United States Patent Application Publication US 2020/0163878 A1 - sequence listing, part 12

SEQ ID NO: 46986 - RNA, 1410 nt, Artificial Sequence
  derived and/or modified CDS sequence (wt) from neuraminidase__InfluenzaA__ABE13095
augaauccaaaucaaaagauaauaacaauuggcucuguuucucucacuauuaccacaauaugcuuccuuaugcaaauugccauccugguaauuacuguaacauugcauuucaagcaaugugagugcaacucccccccaaacaaccaaguaaugcugugugaaccaacaauaauagaaagaaacauaacagagauaguguaucugaccaacaccaccauagagaaagaaauaugccccaaacuagcagaauacagaaauuggucaaagccgcaauguaaaauuacaggauuugcaccuuuuucuaaggacaauucaauucggcuuuccgcugguggagacauuugggugacaagagaaccuuaugugucaugcgauccuggcaaguguuaucaauuugcccuuggacagggaacaacacuaaacaacaggcauucaaaugacacaguacacgauaggaccccuuaucgaacccuauugaugaaugaguuggguguuccauuucauuugggaaccaagcaagugugcauagcaugguccagcucaaguugucacgauggaaaagcauggcugcauguuuguguaacugggcauaaugaaaaugcaacugcgaguuucauuuacgaugggaggcuuguagauaguauugguucaugguccaaaaauauccucaggacccaggagucggaaugcguuuguaucaauggaacuuguacaguaguaaugacugauggaagugcuucaggaagagcugauacuaaaauacuauucauugaagaggggaaaaucguucauauuagcccauugucaggaagugcucagcaugucgaggagugcuccuguuauccucgauauccuggugucagaugugucugcagagacaacuggaaaggcuccaauaggcccaucguagauauaaaugugaaagauuauagcauuguuuccaguuaugugugcucaggacuuguuggagacacacccagaaaaaacgacggcuccagcaguagcuauugccuggauccuaacaaugaggaagggggucauggagugaaaggcugggccuuugaugauggaaaugauguguggaugggaagaacgaucagugagaaguuacgcucagguuaugaaaccuucaaagucauuggaggcugguccaagccuaacuccaaauugcagauaaauaggcaagucauaguugacaaagguaauagguccgguuauucugguauuuucucuguugaaggcaaaagcugcaucaaucggugcuuuuauguggaguugauaaggggaaggaaacaggaaacugaagucugguggaccucaaacaguauuguuguguuuuguggcaccucagguacauauggaacaggcucauggccugauggggcggacaucaaucucaugccuauauaa

SEQ ID NO: 46987 - RNA, 1410 nt, Artificial Sequence; identical to SEQ ID NO: 46880
  derived and/or modified CDS sequence (wt) from neuraminidase__InfluenzaA__ABE13332

SEQ ID NO: 46988 - RNA, 1410 nt, Artificial Sequence; identical to SEQ ID NO: 46924
  derived and/or modified CDS sequence (wt) from neuraminidase__InfluenzaA__ABE13558

SEQ ID NO: 46989 - RNA, 1410 nt, Artificial Sequence
  derived and/or modified CDS sequence (wt) from neuraminidase__InfluenzaA__ABE13642
augaauccaaaucaaaagauaauaacaauuggcucuguuucucucacuauugccacaauaugcuuccuuaugcaaauugccauccugguaacuacuguaacauugcauuucaagcaauaugaaugcaacucccccccaaacaaccaaguaaugcugugugaaccaacaauaauagagagaaacauaacagagauaguguaucugaccaacaccaccauagagaaagaaauaugccccaaacuagcagaauacagaaauuggucaaagccgcaauguaaaauuacaggauuugcaccuuuuucuaaggacaauucaauucggcuuuccgcugguggagacauuugggugacaagagaaccuuaugugucaugcgauccuggcaaguguuaucaauuugcccucggacagggaacaacacuaaacaacaggcauucaaaugacacaguacaugagaggaccccuuaucggacccuauugaugaaugaguuggguguuccauuucauuugggaaccaagcaaguaugcauagcaugguccaguucaaguugucacgauggaaaagcauggcugcauguuuguguaacugggcaugaugaaaaugcaacugcuagcuucauuuacaaugggaggcuuguagauaguauugguucaugguccaaaaauauccucaggacccaggagucggaaugcguuuguaucaauggaacuuguacaguaguaaugacugauggaagugcuucaggaagagcugauacuaaaauacuauucauugaagaggggaaaaucguucauauuagcccacugucaggaagugcucaacaugucgaggagugcuccuguuauccucgauauccuggugucagaugugucugcagagacaacuggaaaggcuccaauaggcccaucguagauauaaaugugaaagauuauagcauuguuuccaguuaugugugcucaggacuuguuggagacacacccagaaaaaacgacagcuccagcaguagccauugccugaauccuaacaaugaggaagggggucauggagugaaaggcugggccuuugaugauggaaaugauguguggaugggaagaacgaucagugagaaguuacgcucagguuaugaaaccuucaaagucauuggaggcugguccaaaccuaacuccaaauugcagauaaauaggcaagucauaguugacagagguaauagguccgguuauucugguauuuucucuguugaaggcaaaagcugcaucaaucggugcuuuuauguggaguugauaaggggaaggaaacaggaaacugaagucugguggaccucaaacaguauuguuguguuuuguggcaccucagguacauauggaacaggcucauggccugauggggcggacaucaaucucaugccuauauaa

SEQ ID NO: 46990 - RNA, 1410 nt, Artificial Sequence
  derived and/or modified CDS sequence (wt) from neuraminidase__InfluenzaA__ABE13668
augaauccaaaucaaaagauaauaacaauuggcucuguuucucucacuauugccacaauaugcuuccuuaugcaaauugccauccugguaacuacuguaacauugcauuucaagcaauaugaaugcaacucccccccaaacaaccaaguaaugcugugugaaccaacaauaauagagagaaacauaacagagauaguguaucugaccaacaccaccauagagaaagaaauaugccccaaacuagcagaauacagaaauuggucaaagccgcaauguaaaauuacaggauuugcaccuuuuucuaaggacaauucaauucggcuuuccgcugguggagacauuugggugacaagagaaccuuaugugucaugcgauccuggcaaguguuaucaauuugcccucggacagggaacaacacuaaacaacaggcauucaaaugacacaguacaugauaggaccccuuaucggacccuauugaugaaugaguuggguguuccauuucauuugggaaccaagcaaguaugcauagcaugguccaguucaaguugucacgauggaaaagcauggcugcauguuuguguaacugggcaugaugaaaaugcaacugcuagcuucauuuacgaugggaggcuuguagauaguauugguucaugguccaaaaauauccucaggacccaggagucggaaugcguuuguaucaauggaacuuguacaguaguaaugacugauggaagugcuucaggaagagcugauacuaaaauacuauucauugaagaggggaaaaucguucauauuagcccacugucaggaagugcucaacaugucgaggagugcuccuguuauccucgauauccuggugucagaugugucugcagagacaacuggaaaggcuccaauaggcccaucguagauauaaaugugaaagauuauagcauuguuuccaguuaugugugcucaggacuuguuggagacacacccagaaaaaacgacagcuccagcaguagccauugccugaauccuaacaaugaggaagggggucauggagugaaaggcugggccuuugaugauggaaaugauguguggaugggaagaacgaucagugagaaguuacgcucagguuaugaaaccuucaaagucauuggaggcugguccaaaccuaacuccaaauugcagauaaauaggcaagucauaguugacagagguaauagguccgguuauucugguauuuucucuguugaaggcaaaagcugcaucaaucggugcuuuuauguggaguugauaaggggaaggaaacaggaaacugaagucugguggaccucaaacaguauuguuguguuuuguggcaccucagguacauauggaacaggcucauggccugauggggcggacaucaaucucaugccuauauaa

SEQ ID NO: 46991 - RNA, 1410 nt, Artificial Sequence
  derived and/or modified CDS sequence (wt) from neuraminidase__InfluenzaA__ABE13836
augaauccaaaucaaaagauaauaacaauuggcucuguuucucucacuauugccacaauaugcuuccuuaugcaaauugccauccugguaacuacuguaacauugcauuucaagcaauaugaaugcaacucccucccaaacaaccaaguaaugcugugugaaccaacaauaauagagagaaacauaacagagauaguguaucugaccaacaccaccauagagaaagaaauaugccccaaacuagcagaauacagaaauuggucaaagccgcaauguaaaauuacaggauuugcaccuuuuucuaaggacaauucaauucggcuuuccgcugguggagacauuugggugacaagagaaccuuaugugucaugcgauccuggcaaguguuaucaauuugcccucggacagggaacaacacuaaacaacaggcauucaaaugacacaguacaugauaggaccccuuaucggacccuauugaugaaugaguuggguguuccauuucauuugggaaccaagcaaguaugcauagcaugguccaguucaaguugucacgauggaaaagcauggcugcauguuuguguaacugggcaugaugaaaaugcaacugcuagcuucauuuacgaugggaggcuuguagauaguauugguucaugguccaaaaauauccucaggacccaggagucggaaugcguuuguaucaauggaacuuguacaguaguaaugacugauggaagugcuucaggaagagcugauacuaaaauacuauucauugaagaggggaaaaucguucauauuagcccauugucaggaagugcucaacaugucgaggagugcuccuguuauccucgauauccuggugucagaugugucugcagagacaacuggaaaggcuccaauaggcccaucguagauauaaaugugaaagauuauagcauuguuuccaguuaugugugcucaggacuuguuggagacacacccagaaaaaacgacagcuccagcaguagccauugccugaauccuaacaaugaggaagggggucauggagugaaaggcugggccuuugaugauggaaaugauguguggaugggaagaacgaucagcgagaaguuacgcucagguuaugaaaccuucaaagucauuggaggcugguccaaaccuaacuccaaauugcagauaaauaggcaagucauaguugacagagguaauagguccgguuauucugguauuuucucuguugaaggcaaaagcugcaucaaucggugcuuuuauguggaguugauaaggggaaggaaacaggaaacugaagucugguggaccucaaacaguauuguuguguuuuguggcaccucagguacauauggaacaggcucauggccugauggggcggacaucaaucucaugccuauauaa

SEQ ID NO: 46992 - RNA, 1410 nt, Artificial Sequence
  derived and/or modified CDS sequence (wt) from neuraminidase__InfluenzaA__ABE14033
augaauccaaaucaaaagauaauaacaauuggcucuguuucucucacuauugccacaauaugcuuccuuaugcaaauugccauccugguaacuacuguaacauuacauuucaagcaauaugaaugcaacucccccccaaacaaccaaguaaugcugugugaaccaacaauaauagaaagaaacauaacagagauaguguaucugaccaacaccaccauagagaaagaaauaugccccaaacuagcagaauacagaaauuggucaaagccgcaauguaaaauuacaggauuugcaccuuuuucuaaggacaauucaauucggcuuuccgcugguggagacauuugggugacaagagaaccuuaugugucaugcgauccuggcaaguguuaucaauuugcccuuggacagggaacaacacuaaacaacaggcauucaaaugacacaguacaugauaggaccccuuaucgaacccuauugaugaaugaguuggguguuccauuucauuugggaaccaagcaagugugcauagcaugguccagcucaaguugucacgauggaaaagcauggcugcauguuuguguaacugggcaugaugaaaaugcaacugcuagcuucauuuacgaugggaggcuuguagauaguauugguucaugguccaaaaauauccucaggacccaggagucggaaugcguuuguaucaauggaacuuguacaguaguaaugacugauggaagugcuucaggaagagcugauacuaaaauacuauucauugaagaggggaaaaucguucauauuagcccauugucaggaagugcucagcaugucgaggagugcuccuguuauccucgauauccuggugucagaugugucugcagagacaacuggaaaggcuccaauaggcccaucguagauauaaaugugaaagauuauagcauuguuuccaguuaugugugcucaggacuuguuggagacacacccagaaaaaacgacagcuccagcaguagcuauugccugaauccuaacaaugaggaagggggucauggagugaaaggcugggccuuugaugauggaaaugauguguggaugggaagaacgaucagcgagaaguuacgcucagguuaugaaaccuucaaagucauuggaggcugguccaaaccuaacuccaaauugcagauaaauaggcaagucauaguugacagagguaauagguccgguuauucugguauuuucucuguugaaggcaaaagcugcaucaaucggugcuuuuauguggaguugauaaggggaaggaaacaggaaacugaagucugguggaccucaaacaguauuguuguguuuuguggcaccucagguacauauggaacaggcucauggccugauggggcggacaucaaucucaugccuauauaa

SEQ ID NO: 46993 - RNA, 1410 nt, Artificial Sequence
  derived and/or modified CDS sequence (wt) from neuraminidase__InfluenzaA__ABE14055
augaauccaaaucaaaagauaauaacaauuggcucuguuucucucacuauugccacaauaugcuuccuuaugcaaauugccauccugguaacuacuguaacauugcauuucaagcaauaugaaugcaacucccccccaaacaaccaaguaaugcugugugaaccaacaauaauagaaagaaacauaacagagauaguguaucugaccaacaccaccauagaaaaagaaauaugccccaaacuagcagaauacagaaauuggucaaagccgcaauguaaaauuacaggauuugcaccuuuuucuaaggacaauucaauucggcuuuccgcugguggagacauuugggugacaagagaaccuuaugugucaugcgauccugacaaguguuaucaauuugcccuuggacagggaacaacacuaaacaacaggcauucaaaugacacaguacaugauaggaccccuuaucgaacccuauugaugaaugaguuggguguuccauuucauuugggaaccaagcaagugugcauagcaugguccagcucaaguugucacgauggaaaagcauggcugcauguuuguguaacugggcaugaugaaaaugcaacugcuagcuucauuuacgaugggaggcuuguagauaguauuaguucaugguccaaaaauauccucaggacccaggagucggaaugcguuuguaucaauggaacuuguacaguaguaaugacugauggaaguucuucaggaagagcugauacuaaaauacuauucauugaagaggggaaaauuguucauauuagcccauugucaggaagugcucagcaugucgaggagugcuccuguuauccucgauacccuggugucagaugugucugcagagacaacuggaaaggcuccaauaggcccaucguagauauaaaugugaaagauuauagcauuguuuccaguuaugugugcucaggacuuguuggagacacacccagaaaaaaugacagcuccagcaguagcuauugccugaauccuaacaaugaggaagggggucauggagugaaaggcugggccuuugaugauggaaaugacguguggaugggaagaacgaucagcgaaaaguuacgcucagguuaugaaaccuucaaggucauuggaggcugguccaaaccuaacuccaaauugcagauaaauaggcaagucauaguugacagagguaauagguccgguuauucugguauuuucucuguugaaggcaaaagcugcgucaaucggugcuuuuauguggaguugauaaggggaaggaaacaggaaacugaagucugguggaccucaaacaguauuguuguguuuuguggcaccucagguacauauggaacaggcucauggccugauggggcggacaucaaucucaugccuauauaa

SEQ ID NO: 46994 - RNA, 1410 nt, Artificial Sequence
  derived and/or modified CDS sequence (wt) from neuraminidase__InfluenzaA__ABE14857
augaauccaaaucaaaagauaauaacaauuggcucuguuucucucacuauugccacaauaugcuuccuuaugcaaauugccauccugguaacuacuguaacauuacauuucaagcaauaugaaugcaacucccccccaaacaaccaaguaaugcugugugaaccaacaauaauagaaagaaacacaacagagauaguguaucugaccaacaccaccauagagaaagaaauaugccccaaacuagcagaauacagaaauuggucaaagccgcaauguaaaauuacaggauuugcaccuuuuucuaaggacaauucaauucggcuuuccgcugguggagacauuugggugacaagagaaccuuaugugucaugcgauccuggcaaguguuaucaauuugcccuuggacagggaacaacacuaaacaacaggcauucaaaugacacaguacaugauaggaccccuuaucgaacccuauugaugaaugaguuggguguuccauuucauuugggaaccaagcaagugugcauagcaugguccagcucaaguugucacgauggaaaagcauggcugcauguuuguguaacugggcaugaugaaaaugcaacugcuagcuucauuuacgaugggaggcuuguagauaguauugguucaugguccaaaaauauccucaggacccaggagucggaaugcguuuguaucaauggaacuuguacaguaguaaugacugauggaagugcuucaggaagagcugauacuaaaauacuauucauugaagaggggaaaaucguucauauuagcccauugucaggaagugcucagcaugucgaggagugcuccuguuauccucgauauccuggugucagaugugucugcagagacaacuggaaaggcuccaauaggcccaucguagauauaaaugugaaagauuauagcauuguuuccaguuaugugugcucaggacuuguuggagacacacccagaaaaaacgacagcuccagcaguagcuauugccugaauccuaacaaugaggaagggggucauggagugaaaggcugggccuuugaugauggaaaugauguguggaugggaagaacgaucagcgagaaguuacgcucagguuaugaaaccuucaaagucauuggaggcugguccaaaccuaacuccaaauugcagauaaauaggcaagucauaguugacagagguaauagguccgguuauucugguauuuucucuguugaaggcaaaagcugcaucaaucggugcuuuuauguggaguugauaaggggaaggaaacaggaaacugaagucugguggaccucaaacaguauuguuguguuuuguggcaccucagguacauauggaacaggcucauggccugauggggcggacaucaaucucaugccuauauaa

SEQ ID NO: 46995 - RNA, 1410 nt, Artificial Sequence; identical to SEQ ID NO: 46992
  derived and/or modified CDS sequence (wt) from neuraminidase__InfluenzaA__ABE15594

SEQ ID NO: 46996 - RNA, 1413 nt, Artificial Sequence
  derived and/or modified CDS sequence (wt) from neuraminidase__InfluenzaA__ABE26994
augaauccaaaucaaaaaauaauaaccauuggaucaaucaguauugcaauuggaauaauuagucugauauugcaaauaggaaauauuauuucaauaugggcuagccacucaauccaaacuggaagucaaaaccacacuggaauaugcaaccaaagaaucauuacauaugaaaauagcaccuggguaaaucaaacauauguuaauauuaacaacacuaauguuguugcuggaaaggacaaaaccucaaugacauuggccggcaauucaucucuuugcccuauccguggaugggcuauauacacaaaagacaacagcauaagaauugguuccaaaggagauguuuuugucauaagagagccuuuuauaucauguucucacuuggaaugcagaaccuuuuuucugacccaaggugcucuauuaaaugacaagcauucaaaugggaccguuaaggacagaagcccuuauagggccuuaaugagcuguccucuaggugaagcuccgucuccauacaauucaagauuugaaucaguugcuuggucagcaagcgcaugccaugauggcuugggcuggcuaacaaucggaauuucugguccagauaauggggcaguggcuguacuaaaauacaacggcauaauaacugaaaccauuaaaaguuggaagaagcgaauauuaagaacacaagagucugaaugugucuguaugaacgguucauguuuuaccauaaugaccgauggcccgaguaauggggccgcaucguacagaaucuucaaaaucgagaaggggagaguuacuaaaucaauagaguuggaugcacccaauuaucauuacgaggaauguucauguuacccagacaccggcacagugaugugugugugcagggacaauuggcacaguucaaaucgaccuugggugucuuuuaaucaaaaccuggauuaucaaauaggauacaucugcagugggguguucggugacaauccgcgucccaaagauggagaaggcagcuguaauccagugacuguugauggagcagacggaguaaagggguuuucauacagauaugguaaugguguuuggauaggaaggacuaaaaguaacagacucagaaagggauuugagaugauuugggauccuaauggauggacagauaccgacagugauuucucaaugaaacaggauaucguggcaaugacugauuggucaggguacagcggaaguuuuguucaacauccugagcuaacaggauuggacuguaugagaccuugcuucuggguugaauuagucagagggcuaccuagagaaaauacaacaaucuggacuagugggagcagcauuucuuuuuguggcguaaauagcgauacugcaaacuggucuuggccagacggugccgaguugccauucaccauugacaaguag

SEQ ID NO: 46997 - RNA, 1350 nt, Artificial Sequence
  derived and/or modified CDS sequence (wt) from neuraminidase__InfluenzaA__ABE97641
augaauccaaaucagaagauaauaaccauuggaucaaucuguaugguaauuggaauaauuagcuuaauguuacaaauugggaacaugaucucaauaugggucagucauucaauucagacguggaaucaacaccaagcugaaucaaucagcaauacuaacccucuuacugagaaagcuguggcuucaguaacauuagcaggcaauucaucucuuugccccauuagaggaugggcuguacacaguaaggacaacagcauaaggaucgguuccaagggggauguguuuguuauuagagagccguucaucucaugcucucacuuggaaugcagaacuuucuuuuugacucagggagccuugcugaaugacaagcacuccaacgggacugucaaagacagaagcccucacagaacauugaugaguuguccugugggugaggcuccuuccccauauaacucaagguuugagucuguugcuuggucagcaagugcuugccaugauggcaccaguugguugacaauuggaauuucuggcccagacaauggggcuguggcuguauugaaauacaauggcauaauaacagacacuaucaagaguuggaggaacaacauacugagaacucaagagucugaaugugcauguguaaauggcucuugcuuuacuguaaugacugauggaccaaguaaugggcaggcaucauauaagaucuucaaaauggaaaaagggaaagugguuaaaucagucgaauuggaugcuccuaauuaucacuaugaggagugcuccuguuauccugaugccggcgaaaucacaugugugugcagggauaauuggcauggcucaaauaggccauggauaucuuucaaucaaaauuuggaguaucaaauaggauauauaugcaguggaguuuucggagacaauccacgccccaaugauggaacagguaguugugguccgauguccccuaacggggcauaugggguaaaaggguuuucauuuaaauacggcaaugguguuuggaucgggagaaccaaaagcacuaauuccaggagcggcuuugaaaugauuugggauccaaauggguggauuggaacggacaguagcuuuucggugaaacaagauauaguagcaauaacugauuggucaggauauagugggaguuuuguccagcauccagaacugacaggauuagauuguauaagaccuuguuucuggguugaguuaaucagagggcggcccaaagagagcacaauuuggacuagugggagcagcauaucuuuuugugguguaaauagugacauugugaguuggucuuggccagacggugcugaguugccauucaccauugacaaguag

SEQ ID NO: 46998 - RNA, 1350 nt, Artificial Sequence
  derived and/or modified CDS sequence (wt) from neuraminidase__InfluenzaA__ABE97642
augaauccaaaucagaagauaauaaccauuggaucaaucuguaugguaauuggaaugguuagcuuaauguuacaaauugggaacaugaucucaauauggcucagucauucaauucagacagggaaucaacaccaagcugaaucaaucagcaauaauaaccuucuuacugagaacgcuguggcuucaguaacauuagcgggcaauucaucucuuugccccauuagaggaugggcuguacacaguaaggacaacaguauaaggaucgguuccaagggggauguguuuguuauuagagagccguucaucucaugcucccacuuggaaugcagaacuuucuuuuugacucagggagccuugcugaaugacaagcacuccaacgggacugucaaagacagaagcccucacagaacauugaugaguuguccugugggugaggcucccuccccauauaacucaagguuugagucuguugcuuggucagcaagugcuugccaugauggcaucaguugguugacaauuggaauuucuggcccagacaauggggcuguggcuguauugaaauacaauggcauaauaacagacacuaucaagaguuggaggaacaacauacugagaacucaagagucugaaugugcauguguaaauggcucuugcuuuacuguaaugacugauggaccaaguaaugggcaggcaucauauaagaucuucaaaauggaaaaagggaaagugguuaaaucagucgaauuggaugccccuaauuaucacuaugaggagugcuccuguuauccugaugccggcgaaaucacaugugugugcagggauaauuggcauggcucaaauaggccauggguaucuuucaaucaaaauuuggaguaucaaauaggauauauaugcaguggaguuuucggagacaauccacgccccaaugauggaacagguaguugugguccgauguccccuaacggggcauaugggguaaaaggguuuucauuuaaauauggcaaugguguuuggaucgggagaaccaaaagcacuaauuccaggagcggcuuugaaaugauuugggauccaaauggguggacuggaacggacaguagcuuuucggugaaacaagauauaguagcaauaacugauuggucaggauauagcgggaguuuuguccagcauccagaacugacaggauuagauugcauaagaccuuguuucuggguugaguuaaucagagggcggcccaaagagagcacaauuuggacuagugggagcagcauaucuuuuugugguguaaauggugacacugugaguuggucuuggccagacggugcugaguugccauucaucauugacaaguag

SEQ ID NO: 46999 - RNA, 1350 nt, Artificial Sequence
  derived and/or modified CDS sequence (wt) from neuraminidase__InfluenzaA__ABE97644
augaauccaaaucagaagauaauaaccauuggaucaaucuguaugguaauuggaauaguuagcuuaauguuacaaauugggaacaugaucucaauaugggucagucauucaauucagacagggaaucaacaccaagcugaaucaaucagcaauacuaacccucuuacugagaaagcuguggcuucaguaacauuagcgggcaauucaucucuuugccccauuagaggaugggcuguacacaguaaggacaacaauauaaggaucgguuccaagggggauguguuuguuauuagagagccguucaucucaugcucccaccuggaaugcagaacuuucuuuuugacucagggagccuugcugaaugacaagcacuccaacgggacugucaaagacagaagcccucacagaacauugaugaguuguccugugggugaggcucccucuccauauaacucaagguuugagucuguugcuuggucagcaagugcuugccaugauggcaccaguugguugacaauuggaauuucuggcccagacaauggggcuguggcuguauugaaauacaauggcauaauaacagacacuaucaagaguuggaggaacaacauacugagaacucaagagucugaaugugcauguguaaauggcucuugcuuuacuguaaugacugauggaccaaguaaugggcaggcaucauauaagaucuucaaaauggaaaaaggaaaaguggucaaaucagucgaacuggaugcuccuaauuaucacuaugaggagugcuccuguuauccugaugccggcgaaaucacauguguuugcagggauaauuggcauggcucaaacaggccauggguaucuuucaaucaaaauuuggaguaucaaauaggguauauaugcaguggaguuuucggagacaauccacgccccaaugauggaacagguaguuguggcccgauguccccuaauggggcauaugggguaaaaggguuuucauucaaauacggcaaugguguuuggaucgggagaaccaaaagcacuaauuccaggagcggcuuugaaaugauuugggauccaaauggguggacuggaacggacaguagcuuuucggugaaacaagauauaguagcauuaacugauuggucaggauauagcgggaguuuuguccagcauccagaacugacgggauuagauugcauaagaccuuguuucuggguugaguuaaucagagggcggcccaaagagagcacaauuuggacuagugggagcagcauaucuuuuugugguguaaauagugacacugugaguuggucuuggccagacggugcugaguugccauucaccauugacaaguag

SEQ ID NO: 47000 - RNA, 1350 nt, Artificial Sequence
  derived and/or modified CDS sequence (wt) from neuraminidase__InfluenzaA__ABE97645
augaauccaaaucagaagauaauaaccauuggauccaucuguaugguaauuggaacaguuagcuuaauguuacaaauugggaacaugaucucaauaugggucagucauucaauucagacagggaaccaacaccaagcugaaccaaccagcaguacuaacccucuuacugagaaagcuguggcuucaguaacauuagcgggcaauucaucucuuugccccauuagaggaugggcuauacacaguaaggacaacaguauaaggaucgguuccaagggggauguguuuguuauuagagagccguuuaucucaugcucucacuuggaaugcagaacuuucuuuuugacucagggagccuugcugaaugacaagcacuccaacgggacugucaaagacagaagcccucacagaacauugaugaguuguccugugggugaggcucccuccccauacaacucaagguuugagucuguugcuuggucagcaagugcuugccaugauggcaccaguugguugacaauuggaauuucuggcccagacaauggggcuguggcuguauugaaauacaauggcauaauaacagacacuaucaagaguuggaggaacaacauacugagaacucaagagucugaaugugcauguguaaauggcucuugcuuuacuguaaugacugauggaccaaguaaugggcaggcaucauauaagaucuucaaaauggaaaaagggaaagugguuaaaucagucgaauuggaugcuccuaauuaucacuaugaggagugcuccuguuauccugaugccggcgaaauuacaugugugugcagggauaauuggcauggcucaaauaggccauggguaucuuucaaucaaaauuuggaguaucaaauaggauauauaugcaguggaguuuucggagacaauccacgccccaaugauggaacagguaguugugguccgauguccccuaacggggcauaugggguaaaaggguuugcauuuaaauacggcaaugguguuuggaucgggagaaccaaaagcacuaauuccaggagcggcuuugaaaugauuugggauccaaauggguggacuggaccggacaguagcuuuucggugaaacaagauauaguagcaauaacugauuggucaggauauagcgggaguuuuguccagcauccagaacugacaggauuagauugcauaagaccuuguuucuggguugaguuaaucagagggcggcccaaagagagcacaauuuggacuagugggagcagcauauccuuuugugguguaaauagugacacugugaguuggucuuggccagacggugcugaguugccauucaccauugacaaguag

SEQ ID NO: 47001 - RNA, 1350 nt, Artificial Sequence
  derived and/or modified CDS sequence (wt) from neuraminidase__InfluenzaA__ABE97646
augaauccaaaucagaagauaauaaccauuggaucaaucuguaugguaauuggaauaguuagcuuaauguugcaaauugggaacaugaucucaauaugggucagucauucaauucagacagagaaucaacaccaagcugaaucaaucagcaauacuaacccuccuacugagaaagcuguggcuucaguaacauuagcgggcaauucaucucuuugccccauuagaggaugggcuguacacaguaaggacaacaguauaaggaucgguuccaagggggauguguuuguuauuagagagccauucaucucaugcucccacuuggaaugcagaacuuucuuuuugacucagggagccuugcugaaugacaagcacuccaacgggacugucaaagacagaagcccucacagaacauugaugaguuguccugugggagaggcucccuccccauacaacucaagguuugagucuguugcuuggucagcaagugcuugccaugauggcaccaguugguugacaaucggaauuucuggcccagacaauggggcuguggcuguauugaaauacaauggcauaauaacagacacuaucaagaguuggaggaacaacacgcugagaacucaagagucugaaugugcauguguaaauggcucuugcuuuacuguaaugacugauggaccaaguaaugggcaagcaucauauaagaucuucaaaauggaaaaagggaaagugguuaaaucagucgaauuggaugcuccuaauuaucacuaugaggagugcuccuguuauccugaugccggcgaaaucacaugugugugcagggauaauuggcauggcucaaauaggccauggguaucuuucaaucaaaauuuggaauaucaaauaggauauauaugcaguggaguuuucggagacaauccacgccccaaugauggaacagguaguugugguccgauguccccuaacggggcauaugggguaaaaggguuuucauuuaaauacggcaaugguguuuggaucgggagaaccaaaagcacuaauuccaggagcggcuuugaaaugauuugggauccaaauggguggacuggaacggacaguagcuuuucggugaaacaagauauaguaucaauaacugauuggucaggauauagcgggaguuuuguccagcauccagaacugacaggauuagauugcauaagaccuuguuucuggguugaguuaaucagagggcggcccaaagagagcacaauuuggacuagugggagcagcauaucuuuuugugguguaaauagugacacugugaguuggucuuggccagacggugcugaguugccguucaccauugacaaguag

SEQ ID NO: 47002 - RNA, 1350 nt, Artificial Sequence
  derived and/or modified CDS sequence (wt) from neuraminidase__InfluenzaA__ABE97647
augaauccaaaucagaagauaauaaccauuggaucaaucuguaugguaauuggaauaguuagcuuaauguuacaaauugggaacaugaucucaauaugggucagucauucaauucagacagggaaucaacaccgagcugaaucaaucagcaauacuaacccucuuacugagaaagcuguggcuucaguaacauuagcgggcaauucaucucuuugccccauuagaggaugggcuguacacaguaaggacaacaauauaaggaucgguuccaagggggauguguuuguuauuagagagccguucaucucaugcucccaccuggaaugcagaacuuucuuuuugacucagggagccuugcugaaugacaagcacuccaacgggacugucaaagacagaagcccucacagaacauugaugaguuguccugugggugaggcucccuccccauauaacucaagguuugagucuguugcuuggucagcaagugcuugccaugauggcaccaguugguugacaauuggaauuucuggcccagacaauggggcuguggcuguauugaaauacaauggcauaauaacagacacuaucaagaguuggaggaacaacauacugagaacucaagagucugaaugugcauguguaaauggcucuugcuuuacuguaaugacugauggaccaaguaaugggcaggcaucauauaagaucuucaaaauggaaaaagggaaagugguuaaaucagucgaauuggaugcuccuaauuaucacuaugaggagugcuccuguuauccugaugccggcgagaucacauguguuugcagggauaauuggcauggcucaaauaggccauggguaucuuucaaucaaaauuuggaguaucaaauaggauauauaugcaguggaguuuucggagacaauccacgccccaaugauggaacagguaguugugguccgauguccccuaacggggcauaugggguaaaaggguucucauuuaaauacggcaaugguguuuggaucgggagaaccaaaagcacuaauuccaggagcggcuuugaaaugauuugggauccaaauggguggacuggaacggacaguagcuuuucggugaaacaagauauaguagcaauaacugauuggucaggauauagcgggaguuuuguccagcauccagaacugacaggauuagauugcauaagaccuuguuucuggguugaguuaaucagagggcggcccaaagagagcacaauuuggacuagugggagcagcauaucuuuuugugguguaaauagugacacugugaguuggucuuggccagacggugcugaguugccauucaccauugacaaguag

SEQ ID NO: 47003 - RNA, 1350 nt, Artificial Sequence
  derived and/or modified CDS sequence (wt) from neuraminidase__InfluenzaA__ABE97649
augaauccaaaucagaagauaauaaccauuggaucaaucuguaugguaauuggaauaguuagcuuaauguuacaaauugggaacaugaucucaauaugggucagucauucaauucagacagggaaucaacaccaagcugaaucaaucagcaauacuaacccucuuacugagaaagcuguggcuucaguaacauuagcgggcaauucaucucuuugccccauuagaggaugggcuguacacaguaaggacaacaguauaaggaucgguuccaagggggauguguuuguuauuagagagccguucaucucaugcucucacuuggaaugcagaacuuucuuuuugacucagggagccuugcugaaugacaagcacuccaacgggacugucaaagacagaagcccucacagaacauugaugaguuguccugugggugaggcucccuccccauacaacucaagguuugagucuguugcuuggucagcaagugcuugccaugauggcaccaguugguugacaauuggaauuucuggcccagacaauggggcuguggcuguauugaaauacaauggcauaauaacagacacuaucaagaguuggaggaacaacauacugagaacucaagagucugaaugugcauguguaaauggcucuugcuuuacuguaaugacugaugggccaaguaaugggcaggcaucauauaagaucuucaaaauggaaaaagggaaagugguuaaaucagucgaauuggaugcuccuaauuaucacuaugaggagugcuccuguuauccugaugccggcgaaaucacaugugugugcagggauaauuggcauggcucaaauaggccauggguaucuuucaaucaaaauuuggaguaucaaauaggauauauaugcaguggaguuuucggagacaauccacgccccaaugauggaacagguaguugugguccgauguccccuaacggggcauaugggguaaaaggguuuucauuuaaauacggcaaugguguuuggaucgggagaaccaaaagcacuaauuccaggagcggcuuugaaaugauuugggauccaaauggguggacuggaacggacaguagcuuuucggugaaacaagauauaguagcaauaacugauuggucaggauauagcgggaguuuuguccagcauccagaacugacaggauuagauugcauaagaccuuguuucuggguugaguuaaucagagggcggcccaaagagagcacaauuuggacuagugggagcagcauaucuuuuugugguguaaauagugacacugugaguuggucuuggccagacggugcugaguugccauucaccauugacaaguag

SEQ ID NO: 47004 - RNA, 1350 nt, Artificial Sequence; identical to SEQ ID NO: 47003
  derived and/or modified CDS sequence (wt) from neuraminidase__InfluenzaA__ABE97651

SEQ ID NO: 47005 - RNA, 1350 nt, Artificial Sequence; identical to SEQ ID NO: 47003
  derived and/or modified CDS sequence (wt) from neuraminidase__InfluenzaA__ABE97653

SEQ ID NO: 47006 - RNA, 1350 nt, Artificial Sequence; identical to SEQ ID NO: 47003
  derived and/or modified CDS sequence (wt) from neuraminidase__InfluenzaA__ABE97654

SEQ ID NO: 47007 - RNA, 1350 nt, Artificial Sequence
  derived and/or modified CDS sequence (wt) from neuraminidase__InfluenzaA__ABE97655
augaauccaaaucagaagauaauaaccauuggauccaucuguauggcaauuggaauaguuagcuuaauguuacaaauugggaacaugaucucaauaugggucagucauucaauucagacagggaaucaacaccaagcugaaucaaccagcaauacuaacccucuuacugagaaagcuguggcuucaguaacauuagcgggcaauucaucucuuugccccauuagaggaugggcuauacacaguaaggacaacaguauaaggaucgguuccaagggggauguguuuguuauuagagagccguucaucucaugcucucacuuggaaugcagaacuuucuuuuugacucagggagccuugcugaaugacaagcacuccaacgggacugucaaagacagaagcccucacagaacauugaugaguuguccugugggugaggcucccuccccauacaacucaagguuugagucuguugcuuggucagcaagugcuugccaugauggcaccaguugguugacaauuggaauuucuggcccagacaauggggcuguggcuguauugaaauacaauggcauaauaacagacacuaucaagaguuggaggaacaacauacugagaacucaagagucugaaugugcauguguaaauggcucuugcuuuacuguaaugacugauggaccaaguaaugggcaggcaucauauaagaucuucaaaauggaaaaagggaaagugguuaaaucagucgaauuggaugcuccuaauuaucacuaugaggagugcuccuguuauccugaugccggcgagaucacaugugugugcagggauaauuggcauggcucaaauaggccauggguaucuuucaaucaaaauuuggaguaucaaauaggauauauaugcaguggaguuuucggagacaauccacgccccaaugauggaacagguaguugugguccgauguccccuaacggggcauaugggguaaaaggguuugcauuuaaauacggcaaugguguuuggaucgggagaaccaaaagcacuaauuccaggagcggcuuugaaaugauuugggauccaaauggauggacuggaccggacaguagcuuuucggugaaacaagauauaguagcaauaacugauuggucaggauauagcgggaguuuuguccagcauccagaacugacaggauuagauugcauaagaccuuguuucuggguugaguuaaucagagggcggcccaaagagagcacaauuuggacuagugggagcagcauauccuuuugugguguaaauagugacacugugaguuggucuuggccagacggugcugaguugccauucaccauugacaaguag

SEQ ID NO: 47008 - RNA, 1350 nt, Artificial Sequence
  derived and/or modified CDS sequence (wt) from neuraminidase__InfluenzaA__ABE97657
augaauccaaaucagaagauaauaaccauuggaucaaucuguaugguaaucggaacaguuagcuuaguguuacaaauugggaacaugaucucaauaugggucagucauucaauucagacagggaaccaacaccaagcugaaucaaucagcaauacuaacccucuuacugagaaagcuguggcuucaguaacauuggcaggcaauucgucucuuugccccauuagaggaugggcuguacacaguaaggacaacaguauaaggaucgguuccaagggggauguguuuguuauuagagagccguucaucucaugcucccacuuggaaugcagaacuuucuuuuugacucagggagccuugcugaaugacaagcacuccaacgggacugucaaagacagaagcccucacagaacauugaugaguuguccugugggugaggcucccucuccauacaacucaagguuugagucuguugcuuggucagcaagugcuugccaugauggcaccaguugguugacaauuggaauuucuggcccagacaauggggcuguggcuguguugaaauacaauggcauaauaacagacacuaucaagaguuggagggacaacauacugagaacucaagagucugaaugugcauguguaaauggcucuugcuuuacuguaaugacugauggaccaaguaaugggcaggcaucauauaagaucuucaaaauggaaaaagggaaagugguuaaaucagucgaauuggaugcucccaauuaucacuaugaggagugcuccuguuauccugaugcuggcgaaaucacaugugugugcagggauaauuggcauggcucaaauaggccauggguauccuucaaucaaaauuuggaguaucaaauaggauauauaugcaguggaguuuucggagacaauccacgccccaaugauggaacagguaguugugguccgauguccucuaacggggcauaugggguaaaaggguuuucauuuaaauacggcaaugguguuuggaucgggagaaccaaaagcacuaauuccagaagcggcuuugaaaugauuugggauccaaauggguggacuggaacggacaguagcuuuucggugaaacaagauauaguagcaauaacugauuggucaggauauagugggaguuuuguccagcauccagaacugacaggauuagauugcauaagaccuuguuucuggguugaguuaaucagagggcgacccaaagagagcacaauuuggacuagugggagcagcauaucuuuuugugguguaaauagugacacugugaguuggucuuggccagacggugcugaguugccauucaccauugacaaguaa

SEQ ID NO: 47009 - RNA, 1350 nt, Artificial Sequence
  derived and/or modified CDS sequence (wt) from neuraminidase__InfluenzaA__ABE97658
augaauccaaaucagaagauaauaaccauugggucaaucuguaugguaauuggaacaauuagcuuaauguuacaaauugggaacaugaucucaauaugggucagucauucaauucagacagggaaccaacaccaaacugaaucaaucagcaauacuaacccucuuacugagaaagcuguggcuucaguaacauuggcaggcaauucgucucuuugcuccauuagaggaugggcuguacacaguaaggacaacaguauaaggaucgguuccaagggggauguguuuguuauuagagagccguucaucucaugcucccacuuggaaugcagaacuuucuuuuugacucagggagccuugcugaaugacaagcacuccaacgggacugucaaagacagaagcccucacagaacauugaugaguuguccugugggugaggcucccucuccauauaacucaagauuugagucuguugcuuggucagcaagugcuugccaugauggcaccaguugguugacaauuggaauuucuggcccagacaauggggcuguggcuguguugaaauacaauggcauaauaacagacacuaucaagaguuggagggacaacauacugagaacucaagagucugaaugugcauguguaaauggcucuugcuuuacuguaaugacugauggaccaaguaaugggcaggcaucauauaagaucuucaaaauggaaaaagggaaagugguuaaaucagucgaauuggaugcucccaauuaucacuaugaggagugcuccuguuauccugaugcuggcgaaaucacaugugugugcagggauaauuggcauggcucaaauaggccauggguauccuucaaucaaaauuuggaguaucaaauaggauauauaugcaguggaguuuucggagacaauccacgccccaaugauggaacagguaguuguggcccgauguccucuaacggggcacaugggguaaaaggguuuucauuuaaauacggcaaugguguuuggaucgggagaaccaaaagcacuaauuccagaagcggcuuugaaaugauuugggauccaaauggguggacuggaacggacaguagcuuuucggugaaacaagauauaguagcaauaacugauuggucaggauauagugggaguuuuguccagcauccagaacugacaggauuagauugcauaagaccuuguuucuggguugaguuaaucagagggcgaccaaaagagagcacaauuuggacuagugggagcagcauaucuuuuugugguguaaauagugacacugugaguuggucuuggccagacggugcugaguugccauucaccauugacaaguaa

SEQ ID NO: 47010 - RNA, 1350 nt, Artificial Sequence
  derived and/or modified CDS sequence (wt) from neuraminidase__InfluenzaA__ABE97659
augaauccaaaucagaagauaauaaccauuggaucaaucuguaugguaauuggaauaguuagcuuaauguuacaaauugggaacaugaucucaauaugggucagucauucaauucagacagggaaccaacaccaagcugaaucaaucagcaauacuaacccucuuacugagaaagcuguggcuucaguaacauuggcaggcaauucgucucuuugccccauuagaggaugggcuguacacaguaaggacaacaguauaaggaucgguuccaagggggauguguuuguuauuagagagccguucaucucaugcucccacuuggaaugcagaacuuucuuuuugacucagggagccuugcugaaugacaagcacuccaacgagacugucaaagacagaagcccucacagaacauugaugaguuguccugugggugaggcucccucuccauacaacucaagguuugagucuguugcuuggucagcaagugcuugccaugauggcaccaguugguugacaauuggaauuucuggcccagacaauggggcuguggcuguguugaaauacaauggcauaauaacagacacuaucaagaguuggagggacaacauacugagaacucaagagucugaaugugcauguguaaauggcucuugcuuuacuguaaugacugauggaccaaguaaugggcaggcaucauauaagaucuucaaaauggaaaaaggaaaagugguuaaaucagucgaauuggaugcucccaauuaucacuaugaggagugcuccuguuauccugaugcuggcgaaaucacaugugugugcagggauaauuggcauggcucaaauaggccauggguauccuucaaucaaaauuuggaguaucaaauaggauauauaugcaguggaguuuucggagacaauccacgccccaaugauggaacagguaguugugguccgauguccucuaacggggcauaugggguaaaaggguuuucauuuaaauacggcaaugguguuuggaucgggagaaccaaaagcacuaauuccagaagcggcuuugaaaugauuugggauccaaauggguggacuggaacggacaguagcuuuucggugaaacaagauauaguagcaauaacugauuggucaggauauagugggaguuuuguccagcauccagaacugacaggauuagauugcauaagaccuuguuucuggguugaguuaaucagagggcgacccaaagagagcacaauuuggacuagugggagcagcauaucuuuuugugguguaaauagugacacugugaguuggucuuggccagacggugcugaguugccauucaccauugacaaguaa

SEQ ID NO: 47011 - RNA, 1350 nt, Artificial Sequence
  derived and/or modified CDS sequence (wt) from neuraminidase__InfluenzaA__ABE97660
augaauccaaaucagaagauaauaaccauugggucaaucuguaugguaauuggaacaauuagcuuaauguuacaaauugggaacaugaucucaauaugggucagucauucaauucagacagggaaccaacaccaagcugaaucaaucagcaauacuaacccucuuacugagaaagcuguggcuucaguaacauuggcaggcaauucgucucuuugccccauuagaggaugggcuguacacaguaaggacaacaguauaaggaucgguuccaagggggauguguuuguuauuagagagccguucaucucaugcucccacuuggaaugcagaacuuucuuuuugacucagggagccuugcugaaugacaagcacuccaacgggacugucaaagacagaagcccucacagaacauuaaugaguuguccugugggugaggcucccucuccauauaacucaagauuugagucuguugcuuggucagcaagugcuugccaugauggcaccaguugguugacaauuggaauuucuggcccagacaauggggcuguggcuguguugaaauacaauggcauaauaacagacacuaucaagaguuggagggacaacauacugagaacucaagagucugaaugugcauguguaaauggcucuuguuuuacuguaaugacugauggaccaaguaaugggcaggcaucauauaagaucuucaaaauggaaaaagggaaaguaguuaaaucagucgaauuggaugcucccaauuaucacuaugaggagugcuccuguuauccugaugcuggcgaaaucacaugugugugcagggauaauuggcauggcucaaauaggccauggguauccuucaaucaaaauuuggaguaucaaauaggauauauaugcaguggaguuuucggagacaauccacgccccaaugauggaacagguaguuguggcccgauguccucuaacggggcacaugggguaaaaggguuuucauuuaaauacggcaaugguguuuggaucgggagaaccaaaagcacuaauuccagaagcggcuuugaaaugauuugggauccaaauggguggacuggaacggacaguagcuuuucggugaaacaagauauaguagcaauaacugauuggucaggauauagugggaguuuuguccagcauccagaacugacaggauuagauugcauaagaccuuguuucuggguugaguuaaucagagggcgaccaaaagagagcacaauuuggacuagugggagcagcauaucuuuuugugguguaaauagugacacugugaguuggucuuggccagacggugcugaguugccauucaccauugacaaguaa

SEQ ID NO: 47012 - RNA, 1350 nt, Artificial Sequence
  derived and/or modified CDS sequence (wt) from neuraminidase__InfluenzaA__ABE97661
augaauccaaaucagaagauaauaaccauugggucaaucuguaugguaauuggaacaauuagcuuaauguuacaaauugggaacaugaucucaauaugggucagucauucaauucagacagggaaccaacaccaaacugaaucaaucagcaauacuaacccucuuacugagaaagcuguggcuucaguaacauuggcaggcaauucgucucuuugccccauuagaggaugggcuguacacaguaaggacaacagcauaaggaucgguuccaagggggauguguuuguuauuagagagccguucaucucaugcucccacuuggaaugcagaacuuucuuuuugacucagggagccuugcugaaugacaagcacuccaacgggacugucaaagacagaagcccucacagaacauugaugaguuguccugugggugaggcucccucuccauauaacucaagauuugagucuguugcuuggucagcaagugcuugccacgauggcaccaguugguugacaauuggaauuucuggcccagacaauggggcuguggcuguguugaaauacaauggcauaauaacagacacuaucaagaguuggagggacaacauacugagaacucaagagucugaaugugcauguguaaauggcucuugcuuuacuguaaugacugauggaccaaguaaugggcaggcaucauauaagaucuucaaaauggaaaaagggaaagugguuaaaucagucgaauuggaugcucccaauuaucacuaugaggagugcuccuguuauccugaugcuggcgaaaucacaugugugugcagggauaauuggcauggcucaaauaggccauggguauccuucaaucaaaauuuggaguaucaaauaggauauauaugcaguggaguuuucggagacaauccacgccccaaugauggaacagguaguuguggcccgauguccucuaacggggcacaugggguaaaaggguuuucauuuaaauacggcaaugguguuuggaucgggagaaccaaaagcacuaauuccagaagcggcuuugaaaugauuugggauccaaauggguggacuggaacggacaguagcuuuucggugaaacaagauauaguagcaacaacugauuggucaggauauagugggaguuuuguccagcauccagaacugacaggauuagauugcauaagaccuuguuucuggguugaguuaaucagagggcgaccaaaggagagcacaguuuggacuagugggagcagcauaucuuuuugugguguaaauagugacacugugaguuggucuuggccagacggugcugaguugccauucaccauugacaaguaa

SEQ ID NO: 47013 - RNA, 1350 nt, Artificial Sequence
  derived and/or modified CDS sequence (wt) from neuraminidase__InfluenzaA__ABE97662
augaauccaaaucagaagauaauaaccauuggaucaaucuguaugguaauuggaauaguuagcuuaauguuacaaauugggaacaugaucucaauaugggucagucauucaauccagacagggaaccaacaccaagcugaaucaaucagcaauacuaacccucuuacugagaaagcuguggcuucaguaacauuagcgggcaauucaucucuuugccccauuagaggaugggcuguacacaguaaggacaacaguauaaggaucgguuccaagggggauguguuuguuauuagagagccguucaucucaugcucccacuuggaaugcagaacuuucuuuuugacucagggagccuugcugaaugacaagcacuccaacgggaccgucaaagacagaagcccucacagaacauugaugaguuguccugugggugaggcucccucuccauauaacucaagguuugagucuguugcuuggucagcaagugcuugccaugauggcaccaguugguugacaauuggaauuucuggcccagacaauggggcuguggcuguguugaaauacaauggcauaauaacagacacuaucaagaguuggaggaacaacauacugagaacucaagagucugaaugugcauguguaaauggcucuugcuuuacuguaaugacugauggaccaaguaaugggcaggcaucauauaagaucuucaaaaugagaaaagggaaagugguuaaaucagucgaauuggaugcucccaauuaucacuaugaggagugcuccuguuauccugaugccggcgaaaucacaugugugugcagggauaauuggcauggcucaaauaggccauggguauccuucaaucaaaauuuggaguaucaaauaggauauauaugcaguggaguuuucggagacaauccacgccccaaugauggaacagguaguugugguccgauguccccuaacggggcauaugggguaaaaggguuuucauuuaaauacggcaaugguguuuggaucgggagaaccaaaagcacuaauuccaggagcggcuuugaaaugauuugggauccaaauggguggacuggaacggacaguagcuuuucggugaaacaagauauaguagcaauaacugauuggucaggauauagugggaguuuuguccagcauccagaacugacaggauuagauugcauaagaccuuguuucuggguugaguuaaucagagggcggcccaaagagagcacaauuuggacuagugggagcagcauaucuuuuugugguguaaauagugacacugugaguuggucuuggccagacggugcugaguugccauucaccauugacaaguag

SEQ ID NO: 47014 - RNA, 1350 nt, Artificial Sequence
  derived and/or modified CDS sequence (wt) from neuraminidase__InfluenzaA__ABE97663
augaauccaaaucagaagauaauaaccaucggaucaaucuguaugguaacuggaauaguuagcuuaauguuacaaauugggaacaugaucucaauaugggucagucauucaauucacacagggaaucaacaccaagcugaaccaaucagcaauacuaauuuucuuacugagaaagcuguggcuucaguaaaauuagcgggcaauucuucucuuugccccauuaacggaugggcuguauacaguaaggacaacaguauaaggaucgguuccaagggggauguguuuguuauaagagagccguucaucucaugcucccacuuggaaugcagaacuuucuuuuugacucagggagccuugcugaaugacaagcacuccaaugggacugucaaagacagaagcccucacagaacauuaaugaguuguccugugggugaggcucccuccccauauaacucaagguuugagucuguugcuuggucagcaagugcuugccaugauggcaccaguugguugacaauuggaauuucuggcccagacaauggggcuguggcuguauugaaauacaauggcauaauaacagacacuaucaagaguuggaggaacaacauauugagaacucaagagucugaaugugcauguguaaauggcucuugcuuuacuguaaugacugacggaccaaguaauggucaagcaucacauaagaucuucaaaauggaaaaagggaaagugguuaaaucagucgaauuggaugcuccuaauuaucacuaugaggaaugcuccuguuauccugaugccggcgaaaucacgugugugugcagggauaauuggcauggcucaaaucggccauggguaucuuucaaucaaaauuuggaguaucaaauaggauauauaugcaguggaguuuucggagacaauccacgccccaaugauggaacagguaguugcgguccgguguccucuaacggggcauaugggguaaaaggguuuucauuuagguacggcaauggugucuggaucgggagaaccaaaagcacuaauuccaggagcggcuuugaaaugauuugggauccaaauggguggacugaaacggacaguagcuuuucagugaaacaagauaucguagcaauaacugauuggucaggauauagcgggaguuuuguccagcauccagaacugacaggacuagauugcauaagaccuuguuucuggguugaguugaucagagggcggcccaaagagagcacaauuuggacuagugggagcagcauaucuuuuugugguguaaauagugacacuguggguuggucuuggccagacggugcugaguugccauucaccauugacaaguag

SEQ ID NO: 47015 - RNA, 1350 nt, Artificial Sequence
  derived and/or modified CDS sequence (wt) from neuraminidase__InfluenzaA__ABE97665
augaauccaaaucagaagauaauaaccaucggaucaaucuguaugguaacuggaauaguuagcuuaauguuacaaguugggaacaugaucucaauaugggucagucauucaauucacacagggaaucaacaccaagcugaaccaaucagcaauacuaauuuucuuacugagaaagcuguggcuucaguaaaauuagcgggcaauucaucucuuugccccauuaacggaugggcuguauacaguaaggacaacaguauaaggaucgguuccaagggggauguguuuguuauaagagagccguucaucucaugcucccacuuggaaugcagaacuuucuuuuugacucauggagccuugcugaaugacaagcacuccaaugggacugucaaagacagaagcccucacagaacauuaaugaguuguccugugggugaggcucccuccccauauaacucaagguuugagucuguugcuuggucagcaagugcuugccaugauggcaccaguugguugacaauuggaauuucuggcccagacaauggggcuguggcuguauugaaauacaauggcauaauaacagacacuaucaagaguuggaggaacaacauacugagaacucaagagucugaaugugcauguguaaauggcucuugcuuuacuguaaugacugacggaccaaguaauggucaggcaucacauaagaucuucaaaauggaaaaagggaaagugguuaaaucagucgaauuggaugcuccuaauuaucacuaugaggaaugcuccuguuauccugaugccggcgaaaucacaugugugugcagggauaauuggcauggcucaaaucggccauggguaucuuucaaucaaaacuuggaguaucaaauaggauauauaugcaguggaguuuucggagacaauccacgccccaaugauggaacagguaguugugguccaguguccucuaacggggcauaugggguaaaaggguuuucauuuaaauacggcaauggugucuggaucgggagaaccaaaagcacuaauuccaggagcggcuuugaaaugauuugggauccaaauggguggacugaaacggacaguagcuuuucagugaaacaagauaucguagcaauaacugauuggucaggauauagcgggaguuuuguccagcauccagaacugacaggacuagauugcauaagaccuuguuucuggguugaguugaucagagggcggcccaaagagagcacaauuuggacuagugggagcagcauaucuuuuugugguguaaauagugacacuguggguuggucuuggccagacggugcugaguugccauucaccauugacaaguag

SEQ ID NO: 47016 - RNA, 1350 nt, Artificial Sequence
  derived and/or modified CDS sequence (wt) from neuraminidase__InfluenzaA__ABE97666
augaauccaaaucagaagauaauaaccaucggaucaaucuguaugguaacuggaauaguuagcuuaauguuacaaauugggaacaugaucucaauaugggucagucauucaauucacacagggaaucaacaccaaucugaaccaaucagcaauacuaauuuucuuacugagaaagcuguggcuucaguaaaauuagcgggcaauucaccucuuugccccauuaacggaugggcuguauacaguaaggacaacaguauaaggaucgguuccaagggggauguguuuguuauaagagagccguucaucucaugcucccacuuggaaugcagaacuuucuuuuugacucagggagccuugcugaaugacaagcacuccaaugggacugucaaagacagaagcccucacagaacauuaaugaguuguccugugggugaggcucccuccccauauaacucaagguuugagucuguugcuuggucagcaagugcuugccaugauggcaccaguugguugacaauuggaauuuccggcccagacaauggggcuguggcuguauugaaauacaauggcauaauaacagacacuaucaagaguuggaggaacaacauacugagaacucaagagucugaaugugcauguguaaauggcucuugcuuuacuguaaugacugacggaccaaguaauggucaggcaucacauaagaucuucaaaauggaaaaagggaaagugguuaaaucagucgaauuggaugcuccuaauuaucacuaugaggaaugcuccuguuauccugaugccggcgaaaucacauguguaugcagggauaauuggcaugguucaaaucggccauggguaucuuucaaccaaaauuuggaguaucaaauaggauauauaugcaguggaguuuucggagacaguccacgccccaaugauggaacagguaguugugguccgguguccucuaacggggcauaugggguaaaaggguuuucauuuaaauacggcaauggugucuggaucgggagaaccaaaagcacuaauuccaggagcggcuuugaaaugauuugggauccaaauggguggacugaaacggacaguagcuuuucagugaaacaagauaucguagcaauaacugauuggucaggauauagcgggaguuuuguccagcauccagaacugacaggacuagauugcauaagaccuuguuucuggguugaguugaucagagggcggcccaaagagagcacaauuuggacuagugggagcagcauaucuuuuugugguguaaauagugacacuguggguuggucuuggccagacggugcugaguugccauucaccauugacaaguag

SEQ ID NO: 47017 - RNA, 1350 nt, Artificial Sequence
  derived and/or modified CDS sequence (wt) from neuraminidase__InfluenzaA__ABE97667
augaauccaaaucagaagauaauaaccaucggaucaaucuguaugguaacuggaaucguuagcuuaauguuacaaauugggaacaugaucucaauauggggcagucauucaauucacacagggaaucaacaccaaucugaaccaaucagcaauacuaauuuucuuacugagaaagcuguggcuucaguaaaauuagcgggcaauucaucucuuugccccauuaacggaugggcuguauacaguaaggacaacaguauaaggaucgguuccaagggggauguguuuguuauaagagagccguucaucucaugcucccauuuggaaugcagaacuuucuuuuugacucagggagccuugcugaaugacaagcacuccaaugggacugucaaagacagaagcccucacagaacauuaaugaguuguccugugggugaggcucccuccccauauaacucaagguuugagucugucgcuuggucagcaagugcuugccaugauggcaccaguugguugacaauugguauuucuggcccagacaacggggcuguggcuguagugaaguacaauggcauaauaacugacacuaucaagaguuggaggaacaacauacugagaacucaagagucugagugugcauguguaaauggcucuugcuuuacuguaaugacugacggaccaaguaauggucaggcaucacauaagaucuucaaaauggaaaaagggaaagugguuaaaucagucgaauuggaugcuccuaauuaucacuacgaggaaugcuccuguuauccugaugcuggcaaaaucacaugugugugcagggauaauuggcauggcucaaaucggccauggguaucuuucaaucaaaauuuggaguaucaaauaggauauauaugcaguggaguuuucggagacaauccacgccccaaugauggaacagguaguugugguccgguguccucuaacggagcauaugggguaaaaggguuuucauuuaaauacggcaauggugucuggaucgggagaaccaaaagcacuaauuccaggagcggcuuugaaaugauuugggauccaaauggguggacugaaacggacaguagcuuuucagugaaacaagauaucguagcaauaacugauuggucaggauauagcgggaguuuuguccagcauccagaacugacaggacuagauugcauaagaccuuguuucuggguugaguugaucagagggcggcccaaagagagcacaauuuggacuagugggagcagcauaucuuuuugugguguaaauagugacauuguggguuggucuuggccagacggugcugaguugccauucaccauugacaaguag

SEQ ID NO: 47018 - RNA, 1350 nt, Artificial Sequence
  derived and/or modified CDS sequence (wt) from neuraminidase__InfluenzaA__ABE97669
augaauccaaaucagaagauaauaaccaucggaucaaucuguaugguaacuggaauaguuagcuuaauguuacaaauugggaacaugaucucaauaugggucagucauucaauucacacagggaaucaacaccaaucugaaccaaucagcaauacuaauuuucuuacugagaaagcuguggcuucaguaaaauuagcgggcaauucaucucuuugccccauuaacggaugggcuguauacaguaaggacaacaguauaaggaucgguuccaagggggauguguuuguuauaagagagccguucaucucaugcucccacuuggaaugcagaacuuucuuuuugacucagggagccuugcugaaugacaagcacuccaaugggacugucaaagacagaagcccucacagaacauuaaugaguuguccugugggugaggcucccuccccauauaacucaagguuugagucugucgcuuggucagcaagugcuugccaugauggcaccaguugguugacaauugguauuucuggcccagacaauggggcuguggcuguagugaaguacaauggcauaauaacagacacuaucaagaguuggaggaacaacauacugagaacucaagagucugagugugcauguguaaauggcucuugcuuuacuguaaugacugacggaccaaguaauggucaggcaucacauaagaucuucaaaauggaaaaagggaaagugguuaaaucagucgaauuggaugcuccuaauuaucacuaugaggaaugcuccuguuauccugaugccggcgaaaucacaugugugugcagggauaauuggcauggcucaaaucggccaugggugucuuucaaucaaaauuuggaguaucaaauaggauauauaugcaguggaguuuucggagacaauccacgccccaaugauggaacagguaguugugguccgguguccucuaacggggcauaugggguaaaagguuuuucauuuaaauacggcaauggugucuggaucgggagaaccaaaagcacuaauuccaggagcggcuuugaaaugauuugggauccaaauggguggacugaaacggacaguagcuuuucagugaaacaagauaucguagcaauaacugauuggucaggauauagcgggaguuuuguccagcauccagaacugacaggacuagauugcauaagaccuuguuucuggguugaguugaucagagggcggcccaaagagagcacaauuuggacuagugggagcagcauaucuuuuugugguguaaauagugacacuguggguuggucuuggccagacggugcugaguugccauucaccauugacaaguag

SEQ ID NO: 47019 - RNA, 1350 nt, Artificial Sequence
  derived and/or modified CDS sequence (wt) from neuraminidase__InfluenzaA__ABE97670
augaauccaaaucagaagauaauaaccaucggaucaaucuguaugguaacuggaauaguuaguuuaauguuacaaauugggaacaugaucucaauaugggucagucauucaauucacacagggaaucaacaccaaucugaaccaaucagcaauacuaauuuucuuacugagaaagcuguggcuucaguaaaauuagcgggcaauucaucucuuugccccauuaacggaugggcuguauacaguaaggacaacaguauaaggaucgguuccaagggggauguguuuguuauaagagagccguucaucucaugcucccacuuggaaugcagaacuuucuuuuugacucagggagccuugcugaaugacaagcacuccaaugggacugucaaagacagaagcccucacagaacauuaaugaguuguccugugggugaggcucccuccccauauaacucaagguuugagucugucgcuuggucagcaagugcuugccaugauggcaccaguugguugacaauugguauuucuggcccagacaauggggcuguggcuguagugaaguacaauggcauaauaacagacacuaucaagaguuggaggaacaacauacugagaacucaagagucugagugugcauguguaaauggcucuugcuuuacuguaaugacugacggaccaaguaauggucaggcaucacauaagaucuucaaaauggaaaaagggaaagugguuaaaucagucgaauuggauaccccuaauuaucacuaugaggaaugcuccuguuacccugaugccggcgaaaucacaugugugugcagggauaauuggcauggcucaaaucggccaugggugucuuucaaucaaaauuuggaguaucaaauaggauauauaugcaguggaguuuucggagacaauccacgccccaaugauggaacagguaguugugguccgguguccucuaacggggcauaugggguaaaagguuuuucauuuaaauacggcaauggugucuggaucgggagaaccaaaagcacuaauuccaggagcggcuuugaaaugauuugggauccaaauggguggacugaaacggacaguagcuuuucagugaaacaagauaucguagcaauaacugauuggucaggauauagcgggaguuuuguccagcauccagaacugacaggacuagauugcauaagaccuuguuucuggguugaguugaucagagggcggcccaaagagagcacaauuuggacuagugggagcagcauaucuuuuugugguguaaauagugacacuguggguuggucuuggccagacggugcugaguugccauucaccauugacaaguag

SEQ ID NO: 47020 - RNA, 1350 nt, Artificial Sequence
  derived and/or modified CDS sequence (wt) from neuraminidase__InfluenzaA__ABE97671
augaauccaaaucaaaagauaauaaccaucggaucaaucuguaugguaacuggaauaguuagcuuaauguuacaaauugggaacaugaucucaauaugggucagucauucaauucacacagggaaucaacaccaagcugaaccaaucagcaauacuaauuuucuuacugagaaagcuguggcuucaguaaaauuagcgggcaauucaucucuuugccccauuaacggaugggcuguauacaguaaggacaacaguauaaggaucgguuccaagggggauguguuuguuauaagagagccguucaucucaugcucccacuuggaaugcagaacuuucuuuuugacucagggagccuugcugaaugacaagcacuccaaugggacugucaaagacagaagcccucacagaacauuaaugaguuguccugugggugaggcucccuccccauauaacucaagguuugagucuguugcuuggucagcaagugcuugccaugauggcaccaguugguugacaauuggaauuucuggcccagacaauggggcuguggcuguauugaaauacaauggcauaauaacagacacuaucaagaguuggaggaacaacauacugagaacucaagagucugaaugugcauguguaaauggcucuugcuuuacuguaaugacugacggaccaaguaauggucaggcaucacauaagaucuucaaaauggaaaaagggaaagugguuaaaucagucgaauuggaugcuccuaauuaucacuaugaggaaugcuccuguuauccugaugccggcgaaaucacaugugugugcagggauaauuggcauggcucaaaucggccauggguaucuuucaaucaaaauuuggaguaucaaauaggauauauaugcaguggaguuuucggagacaauccacgccccaaugauggaacagguaguugcgguccgguguccucuaacggggcauaugggguaaaaggguucucauuuaaauacggcaauggugucuggaucgggagaaccaaaagcacuaauuccaggagcggcuuugaaaugauuugggauccaaauggguggacugaaacggacaguagcuuuucagugaaacaagauaucguagcaauaacugauuggucaggauauagcgggaguuuuguccagcauccagaacugacaggacuagauugcauaagaccuuguuucuggguugaguugaucagagggcggcccaaagagagcacaauuuggacuagugggagcagcauaucuuuuugugguguaaauagugacacuguggguuggucuuggccagacggugcugaguugccauucaccauugacaaguag

SEQ ID NO: 47021 - RNA, 1350 nt, Artificial Sequence
  derived and/or modified CDS sequence (wt) from neuraminidase__InfluenzaA__ABE97672
augaauccaaaucagaagauaauaaccaucggaucaaucuguaugguaacuggaauaguuagcuuaauguuacagauugggaacaugaucucaauaugggucagucauucaauucacacagggaaucaacaccaagcugaaccaaucagcaauacuaauuuucuuacugagaaagcucuggcuucaguaaaauuagcgggcaauucaucucuuugccccauuaauggaugggcuguauacaguaaggacaacaguauaaggaucgguuccaagggggauguguuuguuauaagagagccguucaucucaugcucccacuuggaaugcagaacuuucuuuuugacucagggagccuugcugaaugacaagcacuccaaugggacugucaaagacagaagcccucacagaacauuaaugaguuguccugugggugaggcucccuccccauauaacucaagguuugagucuguugcuuggucagcaagugcuugccaugauggcaccaguugguugacaauuggaauuucuggcccagacaauggggcuguggcuguauugaaauacaauggcauaauaacagacacuaucaagaguuggaggaacaacauacugagaacucaagagucugaaugugcauguguaaauggcucuugcuuuacuguaaugaccgacggaccaaguaauggucaggcaucacauaagaucuucaaaauggaaaaagggaaagugguuaaaucagucgaauuggaugcuccuaauuaucacuaugaggaaugcuccuguuauccugaugccggcgaaaucacaugugugugcagggauaauuggcauggcucaaaucggccauggguaucuuucaaucaaaauuuggaguaucaaauaggauauauaugcaguggaguuuucggagacaauccacgccccaaugauggaacagguaguugugguccgguguccucuaauggggcauaugggguaaaaggguuuucauuuaaauacggcaauggugucuggaucgggagaaccaaaagcacuaauuccaggagcggcuuugaaaugauuugggauccaaauggguggacugaaacggacaguagcuuuucagugaaacaagauaucguagcaauaacugauuggucaggauauagcgggaguuuuguccagcauccagaacugacaggacuagauugcauaagaccuuguuucuggguugaguugaucagagggcggcccaaagagagcacaauuuggacuagugggagcagcauaucuuuuugugguguaaauagugacacuguggguuggucuuggccagacggugcugaguugccauucaccauugacaaguag

SEQ ID NO: 47022 - RNA, 1350 nt, Artificial Sequence
  derived and/or modified CDS sequence (wt) from neuraminidase__InfluenzaA__ABE97675
augaauccaaaucagaagauaauaaccaucggaucaaucuguaugguaacaggaauaguuagcuuaauguuacaaguugggaacaugaucucaauaugggucagucauucaauucacacagggaaucaacaccaagcugaaccaaucagcaauacuaauuuucuuauugagaaagcuguggcuucaguaaaauuagcgggcaauucaucucuuugccccauuaacggcugggcuguauacaguaaggacaacaguauaaggaucgguuccaagggggauguguuuguuauaagagagccguucaucucaugcucccacuuggaaugcagaacuuucuuuuugacucagggagccuugcugaaugacaagcacuccaaugggacugucaaagacagaagcccucacagaacauuaaugaguuguccugugggugaggcucccuccccauauaacucaagguuugagucuguugcuuggucagcaagugcuugccaugauggcaccaguugguugacaauuggaauuucuggcccagacaauggggcuguggcuguauugaaauacaauggcauaauaacagacacuaucaagaguuggaggaacaacauacugagaacucaagagucugaaugugcauguguaaauggcucuugcuuuacuguaaugacugacggaccaaguaauggucaggcaucacauaagaucuucaaaauagaaaaagggaaagugguuaaaucagucgaauuggaugcuccuaauuaucacuaugaggaaugcuccuguuauccugaugccggcgaaaucacaugugugugcagggauaauuggcauggcucaaaucggccauggguaucuuucaaucaaaacuuggaguaucaaauaggauauauaugcaguggaguuuucggagacaauccacgccccaaugauggaacagguaguugugguccgguguccucuaacggggcauaugggguaaaaggguuuucauuuaaauacggcaauggugucuggaucgggagaaccaaaagcacuaauuccaggagcggcuuugaaaugauuugggauccaaauggguggucugaaacggacaguagcuuuucagugaaacaagauaucguagcaauaacugauuggucaggauauagcgggaguuuuguccagcauccagaacugacaggacuagauugcauaagaccuuguuucuggguugaguugaucagagggcggcccaaagagagcacaauuuggacuagugggagcagcauaucuuuuugugguguaaauagugacacuguggguuggucuuggccagacggugcugaguugccauucaccauugacaaguag

SEQ ID NO: 47023 - RNA, 1350 nt, Artificial Sequence
  derived and/or modified CDS sequence (wt) from neuraminidase__InfluenzaA__ABE97676
augaauccaaaucagaagauaauaaccaucggaucaaucuguaugguaacuggaauaguuagcuuaauguuacaaauugggaacaugaucucaauaugggucagucauucaauucacacagggaaucaacaccaagcugaaccaaucagcaauacuaauuuucuuacugagaaagcuguggcuucaguaaaauuagcgggcaauucaucucuuugccccauuaacggaugggcuguauacaguaaggacaacaguauaaggaucgguuccaagggggauguguuuguuauaagagagccguucaucucaugcucccacuuggaaugcagaacuuucuuuuugacucagggagccuugcugaaugacaagcacuccaaugggacugucaaagacagaagcccucacagaacauuaaugaguuguccugugggugaggcucccuccccauauaacucaagguuugagucuguugcuuggucagcaagugcuugccaugauggcaccaguugguugacaauuggaauuucuggcccagacaauggggcuguggcuguauugaaauacaauggcauaauaacagacacuaucaagaguuggaggaacaacauacugagaacucaagagucugaaugugcaugugugaauggcucuugcuuuacuguaaugacugacggaccaaguaauggucaggcaucacauaagaucuucaaaauggaaaaagggaaagugguuaaaucagucgaauuggaugcuccuaauuaucacuaugaggaaugcuccuguuauccugaugccggcgaaaucacaugugugugcagggauaauuggcauggcucaaaucggccaugggugucuuucaaucaaaauuuggaguaucaaauaggauauauaugcaguggaguuuucggagacaauccacgccccaaugauggaacagguaguugugguccgguguccucuaacggggcauaugggguaaaaggauuuuccuuuaaauacggcaauggugucuggaucgggagaaccaaaagcacuaauuccaggagcggcuuugaaaugauuugggauccaaauggguggacugaaacggacaguagcuuuucagugaaacaagauaucguagcaauaaaugauuggucaggauauagcgggaguuuuguccagcauccagaacugacaggacuagauuguauaagaccuuguuucuggguugaguugaucagagggcggcccaaagagagcacaauuuggacuagugggagcagcauaucuuuuugugguguaaauagugacacuguggguuggucuuggccagacggugcugaguugccauucaccauugacaaguag

SEQ ID NO: 47024 - RNA, 1350 nt, Artificial Sequence
  derived and/or modified CDS sequence (wt) from neuraminidase__InfluenzaA__ABE97677
augaauccaaaucagaagauaauaaccaucggaucaaucuguaugguaacuggaauaguuagcuuaauguuacaaauugggaacauaaucucaauaugggucaggcauucaauucacacagggaaucaacaccaaucugaaccaaucagcaacacuaauuuucuuacugagaaagcuguggcuucaguaaaauuagcgggcaauucaucucuuugccccauuaacggaugggcuguauacaguaaggacaacaguauaaggaucgguuccaagggggauguguuuguuauaagagagccguucaucucaugcucccacuuggaaugcagaacuuucuuuuugacucagggagccuugcugaaugacaagcacuccaaugggacugucaaagacagaagcccucacagaacauuaaugaguuguccugugggugaggcucccuccccauauaacucaagguuugagucugucgcuuggucagcaagugcuugccaugauggcaccaguugguugacaauugguauuucuggcccagacaauggggcuguggcuguagugaaguacaauggcauaauaacagacacuaucaagaguuggaggaacaacauacugagaacucaagagucugagugugcauguguaaauggcucuugcuuuacuguaaugacugacggaccaaguaauggucaggcaucacauaagaucuucaaaauggaaaaagggaaagugguuaaaucagucgaauuggaugcuccuaauuaucacuaugaggaaugcuccuguuauccugaugccggcgaaaucacaugugugugcagggauaauuggcauggcucaaaucggccauggguaucuuucaaucaaaauuuggaguaucaaauaggauauauaugcaguggaguuuucggagacaauccacgccccaaugauggaacagguaguugugguccgguguccucuaacggggcauaugggguaaaaggguuuucauuuaaauacggcaauggugucuggaucgggagaaccaaaagcacuaauuccaggagcggcuuugaaaugauuugggauccaaauggguggacugaaacggacaguagcuuuucagugaaacaagauaucguagcaauaacugauuggucaggauauagcgggaguuuuguccagcauccagaacugacaggacuagauugcauaagaccuuguuucuggguugaguugaucagagggcggcccaaagagagcacaauuuggacuagugggagcagcauaucuuuuugugguguaaauagugacacuguggguuggucuuggccagacggugcugaguugccauucaccauugacaaguag

SEQ ID NO: 47025 - RNA, 1350 nt, Artificial Sequence
  derived and/or modified CDS sequence (wt) from neuraminidase__InfluenzaA__ABE97679
augaauccaaaucagaagauaauaaccaucggaucaaucuguaugguaacuggaauaguuagcuuaauguuacaaauugggaacaugaucucaauaugggucaggcauucaauucacacagggaaucaacaccaaucugaaccaaucagcaacacuaauuuucuuacugagaaagcuguggcuucaguaaaauuagcgggcaauucaucucuuugccccauuaacggaugggcuguauacaguaaggacaacaguauaaggaucgguuccaagggggauguguuuguuauaagagagccguucaucucaugcucccacuuggaaugcagaacuuucuuuuugacucagggagccuugcugaaugacaagcacuccaaugggacugucaaagacagaagcccucacagaacauuaaugaguuguccugugggugaggcucccuccccauauaacucaagguuugagucugucgcuuggucagcaagugcuugccaugauggcaccaguugguugacaauugguauuucuggcccagacaauggggcuguggcuguagugaaguacaauggcauaauaacagacacuaucaagaguuggaggaacaacauacugagaacucaagagucugagugugcauguguaaauggcucuugcuuuacuguaaugacugacggaccaaguaauggucaggcaucacauaagaucuucaaaauggaaaaagggaaagugguuaaaucagucgaauuggaugcuccuaauuaucacuaugaggaaugcuccuguuauccugaugccggcgaaaucacaugugugugcagggauaauuggcauggcucaaaucggccauggguaucuuucaaucaaaauuuggaguaucaaauaggauauauaugcaguggaguuuucggagacaauccacgccccaaugauggaacagguaguugugguccgguguccucuaacggggcauaugggguaaaaggguuuucauuuaaauacggcaauggugucuggaucgggagaaccaaaagcacuaauuccaggagcggcuuugaaaugauuugggauccaaauggguggacugaaacggacaguagcuuuucagugaaacaagauaucguagcaauaacugauuggucaggauauagcgggaguuuuguccagcauccagaacugacaggacuagauugcauaagaccuuguuucuggguugaguugaucagagggcggcccaaagagagcacaauuuggacuagugggagcagcauaucuuuuugugguguaaauagugacacuguggguuggucuuggccagacggugcugaguugccauucaccauugacaaguag

SEQ ID NO: 47026 - RNA, 1350 nt, Artificial Sequence
  derived and/or modified CDS sequence (wt) from neuraminidase__InfluenzaA__ABE97680
augaauccaaaucagaagauaauaaccaucggaucaaucuguaugguaacuggaauaguuagcuuaauguuacaaauugggaacaugaucucaauaugggucagucauucaauucacacagggaaucaacaccaaucugaaccaaucagcaauacuaauuuucuuacugagaaagcuguggcuucaguaaaauuagcgggcaauucaucucuuugccccauuaacggaugggcuguauacaguaaggacaacaguauaaggaucgguuccaagggggauguguuuguuauaagagagccguucaucucaugcucccacuuggaaugcagaacuuucuuuuugacucagggagccuugcugaaugacaagcacuccaaugggacugucaaagacagaagcccucacagaacauuaaugaguuguccugugggugaggcucccuccccauauaacucaagguuugagucuguugcuuggucagcaagugcuugccaugauggcaccaguugguugacaauugguauuucuggcccagacaauggggcuguggcuguagugaaauacaauggcauaauaacagacacuaucaagaguuggaggaacaacauacugagaacucaagagucugagugugcauguguaaauggcucuugcuuuacuguaaugacugacggaccaaguaauggucaggcaucacauaagaucuucaaaauggaaaaagggaaagugguuaaaucagucgaauuggaugcuccuaauuaucacuaugaggaaugcuccuguuauccugaugccggcgaaaucacaugugugugcagggauaauuggcauggcucaaaucggccauggguaucuuucaaucaaaauuuggaguaucaaauaggauauauaugcaguggaguuuucggagacaauccacgccccaaugauggaacagguaguugugguccgguguccucuaacggggcauaugggguaaaaggguuuucauuuaaauacggcaauggugucuggaucgggagaaccaaaagcacuaauuccaggagcggcuuugaaaugauuugggauccaaauggguggacugaaacggacaguagcuuuucagugaaacaagauaucguagcaauaacugauuggucaggauauagcgggaguuuuguccagcauccagaacugacaggacuagauugcauaagaccuuguuucuggguugaguugaucagagggcgacccaaagagagcacaauuuggacuagugggagcagcauaucuuuuugugguguaaauagugacacuguggguuggucuuggccagacggugcugaguugccauucaccauugacaaguag

SEQ ID NO: 47027 - RNA, 1350 nt, Artificial Sequence
  derived and/or modified CDS sequence (wt) from neuraminidase__InfluenzaA__ABE97681
augaauccaaaucagaagauaauaaccaucggaucaaucuguaugguaacuggaauaguuagcuuaauguuacaaauugggaacaugaucucaauaugggucagucauucaauucacacagggaaucaacaccaaucugaaccaaucagcaauacuaauuuucuuacugagaaagcuguggcuucaguaaaauuagcgggcaauucaucucuuugccccauuaacggaugggcuguauacaguaaggacaacaguauaaggaucgguuccaagggggauguguuuguuauaagagagccguucaucucaugcucccacuuggaaugcagaacuuucuuuuugacucagggagccuugcugaaugacaagcacuccaaugggacugucaaagacagaagcccucacagaacauuaaugaguuguccugugggugaggcucccuccccauauaacucaagguuugagucugucgcuuggucagcgagugcuugccaugauggcaccaguugguugacaauugguauuucuggcccagacaauggggcuguggcuguagugaaguacaauggcauaauaacagacacuaucaagaguuggaggaacaacauacugagaacucaagagucugagugugcauguguaaauggcucuugcuuuacuguaaugacugacggaccaaguaauggucaggcaucacauaagaucuucaaaauggaaaaagggaaagugguuaaaucagucgaauuggaugcuccuaauuaucacuaugaggaaugcuccuguuauccugaugccggcgaaaucacaugugugugcagggauaauuggcauggcucaaaucggccaugggugucuuucaaucaaaauuuggaguaucaaauaggauauauaugcaguggaguuuucggagacaauccacgccccaaugauggaacagguaguugugguccgguguccucuaauggggcauaugggguaaaagguuuuucauuuaaauacggcaauggugucuggaucgggagaaccaaaagcacuaauuccaggagcggcuuugaaaugauuugggauccaaauggguggacugaaacggacaguagcuuuucagugaaacaagauaucguagcaauaacugauuggucaggauauagcgggaguuuuguccagcauccagaacugacaggacuagauugcauaagaccuuguuucuggguugaguugaucagagggcggcccaaagagagcacaauuuggacuagugggagcagcauaucuuuuugugguguaaauagugacacuguggguuggucuuggccagacggugcugaguugccauucaccauugacaaguag

SEQ ID NO: 47028 - RNA, 1350 nt, Artificial Sequence; identical to SEQ ID NO: 47027
  derived and/or modified CDS sequence (wt) from neuraminidase__InfluenzaA__ABE97682

SEQ ID NO: 47029 - RNA, 1350 nt, Artificial Sequence
  derived and/or modified CDS sequence (wt) from neuraminidase__InfluenzaA__ABE97684
augaauccaaaucagaagauaauaaccaucggaucaaucuguaugguaacuggaauaguuagcuuaauguuacaaauugggaacaugaucucaauaugggucagucauucaauucacacagggaaucaacaccaagcugaaccaaucagcaauacuaauuuucuuacugagaaagcuguggcuucaguaaaauuagcgggcaauucaucucuuugccccauuaacggaugggcuguauacaguaaggacaacaguauaaggaucgguuccaagggggauguguuuguuauaagagagccguucaucucaugcucccacuuggaaugcagaacuuucuuuuugacucagggagccuugcugaaugacaagcacuccaaugggacugucaaagacagaagcccucacagaacauuaaugaguuguccugugggugaggcucccuccccauauaacucaagguuugagucuguugcuuggucagcaagugcuugccaugauggcaccaguugguugacaauuggaauuucuggcccagacaauggggcuguggcuguauugaaauacaauggcauaauaacagacacuaucaagaguuggaggaacaacauacugagaacucaagagucugaaugugcauguguaaauggcucuugcuuuacuguaaugacugacggaccaaguaauggucaggcaucacauaagaucuucaaaauggaaaaagggaaagugguuaaaucagucgaauuggaugcuccuaauuaucacuaugaggaaugcuccuguuauccugaugccggcgaaaucacaugugugugcagggauaauuggcauggcucaaaucggccauggguaucuuucaaucaaaauuuggaguaucaaauaggauauauaugcaguggaguuuucggagacaauccacgccccaaugauggaacagguaguugugguccgguguccucuaacggggcauaugggguaaaaggguuuucauuuaaauacggcaauggugucuggaucgggagaaccaaaagcacuaauuccaggagcggcuuugaaaugauuugggauccaaauggguggacugaaacggacaguagcuuuucagugaaacaagauaucguagcaauaacugauuggucaggauauagcgggaguuuuguccagcauccagaacugacaggacuagauugcauaagaccuuguuucuggguugaguugaucagagggcggcccaaagagagcacaauuuggacuagugggagcagcauaucuuuuugugguguaaauaguggcacuguggguuggucuuggccagacggugcugaguugccauucaccauugacaaguag

SEQ ID NO: 47030 - RNA, 1350 nt, Artificial Sequence
  derived and/or modified CDS sequence (wt) from neuraminidase__InfluenzaA__ABE97685
augaauccaaaucagaagauaauaaccaucggaucaaucuguaugguaacuggaauaguuagcuuaauguuacaaauugggaacaugaucucaauaugggucagucauucaauucacacagggaaucaacaccaagcugaaccaaucagcaauacuaauuuucuuacugagaaagcuguggcuucaguaaaauuagcgggcaauucaucucuuugccccauuaacggaugggcuguauacaguaaggacaacaguauaaggaucgguuccaagggggauguguuuguuauaagagagccguucaucucaugcucccacuuggaaugcagaacuuucuuuuugacucagggagccuugcugaaugacaagcacuccaaugggacugucaaagacagaagcccucacagaacauuaaugaguuguccugugggugaggcucccuccccauauaacucaagguuugagucuguugcuuggucagcaagugcuugccaugauggcaccaguugguugacaauuggaauuucuggcccagacaauggggcuguggcuguauugaaauacaauggcauaauaacagacacuaucaagaguuggaggaacaacauacugagaacucaagagucugaaugugcauguguaaauggcucuugcuuuacuguaaugacugacggaccaaguaauggucaggcaucacauaagaucuucaaaauggaaaaagggaaagugguuaaaucagucgaauuggaugcuccuaauuaucacuaugaggaaugcuccuguuauccugaugccggcgaaaucacaugugugugcagggauaauuggcauggcucaaaucggccauggguaucuuucaaucaaaauuuggaguaucaaauaggauauauaugcaguggaguuuucggagacaauccacgccccaaugauggaacagguaguugugguccgguguccucuaacggggcauaugggguaaaaggguuuucauuuaaauacggcaauggugucuggaucgggagaaccaaaagcacuaauuccaggagcggcuuugaaaugauuugggauccaaauggguggacugaaacggacaguagcuuuucagugaaacaagauaucguagcaauaacugauuggucaggauauagcgggaguuuuguccagcauccagaacugacaggacuagauugcauaagaccuuguuucuggguugaguugaucagagggcggcccaaagagagcacaauuuggacuagugggagcagcauaucuuuuugugguguaaauagugacacuggggguuggucuuggccagacggugcugaguugccauucaccauugacaaguag

SEQ ID NO: 47031 - RNA, 1350 nt, Artificial Sequence
  derived and/or modified CDS sequence (wt) from neuraminidase__InfluenzaA__ABE97686
augaauccaaaucagaagauaauaaccaucggaucaaucuguaugguaacuggaauaguuagcuuaauguuacaaauugggaacaugaucucaauaugggucagucauucaauucacacagggaaucaacaccaagcugaaccaaucagcaauacuaauuuucuuacugagaaagcuguggcuucaguaaaauuagcgggcaauucaucucuuugccccauuaacggaugggcuguauacaguaaggacaacaguauaaggaucgguuccaagggggauguguuuguuauaagagagccguucaucucaugcucccacuuggaaugcagaacuuucuuuuugacucagggagccuugcugaaugacaagcacuccaaugggacugucaaagacagaagcccucacagaacauuaaugaguuguccugugggugaggcucccuccccauauaacucaagguuugagucuguugcuuggucagcaagugcuugccaugauggcaccaguugguugacaauuggaauuucuggcccagacaauggggcuguggcuguauugaaauacaauggcauaauaacagacacuaucaagaguuggaggaacaacauacugagaacucaagagucugaaugugcauguguaaauggcucuugcuuuacuguaaugacugacggaccaaguaauggucaggcaucacauaagaucuucaaaauggaaaaagggaaagugguuaaaucagucgaauuggaugcuccuaauuaucacuaugaggaaugcuccuguuauccugaugccggcgaaaucacaugugugugcagggauaauuggcauggcucaaaucggccauggguaucuuucaaucaaaauuuggaguaucaaauaggauauauaugcaguggaguuuucggagacaauccacgccccaaugauggaacagguaguugugguccgguguccucuaacggggcauaugggguaaaaggguuuucauuuaaauacggcaauggugucuggaucgggagaaccaaaagcacuaauuccaggagcggcuuugaaaugauuugggauccaaauggguggacugaaacggacaguagcuuuucagugaaacaagauaucguagcaauaacugauuggucaggauauagcgggaguuuuguccagcauccagaacugacaggacuagauugcauaagaccuuguuucuggguugaguugaucagagggcggcccaaagagagcacaauuuggacuagugggagcagcauaucuuuuugugguguaaauagugacacuguggguuggucuuggccagacggugcugaguugccauucaccauugacaaguag

SEQ ID NO: 47032 - RNA, 1350 nt, Artificial Sequence
  derived and/or modified CDS sequence (wt) from neuraminidase__InfluenzaA__ABE97687
augaauccaaaucagaagauaauaaccaucggaucaaucuguaugguaacuggaauaguuagcuuaauguuacaaguugggaacaugaucucaauaugggucagucauucaauucacacagggaaucaacaccaagcugaaccaaucagcaauacuaauuuucuuacugagaaagcuguggcuucaguaaaauuagcgggcaauucaucccuuugccccauuaacggaugggcuguauacaguaaggacaacaguauaaggaucgguuccaagggggauguguuuguuauaagagagccguucaucucaugcucccacuuggaaugcagaacuuucuuuuugacucagggagccuugcugaaugacaaacacuccaaugggacugucaaagacagaagcccucacagaacauuaaugaguuguccugugggugaggcucccuccccauauaacucaagguuugagucuguugcuuggucagcaagugcuugccaugauggcaccaguugguugacaauuggaauuucuggcccagacaauggggcuguggcuguauugaaauacaauggcauaauaacagacacuaucaagaguuggaggaacaacauacugagaacucaagagucugaaugugcauguguaaauggcucuugcuuuacuguaaugacugauggaccaaguaauggucaggcaucacauaagaucuucaaaauggaaaaaggaaaagugguuaaaucagucgaauuggaugcuccuaauuaucacuaugaggaaugcuccuguuauccugaugccggcgaaaucacaugugugugcagggauaauuggcauggcucaaaucggccauggguaucuuucaaucaaaacuuggaguaucaaauaggauauauaugcagugggguuuucggagacaauccacgccccaaugauggaacagguaguugugguccgguguccucuaacggggcauaugggguaaaaggguuuucauuuaaauacggcaauggugucuggaucgggagaaccaaaagcacuaauuccaggagcggcuuugaaaugauuugggauccaaauggguggacugaaacggacaguagcuuuucagugaaacaagauaucguagcaauaacugauuggucaggauauagcgggaguuuuguccagcauccagaacugacaggacuagauugcauaagaccuuguuucuggguugaguugaucagagggcggcccaaagagagcacaauuuggacuagugggagcagcauaucuuuuugugguguaaauagugacacuguggguuggucuuggccagacggugcugaguugccauucaccauugacaaguag

SEQ ID NO: 47033 - RNA, 1350 nt, Artificial Sequence
  derived and/or modified CDS sequence (wt) from neuraminidase__InfluenzaA__ABE97688
augaauccaaaucagaagauaauaaccaucggaucaaucuguaugguaacuggaauaguuagcuuaauguuacaaguugggaacaugaucucaauaugggucagucauucaauucacacagggaaucaacaccaagcugaaccaauaagcaauacuaauuuucuuacugagaaagcuguggcuucaguaaaauuagcgggcaauucaucucuuugccccauuaacggaugggcuguauacaguaaggacaacaguauaaggaucgguuccaagggggauguguuuguuauaagagagccguucaucucaugcucccacuuggaaugcagaacuuucuuuuugacucagggagccuugcugaaugacaaacacuccaaugggacugucaaagacagaagcccucacagaacauuaaugaguuguccugugggugaggcucccuccccauauaacucaagguuugagucuguugcuuggucagcaagugcuugccaugauggcaccaguugguugacaauuggaauuucuggcccagacaauggggcuguggcuguacugaaauacaauggcauaauaacagacacuaucaagaguuggaggaacaacauacugagaacucaagagucugaaugugcauguguaaauggcucuugcuuuacuguaaugacugacggaccaaguaauggucaggcaucacauaagaucuucaaaauggaaaaaggaaaagugauuaaaucagucgaauuggaugcuccuaauuaucacuaugaggaaugcuccuguuauccugaugccggcgaaaucacaugugugugcagggauaauuggcauggcucaaaucggccauggguaucuuucaaucaaaacuuggaguaucaaauaggauauauaugcaguggaguuuucggagacaauccacgccccaaugauggaacagguaguugugguccgguguccucuaacggggcauaugggguaaaaggauuuucauuuaaauacggcaauggugucugggucgggagaaccaaaagcacuaauuccaggagcggcuuugaaaugauuugggauccaaauggguggacugaaacggacaguagcuuuucagugaaacaagauaucguagcaauaacugauuggucaggauauagcgggaguuuuguccagcauccagaacugacaggacuagauugcauaagaccuuguuucuggguugaguugaucagagggcggcccaaagagagcacaauuuggacuagugggagcagcauaucuuuuugugguguaaauagugacacuguggguuggucuuggccggacggugcugaguugccauucaucauugacaaguag

SEQ ID NO: 47034 - RNA, 1350 nt, Artificial Sequence
  derived and/or modified CDS sequence (wt) from neuraminidase__InfluenzaA__ABE97690
augaauccaaaucagaagauaauaaccaucggaucaaucuguaugguaacuggaauaguuagcuuaauguuacaaguugggaacaugaucucaauaugggucagucauucaauucacacagggaaucaacaccaagcugaaccaaucagcaauacuaauuuucuuacugagaaagcuguggcuucaguaaaauuagcgggcaauucaucucuuugccccauuaacggaugggcuguauacaguaaggacaacaguauaaggaucgguuccaagggggauguguuuguuauaagagagccguucaucucaugcucccacuuggaaugcagaacuuucuuuuugacucagggagccuugcugaaugacaaacacuccaaugggacugucaaagacagaagcccucacagaucauuaaugaguuguccugugggugaggcucccuccccauauaacucaagguuugagucuguugcuuggucagcaagugcuugccaugauggcaccaguugguugacaauuggaauuucuggcccagacaauggggcuguggcuguauugaaauacaauggcauaauaacagacacuaucaagaguuggaggaacaacauacugagaacucaagagucugaaugugcauguguaaauggcucuugcuuuacuguaaugacugacggaccaaguaauggucaggcaucacauaagaucuucaaaaugaaaaaaggaaaagugguuaaaucagucgaauuggaugcuccuaauuaucacuaugaggaaugcuccuguuauccugaugccggcgaaaucacaugugugugcagggauaauuggcauggcucaaaucggccauggguaucuuucaaucaaaauuuggaguaucaaauaggauauauaugcaguggaguuuucggagacaauccacgccccaaugauggaacagguaguugugguccgguguccucuaacggggcauaugggguaaaaggguuuucauuuaaauacggcaauggugucuggaucgggagaaccaaaagcacuaauuccaggagcggcuuugaaaugauuugggauccaaauggguggacugaaacggacaguagcuuuucagugaaacaagauaucguagcaauaacugauuggucaggauauagcgggaguuuuguccagcaucccgaacugacagggcuagauugcauaagaccuuguuucuggguugaguugaucagagggcggcccaaagagagcacaauuuggacuagugggagcagcauaucuuuuugugguguaaauagugacacuguggguuggucuuggccagacggugcugaguugccauucaccauugacaaguag

SEQ ID NO: 47035 - RNA, 1350 nt, Artificial Sequence
  derived and/or modified CDS sequence (wt) from neuraminidase__InfluenzaA__ABE97691
augaauccaaaucagaagauaauaaccaucggaucaaucuguaugguaacuggaauaguuagcuuaauguuacaaguugggaacaugaucucaauaugggucagucauucaauucacacagggaaucaacaccaagcugaaccaaucagcaauacuaauuuucuuacugagaaagcuguggcuucaguaaaauuagcgggcaauucaucucuuugccccauuaacggaugggcuguauacaguaaggacaacaguauaaggaucgguuccaagggggauguguuuguuaaaagagagccgugcaucucaugcucccacuugaagugcagaacuuucuuuuugacucagggagccuugcugaaugacaaacacuccaaugggacugucaaagacagaagcccucacagaacauuaaugaguuguccugugggugaggcucccuccccauauaacucaagguuugagucuguugcuuggucagcaagugcuugccaugauggcaccaguugguugacaauuggaauuucuggcccagacaauggggcuguggcuguauugaaauacaauggcauaauaacagacacuaucaagaguuggaggaacaacauacugagaacucaagagucugaaugugcauguguaaauggcucuugcuuuacuguaaugacugacggaccaaguaauggucaggcaucacauaagaucuucaaaauggaaaaagggaaagugguuaaaucagucgaauuggaugcuccuaauuaucacuaugaggaaugcuccuguuauccugaugccggcgaaaucacaugugugugcagggauaauuggcauggcucaaaucggccauggguaucuuucaaucaaaacuuggaguaucaaauaggauauauaugcaguggaguuuucggagacaauccacgccccaaugauggaacagguaguugugguccgguguccucuaacggggcauaugggguaaaaggguuuucauuuaaauacggcaauggugucuggaucgggagaaccaaaagcacuaauuccaggagcggcuuugaaaugauuugggauccaaauggguggacugaaacggacaguagcuuuucagugaaacaagauaucguagcaauaacugauuggucaggauauagcgggaguuuuguccagcauccagaacugacaggacuagauugcauaagaccuuguuucuggguugaguugaucagagggcggcccaaagagagcacaauuuggacuagugggagcagcauaucuuuuugugguguaaauagugacacugugggcuggucuuggccagacggugcugaguugccauucaccauugacaaguag

SEQ ID NO: 47036 - RNA, 1350 nt, Artificial Sequence
  derived and/or modified CDS sequence (wt) from neuraminidase__InfluenzaA__ABE97694
augaauccaaaucagaagauaaugaccaucggaucaaucuguaugguaacuggaauaguuagcuuaauguuacaaguugggaacaugaucucaauaugggucagucauucaauucacacagggaaucaacaccaagcugaaccaaucagcaauacuaauuuucuuacugagaaagcuguggauucaguaaaauuagcgggcaauucaucucuuugccccauuaacggaugggcuguauacaguaaggacaacaguauaaggaucgguuccaagggggauguguuuguuauaagagagccgucugucucaugcucccacuuggaaugcagaacuuucuuuuugacucagggagccuugcugaaugacaagcacuccaaugggacugucaaagacagaagcccucacagaacauuaaugaguuguccugugggugaggcucccuccccauauaacucaagguuugagucuguugcuuggucagcaagugcuugccaugauggcaccaguugguugacaauuggaauuucuggcccagacaauggggcuguggcuguacugaaauacaauggcauaauaacagacacuaucaagaguuggaggaacaacauacugagaacucaagagucugaaugugcauguguaaauggcucuugcuuuacuguaaugacugacggaccaaguaauggucaggcaucacauaagaucuucaaaauggaaaaaggaaaagugguuaaaucagucgaauuggaugcuccuaauuaucacuaugaggaaugcuccuguuauccugaugccggcgaaaucacaugugugugcagggauaauuggcauggcucaaaucggccauggguaucuuucaaucaaaacuuggaguaucaaauaggauauauaugcaguggaguuuucggagacaauccacgccccaaugauggaacagguaguugugguccgguguccucuaacggggcauaugggguaaaaggguuuucauuuaaauacggcaauggugucuggaucgggagaaccaaaagcacuaauuccaggagcggcuuugaaaugauuugggauccaaacggguggacugaaacggacaguagcuuuucagugaaacaagaugucguagcaauaacugauuggucaggauauagcgggaguuuuguccagcauccagaacugacaggacuagauugcauaagaccuuguuucuggguugaguugaucagagggcggcccaaagagagcacaauuuggacuagugggagcagcauaucuuuuugugguguaaauagugacacuguggguuggucuuggccagacggugcugaguugccauucaccauugacaaguag

SEQ ID NO: 47037 - RNA, 1350 nt, Artificial Sequence
  derived and/or modified CDS sequence (wt) from neuraminidase__InfluenzaA__ABE97696
augaauccaaaucagaagauaauaaccaucggaucaaucuguaugguaacuggaauaguuagcuuaauguuacaaguugggaacaugaucucaauaugggucagucauucaauucacacagggaaucaacaccaagcugaaccaaucagcaauacuaauuuucuuacugagaaagcuguggcuucaguaaaauuagcgggcaauucaucucuuugccccauuaacggaugggcuguauacaguaaggacaacaguauaaggaucgguuccaagggggauguguuuguuauaagagagccguucaucucaugcucccacuuggaaugcagaacuuucuuuuugacucagggagccuugcugaaugacaaacacuccaaugggagugucaaagacagaagcccucacagaacauuaaugaguuguucugugggugaggcucccuccccauauaacucaagguuugagucuguugcuuggucagcaagugcuugccaugauggcaccaguugguugacaauuggaauuucuggcccagacaauggggcuguggcuguauugaaauacaauggcauaauaacagacacuaucaagaguuggaggaacaacauacugagaacucaagagucugaaugugcauguguaaauggcucuugcuuuacuguaaugacugauggaccaaguaauggucaggcaucacauaagaucuucaaaauggaaaaagggaaagugguuaaaucagucgaauuggaugcuccuaauuaucacuaugaggaaugcuccuguuauccugaugccggcgaaaucacaugugugugcagggauaauuggcauggcucaaaucggccauggguaucuuucaaucaaaacuuggaguaucaaauaggauauauaugcagugggguuuucggagacaauccacgccccaaugauggaacagguaguugugguccgguguccucuaacggggcauaugggguaaaaggguuuucauuuaaauacggcaauggugucuggaucgggagaaccaaaagcacuaauuccaggagcggcuuugaaaugauuugggauccaaauggguggacugaaacggacaguagcuuuucagugaaacaagauaucguagcaauaacugauuggucaggauauagcgggaguuuuguccagcauccagaacugacaggacuagauugcauaagaccuuguuucuggguugaguugaucagagggcggcccaaagagagcacaauuuggacuagugggagcagcauaucuuuuugugguguaaauagugacacuguggguuggucuuggccagacggugcugaguugccauucaccauugacaaguag

SEQ ID NO: 47038 - RNA, 1350 nt, Artificial Sequence
  derived and/or modified CDS sequence (wt) from neuraminidase__InfluenzaA__ABE97697
augaauccaaaucagaagauaauaaccaucggaucaaucuguaugguaacuggaauaguuagcuuaauguuacaaguugggaacaugaucucaauaugggucagucauucaauucacacagggaaucaacaccaagcugaaccaaucagcaauacuaauuuucuuaaugagaaagcuguggcuucaguaaaauuagcgggcaauucaucucuuugccccauuaacggaugggcuguauacaguaaggacaacaguauaaggaucgguuccaagggggauguguuuguuauaagagagccguucaucuccugcucccacuuggaaugcagaacuuucuuuuugacucagggagccuugcugaaugacaaacacuccaaugggacugucaaagacagaagcccucacagaacauuaaugaguuguccugugggugaggcucccuccccauauaacucaagguuugagucuguugcuuggucagcaagugcuugccaugauggcaccaguugguugacaauuggaauuucuggcccagacaauggggcuguggcuguauugaaauacaauggcauuauaacagacacuaucaagaguuggaggaacaacauacugagaacucaagaaucugaaugugcauguguaaauggcucuugcuuuacuguaaugacugacggaccaaguaauggucaggcaucacauaagaucuucaaaauggaaaaagggaaagugguuaaaucaguugaauuggaugcuccuaauuaucacuaugaggaaugcuccuguuauccugaugccggcgaaaucacaugugugugcagggauaauuggcauggcucaaaucggccauggguaucuuucaaucaaaacuuggaguaucaaauaggauauauaugcaguggaguuuucggagacaauccacgccccaaugaugaaacagguaguugugguccgguguccucuaacggggcauaugggguaaaaggguuuucauuuaaauacggcaauggugucuggaucgggagaaccaaaagcacuaauuccaggagcggcuuugaaaugauuugggauccaaauggguggacugaaacggacaguagcuuuucagugaaacaagacaucguagcaauaacugauuggucaggauauagcgggaguuuuguccagcauccagaacugacaggacuagauugcauaagaccuuguuucuggguugaguugaucagagggcggcccaaagagagcaccauuuggacuagugggagcagcauaucuuuuugugguguaaauagugacacuguggguuggucuuggccagacggugcugaguugccguucaccauugacaaguag

SEQ ID NO: 47039 - RNA, 1350 nt, Artificial Sequence
  derived and/or modified CDS sequence (wt) from neuraminidase__InfluenzaA__ABE97702
augaauccaaaucagaagauaauaaccaucggaucaaucuguaugguaacuggaauaguuagcuuaauguuacaaguugggaacaugaucucaauaugggucagucauucaauucacacagggaaucaacaccaagcugaaccaaucagcaauacuaauuuucuuacugagaaagcuguggcuucaguaaaauuagcgggcaauucaucucuuugccccauuaacggaugggcuguauacaguaaggacaacaguauaaggaucgguuccaagggggauguguuuguuauaagagagccguucaucucaugcucccacuuggaaugcagaacuuucuuuuugacucagggagccuugcugaaugacaaacacuccaaugggacugucaaagacagaagcccucacagaacauuaaugaguuguccugugggugaggcucccuccccauauaacucaagguuugagucuguugcuuggucagcaagugcuugccaugauggcaccaguugguugacaauuggaauuucuggcccagacaauggggcuguggcuguauugaaauacaauggcauaauaacagacacuaucaagaguuggaggaacaacauacugagaacucaagagucugaaugugcauguguaaauggcucuugcuuuacuguaaugacugauggaccaaguaauggucaggcaucacauaagaucuucaaaauggaaaaagggaaagugguuaaaucagucgaauuggaugcuccuuauuaucacuaugaggaaugcuccuguuauccugaugccggcgaaaucacaugugugugcagggauaauuggcauggcucaaaucggccauggguaucuuucaaucaaaacuuggaguaucaaauaggauauauaugcagugggguuuucggagacaauccacgccccaaugauggaacagguaguugugguccgguguccucuaacggggcauaugggguaaaaggguuuucauuuaaauacggcaauggugucuggaucgggagaaccaaaagcacuaauuccaggagcggcuuugaaaugauuugggauccaaauggguggacugaaacggacaguagcuuuucagugaaacaagauaucguaucaauaacugauuggucaggauauagcgggaguuuuguccagcauccagaacugacaggacuagauugcauaagaccuuguuucuggguugaguugaucagagggcggcccaaagagagcacaauuuggacuagugggagcagcauaucuuuuugugguguaaauagugacacuguggguuggucuuggccagacggugcugaguugccauucaccacugacaaguag

SEQ ID NO: 47040 - RNA, 1350 nt, Artificial Sequence
  derived and/or modified CDS sequence (wt) from neuraminidase__InfluenzaA__ABE97703
augaauccaaaucagaagauaauaaccaucggaucaaucuguaugguaacuggaauaguuagcuuaauguuacaaguugggaacaugaucucaauaugggucagucauucaauucacacagggaaucaacaccaagcugaaccaaucagcaauacuaauuuucuuacugagaaagcuguggcuucaguaaaauuagcgggcaauucaucucuuugccccauuaacggaugggcuguauacaguaaggacaacaguauaaggaucgguuccaagggggauguguuuguuauaagagagccguucaucucaugcucccacuuggaaugcagaacuuucuuuuugacucagggagccuugcugaaugacaaacacuccaaugggacugucaaagacagaagcccucacagaacauuaaugaguuguccugugggugaggcucccuccccauauaacucaagguuugagucuguugcuuggucagcaagugcuugccaugauggcaccaguugguugacaauuggaauuucuggcccagacaauggggcuguggcuguauugaaauacaauggcauaauaacagacacuaucaagaguuggaggaacaacauacugagaacucaagagucugaaugugcauguguaaauggcucuugcuuuacuguaaugacugacggaccaaguaauggucaggcaucacauaagaucuucaaaauggaaaaagggaaagugguuaaaucagucgaauuggaugcuccuaauuaucacuaugaggaaugcuccuguuauccugaugccggcgaaaucacaugugugugcagggauaauuggcauggcucaaaucggccauggguaucuuucaaucaaaacuuggaguaucaaauaggauauauaugcaguggaguuuucggagacaauccacgccccaaugauggaacagguaguugugguccgguguccucuaacggggcauaugggguaaaaggguuuucauuuaaauacggcaauggugucuggaucgggagaaccaaaagcacuaauuccaggagcggcuuugaaaugauuugggauccaaauggguggacugaaacggacaguagcuuuucagugaaacaagauaucguagcaauaacugauuggucaggauauagcgggaguuuuguccagcauccagaacugacaggacuagauugcauaagaccuuguuucuggguugaguugaucagagggcggcccaaagagagcacaauuuggacuagugggagcagcauaucuuuuugugguguaaauagugacacugugggcuggucuuggccagacggugcugaguugccauucaccauugacaaguag

SEQ ID NO: 47041 - RNA, 1350 nt, Artificial Sequence
  derived and/or modified CDS sequence (wt) from neuraminidase__InfluenzaA__ABE97705
augaauccaaaucagaagauaauaaccaucggaucaaucuguaugguaacuggaauaguuagcuuaauguuacaaguugggaacaugaucucaauaugggucagucauucaauucacacagggaaucaacaccaagcugaaccaaucagcaauacuaauuuucuuacugagaaagcuguggcuucaguaaaauuagcgggcaauucaucucuuugccccauuaacggaugggcuguauacaguaaggacaacaguauaaggaucgguuccaagggggauguguuuguuauaagagagccguucaucucaugcucccacuuggaaugcagaacuuucuuuuugacucagggagccuugcugaaugacaaacacuccaaugggacugucaaagacagaagcccucacagaacauuaaugaguuguccugugggugaggcucccuccccauauaacucaagguuugagucuguugcuuggucagcaagugcuugccaugauggcaccaguugguugacaauuggaauuucuggcccagacaauggggcuguggcuguauugaaauacaauggcauaauaacagacacuaucaagaguuggaggaacaacauacugagaacucaagagucugaaugugcauguguaaauggcucuugcuuuacuguaaugacugauggaccaaguaauggucaggcaucacauaagaucuucaaaauggaaaaagggaaagugguuaaaucagucgaauuggaugcuccuaauuaucacuaugaggaaugcuccuguuauccugaugccggcgaaaucacaugugugugcagggauaauuggcauggcucaaaucggccauggguaucuuucaaucaaaacuuggaguaucaaauaggauauauaugcagugggguuuucggagacaauccacgccccaaugauggaacagguaguugugguccgguguccucuaacggggcauaugggguaaaaggguucucauuuaaauacggcaauggugucuggaucgggagaaccaaaagcacuaauuccaggagcggcuuugaaaugauuugggauccaaauggguggacugaaacggacaguagcuuuucagugaaacaagauaucguagcaauaacugauuggucaggauauagcgggaguuuuguccagcauccagaacugacaggacuagauugcauaagaccuuguuucuggguugaguugaucagagggcggcccaaagagagcacaauuuggacuagugggagcagcauaucuuuuugugguguaaauagugacacuguggguuggucuuggccagacggugcugaguugccauucaccauugacaaguag

SEQ ID NO: 47042 - RNA, 1350 nt, Artificial Sequence
  derived and/or modified CDS sequence (wt) from neuraminidase__InfluenzaA__ABE97706
augaauccaaaucagaagauaauaaccaucggaucaaucuguaugguaacuggaauaguuagcuuaauguuacaaguugggaacaugaucucacuaugggucagucauucaauucacacagggaaucaacaccaagcugaaccaaucagcaauacuaauuuucuuacugagagagcuguggcuucaguaaaauuagcgggcaauucaucucuuugccccauuaacggaugggcuguauacaguaaggacaacaguauaaggaucgguuccaagggggauguguuuguuauaagagagccguucaucucaugcucccacuuggaaugcagaacuuucuuuuugacucagggagccuugcugaaugacaaacacuccaaugggacugucaaagacagaagcccucacagaacauuaaugaguuguccugugggugaggcucccuccccauauaacucaagguuugagucuguugcuuggucagcaagugcuugccaugauggcaccaguugguugacaauuggaauuucuggcccagacaauggggcuguggcuguauugaaauacaauggcauaauaacagacacuaucaagaguuggaggaacaacauacugagaacucaagagucugaaugugcauguguaaauggcucuugcuuuacuguaaugacugacggaccaaguaauggccaggcaucacauaagaucuucaaaauggaaaaagggaaagugguuaaaucagucgaauuggaugcuccuaauuaucacuaugaggaaugcuccuguuauccugaugccggcgaaaucacaugugugugcagggauaauuggcauggcucaaaucggccauggguaucuuucaaucaaaacuuggaguaucaaauaggauauauaugcaguggaguuuucggagacaauccacgccccaaugauggaacagguaguugugguccgguguccuccaacggggcauaugggguaaaaggguuuucauuuaaauacggcaauggugucuggaucgggagaaccaaaagcacuaguuccaggagcggcuuugaaaugauuugggauccaaauggguggacugaaacggacaguagcuuuucagugaaacaagauaucguagcaauaacugauuggucaggauauagcgggaguuuuguccagcauccagaacugacagggcuagauugcauaagaccuugcuucuggguugaguugaucagagggcggcccaaagagagcacaauuugggcuagugggagcagcauaucuuuuugugguguaaauagugacacuguggguuggucuuggccagacggugcugaguugccauucaccauugacaaguag

SEQ ID NO: 47043 - RNA, 1350 nt, Artificial Sequence
  derived and/or modified CDS sequence (wt) from neuraminidase__InfluenzaA__ABE97707
augaauccaaaucagaagauaauaaccaucggaucaaucuguaugguaacuggaauaguuagcuuaauguuacaaguugggaacaugaucucaauaugggucagucauucaauucacacagggaaucaacaccaagcugaaccaaucagcaauacuaauuuucuuacugagaaagcuguggcuucaguaaaauuagcgggcaauucaucucuuugccccauuaaaggaugggcuguauacaguaaggacaacaguauaaggaucgguuccaagggggauguguuuguuauaagagagccguucaucucaugcucccacuuggaaugcagaacuuucuuuuugacucagggagccuugcugaaugacaaacacuccaaugggacugucaaagacagaagcccucacagaacauuaaugaguuguccugugggugaggcucccuccccauauaacucaagguuugagucuguugcuuggucagcaagugcuugccaugauggcaccaguugguugacaauuggaauuucuggcccagacaauggggcuguggcuguauugaaauacaauggcauaauaacagacacuaucaagaguuggaggaacaacauacugagaacucaggagucugaaugugcauguguaaauggcucuugcuuuacuguaaugacugacggaccaaguaauggucaggcaucacauaagaucuucaaaauggaaaaagggaaagugguuaaaucagucgaauuggaugcuccuaauuaucacuaugaggaaugcuccuguuauccugaugccggcgaaaucacaugugugugcagggauaauuggcauggcucaaaucggccauggguaucuuucaaucaaaacuuggaguaucaaauaggauauauaugcaguggaguuuucggagacaauccacgccccaaugauggaacagguaguugugguccgguguccucuaacggggcauaugggguaaaaggguuuucauuuaaauacggcaauggugucuggaucgggagaaccaaaagcacuaauuccaggagcggcuuugaaaugauuugggauccaaauggguggacugaaacggacaguagcuuuucagugaaacaagauaucguagcaauaacugauuggucaggauauagcgggaguuuuguccagcauccagaacugacaggacuagauugcauaagaccuuguuucuggguugaguugaucagagggcggcccaaagagagcacaauuuggacuagugggagcagcauaucuuuuugugguguaaauagugacacuguggguuggucuuggccagacggugcugaguugccauucaccauugacaaguag

SEQ ID NO: 47044 - RNA, 1350 nt, Artificial Sequence
  derived and/or modified CDS sequence (wt) from neuraminidase__InfluenzaA__ABE97708
augaauccaaaucagaagauaauaaccaucggaucaaucuguaugguaacuggaauaguuagcuuaauguuacaaguugggaacaugaucucaauaugggucagucauucaauucacacagggaaucaacaccaagcugaaccaaucagcaauacuaauuuucuuacugagaaagcuguggcuucaguaaaauuagcgggcaauucaucucuuugccccauuaacggaugggcuguauacaguaaggacaacaguauaaggaucgguuccaagggggauguguuuguuauaagagagccguucaucucaugcucccacuuggaaugcagaacuuucuuuuugacucacggagccuugcugaaugacaaacacuccaaugggacugucaaagacagaagcccucacagaacauuaaugaguuguccugugggugaggcucccuccccauauaacucaagguuugagucuguugcuuggucagcaagugcuugccaugauggcaccaguugguugacaauuggaauuucuggcccagacaauggggcuguggcuguauugaaauacaauggcauaauaacagacacuaucaagaguuggaggaacaacauacugagaacucaagagucugaaugugcauguguaaauggcucuugcuuuacuguaaugacugacggaccaaguaauggucaggcaucacauaagaucuucaaaaugaaaaaagggaaagugguuaaaucagucgaauuggaugcuccuaauuaucacuaugaggaaugcuccuguuauccugaugccggcgaaaucacaugugugugcagggauaauuggcauggcucaaaucggccauggguaucuuucaaucaaaacuuggaguaucaaauaggauauauaugcaguggaguuuucggggacaauccacgccccaaugauggaacagguaguugugguccgguguccucuaacggggcauaugggguaaaaggguuuucauuuaaauacggcaauggugucuggaucgggagaaccaaaagcacuaauuccaggagcggcuuugaaaugauuugggauccaaauggguggacugaaacggacaguagcuuuucagugaaacaagauaucguagcaauaacugauuggucaggauauagcgggaguuuuguccagcaucccgaacugacagggcuagauugcauaagaccuuguuucuggguugaguugaucagagggcggcccaaagagagcacaauuuggacuagugggagcagcauaucuuuuugugguguaaauagugacacuguggguuggucuuggccagacggugcugaguugccauucaccauugacaaguag

SEQ ID NO: 47045 - RNA, 1350 nt, Artificial Sequence
  derived and/or modified CDS sequence (wt) from neuraminidase__InfluenzaA__ABE97710
augaauccaaaucagaagauaauaaccaucggaucaaucuguaugguaacuggaauaguuagcuuaauguuacaaguugggaacaugaucucaauaugggucagucauucaauucacacagggaaucaacaccaagcugaaccaaucagcaauacuaauuuucuuacugagaaagcuguggcuucaguaaaauuagcgggcaauucaucucuuugccccauuaacggaugggcuguauacaguaaggacaacaguauaaggaucgguuccaagggggauguguuuguuauaagagagccguucaucucaugcucccacuuggaaugcagaacuuucuuuuugacucagggagccuugcugaaugacaaacacuccaaugggacugucaaagacagaagcccucacagaacauuaaugaguuguccugugggugaggcucccuccccauauaacucaagguuugagucuguugcuuggucagcaagugcuugccaugauggcaccaguugguugacaauuggaauuucuggcccagacaauggggcuguggcuguauugaaauacaauggcauaauaacagacacuaucaagaguuggaggaacaacauacugagaacucaagagucugaaugugcauguguaaauggcucuugcuuuacuguaaugacugauggaccaaguaauggucaggcaucacauaagaucuucaaaauggaaaaagggaaagugguuaaaucagucgaauugaaugcuccuaauuaucacuaugaggaaugcuccuguuauccugaugccggcgaaaucacaugugugugcagggauaauuggcauggcucaaaucggccauggguaucuuucaaucaaaacuuggaguaucaaauaggauauauaugcagugggguuuucggagacaauccacgccccaaugauggaacagguaguugugguccgguguccucuaacggggcauaugggguaaaaggguuuucauuuaaauacggcaauggugucuggaucgggagaaccaaaagcacuaauuccaggagcggcuuugaaaugauuugggauccaaauggguggacugaaacggacaguagcuuuucauugaaacaagauaucguagcaauaacugauuggucaggauauagcgggaguuuuguccagcauccagaacugacaggacuagauugcauaagaccuuguuucuggguugaguugaucagagggcggcccaaagagagcacaauuuggacuagugggagcagcauaucuuuuugugguguaaauagugacacuguggguuggucuuggccagacggugcugaguugccauucaccauugacaaguag

SEQ ID NO: 47046 - RNA, 1350 nt, Artificial Sequence
  derived and/or modified CDS sequence (wt) from neuraminidase__InfluenzaA__ABE97711
augaauccaaaucagaagauaauaaccaucggaucaaucuguaugguaacuggaauaguuagcuuaauguuacaaguugggaacaugaucucaauaugggucagucauucaauucacacagggaaucaacaccaagcugaaccaaucagcaauacuaauuuucuuacugagaaagcuguggcuucaguaaaauuagcgggcaauucaucucuuugccccauuaacggaugggcuguauacaguaaggacaacaguauaaggauugguuccaagggggauguguuuguuauaagagagccguucaucucaugcucccacuuggaaugcagaacuuucuuuuugacucagggagccuugcugaaugacaaacacuccaaugggacugucaaagacagaagcccucacagaacauuaaugaguuguccugugggugaggcucccuccccauauaacucaagguuugagucuguugcuuggucagcaagugcuugccaugauggcaccaguugguugacaauuggaauuucuggcccagacaauggggcuguggcuguauugaaauacaauggcauaauaacagacacuaucaagaguuggaggaacaacauacugagaacucaagagucugaaugugcauguguaaauggcucuugcuuuacuguaaugacugacggaccaagugauggucaggcaucacauaagaucuucaaaauggaaaaagggaaagugguuaaaucagucgaauuggaugcuccuaauuaucacuaugaggaaugcuccuguuauccugaugccggcgaaaucacaugugugugcagggauaauuggcauggcucaaaucggccauggguaucuuucaaucaaaacuuggaguaucaaauaggauauauaugcaguggaguuuucggagacaauccacgccccaaugauggaacagguaguugugguccgguguccucuaacggggcauaugggguaaaaggguuuucauuuaaauacggcaauggugucuggaucgggagaaccaaaagcacuaauuccaggagcggcuuugaaaugguuugggauccaaauggguggacugaaacggacaguagcuuuucagugaaacaagauaucguggcaauaacugauuggucaggauauagcgggaguuuuguccagcauccagaacugacaggacuagauugcauaagaccuuguuucuggguugaguugaucagagggcggcccaaagagagcacaauuuggacuagugggagcagcauaucuuuuugugguguaaauagugacacuguggguuggucuuggccagacggugcugaguugccauucaccauugacaaguag

SEQ ID NO: 47047 - RNA, 1350 nt, Artificial Sequence
  derived and/or modified CDS sequence (wt) from neuraminidase__InfluenzaA__ABE97712
augaauccaaaucagaagauaauaaccaucggaucaaucuguaugguaacuggaauaguuagcuuaauguuacaaguugggaacaugaucucaauaugggucagucauucaauucacacagggaaucaacaccaagcugaaccaaucagcaauacuaauuuucuuacugagaaagcuguggcuucaguaaaauuagcgggcaauucaucucuuugccccauuaacggaugggcuguauacaguaaggacaacaguauaaggaucgguuccaagggggauguguuuguuauaagagagccguucaucucaugcucccacuuggaaugcagaacuuucuuuuugacucagggagccuugcugaaugacaaacacuccaaugggacugucaaagacagaagcccucacagaacauuaaugaguuguccugugggugaggcucccuccccauauaacucaagguuugagucuguugcuuggucagcaagugcuugccaugauggcaccaguugguugacaauuggaauuucuggcccagacaauggggcuguggcuguauugaaauacaauggcauaauaacagacacuaucaagaguuggaggaacaacauacugagaacucaagagucugaaugugcauguguaaauggcucuugcuuuacuguaaugacugacggaccaaguaauggucaggcaucacauaagaucuucaaaauggaaaaagggaaagugguuaaaucagucgaauuggaugcuccuaauuaucacuaugaggaaugcuccuguuauccugaugccggcgaaaucacaugugugugcagggauaauuggcauggcucaaaucggccauggguaucuuucaaucaaaacuuggaguaucaaauaggauauauaugcaguggaguuuucggagacaauccacgccccaaugauggaacagguaguugugguccgguguccucuaacggggcauaugggguaaaaggguuuucauuuaaauacggcaauggugucuggaucgggagaaccaaaagcacuaauuccaggagcggcuuugaaaugauuugggauccaaauggguggacugaaacggacaguagcuuuucagugaaacaagauaucguagcaauaacugauuggucaggauauagcgggaguuuuguccagcauccagaacugacaggacuagauugcauaagaccuuguuucuggguugaguugaucagagggcggcccaaagagagcacaauuuggacuagugggagcagcauaucuuuuugugguguaaauagugacacuguggguuggucuuggccagacggugcugaguugccauucaccauugacaaguag

SEQ ID NO: 47048 - RNA, 1350 nt, Artificial Sequence; identical to SEQ ID NO: 47047
  derived and/or modified CDS sequence (wt) from neuraminidase__InfluenzaA__ABE97713

SEQ ID NO: 47049 - RNA, 1350 nt, Artificial Sequence
  derived and/or modified CDS sequence (wt) from neuraminidase__InfluenzaA__ABE97715
augaauccaaaucagaagauaauaaccaucggaucaaucuguaugguaacuggaauaguuagcuuaauguuacaaguugggaacaugaucucaauaugggucagucauucaauucacacagggaaucaacaccaagcugaaccaaucagcaauacuaauuuucuuacugagaaagcuguggcuucaguaaaauuagcgggcaauucaucucuuugccccauuaacggaugggcuguauacaguaaggacaacaguauaaggaucgguuccaagggggauguguuuguuauaagagagccguucaucucaugcucccacuuggaaugcagaacuuucuuuuugacucagggagccuugcugaaugacaaacacuccaaugggacugucaaagacagaagcccucacagaacauuaaugaguuguccugugggugaggcucccuccccauauaacucaagguuugagucuguugcuuggucagcaagugcuugccaugauggcaccaguugguugacaauuggaauuucuggcccagacaauggggcuguggcuguauugaaauacaauggcauaauaacagacacuaucaagaguuggaggaacaacauacugagaacucaagagucugaaugugcauguguaaauggcucuugcuuuacuguaaugacugacggaccaaguaauggucaggcaucacauaagaucuucaaaauggaaaaagggaaagugguuaaaucagucgaauuggaugcuccuaauuaucacuaugaggaaugcuccuguuauccugaugccggcgaaaucacaugugugugcagggauaauuggcauggcucaaaucggccauggguaucuuucaaucaaaacuuggaguaucaaauaggauauauaugcaguggaguuuucggagacaauccacgccccaaugauggaacagguaguugugguccgguguccucuaacggggcauaugggguaaaaggguuuucauuuaaauacggcaauggugucuggaucgggagaaccaaaagcacuaauuccaggagcggcuuugaaaugauuugggauccaaauggguggacugaaacggacaguagcuuuucagugaaacaagauaucguagcaauaacugauuggucaggauauagcgggaguuuuguccagcauccagaacugacaggacuagauugcauaagaccuugcuucuggguugaguugaucagagggcggcccaaagagagcacaauuuggacuagugggagcagcauaucuuuuugugguguaaauagugacacuguggguuggucuuggccagacggugcugaguugccauucaccauugacaaguag

SEQ ID NO: 47050 - RNA, 1350 nt, Artificial Sequence
  derived and/or modified CDS sequence (wt) from neuraminidase__InfluenzaA__ABE97717
augaauccaaaucagaagauaauaaccaucggaucaaucuguaugguaacuggaauaguuaacuuaauguuacaaguugggaacaugaucucaauaugggucagucauucaauucacacagggaaucaacaccaagcugaaccaaucagcaauacuaauuuucuuacugagaaagcuguggcuucaguaaaauuagcgggcaauucaucucuuugccccauuaacggaugggcuguauacaguaaggacaacaguauaaggaucgguuccaagggggauguguuuguuauaagagagccguucaucucaugcucccacuuggaaugcagaacuuucuuuuugacucagggagccuugcugaaugacaaacacuccaaugggacugucaaagacagaagcccucacagaacauuaaugaguuguccugugggugaggcucccuccccauauaacucaagguuugagucuguugcuuggucagcaagugcuugccaugauggcaccaguugguugacaauuggaauuucuggcccagacaauggggcuguggcuguauugaaauacaauggcauaauaacagacacuaucaagaguuggaggaacaacauacugagaacucaagagucugaaugugcauguguaaauggcucuugcuuuacuguaaugacugacggaccaaguaauggucaggcaucacauaagaucuucaaaauggaaaaagggaaagugguuaaaucagucgaauuggaugcuccuaauuaucacuaugaggaaugcuccuguuauccugaugccggcgaaaucacaugugugugcagggauaauuggcauggcucaaaucggccauggguaucuuucaaucaaaacuuggaguaucaaauaggauauauaugcaguggaguuuucggagacaauccacgccccaaugauggaacagguaguugugguccggugcccucuaacggggcauaugggguaaaaggguuuucauuuaaauacggcaauggugucuggaucgggagaaccaaaagcacuaauuccaggagcggcuuugaaaugauuugggauccaaauggguggacugaaacggacaguagcuuuucagugaaacaagauaucguagcaauaacugauuggucaggauauagcgggaguuuuguccagcauccagaacugacaggacuagauugcauaagaccuuguuucuggguugaguugaucagagggcggcccaaagagagcacaauuuggacuagugggagcagcauaucuuuuugugguguaaauagugacacuguggguuggucuuggccagacggugcugaguugccauucaccauugacaaguag

SEQ ID NO: 47051 - RNA, 1350 nt, Artificial Sequence
  derived and/or modified CDS sequence (wt) from neuraminidase__InfluenzaA__ABE97718
augaauccaaaucagaagauaauaaccaucggaucaaucuguaugguaacuggaauaguuagcuuaauguuacaaguugggaacaugaucucaauaugggucagucauucaauucacacagggaaucaacaccaagcugaaccaaucagcaauacuaauuuucuuacugagaaagcuguggcuucaguaaaauuagcgggcaauucaucucuuugccccauuaacggaugggcuguauacaguaaggacaacaguauaaggaucgguuccaagggggauguguuuguuauaagagagccguucaucucaugcucccacuuggaaugcagaacuuucuuuuugacucagggagccuugcugaaugacaagcacuccaaugggacugucaaagacagaagcccucacagaacauuaaugaguuguccugugggugaggcucccuccccauauaacucaagguuugagucuguugcuuggucagcaagugcuugccaugauggcaccaguugguugacaauuggaauuucuggcccagacaauggggcuguggcuguauugaaauacaauggcauaauaacagacacuaucaagaguuggaggaacaacauacugagaacucaagagucugaaugugcauguguaaauggcucuugcuuuacuguaaugacugacggaccaaguaauggucaggcaucacauaagaucuucaaaauggaaaaagggaaagugguuaaaucggucgaauuggaugcuccuaauuaucacuaugaggaaugcuccuguuauccugaugccggcgaaaucacaugugugugcagggauaauuggcauggcucaaaucggccauggguaucuuucaaucaaaacuuggaguaucaaauaggauauauaugcaguggaguuuucggggacaauccacgccccaaugauggaacagguaguugugguccgguguccucuaacggggcauaugggguaaaaggguuuucauuuaaauacggcaauggugucuggaucgggagaaccaaaagcacuaauuccaggagcggcuuugaaaugauuugggauccaaauggguggacugaaacggacaguagcuuuucagugaaacaagauaucguagcaauaacugauuggucaggauauagcgggaguuuuguucagcauccagaacugacaggacuagauugcauaagaccuuguuucuggguugaguugaucagagggcgacccaaagagagcacaauuuggacuagugggagcagcauaucuuuuugugguguagauagugacacuguggguuggucuuggccagacggugcugaguugccauucaccauugacaaguag

SEQ ID NO: 47052 - RNA, 1350 nt, Artificial Sequence
  derived and/or modified CDS sequence (wt) from neuraminidase__InfluenzaA__ABE97719
augaauccaaaucagaagauaauaaccaucggaucaaucuguaugguaacuggaauaguuagcuuaauguuacaaguugggaacaugaucucaauaugggucagucauucaauucacacagggaaucaacaccaagcugaaccaaucagcaauacuaauuuucuuacugagaaagcuguggcuucaguaaaauuagcgggcaauucaucucuuugccccauuaacggaugggcuguauacaguaaggacaacaguauaaggaucgguuccaagggggauguguuuguuauaagagagccguucaucucaugcucccacuuggaaugcagaacuuucuuuuugacucagggagccuugcugaaugacaaacacuccaaugggacugucaaagacagaagcccucacagaacauuaaugaguuguccugugggugaggcucccuccccauauaacucaagguuugagucuguugcuuggucagcaagugcuugccaugauggcaccaguugguugacaauuggaauuucuggcccagacaauggggcuguggcuguauugaaauacaauggcauaauaacagacacuaucaagaguuggaggaacaacauacugagaacucaagagucugaaugugcauguguaaauggcucuugcuuuacuguaaugacugacggaccaaguaauggucaggcaucacauaagaucuucaaaaugaaaaaaggaaaagugguuaaaucagucgaauuggaugcuccuaauuaucacuaugaggaaugcuccuguuauccugaugccggcgaaaucacaugugugugcagggauaauuggcauggcucaaaucggccauggguaucuuucaaucaaaauuuggaguaucaaauaggauauauaugcaguggaguuuucggagacaauccacgccccaaugauggaacagguaguugugguccgguguccucuaacggggcauaugggguaaaaggguuuucauuuaaauacggcaauggugucuggaucgggagaaccaaaagcacuaauuccaggagcggcuuugaaaugauuugggauccaaauggguggacugaaacggacaguagcuuuucagugaaacaagauaucguagcaauaacugauuggucaggauauagcgggaguuuuguccagcaucccgaacugacagggcuagauugcauaagaccuuguuucuggguugaguugaucagagggcggcccaaagagagcacaauuuggacuagugggagcagcauaucuuuuugugguguaaauagugacacuguggguuggucuuggccagacggugcugaguugccauucaccauugacaaguag

SEQ ID NO: 47053 - RNA, 1350 nt, Artificial Sequence
  derived and/or modified CDS sequence (wt) from neuraminidase__InfluenzaA__ABE97720
augaauccaaaucagaagauaauaaccaucggaucaaucuguaugguaacuggaauaguuagcuuaauguuacaaguugggaacaugaucucaauaugggucagucauucaauucacacagggaaucaacaccaagcugaaccaaucagcaaugcuaauuuucuuacugagaaagcuguggcuucaguaaaauuagcgggcaauucaucucuuugccccauuaacggaugggcuguauacaguaaggacaacaguauaaggaucgguuccaagggggauguguuuguuauaagagagccguucaucucaugcucccacuuggaaugcagaacuuucuuuuugacucagggagccuugcugaaugacaaacacuccaaugggacugucaaagacagaagcccucacagaacacuaaugaguuguccugugggugaggcucccuccccauauaacucaagguuugagucuguugcuuggucagcaagugcuugccaugauggcaccaguugguugacaauuggaauuucuggcccagacaauggggcuguagcuguauugaaauacaauggcauaauaacagacacuaucaagaguuggaggaacaacauacugagaacucaagagucugaaugugcauguguaaauggcucuugcuuuacuguaaugacugacggaccaaguaauggucaggcaucacauaagaucuucaaaauggaaaaagggaaagugguuaaaucagucgaauuggaugcuccuaauuaucacuaugaggaaugcuccuguuauccugaugccggcgaaaucacaugugugugcagggauaauuggcaugguucaaaucggccguggguaucuuucaaucaaaacuuggaguaucaaauaggauauauaugcaguggaguuuucggagacacuccacgccccaaugauggaacagguaguugugguccgguguccucuaacggggcauaugggguaaaaggguuuucauuuaaauacggcaauggugucuggaucgggagaaccaaaagcacuaauuccaggagcggcuuugaaaugauuugggauccaaauggguggacugaaacggacaguagcuuuucagugaaacaagauaucguagcaauaacugauuggucaggauauagcgggaguuuuguccagcauccagaacugacaggacuagauugcauaagaccuuguuucuggguugaguugaucagagggcggcccaaagagagcacaauuuggacuagugggagcagcauaucuuuuugugguguaaauagugacacuguggguuggucuuggccagacggugcugaguugccauucaccauugacaaguag

SEQ ID NO: 47054 - RNA, 1410 nt, Artificial Sequence
  derived and/or modified CDS sequence (wt) from neuraminidase__InfluenzaA__ABF47553
augaauccaaaucaaaagauaauaacaauuggcucuguuucucucaccauugccacaauaugcuuccuuaugcaaauugccauucugguaacuacuguaacauugcauuucaagcaauaugagugcagcucccccccaaacaaccaaguaaugccgugugaaccaacaauaauagaaagaaacauaacagagauaguguauuugacuaacaccaccauagagaaagagauaugccccaaacuaguagaauacagaaauuggucaaagccgcaauguaaaauuacaggauuugcaccuuuuucuaaggacaauucaauucggcuuuccgcugguggagacauuugggugacaagagaaccuuaugugucaugcgauccuggcaaguguuaucaauuugcacuugggcagggaaccacacuaaacaacaggcauucaaaugacacaguacaugauaggaccccuuaucgaacccucuugaugaaugaguuggguguuccauuucauuugggaaccaagcaggugugcauagcaugguccagcucaaguugucacgauggaaaagcaugguugcauguuugugucacugggcaugauaaaaaugcaacugcuagcuucauuuacgaugggaggcuuguagacaguauugguucaugguccaaaaauauccucaggacccaggagucggaaugcguuuguaucaaugggacuuguacaguaguaaugacugauggaagugcuucagaaagagcugauacuaaaauacuauucauugaagaggggaaaaucguucauauuagcccauugucaggaagugcucagcauguagaggagugcuccuguuauccucgauauccuggugucagaugugucugcagagacaacuggaaaggcuccaauaggcccaucguagauauaaaugugaaagauuauagcauuguuuccaguuaugugugcucagggcuuguuggagacacacccagaaaaaacgacagauccagcaguagcuauugccggaauccuaacaaugagaaagggagucauggagugaaaggcugggccuuugacgauggaaaugacguguggaugggaagaacgaucggcgaggaguuacgcucagguuaugaaaccuucaaagucauuggagguugguccacaccuaacuccaaauugcagauaaauaggcaagucauaguugacagcgguaauagguccgguuauucugguauuuucucuguugagggcaaaagcugcaucaaucggugcuuuuauguggaguugauaaggggaagggaacaggaaacuagagucugguggaccucaaacaguauuguuguguuuuguggcaccucagguacauauggaacaggcucauggccugacggggcggacaucaaucucaugccuauauaa

SEQ ID NO: 47055 - RNA, 1413 nt, Artificial Sequence; identical to SEQ ID NO: 46897
  derived and/or modified CDS sequence (wt) from neuraminidase__InfluenzaA__ABF47564

SEQ ID NO: 47056 - RNA, 1413 nt, Artificial Sequence
  derived and/or modified CDS sequence (wt) from neuraminidase__InfluenzaA__ABF47575
augaauccaaaucaaaaaauaauaaccauuggaucaaucaguauagcaaucggaauaauuagccuaauguugcaaauaggaaacauuauuucaauaugggcuagucacucaauccaaacuggaagucaaaaccacacuggaguaugcaaccaaagaaucaucacauaugaaaacagcaccugggugaaucacacauauguuaauauuaacaacaccaauguuauugcuggaaaggacaaaacuucaguggcauuggccggcaauucaucucuuuguucuaucaguggaugggcuauauacacaaaagacaacagcauaagaauugguuccaaaggagauguuuuugucauaagagagccuuucauaucauguucucacuuugaaugcagaaccuuuuuucugacccaaggugcucuauuaaaugacaaacauucaaaugggaccguuaaggacagaagccccuauagggcuuuaaugagcuguccucuaggugaagcuccguccccauacaauucaaaguuugaaucaguugcuuggucagcaagcgcaugccaugauggcaugggcugguuaacaaucggaauuucugguccagacaauggagcaguggcuguacuaaaauacaacggcauaauaacugaaaccauaaaaaguuggaaaaagcaaauauuaagaacacaagagucugaaugugucugugugaacgggucauguuucaccauaaugaccgauggcccgaguaauggggccgccucguacaaaaucuucaagaucgaaaagggaaagguuacuaaaucaauagaguugaaugcacccaauuuucauuaugaggaauguuccuguuacccagacacuggcacagugauguguguaugcagggacaacuggcaugguucaaaucgacccugggugucuuuuaaucaaaaccuggauuaucaaauaggauacaucugcagugggguguucggugacaauccgcgucccaaagauggagagggcagcuguaauccagugacuguugauggagcaaacggaguaaagggguuuucauacaaauaugguaaugguguuuggauaggaaggacuaaaaguaacagacuuagaaagggguuugagaugauuugggauccuaauggauggacagauaccgacagugauuucucagugaaacaggauguuguggcaauaacugauuggucuggguacagcggaaguuucguucaacauccugaguuaacaggauuggacuguauaagaccuugcuucuggguugaguuagucagaggacugccaaaagaaaauacaacaaucuggacuagugggagcagcauuucuuuuuguggcguaaauagugauacugcaaacuggucuuggccagacggugcugaguugccguuuaccauugacaaguag

SEQ ID NO: 47057 - RNA, 1413 nt, Artificial Sequence; identical to SEQ ID NO: 46897
  derived and/or modified CDS sequence (wt) from neuraminidase__InfluenzaA__ABF47586

SEQ ID NO: 47058 - RNA, 1410 nt, Artificial Sequence; identical to SEQ ID NO: 46868
  derived and/or modified CDS sequence (wt) from neuraminidase__InfluenzaA__ABF47597

SEQ ID NO: 47059 - RNA, 1413 nt, Artificial Sequence
  derived and/or modified CDS sequence (wt) from neuraminidase__InfluenzaA__ABF47608
augaauccaaaucaaaaaauaauaaccauuggaucaaucaguauugcaauuggaauaauuagucugauauugcaaauaggaaauauuauuucaauaugggcuagccacucaauccaaacuggaagucaaaaccacacuggaauaugcaaccaaagaaucauuacauaugaaaauagcaccuggguaaaucaaacauauguuaauauuaacaacacuaauguuguugcuggaaaggacaaaaccucaaugacauuggccggcaauucaucucuuugcccuauccguggaugggcuauauacacaaaagacaacagcauaagaauugguuccaaaggagauguuuuugucauaagagagccuuuuauaucauguucucacuuggaauguagaaccuuuuuucugacccaaggugcucuauuaaaugacaagcauucaaaugggaccguuaaggacagaagcccuuauagggccuuaaugagcuguccucuaggugaagcuccgucuccauacaauucaagauuugaaucaguugcuuggucagcaagcgcaugccaugauggcuugggcuggcuaacaaucggaauuucugguccagauaauggggcaguggcuguacuaaaauacaacggcauaauaacugaaaccauuaaaaguuggaagaagcgaauauuaagaacacaagagucugaaugugucuguaugaacgguucauguuuuaccauaaugaccgauggcccgaguaauggggccgcaucguacagaaucuucaaaaucgagaaggggagaguuacuaaaucaauagaguuggaugcacccaauuaucauuacgaggaauguucauguuacccagacacuggcacagugaugugugugugcagggacaauuggcacgguucaaaucgaccuugggugucuuuuaaucaaaaccuggauuaucaaauaggauacaucugcagugggguguucggugacaauccgcgucccaaagauggagaaggcagcuguaauccagugacuguugauggagcagacggaguaaagggguuuucauacagauaugguaaugguguuuggauaggaaggacuaaaaguaacagacucagaaagggauuugagaugauuugggauccuaauggauggacagauaccgacagugauuucucaaugaaacaggauaucguggcaaugacugauuggucaggguacagcggaaguuuuguucaacauccugagcuaacaggauuggacuguaugagaccuugcuucuggguugaauuagucagagggcuaccuagagaaaauacaacaaucuggacuagugggagcagcauuucuuuuuguggcguaaauagcgauacugcaaacuggucuuggccagacggugccgaguugccauucaccauugacaaguag

SEQ ID NO: 47060 - RNA, 1410 nt, Artificial Sequence
  derived and/or modified CDS sequence (wt) from neuraminidase__InfluenzaA__ABF47619
augaauccaaaucaaaagauaauaacaauuggcucuguuucucucacuauugccacaauaugcuuccuuaugcaaauugccauccugguaacuacuguaacauugcauuucaagcaauaugaaugcaacucccccccaaacaaccaaguaaugcugugugaaccaacaauaauagagagaaacauaacagagauaguguaucugaccaacaccaccauagagaaagaaauaugccccaaacuagcagaauacagaaauuggucaaagccgcaauguaaaauuacaggauuugcaccuuuuucuaaggacaauucaauucggcuuuccgcugguggagacauuugggugacaagagaaccuuaugugucaugcgauccuggcaaguguuaucaauuugcccucggacagggaacaacacuaaacaacaggcauucaaaugacacaguacaugauaggaccccuuaucggacccuauugaugaaugaguuggguguuccauuucauuugggaaccaagcaaguaugcauagcaugguccaguucaaguugucacgauggaaaagcauggcugcauguuuguguaacugggcaugaugaaaaugcaacugcuagcuucauuuacgaugggaggcuuguagauaguauugguucaugguccaaaaauauccucaggacccaggagucggaaugcguuuguaucaauggaacuuguacaguaguaaugacugauggaagugcuucaggaagagcugauacuaaaauacuauucauugaagaggggaaaaucguucauauuagcccacugucaggaagugcucaacaugucgaggagugcuccuguuauccucgauauccuggugucagaugugucugcagagacaacuggaaaggcuccaauaggcccaucguagauauaaaugugaaagauuauagcauuguuuccaguuaugugugcucaggacuuguuggagacacacccagaaaaaacgacagcgccagcaguagccauugccugaauccuaacaaugaggaagggggucauggagugaaaggcugggccuuugaugauggaaaugauguguggaugggaagaacgaucagugagaaguuacgcucagguuaugaaaccuucaaagucauuggaggcugguccaaaccuaacuccaaauugcagauaaauaggcaagucauaguugacagagguaauagguccgguuauucugguauuuucucuguugaaggcaaaagcugcaucaaucggugcuuuuauguggaguugauaaggggaaggaaacaggaaacugaagucugguggaccucaaacaguauuguuguguuuuguggcaccucagguacauauggaacaggcucauggccugauggggcggacaucaaucucaugccuauauaa

SEQ ID NO: 47061 - RNA, 1413 nt, Artificial Sequence
  derived and/or modified CDS sequence (wt) from neuraminidase__InfluenzaA__ABF47630
augaauccaaaucaaaaaauaauaaccauuggaucaaucaguauugcaauuggaauaauuagucugauauugcaaauaggaaauaucauuucaauaugggcuagccacucaauccaaacuggaagucaaaaccacacuggaauaugcaaccaaagaaucauuacauaugaaaauagcaccuggguaaaucaaacauauguuaauauuaacaacacuaauguuguugcuggaaaggacaaaaccucaauggcauuggccggcaauucaucucuuugcccuauccguggaugggcuauauacacaaaagacaacagcauaagaauugguuccaaaggagauguuuuugucauaagagagccuuuuauaucauguucucacuuggaaugcagaaccuuuuuucugacccaaggugcucuauuaaaugacaagcauucaaaugggaccguuaaggacagaagcccuuauagggccuuaaugagcuguccucuaggugaagcuccgucuccauacaauucaagauuugaaucaguugcuuggucagcaagcgcaugccaugauggcuugggcuggcuaacaaucggaauuucugguccagauaauggggcaguggcuguacuaaaauacaacggcauaauaacugaaaccauuaaaaguuggaagaagcgaauauuaagaacacaagagucugaaugugucuguaugaacgguucauguuuuaccauaaugaccgauggcccgaguaauggggccgcaucguacagaaucuucaaaaucgagaaggggagaguuacuaaaucaauagaguuggaugcacccaauuaucauuacgaggaauguucauguuacccagacaccggcacagugaugugugugugcagggacaauuggcacgguucaaaucgaccuugggugucuuuuaaucaaaaccuggauuaucaaauaggauacaucugcagugggguguucggugacaauccgcgucccaaagauggagaaggcagcuguaauccagugacuguugauggagcagacggaguaaagggguuuucauacagauaugguaaugguguuuggauaggaaggacuaaaaguaacagacucagaaagggauuugagaugauuugggauccuaauggauggacagauaccgacagugauuucucaaugaaacaggauaucguggcaaugacugauuggucaggguacagcggaaguuuuguucaacauccugagcuaacaggauuggacuguaugagaccuugcuucuggguugaauuagucagagggcuaccuagagaaaauacaacaaucuggacuagugggagcagcauuucuuuuuguggcguaaauagcgauacugcaaacuggucuuggccagacggugccgaguugccauucaccauugacaaguag

SEQ ID NO: 47062 - RNA, 1413 nt, Artificial Sequence
  derived and/or modified CDS sequence (wt) from neuraminidase__InfluenzaA__ABF47652
augaauccaaaucaaaaaauaauaaccauuggaucaaucaguauugcaauuggaauaauuagucugauauugcaaauaggaaauauuauuucaauaugggcuagccacucaauccaaacuggaagucaaaaccacacuggaauaugcaaccaaagaaucauuacauaugaaaauagcaccuggguaaaucaaacauauguuaauauuaacaacacuaauguuguugcaggaaaggacaaaaccucaaugacauuggccggcaauucaucucuuugcccuauccguggaugggcuauauacacaaaagacaacagcauaagaauugguuccaaaggagauguuuuugucauaagagagccuuuuauaucauguucucacuuggaaugcagaaccuuuuuucugacccaaggugcucuauuaaaugacaagcauucaaaugggaccguuaaggacagaagcccuuauagggccuuaaugagcuguccucuaggugaagcuccgucuccauacaauucaagauuugaaucaguugcuuggucagcaagcgcaugccaugauggcuugggcuggcuaacaaucggaauuucugguccagauaauggggcaguggcuguacuaaaauacaacggcauaauaacugaaaccauuaaaaguuggaagaagcgaauauuaagaacacaagagucugaaugugucuguaugaacgguucauguuuuaccauaaugaccgauggcccgaguaauggggccgcaucguacagaaucuucaaaaucgagaaggggagaguuacuaaaucaauagaguuggaugcacccaauuaucauuacgaggaauguucauguuacccaaacacuggcacagugaugugugugugcagggacaauuggcacgguucaaaucgaccuugggugucuuuuaaucaaaaccuggauuaucaaauaggauacaucugcagugggguguucggugacaauccgcgucccaaagauggagaaggcagcuguaauccagugacuguugauggagcagacggaguaaagggguuuucauacagauaugguaaugguguuuggauaggaaggacuaaaaguaacagacucagaaagggauuugagaugauuugggauccuaauggauggacagauaccgacagugauuucucaaugaaacaggauaucguggcaaugacugauuggucaggguacagcggaaguuuuguucaacauccugagcuaacaggauuggacuguaugagaccuugcuucuggguugaauuagucagagggcuaccuagagaaaauacaacaaucuggacuagugggagcagcauuucuuuuuguggcguaaauagcgauacugcaaacuggucuuggccagacggugccgaguugccauucaccauugacaaguag

SEQ ID NO: 47063 - RNA, 1413 nt, Artificial Sequence
  derived and/or modified CDS sequence (wt) from neuraminidase__InfluenzaA__ABF47663
augaauccaaaucaaaaaauaauaaccauuggaucaaucaguauugcaauuggaauaauuagucugauauugcaaauaggaaauauuauuucaauaugggcuagccacucaauccaaacuggaagucaaaaccacacuggaauaugcaaccaaagaaucauuacauaugaaaauagcaccuggguaaaucaaacauauguuaauauuaacaacacuaauguuguugcuggaaaggacaaaaccucaaugacauuggccggcaauucaucucuuugcccuauccguggaugggcuauauacacaaaagacaacagcauaagaauugguuccaaaggagauguuuuugucauaagagagccuuuuauaucauguucucacuuggaaugcagaaccuuuuuucugacccaaggugcucuauuaaaugacaagcauucaaaugggaccguuaaggacagaagcccuuauagggccuuaaugagcuguccucuaggugaagcuccgucuccauacaauucaagauuugaaucaguugcuuggucagcaagcgcaugccaugauggcuugggcuggcuaacaaucggaauuucugguccagauaauggggcaguggcuguacuaaaauacaacggcauaauaacugaaaccauuaaaaguuggaagaagcgaauauuaagaacacaagagucugaaugugucuguaugaacgguucauguuuuaccauaaugaccgauggcccgaguaauggggccgcaucguacagaaucuucaaaaucgagaaggggagaguuacuaaaucaauagaguuggaugcacccaauuaucauuacgaggaauguucauguuacccagacaccggcacagugaugugugugugcagggacaauuggcacgguucaaaucgaccuugggugucuuuuaaucaaaaccuggauuaucaaauaggauacaucugcagugggguguucggugacaauccgcgucccaaagauggagaaggcagcuguaauccagugacuguugauggagcagacggaguaaagggguuuucauacagauauggcaaugguguuuggauaggaaggacuaaaaguaacagacucagaaagggauuugagaugauuugggauccuaauggauggacagauaccgacagugauuucucaaugaaacaggauaucguggcaaugacugauuggucaggguacagcggaaguuuuguucaacauccugagcuaacaggauuggacuguaugagaccuugcuucuggguugaauuagucagagggcuaccuagagaaaauacaacaaucuggacuagugggagcagcauuucuuuuuguggcguaaauagcgauacugcaaacuggucuuggccagacggugccgaguugccauucaccauugacaaguag

SEQ ID NO: 47064 - RNA, 1413 nt, Artificial Sequence
  derived and/or modified CDS sequence (wt) from neuraminidase__InfluenzaA__ABF47674
augaauccaaaucaaaaaauaauaaccauuggaucaaucaguauagcaaucggaauaauuagccuaauguugcaaauaggaaacauuauuucaauaugggcuagucacucaauccaaacuggaagucaaaaccacacuggaguaugcauccaaagaaucaucacauaugaaaacagcaccugggugaaucacacauauguuaauauuaacaacaccaauguuauugcuggaaaggacaaaacuucagugacauuggccggcaauucaucucuuuguucuaucaguggaugggcuauauacacaaaagacaacagcauaagaauugguuccaaaggagauguuuuugucauaagagagccuuucauaucauguucucacuuggaaugcagaaccuuuuuucugacccaaggugcucuauuaaaugacaaacauucaaaugggaccguuaaggacagaagucccuauagggcuuuaaugagcuguccucuaggugaagcuccguccccauacaauucaaaguuugaaucaguugcuuggucagcaagcgcaugccaugauggcaugggcugguuaacaaucggaauuucugguccagacaauggagcaguggcuguacuaaaauacaacggcauaauaacugaaaccauaaaaaguuggaaaaagcaaauauuaagaacacaagagucugaaugugucugugugaacgggucauguuucaccauaaugaccgauggcccgaguaauggggccgccucguacaaaaucuucaagaucgaaaagggaaagguuacuaaaucaauagaguugaaugcacccaauuuucauuaugaggaauguuccuguuacccagacacuggcacagugauguguguaugcagggacaacuggcaugguucaaaucgacccugggugucuuuuaaucaaaaccuggauuaucaaauaggauacaucugcagugggguguucggugacaauccgcgucccaaagauggagagggcagcuguaauccagugacuguugauggagcaaacggaguaaagggguuuucauacaaauaugguaaugguguuuggauaggaaggacuaaaaguaacagacuuagaaagggguuugagaugauuugggauccuaauggauggacagauaccgacagugauuucucagugaaacaggauguuguggcaauaacugauuggucaggguacagcggaaguuucguucaacauccugaguuaacaggauuggacuguauaagaccuugcuucuggguugaguuagucagaggacugccaaaagaaaauacaacaaucuggacuagugggagcagcauuucuuuuuguggcguaaauagugauacugcaaacuggucuuggccagacggugcugaguugccguuuaccauugacaaguag

SEQ ID NO: 47065 - RNA, 1413 nt, Artificial Sequence; identical to SEQ ID NO: 46963
  derived and/or modified CDS sequence (wt) from neuraminidase__InfluenzaA__ABF47696

SEQ ID NO: 47066 - RNA, 1413 nt, Artificial Sequence
  derived and/or modified CDS sequence (wt) from neuraminidase__InfluenzaA__ABF47707
augaauccaaaucagaaaauaauaaccauuggaucaaucuguauggcaaucggaauaauuagucuaauauugcaaauagggaauauuaucucaauauggguuagccacucaauucaaacuggaagucaaaaccauacaggaauaugcaaccaaagaaucauuaccuaugaaaauagcaccuggguaaaucaaacauauguuaauauuagcaacacuaacguuguugcuggaaagggcacaacuucaaugacauuagccggcaauucaucucuuuguccuauccgugggugggcuauauacagcaaagacaacagcauaagaauugguuccaaaggagauguuuuugucauaagagaaccuuuuauaucauguucucacuuggaaugcagaaccuuuuuucugacccaaggcgcucuauuaaaugacaagcauucaaaugggaccguuaaggacagaagcccuuauagggccuuaaugagcuguccuauaggugaagcuccgucuccauacaauucaagguuugaaucgguugcuuggucagcaagugcaugucacgauggcaugggcuggcuaacaaucggaauuucugguccagaugauggagcaguggcuguacuaaaauacaacggcauaauaacugaaaccauaaaaaguuggaggaagcaaauauuaagaacacaagagucugaaugugucuguguaaacgguucauguuuuaccauaaugaccgauggcccgagugaugggccggccucguacagaaucuucaaaaucgagaaggggaagauuacuaaaucaauagaguuggaugcacccaauucucauuacgaggaauguuccuguuacccagacaccggcacagugaugugugugugcagagacaauuggcaugguucgaaucgaccuugggugucuuuuaaucaaaaccuggauuaucaaauaggauacaucugcagugggguuuucggugacaauccgcgucccaaagauggaaaaggcaguugugauccaguaaauguugauggagcagacggaguaaagggguuuucauacagauaugguaaugguguuuggauaggaaggacuaaaaguaacagcuccagaaagggauuugagaugauuugggauccuaauggauggacagauaccgauaguaauuucuuagugaaacaggauguaguggcaaugacugauuggucaggguacagcggaaguuucguucaacauccugagcuaacaggauuggacuguaugaggccuugcuucuggguugaauuaaucagaggacgacccagagaaaaaacaacaaucuggacuagugggagcagcauuucuuuuuguggcgugaauagugauacuguaaauuggucuuggccagacggugccgaguugccauucaccauugacaaguag

SEQ ID NO: 47067 - RNA, 1413 nt, Artificial Sequence
  derived and/or modified CDS sequence (wt) from neuraminidase__InfluenzaA__ABF47718
augaauccaaaucagaaaauaauaaccauuggaucaaucuguauggcaaucggaauaauuagucuaauauugcaaauagggaauauuaucucaauauggguuagccacucaauucaaacuggaagucaaaaccauacaggaauaugcaaccaaagaaucauuaccuaugaaaauagcaccuggguaaaucaaacauauguuaauauuagcaacacuaacguuguugcuggaaaggacacaacuucaaugacauuagccggcaauucaucucuuuguccuauccgugggugggcuauauacagcaaagacaacagcauaagaauugguuccaaaggagauguuuuugucauaagagaaccuuuuauaucauguucucacuuggaaugcagaaccuuuuuucugacccaaggcgcucuauuaaaugacaagcauucaaaugggaccguuaaggacagaagcccuuauagggccuuaaugagcuguccuauaggugaagcuccgucuccauacaauucaagguuugaaucgguugcuuggucagcaagugcaugucacgauggcaugggcuggcuaacaaucggaauuucugguccagaugauggagcaguggcuguacuaaaauacaacggcauaauaacugaaaccauaaaaaguuggaggaagcaaauauuaagaacacaagagucugaaugugucuguguaaacgguucauguuuuaccauaaugaccgauggcccgagugaugggccggccucguacagaaucuucaaaaucgagaaggggaagauuacuaaaucaauagaguuggaugcacccaauucucauuacgaggaauguuccuguuacccagacaccggcacagugaugugugugugcagagacaauuggcaugguucgaaucgaccuugggugucuuuuaaucaaaaccuggauuaucaaauaggauacaucugcagugggguuuucggugacaauccgcgucccaaagauggaaaaggcagcugugauccaguaaauguugauggagcagacggaguaaagggguuuucauacagguaugguaaugguguuuggauaggaaggacuaaaaguaacagcuccagaaagggauuugagaugauuugggacccuaauggcuggacagauaccgauaguaauuucuuagugaaacaggauguaguggcaaugacugauuggucaggguacagcggaaguuucguucaacauccugagcuaacaggauuggacuguaugaggccuugcuucuggguugaauuaaucagaggacgacccagagaaaaaacaacaaucuggacuagugggagcagcauuucuuucuguggcgugaauagugauacuguaaauuggucuuggccagacggugccgaguugccauucaccauugacaaguag

SEQ ID NO: 47068 - RNA, 1413 nt, Artificial Sequence; identical to SEQ ID NO: 46963
  derived and/or modified CDS sequence (wt) from neuraminidase__InfluenzaA__ABF47729

SEQ ID NO: 47069 - RNA, 1413 nt, Artificial Sequence
  derived and/or modified CDS sequence (wt) from neuraminidase__InfluenzaA__ABF47740
augaauccaaaucagaaaauaauaaccauuggaucaaucuguauggcaaucggaauaauuagucuaauauugcaaauagggaauauuaucucaauauggguuagccacucaauucaaacuggaagucaaaaccauacaggaauaugcaaccaaagaaucauuaccuaugaaaauagcaccuggguaaaucaaacauauguuaauauuagcaacacuaacguuguugcuggaaaggacacaacuucaaugacauuagccggcaauucaucucuuuguccuauccgugggugggcuauauacagcaaagacaacagcauaagaauugguuccaaaggagauguuuuugucauaagagaaccuuuuauaucauguucucacuuggaaugcagaaccuuuuuucugacccaaggcgcucuauuaaaugacaagcauucaaaugggaccguuaaggacagaagcccuuauagggccuuaaugagcuguccuauaggugaagcuccgucuccauacaauucaagguuugaaucgguugcuuggucagcaagugcaugucacgauggcaugggcuggcuaacaaucggaauuucugguccagaugauggagcaguggcuguacuaaaauacaacggcauaauaacugaaaccauaaaaaguuggaggaagcaaauauuaagaacacaagagucugaaugugucuguguaaacgguucauguuuuaccauaaugaccgauggcccgagugaugggccggccucguacagaaucuucaaaaucgagaaggggaagauuacuaaaucaauagaguuggaugcacccaauucucauuacgaggaauguuccuguuacccagacaccggcacagugaugugugugugcagagacaauuggcaugguucgaaucgaccuugggugucuuuuaaucaaaaccuggauuaucaaauaggauacaucugcagugggguuuucggugacaauccgcgucccaaagaugggaaaggcaguugugauccaguaaauguugauggagcagacggaguaaagggguuuucauacagauaugguaaugguguuuggauaggaaggacuaaaaguaacagcuccagaaagggauuugagaugauuugggauccuaauggauggacagauaccgauaguaauuucuuagugaaacaggauguaguggcaaugacugauuggucaggguacagcggaaguuucguucaacauccugagcuaacaggauuggacuguaugaggccuugcuucuggguugaauuaaucagaggacgacccagagaaaaaacaacaaucuggacuagugggagcagcauuucuuuuuguggcgugaauagugauacuguaaauuggucuuggccagacggugccgaguugccauucaccauugacaaguag

SEQ ID NO: 47070 - RNA, 1413 nt, Artificial Sequence
  derived and/or modified CDS sequence (wt) from neuraminidase__InfluenzaA__ABF47751
augaauccaaaucagaaaauaauaaccauuggaucaaucuguauggcaaucggaauaauuagucuaauauugcaaauaggaaauauuauuucaauauggguuagccacucaauccaaacuggaagucaaaaccacacuggaauaugcaaccaaagaaucauuaccuaugaaaauagcaccuggguaaaucaaacauauguuaauauuaacaacacuaacguuguugcuggaaaggacacaacuucagugacauuagccggcaauucaucucuuuguccuauccgugggugggcuauauacagcaaagacaacagcauaagaauugguuccaaaggagauguuuuugucauaagagaaccuuuuauaucauguucucacuuggaaugcagaaccuuuuuucugacucaaggugcucuauuaaaugacaagcauucaaaugggaccguuaaggacagaagcccuuauagggccuuaaugagcuguccuauaggugaagcuccgucuccauacaauucaagguuugaaucaguugcuuggucagcaagcgcaugucaugauggcaugggcuggcuaacaaucggaauuucugguccagaugauggagcaguggcuguacuaaaauacaacggcauaauaacugaaaccauaaaaaguuggaggaagcgaauauuaagaacacaagagucugaaugugucuguguaaacgguucauguuuuaccauaaugaccgauggcccgaguaaugggccugccucguacagaaucuucaaaaucgagaaggggaagauuacuaaaucaauagaguuggaugcacccaauucucauuacgaggaauguuccuguuacccagacaccggcacagugaugugugugugcagagacaauuggcaugguucgaaucgaccuugggugucuuuuaaucaaaaccuggauuaucaaauaggauacaucugcagugggguuuucggugacaauccgcgucccaaagauggaaaaggcagcugugauccaguaacuguugauggagcagacggaguaaagggguuuucauacagguauggcaaugguguuuggauaggaaggacuaaaaguaacagcuccagaaagggauuugagaugauuugggauccuaauggauggacagauaccgauaguaauuucuuagugaaacaggauguaguggcaaugacugauuggucaggguacagcggaaguuucguucaacauccugagcuaacaggauuggacuguaugaggccuugcuucuggguugaauuaaucagaggacgaccuagagaaaagacaacaaucuggacuagugggagcagcauuucuuuuuguggcgugaauagugauacugcaaauuggucuuggccagacggugccgaguugccauucaccauugacaaguag

SEQ ID NO: 47071 - RNA, 1413 nt, Artificial Sequence
  derived and/or modified CDS sequence (wt) from neuraminidase__InfluenzaA__ABF47773
augaauccaaaucagaaaauaauaaccauuggaucaaucuguaugacaaucggaauaauuagucuaauauugcaaauaggaaauauuauuucaauauggguuagccacucaauccaaacuggaagucaaaaccacacuggaauaugcaaccaaagaaucauuaccuaugaaaauagcaccuggguaaaucaaacauaugucaauauuaacaacacuaacguuguugcuggaaaggacacaacuucagugacauuagccggcaauucaucucuuuguccuauccgugggugggcuauauacagcaaagacaacagcauaagaauugguuccaaaggagauguuuuugucauaagagaaccuuuuauaucauguucucacuuggaaugcagaaccuuuuuucugacccaaggugcucuauuaaaugacaagcauucaaaugggaccguuaaggacagaagcccuuauagggccuuaaugagcuguccuauaggugaagcuccgucuccauacaauucaagguuugaaucaguugcuuggucagcaagcgcaugucaugauggcaugggcuggcuaacaaucggaauuucugguccagaugauggagcaguggcuguacuaaaauacaacggcauaauaacugaaaccauaaaaaguuggaggaagcgaauauuaagaacacaagagucugaaugugucuguguaaacgguucauguuuuaccauaaugaccgauggcccgaguaauggaccugccucguacagaaucuucaaaaucgagaaggggaagauuacuaaaucaauagaguuggaugcacccaauucucauuacgaggaauguuccuguuacccagacaccggcacagugaugugugugugcagagacaauuggcaugguucgaaucgaccuugggugucuuuuaaucaaaaccuggauuaucaaauaggauacaucugcagugggguguucggugacaauccgcgucccaaagauggaaaaggcagcugugauccaguaacuguugauggagcagacggaguaaagggguuuucauacagguaugguaaugguguuuggauaggaaggacuaaaaguaacagcuccagaaagggauuugagaugauuugggauccuaauggauggacagauaccgauaguaauuucuuagugaaacaggauguaguggcaaugacugauuggucaggguacagcggaaguuucguucaacauccugagcuaacaggauuggacuguaugaggccuugcuucuggguugaauuaaucagaggacgaccuagagaaaagacaacaaucuggacuagugggagcagcauuucuuuuuguggcgugaauagugauacugcaaauuggucuuggccagacggugccgaguugccauucaccauugacaaguag

SEQ ID NO: 47072 - RNA, 1413 nt, Artificial Sequence; identical to SEQ ID NO: 47071
  derived and/or modified CDS sequence (wt) from neuraminidase__InfluenzaA__ABF47784

SEQ ID NO: 47073 - RNA, 1413 nt, Artificial Sequence; identical to SEQ ID NO: 47071
  derived and/or modified CDS sequence (wt) from neuraminidase__InfluenzaA__ABF47795

SEQ ID NO: 47074 - RNA, 1413 nt, Artificial Sequence
  derived and/or modified CDS sequence (wt) from neuraminidase__InfluenzaA__ABF47806
augaauccaaaucagaaaauaauaaccauuggaucaaucuguaugacaaucggaauaauuagucuaauauugcaaauaggaaauauuauuucaauauggguuagccacucaauccaaacuggaagucaaaaccacacuggaauaugcaaccaaagaaucauuaccuaugaaaauagcaccuggguaaaucaaacauaugucaauauuaacaacacuaacguuguugcuggaaaggacacaacuucagugacauuagccggcaauucaucucuuuguccuauccgugggugggcuauauacagcaaagacaacagcauaagaauugguuccaaaggagauguuuuugucauaagagaaccuuuuauaucauguucucacuuggaaugcagaaccuuuuuucugacccaaggugcucuauuaaaugacaagcauucaaaugggaccguuaaggacagaagcccuuauagggccuuaaugagcuguccuauaggugaagcuccgucuccauacaauucaagguuugaaucaguugcuuggucagcaagcgcaugucaugauggcaugggcuggcuaacaaucggaauuucugguccagaugauggagcaguggcuguacuaaaauacaacggcauaauaacugaaaccauaaaaaguuggaggaagcgaauauuaagaacacaagagucugaaugugucuguguaaacgguucauguuuuaccauaaugaccgauggcccgaguaauggaccugccucguacagaaucuucaaaaucgagaaggggaagauuacuaaaucaauagaguuggaugcacccaauucucauuacgaggaauguuccuguuacccagacaccggcacagugaugugugugugcagagacaauuggcaugguucgaaucgaccuugggugucuuuuaaucaaaaccuggauuaucaaauaggauacaucugcagugggguguucggugacaauccgcgucccaaagauggaaaaggcagcugugauccaguaacuguugauggagcagacggaguaaagggguuuucauacagguaugguaaugguguuuggauaggaaggacuaaaaguaacagcuccagaaagggauuugagaugauuugggauccuaauggauggacagauaccgauaguaauuucuuagugaaacaggauguaguggcaaugacugauuggucaggguacagcggaaguuucguucaacauccugaacuaacaggauuggacuguaugaggccuugcuucuggguugaauuaaucagaggacgaccuagagaaaagacaacaaucuggacuagugggagcagcauuucuuuuuguggcgugaauagugauacugcaaauuggucuuggccagacggugccgaguugccauucaccauugacaaguag

SEQ ID NO: 47075 - RNA, 1413 nt, Artificial Sequence
  derived and/or modified CDS sequence (wt) from neuraminidase__InfluenzaA__ABF47817
augaauccaaaucagaaaauaauaaccauuggaucaaucuguaugacaaucggaauaauuagucuaauauugcaaauaggaaauauuauuucaauauggguuagccacucaauccaaacuggaagucaaaaccacacuggaauaugcaaccaaagaaucauuaccuaugaaaauagcaccuggguaaaucaaacauaugucaauauuaacaacacuaacguuguugcuggaaaggacacaacuucagugacauuagccggcaauucaucucuuuguccuauccgugggugggcuauauacagcaaagacaacagcauaagaauugguuccaaaggagauguuuuugucauaagagaaccuuuuauaucauguucucacuuggaaugcagaaccuuuuuucugacccaaggugcucuauuaaaugacaagcauucaaaugggaccguuaaggacagaagcccuuauagggccuuaaugagcuguccuauaggugaagcuccgucuccauacaauucaagguuugaaucaguugcuuggucagcaagcgcaugucaugauggcaugggcuggcuaacaaucggaauuucugguccagaugauggagcaguggcuguacuaaaauacaacggcauaauaacugaaaccauaaaaaguuggaggaagcgaauauuaagaacacaagagucugaaugugucuguguaaacgguucauguuuuaccauaaugaccgauggcccgaguaauggaccugccucguacagaaucuucaaaaucgagaaggggaagauuacuaaaucaauagaguuggaugcacccaauucucauuacgaggaauguuccuguuacccagacaccggcacagugaugugugugugcagagacaauuggcaugguucgaaucgaccuugggugucuuuuaaucaaaaccuggauuaucaaauaggauacaucugcagugggguguucggugacaauccgcgucccaaagauggaaaaggcagcugugauccaguaacuguugauggagcagacggaguaaagggguuuucauacagguaugguaaugguguuuggauaggaaggacuaaaaguaacagcuccagaaagggauuugagaugauuugggauccuaauggauggacagauaccgauaguaauuucuuagugaaacaggauguaguggcaaugacugauuggucaggguacagcggaaguuucguucaacauccugagcuaacaggauuggacuguaugaggccuugcuucuggguugaauuaaucagaggacgaccuagagaaaagacaacaaucuggacuagugggagcagcauuucuuuuuguggcguaaauagugauacugcaaauuggucuuggccagacggugccgaguugccauucaccauugacaaguag

SEQ ID NO: 47076 - RNA, 1413 nt, Artificial Sequence; identical to SEQ ID NO: 47071
  derived and/or modified CDS sequence (wt) from neuraminidase__InfluenzaA__ABF47839

SEQ ID NO: 47077 - RNA, 1413 nt, Artificial Sequence; identical to SEQ ID NO: 47071
  derived and/or modified CDS sequence (wt) from neuraminidase__InfluenzaA__ABF47850

SEQ ID NO: 47078 - RNA, 1413 nt, Artificial Sequence; identical to SEQ ID NO: 46840
  derived and/or modified CDS sequence (wt) from neuraminidase__InfluenzaA__ABF47872

SEQ ID NO: 47079 - RNA, 1413 nt, Artificial Sequence; identical to SEQ ID NO: 46840
  derived and/or modified CDS sequence (wt) from neuraminidase__InfluenzaA__ABF47883

SEQ ID NO: 47080 - RNA, 1413 nt, Artificial Sequence; identical to SEQ ID NO: 46840
  derived and/or modified CDS sequence (wt) from neuraminidase__InfluenzaA__ABF47894

SEQ ID NO: 47081 - RNA, 1410 nt, Artificial Sequence; identical to SEQ ID NO: 46856
  derived and/or modified CDS sequence (wt) from neuraminidase__InfluenzaA__ABF47905

SEQ ID NO: 47082 - RNA, 1362 nt, Artificial Sequence
  derived and/or modified CDS sequence (wt) from neuraminidase__InfluenzaA__ABF47958
augaauccaaaccagaaaauaauaaccauugggucaaucuguaugguagucggaauaauuagccuaauauugcaaauaggaaauauaaucucaauauggauuagccauucaauucaaaccggaaaucaaaaccauacuggaauaugcaaccaaggcagcauuaccuauaaaguuguugcugggcaggacucaacuucagugauauuaaccggcaauucaucucuuugucccauccgugggugggcuauacacagcaaagacaauggcauaagaauugguuccaaaggagacguuuuugucauaagagagccuuuuauuucauguucucacuuggaaugcaggaccuuuuuucugacucaaggcgccuuacugaaugacaagcauucaagggggaccuuuaaggacagaagcccuuauagggccuuaaugagcugcccugucggugaagcuccguccccguacaauucaagguuugaaucgguugcuuggucagcaagugcaugucaugauggaaugggcuggcuaacaaucggaauuucugguccagaugauggagcaguggcuguauuaaaauacaacggcauaauaacugaaaccauaaaaaguuggaggaagaauauauugagaacacaagagucugaauguaccuguguaaaugguucauguuuuaccauaaugaccgauggcccaagugaugggcuggccucguacaaaauuuucaagaucgagaaggggaagguuacuaaaucaauagaguugaaugcaccuaauucucacuacgaggaauguuccuguuacccugauaccggcaaagugaugugugugugcagagacaauuggcacgguucgaaccgaccauggguguccuucgaccaaaaccuagauuauaaaauaggauacaucugcagugggguuuucggugacaacccgcgucccaaagauggaacaggcagcuguggcccagugucugcugauggagcaaacggaguaaagggauuuucauauaaguaugguaaugguguuuggauaggaaggacuaaaagugacaguuccagacauggguuugagaugauuugggauccuaauggauggacagagacugauaguagguucucuaugagacaagauguuguggcaaugacugaucggucaggguacagcggaaguuucguucaacauccugagcuaacagggcuagacuguaugaggccuugcuucuggguugaauuaaucagggggcuaccugaggaggacgcaaucuggacuagugggagcaucauuucuuuuuguggugugaauagugauacuguagauuggucuuggccagacggugcugaguugccguucaccauugacaaguaa

SEQ ID NO: 47083 - RNA, 1350 nt, Artificial Sequence
  derived and/or modified CDS sequence (wt) from neuraminidase__InfluenzaA__ABF56651
augaauccaaaucagaagauaauaaccaucggaucaaucuguaugguaacuggaauaguuagcuuaauguuacaaguugggaacaugaucucaauaugggucagucauucaauucacacagggagucaacaccaagcugaaccaaucagcaauacuaauuuucuuacugagaaagcuguggcuucaguaaaauuagcgggcaauucaucucuuugccccauuaacggaugggcuguauacaguaaggacaacaguauaaggaucgguuccaagggggauguguuuguuauaagagagccguucaucucaugcucccacuuggaaugcagaacuuucuuuuugacucagggagccuugcugaaugacaaacacuccaaugggacugucaaagacagaagcccucacagaacauuaaugaguuguccugugggugaggcucccuccccauauaacucaagguuugagucuguugcuuggucagcaagugcuugccaugauggcaccaguugguugacaauuggaauuucuggcccagacaauggggcuguggcuguauugaaauacaauggcauaauaacagacacuaucaagaguuggaggaacaacauacugagaacucaagagucugaaugugcauguguaaauggcucuugcuuuacuguaaugacugacggaccaaguaauggucaggcaucacauaagaucuucaaaauggaaaaagggaaagugguuaaaucagucgaauuggaugcuccuaauuaucacuaugaggaaugcuccuguuauccugaugccggcgaaaucacaugugugugcagggauaauuggcauggcucaaaucggccauggguaucuuucaaucaaaacuuggaguaucaaauaggauauauaugcaguggaguuuucggagacaauccacgccccaaugauggaacagguaguugugguccgguguccucuaacggggcauaugggguaaaaggguuuucauuuaaauacggcaauggugucuggaucgggagaaccaaaagcacuaauuccaggagcggcuuugaaaugauuugggauccaaauggguggacugaaacggacaguagcuuuucagugaaacaagauaucguagcaauaacugauuggucaggauauagcgggaguuuuguccagcauccagaacugacaggacuagauugcauaagaccuuguuucuggguugaguugaucagagggcggcccaaagagagcacaauuuggacuagugggagcagcauaucuuuuugugguguaaauagugacacuguggguuggucuuggccagacggugcugaguugccauucaccauugacaaguag

SEQ ID NO: 47084 - RNA, 1410 nt, Artificial Sequence; identical to SEQ ID NO: 46839
  derived and/or modified CDS sequence (wt) from neuraminidase__InfluenzaA__ABF82654

SEQ ID NO: 47085 - RNA, 1413 nt, Artificial Sequence; identical to SEQ ID NO: 46897
  derived and/or modified CDS sequence (wt) from neuraminidase__InfluenzaA__ABF82665

SEQ ID NO: 47086 - RNA, 1413 nt, Artificial Sequence; identical to SEQ ID NO: 46953
  derived and/or modified CDS sequence (wt) from neuraminidase__InfluenzaA__ABF82676

SEQ ID NO: 47087 - RNA, 1413 nt, Artificial Sequence
  derived and/or modified CDS sequence (wt) from neuraminidase__InfluenzaA__ABF82687
augaauccaaaucaaaaaauaauaaccauuggaucaaucaguauagcaaucggaauaauuagccuaauguugcaaauaggaaacauuauuucaauaugggcuagucacucaauccaaacuggaagucaaaaccacacuggaguaugcaaccaaagaaucaucacauaugaaaacagcaccugggugaaucacacauauguuaauauuaacaacaccaauguuauugcuggaaaggacaaaacuucagugacauuggccggcaauucaucucuuuguucuaucaguggaugggcuauauacacaaaagacaacagcauaagaauugguuccaaaggagauguuuuugucauaagagagccuuucauaucauguucucacuuggaaugcagaaccuuuuuucugacccaaggugcucuauuaaaugacaaacauucaaaugggaccguuaaggacagaagccccuauagggcuuuaaugagcuguccucuaggugaagcuccguccccauacaauucaaaguuugaaucaguugcuuggucagcaagcgcaugccaugauggcaugggcugguuaacaaucggaauuucugguccagacaauggagcaguggcuguacuaaaauacaacggcauaauaacugaaaccauaaaaaguuggaaaaagcaaauauuaagaacacaagagucugaaugugucugugugaacgggucauguuucaccauaaugaccgauggcccgaguaauggggccgccucguacaaaaucuucaagaucgaaaagggaaagacuacuaaaucaauagaguugaaugcacccaauuuucauuaugaggaauguuccuguuacccagacacuggcacagugauguguguaugcagggacaacuggcaugguucaaaucgacccugggugucuuuuaaucaaaaccuggauuaucaaauaggauacaucugcagugggguguucggugacaauccgcgucccaaagauggagagggcagcuguaauccaguaacuguugauggagcaaacggaguaaagggguuuucauacaaauaugguaaugguguuuggauaggaaggacuaaaaguaacagacuuagaaagggguuugagaugauuugggauccuaauggauggacagauaccgacagugauuucucagugaaacaggauguuguggcaauaacugauuggucuggguacagcggaaguuucguucaacauccugaguuaacaggauugaacuguauaagaccuugcuucuggguugaguuagucagaggacugccaaaagaaaauacaacaaucuggacuagugggagcagcauuucuuuuuguggcguaaauagugauacugcaaacuggucuuggccagacggugcugaguugccguuuaccauugacaaguag

SEQ ID NO: 47088 - RNA, 1410 nt, Artificial Sequence
  derived and/or modified CDS sequence (wt) from neuraminidase__InfluenzaA__ABF82698
augaauccaaaucaaaagauaauaacaauuggcucuguuucucucacuauuaccacaauaugcuuccuuaugcaaauugccauccugguaauuacuguaacauugcauuucaagcaaugugaaugcaacucccccccaaacaaccaaguaaugcugugugaaccaacaauaauagaaagaaacauaacagagauaguguaucugaccaacaccaccauagagaaagaaauaugccccaaacuagcagaauacagaaauuggucaaagccgcaauguaaaauuacaggauuugcaccuuuuucuaaggacaauucaauucggcuuuccgcugguggagacauuugggugacaagagaaccuuaugugucaugcgauccuggcaaguguuaucaauuugcccuuggacagggaacaacacuaaacaacaggcauucaaaugacacaguacacgauaggaccccuuaucgaacccuauugaugaaugaguuggguguuccauuucauuugggaaccaagcaagugugcauagcaugguccagcucaaguugucacgauggaaaagcauggcugcauguuuguguaacugggcauaaugaaaaugcaacugcgaguuucauuuacgaugggaggcuuguagauaguauugguucaugguccaaaaauauccucaggacccaggagucggaaugcguuuguaucaauggaacuuguacaguaguaaugacugauggaagugcuucaggaagagcugauacuaaaauacuauucauugaagaggggaaaaucguucauauuagcccauugucaggaagugcucagcaugucgaggagugcuccuguuauccucgauauccuggugucagaugugucugcagagacaacuggaaaggcuccaauaggcccaucguagauauaaaugugaaagauuauagcauuguuuccaguuaugugugcucaggacuuguuggagacacacccagaaaaaacgacagcuccagcaguagcuauugccuggauccuaacaaugaggaagggggucauggagugaaaggcugggccuuugaugauggaaaugauguguggaugggaagaacgaucagugagaaguuacgcucagguuaugaaaccuucaaagucauuggaggcugguccaagccuaacuccaaauugcagauaaauaggcaagucauaguugacaaagguaauagguccgguuauucugguauuuucucuguugaaggcaaaagcugcaccaaucggugcuuuuauguggaguugauaaggggaaggaaacaggaaacugaagucugguggaccucaaacaguauuguuguguuuuguggcaccucagguacauauggaacaggcucauggccugauggggcggacaucaaucucaugccuauauaa

SEQ ID NO: 47089 - RNA, 1410 nt, Artificial Sequence
  derived and/or modified CDS sequence (wt) from neuraminidase__InfluenzaA__ABF82709
augaauccaaaucaaaagauaauaacgauuggcucuguuucucucacuauugccacaauaugcuuccuuaugcaaauugccauccugguaacuacuguaacauugcauuucaagcaauaugaaugcaacucccccccaaacaaccaaguaaugcugugugaaccaacaauaauagaaagaaacauaacagagauaguguaucugaccaacaccaccauagagaaggaaauaugccccaaacuagcagaauacagaaauuggucaaagccgcaauguaaaauuacaggauuugcaccuuuuucuaaggacaauucaauucggcuuuccgcugguggggacauuugggugacaagagaaccuuaugugucaugcgauccugacaaguguuaucaauuugcccuuggacagggaacaacacuaaacaacaggcauucaaaugacacaguacaugauaggaccccuuaucgaacccuauugaugaaugaguuggguguuccauuucauuugggaaccaagcaagugugcauagcaugguccagcucaaguugucacgauggaaaagcauggcugcauguuuguguaacugggcaugaugaaaaugcaacugcuagcuucauuuacgaugggaggcuuguagauaguauugguucaugguccaaaaaaauccucaggacccaggagucggaaugcguuugcaucaauggaacuuguacaguaguaaugacugaugggagugcuucaggaagagcugauacuaaaauacuauucauugaggaggggaaaaucguucauauuagcccauugucaggaagugcucagcaugucgaggagugcuccuguuauccucgauacccuggugucagaugugucugcagagacaacuggaaaggcuccaauaggcccaucguagauauaaauguaaaggauuauagcauuguuuccaguuaugugugcucaggacuugucggagacacacccagaaaaaacgacagcuccagcaguagccauugccugaauccuaacaaugaggaagggggucauggaguaaaaggcugggccuuugaugauggaaaugacguguggaugggaagaacgaucagcgagaaguuacgcucagguuaugaaaccuucaaagucauugaaggcugguccaaaccuaacuccaaauugcagauaaauaggcaagucauaguugacagagguaauagguccgguuauucugguauuuucucuguugaaggcaaaagcugcaucaaucgaugcuuuuauguggaguugauaaggggaaggaaacaggaaacugaagucugguggaccucaaacaguauuguuguguuuuguggcacaucagguacauauggaacaggcucauggccugauggggcggacaucaaucucaugccuauauaa

SEQ ID NO: 47090 - RNA, 1413 nt, Artificial Sequence
  derived and/or modified CDS sequence (wt) from neuraminidase__InfluenzaA__ABF82822
augaauccaaaucaaaaaauaauaaccauuggaucaaucaguauagcaaucggaauaauuagucuaauguugcaaauaggaaauauuauuucaauaugggcuagucacucaauccaaacuggaagucaaaaccacacuggaauaugcaaccaaagaaucaucacauaugaaaacagcaccugggugaaucacacauauguuaauauuaacaacacuaauguuguugcuggaaaagacaaaacuucagugacauuggccggcaauucaucucuuuguucuaucaguggaugggcuauauacacaaaagacaacagcauaagaauuggcuccaaaggagauguuuuugucauaagagaaccuuucauaucauguucucacuuggaaugcagaaccuuuuuucugacccaaggugcucuauuaaaugacaaacauucaaaugggaccguuaaggacagaaguccuuauagggccuuaaugagcuguccucuaggugaagcuccguccccauacaauucaaaguuugaaucaguugcauggucagcaagcgcaugccaugauggcaugggcugguuaacaaucggaauuucugguccagacaauggagcuguggcuguacuaaaauacaacggaauaauaacugaaaccauaaaaaguuggaaaaagcgaauauuaagaacacaagagucugaaugugucugugugaacgggucauguuucaccauaaugaccgauggcccgaguaauggggccgccucguacaaaaucuucaagaucgaaaaggggaagguuacuaaaucaauagaguugaaugcacccaauuuucauuaugaggaauguuccuguuacccagacacuggcacagugauguguguaugcagggacaacuggcaugguucaaaucgaccuugggugucuuuuaaucaaaacuuggauuaucaaauaggauacaucugcaguggaguguucggugacaauccgcgucccaaagauggagagggcagcuguaauccagugacuguugauggagcagacggaguaaagggguuuucauacaaauaugguaaugguguuuggauaggaaggacuaaaaguaacagacuuagaaagggguuugagaugauuugggauccuaauggauggacagauaccgacagugauuucucagugaaacaggauguuguggcaauaacugauuggucaggguacagcggaaguuucguucaacauccugaguuaacaggauuggacuguauaagaccuugcuucuggguugaguuagucagaggacugccuagagaaaauacaacaaucuggacuagugggagcagcauuucuuuuuguggcguuaauagugauacugcaaacuggucuuggccagacggugcugaguugccguucaccauugacaaguag

SEQ ID NO: 47091 - RNA, 1413 nt, Artificial Sequence; identical to SEQ ID NO: 46897
  derived and/or modified CDS sequence (wt) from neuraminidase__InfluenzaA__ABF82833

SEQ ID NO: 47092 - RNA, 1413 nt, Artificial Sequence; identical to SEQ ID NO: 46897
  derived and/or modified CDS sequence (wt) from neuraminidase__InfluenzaA__ABF82844

SEQ ID NO: 47093 - RNA, 1413 nt, Artificial Sequence
  derived and/or modified CDS sequence (wt) from neuraminidase__InfluenzaA__ABF82855
augaauccaaaucaaaaaauaauaaccauuggaucaaucaguauagcaaucggaauaauuagccuaauguugcaaauaggaaacauuauuucaauaugggcuagucacucaauccaaauuggaagucaaaaccacacuggaguaugcaaccaaagaaucaucacauaugaaaacagcaccugggugaaucacacauauguuaauauuaacaacaccaauguuauugcuggaaaggacaaaacuucagugacauuggccggcaauucaucucuuuguucuaucaguggaugggcuauauacacaaaagacaacagcauaagaauugguuccaaaggagauguuuuugucauaagagagccuuucauaucauguucucacuuggaaugcagaaccuuuuuucugacccaaggugcucuauuaaaugacaaacauucaaaugggaccguuaaggacagaagccccuauagggcuuuaaugagcuguccucuaggugaagcuccguccccauacaauucaaaguuugaaucaguugcuuggucagcaagcgcaugccaugauggcaugggcugguuaacaaucggaauuucugguccagacaauggagcaguggcuguacuaaaauacaacggcauaauaacugaaaccauaaaaaguuggaaaaagcaaauauuaagaacacaagagucugaaugugucugugugaacgggucauguuucaccauaaugaccgauggcccgaguaauggggccgccucguacaaaaucuucaagaucgaaaagggaaagguuacuaaaucaauagaguugaaugcacccaauuuucauuaugaggaauguuccuguuacccagacacuggcacagugauguguguaugcagggacaacuggcaugguucaaaucgacccugggugucuuuuaaucaaaaccuggauuaucaaauaggauacaucugcagugggguguucggugacaauccgcgucccaaagauggagagggcagcuguaauccagugacuguugauggagcaaacggaguaaagggguuuucauacaaauaugguaaugguguuuggauaggaaggacuaaaaguaacagacuuagaaagggguuugagaugauuugggauccuaauggauggacagauaccgacagugauuucucagugaaacaggauguuguggcaauaacugauuggucuggguacagcggaaguuucguucaacauccugaguuaacaggauuggacuguauaagaccuugcuucuggguugaguuagucagaggacugccaaaagaaaauacaacaaucuggacuagugggagcagcauuucuuuuuguggcguaaauagugauacugcaaacuggucuuggccagacggugcugaguugccguuuaccauugacaaguag

SEQ ID NO: 47094 - RNA, 1413 nt, Artificial Sequence; identical to SEQ ID NO: 46897
  derived and/or modified CDS sequence (wt) from neuraminidase__InfluenzaA__ABF82866

SEQ ID NO: 47095 - RNA, 1413 nt, Artificial Sequence
  derived and/or modified CDS sequence (wt) from neuraminidase__InfluenzaA__ABF82888
augaauccaaaucaaaaaauaauaaccauuggaucaaucaguauagcaaucggaaugauuagccuaauguugcaaauaggaaacauuauuucaauaugggcuagucacucaauccaaacuggaagucaaaaccacacuggaguaugcaaccaaagaaucaucacauaugaaaacagcaccugggugaaucacacauauguuaauauuaacaacaccaauguuauugcuggaaaggacaaaacuucagugacauuggccggcaauucaucucuuuguucuaucaguggaugggcuauauacacaaaagacaacagcauaagaauugguuccaaaggagauguuuuugucauaagagagccuuucauaucauguucucacuuggaaugcagaaccuuuuuucugacccaaggugcucuauuaaaugacaaacauucaaaugggaccguuaaggacagaagccccuauagggcuuuaaugagcuguccucuaggugaagccccguccccauacaauucaaaguuugaaucaguugcuuggucagcaagcgcaugccaugauggcaugggcugguuaacaaucggaauuucugguccagacaauggagcaguggcuguacuaaaauacaacggcauaauaacugaaaccauaaaaaguuggaaaaagcaaauauuaagaacacaagagucugaaugugucugugugaacgggucauguuucaccauaaugaccgauggcccgaguaauggggccgccucguacaaaaucuucaagaucgaaaagggaaagguuacuaaaucaauagaguugaaugcacccaauuuucauuaugaggaauguuccuguuacccagacacuggcacagugauguguguaugcagggacaacuggcaugguucaaaucgacccugggugucuuuuaaucaaaaccuggauuaucaaauaggauacaucugcagugggguguucggugacaauccgcgucccaaagauggagagggcagcuguaauccagugacuguugauggagcaaacggaguaaagggguuuucauacaaauaugguaaugguguuuggauaggaaggacuaaaaguaacagacuuagaaagggguuugagaugauuugggauccuaauggauggacagauaccgacagugauuucucagugaaacaggauguuguggcaauaacugauuggucuggguacagcggaaguuucguucaacauccugaguuaacaggauuggacuguauaagaccuugcuucuggguugaguuagucagaggacugccaaaagaaaauacaacaaucuggacuagugggagcagcauuucuuuuuguggcguaaauagugauacugcaaacuggucuuggccagacggugcugaguugccguuuaccauugacaaguag

SEQ ID NO: 47096 - RNA, 1413 nt, Artificial Sequence; identical to SEQ ID NO: 46897
  derived and/or modified CDS sequence (wt) from neuraminidase__InfluenzaA__ABF82910

SEQ ID NO: 47097 - RNA, 1413 nt, Artificial Sequence; identical to SEQ ID NO: 46897
  derived and/or modified CDS sequence (wt) from neuraminidase__InfluenzaA__ABF82921

SEQ ID NO: 47098 - RNA, 1413 nt, Artificial Sequence; identical to SEQ ID NO: 46897
  derived and/or modified CDS sequence (wt) from neuraminidase__InfluenzaA__ABF82932

SEQ ID NO: 47099 - RNA, 1413 nt, Artificial Sequence
  derived and/or modified CDS sequence (wt) from neuraminidase__InfluenzaA__ABF82943
augaauccaaaucaaaaaauaauaaccauuggaucaaucaguauagcaaucggaauaauuagccuaauguugcaaauaggaaacauuauuucaauaugggcuagucacucaauccaaacuggaagucaaaaccacacuggaguaugcaaccaaagaaucaucacauaugaaaacagcaccugggugaaucacacauauguuaauauuaacaacaccaauguuauugcuggaaaggacaaaacuucagugacauuggccggcaauucaucucuuuguucuaucaguggaugggcuauauacacaaaagacaacagcauaagaauugguuccaaaggagauguuuuugucauaagagagccuuucauaucauguucucacuuggaaugcagaaccuuuuuucugacccaaggugcucuauuaaaugacaaacauucaaaugggaccguuaaggacagaagccccuauagggcuuuaaugagcuguccucuaggugaagcuccguccccauacaauucaaaguuugaaucaguugcuuggucagcaagcgcaugccaugauggcaugggcugguuaacaaucggaauuucugguccagacaauggagcaguggcuguacuaaaauacaacggcauaauaacugaaaccauaaaaaguuggaaaaagcaaauauuaagaacacaagagucugaaugugucugugugaacgggucauguuucaccauaaugaccgauggcccgaguaauggggccgccucguacaaaaucuucaagaucgaaaagggaaagguuacuaaaucaauagaguugaaugcacccaauuuucauuaugaggaauguuccuguuacccagacacuggcacagugauguguguaugcagggacaacuggcaugguucaaaucgacccugggugucuuuuaaucaaaaccuggauuaucaaauaggauacaucugcagugggguguucggugacaauccgcgucccaaagauggagagggcagcuguaauccagugacuguugauggagcaaacggaguaaagggguuuucauacaaauaugguaaugguguuuggauaggaaggacuaaaaguaacagacuuagaaagggguuugagaugauuugggauccuaauggauggacagauaccgacagugauuucucagugaaacaggauguuguggcaauaacugauuggucuggguacagcggaaguuucguucaacauccugaguuaacaggauuggacuguauaagaccuugcuucuggguugaguuaguuagaggacugccaaaagaaaauacaacaaucuggacuagugggagcagcauuucuuuuuguggcguaaauagugauacugcaaacuggucuuggccagacggugcugaguugccguuuaccauugacaaguag

SEQ ID NO: 47100 - RNA, 1350 nt, Artificial Sequence
  derived and/or modified CDS sequence (wt) from neuraminidase__InfluenzaA__ABG20474
augaauccaaaucagaagauaauaaccaucggaucaaucuguaugguaauuggaauaguuagcuuaauguuacaaauugggaacaugaucucaauaugggucagucauucaauccagacagggaaucaacgccaagcugaaccaaucagcaauacuaaauuucuuacugagaaagcuguggcuucaguaacauuagcgggcaauucaucucuuugccccauuagcggaugggcuguauacaguaaggacaacaguauaaggaucgguuccaggggggauguguuuguuauaagagagccguucaucucaugcucccacuuggaaugcagaacuuucuuuuugacucagggagccuugcugaaugacaagcacuccaaugggacugucaaagacagaagcccuuacagaacauugaugaguuguccugugggugaggcucccuccccauauaacucaagguuugagucuguugcuuggucagcaagugcuugccaugauggcaccaguugguugaccauuggaauuucugguccagacaauggggcuguggcuguauugaaauacaauggcauaauaacagacaccaucaagaguuggaggaacaacguacugagaacccaagagucugaaugugcauguguaaauggcucuugcuuuacuguaaugacugauggaccaaguaaugggcaggcaucauauaaaaucuucaaaauggaaaaagggaaagugguuaaaucagucgaauuggaugcuccuaauuaucacuaugaggagugcuccuguuauccugaugccggcgaaaucacaugugugugcagggauaauuggcauggcucaaauaggccauggguaucuuucaaucaaaauuuggaguaucaaauaggauauauaugcaguggaguuuucggagacaauccacgccccaaugauggaacagguaguugugguccgguguccccuaacggggcauaugggguaaaaggguuuucauuuaaauacggcaaugguguuuggauugggagaaccaaaagcacuaauuccaggagcggcuuugaaaugauuugggauccaaauggguggacuggaacggacaguaacuuuucggugaagcaagauaucguagcaauaacugauuggucaggauauagcgggaguuuuguccagcauccagaacugacaggauuagauugcauaagaccuuguuucuggguugaguuaaucagagggcggccuaaagagagcacaauuuggaccagugggagcagcauauuuuuuugugguguaaauagugacacuguuaguuggucuuggccagacggugcugaguugccauucaccauugacaaguag

SEQ ID NO: 47101 - RNA, 1410 nt, Artificial Sequence; identical to SEQ ID NO: 46924
  derived and/or modified CDS sequence (wt) from neuraminidase__InfluenzaA__ABG26761

SEQ ID NO: 47102 - RNA, 1410 nt, Artificial Sequence
  derived and/or modified CDS sequence (wt) from neuraminidase__InfluenzaA__ABG26772
augaauccaaaucaaaagauaauaacgauuggcucuguuucucucacuauugccacaauauguuuccuuaugcaaauugccauccugguaacuacuguaacauugcauuucaagcaauaugaaugcaacucccccccaaacaaccaaguaaugcugugugaaccaacaauaauagaaagaaacauaacagagauaguguaucugaccaacaccaccauagagaaggaaauaugccccaaacuagcagaauacagaaauuggucaaagccgcaauguaaaauuacaggauuugcaccuuuuucuaaggacaauucaauucggcuuuccgcugguggggacauuugggugacaagagaaccuuaugugucaugcgauccugacaaguguuaucaauuugcccuuggacagggaacaacacuaaacaacaggcauucaaaugacacaguacaugauaggaccccuuaucgaacccuauugaugaaugaguuggguguuccauuucauuugggaaccaagcaagugugcauagcaugguccagcucaaguugucacgauggaaaagcauggcugcauguuuguguaacugggcaugaugaaaaugcaacugcuagcuucauuuacgaugggaggcuuguagauaguauugguucaugguccaaaaaaauccucaggacccaggagucggaaugcguuuguaucaauggaacuuguacaguaguaaugacugaugggagugcuucaggaagagcugauacuaaaauacuauucauuaaggaggggaaaaucguucauauuagcccauugucaggaagugcucaacaugucgaggagugcuccuguuauccucgauauccuggugucagaugugucugcagagacaacuggaaaggcuccaauaggcccaucguagauauaaauguaaaggauuauagcauuguuuccaguuaugugugcucaggacuuguuggagacacacccagaaaaaacgacagcuccagcaguagccauugccugaauccuaacaaugaggaagggggucauggagugaaaggcugggccuuugaugauggaaaugacguguggaugggaagaacgaucagcgagaaguuacgcucagguuaugaaaccuucaaagucauugaaggcugguccaaaccuaacuccaaauugcagauaaauaggcaagucauaguugacagagguaauagguccgguuauucugguauuuucucuguugaaggcaaaagcugcaucaaucggugcuucuauguggaguugauaaggggaaggaaacaggaaacugaagucugguggaccucaaacaguauuguuguguuuuguggcaccucagguacauauggaacaggcucauggccugauggggcggacaucaaucucaugccuauauaa

SEQ ID NO: 47103 - RNA, 1413 nt, Artificial Sequence
  derived and/or modified CDS sequence (wt) from neuraminidase__InfluenzaA__ABG26783
augaauccaaaucaaaaaauaauaaccauuggaucaaucaguauugcaauuggaauaauuagucugauauugcaaauaggaaauauuauuucaauaugggcuagccacucaauccaaacuggaagucaaaaccacacuggaauaugcaaccaaagaaucauuacauaugaaaauagcaccuggguaaaucaaacauauguuaauauuaacaacacuaauguuguugcaggaaaggacaaaaccucaaugacauuggccggcaauucaucucuuugcccuauccguggaugggcuauauacacaaaagacaacagcauaagaauugguuccaaaggagauguuuuugucauaagagagccuuuuauaucauguucucacuuggaaugcagaaccuuuuuucugacccaaggugcucuauuaaaugacaagcauucaaaugggaccguuaaggacagaagcccuuauagggccuuaaugagcuguccucuaggugaagcuccgucuccauacaauucaagauuugaaucaguugcuuggucagcaagcgcaugccaugauggcuugggcuggcuaacaaucggaauuucugguccagauaauggggcaguggcuguacuaaaauacaacggcauaauaacugaaaccauuaaaaguuggaagaagcgaauauuaagaacacaagagucugaaugugucuguaugaacgguucauguuuuaccauaaugaccgauggcccgaguaauggggccgcaucguacagaaucuucaaaaucgagaaggggagaguuacuaaaucaauagaguuggaugcacccaauuaucauuacgaggaauguucauguuacccaaacacuggcacagugaugugugugugcagggacaauuggcacgguucaaaucgaccuugggugucuuuuaaucaaaaccuggauuaucaaauaggauacaucugcagugggguguucggugacaauccgcgucccaaagauggagaaggcagcuguaauccagugacuguugauggagcagacggaguaaagggguuuucauacagauaugguaaugguguuuggauaggaaggacuaaaaguaacagacucagaaagggauuugagaugauuugggauccuaauggauggacagauaccgacagugauuucucaaugaaacaggauaucguggcaaugacugauuggucaggguacagcggaaguuuuguucaacauccugagcuaacaggauuggacuguauaagaccuugcuucuggguugaauuagucagagggcuaccuagagaaaauacaacaaucuggacuagugggagcagcauuucuuuuuguggcguaaauagcgauacugcaaacuggucuuggccagacggugccgaguugccauucaccauugacaaguag

SEQ ID NO: 47104 - RNA, 1413 nt, Artificial Sequence; identical to SEQ ID NO: 46980
  derived and/or modified CDS sequence (wt) from neuraminidase__InfluenzaA__ABG26794

SEQ ID NO: 47105 - RNA, 1410 nt, Artificial Sequence
  derived and/or modified CDS sequence (wt) from neuraminidase__InfluenzaA__ABG26805
augaauccaaaucaaaagauaauaacaauuggcucuguuucucucaccauugcaacaauaugcuuccuuacgcaaauugccauccugguaacuacuguaacauugcauuucaagcaauaugagugcagcucccccccaaacaaccaaguaaugccgugugaaccaauaauaauagaaagaaacauaacagagauaguguauuugacuaacaccaccauagagaaagagauaugccccaaacuaguggaauacagaaauuggucaaagccgcaauguaaaauuacaggauuugcaccuuuuucuaaggacaauucaauucggcuuuccgcuggcggggacauuugggugacgagagaaccuuaugugucaugcgauccuggcaaguguuaucaauuugcacucgggcagggaaccacacuaaacaacaagcauucaaaugacacaauacaugauaggaccccuuaucgaacccuauugaugaaugaguuggguguuccauuucauuugggaaccaagcaagugugcauagcaugguccagcucaaguugucacgauggaaaagcauggcugcauguuuguaucacugggcaugauaaaaaugcaacugcuagcuucauuuacgaugggaggcuuguagacaguauugguucaugguccaaaaauauccucaggacccaggagucggaaugcguuuguaucaaugggacuuguacaguaguaaugacugauggaagugcuucagaaagagcugauacuaaaauacuauucauugaagaggggaaaaucguucauauuagcccauugucaggaagugcucagcauguagaggaguguuccuguuauccucgauauccuggugucagaugugucugcagagacaacuggaaaggcuccaauaggcccaucguagauauaaauguaaaagauuauagcauuguuuccaguuaugugugcucagggcuuguuggcgacacacccagaaaaaacgacagauccagcaguagcuauugccggaauccuaacaaugagaaagggaaucauggagugaaaggcugggccuuugacgauggaaaugacguguggaugggaagaacgauuggcgaggaguuacgcucagguuaugaaaccuuuaaagucauuggugguugguccacaccuaacuccaaauugcagauaaauaggcaaaucauaguugacagcgguaauagguccgguuauucugguauuuucucuguugagggcaaaagcugcaucaauaggugcuuuuauguggaguugauaaggggaagggaacaggaaacuagagucugguggaccucaaacaguauuguuguguuuuguggcaccucagguacauauggaacaggcucauggccugauggagcggacaucaaucucaugccuauauaa

SEQ ID NO: 47106 - RNA, 1413 nt, Artificial Sequence; identical to SEQ ID NO: 46963
  derived and/or modified CDS sequence (wt) from neuraminidase__InfluenzaA__ABG26816

SEQ ID NO: 47107 - RNA, 1413 nt, Artificial Sequence; identical to SEQ ID NO: 47071
  derived and/or modified CDS sequence (wt) from neuraminidase__InfluenzaA__ABG26827

SEQ ID NO: 47108 - RNA, 1413 nt, Artificial Sequence; identical to SEQ ID NO: 47071
  derived and/or modified CDS sequence (wt) from neuraminidase__InfluenzaA__ABG26838

SEQ ID NO: 47109 - RNA, 1410 nt, Artificial Sequence
  derived and/or modified CDS sequence (wt) from neuraminidase__InfluenzaA__ABG26860
augaauccaaaucaaaagauaauaacaauuggcucuguuucucucacuauugccacaauaugcuuccuuaugcaaauugccauccugguaacuacuguaacauugcauuucaagcaauaugagugcaacucccccccaaacaaccaaguaaugcugugugaaccaacaauaauagaaagaaacauaacagagauaguguaucugaccaacaccaccauagagaaagaaauaugccccaaacuggcagaauacagaaauuggucaaagccgcaauguaaaauuacaggauuugcaccuuuuucuaaggacaauucaauccggcuuuccgcggguggagacauuugggugacaagagaaccuuaugugucaugcgauccuggcaaguguuaucaauuugcccuuggacagggaacaacacuaaacaacaggcauucaaaugacacaguacaugauaggaccccuuaucgaacccuauugaugaaugaguuggguguuccauuucauuugggaaccaagcaagugugcauagcgugguccagcucaaguugucacgauggaaaagcauggcugcauguuuguguaacugggcaugaugaaaaugcaacugcuagcuucauuuacgaugggaggcuuguagauaguauugguucaugguccaaaaauauccucaggacccaggagucggaaugcguuuguaucaauggaacuuguacaguaguaaugacugauggaagugcuucagacagagcugauacuaaaauacuauucauugaagaggggaaaaucguucauauuagcccauugucaggaagugcucagcaugucgaggagugcuccuguuauccucgauauccuggugucagaugugucugcagagacaacuggaaaggcuccaauaggcccaucauagauauaaaugugaaagauuauagcauuguuuccaguuaugugugcucaggacuuguuggagacacacccagaaaaaacgacagcuccagcaguagcuauugcuggaauccuaacaaugagaaagggggucauggagugaaaggcugggccuuugaugauggaaaugacguguggaugggaagaacgaucagcgaggagucacgcucagguuaugaaaccuucaaagucauuggaggcugguccaaaccuaacuccaaauugcagauaaauaggcaagucauaguugacagagguaauagguccgguuauucugguauuuucucuguugaaggcaaaagcugcaucaaucggugcuuuuauguggaguugauaaggggaaggaaacaggaaacugaagucugguggaccucaaacaguauuguuguguuuuguggcaccucagguacauauggaacaggcucauggccugauggggcggacaucaaucucaugccuauauaa

SEQ ID NO: 47110 - RNA, 1410 nt, Artificial Sequence
  derived and/or modified CDS sequence (wt) from neuraminidase__InfluenzaA__ABG26871
augaauccaaaucaaaagauaauaacaauuggcucuguuucucucacuauugccacaauaugcuuccuuaugcaaauugccauccugguaacuacuguaacauugcauuucaagcaauaugagugcaacucccccccauacaaccaaauaaugcugugugaaccaacaauaauagaaagaaacauaacagagauaguguaucugaccaacaccaccauagagaaagaaauaugccccaaacuggcagaauacagaaauuggucaaagccgcaauguaaaauuacaggauuugcaccuuuuucuaaggacaauucaauucggcuuuccgcugguggagacauuugggugacaagagaaccuuaugugucaugcgauccuggcaaguguuaucaauuugcccuuggacagggaacaacacuaaacaacaggcauucaaaugacacaguacaugauaggaccccuuaucgaacccuauugaugaaugaguuggguguuccauuucauuugggaaccaagcaagugugcauagcgugguccagcucaaguugucacgauggaaaagcauggcugcauguuuguguaacugggcaugaugaaaaugcaacugcuagcuucauuuacgaugggaggcuuguagauaguauugguucaugguccaaaaauauccucaggacccaggagucggaaugcguuuguaucaauggaacuuguacaguaguaaugacugauggaagugcuucagacagagcugauacuaaaauacuauucauugaagaggggaaaaucguucauauuagcccauugucaggaagugcucagcaugucgaggagugcuccuguuauccucgauauccuggugucagaugugucugcagagacaacuggaaaggcuccaauaggcccaucguagauauaaaugugaaagauuauagcauuguuuccaguuaugugugcucaggacuuguuggagacacacccagaaaaaacgacagcuccagcaguagcuauugcuggaauccuaacaaugagaaagggggucauggagugaaaggcugggccuuugaugauggaaaugacguguggaugggaagaacgaucagcgaggagucacgcucagguuaugaaaccuucaaagucauuggaggcugguccaaaccuaacuccaaauugcagauaaauaggcaagucauaguugacagagguaauagguccgguuauucugguauuuucucuguugaaggcaaaagcugcaucaaucggugcuuuuauguggaguugauaaggggaaggaaacaggaaacugaagucugguggaccucaaacaguauuguuguguuuuguggcaccucagguacauauggaacaggcucauggccugauggggcggacaucaaucucaugccuauauaa

SEQ ID NO: 47111 - RNA, 1410 nt, Artificial Sequence
  derived and/or modified CDS sequence (wt) from neuraminidase__InfluenzaA__ABG26893
augaauccaaaucaaaagauaauaacaauuggcucuauuucucucacuauugccacaauaugcuuccuuaugcaaauugccauccugguaacuacuguaacauugcauuucaagcaauaugagugcaacucccccccaaacaaccaaguaaugcugugugaaccaacaauaauagaaagaaacauaacagagauaguguaucugaccaacaccaccauagagaaagaaauaugccccaaacuggcagaauacagaaauuggucaaagccgcaauguaaaauuacaggauuugcaccuuuuucuaaggacaauucaauucggcuuuccgcugguggagacauuugggugacaagagaaccuuaugugucaugcgauccuggcaaguguuaucaauuugcccuuggacagggaacaacacuaaacaacaggcauucaaaugacacaguacaugauaggaccccuuaucgaacccuauugaugaaugaguuggguguuccauuucauuugggaaccaagcaagugugcauagcgugguccagcucaaguugucacgauggaaaagcauggcugcauguuuguguaacugggcaugaugaaaaugcaacugcuagcuucauuuacgaugggaggcuuguagauaguauugguucaugguccaaaaauauccucaggacccaggagucggaaugcguuuguaucaauggaacuuguacaguaguaaugacugauggaagugcuucagacagagcugauacuaaaauacuauucauugaagaggggaaaaucguucauauuagcccauugucaggaagugcucagcaugucgaggagugcuccuguuauccucgauauccuggugucagaugugucugcagagacaacuggaaaggcuccaauaggcccaucguagauauaaaugugaaagauuauagcauuguuuccaguuaugugugcucaggacuuguuggagacacacccagaaaaaacgacagcuccagcaguagcuauugcuggaauccuaacaaugagaaagggggucauggagugaaaggcugggccuuugaugauggaaaugacguguggaugggaagaacgaucagcgaggagucacgcucagguuaugaaaccuucaaagucauuggaggcugguccaaaccuaacuccaaauugcagauaaauaggcaagucauaguugacagagguaauagguccgguuauucugguauuuucucuguugaaggcaaaagcugcaucaaucggugcuuuuauguggaguugauaaggggaaggaaacaggaaacugaagucugguggaccucaaacaguauuguuguguuuuguggcaccucagguacauauggaacaggcucauggccugauggggcggacaucaaucucaugccuauauaa

SEQ ID NO: 47112 - RNA, 1410 nt, Artificial Sequence
  derived and/or modified CDS sequence (wt) from neuraminidase__InfluenzaA__ABG26915
augaauccaaaucaaaagauaauaacaauuggcucuguuucucucacuauugccacaauaugcuuccuuaugcaaauugccauccugguaacuacuguaacauugcauuucaagcaauaugaaugcaacucccccccaaacaaccaaguaaugcugugugaaccaacaauaauagaaagaaacauaacagagauaguguaucugaccaacaccaccauagagaaagaaauaugccccaaacuagcagaauacagaaauuggucaaagccgcaauguaaaauuacaggauuugcaccuuuuucuaaggacaauucaauucggcuuuccgcugguggagacauuugggugacaagagaaccuuaugugucaugcgauccuggcaaguguuaucaauuugcccuuggacagggaacaacacuaaacaacaggcauucaaaugacacaguacaugauaggaccccuuaucgaacccuauugaugaaugaguuggguguuccauuucauuugggaaccaagcaagugugcauagcaugguccagcucaaguugucacgauggaaaagcauggcugcauguuuguguaacugggcaugaugaaaaugcaacugcuagcuucauuuacgaugggaggcuuguagauaguauuaguucaugguccaaaaauauccucagaacccaggagucggaaugcguuuguaucaauggaacuuguacaguaguaaugacugauggaagugcuucagaaagagcugauacuaaaauacuauucauugaagaggggaaaaucguucauauuagcccauugucaggaagugcucagcaugucgaggagugcuccuguuauccucgauauccuggugucagaugugucugcagagacaacuggaaaggcuccaauaggcccaucguagauauaaaugugaaagauuauagcauuguuuccaguuaugugugcucaggacuuguuggagacacacccagaaaaaacgacagcuccagcaguagcuauugccugaauccuaacaaugaggaagggggucauggagugaaaggcugggccuuugaugauggaaaugacguguggaugggaagaacgaucagcgaaaaguuacgcucagguuaugaaaccuucaaggucauuggaggcugguccaaaccuaacuccaaauugcagauaaauaggcaagucauaguugacagagguaauagguccgguuauucugguauuuucucuguugaaggcaaaagcugcgucaaucggugcuuuuauguggaguugauaaggggaaggaaacaggaaacugaagucugguggaccucaaacaguauuguuguguuuuguggcaccucagguacauauggaacaggcucauggccugauggagcggacaucaaucucaugccuauauaa

SEQ ID NO: 47113 - RNA, 1410 nt, Artificial Sequence
  derived and/or modified CDS sequence (wt) from neuraminidase__InfluenzaA__ABG26937
augaauccaaaucaaaagauaauaacaauuggcucuguuucucucacuauugccacaauaugcuuccuuaugcaaauugccauccugguaacuacuguaacauugcauuucaagcaauaugagugcaacucccccccaagcaaccaaguaaugcugugugaaccaacaauaauagaaagaaacauaacagagauaguguauuugacuaacaccaccauagagaaagaaauaugccccaaacuggcagaauacagaaauuggucaaagccgcaauguaaaauuacaggauuugcaccuuuuucuaaggacaauucaauucggcuuuccgcugguggagacauuugggugacaagagaaccuuaugugucaugcgauccuggcaaguguuaucaauuugcacuuggacagggaacaacacuaaacaacaggcauucaaaugacacaguacaugauaggaccccuuaucgaacccuauugaugaaugaguuggguguuccauuucauuugggaaccaagcaagugugcauagcaugguccagcucaaguugucacgauggaaaagcauggcugcauguuuguguaacugggcaugaugaaaaugcaacugcuagcuucauuuacgaugggaggcuuguagacaguauugguucaugguccaaaaauauccucaggacccaggagucggaaugcguuuguaucaauggaacuuguacaguaguaaugacugauggaagugcuucagaaagagcugauacuaaaauacuauucauugaagaggggaaaaucguucauauuagcccauugucaggaagugcucagcaugucgaggagugcuccuguuauccucgauauccuggugucagaugugucugcagagacaacuggaaaggcuccaauaggcccaucguagauauaaaugugaaagauuauagcauuguuuccaguuaugugugcucaggacuuguuggagacacacccagaaaaaacgacagcuccagcaguagcuauugccggaauccuaacaaugagaaagggagucauggagugaaagguugggccuuugaugauggaaaugacguguggaugggaagaacgaucagcgaggaguuacgcucugguuaugaaaccuucaaaguuauuggaggcugguccaaaccuaacuccaaauugcagauaaauaggcaagucauaguugacagggguaauagguccgguuauucugguauuuucucuguugaaggcaaaagcugcaucaaucggugcuuuuauguggaguugauaaggggaaggaaacaggaaacugaagucugguggaccucaaacaguauuguuguguuuuguggcaccucagguacauauggaacaggcucauggccugauggggcggacaucaaucucaugccuauauaa

SEQ ID NO: 47114 - RNA, 1413 nt, Artificial Sequence; identical to SEQ ID NO: 46897
  derived and/or modified CDS sequence (wt) from neuraminidase__InfluenzaA__ABG26948

SEQ ID NO: 47115 - RNA, 1410 nt, Artificial Sequence
  derived and/or modified CDS sequence (wt) from neuraminidase__InfluenzaA__ABG26959
augaauccaaaucaaaagauaauaacaauuggcucuguuucucucaccauugccacaauaugcuuccuuaugcaaauugccauccugguaacuacuguaacauugcauuucaagcaguaugaaugcaacucccccccaaacaaccaaguaaugcugugugaaccaacaauaauagaaagaaacauaacagagauaguguaucugaccaacaccaccauagagaaggaaauaugccccaaauuagcagaauacagaaauuggucaaagccgcaauguaacauuacaggauuugcaccuuuuucuaaggacaauucgauucggcuuuccgcugguggggacaucugggugacaagagaaccuuaugugucaugcgauccugacaaguguuaucaauuugcccuugggcagggaacaacacuaaacaacgggcauucaaaugacacaguacaugauaggaccccuuaccggacccuauugaugaaugaauuggguguuccauuucauuugggaaccaggcaagugugcauagcaugguccagcucaaguugucacgacggaaaagcauggcugcauguuuguguaacuggggaugaugaaaaugcaacugcuagcuucauuuacaaugggaggcuuguagauaguauugguucaugguccaaaaaaauacucagaacccaggagucggaaugcguuuguaucaauggaacuuguacaguaguaaugacugaugggagcgcuucaggaaaagcugauacuaaaauacuauucauugaggaggggaaaaucguucauauuagcacauugucaggaagugcucagcaugucgaggagugcuccuguuauccucgauauccuggugucagaugugucugcagagacaacuggaaaggcuccaauaggcccaucguagauauaaauguaaaggauuauagcauuguuuccaguuaugugugcucaggacuuguuggagacacacccagaaaaaacgacagcuucagcaguagccauugccuagauccuaacaaugaggaagguggucauggagugaaaggcugggccuuugaugauggaaaugacguguggaugggaagaacgaucagcgagaaguuacgcucagguuaugaaaccuucaaagucaucgaaggcugguccaaaccuaacuccaaauuacagacaaauaggcaagucauaguugaaagagguaacagguccgguuauucugguauuuucuccguugaaggcaaaagcugcaucaaucggugcuuuuauguggaguugauaaggggaaggaaagaggaaacugaagucugguggaccucaaacaguauuguuguguuuuguggcaccucagguacauauggaacaggcucauggccugauggggcggauaucaaucucaugccuauauaa

SEQ ID NO: 47116 - RNA, 1413 nt, Artificial Sequence
  derived and/or modified CDS sequence (wt) from neuraminidase__InfluenzaA__ABG37123
augaauccaaaucaaaaaauaauaaccauuggaucaaucaguauaacaaucggaauaauuagccuaauguugcaaauaggaaacauuauuucaauaugggcuagucacucaauccaaacuggaagucaaaaccacacuggaguaugcaaccaaagaaucaucacauaugaaaacagcaccugggugaaucacacauauguuaauauuaacaacaccaauguuauugcuggaaaggacaaaacuucagugacauuggccggcaauucaucucuuuguucuaucaguggaugggcuauauacacaaaagacaacagcauaagaauugguuccaaaggagauguuuuugucauaagagagccuuucauaucauguucucacuuggaaugcagaaccuuuuuucugacccaaggugcucuauuaaaugacaaacauucaaaugggaccguuaaggacagaagccccuauagggcuuuaaugagcuguccucuaggugaagcuccguccccauacaauucaaaguuugaaucaguugcuuggucagcaagcgcaugccaugauggcaugggcugguuaacaaucggaauuucugguccagacaauggagcaguggcuguacuaaaauacaacggcauaauaacugaaaccauaaaaaguuggaaaaagcaaauauuaagaacacaagagucugaaugugucugugugaacgggucauguuucaccauaaugaccgauggcccgaguaauggggccgccucguacaaaaucuucaagaucgaaaagggaaagguuacuaaaucaauagaguugaaugcacccaauuuucauuaugaggaauguuccuguuacccagacacuggcacagugauguguguaugcagggacaacuggcaugguucaaaucgacccugggugucuuuuaaucaaaaccuggauuaucaaauaggauacaucugcagugggguguucggugacaauccgcgucccaaagauggagagggcagcuguaauccagugacuguugauggagcaaacggaguaaagggguuuucauacaaauaugguaaugguguuuggauaggaaggacuaaaaguaacagacuuagaaagggguuugagaugauuugggauccuaauggauggacagauaccgacagugauuucucagugaaacaggauguuguggcaauaacugauuggucuggguacagcggaaguuucguucaacauccugaguuaacaggauuggacuguauaagaccuugcuucuggguugaguuagucagaggacugccaaaagaaaauacaacaaucuggacuagugggagcagcauuucuuuuuguggcguaaauagugauacugcaaacuggucuuggccagacggugcugaguugccguuuaccauugacaaguag

SEQ ID NO: 47117 - RNA, 1410 nt, Artificial Sequence
  derived and/or modified CDS sequence (wt) from neuraminidase__InfluenzaA__ABG37134
augaauccaaaucaaaagauaauaacgauuggcucuguuucucucacuauugccacaauaugcuuccuuaugcaaauugccauccugguaacuacuguaacauugcauuucaagcaauaugaaugcaacucccccccaaacaaccaaguaaugcugugugaaccaacaauaauagaaagaaacauaacagagauaguguaucugaccaacaccaccauagagaaggaaauaugccccaaacuagcagaauacagaaauuggucaaagccgcaauguaaaauuacaggauuugcaccuuuuucuaaggacaauucaauucggcuuuccgcugguggggacauuugggugacaagagaaccuuaugugucaugcgauccugacaaguguuaucaauuugcccuuggacagggaacaacacuaaacaacaggcauucaaaugacacaguacaugauaggaccccuuaucgaacccuauugaugaaugaguuggguguuccauuucauuugggaaccaagcaagugugcauagcaugguccagcucaaguugucacgauggaaaagcauggcugcauguuuguguaacugggcaugaugaaaaugcaacugcuagcuucauuuacgaugggaggcuuguagauaguauugguucaugguccaaaaaaauccucaggacccaggagucggaaugcguuuguaucaauggaacuuguacaguaguaaugacugaugggagugcuucaggaagagcugauacuaaaauacuauucauugaggaagggaaaaucguucauauuagccaauuguuaggaagugcucagcaugucgaagagugcuccuguuauccucgauauccuggugucagaugugucugcagagacaacuggaaaggcuccaauaggcccaucguagauauaaauguaaaggauuauagcauuguuuccaguuaugugugcucaggacuuguuggagacacacccagaaaaaacgacagcuccagcaguagccauugccugaauccuaacaaugaggaagggggucauggagugaaaggcugggccuuugaugauggaaaugacguguggaugggaagaacgaucagcgagaaguuacgcucagguuaugaaaccuucaaagucauugaaggcugguccaaacccaacuccaaauugcagauaaauaggcaagucauaguugacagagguaauagguccgguuauucugguauuuucucuguugaaggcaaaagcugcaucaaucggugcuuuuauguggaguugauaaggggaaggaaacaggaaacugaagucugguggaccucaaacaguauuguuguguuuuguggcaccucagguacauauggaacaggcucauggccugauggggcggacaucaaucucaugccuauauaa

SEQ ID NO: 47118 - RNA, 1410 nt, Artificial Sequence
  derived and/or modified CDS sequence (wt) from neuraminidase__InfluenzaA__ABG37145
augaauccaaaucaaaagauaauaacgauuggcucuguuucucucacuauugccacaauaugcuuccuuaugcaaauugccauccugguaacuacuguaacauugcauuucaagcaauaugaaugcaacucccccccaaacaaccaaguaaugcugugugaaccaacaauaauagaaagaaacauaacagagauaguguaucugaccaacaccaccauagagaaggaaauaugccccaaacuagcagaauacagaaauuggucaaagccgcaauguaaaauuacaggauuugcaccuuuuucuaaggacaauucaauucggcuuuccgcugguggggacauuugggugacaagagaaccuuaugugucaugcgauccugacaaguguuaucaauuugcccuuggacagggaacaacacuaaacaacaggcauucaaaugacacaguacaugauaggaccccuuaucgaacccuauugaugaaugaguuggguguuccauuucauuugggaaccaagcaagugugcauagcaugguccagcucaaguugucacgauggaaaggcauggcugcauguuuguguaacugggcaugaugaaaaugcaacugcuagcuucauuuacgaugggaggcuuguagauaguauugguucaugguccaaaaaaauccucaggacccaggagucggaaugcguuuguaucaauggaacuuguacaguaguaaugacugaugggagugcuucaggaagagcugauacuaaaauacuauucauugaggaggggaaaaucguucauauuagcccauugucaggaagugcucagcaugucgaggagugcuccuguuauccucgauacccuggugucagaugugucugcagagacaacuggaaaggcuccaauaggcccaucguagauauaaauguaaaggauuauagcauuguuuccaguuaugugugcucaggacuugucggagacacacccagaaaaaacgacagcuccagcaguagccauugccugaauccuaacaaugaggaagggggucauggagugaaaggcugggccuuugaugauggaaaugacguguggaugggaagaacgaucagcgagaaguuacgcucagguuaugaaaccuucaaagucauugaaggcugguccaaaccuaacuccaaauugcagauaaauaggcaagucauaguugacagagguaauagguccgguuauucugguauuuucucuguugaaggcaaaagcugcaucaaucggugcuuuuauguggaguugauaaggggaaggaaacaggaaacugaagucugguggaccucaaacaguauuguuguguuuuguggcacaucagguacauauggaacaggcucauggccugauggggcggacaucaaucucaugccuauauaa

SEQ ID NO: 47119 - RNA, 1410 nt, Artificial Sequence
  derived and/or modified CDS sequence (wt) from neuraminidase__InfluenzaA__ABG37156
augaauccaaaucaaaagauaauaacaauuggcucuguuucucucacuauugccacaauaugcuuccuuaugcaaauugccauccugguaacuacuguaacauugcauuucaagcaauaugaaugcaacucccccccaaacaaccaaguaaugcugugugaaccaacaauaauagagagaaacauaacagagauaguguaucugaccaacaccaccauagagaaagaaauaugccccaaacuagcagaauacagaaauuggucaaagccgcaauguaaaauuacaggauuugcaccuuuuucuaaggacaauucaauucggcuuuccgcugguggagacauuugggugacaagagaaccuuaugugucaugcgauccuggcaaguguuaucaauuugcccucggacagggaacaacacuaaacaacaggcauucaaaugacacaguacaugauaggaccccuuaucggacccuauugaugaaugaguuggguguuccauuucauuugggaaccaagcaaguaugcauagcaugguccaguucaaguugucacgauggaaaagcauggcugcauguuuguguaacugggcaugaugaaaaugcaacugcuagcuucauuuacgaugggaggcuuguagauaguauugguucaugguccaaaaauauccucaggacccaggagucggaaugcguuuguaucaauggaacuuguacaguaguaaugacugauggaagugcuucaggaagagcugauacuaaaauacuauucauugaagaggggaaaaucguucauauuagcccacugucaggaagugcucaacaugucgaggagugcuccuguuauccucgauauccuggugucagaugugucugcagagacaacuggaaaggcuccaauaggcccaucguagauauaaaugugaaagauuauagcauuguuuccaauuaugugugcucaggacuuguuggagacacacccagaaaaaacgacagcuccagcaguagccauugccugaauccuaacaaugaggaagggggucauggagugaaaggcugggccuuugaugauggaaaugauguguggaugggaagaacgaucagugagaaguuacgcucagguuaugaaaccuucaaagucauuggaggcugguccaaaccuaacuccaaauugcagauaaauaggcaagucauaguugacagagguaauagguccgguuauucugguauuuucucuguugaaggcaaaagcugcaucaaucggugcuuuuauguggaguugauaaggggaaggaaacaggaaacugaagucugguggaccucaaacaguauuguuguguuuuguggcaccucagguacauauggaacaggcucauggccugauggggcggacaucaaucucaugccuauauaa

SEQ ID NO: 47120 - RNA, 1410 nt, Artificial Sequence
  derived and/or modified CDS sequence (wt) from neuraminidase__InfluenzaA__ABG37167
augaauccaaaucaaaagauaauaacaauuggcucuguuucucucacuauugccacaauaugcuuccuuaugcaaauugccauccugguaacuacuguaacauugcauuucaagcaauaugaaugcaacucccccccaaacaaccaaguaaugcugugugaaccaacaauaauagaaagaaacauaacagagauaguguaucugaccaacaccaccauagaaaaagaaauaugccccaaacuagcagaauacagaaauuggucaaagccgcaauguaaaauuacaggauuugcaccuuuuucuaaggacaauucaauucggcuuuccgcugguggagacauuugggugacaagagaaccuuaugugucgugcgauccugacaaguguuaucaauuugcccuuggacagggaacaacacuaaacaacaggcauucaaaugacacaguacaugauaggaccccuuaucgaacccuauugaugaaugaguuggguguuccauuucauuugggaaccaagcaagugugcauagcaugguccagcucaaguugucacgauggaaaagcauggcugcauguuuguguaacugggcaugaugaaaaugcaacugcuagcuucauuuacgaugggaggcuuguagauaguauuaguucaugguccaaaaauauccucaggacccaggagucggaaugcguuuguaucaauggaacuuguacaguaguaaugacugauggaagugcuucaggaagagcugauacuaaaauacuauucauugaagaggggaaaauuguucauauuagcccauugucaggaagugcucagcaugucgaggagugcuccuguuauccucgauacccuggugucagaugugucugcagagacaacuggaaaggcuccaauaggcccaucguagauauaaaugugaaagauuauagcauuguuuccaguuaugugugcucaggacuuguuggagacacacccagaaaaaaugacagcuccagcaguagcuauugccugaauccuaacaaugaggaagggggucauggagugaaaggcugggccuuugaugauggaaaugacguguggaugggaagaacgaucagcgaaaaguuacgcucagguuaugaaaccuucaaggucauuggaggcugguccaaaccuaacuccaaauugcagauaaauaggcaagucauaguugacagagguaauagguccgguuauucugguauuuucucuguugaaggcaaaagcugcgucaaucggugcuuuuauguggaguugauaaggggaaggaaacaggaaacugaagucugguggaccucaaacaguauuguuguguuuuguggcaccucagguacauauggaacaggcucauggccugauggggcggacaucaaucucaugccuauauaa

SEQ ID NO: 47121 - RNA, 1410 nt, Artificial Sequence
  derived and/or modified CDS sequence (wt) from neuraminidase__InfluenzaA__ABG37189
augaauccaaaucaaaagauaauaacaauuggcucuguuucucucacuauugccacaauaugcuuccuuaugcaaauugccauccugguaacuacuguaacauugcauuucaagcaauaugaaugcaacucccccccaaacaaccaaguauugcugugugaaccaacaauaauagagagaaacauaacagagauaguguaucugaccaacaccaccauagagaaagaaauaugccccaaacuagcagaauacagaaauuggucaaagccgcaauguaaaauuacaggauuugcaccuuuuucuaaggacaauucaauucggcuuuccgcugguggagacauuugggugacaagagaaccuuaugugucaugcgauccuggcaaguguuaucaauuugcccucggacagggaacaacacuaaacaacaggcauucaaaugacacaguacacgauaggaccccuuaucggacccuauugaugaaugaguuggguguuccauuucauuugggaaccaagcaaguaugcauagcaugguccagcucaaguugucacgauggaaaagcauggcugcauguuuguguaacugggcaugaugaaaaugcaacugcuagcuucaucuacgaugggaggcuuguagauaguauugguucaugguccaaaaauauccucaggacccaggagucggaaugcguuuguaucaauggaacuuguacaguaguaaugacugacggaagugcuucaggaagagcugauacuaaaauacuauucauugaagaggggaaaaucguucauauuagcucacugucaggaagugcucagcaugucgaggagugcuccuguuauccucgauauccuggugucagaugcgucugcagagacaacuggaaaggcuccaauaggcccaucguagauauaaaugugaaagauuauagcauuguuuccaguuaugugugcucaggacuuguuggagacacacccagaaaaaacgacagcuccagcaguagccauugccugaauccuaacaaugaggaagggggucauggagugaaaggcugggccuuugaugauggaaaugauguguggaugggaagaacgaucagcgagaaguuacgcucagguuaugaaaccuucaaagucauuggaggcugguccaaaccuaacuccaaauugcagauaaauaggcaagucauaguugacagagguaauagguccgguuauucugguauuuucucuguugaaggcaaaagcugcaucaaucggugcuuuuauguggaguugauaaggggaaggaaacaggaaacugaagucugguggaccucaaacaguauuguuguguuuuguggcaccucagguacauauggaacaggcucauggccugauggagcggacaucaaucucaugccuauauaa

SEQ ID NO: 47122 - RNA, 1410 nt, Artificial Sequence
  derived and/or modified CDS sequence (wt) from neuraminidase__InfluenzaA__ABG37200
augaauccaaaucaaaagauaauaacaauuggcucuguuucucucacuauugccacaauaugcuuccuuaugcaaauugccauccugguaacuacuguaacauugcauuucaagcaauaugaaugcaacucccccccaaacaaccaaguaaugcugugugaaccaacaauaauagagagaaacauaacagagauaguguaucugaccaacaccaccauagagaaagaaauaugccccaaacuagcagaauacagaaauuggucaaagccgcaauguaaaauuacaggauuugcaccuuuuucuaaggacaauucaauucggcuuuccgcugguggagacauuugggugacaagagaaccuuaugugucaugcgauucuggcaaguguuaucaauuugcccucggacagggaacaacacuaaacaacaggcauucaaaugacacaguacaugauaggaccccuuaucggacccuauugaugaaugaguuggguguuccauuucauuugggaaccaagcaaguaugcauagcaugguccaguucaaguugucacgauggaaaagcauggcugcauguuuguguaacugggcaugaugaaaaugcaacugcuagcuucauuuacgaugggaggcuuguagauaguauugguucaugguccaaaaauauccucaggacccaggagucggaaugcguuuguaucaauggaacuuguacaguaguaaugacugauggaagugcuucaggaagagcugauacuaaaauacuauucauugaagaggggaaaaucguucauauuagcacacugucaggaagugcucaacaugucgaggagugcuccuguuauccucgauauccuggugucagaugugucugcagagacaacuggaaaggcuccaauaggcccaucguagauauaaaugugaaagauuauagcauuguuuccaguuaugugugcucaggacuuguuggagacacacccagaaaaaacgacagcuccagcaguagccauugccugaauccuaacaaugaggaagggggucauggagugaaaggcugggccuuugaugauggaaaugauguguggaugggaagaacgaucagugagaaguuacgcucagguuaugaaaccuucaaagucauuggaggcugguccaaaccuaacuccaaauugcagauaaauaggcaagucauaguugacagagguaauagguccgguuauucugguauuuucucuguugaaggcaaaagcugcaucaaucggugcuuuuauguggaguugauaaggggaaggaaacaggaaacugaagucugguggaccucaaacaguauuguuguguuuuguggcaccucagguacauauggaacaggcucauggccugauggggcggacaucaaucucaugccuauauaa

SEQ ID NO: 47123 - RNA, 1410 nt, Artificial Sequence
  derived and/or modified CDS sequence (wt) from neuraminidase__InfluenzaA__ABG37211
augaauccaaaucaaaagauaauaacaauuggcucuguuucucucaccauugcaacaauaugcuuccuuacgcaaauugccauccugguaacuacuguaacauugcauuucaagcaauaugagugcagcucccccccaaacaaccaaguaaugccgugugaaccaauaauaauagaaagaaacauaacagagauaguguauuugacuaacaccaccauagagaaagagauaugccccaaacuaguggaauacagaaauuggucaaagccgcaauguaaaauuacaggauuugcaccuuuuucuaaggacaauucaauucggcuuuccgcuggcggggacauuugggugacgagagaaccuuaugugucaugcgauccuggcaaguguuaucaauuugcacucgggcagggaaccacacuaaacaacaagcauucaaaugacacaauacaugauaggaccccuuaucgaacccuauugaugaaugaguuggguguuccauuucauuugggaaccaagcaagugugcauagcaugguccagcucaaguugucacgauggaaaagcauggcugcauguuuguaucacugggcaugauaaaaaugcaacugcuagcuucauuuacgaugggaggcuuguagacaguauugguucaugguccaaaaauauccucaggacccaggagucggaaugcguuuguaucaaugggacuuguacaguaguaaugacugauggaagugcuucagaaagagcugauacuaaaauacuauucauugaagaggggaaaaucguucauauuagcccauugucaggaagugcucagcauguagaggaguguuccuguuauccucgauauccuggugucagaugugucugcagagacaacuggaaaggcuccaauaggcccaucguagauauaaauguaaaagauuauagcauuguuuccaguuaugugugcucagggcuuguuggcgacacacccagaaaaaacgacagauccagcaguagcuauugccggaauccuaacaaugagaaagggaaucauggagugaaaggcugggccuuugacgauggaaaugacguguggaugggaagaacgauuggcgaggaguuacgcucagguuaugaaaccuuuaaagucauuggugguugguccacaccuaacuccaaauugcagauaaauaggcaagucauaguugacagcgguaauagguccgguuauucugguauuuucucuguugagggcaaaagcugcaucaauaggugcuuuuauguggaguugauaaggggaagggaacaggaaacuagagucugguggaccucaaacaguauuguuguguuuuguggcaccucagguacauauggaacaggcucauggccugauggagcggacaucaaucucaugccuauauaa

SEQ ID NO: 47124 - RNA, 1410 nt, Artificial Sequence
  derived and/or modified CDS sequence (wt) from neuraminidase__InfluenzaA__ABG37233
augaauccaaaucaaaagauaauaacaauuggcucuguuucucucacuauugccacaauaugcuuccuuaugcaaauugccauccugguaacuacuguaacauugcauuucaagcaauaugagugcaacucccccccaagcaaccaagcaaugcugugugaaccaacaauaauagaaagaaacauaacagagauaguguauuugacuaacaccaccauagagaaagaaauaugccccaaacuggcagaauacagaaauuggucaaagccgcaauguaaaauuacaggauuugcaccuuuuucuaaggacaauucaauucggcuuuccgcugguggagacauuugggugacaagagaaccuuaugugucaugcgauccuggcaaguguuaucaauuugcacuuggacagggaacaacaauaaacaacaggcauucaaaugacacaguacaugauaggaccccuuaucgaacccuauugaugaaugaguuggguguuccauuucauuugggaaccaagcaagugugcauagcaugguccagcucaaguugucacgauggaaaagcauggcugcauguuuguguaacugggcaugaugaaaaugcaacugcuagcuucauuuacgaugggaggcuuguagauaguauugguucaugguccaaaaauauccucaggacccaggagucggaaugcguuuguaucaauggaacuuguacaguaguaaugacugauggaagugcuucaggaagagcugauacuaaaauacuauucauugaagaggggaaaaucguucauauuagcccauugucaggaagugcucagcaugucgaggagugcuccuguuauccucgauauccuggugucagaugugucugcagagacaacuggaaaggcuccaauaggcccaucguagauauaaaugugaaagauuauagcauuguuuccaguuaugugugcucaggacuuguuggagacacacccagaaaaaacgacagcuccagcaauagcuauugccggaauccuaacaaugagaaagggagucauggagugaaagguugggccuuugaugauggaaaugacguguggaugggaagaacgaucagcgcggagucacgcucugguuaugaaaccuucaaaguuauuggaggcugguccaaaccuaacuccaaauugcagauaaauaggcaagucauaguugauagagguaauagguccgguuauucugguauuuucucuguugaaggcaaaagcugcaucaaucggugcuuuuauguggaguugauaaggggaaggaaacaggaaacugaagucugguggaccucaaacaguauuguuguguuuuguggcaccucagguacauauggaacaggcucauggccugauggggcggacaucaaucucaugccuauauaa

SEQ ID NO: 47125 - RNA, 1410 nt, Artificial Sequence
  derived and/or modified CDS sequence (wt) from neuraminidase__InfluenzaA__ABG37244
augaauccaaaucaaaagauaauaacaauuggcucuguuucucucacuauugccacaauaugcuuccuuaugcaaauugccauccugguaacuacuguaacauugcauuucaagcaauaugagugcaacucccccccaaacaaccaaguaaugcugugugaaccaacaauaauagaaagaaacauaacagagauaguguaucugaccaacaccaccauagagaaagaaauaugccccaaacuggcagaauacagaaauuggucaaagccgcaauguaaaauuacaggauuugcaccuuuuucuaaggacaauucaauucggcuuuccgcugguggagacauuugggugacaagagaaccuuaugugucaugcgauccuggcaaguguuaucaauuugcccuuggacagggaacaacacuaaacaacaggcauucaaaugacacaguacaugauaggaccccuuaucgaacccuauugaugaaugaguuggguguuccauuucauuugggaaccaagcaagugugcauagcgugguccagcucaaguugucacgauggaaaagcauggcugcauguuuguguaacugggcaugaugaaaaugcaacugcuagcuucauuuacgaugggaggcuuguagauaguauugguucaugguccaaaaauauccucaggacccaggagucggaaugcguuuguaucaauggaacuuguacaguaguaaugacugauggaagugcuucagacagagcugauacuaaaauacuauucauugaagaggggaaaaucguucauauuagcccauugucaggaagugcucagcaugucgaggagugcuccuguuauccucgauauccuggugucagaugugucugcagagacaacuggaaaggcuccaauaggcccaucguagauauaaaugugaaagauuauagcauuguuuccaguuaugugugcucaggacuuguuggagacacacccagaaaaaacgacagcuccagcaguagcuauugcuggaauccuaacaaugagaaagggggucauggagugaaaggcugggccuuugaugauggaaaugacguguggaugggaagaacgaucagcgaggagucacgcucagguuaugaaaccuucaaagucauuggaggcugguccaaaccuaacuccaaauugcagauaaauaggcaagucauaguugacagagguaauagguccgguuauucugguauuuucucuguugaaggcaaaagcugcaucaaucggugcuuuuauguggaguugauaaggggaaggaaacaggaaacugaagucugguggaccucaaacaguauuguuguguuuuguggcaccucagguacauauggaacaggcucauggccugauggggcggacaucaaucucaugccuauauaa

SEQ ID NO: 47126 - RNA, 1410 nt, Artificial Sequence; identical to SEQ ID NO: 47125
  derived and/or modified CDS sequence (wt) from neuraminidase__InfluenzaA__ABG37255

SEQ ID NO: 47127 - RNA, 1410 nt, Artificial Sequence
  derived and/or modified CDS sequence (wt) from neuraminidase__InfluenzaA__ABG37266
augaauccaaaucaaaagauaauaacaauuggcucuguuucucucacuauugccacaauaugcuuccuuaugcaaauugccauccugguaacuacuguaacauugcauuucaagcaauaugaaugcaacucccccccaaacaaccaaguaaugcugugugaaccaacaauaauagaaagaaacauaacagagauaguguaucugaccaacaccaccauagagaaagaaauaugccccaaacuagcagaauacagaaauuggucaaagccgcaauguaaaauuacaggauuugcaccuuuuucuaaggacaauucaauucggcuuuccgcugguggagacauuugggugacaagagaaccuuaugugucaugcgauccuggcaaguguuaucaauuugcccuuggacagggaacaacacuaaacaacaggcauucaaaugacacaguacaugauaggaccccuuaucgaacccuauugaugaaugaguuggguguuccauuucauuugggaaccaagcaagugugcauagcaugguccagcucaaguugucacgauggaaaagcauggcugcauguuuguguaacugggcaugaugaaaaugcaacugcuagcuucauuuacgaugggaggcuuguagauaguauuaguucaugguccaaaaauauccucaggacccaggagucggaaugcguuuguaucaauggaacuuguacaguaguaaugacugauggaagugcuucagaaagagcugauacuaaaauacuauucauugaagaggggaaaaucguucauauuagcccauugucaggaagugcucagcaugucgaggagugcuccuguuauccucgauauccuggugucagaugugucugcagagacaacuggaaaggcuccaauaggcccaucguagauauaaaugugaaagauuauagcauuguuuccaguuaugugugcucaggacuuguuggagacacacccagaaaaaacgacagcuccagcaguagcuauugccugaauccuaacaaugaggaagggggucauggagugaaaggcugggccuuugaugauggaaaugacguguggaugggaagaacgaucagcgaaaaguuacgcucagguuaugaaaccuucaaggucauuggaggcugguccaaaccuaacuccaaauugcagauaaauaggcaagucauaguugacagagguaauagguccgguuauucugguauuuucucuguugaaggcaaaagcugcgucaaucggugcuuuuauguggaguugauaaggggaaggaaacaggaaacugaagucugguggaccucaaacaguauuguuguguuuuguggcaccucagguacauauggaacaggcucauggccugauggagcggacaucaaucucaugccuauauaa

SEQ ID NO: 47128 - RNA, 1410 nt, Artificial Sequence; identical to SEQ ID NO: 47125
  derived and/or modified CDS sequence (wt) from neuraminidase__InfluenzaA__ABG37277

SEQ ID NO: 47129 - RNA, 1410 nt, Artificial Sequence; identical to SEQ ID NO: 47125
  derived and/or modified CDS sequence (wt) from neuraminidase__InfluenzaA__ABG37288

SEQ ID NO: 47130 - RNA, 1410 nt, Artificial Sequence; identical to SEQ ID NO: 47125
  derived and/or modified CDS sequence (wt) from neuraminidase__InfluenzaA__ABG37310

SEQ ID NO: 47131 - RNA, 1410 nt, Artificial Sequence; identical to SEQ ID NO: 47127
  derived and/or modified CDS sequence (wt) from neuraminidase__InfluenzaA__ABG37321

SEQ ID NO: 47132 - RNA, 1410 nt, Artificial Sequence
  derived and/or modified CDS sequence (wt) from neuraminidase__InfluenzaA__ABG37332
augaauccaaaucaaaagauaauaacaauuggcucuguuucucucacuauugccacaauaugcuuccuuaugcaaauugccauccugguaacuacuguaacauugcauuucaagcaacaugagugcaacucccccccaaacaaccaaguaaugcugugugaaccaacaauaauagaaagaaacauaacagagauagugcaucugaccaacaccaccauagagaaagaaauaugccccaaacuggcagaauacagaaauuggucaaagccgcaauguaaaauuacaggauuugcaccuuuuucuaaggacaauucaauucggcuuuccgcugguggagacauuugggugacaagagaaccuuaugugucaugcgauccuggcaaguguuaucaauuugcccuuggacagggaacaacacuaaacaacaggcauucaaaugacacaguacaugauaggaccccuuaucgaacccuauugaugaaugaguuggguguuccauuucauuugggaaccaagcaagugugcauagcgugguccagcucaaguugucacgauggaaaagcauggcugcauguuuguguaacugggcaugaugaaaaugcaacugcuagcuucauuuacgaugggaggcuuguagauaguauugguucaugguccaaaaauauccucaggacccaggagucggaaugcguuuguaucaauggaacuuguacaguaguaaugacugauggaagugcuucagacagagcugauacuaaaauacuauucauugaagaggggaaaaucguucauauuagcccauuaucaggaggugcucagcaugucgaggagugcuccuguuauccucgauacccuggugucagaugugucugcagagacaacuggaaaggcuccaauaggcccaucguagauauaaaugugaaagauuauagcauuguuuccaguuaugugugcucaggacuuguuggagacacacccagaaaaaacgacagcuccagcaguagcuauugcuggaauccuaacaaugagaaagggggucauggagugaaaggcugggccuuugaugauggaaaugacguguggaugggaagaacgaucagcgaggagucacgcucagguuaugaaaccuucaaagucauuggaggcugguccaaaccuaacuccaaauugcagauaaauaggcaagucauaguugacagagguaauagguccgguuauucugguauuuucucuguugaaggcaaaagcugcaucaaucggugcuuuuauguggaguugauaaggggaaggaaacaggaaacugaagucugguggaccucaaacaguauuguuguguuuuguggcaccucagguacauauggaacaggcucauggccugauggggcggacaucaaucucaugccuauauaa

SEQ ID NO: 47133 - RNA, 1410 nt, Artificial Sequence
  derived and/or modified CDS sequence (wt) from neuraminidase__InfluenzaA__ABG37343
augaauccaaaucaaaagauaauaacaauuggcucuguuucucucacuauugccacaauaugcuuccuuaugcaaauugccauccugguaacuacuguaacauugcauuucaagcaauaugagugcaacucccccccaaacaaccaaguaaugcugugugaaccaacaauaauagaaagaaacauaacagagauaguguaucugaccaacaccaccauagagaaagaaauaugccccaaacuggcagaauacagaaauuggucaaagccgcaauguaaaauuacaggauuugcaccuuuuucuaaggacaauucaauucggcuuuccgcugguggagacauuugggugacaagagaaccuuaugugucaugcgauccuggcaaguguuaucaauuugcccuuggacagggaacaacacuaaacaacaggcauucaaaugacacaguacaugauaggaccccuuaucgaacccuauugaugaaugaguuggguguuccauuucauuugggaaccaagcaagugugcauagcgugguccagcucaaguugucacgauggaaaagcauggcugcauguuuguguaacugggcaugaugaaaaugcaacugcuagcuucauuuacgaugggaggcuuguagauaguauugguucaugguccaaaaauauccucaggacccaggagucggaaugcguuuguaucaauggaacuuguacaguaguaaugacugauggaagugcuucagacagagcugauacuaaaauacuauucauugaagaggggaaaaucguucauauuagcccauugucaggaagugcucagcaugucgaggagugcuccuguuauccucgauauccuggugucagaugugucugcagagacaacuggaaaggcuccaauaggcccaucguagauauaaaugugaaaaauuauagcauuguuuccaguuaugugugcucaggacuuguuggagacacacccagaaaaaacgacagcuccagcaguagcuauugcuggaauccuaacaaugagaaaggggggcauggagugaaaggcugggccuuugaugauggaaaugacguguggaugggaagaacgaucagcgaggagucacgcucagguuaugaaaccuucaaagucauuggaggcugguccaaaccuaacuccaaauugcagauaaauaggcaagucauaguugacagagguaauagguccgguuauucugguauuuucucuguugaaggcaaaagcugcaucaaucggugcuuuuauguggaguugauaaggggaaggaaacaggaaacugaagucugguggaccucaaacaguauuguuguguuuuguggcaccucagguacauauggaacaggcucauggccugauggggcggacaucaaucucaugccuauauaa

SEQ ID NO: 47134 - RNA, 1410 nt, Artificial Sequence
  derived and/or modified CDS sequence (wt) from neuraminidase__InfluenzaA__ABG37354
augaauccaaaucaaaagauaauaacaauuggcucuguuucucucacuauugccacaauaugcuuccuuaugcaaauugccauccugguaacuacuguaacauugcauuucaagcaauaugagugcaacucccccccaagcaaccaaguaaugcugugugaaccaacaauaauagaaagaaacauaacagagauaguguauuugacuaacaccaccauagagaaagaaauaugccccaaacuggcagaauacagaaauuggucaaagccgcaauguaaaauuacaggauuugcaccuuuuucuaaggacaauucaauucggcuuuccgcugguggagacauuugggugacaagagaaccuuaugugucaugcgauccuggcaaguguuaucaauuugcacuuggacagggaacaacacuaaacaacaggcauucaaaugacacaguacaugauaggaccccuuaucgaacccuauugaugaaugaguuggguguuccauuucauuugggaaccaagcaagugugcauagcaugguccagcucaaguugucacgauggaaaagcauggcugcauguuuguguaacugggcaugaugaaaaugcaacugcuagcuucauuuacgaugggaggcuuguagauaguauugguucaugguccaaaaauauccucaggacccaggagucggaaugcguuuguaucaauggaacuuguacaguaguaaugacugauggaagugcuucagaaagagcugauacuaaaauacuauucauugaagaggggaaaaucguucauauuagcccauugucaggaagugcucagcaugucgaggagugcuccuguuauccucgauauccuggugucagaugugucugcagagacaacuggaaaggcuccaauaggcccaucguagauauaaaugugaaagauuauagcauuguuuccaguuaugugugcucaggacuuguuggagacacacccagaaaaaacgacagcuccagcaguagcuauugccggaauccuaacaaugagaaagggagucauggagugaaagguugggccuuugaugauggaaaugacguguggaugggaagaacgaucagcgaggaguuacgcucugguuaugaaaccuucaaaguuauuggaggcugguccaaaccuaacuccaaauugcagauaaauaggcaagucauaguugacagagguaauagguccgguuauucugguauuuucucuguugaaggcaaaagcugcaucaaucggugcuuuuauguggaguugauaaggggaaggaaacaggaaacugaagucugguggaccucaaacaguauuguuguguuuuguggcaccucagguacauauggaacaggcucauggccugauggggcggacaucaaucucaugccuauauaa

SEQ ID NO: 47135 - RNA, 1413 nt, Artificial Sequence
  derived and/or modified CDS sequence (wt) from neuraminidase__InfluenzaA__ABG37365
augaauccaaaucaaaaaauaauaaccauuggaucaaucaguauagcaaucggaauaauuagucuaauguugcaaauaggaaauauuauuucaauaugggcuagucacucaauccaaacuggaagucaaaaccacacuggaauaugcaaccaaagaaucaucacauaugaaaacagcaccugggugaaucacacauauguuaauauuaacaacacuaauguuguugcuggaaaggacaaaacuucagugacauuggccggcaauucaucucuuuguucuaucaguggaugggcuauauacacaaaagacaacagcauaagaauuggauccaaaggagauguuuuugucauaagagaaccuuucauaucauguucucacuuggaaugcagaaccuuuuuucugacccaaggugcucuauuaaaugacaaacauucaaauggaaccguuaaggacagaaguccuuauagggccuuaaugagcugcccucuaggugaagcuccguccccauacaauucaaaguuugaaucaguugcauggucagcaagcgcaugccaugauggcaugggcugguuaacaaucggaauuucugguccagacaauggagcuguggcuguacuaaaauacaacggcauaauaacugaaaccauaaaaaguuggaaaaagcgaauauuaagaacacaagagucugaaugugucugugugaacgggucauguuucaccauaaugaccgauggcccgaguaauggggccgccucguacaaaaucuucaagaucgaaaaggggaagguuacuaaaucaauagaguugaaugcacccaauuuccauuaugaggaauguuccuguuacccagacacuggcacagugauguguguaugcagggacaacuggcaugguucaaaucgaccuugggugucuuuuaaucaaaaccuggauuaucaaauaggauacaucugcagugggguguucggugacaauccgcgucccaaagauggagagggcagcuguaauccagugacuguugauggagcagacggaguaaagggguuuucauacaaauaugguaaugguguuuggauaggaaggacuaaaaguaacagacuuagaaagggguuugagaugauuugggauccuaauggauggacagauaccgacaguaauuucucagugaaacaggauguuguggcaauaacugauuggucaggguacagcggaaguuucguucaacauccugaguuaacaggauuggacuguauaagaccuugcuucuggguugaguuagucagaggacugccuagagaaaauacaacaaucuggacuagugggagcagcauuucuuuuuguggcguaaauagugauacugcaaacuggucuuggccagacggugcugaguugccguucaccauugacaaguag

SEQ ID NO: 47136 - RNA, 1413 nt, Artificial Sequence; identical to SEQ ID NO: 46942
  derived and/or modified CDS sequence (wt) from neuraminidase__InfluenzaA__ABG37387

SEQ ID NO: 47137 - RNA, 1413 nt, Artificial Sequence
  derived and/or modified CDS sequence (wt) from neuraminidase__InfluenzaA__ABG37398
augaauccaaaucaaaaaauaauaaccauuggaucaaucaguauagcaaucggaauaauuagccuaauguugcaaauaggaaacauuauuucaauaugggcuagucacucaauccaaacuggaagucaaaaccacacuggaguaugcaaccaaagaaucaucacauaugaaaacaacaccugggugaaucacacauauguuaauauuaacaacaccaauguuauugcuggaaaggacaaaacuucagugacauuggccggcaauucaucucuuuguucuaucaguggaugggcuauauacacaaaagacaacagcauaagaauugguuccaaaggagauguuuuugucauaagagagccuuucauaucauguucucacuuggaaugcagaaccuuuuuucugacccaaggugcucuauuaaaugacaaacauucaaaugggaccguuaaggacagaagccccuauagggcuuuaaugagcuguccucuaggugaagcuccguccccauacaauucaaaguuugaaucaguugcuuggucagcaagcgcaugccaugauggcaugggcugguuaacaaucggaauuucugguccagacaauggagcaguggcuguacuaaaauacaacggcauaauaacugaaaccauaaaaaguuggaaaaagcaaauauuaagaacacaagagucugaaugugucugugugaacgggucauguuucaccauaaugaccgauggcccgaguaauggggccgccucauacaaaaucuucaagaucgaaaagggaaagguuacuaaaucaauagaguugaaugcacccaauuuucauuaugaggaauguuccuguuacccagacacuggcacagugauguguguaugcagggacaacuggcaugguucaaaucgacccugggugucuuuuaaucaaaaccuggauuaucaaauaggauacaucugcagugggguguucggugacaauccgcgucccaaagauggagagggcagcuguaauccagugacuguugauggagcaaacggaguaaagggguuuucauacaaauaugguaaugguguuuggauaggaaggacuaaaaguaacagacuuagaaagggguuugagaugauuugggauccuaauggauggacagauaccgacagugauuucucagugaaacaggauguuguggcaauaacugauuggucuggguacagcggaaguuucguucaacauccugaguuaacaggauuggacuguauaagaccuugcuucuggguugaguuagucagaggacugccaaaagaaaauacaacaaucuggacuagugggagcagcauuucuuuuuguggcguaaauagugauacugcaaacuggucuuggccagacggugcugaguugccguuuaccauugacaaguag

SEQ ID NO: 47138 - RNA, 1410 nt, Artificial Sequence
  derived and/or modified CDS sequence (wt) from neuraminidase__InfluenzaA__ABG37409
augaauccaaaucaaaagauaauaacgauuggcucuguuucucucaccauugccacaauaugcuuccuuaugcaaauugucauccugguaacuacuguaacauugcauuucaagcaauaugaaugcaacucccccccaaacaaccaagugaugccgugugaaccaacaauaauagaaagaaacauaacagagauaguguaucugaccaacaccaccauagagaaggaaauaugccccaaacuagcagaauacagaaauuggucaaagccgcaauguaacauuacuggauuugcaccuuuuucuaaggacaauucgauucggcuuuccgcugguggggacaucugggugacaagagaaccuuaugugucaugcgauccugacaaguguuaucaauuugcccuuggacagggaacaacacuaaacaacgggcauucaaaugacacaguacaugauaggaccccuuaucggacccuauugaugaaugaguuggguguuccauuucauuugggaaccaagcaagugugcauagcaugguccagcucaaguugucacgauggaaaagcauggcugcauguuuguguaacgggugaugaugaaaaugcaacugcuagcuucauuuacaaugggaggcuuguagauaguauagguucaugguccaaaaaaauccucaggacccaggagucggaaugcguuuguaucaauggaacuuguacaguaguaaugacugauggaagugcuucaggaaaagcugauacuaaaauacuauucauugaggaggggaaaaucguucauacuagccuauugucagggagcgcucagcaugucgaggagugcuccuguuauccucgguauccuggugucagaugugucugcagagacaacuggaaaggcuccaauaggcccaucguagauauaaauguaaaggauuauagcauuguuuccaguuaugugugcucaggacuuguuggagacacacccagaaaaaacgacagcuccagcaguagccauugcuuggauccuaacaaugaggaagguggucauggagugaaaggcugggccuuugaugauagaaaugacguguggaugggaagaacgaucagcgagaaguuacgcucaggauaugaaaccuucaaagucauugaaggcugguccaaaccuaacuccaaacugcagauaaauaggcaagucauaguugacagagguaauagguccgguuauucugguauuuucucuguugaaggcaaaagcugcaucaaucggugcuuuuauguggaguugauaaggggaaggaaacaggaaacugaagucuuguggaccucaaacaguauuguuguguuuuguggcaccucagguacauauggaacaggcucauggccugauggggcggacaucaaucucaugccuauauaa

SEQ ID NO: 47139 - RNA, 1410 nt, Artificial Sequence
  derived and/or modified CDS sequence (wt) from neuraminidase__InfluenzaA__ABG37442
augaauccaaaucaaaagauaauaacaauuggcucuguuucucucaccauugccacaauaugcuuccuuaugcaaauugccauccugguaacuacuguaacauugcauuucaagcaguuugaaugcaacucccccccaaacaaccaaguaaugcugugugaaccaacaauaauagaaggaaacauaacagagauaguguaucugaccaacaccaccauagagaaggaaauaugccccaaauuagcagaauacagaaauuggucaaagccgcaauguaacauuacaggauuugcaccuuuuucuaaggacaauucgauucggcuuuccgcugguggggacaucugggugacaagagaaccuuaugugucaugcgauccugacaaguguuaucaauuugcccuugggcagggaacaacacuaaacaacgggcauucaaaugacacaguacaugauaggaccccuuaccggacccuauugaugaaugaauuggguguuccauuucauuugggaaccaggcaagugugcauagcaugguccagcucaaguugucacgauggaaaagcauggcugcauguuuguguaacuggggaugaugaaaaugcgacugcuagcuucauuuacaaugggaggcuuguagauaguauugguucaugguccaaaaaaauacucagaacccaggagucggaaugcguuuguaucaauggaacuuguacaguaguaaugacugaugggagcgcuucaggaaaagcugauacuaaaauacuauucauugaggaggggaaaaucguucauauuagcacauugucaggaagugcucagcaugucgaggagugcuccuguuauccucgauauccuggugucagaugugucugcagagacaacuggaaaggcuccaauaggcccaucguagauauaaauguaaaggauuauagcauuguuuccaguuaugugugcucaggacuuguuggagacacacccagaaaaaacgacagcuucagcaguagccauugccuagauccuaacaaugaggaagguggucauggagugaaaggcugggccuuugaugauggaaaugacguguggaugggaagaacgaucagcgagaaguuacgcucagguuaugaaaccuucaaagucaucgaaggcugguccaaaccuaacuccaaauuacagacaaauaggcaagucauaguugaaagagguaacagguccgguuauucugguauuuucuccguugaaggcaaaagcugcaucaaucggugcuuuuauguggaguugauaaggggaaggaaagaggaaacugaagucugguggaccucaaacaguauuguuguguuuuguggcaccucagguacauauggaacaggcucauggccugauggggcggauaucaaucucaugccuauauaa

SEQ ID NO: 47140 - RNA, 1410 nt, Artificial Sequence
  derived and/or modified CDS sequence (wt) from neuraminidase__InfluenzaA__ABG37453
augaauccaaaucaaaagauaauaacaauuggcucuguuucucucaccauugccacaauaugcuuccuuaugcaaauugccauccugguaacuacuguaacauugcauuucaagcaguaugaaugcaacucccccccaaacaaccaaguaaugcugugugaaccaacaauaauagaaagaaacauaacagagauaguguaucugaccaacaccaccauagagaaggaaauaugccccaaacuagcagaauacagaaauuggucaaagccgcaauguaacauuacaggauuugcaccuuuuucuaaggacaauucgauucggcuuuccgcugguggggacaucugggugacaagagaaccuuaugugucaugcgauccugacaaguguuaucaauuugcccuugggcagggaacaacacuaaacaacgggcauucaaaugacacaguacaugauaggaccccuuaucggacccuauugaugaaugaauuggguguuccauuucauuuaggaaccaggcaagugugcauagcaugguccagcucaaguugucacgauggaaaagcauggcugcauguuuguguaacuggggaugaugaaaaugcaacugcuagcuucauuuacaaugggaggcuuguagauaguauugguucaugguccaaaaaaauacucagaacccaggagucggaaugcguuuguaucaauggaacuuguacaguaguaaugacugaugggagcgcuucaggaaaagcugauacuaaaauacuauucauugaggaggggaaaauuguucauauuagcacauugucaggaagugcucagcaugucgaggagugcuccuguuauccucgauauccuggugucagaugugucugcagagacaacuggaaaggcuccaauaggcccaucguagauauaaauguaaaggauuauagcauuguuuccaguuaugugugcucaggacuuguuggagacacacccagaaaaaacgacagcuucagcaguagccauugccuagauccuaacaaugaggaagguggucauggggugaaaggcugggccuuugaugauggaaaugacguguggaugggaagaacgaucagcgagaaguuacgcucagguuaugaaaccuucaaagucaucgaaggcugguccaaaccuaacuccaaauuacagauaaauaggcaagucauaguugaaagagguaacagguccgguuauucugguauuuucuccguugaaggcaaaagcugcaucaaucggugcuuuuauguggaguugauaaggggaaggaaagaggaaacugaagucugguggaccucaaacaguauuguuguguuuuguggcaccucagguacauauggaacaggcucauggccugauggggcggauaucaaucucaugccuauauaa

SEQ ID NO: 47141 - RNA, 1410 nt, Artificial Sequence; identical to SEQ ID NO: 47115
  derived and/or modified CDS sequence (wt) from neuraminidase__InfluenzaA__ABG37464

SEQ ID NO: 47142 - RNA, 1410 nt, Artificial Sequence
  derived and/or modified CDS sequence (wt) from neuraminidase__InfluenzaA__ABG37475
augaauccaaaucaaaagauaauaacaauuggcucuguuucucucaccauugccacaauaugcuuccuuaugcaaauugccauccugguaacuacuguaacauugcauuucaagcaguaugaaugcaacucccccccaaacaaccaaguaaugcugugugaaccaacaauaauagaaagaaacauaacagagauaguguaucugaccaacaccaccauagagaaggaaauaugccccaaacuagcagaauacagaaauuggucaaagccgcaauguaacauuacaggauuugcacccuuuucuaaggacaauucgauucggcuuuccgcugguggggacaucugggugacaagagaaccuuaugugucaugcgauccugacaaguguuaucaauuugcccuugggcagggaacaacacuaaacaacgggcauucaaaugacacaguacaugauaggaccccuuaccggacccuauugaugaaugaauuggguguuccauuucauuugggaaccaggcaagugugcauagcaugguccagcucaaguugucacgauggaaaagcauggcugcauguuuguguaacuggggaugaugaaaaugcaacugcuagcuucauuuacaaugggaggcuuguagauaguauugguucaugguccaaaaaaauacucagaacccaggagucggaaugcguuuguaucaauggaacuuguacaguaguaaugacugaugggagcgcuucaggaaaagcugauacuaaaauacuauucauugaggaggggaaaaucguucauauuagcacauugucaggaagugcucagcaugucgaggagugcuccuguuauccucgauauccuggugucagaugugucugcagagacaacuggaaaggcuccaauaggcccaucguagauauaaauguaaaggauuauagcauuguuuccaguuaugugugcucaggacuuguuggagacacacccagaaaaaacgacagcuucagcaguagccauugccuagauccuaacaaugaggaagguggucauggagugaaaggcugggccuuugaugauggaaaugacguguggaugggaagaacgaucagcgagaaguuacgcucagguuaugaaaccuucaaagucaucgaaggcugguccaaacccaacuccaaauuacagauaaauaggcaagucauaguugaaagaggugacagguccgguuauucugguauuuucuccguugaaggcaaaagcugcaucaaucgaugcuuuuauguggaguugauaaggggaaggaaagaggaaacugaagucuuguggaccucaaacaguauuguuguguuuuguggcaccucagguacauauggaacaggcucauggccugauggggcggauaucaaucucaugccuauauaa

SEQ ID NO: 47143 - RNA, 1410 nt, Artificial Sequence
  derived and/or modified CDS sequence (wt) from neuraminidase__InfluenzaA__ABG37486
augaauccaaaucaaaagauaauaacaauuggcucuguuucucucaccauugccacaauaugcuuccuuaugcaaauugccauccugguaacuacuguaacauugcauuucaagcaguaugaaugcaacucccccccaaacaaccaaguaaugcugugugaaccaacaauaauagaaagaaacauaacagagauaguguaucugaccaacaccaccauagagaaggaaauaugccccaaauuagcagaauacagaaauuggucaaagccgcaauguaaccuuacaggauuugcaccuuuuucuaaggacaauucgauucggcuuuccgcugguggggacaucugggugacaagagaaccuuaugugucaugcgauccugacaaguguuaucaauuugcccuugggcagggaacaacacuaaacaacgggcauucaaaugacacaguacaugauaggaccccuuaccggacccuauugaugaaugaauuggguguuccauuucauuugggaaccaggcaagugugcauagcaugguccagcucaaguugucacgauggaaaagcauggcugcauguuuguguaacuggggaugaugaaaaugcaacugcuagcuucauuuacaaugggaggcuuguagacaguauugguucaugguccaaaaaaauacucagaacccaggagucggaaugcguuuguaucaauggaacuuguacaguaguaaugacugaugggagcgcuucaggaaaagcugauacuaaaauacuauucauugaggaggggaaaaucguucauauuagcacauugucaggaagugcucagcaugucgaggagugcuccuguuauccucgauauccuggugucagaugugucugcagagacaacuggaaaggcuccaauaggcccaucguagauauaaauguaaaggauuauagcauuguuuccaguuaugugugcucaggacuuguuggagacacacccagaaaaaacgacagcuucagcaguagccauugccuagauccuaacaaugaggaagguggucauggagugaaaggcugggccuuugaugauggaaaugacguguggaugggaagaacgaucagcgagaaguuacgcucagguuaugaaaccuucaaagucaucgaaggcugguccaaaccuaacuccaaauuacagacaaauaggcaagucauaguugaaagagguaacagguccgguuauucugguauuuucuccguugaaggcaaaagcugcaucaaucggugcuuuuauguggaguugauaaggggaaggaaagaggaaacugaagucugguggaccucaaacaguauuguuguguuuuguggcaccucagguacauauggaacaggcucauggccugauggggcggauaucaaucucaugccuauauaa

SEQ ID NO: 47144 - RNA, 1410 nt, Artificial Sequence
  derived and/or modified CDS sequence (wt) from neuraminidase__InfluenzaA__ABG37497
augaauccaaaucaaaagauaauaacaauuggcucuguuucucucaccauugccacaauaugcuuccuuaugcaaauugccauccugguaacuacuguaacauugcauuucaagcaguaugaaugcaacucccccccaaacaaccaaguaaugcugugugaaccaacaauaauagaaagaaacauaacagagauaguguaucugaccaacaccaccauagagaaggaaauaugccccaaauuagcagaauacagaaauuggucaaaaccgcaauguaacauuacaggauuugcaccuuuuucuaaggacaauucgauucggcuuuccgcugguggggacaucugggugacaagagaaccuuaugugucaugcgauccugacaaguguuaucaauuugcccuugggcagggaacaacacuaaacaacgggcauucaaaugacacaguacaugauaggaccccuuaccggacccuauugaugaaugaauuggguguuccauuucauuugggaaccaggcaagugugcauagcaugguccagcucaaguugucacgacggaaaagcauggcugcauguuuguguaacuggggaugaugaaaaugcaacugcuagcuucauuuacaaugggaggcuuguagauaguauugguucaugguccaaaaaaauacucagaacccaggagucggaaugcguuuguaucaauggaacuuguacaguaguaaugacugaugggagcgcuucaggaaaagcugauacuaaaauaauauucauugaggaggggaaaaucguucauauuagcacauugucaggaagugcucagcaugucgaggagugcuccuguuauccucgauauccuggugucagaugugucugcagagacaacuggaaaggcuccaauaggcccaucguagauauaaauguaaaggauuauagcauuguuuccaguuaugugugcucaggacuuguuggagacacacccagaaaaaacgacagcuucagcaguagccauugccuagauccuaacaaugaggaagguggucauggagugaaaggcugggccuuugaugauggaaaugacguguggaugggaagaacgaucagcgagaaauuacgcucagguuaugaaaccuucaaagucaucgaaggcugguccaaaccuaacuccaaauuacagacaaauaggcaagucauaguugaaagagguaacagguccgguuauucugguauuuucuccguugaaggcaaaagcugcaucaaucggugcuuuuauguggaguugauaaggggaaggaaagaggaaacugaagucugguggaccucaaacaguauuguuguguuuuguggcaccucagguacauauggaacaggcucauggccugauggggcggauaucaaucucaugccuauauaa

SEQ ID NO: 47145 - RNA, 1410 nt, Artificial Sequence
  derived and/or modified CDS sequence (wt) from neuraminidase__InfluenzaA__ABG37508
augaauccaaaucaaaagauaauaacaauuggcucuguuucccucaccauugccacaauaugcuuccuuaugcaaauugccauccugguaaccacuguaacauugcauuucaagcaguaugaaugcaacucccccccaaacaaccaaguaaugcugugugaaccaacaauaauagaaagaaacauaacagagauaguguaucugaccaacaccaccauagagaaggaaauaugccccaaacuagcagaauacagaaauuggucaaagccgcaauguaacauuacaggauuugcaccuuuuucuaaggacaauucgauucggcuuuccgcugguggggacaucugggugacaagagaaccuuaugugucaugcgauccugacaaguguuaucaauuugcccuugggcagggaacaacacuaaacaacgggcauucaaaugacacaguacaugauaggaccccuuaccggacccuauugaugaaugaauuggguguuccauuucauuugggaaccaggcaagugugcauagcaugguccagcucaaguugucacgauggaaaagcauggcugcauguuuguguaacuggggaugaugaaaaugcaacugcuagcuucauuuacaaugggaggcuuguagauaguauugguucaugguccaaaaaaauacucagaacccaggagucggaaugcguuuguaucaauggaacuuguacaguaguaaugacugaugggagcgcuucaggaaaagcugauacuaaaauacuauucauugaggaggggaaaaucguucauauuagcacauugucagggagugcucagcaugucgaggagugcuccuguuauccucgauauccuggugucagaugugucugcagagacaacuggaaaggcuccaauaggcccaucguagauauaaauguaaaggaucauagcauuguuuccaguuaugugugcucaggacuuguuggagacacacccagaaaaaacgacagcuucagcaguagccauugccuagacccuaacaaugaggaagguggucauggagugaaaggcugggccuuugaugauggaaaugacguguggaugggaagaacgaucagcgagaaguuacgcucagguuaugaaaccuucaaagucaucgaaggcugguccaaaccuaacuccaaauuacagauaaauaggcaagucauaguugaaagagguaacagguccgguuauucugguauuuucuccguugaaggcaaaagcugcaucaaucggugcuuuuauguggaguugauaaggggaaggaaagaggaaacugaagucugguggaccucaaacaguauuguuguguuuuguggcaccucagguacauauggaacaggcucauggccugauggggcggauaucaaucucaugccuauauaa

SEQ ID NO: 47146 - RNA, 1410 nt, Artificial Sequence; identical to SEQ ID NO: 46603
  derived and/or modified CDS sequence (wt) from neuraminidase__InfluenzaA__ABG37519

SEQ ID NO: 47147 - RNA, 1410 nt, Artificial Sequence; identical to SEQ ID NO: 46603
  derived and/or modified CDS sequence (wt) from neuraminidase__InfluenzaA__ABG37530

SEQ ID NO: 47148 - RNA, 1410 nt, Artificial Sequence
  derived and/or modified CDS sequence (wt) from neuraminidase__InfluenzaA__ABG37541
augaauccaaaucaaaagauaauaacaauuggcucuguuucucucaccauugccacaauaugcuuccuuaugcaaauugccauccugguaacuacuguaacauugcauuucaagcagcaugaaugcaacucccccccaaacaaccaaguaaugcugugugaaccaacaauaauagaaagaaacauaacagagauaguguaucugaccaacaccaccauagagaaggaaauaugccccaaacuaguagaauacagaaauuggucaaagccgcaauguaacauuacaggauuugcaccuuuuucuaaggacaauucgauucggcuuuccgcugguggggacaucugggugacaagagaaccuuaugugucaugcgauccugacaaguguuaucaauuugcccuugggcagggaacaacacuaaacaacgggcauucaaaugacacaguacaugauaggaccccuuaccggacccuauugaugaaugaauuggguguuccauuucauuugggaaccaggcaagugugcauagcaugguccagcucaaguugucacgauggaaaagcauggcugcauguuuguguaacuggggaugauaaaaaugcaacugcuagcuucauuuacaaugggaggcuuguagauaguauugguucaugguccaaaaaaauacucagaacccaggagucggaaugcguuuguaucaauggaacuuguacaguaguaaugacugaugggagcgcuucagggaaagcugauacuaaaauacuauucauugaggaggggaaaaucguucauauuagcacauugucaggaagugcucagcaugucgaggagugcuccuguuauccucgauauccuggugucagaugugucugcagagacaacuggaaaggcuccaauaggcccauuguagauauaaauguaaaggauuauagcauuguuuccaguuaugugugcucaggacuuguuggagacacacccagaaaaaacgacagcuucagcaguagccauugccuagauccuaacaaugaggaagguggucauggagugaaaggcugggccuuugaugauggaaaugacguguggaugggaagaacgaucagcgagaaguuacgcucagguuaugaaaccuucaaagucaucgaaggcugguccaaaccuaacuccaaauuacagauaaauaggcaaguuauaguugaaagagguaacagguccgguuauucugguauuuucuccguugaaggcaaaagcugcaucaaucggugcuuuuauguggaguugauaaggggaaggaaagaggaaacugaagucugguggaccucaaacaguauuguuguguuuuguggcaccucagguacauauggaacaggcucauggccugauggggcggauaucaaucucaugccuauauaa

SEQ ID NO: 47149 - RNA, 1410 nt, Artificial Sequence; identical to SEQ ID NO: 46603
  derived and/or modified CDS sequence (wt) from neuraminidase__InfluenzaA__ABG37552

SEQ ID NO: 47150 - RNA, 1410 nt, Artificial Sequence; identical to SEQ ID NO: 46603
  derived and/or modified CDS sequence (wt) from neuraminidase__InfluenzaA__ABG37563

SEQ ID NO: 47151 - RNA, 1410 nt, Artificial Sequence; identical to SEQ ID NO: 46603
  derived and/or modified CDS sequence (wt) from neuraminidase__InfluenzaA__ABG37585

SEQ ID NO: 47152 - RNA, 1410 nt, Artificial Sequence
  derived and/or modified CDS sequence (wt) from neuraminidase__InfluenzaA__ABG37596
augaauccaaaucaaaagauaauaacaauuggcucuguuucucucaccauugccacaauaugcuuccuuaugcaaauugccauccugguaacuacuguaacauugcauuucaagcagcaugaaugcaacucccccccaaacaaccaaguaaugcugugugaaccaacaauaauagaaagaaacauaacagagauaguguaucugaccaacaccaccauagagaaggaaauaugccccaaacuaguagaauacagaaauuggucaaagccgcaauguaacauuacaggauuugcaccuuuuucuaaggacaauucgauucggcuuuccgcugguggggacaucugggugacaagagaaccuuaugugucaugcgauccugacaaguguuaucaauuugcccuugggcagggaacaacacuaaacaacgggcauucaaaugacacaguacaugauaggaccccuuaccggacccuauugaugaaugaauuggguguuccauuucauuugggaaccaggcaagugugcauagcaugguccagcucaaguugucacgauggaaaagcauggcugcauguuuguguaacuggggaugauaaaaaugcaacugcuagcuucauuuacaaugggaggcuuguagauaguauugguucaugguccaaaaaaauacucagaacccaggagucggaaugcguuuguaucaauggaacuuguacaguaguaaugacugaugggagcgcuucaggaaaagcugauacuaaaauacuauucauugaggaggggaaaauuguucauauuagcacauugucaggaagugcucagcaugucgaggagugcuccuguuauccucgauauccuggugucagaugugucugcagagacaacuggaaaggcuccaauaggcccauuguagauauaaauguaaaggauuauagcauuguuuccaguuaugugugcucaggacuuguuggagacacacccagaaaaaacgacagcuucagcaguagccauugccuagauccuaacaaugaggaagguggucauggagugaaaggcugggccuuugaugauggaaaugacguguggaugggaagaacgaucagcgagaaguuacgcucagguuaugaaaccuucaaagucaucgaaggcugguccaaaccuaacuccaaauuacagauaaauaggcaaguuauaguugaaagagguaacagguccgguuauucugguauuuucuccguugaaggcaaaagcugcaucaaucggugcuuuuauguggaguugauaaggggaaggaaagaggaaacugaagucugguggaccucaaacaguauuguuguguuuuguggcaccucagguacauauggaacaggcucauggccugauggggcggauaucaaucucaugccuauauaa

SEQ ID NO: 47153 - RNA, 1410 nt, Artificial Sequence; identical to SEQ ID NO: 46603
  derived and/or modified CDS sequence (wt) from neuraminidase__InfluenzaA__ABG37607

SEQ ID NO: 47154 - RNA, 1410 nt, Artificial Sequence
  derived and/or modified CDS sequence (wt) from neuraminidase__InfluenzaA__ABG37618
augaauccaaaucaaaagauaauaacaauuggcucuguuucucucaccauugccacaauaugcuuccuuaugcaaauugccauccugguaacuacuguaacauugcauuucaagcagcaugaaugcaacucccccccaaacaaccaaguaaugcugugugaaccaacaauaauagaaagaaacauaacagagauaguguaucugaccaacaccaccauagagaaggaaauaugccccaaacuaguagaauacagaaauuggucaaagccgcaauguaacauuacaggauuugcaccuuuuucuaaggacaauucgauucggcuuuccgcugguggggacaucugggugacaagagaaccuuaugugucaugcgauccugacaaguguuaucaauuugcccuugggcagggaacaacacuaaacaacgggcauucaaaugacacaguacaugauaggaccccuuaccggacccuauugaugaaugaauuggguguuccauuucauuugggaaccaggcaagugugcauagcaugguccagcucaaguugucacgauggaaaagcauggcugcauguuuguguaacuggggaugauaaaaaugcaacugcuagcuucaucuacaaugggaggcuuguagauaguauugguucaugguccaaaaaaauacucagaacccaggagucggaaugcguuuguaucaauggaacuuguacaguaguaaugacugaugggagcgcuucaggaaaagcugauacuaaaauacuauucauugaggaggggaaaaucguucauauuagcacauugucaggaagugcucagcaugucgaggagugcuccuguuacccucgauauccuggugucagaugugucugcagagacaacuggaaaggcuccaauaggcccauuguagauauaaauguaaaggauuauagcauuguuuccaguuaugugugcucaggacuuguuggagacacacccagaaaaaacgacagcuucagcaguagccauugccuagauccuaacaaugaggaagguggucauggagugaaaggcugggccuuugaugauggaaaugacguguggaugggaagaacgaucagcgagaaguuacgcucagguuaugaaaccuucaaagucaucgaaggcugguccaaaccuaacuccaaauuacagauaaauaggcaaguuauaguugaaagagguaacagguccgguuauucugguauuuucuccguugaaggcaaaagcugcaucaaucggugcuuuuauguggaguugauaaggggaaggaaagaggaaacugaagucugguggaccucaaacaguauuguuguguuuuguggcaccucagguacauauggaacaggcucauggccugauggggcggauaucaaucucaugccuauauga

SEQ ID NO: 47155 - RNA, 1413 nt, Artificial Sequence; identical to SEQ ID NO: 46840
  derived and/or modified CDS sequence (wt) from neuraminidase__InfluenzaA__ABG47810

SEQ ID NO: 47156 - RNA, 1413 nt, Artificial Sequence
  derived and/or modified CDS sequence (wt) from neuraminidase__InfluenzaA__ABG47832
augaauccaaaucaaaaaauaauaaccauuggaucaaucaguauugcaauuggaauaauuagccugauauugcaaguaggaaauauuauuucaauaugggcuagccacucaauccaaacuggaagucaaaaccacacuggaauaugcaaccaaagaaucauuacauaugaaaauagcaccuggguaaaucaaacauauguuaauauuaacaacacuaauguuguugcaggaaaggacaaaaccucaaugacauuggccggcaauucaucucuuugcccuauccguggaugggcuauauacacaaaagacaacagcauaagaauugguuccaaaggagauguuuuugucauaagagagccuuuuauaucauguucucacuuggaaugcagaaccuuuuuucugacccaaggugcucuauuaaaugacaagcauucaaaugggaccguuaaggacagaagcccuuauagggccuuaaugagcuguccucuaggugaagcuccgucuccauacaauucaagauuugaaucaguugcuuggucagcaagcgcaugccaugauggcuugggcuggcuaacaaucggaauuucugguccagauaauggggcaguggcuguacuaaaauacaacggcauaauaacugaaaccauuaaaaguuggaagaagcgaauauuaagaacacaagagucugagugugucuguaugaacgguucauguuuuaccauaaugaccgauggcccgaguaauggggccgcaucguacagaaucuucaaaaucgagaaggggagaguuacuaaaucaauagaguuggaugcacccaauuaucauuacgaggaauguucauguuacccaaacacuggcacagugaugugugugugcagggacaauuggcacgguucaaaucgaccuugggugucuuuuaaucaaaaucuggauuaucaaauaggauacaucugcagugggguguucggugacaauccgcgucccaaagauggagaaggcagcuguaauccagugacuguugauggagcagacggaguaaagggguuuucauacagauaugguaaugguguuuggauaggaaggacuaaaaguaacagacucagaaagggauuugagaugauuugggauccuaauggauggacagauaccgacagugauuucucaaugaaacaggauaucguggcaaugacugauuggucaggguacagcggaaguuuuguucaacauccugagcuaacaggauuggacuguaugagaccuugcuucuggguugaauuagucagagggcuaccuagagaaaauacaacaaucuggacuagugggagcagcauuucuuuuuguggcguaaauagcgauacugcaaacuggucuuggccagacggugccgaguugccauucaccauugacaaguag

SEQ ID NO: 47157 - RNA, 1413 nt, Artificial Sequence
  derived and/or modified CDS sequence (wt) from neuraminidase__InfluenzaA__ABG47843
augaauccaaaucaaaaaauaauaaccauuggaucaaucaguauugcaauuggaauaauuagucugauauugcaaauaggaaauauuauuucaauaugggcuagccacucaauccaaacuggaagucaaaaccacacuggaauaugcaaccaaagaaucauuacauaugagaauagcaccuggguaaaucaaacauauguuaauauuaacaacacuaauguuguugcuggaaaggacaaaaccucaaugacauuggccggcaauucaucucuuugcccuauccguggaugggcgauauacacaaaagacaacagcauaagaauugguuccaaaggagauguuuuugucauaagagagccuuuuauaucauguucucacuuggaaugcagaaccuuuuuucugacccaaggugcucuauuaaaugacaagcauucaaaugggaccguuaaggacagaagcccuuauagggccuuaaugagcuguccucuaggugaagcuccgucuccauacaauucaagauuugaaucaguugcuuggucagcaagcgcaugccaugauggcuugggcuggcuaacaaucggaauuucugguccagauaauggggcaguggcuguacuaaaauacaacggcauaauaacugaaaccauuaaaaguuggaagaagcgaauauuaagaacacaagagucugaaugugucuguaugaacgguucauguuuuaccauaaugaccgauggcccgaguaauggggccgcaucguacagaaucuucaaaaucgagaaggggagaguuacuaaaucaauagaguuggaugcacccaauuaucauuacgaggaauguucauguuacccagacaccggcacagugaugugugugugcagggacaauuggcacgguucaaaucgaccuugggugucuuuuaaucaaaaccuggauuaucaaauaggauacaucugcagugggguguucggugacaauccgcgucccaaagauggagaaggcagcuguaauccagugacuguugauggagcagacggaguaaagggguuuucauacagauaugguaaugguguuuggauaggaaggacuaaaaguaacagacucagaaagggauuugagaugauuugggauccuaauggauggacagauaccgacagugauuucucaaugaaacaggauaucguggcaaugacugauuggucaggguacagcggaaguuuuguucaacauccugagcuaacaggauuggacuguaugagaccuugcuucuggguugaauuagucagagggcuaccuagagaaaauacaacaaucuggacuagugggagcaguauuucuuuuuguggcguaaauagcgauacugcaaacuggucuuggccagacggugccgaguugccauucaccauugacaaguag

SEQ ID NO: 47158 - RNA, 1410 nt, Artificial Sequence
  derived and/or modified CDS sequence (wt) from neuraminidase__InfluenzaA__ABG47865
augaauccaaaucaaaagauaauaacuauuggcucuguuucucucacuauugccacaauaugcuuccuuaugcaaauugccauccugguaauuacuguaacauuacauuucaagcaauaugaaugcaacucccccccaaacaaccaaguaaugcugugugaaccaacaauaauagaaagaaacauaacagagauaguguaucugaccaacaccaccauagagaaggaaauaugccccaaacuagcagaauacagaaauuggucaaagccgcaauguaaaauuacaggauuugcacccuuuucuaaggacaauucaauucggcuuuccgcugguggggacauuugggugacaagagaaccuuaugugucaugcgauccugacaaguguuaucaauuugcccuuggacagggaacaacacuaaacaacaggcauucaaaugacacaguacaugauaggaccccuuaucgaacccuauugaugaaugaguuggguguuccauuucauuugggaaccaagcaagugugcauagcaugguccagcucaaguugucacgauggaaaagcauggcugcauguuuguguaacugggcaugaugaaaaugcaacugcuagcuucauuuacgaugggaggcuuguagauaguauugguucaugguccaaaaaaauccucaggacccaggagucggaaugcguuuguaucaauggaacuuguacaguaguaaugacugauggaagugcuucaggaagagcugauacuaaaauacuauucauugaagaggggaaaaucguucauauuagcccauugucaggaagugcucagcaugucgaggagugcuccuguuauccucgauauucuggugucagaugugucugcagagacaacuggaaaggcuccaauaggcccaucguagauauaaaugugaaagauuauagcauuguuuccaguuaugugugcucaggacuuguuggagacacacccagaaaaaacgacagcuccagcaguagccauugccugaauccuaacaaugaggaagggggucauggagugaaaggcugggccuuugaugauggaaaugacguguggaugggaagaacgaucagcgagaaauuacgcucagguuaugaaaccuucaaagucauuggaggcugguccaaaccuaacuccaaauugcagauaaauaggcaagucauaguugacagagguaauagguccgguuauucugguauuuucucuguugaaggcaaaagcugcaucaaucggugcuuuuauguggaguugauaaggggaaggaaacaggaaacugaagucugguggaccucaaacaguauuguuguguuuuguggcaccucagguacauauggaacaggcucauggccugauggggcggacaucaaucucaugccuauauaa

SEQ ID NO: 47159 - RNA, 1410 nt, Artificial Sequence
  derived and/or modified CDS sequence (wt) from neuraminidase__InfluenzaA__ABG47876
augaauccaaaucaaaagauaauaacaauuggcucuguuucucucacuauugccacaauaugcuuccuuaugcaaauugccauccugguaacuacugugacauugcauuucaagcaauaugagugcaacucccccccaaacaaccaaguaaugcugugugaaccaacaauaauagaaagaaacauaacagagauaguguaucugaccaacaccaccauagagaaagaaauaugccccaaacuggcagaauacagaaauuggucaaagccgcaauguaaaauuacaggauuugcaccuuuuucuaaggacaauucaauucggcuuuccgcugguggagacauuugggugacaagagaaccuuaugugucaugcgauccuggcaaguguuaucaauuugcccuuggacagggaacaacacuaaacaacaggcauucaaaugacacaguacaugauaggaccccuuaucgaacccuauugaugaaugaguuggguguuccauuucauuugggaaccaagcaagugugcauagcgugguccagcucaaguugucacgauggaaaagcauggcugcauguuuguguaacugggcaugaugaaaaugcaacugcuagcuucauuuacgaugggaggcuuguagauaguauugguucaugguccaaaaauauccucaggacccaggagucggaaugcguuuguaucaauggaacuuguacaguaguaaugacugauggaagugcuucagacagagcugauacuaaaauacuauucauugaagaggggaaaaucguucauauuagcccauugucaggaagugcucagcaugucgaggagugcuccuguuauccucgauauccuggugucagaugugucugcagagacaacuggaaaggcuccaauaggcccaucguagauauaaaugugaaagauuauagcauuguuuccaguuaugugugcucaggacuuguuggagacacacccagaaaaaacgacagcuccagcaguagcuauugcuggaauccuaacaaugagaaagggggucauggagugaaaggcugggccuuugaugauggaaaugacguguggaugggaagaacgaucagcgaggagucacgcucagguuaugaaaccuucaaagucauuggaggcugguccaaaccuaacuccaaauugcagauaaauaggcaagucauaguugacagagguaauagguccgguuauucugguauuuucucuguugaaggcaaaagcugcaucaaucggugcuuuuauguggaguugauaaggggaaggaaacaggaaacugaagucugguggaccucaaacaguauuguuguguuuuguggcaccucagguacauauggaacaggcucauggccugauggggcggacaucaaucucaugccuauauaa

SEQ ID NO: 47160 - RNA, 1410 nt, Artificial Sequence; identical to SEQ ID NO: 47125
  derived and/or modified CDS sequence (wt) from neuraminidase__InfluenzaA__ABG47887

SEQ ID NO: 47161 - RNA, 1410 nt, Artificial Sequence
  derived and/or modified CDS sequence (wt) from neuraminidase__InfluenzaA__ABG47898
augaauccaaaucaaaagauaauaacaauuggcucuguuucucucacuauugccacaauaugcuuccuuaugcaaauugccauccugguaacuacuguaacauugcauuucaagcaauaugaaugcaacucccccccaaacaaccaaguaaugcugugugaaccaacaauaauagaaagaaacauaacagagauaguguaucugaccaacaccaccauagagaaagaaauaugccccaaacuagcagaauacagaaauuggucaaagccgcaauguaaaauuacaggguuugcaccuuuuucuaaggacaauucaauucggcuuuccgcugguggagacauuugggugacaagagaaccuuaugugucaugcgauccuggcaaguguuaucaauuugcccuuggacagggaacaacacuaaacaacaggcauucaaaugacacaguacaugauaggaccccuuaucgaacccuauugaugaaugaguuggguguuccauuucauuugggaaccaagcaagugugcauagcaugguccagcucaaguugucacgauggaaaagcauggcugcauguuuguguaacugggcaugaugaaaaugcaacugcuagcuucauuuacgaugggaggcuuguagauaguauuaguucaugguccaaaaauauccucaggacccaggagucggaaugcguuuguaucaauggaacuuguacaguaguaaugacugauggaagugcuucagaaagagcugauacuaaaauacuauucauugaagaggggaaaaucguucauauuagcccauugucaggaagugcucagcaugucgaggagugcuccuguuauccucgauauccuggugucagaugugucugcagagacaacuggaaaggcuccaauaggcccaucguagauauaaaugugaaagauuauagcauuguuuccaguuaugugugcucaggacuuguuggagacacacccagaaaaaacgacagcuccagcaguagcuauugccugaauccuaacaaugaggaagggggucauggagugaaaggcugggccuuugaugauggaaaugacguguggaugggaagaacgaucagcgaaaaguuacgcucagguuaugaaaccuucaaggucauuggaggcugguccaaaccuaacuccaaauugcagauaaauaggcaagucauaguugacagagguaauagguccgguuauucugguauuuucucuguugaaggcaaaagcugcgucaaucggugcuuuuauguggaguugauaaggggaaggaaacaggaaacugaagucugguggaccucaaacaguauuguuguguuuuguggcaccucagguacauauggaacaggcucauggccugauggagcggacaucaaucucaugccuauauaa

SEQ ID NO: 47162 - RNA, 1410 nt, Artificial Sequence; identical to SEQ ID NO: 47125
  derived and/or modified CDS sequence (wt) from neuraminidase__InfluenzaA__ABG47909

SEQ ID NO: 47163 - RNA, 1410 nt, Artificial Sequence; identical to SEQ ID NO: 47134
  derived and/or modified CDS sequence (wt) from neuraminidase__InfluenzaA__ABG47920

SEQ ID NO: 47164 - RNA, 1410 nt, Artificial Sequence
  derived and/or modified CDS sequence (wt) from neuraminidase__InfluenzaA__ABG47931
augaauccaaaucaaaagauaauaacaauuggcucuguuucucucacuauugccacaauaugcuuccuuaugcaaauugccauccugguaacuacuguaacauugcauuucaagcaauaugagugcaacucccccccaagcaaccaaguaaugcugugugaaccaacaauaauagaaagaaacauaacagagauaguguauuugacuaacaccaccauagagaaagaaauaugccccaaacuggcagaauacagaaauuggucaaagccgcaauguaaaauuacaggauuugcaccuuuuucuaaggacaauucaauucggcuuuccgcugguggagacauuugggugacaagagaaccuuaugugucaugcgauccuggcaaguguuaucaauuugcacuuggacagggaacaacacuaaacaacaggcauucaaaugacacaguacaugauaggaccccuuaucgaacccuauugaugaaugaguuggguguuccauuucauuugggaaccaagcaagugugcauagcaugguccagcucaaguugucacgauggaaaagcauggcugcauguuuguguaacugggcaugaugaaaaugcaacugcuagcuucauuuacgaugggaggcuuguagauaguauugguucaugguccaaaaauauccucaggacccaggagucggaaugcguuuguaucaauggaacuuguacaguaguaaugacugauggaagugcuucagaaagagcugauacuaaaauacuauucauugaagaggggaaaaucguucauauuagcccauugucaggaagugcucagcaugucgaggagugcuccuguuauccucgauauccuggugucagaugugucugcagagacaacuggaaaggcuccaauaggcccaucguagauauaaaugugaaagauuauagcauuguuuccaguuaugugugcucaggacuuguuggagacacacccagaaaaaacgacagcuccagcaguagcuauugccggaauccuaacaaugaaaaagggagucauggagugaaagguugggccuuugaugauggaaaugacguguggaugggaagaacgaucagcgaggaguuacgcucugguuaugaaaccuucaaaguuauuggaggcugguccaaaccuaacuccaaauugcagauaaauaggcaagucauaguugacagagguaauagguccgguuauucugguauuuucucuguugaaggcaaaagcugcaucaaucggugcuuuuauguggaguugauaaggggaaggaaacaggaaacugaagucugguggaccucaaacaguauuguuguguuuuguggcaccucagguacauauggaacaggcucauggccugauggggcggacaucaaucucaugccuauauaa

SEQ ID NO: 47165 - RNA, 1410 nt, Artificial Sequence; identical to SEQ ID NO: 47134
  derived and/or modified CDS sequence (wt) from neuraminidase__InfluenzaA__ABG47942

SEQ ID NO: 47166 - RNA, 1410 nt, Artificial Sequence
  derived and/or modified CDS sequence (wt) from neuraminidase__InfluenzaA__ABG47953
augaauccaaaucaaaagauaauaacaauuggcucuguuucucucacuauugccacaauaugcuuccuuaugcaaauugccauccugguaacuacuguaacauugcauuucaagcaauaugagugcaacucccccccaagcaaccaaguaaugcugugugaaccaacaauaauagaaagaaacauaacagagauaguguauuugacuaacaccaccauagagaaagaaauaugccccaaacuggcagaauacagaaauuggucaaagccgcaauguaaaauuacaggauuugcaccuuuuucuaaggacaauucaauucggcuuuccgcugguggagacauuugggugacaagagaaccuuaugugucaugcgauccuggcaaguguuaucaauuugcacuuggacagggaacaacacuaaacaacaggcauucaaaugacacagugcaugauaggaccccuuaucgaacccuauugaugaaugaguuggguguuccauuucauuugggaaccaagcaagugugcauagcaugguccagcucaaguugucacgauggaaaagcauggcugcauguuuguguaacugggcaugaugaaaaugcaacugcuagcuucauuuacgaugggaggcuuguagauaguauugguucaugguccaaaaauauccucaggacccaggagucggaaugcguuuguaucaauggaacuuguacaguaguaaugacugauggaagugcuucagaaagagcugauacuaaaauacuauucauugaagaggggaaaaucguucauauuagcccauugucaggaagugcucagcaugucgaggagugcuccuguuauccucgauauccuggugucagaugugucugcagagacaacuggaaaggcuccaauaggcccaucguagauauaaaugugaaagauuauagcauuguuuccaguuaugugugcucaggacuuguuggagacacacccagaaaaaacgacagcuccagcaguagcuauugccggaauccuaacaaugagaaagggagucauggagugaaagguugggccuuugaugauggaaaugacguguggaugggaagaacgaucagcgaggaguuacgcucugguuaugaaaccuucaaaguuauuggaggcugguccaaaccuaacuccaaauugcagauaaauaggcaagucauaguugacagagguaauagguccgguuauucugguauuuucucuguugaaggcaaaagcugcaucaaucggugcuuuuauguggaguugauaaggggaaggaaacaggaaacugaagucugguggaccucaaacaguauuguuguguuuuguggcaccucagguacauauggaacaggcucauggccugauggggcgaacaucaaucucaugccuauauaa

SEQ ID NO: 47167 - RNA, 1410 nt, Artificial Sequence
  derived and/or modified CDS sequence (wt) from neuraminidase__InfluenzaA__ABG47964
augaauccaaaucaaaagauaauaacaauuggcucuguuucucucacuauugccacaauaugcuuccuuaugcaaauugccauccugguaacuacuguaacauugcauuucaagcaauaugagugcaacucccccccaaacaaccaaguaaugcugugugaaccaacaauaauagaaagaaacauaacagagauaguguaucugaccaacaccaccauagagaaagaaauaugccccaaacuagcagaauacagaaauuggucaaagccacaauguaaaauuacaggauuugcaccuuuuucuaaggacaauucaauucggcuuuccgcugguggagacauuugggugacacgagaaccuuaugugucaugcgauccuggcaaguguuaucaauuugcccuuggacagggaacaacacuaaacaacaggcacucaaaugacacaguacaugauaggaccccuuaucgaacccuauugaugaaugaguuggguguuccauuucauuugggaaccaagcaagugugcauagcaugguccagcucaaguugucacgauggaaaagcauggcugcauguuuguguaacugggcaugaugaaaaugcaacugcuagcuucauuuacgaugggaggcuuguagauaguauugguucaugguccaaaaauauccucaggacccaggagucggaaugcguuuguaucaauggaacuuguacaguaguaaugacugauggaagugcuucagaaagagcugauacuaaaauacuauucauugaagaggggaaaaucguucauauuagcccauugucaggaagugcucagcaugucgaggagugcuccuguuauccucgguauccuggugucagaugugucugcagagacaacuggaaaggcuccaauaggcccaucguagauauaaaugugaaagauuauagcauuguuuccaguuauguaugcucaggacuuguuggggacacacccagaaaaaacgacagcuccagcaguagcuauugccagaauccuaacaaugagaaagggagucauggagugaaaggcugggccuuugaugauggaaaugacguguggaugggaagaacgaucagcgaggaguuacgcucagguuaugaaaccuucaaagucauuggaggcugguccaaaccuaacuccaaauugcagauaaauaggcaagucauaguugacagagguaauagguccgguuauucugguauuuucucuguugaaggcaagagcugcaucaaucggugcuuuuauguggaguugauaaggggaaggaaacaggaaacugaagucugguggaccucaaacaguauuguuguguuuuguggcaccucagguacauauggaacaggcucauggccugauggggcggacaucaaucucaugccuauauaa

SEQ ID NO: 47168 - RNA, 1410 nt, Artificial Sequence
  derived and/or modified CDS sequence (wt) from neuraminidase__InfluenzaA__ABG47975
augaauccaaaucaaaagauaauaacaauuggcucuguuucucucacuauugccacaauaugcuuccuuaugcaaauugccauccugguaacuacuguaacauugcauuucaagcaauaugagugcaacucccccccaagcaaccaaguaaugcugugugaaccaacaauaauagaaagaaacauaacagagauaguguauuugacuaacaccaccauagagaaagaaauaugccccaaacuggcagaauacagaaauuggucaaagccgcaauguaaaauuacaggauuugcaccuuuuuccaaggacaauucaauucggcuuuccgcugguggagacauuugggugacaagagaaccuuaugugucaugcgauccuggcaaguguuaucaauuugcacuuggacagggaacaacacuaaacaacaggcauucaaaugacacaguacaugauaggaccccuuaucgaacccuauugaugaaugaguuggguguuccauuucauuugggaaccaagcaagugugcauagcaugguccagcucaaguugucacgauggaaaagcauggcugcauguuuguguaacugggcaugaugaaaaugcaacugcuagcuucauuuacgaugggaggcuuguagauaguauugguucaugguccaaaaauauccucaggacccaggagucggaaugcguuuguaucaauggaacuuguacaguaguaaugacugauggaagugcuucagaaagagcugauacuaaaauacuauucauugaagaggggaaaaucguucauauuagcccauugucaggaagugcucagcaugucgaggagugcuccuguuauccucgauauccuggugucagaugugucugcagagacaacuggaaaggcuccaauaggcccaucguagauauaaaugugaaagauuauagcauuguuuccaguuaugugugcucaggacuuguuggagacacacccagaaaaaacgacagcuccagcaguagcuauugccgggauccuaacaaugagagagggagucauggagugaaagguugggccuuugaugauggaaaugacguguggaugggaagaacgaucagcgaggaguuacgcucugguuaugaaaccuucaaaguuauuggaggcugguccaaaccuaacuccaaauugcagauaaauaggcaagucauaguugacagagguaauagauccgguuauucugguauuuucucuguugaaggcaaaagcugcaucaaucggugcuuuuauguggaguugauaaggggaaggaaacaggaaacugaagucugguggaccucaaacaguauuguuguguuuuguggcaccucagguacauauggaacaggcucauggccugauggggcggacaucaaucucaugccuauauaa

SEQ ID NO: 47169 - RNA, 1410 nt, Artificial Sequence
  derived and/or modified CDS sequence (wt) from neuraminidase__InfluenzaA__ABG47986
augaauccaaaucaaaagauaauaacaauuggcucuguuucucucacuauugccacaauaugcuuucuuaugcaaauugccauccugguaacuacuguaacauugcauuucaagcaauaugagugcaacucccccccaagcaaccaaguaaugcugugugaaccaacaauaauagaaagaaacauaacagagauaguguauuugacuaacaccaccauagagaaagaaauaugccccaaacuggcagaauacagaaauuggucaaagccgcaauguaaaauuacaggauuugcaccuuuuucuaaggacaauucaauucggcuuuccgcugguggagacauuugggugacaagagaaccuuaugugucaugcgauccuggcaaguguuaucaauuugcacuuggacagggaacaacacuaaacaacaggcauucaaaugacacaguacaugauaggaccccuuaucgaacccuauugaugaaugaguuggguguuccauuucauuugggaaccaagcaagugugcauagcaugguccagcucaaguugucacgauggaaaagcauggcugcauguuuguguaacugggcaugaugaaaaugcaacugcuagcuucauuuacgaugggaggcuuguagauaguauugguucaugguccaaaaauauccucaggacccaggagucggaaugcguuuguaucaauggaacuuguacaguaguaaugacugauggaagugcuucagaaagagcugauacuaaaauacuauucauugaagaggggaaaaucguucauauuagcccauugucaggaagugcucagcaugucgaggagugcuccuguuauccucgauauccuggugucagaugugucugcagagacaacuggaaaggcuccaauaggcccaucguagauauaaaugugaaagauuauagcauuguuuccaguuaugugugcucaggacuuguuggagacacacccagaaaaaacgacagcuccagcaguagcuauugccggaaaccuaacaaugagaaagggagucauggagugaaagguugggccuuugaugauggaaaugacguguggaugggaagaacgaucagcgaggaguuacgcucugguuaugaaaccuucaaaguuauuggaggcugguccaaaccuaacuccaaauugcagauaaauaggcaagucauaguugacagagguaauagguccgguuauucugguauuuucucuguugaaggcaaaagcugcaucaaucggugcuuuuauguggaguugauaaggggaaggaaacaggaaacugaagucugguggaccucaaacaguauuguuguguuuuguggcaccucagguacauauggaacaggcucauggccugauggggcggacaucaaucucaugccuauauaa

SEQ ID NO: 47170 - RNA, 1410 nt, Artificial Sequence
  derived and/or modified CDS sequence (wt) from neuraminidase__InfluenzaA__ABG47997
augaauccaaaucaaaagauaauaacaauuggcucuguuucucucacuauugccacaauaugcuuccuuaugcaaauugccauccugguaacuacuguaacauugcauuucaagcaauaugagugcaacucccccccaagcaaccaaguaaugcugugugaaccaacaauaauagaaagaaacauaacagagauaguguauuugacuaacaccaccauagagaaagaaauaugccccaaacuggcagaauacagaaauuggucaaagccgcaauguaaaauuacaggauuugcaccuuuuucuaaggacaauucaauucggcuuuccgcugguggagacauuugggugacaagagaaccuuaugugucaugcgauccuggcaaguguuaucaauuugcacuuggacagggaacaacacuaaacaacaggcauucaaaugacacaguacaugauaggaccccuuaucgaacccuauugaugaaugaguuggguguuccauuucauuugggaaccaagcaagugugcauagcaugguccagcucaaguugucacgauggaaaagcauggcugcauguuuguguaacugggcaugaugaaaaugcaacugcuagcuucauuuacgaugggaggcuuguagauaguauugguucaugguccaaaaauauccucaggacccaggagucggaaugcguuuguaucaauggaacuuguacaguaguaaugacugauggaagugcuucagaaagagcugauacuaaaauacuauucauugaagaggggaaaaucguucauauuagcccauugucaggaagugcucagcaugucgaggagugcuccuguuauccucgauauccuggugucagaugugucugcagagacaacuggaaaggcuccaauaggcccaucguagauauaaaugugaaagauuauagcauuguuuccaguuaugugugcucaggacuuguuggagacacacccagaaaaaacgacagcuccagcaguagcuauugccggaauccuaacaaugagaaagggagucauggagugaaagguugggccuuugaugauggaaaugacguguggaugggaagaacgaucagcgaggaguuacgcucugguuaugaaaccuucaaaguuauuggaggcugguccaaaccuaacuccaaauugcagauaaauaggcaagucauaguugacagagguaauagguccgguuauucugguauuuucucuguugaaggcaaaagcugcaucaaucggugcuuuuauguggaguugauaaggggaaggaaacaggaaacugaagucugguggaccucaaacaguauuguaguguuuuguggcaccucagguacauauggaacaggcucauggccugauggggcggacaucaaucucaugccuauauaa

SEQ ID NO: 47171 - RNA, 1410 nt, Artificial Sequence
  derived and/or modified CDS sequence (wt) from neuraminidase__InfluenzaA__ABG48008
augaauccaaaucaaaagauaauaacaauuggcucuguuucucucacuauugccacaauaugcuuucuuaugcaaauugccauccugguaacuacuguaacauugcauuucaagcaauaugagugcaacucccccccaagcaaccaaguaaugcugugugaaccaacaauaauagaaagaaacauaacagagauaguguauuugacuaacaccaccauagagaaagaaauaugccccaaacuggcagaauacagaaauuggucaaagccgcaauguaaaauuacaggauuugcaccuuuuucuaaggacaauucaauucggcuuuccgcugguggagacauuugggugacaagagaaccuuaugugucaugcgauccuggcaaguguuaucaauuugcacuuggacagggaacaacacuaaacaacaggcauucaaaugacacaguacaugauaggaccccuuaucgaacccuauugaugaaugaguuggguguuccauuucauuugggaaccaaacaagugugcauagcaugguccagcucaaguugucacgauggaaaagcauggcugcauguuuguguaacugggcaugaugaaaaugcaacugcuagcuucauuuacgaugggaggcuuguagauaguauugguucaugguccaaaaauauccucaggacccaggagucggaaugcguuuguaucaauggaacuuguacaguaguaaugacugauggaagugcuucagaaagagcugauacuaaaauacuauucauugaagaggggaaaaucguucauauuagcccauugucaggaagugcucagcaugucgaggagugcuccuguuauccucgauauccuggugucagaugugucugcagagacaacuggaaaggcuccaauaggcccaucguagauauaaaugugaaagauuauagcauuguuuccaguuaugugugcucaggacuuguuggagacacacccagaagaaacgacagcuccagcaguagcuauugccggaaaccuaacaaugagaaagggagucauggagugaaagguugggccuuugaugauggaaaugacguguggaugggaagaacgaucagcgaggaguuacgcucugguuaugaaaccuucaaaguuauuggaggcugguccaaaccuaacuccaaauugcagauaaauaggcaagucauaguugacagagguaauagguccgguuauucugguauuuucucuguugaaggcaaaagcugcaucaaucggugcuuuuauguggaguugauaaggggaaggaaacaggaaacugaagucugguggaccucaaacaguauuguuguguuuuguggcaccucagguacauauggaacaggcucauggccugauggggcggacaucaaucucaugccuauauaa

SEQ ID NO: 47172 - RNA, 1410 nt, Artificial Sequence
  derived and/or modified CDS sequence (wt) from neuraminidase__InfluenzaA__ABG48019
augaauccaaaucaaaagauaauaacaauuggcucuguuucucucacuauugccacaauaugcuuccuuaugcaaauugccauccugguaacuacuguaacauugcauuucaagcaauaugagugcaacucccccccaagcaaccaaguaaugcugugugaaccaacaauaauagaaagaaacauaacagagauaguguauuugacuaacaccaccauagagaaagaaauaugccccaaacuggcagaauacagaaauuggucaaagccgcaauguaaaauuacaggauuugcaccuuuuucuaaggacaauucaauucggcuuuccgcugguggagacauuugggugacaagagaaccuuaugugucaugcgauccuggcaaguguuaucaauuugcacuuggacagggaacaacacuaaacaacaggcauucaaaugacacaguacaugauaggaccccuuaucgaacccuauugaugaaugaguuggguguuccauuucauuugggaaccaagcaaguaugcauagcaugguccagcucaaguugucacgauggaaaagcauggcugcauguuuguguaacugggcaugaugaaaaugcaacugcuagcuucauuuacgaugggaggcuuguagauaguauugguucaugguccaaaaauauccucaggacccaggagucggaaugcguuuguaucaauggaacuuguacaguaguaaugacugauggaagugcuucagaaagagcugauacuaaaauacuauucauugaagaggggaaaaucguucauauuagcccauugucaggaagugcucagcaugucgaggagugcuccuguuauccucgauauccuggugucagaugugccugcagagacaacuggaaaggcuccaauaggcccaucguagauauaaaugugaaagauuauagcauuguuuccaguuaugugugcucaggacuuguuggagacacacccagaaaaaacgacagcuccagcaguagcuauugccggaauccuaacaaugagaaagggagucauggagugaaagguugggccuuugaugauggaaaugacguguggaugggaagaacgaucagcgaggaguuacgcucugguuaugaaaccuucaaaguuauuggaggcugguccaaaccuaacuccaaauugcagauaaauaggcaagucauaguugacagagauaauagguccgguuauucugguauuuucucuguugaaggcaaaagcugcaucaaucggugcuuuuauguggaguugauaaggggaaggaaacaggaaacugaagucugguggaccucaaacaguauuguuguguuuuguggcaccucagguaccuauggaacaggcucauggccugauggggcggacaucaaucucaugccuauauaa

SEQ ID NO: 47173 - RNA, 1410 nt, Artificial Sequence; identical to SEQ ID NO: 47134
  derived and/or modified CDS sequence (wt) from neuraminidase__InfluenzaA__ABG48030

SEQ ID NO: 47174 - RNA, 1410 nt, Artificial Sequence
  derived and/or modified CDS sequence (wt) from neuraminidase__InfluenzaA__ABG48041
augaauccaaaucaaaagauaauaacaauuggcucuguuucucuuacuauugccacaauaugcuuccuuaugcaaauugccauccugguaacuacuguaacauugcauuucaagcaauaugagugcaacucccccccaagcaaccaaguaaugcugugugaaccaacaauaauagaaagaaacauaacagagauaguguauuugacuaacaccaccauagagaaagaaauaugccccaaacuggcagaauacagaaauuggucaaagccgcaauguaaaauuacaggauuugcaccuuuuucuaaggacaauucaauucggcuuuccgcugguggagacauuugggugacaagagaaccuuaugugucaugcgauccuggcaaguguuaucaauuugcacuuggacagggaacaacacuaaacaacaggcauucaaaugacacaguacaugauaggaccccuuaucgaacccuauugaugaaugaguuggguguuccauuucauuugggaaccaagcaagugugcauagcaugguccagcucaaguugucacgauggaaaagcauggcugcauguuuguguaacugggcaugaugaaaaugcaacugcuagcuucauuuacgaugggaggcuuguagauaguauugguucaugguccaaaaauauccucaggacccaggagucggaaugcguuuguaucaauggaacuuguacaguaguaaugacugauggaagugcuucagaaagagcugauacuaaaauacuauucauugaagaggggaaaaucguucauauuagcccauugucaggaagugcucagcaugucgaggagugcuccuguuauccucgauauccuggugucagaugugucugcagagacaacuggaaaggcuccaauaggcccaucguagauauaaaugugaaagauuauagcauuguuuccaguuaugugugcucaggacuuguuggagacacacccagaaaaaacgacagcuccagcaguagcuauugccggaauccuaacaaugagaaagggagucauggagugaaagguugggccuuugaugauggaaaugacguguggaugggaagaacgaucagcgaggaguuacgcucugguuaugaaaccuucaaaguuauuggaggcugguccaaaccuaacuccaaauugcagauaaauaggcaagucauaguugacagagguaauagguccgguuauucugguauuuucucuguugaaggcaaaagcugcaucaaucggugcuuuuauguggaguugauaaggggaaggaaacaggagacugaagucugguggaccucaaacaguauuguuguguuuuguggcaccucagguacauauggaacaggcucauggccugauggggcggacaucaaucucaugccuauauaa

SEQ ID NO: 47175 - RNA, 1413 nt, Artificial Sequence; identical to SEQ ID NO: 46888
  derived and/or modified CDS sequence (wt) from neuraminidase__InfluenzaA__ABG48052

SEQ ID NO: 47176 - RNA, 1410 nt, Artificial Sequence; identical to SEQ ID NO: 46755
  derived and/or modified CDS sequence (wt) from neuraminidase__InfluenzaA__ABG48063

SEQ ID NO: 47177 - RNA, 1410 nt, Artificial Sequence; identical to SEQ ID NO: 46867
  derived and/or modified CDS sequence (wt) from neuraminidase__InfluenzaA__ABG48074

SEQ ID NO: 47178 - RNA, 1410 nt, Artificial Sequence
  derived and/or modified CDS sequence (wt) from neuraminidase__InfluenzaA__ABG48085
augaauccaaaucaaaagauaauaacaauuggcucuguuucucucaccauugccacaauaugcuuccuuaugcaaauugccauccugguaacuacuguaacauugcauuucaagcaguaugaaugcaacucccccccaaacaaccaaguaaugcugugugaaccaacaauaauagaaagaaacauaacagagauaguguaucugaccaauaccaccauagagaaggaaauaugccccaaauuagcagaauacagaaauuggucaaagccgcaauguaacauuacaggauuugcaccuuuuucuaaggacaauucgauucggcuuuccgcugguggggacaucugggugacaagagaaccuuaugugucaugcgauccugacaaguguuaucaauuugcccuugggcagggaacaacacuaaacaacgggcauucaaaugacacaguacaugauaggaccccuuaccggacccuauugaugaaugaauuggguguuccauuucauuugggaaccaggcaagugugcauagcaugguccagcucaaguugucacgauggaaaagcauggcugcauguuuguguaacuggggaugaugaaaaugcaacugcuagcuucauuuacaaugggaggcuuguagauaguauugguucaugguccaaaaaaauacucagaacccaggagucggaaugcguuuguaucaauggaacuuguacaguaguaaugacugaugggagcgcuucaggaaaagcugauacuaaaauacuauucauugaggaggggaaaaucguucauauuagcacauugucaggaagugcucagcaugucgaggagugcuccuguuauccucgauauccuggugucagaugugucugcagagacaacuggaaaggcuccaauaggcccaucguagauauaaauguaaaggauuauagcauuguuuccaguuaugugugcucaggacuuguuggagacacacccagaaaaaacgacagcuucagcaguagccauugccuagauccuaacaaugaggaagguggucauggagugaaaggcugggccuuugaugauggaaaugacguguggaugggaagaacgaucagcgagaaguuacgcucagguuaugaaaccuucaaagucaucgaaggcugguccaaaccuaacuccaaauuacagauaaauaggcaagucauaguugaaagagguaacagguccgguuauucugguauuuucuccguugaaggcaaaagcugcaucaaucggugcuuuuauguggaguugauaaggggaaggaaagaggaaacugaagucugguggaccucaaacaguauuguuguguuuuguggcaccucagguacauauggaacaggcucauggccugauggggcggauaucaaucucaugccuauauaa

SEQ ID NO: 47179 - RNA, 1410 nt, Artificial Sequence
  derived and/or modified CDS sequence (wt) from neuraminidase__InfluenzaA__ABG48107
augaauccaaaucaaaagauaauaacaauuggcucuguuucucucaccauugccacaauaugcuuccuuaugcaaauugccauccugguaacuacuguaacauugcauuucaagcaguaugaaugcaacucccccccaaacaaccaaguaaugcugugugaaccaacaauaauagaaagaaacauaacagagauaguguaucugaccaacaccaccauagagaaggaaauaugccccaaacuagcagaauacagaaauuggucaaagccgcaauguaacauuacaggauuugcaccuuuuucuaaggacaauucgauucggcuuuccgcugguggggacaucugggugacaagagaaccuuaugugucaugcgauccugacaaguguuaucaauuugcccuugggcagggaacaacacuaaacaacgggcauucaaaugacacaguacaugauaggaccccuuaccggacccuauugaugaaugaauuggguguuccauuucauuugggaaccaggcaagugugcauagcaugguccagcucaaguugucacgauggaaaagcauggcugcauguuuguguaacuggggaugaugaaaaugcaacugcuagcuucauuuacaaugggaggcuuguagauaguauugguucaugguccaaaaaaacacucagaacccaggagucggaaugcguuuguaucaauggaacuuguacaguaguaaugacugaugggagcgcuucaggaaaagcugauacuaaaauacuauucauugaggaggggaaaaucguucauauuagcacauugucaggaagugcucagcaugucgaggagugcuccuguuauccucgauauccuggugucagaugugucugcagagacaacuggaaaggcuccaauaggcccaucguagauauaaauguaaaggauuauagcauuguuuccaguuaugugugcucaggacuuguuggagacacacccagaaaaaacgacagcuucagcaguagccauugccuagauccuaacaaugaggaagguggucauggagugaaaggcugggccuuugaugauggaaaugacguguggaugggaagaacgaucagcgagaaguuacgcucagguuaugaaaccuucaaagucaucgaaggcugguccaaaccuaacuccaaauuacagauaaauaggcaagucauaguugaaagagguaacagguccgguuauucugguauuuucuccguugaaggcaaaagcugcaucaaucggugcuuuuauguggaguugauaaggggaaggaaagaggaaacugaagucugguggaccucaaacaguauuguuguguuuuguggcaccucagguacauauggaacaggcucauggccugauggggcggauaucaaucucaugccuauauaa

SEQ ID NO: 47180 - RNA, 1410 nt, Artificial Sequence
  derived and/or modified CDS sequence (wt) from neuraminidase__InfluenzaA__ABG48118
augaauccaaaucaaaagauaauaacaauuggcucuguuucucucaccauugccacaauaugcuuccuuaugcaaauugccauccugguaacuacuguaacauugcauuucaagcaguaugaaugcaacucccccccaaacaaccaaguaaugcugugugaaccaacaauaauagaaagaaacauaacagagauaguguaucugaccaacaccaccauagagaaggaaauaugccccaaauuagcagaauacagaaauuggucaaagccgcaauguaacauuacaggauuugcaccuuuuucuaaggacaauucgauucggcuuuccgcugguggggacaucugggugacaagagaaccuuaugugucaugcgauccugacaaguguuaucaauuugcccuugggcagggaacaacacuaaacaacgggcauucaaaugacacaguacaugauaggaccccuuaccggacccuauugaugaaugaauuggguguuccauuucauuugggaaccaggcaagugugcauagcaugguccagcucaaguugucacgacggaaaagcauggcugcauguuuguguaacuggggaugaugaaaaugcaacugcuagcuucauuuacaaugggaggcuuguagauaguauugguucaugguccaaaaaaauacucagaacccaggagucggaaugcguuuguaucaauggaacuuguacaguaguaaugacugaugggagcgcuucaggaaaagcugauacuaaaauacuauucauugaggaggggaaaaucguucauauuagcacauugucaggaagugcucagcaugucgaggagugcuccuguuauccucgauauccuggugucagaugugucugcagagacaacuggaaaggcuccaauaggcccaucguagauauaaauguaaaggauuauagcauuguuuccaguuaugugugcucaggacuuguuggagacacacccagaaaaaacgacagcuucagcaguagccauugccuagauccuaacaaugaggaagguggucauggagugaaaggcugggccuuugaugauggaaaugacguguggaugggaagaacgaucagcgagaaguuacgcucagguuaugaaaccuucaaagucaucgaaggcugguccaaacccaacuccaaauuacagacaaauaggcaagucauaguugaaagagguaacagguccgguuauucugguauuuucuccguugaaggcaaaagcugcaucaaucggugcuuuuauguggaguugauaaggggaaggaaagaggaaacugaagucugguggaccucaaacaguauuguuguguuuuguggcaccucagguacauauggaacaggcucauggccugauggggcggauaucaaucucaugccuauauaa

SEQ ID NO: 47181 - RNA, 1410 nt, Artificial Sequence
  derived and/or modified CDS sequence (wt) from neuraminidase__InfluenzaA__ABG48129
augaauccaaaucaaaagauaauaacaauuggcucuguuucucucaccauugccacaauaugcuuccuuaugcaaauugccauccugguaacuacuguaacauugcauuucaagcaguaugaaugcaacucccccccaaacaaccaaguaaugcugugugaaccaacaauaauagaaagaaacauaacagagauaguguaucugaccaacaccaccauagagaaggaaauaugccccaaauuagcagaauacagaaauuggucaaagccgcaauguaacauuacaggauuugcaccuuuuucuaaggacaauucgauucggcuuuccgcugguggggacaucugggugacaagagaaccuuaugugucaugcgauccugacaaguguuaucaauuugcccuugggcagggaacaacacuaaacaacgggcauucaaaugacacaguacaugauaggaccccuuaccggacccuauugaugaaugaauuggguguuccauuucauuugggaaccaggcaagugugcauagcaugguccagcucaaguugucacgauggaaaagcauggcugcauguuuguguaacuggggaugaugaaaaugcaacugcuagcuucauuuacaaugggaggcuuguagauaguauugguucaugguccaaaaaaauacucagaacccaggagucggaaugcguuuguaucaauggaacuuguacaguaguaaugacugaugggagcgcuucaggaaaagcugauacuaaaauacuauucauugaggaggggaaaaucguucauauuagcacauugucaggaagugcucagcaugucgaggagugcuccuguuauccucgauauccuggugucagaugugucugcagagacaacuggaaaggcuccaauaggcccaucguagauauaaauguaaaggauuauagcauuguuuccaguuaugugugcucaggacuuguuggagacacacccagaaaaaaugacagcuucagcaguagccauugccuagauccuaacaaugaggaagguggucauggagugaaaggcugggccuuugaugauggaaaugacguguggaugggaagaacgaucagcgagaaguuacgcucagguuaugaaaccuucaaagucaucgaaggcugguccaaaccuaacuccaaauuacagacaaauaggcaagucauaguugaaagagguaacagguccgguuauucugguauuuucuccguugaaggcaaaagcugcaucaaucggugcuuuuauguggaguugauaaggggaaggaaagaggaaacugaagucugguggaccucaaacaguauuguuguguuuuguggcaccucagguacauauggaacaggcucauggccugauggggcggauaucaaucucaugccuauauaa

SEQ ID NO: 47182 - RNA, 1410 nt, Artificial Sequence
  derived and/or modified CDS sequence (wt) from neuraminidase__InfluenzaA__ABG48140
augaauccaaaucaaaagauaauaacaauuggcucuguuucucucaccauugccacaauaugcuuccuuaugcaaauugccauccugguaacuacuguaacauugcauuucaagcaguaugaaugcaacucccccccaaacaaccaaguaaugcugugugaaccaacaauaauagaaagaaacauaacagagauaguguaucugaccaauaccaccauagagaaggaaauaugccccaaauuagcagaauacagaaauuggucaaagccgcaauguaacauuacaggauuugcaccuuuuucuaaggacaauucgauucggcuuuccgcugguggggacaucugggugacaagagaaccuuaugugucaugcgauccugacaaguguuaucaauuugcccuugggcagggaacaacacuaaacaacgggcauucaaaugacacaguacaugauaggaccccuuacaggacccuauugaugaaugaauuggguguuccauuucauuugggaaccaggcaagugugcauagcaugguccagcucaaguugucacgauggaaaagcauggcugcauguuuguguaacuggggaugaugaaaaugcaacugcuagcuucauuuacaaugggaggcuuguagauaguauugguucaugguccaaaaaaauacucagaacccaggagucggaaugcguuuguaucaauggaacuuguacaguaguaaugacugaugggagcgcuucaggaaaagcugauacuaaaauacuauucauugaggaggggaaaaucguucauauuagcacauugucaggaagugcucagcaugucgaggagugcuccuguuauccucgauauccuggugucagaugugucugcagagacaacuggaaaggcuccaauaggcccaucguagauauaaauguaaaggauuauagcauuguuuccaguuaugugugcucaggacuuguuggagacacacccagaaaaaacgacagcuucagcaguagccauugccuagauccuaacaaugaggaagguggucauggagugaaaggcugggccuuugaugauggaaaugacguguggaugggaagaacgaucagcgagaaguuacgcucagguuaugaaaccuucaaagucaucgaaggcugguccaaaccuaacuccaaauuacagauaaauaggcaagucauaguugaaagagguaacagguccgguuauucugguauuuucuccguugaaggcaaaagcugcaucaaucggugcuuuuauguggaguugauaaggggaaggaaagaggaaacugaagucugguggaccucaaacaguauuguuguguuuuguggcaccucagguacauauggaacaggcucauggccugauggggcggauaucaaucucaugccuauauaa

SEQ ID NO: 47183 - RNA, 1410 nt, Artificial Sequence
  derived and/or modified CDS sequence (wt) from neuraminidase__InfluenzaA__ABG48151
augaauccaaaucaaaagauaauaacaauuggcucuguuucucucaccauugccacaauaugcuuccuuaugcaaauugccauccugguaacuacuguaacauugcauuucaagcaguaugaaugcaacucccccccaaacaaccaaguaaugcugugugaaccaacaauaauagaaagaaacauaacagagauaguguaucugaccaacaccaccauagagaaggaaauaugccccaaauuagcagaauacagaaauuggucaaagccgcaauguaacauuacaggauuugcaccuuuuucuaaggacaauucgauucggcuuuccgcugguggggacaucugggugacaagagaaccuuaugugucaugcgauccugacaaguguuaucaauuugcccuugggcagggaacaacacuaaacaacgggcauucaaaugacacaguacaugauaggaccccuuaccggacccuauugaugaaugaauuggguguuccauuucauuugggaaccaggcaagugugcauagcaugguccagcucaaguugucacgauggaaaagcauggcugcauguuuguguaacuggggaugaugaaaaugcaacugcuagcuucauuuacaaugggaggcuuguagacaguauugguucaugguccaaaaaaauacucagaacccaggagucggaaugcguuuguaucaauggaacuuguacaguaguaaugacugaugggagcgcuucaggaaaagcugauacuaaaauacuauucauugaggaggggaaaaucguucauauuagcacauugucaggaagugcucagcaugucgaggagugcuccuguuauccucgauauccuggugucagaugugucugcagagacaacuggaaaggcuccaauaggcccaucguagauauaaauguaaaggauuauagcauuguuuccaguuaugugugcucaggacuuguuggagacacacccagaaaaaacgacagcuucagcaguagccauugccuagauccuaacaaugaggaagguggucauggagugaaaggcugggccuuugaugauggaaaugacguguggaugggaagaacgaucagcgagaaguuacgcucagguuaugaaaccuucaaagucaucgaaggcugguccaaaccuaacuccaaauuacagacaaauaggcaagucauaguugaaagagguaacagguccgguuauucugguauuuucuccguugaaggcaaaagcugcaucaaucggugcuuuuauguggaguugauaaggggaaggaaagaggaaacugaagucugguggaccucaaacaguauuguuguguuuuguggcaccucagguacauauggaacaggcucauggccugauggggcggauaucaaucucaugccuauauaa

SEQ ID NO: 47184 - RNA, 1410 nt, Artificial Sequence
  derived and/or modified CDS sequence (wt) from neuraminidase__InfluenzaA__ABG48173
augaauccaaaucaaaagauaauaacaauuggcucuguuucucucaccauugccacaauaugcuuccuuaugcaaauugccauccugguaacuacuguaacauugcauuucaagcaauaugaaugcaacucccccccaaacaaccaaguaaugcugugugaaccaacaauaauagaaagaaacauaacagagauaguguaucugaccaauaccaccauagagaaggaaauaugccccaaauuagcagaauacagaaauuggucaaagccgcaauguaacauuacaggauuugcaccuuuuucuaaggacaauucgauucggcuuuccgcugguggggacaucugggugacaagagaaccuuaugugucaugcgauccugacaaguguuaucaauuugcccuugggcagggaacaacacuaaacaacgggcauucaaaugacacaguacaugauaggaccccuuacaggacccuauugaugaaugaauuggguguuccauuucauuugggaaccaggcaagugugcauagcaugguccagcucaaguugucacgauggaaaagcauggcugcauguuuguguaacuggggaugaugaaaaugcaacugcuagcuucauuuacaaugggaggcuuguagauaguauugguucaugguccaaaaaaauacucagaacccaggagucggaaugcguuuguaucaauggaacuuguacaguaguaaugacugaugggagcgcuucaggaaaagcugauacuaaaauacuauucauugaggaggggaaaaucguucauauuagcacauugucaggaagugcucagcaugucgaggagugcuccuguuauccucgauauccuggugucagaugugucugcagagacaacuggaaaggcuccaauaggcccaucguagauauaaauguaaaggauuauagcauuguuuccaguuaugugugcucaggacuuguuggagacacacccagaaaaaacgacagcuucagcaguagccauugccuagauccuaacaaugaggaagguggucauggagugaaaggcugggccuuugaugauggaaaugacguguggaugggaagaacgaucagcgagaaguuacgcucagguuaugaaaccuucaaagucaucgaaggcugguccaaaccuaacuccaaauuacagauaaauaggcaagucauaguugaaagagguaacagguccgguuauucugguauuuucuccguugaaggcaaaagcugcaucaaucggugcuuuuauguggaguugauaaggggaaggaaagaggaaacugaagucugguggaccucaaacaguauuguuguguuuuguggcaccucagguacauauggaacaggcucauggccugauggggcggauaucaaucucaugccuauauaa

SEQ ID NO: 47185 - RNA, 1410 nt, Artificial Sequence; identical to SEQ ID NO: 46178
  derived and/or modified CDS sequence (wt) from neuraminidase__InfluenzaA__ABG48184

SEQ ID NO: 47186 - RNA, 1410 nt, Artificial Sequence
  derived and/or modified CDS sequence (wt) from neuraminidase__InfluenzaA__ABG48195
augaauccaaaucaaaagauaauaacaauuggcucuguuucucucaccauugccacaauaugcuuccuuaugcaaauugccauccugguaacuacuguaacauugcauuucaagcaguaugaaugcaacucccccccaaacaaccaaguaaugcugugugaaccaacaauaauagaaagaaacauaacagagauaguguaucugaccaacaccaccauagagaaggaaauaugccccaaauuagcagaauacagaaauuggucaaagccgcaauguaacauuacaggauuugcaccuuuuucuaaggacaauucgauucggcuuuccgcugguggggacaucugggugacaagagaaccuuaugugucaugcgauccugacaaguguuaucaauuugcccuugggcagggaacaacacuaaacaacgggcauucaaaugacacaguacaugauaggaccccuuaccggacccuauugaugaaugaauuggguguuccauuucauuugggaaccaggcaagugugcauagcaugguccagcucaaguugucacgauggaaaagcauggcugcauguuuguguaacuggggaugaugaaaaugcaacugcuagcuucauuuacaaugggaggcuuguagauaguauugguucaugguccaaaaaaauacucagaacccaggagucggaaugcguuuguaucaauggaacuuguacaguaguaaugacugaugggagcgcuucaggaaaagcugauacuaaaauacuauucauugaggaggggaaaaucguucauauuagcacauugucaggaagugcucagcaugucgaggagugcuccuguuauccucgauauccuggugucagaugugucugcagagacaacuggaaaggcuccaauaggcccaucguagauauaaauguaaaggauuauagcauuguuuccaguuaugugugcucaggacuuguuggagacacacccagaaaaaacgacagcuucagcaguagccauugcauagauccuaacaaugaggaagguggucauggagugaaaggcugggccuuugaugauggaaaugacguguggaugggaagaacgaucagcgagaaguuacgcucagguuaugaaaccuucaaagucaucgaaggcugguccaaaccuaacuccaaauuacagacaaauaggcaagucauaguugaaagagguaacagguccgguuauucugguauuuucuccguugaaggcaaaagcugcaucaaucggugcuuuuauguggaguugauaaggggaaggaaagaggaaacugaagucugguggaccucaaacaguauuguuguguuuuguggcaccucagguacauauggaacaggcucauggccugauggggcggauaucaaucucaugccuauauaa

SEQ ID NO: 47187 - RNA, 1410 nt, Artificial Sequence
  derived and/or modified CDS sequence (wt) from neuraminidase__InfluenzaA__ABG48206
augaauccaaaucaaaagauaauaacaauuggcucuguuucucucaccauugccacaauaugcuuccuuaugcaaauugccauccugguaacuacuguaacauugcauuucaagcagcaugaaugcaacucccccccaaacaaccaaguaaugcugugugaaccaacaauaauagaaagaaacauaacagagauaguguaucugaccaacaccaccauagagaaggaaauaugccccaaacuaguagaauacagaaauuggucaaagccgcaauguaacauuacaggauuugcaccuuuuucuaaggacaauucgauucggcuuuccgcugguggggacaucugggugacaagagaaccuuaugugucaugcgauccugacaaguguuaucaauuugcccuugggcagggaacaacacuaaacaacgggcauucaaaugacacaguacaugauaggaccccuuaccggacccuauugaugaaugaauuggguguuccauuucauuugggaaccaggcaagugugcauagcaugguccagcucaaguugucacgauggaaaagcauggcugcauguuuguguaacuggggaugauaaaaaugcaacugcuagcuucauuuacaaugggaggcuuguagauaguauugguucaugguccaaaaaaauacucagaacccaggagucggaaugcguuuguaucaauggaacuuguacaguaguaaugacugaugggagcgcuucaggaaaagcugauacuaaaauacuauucauugaggaggggaaaaucguucauauuagcacauugucaggaagugcucagcaugucgaggagugcuccuguuauccucgauauccuggugucagaugugucugcagagacaacuggaaaggcuccaauaggcccauuguagauauaaauguaaaggauuauagcauuguuuccaguuaugugugcucaggacuuguuggagacacacccagaaaaaacgacagcuucagcaguagccauugccuagauccuaacaaugaggaagguggucauggagugaaaggcugggccuuugaugauggaaaugacguguggaugggaagaacgaucaacgagaaguuacgcucagguuaugaaaccuucaaagucaucgaaggcugguccaaaccuaacuccaaauuacagauaaauaggcaaguuauaguugaaagagguaacagguccgguuauucugguauuuucuccguugaaggcaaaagcugcaucaaucggugcuuuuauguggaguugauaaggggaaggaaagaggaaacugaagucugguggaccucaaacaguauuguuguguuuuguggcaccucagguacauauggaacaggcucauggccugauggggcggauaucaaucucaugccuauauaa

SEQ ID NO: 47188 - RNA, 1410 nt, Artificial Sequence; identical to SEQ ID NO: 46603
  derived and/or modified CDS sequence (wt) from neuraminidase__InfluenzaA__ABG48217

SEQ ID NO: 47189 - RNA, 1410 nt, Artificial Sequence; identical to SEQ ID NO: 46603
  derived and/or modified CDS sequence (wt) from neuraminidase__InfluenzaA__ABG48228

SEQ ID NO: 47190 - RNA, 1410 nt, Artificial Sequence; identical to SEQ ID NO: 47187
  derived and/or modified CDS sequence (wt) from neuraminidase__InfluenzaA__ABG48239

SEQ ID NO: 47191 - RNA, 1410 nt, Artificial Sequence; identical to SEQ ID NO: 46603
  derived and/or modified CDS sequence (wt) from neuraminidase__InfluenzaA__ABG48250

SEQ ID NO: 47192 - RNA, 1410 nt, Artificial Sequence
  derived and/or modified CDS sequence (wt) from neuraminidase__InfluenzaA__ABG48272
augaauccaaaucaaaagauaauaacgauuggcucuguuucucucaccauuuccacaauaugcuucuucaugcaaauugccaucuugauaacuacuguaacauugcauuucaagcaauaugaauucaacucccccccaaacaaccaagugaugcugugugaaccaacaauaauagaaagaaacauaacagagauaguguaucugaccaacaccaccauagagaaggaaauaugccccaaacuagcagaauacagaaauuggucaaagccgcaaugugacauuacaggauuugcaccuuuuucuaaggacaauucgauuaggcuuuccgcugguggggacaucugggugacaagagaaccuuaugugucaugcgauccugacaaguguuaucaauuugcccuuggacagggaacaacacuaaacaacgugcauucaaaugacacaguacaugauaggacccccuaucggacccuauugaugaaugaguuagguguuccauuucauuuggggaccaagcaagugugcauagcaugguccagcucaaguugucacgauggaaaagcauggcugcauguuuguguaacgggggaugauaaaaaugcaacugcuagcuucauuuacaaugggaggcuuguagauaguauuguuucaugguccaaaaaaauccucaggacccaggagucagaaugcguuuguaucaauggaacuuguacaguaguaaugacugaugggagugcuucaggaaaagcugauacuaaaauacuauucauugaggaggggaaaaucguucauacuagcacauugucaggaagugcucagcaugucgaggagugcuccugcuauccucgauauccuggugucagaugugucugcagagacaacuggaaaggcuccaauaggcccaucguagauauaaacauaaaggauuauagcauuguuuccaguuaugugugcucaggacuuguuggagacacacccagaaaaaacgacagcuccagcaguagccauugcuuggauccuaacaaugaagaagguggucauggagugaaaggcugggccuuugaugauggaaaugacguguggaugggaagaacgaucagcgagaagucacgcucaggauaugaaaccuucaaagucauugaaggcugguccaacccuaauuccaaauugcagauaaauaggcaagucauaguugacagagguaauagguccgguuauucugguauuuucucuguugaaggcaaaagcugcaucaaucggugcuuuuauguggaguugauaaggggaagaaaagaggaaacugaagucuuguggaccucaaacaguauuguuguguuuuguggcaccucagguacauauggaacaggcucauggccugauggggcggacaucaaucucaugccuauauaa

SEQ ID NO: 47193 - RNA, 1410 nt, Artificial Sequence
  derived and/or modified CDS sequence (wt) from neuraminidase__InfluenzaA__ABG48294
augaauccaaaucaaaagauaauaacaauuggcucuguuucucucacuauugccacaauaugcuuccuuaugcaaauugccauccugguaacuacuguaacauugcauuucaagcaauaugagugcagcucccccccaaacaaccaaguaauuccaugucaaccaacaauaauagaaagaaacauaacagagauaguguauuugacuaacaccaccauagagaaagagauaugccccaaacuaguagaauacagaaauuggucaaagccgcaauguaaaauuacaggauuugcaccuuuuucuaaggacaauucaauucggcuuuccgcugguggagacauuugggugacaagagaaccuuaugugucaugcgacccuggcaaauguuaucaauuugcacuuggacagggaaccacacuaaacaacaggcauucaaaugauacaguacaugauaggaccccuuaucgaacccucuugaugaaugaguuggguguuccauuucauuugggaaccaagcaagugugcauagcaugguccagcucaaguugucacgauggaaaagcauggcugcauguuugugucacugggcaugaugaaaaugcaacugcuagcuucauuuacgaugggaggcuuguagauaguauugguucaugguccagaaauauccucaggacccaggagucggaaugcguuuguaucaaugggacuuguacaguaguaaugacugauggaagugcuucagaaagagcugauacuaaaauacuauucauugaagaggggaaagucguucauauuagcccauugucaggaagugcucagcauguagaggagugcuccuguuauccucgauauccuggugucagaugugucugcagagacaacuggaaaggcuccaauaggcccaucguagauauaaaugugaaagauuauagcauuauuuccaguuaugugugcucagggcuuguuggagacacacccagaagaaacgacagcuccagcaguagcuauugccagaauccuaacaaugagaaagggagucauggagugaaaggcugggccuuugacgauggaaaugacguguggaugggaagaacgaucagcgaggaguuacgcucagguuaugaaaccuucaaagucauuggagguugguccacaccuaauuccaaauugcagauaaauaggcaagucauaguugacagcgguaauagguccgguuauucugguauuuucucuguugaaggcaaaagcugcaucaaucggugcuuuuauguggaguugauaaggggaaggaaacaggaaacuaaagucugguggaccucaaacaguauuguuguguuuuguggcaccucagguacauauggaacaggcucauggccugauggggcggacaucgaucucaugccuauauaa

SEQ ID NO: 47194 - RNA, 1410 nt, Artificial Sequence
  derived and/or modified CDS sequence (wt) from neuraminidase__InfluenzaA__ABG48305
augaauccaaaucaaaagauaauaauaauuggcucuguuucucucacuauugccacaauaugcuuccuuaugcaaauugccauccugguaacuacuguaacauugcauuucaagcaauaugagugcaacucccccccaaacaaccaaguaaugcugugugaaccaacaauaauagaaagaaacauaacagagauaguguaucugaccaacaccaccauagagaaagaaauaugccccaaacuagcagaauacagaaauuggucaaagccgcaauguaaaauuacaggauuugcaccuuuuucuaaggacaauucaauucggcuuuccgcugguggagacauuugggugacaagagaaccuuaugugucaugcgauccuggcaaguguuaucaauuugcccucggacagggaacaacacuaaacaacaggcacucaaaugacacaguacaugauaggaccccuuaucgaacccuauugaugaaugaguuggguguuccauuucauuugggaaccaagcaagugugcauagcaugguccagcucaaguugucacgauggaaaagcauggcugcauguuuguguaacugggcaugaugaaaaugcaacugcuagcuucauuuacgaugggaggcuuguagauaguauugguucaugguccaaaaauauccucaggacccaggagucggaaugcguuuguaucaauggaacuuguacaguaguaaugacugauggaagugcuucagaaagagcugauacuaaaauacuauucauugaagaggggaaaaucguucauauuagcccauugucaggaagugcucagcaugucgaggagugcuccuguuauccucgguauccuggugucagaugugucugcagagacaacuggaaaggcuccaauaggcccaucguagauauaaaugugaaagauuauagcauuguuuccaguuaugugugcucaggacuuguuggagacacacccagaaaaaacgacagcuccagcaguagcuauugccggaauccuaacaaugagaaagggagucauggagugaaaggcugggccuuugaugauggaaaugacguguggaugggaagaacgaucagcgaggaguuacgcucagguuaugaaaccuucaaagucauuggaggcugguccaaaccuaacuccaaauugcagauaaauaggcaagucauaguugacagagguaauagguccgguuauucugguauuuucucuguugaaggcaaaagcugcaucaaucggugcuuuuauguggaguugauaaggggaaggaaacaggaaacugaagucugguggaccucaaacaguauuguuguguuuuguggcaccucagguacauauggaacaggcucauggccugauggggcggacaucaaucucaugccuauauaa

SEQ ID NO: 47195 - RNA, 1410 nt, Artificial Sequence
  derived and/or modified CDS sequence (wt) from neuraminidase__InfluenzaA__ABG48316
augaauccaaaucaaaagauaauaacaauuggcucuguuucucucacuguugccacaauaugcuuccuuaugcaaauugccauccugguaacuacuguaacauugcauuucaagcaauaugagugcaacucccccccaaacaaccaaguaaugcugugugaaccaacaauaauagaaagaaacauaacagagauaguguaucugaccaacaccaccauagagaaagaaauaugccccaaacuagcagaauacagaaauuggucaaagccgcaauguaaaauuacuggauuugcaccuuuuucuaaggacaauucaauucggcuuuccgcugguggagacauuugggugacaagagaaccuuaugugucaugcgauccuggcaaguguuaucaauuugcccuuggacagggaacaacacuaaacaacaggcacucaaaugacacaguacaugauaggaccccuuaucgaacccuauugaugaaugaguuggguguuccauuucauuugggaaccaagcaagugugcauagcaugguccagcucaaguugucacgauggaaaagcauggcugcauguuuguguaacugggcaugaugaaaaugcaacugcuagcuucauuuacgaugggaggcuuguagauaguauugguucaugguccaaaaauauccucaggacccaggagucggaaugcguuuguaucaauggaacuuguacaguaguaaugacugauggaagugcuucagaaagagcugauacuaaaauacuauucauugaagaggggaaaaucguucauauuagcccauugucaggaagugcucagcaugucgaggagugcuccuguuauccucgauauccuggugucagaugugucugcagagacaacuggaaaggcuccaauaggcccaucguagauauaaaugugaaagauuauagcauuguuuccaguuaugugugcucaggacuuguuggagacacacccagaaaaaacgacagcuccagcaguagcuauugccggaauccuaacaaugagaaagggagucauggagugaaaggcugggccuuugaugauggaaaugacguguggaugggaagaacgaucagcgaggaguuacgcucagguuaugaaaccuucaaagucauuggaggcugguccaaaccuaacuccaaauugcagauaaauaggcaagucauaguugaaagagguaauagguccgguuauucugguauuuucucuguugaaggcaaaagcugcaucaaucggugcuuuuauguggaguugauaaggggaaggaaacaggaaacugaagucugguggaccucaaacaguauuguuguguuuuguggcaccucagguacauauggaacaggcucauggccugauggggcggacaucaaucucaugccuauauaa

SEQ ID NO: 47196 - RNA, 1410 nt, Artificial Sequence
  derived and/or modified CDS sequence (wt) from neuraminidase__InfluenzaA__ABG48327
augaauccaaaucaaaagauaauaacaauuggcucuguuucucucacuauugccacaauaugcuuccuuaugcaaauugccauccugguaacuacuguaacauugcauuucaagcaauaugagugcaacucccccccaaacaaccaaguaaugcugugugaaccaacaauaauagaaagaaacauaacagagauaguguaucugaccaacaccaccauagagaaagaaauaugccccaaacuagcagaauacagaaauuggucaaagccgcaauguaaaauuacaggauuugcaccuuuuucuaaggacaauucaauucggcuuuccgcugguggagacauuugggugacaagagaaccuuaugugucaugcgauccuggcaaguguuaucaauuugcccuuggacagggaacaacacuaaacaacaggcauucaaaugacacaguacaugauaggaccccuuaucgaacccuauugaugaaugaguuggguguuccauuucauuugggaaccaagcaagugugcauagcaugguccagcucaaguugucacgauggaaaagcauggcugcauguuuguguaacugggcaugaugaaaaugcaacugcuagcuucauuuacgaugggaggcuuguagauaguauugguucaugguccaaaaauauccucaggacccaggagucggaaugcguuuguaucaauggaacuuguacaguaguaaugacugauggaagugcuucagaaagagcugauacuaaaauacuauucauugaagaggggaaaaucguucauauuagcccauugucaggaagugcucagcaugucgaggagugcuccuguuauccucgauauccuggugucagaugugucugcagagacaacuggaaaggcuccaauaggcccaucguagauauaaaugugaaagauuauagcauuguuuccaguuaugugugcucaggacuuguuggagacacacccagaaaaaacgacagcuccagcaguagcuauugccggaauccuaacaaugagaaagggagucguggagugaaaggcugggccuuugaugauggaaaugacguguggaugggaagaacgaucagugaggaguuacgcucagguuaugaaaccuucaaagucauuggaggcugguccaaaccuaacuccaaauugcagauaaauaggcaagucauaguugacagagguaauagguccgguuauucugguauuuucucuguugaaggcaaaagcugcaucaaucggugcuuuuauguggaguugauaaggggaaggaaacaggaaacugaagucugguggaccucaaacaguauuguuguguuuuguggcaccucagguacauauggaacaggcucauggccugauggggcggacaucaaucucaugccuauauaa

SEQ ID NO: 47197 - RNA, 1410 nt, Artificial Sequence
  derived and/or modified CDS sequence (wt) from neuraminidase__InfluenzaA__ABG48338
augaauccaaaucaaaagauaauaacaauuggcucuguuucucucacuauugccacaauaugcuuccuuaugcaaauugccauccugguaacuacuguaacauugcauuucaagcaauaugagugcaacucccccccaaacaaccaaguaaugcugugugaaccaacaauaauagaaagaaacauaacagagauaguguaucugaccaacaccaccauagagaaagaaauaugccccaaacuagcagaauacagaaauuggucaaagccgcaauguaaaauuacaggauuugcaccuuuuucuaaggacaauucaauucggcuuuccgcugguggagacauuugggugacaagagaaccuuaugugucaugcgauccuggcaaguguuaucaauuugcccuuggacagggaacaacacuaaacaacaggcacucaaaugacacaguacaugauaggaccccuuaucgaacccuauugaugaaugaguuggguguuccauuucauuugggaaccaagcaagugugcauagcaugguccagcucaaguugucacgauggaaaagcauggcugcauguguguguaacugggcaugaugaaaaugcaacugcuagcuucauuuacgaugggaggcuuguagauaguauugguucaugguccaaaaauauccucaggacccaggagucggaaugcguuuguaucaauggaacuuguacaguaguaaugacugauggaagugcuucagaaagagcugauacuaaaauacuauucauugaagaggggaaaaucguucauauuagcccauugucaggaagugcucagcaugucgaggagugcuccuguuauccucgguauccuggugucagaugugucugcagagacaacuggaaaggcuccaauaggcccaucguagauauaaaugugaaagauuauagcauuguuuccaguuaugugugcucaggacuuguuggagacacacccagaaaaaacgacagcuccagcaguagcuauugccggaauccuaacaaugagaaagggagucauggagugaaaggcugggccuuugaugauggaaaugacguguggaugggaagaacgaucagcgaggaguuacgcucagguuaugaaaccuucaaagucauuggaggcugguccaaaccuaacuccaaauugcagauaaauaggcaagucauaguugacagagguaauagguccgguuauucugguauuuucucuguugaaggcaaaagcugcaucaaucggugcuuuuauguggaguugauaaggggaaggaaacaggaaacugaagucugguggaccucaaacaguauuguuguguuuuguggcaccucagguacauauggaacaggcucauggccugauggggcggacaucaaucucaugccuauauaa

SEQ ID NO: 47198 - RNA, 1410 nt, Artificial Sequence; identical to SEQ ID NO: 47197
  derived and/or modified CDS sequence (wt) from neuraminidase__InfluenzaA__ABG48349

SEQ ID NO: 47199 - RNA, 1410 nt, Artificial Sequence
  derived and/or modified CDS sequence (wt) from neuraminidase__InfluenzaA__ABG48360
augaauccaaaucaaaagauaauaacaauuggcucuguuucucucacuauugccacaauaugcuuccuuaugcaaauugccauccugguaacuacuguaacauugcauuucaagcaauaugagugcaacucccccccaaacaaccaaguaaugcugugugaaccaacaauaauagaaagaaacauaacagagauaguguaucugaccaacaccaccauagagaaagaaauaugccccaaacuagcagaauacagaaauuggucaaagccgcaauguaaaauuacaggauuugcaccuuuuucuaaggacaauucaauucggcuuuccgcugguggagacauuugggugacaagagaaccuuaugugucaugcgauccuggcaaguguuaucaauuugcccuuggacagggaacaacacuaaacaacaggcauucaaaugacacaguacaugauaggaccccuuaucgaacccuauugaugagugaguuggguguuccauuucauuugggaaccaagcaagugugcauagcaugguccagcucaaguugucacgauggaaaagcauggcugcauguuuguguaacugggcaugaugaaaaugcaacugcuagcuucauuuacgaugggaagcuuguagauaguauugguucaugguccaaaaauauccucaggacccaggagucggaaugcguuuguaucaauggaacuuguacagugguaaugacugauggaagugcuucagaaagagcugauacuaaaauacuauucauugaagaggggaaaaucguucauauuagcccauugucaggaagugcucagcaugucgaggagugcuccuguuauccucgauauccuggugucagaugugucugcagagacaacuggaaaggcuccaauaggcccaucguagauauaaaugugaaagaucauagcauuguuuccaguuaugugugcucaggacuuguuggagacacacccagaaaaaacgacagcuccagcaguagcuauugccggaauccuaacaaugagaaagggagucauggagugaaaggcugggccuuugaugauggaaaugacguguggaugggaagaacgaucagcgaggaguuacgcucagguuaugaaaccuucaaagucauuggaggcugguccaaaccuaacuccaaauugcagauaaauaggcaagucauaguugacagagguaauagguccgguuauucugguauuuucucuguugaaggcaaaagcugcaucaaucggugcuuuuauguggaguugauaaggggaaggaaacaggaaacugaagucugguggaccucaaacaguauuguuguguuuuguggcaccucagguacauauggaacaggcucauggccugauggggcggacaucaaucucaugccuauauaa

SEQ ID NO: 47200 - RNA, 1410 nt, Artificial Sequence
  derived and/or modified CDS sequence (wt) from neuraminidase__InfluenzaA__ABG48371
augaauccaaaucaaaagauaauaacaauuggcucuguuucucucacuauugccacaauaugcuuccuuaugcaaauugccauccugguaacuacuguaacauugcauuucaagcaauaugagugcaacucccccccaaacaaccaaguaaugcugugugaaccaacaauaauagaaagaaacauaacagagauaguguaucugaccaacaccaccauagagaaagaaauaugccccaaacuagcagaauacagaaauuggucaaagccgcaauguaaaauuacaggauuugcaccuuuuucuaaggacaauucaauucggcuuuccgcugguggagacauuugggugacaagagaaccuuaugugucaugcgauccuggcaaguguuaucaauuugcccuuggacagggaacaacacuaaacaacaggcacucaaaugacacaguacaugauaggaccccuuaucgaacccuauugaugaaugaguuggguguuccauuucauuugggaaccaagcaagugugcauagcaugguccagcucaaguugucacgauggaaaagcauggcugcauguuuguguaacugggcaugaugaaaaugcaacugcuagcuucauuuacgaugggaggcuuguagauaguauugguucaugguccaaaaauauccucaggacccaggagucggaaugcguuuguaucaauggaacuuguacaguaguaaugacugauggaagugcuucagaaagagcugauacuaaaauacuauucauugaagaggggaaaaucguucauauuagcccauugucaggaagugcucagcaugucgaggagugcuccuguuauccucgguauccuggugucagaugugucugcagagacaacuggaaaggcuccaauaggcccaucguagauauaaaugugaaagauuauagcauuguuuccaguuaugugugcucaggacuuguuggagacacacccagaaaaaacgacagcuccagcaguagcuauugccggaauccuaacaaugagaaagggagucauggagugaaaggcugggccuuugaugauggaaaugacguguggaugggaagaacgaucagcgaggaguuacgcucagguuaugaaaccuucaaagucauuggaggcugguccaaaccuaacuccaaauugcagauaaauaggcaagucauaguugacagagguaauagguccgguuauucugguauuuucucuguugaaggcaaaagcugcaucaaucggugcuuuuauguggaguugauaaggggaaggaaacaggaaacugaagucugguggaccucaaacaguauuguuguguuuuguggcaccucagguacauauggaacaggcucauggccugauggggcggacaucaaucucaugccuauauaa

SEQ ID NO: 47201 - RNA, 1410 nt, Artificial Sequence
  derived and/or modified CDS sequence (wt) from neuraminidase__InfluenzaA__ABG67138
augaauccaaaucaaaagauaauaacgauuggcucuguuucucucacuauugccacaauaugcuuccuuacgcaaauugccauccugguaacuacuguaacauugcauuucaagcaauaugaaugcaacucccccccaagcaaccaaguaaugcugugugaaccaacaacaauagaaagaaacauaacagagauaguguaucugaccaacaccaccauagagaaggaaauaugccccaaacuagcagaauacagaaauuggucaaagccgcaauguaaaauuacaggauuugcaccuuuuucuaaggacaauucaauucggcuuuccgcugguggggacauuugggugacaagagaaccuuaugugucaugcgauccugacaaguguuaucaauuugcccuuggacagggaacaacacuaaacaacaggcauucaaaugacacaguacaugauaggaccccuuaucgaacccuauugaugaaugaguuggguguuccauuucauuugggaaccaagcaagugugcauagcaugguccagcucaaguugucacgauggaaaagcauggcugcauguuuguguaacugggcaugaugaaaaugcaacugcuagcuucauuuacgaugggaggcuuguagauaguauugguucaugguccaaaaaaauccucaggacccaggagucggaaugcguuuguaucaauggaacuuguacaguaguaaugacugaugggagugcuucaggaagagcugauacuaaaauacuauucauugaggaggggaaaaucguucauauuagcccauugucaggaagugcucagcaugucgaggagugcuccuguuauccucgauauccuggugucagaugugucugcagagacaacuggaaaggcuccaauaggcccaucguagauauaaauguaaaggauuauagcauuguuuccaguuaugugugcucaggacuuguuggagacacacccagaaaaaacgacagcuccagcaguagccauugccugaauccuaacaaugaggaagggggucauggagugaaaggcugggccuuugaugauggaaaugacguguggaugggaagaacgaucagcgagaaguuacgcucagguuaugaaaccuucaaagucauugaaggaugguccaaaccuaacuccaaauugcagauaaauaggcaagucauaguugacagagguaauagguccgguuauucugguauuuuuucuguugaaggcaaaagcugcaucaaucggugcuuuuauguggaguugauaaggggaaggaaacaggaaacugaagucugguggaccucaaacaguauuguuguguuuuguggcaccucagguacauauggaacaggcucauggccugauggggcggacaucaaucucaugccuauauaa

SEQ ID NO: 47202 - RNA, 1410 nt, Artificial Sequence; identical to SEQ ID NO: 46880
  derived and/or modified CDS sequence (wt) from neuraminidase__InfluenzaA__ABG67149

SEQ ID NO: 47203 - RNA, 1410 nt, Artificial Sequence
  derived and/or modified CDS sequence (wt) from neuraminidase__InfluenzaA__ABG67160
augaauccaaaucaaaagauaauaacaauuggcucuguuucucucacuauugccacaauaugcuuccuuaugcaaauugccauccuuguaacuacuguaacauugcauuucaagcaauaugagugcaacucccccccaaacaaccaaguaaugcugugugaaccaacaauaauagaaagaaacauaacagagauaguguaucugaccaacaccaccauagagaaagaaauaugccccaaacuagcagaauacagaaguuggucaaagccgcaauguaaaauuacaggauuugcaccuuuuucuaaggacaauucaauucggcuuuccgcugguggagacauuugggugacaagagaaccuuaugugucaugcgauccuggcaaguguuaucaauuugcccuuggacagggaacaacacuaaacaacaggcauucaaaugacacaguacaugauaggaccccuuaucgaacccuauugaugaaugaguuggguguuccauuucauuugggaaccaagcaagugugcauagcaugguccagcucaaguugucacgauggaaaagcauggcugcauguuuguguaacugggcaugaugaaaaugcaacugcuagcuucauuuacgaugggaggcuuguagauaguauugguucaugguccaaaaauauccucaggacccaggagucggaaugcguuugugucaauggaacuuguacaguaguaaugacugauggaagugcuucagaaagagcugauacuaaaauacuauucauugaagaggggaaaaucguucauauuagcccauugucaggaagugcucagcaugucgaggagugcuccuguuauccucgauauccuggugucagaugugucugcagagacaacuggaaaggcuccaauaggcccaucguagauauaaaugugaaagauuauaguauuguuuccaguuaugugugcucaggacuuguuggagacacacccagaaaaaacgacagcuccagcaguagcuauugcuggaauccuaacaaugagaaaggggggcauggggugaaaggcugggccuuugaugauggaaaugacguguggaugggaagaacgaucagcgaggaguuacgcucagguuaugaaaccuucaaagucauuggaggcugguccaaaccuaacuccaaauugcagauaaauaggcaagucauaguugacagagguaauagguccgguuauucugguauuuucucuguugaaggcaaaagcugcaucaaucggugcuuuuauguggaguugauaaggggaaggaaacaggaaacugaagucugguggaccucaaacaguauuguuguguuuuguggcaccucagguacauauggaacaggcucauggccugauggggcggacaucaaucucaugccuauauaa

SEQ ID NO: 47204 - RNA, 1410 nt, Artificial Sequence
  derived and/or modified CDS sequence (wt) from neuraminidase__InfluenzaA__ABG67171
augaauccaaaucaaaagauaauaacaauuggcucuguuucucucacuauugccacaauaugcuuccuuaugcaaauugccauccugguaacuacuguaacauugcauuucaagcaauaugagugcaacucccccccaaacaaccaaguaaugcugugugaaccaacaauaauagaaagaaacauaacagagauaguguaucugaccaacaccaccauagagaaagaaauaugccccaaacuggcagaauacagaaauuggucaaagccgcaauguaaaauuacaggauuugcaccuuuuucuaaggacaauucaauucggcuuuccgcugguggagacauuugggugacaagagaaccuuaugugucaugcgauccuggcaaguguuaucaauuugcccuuggacagggaacaacacuaaacaacaggcauucaaaugacacaguacaugauaggaccccuuaucgaacccuauugaugaaugaguuggguguuccauuucauuugggaaccaagcaagugugcauagcgugguccagcucaaguugucacgauggaaaagcauggcugcauguuuguguaacugggcaugauaaaaaugcaacugcuagcuucauuuacgaugggaggcuuguagauaguauugguucaugguccaaaaauauccucaggacccaggagucggaaugcguuuguaucaauggaacuuguacaguaguaaugacugauggaagugcuucagacagagcugauacuaaaauacuauucauugaagaggggaaaaucguucauauuagcccauugucaggaagugcucagcaugucgaggagugcuccuguuauccucgauauccuggugucagaugugucugcagagacaacuggaaaggcuccaauaggcccaucguagauauaaaugugaaagauuauagcauuguuuccaguuaugugugcucaggacuuguuggagacacacccagaaaaaacgacagcuccagcaguagcuauugcuggaauccuaacaaugagaaaggggggcauggagugaaaggcugggccuuugaugauggaaaugacguguggaugggaagaacgaucagcgaggagucacgcucagguuaugaaaccuucaaagucauuggaggcugguccaaaccuaacuccaaauugcagauaaauaggcaagucauaguugacagagguaauagguccgguuauucugguauuuucucuguugaaggcaaaagcugcaucaaucggugcuuuuauguggaguugauaaggggaaggaaacaggaaacugaagucugguggaccucaaacaguauuguuguguuuuguggcaccucagguacauauggaacaggcucauggccugauggggcggacaucaaucucaugccuauauaa

SEQ ID NO: 47205 - RNA, 1410 nt, Artificial Sequence; identical to SEQ ID NO: 47125
  derived and/or modified CDS sequence (wt) from neuraminidase__InfluenzaA__ABG67182

SEQ ID NO: 47206 - RNA, 1410 nt, Artificial Sequence
  derived and/or modified CDS sequence (wt) from neuraminidase__InfluenzaA__ABG67193
augaauccaaaucaaaagauaauaacaauuggcucuguuucucucacuauugccacaauaugcuuccuuaugcaaauugccauccugguaacuacuguaacauugcauuucaagcaauaugagugcaacucccccccaaacaaccaaguaaugcugugugaaccaacaacaauagaaagaaacauaacagagauaguguaucugaccaacaccaccauagagaaagaaauaugccccaaacuggcagaauacagaaauuggucaaagccgcaauguaaaauuacaggauuugcaccuuuuucuaaggacaauucaauucggcuuuccgcugguggagacauuugggugacaagagaaccuuaugugucaugcgauccuggcaaguguuaucaauuugcccuuggacagggaacaacacuaaacaacaggcauucaaaugacacaguacaugauaggaccccuuaucgaacccuauugaugaaugaguuggguguuccauuucauuugggaaccaagcaagugugcauagcgugguccagcucaaguugucacgauggaaaagcauggcugcauguuuguguaacugggcaugaugaaaaugcaacugcuagcuucauuuacgaugggaggcuuguagauaguauugguucaugguccaaaaauauccucaggacccaggagucggaaugcguuuguaucaauggaacuuguacaguaguaaugacugauggaagugcuucagacagagcugauacuaaaauacuauucauugaagaggggaaaaucguucauauuagcccauugucaggaagugcucagcaugucgaggagugcuccuguuauccucgauauccuggugucagaugugucugcagagacaacuggaaaggcuccaauaggcccaucguagauauaaaugugaaaaauuauagcauuguuuccaguuaugugugcucaggacuuguuggagacacacccagaaaaaacgacagcuccagcaguaguuauugcuggaauccuaacaaugagaaaggggggcauggagugaaaggcugggccuuugaugauggaaaugacguguggaugggaagaacgaucagcgaggagucacgcucagguuaugaaaccuucaaagucauuggaggcugguccaaaccuaacuccaaauugcagauaaauaggcaagucauaguugacagagguaauagguccgguuauucugguauuuucucuguugaaggcaaaagcugcaucaaucggugcuuuuauguggaguugauaaggggaaggaaacaggaaacugaagucugguggaccucaaacaguauuguuguguuuuguggcaccucagguacauauggaacaggcucauggccugauggggcggacaucaaucucaugccuauauaa

SEQ ID NO: 47207 - RNA, 1410 nt, Artificial Sequence; identical to SEQ ID NO: 47125
  derived and/or modified CDS sequence (wt) from neuraminidase__InfluenzaA__ABG67204

SEQ ID NO: 47208 - RNA, 1410 nt, Artificial Sequence
  derived and/or modified CDS sequence (wt) from neuraminidase__InfluenzaA__ABG67215
augaauccaaaucaaaagauaauaacaauuggcucuguuucucucacuauugccacaauaugcuuccuuaugcaaauugccauccugguaacuacuguaacauugcauuucaagcaauaugagugcaacucccccccaagcaaccaaguaaugcugugugaaccaacaauaauagaaagaaacauaacagagauaguguauuugacuaacaccaccauagagaaagaaauaugccccaaacuggcagaauacagaaauuggucaaagccgcaauguaaaauuacaggauuugcaccuuuuucuaaggacaauucaauucggcuuuccgcugguggagacauuugggugacaagagaaccuuaugugucaugcgguccuggcaaguguuaucaauuugcacuuggacagggaacaacacuaaacaacaggcauucaaaugacacaguacaugauaggaccccuuaucgaacccuauugaugaaugaguuggguguuccauuucauuugggaaccaagcaagugugcauagcaugguccagcucaaguugucacgauggaaaagcauggcugcauguuuguguaacugggcaugaugaaaaugcaacugcuagcuucauuuacgaugggaggcuuguagauaguauugguucaugguccaaaaauauccucaggacccaggagucggaaugcguuuguaucaauggaacuuguacaguaguaaugacugauggaagugcuucagaaagagcugauacuaaaauacuauucauugaagaggggaaaaucguucauauuagcccauugucaggaagugcucagcaugucgaggagugcuccuguuauccucgauauccuggugucagaugugucugcagagacaacuggaaaggcuccaauaggcccaucguagauauaaaugugaaagauuauagcauuguuuccaguuaugugugcucaggacuuguuggagacacacccagaaaaaacgacagcuccagcaguagcuauugccggaauccuaacaaugagaaagggagucauggagugaaagguugggccuuugaugauggaaaugacguguggaugggaagaacgaucagcgaggaguuacgcucugguuaugaaaccuucaaaguuauuggaggcugguccaaaccuaacuccaaauugcagauaaauaggcaagucauaguugacagagguaauagguccgguuauucugguauuuucucuguugaaggcaaaagcugcaucaaucggugcuuuuauguggaguugauaaggggaaggaaacaggaaacugaagucugguggaccucaaacaguauuguuguguuuuguggcaccucagguacauauggaacaggcucauggccugauggggcggacaucaaucucaugccuauauaa

SEQ ID NO: 47209 - RNA, 1410 nt, Artificial Sequence
  derived and/or modified CDS sequence (wt) from neuraminidase__InfluenzaA__ABG67226
augaauccaaaucaaaagauaauaacaauuggcucuguuucucucacuauugccacaauaugcuuccuuaugcaaauugccauccugguaacuacuguaacauugcauuucaagcaauaugagugcaacucccccccaagcaaccaaguaaugcugugugaaccaacaauaauagaaagaaacauaacagagauaguguauuugacuaacaccaccauagagaaagaaauaugccccaaacuggcagaauacagaaauuggucaaagccgcaauguaaaauuacaggauuugcaccuuuuucuaaggacaauucaauucggcuuuccgcugguggagacauuugggugacaagagaaccuuaugugucaugcgauccuggcaaguguuaucaauuugcacuuggacagggaacaacacuaaacaacaggcauucaaaugacacaguacaugauaggaccccuuaucgaacccuauugaugaaugaguuggguguuccauuucauuugggaaccaagcaagugugcauagcaugguccagcucaaguugucacgauggaaaagcauggcugcauguuuguguaacugggcaugaugaaaaugcaacugcuagcuucauuuacgaugggaggcuuguagauaguauugguucaugguccaaaaauauccucaggacccaggagucggaaugcguuuguaucaauggaacuuguacaguaguaaugacugauggaagugcuucagaaagagcugauacuaaaauacuauucauugaagaggggaaaaucguucauauuagcccauugucaggaagugcucagcaugucgaggagugcuccuguuauccccgauauccuggugucagaugugucugcagagacaacuggaaaggcuccaauaggcccaucguagauauaaaugugaaagauuauagcauuguuuccaguuaugugugcucaggacuuguuggagacacacccagaaaaaacgacagcuccagcaguagcuauugccggaauccuaacaaugagaaagggagucauggagugaaagguugggccuuugaugauggaaaugacguguggaugggaagaacgaucagcgaggaguuacgcucugguuaugaaaccuucaaaguuauuggaggcugguccaaaccuaacuccaaauugcagauaaauaggcaagucauaguugacagagguaauagguccgguuauucugguauuuucucuguugaaggcaaaagcugcaucaaucggugcuuuuauguggaguugauaaggggaaggaaacaggaaacugaagucugguggaccucaaacaguauuguuguguuuuguggcaccucagguacauauggaacaggcucauggccugauggggcggacaucaaucucaugccuauauaa

SEQ ID NO: 47210 - RNA, 1410 nt, Artificial Sequence; identical to SEQ ID NO: 47174
  derived and/or modified CDS sequence (wt) from neuraminidase__InfluenzaA__ABG67248

SEQ ID NO: 47211 - RNA, 1413 nt, Artificial Sequence; identical to SEQ ID NO: 46840
  derived and/or modified CDS sequence (wt) from neuraminidase__InfluenzaA__ABG67480

SEQ ID NO: 47212 - RNA, 1413 nt, Artificial Sequence
  derived and/or modified CDS sequence (wt) from neuraminidase__InfluenzaA__ABG67494
augaauccaaaucaaaaaauaauaaccauuggaucaaucaguauagcaaucggaauaauuagccuaauguugcaaauaggaaacauuauuucaauaugggcuagucacucaauccaaacuggaagucaaaaccacacuggaguaugcaaccaaagaaucaucacauaugaaaacagcaccugggugaaucacacauauguuaauauuaacaacaccaauguuauugcuggaaaggacaaaacuucagugacauuggccggcaauucaucucuuuguucuaucaguggaugggcuauauacacaaaagacaacagcauaagaauugguuccaaaggagauguuuuugucauaagagagccuuucauaucauguucucacuuggaaugcagaaccuuuuuucugacccaaggugcucuauuaaaugacaaacauucaaaugggaccguuaaggacagaagccccuauagggcuuuaaugagcuguccucuaggugaagcuccguccccauacaauucaaaguuugaaucaguugcuuggucagcaagcgcaugccaugauggcaugggcugguuaacaaucggaauuucugguccagacaauggagcaguggcuguacuaaaauacaacggcauaauaacugaaaccauaaaaaguuggaaaaagcaaauauuaagaacacaagagucugaaugugucugugugaacgggucauguuucaccauaaugaccgauggcccgaguaauggggccgccucguacaaaaucuucaagaucgaaaagggaaagguuacuaaaucaauagaguugaaugcacccaauuuucauuaugaggaauguuccuguuacccagacacuggcacagugauguguguaugcagggacaacuggcaugguucaaaucgacccugggugucuuuuaaucaaaaccuggauuaucaaauaggauacaucugcagugggguguucggugacaauccgcgucccaaagauggagagggcagcuguaauccagugacuguugauggagcaaacggaguaaagggguuuucauacaaauaugguaauggugucuggauaggaaggacuaaaaguaacagacuuagaaagggguuugagaugauuugggauccuaauggauggacagauaccgacagugauuucucagugaaacaggauguuguggcaauaacugauuggucuggguacagcggaaguuucguucaacauccugaguuaacaggauuggacuguauaagaccuugcuucuggguugaguuagucagaggacugccaaaagaaaauacaacaaucuggacuagugggagcagcauuucuuuuuguggcguaaauagugauacugcaaacuggucuuggccagacggugcugaguugccguuuaccauugacaaguag

SEQ ID NO: 47213 - RNA, 1410 nt, Artificial Sequence
  derived and/or modified CDS sequence (wt) from neuraminidase__InfluenzaA__ABG67505
augaauccaaaucaaaagauaauaacaauuggcucuguuucucucaccauugccacaauaugcuuccuuaugcaaauugccauccugguaacuacuguaacauugcauuucaagcaguaugaaugcaacucccccccaaacaaccaaguaaugcugugugaaccaacaauaauagaaagaaacauaacagagauaguguaucugaccaacaccaccauagagaaggaaauaugccccaaacuagcagaauacagaaauuggucaaagccgcaauguaacauuacaggauuugcaccuuuuucuaaggacaauucgauucggcuuuccgcugguggggacaucugggugacaagagaaccuuaugugucaugcgauccugacaaguguuaucaauuugcccuugggcagggaacaacacuaaacaacgggcauucaaaugacacaguacaugauaggaccccuuaccggacccuauugaugaaugaauuggguguuccauuucauuugggaaccaggcaagugugcauagcaugguccagcucaaguugucacgauggaaaagcauggcugcauguuuguguaacuggggaugaugaaaaugcaacugcuagcuucauuuacaaugggaggcuuguagauaguauugguucaugguccaaaaaaauacucagaacccaggagucggaaugcguuuguaucaauggaacuuguacaguaguaaugacugaugggagcgcuucaggaaaagccgauacuaaaauacuauucauugaggaggggaaaaucguucauauuagcacauugucaggaagugcucagcaugucgaggagugcuccuguuauccucgauauccuggugucagaugugucugcagagacaacuggaaaggcuccaauaggcccaucguagauauaaauguaaaggauuauagcauuguuuccaguuaugugugcucaggacuuguuggagacacacccagaaaaaacgacagcuucagcaguagccauugccuagauccuaacaaugaggaagguggucauggagugaaaggcugggccuuugaugauggaaaugacguguggaugggaagaacgaucagcgagaaguuacgcucagguuaugaaaccuucaaagucaucgaaggcugguccaaaccuaacuccaaauuacagauaaauaggcaagucauaguugaaagagguaacagguccgguuauucugguauuuucuccguugaaggcaaaagcugcaucaaucggugcuuuuauguggaguugauaaggggaaggaaagaggaaacugaagucugguggaccucaaacaguauuguuguguuuuguggcaccucagguacauauggaacaggcucauggccugauggggcggauaucaaucucaugccuauauaa

SEQ ID NO: 47214 - RNA, 1410 nt, Artificial Sequence; identical to SEQ ID NO: 47213
  derived and/or modified CDS sequence (wt) from neuraminidase__InfluenzaA__ABG67516

SEQ ID NO: 47215 - RNA, 1410 nt, Artificial Sequence; identical to SEQ ID NO: 47179
  derived and/or modified CDS sequence (wt) from neuraminidase__InfluenzaA__ABG67527

SEQ ID NO: 47216 - RNA, 1410 nt, Artificial Sequence
  derived and/or modified CDS sequence (wt) from neuraminidase__InfluenzaA__ABG67538
augaauccaaaucaaaagauaauaacaauuggcucuguuucucucaccauugccacaauaugcuuccuuaugcaaauugccauccugguaacuacuguaacauugcauuucaagcaguacgaaugcaacucccccccaaacaaccaaguaaugcugugugaaccaacaacaauagaaagaaacacaacagagauaguguaucugaccaacaccaccauagagaaggaaauaugccccaaauuagcagaauacagaaauuggucaaagccgcaauguaacauuacaggauuugcaccuuuuucuaaggacaauucgauucggcuuuccgcugguggggacaucugggugacaagagaaccuuaugugucaugcgauccugacaaguguuaucaauuugcccuugggcagggaacaacacuaaacaacgggcauucaaaugacacaguacaugauaggaccccuuaccggacccuauugaugaaugaauuggguguuccauuucauuugggaaccaggcaagugugcauagcaugguccagcucaaguugucacgauggaaaagcauggcugcauguuuguguaacuggggaugaugaaaaugcaacugcuagcuucauuuacaaugggaggcuuguagauaguauugguucaugguccaaaaaaauacucagaacccaggagucggaaugcguuuguaucaauggaacuuguacaguaguaaugacugaugggagcgcuucaggaaaagcugauacuaaaauacuauucauugaggaggggaaaaucguucauauuagcacauugucaggaagugcucagcaugucgaggagugcuccuguuauccucgauauccuggugucagaugugucugcagagacaacuggaaaggcuccaauaggcccaucauagauauaaauguaaaggauuauagcauuguuuccaguuaugugugcucaggacuuguuggagacacacccagaaaaaacgacagcuucagcaguagccauugccuagauccuaacaaugaggaagguggucauggagugaaaggcugggccuuugaugauggaaaugacguguggaugggaagaacgaucagcgagaaguuacgcucagguuaugaaaccuucaaagucaucgaaggcugguccaaaccuaacuccaaauuacagacaaauaggcaagucauaguugaaagagguaacagguccgguuauucugguauuuucuccguugaaggcaaaagcugcaucaaucggugcuuuuauguggaguugauaaggggaaggaaagaggaaacugaagucugguggaccucaaacaguauuguuguguuuuguggcaccucagguacauauggaacaggcucauggccugauggggcggauaucaaucucaugccuauauaa

SEQ ID NO: 47217 - RNA, 1410 nt, Artificial Sequence
  derived and/or modified CDS sequence (wt) from neuraminidase__InfluenzaA__ABG67549
augaauccaaaucaaaagauaauaacaauuggcucuguuucucucaccauugccacaauaugcuuccuuaugcaaauugccauccugguaacuacuguaacauugcauuucaagcagcaugaaugcaacucccccccaaacaaccaaguaaugcugugugaaccaacaauaauagaaagaaacauaacagagauaguguaucugaccaacaccaccauagagaaggaaauaugccccaaacuaguagaauacagaaauuggucaaagccgcaauguaacauuacaggauuugcaccuuuuucuaaggacaauucgauucggcuuuccgcugguggggacaucugggugacaagagaaccuuaugugucaugcgauccugacaaguguuaucaauuugcccuugggcagggaacaacacuaaacaacgggcauucaaaugacacaguacaugauaggaccccuuaccggacccuauugaugaaugaauuggguguuccauuucauuugggaaccaggcaagugugcauagcaugguccagcucaaguugucacgauggaaaagcauggcugcauguuuguguaacuggggaugauaaaaaugcaacugcuagcuucauuuacaaugggaggcuuguagauaguauugguucaugguccaaaaaaauacucagaacccaggagucggaaugcguuuguaucaauggaacuuguacaguaguaaugacugaugggagcgcuucaggaaaagcugauacuaaaauacuauucauugaggaggggaaaaucguucauauuagcacauugucaggaagugcucagcaugucgaggagugcuccuguuauccucgauauccuggugucagaugugucugcagagacaacuggaaaggcuccaauaggcccauuguagauauaaauguaaaggauuauagcauuguuuccaguuaugugugcucaggacuuguuggagacacacccagaaaaaacgacagcuucagcaguagccauugccuagauccuaacaaugaggaagguggucauggagugaaaggcugggccuuugaugauggaaaugacguguggaugggaagaacgaucagcgagaaguuacgcucagguuaugaaaccuucaaagucaucgaaggcugguccaaaccuaacuccaaauugcagauaaauaggcaaguuauaguugaaagagguaacagguccgguuauucugguauuuucuccguugaaggcaaaagcugcaucaaucggugcuuuuauguggaguugauaaggggaaggaaagaggaaaaugaagucugguggaccucaaacaguauuguuguguuuuguggcaccucagguacauauggaacaggcucauggccugauggggcggauaucaaucucaugccuauauaa

SEQ ID NO: 47218 - RNA, 1410 nt, Artificial Sequence; identical to SEQ ID NO: 46603
  derived and/or modified CDS sequence (wt) from neuraminidase__InfluenzaA__ABG67560

SEQ ID NO: 47219 - RNA, 1410 nt, Artificial Sequence; identical to SEQ ID NO: 46603
  derived and/or modified CDS sequence (wt) from neuraminidase__InfluenzaA__ABG67571

SEQ ID NO: 47220 - RNA, 1410 nt, Artificial Sequence
  derived and/or modified CDS sequence (wt) from neuraminidase__InfluenzaA__ABG67582
augaauccaaaucaaaagauaauaacaauuggcucuguuucucucaccauugccacaauaugcuuccuuaugcaaauugccauccugguaacuacuguaacauugcauuucaagcagcaugaaugcaacucccccccaaacaaccaaguaaugcugugugaaccaacaauaauagaaagaaacauaacagagauaguguaucugaccaacaccaccauagagaaggaaauaugccccaaacuaguagaauacagaaauuggucaaagccgcaauguaacauuacaggauuugcaccuuuuucuaaggacaauucgauucggcuuuccgcugguggggacaucugggugacaagagaaccuuaugugucaugcgauccugacaaguguuaucaauuugcccuugggcagggaacaacacuaaacaacgggcauucaaaugacacaguacaugauaggaccccuuaccggacccuauugaugaaugaauuggguguuccauuucauuugggaaccaggcaagugugcauagcaugguccagcucaaguugucacgauggaaaagcauggcugcauguuuguguaacuggggaugauaaaaaugcaacugcuagcuucaucuacaaugggaggcuuguagauaguauugguucaugguccaaaaaaauacucagaacccaggagucggaaugcguuuguaucaauggaacuuguacaguaguaaugacugaugggagcgcuucaggaaaagcugauacuaaaauacuauucauugaggaggggaaaaucguucauauuagcacauugucaggaagugcuaagcaugucgaggagugcuccuguuacccucgauauccuggugucagaugugucugcagagacaacuggaaaggcuccaauaggcccauuguagauauaaauguaaaggauuauagcauuguuuccaguuaugugugcucaggacuuguuggagacacacccagaaaaaacgacagcuucagcaguagccauugccuagauccuaacaaugaggaagguggucauggagugaaaggcugggccuuugaugauggaaaugacguguggaugggaagaacgaucagcgagaaguuacgcucagguuaugaaaccuucaaagucaucgaaggcugguccaaaccuaacuccaaauuacagauaaauaggcaaguuauaguugaaagagguaacagguccgguuauucugguauuuucuccguugaaggcaaaagcugcaucaaucggugcuuuuauguggaguugauaaggggaaggaaagaggaaacugaagucugguggaccucaaacaguauuguuguguuuuguggcaccucagguacauauggaacaggcucauggccugauggggcggauaucaaucucaugccuauauaa

SEQ ID NO: 47221 - RNA, 1410 nt, Artificial Sequence
  derived and/or modified CDS sequence (wt) from neuraminidase__InfluenzaA__ABG67593
augaauccaaaucaaaagauaauaacaauuggcucuguuucucucaccauugccacaauaugcuuccuuaugcaaauugccauccuggucacuacuguaacauugcauuucaagcagcaugaaugcaacucccccccaaacaaccaaguaaugcugugugaaccaacaauaauagaaagaaacauaacagagauaguguaucugaccaacaccaccauagagaaggaaauaugccccaaacuaguagaauacagaaauuggucaaagccgcaauguaacauuacaggauuugcaccuuuuucuaaggacaauucgauucggcuuuccgcugguggggacaucugggugacaagagaaccuuaugugucaugcgauccugacaaguguuaucaauuugcccuugggcagggaacaacacuaaacaacgggcauucaaaugacacaguacaugauaggaccccuuaccggacccuauugaugaaugaauuggguguuccauuucauuugggaaccaggcaagugugcauagcaugguccagcucaaguugucacgauggaaaagcauggcugcauguuuguguaacuggggaugauaaaaaugcaacugcuagcuucauuuacaaugggaggcuuguagauaguauugguucaugguccaaaaaaauacucagaacccaggagucggaaugcguuuguaucaauggaacuuguacaguaguaaugacugaugggagcgcuucaggaaaagcugauacuaaaauacuauucauugaggaggggaaaaucguucauauuagcacauugucaggaagugcucagcaugucgaggagugcuccuguuauccucgauauccuggugucagaugugucugcagagacaacuggaaaggcuccaauaggcccauuguagauauaaauguaaaggauuauagcauuguuuccaguuaugugugcucaggacuuguuggagacacacccagaaaaaacgacagcuucagcaguagccauugccuagauccuaacaaugaggaagguggucauggagugaaaggcugggccuuugaugauggaaaugacguguggaugggaagaacgaucaacgagaaguuacgcucagguuaugaaaccuucaaagucaucgaaggcugguccaaaccuaacuccaaauuacagauaaauaggcaaguuauaguugaaagagguaacagguccgguuauucugguauuuucuccguugaaggcaaaagcugcaucaaucggugcuuuuauguggaguugauaaggggaaggaaagaggaaacugaagucugguggaccucaaacaguauuguuguguuuuguggcaccucagguacauauggaacaggcucauggccugauggggcggauaucaaucucaugccuauauaa

SEQ ID NO: 47222 - RNA, 1410 nt, Artificial Sequence; identical to SEQ ID NO: 46603
  derived and/or modified CDS sequence (wt) from neuraminidase__InfluenzaA__ABG67604

SEQ ID NO: 47223 - RNA, 1410 nt, Artificial Sequence; identical to SEQ ID NO: 46603
  derived and/or modified CDS sequence (wt) from neuraminidase__InfluenzaA__ABG67615

SEQ ID NO: 47224 - RNA, 1410 nt, Artificial Sequence
  derived and/or modified CDS sequence (wt) from neuraminidase__InfluenzaA__ABG67626
augaauccaaaucaaaagauaauaacaauuggcucuguuucucucaccauugccacaauaugcuuccuuaugcaaauugccauccugguaacuacuguaacauugcauuucaagcagcaugaaugcaacucccccccaaacaaccaaguaaugcugugugaaccaacaauaauagaaagaaacauaacagagauaguguaucugaccaacaccaccauagagaaggaaauaugccccaaacuaguagaauacagaaauuggucaaagccgcaauguaacauuacaggauuugcaccuuuuucuaaggacaauucgauucggcuuuccgcugguggggacaucugggugacaagagaaccuuaugugucaugcgauccugacaaguguuaucaauuugcccuugggcaaggaacaacacuaaacaacgggcauucaaaugacacaguacaugauaggaccccuuaccggacccuauugaugaaugaauuggguguuccauuucauuugggaaccaggcaagugugcauagcaugguccagcucaaguugucacgauggaaaagcauggcugcauguuuguguaacuggggaugauaaaaaugcaacugcuagcuucauuuacaaugggaggcuuguagauaguauugguucaugguccaaaaaaauacucagaacccaggagucggaaugcguuuguaucaauggaacuuguacaguaguaaugacugaugggagcgcuucaggaaaagcugauacuaaaauacuauucauugaggaggggaaaaucguucauauuagcacauugucaggaagugcucagcaugucgaggagugcuccuguuauccucgauauccuggugucagaugugucugcagagacaacuggaaaggcuccaauaggcccauuguagauauaaauguaaaggauuauagcauuguuuccaguuaugugugcucaggacuuguuggagacacacccagaaaaaacgacagcuucagcaguagccauugccuagauccuaacaaugaggaagguggucauggagugaaaggcugggccuuugaugauggaaaugacguguggaugggaagaacgaucagcgagaaguuacgcucagguuaugaaaccuucaaagucaucgaaggcugguccaaaccuaacuccaaauuacagauaaauaggcaaguuauaguugaaagagguaacagguccgguuauucugguauuuucuccguugaaggcaaaagcugcaucaaucggugcuuuuauguggaguugauaaggggaaggaaagaggaaacugaagucugguggaccucaaacaguauuguuguguuuuguggcaccucagguacauauggaacaggcucauggccugauggggcggauaucaaucucaugccuauauaa

SEQ ID NO: 47225 - RNA, 1410 nt, Artificial Sequence; identical to SEQ ID NO: 46603
  derived and/or modified CDS sequence (wt) from neuraminidase__InfluenzaA__ABG67637

SEQ ID NO: 47226 - RNA, 1410 nt, Artificial Sequence
  derived and/or modified CDS sequence (wt) from neuraminidase__InfluenzaA__ABG67648
augaauccaaaucaaaagauaauaacaauuggcucuguuucucucaccauugccacaauaugcuuccuuaugcaaauugccauccugguaacuacuguaacauugcauuucaagcagcaugaaugcaacucccccccaaacaaccaaguaaugcugugugaaccaacaauaauagaaagaaacauaacagagauaguguaucugaccaacaccaccauagagaaggaaauaugccccaaacuaguagaauacagaaauuggucaaagccgcaauguaacauuacaggauuugcaccuuuuucuaaggacaauucgauucggcuuuccgcugguggggacaucugggugacaagagaaccuuaugugucaugcgauccugacaaguguuaucaauuugcccuugggcagggaacaacacuaaacaacgggcauucaaaugacacaguacaugauaggaccccuuaccggacccuauugaugaaugaauuggguguuccauuucauuugggaaccaggcaagugugcauagcaugguccagcucaaguugucacgauggaaaagcauggcugcauguuuguguaacuggggaugauaaaaaugcaacugcuagcuucaucuacaaugggaggcuuguagauaguauugguucaugguccaaaaaaauacucagaacccaggagucggaaugcguuuguaucaauggaacuuguacaguaguaaugacugaugggagcgcuucaggaaaagcugauacuaaaauacuauucauugaggaggggaaaaucguucauauuagcacauugucaggaagugcucagcaugucgaggagugcuccuguuacccucgauauccuggugucagaugugucugcagagacaacuggaaaggcuccaauaggcccauuguagauauaaauguaaaagauuauagcauuguuuccaguuaugugugcucaggacuuguuggagacacacccagaaaaaacgacagcuucagcaguagccauugccuagauccuaacaaugaggaagguggucauggagugaaaggcugggccuuugaugauggaaaugacguguggaugggaagaacgaucagcgagaaguuacgcucagguuaugaaaccuucaaagucaucgaaggcugguccaaaccuaacuccaaauuacagauaaauaggcaaguuauaguugaaagagguaacagguccgguuauucugguauuuucuccguugaaggcaaaagcugcaucaaucggugcuuuuauguggaguugauaaggggaaggaaagaggaaacugaagucugguggaccucaaacaguauuguuguguuuuguggcaccucagguacauauggaacaggcucauggccugauggggcggauaucaaucucaugccuauauga

SEQ ID NO: 47227 - RNA, 1410 nt, Artificial Sequence
  derived and/or modified CDS sequence (wt) from neuraminidase__InfluenzaA__ABG67659
augaauccaaaucaaaagauaauaacaauuggcucuguuucucucaccauugccacaauaugcuuccuuaugcaaauugccauccugguaacuacuguaacauugcauuucaagcagcaugaaugcaacucccccccaaacaaccaaguaaugcugugugaaccaacaauaauagaaagaaacauaacagagauaguguaucugaccaacaccaccauagagaaggaaauaugccccaaacuaguagaauacagaaauuggucaaagccgcaauguaacauuacaggauuugcaccuuuuucuagggacaauucgauucggcuuuccgcugguggggacaucugggugacaagagaaccuuaugugucaugcgauccugacaaguguuaucaauuugcccuugggcagggaacaacacuaaacaacgggcauucaaaugacacaguacaugauaggaccccuuaucggacccuauugaugaaugaauuggguguuccauuucauuugggaaccaggcaagugugcauagcaugguccagcucaaguugucacgauggaaaagcauggcugcauguuuguguaacuggggaugauaaaaaugcaacugcuagcuucauuuacaaugggaggcuuguagauaguauugguucaugguccaaaaaaauacucagaacccaggagucggaaugcguuuguaucaauggaacuuguacaguaguaaugacugaugggagcgcuucaggaaaagcugauacuaaaauacuauucauugaggaggggaaaaucguucauauuagcacauugucaggaagugcucagcaugucgaggagugcuccuguuauccucgauauccuggugucagaugugucugcagagacaacuggaaaggcuccaauaggcccauuguagauauaaauguaaaggauuauagcauuguuuccaguuaugugugcucaggacuuguuggagacacacccagaaaaaacgacagcuucagcaguagccauugccuagauccuaacaaugaggaagguggucauggagugaaaggcugggccuuugaugauggaaaugacguguggaugggaagaacgaucagcgagaaguuacgcucagguuaugaaaccuucaaagucaucgaaggcugguccaaaccuaacuccaaauuacagauaaauaggcaaguuauaguugaaagagguaacagguccgguuauucugguauuuucuccguugaaggcaaaagcugcaucaaucggugcuuuuauguggaguugauaaggggaaggaaagaggaaacugaagucugguggaccucaaacaguauuguuguguuuuguggcaccucagguacauauggaacaggcucauggccugauggggcggauaucaaucucaugccuauauaa

SEQ ID NO: 47228 - RNA, 1410 nt, Artificial Sequence
  derived and/or modified CDS sequence (wt) from neuraminidase__InfluenzaA__ABG67670
augaauccaaaucaaaagauaauaacaauuggcucuguuucucucacuauugccacaauaugcuuccuuaugcaaauugccauccugauaacuacuguaacauugcauuucaagcaauaugaaugcaacucccccccaaacaaccaaguaaugcugugugaaccaacaauaauagagagaaacauaacagagauaguguaucugaccaacaccaccauagagaaagaaauaugccccaaacuagcagaauacagaaauuggucaaagccgcaauguaaaauuacaggauuugcaccuuuuucuaaggacaauucaauucggcuuuccgcugguggagacauuugggugacaagagaaccuuaugugucaugcgauccuggcaaguguuaucaauuugcccuuggacagggaacaacacuaaacaacaggcauucaaaugacacaguacaugauaggaccccuuaucggacccuauugaugaaugaguuggguguuccauuucauuugggaaccaagcaagugugcauagcaugguccagcucaaguugucacgauggaaaagcauggcugcauguuuguguaacugggcaugaugaaaaugcaacugcuagcuucauuuacgaugggaggcuuguagauaguauugguucaugguccaaaaauauccucaggacccaggagucggaaugcguuuguaucaauggaacuuguacaguaguaaugacugauggaagugcuucaggaagagcugauacuaaaauacuauucauugaagaggggaaaaucguucauauuagcccacugucaggaagugcucagcaugucgaggagugcuccugcuauccucgauauccuggugucagaugugucugcagagacaacuggaaaggcuccaauaggcccaucguagauauaaaugugaaagauuauagcauuguuuccaguuaugugugcucaggacuuguuggagacacacccagaaaaaacgacagcuccagcaguagccauugccugaauccuaacaaugaggaagggggucauggagugaaaggcugggccuuugaugauggaaaugauguguggaugggaagaacgaucagcgagaaguuacgcucagguuaugaaaccuucaaagucauuggaggcugguccaaaccuaacuccaaauugcagauaaauaggcaagucauaguugacagagguaauagguccgguuauucugguauuuucucuguugaaggcaaaagcugcaucaaucggugcuuuuauguggaguugauaaggggaaggaaacaggaaacugaagucugguggaccucaaacaguauuguuguguuuuguggcaccucagguacauauggaacaggcucauggccugauggggcggacaucaaucucaugccuauauaa

SEQ ID NO: 47229 - RNA, 1410 nt, Artificial Sequence; identical to SEQ ID NO: 46755
  derived and/or modified CDS sequence (wt) from neuraminidase__InfluenzaA__ABG79944

SEQ ID NO: 47230 - RNA, 1413 nt, Artificial Sequence; identical to SEQ ID NO: 47071
  derived and/or modified CDS sequence (wt) from neuraminidase__InfluenzaA__ABG79955

SEQ ID NO: 47231 - RNA, 1410 nt, Artificial Sequence
  derived and/or modified CDS sequence (wt) from neuraminidase__InfluenzaA__ABG79966
augaauccaaaucaaaagauaauaacaauuggcucuguuucucucaccauugccacaauaugcuuccuuaugcaaauugccauccugguaacuacuguaacauugcauuucaagcaauaugagugcaacucccccccaagcaaccaaguaaugcugugugaaccaacaauaauagaaagaaacauaacagagauaguguauuugacuaacaccaccauagagaaagaaauaugccccaaacuggcagaauacaggaauuggucaaagccgcaauguaaaauuacaggauuugcaccuuuuucuaaggacaauucaauucggcuuuccgcugguggagacauuugggugacaagagaaccuuaugugucaugcgauccuggcaaguguuaucaauuugcacuuggacagggaacaacacuaaacaacaggcauucaaaugacacaguacaugauaggaccccuuaucgaacccuauugaugaaugaguuggguguuccauuucauuugggaaccaagcaagugugcauagcaugguccagcucaaguugucacgauggaaaagcauggcugcauguuuguguaacugggcaugaugaaaaugcaacugcuagcuucauuuacgaugggaggcuuguagauaguauugguucaugguccaaaaauauccucaggacccaggagucggaaugcguuuguaucaauggaacuuguacaguaguaaugacugauggaagugcuucagaaagagcugauacuaaaauacuauucauugaagaggggaaaaucguucauauuagcccauugucagggagugcucagcaugucgaggagugcuccuguuauccucgauauccuggugucagaugugucugcagagacaacuggaaaggcuccaauaggcccaucguagauauaaaugugaaagauuauagcauuguuuccaguuaugugugcucaggacuuguuggagacacacccagaaaaaacgacagcuccagcaguagcuauugccagaauccuaacaaugagaaagggagucauggagugaaagguugggccuuugaugauggaaaugacguguggaugggaagaacgaucagcgaggaguuacgcucagguuaugaaaccuucaaaguuauuggaggcugguccaaaccuaacuccaaauugcagauaaauaggcaagucauaguugacagagguaauagguccgguuauucugguauuuucucuguugaaggcaaaagcugcaucaaucggugcuuuuauguggaguugauaaggggaaggaaacaggaaacugaagucugguggaccucaaacaguauuguuguguuuuguggcaccucagguacauauggaacaggcucauggccugauggggcggacaucaaucucaugccuauauaa

SEQ ID NO: 47232 - RNA, 1410 nt, Artificial Sequence
  derived and/or modified CDS sequence (wt) from neuraminidase__InfluenzaA__ABG79977
augaauccaaaucaaaagauaauaacaauuggcucuguuucucucacuauugccacaauaugcuuccuuaugcaaauugccauccugguaacuacuguaacauugcauuucaagcaauaugagugcaacucccccccaaacaaccaagcaaugcugugugaaccaacaauaauagaaagaaacauaacagagauaguguaucugaccaacaccaccauagagaaagaaauaugccccaaacuggcagaauacagaaauuggucaaagccgcaauguaaaauuacaggauuugcaccuuuuucuaaggacaauucaauucggcuuuccgcugguggagacauuugggugacaagagaaccuuaugugucaugcgauccuggcaaguguuaucaauuugcccuuggacagggaacaacacuaaacaacaggcauucaaaugacacaguacaugauaggaccccuuaucgaacccuauugaugaaugaguuggguguuccauuucauuugggaaccaagcaagugugcauagcgugguccagcucaaguugucacgauggaaaagcauggcugcauguuuguguaacugggcaugaugaaaaugcaacugcuagcuucauuuacgaugggaggcuuguagauaguauugguucaugguccaaaaauauccucaggacccaggagucggaaugcguuuguaucaauggaacuuguacaguaguaaugacugauggaagugcuucagacagagcugauacuaaaauacuauucauugaagaggggaaaaucguucauauuagcccauugucaggaagugcucagcaugucgaggagugcuccuguuauccucgauauccuggugucagaugugucugcagagacaacuggaaaggcuccaauaggcccaucguagauauaaaugugaaagauuauagcauuguuuccaguuaugugugcucaggacuuguuggagacacacccagaaaaaacgacagcuccagcaguagcuauugcuggaauccuaacaaugagaaagggggucauggagugaaaggcugggccuuugaugauggaaaugacguguggaugggaagaacgaucagcgaggagucacgcucagguuaugaaaccuucaaagucauuggaggcugguccaaaccuaacuccaaauugcagauaaauaggcaagucauaguugacagagguaauagguccgguuauucugguauuuucucuguugaaggcaaaagcugcaucaaucggugcuuuuauguggaguugauaaggggaaggaaacaggaaacugaagucugguggaccucaaacaguauuguuguguuuuguggcaccucagguacauauggaacaggcucauggccugauggggcggacaucaaucucaugccuauauaa

SEQ ID NO: 47233 - RNA, 1410 nt, Artificial Sequence; identical to SEQ ID NO: 47125
  derived and/or modified CDS sequence (wt) from neuraminidase__InfluenzaA__ABG79988

SEQ ID NO: 47234 - RNA, 1410 nt, Artificial Sequence
  derived and/or modified CDS sequence (wt) from neuraminidase__InfluenzaA__ABG79999
augaauccaaaucaaaagauaauaacaauuggcucuguuucucucacuauugccacaauaugcuuccuuaugcaaauugccauccugguaacuacuguaacauugcauuucaagcaauaugagugcaacucccccccaaacaaccaaguaaugcugugugaaccaacaauaauagaaagaaacauaacagagauaguguaucugaccaacaccaccauagagaaagaaauaugccccaaacuggcagaauacagaaauuggucaaagccgcaauguaaaauuacaggauuugcaccuuuuucuaaggacaauucaauucggcuuuccgcugguggagacauuugggugacaagagaaccuuaugugucaugcgauccuggcaaguguuaucaauuugcccuuggacagggaacaacacuaaacaacaggcauucaaaugacacaguacaugauaggaccccuuaucgaacccuauugaugaaugaguuggguguuccauuucauuugggaaccaagcaagugugcauagcgugguccagcucaaguugucacgauggaaaagcauggcugcauguuuguguaacugggcaugaugaaaaugcaacugcuagcuucauuuacgaugggaggcuuguagauaguauugguucaugguccaaaaauauccucaggacccaggagucggaaugcguuuguaucaauggaacuuguacaguaguaaugacugauggaagugcuucagacagagcugauacuaaaauacuauucauugaagaggggaaaaucguucauauuagcccauugucaggaagugcucagcaugucgaggagugcuccuguuauccucgauauccuggugucagaugugucugcagagacaacuggaaaggcuccaauaggcccaucguagauauaaaugugaaagauuauagcauuguuuccaguuaugugugcucaggacuuguuggagacacacccagaaaaaacgacagcuccagcaguagcuauugcuggaauccuaacaaugagaaagggggucauggagugaaaggcugggccuuugaugauggaaaugacguguggaugggaagaacgaucagcgaggagucacgcucagguuaugaaaccuucaaagucauuggaggcugguccaaaccuaacuccaaauugcagauaaauaggcaagucauaguugacagagguaauagauccgguuauucugguauuuucucuguugaaggcaaaagcugcaucaaucggugcuuuuauguggaguugauaaggggaaggaaacaggaaacugaagucugguggaccucaaacaguauuguuguguuuuguggcaccucagguacauauggaacaggcucauggccugauggggcggacaucaaucucaugccuauauaa

SEQ ID NO: 47235 - RNA, 1410 nt, Artificial Sequence
  derived and/or modified CDS sequence (wt) from neuraminidase__InfluenzaA__ABG80010
augaauccaaaucaaaagauaauaacaauuggcucuguuucucucacuauugccacaauaugcuuccuuaugcaaauugccauccugguaacuacuguaacauugcauuucaagcaauaugagugcaacucccccccaaacaaccaaguaaugcugugugaaccaacaauaauagaaagaaacauaacagagauaguguaucugaccaacaccaccauagagaaagaaauaugccccaaacuggcagaauacagaaauuggucaaagccgcaauguaaaauuacaggauuugcaccuuuuucuaaggacaauucaauucggcuuuccgcugguggagacauuugggugacaagagaaccuuaugugucaugcgauccuggcaaguguuaucaauuugcccuuggaaagggaacaacacuaaacaacaggcauucaaaugacacaguacaugauaggaccccuuaucgaacccuauugaugaaugaguuggguguuccauuucauuugggaaccaagcaagugugcauagcgugguccagcucaaguugucacgauggaaaagcauggcugcauguuuguguaacuggacaugaugaaaaugcaacugcuagcuucauuuacgaugggaggcuuguagauaguauugguucaugguccaaaaauauccucaggacccaggagucggaaugcguuuguaucaauggaacuuguacaguaguaaugacugauggaagugcuucagacagagcugauacuaaaauacuauucauugaagaggggaaaaucguucauauuagcccauugucaggaagugcucagcaugucgaggagugcuccuguuauccucgauauccuggugucagaugugucugcagagacaacuggaaaggcuccaauaggcccaucguagauauaaaugugaaagauuauagcauuguuuccaguuaugugugcucaggacuuguuggagacacacccagaaaaaacgacagcuccagcaguagcuauugcuggaauccuaacaaugagaaagggggucauggagugaaaggcugggccuuugaugauggaaaugacguguggaugggaagaacgaucagcgaggagucacgcucagguuaugaaaccuucaaagucauuggaggcugguccaaaccuaacuccaaauugcagauaaauaggcaagucauaguugacagagguaauagguccgguuauucugguauuuucucuguugaaggcaaaagcugcaucaaucggugcuuuuauguggaguugauaaggggaaggaaacaggaaacugaagucugguggaccucaaacaguauuguuguguuuuguggcaccucagguacauauggaacaggcucauggccugauggggcggacaucaaucucaugccuauauaa

SEQ ID NO: 47236 - RNA, 1410 nt, Artificial Sequence
  derived and/or modified CDS sequence (wt) from neuraminidase__InfluenzaA__ABG80021
augaauccaaaucaaaagauaauaacaauuggcucuguuucucucacuauugccacaauaugcuuccuuaugcaaauugccauccugguaacuacuguaacauugcauuucaagcaauaugagugcaacucccccccaaacaaccaaguaaugcugugugaaccaacaauaauagaaagaaacauaacagagauaguguaucugaccaacaccaccauagagaaagaaauaugccccaaacuggcagaauacaggaauuggucaaagccgcaauguaaaauuacaggauuugcaccuuuuucuaaggacaauucaauucggcuuuccgcugguggagacauuugggugacaagagaaccuuaugugucaugcgauccuggcaaguguuaucaauuugcccuuggacagggaacaacacuaaacaacaggcauucaaaugacacaguacaugauaggaccccuuaucgaacccuauugaugaaugaguuggguguuccauuucauuugggaaccaagcaagugugcauagcgugguccagcucaaguugucacgauggaaaagcauggcugcauguuuguguaacugggcaugaugaaaaugcaacugcuagcuucauuuacgaugggaggcuuguagauaguauugguucaugguccaaaaauauccucaggacccaggagucggaaugcguuuguaucaauggaacuuguacaguaguaaugacugauggaagugcuucagacagagcugauacuaaaauacuauucauugaagaggggaaaaucguucauauuagcccauugucaggaagugcucagcaugucgaggagugcuccuguuauccucgauauccuggugucagaugugucugcagagacaacuggaaaggcuccaauaggcccaucguagauauaaaugugaaagauuauagcauuguuuccaguuaugugugcucaggacuuguuggagacacacccagaaaaaacgacagcuccagcaguagcuauugcuggaauccuaacaaugagaaagggggucauggagugaaaggcugggccuuugaugauggaaaugacguguggaugggaagaacgaucagcgaggagucacgcucagguuaugaaaccuucaaagucauuggaggcugguccaaaccuaacuccaaauugcagauaaauaggcaagucauaguugacagagguaauagguccgguuauucugguauuuucucuguugaaggcaaaagcugcaucaaucggugcuuuuauguggaguugauaaggggaaggaaacaggaaacugaagucugguggaccucaaacaguauuguuguguuuuguggcaccucagguacauauggaacaggcucauggccugauggggcggacaucaaucucaugccuauauaa

SEQ ID NO: 47237 - RNA, 1410 nt, Artificial Sequence
  derived and/or modified CDS sequence (wt) from neuraminidase__InfluenzaA__ABG80032
augaauccaaaucaaaagauaauaacaauuggcucuguuucucucacuauugccacaauaugcuuccuuaugcaaauugccauccugguaacuacuguaacauugcauuucaagcaauaugaaugcaacucccccccaaacaaccaaguaaugcugugugaaccaacaauaauagaaagaaacauaacagagauaguguaucugaccaacaccaccauagagaaagaaauaugccccaaacuagcagaauacagaaauuggucaaagccgcaauguaaaauuacaggauuugcaccuuuuucuaaggacaauucaauucggcuuuccgcugguggagacauuugggugacaagagaaccuuaugugucaugcgauccuggcaaguguuaucaauuugcccuuggacagggaacaacacuaaacaacaggcauucaaaugacacaguacaugauaggaccccuuaucgaacccuauugaugaaugaguuggguguuccauuucauuugggaaccaagcaagugugcauagcaugguccagcucaaguugucacgauggaaaagcauggcugcauguuuguguaacugggcaugaugaaaaugcaacugcuagcaucauuuacgaugggaggcuuguagauaguauuaguucaugguccaaaaauauccucaggacccaggagucggaaugcguuuguaucaauggaacuuguacaguaguaaugacugauggaagugcuucagaaagagcugauacuaaaauacuauucauugaagaggggaaaaucguucacauuagcccauugucaggaagugcucagcaugucgaggagugcuccuguuauccucgauauccuggugucagaugugucugcagagacaacuggaaaggcuccaauaggcccaucguagauauaaaugugaaagauuauagcauuguuuccaguuaugugugcucaggacuuguuggagacacacccagaaaaaacgacagcuccagcaguagcuauugccugaauccuaacaaugaggaagggggucauggagugaaaggcugggccuuugaugauggaaaugacguguggaugggaagaacgaucagcgaaaaguuacgcucagguuaugaaaccuucaaggucauuggaggcugguccaaaccuaacuccaaauugcagauaaauaggcaagucauaguugacagagguaauagguccgguuauucugguauuuucucuguugaaggcaaaagcugcgucaaucggugcuuuuauguggaguugauaaggggaaggaaacaggaaacugaagucugguggaccucaaacaguauuguuguguuuuguggcaccucagguacauauggaacaggcucauggccugauggagcggacaucaaucucaugccuauauaa

SEQ ID NO: 47238 - RNA, 1410 nt, Artificial Sequence; identical to SEQ ID NO: 47127
  derived and/or modified CDS sequence (wt) from neuraminidase__InfluenzaA__ABG80043

SEQ ID NO: 47239 - RNA, 1410 nt, Artificial Sequence
  derived and/or modified CDS sequence (wt) from neuraminidase__InfluenzaA__ABG80054
augaauccaaaucaaaagauaauaacaauuggcucuguuucucucacuauugccacaauaugcuuccuuaugcaaauugccauccugguaacuacuguaacauugcauuucaagcaauaugagugcaacucccccccaaacaaccaaguaaugcugugugaaccaacaauaauagaaagaaacauaacagagauaguguaucugaccaacaccaccauagagaaagaaauaugccccaaacuggcagaauacagaaauuggucaaagccgcaauguaaaauuacaggauuugcaccuuuuucuaaggacaauucaauucggcuuuccgcugguggagacauuugggugacaagagaaccuuaugugucaugcgauccuggcaaguguuaucaauuugcccuuggacagggaacaacacuaaacaacaggcauucaaaugacacaguacaugauaggaccccuuaucgaacccuauugaugaaugaguuggguguuccauuucauuugggaaccaagcaagugugcauagcgugguccagcucaaguugucacgauggaaaagcauggcugcauguuuguguaacugggcaugaugaaaaugcaacugcuagcuucauuuacgaugggaggcuuguagauaguauugguucaugguccaaaaauauccucaggacccaggagucggaaugcguuuguaucaauggaacuuguacaguaguaaugacugauggaagugcuucagacagagcugauacuaaaauacuauucauugaagaggggaagaucguucauauuagcccauugucaggaagugcucagcaugucgaggagugcuccuguuauccucgauauccuggugucagaugugucugcagagacaacuggaaaggcuccaauaggcccaucguagauauaaaugugaaagauuauagcauuguuuccaguuaugugugcucaggacuuguuggagacacacccagaaaaaacgacagcuccagcaguagcuauugcuggaauccuaacaaugagaaagggggucauggagugaaaggcugggccuuugaugauggaaaugacguguggaugggaagaacgaucagcgaggagucacgcucagguuaugaaaccuucaaagucauuggaggcugguccaaaccuaacuccaaauugcagauaaauaggcaagucauaguugacagagguaauagguccgguuauucugguauuuucucuguugaaggcaaaagcugcaucaaucggugcuuuuauguggaguugauaaggggaaggaaacaggaaacugaagucugguggaccucaaacaguauuguuguguuuuguggcaccucagguacauauggaacaggcucauggccugauggggcggacaucaaucucaugccuauauaa

SEQ ID NO: 47240 - RNA, 1410 nt, Artificial Sequence
  derived and/or modified CDS sequence (wt) from neuraminidase__InfluenzaA__ABG80065
augaauccaaaucaaaagauaauaacaauuggcucuguuucucucacuauugccacaauaugcuuccuuaugcaaauugccauccugguaacuacuguaacauugcauuucaagcaauaugaaugcaacucccccccaaacaaccaaguaaugcugugugaaccaacaauaauagaaagaaacauaacagagauaguguaucuaaccaacaccaccauagagaaagaaauaugccccaaacuagcagaauacagaaauuggucaaagccgcaauguaaaauuacaggauuugcaccuuuuucuaaggacaauucaauucggcuuuccgcugguggagacauuugggugacaagagaaccuuaugugucaugcgauccuggcaaguguuaucaauuugcccuuggacagggaacaacacuaaacaacaggcauucaaaugacacaguacaugauaggaccccuuaucgaacccuauugaugaaugaguuggguguuccauuucauuugggaaccaagcaagugugcauagcaugguccagcucaaguugucacgauggaaaagcauggcugcauguuuguguaacugggcaugaugaaaaugcaacugcuagcuucauuuacgaugggaggcuuguagauaguauuaguucaugguccaaaaauauccucaggacccaggagucggaaugcguuuguaucaauggaacuuguacaguaguaaugacugauggaagugcuucagaaagagcugauacuaaaauacuauucauugaagaggggaaaaucguucauauuagcccauugucaggaagugcucagcaugucgaggagugcuccuguuauccucgauauccuggugucagaugugucugcagagacaacuggaaaggcuccaauaggcccaucguagauauaaaugugaaagauuauagcauuguuuccaguuaugugugcucaggacuuguuggagacacacccagaaaaaacgacagcuccagcaguagcuauugccugaauccuaacaaugaggaagggggucauggagugaaaggcugggccuuugaugauggaaaugacguguggaugggaagaacgaucagcgaaaaguuacgcucagguuaugaaaccuucaaggucauuggaggcugguccaaaccuaacuccaaauugcagauaaauaggcaagucauaguugacagagguaauagguccgguuauucugguauuuucucuguugaaggcaaaagcugcgucaaucggugcuuuuauguggaguugauaaggggaaggaaacaggaaacugaagucugguggaccucaaacaguauuguuguguuuuguggcaccucagguacauauggaacaggcucauggccugauggggcggacaucaaucucaugccuauauaa

SEQ ID NO: 47241 - RNA, 1410 nt, Artificial Sequence
  derived and/or modified CDS sequence (wt) from neuraminidase__InfluenzaA__ABG80076
augaauccaaaucaaaagauaauaacaauuggcucuguuucucucacuauugccacaauaugcuuccuuaugcaaauugccauccugguaacuacuguaacauugcauuucaagcaauaugagugcaacucccccccaaacaaccaaguaaugcugugugaaccaacaauaauagaaagaaacauaacagagauaguguauuugacuaacaccaccauagagaaagaaauaugccccaaacuggcagaauacagaaauuggucaaaaccgcaauguaaaauuacaggauuugcaccuuuuucuaaggacaauucaauucggcuuuccgcugguggagacauuugggugacaagagaaccuuaugugucaugcgauccuggcaaguguuaucaauuugcacuuggacagggaacaacacuaaacaacaggcauucaaaugacacaguacaugauaggaccccuuaucgaacccuauugaugaaugaguuggguguuccauuucauuugggaaccaagcaagugugcauagcaugguccagcucaaguugucacgauggaaaagcauggcugcauguuuguguaacugggcaugaugaaaaugcaacugcuagcuucauuuacgaugggaggcuuguagauaguauugguucaugguccaaaaauauccucaggacccaggagucggaaugcguuuguaucaauggaacuuguacaguaguaaugacugauggaagugcuucagaaagagcugauacuaaaauacuauucauugaagaggggaaaaucguucauauuagcccauugucaggaagugcucagcaugucgaggagugcuccuguuauccucgauauccuggugucagaugugucugcagagacaacuggaaaggcuccaauaggcccaucguagauauaaaugugaaagauuauagcauuguuuccaguuaugugugcucaggacuuguuggagacacacccagaaaaaacgacagcuccagcaguagcuauugccggaauccuaacaaugagaaagggagucauggagugaaaggcugggccuuugaugauggaaaugacguguggaugggaagaacgaucagcgaggaguuacgcucagguuaugaaaccuucaaaguuauuggaggcugguccaaaccuaacuccaaauugcagauaaauaggcaagucauaguugacagagguaauagguccgguuauucugguauuuucucuguugaaggcaaaaacugcaucaaucggugcuuuuauguggaguugauaaggggaaggaaacaggaaacugaagucugguggaccucaaacaguauuguuguguuuuguggcaccucagguacauauggaacaggcucauggccugauggggcggacaucaaucucaugccuauauaa

SEQ ID NO: 47242 - RNA, 1410 nt, Artificial Sequence
  derived and/or modified CDS sequence (wt) from neuraminidase__InfluenzaA__ABG80087
augaauccaaaucaaaagauaauaacaauuggcucuguuucucucacuauugccacaauaugcuuucuuaugcaaauugccguccugguaacuacuguaacauugcauuucaagcaauaugagugcaacucccccccaagcaaccaaguaaugcugugugaaccaacaauaauagaaagaaacauaacagagauaguguaccugacuaacaccaccauagagaaagaaauaugccccaaacuggcagaauacagaaauuggucaaagccgcaauguaaaauuacaggauuugcaccuuuuucuaaggacaauucaauucggcuuuccgcugguggagacauuugggugacaagagaaccuuaugugucaugcgauccuggcaaguguuaucaauuugcacuuggacagggaacaacacuaaacaacaggcauucaaaugacacaguacaugauaggaccccuuaucgaacccuauugaugaaugaguuggguguuccauuucauuugggaaccaagcaagugugcauggcaugguccagcucaaguugucacgauggaaaagcauggcugcauguuuguguaacugggcaugaugaaaaugcaacugcuagcuucauuuacgaugggaggcuuguagauaguauugguucaugguccaaaaauauccucaggacccaggagucggaaugcgucuguaucaauggaacuuguacaguaguaaugacugauggaagugcuucagaaagagcugauacuaaaauacuauucauugaagaggggaaaaucguucauauuagcccauugucaggaagugcucagcaugucgaggagugcuccuguuauccucgauauccuggugucagaugugucugcagagacaacuggaaaggcuccaauaggcccaucguagauauaaaugugaaagauuauagcauuguuuccaguuaugugugcucaggacuuguuggagacacacccagaaaaaacgacagcuccagcaguagcuauugccggaauccuaacaaugagaaagggagucauggagugaaagguugggccuuugaugauggaaaugacguguggaugggaagaacgaucagcgaggaguuacgcucugguuaugaaaccuucaaaguuauuggaggcugguccaaaccuaacuccaaauugcagauaaauaggcaagucauaguugacagagguaauagguccgguuauucugguauuuucucuguugaaggcaaaagcugcaucaaucggugcuuuuauguggaguugauaaggggaaggaaacaggaaacugaagucugguggaccucaaacaguauuguuguguuuuguggcaccucagguacauauggaacaggcucauggccugauggggcggacaucaaucucaugccuauauaa

SEQ ID NO: 47243 - RNA, 1410 nt, Artificial Sequence
  derived and/or modified CDS sequence (wt) from neuraminidase__InfluenzaA__ABG80098
augaauccaaaucaaaagauaauaacaauuggcucuguuucucucacuauugccacaauaugcuuucuuaugcaaauugccauccugguaacuacuguaacauugcauuucaagcaauaugagugcaacucccccccaagcaaccaaguaaugcugugugaaccaacaauaauagaaagaaacauaacagagauaguguauuugacuaacaccaccauagagaaagaaauaugccccaaacuggcagaauacagaaauuggucaaagccgcaaugcaaaauuacaggauuugcaccuuuuucuaaggacaauucaauucggcuuuccgcugguggagacauuugggugacaagagaaccuuaugugucaugcgauccuggcaaguguuaucaauuugcacuuggacagggaacaacacuaaacaacaggcauucaaaugacacaguacaugauaggaccccuuaucgaacccuauugaugaaugaguuggguguuccauuucauuugggaaccaagcaagugugcauagcaugguccagcucaaguugucacgauggaaaagcauggcugcauguuuguguaacugggcaugaugaaaaugcaacugcuagcuucauuuacgaugggaggcuuguagauaguauugguucaugguccaaaaauauccucaggacccaggagucggaaugcguuuguaucaauggaacuuguacaguaguaaugacugauggaagugcuucagaaagagcugauacuaaaauacuauucauugaagaggggaaaaucguucauauuagcccauugucaggaagugcucagcaugucgaggagugcuccuguuauccucgauauccuggugucagaugugucugcagagacaacuggaaaggcuccaauaggcccaucguagauauaaaugugaaagauuauagcauuguuuccaguuaugugugcucaggacuuguuggagacacacccagaaaaaacgacagcuccagcaguagcuauugccggaaaccuaacaaugagaaagggagucauggagugaaagguugggccuuugaugauggaaaugacguguggaugggaagaacgaucagcgaggaguuacgcucugguuaugaaaccuucaaaguuauuggaggcugguccaaaccuaacuccaaauugcagauaaauaggcaagucauaguugacagagguaauagguccgguuauucugguauuuucucuguugaaggcaaaagcugcaucaaucggugcuuuuauguggaguugauaaggggaaggaaacaggaaacugaagucugguggaccucaaacaguauuguuguguuuuguggcaccucagguacauauggaacaggcucauggccugauggggcggacaucaaucucaugccuauauaa

SEQ ID NO: 47244 - RNA, 1410 nt, Artificial Sequence
  derived and/or modified CDS sequence (wt) from neuraminidase__InfluenzaA__ABG80109
augaauccaaaucaaaagauaauaacaauuggcucuguuucucucacuauugccacaauaugcuuccuuaugcaaauugccauccugguaacuacuguaacauugcauuucaagcaauaugagugcaacucccccccaagcaaccaaguaaugcugugugaaccaacaauaauagaaagaaacauaacagagauaguguauuugacuaacaccaccauagagaaagaaauaugccccaaacuggcagaauacagaaauuggucaaagccgcaauguaaaauuacaggauuugcaccuuuuucuaaggacaauucaauucggcuuuccgcugguggagacauuugggugacaagagaaccuuaugugucaugcgauccuggcaaguguuaucaauuugcacuuggacagggaacaacacuaaacaacaggcauucaaaugacacaguacaugauaggaccccuuaucgaacccuauugaugaaugaguuggguguuccauuucauuugggaaccaagcaagugugcauagcaugguccagcucaaguugucacgauggaaaagcauggcugcauguuuguguaacugggcaugaugaaaaugcaacugcuagcuucauuuacgaugggaggcuuguagauaguauugguucaugguccaaaaauauccucagaacccaggagucggaaugcguuuguaucaauggaacuuguacaguaguaaugacugauggaagugcuucagaaagagcugauacuaaaauacuauucauugaagaggggaaaaucguucauauuagcccauugucaggaagugcucagcaugucgaggagugcuccuguuauccucgauauccuggugucagaugugucugcagagacaacuggaaaggcuccaauaggcccaucguagauauaaaugugaaagauuauagcauuguuuccaguuaugugugcucaggacuuguuggagacacacccagaaaaaacgacagcuccagcaguagcuauugccggaauccuaacaaugagaaagggagucauggagugaaagguugggccuuugaugauggaaaugacguguggaugggaagaacgaucagcgaggaguuacgcucugguuaugaaaccuucaaaguuauuggaggcugguccaaaccuaacuccaaauugcagauaaauaggcaagucauaguugacagagguaauagguccgguuauucugguauuuucucuguugaaggcaaaagcugcaucaaucggugcuuuuauguggaguugauaaggggaaggaaacaggaaacugaagucugguggaccucaaacaguauuguuguguuuuguggcaccucagguacauauggaacaggcucauggccugauggggcggacaucaaucucaugccuauauaa

SEQ ID NO: 47245 - RNA, 1410 nt, Artificial Sequence
  derived and/or modified CDS sequence (wt) from neuraminidase__InfluenzaA__ABG80120
augaauccaaaucaaaagauaauaacaauuggcucuguuucucucacuauugccacaauaugcuuccuuaugcaaauugccauccugguaacuacuguaacauugcauuucaagcaauaugagugcaacucccccccaagcaaccaaguaaugcugugugaaccaacaauaauagaaagaaacauaacagagauaguguauuugacuaacaccaccauagagaaagaaauaugccccaaacuggcagaauacagaaauuggucaaagccgcaauguaaaauuacaggauuugcaccuuuuucuaaggacaauucaauucggcuuuccgcugguggagacauuugggugacaagagaaccuuaugugucaugcgauccuggcaaguguuaucaauuugcacuuggacagggaacaacacuaaacaacaggcauucaaaugacacaguacaugauaggaccccuuaucgaacccuauugaugaaugaguuggguguuccauuucauuugggaaccaagcaagugugcauagcaugguccagcucaaguugucacgauggaaaagcauggcugcauguuuguguaacugggcaugaugaaaaugcaacugcuagcuucauuuacgaugggaggcuuguagauaguauugguucaugguccaaaaauauccucaggacccaggagucggaaugcauuuguaucaauggaacuuguacaguaguaaugacugauggaagugcuucagaaagagcugauacuaaaauacuauucauugaagaggggaaaaucguucauauuagcccauugucaggaagugcucagcaugucgaggagugcuccuguuauccucgauauccuggugucagaugugucugcagagacaacuggaaaggcuccaauaggcccaucguagauauaaaugugaaagauuauagcauuguuuccaguuaugugugcucaggacuuguuggagacacacccagaaaaaacgacagcuccagcaguagcuauugccggaauccuaacaaugagaaagggagucauggagugaaagguugggccuuugaugauggaaaugacguguggaugggaagaacgaucagcgaggaguuacgcucugguuaugaaaccuucaaaguuauuggaggcugguccaaaccuaacuccaaauugcagauaaauaggcaagucauaguugacagagguaauagguccgguuauucugguauuuucucuguugaaggcaaaagcugcaucaaucggugcuuuuauguggaguugauaaggggaaggaaacaggaaacugaagucugguggaccucaaacaguauuguuguguuuuguggcaccucagguacauauggaacaggcucauggccugauggggcggacaucaaucucaugccuauauaa

SEQ ID NO: 47246 - RNA, 1410 nt, Artificial Sequence
  derived and/or modified CDS sequence (wt) from neuraminidase__InfluenzaA__ABG80131
augaauccaaaucaaaagauaauaacaauuggcucuguuucucucacuauugccacaauaugcuuucuuaugcaaauugccaucaugguaaccacuguaacauugcauuucaaacaauaugagugcaacucccccccaagcaaccaaguaaugcugugugaaccaacaauaauagaaagaaacauaacagagauaguguauuugacuaacaccaccauagagaaagaaauaugccccaaacuggcagaauacagaaauuggucaaagccgcaauguaaaauuacaggauuugcaccuuuuuccaaggacaauucaauucggcuuuccgcugguggagacauuugggugacaagagaaccuuaugugucaugcgauccuggcaaguguuaucaauuugcacuuggacagggaacaacacuaaacaacaggcauucaaaugacacaguacaugauaggaccccuuaucgaacccuauugaugaaugaguuggguguuccauuucauuugggaaccaagcaagugugcauagcaugguccagcucaaguugucacgauggaaaagcauggcugcauguuuguguaacugggcaugaugaaaaugcaacugcuagcuucauuuacgaugggaggcuuguagauaguauugguucaugguccaaaaauauccucaggacccaggagucggaaugcguuuguaucaauggaacuuguacaguaguaaugacugauggaagugcuucagaaagagcugauacuaaaauacuauucauugaagaggggaaaaucguucauauuagcccauugucaggaagugcucagcaugucgaggagugcuccuguuauccucgauauccuggugucagaugugucugcagagacaacuggaaaggcuccaauaggcccaucguagauauaaaugugaaagauuauagcauuguuuccaguuaugugugcucaggacuuguuggagacacacccagaaaaaacgacagcuccagcaguagcuauugccggaauccuaacaaugagaaagggagucauggagugaaagguugggccuuugaugauggaaaugacguguggaugggaagaacgaucagcgaggaguuacgcucugguuaugaaaccuucaaaguuauuggaggcugguccaaaccuaacuccaaauugcagauaaauaggcaagucauaguugacagagguaauagguccgguuauucugguauuuucucuguugaaggcaaaagcugcaucaaucggugcuuuuauguggaguugauaaggggaaggaaacaggaaacugaagucugguggaccucaaacaguauuguuguguuuuguggcaccucagguacauauggaacaggcucauggccugauggggcggacaucaaucucaugccuauauaa

SEQ ID NO: 47247 - RNA, 1410 nt, Artificial Sequence; identical to SEQ ID NO: 47134
  derived and/or modified CDS sequence (wt) from neuraminidase__InfluenzaA__ABG80142

SEQ ID NO: 47248 - RNA, 1410 nt, Artificial Sequence
  derived and/or modified CDS sequence (wt) from neuraminidase__InfluenzaA__ABG80153
augaauccaaaucaaaagauaauaacaauuggcucuguuucucucacuauugccacaauaugcuuucuuaugcaaauugccauccugguaacuacuguaacauugcauuucaagcaauaugagugcaacucccccccaagcaaccaaguaaugcugugugaaccaacaauaauagaaagaaacauaacagagauaguguauuugacuaacaccaccauagagaaagaaauaugccccaaacuggcagaauacagaaauuggucaaagccgcaauguaaaauuacaggauuugcaccuuuuucuaaggacaauucaauucggcuuuccgcugguggagacauuugggugacaagagaaccuuaugugucaugcgauccuggcaaguguuaucaauuugcacuuggacagggaacaacacuaaacaacaggcauucaaaugacacaguacaugauaggaccccuuaucgaacccuauugaugaaugaguuggguguuccauuucauuugggaaccaaacaagugugcauagcaugguccagcucaaguugucacgauggaaaagcauggcugcauguuuguguaacugggcaugaugaaaaugcaacugcuagcuucauuuacgaugggaggcuuguagauaguauugguucaugguccaaaaauauccucaggacccaggagucggaaugcguuuguaucaauggaacuuguacaguaguaaugacugauggaagugcuucagaaagagcugauacuaaaauacuauucauugaagaggggaaaaucguucauauuagcccauugucaggaagugcucagcaugucgaggagugcuccuguuauccucgauauccuggugucagaugugucugcagagacaacuggaaaggcuccaauaggcccaucguagauauaaaugugaaagauuauagcauuguuuccaguuaugugugcucaggacuuguuggagacacacccagaaaaaacgacagcuccagcaguagcuauugccggaaaccuaacaaugagaaagggagucauggagugaaagguugggccuuugaugauggaaaugacguguggaugggaagaacgaucagcgaggaguuacgcucugguuaugaaaccuucaaaguuauuggaggcugguccaaaccuaacuccaaauugcagauaaauaggcaagucauaguugacagagguaauagguccgguuauucugguauuuucucuguugaaggcaaaagcugcaucaaucggugcuuuuauguggaguugauaaggggaaggaaacaggaaacugaagucugguggaccucaaacaguauuguuguguuuuguggcaccucagguacauauggaacaggcucauggccugauggggcggacaucaaucucaugccuauauaa

SEQ ID NO: 47249 - RNA, 1410 nt, Artificial Sequence
  derived and/or modified CDS sequence (wt) from neuraminidase__InfluenzaA__ABG80164
augaauccaaaucaaaagauaauaacaauuggcucuguuucucucacuauugccacaauaugcuuccuuaugcaaauugccauccugguaacuacuguaacauugcauuucaagcaauaugagugcaacucccccccaagcaaccaaguaaugcugugugaaccaacaauaauagaaagaaacauaacagagauaguguauuugacuaacaccaccauagagaaagaaauaugccccaaacuggcagaauacagaaauuggucaaagccgcaauguaaaauuacaggauuugcaccuuuuucuaaggacaauucaauucggcuuuccgcugguggagacauuugggugacaagagaaccuuaugugucaugcgauccuggcaaguguuaucaauuugcacuuggacagggaacaacacuaaacaacaggcauucaaaugacacaguacaugauaggaccccuuaucgaacccuauugaugaaugaguuggguguuccauuucauuugggaaccaagcaagugugcauagcaugguccagcucaaguugucacgauggaaaagcauggcugcauguuuguguaacugggcaugaugaaaaugcaacugcuagcuucauuuacgaugggaggcuuguagauaguauugguucaugguccaaaaauauccucaggacccaggagucggaaugcguuuguaucaauggaacuuguacaguaguaaugacugauggaagugcuucagaaagagcugauacuaaaauacuauucauugaagaggggaaaaucguucauauuagcccauugucaggaagugcucagcaugucgaggagugcuccuguuauccucgauauccuggugucagaugugucugcagagacaacuggaaaggcuccaauaggcccaucguagauauaaaugugaaagauuauagcauuguuuccaguuaugugugcucaggacuuguuggagacacacccagaaaaaacgacagcuccagcaguagcuauugccggaauccuaacaaugagaaagggagucauggagugaaagguugggccuuugaugauggaaaugacguguggaugggaagaacgaucagcgaggaguuacgcucugguuaugaaaccuucaaaguuauuggaggcugguccaaaccuaacuccaaauugcagauaaauaggcaagucauaguugacagagguaauagguccgguuauucugguauuuucucuguugaaggcaaaagcugcaucaaucggugcuuuuauguggaguugauaaggggaaggaaacaggaaacugaagucugguggaccucaaacaguauuguuguguuuuguggcaccucagguacauacggaacaggcucauggccugauggggcggacaucaaucucaugccuauauaa

SEQ ID NO: 47250 - RNA, 1413 nt, Artificial Sequence; identical to SEQ ID NO: 46931
  derived and/or modified CDS sequence (wt) from neuraminidase__InfluenzaA__ABG80186

SEQ ID NO: 47251 - RNA, 1410 nt, Artificial Sequence; identical to SEQ ID NO: 46181
  derived and/or modified CDS sequence (wt) from neuraminidase__InfluenzaA__ABG80197

SEQ ID NO: 47252 - RNA, 1410 nt, Artificial Sequence; identical to SEQ ID NO: 46800
  derived and/or modified CDS sequence (wt) from neuraminidase__InfluenzaA__ABG80219

SEQ ID NO: 47253 - RNA, 1410 nt, Artificial Sequence
  derived and/or modified CDS sequence (wt) from neuraminidase__InfluenzaA__ABG80230
augaauccaaaucaaaagauaauaacaauuggcucuguuucucucaccauugccacaauaugcuuccuuaugcaaauugccauccugguaacuacuguaacauugcauuucaagcaguaugaaugcaacucccccccaaacaaccaaguaaugcugugugaaccaacaauaauagaaagaaacauaacagagauaguguaucugaccaacaccaccauagagaaggaaauaugccccaaauuagcagaauacagaaauuggucaaagccgcaauguaacauuacaggauuugcaccuuuuucuaaggacaauucgauucggcuuuccgcugguggggacaucugggugacaagagaaccuuaugugucaugcgauccugacaaguguuaucaauuugcccuugggcagggaacaacacuaaacaacgggcauucaaaugacacaguacaugauaggaccccuuaccggacccuauugaugaaugaauuggguguuccauuucauuugggaaccaggcaagugugcauagcaugguccagcucaaguugucacgauggaaaagcauggcugcauguuuguguaacuggggaugaugaaaaugcaacugcuagcuucauuuacaaugggaggcuuguagauaguauugguucaugguccaaaaauauacucagaacccaggagucggaaugcguuuguaucaauggaacuuguacaguaguaaugacugaugggagcgcuucaggaaaagcugauacuaaaauacuauucauugaggaggggaaaaucguucauauuagcacauugucagaaagugcucagcaugucgaggagugcuccuguuauccucgauauccuggugucagaugugucugcagagacaacuggaaaggcuccaauaggcccaucguagauauaaauguaaaggauuauagcauuguuuccaguuaugugugcucaggacuuguuggagacacacccagaaaaaacgacagcuucagcaguagccauugccuagauccuaacaaugaggaagguggucauggagugaaaggcugggccuuugaugauggaaaugacguguggaugggaagaacgaucagcgagaaguuacgcucagguuaugaaaccuucaaagucaucgaaggcugguccaaaccuaacuccaaauuacagacaaauaggcaagucauaguugaaagagguaacagguccgguuauucugguauuuucuccguugaaggcaaaagcugcaucaaucggugcuuuuauguggaguugauaaggggaaggaaagaggaaacugaagucugguggaccucaaacaguauuguuguguuuuguggcaccucagguacauauggaacaggcucauggccugauggggcggauaucaaucucaugccuauauaa

SEQ ID NO: 47254 - RNA, 1410 nt, Artificial Sequence; identical to SEQ ID NO: 46603
  derived and/or modified CDS sequence (wt) from neuraminidase__InfluenzaA__ABG80241

SEQ ID NO: 47255 - RNA, 1410 nt, Artificial Sequence; identical to SEQ ID NO: 46603
  derived and/or modified CDS sequence (wt) from neuraminidase__InfluenzaA__ABG80252

SEQ ID NO: 47256 - RNA, 1410 nt, Artificial Sequence; identical to SEQ ID NO: 47187
  derived and/or modified CDS sequence (wt) from neuraminidase__InfluenzaA__ABG80263

SEQ ID NO: 47257 - RNA, 1410 nt, Artificial Sequence
  derived and/or modified CDS sequence (wt) from neuraminidase__InfluenzaA__ABG80274
augaauccaaaucaaaagauaauaacgauuggcucuguuucucucaccauuuccacaauaugcuucuucaugcaaauugccaucuugauaacuacuguaacauugcauuucaagcaauaugaauucaacucccccccaaacaaccaggugaugcugugugaaccaacaauaauagaaagaaacauaacagagauaguguaucugaccaacaccaccauagagaaggaaauaugccccaaacuagcagaauacagaaauuggucaaagccgcaaugugacauuacaggauuugcaccuuuuucuaaggacaauucgauuaggcuuuccgcugguggggacaucugggugacaagagaaccuuaugugucaugcgauccugacaaguguuaucaauuugcccuuggacaggggacaacacuaaacaacgugcauucaaaugacacaguacaugauaggaccccuuaucggacccuauugaugaaugaguuagguguuccauuucaucuggggaccaagcaagugugcauagcaugguccagcucaaguugucacgauggaaaagcauggcugcauguuuguguaacgggggaugauaaaaaugcaacugcuagcuucauuuacaaugggaggcuuguagauaguauuguuucaugguccaaagaaauccucaggacccaggagucagaaugcguuuguaucaauggaacuuguacaguaguaaugacugaugggagugcuucaggaaaggcugauacuaaaauacuauucauugaggaggggaaaauuguucauacuagcacauugucaggaagugcucagcaugucgaggaguguuccugcuauccucgauauccuggugucagaugugucugcagagacaacuggaaaggcuccaauaggcccaucguagauauaaacauaaaggauuauagcauuguuuccaguuaugugugcucaggacuuguuggagacacacccagaaaaaacgacagcuccagcaguagccauugcuuggauccuaacaaugaagaagguggucauggagugaaaggcugggccuuugaugauggaaaugacguguggaugggaagaacgaucagcgagaaguuacgcucaggauaugaaaccuucaaagucauugaaggcugguccaacccuaauuccaaauugcagauaaauaggcaagucauaguugacagagguaauagguccgguuauucugguauuuucucuguugaaggcaaaaacugcaucaaucggugcuuuuauguggaguugauaaggggaagaaaagaggaaacugaagucuuguggaccucaaacaguauuguuguguuuuguggcaccucagguacauauggaacaggcucauggccugauggggcggacaucaaucucaugccuauauaa

SEQ ID NO: 47258 - RNA, 1410 nt, Artificial Sequence
  derived and/or modified CDS sequence (wt) from neuraminidase__InfluenzaA__ABG80285
augaauccaaaucaaaagauaauaacgauuggcucuguuucucucaccauuuccacaauaugcuucuucaugcaaauugccaucuugauaacuacuguaacauugcauuucaagcaauaugaauucaacucccccccaaacaaccaagugaugcugugugaaccaacaauaauagaaagaaacauaacagagauaguguaucugaccaacaccaccauagagaaggaaauaugccccaaacuagcagaauacagaaauuggucaaagccgcaaugugacauuacaggauuugcaccuuuuucuaaggacaauucgauuagacuuuccgcugguggggacaucugggugacaagagaaccuuaugugucaugcgacccugacaaguguuaucaauuugcccuuggacagggaacaacacuaaacaacgugcauucaaaugacacaguacaugauaggaccccuuaucggacccuauugaugaaugaguuagguguuccauuucaucuggggaccaagcaagugugcauagcaugguccagcucaaguugucacgauggaaaagcauggcugcauguuuguguaacgggggaugauaaaaaugcaacugcuagcuucauuuacaaugggaggcuuguagauaguauuguuucaugguccaaagaaauccucaggacccaggagucagaaugcguuuguaucaauggaacuuguacaguaguaaugacugaugggagugcuucaggaaaagcugauacuaaaauacuauucauugaggaggggaaaaucguucauacuagcacauugucaggaagugcucagcaugucgaggagugcuccugcuauccucgauauccuggugucagaugugucugcagagacaacuggaaaggcuccaauaggcccaucguagauauaaacauaaaggauuauagcauuguuuccaguuaugugugcucaggacuuguuggagacacacccagaaaaaacgacagcuccagcaguagccauugcuuggauccuaacaaugaagaagguggucauggagugaaaggcugggccuuugaugauggaaaugacguguggaugggaagaacgaucagcgagaaguuacgcucaggauaugaaaccuucaaagucauugaaggcugguccaacccuaauuccaaauugcagauaaauaggcaagucauaguugacagagguaauagguccgguuauucugguauuuucucuguugaaggcaaaagcugcaucaaucggugcuuuuauguggaguugauaaggggaagaaaagaggaaacugaagucuuguggaccucaaacaguauuguuguguuuuguggcaccucagguacauauggaacaggcucauggccugauggggcggacaucaaucucaugccuauauga

SEQ ID NO: 47259 - RNA, 1410 nt, Artificial Sequence; identical to SEQ ID NO: 46378
  derived and/or modified CDS sequence (wt) from neuraminidase__InfluenzaA__ABG80296

SEQ ID NO: 47260 - RNA, 1410 nt, Artificial Sequence
  derived and/or modified CDS sequence (wt) from neuraminidase__InfluenzaA__ABG80307
augaauccaaaucaaaagauaauaacgauuggcucuguuucucucaccauuuccacaauaugcuucuuuaugcaaauugccaucuugauaacuacuguaacauugcauuucaagcaauaugaauucaacucccccccaaacaaccaagugaugcugugugaaccaacaauaauagaaagaaacauaacagagauaguguaucugaccaacaccaccauagagaaggaaauaugccccaaacuagcagaauacagaaauuggucaaagccgcaaugugacauuacaggauuugcaccuuuuucuaaggacaauucgauuaggcuuuccgcugguggggacaucugggugacaagagaaccuuaugugucaugcgauccugacaaauguuaucaauuugcccuuggacagggaacaacacuaaacaacgugcauucaaaugacacaguacaugauaggaccccuuaucggacccuauugaugaaugaguuagguguuccauuucaucuggggacuaagcaagugugcauagcaugguccagcucaaguugucacgauggaaaagcauggcugcauguuuguguaacgggggaugauaaaaaugcaacugcuagcuucauuuacaaugggaggcuuguagauaguauuguuucaugguccaaagaaauccucagaacccaggagucagaaugcguuuguaucaauggaacuuguacaguaguaaugacugaugggagugcuucaggaaaagcugauacuaaaauacuauucauugaggaggggaaaaucguucauacuagcacauugucaggaagugcccagcaugucgaagagugcuccugcuauccucgauauccuggugucagaugugucugcagagacaacuggaaaggcuccaauaggcccaucguagauauaaacauaaaggauuauagcauuguuuccaguuaugugugcucaggacuuguuggagacacacccagaaaaaacgacagcuccagcaguagccauugcuuggauccuaacaaugaagaagguggucauggagugaaaggcugggccuuugaugauggaaaugacguguggaugggaagaacgaucagcgagaaguuacgcucaggauaugaaaccuucaaagucauugaaggcugguccaacccuaauuccaaauugcagauaaauaggcaagucauaguugacagagguaauagguccgguuauucugguauuuucucuguugaaggcaaaagcugcaucaaucggugcuuuuauguggaguugauaaggggaagaaaagaggaaacugaagucuuguggaccucaaacaguauuguuguguuuuguggcaccucagguacauauggaacaggcucauggccugauggggcggacaucaaucucaugccuauauaa

SEQ ID NO: 47261 - RNA, 1410 nt, Artificial Sequence
  derived and/or modified CDS sequence (wt) from neuraminidase__InfluenzaA__ABG80318
augaauccaaaucaaaagauaauaacgauuggcucuguuucucucaccauuuccacaauaugcuucuucaugcaaauugccaucuugauaacuacuguaacauugcauuucaagcaauaugaauucaacucccccccaaacaaccaagugaugcugugugaaccaacaauaauagaaagaaacauaacagagauaguguaucugaccaacaccaccauagagaaggaaauaugccccaaacuagcagaauacagaaauuggucaaagccgcaaugugacauuacaggauuugcaccuuuuucuaaggacaauucgauuaggcuuuccgcugguggggacaucugggugacaagagaaccuuaugugucaugcgauccugacaaguguuaucaauuugcccuuggacagggaacaacacuaaacaacgugcauucaaaugacacaguacaugauaggaccccuuaucggacccuauugaugaaugaguuagguguuccauuucaucuggggaccaagcaagugugcauagcaugguccagcucaaguugucacgauggaaaagcauggcugcauguuuguguaacgggggaugauaaaaaugcaacugcuagcuucauuuacaaugggaggcuuguagauaguauuguuucaugguccaaaaaaauccucaggacccaggagucagaaugcguuuguaucaauggaacuuguacaguaguaaugacugaugggagugcuucaggaaaagcugauacuaaaauacuauucauugaggaggggaaaaucguucauacuagcacauugucaggaagugcucagcaugucgaggagugcuccugcuauccucgauauccuggugucagaugugucugcagagacaacuggaaaggcuccaauaggcccaucguagauauaaacauaaaggauuauagcauuguuuccaguuaugugugcucaggacuuguuggagacacacccagaaaaaacgacagcuccagcaguagccauugcuuggauccuaacaaugaggaagguggucauggagugaaaggcugggccuuugaugauggaaaugacguguggaugggaagaacgaucagcgagaaguuacgcucaggauaugaaaccuucaaagucauugaaggcugguccaacccuaauuccaaauugcagauaaauaggcaagucauaguugacagagguaauagguccgguuauucugguauuuucucuguugaaggcaaaagcugcaucaaucggugcuuuuauguggaguugauaaggggaagaaaagaggaaacugaagucuuguggaccucaaacaguauuguuguguuuuguggcaccucagguacauauggaacaggcucauggccugauggggcggacaucaaucucaugccuauauaa

SEQ ID NO: 47262 - RNA, 1410 nt, Artificial Sequence
  derived and/or modified CDS sequence (wt) from neuraminidase__InfluenzaA__ABG80329
augaauccaaaucaaaagauaauaacgauuggcucuguuucucucaccauuuccacaauaugcuucuuuaugcaaauugccaucuugauaacuacuguaacauugcauuucaagcaauaugaauucaacucccccccaaacaaccaagugaugcugugugaaccaacaauaauagaaagaaacauaacagagauaguguaucugaccaacaccaccauagagaaggaaauaugccccaaacuagcagaauacagaaauuggucaaagccgcaaugugacauuacaggauuugcaccuuuuucuaaggacaauucgauuaggcuuuccgcugguggggacaucugggugacaagagaaccuuaugugucaugcgauccugacaaauguuaucaauuugcccuuggacagggaacaacacuaaacaacgugcauucaaaugacacaguacaugauaggaccccuuaucggacccuauugaugaaugaguuagguguuccauuucaucuggggacuaagcaagugugcauagcaugguccagcucaaguugucacgauggaaaagcauggcugcauguuuguguaacgggggaugauaaaaaugcaacugcuagcuucauuuacaaugggaggcuuguagauaguauuguuucaugguccaaagaaauccucagaacccaggagucagaaugcguuuguaucaauggaacuuguacaguaguaaugacugaugggagugcuucaggaaaagcugauacuaaaauacuauucauugaggaggggaaaaucguucauacuagcacauugucaggaagugcccagcaugucgaggagugcuccugcuauccucgauauccuggugucagaugugucugcagagacaacuggaaaggcuccaauaggcccaucguagauauaaacauaaaggauuauagcauuguuuccaguuaugugugcucaggacuuguuggagacacacccagaaaaaacgacagcuccagcaguagccauugcuuggauccuaacaaugaagaagguggucauggagugaaaggcugggccuuugaugauggaaaugacguguggaugggaagaacgaucagcgagaaguuacgcucaggauaugaaaccuucaaagucauugaaggcugguccaacccuaauuccaaauugcagauaaauaggcaagucauaguugacagagguaauaggucugguuauucugguauuuucucuguugaaggcaaaagcugcaucaaucggugcuuuuauguggaguugauaaggggaagaaaagaggaaacugaagucuuguggaccucaaacaguauuguuguguuuuguggcaccucagguacauauggaacaggcucauggccugauggggcggacaucaaucucaugccuauauaa

SEQ ID NO: 47263 - RNA, 1410 nt, Artificial Sequence
  derived and/or modified CDS sequence (wt) from neuraminidase__InfluenzaA__ABG80340
augaauccaaaucaaaagauaauaacgauuggcucuguuucucucaccauuuccacaauaugcuucuuuaugcaaauugccaucuugauaacuacuguaacauugcauuucaagcaauaugaauucaacucccccccaaacaaccaagugaugcugugugaaccaacaauaauagaaagaaacauaacagagauaguguaucugaccaacaccaccauagagaaggaaauaugccccaaacuagcagaauacagaaauuggucaaagccgcaaugugacauuacaggauuugcaccuuuuucuaaggacaauucgauuaggcuuuccgcugguggggacaucugggugacaagagaaccuuaugugucaugcgauccugacaaauguuaucaauuugcccuuggacagggaacaacacuaaacaacgugcauucaaaugacacaguacaugauaggaccccuuaucggacccuauugaugaaugaguuagguguuccauuucaucuggggacuaagcaagugugcauagcaugguccagcucaaguugucacgauggaaaagcauggcugcauguuuguguaacgggggaugauaaaaaugcaacugcuagcuucauuuacaaugggaggcuuguagauaguauuguuucaugguccaaagaaauccucagaacccaggagucagaaugcguuuguaucaauggaacuuguacaguaguaaugacugaugggagugcuucaggaaaagcugauacuaaaauacuauucauugaggaggggaaaaucguucauacuagcacauugucaggaagugcccagcaugucgaggagugcuccugcuauccucgauauccuggugucagaugugucugcagagacaacuggaaaggcuccaauaggcccaucguagauauaaacauaaaggauuauagcauuguuuccaguuaugugugcucaggacuuguuggagacacacccagaaaaaacgacagcuccagcaguagccauugcuuggauccuaacaaugaagaagguggucauggagugaaaggcugggccuuugaugauggaaaugacguguggaugggaagaacgaucagcgagaaguuacgcucaggauaugaaaccuucaaagucauugaaggcugguccaacccuaauuccaaauugcagauaaauaggcaagucauaguugacagagguaauagguccgguuauucugguauuuucucuguugaaggcaaaagcugcaucaaucggugcuuuuauguggaguugauaaggggaagaaaagaggaaacugaaguuuuguggaccucaaacaguauuguuguguuuuguggcaccucagguacauauggaacaggcucauggccugauggggcggacaucaaucucaugccuauauaa

SEQ ID NO: 47264 - RNA, 1410 nt, Artificial Sequence
  derived and/or modified CDS sequence (wt) from neuraminidase__InfluenzaA__ABG80351
augaauccaaaucaaaagauaauaacaauuggcucuguuucucucacuauugccacaauaugcuuccuuaugcaaauugccauccugguaacuacuguaacauugcauuucaagcaauaugagugcaacucccccccaaacaaccaaguaaugcugugugaaccaacaauaauagaaagaaacauaacagagauaguguaucugaccaacaccaccauagagaaagaaauaugccccaaacuagcagaauacagaaauuggucaaagccgcaauguaaaauuacaggauuugcaccuuuuucuaaggacaauucaauucggcuuuccgcugguggagacauuugggugacaagagaaccuuaugugucaugcgauccuggcaaguguuaucaauuugcccuuggacagggaacaacacuaaacaacaggcauucaaaugacacaguacaugauaggaccccuuaucgaacccuauugaugaaugaguuggguguuccauuucauuugggaaccaagcaagugugcauagcaugguccagcucaaguugucacgauggaaaagcauggcugcauguuuguguaacugggcaugaugaaaaugcaacugcuagcuucauuuacgaugggaggcuuguagauaguauugguucaugguccaaaaauauccucaggacccaggagucggaaugcguuuguaucaauggaacuuguacaguaguaaugacagauggaagugcuucagaaagagcugauacuaaaauacuauucauugaagaggggaaaaucguucauauuagcccauugucaggaagugcucagcaugucgaggagugcuccuguuauccucgauauccuggugucagaugugucugcagagacaacuggaaaggcuccaauaggcccaucguagauauaaaugugaaagauuauagcauuguuuccaguuaugugugcucaggacuuguuggagacacacccagaaaaaacgacagcuccagcaguagcuauugccggaauccuaacaaugagaaagggagucauggagugaaaggcugggccuuugaugauggaaaugacguguggaugggaagaacgaucagcgaggaguuacgcucagguuaugaaaccuucaaagucauuggaggcugguccaaaccuaacuccaaauugcagauaaauaggcaagucauaguugacagagguaauagguccgguuauucugguauuuucucuguugaaggcaaaagcugcaucaaucggugcuuuuauguggaguugauaaggggaaggaaacaggaaacugaagucugguggaccucaaacaguauuguuguguuuuguggcaccucagguacauauggaacaggcucauggccugauggggcggacaucaaucucaugccuauauaa

SEQ ID NO: 47265 - RNA, 1410 nt, Artificial Sequence
  derived and/or modified CDS sequence (wt) from neuraminidase__InfluenzaA__ABG80373
augaauccaaaucaaaagauaauaacaauuggcucuguuucucucacuauugccacaauaugcuuccuuaugcaaauugccauccugguaacuacuguaacauugcauuucaagcaauaugagugcaacucccccccaaacaaccaaguaaugcugugugaaccaacaauaauagaaagaaacauaacagagauaguguaucugaccaacaccaccauagagaaagagauaugccccaaacuagcagaauacagaaauuggucaaagccgcaauguaaaauuacaggauuugcaccuuuuucuaaggacaauucaauucggcuuuccgcugguggagacauuugggugacaagagaaccuuaugugucaugcgauccuggcaaguguuaucaauuugcccuuggacagggaacaacacuaaacaacaggcauucaaaugacacaguacaugauaggaccccuuaucgaacccuauugaugaaugaguuggguguuccauuucauuugggaaccaagcaagugugcauagcaugguccagcucaaguugucacgauggaaaagcauggcugcauguuuguguaacugggcaugaugaaaaugcaacugcuagcuucauuuacgaugggaggcuuguagauaguauugguucaugguccaaaaauauccucaggacccaggagucggaaugcguuuguaucaauggaacuuguacagugguaaugacugauggaagugcuucagaaagagcugauacuaaaauacuauucauugaagaggggaaaaucguucauauuagcccauugucaggaagugcucagcaugucgaggagugcuccuguuauccucgauauccuggugucagaugugucugcagagacaacuggaaaggcuccaauaggcccaucguagauauaaaugugaaagaucauagcauuguuuccaguuaugugugcucaggacuuguuggagacacacccagaaaaaacgacagcuccagcaguagcuauugccggaauccuaacaaugagaaagggagucauggagugaaaggcugggccuuugaugauggaaaugacguguggaugggaagaacgaucagcgaggaguuacgcucagguuaugaaaccuucaaagucauuggaggcugguccaaaccuaacuccaaauugcagauaaauaggcaagucauaguugacagagguaauagguccgguuauucugguauuuucucuguugaaggcaaaagcugcaucaaucggugcuuuuauguggaguugauaaggggaaggaaacaggaaacugaagucugguggaccucaaacaguauuguuguguuuuguggcaccucagguacauauggaacaggcucauggccugauggggcggacaucaaucucaugccuauauaa

SEQ ID NO: 47266 - RNA, 1410 nt, Artificial Sequence
  derived and/or modified CDS sequence (wt) from neuraminidase__InfluenzaA__ABG80384
augaauccaaaucaaaagauaauaacaauuggcucuguuucucucacuauugccacaauaugcuuccuuaugcaaauugccauccugguaacuacuguaacauugcauuucaagcaauaugagugcaacucccccccaaacaaccaaguaaugcugugugaaccaacaauaauagaaagaaacauaacagagauaguguaucugaccaacaccaccauagagaaagaaauaugccccaaacuagcagaauacagaaauuggucaaagccgcaauguaaaauuacaggauuugcaccuuuuucuaaggacaauucaauucggcuuuccgcugguggagacauuugggugacaagagaaccuuaugugucaugcgauccuggcaaguguuaucaauuugcccuuggacagggaacaacacuaaacaacaggcauucaaaugacacaguacaugauaggaccccuuaucgaacccuauugaugaaugaguuggguguuccauuucauuugggaaccaagcaagugugcauagcaugguccagcucaaguugucacgauggaaaagcauggcugcauguuuguguaacugggcaugaugaaaaugcaacugcuagcuucauuuacgaugggaggcuuguagauaguauugguucaugguccaaaaauauccucaggacccaggagucggaaugcguuuguaucaauggaacuuguacagugguaaugacugauggaagugcuucagaaagagcugauacuaaaauacuauucauugaagaggggaaaaucguucauauuagcccauugucaggaagugcucagcaugucgaggagugcuccuguuauccucgauauccuggugucagaugugucugcagagacaacuggaaaggcuccaauaggcccaucguagauauaaaugugaaagaucauagcauuguuuccaguuaugugugcucaggacuuguuggagacacacccagaaaaaacgacagcuccagcaguagcuauugccggaauccuaacaaugagaaagggagucauggagugaaaggcugggccuuugaugauggaaaugacguguggaugggaagaacgaucagcgaggaguuacgcucagguuaugaaaccuucaaagucauuggaggcugguccaaaccuaacuccaaauugcagauaaauaggcaagucauaguugacagagguaauagguccgguuauucugguauuuucucuguugaaggcaaaagcugcaucaaucggugcuuuuauguggaguugauaaggggaaggaaacaggaaacugaagucugguggaccucaaacaguauuguuguguuuuguggcaccucagguacauauggaacaggcucauggccugauggggcggacaucaaucucaugccuauauaa

SEQ ID NO: 47267 - RNA, 1410 nt, Artificial Sequence
  derived and/or modified CDS sequence (wt) from neuraminidase__InfluenzaA__ABG80395
augaauccaaaucaaaagauaauaacaauuggcucuguuucucucacuauugccacaauaugcuuccuuaugcaaauugccauccugguaacuacuguaacauugcauuucaagcaauaugagugcaacucccccccaaacaaccaaguaaugcugugugaaccaacaauaauagaaagaaacauaacagagauaguguaucugaccaacaccaccauagagaaagaaauaugccccaaacuagcagaauacagaaauuggucaaagccgcaauguaaaauuacaggauuugcaccuuuuucuaaggacaauucaauucggcuuuccgcugguggagacauuugggugacaagagaaccuuaugugucaugcgauccuggcaaguguuaucaauuugcccuuggacagggaacaacacuaaacaacaggcauucaaaugacacaguacaugauaggaccccuuaucgaacccuauugaugaaugaguuggguguuccauuucauuugggaaccaagcaagugugcauagcaugguccagcucaaguugucacgauggaaaagcauggcugcauguuuguguaacugggcaugaugaaaaugcaacugcuagcuucauuuacgaugggaggcuuguagauaguauugguucaugguccaaaaauauccucaggacccaggagucggaauguguuuguaucaauggaacuuguacaguaguaaugacugauggaagugcuucaaaaagagcugauacuaaaauacuauucauugaagaggggaaaaucguucauauuagcccauugucaggaagugcucagcaugucgaggagugcuccuguuauccucgauauccuggugucagaugugucugcagagacaacuggaaaggcuccaauaggcccaucguagauauaaaugugaaagauuauagcauuguuuccaguuaugugugcucaggacuuguuggagacacacccagaaaaaacgacagcuccagcaguagcuauugccggaauccuaacaaugagaaagggagucauggagugaaaggcugggccuuugaugauggaaaugacguguggaugggaagaacgaucagcgaggaguuacgcucagguuaugaaaccuucaaagucauuggaggcugguccaaaccuaacuccaaauugcagauaaauaggcaagucauaguugacagagguaauauguccgguuauucugguauuuucucuguugaaggcaaaagcugcaucaaucggugcuuuuacguggaguugauaaggggaaggaaacaggaaacugaagucugguggaccucaaacaguauuguuguguuuuguggcaccucagguacauauggaacaggcucauggccugauggggcggacaucaaucucaugccuauauaa

SEQ ID NO: 47268 - RNA, 1410 nt, Artificial Sequence; identical to SEQ ID NO: 47197
  derived and/or modified CDS sequence (wt) from neuraminidase__InfluenzaA__ABG80406

SEQ ID NO: 47269 - RNA, 1410 nt, Artificial Sequence; identical to SEQ ID NO: 47197
  derived and/or modified CDS sequence (wt) from neuraminidase__InfluenzaA__ABG80417

SEQ ID NO: 47270 - RNA, 1410 nt, Artificial Sequence
  derived and/or modified CDS sequence (wt) from neuraminidase__InfluenzaA__ABG80428
augaauccaaaucaaaagauaauaacaauuggcucuguuucucucacuauugccacaauaugcuuccuuaugcaaauugccauccugguaacuacuguaacauugcauuucaagcaauaugagugcaacucccccccaaacaaccaaguaaugcugugugaaccaacaauaauagaaagaaacauaacagagauaguguaucugaccaacaccaccauagagaaagaaauaugccccaaacuagcagaauacagaaauuggucaaagccgcaauguaaaauuacaggauuugcaccuuuuucuaaggacaauucaauucggcuuuccgcugguggagacauuugggugacaagggaaccuuaugugucaugcgauccuggcaaguguuaucaauuugcccuuggacagggaacaacacuaaacaacaggcacucaaaugacacaguacaugauaggaccccuuaucgaacccuauugaugaaugaguuggguguuccauuucauuugggaaccaagcaagugugcauagcaugguccagcucaaguugucacgauggaaaagcauggcugcauguuuguguaacugggcaugaugaaaaugcaacugcuagcuucauuuacgaugggaggcuuguagauaguauugguucaugguccaaaaauauccucaggacccaggagucggaaugcguuuguaucaauggaacuuguacaguaguaaugacugauggaagugcuucagaaagagcugauacuaaaauacuauucauugaagaggggaaaaucguucauauuagcccauugucaggaagugcucagcaugucgaggagugcuccuguuauccucgguauccuggugucagaugugucugcagagacaacuggaaaggcuccaauaggcccaucguagauauaaaugugaaagauuauagcauuguuuccaguuaugugugcucaggacuuguuggagacacacccagaaaaaacgacagcuccagcaguagcuauugccggaauccuaacaaugagaaagggagucauggagugaaaggcugggccuuugaugauggaaaugacguguggaugggaagaacgaucagcgaggaguuacgcucagguuaugaaaccuucaaagucauuggaggcugguccaaaccuaacuccaaauugcagauaaauaggcaagucauaguugacagagguaauagguccgguuauucugguauuuucucuguugaaggcaaaagcugcaucaaucggugcuuuuauguggaguugauaaggggaaggaaacaggaaacugaagucugguggaccucaaacaguauuguuguguuuuguggcaccucagguacauauggaacaggcucauggccugauggggcggacaucaaucucaugccuauauaa

SEQ ID NO: 47271 - RNA, 1410 nt, Artificial Sequence; identical to SEQ ID NO: 46924
  derived and/or modified CDS sequence (wt) from neuraminidase__InfluenzaA__ABG88292

SEQ ID NO: 47272 - RNA, 1413 nt, Artificial Sequence
  derived and/or modified CDS sequence (wt) from neuraminidase__InfluenzaA__ABG88314
augaauccaaaucaaaaaauaauaaccauuggaucaaucaguauugcaauuggaauaauuagucugauauugcaaauaggaaauauuauuucaauaugggcuagccacucaauccaaacuggaagucaaaaccacacuggaauaugcaaccaaagaaucauuacauaugaaaauagcaccuggguaaaucaaacauauguuaauauuaacaacacuaauguuguugcaggaaaggacaaaaccucaaugacauuggccggcaauucaucucuuugcccuauccguggaugggcuauauacacaaaagacaacagcauaagaauugguuccaaaggagauguuuuugucauaagagagccuuuuauaucauguucucacuuggaaugcagaaccuuuuuucugacccaaggugcucuauuaaaugacaagcauucaaaugggaccguuaaggacagaagcccuuauagggccuuaaugagcuguccucuaggugaagcuccgucuccauacaauucaagauuugaaucaguugcuuggucagcaagcgcaugccaugauggcuugggcuggcuaacaaucggaauuucugguccagauaauggggcaguggcuguacuaaaauacaacggcauaauaacugaaaccauuaaaaguuggaagaagcgaauauuaagaacacaagagucugaaugugucugcaugaacgguucauguuuuaccauaaugaccgauggcccgaguaauggggccgcaucguacagaaucuucaaaaucgagaaggggagaguuacuaaaucaauagaguuggaugcacccaauuaucauuacgaggaauguucauguuacccaaacacuggcacagugaugugugugugcagggacaauuggcacgguucaaaucgaccuugggugucuuuuaaucaaaaccuggauuaucaaauaggauacaucugcagugggguguucggugacaauccgcgucccaaagauggagaaggcagcuguaauccagugacuguugauggagcagacggaguaaagggguuuucauacagauaugguaaugguguuuggauaggaaggacuaaaaguaacagacucagaaagggauuugagaugauuugggauccuaauggauggacagauaccgacagugauuucucaaugaaacaggauaucguggcaaugacugauuggucaggguacagcggaaguuuuguucaacauccugagcuaacaggauuggacuguaugagaccuugcuucuggguugaauuagucagagggcuaccuagagaaaauacaacaaucuggacuagugggagcagcauuucuuuuuguggcguaaauagcgauacugcaaacuggucuuggccagacggugccgaguugccauucaccauugacaaguag

SEQ ID NO: 47273 - RNA, 1413 nt, Artificial Sequence
  derived and/or modified CDS sequence (wt) from neuraminidase__InfluenzaA__ABG88325
augaauccaaaucaaaaaauaauaaccauuggaucaaccaguauugcaauuggaauaauuagucugauauugcaaauaggaaauauuauuucaauaugggcuagccacucaauccaaacuggaagucaaaaccacacuggaauaugcaaccaaagaaucauuacauaugaaaauagcaccuggguaaaucaaacauauguuaauauuaacaacacuaguguuguugcuggaaaggacaaaaccucaaugacauuggccggcaauucaucucuuugcccuauccguggaugggcuauauacacaaaagacaacagcauaagaauugguuccaaaggagauguuuuugucauaagagagccuuuuauaucauguucucacuuggaaugcagaaccuuuuuucugacccaaggugcucuauuaaaugacaagcauucaaaugggaccguuaaggacagaagcccuuauagggccuuaaugagcuguccucuaggugaagcuccgucuccauacaauucaagauuugaaucaguugcuuggucagcaagcgcaugccaugauggcuugggcuggcuaacaaucggaauuucugguccagauaauggggcaguggcuguacuaaaauacaacggcauaauaacugaaaccauuaaaaguuggaagaagcgaauauuaagaacacaagagucugaaugugucuguaugaacgguucauguuuuaccauaaugaccgauggcccgaguaauggggccgcaucguacagaaucuucaaaaucgagaaggggagaguuacuaaaucaauagaguuggaugcacccaauuaucauuacgaggaauguucauguuacccagacaccggcacagugaugugugugugcagggacaauuggcacgguucaaaucgaccuugggugucuuuuaaucaaaaccuggauuaucaaacaggauacaucugcagugggguguucggugacaauccgcgucccaaagauggagaaggcagcuguaauccagugacugcugauggagcagacggaguaaagggguuuucauacagauaugguaaugguguuuggauaggaaggacuaaaaguaacagacucagaaagggauuugagaugauuugggauccuaauggauggacagauaccgacagugauuucucaaugaaacaggauaucguggcaaugacugauuggucaggguacagcggaaguuuuguucaacauccugagcuaacaggauuggacuguaugagaccuugcuucuggguugaauuagucagagggcuaccuagagaaaauacaacaaucuggacuagugggagcagcauuucuuuuuguggcguaaauagcgauacugcaaacuggucuuggccagacggugccgaguugccauucaccauugacaaguag

SEQ ID NO: 47274 - RNA, 1413 nt, Artificial Sequence
  derived and/or modified CDS sequence (wt) from neuraminidase__InfluenzaA__ABG88336
augaauccaaaucagaaaauaauaaccauuggaucaaucuguauggcaaucgggauaauuagucuaauauugcagauaggaaauauuauuucaauauggguuagccacucaauccaaacuggaaaucaaaaccacacuggaauaugcaaccaaagaaucaucaccuaugaaaauagcaccuggguaaaucaaacauauguuaauauuaacaacacuaacguuguugcuggaaaggacacaacuucagugacacuagccggcaauucaucucuuuguccuguccgugggugggcuauauacagcaaagacaacagcauaagaauugguuccaaaggagauguuuuugucauaagagaaccuuuuauaucauguucucacuuggaaugcagaaccuuuuuucuaacccaaggugcucuauuaaaugacaagcauucaaaugggaccguuaaggacagaagcccuuauagggccuuaaugagcuguccuauaggugaagcuccgucuccauacaauucaagguuugaaucaguugcuuggucagcaagcgcaugucaugauggcaugggcuggcuaacaaucggaauuucuggaccagaugauggagcaguggcuguacuaaaauacaauggcauaauaacugaaaccauaaaaaguuggaggaagcgaauauuaagaacacaagagucugaaugugucuguguaaacgguucauguuuuaccauaaugaccgauggcccaaguaaugggccggccucguacaagaucuucaaaaucgagaaggggaaaauuacuaaaucaauagaguuggaugcacccaauucucacuacgaggaauguuccuguuacccagacaccggcacagugaugugugugugcagagacaauuggcaugguucgaaucgaccuugggugucuuuuaaucaaaaccuggauuaucaauuaggauacaucugcagugggauuuucggugacaauccgcgucccaaagauggaaaaggcagcugugguccaguaacuguugauggagcagacggaguaaagggauuuucauacagauaugguaaugguguuuggauaggaaggacuaaaaguaacagcuccagaaagggauuugagaugauuugggauccuaacggauggacagauaccgauaguaauuucuuagugaaacaggauguaguggcaaugacugauuggucaggguacagcggaaguuucguucaacauccugaacuaacaggauuggacuguaugaggccuugcuucuggguugaauuaaucagaggacgaccuagagaaacgacaacaaucuggacuagugggagcagcauuucuuuuuguggcgugaauagugauacuguaaauuggucuuggccagacggugccgaguugccauucaccauugacaaguag

SEQ ID NO: 47275 - RNA, 1413 nt, Artificial Sequence
  derived and/or modified CDS sequence (wt) from neuraminidase__InfluenzaA__ABG88347
augaauccaaaucagaaaauaauaaccauuggaucaaucuguauggcaaucgggauaauuggucuaauauugcagauaggaaauauuauuucaauauggguuagccacucaauccaaacuggaagucaaaaccacacuggaauaugcaaccaaagaaucaucaccuaugaaaauagcaccuggguaaaucaaacauauguuaauauuaacaacacuaacguuguugcuggaaaggacacaacuucagugacacuagccggcaauucaucucuuuguccuguccgugggugggcuauauacagcaaagacaacagcauaagaauugguuccaaaggagauguuuuugucauaagagaaccuuuuauaucauguucucacuuggaaugcagaaccuuuuuucuaacccaaggugcucuauuaaaugacaagcauucaaaugggaccguuaaggacagaagcccuuauagggccuuaaugagcuguccuauaggugaagcuccgucuccauacaauucaagguuugaaucaguugcuuggucagcaagcgcaugucaugauggcaugggcuggcuaacaaucggaauuucuggaccagaugauggagcaguggcuguacuaaaauacaauggcauaauaacugaaaccauaaaaaguuggaggaagcgaauauuacgaacacaagagucugaaugugucuguguaaacgguucauguuuuaccauaaugaccgauggcccaaguaaugggccggccucguacaagaucuucaaaaucgagaaggggaaaauuacuaaaucaauagaguuggaugcacccaauucucacuacgaggaauguuccuguuacccagacaccggcacagugaugugugugugcagagacaauuggcaugguucgaaucgaccuugggugucuuuuaaucaaaaccuggauuaucaauuaggauacaucugcagugggauuuucggugacaauccgcgucccaaagauggaaaaggcagcugugguccaguaacuguugauggagcagacggaguaaagggguuuucauacagauaugguaaugguguuuggauaggaaggacuaaaaguaacagcuccagaaagggauuugagaugauuugggauccuaauggauggacagauaccgauaguaauuucuuagugaaacaggauguaguggcaaugacugauuggucaggguacagcggaaguuucguucaacauccugaacuaacaggauuggacuguaugaggccuugcuucuggguugaauuaaucagaggacgaccuagagaaacgacaacaaucuggacuagugggagcagcauuucuuuuuguggcgugaauagugauacuguaaauuggucuuggccagacggugccgaguugccauucaccauugacaaguag

SEQ ID NO: 47276 - RNA, 1410 nt, Artificial Sequence
  derived and/or modified CDS sequence (wt) from neuraminidase__InfluenzaA__ABG88358
augaauccaaaucaaaagauaauaacaauuggcucuguuucucucacuauugccacaauaugcuuccuuaugcaaauugccauccugguaacuacuguaacauugcauuucaagcaauaugagugcaacucccccccaaacaaccaaguaaugcugugugaaccaacaauaauagaaagaaacauaacagagauaguguaucugaccaacaccaccauagagaaagaaauaugccccaaacuggcagaauacagaaauuggucaaagccgcaauguaaaauuacaggauuugcaccuuuuucuaaggacaauucaauucggcuuuccgcugguggagacauuugggugacaagagaaccuuaugugucaugcgauccuggcaaguguuaucaauuugcccuuggacagggaacaacacuaaacaacaggcauucaaaugacacaguacaugauaggaccccuuaucgaacccuauugaugaaugaguuggguguuccauuucauuugggaaccaagcaagugugcauagcgugguccagcucaaguugucacgauggaaaagcauggcugcauguuuguguaacugggcaugauaaaaaugcaacugcuagcuucauuuacgaugggaggcuuguagauaguauugguucaugguccaaaaauauccucaggacccaggagucggaaugcguuuguaucaauggaacuuguacaguaguaaugacugauggaagugcuucagacagagcugauacuaaaauacuauucauugaagaggggaaaaucguucauauuagaccauugucaggaagugcucagcaugucgaggagugcuccuguuauccucgauauccuggugucagaugugucugcagagacaacuggaaaggcuccaauaggcccaucguagauauaaaugugaaagauuauagcauuguuuccaguuauguaugcucaggacuuguuggagacacacccagaaaaaacgacagcuccagcaguagcuauugcuggaauccuaacaaugagaaagggggucauggagugaaaggcugggccuuugaugauggaaaugacguguggaugggaagaacgaucagcgaggagucacgcucagguuaugaaaccuucaaagucauuggaggcugguccaaaccuaacuccaaauugcagauaaauaggcaagucauaguugacagagguaauagguccgguuauucugguauuuucucuguugaaggcaaaagcugcaucaaucggugcuuuuauguggaguugauaaggggaaggaaacaggaaacugaagucugguggaccucaaacaguauuguuguguuuuguggcaccucagguacauauggaacaggcucauggccugauggggcggacaucaaucucaugccuauauaa

SEQ ID NO: 47277 - RNA, 1410 nt, Artificial Sequence; identical to SEQ ID NO: 47125
  derived and/or modified CDS sequence (wt) from neuraminidase__InfluenzaA__ABG88369

SEQ ID NO: 47278 - RNA, 1410 nt, Artificial Sequence; identical to SEQ ID NO: 47125
  derived and/or modified CDS sequence (wt) from neuraminidase__InfluenzaA__ABG88380

SEQ ID NO: 47279 - RNA, 1410 nt, Artificial Sequence; identical to SEQ ID NO: 47125
  derived and/or modified CDS sequence (wt) from neuraminidase__InfluenzaA__ABG88391

SEQ ID NO: 47280 - RNA, 1410 nt, Artificial Sequence; identical to SEQ ID NO: 47127
  derived and/or modified CDS sequence (wt) from neuraminidase__InfluenzaA__ABG88402

SEQ ID NO: 47281 - RNA, 1410 nt, Artificial Sequence
  derived and/or modified CDS sequence (wt) from neuraminidase__InfluenzaA__ABG88413
augaauccaaaucaaaagauaauaacaauuggcucuguuucucucacuauugccacaauaugcuuucuuaugcaaauugccauccugguaacuacuguaacauugcauuucaagcaauaugagugcaacucccccccaagcaaccaaguaaugcugugugaaccaacaauaauagaaagaaacauaacagagauaguguauuugacuaacaccaccauagagaaagaaauaugccccaaacuggcagaauacagaaauuggucaaagccgcaauguaaaauuacaggauuugcaccuuuuucuaaggacaauucaauucggcuuuccgcugguggagacauuugggugacaagagaaccuuaugugucaugcgauccuggcaaguguuaucaauuugcacuuggacagggaacaacacuaaacaacaggcauucaaaugacacaguacaugauaggaccccuuaucgaacccuauugaugaaugaguuggguguuccauuucauuugggaaccaagcaagugugcauagcaugguccagcucaaguugucacgauggaaaagcauggcugcauguuuguguaacugggcaugaugaaaaugcaacugcuagcuucauuuacgaugggaggcuuguagauaguauugguucaugguccaaaaauauccucaggacccaggagucggaaugcguuuguaucaauggaacuuguacaguaguaaugacugauggaagugcuucagaaagagcugauacuaaaauacuauucauugaagaggggaaaaucguucauauuagcccauugucaggaagugcucagcaugucgaggagugcuccuguuauccucgauauccuggugucagaugugucugcagagacaacuggaaaggcuccaauaggcccaucguagauauaaaugugaaagauuauagcauuguuuccaguuauguguguucaggacuuguuggagacacacccagaaaaaacgacagcuccagcaguagcuauugccggaaaccuaacaaugagaaagggagucauggagugaaagguugggccuuugaugauggaaaugacguguggaugggaagaacgaucagcgaggaguuacgcucugguuaugaaaccuucaaaguuauuggaggcugguccaaaccuaacuccaaauugcagauaaauaggcaagucauaguugacagagguaauagguccgguuauucugguauuuucucuguugaaggcaaaagcugcaucaaucggugcuuuuauguggaguugauaaggggaaggaaacaggaaacugaagucugguggaccucaaacaguauuguuguguuuuguggcaccucagguacauauggaacaggcucauggccugauggggcggacaucaaucucaugccuauauaa

SEQ ID NO: 47282 - RNA, 1410 nt, Artificial Sequence
  derived and/or modified CDS sequence (wt) from neuraminidase__InfluenzaA__ABG88424
augaauccaaaucaaaagauaauaacaauuggcucuguuucucucacuauugccacaauaugcuuccuuaugcaaauugccauccugguaacuacuguaacauugcauuucaagcaauaugagugcaacucccccccaagcaaccaaguaaugcugugugaaccaacaauaauagaaagaaacauaacagagauaguguauuugacuaacaccaccauagagaaagaaauaugccccaaacuggcagaauacagaaauuggucaaagccgcaauguaaaauuacaggauuugcaccuuuuucuaaggacaauucaauucggcuuuccgcugguggagacauuugggugacaagagaaccuuaugugucaugcgauccuggcaaguguuaucaauuugcacuuggacagggaacaacacuaaacaacaggcauucaaaugacacaguacaugauaggaccccuuaucggacccuauugaugaaugaguuggguguuccauuucauuugggaaccaagcaagugugcauagcaugguccagcucaaguugucacgauggaaaagcauggcugcauguuuguguaacugggcaugaugaaaaugcaacugcuagcuucauuuacgaugggaggcuuguagauaguauugguucaugguccaaaaauauccucaggacccaggagucggaaugcguuuguaucaauggaacuuguacaguaguaaugacugauggaagugcuucagaaagagcugauacuaaaauacuauucauugaagaggggaaaaucguucauauuagcccauugucaggaagugcucagcaugucgaggagugcuccuguuauccucgauauccuggugucagaugugucugcagagacaacuggaaaggcuccaauaggcccaucguagauauaaaugugaaagauuauagcauuguuuccaguuaugugugcucaggacuuguuggagacacacccagaaaaaacgacagcuccagcaguagcuauugccggaauccuaacaaugagaaagggagucauggagugaaagguugggccuuugaugauggaaaugacguguggaugggaagaacgaucagcgaggaguuacgcucugguuaugaaaccuucaaaguuauuggaggcugguccaaaccuaacuccaaauugcagauaaauaggcaagucauaguugacagagguaauagguccgguuauucugguauuuucucuguugaaggcaaaagcugcaucaaucggugcuuuuauguggaguugauaaggggaaggaaacaggaaacugaagucugguggaccucaaacaguauuguuguguuuuguggcaccucagguacauauggaacaggcucauggccugauggggcggacaucaaucucaugccuauauaa

SEQ ID NO: 47283 - RNA, 1410 nt, Artificial Sequence
  derived and/or modified CDS sequence (wt) from neuraminidase__InfluenzaA__ABG88435
augaauccaaaucaaaagauaauaacaauuggcucuguuucucucacuauugccacaauaugcuuccuuaugcaaauugccauccugguaacuacuguaacauugcauuucaagcaauaugagugcaacucccccccaagcaaccaaguaaugcugugugaaccaacaauaauagaaagaaacauaacagagauaguguaccugacuaacaccaccauagagaaagaaauaugccccaaacuggcagaauacagaaauuggucaaagccgcaauguaaaauuacaggauuugcaccuuuuucuaaggacaauucaauucggcuuuccgcugguggagacauuugggugacaagagaaccuuaugugucaugcgauccuggcaaguguuaucaauuugcacuuggacagggaacaacacuaaacaacaggcauucaaaugacacaguacaugauaggaccccuuaucgaacccuauugaugaaugaguuggguguuccauuucauuugggaaccaagcaagugugcauagcaugguccagcucaaguugucacgauggaaaagcauggcugcauguuuguguaacugggcaugaugaaaaugcaacugcuagcuucauuuacgaugggaggcuuguagauaguauugguucaugguccaaaaauauccucaggacccaggagucggaaugcguuuguaucaauggaacuuguacaguaguaaugacugauggaagugcuucagaaagagcugauacuaaaauacuauucauugaagaggggaaaaucguucauauuagcccauugucaggaagugcucagcaugucgaggagugcuccuguuauccucgauauccuggugucagaugugucugcagagacaacuggaaaggcuccaauaggcccaucguagauauaaaugugaaagauuauagcauuguuuccaguuaugugugcucaggacuuguuggagacacacccagaaaaaacgacagcuccagcaguagcuauugccggaauccuaacaaugagaaagggagucauggagugaaagguugggccuuugaugauggaaaugacguguggaugggaagaacgaucagcgaggaguuacgcucugguuaugaaaccuucaaaguuauuggaggcugguccaaaccuaacuccaaauugcagauaaauaggcaagucauaguugacagagguaauagguccgguuauucugguauuuucucuguugaaggcaaaagcugcaucaaucggugcuuuuauguggaguugauaaggggaaggaaacaggaaacugaagucugguggaccucaaacaguauuguuguguuuuguggcaccucagguacauauggaacaggcucauggccugauggggcggacaucaaucucaugccuauauaa

SEQ ID NO: 47284 - RNA, 1410 nt, Artificial Sequence
  derived and/or modified CDS sequence (wt) from neuraminidase__InfluenzaA__ABG88446
augaauccaaaucaaaagauaauaacaauuggcucuguuucucucacuauugccacaauaugcuuucuuaugcaaauugccauccugguaacuacuguaacauugcauuucaagcaauaugagugcaacucccccccaagcaaccaaguaaugcugugugaaccaacaauaauagaaagaaacauaacagagauaguguauuugacuaacaccaccauagagaaagaaauaugccccaaacuggcagaauacagaaauuggucaaagccgcaauguaaaauuacaggauuugcaccuuuuucuaaggacaauucaauucggcuuuccgcugguggagacauuugggugacaagagaaccuuaugugucaugcgauccuggcaaguguuaucaauuugcacuuggacagggaacaacacuaaacaacaggcauucaaaugacacaguacaugauaggaccccuuaucgaacccuauugaugaaugaguuggguguuccauuucauuugggaaccaagcaagugugcauagcaugguccagcucaaguugucacgauggaaaagcauggcugcauguuuguguaacugggcaugaugaaaaugcaacugcuagcuucauuuacgaugggaggcuuguagauaguauugguucaugguccaaaaauauccucaggacccaggagucggaaugcguuuguaucaauggaacuuguacaguaguaaugacugauggaagugcuucagaaagagcugauacuaaaauacuauucauugaagaggggaaaaucguucauauuagcccauugucaggaagugcucagcaugucgaggagugcuccuguuauccucgauauccuggugucagaugugucugcagagacaacuggaaaggcuccaauaggcccaucguagauauaaaugugaaagauuauagcauuguuuccaguuaugugugcucaggacuuguuggagacacacccagaaaaaacgacagcuccagcaguagcuauugccggaauccuaacaaugagaaagggagucauggagugaaagguugggccuuugaugauggaaaugacguguggaugggaagaacgaucagcgaggaguuacgcucugguuaugaaaccuucaaaguuauuggaggcugguccaaaccuaacuccaaauugcagauaaauaggcaagucauaguugacagagguaauagguccgguuauucugguauuuucucuguugaaggcaaaagcugcaucaaucggugcuuuuauguggaguugauaaggggaaggaaacaggaaacugaagucugguggaccucaaacaguauuguuguguuuuguggcaccucagguacauauggaacaggcucauggccugauggggcggacaucaaucucaugccuauauaa

SEQ ID NO: 47285 - RNA, 1410 nt, Artificial Sequence
  derived and/or modified CDS sequence (wt) from neuraminidase__InfluenzaA__ABG88457
augaauccaaaucaaaagauaauaacaauuggcucuguuucucucacuacugccacaauaugcuuccuuaugcaaauugccauccugguaacuacuguaacauugcauuucaagcaauaugagugcaacucccccccaaacaaccaaguaaugcugugugaaccaacaauaauagaaagaaacauaacagagauaguguaucugaccaacaccaccauagagaaagaaauaugccccaaacuagcagaauacagaaauuggucaaagccgcaauguaaaauuacaggauuugcaccuuuuucuaaggacaauucaauucggcuuuccgcugguggagacauuugggugacaagagaaccuuaugugucaugcgauccuggcaaguguuaucaauuugcccuuggacagggaacaacacuaaacaacaggcacucaaaugacacaguacaugauaggaccccuuaucgaacccuauugaugaaugaguuggguguuccauuucauuugggaaccaagcaagugugcauagcaugguccagcucaaguugucacgauggaaaagcauggcugcauguuuguguaacugggcaugaugaaaaugcaacugcuagcuucauuuacgaugggaggcuuguagauaguauugguucaugguccaaaaauauccucaggacccaggagucggaaugcguuuguaucaauggaacuuguacaguaguaaugacugauggaagugcuucagaaagagcugauacuaaaauacuauucauuaaagaggggaaaaucguucauauuagcccauugucaggaagugcucagcaugucgaggagugcuccuguuauccucgguauccuggugucagaugugucugcagagacaacuggaaaggcuccaauaggcccaucguagauauaaaugugaaagauuauagcauuguuuccaguuauguaugcucaggacuuguuggagacacacccagaaaaaacgacagcuccagcaguagcuauugccagaauccuaacaaugagaaagggagucauggagugaaaggcugggccuuugaugauggaaaugacguguggaugggaagaacgaucagcgaggaguuacgcucagguuaugaaaccuucaaagucauuggaggcugguccaaaccuaacuccaaauugcagauaaauaggcaagucauaguugacagagguaauagguccgguuauucugguauuuucucuguugaaggcaagagcugcaucaaucggugcuuuuauguggaguugauuaggggaaggaaacaggaaacugaagucugguggaccucaaacaguauuguuguguuuuguggcaccucagguacauauggaacaggcucauggccugauggggcggacaucaaucucaugccuauauaa

SEQ ID NO: 47286 - RNA, 1410 nt, Artificial Sequence
  derived and/or modified CDS sequence (wt) from neuraminidase__InfluenzaA__ABG88468
augaauccaaaucaaaagauaauaacaauuggcucuguuucucucacuauugccacaauaugcuuccuuaugcaaauugccauccugguaacuacuguaacauugcauuucaagcaauaugagugcaacucccccccaagcaaccaaguaaugcugugugaaccaacaauaauagaaagaaacauaacagagauaguguauuugacuaacaccaccauagagaaagaaauaugccccaaacuggcagaauacagaaauuggucaaagccgcaauguaaaauuacaggauuugcaccuuuuucuaaggacaauucaauucggcuuuccgcugguggagacauuugggugacaagagaaccuuaugugucaugcgauccuggcaaguguuaucaauuugcacuuggacagggaacaacacuaaacaacaggcauucaaaugacacaguacaugauaggaccccuuaucgaacccuauugaugaaugaguuggguguuccauuucauuugggaaccaagcaaguaugcauagcaugguccagcucaaguugucacgauggaaaagcauggcugcauguuuguguaacugggcaugaugaaaaugcaacugcuagcuucauuuacgaugggaggcuuguagauaguauugguucaugguccaaaaauauucucaggacccaggagucggaaugcguuuguaucaauggaacuuguacaguaguaaugacugauggaagugcuucagaaagagcugauacuaaaauacuauucauugaagaggggaaaaucguucauauuagcccauugucaggaagugcucagcaugucgaggagugcuccuguuauccucgauauccuggugucagaugugucugcagagacaacuggaaaggcuccaauaggcccaucguagauauaaaugugaaagauuauagcauuguuuccaguuaugugugcucaggacuuguuggagacacacccagaaaaaacgacagcuccagcaguagcuauugccggaacccuaacaaugagaaagggagucauggagugaaagguugggccuuugaugauggaaaugacguguggaugggaagaacgaucagcgaggaguuacgcucugguuaugaaaccuucaaaguuauuggaggcugguccaaaccuaacuccaaauugcagauaaauaggcaagucauaguugacagagguaauagguccgguuauucugguauuuucucuguugaaggcaaaagcugcaucaaucggugcuuuuauguggaguugauaaggggaaggaaacaggaaacugaagucugguggaccucaaacaguauuguuguguuuuguggcaccucagguaccuauggaacaggcucauggccugauggggcggacaucaaucucaugccuauauaa

SEQ ID NO: 47287 - RNA, 1410 nt, Artificial Sequence
  derived and/or modified CDS sequence (wt) from neuraminidase__InfluenzaA__ABG88479
augaauccaaaucaaaagauaauaacaauuggcucuguuucucucacuauugccacaauaugcuuucuuaugcaaauugccauccugguaacuacuguaacauugcauuucaagcaauaugagugcaacucccccccaagcaaccaaguaaugcugugugaaccaacaauaauagaaagaaacauaacagagauaguguauuugacuaacaccaccauagagaaagaaauaugccccaaacuggcagaauacagaaauuggucaaagccgcaauguaaaauuacaggauuugcaccuuuuucuaaggacaauucaauucggcuuuccgcugguggagacauuugggugacaagagaaccuuaugugucaugcgauccuggcaaguguuaucaauuugcacuuggacagggaacaacacuaaacaacaggcauucaaaugacacaguacaugauaggaccccuuaucgaacccuauugaugaaugaguuggguguuccauuucauuugggaaccaagcaagugugcauagcaugguccagcucaaguugucacgaugggaaagcauggcugcauguuuguguaacugggcaugaugaaaaugcaacugcuagcuucauuuacgaugggaggcuuguagauaguauugguucaugguccaaaaauauccucaggacccaggagucggaaugcguuuguaucaauggaacuuguacaguaguaaugacugauggaagugcuucagaaagagcugauacuaaaauacuauucauugaagaggggaaaaucguucauauuagcccauugucaggaagugcucagcaugucgaggagugcuccuguuauccucgauauccuggugucagaugugucugcagagacaacuggaaaggcuccaauaggcccaucguagauauaaaugugaaagauuauagcauuguuuccaguuaugugugcucaggacuuguuggagacacacccagaaaaaacgacagcuccagcaguagcuauugccggaauccuaacaaugagaaagggagucauggagugaaagguugggccuuugaugauggaaaugacguguggaugggaagaacgaucagcgaggaguuacgcucugguuaugaaaccuucaaaguuauuggaggcugguccaaaccuaacuccaaauugcagauaaauaggcaagucauaguugacagagguaauagguccgguuauucugguauuuucucuguugaaggcaaaagcugcaucaaucggugcuuuuauguggaguugauaaggggaaggaaacaggaaacugaagucugguggaccucaaacaguauuguuguguuuuguggcaccucagguacauauggaacaggcucauggccugauggggcggacaucaaucucaugccuauauaa

SEQ ID NO: 47288 - RNA, 1410 nt, Artificial Sequence
  derived and/or modified CDS sequence (wt) from neuraminidase__InfluenzaA__ABG88490
augaauccaaaucaaaagauaauaacaauuggcucuguuucucucacuauugccacaauaugcuuccuuaugcaaauugccauccugguaacuacuguaacauugcauuucaagcaauaugagugcaacucccccccaagcaaccaaguaaugcugugugaaccaacaauaauagaaagaaacauaacagagauaguguauuugacuaacaccaccauagagaaagaaauaugccccaaacuggcagaauacagaaauuggucaaagccgcaauguaaaauuacaggauuugcaccuuuuucuaaggacaauucaauucggcuuuccgcugguggagacauuugggugacaagagaaccuuaugugucaugcgauccuggcaaguguuaucaauuugcacuuggacagggaacaacacuaaacaacaggcauucaaaugacacaguacaugauaggaccccuuaucgaacccuauugaugaaugaguuggguguuccauuucauuugggaaccaagcaagugugcauagcaugguccagcucaaguugucacgauggaaaagcauggcugcauguuuguguaacugggcaugaugaaaaugcaacugcuagcuucauuuacgaugggaggcuuguagauaguauugguucaugguccaaaaauauccucaggacccaggagucggaaugcguuuguaucaauggaacuuguacaguaguaaugacugauggaagugcuucagaaagagcugauacuaaaauacuauucauugaagaggggaaaaucguucauauuagcccauugucaggaagugcucagcaugucgaggagugcuccuguuauccucgauauccuggugucagaugugucugcagagacaacuggaaaggcuccaauaggcccauaguagauauaaaugugaaagauuauagcauuguuuccaguuaugugugcucaggacuuguuggagacacacccagaaaaaacgacagcuccagcaguagcuauugccggaauccuaacaaugagaaagggagucauggagugaaagguugggccuuugaugauggaaaugacguguggaugggaagaacgaucagcgaggaguuacgcucugguuaugaaaccuucaaaguuauuggaggcugguccaaaccuaacuccaaauugcagauaaauaggcaagucauaguugacagagguaauagguccgguuauucugguauuuucucuguugaaggcaaaagcugcaucaaucggugcuuuuauguggaguugauaaggggaaggaaacaggaaacugaagucugguggaccucaaacaguauuguuguguuuuguggcaccucagguacauauggaacaggcucauggccugauggggcggacaucaaucucaugccuauauaa

SEQ ID NO: 47289 - RNA, 1410 nt, Artificial Sequence
  derived and/or modified CDS sequence (wt) from neuraminidase__InfluenzaA__ABG88501
augaauccaaaucaaaagauaauaacaauuggcucuguuucucucacuauugccacaauaugcuuccuuaugcaaauugccauccugguaacuacuguaacauugcauuucaagcaauaugagugcaacucccccccaagcaaccaaguaaugcugugugaaccaacaauaauagaaagaaacauaacagagauaguguauuugacuaacaccaccauagagaaagaaauaugccccaaacuggcagaauacagaaauuggucaaagccgcaauguaaaauuacaggauuugcacccuuuucuaaggacaauucaauucggcuuuccgcugguggagacauuugggugacaagagaaccuuaugugucaugcgauccuggcaaguguuaucaauuugcacuuggacagggaacaacacuaaacaacaggcauucaaaugacacaguacaugauaggaccccuuaucgaacccuauugaugaaugaguuggguguuccauuucauuugggaaccaagcaagugugcauagcaugguccagcucaaguugucacgauggaaaagcauggcugcauguuuguguaacugggcaugaugaaaaugcaacugcuagcuucauuuacgaugggaggcuuguagauaguauugguucaugguccaaaaauauccucaggacccaggagucggaaugcguuuguaucaauggaacuuguacaguaguaaugacugauggaagugcuucagaaagagcugauacuaaaauacuauucauugaagaggggaaaaucguucauauuagcccauugucaggaagugcucagcaugucgaggagugcuccuguuauccucgauauccuggugucagaugugucugcagagacaacuggaaaggcuccaauaggcccaucguagauauaaaugugaaagauuauagcauuguuuccaguuaugugugcucaggacuuguuggagacacacccagaaaaaacgacagcuccagcaguagcuauugccggaauccuaacaaugagaaagggagucauggagugaaagguugggccuuugaugauggaaaugacguguggaugggaagaacgaucagcgaggaguuacgcucugguuaugaaaccuucaaaguuauuggaggcugguccaaaccuaacuccaaauugcagauaaauaggcaagucauaguugacagagguaauagguccgguuauucugguauuuucucuguugaaggcaaaagcugcaucaaucggugcuuuuauguggaguugauaaggggaaggaaacaggaaacugaagucugguggaccucaaacaguauuguuguguuuuguggcaccucagguacauauggaacaggcucauggccugauggggcggacaucaaucucaugccuauauaa

SEQ ID NO: 47290 - RNA, 1410 nt, Artificial Sequence
  derived and/or modified CDS sequence (wt) from neuraminidase__InfluenzaA__ABG88512
augaauccaaaucaaaagauaauaacaauuggcucuguuucucucacuauugccacaauaugcuuucuuaugcaaauugccauccugguaacuacuguaacauugcauuucaagcaauaugaaugcaacucccccccaagcaaccaaguaaugcugugugaaccaacaauaauagaaagaaacauaacagagauaguguauuugacuaacaccaccauagagaaagaaauaugccccaaacuggcagaauacagaaauuggucaaagccgcaauguaaaauuacaggauuugcaccuuuuucuaaggacaauucaauucggcuuuccgcugguggagacauuugggugacaagagaaccuuaugugucaugcgauccuggcaaguguuaucaauuugcacuuggacagggaacaacacuaaacaacaggcauucaaaugacacaguacaugauaggaccccuuaucgaacccuauugaugaaugaguuggguguuccauuucauuugggaaccaagcaagugugcauagcaugguccagcucaaguugucacgauggaaaagcauggcugcauguuuguguaacugggcaugaugaaaaugcaacugcuagcuucauuuacgaugggaggcuuguagauaguauugguucaugguccaaaaauauccucaggacccaggagucggaaugcguuuguaucaauggaacuuguacaguaguaaugacugauggaagugcuucagaaagagcugauacuaaaauacuauucauugaagaggggaaaaucguucauauuagcccauugucaggaagugcucagcaugucgaggagugcuccuguuauccucgauauccuggugucagaugugucugcagagacaacuggaaaggcuccaauaggcccaucguagauauaaaugugaaagauuauagcauuguuuccaguuaugugugcucaggacuuguuggagacacacccagaaaaaacgacagcuccagcaguagcuauugccggaauccuaacaaugaaaaagggagucauggagugaaagguugggccuuugaugauggaaaugacguguggaugggaagaacgaucagcgaggaguuacgcucugguuaugaaaccuucaaaguuauuggaggcugguccaaaccuaacuccaaauugcagauaaauaggcaagucauaguugacagagguaauagguccgguuauucugguauuuucucuguugaaggcaaaagcugcaucaaucggugcuuuuauguggaguugauaaggggaaggaaacaggaaacugaagucugguggaccucaaacaguauuguuguguuuuguggcaccucagguacauauggaacaggcucauggccugauggggcggacaucaaucucaugccuauauaa

SEQ ID NO: 47291 - RNA, 1410 nt, Artificial Sequence; identical to SEQ ID NO: 47249
  derived and/or modified CDS sequence (wt) from neuraminidase__InfluenzaA__ABG88523

SEQ ID NO: 47292 - RNA, 1410 nt, Artificial Sequence
  derived and/or modified CDS sequence (wt) from neuraminidase__InfluenzaA__ABG88534
augaauccaaaucaaaagauaauaacaauuggcucuguuucucucacuauugccacaauaugcuuucuuaugcaaauugccauccugguaacuacuguaacauugcauuucaagcaauaugagugcaacucccccccaagcaaccaaguaaugcugugugaaccaacaauaauagaaagaaacauaacagagauaguguauuugacuaacaccaccauagagaaagaaauaugccccaaacuggcagaauacagaaauuggucaaagccgcaauguaaaauuacaggauuugcaccuuuuucuaaggacaauucaauucggcuuuccgcugguggagacauuugggugacaagagaaccuuaugugucaugcgauccuggcaaguguuaucaauuugcacuuggacagggaacaacacuaaacaacaggcauucaaaugacacaguacaugauaggaccccuuaucgaacccuauugaugaaugaguuggguguuccauuucauuugggaaccaagcaagugugcauagcaugguccagcucaaguugucacgauggaaaagcauggcugcauguuuguguaacugggcaugaugaaaaugcaacugcuagcuucauuuacgaugggaggcuuguagauaguauugguucaugguccaaaaauauccucaggacccaggagucggaaugcguuuguaucaauggaacuuguacaguaguaaugacugauggaagugcuucagaaagagcugauacuaaaauacuauucauugaagaggggaaaaucguucauauuagcccauugucaggaagugcucagcaugucgaggagugcuccuguuauccucgauauccuggugucagaugugucugcagagacaacuggaaaggcuccaauaggcccaucguagauauaaaugugaaagauuauagcauuguuuccaguuaugugugcucaggacuuguuggagacacacccagaaaaaacgacagcuccagcaguagcuauugccggaauccuaacaaugagaaagggagucauggagugaaagguugggccuuugaugauggaaaugacguguggaugggaagaacgaucagcgaggaguuacgcucugguuaugaaaccuucaaaguuauuggaggcugguccaaaccuaacuccaaauugcagauaaauaggcaagucauaguugacagagguaauagguccgguuauucugguauuuucucuguugaaaacaaaagcugcaucaaucggugcuuuuauguggaguugauaaggggaaggaaacaggaaacugaagucugguggaccucaaacaguauuguuguguuuuguggcaccucagguacauauggaacaggcucauggccugauggggcggacaucaaucucaugccuauauaa

SEQ ID NO: 47293 - RNA, 1410 nt, Artificial Sequence
  derived and/or modified CDS sequence (wt) from neuraminidase__InfluenzaA__ABG88567
augaauccaaaucaaaagauaauaacgauugguucuguuucucucaccauugccacaauaugcuuccuuaugcaaauugccguccugguaacuacuguaacauugcauuucaagcaauaugaaugcaacucccccccaaacaaccaagugaugcugugugaaccaacaauaauagaaagaaacauaacagagauaguguaucugaccaacaccaccauagagaaggaaauaugccccaaacuagcagaauacagaaauuggucaaagccgcaauguaacauuacaggauuugcaccuuuuucuaaggacaauucgauucggcuuuccgcugguggggacaucugggugacaagagaaccuuaugugucaugcgauccugacaaguguuaucaauuugcccuuggacagggaacaacacuaaacaacggacauucaaaugacacaguacaugauaggaccccuuaucggacccuauugaugaaugaguuggguguuccauuucauuugggaaccaagcaagugugcauagcaugguccagcucaaguugucacgauggaaaagcauggcugcauguuuguguaacgggggaugaugaaaaugcaacugcuagcuucauuuacaaugggaggcuuguagauaguauugguucaugguccaaaaaaauccucaggacccaggagucggaaugcguuuguaucaauggaacuuguacaguaguaaugacugaugggagugcuucaggaaaagcugauacuaaaauacuauucauugaggaggggaaaaucguucauacuagccuauugucaggaagugcucagcaugucgaggagugcuccuguuauccucgauacccuggugucagaugugucugcagagacaacuggaaaggcuccaauaggcccaucguagauauaaauguaaaggauuauagcauuguuuccaguuaugugugcucaggacuuguuggagacacacccagaaaaaacgacagcuccagcaguagccauugcuuggauccuaacaaugaggaagguggucauggagugaaaggcugggccuuugaugauggaaaugacguguggaugggaagaacgaucagcgagaaguuacgcucaggauaugaaaccuucaaagucauugaaggcugguccaaaccuaacuccaaauugcagauaaauaggcaagucauaguugacagagguaauagguccgguuauucugguauuuucucuguugaaggcaaaagcugcaucaaucggugcuuuuauguggaguugauaaggggaaggaaacaggaaacugaagucuuguggaccucaaacaguauuguuguguuuuguggcaccucagguacauauggaacaggcucauggccugauggggcggacaucaaucucaugccuauauaa

SEQ ID NO: 47294 - RNA, 1410 nt, Artificial Sequence
  derived and/or modified CDS sequence (wt) from neuraminidase__InfluenzaA__ABG88600
augaauccaaaucaaaagauaauaacgauuggcucuguuucucucaccauugccacaauaugcuuccuuaugcaaauugccauccugguaacuacuguaacauugcauuucaagcaauaugaaugcaacucccccccaaacaaccaagugaugcugugugaaccaacaauaauagaaagaaacauaacagagauaguguaucugaccaacaccaccauagagaaggaaauaugccccaaaccagcagaauacagaaauuggucaaagccgcaauguaacauuacuggauuugcaccuuuuucuaaggacaauucgauucggcuuuccgcugguggggacaucugggugacaagagaaccuuaugugucaugcgauccugacaaguguuaucaauuugcccuuggacagggaacaacacuaaacaacgggcauucaaaugacacaguacaugauaggaccccuuaccgaacccuauugaugaaugaguuggguguuccauuucauuugggaaccaagcaagugugcauagcaugguccagcucaaguugucacgauggaaaagcauggcugcauguuuguguaacgggugaugaugaaaaugcaacugcuagcuucauuuacaaugggaggcuuguagauaguauagguucaugguccaaaaaaauccucaggacccaggagucggaaugcguuuguaucaauggaacuuguacaguaguaaugacugauggaagugcuucaggaaaagcugauacuaaaauacuauucauugaggaggggaaaaucguucauacuagccuauugucagggagugcucagcaugucgaggagugcuccuguuauccucgauauccuggugucagaugugucugcagagacaacuggaaaggcuccaauaggcccaucguagauauaaauguaaaggauuauagcauuguuuccaguuaugugugcucaggacuuguuggagacacacccagaaaaaacgacagcuccagcaguagccauugcuuggauccuaacaaugaggaagguggucauggagugaaaggcugggccuuugaugauggaaaugacguguggaugggaagaacgaucagcgagaaguuacgcucaggauaugaaaccuucaaagucauugaaggcugguccaaaccuaacuccaaacugcagauaaauaggcaagucauaguugacagagguaauagguccgguuauucugguauuuucucuguugaaggcaaaagcugcaucaaucggugcuuuuauguggaguugauaaggggaaggaaacaggaaacugaagucuuguggaccucaaacaguauuguuguguuuuguggcaccucagguacauauggaacaggcucauggccugauggggcggacaucaaucucaugccuauauaa

SEQ ID NO: 47295 - RNA, 1410 nt, Artificial Sequence; identical to SEQ ID NO: 47140
  derived and/or modified CDS sequence (wt) from neuraminidase__InfluenzaA__ABG88611

SEQ ID NO: 47296 - RNA, 1410 nt, Artificial Sequence
  derived and/or modified CDS sequence (wt) from neuraminidase__InfluenzaA__ABG88622
augaauccaaaucaaaagauaauaacaauuggcucuguuucucucaccauugccacaauaugcuuccuuaugcaaauugccauccugguaacuacuguaacauugcauuucaagcaguaugaaugcaacucccccccaaacaaccaaguaaugcugugugaaccaacaauaauagaaagaaacauaacagagauaguguaucugaccaacaccaccauagagaaggaaauaugccccaaauuagcagaauacagaaauuggucaaagccgcaauguaacauuacaggauuugcaccuuuuucuaaggacaauucgauucggcuuuccgcugguggggacaucugggugacaagagaaccuuaugugucaugcgauccugacaaguguuaucaauuugcccuugggcagggaacaacacuaaacaacgggcauucaaaugacacaguacaugauaggaccccuuaccggacccuauugaugaaugaauuggguguuccauuucauuugggaaccaggcaagugugcauagcaugguccagcucaaguugucacgauggaaaagcauggcugcauguuuguguaacuggggaugaugaaaaugcaacugcuagcuucauuuacaaugggaggcuuguagauaguauugguucaugguccaaaaaaauacucagaacccaggagucggaaugcguuuguaucaauggaacuuguacaguaguaaugacugaugggagcgcuucaggaaaagcugauacuaaaauacuauucauugaggaggggaaaaucguucauauuagcacauugucaggaagugcucagcaugucgaggagugcuccuguuauccucgauauccuggugucagaugugucugcagagacaacuggaaaggcuccaauaggcccaucguagauauaaauguaaaggauuauagcauuguuuccaguuaugugugcucaggacuuguuggagacacacccagaaaaaacgacagcuucagcaguagccauugccuagauccuaacaaugaggaagguggucauggagugaaaggcugggccuuugaugauggaaaugacguguggaugggaagaacgaucagcgagaaguuacgcucagguuaugaaaccuucaaagucaucgaaggcugguccaaaccuaacuccaaauuacagacaaauaggcaagucauaguugaaagagguaacagguccgguuauucugguauuuucuccguugaagguaaaagcugcaucaaucggugcuuuuauguggaguugauaaggggaaggaaagaggaaacugaagucugguggaccucaaacaguauuguuguguuuuguggcaccucagguacauauggaacaggcucauggccugauggggcggauaucaaucucaugccuauauaa

SEQ ID NO: 47297 - RNA, 1410 nt, Artificial Sequence
  derived and/or modified CDS sequence (wt) from neuraminidase__InfluenzaA__ABG88633
augaauccaaaucaaaagauaauaacaauuggcucuguuucucucaccauugccacaauaugcuuccuuaugcaaauugccauccugguaacuacuguaacauugcauuucaagcaguaugaaugcaacucccccccaaacaaccaaguaaugcugugugaaccaacaauaauagaaagaaacauaacagagauaguguaucugaccaauaccaccauagagaaggaaauaugccccaaauuagcagaauacagaaauuggucaaagccgcaauguaacauuacaggauuugcaccuuuuucuaaggacaauucgauucggcuuuccgcugguggggacaucugggugacaagagaacccuaugugucaugcgauccugacaaguguuaucaauuugcccuugggcagggaacaacacuaaacaacgggcauucaaaugacacaguacaugauaggaccccuuaccggacccuauugaugaaugaauuggguguuccauuucauuugggaaccaggcaagugugcauagcaugguccagcucaaguugucacgauggaaaagcauggcugcauguuuguguaacuggggaugaugaaaaugcaacugcuagcuucauuuacaaugggaggcuuguagauaguauugguucaugguccaaaaaaauacucagaacccaggagucggaaugcguuuguaucaauggaacuuguacaguaguaaugacugaugggagcgcuucaggaaaagcugauacuaaaauacuauucauugaggaggggaaaaucguucauauuagcacauugucaggaagugcucagcaugucgaggagugcuccuguuauccucgauauccuggugucagaugugucugcagagacaacuggaaaggcuccaauaggcccaucguagauauaaauguaaaggauuauagcauuguuuccaguuaugugugcucaggacuuguuggagacacacccagaaaaaacgacagcuucagcaguagccauugccuagauccuaacaaugaggaagguggucauggagugaaaggcugggccuuugaugauggaaaugacguguggaugggaagaacgaucagcgagaaguuacgcucagguuaugaaaccuucaaagucaucgaaggcugguccaaaccuaacuccaaauuacagauaaauaggcaagucauaguugaaagagguaacagguccgguuauucugguauuuucuccguugaaggcaaaagcugcaucaaucggugcuuuuauguggaguugauaaggggaaggaaagaggaaacugaagucugguggaccucaaacaguauuguuguguuuuguggcaccucagguacauauggaacaggcucauggccugauggggcugauaucaaucucaugccuauauaa

SEQ ID NO: 47298 - RNA, 1410 nt, Artificial Sequence; identical to SEQ ID NO: 47217
  derived and/or modified CDS sequence (wt) from neuraminidase__InfluenzaA__ABG88655

SEQ ID NO: 47299 - RNA, 1410 nt, Artificial Sequence; identical to SEQ ID NO: 47217
  derived and/or modified CDS sequence (wt) from neuraminidase__InfluenzaA__ABG88666

SEQ ID NO: 47300 - RNA, 1410 nt, Artificial Sequence; identical to SEQ ID NO: 46603
  derived and/or modified CDS sequence (wt) from neuraminidase__InfluenzaA__ABG88677

SEQ ID NO: 47301 - RNA, 1410 nt, Artificial Sequence; identical to SEQ ID NO: 47217
  derived and/or modified CDS sequence (wt) from neuraminidase__InfluenzaA__ABG88688

SEQ ID NO: 47302 - RNA, 1410 nt, Artificial Sequence
  derived and/or modified CDS sequence (wt) from neuraminidase__InfluenzaA__ABG88699
augaauccaaaucaaaagauaauaacaauuggcucuguuucucucaccauugccacaauaugcuuccuuaugcaaauugccauccugguaacuacuguaacauugcauuucaagcagcaugaaugcaacucccccccaaacaaccaaguaaugcugugugaaccaacaauaauagaaagaaacauaacagagauaguguaucugaccaacaccaccauagagaaggaaauaugccccaaacuaguagaauacagaaauuggucaaagccgcaauguaacauuacaggauuugcaccuuuuucuaaggacaauucgauucggcuuuccgcugguggggacaucugggugacaagagaaccuuaugugucaugcgauccugacaaguguuaucaauuugcccuugggcagggaacaacacuaaacaacgggcauucaaaugacacaguacaugauaggacccccuaccggacccuauugaugaaugaauuggguguuccauuucauuugggaaccaggcaagugugcauagcaugguccagcucaaguugucacgauggaaaagcauggcugcauguuuguguaacuggggaugauaaaaaugcaacugcuagcuucauuuacaaugggaggcuuguagauaguauugguucaugguccaaaaaaauacucagaacccaggagucggaaugcguuuguaucaauggaacuuguacaguaguaaugacugaugggagcgcuucaggaaaagcugauacuaaaauacuauucauugaggaggggaaaaucguucauauuagcacauugucaggaagugcucagcaugucgaggagugcuccuguuauccucgauauccuggugucagaugugucugcagagacaacuggaaaggcuccaauaggcccauuguagauauaaauguaaaggauuauagcauuguuuccaguuaugugugcucaggacuuguuggagacacacccagaaaaaacgacagcuucagcaguagccauugccuagauccuaacaaugaggaagguggucauggagugaaaggcugggccuuugaugauggaaaugacguguggaugggaagaacgaucagcgagaaguuacgcucagguuaugaaaccuucaaagucaucgaaggcugguccaaaccuaacuccaaauuacagauaaauaggcaaguuauaguugaaagagguaacagguccgguuauucugguauuuucuccguugaaggcaaaagcugcaucaaucggugcuuuuauguggaguugauaaggggaaggaaagaggaaacugaagucugguggaccucaaacaguauuguuguguuuuguggcaccucagguacauauggaacaggcucauggccugauggggcggauaucaaucucaugccuauauaa

SEQ ID NO: 47303 - RNA, 1410 nt, Artificial Sequence; identical to SEQ ID NO: 46681
  derived and/or modified CDS sequence (wt) from neuraminidase__InfluenzaA__ABG88710

SEQ ID NO: 47304 - RNA, 1410 nt, Artificial Sequence; identical to SEQ ID NO: 47262
  derived and/or modified CDS sequence (wt) from neuraminidase__InfluenzaA__ABG88721

SEQ ID NO: 47305 - RNA, 1410 nt, Artificial Sequence
  derived and/or modified CDS sequence (wt) from neuraminidase__InfluenzaA__ABG88732
augaauccaaaucaaaagauaauaacaauuggcucuguuucucucacuauugccacaauaugcuuccuuaugcaaauugccauccugguaacuacuguaacauugcauuucaagcaauaugagugcaacucccccccaaacaaccaaguaaugcugugugaaccaacaauaauagaaagaaacauaacagagauaguguaucugaccaacaccaccauagagaaagaaauaugccccaaacuagcagaauacagaaauuggucaaagccgcaauguaaaauuacuggauuugcaccuuuuucuaaggacaauucaauucggcuuuccgcugguggagacauuugggugacaagagaaccuuaugugucaugcgauccuggcaaguguuaucaauuugcccuuggacagggaacaacacuaaacaacaggcacucaaaugacacaguacaugauaggaccccuuaucgaacccuauugaugaaugaguuggguguuccauuucauuugggaaccaagcaagugugcauagcaugguccagcucaaguugucacgauggaaaagcauggcugcauguuuguguaacugggcaugaugaaaaugcaacugcuagcuucauuuacgaugggaggcuuguagauaguauugguucaugguccaaaaauauccucaggacccaggagucggaaugcguuuguaucaauggaacuuguacaguaguaaugacugauggaagugcuucagaaagagcugauacuaaaauacuauucauugaagaggggaaaaucguucauauuagcccauugucaggaagugcucagcaugucgaggagugcuccuguuauccucgauauccuggugucagaugugucugcagagacaacuggaaaggcuccaauaggcccaucguagauauaaaugugaaagauuauagcauuguuuccaguuaugugugcucaggacuuguuggagacacacccagaaaaaacgacagcuccagcaguagcuauugccggaauccuaacaaugagaaagggagucauggagugaaaggcugggccuuugaugauggaaaugacguguggaugggaagaacgaucagcgaggaguuacgcucagguuaugaaaccuucaaagucauuggaggcugguccaaaccuaacuccaaauugcagauaaauaggcaagucauaguugaaagagguaauagguccgguuauucugguauuuucucuguugaaggcaaaagcugcaucaaucggugcuuuuauguggaguugauaaggggaaggaaacaggaaacugaagucugguggaccucaaacaguauuguuguguuuuguggcaccucagguacauauggaacaggcucauggccugauggggcggacaucaaucucaugccuauauaa

SEQ ID NO: 47306 - RNA, 1410 nt, Artificial Sequence; identical to SEQ ID NO: 47266
  derived and/or modified CDS sequence (wt) from neuraminidase__InfluenzaA__ABG88743

SEQ ID NO: 47307 - RNA, 1410 nt, Artificial Sequence; identical to SEQ ID NO: 47266
  derived and/or modified CDS sequence (wt) from neuraminidase__InfluenzaA__ABG88754

SEQ ID NO: 47308 - RNA, 1410 nt, Artificial Sequence
  derived and/or modified CDS sequence (wt) from neuraminidase__InfluenzaA__ABG88765
augaauccaaaucaaaagauaauaacaauuggcucuguuucucucacuauugccacaauaugcuuccuuaugcaaauugccauccugguaacuacuguaacauugcauuucaagcaauaugagugcaacucccccccaaacaaccaaguaaugcuuugugaaccaacaauaauagaaagaaacauaacagagauaguguaucugaccaacaccaccauagagaaagaaguaugccccaaacuagcagaauacagaaauuggucaaagccgcaauguaaaauuacaggauuugcaccuuuuucuaaggacaauucaauucggcuuuccgcugguggagacauuugggugacaagagaaccuuaugugucaugcgauccuggcaaguguuaucaauuugcccuuggacagggaacaacacuaaacaacaggcacucaaaugacacaguacaugauaggaccccuuaucgaacccuauugaugaaugaguuggguguuccauuucauuugggaaccaagcaagugugcauagcaugguccagcucaaguugucacgauggaaaagcaugguugcauguuuguguaacugggcaugaugaaaaugcaacugcuagcuucauuuacgaugggaggcuuguagauaguauugguucaugguccaaaaauauccucaggacccaggagucggaaugcguuuguaucaauggaacuuguacaguaguaaugacugauggaagugcuucagaaagagcugauacuaaaauacuauucauugaagaggggaaaaucguucauauuagcccauugucaggaagugcucagcaugucgaggagugcuccuguuauccucgauauccuggugucagaugugucugcagagacaacuggaaaggcuccaauaggcccaucguagauauaaaugugaaagauuauagcauuguuuccaguuaugugugcucaggacuuguuggagacacacccagaaaaaacgacagcuccagcaguagcuauugccggaauccuaacaaugagaaagggagucauggagugaaaggcugggccuuugaugauggaaaugacguguggaugggaagaacgaucagcgaggaguuacgcucagguuaugaaaccuucaaagucauuggaggcugguccaaaccuaacuccaaauugcagauaaauaggcaagucauaguugacagagguaauagguccgguuauucugguauuuucucuguugaaggcaaaagcugcaucaaucggugcuuuuauguggaguugauaaggggaaggaaacaggaaacugaagucugguggaccucaaacaguauuguuguguuuuguggcaccucagguacauauggaacaggcucauggccugauggggcggacaucaaucucaugccuauauaa

SEQ ID NO: 47309 - RNA, 1410 nt, Artificial Sequence
  derived and/or modified CDS sequence (wt) from neuraminidase__InfluenzaA__ABG88776
augaauccaaaucaaaagauaauaacaauuggcucuguuucucucacuauugccacaauaugcuuccuuaugcaaauugccauccugguaacuacuguaacauugcauuucaagcaauaugagugcaacucccccccaaacaaccaaguaaugcuaugugaaccaacaauaauagaaagaaacauaacagagauaguguaucugaccaacaccaccauagagaaagaaauaugccccaaacuagcagaauacagaaauuggucaaagccgcaauguaaaauuacaggauuugcaccuuuuucuaaggacaauucaauucggcuuuccgcugguggagacauuugggugacaagagaaccuuaugugucaugcgauccuggcaaguguuaucaauuugcccuuggacagggaacaacacuaaacaacaggcauucaaaugacacaguacaugauaggaccccuuaucgaacccuauugaugaaugaguuggguguuccauuucauuugggaaccaagcaagugugcauagcaugguccagcucaaguugucacgauggaaaagcauggcugcauguuuguguaacugggcaugaugaaaaugcaacugcuagcuucauuuacgaugggaggcuuguagauaguauugguucaugguccaaaaauauccucaggacccaggagucggaaugcguuuguaucaauggaacuuguacaguaguaaugacugauggaagugcuucagaaagagcugauacuaaaauacuauucauugaagaggggaaaaucguucauauuagcccauugucaggaagugcucagcaugucgaggagugcuccuguuauccucgauauccuggugucagaugugucugcagagacaacuggaaaggcuccaauaggcccaucguagauauaaaugugaaagauuauagcauuguuuccaguuaugugugcucaggacuuguuggagacacacccagaaaaaacgacagcuccagcaguagcuauugccggaauccuaacaaugagaaagggagucauggagugaaaggcugggccuuugaugauggaaaugacguguggaugggaagaacgaucagugaggaguuacgcucagguuaugaaaccuucaaagucauuggaggcugguccaaaccuaacuccaaauugcagauaaauaggcaagucauaguugacagagguaauagguccgguuauucugguauuuucucuguugaaggcaaaagcugcaucaaucggugcuuuuauguggaguugauaaggggaaggaaacaggaaacugaagucugguggaccucaaacaguauuguuguguuuuguggcaccucagguacauauggaacaggcucauggccugauggggcggacaucaaucucaugccuauauaa

SEQ ID NO: 47310 - RNA, 1410 nt, Artificial Sequence; identical to SEQ ID NO: 47200
  derived and/or modified CDS sequence (wt) from neuraminidase__InfluenzaA__ABG88787

SEQ ID NO: 47311 - RNA, 1410 nt, Artificial Sequence
  derived and/or modified CDS sequence (wt) from neuraminidase__InfluenzaA__ABG88820
augaauccaaaucaaaagauaauaacgauuggcucuguuucucucaccauuuccacaauaugcuucuucaugcaaauugccaucuugauaacuacuguaacauugcauuucaagcaauaugaauucaacucccccccaaacaaccaagugaugcugugugaaccaacaauaauagaaagaaacauaacagagauaguguaucugaccaacaccaccauagagaaggaaaaaugccccaaacuagcagaauacagaaauuggucaaagccgcaauguaacauuacaggauuugcaccuuuuuccaaggacaauucgauuaggcuuuccgcugguggggacaucugggugacaagagaaccuuaugugucaugcgauccugauaaguguuaucaauuugcccuuggacagggaacaacacuaaacaacgugcauucaaaugacacaguacgugauaggaccccuuaucggacccuauugaugaaugaguuagguguuccauuucaucuggggaccaagcaagugugcauagcaugguccagcucaaguugucacgauggaaaagcauggcugcauguuuguguaacgggggaugauaaaaaugcaacugcuagcuucauuuacaaugggaggcuuguagauaguauuguuucaugguccaaagaaauccucaggacccaggagucagaaugcguuuguaucaauggaacuuguacaguaguaaugacugaugggagugcuucaggaaaagcugauacuaaaauacuauucauugaggaggggaaaaucguucauacuagcacauugucaggaagugcucaacaugucgaggagugcuccugcuauccucgauauccuggugucagaugugucugcagagacaacuggaaaggcuccaauaggcccauaguagauauaaacauaaaggauuauagcauuguuuccaguuaugugugcucaggacuuguuggagacacacccagaaaaaacgacagcuccagcaguagccauugcuuggauccuaacaaugaagaagguggucauggagugaaaggcugggccuuugaugauggaaaugacguguggaugggaagaacgaucagcgagaaguuacgcuuaggauaugaaaccuucaaagucauugaaggcugguccaacccuaauuccaaauugcagacaaauaggcaagucauaguugacagagguaauagguccgguuauucugguauuuucucuguugaaggcaaaagcugcaucaaucggugcuuuuauguggaguugauaaggggaagaaaagaggaaacugaagucuuguggaccucaaacaguauuguuguguuuuguggcaccucagguacauauggaacaggcucauggccugauggggcggacaucaaucucaugccuauauaa

SEQ ID NO: 47312 - RNA, 1350 nt, Artificial Sequence
  derived and/or modified CDS sequence (wt) from neuraminidase__InfluenzaA__ABI16506
augaauccaaaucagaagauaauaaccauugggucaaucuguaugguaauuggaauaguuagcuuaauguuacaaauugggaacauggucucauuaugggucagucauucaauucagacagggaaucaacaccaaguugaaccaaucagcaauacuaauuuucuuacugagaaagcuguggcuucaguaacauuagcgggcaauucaucucuuugccccauuagaggaugggcuguacacaguaaggacaacaguauaaggauugguuccaaaggggauguguuuguuauuagagagccauucaucucaugcucccacuuggaaugcagaacuuucuuuuugacucagggagccuugcugaaugacaagcacuccaacgggacugucaaagacagaagcccucacagaacauuaaugaguuguccugugggugaggcucccuccccauauaacucaagguuugaaucuguugcuuggucagcaagugcuugccaugauggcaccaguugguugacaauuggaauuucuggcccagacaauggggcuguggcuguauugaaauacaauggaaugauaacagacaccaucaagaguuggaggaacaacauacugagaacucaagagucugaauguguauguguaaauggcucuugcuuuacuguaaugacugauggaccaaguaaugggcaggcaucauauaagaucuucaaaauggaaaaaggaaaagugguuaaaucagucgaauuggaugcuccuaauuaccacuaugaggaaugcuccuguuauccugaugccggcgaaaucacaugugugugcagggauaauuggcauggcucaaaucggccauggguaucuuucaaucaaaauuuggaguaucaaauaggauauauaugcagcggaguuuucggggacaauccacgccccaaugauggaacagguaguugugguccgguguccccuaauggggcauaugggguaaaaggguuuucauuuaaauacggcaaugguguuuggaucgggagaaccaaaagcccuaguuccaggagcggcuuugaaaugauuugggauccaaauggguggacugaaacggacaguagcuucucggugaaacaagauauaguagcaauaacugauuggucaggauauagcgggaguuuuguccagcauccagaacugacaggauuagauugcauaagaccuuguuucuggguugaguuaaucagagggcggcccaaagagagcacaauuuggacuagugggagcagcauauccuuuugugguguaaauagugacacugugaguuggucuuggccagacggugcugaguugccauucaccauugacaaguaa

SEQ ID NO: 47313 - RNA, 1413 nt, Artificial Sequence
  derived and/or modified CDS sequence (wt) from neuraminidase__InfluenzaA__ABI20840
augaauccaaaucaaaaaauaauaaccauuggaucaaucaguauggcaauaggaauaauuagucuaauauugcaaauagggaauauuauuucaauaugggcuagccacucaauccaaacuggaagucaaaacuacacuggaauaugcaaccaaagaaucauuacauaugaaaauagcaccuggguaaaucaaacauauguuaauauuaacaacacuaauguuguugcuggaaaggacaaaaccucaaugacauuggccggcaauucaucucuuugccccauccguggaugggcuauauacacaaaagacaacagcauaagaauugguuccaaaggagauguuuuugucauaagagagccuuuuauaucauguucucauuuggaaugcagaaccuuuuuucugacccaaggugcucuauuaaaugacaagcauucaaaugggaccguuaaggacagaagcccuuauagggccuuaaugagcuguccucuaggugaagcuccgucuccauacaauucaagauuugaaucaguugcuuggucagcaagcgcuugccaugauggcuugggcuggcuaacaaucggaauuucugguccagauaauggagcaguggcuguacuaaaauacaacggcauaauaacugaaaccauaaaaaguuggaagaagcaaaucuuaagaacacaagagucugaaugugucugugugaacgguucauguuuuaccauaaugaccgauggcccgaguaauggggcugcaucguacagaaucuucaaaaucgagaaggggagaguuacuaaaucaauagaguuggaugcacccaauuaucauuacgaggaauguuccuguuacccagacaccggcacagugaugugugugugcagggacaauuggcacgguucaaaucgaccuugggugucuuuuaaucaaaaccuggauuaucaaauaggauacaucugcagugggguguucggugacaauccgcgucccaaagauggagaaggcagcuguaauccagugacuguugauggagcagacggaguaaagggguuuucauacagauaugguaaugguguuuggauaggaaggacuaaaaguaacagacucagaaagggauuugagaugauuugggacccuaauggauggacagauaccgacagugauuucucaaugaaacaggaugucguggcaaugacugauuggucaggguacagcggaaguuuuguccaacauccugagcuaacaggauuggacuguaugagaccuugcuucuggguugaauuagucagagggcuaccuagagaaaauacaacaaucuggacuagugggagcagcauuucuuuuuguggcguaaauagcgagacugcaaacuggucuuggccagacggugcugaguugccauucaccauugacaaguag

SEQ ID NO: 47314 - RNA, 1413 nt, Artificial Sequence
  derived and/or modified CDS sequence (wt) from neuraminidase__InfluenzaA__ABI20862
augaauccaaaucagaaaauaauaaccauuggaucaaucuguaugacaaucggaauaauuagucuaauauugcaaauaggaaauauuauuucaauauggguuagccacucaauccaaacuggaagucaaaaccacacuggaauaugcaaccaaagaaucauuaccuaugaaaauagcaccuggguaaaucaaacauaugucaauauuaacaacacuaacguuguugcuggaaaggacacaacuucagugacauuagccggcaauucaucucuuuguccuauccgugggugggcuauauacagcaaagacaacagcauaagaauugguuccaaaggagauguuuuugucauaagagaaccuuuuauaucauguucucacuuggaaugcagaaccuuuuuucugacccaaggugcucuauuaaaugacaagcauucaaaugggaccguuaaggacagaagcccuuauagggccuuaaugagcuguccuauaggugaagcuccgucuccauacaauucaagguuugaaucaguugcuuggucagcaagcgcaugucaugauggcaugggcuggcuaacaaucggaauuucugguccagaugauggagcaguggcuguacuaaaauacaacggcauaauaacugaaaccauaaaaaguuggaggaagcgaauauuaagaacacaagagucugaaugugucuguguaaacgguucauguuuuaccauaaugaccgauggcccgaguaauggaccugccucguacagaaucuucaaaaucgagaaggggaagauuacuaaaucaauagaguuggaugcacccaauucucauuacgaggaauguuccuguuacccagacaccggcacagugaugugugugugcagagacaauuggcaugguucgaaucgaccuugggugucuuuuaaucaaaaccuggauuaucaaacaggauacaucugcagugggguguucggugacaauccgcgucccaaagauggaaaaggcagcugugauccaguaacuguugauggagcagacggaguaaagggguuuucauacagguaugguaaugguguuuggauaggaaggacuaaaaguaacagcuccagaaagggauuugagaugauuugggauccuaauggauggacagauaccgauaguaauuucuuagugaaacaggauguaguggcaaugacugauuggucaggguacagcggaaguuucguucaacauccugagcuaacaggauuggacuguaugaggccuugcuucuggguugaauuaaucagaggacgaccuagagaaaagacaacaaucuggacuagugggagcagcauuucuuuuuguggcgugaauagugauacugcaaauuggucuuggccagacggugccgaguugccauucaccauugacaaguag

SEQ ID NO: 47315 - RNA, 1413 nt, Artificial Sequence
  derived and/or modified CDS sequence (wt) from neuraminidase__InfluenzaA__ABI20873
augaauccaaaucaaaaaauaauaaccauuggaucgaucaguauggcaaucggaauaauuagucuaacauugcaaauaggaaauauuaucucaauaugggcuagccacucaauccaaacuggaagucaaaaccacacuggaauaugcaaccaaagaaucauuacauaugaaaauagcaccugggugaaucaaacauauguuaauauuaacaacacuaauguuguugcugaaaaggacaaaacuucagugacauuggccggcaauucaucucuuugcccuauccgugggugggcuauauacacaaaagacaacagcauaagaauugguuccaaaggagauguuuuugucauaagagagccuuuuauaucauguucucacuuggaaugcagaaccuuuuuucugacccaaggugcucuauuaaaugacaagcauucaaaugggaccguuaaggacagaagcccuuauagggccuuaaugagcuguccucuaggugaagcuccgucuccauacaauucaagguucgaaucaguugcuuggucagcaaccgcaugccaugauggaauaggcuggcuaacaaucggaauuucugguccagauaauggagcaguggcuguacuaaaauacaacggcguaauaacugaaaccauaaaaaguuggaagaagcaaauauuaagaacacaagagucugaaugugucugugugaacgguucauguuuuaccauaaugaccgauggcccgaguaauggggccgccucguacagaaucuucaaaauugagaaggggaagauuaccaaaucaauagaauuggaugcacccaauuuucauuacgaggaauguuccuguuacccagacaccggcacagugaugugugugugcagggacaauuggcacgguucaaaucgaccuugggugucuuucaaucaaaaccuggauuaucaaauaggauauaucugcagugggguguucggugacaauccgcgucccaaagauggagaagguagcuguaauccagugacuguugauggagcagacggaguaaagggguuuucauacagauauggcaaugguguuuggauaggaaggacuaaaaguaacagacucagaaagggauuugagauaauuugggauccuaauggauggacagauaccgacagugauuuuucagugaaacaggaugucguggcaaugacugauuggucaggguacagcggaaguuucguucaacauccugagcuaacaggauuggacuguaugagaccuugcuucuggguugaauuagucagagggcuaccuagagaaaaugcaacaaucuggacuagugggagcagcauuucuuuuuguggcguaaauagugauacugcaaacuggucuuggccagacggugccgaguugccauucaccauugacaaguag

SEQ ID NO: 47316 - RNA, 1410 nt, Artificial Sequence
  derived and/or modified CDS sequence (wt) from neuraminidase__InfluenzaA__ABI20895
augaauccaaaucaaaagauaauaacaauuggcucuguuucucucacuauugccacaauaugcuuccuuaugcaaauugccauccugguaacuacuguaacauugcauuucaagcaauaugaaugcaacucccccccaaacaaccaaguaaugcugugugaaccaacaauaauagaaagaaacauaacagagauaguguaucugaccaacaccaccauagagaaagaaauaugccccaaacuagcagaauacagaaauuggucaaagccgcaauguaaaauuacaggauuugcaccuuuuucuaaggacaauucaauucggcuuuccgcugguggagacauuugggugacaagagaaccuuaugugucaugcgauccuggcaaguguuaucaauuugcccuuggacagggaacaacacuaaacaacaggcauucaaaugacacaguacaugauaggaccccuuaucgaacccuauugaugaaugaguuggguguuccauuucauuugggaaccaagcaagugugcauagcaugguccagcucaaguugucacgauggaaaagcauggcugcauguuuguguaacugggcaugaugaaaaugcaacugcuagcuucauuuacgaugggaggcuuguagauaguauuaguucaugguccaaaaauauccucaggacccaggagucggaaugcguuuguaucaauggaacuuguacaguaguaaugacugauggaagugcuucagaaagagcugauacuaaaauacuauucauugaagaggggaaaaucguucauauuagcccauugucaggaagugcucagcaugucgaggagugcuccuguuauccucgauauccuggugucagaugugucugcagagacaacuggaaaggcuccaauaggcccaucguagauauaaaugugaaagauuauagcauuguuuccaguuaugugugcucaggacuuguuggagacacacccagaaaaaacgacagcuccagcaguagcuauugccugaauccuaacaaugaggaagggggucauggagugaaaggcugggccuuugaugauggaaaugacguguggaugggaagaacgaucagcgaaaaguuacgcucagguuaugaaaccuucaaggucauuggaggcugguccaaaccuaacuccaaauugcagauaaauaggcaagucauaguugacagagguaauagguccgguuauucugguauuuucucuguugaaggcaaaagcugcgucaaucggugcuuuuauguggaguugauaaggggaaggaaacaggaaacugaagucugguggaccucaaacaguauuguuguguuuuguggcaccucagguacauauggaacaggcucauggccugauggggcggacaucaaucucaugccuauauaa

SEQ ID NO: 47317 - RNA, 1410 nt, Artificial Sequence
  derived and/or modified CDS sequence (wt) from neuraminidase__InfluenzaA__ABI20906
augaauccaaaucaaaagauaauaacaauuggcucuguuucucucacuauugccacaauaugcuuccuuaugcaaauugccauccugguaacuacuguaacauugcauuucaagcaauaugagugcaacucccccccaaacaaccaaguaaugcugugugaaccaacaauaauagaaagaaacauaacagagauaguguaucugaccaacaccaccauagagaaagaaauaugccccaaacuggcagaauacagaaauuggucaaagccgcaauguaaaauuacaggauuugcaccuuuuucuaaggacaauucaauucggcuuuccgcugguggggacauuugggugacaagagaaccuuaugugucaugcgauccuggcaaguguuaucaauuugcccuuggacagggaacaacacuaaacaacaggcauucaaaugacacaguacaugauaggaccccuuaucgaacccuauugaugaaugaguuggguguuccauuucauuugggaaccaagcaagugugcauagcgugguccagcucaaguugucacgauggaaaagcauggcugcauguuuguguaacugggcaugaugaaaaugcaacugcuagcuucauuuacgaugggaggcuuguagauaguauugguucaugguccaaaaauauccucaggacccaggagucggaaugcguuuguaucaauggaacuuguacaguaguaaugacugauggaagugcuucagacagagcugauacuaaaauacuauucauugaagaggggaaaaucguucauauuagcccauugucaggaagugcucagcaugucgaggagugcuccuguuauccucgauauccuggugucagaugugucugcagagacaacuggaaaggcuccaauaggcccaucguagauauaaaugugaaagauuauagcauuguuuccaguuaugugugcucaggacuuguuggagacacacccagaaaaaacgacagcuccagcaguagcuauugcuggaauccuaacaaugagaaagggggucauggagugaaaggcugggccuuugaugauggaaaugacguguggaugggaagaacgaucagcgaggagucacgcucagguuaugaaaccuucaaagucauuggaggcugguccaaaccuaacuccaaauugcagauaaauaggcaagucauaguugacagagguaauagguccgguuauucugguauuuucucuguugaaggcaaaagcugcaucaaucggugcuuuuauguggaguugauaaggggaaggaaacaggaaacugaagucugguggaccucaaacaguauuguuguguuuuguggcaccucagguacauauggaacaggcucauggccugauggggcggacaucaaucucaugccuauauaa

SEQ ID NO: 47318 - RNA, 1410 nt, Artificial Sequence; identical to SEQ ID NO: 47174
  derived and/or modified CDS sequence (wt) from neuraminidase__InfluenzaA__ABI20928

SEQ ID NO: 47319 - RNA, 1410 nt, Artificial Sequence; identical to SEQ ID NO: 47174
  derived and/or modified CDS sequence (wt) from neuraminidase__InfluenzaA__ABI20939

SEQ ID NO: 47320 - RNA, 1410 nt, Artificial Sequence; identical to SEQ ID NO: 47134
  derived and/or modified CDS sequence (wt) from neuraminidase__InfluenzaA__ABI20950

SEQ ID NO: 47321 - RNA, 1410 nt, Artificial Sequence
  derived and/or modified CDS sequence (wt) from neuraminidase__InfluenzaA__ABI20961
augaauccaaaucaaaagauaauaacaauuggcucuguuucucucacuauugccacaauaugcuuccuuaugcaaauugccauccugguaacuacuguaacauugcauuucaagcaauaugagugcaacucccccccaagcaaccaaguaaugcugugugaaccaacaauaauagaaagaaacauaacagagauaguguauuugacuaacaccaccauagagaaagaaauaugccccaaacuggcagaauacagaaauuggucaaagccgcaauguaaaauuacaggauuugcaccuuuuucuaaggacaauucaauucggcuuuccgcugguggagacauuugggugacaagagaaccuuaugugucaugcgauccuggcaaguguuaucaauuugcacuuggacagggaacaacacuaaacaacaggcauucaaaugacacaguacaugauaggaccccuuaucgaacccuauugaugaaugaguuggguguuccauuucauuugggaaccaagcaagugugcauagcaugguccagcucaaguugucacgauggaaaagcauggcugcauguuuguguaacugggcaugaugaaaaugcaacugcuagcuucauuuacgaugggaggcuuguagauaguauugguucaugguccaaaaauauccucaggacccaggagucggaaugcguuuguaucaauggaacuuguacaguaguaaugacugauggaagugcuucagaaagagcugauacuaaaauacuauucauugaagaggggaaaaucguucauauuagcccauugucaggaagugcucagcaugucgaggagugcuccuguuauccucgauauccuggugucagaugugucugcagagacaacuggaaaggcuccaauaggcccaucguagauauaaaugugaaagauuauagcauuguuuccaguuaugugugcucaggacuuguuggagacacacccagaaaaaacgacagcuccagcaguagcuauugccggaauccuaacaaugagaaagggagccauggagugaaagguugggccuuugaugauggaaaugacguguggaugggaagaacgaucagcgaggaguuacgcucugguuaugaaaccuucaaaguuauuggaggcugguccaaaccuaacuccaaauugcagauaaauaggcaagucauaguugacagagguaauagguccgguuauucugguauuuucucuguugaaggcaaaagcugcaucaaucggugcuuuuauguggaguugauaaggggaaggaaacaggaaacugaagucugguggaccucaaacaguauuguuguguuuuguggcaccucagguacauauggaacaggcucauggccugauggggcggacaucaaucucaugccuauauaa

SEQ ID NO: 47322 - RNA, 1410 nt, Artificial Sequence; identical to SEQ ID NO: 46839
  derived and/or modified CDS sequence (wt) from neuraminidase__InfluenzaA__ABI20983

SEQ ID NO: 47323 - RNA, 1410 nt, Artificial Sequence
  derived and/or modified CDS sequence (wt) from neuraminidase__InfluenzaA__ABI20994
augaauccaaaucaaaagauaauaacgauuggcucuguuucucucaccauugccacaauaugcuuccuuaugcaaauugccauccugguaacuacuguaacguugcauuucaagcaauaugaaugcaacucccccccaaacaaccaagugaugcugugugaaccaacaauaauagaaagaaacauaacagagauaguguaucugaccaacaccaccauagagaaggaaauaugccccaaacuagcagaauacagaaauuggucaaagccgcaauguaacauuacaggauuugcaccuuuuucuaaggacaauucgauucggcuuuccgcugguggggacaucugggugacaagagaaccuuaugugucaugcgauccugacaaguguuaucaauuugcccuuggacagggaacaacacuaaacaacgggcauucaaaugacacaguacauaauaggaccccuuaucgaacccuauugaugaaugaguuggguguuccauuucauuugggaaccaagcaagugugcauagcaugguccagcucaaguugucacgauggaaaagcauggcugcauguuuguguaacgggggaugaugaaaaugcaacugcuagcuucauuuacaaugggaggcuuguagauaguaucgguucaugguccaaaaaaauccucaggacccaggagucggaaugcguuuguaucaauggaacuuguacaguaguaaugacugaugggagugcuucaggaaaagcugauacuaaaauacuauucauugaggaggggaaaaucguucauacuagcucauugucaggaagugcucagcaugucgaggagugcuccuguuauccucgauauccuggugucagaugugucugcagagacaacuggaaaggcuccaauaggcccaucguagauauaaauguaaaggauuauagcauuguuuccaguuaugugugcucaggacuuguuggagacacacccagaaaaaacgacagcuccagcaguagccauugcuuggauccuaacaaugaggaagguggucauggagugaaaggcugggccuuugaugauggaaaugacguguggaugggaagaacgaucagcgagaaguuacgcucaggauaugaaaccuucaaagucauugaaggcugguccaaaccuaacuccaaauugcagauaaauaggcaagucauaguugacagagguaauagguccgguuauucugguauuuucucuguugaaagcaaaagcugcaucaauaggugcuuuuauguggaguugauaaggggaaggaaacaggaaacugaagucuuguggaccucaaacaguauuguuguguuuuguggcaccucagguacauauggaacaggcucauggccugauggggcggacaucaaucucaugccuauauaa

SEQ ID NO: 47324 - RNA, 1410 nt, Artificial Sequence
  derived and/or modified CDS sequence (wt) from neuraminidase__InfluenzaA__ABI21005
augaauccaaaucaaaagauaauaacgauuggcucuguuucucucaccauugccacaauaugcuuccuuaugcaaauugccguccugguaacuacuguaacauugcauuucaagcaauaugaaugcaacucccccccaaacaaccaagugaugcugugugaaccaacaauaauagaaagaaacauaacagagauaguguaucugaccaacaccaccauagagaaggaaauaugccccaaacuagcagaauacagaaauuggucaaagccgcaauguaacauuacaggauuugcaccuuuuucuaaggacaauucgauucggcuuuccgcugguggggacaucugggugacaagagaaccuuaugugucaugcgauccugacaaguguuaucaauuugcccuuggacagggaacaacacuaaacaacggacauucaaaugacacaguacaugauaggaccccuuaucggacccuauugaugaaugaguuggguguuccauuucauuugggaaccaagcaagugugcauagcaugguccagcucaaguugucacgauggaaaagcauggcugcauguuuguguaacgggggaugaugaaaaugcaacugcuagcuucauuuacaaugggaggcuugcagauaguauugguucaugguccaaaaaaauccucaggacccaggagucggaaugcguuuguaucaauggaacuuguacaguaguaaugacugaugggagugcuucaggaaaagcugauacuaaaauacuauucauugaggaggggaaaaucguucauacuagccuauugucaggaagugcucagcaugucgaggagugcuccuguuauccucgauacccuggugucagaugugucugcagagacaacuggaaaggcuccaauaggcccaucguagauauaaauguaaaggauuauagcauuguuuccaguuaugugugcucaggacuuguuggagacacacccagaaaaaacgacagcuccagcaguagccauugcuuggauccuaacaaugaggaagguggucauggagugaaaggcugggccuuugaugauggaaaugacguguggaugggaagaacgaucagcgagaaguuacgcucaggauaugaaaccuucaaagucauugaaggcugguccaaaccuaauuccaaauugcagauaaauaggcaagucauaguugacagagguaauagguccgguuauucugguauuuucucuguugaaggcaaaagcugcaucaaucggugcuuuuauguggaguugauaaggggaaggaaacaggaaacugaagucuuguggaccucaaacaguauuguuguguuuuguggcaccucagguacauauggaacaggcucauggccugauggggcggacaucaaucucaugccuauauaa

SEQ ID NO: 47325 - RNA, 1410 nt, Artificial Sequence; identical to SEQ ID NO: 47140
  derived and/or modified CDS sequence (wt) from neuraminidase__InfluenzaA__ABI21016

SEQ ID NO: 47326 - RNA, 1410 nt, Artificial Sequence
  derived and/or modified CDS sequence (wt) from neuraminidase__InfluenzaA__ABI21027
augaauccaaaucaaaggauaauaacaauuggcucuguuucucucaccauugccacaauaugcuuccuuaugcaaauugccauccugguaacuacuguaacauugcauuucaagcaguaugaaugcaacucccccccaaacaaccaaguaaugcugugugaaccaacaauaauagaaagaaacauaacagagauaguguaucugaccaacaccaccauagagaaggaaauaugccccaaauuagcagaauacagaaauuggucaaagccgcaauguaacauuacaggauuugcaccuuuuucuaaggacaauucgauucggcuuuccgcugguggggacaucugggugacaagagaaccuuaugugucaugcgauccugacaaguguuaucaauuugcccuugggcagggaacaacacuaaacaacgggcauucaaaugacacaguacaugauaggaccccuuaccggacccuauugaugaaugaauuggguguuccauuucauuugggaaccaggcaagugugcauagcaugguccagcucaaguugucacgauggaaaagcauggcugcauguuuguguaacuggggaugaugaaaaugcaacugcuagcuucauuuacaaugggaggcuuguagauaguauugguucaugguccaaaaaaauacucagaacccaggagucggaaugcguuuguaucaauggaacuuguacaguaguaaugacugaugggagcgcuucaggaaaagcugauacuaaaauacuauucauugaggaggggaaaaucguucauauuagcacauugucaggaagugcucagcaugucgaggagugcuccuguuauccucgauauccuggugucagaugugucugcagagacaacuggaaaggcuccaauaggcccaucguagauauaaauguaaaggauuauagcauuguuuccaguuaugugugcucaggacuuguuggagacacacccagaaaaaacgacagcuucagcaguagccauugccuagauccuaacaaugaggaagguggucauggagugaaaggcugggccuuugaugauggaaaugacguguggaugggaagaacgaucagcgagaaguuacgcucagguuaugaaaccuucaaagucaucgaaggcugguccaaaccuaacuccaaauuacagacaaauaggcaagucauaguugaaagagguaacagguccgguuauucugguauuuucuccguugaaggcaaaagcugcaucaaucggugcuuuuauguggaguugauaaggggaaggaaagaggaaacugaagucugguggaccucaaacaguauuguuguguuuuguggcaccccagguacauauggaacaggcucauggccugauggggcggauaucaaucucaugccuauauaa

SEQ ID NO: 47327 - RNA, 1410 nt, Artificial Sequence; identical to SEQ ID NO: 46603
  derived and/or modified CDS sequence (wt) from neuraminidase__InfluenzaA__ABI21038

SEQ ID NO: 47328 - RNA, 1410 nt, Artificial Sequence
  derived and/or modified CDS sequence (wt) from neuraminidase__InfluenzaA__ABI21049
augaauccaaaucaaaagauaauaacaauuggcucuguuucucucaccauugccacaauaugcuuccuuaugcaaauugccauccugguaacuacuguaacauugcauuucaagcagcaugaaugcaacucccccccaaacaaccaaguaaugcugugugaaccaacaauaauagaaagaaacauaacagagauaguguaucugaccaacaccaccauagagaaggaaauaugccccaaacuaguagaauacagaaauuggucaaagccgcaauguaacauuacaggauuugcaccuuuuucuaaggacaauucgauucggcuuuccgcugguggggacaucugggugacaagagaaccuuaugugucaugcgauccugacaaguguuaucaauuugcccuugggcagggaacaacacuaaacaacgggcauucaaaugacacaguacaugauaggaccccuuaccggacccuauugaugaaugaauuggguguuccauuucauuugggaaccaggcaagugugcauagcaugguccagcucaaguugucacgauggaaaagcauggcugcauguuuguguaacuggggaugauaaaaaugcaacugcuagcuucauuuacaaugggaggcuuguagauaguauugguucaugguccaaaaaaauacucagaacccaggagucggaaugcguuuguaucaauggaacuuguacaguaguaaugacugaugggagcgcuucaggaaaagcugauacuaaaauacuauucauugaggaggggaaaaucguucauauuagcacauugucaggaagugcucagcaugucgaggagugcuccuguuauccucgauauccuggugucagaugugucugcagagacaacuggaaaggcuccaauaggcccauuguagauauaaauguaaaggauuauagcauuguuuccgguuaugugugcucaggacuuguuggagacacacccagaaaaaacgacagcuucagcaguagccauugccuagauccuaacaaugaggaagguggucauggagugaaaggcugggccuuugaugauggaaaugacguguggaugggaagaacgaucagcgagaaguuacgcucagguuaugaaaccuucaaagucaucgaaggcugguccaaaccuaacuccaaauuacagauaaauaggcaaguuauaguugaaagagguaacagguccgguuauucugguauuuucuccguugaaggcaaaagcugcaucaaucggugcuuuuauguggaguugauaaggggaaggaaagaggaaacugaagucugguggaccucaaacaguauuguuguguuuuguggcaccucagguacauauggaacaggcucauggccugauggggcggauaucaaucucaugccuauauaa

SEQ ID NO: 47329 - RNA, 1410 nt, Artificial Sequence
  derived and/or modified CDS sequence (wt) from neuraminidase__InfluenzaA__ABI21060
augaauccaaaucaaaagauaauaacaauuggcucuguuucucucaccauugccacaauaugcuuccuuaugcaaauugccauccugguaacuacuguaacauugcauuucaagcagcaugaaugcaacucccccccaaacaaccaaguaaugcugugugaaccaacaauaauagaaagaaacauaacagagauaguguaucugaccaacaccaccauagagaaggaaauaugccccaaaccaguagaauacagaaauuggucaaagccgcaauguaacauuacaggauuugcaccuuuuucuaaggacaauucgauucggcuuuccgcugguggggacaucugggugacaagagaaccuuaugugucaugcgauccugacaaguguuaucaauuugcccuugggcagggaacaacacuaaacaacgggcauucaaaugacacaguacaugauaggaccccuuaccggacccuauugaugaaugaauuggguguuccauuucauuugggaaccaggcaagugugcauagcaugguccagcucaaguugucacgauggaaaagcauggcugcauguuuguguaacuggggaugauaaaaaugcaacugcuagcuucauuuacaaugggaggcuuguagauaguauugguucaugguccaaaaaaauacucagaacccaggagucggaaugcguuuguaucaauggaacuuguacaguaguaaugacugaugggagcgcuucaggaaaagcugauacuaaaauacuauucauugaggaggggaaaaucguucauauuagcacauugucaggaagugcucagcaugucgaggagugcuccuguuauccucgauauccuggugucagaugugucugcagagacaacuggaaaggcuccaauaggcccauuguagauauaaauguaaaggauuauagcauuguuuccaguuaugugugcucaggacuuguuggagacacacccagaaaaaacgacagcuucagcaguagccauugccuagauccuaacaaugaggaagguggucauggagugaaaggcugggccuuugaugauggaaaugacguguggaugggaagaacgaucagcgagaaguuacgcucagguuaugaaaccuucaaagucaucgaaggcugguccaaaccuaacuccaaauuacagauaaauaggcaaguuauaguugaaagagguaacagguccgguuauucugguauuuucuccguugaaggcaaaagcugcaucaaucggugcuuuuauguggaguugauaaggggaaggaaagaggaaacugaagucugguggaccucaaacaguauuguuguguuuuguggcaccucagguacauauggaacaggcucauggccugauggggcggauaucaaucucaugccuauauaa

SEQ ID NO: 47330 - RNA, 1410 nt, Artificial Sequence
  derived and/or modified CDS sequence (wt) from neuraminidase__InfluenzaA__ABI21071
augaauccaaaucaaaagauaauaacgauuggcucuguuucucucaccauuuccacaauaugcuucuuuaugcaaauagccaucuugauaacuacuguaacauugcauuucaagcaauaugaauucaacucccccccaaacaaccaagugaugcugugugaaccaacaauaauagaaagaaacauaacagagauaguguaucugaccaacaccaccauagagaaggaaauaugccccaaacuagcagaauacagaaauuggucaaagccgcaaugugacauuacaggauuugcaccuuuuucuaaggacaauucgauuaggcuuuccgcugguggggacaucugggugacaagagaaccuuaugugucaugcgauccugacaaauguuaucaauuugcccuuggacagggaacaacacuaaacaacgugcauucaaaugacacaguacaugauaggaccccuuaucggacccuauugaugagugaguuagguguuccauuucaucuggggacuaagcaagugugcauagcaugguccagcucaaguugucacgauggaaaagcauggcugcauguuuguguaacgggggaugauaaaaaugcaacugcuagcuucauuuacaaugggaggcuuguagauaguauuguuucaugguccaaagaaauccucagaacccaggagucagaaugcguuuguaucaauggaacuuguacaguaguaaugacugaugggagugcuucaggaaaagcugauacuaaaauacuauucauugaggaggggaaaaucguucauacuagcacauugucaggaagugcccagcaugucgaggagugcuccugcuauccucgauauccuggugucagaugugucugcagagacaacuggaaaggcuccaauaggcccaucguagauauaaacauaaaggauuauagcauuguuuccaguuaugugugcucaggacuuguuggagacacacccagaaaaaacgacagcuccagcaguagccauugcuuggauccuaacaaugaagaagguggucauggagugaaaggcugggccuuugaugauggaaaugacguguggaugggaagaacgaucagcgagaaguuacgcucaggauaugaaaccuucaaagucauugaaggcugguccaacccuaauuccaaauugcagauaaauaggcaagucauaguugacagagguaauagguccgguuauucugguauuuucucuguugaaggcaaaagcugcaucaaucggugcuuuuauguggaguugauaaggggaagaaaagaggaaacugaagucuuguggaccucaaacaguauuguuguguuuuguggcaccucagguacauauggaacaggcucauggccugauggggcggacaucaaucucaugccuauauaa

SEQ ID NO: 47331 - RNA, 1410 nt, Artificial Sequence
  derived and/or modified CDS sequence (wt) from neuraminidase__InfluenzaA__ABI21082
augaauccaaaucaaaagauaauaacgauuggcucuguuucucucaccauuuccacaauaugcuucuuuaugcaaauugccaccuugauaacuacuguaacauugcauuucaagcaauaugaauucaacucccccccaaacaaccaagugaugcugugugaaccaacaauaauagaaagaaacauaacagagauaguguaucugaccaacaccaccauagagaaggaaauaugccccaaacuagcagaauacagaaauuggucaaagccgcaaugugacauuacaggauuugcaccuuuuucuaaggacaauucgauuaggcuuuccgcugguggggacaucugggugacaagagaaccuuaugugucaugcgauccugacaaauguuaucaauuugcccuuggacagggaacaacacuaaacaacgugcauucaaaugacacaguacaugauaggaccccuuaucggacccuauugaugaaugaguuagguguuccauuucaucuggggacuaagcaagugugcauagcaugguccagcucaaguugucacgauggaaaagcauggcugcauguuuguguaacgggggaugauaaaaaugcaacugcuagcuucauuuacaaugggaggcuuguagauaguauuguuucaugguccaaagaaauccucagaacccaggagucagaaugcguuuguaucaauggaacuuguacaguaguaaugacugaugggagugcuucaggaaaagcugauacuaaaauacuauucauugaggaggggaaaaucguucauacuagcacauugucaggaagugcccagcaugucgaggagugcuccugcuauccucgauauccuggugucagaugugucugcagagacaacuggaaaggcuccaauaggcccaucguagauauaaacauaaaggauuauagcauuguuuccaguuaugugugcucaggacuuguuggagacacacccagaaaaaacgacagcuccagcaguagccauugcuuggauccuaacaaugaagaagguggucauggagugaaaggcugggccuuugaugauggaaaugacguguggaugggaagaacgaucagcgagaaguuacgcucaggauaugaaaccuucaaagucauugaaggcugguccaacccuaauuccaaauugcagauaaauaggcaagucauaguugacagagguaauagguccgguuauucugguauuuucucuguugaaggcaaaagcugcaucaaucggugcuuuuauguggaguugauaaggggaagaaaagaggaaacugaaguuuuguggaccucaaacaguauuguuguguuuuguggcaccucagguacauauggaacaggcucauggccugauggggcggacaucaaucucaugccuauauaa

SEQ ID NO: 47332 - RNA, 1410 nt, Artificial Sequence
  derived and/or modified CDS sequence (wt) from neuraminidase__InfluenzaA__ABI21093
augaauccaaaucaaaagauaauaacgauuggcucuguuucucucaccauuuccacaauaugcuucuucaugcaaauugccaucuugauaacuacuguaacauugcauuucaagcaauaugaauucaacucccccccaaacaaccaggugaugcugugugaaccaacaauaauagaaagaaacauaacagagauaguguaucugaccaacaccaccauagagaaggaaauaugccccaaacuagcagaauacagaaauuggucaaagccgcaaugugacauuacaggauuugcaccuuuuucuaaggacaauucgauuaggcuuuccgcugguggggacaucugggugacaagagaaccuuaugugucaugcgauccugacaaguguuaucaauuugcccuuggacaggggacaacacuaaacaacgugcauucaaaugacacaguacaugauaggaccccuuaucggacccuauugaugaaugaguuagguguuccauuucaucuggggaccaagcaagugugcauagcaugguccagcucaaguugucacgauggaaaagcauggcugcauguuuguguaacgggggaugauaaaaaugcaacugcuagcuucauuuacaaugggaggcuuguagauaguauuguuucaugguccaaagaaauccucaggacccaggagucagaaugcguuuguaucaauggaacuuguacaguaguaaugacugaugggagugcuucaggaaaagcugauacuaaaauacuauucauugaggaggggaaaauuguucauacuagcacauugucaggaagugcucagcaugucgaggaguguuccugcuauccucgauauccuggugucagaugugucugcagagacaacuggaaaggcuccaauaggcccaucguagauauaaacauaaaggauuauagcauuguuuccaguuaugugugcucaggacuuguuggagacacacccagaaaaaacgacagcuccagcaguagccauugcuuggauccuaacaaugaagaagguggucauggagugaaaggcugggccuuugaugauggaaaugacguguggaugggaagaacgaucagcgagaaguuacgcucaggauaugaaaccuucaaagucauugaaggcugguccaacccuaauuccaaauugcagauaaauaggcaagucauaguugacagagguaauagguccgguuauucugguauuuucucuguugaaggcaaaaacugcaucaaucggugcuuuuauguggaguugauaaggggaagaaaagaggaaacugaagucuuguggaccucaaacaguauuguuguguuuuguggcaccucagguacauauggaacaggcucauggccugauggggcggacaucaaucucaugccuauauaa

SEQ ID NO: 47333 - RNA, 1410 nt, Artificial Sequence
  derived and/or modified CDS sequence (wt) from neuraminidase__InfluenzaA__ABI21104
augaauccaaaucaaaagauaauaacgauuggcucuguuucucucaccauuuccacaauaugcuucuucaugcaaauugccaucuugauaacuacuguaacauugcauuucaagcaauaugaauucaacucccccccaaacaaccaggugaugcugugugaaccaacaauaauagaaagaaacauaacagagauaguguaucuggccaacaccaccauagagaaggaaauaugccccaaacuagcagaauacagaaauuggucaaagccgcaaugugacauuacaggauuugcaccuuuuucuaaggacaauucgauuaggcuuuccgcugguggggacaucugggugacaagagaaccuuaugugucaugcgauccugacaaguguuaucaauuugcccuuggacaggggacaacacuaaacaacgugcauucaaaugacacaguacaugauaggaccccuuaucggacccuauugaugaaugaguuagguguuccauuucaucuggggaccaagcaagugugcauagcaugguccagcucaaguugucacgauggaaaagcauggcugcauguuuguguaacgggggaugauaaaaaugcaacugcuagcuucauuuacaaugggaggcuuguagauaguauuguuucaugguccaaagaaauccucaggacccaggagucagaaugcguuuguaucaauggaacuuguacaguaguaaugacugaugggagugcuucaggaaaagcugauacuaaaauacuauucauugaggaggggaaaauuguucauacuagcacauugucaggaagugcucagcaugucgaggaguguuccugcuauccucgauauccuggugucagaugugucugcagagacaacuggaaaggcuccaauaggcccaucguagauauaaacauaaaggauuauagcauuguuuccaguuaugugugcucaggacuuguuggagacacacccagaaaaaacgacagcuccagcaguagccauugcuuggauccuaacaaugaagaagguggucauggagugaaaggcugggccuuugaugauggaaaugacguguggaugggaagaacgaucagcgagaaguuacgcucaggauaugaaaccuucaaagucauugaaggcugguccaacccuaauuccaaauugcagauaaauaggcaagucauaguugacagagguaauagguccgguuauucugguauuuucucuguugaaggcaaaaacugcaucaaucggugcuuuuauguggaguugauaaggggaagaaaagaggaaacugaagucuuguggaccucaaacaguauuguuguguuuuguggcaccucagguacauauggaacaggcucauggccugauggggcggacaucaaucucaugccuauauaa

SEQ ID NO: 47334 - RNA, 1410 nt, Artificial Sequence; identical to SEQ ID NO: 46378
  derived and/or modified CDS sequence (wt) from neuraminidase__InfluenzaA__ABI21115

SEQ ID NO: 47335 - RNA, 1410 nt, Artificial Sequence; identical to SEQ ID NO: 47263
  derived and/or modified CDS sequence (wt) from neuraminidase__InfluenzaA__ABI21126

SEQ ID NO: 47336 - RNA, 1410 nt, Artificial Sequence; identical to SEQ ID NO: 47332
  derived and/or modified CDS sequence (wt) from neuraminidase__InfluenzaA__ABI21137

SEQ ID NO: 47337 - RNA, 1410 nt, Artificial Sequence
  derived and/or modified CDS sequence (wt) from neuraminidase__InfluenzaA__ABI21148
augaauccaaaucaaaagauaauaacgauuggcucuguuucucucaccauuuccacaauaugcuucuuuaugcaaauugccaucuugauaacuacuguaacauugcauuucaagcaauaugaauucaacucccccccaaacaaccaagugaugcugugugaaccaacaauaauagaaagaaacauaacagagauaguguaucugaccaacaccaccauagagaaggaaauaugccccaaacuagcagaauacagaaauuggucaaagccgcaaugugacauuacaggauuugcaccuuuuucuaaggacaauucgauuaggcuuuccgcugguggggacaucugggugacaagagaaccuuaugugucaugcgauccugacaaauguuaucaauuugcccuuggacagggaacaacacuaaacaacgugcauucaaaugacacaguacaugauaggaccccuuaucggacccuauugaugaaugaguuagguguuccauuucaucuggggacuaagcaagugugcauagcaugguccagcucaaguugucacgauggaaaagcauggcugcauguuuguguaacgggggaugauaaaaaugcaacugcuagcuucauuuacaaugggaggcuuguagauaguauuguuucaugguccaaagaaauccucagaacccaggagucagaaugcguuuguaucaauggaacuuguacaguaguaaugacugaugggagugcuucaggaaaagcugauacuaaaauacuauucauugaggaggggaaaaucguucauacuagcacauugucaggaagugcccagcaugucgaggagugcuccugcuauccucgauauccuggugucagaugugucugcagagacaacuggaaaggcuccaauaggcccaucguagauauaaacauaaaggauuauagcauuguuuccaguuauguaugcucaggacuuguuggagacacacccagaaaaaacgacagcuccagcaguagccauugcuuggauccuaacaaugaagaagguggucauggagugaaaggcugggccuuugaugauggaaaugacguguggaugggaagaacgaucagcgagaaguuacgcucaggauaugaaaccuucaaagucauugaaggcugguccaacccuaauuccaaauugcagauaaauaggcaagucauaguugacagagguaauagguccgguuauucugguauuuucucuguugaaggcaaaagcugcaucaaucggugcuuuuauguggaguugauaaggggaagaaaagaggaaacugaagucuuguggaccucaaacaguauuguuguguuuuguggcaccucagguacauauggaacaggcucauggccugauggggcggacaucaaucucaugccuauauaa

SEQ ID NO: 47338 - RNA, 1410 nt, Artificial Sequence
  derived and/or modified CDS sequence (wt) from neuraminidase__InfluenzaA__ABI21159
augaauccaaaucaaaagauaauaacgauuggcucuguuucucucaccauuuccacaauaugcuucuuuaugcaaauugccaucuugauaacuacuguaacauugcauuucaagcaauaugaauucaacucccccccaaacaaccaagugaugcugugugaaccaacaauaauagaaagaaacauaacagagauaguguaucugaccaacaccaccauagagaaggaaauaugccccaaacuagcagaauacagaaauuggucaaagccgcaaugugacauuacaggauuugcaccuuuuucuaaggacaauucgauuaggcuuuccgcugguggggacaucugggugacaagagaaccuuaugugucaugcgauccugacaaauguuaucaauuugcccuuggacagggaacaacacuaaacaacgugcauucaaaugacacaguacaugauaggaccccuuaucggacccuauugaugaaugaguuagguguuccauuucaucuggggacuaagcaagugugcauagcaugguccagcucaaguugucacgauggaaaagcauggcugcauguuuguguaacgggggaugauaaaaaugcaacugcuagcuucauuuacaaugggaggcuuguagauaguauuguuucaugguccaaagaaauccucagaacccaggagucagaaugcguuuguaucaauggaacuuguacaguaguaaugacugaugggagugcuucaggaaaagcugauacuaaaauacuauucauugaggaggggaaaaucguucauacuagcacauugucaggaagugcccagcaugucgaggagugcuccugcuauccucgauauccuggugucagaugugucugcagagacaacuggaaaggcuccaauaggcccaucguagauauaaacauaaaggauuauagcauuguuuccgguuaugugugcucaggacuuguuggagacacacccagaaaaaacgacagcuccagcaguagccauugcuuggauccuaacaaugaagaagguggucauggagugaaaggcugggccuuugaugauggaaaugacguguggaugggaagaacgaucagcgagaaguuacgcucaggauaugaaaccuucaaagucauugaaggcugguccaacccuaauuccaaauugcagauaaauaggcaagucauaguugacagagguaauagguccgguuauucugguauuuucucuguugaaggcaaaagcugcaucaaucggugcuuuuauguggaguugauaaggggaagaaaagaggaaacugaagucuuguggaccucaaacaguauuguuguguuuuguggcaccucagguacauauggaacaggcucauggccugauggggcggacaucaaucucaugccuauauaa

SEQ ID NO: 47339 - RNA, 1410 nt, Artificial Sequence; identical to SEQ ID NO: 46378
  derived and/or modified CDS sequence (wt) from neuraminidase__InfluenzaA__ABI21170

SEQ ID NO: 47340 - RNA, 1410 nt, Artificial Sequence; identical to SEQ ID NO: 46378
  derived and/or modified CDS sequence (wt) from neuraminidase__InfluenzaA__ABI21181

SEQ ID NO: 47341 - RNA, 1413 nt, Artificial Sequence
  derived and/or modified CDS sequence (wt) from neuraminidase__InfluenzaA__ABI21192
augaauccaaaucaaaaaauaauaaccauuggaucaaucaguauagcaaucggaauaauuagucuaauguugcaaauaggaaauauuauuucaauaugggcuagucacucaauccaaacuggaagucaaaaccacacuggaacaugcaaccaaagaaucaucacauaugaaaacagcaccugggugaaucacacauauguuaauauuaacaacacuaauguuguugcuggaaaggacaaaacuucagugacauuggccggcaauucaucucuuuguucuaucaguggaugggcuauauacacaaaagacaacagcauaagaauuggcuccaaaggagauguuuuugucauaagagaaccuuucauaucauguucucauuuggaaugcaggaccuuuuuucugacccaaggugcucuauuaaaugacaaacauucaaauggaaccguuaaggacagaaguccuuauagggccuuaaugagcuguccucuaggugaagcuccguccccauacaauucaaaguuugaaucaguugcauggucagcaagcgcaugccaugauggcaugggcugguuaacaaucggaauuucugguccagacaauggagcuguggcuguacuaaaauacaacggaauaauaacugaaaccauaaaaaguuggagaaagcggauauugagaacacaagagucugaaugugucugugugaacgggucauguuucaccauaaugaccgauggcccgaguaauggggccgccucguacaaaaucuucaagaucgaaaaggggaagguuacuaaaucaauagaguuaaaugcacccaauuuucauuaugaggaauguuccuguuacccagacacuggcacagugauguguguaugcagggacaacuggcaugguucaaaucgaccuugggugucuuuuaaucaaaacuuggauuaucaaauaggauacaucugcaguggaguguucggugacaauccgcgucccaaagauggaaagggcagcuguaauccagugacuguugauggagcagacggaguuaagggguuuucauacaaauaugguaaugguguuuggauaggaaggacuaaaaguaacagacuuagaaagggguuugagaugauuugggauccuaauggauggacagauaccgacagugauuucucagugaaacaggauguuguggcaauaacugauuggucaggguacaguggaaguuucguucaacauccugaguuaacaggauuggacuguauaagaccuugcuucuggguugaguuagucagaggacugccuagagaaaauacaacaaucuggacuagugggagcagcauuuccuuuuguggcguugauagugauacugcaaacuggucuuggccagacggugcugaguugccguucaucauugacaaauag

SEQ ID NO: 47342 - RNA, 1413 nt, Artificial Sequence
  derived and/or modified CDS sequence (wt) from neuraminidase__InfluenzaA__ABI21203
augaauccaaaucaaaaaauaauaaccauuggaucaaucaguauagcaaucggaauaauuagucuaauguugcaaauaggaaauauuauuucaauaugggcuagucacucaauccaaacuggaagucaaaaccacacuggaauaugcaaccaaagaaucaucacauaugaaaacagcaccugggugaaucacacauauguuaauauuaacaacacuaauguuguugcuggaaaggacaaaacuucagugacauuggccggcaauucaucucuuuguucuaucaguggaugggcuauauacacaaaagacaacagcauaagaauuggcuccaaaggagauguuuuugucauaagagaaccuuucauaucauguucucauuuggaaugcaggaccuuuuuucugacccaaggugcucuauuaaaugacaaacauucaaauggaaccguuaaggacagaaguccuuauagggccuuaaugagcuguccucuaggugaagcuccguccccauacaauucaaaguuugaaucaguugcauggucagcaagcgcaugccaugauggcaugggcugguuaacaaucggaauuucugguccagacaauggagcuguggcuguacuaaaauacaacggaauaauaacugaaaccauaaaaaguuggaaaaagcggauauugagaacacaagagucugaaugugucugugugaacgggucauguuucaccauaaugaccgauggcccgaguaauggggccgccucguacaaaaucuucaagaucgaaaaggggaagguuacuaaaucaauagaguuaaaugcacccaauuuucauuaugaggaauguuccuguuacccagacacuggcacagugauguguguaugcagggacaacuggcaugguucaaaucgaccuugggugucuuuuaaucaaaacuuggauuaucaaauaggauacaucugcaguggaguguucggugacaauccgcgucccaaagauggaaagggcagcuguaauccagugacuguugauggagcagacggaguuaagggguuuucauacaaauaugguaaugguguuuggauaggaaggacuaaaaguaacagacuuagaaagggguuugagaugauuugggauccuaauggauggacagauaccgacagugauuucucagugaaacaggauguuguggcaauaacugauuggucaggguacaguggaaguuucguucaacauccugaguuaacaggauuggacuguauaagaccuugcuucuggguugaguuagucagaggacugccuagagaaaauacaacaaucuggacuagugggagcagcauuuccuuuuguggcguugauagugauacugcaaacuggucuuggccagacggugcugaguugccguucaccauugacaaauag

SEQ ID NO: 47343 - RNA, 1413 nt, Artificial Sequence
  derived and/or modified CDS sequence (wt) from neuraminidase__InfluenzaA__ABI21214
augaauccaaaucaaaaaauaauaaccauuggaucaaucaguauagcaaucggaauaauuagucuaauguugcaaauaggaaauauuauuucaauaugggcuagucacucaauccaaacuggaagucaaaaccacacuggaauaugcaaccaaagaaucaucacauaugaaaacagcaccugggugaaucacacauauguuaauauuaacaacacuaauguuguugcuggaaaggacauaacuucagugacauuggccggcaauucaucucuuuguucuaucaguggaugggcuauauacacaaaagacaacagcauaagaauuggcuccaaaggagauguuuuugucauaagagaaccuuucauaucauguucucauuuggaaugcaggaccuuuuuucugacccaaggugcucuauuaaaugacaaacauucaaauggaaccguuaaggacagaaguccuuauagggccuuaaugagcuguccucuaggugaagcuccguccccauacaauucaaaguuugaaucaguugcauggucagcaagcgcaugccaugauggcaugggcugguuaacaaucggaauuucugguccagacaauggagcuguggcuguacuaaaauacaacggaauaauaacugaaaccauaaaaaguuggaaaaagcgaauauugagaacacaagagucugaaugugucugugugaacgggucauguuucaccauaaugaccgauggcccgaguaauggggccgccucguacaaaaucuucaagaucgaaaaggggaagguuacuaaaucaauagaguuaaaugcacccaauuuucauuaugaggaauguuccuguuacccagacacuggcacagugauguguguaugcagggacaacuggcaugguucaaaucgaccuugggugucuuuuaaucaaaacuuggauuaucaaauaggauacaucugcaguggaguguucggugacaauccgcgucccaaagauggaaagggcagcuguaauccagugacuguugauggagcagacggaguuaagggguuuucauacaaauaugguaaugguguuuggauaggaaggacuaaaaguaacagacuuagaaagggguuugagaugauuugggauccuaauggauggacagauaccgacagugauuucucagugaaacaggauguuguggcaauaacugauuggucaggguacaguggaaguuucguucaacauccugaguuaacaggauuggacuguauaagaccuugcuucuggguugaguuagucagaggacugccuagagaaaauacaacaaucuggacuagugggagcagcauuucuuuuuguggcguugauagugauacugcaaacuggucuuggccagacggugcugaguugccguucaccauugacaaauag

SEQ ID NO: 47344 - RNA, 1410 nt, Artificial Sequence
  derived and/or modified CDS sequence (wt) from neuraminidase__InfluenzaA__ABI21247
augaauccaaaucaaaagauaauaacaauuggcucuguuucucucacuauugccacaauaugcuuccuuaugcaaauugccauccugguaacuacuguaacauugcauuucaagcaauaugagugcaacucccccccaaacaaccaaguaaugcugugugaaccaacaauaauagaaagaaacauaacagagauaguguaucugaccaacaccaccauagagaaagaaaaaugccccaaacuagcagaauacagaaauuggucaaagccgcaauguaaaauuacaggauuugcaccuuuuucuaaggacaauucaauucggcuuuccgcugguggagacauuugggugacaagagaaccuuaugugucaugcgauccuggcaaguguuaucaauuugcccuuggacagggaacaacacuaaacaacaggcauucaaaugacacaguacaugauaggaccccuuaucgaacccuauugaugaaugaguuggguguuccauuucauuugggaaccaagcaagugugcauagcaugguccagcucaaguugucacgauggaaaagcauggcugcauguuuguguaacugggcaugaugaaaaugcaacugcuagcuucauuuacgaugggaggcuuguagauaguauugguucaugguccaaaaauauccucaggacccaggagucggaaugcguuuguaucaauggaacuuguacagugguaaugacugauggaagugcuucagaaagagcugauacuaaaauacuauucauugaagaggggaaaaucguucauauuagcccauugucaggaagugcucagcaugucgaggagugcuccuguuauccucgauauccuggugucagaugugucugcagagacaacuggaaaggcuccaauaggcccaucguagauauaaaugugaaagaucauagcauuguuuccaguuaugugugcucaggacuuguuggagacacacccagaaaaaacgacagcuccagcaguagcuauugccggaauccuaacaaugagaaagggagucauggaaugaaaggcugggccuuugaugauggaaaugacguguggaugggaagaacgaucagcgaggaguuacgcucagguuaugaaaccuucaaagucauuggaggcugguccaaaccuaacuccaaauugcagauaaauaggcaagucauaguugacagagguaauagguccgguuauucugguauuuucucuguugaaggcaaaagcugcaucaaucggugcuuuuauguggaguugauaaggggaaggaaacaggaaacugaagucugguggaccucaaacaguauuguuguguuuuguggcaccucagguacauauggaacaggcucauggccugauggggcggacaucaaucucaugccuauauaa

SEQ ID NO: 47345 - RNA, 1410 nt, Artificial Sequence
  derived and/or modified CDS sequence (wt) from neuraminidase__InfluenzaA__ABI21258
augaauccaaaucaaaagauaauaacaauuggcucuguuucucucacuauugccacaauaugcuuccuuaugcaaauugccauccugguaacuacuguaacauugcauuucaagcaauaugagugcaacucccccccaaacaaccaaguaaugcugugugaaccaacaauaauagaaagaaacauaacagagauaguguaucugaccaacaccaccauagagaaagaaauaugccccaaacuagcagaauacagaaauuggucaaagccgcaauguaaaauuacaggauuugcaccuuuuucuaaggacaauucaauucggcuuuccgcugguggagacauuugggugacaagagaaccuuaugugucaugcgauccuggcaaguguuaucaauuugcccuuggacagggaacaacacuaaacaacaggcauucaaaugacacaguacaugauaggaccccuuaucgaacccuauugaugaaugaguuggguguuccauuucauuugggaaccaagcaagugugcauagcaugguccagcucaaguugucacgauggaaaagcauggcugcauguuuguguaacugggcaugaugaaaaugcaacugcuagcuucauuuacgaugggaggcuuguagauaguauugguucaugguccaaaaauauccucaggacccaggagucggaaugcguuuguaucaaugguacuuguacagugguaaugacugauggaagugcuucagaaagagcugauacuaaaauacuauucauugaagaggggaaaaucguucauauuagcccauugucaggaagugcucagcaugucgaggagugcuccuguuauccucgauauccuggugucagaugugucugcagagacaacuggaaaggcuccaauaggcccaucguagauauaaaugugaaagaucauagcauuguuuccaguuaugugugcucaggacuuguuggagacacacccagaaaaaacgacagcuccagcaguagcuauugccggaauccuaacaaugagaaagggagucauggagugaaaggcugggccuuugaugauggaaaugacguguggaugggaagaacgaucagcgaggaguuacgcucagguuaugaaaccuucaaagucauuggaggcugguccaaaccuaacuccaaauugcagauaaauaggcaagucauaguugacagagguaauagguccgguuauucugguauuuucucuguugaaggcaaaagcugcaucaaucggugcuuuuauguggaguugauaaggggaaggaaacaggaaacugaagucugguggaccucaaacaguauuguuguguuuuguggcaccucagguacauauggaacaggcucauggccugauggggcggacaucaaucucaugccuauauaa

SEQ ID NO: 47346 - RNA, 1410 nt, Artificial Sequence
  derived and/or modified CDS sequence (wt) from neuraminidase__InfluenzaA__ABI21269
augaauccaaaucaaaagauaauaacaauuggcucuguuucucucacuauugccacaauaugcuuccuuaugcaaauugccauccugguaacuacuguaacauugcauuucaagcaauaugagugcaacucccccccaaacaaccaaguaaugcugugugaaccaacaauaauagaaagaaacauaacagagauaguguaucugaccaacaccaccauagagaaagaaauaugccccaaacuagcagaauacagaaauuggucaaagccgcaauguaaaauuacaggauuugcaccuuuuucuaaggacaauucaauucggcuuuccgcugguggagacauuuggguaacaagagaaccuuaugugucaugcgauccuggcaaguguuaucaauuugcccuuggacagggaacaacacuaaacaacaggcauucaaaugacacaguacaugauaggaccccuuaucgaacccuauugaugaaugaguuggguguuccauuucauuugggaaccaagcaagugugcauagcaugguccagcucaaguugucacgauggaaaagcauggcugcauguuuguguaacuggacaugaugaaaaugcaacugcuagcuucauuuacgaugggaggcuuguagauaguauugguucaugguccaaaaauauccucaggacccaggagucggaaugcguuuguaucaauggaacuuguacagugguaaugacugauggaagugcuucagaaagagcugauacuaaaauacuauucauugaagaggggaaaaucguucauauuagcccauugucaggaagugcucagcaugucgaggagugcuccuguuauccucgauauccuggugucagaugugucugcagagacaacuggaaaggcuccaauaggcccaucguagauauaaaugugaaagaucauagcauuguuuccaguuaugugugcucaggacuuguuggagacacacccagaaaaaacgacagcuccagcaguagcuauugccggaauccuaacaaugagaaagggagucauggagugaaaggcugggccuuugaugauggaaaugacguguggaugggaagaacgaucagcgaggaguuacgcucagguuaugaaaccuucaaagucauuggaggcugguccaaaccuaacuccaaauugcagauaaauaggcaagucauaguugacagagguaauagguccgguuauucugguauuuucucuguugaaggcaaaagcugcaucaaucggugcuuuuauguggaguugauaaggggaaggaaacaggaaacugaagucugguggaccucaaacaguauuguuguguuuuguggcaccucagguacauauggaacaggcucauggccugauggggcggacaucaaucucaugccuauauaa

SEQ ID NO: 47347 - RNA, 1410 nt, Artificial Sequence; identical to SEQ ID NO: 47346
  derived and/or modified CDS sequence (wt) from neuraminidase__InfluenzaA__ABI21280

SEQ ID NO: 47348 - RNA, 1410 nt, Artificial Sequence; identical to SEQ ID NO: 47264
  derived and/or modified CDS sequence (wt) from neuraminidase__InfluenzaA__ABI21302

SEQ ID NO: 47349 - RNA, 1410 nt, Artificial Sequence
  derived and/or modified CDS sequence (wt) from neuraminidase__InfluenzaA__ABI21313
augaauccaaaucaaaagauaauaacaauuggcucuguuucucucacuauugccacaauaugcuuccuuaugcaaauugccauccugguaacuacuguaacauugcauuucaagcaauaugagugcaauucccccccaaacaaccaaguaaugcugugugaaccaacaauaauagaaagaaacauaacagagauaguguaucugaccaacaccaccauagagaaagaaauaugccccaaacuagcagaauacagaaauuggucaaagccgcaauguaaaauuacaggauuugcaccuuuuucuaaggacaauucaauucggcuuuccgcugguggagacauuugggugacaagagaaccuuaugugucaugcgauccuggcaaguguuaucaauuugcccuuggacagggaacaacacuaaacaacaggcacucaaaugacacaguacaugauaggaccccuuaucgaacccuauugaugaaugaguuggguguuccauuucauuugggaaccaagcaagugugcauagcaugguccagcucaaguugucacgauggaaaagcauggcugcauguuuguguaacugggcaugaugaaaaugcaacugcuagcuucauuuacgaugggaggcuuguagauaguauugguucaugguccaaaaauauccucaggacccaggagucggaaugcguuuguaucaauggaacuuguacaguaguaaugacugauggaagugcuucagaaagagcugauacuaaaauacuauucauugaagaggggaaaaucguucauauuagcccauugucaggaagugcucagcaugucgaggagugcuccuguuauccucgguauccuggugucagaugugucugcagagacaacuggaaaggcuccaauaggcccaucguagauauaaaugugaaagauuauagcauuguuuccaguuaugugugcucaggacuuguuggagacacacccagaaaaaacgacagcuccagcaguagcuauugccggaauccuaacaaugagaaagggagucauggagugaaaggcugggccuuugaugauggaaaugacguguggaugggaagaacgaucagcgaggaguuacgcucagguuaugaaaccuucaaagucauuggaggcugguccaaaccuaacuccaaauugcagauaaauaggcaagucauaguugacagagguaauagguccgguuauucugguauuuucucuguugaaggcaaaagcugcaucaaucggugcuuuuauguggaguugauaaggggaaggaaacaggaaacugaagucugguggaccucaaacaguauuguuguguuuuguggcaccucagguacauauggaacaggcucauggccugauggggcggacaucaaucucaugccuauauaa

SEQ ID NO: 47350 - RNA, 1410 nt, Artificial Sequence; identical to SEQ ID NO: 47200
  derived and/or modified CDS sequence (wt) from neuraminidase__InfluenzaA__ABI21324

SEQ ID NO: 47351 - RNA, 1410 nt, Artificial Sequence; identical to SEQ ID NO: 47200
  derived and/or modified CDS sequence (wt) from neuraminidase__InfluenzaA__ABI21335

SEQ ID NO: 47352 - RNA, 1410 nt, Artificial Sequence; identical to SEQ ID NO: 47265
  derived and/or modified CDS sequence (wt) from neuraminidase__InfluenzaA__ABI21346

SEQ ID NO: 47353 - RNA, 1410 nt, Artificial Sequence
  derived and/or modified CDS sequence (wt) from neuraminidase__InfluenzaA__ABI21357
augaauccaaaucaaaagauaauaacaauuggcucuguuucucucacuauugccacaauaugcuuccuuaugcaaauugccauccugguaacuacuguaacauugcauuucaagcaauaugagugcaacucccccccaaacaaccaaguaaugcugugugaaccaacaauaauagaaagaaacauaacagagauaguguaucugaccaacaccaccauagagaaagaaauaugccccaaacuagcagaauacagaaauuggucaaagccgcaauguaaaauuacaggauuugcaccuuuuucuaaggacaauucaauucggcuuuccgcugguggagacauuugggugacaagagaaccuuaugugucaugcgauccuggcaaguguuaucaauuugcccuuggacagggaacaacacuaaacaacaggcacucaaaugacacaguacaugauaggaccccuuaucgaacccuauugaugaaugaguuggguguuccauuucauuugggaaccaagcaagugugcauagcaugguccagcucaaguugucacgauggaaaagcauggcugcauguuuguguaacugggcaugaugaaaaugcaacugcuagcuucauuuacgaugggaggcuuguagauaguauugguucaugguccaaaaauauccucaggacccaggagucggaaugcguuuguaucaauggaacuuguacaguaguaaugacugauggaagugcuucagaaagagcugauacuaaaauacuauucauugaagaggggaaaaucguucauauuagcccauugucaggaagugcucagcaugucgaggagugcuccuguuauccucgguauccuggugucagaugugucugcagagacaacuggaaaggcuccaauaggcccaucguagauauaaaugugaaaaauuauagcauuguuuccaguuaugugugcucaggacuuguuggagacacacccagaaaaaacgacagcuccagcaguagcuauugccggaauccuaacaaugagaaagggagucauggagugaaaggcugggccuuugaugauggaaaugacguguggaugggaagaacgaucagcgaggaguuacgcucagguuaugaaaccuucaaagucauuggaggcugguccaaaccuaacuccaaauugcagauaaauaggcaagucauaguugacagagguaauagguccgguuauucugguauuuucucuguugaaggcaaaagcugcaucaaucggugcuuuuauguggaguugauaaggggaaggaaacaggaagcugaagucugguggaccucaaacaguauuguuguguuuuguggcaccucagguacauauggaacaggcucauggccugauggggcggacaucaaucucaugccuauauaa

SEQ ID NO: 47354 - RNA, 1410 nt, Artificial Sequence
  derived and/or modified CDS sequence (wt) from neuraminidase__InfluenzaA__ABI21368
augaauccaaaucaaaagauaauaacaauuggcucuguuucucucacuauugccacaauaugcuuccuuaugcaaauugccauccugguaacuacuguaacauugcauuucaagcaauaugagugcaacucccccccaaacaaccaaguaaugcugugugaaccaacaauaauagaaagaaacauaacagagauaguguaucugaccaacaccaccauagagaaagaaauaugccccaaacuagcagaauacagaaauuggucaaagccgcaauguaaaauuacaggauuugcaccuuuuucuaaggacaauucaauucggcuuuccgcugguggagacauuugggugacaagagaaccuuaugugucaugcgauccuggcaaguguuaucaauuugcacuuggacagggaacaacacuaaacaacaggcauucaaaugacaccguacaugauaggaccccuuaucgaacccuauugaugaaugaguuggguguuccauuucauuugggaaccaagcaagugugcauagcaugguccagcucaaguugucacgauggaaaagcauggcugcauguuuguguaacugggcaugaugagaaugcaacugcuagcuucauuuacgaugggaggcuuguagauaguauugguucaugguccaaaaauauccucaggacccaggagucggaaugcguuuguaucaauggaacuuguacaguaguaaugacugauggaagugcuucagaaagagcugauacuaaaauacuauucauugaagaggggaaaaucguucauauuagcccauugucaggaagugcucagcaugucgaggagugcuccuguuauccucgauauccuggugucagaugugucugcagagacaacuggaaaggcuccaauaggcccaucguagauauaaaugugaaagauuauagcauuguuuccaguuaugugugcucaggacuuguuggagacacacccagaaaaaacgacagcuccagcaguagcuauugucggaauccuaacaaugagaaagggagucauggagugaaaggcugggccuuugaugauggaaaugacguguggaugggaagaacgaucagcgaggaguuacgcucagguuaugaaaccuucaaagucauuggaggcugguccaaaccuaacuccaaauugcagauaaauaggcaagucauaguugacagagguaauagguccgguuauucugguauuuucucuguugaaggcaaaagcugcaucaaucggugcuuuuauguggaguugauaaggggaaggaaacaggaaacugaagucugguggaccucaaacaguauuguuguguuuuguggcaccucagguacauauggaacaggcucauggccugauggggcggacaucaaucucaugccuauauaa

SEQ ID NO: 47355 - RNA, 1410 nt, Artificial Sequence; identical to SEQ ID NO: 47264
  derived and/or modified CDS sequence (wt) from neuraminidase__InfluenzaA__ABI21379

SEQ ID NO: 47356 - RNA, 1410 nt, Artificial Sequence; identical to SEQ ID NO: 47197
  derived and/or modified CDS sequence (wt) from neuraminidase__InfluenzaA__ABI21390

SEQ ID NO: 47357 - RNA, 1410 nt, Artificial Sequence
  derived and/or modified CDS sequence (wt) from neuraminidase__InfluenzaA__ABI21401
augaauccaaaucaaaagauaauaacaauuggcucuguuucucucacuauugccacaauaugcuuccuuaugcaaauugccauccugguaacuacuguaacauugcauuucaagcaauaugaaugcaacucccccccaaacaaccaaguaaugcugugugaaccaacaauaauagaaagaaacauaacagagauaguguaucugaccaacaccaccauagagaaagaaauaugccccaaacuagcagaauacagaaauuggucaaagccgcaauguaaaauuacaggauuugcaccuuuuucuaaggacaauucaauucggcuuuccgcugguggagacauuugggugacaagagaaccuuaugugucaugcgauccuggcaaguguuaucaauuugcccuuggacagggaacaacacuaaacaacaggcauucaaaugacacaguacaugauaggaccccuuaucgaacccuauugaugaaugaguuggguguuccauuucauuugggaaccaagcaagugugcauagcaugguccagcucaaguugucacgauggaaaagcauggcugcauguuuguguaacugggcaugaugaaaaugcaacugcuagcuucauuuacgaugggaggcuuguagauaguauugguucaugguccaaaaauauccucaggacccaggagucggaaugcguuuguaucaauggaacuuguacagugguaaugacugauggaagugcuucagaaagagcugauacuaaaauacuauucauugaagaggggaaaaucguucauauuagcccauugucaggaagugcucagcaugucgaggagugcuccuguuauccucgauauccuggugucagaugugucugcagagacaacuggaaaggcuccaauaggcccaucguagauauaaaugugaaagaucauagcauuguuuccaguuaugugugcucaggacuuguuggagacacacccagaaaaaacgacagcuccagcaguagcuauugccggaauccuaacaaugagaaagggagucauggagugaaaggcugggccuuugaugauggaaaugauguguggaugggaagaacgaucagcgaggaguuacgcucagguuaugaaaccuucaaagucauuggaggcugguccaaaccuaacuccaaauugcagauaaauaggcaagucauaguugacagagguaauagguccgguuauucugguauuuucucuguugaaggcaaaagcugcaucaaucggugcuuuuauguggaguugauaaggggaaggaaacaggaaacugaagucugguggaccucaaacaguauuguuguguuuuguggcaccucagguacauauggaacaggcucauggccugauggggcggacaucaaucucaugccuauauaa

SEQ ID NO: 47358 - RNA, 1410 nt, Artificial Sequence
  derived and/or modified CDS sequence (wt) from neuraminidase__InfluenzaA__ABI21412
augaauccaaaucaaaagauaauaacaauuggcucuguuucucucacuauugccacaauaugcuuccuuaugcaaauugccauccugguaacuacuguaacauugcauuucaagcaauaugagugcaacccccccccaaacaaccaaguaaugcugugugaaccaacaauaauagaaagaaacauaacagagauaguguaucugaccaacaccaccauagagaaagaaauaugccccaaacuagcagaauacagaaauuggucaaagccgcaauguaaaauuacaggauuugcaccuuuuucuaaggacaauucaauucggcuuuccgcugguggagacauuugggugacaagagaaccuuaugugucaugcgauccuggcaaguguuaucaauuugcccuuggacagggaacaacacuaaacaacaggcacucaaaugacacaguacaugauaggaccccuuaucgaacccuauugaugaaugaguuggguguuccauuucauuugggaaccaagcaagugugcauagcaugguccagcucaaguugucacgauggaaaagcauggcugcauguuuguguaacugggcaugaugaaaaugcaacugcuagcuucauuuacgaugggaggcuuguagauaguauugguucaugguccaaaaauauccucaggacccaggagucggaaugcguuuguaucaauggaacuuguacaguaguaaugacugauggaagugcuucagaaagagcugauacuaaaauacuauucauugaagaggggaaaaucguucauauuagcccauugucaggaagugcucagcaugucgaggagugcuccuguuauccucgguauccuggugucagaugugucugcagagacaacuggaaaggcuccaauaggcccaucguagauauaaaugugaaagauuauagcauuguuuccaguuaugugugcucaggacuuguuggagacacacccagaaaaaacgacagcuccagcaguagcuauugccggaauccuaacaaugagaaagggagucauggagugaaaggcugggccuuugaugauggaaaugacguguggaugggaagaacgaucagcgaggaguuacgcucagguuaugaaaccuucaaagucauuggaggcugguccaaaccuaacuccaaauugcagauaaauaggcaagucauaguugacagagguaauagguccgguuauucugguauuuucucuguugaaggcaaaagcugcaucaaucggugcuuuuauguggaguugauaaggggaaggaaacaggaaacugaagucugguggaccucaaacaguauuguuguguuuuguggcaccucagguacauauggaacaggcucauggccugauggggcggacaucaaucucaugccuauauaa

SEQ ID NO: 47359 - RNA, 1410 nt, Artificial Sequence; identical to SEQ ID NO: 47308
  derived and/or modified CDS sequence (wt) from neuraminidase__InfluenzaA__ABI21423

SEQ ID NO: 47360 - RNA, 1410 nt, Artificial Sequence; identical to SEQ ID NO: 47197
  derived and/or modified CDS sequence (wt) from neuraminidase__InfluenzaA__ABI21434

SEQ ID NO: 47361 - RNA, 1410 nt, Artificial Sequence; identical to SEQ ID NO: 47346
  derived and/or modified CDS sequence (wt) from neuraminidase__InfluenzaA__ABI21445

SEQ ID NO: 47362 - RNA, 1410 nt, Artificial Sequence; identical to SEQ ID NO: 47346
  derived and/or modified CDS sequence (wt) from neuraminidase__InfluenzaA__ABI21456

SEQ ID NO: 47363 - RNA, 1410 nt, Artificial Sequence; identical to SEQ ID NO: 47358
  derived and/or modified CDS sequence (wt) from neuraminidase__InfluenzaA__ABI21467

SEQ ID NO: 47364 - RNA, 1410 nt, Artificial Sequence; identical to SEQ ID NO: 47346
  derived and/or modified CDS sequence (wt) from neuraminidase__InfluenzaA__ABI21478

SEQ ID NO: 47365 - RNA, 1410 nt, Artificial Sequence; identical to SEQ ID NO: 47266
  derived and/or modified CDS sequence (wt) from neuraminidase__InfluenzaA__ABI21489

SEQ ID NO: 47366 - RNA, 1410 nt, Artificial Sequence; identical to SEQ ID NO: 47346
  derived and/or modified CDS sequence (wt) from neuraminidase__InfluenzaA__ABI21500

SEQ ID NO: 47367 - RNA, 1410 nt, Artificial Sequence
  derived and/or modified CDS sequence (wt) from neuraminidase__InfluenzaA__ABI21511
augaauccaaaucaaaagauaauaacaauuggcucuguuucucucaccauugccacaauaugcuuccuuaugcaaauugccauccugguaacuacuguaacauugcauuucaagcaguaugaaugcaacucccccccaaacaaccaaguaaugcugugugaaccagcaauaauagaaagaaacauaacagagauaguguaucugaccaacaccaccauagagaaggaaaugugccccaaauuagcagaauacagaaauuggucaaagccgcaauguaacauuacaggauuugcaccuuuuuccaaggacaauucgauucggcuuuccgcugguggggacaucugggugacaagagaaccuuaugugucaugcgauccugacaaguguuaucaauuugcccuuggacagggaacaacacuaaacaacgggcauucaaaugacacaguacaugauaggaccccuuaccggacccuauugaugaaugaauuggguguuccauuucauuugggaaccaggcaagugugcauagcaugguccagcucaaguugucacgauggaaaagcauggcugcauguuuguguaacuggggaugaugaaaaugcaacugcuagcuucauuuacgaugggaggcuuguagauaguauugguucaugguccaaaaaaauacucagaacccaggagucggaaugcguuuguaucaauggaacuuguacaguaguaaugacugaugggagcgcuucaggaaaagcugauacuaaaauacuauucauugaggaggggaagaucguuaauauuagcacauugucaggaagugcucagcaugucgaggagugcuccuguuauccucgauauccuggugucagaugugucugcagagacaacuggaaaggcuccaauaggcccaucguagauauaaauguaaaggauuauagcauuguuuccaguuaugugugcucaggacuuguuggagacacacccagaaaaaacgacagcuucagcaguagccauugccuagauccuaacaaugaggaagguggucauggagugaaaggcugggccuuugaugauggaaaugacguguggaugggaagaacgaucagcgagaaguuacgcucagguuaugaaaccuucaaagucaucgaaggcugguccaaaccuaacuccaaauuacagauaaauaggcaagucauaguugaaagagguaacagguccgguuauucugguauuuucuccguugaaggcaaaagcugcaucaaucggugcuuuuauguggaguugauaaggggaaggaaagaggaaacugaaguuugguggaccucaaacaguauuguuguguuuuguggcaccucagguacauauggaacaggcucauggccugauggggcggauaucaaucucaugccuauauaa

SEQ ID NO: 47368 - RNA, 1413 nt, Artificial Sequence
  derived and/or modified CDS sequence (wt) from neuraminidase__InfluenzaA__ABI21533
augaauccaaaucaaaaaauaauaaccauuggaucaaucaguauagcaaucggaauaauuagucuaauguugcaaauaggaaauauuauuucaauaugggcuagucacucaauccaaacuggaagucaaaaccacacuggaauaugcaaccaaagaaucaucacauaugaaaacagcaccugggugaaucacacauauguuaauauuaacaacacuaauguuguugcuggaaaggacaaaacuucagugacauuggccggcaauucaucucuuuguucuaucaguggaugggcuauauacacaaaagacaacagcauaagaauugguuccaaaggagauguuuuugucaugagagagccuuucauaucauguucucacuuggaaugcagaaccuuuuuucugacccaaggugcucuauuaaaugacaaacauucaaaugggaccguuaaggacagaaguccuuauagggccuuaaugaguuguccucuaggugaagcuccgucuccauauaauucaaaguuugaaucaguugcuuggucagcaagcgcaugccaugauggcaugggcugguuaacaaucggaauuucugguccagauaauggagcaguggcuguacuaaaauacaacggcauaauaacugaaaccauaaaaaguuggaaaaagcgaauauuaagaacacaagagucugaaugugucugugugaacgggucauguuuuaccauaaugaccgauggcccgaguaauggggccgccucguacaaaaucuucaagaucgaaaaggggaagguuauuaaaucaauagaguugaaugcacccaauucucauuaugaggaauguuccuguuacccagacacuggcacagugauguguguaugcagggacaacuggcacgguucaaaucgaccuugggugucuuuuaaucaaaaccuggauuaucaaauaggauacaucugcagugggguguucggugacaauccgcgucccaaagauggagagggcagcuguaauccagugacuguugauggagcagacggaguaaagggguuuucauacaaauaugguaaugguguuuggauaggaaggacuaaaaguaacagacucagaaagggguuugagaugauuugggauccuaauggauggacagauaccgacagugauuucucagugaaacaggauguuguggcaauaacugauuggucaggguacagcggaaguuucguucaacauccugaguuaacaggauuggacuguauaagaccuugcuucuggguugaguuagucagaggacggccuagagaaaauacaacaaucuggacuagugggagcagcauuucuuuuuguggcguaaauagugauacugcaaacuggucuuggccagacggugcugaguugccauucaccauugacaaguag

SEQ ID NO: 47369 - RNA, 1413 nt, Artificial Sequence; identical to SEQ ID NO: 47368
  derived and/or modified CDS sequence (wt) from neuraminidase__InfluenzaA__ABI21544

SEQ ID NO: 47370 - RNA, 1413 nt, Artificial Sequence; identical to SEQ ID NO: 47368
  derived and/or modified CDS sequence (wt) from neuraminidase__InfluenzaA__ABI21555

SEQ ID NO: 47371 - RNA, 1413 nt, Artificial Sequence; identical to SEQ ID NO: 47368
  derived and/or modified CDS sequence (wt) from neuraminidase__InfluenzaA__ABI21566

SEQ ID NO: 47372 - RNA, 1413 nt, Artificial Sequence; identical to SEQ ID NO: 47368
  derived and/or modified CDS sequence (wt) from neuraminidase__InfluenzaA__ABI21577

SEQ ID NO: 47373 - RNA, 1413 nt, Artificial Sequence
  derived and/or modified CDS sequence (wt) from neuraminidase__InfluenzaA__ABI22112
augaauccaaaucaaaaaauaauaaccauuggaucaaucaguauagcaaucggaauaauuagucuaauguugcaaauaggaaauauuauuucaauaugggcuagucacucaauccaaacuggaagucaaaaccacacuggaauaugcaaccaaagaaucaucacauaugaaaacagcaccugggugaaucacacauauguuaauauuaacaacacuaauguuguugcuggaaaggacaaaacuucagugacauuggccggcaauucaucucuuuguucuaucaguggaugggcuauauacacaaaagacaacagcauaagaauuggcuccaaaggagauguuuuugucauaagagaaccuuucauaucauguucucauuuggaaugcaggaccuuuuuucugacccaaggugcucuauuaaaugacaaacauucaaauggaaccguuaaggacagaaguccuuauagggccuuaaugagcuguccucuaggugaagcuccguccccauacaauucaaaguuugaaucaguugcauggucagcaagcgcaugccaugauggcaugggcugguuaacaaucggaauuucugguccagacaauggagcuguggcuguacuaaaauacaacgaaauaauaacugaaaccauaaaaaguuggaaaaagcgaauauugagaacacaagagucugaaugugucugugugaacgggucauguuucaccauaaugaccgauggcccgaguaauggggccgccucguacaaaaucuucaagaucgaaaaggggaagguuacuaaaucaauagaguuaaaugcacccaauuuucauuaugaggaauguuccuguuacccagacacuggcacagugauguguguaugcagggacaacuggcaugguucaaaucgaccuugggugucuuuuaaucaaaacuuggauuaucaaauaggauacaucugcaguggaguguucggugacaauccgcgucccaaagauggaaagggcagcuguaauccagugacuguugauggagcagacggaguuaagggguuuucauacaaauaugguaaugguguuuggauaggaaggacuaaaaguaacagacuuagaaagggguuugagaugauuugggauccuaauggauggacagauaccgacagugauuucucagugaaacaggauguuguggcaauaacugauuggucaggguacaguggaaguuucguucaacauccugaguuaacaggauuggacuguauaagaccuugcuucuggguugaguuagucagaggacugccuagagaaaauacaacaaucuggacuagugggagcagcauuucuuuuuguggcguugauagugauacugcaaacuggucuuggccagacggugcugaguugccguucaccauugacaaauag

SEQ ID NO: 47374 - RNA, 1410 nt, Artificial Sequence
  derived and/or modified CDS sequence (wt) from neuraminidase__InfluenzaA__ABI22162
augaauccaaaucaaaagauaauaacgauuggcucuguuucucucaccauuuccacaauaugcuucuucaugcaaauugccaucuugauaacuacuguaacauugcauuucaagcaauaugaauucaacucccccccaaacaaccaagugaugcugugugaaccaacaauaauagaaagaaacauaacagagauaguguaucugaccaacaccaccauagagaaggaaauaugccccaaacuagcagaauacagaaauuggucaaagccgcaguguaacauuacaggauuugcaccuuuuucuaaggacaauucgauuaggcuuuccgcugguggggacaucugggugacaagagaaccuuaugugucaugcgauccugacaaguguuaucaauuugcccuuggacagggaacaacacuaaacaacgugcauucaaaugacacaguacaugauaggaccccuuaucggacccuauugaugaaugaguuagguguuccauuucaucuggggaccaagcaagugugcauagcaugguccagcucaaguugucacgauggaaaagcauggcugcauguuuguguaacgggggaugauaaaaaugcaacugcuagcuucauuuacaaugggaggcuuguagauaguauuguuucaugguccaaagaaauccucaggacccaggagucagaaugcguuuguaucaauggaacguguacaguaguaaugacugaugggagugcuucaggaaaagcugauacuaaaauacuauucauugaggaggggaaaaucguucauacuagcacauugucaggaagugcucagcaugucgaggagugcuccugcuauccucgauauccuggugucagaugugucugcagagacaacuggaaaggcuccaauaggcccauaguagauauaaacauaaaggauuauagcauuguuuccaguuaugugugcucaggacuuguuggagacacacccagaaaaaacgacagcuccagcaguagccauugcuuggauccuaacaaugaagaagguggucauggagugaaaggcugggccuuugaugauggaaaugacguguggaugggaagaacgaucagcgagaaguuacgcucaggauaugaaaccuucaaagucauugaaggcugguccaacccuaauuccaaauugcagacaaauaggcaagucauaguugacagagguaauagguccgguuauucuggcauuuucucuguugaaggcaaaagcugcaucaaucggugcuuuuauguggaguugauaaggggaagaaaagaggaaacugaagucuuguggaccucaaacaguauuguuguguuuuguggcaccucagguacauauggaacaggcucauggccugauggggcggacaucgaucucaugccuauauaa

SEQ ID NO: 47375 - RNA, 1350 nt, Artificial Sequence
  derived and/or modified CDS sequence (wt) from neuraminidase__InfluenzaA__ABI23981
augaauccaaaucagaagauaauaaccaucggaucaaucuguaugguaauuggaauaguuagcuuaauguuacaaauugggaacaugaucucaauaugggucagucauucaauucagacagggaaucaacgccaagcugaaucaaucagcaauacuaaauuucuuacugagaaagcuguggcuucaguaacauuagcgggcaauucaucucuuugccccauuagcggaugggcuguauacaguaaggacaacaguauaaggaucgguuccaggggggauguguuuguuauaagagagccguucaucucaugcucccacuuggaaugcagaacuuucuuuuugacucagggagccuugcugaaugacaagcacuccaaugggacugucaaagacagaagcccuuacagaacauugaugaguaguccugugggugaggcucccuccccauauaacucaagauuugagucuguugcuuggucagcaagugcuugccaugauggcaccaguugguugacaauuggaauuucugguccagacaauggggcuguggcuguauugaaauacaauggcauaauaacagacaccaucaagaguuggaggaacaacauacugagaacccaagagucugaaugugcauguguaaauggcucuugcuuuacuguaaugacugauggaccaaguaaugggcaggcaucauauaagaucuucaaaauggaaaaagggaaagugguuaaaucagucgaauuggaugcuccuaauuaucacuaugaggagugcuccuguuauccugaugccggcgaaaucacaugugugugcagggauaauuggcauggcucaaauaggccauggguaucuuucaaucaaaauuuggaguaucaaauaggauauauaugcaguggaguuuucggagacaauccacgccccaaugauggaacagguaguugugguccggugucccuuaacggggcauaugggguaaaaggguuuucauuuaaauacggcaaugguguuuggauugggagaaccaaaagcacuaauuccaggagcggcuuugaaaugauuugggauccaaauggauggacuggaacggacaguagcuuuucggugaagcaagauaucguagcaauaacugauuggucaggauauagcgggaguuuuguccagcauccagaauugacaggauuagauugcauaagaccuuguuucuggguugaguuaaucagagggcggccuaaagagagcacaauuuggaccagugggagcagcauaucuuuuugugguguaaauagugacacuguuaguuggucuuggccagacggugcugaguugccauucaccauugacaaguag

SEQ ID NO: 47376 - RNA, 1410 nt, Artificial Sequence
  derived and/or modified CDS sequence (wt) from neuraminidase__InfluenzaA__ABI26649
augaauccaaaucaaaagauaauaacgauuggcucuguuucucucaccauuuccacaauaugcuucuuuaugcaaauugccaucuugauaacuacuguaacauugcauuucaagcaauaugaauucaacucccccccaaacaaccaagugaugcugugugaaccaacaauaauagaaagaaacauaacagagauaguguaucugaccaacaccaccauagagaaggaaauaugccccaaacuagcagaauacagaaauuggucaaagccgcaaugugacauuacaggauuugcaccuuuuucuaaggacaauucgauuaggcuuuccgcugguggggacaucugggugacaagagaaccuuaugugucaugcgauccugacaaauguuaucaauuugcccuuggacagggaacaacacuaaacaacgugcauucaaaugacacaguacaugauaggaccccuuaucggacccuauugaugaaugaguuagguguuccauuucaucuggggacuaagcaagugugcauagcaugguccagcucaaguugucacgauggaaaagcauggcugcauguuuguguaacgggggaugauaaaaaugcaacugcuagcuucauuuacaaugggaggcuuguagauaguauuguuucaugguccaaagaaauccucagaacccaggagucagaaugcguuuguaucaauggaacuuguacaguaguaaugacugaugggagugcuucaggaaaagcugauacuaaaauacuauucauugaggaggggaaaaucguucauacuagcacauugucaggaagugcccagcaugucgaggagugcuccugcuauccucgauauccuggugucagaugugucugcagagacaacuggaaaggcuccaauaggcccaucguagauauaaacauaaaggauuauagcauuguuuccaguuaugugugcucaggacuuguuggagacacacccagaaaaaacgacagcuccagcaguagccauugcuuggauccuaacaaugaagaagguggucauggagugaaaggcugggccuuugaugauggaaaugacguguggaugggaagaacgaucagcgagaaguuacgcucaggauaugaaaccuucaaagucauugaaggcugguccaacccuaauuccaaauugcagauaaauaggcaagucauaguugacagagguaauagguccgguuauucugguauuuucucuguugaaggcaaaagcugcaucaaucggugcuuuuauguggaguugauaaggggaagaaaagaggaaacugaagucuuguggaccucaaacaguauuguuguguuuuguggcacaucagguacauauggaacaggcucauggccugauggggcggacaucaaucucaugccuauauaa

SEQ ID NO: 47377 - RNA, 1413 nt, Artificial Sequence; identical to SEQ ID NO: 47062
  derived and/or modified CDS sequence (wt) from neuraminidase__InfluenzaA__ABI30370

SEQ ID NO: 47378 - RNA, 1410 nt, Artificial Sequence
  derived and/or modified CDS sequence (wt) from neuraminidase__InfluenzaA__ABI30392
augaauccaaaucaaaagauaauaacaauuggcucuguuucucucacuauugccacaauaugcuuccuuaugcaaauugccauccugguaacuacuguaacauugcauuucaagcaauaugagugcaacucccccccaagcaaccaaguaaugcugugugaaccaacaauaauagaaagaaacauaacagagauaguguauuugacuaacaccaccauagagaaagaaauaugccccaaacuggcagaauacagaaauuggucaaagccgcaauguaaaauuacaggauuugcaccuuuuucuaaggacaauucaauucggcuuuccgcugguggagacauuugggugacaagagaaccuuaugugucaugcgauccuggcaaguguuaucaauuugcacuuggacagggaacaacacuaaacaacaggcauucaaaugacacaguacaugauaggaccccuuaucgaacccuauugaugaaugaguuggguguuccauuucauuugggaaccaagcaagugugcauagcaugguccagcucaaguugucacgauggaaaagcauggcugcauguuuguguaacugggcaugaugaaaaugcaacugcuagcuucauuuacgaugggaggcuuguagauaguauugguucaugguccaaaaauauccucaggacccaggagucggaaugcguuuguaucaauggaacuuguacaguaguaaugacugauggaagugcuucagaaagagcugauacuaaaauacuauucauugaagaggggaaaaucguucauauuagcccauugucaggaagugcucagcaugucgaggagugcuccuguuauccucgauauccuggugucagaugugucugcagagacaacuggaaaggcuccaauaggcccaucguagauauaaaugugaaagacuauagcauuguuuccaguuaugugugcucaggacuuguuggagacacacccagaaaaaacgacagcuccagcaguagcuauugccggaauccuaacaaugagaaagggagucauggagugaaagguugggccuuugaugauggaaaugacguguggaugggaagaacgaucagcgaggaguuacgcucugguuaugaaaccuucaaaguuauuggaggcugguccaaaccuaacuccaaauugcagauaaauaggcaagucauaguugacagagguaauagguccgguuauucugguauuuucucuguugaaggcaaaagcugcaucaaucggugcuuuuauguggaguugauaaggggaaggaaacaggaaacugaagucugguggaccucaaacaguauuguuguguuuuguggcaccucagguacauauggaacaggcucauggccugauggggcggacaucaaucucaugccuauauaa

SEQ ID NO: 47379 - RNA, 1410 nt, Artificial Sequence
  derived and/or modified CDS sequence (wt) from neuraminidase__InfluenzaA__ABI30403
augaauccaaaucaaaagauaauaacgauuggcucuguuucucucaccauugccacaauaugcuuccuuaugcaaauugccauccugguaacuacuguaacguugcauuucaagcaauaugaaugcaacucccccccaaacaaccaagugaugcugugugaaccaacaauaauagaaagaaacauaacagagauaguguaucugaccaacaccaccauagagaaggaaauaugccccaaacuagcagaauacagaaauuggucaaagccgcaauguaacauuacaggauuugcaccuuuuucuaaggacaauucgauucggcuuuccgcugguggggacaucugggugacaagagaaccuuaugugucaugcgauccugacaaguguuaucaauuugcccuuggacagggaacaacacuaaacaacgggcauucaaaugacacaguacaugauaggaccccuuaucgaacccuauugaugaaugaguuggguguuccauuucauuugggaaccaagcaagugugcauagcaugguccagcucaaguugucacgauggaaaagcauggcugcauguuuguguaacgggggaugaugaaaaugcaacugcuagcuucauuuacaaugggaggcuuguagauaguaucgguucaugguccaaaaaaauccucaggacccaggagucggaaugcguuuguaucaauggaacuuguacaguaguaaugacugaugggagugcuucaggaaaagcugauacuaaaauacuauucauugaggaggggaaaaucguucauacuagcucauugucaggaagugcucagcaugucgaggagugcuccuguuauccucgauauccuggugucagaugugucugcagagacaacuggaaaggcuccaauaggcccaucguagauauaaaugugaaggauuauagcauuguuuccaguuaugugugcucaggacuuguuggagacacacccagaaaaaacgacagcuccagcaguagccauugcuuggauccuaacaaugaggaagguggucauggagugaaaggcugggccuuugaugauggaaaugacguguggaugggaagaacgaucagcgagaaguuacgcucaggauaugaaaccuucaaagucauugaaggcugguccaaaccuaacuccaaauugcagauaaauaggcaagucauaguugacagagguaauagguccgguuauucugguauuuucucuguugaaagcaaaagcugcaucaauaggugcuuuuauguggaguugauaaggggaaggaaacaggaaacugaagucuuguggaccucaaacaguauuguuguguuuuguggcaccucagguacauauggaacaggcucauggccugauggggcggacaucaaucucaugccuauauaa

SEQ ID NO: 47380 - RNA, 1410 nt, Artificial Sequence; identical to SEQ ID NO: 46755
  derived and/or modified CDS sequence (wt) from neuraminidase__InfluenzaA__ABI30414

SEQ ID NO: 47381 - RNA, 1410 nt, Artificial Sequence
  derived and/or modified CDS sequence (wt) from neuraminidase__InfluenzaA__ABI30425
augaauccaaaucaaaagauaauaacgauuggcucuguuucucucaccauuuccacaauaugcuucuucaugcaaauugccaucuugauaacuacuguaacauugcauuucaagcaauaugaauucaacucccccccaaacaaccaagugaugcugugugaaccaacaauaauagaaagaaacauaacagagauaguguaucugaccaacaccaccauagagaaggaaauaugccccaaacuagcagaauacagaaauuggucaaagccgcaaugugacauuacaggauuugcaccuuuuucuaaggacaauucgauuagacuuuccgcugguggggacaucugggugacaagagaaccuuaugugucaugcgacccugacaaguguuaucaauuugcccuuggacagggaacaacacuaaacaacgugcauucaaaugacacaguacaugauaggaccccuuaucggacccuauugaugaaugaguuagguguuccauuucaucuggggaccaagcaagugugcauagcaugguccagcucaaguugucacgauggaaaagcauggcugcauguuuguguaacgggggaugauaaaaaugcaacugcuagcuucauuuacaaugggaggcuuguagauaguauuguuucaugguccaaagaaauccucaggacccaggagucagaaugcguuuguaucaauggaacuuguacaguaguaaugacugaugggagugcuucaggaaaagcugauacuaaaauacuauucauugaggaggggaaaaucguucauacuagcacauugucaggaagugcucagcaugucgaggagugcuccugcuauccucgauauccuggugucagaugugucugcagagacaacuggaaaggcuccaauaggcccaucguagauauaaacauaaaggauuauagcauuguuuccaguuaugugugcucaggacuuguuggagacacacccagaaaaaacgacagcuccagcaguagccauugcuuggauccuaacaaugaagaagguggucauggagugaaaggcugggccuuugaugauggaaaugacguguggaugggaagaacgaucagcgagaaguuacgcucaggauaugaaaccuucaaagucauugaaggcugguccaacccuaauuccaaauugcagauaaauaggcaagucauaguugacagagguaauagguccgguuauucugguauuuucucuguugaaggcaaaagcugcaucaaucggugcuuuuauguggaguugauaaggggaagaaaagaggaaacugaagucuuguggaccucaaacaguauuguuguguuuuguggcaccucagguacauauggaacaggcucauggccugauggggcggacaucaaucucaugccuauauaa

SEQ ID NO: 47382 - RNA, 1410 nt, Artificial Sequence; identical to SEQ ID NO: 46378
  derived and/or modified CDS sequence (wt) from neuraminidase__InfluenzaA__ABI30436

SEQ ID NO: 47383 - RNA, 1410 nt, Artificial Sequence; identical to SEQ ID NO: 47381
  derived and/or modified CDS sequence (wt) from neuraminidase__InfluenzaA__ABI30447

SEQ ID NO: 47384 - RNA, 1410 nt, Artificial Sequence; identical to SEQ ID NO: 46378
  derived and/or modified CDS sequence (wt) from neuraminidase__InfluenzaA__ABI30458

SEQ ID NO: 47385 - RNA, 1410 nt, Artificial Sequence; identical to SEQ ID NO: 46378
  derived and/or modified CDS sequence (wt) from neuraminidase__InfluenzaA__ABI30469

SEQ ID NO: 47386 - RNA, 1410 nt, Artificial Sequence; identical to SEQ ID NO: 46378
  derived and/or modified CDS sequence (wt) from neuraminidase__InfluenzaA__ABI30480

SEQ ID NO: 47387 - RNA, 1410 nt, Artificial Sequence
  derived and/or modified CDS sequence (wt) from neuraminidase__InfluenzaA__ABI30491
augaauccaaaucaaaagauaauaacgauuggcucuguuucucucaccauuuccacaauaugcuucuuuaugcaaauugccaucuugauaacuacuguaacauugcauuucaagcaauaugaauucaacucccccccaaacaaccaagugaugcugugugaaccaacaauaauagaaagaaacauaacaaagauaguguaucugaccaacaccaccauagagaaggaaauaugccccaaacuagcagaauacagaaauuggucaaagccgcaaugugacauuacaggauuugcaccuuuuucuaaggacaauucgauuaggcuuuccgcugguggggacaucugggugacaagagaaccuuaugugucaugcgauccugacaaauguuaucaauuugcccuuggacagggaacaacacuaaacaacgugcauucaaaugacacaguacaugauaggaccccuuaucggacccuauugaugaaugaguuagguguuccauuucaucuggggacuaagcaagugugcauagcaugguccagcucaaguugucacgauggaaaagcauggcugcauguuuguguaacgggggaugauaaaaaugcaacugcuagcuucauuuacaaugggaggcuuguagauaguauuguuucaugguccaaagaaauccucagaacccaggagucagaaugcguuuguaucaauggaacuuguacaguaguaaugacugaugggagugcuucaggaaaagcugauacuaaaauacuauucauugaggaggggaaaaucguucauacuagcacauugucaggaagugcccagcaugucgaggagugcuccugcuauccucgauauccuggugucagaugugucugcagagacaacuggaaaggcuccaauaggcccaucguagauauaaacauaaaggauuauagcauuguuuccaguuaugugugcucaggacuuguuggagacacacccagaaaaaacgacagcuccagcaguagccauugcuuggauccuaacaaugaagaagguggucauggagugaaaggcugggccuuugaugauggaaaugacguguggaugggaagaacgaucagcgagaaguuacgcucaggauaugaaaccuucaaagucauugaaggcugguccaacccuaauuccaaauugcagauaaauaggcaagucauaguugacagagguaauagguccgguuauucugguauuuucucuguugaaggcaaaagcugcaucaaucggugcuuuuauguggaguugauaaggggaagaaaagaggaaacugaagucuuguggaccucaaacaguauuguuguguuuuguggcaccucagguacauauggaacaggcucauggccugauggggcggacaucaaucucaugccuauauaa

SEQ ID NO: 47388 - RNA, 1410 nt, Artificial Sequence; identical to SEQ ID NO: 46378
  derived and/or modified CDS sequence (wt) from neuraminidase__InfluenzaA__ABI30502

SEQ ID NO: 47389 - RNA, 1410 nt, Artificial Sequence
  derived and/or modified CDS sequence (wt) from neuraminidase__InfluenzaA__ABI30513
augaauccaaaucaaaagauaauaacgauuggcucuguuucucucaccauuuccacaauaugcuucuuuaugcaaauugccaucuugauaacuacuguaacauugcauuucaagcaauaugaauucaacucccccccaaacaaccaagugaugcugugugaaccaacaauaauagaaagaaacauaacagagauaguguaucugaccaacaccaccauagagaaggaaauaugccccaaacuagcagaauacagaaauuggucaaagccgcaaugugacauuacaggauuugcaccuuuuucuaaggacaauucgauuaggcuuuccgcugguggggacaucugggugacaagagaaccuuaugugucaugcgauccugacaaauguuaucaauuugcccuuggacagggaacaacacuaaacaacgugcauucaaaugacacaguacaugauaggaccccuuaucggacccuauugaugaaugaguuagguguuccauuucaucuggggacuaagcaagugugcauagcaugguccagcucaaguugucacgauggaaaagcauggcugcauguuuguguaacgggggaugauaaaaaugcaacugcuagcuucauuuacaaugggaggcuuguagauaguauuguuucaugguccaaagaaauccucagaacccaggagucagaaugcguuuguaucaauggaacuuguacaguaguaaugacugaugggagugcuucaggaaaagcugauacuaaaauacuauucauugaggaggggaaaaucguucauacuagcacauugucaggaagugcccagcaugucgaggagugcuccugcuauccucgauauccuggugucagaugugucugcagagacaacuggaaaggcuccaauaggcccaucguagauauaaacauaaaggauuauagcauuguuuccaguuaugugugcucaggacuuguuggagacacacccagaaaaaacgacagcuccagcaguagccauugcuuggauccuaacaaugaagaagguggucauggagugaaaggcugggccuuugaugauggaaaugacguguggaugggaagaacgaucagcgagaaguuacgcucaggauaugaaaccuucaaagucauugaaggcugguccaacccuaauuccaaauugcagacaaauaggcaagucauaguugacagagguaauagguccgguuauucugguauuuucucuguugaaggcaaaagcugcaucaaucggugcuuuuauguggaguugauaaggggaagaaaagaggaaacugaagucuuguggaccucaaacaguauuguuguguuuuguggcaccucagguacauauggaacaggcucauggccugauggggcggacaucaaucucaugccuauauaa

SEQ ID NO: 47390 - RNA, 1410 nt, Artificial Sequence; identical to SEQ ID NO: 47337
  derived and/or modified CDS sequence (wt) from neuraminidase__InfluenzaA__ABI30524

SEQ ID NO: 47391 - RNA, 1410 nt, Artificial Sequence; identical to SEQ ID NO: 46378
  derived and/or modified CDS sequence (wt) from neuraminidase__InfluenzaA__ABI30535

SEQ ID NO: 47392 - RNA, 1410 nt, Artificial Sequence
  derived and/or modified CDS sequence (wt) from neuraminidase__InfluenzaA__ABI30546
augaauccaaaucaaaagauaauaacgauuggcucuguuucucucaccauuuccacaauaugcuucuucaugcaaauugccaucuugauaacuacuguaacauugcauuucaagcaauaugaauucaacucccccccaaacaaccaggugaugcugugugaaccaacaauaauagaaagaaacauaacagagauaguguaucugaccaacaccaccauagagaaggaaauaugccccaaacuagcggaauacagaaauuggucaaagccgcaaugugacauuacaggauuugcaccuuuuucuaaggacaauucgauuaggcuuuccgcugguggggacaucugggugacaagagaaccuuaugugucaugcgauccugacaaguguuaucaauuugcccuuggacaggggacaacacuaaacaacuugcauucaaaugacacaguacaugauaggaccccuuaucggacccuauugaugagugaguuagguguuccauuucaucuggggaccaagcaagugugcauagcaugguccagcucaaguugucacgauggaaaagcauggaugcauguuuguguaacgggggaugauaaaaaugcaacugcuagcuucauuuacaaugggaggcuuguagauaguauuguuucaugguccaaagaaauccucaggacccaggagucagaaugcguuuguaucaauggaacuuguacaguaguaaugacugaugggagugcuucaggaaaagcugauacuaaaauacuauucauugaggaggggaaaauuguucauacuagcacauugucaggaagugcucagcaugucgaggaguguuccugcuauccucgauauccuggugucagaugugucugcagagacaacuggaaaggcuccaauaggcccaucguagauauaaacauaaaggauuauagcauuguuuccaguuaugugugcucaggacuuguuggagacacacccagaaaaaacgacagcuccagcaguagccauugcuuggauccuaacaaugaagaagguggucauggagugaaaggcugggccuuugaugauggaaaugacguguggaugggaagaacgaucagcgagaaguuacgcucaggauaugaaaccuucaaagucauugaaggcugguccaacccuaauuccaaauugcagauaaauaggcaagucauaguugacagagguaauagguccgguuauucugguauuuucucuguugaaggcaaaaacugcaucaaucggugcuuuuauguggaguugauaaggggaagaaaagaggaaacugaagucuuguggaccucaaacaguauuguuguguuuuguggcacaucagguacauauggaacaggcucauggccugauggggcggacaucaaucucaugccuauauaa

SEQ ID NO: 47393 - RNA, 1410 nt, Artificial Sequence; identical to SEQ ID NO: 46378
  derived and/or modified CDS sequence (wt) from neuraminidase__InfluenzaA__ABI30557

SEQ ID NO: 47394 - RNA, 1410 nt, Artificial Sequence
  derived and/or modified CDS sequence (wt) from neuraminidase__InfluenzaA__ABI30579
augaauccaaaucaaaagauaauaacgauuggcucuguuucucucaccauuuccacaauaugcuucuucaugcaaauugccaucuugauaacuacuguaacauugcauuucaagcaauaugaauucaacucccccccaaacaaccaagugaugcugugugaaccaacaauaauagaaagaaacauaacagagauaguguaucugaccaacaccaccauagagaaggaaauaugccccaaacuagcagaauacagaaauuggucaaagccgcaaugugacauuacaggauuugcaccuuuuucuaaggacaauucgauuaggcuuuccgcugguggggacaucugggugacaagagaaccuuaugugucaugcgauccugacaaguguuaucaauuugcccuuggacaggggacaacacuaaacaacgugcauucaaaugacacaguacaugauaggaccccuuaucggacccuauugaugaaugaguuagguguuccauuucaucuggggaccaagcaagugugcauagcaugguccagcucaaguugucacgauggaaaagcauggcugcauguuuguguaacgggggaugauaaaaaugcaacugcuagcuucauuuacaaugggaggcuuguagauaguauuguuucaugguccaaaaaaauccucaggacccaggagucagaaugcguuuguaucaauggaacuuguacaguaguaaugacugaugggagugcuucaggaaaagcugauacuaaaauacuauucauugaggaggggaaaauuguucauacuagcacauugucaggaagugcucagcaugucgaggagugcuccugcuauccucgauauccuggugucagaugugucugcagagacaacuggaaaggcuccaauaggcccaucguagauauaaacauaaaggauuauagcauuguuuccagcuaugugugcucaggacuuguuggagacacacccagaaaaaacgacagcuccagcaguagccauugcuuggauccuaacaaugaagaagguggucauggagugaaaggcugggccuuugaugauggaaaugacguguggaugggaagaacaaucagcgagaaguuacgcucaggauaugaaaccuucaaagucauugaaggcugguccaacccuaauuccaaauugcagauaaauaggcaagucauaguugacagagguaauagguccgguuauucugguauuuucucuguugaaggcaaaagcugcaucaaucggugcuuuuauguggaguugauaaggggaagaaaagaggaaacugaagucuuguggaccucaaacaguauuguuguguuuuguggcaccucagguacauauggaacaggcucauggccugauggggcggacaucaaucucaugccuauauaa

SEQ ID NO: 47395 - RNA, 1410 nt, Artificial Sequence
  derived and/or modified CDS sequence (wt) from neuraminidase__InfluenzaA__ABI30590
augaauccaaaucaaaagauaauaacgauuggcucuguuucucucaccauuuccacaauaugcuucuucaugcaaauugccaucuugauaacuacuguaacauugcauuuuaagcaauaugaauucaacucccccccaaacaaccaagugaugcugugugaaccaacaauaauagaaagaaacauaacagagauaguguaucugaccaacaccaccauagagaaggaaauaugccccaaacuagcagaauacaggaauuggucaaagccgcaaugugacauuacaggauuugcaccuuuuucuaaggacaauucgauuaggcuuuccgcugguggggacaucugggugacaagagaaccuuaugugucaugcgauccugacaaguguuaucaauuugcccuuggacagggaacaacacuaaacaacgugcauucaaaugacacaguacaugauaggaccccuuaucggacccuauugaugaaugaguuagguguuccauuucaucuggggaccaagcaagugugcauagcaugguccagcucaaguugucacgauggaaaagcauggcugcauguuuguguaacgggggaugauaaaaaugcaacugcuagcuucauuuacaaugggaggcuuguagauaguauuguuucaugguccaaaaaaauccucaggacccaggagucagaaugcguuuguaucaauggaacuuguacaguaguaaugacugaugggagugcuucaggaaaagcugauacuaaaauacuauucauugaggaggggaaaaucguucauacuagcacauugucaggaagugcucagcaugucgaggagugcuccugcuauccucgauauccuggugucagaugugucugcagagacaacuggaaaggcuccaauaggcccaucguagauauaaacauaaaggauuauagcauuguuuccaguuaugugugcucaggacuuguuggagacacacccagaaaaaacgacagcuccagcaguagccauugcuuggauccuaacaaugaagaagguggucauggagugaaaggcugggccuuugaugauggaaaugacguguggaugggaagaacgaucagcgagaaguuacgcucaggauaugaaaccuucaaagucauugaaggcugguccaacccuaauuccaaauugcagauaaauaggcaagucauaguugacagagguaauagguccgguuauucugguauuuucucuguugaaggcaaaggcugcaucaaucggugcuuuuauguggaguugauaaggggaagaaaagaggaaacugaagucuuguggaccucaaacaguauuguuguguuuuguggcaccucagguacauauggaacaggcucauggccugauggggcggacaucaaucucaugccuauauaa

SEQ ID NO: 47396 - RNA, 1410 nt, Artificial Sequence
  derived and/or modified CDS sequence (wt) from neuraminidase__InfluenzaA__ABI30601
augaauccaaaucaaaagauaauaacgauuggcucuguuucucucaccauuuccacaauaugcuucuucaugcaaauugccaucuugauaacuacuguaacauugcauuucaagcaauaugaauucaacucccccccaaacaaccaagugaugcugugugaaccaacaauaauagaaagaaacauaacagagauaguguaucugaccaacaccaccauagagaaggaaauaugccccaaacuagcagaauacagaaauuggucaaagccgcaaugugacauuacaggauuugcaccuuuuucuaaggacaauucgauuaggcuuuccgcugguggggacaucugggugacaagagaaccuuaugugucaugcgauccugacaaguguuaucaauuugcccuuggacagggaacaacacuaaacaacgugcauucaaaugacacaguacaugauaggaccccuuaucggacccuauugaugaaugaguuagguguuccauuucaucuggggaccaagcaagugugcauagcaugguccagcucaaguugucacgauggaaaagcauggcugcauguuuguguaacgggggaugauaaaaaugcaacugcuagcuucauuuacaaugggaggcuuguagauaguauuguuucaugguccaaagauauccucaggacccaggagucagaaugcguuuguaucaauggaacuuguacaguaguaaugacugaugggagugcuucaggaaaagcugauacuaaaauacuauucauugaggaggggaaaaucguucauacuagcacauugucaggaagugcucagcaugucgaggagugcuccugcuauccucgauauccuggugucagaugugucugcagagacaacuggaaaggcuccaauaggcccauuguagauauaaacauaaaggauuauagcauuguuuccaguuaugugugcucaggacuuguuggagacacacccagaaaaaccgacagcuccagcaguagccauugcuuggauccuaacaaugaagaagguggucauggagugaaaggcugggccuuugaugauggaaaugacguguggaugggaagaacgaucagcgagaaguuacgcuuaggauaugaaaccuucaaagucauugaaggcugguccaacccuaauuccaaauugcagauaaauaggcaagucauaguugacagagguaauagguccgguuauucugguauuuucucuguugaaggcaaaagcugcaucaaucggugcuuuuauguggaguugauaaggggaagaaaagaggaaacugaagucuuguggaccucaaacaguauuguuguauuuuguggaaccucagguacauauggaacaggcucauggccugauggggcggacaucaaucucaugccuauauaa

SEQ ID NO: 47397 - RNA, 1410 nt, Artificial Sequence
  derived and/or modified CDS sequence (wt) from neuraminidase__InfluenzaA__ABI30612
augaauccaaaucaaaagauaauaacgauuggcucuguuucucucaccauuuccacaauaugcuucuucaugcaaauugccaucuugauaacuacuguaacauugcauuucaagcaauaugaauucaacucccccccaaacaaccaagugaugcugugugaaccaacaauaauagaaagaaacauaacagagauaguguaucugaccaacaccaccauagagaaggaaauaugccccaaacuagcagaauacagaaauuggucaaagccgcaauguaacauuacaggauuugcaccuuuuucuaaggacaauucgauuaggcuuuccgcugguggggacaucugggugacaagagaaccuuaugugucaugcgauccugacaaguguuaucaauuugcccuuggacagggaacaacacuaaacaacgugcauucaaaugacacaguacaugauaggaccccuuaucggacccuauugaugaaugaguuagguguuccauuucaucuggggaccaagcaagugugcauagcaugguccagcucaaguugucacgauggaaaagcauggcugcauguuuguguaacgggggaugauaaaaaugcaacugcuagcuucauuuacaaugggaggcuuguagauaguauuguuucaugguccaaagaaauccucaggacccaggagucagaaugcguuuguaucaauggaacuuguacaguaguaaugacugaugggagugcuucaggaaaagcugauacuaaaauacuauucauugaggaggggaaaaucauucauacuagcacauugucaggaagugcucagcaugucgaggagugcuccugcuauccucgauauccuggugucagaugugucugcagagacaacuggaaaggcuccaauaggcccauaguagauauaaacauaaaggauuauagcauuguuuccaguuaugugugcucaggacuuguuggagacacacccagaaaaaacgacagcuccagcaguagccauugcuuggauccuaacaaugaagaagguggucauggagugaaaggcugggccuuugaugauggaaaugacguguggaugggaagaacgaucagcgagaaguuacgcucaggauaugaaaccuucaaagucauugaaggcugguccaacccuaauuccaaauugcagauaaauaggcaagucauaguugacagagguaauagguccgguuauucugguauuuucucuguugaaggcaaaagcugcaucaaucggugcuuuuauguggaguugauaaggggaagaaaagaggaaacugaagucuuguggaccucaaacaguauuguuguguuuuguggcaccucagguacauauggaacaggcucauggccugauggggcggacaucaaucucaugccuauauaa

SEQ ID NO: 47398 - RNA, 1410 nt, Artificial Sequence; identical to SEQ ID NO: 47396
  derived and/or modified CDS sequence (wt) from neuraminidase__InfluenzaA__ABI30623

SEQ ID NO: 47399 - RNA, 1410 nt, Artificial Sequence
  derived and/or modified CDS sequence (wt) from neuraminidase__InfluenzaA__ABI30736
augaauccaaaucaaaagauaauaacgauuggcucuguuucucucaccauuuccacaauaugcuucuucaugcaaauugccaucuugauaacuacuguaacauugcauuuuaagcaauaugaauucaacucccccccaaacaaccaagugaugcugugugaaccaacaauaauagaaagaaacauaacagagauaguguaucugaccaacaccaccauagagaaggaaauaugccccaaacuagcagaauacaggaauuggucaaagccacaaugugacauuacaggauuugcaccuuuuucuaaggacaauucgauuaggcuuuccgcugguggggacaucugggugacaagagaaccuuaugugucaugcgacccugacaaguguuaucaauuugcccuuggacagggaacaacacuaaacaacgugcauucaaaugacacaguacaugauaggaccccuuaucggacccuauugaugaaugaguuagguguuccauuucaucuggggaccaagcaagugugcauagcaugguccagcucaaguugucacgauggaaaagcauggcugcauguuuguguaacaggggaugauaaaaaugcaacugcuagcuucauuuacaaugggaggcuuguagauaguauuguuucaugguccaaaaaaauccucaggacccaggagucagaaugcguuuguaucaauggaacuuguacaguaguaaugacugaugggagugcuucaggaaaagcugauacuaaaauacuauucauugaggaggggaaaaucguucauacuagcacauugucaggaagugcucagcaugucgaggagugcuccugcuauccucgauauccuggugucagaugugucugcagagacaacuggaaaggcuccaauaggcccaucguagauauaaacauaaaggauuauagcguuguuuccaguuaugugugcucaggacuuguuggagacacacccagaaaaaacgacagcuccagcaguagccauugcuuggauccuaacaaugaagaagguggucauggagugaaaggcugggccuuugaugauggaaaugacguguggaugggaagaacgaucagcgagaaguuacgcucaggauaugaaaccuucaaagucauugaaggcugguccaacccuaauuccaaauugcagauaaauagacaagucauaguugacagagguaauagguccgguuauucugguauuuucucuguugaaggcaaaagcugcaucaaucggugcuuuuauguggaguugauaaggggaagaaaagaggaaacugaagucuuguggaccucaaacaguauuguuguguuuuguggcaccucagguacauauggaacaggcucauggccugauggggcggacaucaaucucaugccuauauaa

SEQ ID NO: 47400 - RNA, 1410 nt, Artificial Sequence
  derived and/or modified CDS sequence (wt) from neuraminidase__InfluenzaA__ABI30758
augaauccaaaucaaaagauaauaacgauuggcucuguuucucucaccauuuccacaauaugcuucuucaugcaaauugccaucuugauaacuacuguaacauugcauuuuaagcaauaugaauucaacucccccccaaacaaccaagugaugcuguaugaaccaacaauaauagaaagaaacauaacagagauaguguaucugaccaacaccaccauagagaaggaaauaugccccaaacuagcagaauacaggaauuggucaaagccgcaaugugacauuacaggauuugcaccuuuuucuaaggacaauucgauuaggcuuuccgcugguggggacaucugggugacaagagaaccuuaugugucaugcgauccugacaaguguuaucaauuugcccuuggacagggaacaacacuaaacaacgugcauucaaaugacacaguacaugauaggaccccuuaucggacccuauugaugaaugaguuagguguuccauuucaucuggggaccaagcaagugugcauagcaugguccagcucaaguugucacgauggaaaagcauggcuacauguuuguguaacgggggaugauaaaaaugcaacugcuagcuucauuuacaaugggaggcuuguagauaguauuguuucaugguccaaaaaaauccucagaacccaggagucagaaugcguuuguaucaauggaacuuguacaguaguaaugacugaugggagugcuucaggaaaagcugauacuaaaauacuauucauugaggaggggaaaaucguucauacuagcacauugucaggaagugcucagcaugucgaggagugcuccugcuauccucgauauccuggugucagaugugucugcagagacaacuggaaaggcuccaauaggcccaucguagauauaaacauaaaggauuauagcauuguuuccaguuaugugugcucaggacuuguuggagacacacccagaaaaaacgacagcuccagcaguagccauugcuuggauccuaacaaugaagaagguggucauggagugaaaggcugggccuuugaugauggaaaugacguguggaugggaagaacgaucagcgagaaguuacgcucaggauaugaaaccuucaaagucauugaaggcugguccaacccuaauuccaaauugcagauaaauaggcaagucauaguugacagagguaauagguccgguuauucugguauuuucucuguugaaggcaaaagcugcaucaaucggugcuuuuauguggaguugauaaggggaagaaaagaggaaacugaagucuuguggaccucaaacaguauuguuguguuuuguggcaccucagguacauauggaacaggcucauggccugauggggcggacaucaaucucaugccuauauaa

SEQ ID NO: 47401 - RNA, 1410 nt, Artificial Sequence
  derived and/or modified CDS sequence (wt) from neuraminidase__InfluenzaA__ABI30769
augaauccaaaucaaaagauaauaacgauuggcucuguuucucucaccauuuccacaauaugcuucuucaugcaaauugccaucuugauaacuacuguaacauugcauuuuaagcaauaugaauucaacucccccccaaacaaccaagugaugcugugugaaccaacaauaauagaaagaaacauaacagagauaguguaucugaccaacaccaccauagagaaggaaauaugccccaaacuagcagaauacaggaauuggucaaagccgcaaugugacauuacaggauuugcaccuuuuucuaaggacaauucgauuaggcuuuccgcugguggggacaucugggugacaagagaaccuuaugugucaugcgauccugacaaguguuaucaauuugcccuuggacagggaacaacacuaaacaacgugcauucaaaugacacaguacaugauaggaccccuuaucggacccuauugaugaaugaguuagguguuccauuucaucuggggaccaagcaagugugcauagcaugguccagcucaaguugucacgauggaaaagcauggcugcauguuuguguaacgggggaugauaaaaaugcaacugcuagcuucauuuacaaugggaggcuuguagauaguauuguuucaugguccaaaaaaauccucaggacccaggagucagaaugcguuuguaucaauggaacuuguacaguaguaaugacugaugggagugcuucaggaaaagcugauacuaaaauacuauucauugaggaggggaaaaucguucauacuagcacauugucaggaagugcucagcaugucgaggagugcuccugcuauccucgauauccuggugucagaugugucugcagagacaacuggaaaggcuccaauaggcccaucguagauauaaacauaaaggauuauagcauuguuuccaguuaugugugcucaggacuuguuggagacacacccagaaaaaacgacagcuccagcaguagccauugcuuggauccuaacaaugaagaagguggucauggagugaaaggcugggccuuugaugauggaaaugacguguggaugggaagaacgaucagcgagaaguuacgcucaggauaugaaaccuucaaagucauugaaggcugguccaaccccaauuccaaauugcagauaaauaggcaagucauaguugacagagguaauagguccgguuauucugguauuuucucuguugaaggcaaaagcugcaucaaucggugcuuuuauguggaguugauaaggggaagaaaagaggaaacugaagucuuguggaccucaaacaguauuguuguguuuuguggcaccucagguacauauggaacaggcucauggccugauggggcggacaucaaucucaugccuauauaa

SEQ ID NO: 47402 - RNA, 1410 nt, Artificial Sequence; identical to SEQ ID NO: 46726
  derived and/or modified CDS sequence (wt) from neuraminidase__InfluenzaA__ABI30780

SEQ ID NO: 47403 - RNA, 1410 nt, Artificial Sequence
  derived and/or modified CDS sequence (wt) from neuraminidase__InfluenzaA__ABI30791
augaauccaaaucaaaagauaauaacgauuggcucuguuucucucaccauuuccacaauaugcuucuucaugcaaauugccaucuugauaacuacuguaacauugcauuuuaagcaauaugaauucaacucccccccaaacaaccaagugaugcugugugaaccaacaauaauagaaagaaacauaacagagauaguguaucugaccaacaccaccauagagaaggaaauaugccccaaacuagcagaauacaggaauuggucaaagccacaaugugacauuacaggauuugcaccuuuuucuaaggacaauucgauuaggcuuuccgcugguggggacaucugggugacaagagaaccuuaugugucaugcgacccugacaaguguuaucaauuugcccuuggacagggaacaacacuaaacaacgugcauucaaaugacacaguacaugauaggaccccuuaucggacccuauugaugaaugaguuagguguuccauuucaucuggggaccaagcaagugugcauagcaugguccagcucaaguugucacgauggaaaagcauggcugcauguuuguguaacaggggaugauaaaaaugcaacugcuagcuucauuuacaaugggaggcuuguagauaguauuguuucaugguccaaaaaaauccucaggacccaggagucagaaugcguuuguaucaauggaacuuguacaguaguaaugacugaugggagugcuucaggaaaagcugauacuaaaauacuauucauugaggaggggaaaaucguucauacuagcacauugucaggaagugcucagcaugucgaggagugcuccugcuauccucgauauccuggugucagaugugucugcagagacaacuggaaaggcuccaauaggcccaucguagauauaaacauaaaggauuauagcauuguuuccaguuaugugugcucaggacuuguuggagacacacccagaaaaaacgacagcuccagcaguagccauugcuuggauccuaacaaugaagaagguggucauggagugaaaggcugggccuuugaugauggaaaugacguguggaugggaagaacgaucagcgagaaguuacgcucaggauaugaaaccuucaaagucauugaaggcugguccaauccuaauuccaaauugcagauaaauaggcaagucauaguugacagagguaauagguccgguuauucugguauuuucucuguugaaggcaaaagcugcaucaaucggugcuuuuauguggaguugauaaggggaagaaaagaggaaacugaagucuuguggaccucaaacaguauuguuguguuuuguggcaccucagguacauauggaacaggcucauggccugauggggcggacaucaaucucaugccuauauaa

SEQ ID NO: 47404 - RNA, 1410 nt, Artificial Sequence
  derived and/or modified CDS sequence (wt) from neuraminidase__InfluenzaA__ABI30802
augaauccaaaucaaaagauaauaacgauuggcucuguuucucucaccauuuccacaauaugcuucuucaugcaaauugccaucuugauaacuacuguaacauugcauuuuaagcaauaugaauucaacucccccccaaacaaccaagugaugcugugugaaccaacaauaauagaaagaaacauaacagagauaguguaucugaccaacaccaccauagagaaggaaauaugccccaaacuagcagaauacaggaauuggucaaagccgcaaugugacauuacaggauuugcaccuuuuucuaaggacaauucgauuaggcuuuccgcugguggggacaucugggugacaagagaaccuuauguaucaugcgauccugacaaguguuaucaauuugcccuuggacagggaacaacacuaaacaacgugcauucaaaugacacaguacaugauaggaccccuuaccggacccuauugaugaaugaguuagguguuccauuucaucuggggaccaagcaagugugcauagcaugguccagcucaaguugucacgauggaaaagcauggcugcauguuuguguaacgggggaugauaaaaaugcaacugcuagcuucauuuacaaugggaggcuuguagauaguauuguuucaugguccaaaaaaauccucaggacccaggagucagaaugcguuuguaucaauggaacuuguacaguaguaaugacugaugggagugcuucaggaaaagcugauacuaaaauacuauucauugaggaggggaaaaucguucauacuagcacauugucaggaagugcucagcaugucgaggagugcuccugcuauccucgauauccuggugucagaugugucugcagagacaacuggaaaggcuccaauaggcccaucguagauauaaacauaaaggauuauagcauuguuuccaguuaugugugcucaggacuuguuggagacacacccagaaaaaacgacagcuccagcaguagccauugcuuggauccuaacaaugaagaagguggucauggagugaaaggcugggccuuugaugauggaaaugacguguggaugggaagaacgaucagcgagaaguuacgcucaggauaugaaaccuucaaagucauugaaggcugguccaacccuaauuccaaauugcagauaaauaggcaagucauaguugacagagguaauagguccgguuauucugguauuuucucuguugaaggcaaaagcugcaucaaucggugcuuuuauguggaguugauaaggggaagaaaagaggaaacugaagucuuguggaccucaaacaguauuguuguguuuuguggcaccucagguacauauggaacaggcucauggccugauggggcggacaucaaucucaugccuauauaa

SEQ ID NO: 47405 - RNA, 1410 nt, Artificial Sequence; identical to SEQ ID NO: 46726
  derived and/or modified CDS sequence (wt) from neuraminidase__InfluenzaA__ABI30813

SEQ ID NO: 47406 - RNA, 1410 nt, Artificial Sequence
  derived and/or modified CDS sequence (wt) from neuraminidase__InfluenzaA__ABI30824
augaauccaaaucaaaagauaauaacgauuggcucuguuucucucaccauuuccacaauaugcuucuucaugcaaauugccaucuugauaacuacuguaacauugcauuuuaagcaauaugaauucaacucccccccaaacaaccaagugaugcugugugaaccaacaauaauagaaagaaacauaacagagauaguguaucugaccaacaccaccauagagaaggaaauaugccccaaacuagcagaauacaggaauuggucaaagccgcaaugugacauuacaggauuugcaccuuuuucuaaggacaauucgauuaggcuuuccgcugguggggacaucugggugacaagagaaccuuauguaucaugcgauccugacaaguguuaucaauuugcccuuggacagggaacaacacuaaacaacgugcauucaaaugacacaguacaugauaggaccccuuaccggacccuauugaugaaugaguuagguguuccauuucaucuggggaccaagcaagugugcauagcaugguccagcucaaguugucacgauggaaaagcauggcugcauguuuguguaacgggggaugauaaaaaugcaacugcuagcuucauuuacaaugggaggcuuguagauaguauuguuucaugguccaaaaaaauccucaggacccaggagucagaaugcguuuguaucaauggaacuuguacaguaguaaugacugaugggagugcuucaggaaaagcugauacuaaaauacuauucauugaggaggggaaaaucguucauacuagcacauugucaggaagugcucagcaugucgaggagugcuccugcuauccucgauauccuggugucagaugugucugcagagacaacuggaaaggcuccaauaggcccaucguagauauaaacauaaaggauuauagcauuguuuccaguuaugugugcucaggacuuguuggagacacacccagaaaaaacgacagcuccagcaguagccauugcuuggauccuaacaaugaagaagguggucauggagugaaagguugggccuuugaugauggaaaugacguguggaugggaagaacgaucagcgagaaguuacgcucaggauaugaaaccuucaaagucauugaaggcugguccaacccuaauuccaaauugcagauaaauaggcaagucauaguugacagagguaauagguccgguuauucugguauuuucucuguugaaggcaaaagcugcaucaaucggugcuuuuauguggaguugauaaggggaagaaaagaggaaacugaagucuuguggaccucaaacaguauuguuguguuuuguggcaccucagguacauauggaacaggcucauggccugauggggcggacaucaaucucaugccuauauaa

SEQ ID NO: 47407 - RNA, 1410 nt, Artificial Sequence; identical to SEQ ID NO: 47406
  derived and/or modified CDS sequence (wt) from neuraminidase__InfluenzaA__ABI30835

SEQ ID NO: 47408 - RNA, 1410 nt, Artificial Sequence; identical to SEQ ID NO: 47401
  derived and/or modified CDS sequence (wt) from neuraminidase__InfluenzaA__ABI30846

SEQ ID NO: 47409 - RNA, 1410 nt, Artificial Sequence; identical to SEQ ID NO: 47197
  derived and/or modified CDS sequence (wt) from neuraminidase__InfluenzaA__ABI30857

SEQ ID NO: 47410 - RNA, 1410 nt, Artificial Sequence; identical to SEQ ID NO: 47200
  derived and/or modified CDS sequence (wt) from neuraminidase__InfluenzaA__ABI30868

SEQ ID NO: 47411 - RNA, 1350 nt, Artificial Sequence
  derived and/or modified CDS sequence (wt) from neuraminidase__InfluenzaA__ABI36157
augaauccaaaucagaagauaauaaccauuggaucaaucuguauggcaauuggaacaguuagcuuaauguuacaaauugggaacaugaucucaauaugggucagccauucaauucagacagggaaccaacaccaagcugaaucaaucagcaauacuaacccucuuacugagaaagcuguggcuucaguaacauuggcaggcaauucgucucuuugccccauuagaggaugggcuguacacaguaaggacaacaguauaaggaucgguuccaagggggauguguuuguuauuagagagccguucaucucaugcucccacucggaaugcagaacuuucuuuuugacucagggagccuugcugaaugacaagcacuccaacgagacugucaaagacagaagcccucacagaacauugaugaguuguccugugggugaggcucccucuccauacaacucaagguuugagucuguugcuuggucagcaagugcuugccaugauggcaccaguugguugacaauuggaauuucuggcccagacaauggggcuguggcuguguugaaauacaauggcauaauaacagacacuaucaagaguuggaggaacaacauacuaagaacucaagagucugaaugugcauguguaaauggcucuugcuuuacuguaaugacugauggaccaaguaaugggcaggcaucauauaagaucuucaaaauggaaaaagggaaagugguuaaaucagucgaauuggaugcucccaauuaucacuaugaggagugcuccuguuauccugaugcuggcgaaaucacaugugugugcagggauaauuggcauggcucaaacaggccauggguauccuucaaucaaaauuuggaguaucaaauaggauauauaugcaguggaguuuuuggagacaauccacgccccaaugauggaacagguaguugugguccgauguccucuaacggggcauaugggguaaagggguuuucauuuaaauacggcaaugguguuuggaucgggagaaccaaaagcacuaauuccagaagcggcuuugaaaugauuugggauccaaauggguggacuggaacggacaguagcuuuucggugaaacaagauauaguagcaauaacugauuggucaggauauagugggaguuuuguccaacauccagaacugacaggauuagauugcauaagaccuuguuucuggguugaguuaaucagagggcgacccaaagagagcacaauuuggacuagugggagcagcauaucuuuuugugguguaaauagugacacugugaguuggucuuggccagacggugcugaguugccauucaccauugacaaguaa

SEQ ID NO: 47412 - RNA, 1350 nt, Artificial Sequence; identical to SEQ ID NO: 47411
  derived and/or modified CDS sequence (wt) from neuraminidase__InfluenzaA__ABI36168

SEQ ID NO: 47413 - RNA, 1350 nt, Artificial Sequence; identical to SEQ ID NO: 47411
  derived and/or modified CDS sequence (wt) from neuraminidase__InfluenzaA__ABI36179

SEQ ID NO: 47414 - RNA, 1350 nt, Artificial Sequence; identical to SEQ ID NO: 47411
  derived and/or modified CDS sequence (wt) from neuraminidase__InfluenzaA__ABI36189

SEQ ID NO: 47415 - RNA, 1350 nt, Artificial Sequence
  derived and/or modified CDS sequence (wt) from neuraminidase__InfluenzaA__ABI36278
augaauccaaaucagaagauaauaaccauuggaucaaucuguaugguaauuggaauaguuagcuuaauguuacaaauugggaacaugaucucaauaugggucagucauucaauucagaaagggaaucaacaccaagcugaaucaaucagcaauacuaacccucuuacugagaaagcuguggcuucaguaacauuagcgggcaauucaucucuuugccccauuagaggaugggcuguacacaguaaggacaacaauauaaggaucgguuccaagggggauguguuuguuauuagagagccguucaucucauguucccaccuggaaugcagaacuuucuucuugacucagggagccuugcugaaugacaagcacuccaacgggacugucaaagacagaagcccucacagaacauuaaugaguuguccugugggugaggcucccucuccauauaacucaagguuugagucuguugcuuggucagcaagugcuugccaugauggcaccaguugguugacaauuggaauuucuggcccagacaaugaggcuguggcuguauugaaauacaauggcauaauaacagacacuaucaagaguuggaggaacaacauacugagaacucaagagucugaaugugcauguguaaauggcucuugcuuuacuguaaugacugauggaccaaguaaugggcaggcaucauauaagaucuucaaaauggaaaaaggaaaaguggucaaaucagucgaauuggaugcuccuaauuaucacuaugaggagugcuccuguuauccugaugccggcgaaaucacauguguuugcagggauaauuggcauggcucaaauaggccauggguaucuuucaaucaaaauuuggaguaucaaauaggauauauaugcaguggaguuuucggagacaauccacgccccaaugauggaacagguaguuguggcccgauguccccuaacggggcauaugggguaaaaggguuuucauuuaaauacggcaaugguguuuggaucgggagaaccaaaagcacuaacuccaggagcggcuuugaaaugauuugggauccaaauggguggacuggaacggacaguagcuuuucagugaaacaagauauaguagcaauaacugauuggucaggauauagcgggaguuuuguccagcauccagaacugacaggacuagauugcauaagaccuuguuucuggguugaguuaaucagagggcggcccaaagagagcacaauuuggacuagugggaguagcauaucuuuuugugguguaaauagugacacugugagcuggucuuggccagacggugcugaguugccauucaccauugacaaguag

SEQ ID NO: 47416 - RNA, 1350 nt, Artificial Sequence; identical to SEQ ID NO: 47415
  derived and/or modified CDS sequence (wt) from neuraminidase__InfluenzaA__ABI36287

SEQ ID NO: 47417 - RNA, 1350 nt, Artificial Sequence
  derived and/or modified CDS sequence (wt) from neuraminidase__InfluenzaA__ABI36298
augaauccaaaucagaagauaauaaccauuggaucaaucuguaugguaauuggaauaguuagcuuaauguuacaaauugggaacaugaucucaauaugggucagucauucaauucagaaagggaaucaacaccaagcugaaucaaucagcaauacuaacccucuuacugagaaagcuguggcuucaguaacauuagcgggcaauucaucucuuugccccauuagaggaugggcuguacacaguaaggacaacaauauaaggaucgguuccaagggggauguguuuguuauuagagagccguucaucucaugcucccaccuggaaugcagaacuuucuucuugacucagggagccuugcugaaugacaagcacuccaacgggacugucaaagacagaagcccucacagaacauuaaugaguuguccugugggugaggcucccucuccauauaacucaagguuugagucuguugcuuggucagcaagugcuugccaugauggcaccaguugguugacaauuggaauuucuggcccagacaaugaggcuguggcuguauugaaauacaauggcauaauaacagacacuaucaagaguuggaggaacaacauacuuagaacucaagagucugaaugugcauguguaaauggcucuugcuuuacuguaaugacugauggaccaaguaaugggcaggcaucauauaagaucuucaaaauggaaaaaggaaaaguggucaaaucagucgaauuggaugcuccuaauuaucacuaugaggagugcuccuguuauccugaugccggcgaaaucacauguguuugcagggauaauuggcauggcucaaauaggccauggguaucuuucaaucaaaauuuggaguaucaaauaggauauauaugcaguggaguuuucggagacaauccacgccccaaugauggaacagguaguuguggcccgauguccccuaacggggcauaugggguaaaaggguuuucauuuaaauacggcaaugguguuuggaucgggagaaccaaaagcacuaacuccaggagcggcuuugaaaugauuugggauccaaauggguggacuggaacggacaguagcuuuucagugaaacaagauauaguagcaauaacugauuggucaggauauagcgggaguuuuguccagcauccagaacugacagggcuagauugcauaagaccuuguuucuggguugaguuaaucagagggcggcccaaagagagcacaauuuggacuagugggagcagcauaucuuuuugugguguaaauagugacacugugaguuggucuuggccagacggugcugaguugccauucaccauugacaaguag

SEQ ID NO: 47418 - RNA, 1350 nt, Artificial Sequence
  derived and/or modified CDS sequence (wt) from neuraminidase__InfluenzaA__ABI36314
augaauccaaaucagaagauaauaaccauuggaucaaucuguaugguaauuggaauaguuagcuuaauguuacaaauugggaacaugaucucaauaugggucagucauucaauucagacagggaaucaacaccaagcugaaucaaucagcaauacuaacccucuuacugagaaagcuguggcuucaguaacauuagcgggcaauucaucucuuugccccauuagaggaugggcuguacacaguaaggacaacaauauaaggaucgguucaaagggggauguguuuguuauuagagagccguucaucucaugcucccaccuggaaugcagaacuuucuucuugacucagggagccuugcugaaugacaagcacuccaacgggacugucaaagacagaagcccucacagaacauuaaugaguuguccugugggugaggcucccucuccauauaacucaagguuugagucuguugcuuggucagcaagugcuugccaugauggcaacaguugguugacaauuggaauuucuggcccagacaaugaggcuguggcuguauugaaauacaauggcauaauaacagacacuaucaagaguuggaggaacaacauacugagaacucaagagucugaaugugcauguguaaauggcucuugcuuuacuguaaugacugauggaccaaguaaugggcaggcaucauauaagaucuucaaaauggaaaaaggaaaaguggucaaaucagucgaauuggaugcuccuaauuaucacuaugaggagugcucuuguuauccugaugccggcgaaaucacauguguuugcagggauaauuggcauggaucaaauaggccauggguaucuuucaaucaaaauuuggaguaucaaauaggauauauaugcaguggaguuuucggagacaauccacgccccaaugauggaacagguaguuguggcccgauguccccuaacggggcauaugggguaaaaggguuuucauuuaaauacggcaaugguguuuggaucgggagaaccaaaagcacuaacuccaggagcggcuuugaaaugauuugggauccaaauggguggacuggaacggacaguagcuuuucagugaaacaagauauaguagcaauaacugauuggucaggauauagcgggaguuuuguccagcauccagaacugacaggauuagauugcauaagaccuuguuucuggguugaguuaaucagagggcggcccaaagagagcacaauuuggacuagugggagcagcauaucuuuuugugguguaaauagugacacugugaguuggucuuggccagacggugcugaguugccauucaccauugacaaguag

SEQ ID NO: 47419 - RNA, 1350 nt, Artificial Sequence
  derived and/or modified CDS sequence (wt) from neuraminidase__InfluenzaA__ABI36336
augaauccaaaucagaagauaauaaccauuggaucaaucuguaugguaauugggauaguuagcuuaauguuacaaauugggaacaugaucucaauaugggucagucauucaguucagacagggaaucaacaccaagcugaaucaaucagcaauacuaacccucuuacugagaaggcuguggcuucaguaacauuagcgggcaauucaucucuuugccccauuagaggaugggcuguacacaguaaggacaacaauauaaggaucgguuccaagggggauguguuuguuauuagagagccguucaucucaugcucccaccuggaaugcagaacuuucuuuuugacucagggagccuugcugaaugacaagcacuccaacgggacugucaaagacagaagcccucacagaacauuaaugaguuguccuuugggugaggcucccucuccauauaacucaagguuugagucuguuucuuggucagcaagugcuugccaugauggcaccaguugguugacaauuggaauuucuggcccagacaaugaggcuguggcuguauugaaauacaauggcauaauaacagacacuaucaagaguuggaggaacaacauacugagaacucaagagucugaaugugcauguguaaauggcucuugcuuuacuguaaugacugauggaccaaguaaugggcaggcaucauauaagaucuucaaaauggaaaaaggaaaaguggucaaaucagucgaauuggaugcuccuaauuaucacuaugaggagugcuccuguuauccugaugccggcgaaaucacauguguuugcagggauaauuggcauggaucaaauaggccauggguaucuuucaaucaaaauuuggaguaucaaauaggauauauaugcaguggaguuuucggagacaauccacgccccaaugauggaacagguaguuguggcccgauguccccuaacggggcauauggaguaaaaggguuuucauuuaaauacggcaaugguguuuggaucgggagaaccaaaagcacuaacuccaggagcggcuuugaaaugauuugggauccaaauggguggacuggaacggacaguagcuuuucagugaaacaagauauaguagcaauaacugauuggucaggauauagcgggaguuuuguccagcauccagaacugacaggauuagauugcauaagaccuuguuucuggguugaguuaaucagaggacggcccaaagagagcacaauuuggacuagugggagcaucauaucuuuuugugguguaaauagugacacugugaguuggucuuggccagacggugcugaguugccauucaccauugacaaguag

SEQ ID NO: 47420 - RNA, 1350 nt, Artificial Sequence
  derived and/or modified CDS sequence (wt) from neuraminidase__InfluenzaA__ABI36358
augaauccaaaucagaagauaauaaccauuggaucaaucuguaugguaauuggaauaguuagcuuaauguuacaaauugggaacaugaucucaauaugggucagucauucaguucagacagggaaucaacaccaagcugaaucaaucagcaauacuaacccucuuacugagaaagcuguggcuucaguaacauuagcgggcaauucaucucuuugucccauuagaggaugggcuguacacaguaaggacaacaauauaaggaucgguuccaagggggauguguuuguuauuagagagccguucaucucaugcucccaccuggaaugcagaacuuucuuuuugacucagggagccuugcugaaugacaagcacuccaacgggacugucaaagacagaagcccucacagaacauuaaugaguuguccugugggugaggcucccucuccauauaacucaagauuugagucuguugcuuggucagcaagugcuugccaugauggcaccaguugguugacaauuggaauuucuggcccagacaaugaggcuguggcuguauugaaauacaauggcauaauaacagacacuaucaagaguuggaggaacaacauacugagaacucaagagucugaaugugcauguguaaauggcucuugcuuuacuguaaugacugauggaccaaguaaugggcaggcaucauauaagaucuucaaaauggaaaaaggaaaaguggucaaaucagucgaauuggaugcuccuaauuaucacuaugaggagugcuccuguuauccugaugccggcgaaaucacauguguuugcagggauaauuggcauggaucaaauaggccauggguaucuuucaaucaaaauuuggaguaucaaauaggauauauaugcaguggaguuuucggagacaauccacgccccaaugauggaacagguaguuguggcccgauguccccuaacggggcauauggaguaaaaggguuuucauuuaaauacggcaaugguguuuggaucgggagaaccaaaagcacuaacuccaggagcggcuuugaaaugauuugggauccaaauggguggacuggaacggacaguagcuuuucagugaaacaagauauaguagcaauaacugauuggucaggauauagcgggaguuuuguccagcauccagaacugacaggauuagauugcauaagaccuuguuucuggguugaguuaaucagaggacggcccaaagagagcacaauuuggacuagugggagcagcauaucuuuuugugguguaaauagugacacugugaguuggucuuggccagacggugcugaguugccauucaccauugacaaguag

SEQ ID NO: 47421 - RNA, 1350 nt, Artificial Sequence
  derived and/or modified CDS sequence (wt) from neuraminidase__InfluenzaA__ABI36369
augaauccaaaucagaagauaauaaccauuggaucaaucuguauggcaauuggaacaguuagcuuaauguuacaaauugggaacaugaucucaauaugggucagccauucaauucagacagggaaccaacaccaagcugaaucaaucagcaauacuaacccucuuacugagaaagcuguggcuucaguaacauuggcaggcaauucgucucuuugccccauuagaggaugggcuguacacaguaaggacaacaguauaaggaucgguuccaagggggauguguuuguuauuagagagccguucaucucaugcucccacucggaaugcagaacuuucuuuuugacucagggagcccugcugaaugacaagcacuccaacgagacugucaaagacagaagcccucacagaacauugaugaguuguccugugggugaggcucccucuccauacaacucaagguuugagucuguugcuuggucagcaagugcuugccaugauggcaccaguugguugacaauuggaauuucuggcccagacaauggggcuguggcuguguugaaauacaauggcauaauaacagacacuaucaagaguuggaggaacaacauacuaagaacucaagagucugaaugugcauguguaaauggcucuugcuuuacuguaaugacugauggaccaaguaaugggcaggcaucauauaagaucuucaaaauggaaaaagggaaagugguuaaaucagucgaauuggaugcucccaauuaucacuaugaggagugcuccuguuauccugaugcuggcgaaaucacaugugugugcagggauaauuggcauggcucaaacaggccauggguauccuucaaucaaaauuuggaguaucaaauaggauauauaugcaguggaguuuuuggagacaauccacgccccaaugauggaacagguaguugugguccgauguccucuaacggggcauaugggguaaagggguuuucauuuaaauacggcaaugguguuuggaucgggagaaccaaaagcacuaauuccagaagcggcuuugaaaugauuugggauccaaauggguggacuggaacggacaguagcuuuucggugaaacaagauauaguagcaauaacugauuggucaggauauagugggaguuuuguccaacauccagaacugacaggauuagauugcauaagaccuuguuucuggguugaguuaaucagagggcgacccaaagagagcacaauuuggacuagugggagcagcauaucuuuuugugguguaaacagugacacugugaguuggucuuggccagacggugcugaguugccauucaccauugacaaguaa

SEQ ID NO: 47422 - RNA, 1350 nt, Artificial Sequence
  derived and/or modified CDS sequence (wt) from neuraminidase__InfluenzaA__ABI36391
augaauccaaaucagaagauaauaaccauuggaucaaucuguaugguaauuggaauaguuagcuuaauguuacaaauugggaacaugaucucaauaugggucagucauucaacucagaaagggaaucaacaccaagcugaaucaaucagcaauacuaacccucuuacugagaaagcuguggcuucaguaacauuagcgggcaauucaucucuuugcccuauuagaggaugggcuguacacaguaaggacaacaauauaaggaucgguuccaagggggauguguuuguuauuagagagccguucaucucaugcucccaccuggaaugcagaacuuucuucuugacucagggagccuugcugaaugacaagcacuccaacgggacugucaaagacagaagcccucacagaacauuaaugaguuguccugugggugaggcucccucuccauauaacucaagguuugagucuguugcuuggucagcaagugcuugccaugauggcaccaguugguugacaauuggaauuucuggcccagacaaugaggcuguggcuguauugaaauacaauggcauaauaacagacacuaucaagaguuggaggaacaacauacugagaacucaagagucugaaugugcauguguaaauggcucuugcuuuacuguaaugacugauggaccaaguaaugggcaggcaucauauaagaucuucaaaauggaaaaaggaaaaguggucaaaucagucgaauuggaugcuccuaauuaucacuaugaggagugcuccuguuauccugaugccggcgaaaucacauguguuugcagggauaauuggcauggcucaaauaggccauggguaucuuucaaucaaaauuuggaguaucaaauaggauauauaugcaguggaauuuucggagacaauccacgccccaaugauggaacagguaguuguggcccgauguucccuaacggggcauaugggguaaaaggguuuucauuuaaauacggcaaugguguuuggaucgggagaaccaaaagcacuaacuccaggagcggcuuugaaaugauuugggauccaaauggguggacuggaacggacaguagcuuuucagugaaacaagauauaguagcaauaacugauuggucaggauauagcgggaguuuuguccagcauccagaacugacaggacuagauugcauaagaccuuguuucuggguugaguuaaucagagggcggcccaaagagagcacaauuuggacuagugggagcagcauaucuuuuugugguguaaauagugacacugugaguuggucuuggccagacggugcugaguugccauucaccauugacaaguag

SEQ ID NO: 47423 - RNA, 1350 nt, Artificial Sequence; identical to SEQ ID NO: 47422
  derived and/or modified CDS sequence (wt) from neuraminidase__InfluenzaA__ABI36402

SEQ ID NO: 47424 - RNA, 1350 nt, Artificial Sequence
  derived and/or modified CDS sequence (wt) from neuraminidase__InfluenzaA__ABI36413
augaauccaaaucagaagauaauaaccauuggaucaaucuguauggcaauuggaacaguuagcuuaauguuacaaauugggaacaugaucucaauaugggucagccauucaauucagacagggaaccaacaccaagcugaaucaaucagcaauacuaacccucuuacugagaaagcuguggcuucaguaacauuggcaggcaauucgucucuuugccccauuagaggaugggcuguacacaguaaggacaacaguauaaggaucgguuccaagggggauguguuuguuauuagagagccguucaucucaugcucccacucggaaugcagaacuuucuuuuugacucagggagcccugcugaaugacaagcacuccaacgagacugucaaagacagaagcccucacagaacauugaugaguuguccugugggugaggcucccucuccauacaacucaagguuugaaucuguugcuuggucagcaagugcuugccaugauggcaccaguugguugacaauuggaauuucuggcccagacaauggggcuguggcuguguugaaauacaauggcauaauaacagacacuaucaagaguuggaggaacaacauacuaagaacucaagagucugaaugugcauguguaaauggcucuugcuuuacuguaaugacugauggaccaaguaaugggcaggcaucauauaagaucuucaaaauggaaaaagggaaagugguuaaaucagucgaauuggaugcucccaauuaucacuaugaggagugcuccuguuauccugaugcuggcgaaaucacaugugugugcagggauaauuggcauggcucaaacaggccauggguauccuucaaucaaaauuuggaguaucaaauaggauauauaugcaguggaguuuuuggagacaauccacgccccaaugauggaacagguaguugugguccgauguccucuaacggggcauaugggguaaagggguuuucauuuaaauacggcaaugguguuuggaucgggagaaccaaaagcacuaauuccagaagcggcuuugaaaugauuugggauccaaauggguggacuggaacggacaguagcuuuucggugaaacaagauauaguagcaauaacugauuggucaggauauagugggaguuuuguccaacauccagaacugacaggauuagauugcauaagaccuuguuucuggguugaguuaaucagagggcgacccaaagagagcacaauuuggacuagugggagcagcauaucuuuuugugguguaaacagugacacugugaguuggucuuggccagacggugcugaguugccauucaccauugacaaguaa

SEQ ID NO: 47425 - RNA, 1350 nt, Artificial Sequence
  derived and/or modified CDS sequence (wt) from neuraminidase__InfluenzaA__ABI36446
augaauccaaaucagaagauaauaaccauuggaucaaucuguaugguaauuggaauaguuagcuuaauguuacaaauugggaacaugaucucaauaugggucagucauucaauucagacagggaaucaacaccaagcugaaucaaucagcaauacuaacccucuuacugagaaagcuguggcuucaguaacauuagcgggcaauucaucucuuugccccauuagaggaugggcuguacacaguaaggacaacaauauaaggaucgguucaaagggggauguguuuguuauuagagagccguucaucucaugcucccaccuggaaugcagaacuuucuucuugacucagggagccuugcugaaugacaagcacuccaacgggacugucaaagacagaagcccucacagaacauuaaugaguuguccugugggugaggcucccucuccauauaacucaagguuugagucuguugcuuggucagcaagugcuugccaugauggcaccaguugguugacaauuggaauuucuggcccagacaaugaggcuguggcuguauugaaauacaauggcauaauaacagacacuaucaagaguuggaggaacaacauacugaggacucaagagucugaaugugcauguguaaauggcucuugcuuuacuguaaugacugauggaccaaguaaugggcaggcaucauauaagaucuucaaaauggaaaaaggaaaaguggucaaaucagucgaauuggaugcuccuaauuaucacuaugaggagugcuccuguuauccugaugccggcgaaaucacauguguuugcagggauaauuggcauggaucaaauaggccauggauaucuuucaaucaaaauuuggaguaucaaauaggauauauaugcaguggaguuuucggagacaauccacgccccaaugauggaacagguaguuguggcccgauguccccuaacggggcauaugggguaaaaggguuuucauuuaaauacggcaaugguguuuggaucgggagaaccaaaagcacuaacuccaggagcggcuuugaaaugauuugggauccaaauggguggacuggaacggacaguagcuuuucagugaaacaagauauaguagcaauaacugauuggucaggauauagcgggaguuuuguccagcauccagaacugacaggauuagauugcauaagaccuuguuucuggguugaguuaaucagagggcggcccaaagagagcacaauuuggacuagugggagcagcauaucuuuuugugguguaaauagugacacugugaguuggucuuggccagacggugcugaguugccauucaccauugacaaguag

SEQ ID NO: 47426 - RNA, 1350 nt, Artificial Sequence
  derived and/or modified CDS sequence (wt) from neuraminidase__InfluenzaA__ABI36457
augaauccaaaucagaagauaauaaccauuggaucaaucuguaugguaauuggaauaguuagcuuaauguuacaaauugggaacaugaucucaauaugggucagucauucaauucagaaagggaaucaacaccaagcugaaucaaucagcaauacuaacccucuuacugagaaagcuguggcuucaguaacauuagcgggcaauucaucucuuugccccauuagaggaugggcuguacacaguaaggacaacaauauaaggaucgguuccaagggggauguguuuguuauuagagagccguucaucucaugcucccaccuggaaugcagaacuuucuucuugacucagggagccuugcugaaugacaagcacuccaacgggacugucaaagacagaagcccucacagaacacuaaugaguuguccugugggugaggcucccucuccauauaacucaagguuugagucuguugcuuggucagcaagugcuugccaugauggcaccaguugguugacaauuggaauuucuggcccagacaaugaggcuguggcuguauugaaauacaauggcauaauaacagacacuaucaagaguuggaggaacaacauacugagaacucaagagucugaaugugcauguguaaauggcucuugcuuuacuguaaugacugauggaccaaguaaugggcaggcaucauauaagaucuucaaaauggaaaaaggaaaaguggucaaaucagucgaauuggaugcuccuaauuaucacuaugaggagugcuccuguuauccugaugccggcgaaaucacauguguuugcagggauaauuggcauggcucaaauaggccauggguaucuuucaaucaaaauuuggaguaucaaauaggauauauaugcaguggaguuuucggagacaauccacgccccaaugauggaacagguaguuguggcccgauguccccuaacggggcauaugggguaaaaggguuuucauuuaaauacggcaaugguguuuggaucgggagaaccaaaagcacuaacuccaggagcggcuuugaaaugauuugggauccaaauggguggacuggaacggauaguagcuuuucagugaaacaagauauaguagcaauaacugauuggucaggauauagcgggaguuuuguccagcauccagaacugacaggacuagauugcauaagaccuuguuucuggguugaguuaaucagagggcggcccaaagagagcacaauuuggacuagugggagcagcauaucuuuuugugguguaaauagugacacugugagcuggucuuggccagacggugcugaguugccauucaccauugacaaguag

SEQ ID NO: 47427 - RNA, 1350 nt, Artificial Sequence
  derived and/or modified CDS sequence (wt) from neuraminidase__InfluenzaA__ABI36476
augaauccaaaucagaagauaauaaccauuggaucaaucuguaugguaauuggaauaguuagcuuaauguuacaaauugggaacaugaucucaauaugggucagucauucaacucagaaagggaaucaacaccaagcugaaucaaucagcaauacuaacccucuuacugagaaagcuguggcuucaguaacauuagcgggcaauucaucucuuugcccuauuagaggaugggcuguacacaguaaggacaacaauauaaggaucgguuccaagggggauguguuuguuauuagagagccguucaucucaugcucccaccuggaaugcagaacuuucuucuugacucagggagccuugcugaaugacaagcacuccaacggaacugucaaagacagaagcccucacagaacauuaaugaguuguccugugggugaggcucccucuccauauaacucaagguuugagucuguugcuuggucagcaagugcuugccaugauggcaccaguugguugacaauuggaauuucuggcccagacaaugaggcuguggcuguauugaaauacaauggcauaauaacagacacuaucaagaguuggaggaacaacauacugagaacucaagagucugaaugugcauguguaaauggcucuugcuuuacuguaaugacugauggaccaaguaaugggcaggcaucauauaagaucuucaaaauggaaaaaggaaaaguggucaaaucagucgaauuggaugcuccuaauuaucacuaugaggagugcuccuguuauccugaugccggcgaaaucacauguguuugcagggauaauuggcauggcucaaauaggccauggguaucuuucaaucaaaauuuggaguaucaaauaggauauauaugcaguggaguuuucggagacaauccacgccccaaugauggaacagguaguuguggcccgauguccccuaacggggcauaugggguaaaaggguuuucauuuaaauacggcaaugguguuuggaucgggagaaccaaaagcacuaacuccaggagcggcuuugaaaugauuugggauccaaauggguggacuggaacggacaguagcuuuucagugaaacaagauauaguagcaauaacugauuggucaggauauagcgggaguuuuguccagcauccagaacugacaggacuagauugcauaagaccuuguuucuggguugaguuaaucagagggcggcccaaagagagcacaauuuggacuagugggagcagcauaucuuuuugugguguaaauagugacacugugaguuggucuuggccagacggugcugaguugccauucaccauugacaaguag

SEQ ID NO: 47428 - RNA, 1350 nt, Artificial Sequence
  derived and/or modified CDS sequence (wt) from neuraminidase__InfluenzaA__ABI49409
augaauccaaaucggaagauaauaaccauuggaucaaucuguaugguaauuggaaugguuagcuuaauguuacaaauugggaacaugaucucaauaugggucagucauucaauucagacagggaaucaacaccaagcugaaucaaucagcaauacuaacccucuuacugagaaagcuguggcuucaguaacauuagcgggcaauucaucucuuugccccauuagaggaugggcuguacacaguaaggacaacaauauaaggaucgguucaaagggggauguguuuguuauuagagagccguucaucucaugcucccaccuggaaugcagaacuuucuucuugacucagggagccuugcugaaugacaagcacuccaacggaacugucaaagacagaagcccucacagaacauuaaugaguuguccugugggugaggcucccucuccauauaacucaagguuugagucuguugcuuggucagcaagugcuugccaugauggcaccaguugguugacaauuggaauuucuggcccagacaaugaggcuguggcuguauugaaauacaauggcauaauaacagacacuaucaagaguuggaggaacaacauccugagaacucaagagucugaaugugcauguguaaauggcucuugcuuuacuguaaugacugauggaccaaguaaugggcaggcaucauauaagaucuucaaaauggaaaaaggaaagguggucaaaucagucgaauugguugcuccuaauuaucacuaugaggagugcuccuguuauccugaugccggcgaaaucacauguguuugcagggauaauuggcauggaucaaauaggccauggguaucuuucaaucaaaauuuggaguaucaaauaggauauauaugcaguggaguuuucggagacaauccacgccccaaugauggaacagguaguuguggcccgauguccccuaacggggcauaugggguaaaaggguuuucauuuaaauacggcaaugguguuuggaucgggagaaccaaaagcacuaacuccaggagcggcuuugaaaugauuugggauccaaauggguggacaggaacggacaguagcuuuucagugaaacaagauauaguagcaauaacugauuggucaggauauagcgggaguuuuguccagcauccagaacugacaggauuagauugcauaagaccuuguuucuggguugaguuaaucagagggcggcccaaagagagcacaauuuggacuagugggagcagcauaucuuuuugugguguaaauagugacacugcgaguuggucuuggccagacggugcugaguugccauucaccauugacaaguag

SEQ ID NO: 47429 - RNA, 1350 nt, Artificial Sequence
  derived and/or modified CDS sequence (wt) from neuraminidase__InfluenzaA__ABI49417
augaauccaaaucagaagauaauaaccauuggaucaaucuguaugguaauuggaauaguuagcuuaauguuacaaauugggaacaugaucucaauaugggucagucauucaauucagacagggaaucaacaccaagcugaaucaaucagcaauacuaacccucuuacugagaaagcuguggcuucaguaacauuagcgggcaauucaucucuuugccccauuagaggaugggcuguacacaguaaggacaacaauauaaggaucgguucaaagggggauguguuuguuauuagagagccguucaucucaugcucccaccuggaaugcagaacuuucuucuugacucggggagccuugcugaaugacaagcacuccaacgggacugucaaagacagaagcccucacagaacauuaaugaguuguccugugggugaggcucccucuccauauaacucaagguuugagucuguugcuuggucagcaagugcuugccaugauggcaccaguugguugacaauuggaauuucuggcccagacaaugaggcuguggcuguauugaaauacaauggcauaauaacagacacuaucaagaguuggaggaacaacauacugaggacucaagagucugaaugugcauguguaaauggcucuugcuuuacuguaaugacugauggaccaaguaaugggcaggcaucauauaagaucuucaaaauggaaaaaggaaaaguggucaaaucagucgaauuggaugcuccuaauuaucacuaugaggagugcuccuguuauccugaugccggcgaaaucacauguguuugcagggauaauuggcauggaucaaauaggccauggguaucuuucaaucaaaauuuggaguaucaaauaggauauauaugcaguggaguuuucggagacaauccacgccccaaugauggaacagguaguuguggcccgauguccccuaacggggcauaugggguaaaaggguuuucauuuaaauacggcaaugguguuuggaucgggagaaccaaaagcacuaacuccaggagcggcuuugaaaugauuugggauccaaauggguggacuggaacggacaguagcuuuucagugaaacaagauauaguagcaauaacugauuggucaggauauagcgggaguuuuguccagcauccagaacugacaggauuagauugcauaagaccuuguuucuggguugaguuaaucagagggcagcccaaagagagcacaauuuggacuagugggagcagcauaucuuuuugugguguaaauagugacacugugaguuggucuuggccagacggugcugaguugccauucaccauugacaaguag

SEQ ID NO: 47430 - RNA, 1410 nt, Artificial Sequence
  derived and/or modified CDS sequence (wt) from neuraminidase__InfluenzaA__ABI84962
augaauccaaaucaaaagauaauaacaauuggcucugucucucucaccauugcaacaguaugcuuccucaugcagauugccauccuggcaacuacugugacauugcauuuuaagcaacaugagugcgacucccccgcgagcaaccaaguaaugccaugugaaccaauaauaauagaaaggaacauaacagagauaguguauuugaauaacaccaccauagagaaagagauuugccccgaaguaguggaauacagaaauuggucaaagccgcaaugucaaauuacaggauuugcaccuuuuucuaaggacaauucaauccggcuuucugcugguggggacauuugggugacgagagaaccuuaugugucaugcgauccuggcaaguguuaucaauuugcacucgggcaggggaccacacuagacaacaaacauucaaauggcacaauacaugauagaaucccucaucgaacccuauuaaugaaugaguuggguguuccauuucauuuaggaaccaaacaaguguguguagcaugguccagcucaaguugucacgauggaaaagcaugguugcauguuugugucacuggggaugauagaaaugcaacugcuagcuucauuuaugacgggaggcuuguggacaguauugguucauggucucaaaauauccucaggacccaggagucggaaugcguuuguaucaaugggacuugcacaguaguaaugacugauggaagugcaucaggaagagccgauacuagaauacuauucauuaaagaggggaaaauuguccauauuagcccauugucaggaagugcucagcauauagaggaguguuccuguuacccucgauauccugacgucagauguaucugcagagacaacuggaaaggcucuaauaggcccguuauagacauaaauauggaagauuauagcauugauuccaguuaugugugcucagggcuuguuggcgacacacccaggaacgacgacagcucuagcaauagcaauugcagggauccuaacaaugagagagggaauccaggagugaaaggcugggccuuugacaauggagaugauguauggaugggaagaacaaucagcaaagauucacgcucagguuaugaaacuuucaaagucauuggugguugguccacaccuaauuccaaaucgcaggucaauagacaggucauaguugacaacaauaauuggucugguuacucugguauuuucucuguugagggcaaaagcugcaucaauaggugcuuuuauguggaguugauaaggggaaggccacaggagacuagaguaugguggaccucaaacaguauuguuguguuuuguggcacuucagguacuuauggaacaggcucauggccugauggggcgaacaucaauuucaugccuauauaa

SEQ ID NO: 47431 - RNA, 1410 nt, Artificial Sequence
  derived and/or modified CDS sequence (wt) from neuraminidase__InfluenzaA__ABI85003
augaauccgaaucagaagauaauaacaaucgggguagugaauaccacucugucaacaauagcccuucucauuggagugggaaacuuaguuuucaacacagucauacaugagaaaauaggagaccaucaaauagugacccauccaacaauaaugaccccugaaguaccgaacugcagugacacuauaauaacauacaauaacacuguuauaaacaacauaacaacaacaauaauaacugaagcagaaaggccuuucaagucuccacuaccgcugugccccuucagaggauucuucccuuuucacaaggacaaugcaauacgacugggugaaaacaaagacgucauagucacaagggagccuuauguuagcugcgauaaugacaacugcugguccuuugcucucgcacaaggagcauugcuagggacuaaacauagcaaugggaccauuaaagacagaacaccauauaggucucuaauucguuucccaauaggaacagcuccaguacuaggaaauuacaaagagauaugcauugcuuggucgagcagcaguugcuuugacgggaaagaguggaugcaugugugcaugacagggaaugauaaugaugcaagugcccagauaauauauggaggaagaaugacagacuccauuaaaucauggaggaaagacauacuaagaacccaggagucugaaugucaaugcauugacgggacuuguguuguugcugucacagauggcccugcugcuaauagugcagaucacaggguuuacuggauacgggagggaagaauaauaaaguaugaaaauguucccaaaacaaagauacaacacuuagaagaauguuccugcuauguggacauugauguuuacuguauauguagggacaauuggaagggcucuaacagaccuuggaugagaaucaacaacgagacuauacuggaaacaggauauguauguaguaaauuucacucagacacccccaggccagcugacccuucaauaaugucaugugacuccccaagcaaugucaauggaggacccggagugaagggguuugguuucaaagcuggcaaugauguaugguuagguagaacagugucaacuagugguagaucgggcuuugaaauuaucaaaguuacagaaggguggaucaacucuccuaaccaugucaaaucaauuacacaaacacuaguguccaacaaugacuggucaggcuauucagguagcuucauugucaaagccaaggacuguuuucagcccuguuuuuauguugagcuuauacgagggaggcccaacaagaaugaugacgucucuuggacaaguaauaguauaguuacuuucuguggacuagacaaugaaccuggaucgggaaauuggccagaugguucuaacauuggguuuaugcccaaguaa

SEQ ID NO: 47432 - RNA, 1410 nt, Artificial Sequence; identical to SEQ ID NO: 47102
  derived and/or modified CDS sequence (wt) from neuraminidase__InfluenzaA__ABI92294

SEQ ID NO: 47433 - RNA, 1413 nt, Artificial Sequence
  derived and/or modified CDS sequence (wt) from neuraminidase__InfluenzaA__ABI92305
augaauccaaaucagaaaauaauaaccauuggaucaaucuguauggcaaucgggauaauuagucuaauauugcaaauaggaaauauuauuucaauauggguuagccacuuaauccaaacuggaagucaaaaccacacuggaauaugcaaccaaagaaucaucaccuaugaaaauagcaccuggguaaaucaaacauauguuaauauuaacaacacuaacguuguugcuggaaaggacacaacuucagugacacuagccggcaauucaucucuuuguccuguccgugggugggcuauauacagcaaagacaacagcauaagaauugguuccaaaggagauguuuuugucauaagagaaccuuuuauaucauguucucacuuggaaugcagaaccuuuuuucuaacccaaggugcucuauuaaaugacaagcauucaaaugggaccguuaaggacagaagcccuuauagggccuuaaugagcuguccuauaggugaagcuccgucuccauacaauucaagguuugaaucaguugcuuggucagcaagcgcaugucaugauggcaugggcuggcuaacaaucggaauuucuggaccagaugauggagcaguggcuguacuaaaauacaacggcauaauaacugaaaccauaaaaaguuggaggaaacgaauauuaagaacacaagagucugaaugugucuguauaaacgguucauguuuuaccauaaugaccgauggcccaaguaaugggccggccucguacagaaucuucaaaaucgagaaggggaaaauuacuaaaucaauagaguuggaugcacccaauucucacuacgaggaauguuccuguuacccagacaccggcacagugaugugugugugcagagacaauuggcaugguucgaaucgaccuuggguguccuuuaaucaaaaccuggauuaucaaauaggauacaucugcagugggguuuucggugacaacccgcgucccaaagauggaaaaggcagcugugguccaguaacuguugauggagcagacggaguaaagggguuuucauacagguaugguaauggugucuggauaggaagaacuaaaaguaacagcuccagaaagggauuugagaugauuugggauccuaauggauggacagauaccgauaguaauuucuuagugaaacaggauguaguggcaaugacugauuggucaggguacagcggaaguuucguucaacauccugagcuaacaggauuggacuguaugaggccuugcuucuggguugaauuaaucagaggacgaccuagagaaaagacaacaaucuggacuagugggagcagcauuucuuuuuguggcgugaauagugauacuguaaauuggucuuggccagacggugccgaguugccauucaccauugacaaguag

SEQ ID NO: 47434 - RNA, 1413 nt, Artificial Sequence
  derived and/or modified CDS sequence (wt) from neuraminidase__InfluenzaA__ABI92316
augaauccaaaucaaaaaauaauaaccauuggaucaaucaguauugcaauuggaguaauuagucugauauugcaaauaggaaauauuauuucaauaugggcuagccacucaauccaaacuggaagucaaaaccacacuggaauaugcaaccaaaggaucauuacauaugaaaauagcaccuggguaaaucaaacauauguuaauauuaacaacacuaauguuguugcuggaaaggacaaaaccucaaugacauuggccggcaauucaucucuuugcccuauccguggaugggcuauauacacaaaagacaacagcauaagaauugguuccaaaggagauguuuuugucauaagagagccuuuuauaucauguucucacuuggaaugcagaaccuuuuuucugacccaaggugcucuauuaaaugacaagcauucaaaugggaccguuaaggacagaagcccuuauagggccuuaaugagcuguccucuaggugaagcuccgucuccauacaauucaagauuugaaucaguugcuuggucagcaagcgcaugccaugauggcuugggcuggcuaacaaucggaauuucugguccagauaauggggcaguggcuguacuaaaauacaacggcauaauaacugaaaccauuaaaaguuggaagaagcgaauauuaagaacacaagagucugaaugugucugugugaacgguucauguuuuaccauaaugaccgauggcccgaguaauggggccgcaucguacagaaucuucaaaaucgagaaggguagaguuacuaaaucaauagaguuggaugcacccaauuaucauuacgaggaauguucauguuacccagacaccggcacagugaugugugugugcagggacaauuggcacgguucaaaucgaccuugggugucuuuuaaucaaaaccuggauuaucaaauaggauacaucugcagugggguguucggugacaauccgcgucccaaagauggagaaggcagcuguaauccagugacuguugauggagcagacggaguaaagggguuuucauacagauaugguaaugguguuuggauaggaaggacuaaaaguaacagacucagaaagggauuugagaugauuugggauccuaauggauggacagauaccgacagugauuucucaaugaaacaggauaucguggcaaugacugauuggucaggguacagcggaaguuuuguucaacauccugagcuaacaggauuggacuguaugagaccuugcuucuggguugaauuagucagagggcuaccuagagaaaauacaacaaucuggacuagugggagcagcauuucuuuuuguggcguaaauagcgauacugcaaacuggucuuggccagacggugccgaguugccauucaccauugacaaguag

SEQ ID NO: 47435 - RNA, 1410 nt, Artificial Sequence
  derived and/or modified CDS sequence (wt) from neuraminidase__InfluenzaA__ABI92327
augaauccaaaucaaaagauaauaacaauuggcucuguuucucucacuauugccacaauaugcuuccuuaugcaaauugccauccugguaacuacuguaacauugcauuucaagcaauaugagugcaacucccccccaagcaaccaaguaaugcugugugaaccaacaauaauagaaagaaacauaacagagauaguguauuugacuaacaccaccauagagaaagaaauaugccccaaacuggcagaauacagaaauuggucaaagccgcaauguaaaauuacaggauuugcaccuuuuucuaaggacaauucaauucggcuuuccgcugguggagacauuugggugacaagagaaccuuaugugucaugcgauccuggcaaguguuaucaauuugcacuuggacagggaacaacacuaaacaacaggcauucaaaugacacaguacaugauaggaccccuuaucgaacccuauugaugaaugaguuggguguuccauuucauuugggaaccaagcaagugugcauagcaugguccagcucaaguugucacgauggaaaagcauggcugcauguuuguguaacugggcaugaugaaaaugcaacugcuagcuucauuuacgaugggaggcuuguagauaguauugguucaugguccaaaaauauccucaggacccaggagucggaaugcguuuguaucaauggaacuuguacaguaguaaugacugauggaagugcuucagaaagagcugauacuaaaauacuauucauugaagaggggaaaaucguucauauuagcccauugucaggaagugcucagcaugucgaggagugcuccuguuauccucgauauccuggugucagaugugucugcagagacaacuggaaaggcuccaauaggcccaucguagauauaaaugugaaagauuauagcauuguuuccaguuaugugugcucaggacuuguuggagacacacccagaaaaaacgacaguuccagcaguagcuauugccggaauccuaacaaugagaaagggagucauggagugaaagguugggccuuugaugauggaaaugacguguggaugggaagaacgaucagcgaggaguuacgcucugguuaugaaaccuucaaaguuauuggaggcugguccaaaccuaacuccaaauugcagauaaauaggcaagucauaguugacagagguaauagguccgguuauucugguauuuucucuguugaaggcaaaagcugcaucaaucggugcuuuuauguggaguugauaaggggaaggaaacaggaaacugaagucugguggaccucaaacaguaucguuguguuuuguggcaccucagguacauauggaacaggcucauggccugauggggcggacaucaaucucaugccuauauaa

SEQ ID NO: 47436 - RNA, 1410 nt, Artificial Sequence
  derived and/or modified CDS sequence (wt) from neuraminidase__InfluenzaA__ABI92338
augaauccaaaucaaaagauaauaacaauuggcucuguuucucucaccauugccacaauaugcuuccuuaugcaaauugccauccugguaacuacuguaacauugcauuucaagcaguaugaaugcaacucccccccaaacaaccaaguaaugcugugugaaccagcaauaauagaaagaaacauaacagagauaguguaucugaccaacaccaccauagagaaggaaauaugccccaaauuagcagaauacagaaauuggucaaagccgcaauguaacauuacaggauuugcaccuuuuuccaaggacaauucgauucggcuuuccgcugguggggacaucugggugacaagagaaccuuaugugucaugcgauccugacaaguguuaucaauuugcccuuggacagggaacaacacuaaacaacgggcauucaaaugacacaguacaugauaggaccccuuaccggacccuauugaugaaugaauuggguguuccauuucauuugggaaccaggcaagugugcauagcaugguccagcucaaguugucacgauggaaaagcauggcugcauguuuguguaacuggggaugaugaaaaugcaacugcuagcuucauuuacaaugggaggcuuguagauaguauugguucaugguccaaaaaaauacucagaacccaggagucggaaugcguuuguaucaauggaacuuguacaguaguaaugacugaugggagcgcuucaggaaaagcugauacuaaaauacuauucauugaggaggggaaaaucguuaauauuagcacauugucaggaagugcucagcaugucgaggagugcuccuguuauccucgauauccuggugucagaugugucugcagagacaacuggaaaggcuccaauaggcccaucauagauauaaauguaaaggauuauagcauuguuuccaguuaugugugcucaggacuuguuggagacacacccagaaaaaacgacagcuucagcaguagccauugccuagauccuaacaaugaggaagguggucauggagugaaaggcugggccuuugaugauggaaaugacguguggaugggaagaacgaucagcgagaaguuacgcucagguuaugaaaccuucaaagucaucgaaggcugguccaaaccuaacuccaaauuacagauaaauaggcaagucauaguugaaagagguaacagguccgguuauucugguauuuucuccguugaaggcaaaagcugcaucaaucggugcuuuuauguggaguugauaaggggaaggaaagaggaaacugaaguuugguggaccucaaacaguauuguuguguuuuguggcaccucagguacauauggaacaggcucauggccugauggggcggauaucaaucucaugccuauauaa

SEQ ID NO: 47437 - RNA, 1410 nt, Artificial Sequence
  derived and/or modified CDS sequence (wt) from neuraminidase__InfluenzaA__ABI92349
augaauccaaaucaaaagauaauaacaauuggcucuguuucucucaccauugccacaauaugcuuccuuaugcaaauugccauccugguaacuacuguaacauugcauuucaagcaguaugaaugcaacucccccccaaacaaccaaguaaugcugugugaaccaacaauaauagaaagaaacauaacagagauaguguaucugaccaacaccaccauagagaaggaaauaugccccaaauuagcaaaauacagaaauuggucaaagccgcaauguaacauuacaggauuugcaccuuuuucuaaggacaauucgauucggcuuuccgcugguggggacaucugggugacaagagaaccuuaugugucaugcgauccugacaaguguuaucaauuugcccuugggcagggaacaacacuaaacaacgggcauucaaaugacacaguacaugauaggaccccuuaccggacccuauugaugaaugaauuggguguuccauuucauuugggaaccaggcaagugugcauagcaugguccagcucaaguugucacgauggaaaagcauggcugcauguuuguguaacuggggaugaugaaaaugcaacugcuagcuucauuuacaaugggaggcuuguagauaguauugguucaugguccaaaaaaauacucagaacccaggagucggaaugcguuuguaucaauggaacuuguacaguaguaaugacugaugggagcgcuucaggaaaagcugauacuaaaauacuauucauugaggaggggaaaaucguucauauuagcacauugucaggaagugcucagcaugucgaggagugcuccuguuauccucgauauccuggugucagaugugucugcagagacaacuggaaaggcuccaauaggcccaucguagauauaaauguaaaggauuauagcauuguuuccaguuaugugugcucaggacuuguuggagacacacccagaaaaaacgacagcuucagcaguagccauugccuagauccuaacaaugaggaagguggucauggagugaaaggcugggccuuugaugauggaaaugacguuuggauaggaagaacgaucagcgagaaguuacgcucagguuaugaaaccuucaaagucaucgaaggcugguccaaaccuaacuccaaauuacagacaaauaggcaagucauaguugaaagagguaacagguccgguuauucugguauuuucuccguugaaggcaaaagcugcaucaaucggugcuuuuauguggaguugauaaggggaaggaaagaggaaacugaagucugguggaccucaaacaguauuguuguguuuuguggcaccucagguacauauggaacaggcucauggccugauggggcggauaucaaucucaugccuauauaa

SEQ ID NO: 47438 - RNA, 1410 nt, Artificial Sequence
  derived and/or modified CDS sequence (wt) from neuraminidase__InfluenzaA__ABI92360
augaauccaaaucaaaagauaauaacgauuggcucuguuucucucaccauuuccacaauaugcuucuuuaugcaaauugccaucuugauaacaacuguaacauugcauuucaagcaauaugaauucaacucccccccaaacaaccaagugaugcugugugaaccaacaauaauagaaagaaacauaacagagauaguguaucugaccaacaccaccauagagaaggaaauaugccccaaacuagcagaauacagaaauuggucaaagccgcaaugugacauuacaggauuugcaccuuuuucuaaggacaauucgauuaggcuuuccgcugguggggacaucugggugacaagagaaccuuaugugucaugcgauccugacaaauguuaucaauuugcccuuggacagggaacaacacuaaacaacgugcauucaaaugacacaguacaugauaggaccccuuaucggacccuauugaugaaugaguuagguguuccauuucaucuggggacuaagcaagugugcauagcaugguccagcucaaguugucacgauggaaaagcauggcugcauguuuguguaacgggggaugauaaaaaugcaacugcuagcuucauuuacaaugggaggcuuguagauaguauuguuucaugguccaaagaaauccucagaacccaggagucagaaugcguuuguaucaauggaacuuguacaguaguaaugacugaugggagugcuucaggaaaagcugauacuaaaauacuauucauugaggaggggaaaaucguucauacuagcacauugucaggaagugcccagcaugucgaggagugcuccugcuauccucgauauccuggugucagaugugucugcagagacaacuggaaaggcuccaauaggcccaucguagauauaaacauaaaggauuauagcauuguuuccaguuaugugugcucaggacuuguuggagacacacccagaaaaaacgacagcuccagcaguagccauugcuuggauccuaacaaugaagaagguggucauggagugaaaggcugggccuuugaugauggaaaugacguguggaugggaagaacgaucagcgagaaguuacgcucaggauaugaaaccuucaaagucauugaaggcugguccaacccuaauuccaaauugcagauaaauaggcaagucauaguugacagagguaauagguccgguuauucugguauuuucucuguugaaggcaaaagcugcaucaaucggugcuuuuauguggaguugauaaggggaagaaaagaggaaacugaagucuuguggaccucaaacaguauuguuguguuuuguggcaccucagguacauauggaacaggcucauggccugauggggcggacaucaaucucaugccuauauaa

SEQ ID NO: 47439 - RNA, 1410 nt, Artificial Sequence; identical to SEQ ID NO: 46378
  derived and/or modified CDS sequence (wt) from neuraminidase__InfluenzaA__ABI92371

SEQ ID NO: 47440 - RNA, 1413 nt, Artificial Sequence; identical to SEQ ID NO: 47342
  derived and/or modified CDS sequence (wt) from neuraminidase__InfluenzaA__ABI92382

SEQ ID NO: 47441 - RNA, 1410 nt, Artificial Sequence; identical to SEQ ID NO: 47394
  derived and/or modified CDS sequence (wt) from neuraminidase__InfluenzaA__ABI92393

SEQ ID NO: 47442 - RNA, 1410 nt, Artificial Sequence
  derived and/or modified CDS sequence (wt) from neuraminidase__InfluenzaA__ABI92404
augaauccaaaucaaaagauaauaacgauuggcucuguuucucucaccauuuccacaauaugcuucuuuaugcaaauugccaucuugauaacuacuguaacauugcauuucaagcaauaugaauucaacucccccccaaacaaccaagugaugcugugugaaccaacaauaauagaaagaaacauaacagagauaguguaucugaccaacaccaccauagagaaggaaauaugccccaaacuagcagaauacagaaauuggucaaagccgcaaugugacauuacaggauuugcaccuuuuucuaaggacaauucgauuaggcuuuccgcugguggggacaucugggugacaagagaaccuuaugugucaugcgauccugacaaauguuaucaauuugcccuuggacagggaacaacacuaaacaacgugcauucaaaugacacaguacaugauaggaccccuuaucggacccuauugaugaaugaguuagguguuccauuucaucuggggacuaagcaagugugcauagcaugguccagcucaaguugucacgauggaaaagcauggcugcauguuuguguaacgggggaugauaaaaaugcaacugcuagcuucauuuacaaugggaggcuuguagauaguauuguuucaugguccaaagaaauccucagaacccaggagucagaaugcguuuguaucaauggaacuuguacaguaguaaugacugaugggagugcuucaggaaaagcugauacuaaaauacuauucauugaggaggggaaaaucguucauacuagcacauugucaggaagugcccagcaugucgaggagugcuccugcuauccucgauauccuggugucagaugugucugcagagacaacuggaaaggcuccaauaggcccaucguagauauaaacauaaaggauuauagcauuguuuccaguuaugugugcucaggacuuguuggagacacacccagaaaaaacgacagcuccagcaguagccauugcuuggauccuaacaaugaagaagguggucauggagugaaaggcugggccuuugaugauggaaaugacguguggaugggaagaacgaucagcgagaaguuacgcucaggauaugaaaccuucaaagucauugaaggcugguccaacccuaauuccaaauugcagauaaauaggcaaguuauaguugacagagguaauagguccgguuauucugguauuuucucuguugaaggcaaaagcugcaucaaucggugcuuuuauguggaguugauaaggggaagaaaagaggaaacugaagucuuguggaccucaaacaguauuguuguguuuuguggcaccucagguacauauggaacaggcucauggccugauggggcggacaucaaucucaugccuauauaa

SEQ ID NO: 47443 - RNA, 1410 nt, Artificial Sequence
  derived and/or modified CDS sequence (wt) from neuraminidase__InfluenzaA__ABI92415
augaauccaaaucaaaagauaauaacgauuggcucuguuucucucaccauuuccacaauaugcuucuucaugcaaauugccaucuugauaacuacuguaacauugcauuuuaagcaauaugaauucaacucccccccaaacaaccaagugaugcugugugaaccaacaauaauagaaagaaacauaacagagauaguguaucugaccaacaccaccauagagaaggaaauaugccccaaacuagcagaauacaggaauuggucaaagccgcaaugugacauuacaggauuugcaccuuuuucuaaggacaauucgauuaggcuuuccgcugguggggacaucugggugacaagagaaccuuaugugucaugcgauccugacaaguguuaucaauuugcccuuggacagggaacaacacuaaacaacgugcauucaaaugacacaguacaugauaggaccccuuaucggacccuauugaugaaugaguuagguguuccauuucaucuggggaccaagcaagugugcauagcaugguccagcucaaguugucacgauggaaaagcauggcugcauguuuguguaacgggggaugauaaaaaugcaacugcuagcuucauuuacaaugggaggcuuguagauaguauuguuucaugguccaaaaaaauccucaggacccaggagucagaaugcguuuguaucaauggaacuuguacaguaguaaugacugaugggagugcuucaggaaaagcugauacuaaaauacuauucauugaggaggggaaaaucguucauacuagcacauugucaggaagugcucagcaugucgaggagugcuccugcuauccucgauauccuggugucagaugugucugcagagacaacuggaaaggcuccaauaggcccaucguagauauaaacauaaaggauuauagcauuguuuccaguuaugugugcucaggacuuguuggagacacacccagaaaaaacgacagcuccagcaguagccauugcuuggauccuaacaaugaagaagguggucauggagugaaaggcugggccuuugaugauggaaaugacguguggaugggaagaacgaucagcgagaaguuacgcucaggauaugaaaccuucaaagucauugaaggcugguccaacccuaauuccaaauugcagauaaauaggcaagucauaguugacagagguaauagguccgguuauucugguauuuucucuguugaaggcaaaagcugcaucaaucggugcuuuuauguggaguugauaaggggaagaaaagaggaaacugaagucuuguggaccucaaacaguauuguuguguuuuguggcaccucagguacauauggaacaggcucauggccugauggggcggacaucaauuucaugccuauauga

SEQ ID NO: 47444 - RNA, 1410 nt, Artificial Sequence; identical to SEQ ID NO: 47401
  derived and/or modified CDS sequence (wt) from neuraminidase__InfluenzaA__ABI92426

SEQ ID NO: 47445 - RNA, 1410 nt, Artificial Sequence; identical to SEQ ID NO: 47401
  derived and/or modified CDS sequence (wt) from neuraminidase__InfluenzaA__ABI92437

SEQ ID NO: 47446 - RNA, 1410 nt, Artificial Sequence
  derived and/or modified CDS sequence (wt) from neuraminidase__InfluenzaA__ABI92448
augaauccaaaucaaaagauaauaacgauuggcucuguuucucucaccauuuccacaauaugcuucuucaugcaaauugccaucuugauaacuacuguaacauugcauuuuaagcaauaugaauucaacucccccccaaacaaccaagugaugcugugugaaccaacaauaauagaaagaaacauaacagagauaguguaucugaccaacaccaccauagagaaggaaauaugccccaaacuagcagaauacaggaauuggucaaagccgcaaugugacauuacaggauuugcaccuuuuucuaaggacaauucgauuaggcuuuccgcugguggggacaucugggugacaagagaaccuuaugugucaugcgauccugauaaguguuaucaauuugcccuuggacagggaacaacacuaaacaacgugcauucaaaugacacaguacaugauaggaccccuuaucggacccuauugaugaaugaguuagguguuccauuucaucuggggaccaagcaagugugcauagcaugguccagcucaaguugucacgauggaaaagcauggcugcauguuuguguaacgggggaugauaaaaaugcaacugcuagcuucauuuacaaugggaggcuuguagauaguauuguuucaugguccaaaaaaauccucaggacccaggagucagaaugcguuuguaucaauggaacuuguacaguaguaaugacugaugggagugcuucaggaaaagcugauacuaaaauacuauucauugaggaggggaaaaucguucauacuagcacauugucaggaagugcucagcaugucgaggagugcuccugcuauccucgauauccuggugucagaugugucugcagagacaacuggaaaggcuccaauaggcccaucguagauauaaacauaaaggauuauagcauuguuuccaguuaugugugcucaggacuuguuggagacacacccagaaaaaacgacagcuccagcaguagccauugcuuggauccuaacaaugaagaagguggucauggagugaaaggcugggccuuugaugauggaaaugacguguggaugggaagaacgaucagcgagaaguuacgcucaggauaugaaaccuucaaagucauugaaggcugguccaacccuaauuccaaauugcagauaaauaggcaagucauaguugacagagguaauagguccgguuauucugguauuuucucuguugaaggcaaaagcugcaucaaucggugcuuuuauguggaguugauaaggggaagaaaagaggaaacugaagucuuguggaccucaaacaguauuguuguguuuuguggcaccucagguacauauggaacaggcucauggccugauggggcggacaucaaucucaugccuauauaa

SEQ ID NO: 47447 - RNA, 1410 nt, Artificial Sequence; identical to SEQ ID NO: 47401
  derived and/or modified CDS sequence (wt) from neuraminidase__InfluenzaA__ABI92459

SEQ ID NO: 47448 - RNA, 1410 nt, Artificial Sequence
  derived and/or modified CDS sequence (wt) from neuraminidase__InfluenzaA__ABI92470
augaauccaaaucaaaagauaauaacgauuggcucuguuucucucaccauugccacaauaugcuuccuuaugcaaauugccauccugguaacuacuguaacguugcauuucaagcaauaugaaugcaacucccccccaaacaaccaagugaugcugugugaaccaacaauaauagaaagaaacauaacagagauaguguaucugaccaacaccaccauagagaaggaaauaugccccaaacuagcagaauacagaaauuggucaaagccgcaauguaacauuacaggauuugcaccuuuuucuaaggacaauucgauucggcuuuccgcugguggggacaucugggugacaagagaaccuuaugugucaugcgauccugacaaguguuaucaauuugcccuuggacagggaacaacacuaaacaacgggcauucaaaugacacaguacaugauaggaccccuuaucgaacccuauugaugaaugaguuggguguuccauuucauuugggaaccaagcaagugugcauagcaugguccagcucaaguugucacgauggaaaagcauggcugcauguuuguguaacgggggaugaugaaaaugcaacugcuagcuucauuuacaaugggaggcuuguagauaguaucgguucaugguccaaaaaaauccucaggacccaggagucggaaugcguuuguaucaauggaacuuguacaguaguaaugacugaugggagugcuucagaaaaagcugauacuaaaauacuauucauugaggaggggaaaaucguucauacuagcucauugucaggaagugcucagcaugucgaggagugcuccuguuauccucgauauccuggugucagaugugucugcagagacaacuggaaaggcuccaauaggcccaucguagauauaaauguaaaggauuauagcauuguuuccaguuaugugugcucaggacuuguuggagacacacccagaaaaaacgacagcuccagcaguagccauugcuuggauccuaacaaugaggaagguggucauggagugaaaggcugggccuuugaugauggaaaugacguguggaugggaagaacgaucagcgagaaguuacgcucaggauaugaaaccuucaaagucauugaaggcugguccaaaccuaacuccaaauugcagauaaauaggcaagucauaguugacagagguaauagguccgguuauucugguauuuucucuguugaaagcaaaagcugcaucaauaggugcuuuuauguggaguugauaaggggaaggaaacaggaaacugaagucuuguggaccucaaacaguauuguuguguuuuguggcaccucagguacauauggaacaggcucauggccugauggggcggacaucaaucucaugccuauauaa

SEQ ID NO: 47449 - RNA, 1410 nt, Artificial Sequence; identical to SEQ ID NO: 46755
  derived and/or modified CDS sequence (wt) from neuraminidase__InfluenzaA__ABI92481

SEQ ID NO: 47450 - RNA, 1410 nt, Artificial Sequence; identical to SEQ ID NO: 46755
  derived and/or modified CDS sequence (wt) from neuraminidase__InfluenzaA__ABI92492

SEQ ID NO: 47451 - RNA, 1410 nt, Artificial Sequence
  derived and/or modified CDS sequence (wt) from neuraminidase__InfluenzaA__ABI92503
augaauccaaaucaaaagauaauaacgauuggcucuguuucucucaccauugccacaauaugcuuccuuaugcaaauugccauccugguaacuacuguaacguugcauuucaagcaauaugaaugcaacucccccccaaacaaccaagugaugcugugugaaccaacaauaauagaaagaaacauaacagagauaguguaucugaccaacaccaccauagagaaggaaauaugccccaaacuagaagaauacagaaauuggucaaagccgcaauguaacauuacaggauuugcaccuuuuucuaaggacaauucgauucggcuuuccgcugguggggacaucugggugacaagagaaccuuaugugucaugcgauccugacaaguguuaucaauuugcccuuggacagggaacaacacuaaacaacgggcauucaaaugacacaguacaugauaggaccccuuaucgaacccuauugaugaaugaguuggguguuccauuucauuugggaaccaagcaagugugcauagcaugguccagcucaaguugucacgauggaaaagcauggcugcauguuuguguaacgggggaugaugaaaaugcaacugcuagcuucauuuacaaugggaggcuuguagauaguaucgguucaugguccaaaaaaauccucaggacccaggagucggaaugcguuuguaucaauggaacuuguacaguaguaaugacugaugggagugcuucaggaaaagcugauacuaaaauacuauucauugaggaggggaaaaucguucauacuagcucauugucaggaagugcucagcaugucgaggagugcuccuguuauccucgauauccuggugucagaugugucugcagagacaacuggaaaggcuccaauaggcccaucguagauauaaauguaaaggauuauagcauuguuuccaguuaugugugcucaggacuuguuggagacacacccagaaaaaacgacagcuccagcaguagccauugcuuggauccuaacaaugaggaagguggucauggagugaaaggcugggccuuugaugauggaaaugacguguggaugggaagaacgaucagcgagaaguuacgcucaggauaugaaaccuucaaagucauugaaggcugguccaaaccuaacuccaaauugcagauaaauaggcaagucauaguugacagagguaauagguccgguuauucugguauuuucucuguugagagcaaaagcugcaucaauaggugcuuuuauguggaguugauaaggggaaggaaacaggaaacugaagucuuguggaccucaaacaguauuguuguguuuuguggcaccucagguacauauggaacaggcucauggccugauggggcggacaucaaucucaugccuauauaa

SEQ ID NO: 47452 - RNA, 1410 nt, Artificial Sequence
  derived and/or modified CDS sequence (wt) from neuraminidase__InfluenzaA__ABI92514
augaauccaaaucaaaagauaauaacgauuggcucuguuucucucacuauugccacaauaugcuuccuugugcaaauagccauccugguaacuacuguaacauugcauuucaagcaauaugaaugcaacucccccccaaacaaccaaguaaugcugugugaaccaacaauaauagaaagaaacauaacagagauaguguaucugaccaacaccaccauagagaaggaaauaugccccaaacuagcagaauacagaaauuggucaaagccgcaauguaaaauuacaggauuugcaccuuuuucuaaggauaauucaauucggcuuuccgcugguggggacauuugggugacaagagaaccuuaugugucaugcgauccugacaaguguuaucaauuugcccuuggacagggaacaacacuaaacaacaggcauucaaaugacacaguacaugauaggaccccuuaucgaacccuauugaugaaugaguuggguguuccauuucauuugggaaccaagcaaguguguauagcaugguccagcucaaguugucacgauggaaaagcauggcugcauguuuguguaacuggggaugaugaaaaugcaacugcuagcuucauuuacgaugggagacuuguagauaguauugguucaugguccaaaaaaauccucaggacccaggagucggaaugcguuuguaucaauggaacuuguacaguaguaaugacugaugggagugcuucaggaagagcugauacuaaaauacuauucauugaggaggggaaaaucguacauacuagcaaacugucaggaagugcucagcaugucgaggagugcuccuguuauccucgauauccuggugucagaugugucuguagagacaacuggaaaggcuccaauaggcccaucguagauauaaauguaaaggauuauagcauuguuuccaguuaugugugcucaggacuuguuggagacacacccagaaaaaacgacagcuccagcaguagccauugccuggauccuaacaaugaagaagggggucauggagugaaaggcugggccuuugaugauggagaugauguguggaugggaagaacgaucagcgagaagucacgcucugguuaugaaaccuucaaggucauugaaggcugguccaaaccuaacuccaaauugcagauaaauaggcaagucauaguugaaagagguaauauguccgguuauucugguauuuucucuguugaaggcaaaagcugcaucaaccggugcuuuuauguggaguugauaaggggaaggaaacaggaaacugaagucugguggaccucaaacaguauuguuguguuuuguggcaccucagguacauauggaacaggcucauggccugauggggcggacaucaaucucaugccuauauaa

SEQ ID NO: 47453 - RNA, 1410 nt, Artificial Sequence
  derived and/or modified CDS sequence (wt) from neuraminidase__InfluenzaA__ABI92525
augaauccaaaucaaaagauaauaacaauuggcucuguuucucucaccauugccacaauaugcuuccuuaugcaaauugccauccugguaacuacuguaacauugcauuucaagcaguaugaaugcaacucccccccaaacaaccaaguaaugcugugugaaccaacaauaauagaaagaaacauaacagagauaguguaucugaccaacaccaccauagagaaggaaauaugcccuaaacuagcagaauacagaaauuggucaaagccgcaauguaacauuacaggauuugcaccuuuuucuaaggacaauucgauucggcuuuccgcugguggggacaucugggugacaagagaaccuuaugugucaugcgauccugacaaguguuaucaauuugcccuugggcagggaacaacacuaaacaacgggcauucaaaugacacaguacaugauaggaccccuuaccggacccuauugaugaaugaguuggguguuccauuucauuugggaaccaagcaagugugcauagcaugguccagcucaaguugucacgauggaaaagcauggcugcauguuuguguaacuggggaugaugaaaaugcaacugcuagcuucauuuacaaugggaggcuuguagauaguauugguucaugguccaaaaaaauacucaggacccaggagucggaaugcguuuguaucaauggaacuuguacaguaguaaugacugaugggagcgcuucaggaaaagcugauacuaaaauacuauucauugaggaggggaaaaucguucauauuagcacauugucaggaagugcucagcaugucgaggagugcuccuguuauccucgauauccuggugucagaugugucugcagagacaacuggaaaggcuccaauaggcccaucguagauauaaauguaaaggauuauagcauuguuuccaguuaugugugcucaggacuuguuggagacacacccagaaaaaacgacagcuucagcaguagccauugccuagauccuaacaaugaggaagguggucauggagugaaaggcugggccuuugaugauggaaaugacguguggaugggaagaacgaucagcgagaaguuacgcucagguuaugaaaccuucaaagucaucgaaggcugguccaaaccuaacuccaaauuacagauaaauaggcaagucauaguugaaagagguaacagguccgguuauucugguauuuucuccguugaaggcaaaagcugcaucaaucggugcuuuuauguggaguugauaaggggaaggaaagaggaaacugaagucugguggaccucaaacaguauuguuguguuuuguggcaccucagguacauauggaacaggcucauggccugauggggcggauaucaaucucaugccuauauaa

SEQ ID NO: 47454 - RNA, 1410 nt, Artificial Sequence
  derived and/or modified CDS sequence (wt) from neuraminidase__InfluenzaA__ABI92536
augaauccaaaucaaaagauaauaacaauuggcucuguuucucucaccauugccacaauaugcuuccuuaugcaaauugccauccugguaacuacuguaacauugcauuucaagcaguaugaaugcaacucccccccaaacaaccaaguaaugcugugugaaccaacaauaauagaaagaaacauaacagagauaguguaucugaccaacaccaccauagagaaggaaaagugccccaaacuagcagaauacagaaauuggucaaagccgcaauguaacauuacaggauuugcaccuuuuucuaaggacaauucgauucggcuuuccgcugguggggacaucugggugacaagagaaccuuaugugucaugcgauccugacaaguguuaucaauuugcccuugggcagggaacaacacuaaacaacgggcauucaaaugacacaguacaugauaggaccccuuaccggacccuauugaugaaugaauuggguguuccauuucauuugggaaccaggcaagugugcauagcaugguccagcucaaguugucacgauggaaaagcauggcugcauguuuguguaacuggggaugaugaaaaugcaacugcuagcuucauuuacaaugggaggcuuguagauaguauugguucaugguccaaaaaaauacucagaacccaggagucggaaugcguuuguaucaauggaacuuguacaguaguaaugacugaugggagcgcuucaggaaaagcugauacuaaaauacuauucauugaggaggggaaaaucguucauauuagcacauugucaggaagugcucagcaugucgaggagugcuccuguuauccucgauauccuggugucagaugugucugcagagacaacuggaaaggcuccaauaggcccaucguagauauaaauguaaaggauuauagcauuguuuccaguuaugugugcucaggacuuguuggagacacacccagaaaaaacgacagcuucagcaguagccauugccuagauccuaacaaugaggaagguggucauggagugaaaggcugggccuuugaugauggaaaugacguguggaugggaagaacgaucagcgagaaguuacgcucagguuaugaaaccuucaaagucaucgaaggcugguccaaaccuaacuccaaauuacagauaaauaggcaagucauaguugaaagagguaacagguccgguuauucugguauuuucuccguugaaggcaaaagcugcaucaaucggugcuuuuauguggaguugauaaggggaaggaaagaggaaacugaagucugguggaccucaaacaguauuguuguguuuuguggcaccucagguacauauggagcaggcucauggccugauggggcggauaucaaucucaugccuauauaa

SEQ ID NO: 47455 - RNA, 1410 nt, Artificial Sequence
  derived and/or modified CDS sequence (wt) from neuraminidase__InfluenzaA__ABI92547
augaauccaaaucaaaagauaauaacaauuggcucuguuucucucaccauugccacaauaugcuuccuuaugcaaauugccauccugguaacuacuguaacauugcauuucaagcaguaugaaugcaacucccccccaaacaaccaaguaaugcugugugaaccaacaauaauagaaagaaacauaacagagauaguguaucugaccaacaccaccauagagaaggaaaugugccccaaacuagcagaauacagaaauuggucaaagccgcaauguaacauuacaggauuugcaccuuuuucuaaggacaauucgauucggcuuuccgcugguggggacaucugggugacaagagaaccuuaugugucaugcgauccugacaaguguuaucaauuugcccuugggcagggaacaacacuaaacaacgggcauucaaaugacacaguacaugauaggaccccuuaccggacccuauugaugaaugaauuggguguuccauuucauuugggaaccaggcaagugugcauagcaugguccagcucaaguugucacgauggaaaagcauggcugcauguuuguguaacuggggaugaugaaaaugcaacugcuagcuucauuuacaaugggaggcuuguagauaguauugguucaugguccaaaaaaauacucagaacccaggagucggaaugcguuuguaucaauggaacuuguacaguaguaaugacugaugggagcgcuucaggaaaagcugauacuaaaauacuauucauugaggaggggaaaaucguucauauuagcacauugucaggaagugcucagcaugucgaggagugcuccuguuauccucgauauccuggugucagaugugucugcagagacaacuggaaaggcuccaauaggcccaucguagauauaaauguaaaggauuauagcauuguuuccaguuaugugugcucaggacuuguuggagacacacccagaaaaaacgacagcuucagcaguagccauugccuagauccuaacaaugaggaagguggucauggagugaaaggcugggccuuugaugauggaaaugacguguggaugggaagaacgaucagcgagaaguuacgcucagguuaugaaaccuucaaagucaucgaaggcugguccaaaccuaacuccaaauuacagauaaauaggcaagucauaguugaaagagguaacagguccgguuauucugguauuuucuccguugaaggcaaaagcugcaucaaucggugcuuuuauguggaguugauaaggggaaggaaagaggaaacugaagucugguggaccucaaacaguauuguuguguuuuguggcaccucagguacauauggagcaggcucauggccugauggggcggauaucaaucucaugccuauauaa

SEQ ID NO: 47456 - RNA, 1410 nt, Artificial Sequence
  derived and/or modified CDS sequence (wt) from neuraminidase__InfluenzaA__ABI92558
augaauccaaaucaaaagauaauaacaauuggcucuguuucucucaccauugccacaauaugcuuccuuaugcaaauugccauccugguaacuacuguaacauugcauuucaagcaguaugaaugcaacucccccccaaacaaccaaguaaugcugugugaaccaacaauaauagaaagaaacauaacagagauaguguaucugaccaauaccaccauagagaaggaaauaugccccaaauuagcagaauacagaaauuggucaaggccgcaauguaacauuacaggauuugcaccuuuuucuaaggacaauucgauucggcuuuccgcugguggggacaucugggugacaagagaaccuuaugugucaugcgauccugacaaguguuaucaauuugcccuugggcagggaacaacacuaaacaacgggcauucaaaugacacaguacaugauaggaccccuuaccggacccuauugaugaaugaauuggguguuccauuucauuugggaaccaggcaagugugcauagcaugguccagcucaaguugucacgauggaaaagcauggcugcauguuuguguaacuggggaugaugaaaaugcaacugcuagcuucauuuacaaugggaggcuuguagauaguauugguucaugguccaaaaaaauacucagaacccaggagucggaaugcguuuguaucaauggaacuuguacaguaguaaugacugaugggagcgcuucaggaaaagcugauacuaaaauacuauucauugaggaggggaaaaucguucauauuagcacauugucaggaagugcucagcaugucgaggagugcuccuguuauccucgauauccuggugucagaugugucugcagagacaacuggaaaggcuccaauaggcccaucguagauauaaauguaaaagauuauagcauuguuuccaguuaugugugcucaggacuuguuggagacacacccagaaaaaacgacagcuucagcaguagccauugccuagauccuaacaaugaggaagguggucauggagugaaaggcugggccuuugaugauggaaaugacguguggaugggaagaacgaucagcgagaaguuacgcucagguuaugaaaccuucaaagucaucgaaggcugguccaaacccaacuccaaauuacagauaaauaggcaagucauaguugaaagagguaacagguccgguuauucugguauuuucuccguugaaggcaaaagcugcaucaaucggugcuuuuauguggaguugauaaggggaaggaaagaggaaacugaagucugguggaccucaaacagcauuguuguguuuuguggcaccucagguacauauggaacaggcucauggccugauggggcggauaucaaucucaugccuauauaa

SEQ ID NO: 47457 - RNA, 1410 nt, Artificial Sequence
  derived and/or modified CDS sequence (wt) from neuraminidase__InfluenzaA__ABI92569
augaauccaaaucaaaagauaauaacaauuggcucuguuucucucaccauugccacaauaugcuuccuuaugcaaauugccauccugguaacuacuguaacauugcauuucaagcaguaugaaugcaacucccccccaaacaaccaaguaaugcugugugagccaacaauaauagaaagaaacauaacagagauaguguaucugaccaacaccaccauagagaaggaaauaugccccaaauuagcagaauacagaaauuggucaaagccgcaauguaacauuacaggauuugcaccuuuuucuaaggacaauucgauucggcuuuccgcugguggggacaucugggugacaagagaaccuuaugugucaugcgauccugacaaguguuaucaauuugcccuugggcagggaacaacacuaaacaacgggcauucaaaugacacaguacaugauaggaccccuuaccggacccuauugaugaaugaauuggguguuccauuucauuugggaaccaggcaagugugcauagcaugguccagcucaaguugucacgauggaaaagcauggcugcauguuuguguaacuggggaugaugaaaaugcaacugcuagcuucauuuacaaugggaagcuuguagauaguauugguucaugguccaaaaaaauacucagaacccaggagucggaaugcguuuguaucaauggaacuugugcaguaguaaugacugaugggagcgcuucaggaaaagcugauacuaaaauacuauucauugaggaggggaaaaucguucauauuagcacauugucaggaagugcucagcaugucgaggagugcuccuguuauccucgauauccuggugucagaugugucugcagagacaacuggaaaggcuccaauaggcccaucguagauauaaauguaaaggauuauagcauuguuuccaguuaugugugcucaggacuuguuggagacacacccagaaaaaacgacagcuucagcaguagccauugccuagauccuaacaaugaggaagguggucauggagugaaaggcugggccuuugaugauggaaaugacguguggaugggaagaacgaucagcgagaaguuacgcucagguuaugaaaccuucaaagucaucgaaggcugguccaaaccuaacuccaaauuacagacaaauaggcaagucauaguugaaagagguaacagguccgguuauucugguauuuucuccguugaaggcaaaagcugcaucaaucggugcuuuuauguggaauugauaaggggaaggaaagaggaaacugaagucugguggaccucaaacaguauuguuguguuuuguggcaccucagguacauauggaacaggcucauggccugauggggcggauaucaaucucaugccuauauaa

SEQ ID NO: 47458 - RNA, 1410 nt, Artificial Sequence
  derived and/or modified CDS sequence (wt) from neuraminidase__InfluenzaA__ABI92580
augaauccaaaucaaaagauaauaacaauuggcucuguuucucucaccauugccacaauaugcuuccuuaugcaaauugccauccugguaacuacuguaacauugcauuucaagcaguaugaaugcaacucccccccaaacaacaaaguaaugcugugugaaccaacaauaauagaaagaaacauaacagagauaguguaucugaccaacaccaccauagagaaggaaauaugccccaaacuagcagaauacagaaauuggucaaagccgcaauguaacauuacaggauuugcaccuuuuucuaaggacaauucgauucggcuuuccgcugguggggacaucugggugacaagagaaccuuaugugucaugcgauccugacaaguguuaucaauuugcccuugggcagggaacaacacuaaacaacgggcauucaaaugacacaguacaugauaggaccccuuaccggacccuauugaugaaugaauuggguguuccauuucauuugggaaccaggcaagugugcauagcaugguccagcucaaguugucacgauggaaaagcauggcugcauguuuguguaacuggggaugaugaaaaugcaacugcuagcuucauuuacaaugggaggcuuguagauaguauugguucaugguccaaaaaaauacucagaacccaggagucggaaugcguuuguaucaauggaacuuguacaguaguaaugacugaugggagcgcuucaggaaaagcugauacuaaaauauuauucauugaggaggggaaaaucguucauauuagcacauugucaggaagugcucagcaugucgaggagugcuccuguuauccucgauauccuggugucagaugugucugcagagacaacuggaaaggcuccaauaggcccaucguagauauaaauguaaaggauuauagcauuguuuccaguuaugugugcucaggacuuguuggagacacacccagaaaaaacgacagcuucagcaguagccauugccuagauccuaacaaugaggaagguggucauggagugaaaggcugggccuuugaugauggaaaugacguguggaugggaagaacgaucagcgagaaguuacgcucagguuaugaaaccuucaaagucauugaaggcugguccaaaccuaacuccaaauuacagauaaauaggcaagucauaguugaaagagguaacagguccgguuauucugguauuuucuccguugaaggcaaaggcugcaucaaucggugcuuuuauguggaguugauaaggggaaggaaagaggaaacugaagucugguggaccucaaacaguauuguuguguuuuguggcaccucagguacauauggaacaggcucauggccugauggggcggauaucaaucucaugccuauauaa

SEQ ID NO: 47459 - RNA, 1410 nt, Artificial Sequence
  derived and/or modified CDS sequence (wt) from neuraminidase__InfluenzaA__ABI92591
augaauccaaaucaaaagauaauaacaauuggcucuguuucucucaccauugccacaauaugcuuccuuaugcaaauugccauccugguaacuacuguaacauugcauuucaagcaguaugaaugcaacucccccccaaacaaccaaguaaugcugugugaaccaacaauaauagaaagaaacauaacagagauaguguaucugaccaacaccaccauagagaaggaaauaugccccaaacuagcagaauacagaaauuggucaaagccacaauguaacauuacaggauuugcaccuuuuucuaaggacaauucgauucggcuuuccgcugguggggacaucugggugacaagagaaccuuaugugucaugcgauccugacaaguguuaucaauuugcccuugggcagggaacaacacuaaacaacgggcauucaaaugacacaguacaugauaggaccccuuaccggacccuauugaugaaugaauuggguguuccauuucauuugagaaccaggcaagugugcauagcaugguccagcucaaguugucacgauggaaaagcauggcugcauguuuguguaacuggggaugaugaaaaugcaacugcuagcuucauuuacaaugggaggcuuguagauaguauugguucaugguccaaaaaaauacucagaacccaggagucggaaugcguuuguaucaauggaacuuguacaguaguaaugacugaugggagcgcuucaggaaaagcugauacuaaaauauuauucauugaggaggggaaaaucguucauauuagcacauugucaggaagugcucagcaugucgaggagugcuccuguuauccucgauauccuggugucagaugugucugcagagacaacuggaaaggcuccaauaggcccaucguagauauaaauguaaaggauuauagcauuguuuccaguuaugugugcucaggacuuguuggagacacacccagaaaaaacgacagccucagcaguagccauugccuagauccuaacaaugaggaagguggucauggagugaaaggcugggccuuugaugauggaaaugacguguggaugggaagaacgaucagcgagaaguuacgcucagguuaugaaaccuucaaagucauugaaggcugguccaaaccuaacuccaaauuacagauaaauaggcaagucauaguugaaagagguaacagguccgguuauucugguauuuucuccguugaaggcaaaggcugcaucaaucggugcuuuuauguggaguugauaaggggaaggaaagaggaaacugaagucugguggaccucaaacaguauuguuguguuuuguggcaccucagguacauauggaacaggcucauggccugauggggcggauaucaaucucaugccuauauaa

SEQ ID NO: 47460 - RNA, 1410 nt, Artificial Sequence
  derived and/or modified CDS sequence (wt) from neuraminidase__InfluenzaA__ABI92602
augaauccaaaucaaaagauaauaacaauuggcucuguuucucucaccauugccacaauaugcuuccuuaugcaaauugccauccugguaacuacuguaacauugcauuucaagcaguaugaaugcaacucccccccaaacaaccaaguaaugcugugugaaccaacaauaauagaaagaaacauaacagagauaguguaucugaccaauaccaccauagagaaggaaauaugccccaaauuagcagaauacagaaauuggucaaagccgcaauguaacauuacaggauuugcaccuuuuucuaaggacaauucgauucggcuuuccgcugguggggacaucugggugacaagagaaccuuaugugucaugcgauccugacaaguguuaucaauuugcccuugggcagggaacaacacuaaacaacgggcauucaaaugacacaguacaugauaggaccccuuaccggacccuauugaugaaugaauuggguguuccauuucauuugggaaccaggcaagugugcauagcaugguccagcucaaguugucacgauggaaaagcauggcugcauguuuguguaacuggggaugaugaaaaugcaacugcuagcuuaauuuacaaugggaggcuuguagauaguauugguucaugguccaaaaaaauacucagaacccaggagucggaaugcguuuguaucaauggaacuuguacaguaguaaugacugaugggagcgcuucaggaaaagcugauacuaaaauacuauucauugaggaggggaaaaucguucauauuagcacauugucaggaagugcucagcaugucgaggagugcuccuguuauccucgauauccuggugucagaugugucugcagagacaacuggaaaggcuccaauaggcccaucguagauauaaauguaaaagauuauagcauuguuuccaguuaugugugcucaggacuuguuggagacacacccagaaaaaacgacagcuucagcaguagccauugccuagauccuaacaaugaggaagguggucauggagugaaaggcugggccuuugaugauggaaaugacguguggaugggaagaacgaucagcgagaaguuacgcucagguuaugaaaccuucaaagucaucgaaggcugguccaaaccuaacuccaaauuacagguaaauaggcaagucauaguugaaagagguaacagguccgguuauucugguauuuucuccguugaaggcaaaagcugcaucaaucggugcuuuuauguggaguugauaaggggaaggaaagaggaaacugaagucugguggaccucaaacaguauuguuguguuuuguggcaccucagguacauauggaacaggcucauggccugauggagcggauaucaaucucaugccuauauaa

SEQ ID NO: 47461 - RNA, 1410 nt, Artificial Sequence
  derived and/or modified CDS sequence (wt) from neuraminidase__InfluenzaA__ABI92613
augaauccaaaucaaaagauaauaacaauuggcucuguuucucucaccauugccacaauaugcuuccuuaugcaaauugccauccugguaacuacuguaacauugcauuucaagcaguaugaaugcaacucccccccaaacaaccaaguaaugcugugugaaccaacaauaauagaaagaaacauaacagagauaguguaucugaccaacaccaccauagagaaggaaauaugccccaaauuagcagaauacagaaauuggucaaagccgcaauguaacauuacaggauuugcaccuuuuucuaaggacaauucgauucggcuuuccgcugguggggacaucugggugacaagagaaccuuaugugucaugcgauccugacaaguguuaucaauuugcccuugggcagggaacaacacuaaacaacgggcauucaaaugacacaguacaugauaggaccccuuaccggacccuauugaugaaugaauuggguguuccauuucauuugggaaccaggcaagugugcauagcaugguccagcucaaguugucacgauggaaaagcauggcugcauguuuguguaacuggggauaaugaaaaugcaacugcuagcuucauuuacaaugggaagcuuguagauaguauugguucaugguccaaaaaaauacucagaacccaggagucggaaugcguuuguaucaauggaacuugugcaguaguaaugacugaugggagcgcuucaggaaaagcugauacuaaaauacuauucauugaggaggggaaaaucguucauauuagcacauugucaggaagugcucagcaugucgaggagugcuccuguuauccucgauauccuggugucagaugugucugcagagacaacuggaaaggcuccaauaggcccaucguagauauaaauguaaaggauuauagcauuguuuccaguuaugugugcucaggacuuguuggagacacacccagaaaaaacgacagcuucagcaguagccauugccuagauccuaacaaugaggaagguggucauggagugaaaggcugggccuuugaugauggaaaugacguguggaugggaagaacgaucagcgagaaguuacgcucagguuaugaaaccuucaaagucaucgaaggcugguccaaaccuaacuccaaauuacagacaaauaggcaagucauaguugaaagagguaacagguccgguuauucugguauuuucuccguugaaggcaaaagcugcaucaaucggugcuuuuauguggaauugauaaggggaaggaaagaggaaacugaagucugguggaccucaaacaguauuguuguguuuuguggcaccucagguacauauggaacaggcucauggccugauggggcggauaucaaucucaugccuauauaa

SEQ ID NO: 47462 - RNA, 1410 nt, Artificial Sequence
  derived and/or modified CDS sequence (wt) from neuraminidase__InfluenzaA__ABI92624
augaauccaaaucaaaagauaauaacaauuggcucuguuucccucaccauugccacaauaugcuuccuuaugcaaauugccauccugguaacuacuguaacauugcauuucaagcaguaugaaugcaacucccccccaaacaaccaaguaaugcugugugaaccaacaauaauagaaagaaacauaacagagauaguguaucugaccaacaccaccauagagaaggaaauaugccccaaacuagcagaauacagaaauuggucaaagccgcaauguaacauuacaggauuugcaccuuuuucuaaggacaauucgauucggcuuuccgcugguggggacaucugggugauaagagaaccuuaugugucaugcgauccugacaaguguuaucaauuugcccuugggcagggaacaacacuaaacaacgggcauucaaaugacacaguacaugauaggaccccuuaccggacccuauugaugaaugaauuggguguuccauuucauuugggaaccaggcaagugugcauagcaugguccagcucaaguugucacgauggaaaagcauggcugcauguuuguguaacuggggaugaugaaaaugcaacugcuagcuucauuuacaaugggaggcuuguagauaguauugguucaugguccaaaaaaauacucagaacccaggagucggaaugcguuuguaucaauggaacuuguacaguaguaaugacugaugggagcgcuucaggaaaagcugauacuaaaauacuauucauugaggaggggaaaaucguucauauuagcacauugucaggaagugcucagcaugucgaggagugcuccuguuauccucgauauccuggugucagaugugucugcagagacaacuggaaaggcuccaauaggcccaucguagauauaaauguaaaggaucauagcauuguuuccaguuaugugugcucaggacuuguuggagacacacccagaaaaaacgacagcuucagcaguagccauugccuagacccuaacaaugaggaagguggucauggagugaaaggcugggccuuugaugauggaaaugacguguggaugggaagaacgaucagcgagaaguuacgcucagguuaugaaaccuucaaagucaucgaaggcugguccaaaccuaacuccaaauuacagauaaauaggcaagucauaguugaaagagguaacagguccgguuauucugguauuuucuccguugaaggcaaaagcugcaucaaucggugcuuuuauguggaguugauaaggggaaggaaagaggaaacugaagucugguggaccucaaacaguauuguuguguuuuguggcaccucagguacauauggaacaggcucauggccugauggggcggauaucaaucucaugccuauauaa

SEQ ID NO: 47463 - RNA, 1410 nt, Artificial Sequence
  derived and/or modified CDS sequence (wt) from neuraminidase__InfluenzaA__ABI92635
augaauccaaaucaaaagauaauaacaauuggcucuguuucucucaccauugccacaauaugcuuccuuaugcaaauugccauccugguaacuacuguaacauugcauuucaagcaguaugaaugcaacccccccccaaacaaccaaguaaugcuaugugaaccaacaauaauagaaagaaacauaacagagauaguguaucugaccaacacuaccauagagaaggaaauaugccccaaauuagcagaauacagaaauuggucaaagccgcaauguaaccuuacaggauuugcaccuuuuucuaaggacaauucgauucggcuuuccgcugguggggacaucugggugacaagagaaccuuaugugucaugcgauccugacaaguguuaucaauuugcccuugggcagggaacaacacuaaacaacgggcauucaaaugacacaguacaugauaggaccccuuaccggacccuauugaugaaugaauugggugucccauuccauuugggaaccaggcaagugugcauagcaugguccagcucaaguugucacgauggaaaagcauggcugcauguuuguguaacuggggaugaugaaaaugcaacugcuagcuucauuuacaaugggaggcuuguagauaguauugguucaugguccaaaaaaauacucagaacccaggagucggaaugcguuuguaucaauggaacuuguacaguaguaaugacugaugggagcgcuucaggaaaagcugauacuaaaauaauauucauugaggaggggaaaaucguucauacuagcacauugucaggaagugcucagcaugucgaggagugcuccuguuauccucgauauccuggugucagaugugucugcagagacaacuggaaaggcuccaauaggcccaucguagauauaaauguaaaggauuauagcauuguuuccaguuaugugugcucaggacuuguuggagacacacccagaaaaaacgacagcuucagcaguagccauugccuagauccuaacaaugaggaagguggucauggagugaaaggcugggccuuugaugauggaaaugacguguggaugggaagaacgaucagcgagaaguuacgcucagguuaugaaaccuucaaagucaucgaaggcugguccaaaccuaacuccaaauuacagacaaauaggcaagucauaguugaaagagguaacagguccgguuauucugguauuuucuccguugaaggcaaaagcugcaucaaucggugcuuuuauguggaguugauaaggggaaggaaagaggaaacugaagucugguggaccucaaacaguauuguuguguuuuguggcaccucagguacauauggaacaggcucauggccugauggggcggauaucaaucucaugccuauauaa

SEQ ID NO: 47464 - RNA, 1410 nt, Artificial Sequence
  derived and/or modified CDS sequence (wt) from neuraminidase__InfluenzaA__ABI92646
augaauccaaaucaaaagauaauaacaauuggcucuguuucucucaccauugccacaauaugcuuccuuaugcaaauugccauccugguaacuacuguaacauugcauuucaagcagcaugaaugcaacucccccccaaacaaccaaguaaugcugugugaaccaacaauaauagaaagaaacauaacagagauaguguaucugaccaacaccaccauagagaaggaaauaugccccaaacuagcagaauacagaaauuggucaaagccgcaauguaacauuacaggauuugcaccuuuuucuaaggacaauucgauucggcuuuccgcugguggggacaucugggugacaagagaaccuuaugugucaugcgauccugacaaguguuaucaauuugcccuugggcagggaacaacacuaaacaacgggcauucaaaugacacaguacaugauaggaccccuuaccggacccuauugaugaaugaauuggguguuccauuucauuugggaaccaggcaagugugcauagcaugguccagcucaaguugucacgauggaaaagcauggcugcauguuuguguaacuggggaugauaaaaaugcaacugcuagcuucauuuacaaugggaggcuuguagauaguauugguucaugguccaaaaaaauacucagaacccaggagucggaaugcguuuguauaaauggaacuuguacaguaguaaugacugaugggagcgcuucaggaaaagcugauacuaaaauacuauucauugaggaggggaaaaucguucauauuagcacauugucaggaagugcucagcaugucgaggagugcuccuguuauccucgauauccuggugucagaugugucugcagagacaacuggaaaggcuccaauaggcccauuguagauauaaauguaaaggauuauagcauuguuuccaguuaugugugcucaggacuuguuggagacacacccagaaaaaacgacagcuucagcaguagccauugccuagauccuaacaaugaggaagguggucauggagugaaaggcugggccuuugaugauggaaaugacguguggaugggaagaacgaucagcgagaaguuacgcucagguuaugaaaccuucaaagucaucgaaggcugguccaaaccuaacuccaaauuacagauaaauaggcaaguuauaguugaaagagguaacagguccgguuauucuggcauuuucuccguugaaggcaaaagcugcaucaaucggugcuuuuauguggaguugauaaggggaaggaaagaggaaacugaagucugguggaccucaaacaguauuguuguguuuuguggcaccucagguacauauggaacaggcucauggccugauggggcggacaucaaucucaugccuauauaa

SEQ ID NO: 47465 - RNA, 1410 nt, Artificial Sequence
  derived and/or modified CDS sequence (wt) from neuraminidase__InfluenzaA__ABI92657
augaauccaaaucaaaagauaauaacaauuggcucuguuucucucaccauugccacaauaugcuuccuuaugcaaauugccauccugguaacuacuguaacauugcauuucaagcagcaugaaugcaacucccccccaaacaaccaaguaaugcugugugaaccaacaauaauagaaagaaacauaacagagauaguguaucugaccaacaccaccauagagaaggaaauaugccccaaacuagcagaauacagaaauuggucaaagccgcaauguaacauuacaggauuugcaccuuuuucuaaggacaauucgauucggcuuuccgcugguggggacaucugggugacaagagaaccuuaugugucaugcgauccugacaaguguuaucaauuugcccuugggcagggaacaacacuaaacaacgggcauucaaaugacacaguacaugauaggaccccuuaccggacccuauugaugaaugaauuggguguuccauuucauuugggaaccaggcaagugugcauagcaugguccagcucaaguugucacgauggaaaagcauggcugcauguuuguguaacuggggaugauaaaaaugcaacugcuagcuucauuuacaaugggaggcuuguagauaguauugguucaugguccaaaaaaauacucagaacccaggagucggaaugcguuuguauaaauggaacuuguacaguaguaaugacugaugggagcgcuucaggaaaagcugauacuaaaauacuauucauugaggaggggaaaaucguucauauuagcacauugucaggaagugcucagcaugucgaggagugcuccuguuauccucgauauccuggugucagaugugucugcagagacaacuggaaaggcuccaauaggcccauuguagauauaaauguaaaggauuauagcauuguuuccaguuaugugugcucaggacuuguuggagacacacccagaaaaaacgacagcuucagcaguagccauugccuagauccuaacaaugaggaagguggucauggagugaaaggcugggccuuugaugauggaaaugacguguggaugggaagaacgaucagcgagaaguuacgcucagguuaugaaaccuucaaagucaucgaaggcugguccaaaccuaacuccaaauuacagauaaauaggcaaguuauaguugaaagagguaacagguccgguuauucuggcauuuucuccguugaaggcaaaagcugcaucaaucgguguuuuuauguggaguugauaaggggaaggaaagaggaaacugaagucugguggaccucaaacaguauuguuguguuuuguggcaccucagguacauauggaacaggcucauggccugauggggcggacaucaaucucaugccuauauaa

SEQ ID NO: 47466 - RNA, 1410 nt, Artificial Sequence
  derived and/or modified CDS sequence (wt) from neuraminidase__InfluenzaA__ABI92668
augaauccaaaucaaaagauaauaacaauuggcucuguuucucucaccauugccacaauaugcuuccuuaugcaaauugccauccugguaacuacuguaacauugcauuucaagcagcaugaaugcaacucccccccaaacaaccaaguaaugcugugugaaccaacaauaauagaaagaaacauaacagagauaguguaucugaccaacaccaccauagagaaggaaauaugccccaaacuagcagaauacagaaauuggucaaagccgcaauguaacauuacaggauuugcaccuuuuucuaaggacaauucgauucggcuuuccgcugguggggacaucugggugacaagagaaccuuaugugucaugcgguccugauaaguguuaucaauuugcccuugggcagggaacaacacuaaacaacgggcauucaaaugacacaguacaugauaggaccccuuaccggacccuauugaugaaugaauuggguguuccauuucauuugggaaccaggcaagugugcauagcaugguccagcucaaguugucacgauggaaaagcauggcugcauguuuguguaacuggggaugauaaaaaugcaacugcuagcuucauuuacaaugggaggcuuguagauaguauugguucaugguccaaaaaaauacucagaacccaggagucggaaugcguuuguauaaauggaacuuguacaguaguaaugacugaugggagcgcuucaggaaaagcugauacuaaaauacuauucauugaggaggggaaaaucguucauauuagcacauugucaggaagugcucagcaugucgaggagugcuccuguuauccucgauauccuggugucagaugugucugcagagacaacuggaaaggcuccaauaggcccauuguagauauaaauguaaaggauuauagcauuguuuccaguuaugugugcucaggacuuguuggagacacacccagaaaaaacgacagcuucagcaguagccauugccuagauccuaacaaugaggaagguggucauggagugaaaggcugggccuuugaugauggaaaugacguguggaugggaagaacgaucagcgagaaguuacgcucagguuaugaaaccuucaaagucaucgaaggcugguccaaaccuaacuccaaauuacagauaaauaggcaaguuauaguugaaagagguaacagguccgguuauucuggcauuuucuccguugaaggcaaaagcugcaucaaucggugcuuuuauguggaguugauaaggggaaggaaagaggaaacugaagucugguggaccucaaacaguauuguuguguuuuguggcaccucagguacauauggaacaggcucauggccugauggggcggacaucaaucucaugccuauauaa

SEQ ID NO: 47467 - RNA, 1410 nt, Artificial Sequence; identical to SEQ ID NO: 46603
  derived and/or modified CDS sequence (wt) from neuraminidase__InfluenzaA__ABI92679

SEQ ID NO: 47468 - RNA, 1410 nt, Artificial Sequence; identical to SEQ ID NO: 47465
  derived and/or modified CDS sequence (wt) from neuraminidase__InfluenzaA__ABI92701

SEQ ID NO: 47469 - RNA, 1410 nt, Artificial Sequence
  derived and/or modified CDS sequence (wt) from neuraminidase__InfluenzaA__ABI92712
augaauccaaaucaaaagauaauaacaauuggcucuguuucucucaccauugccacaauaugcuuccuuaugcaaauugccauccugguaacuacuguaacauugcauuucaagcagcacgaaugcaacucccccccaaacaaccaagcaaugcugugugaaccaacaacaacagaaagaaacacaacagagauaguguaucugaccaacaccaccauagagaaggaaauaugccccaaacuaguagaauacagaaauuggucaaagccgcaauguaacauuacaggauuugcaccuuuuucuaaggacaauucgauucggcuuuccgcugguggggacaucugggugacaagagaaccuuaugugucaugcgauccugacaaguguuaucaauuugcccuugggcagggaacaacacuaaacaacgggcauucaaaugacacaguacaugauaggaccccuuaccggacccuauugaugaaugaauuggguguuccauuucauuugggaaccaggcaagugugcauagcaugguccagcucaaguugucacgauggaaaagcauggcugcauguuuguguaacuggggaugauaaaaaugcaacugcuagcuucauuuacaaugggaggcuuguagauaguauugguucaugguccaaaaaaauacucagaacccaggagucggaaugcguuuguaucaauggaacuuguacaguaguaaugacugaugggagcgcuucaggaaaagcugauacuaaaauacuauucauugaggaggggaaaaucguucauauuagcacauugucaggaagugcucagcaugucgaggagugcuccuguuauccucgauauccuggugucagaugugucugcagagacaacuggaaaggcuccaauaggcccauuguagauauaaauguaaaggauuauagcauuguuuccaguuaugugugcucaggacuuguuggagacacacccagaaaaaacgacagcuucagcaguagccauugccuagauccuaacaaugaggaagguggucauggagugaaaggcugggccuuugaugauggaaaugacguguggaugggaagaacgaucagcgagaaguuacgcucagguuaugaaaccuucaaagucaucgaaggcugguccaaaccuaacuccaaauuacagauaaauaggcaaguuauaguugaaagagguaacagguccgguuauucugguauuuucuccguugaaggcaaaagcugcaucaaucggugcuuuuauguggaguugauaaggggaaggaaagaggaaacugaagucugguggaccucaaacaguauuguuguguuuuguggcaccucagguacauauggaacaggcucauggccugauggggcggauaucaaucucaugccuauauaa

SEQ ID NO: 47470 - RNA, 1410 nt, Artificial Sequence
  derived and/or modified CDS sequence (wt) from neuraminidase__InfluenzaA__ABI92723
augaauccaaaucaaaagauaauaacaauuggcucuguuucucucaccauugccacaauaugcuuccuuaugcaaauugccauccugguaacuacuguaacauugcauuucaagcagcaugaaugcaacucccccccaaacaaccaaguaaugcugugugaaccaacaauaauagaaagaaacauaacagagauaguguaucugaccaacaccaccauagagaaggaaauaugccccaaacuaguagaauacagaaauuggucaaagccgcaauguaacauuacaggauuugcaccuuuuucuaaggacaauucgauucggcuuuccgcugguggggacaucugggugacaagagaaccuuaugugucaugcgauccugacaaguguuaucaauuugcccuugggcagggaacaacacuaaacaacgggcauucaaaugacacaguacaugauaggaccccuuaccggacccuauugaugaaugaauuggguguuccauuucauuugggaaccaagcaagugugcauagcaugguccagcucaaguugucacgauggaaaagcauggcugcauguuuguguaacuggggaugauaaaaaugcaacugcuagcuucauuuacaaugggaggcuuguagauaguauugguucaugguccaaaaaaauacucagaacccaggagucggaaugcguuuguaucaauggaacuuguacaguaguaaugacugaugggagcgcuucaggaaaagcugauacuaaaauacuauucauugaggaggggaaaaucguucauauuagcacauugucaggaagugcucagcaugucgaggagugcuccuguuauccucgauauccuggugucagaugugucugcagagacaacuggaaaggcuccaauaggcccauuguagauauaaauguaaaggauuauagcauuguuuccaguuaugugugcucaggacuuguuggagacacacccagaaaaaacgacagcuucagcaguagccauugccuagauccuaacaaugaggaagguggucauggagugaaaggcugggccuuugaugauggaaaugacguguggaugggaagaacgaucagcgagaaguuacgcucagguuaugaaaccuucaaagucaucgaaggcugguccaaaccuaacuccaaauuacagauaaauaggcaaguuauaguugaaagagguaacagguccgguuauucugguauuuucuccguugaaggcaaaagcugcaucaaucggugcuuuuauguggaguugauaaggggaaggaaagaggaaacugaagucugguggaccucaaacaguauuguuguguuuuguggcaccucagguacauauggaacaggcucauggccugauggggcggauaucaaucucaugccuauauaa

SEQ ID NO: 47471 - RNA, 1410 nt, Artificial Sequence; identical to SEQ ID NO: 47464
  derived and/or modified CDS sequence (wt) from neuraminidase__InfluenzaA__ABI92734

SEQ ID NO: 47472 - RNA, 1410 nt, Artificial Sequence; identical to SEQ ID NO: 46603
  derived and/or modified CDS sequence (wt) from neuraminidase__InfluenzaA__ABI92745

SEQ ID NO: 47473 - RNA, 1410 nt, Artificial Sequence
  derived and/or modified CDS sequence (wt) from neuraminidase__InfluenzaA__ABI92756
augaauccaaaucaaaagauaauaacaauuggcucuguuucucucaccauugccacaauaugcuuccuuaugcaaauugccauccugguaacuacuguaacauugcauuucaagcagcaugaaugcaacucccccccaaacaaccaaguaauacugugugaaccaacaauaauagaaagaaacauaacagagauaguguaucugaccaacaccaccauagagaaggaaauaugccccaaacuagcagaauacagaaauuggucaaagccgcaauguaacauuacaggauuugcaccuuuuucuaaggacaauucgauucggcuuuccgcugguggggacaucugggugacaagagaaccuuaugugucaugcgauccugacaaguguuaucaauuugcccuugggcagggaacaacacuaaacaacgggcauucaaaugacacaguacaugauaggaccccuuaccggacccuauugaugaaugaauuggguguuccauuucauuugggaaccaggcaagugugcauagcaugguccagcucaagcugucacgauggaaaagcauggcugcauguuuguguaacuggggaugauaaaaaugcaacugcuagcuucauuuacaaugggaggcuuguagauaguauugguucaugguccaaaaaaauacucagaacccaggagucggaauguguuuguauaaauggaacuuguacaguaguaaugacugaugggagcgcuucaggaaaagcugauacuaaaauacuauucauugaggaggggaaaaucguucauauuagcacauugucaggaagugcucagcauguugaggagugcuccuguuauccucgauauccuggugucagaugugucugcagagacaacuggaaaggcuccaauaggcccauuguagauauaaauguaaaggauuauagcauuguuuccaguuaugugugcucaggacuuguuggagacacacccagaaaaaacgacagcuucagcaguagccauugccuagauccuaacaaugaggaagguggucauggagugaaaggcugggccuuugaugauggaaaugacguguggaugggaagaacgaucagcgagaaguuacgcucagguuaugaaaccuucaaagucaucgaaggcugguccaaaccuaacuccaaauuacagauaaauaggcaaguuauaguugaaagagguaacagguccgguuauucuggcauuuucuccguugaaggcaaaagcugcaucaaucggugcuuuuauguggaguugauaaggggaaggaaagaggaaacugaagucugguggaccucaaacaguauuguuguguuuuguggcaccucagguacauauggaacaggcucauggccugauggggcggacaucaaucucaugccuauauaa

SEQ ID NO: 47474 - RNA, 1410 nt, Artificial Sequence
  derived and/or modified CDS sequence (wt) from neuraminidase__InfluenzaA__ABI92767
augaauccaaaucaaaagauaauaacaauuggcucuguuucucucaccauugccacaauaugcuuccuuaugcaaauugccauccugguaacuacuguaacauugcauuucaagcagcaugaaugcaacucccccccaaacaaccaaguaaugcugugugaaccaacaauaauagaaagaaacauaacagagauaguguaucugaccaacaccaccauagagaaggaaauaugccccaaacuagcagaauacagaaauuggucaaagccgcaauguaacauuacaggauuugcaccuuuuucuaaggacaauucgauucggcuuuccgcugguggggacaucugggugacaagagaaccuuacgugucaugcgauccugacaaguguuaucaauuugcccuugggcagggaacaacacuaaacaacgggcauucaaaugacacaguacaugauaggaccccuuaccggacccuauugaugaaugaauuggguguuccauuucauuugggaaccaggcaagugugcauagcaugguccagcucaaguugucacgauggaaaagcauggcugcauguuuguguaacuggggaugauaaaaaugcaacugcuagcuucauuuacaaugggaggcuuguagauaguauugguucaugguccaaaaaaauacucagaacccaggagucggaaugcguuuguauaaauggaacuuguacaguaguaaugacugaugggagcgcuucaggaaaagcugauacuaaaauacuauucauugaggaggggaaaaucguucauauuagcacauugucaggaagugcucagcaugucgaggagugcuccuguuauccucgauauccuggugucagaugugucugcagagacaacuggaaaggcuccaauaggcccauuguagauauaaauguaaaggauuauagcauuguuuccaguuaugugugcucaggacuuguuggagacacacccagaaaaaacgacagcuucagcaguagccauugccuagauccuaacaaugaggaagguggucauggagugaaaggcugggccuuugaugauggaaaugacguguggaugggaagaacgaucagcgagaaguuacgcucagguuaugaaaccuucaaagucaucgaaggcugguccaaaccuaacuccaaauuacagauaaauaggcaaguuauaguugaaagagguaacagguccgguuauucuggcauuuucuccguugaaggcaaaagcugcaucaaucggugcuuuuauguggaguugauaaggggaaggaaagagaaaacugaagucugguggaccucaaacaguauuguuguguuuuguggcaccucagguacauauggaacaggcucauggccugauggggcggacaucaaucucaugccuauauaa

SEQ ID NO: 47475 - RNA, 1410 nt, Artificial Sequence; identical to SEQ ID NO: 47465
  derived and/or modified CDS sequence (wt) from neuraminidase__InfluenzaA__ABI92778

SEQ ID NO: 47476 - RNA, 1410 nt, Artificial Sequence
  derived and/or modified CDS sequence (wt) from neuraminidase__InfluenzaA__ABI92789
augaauccaaaucaaaagauaauaacgauuggcucuguuucucucaccauuuccacaauaugcuucuuuaugcaaauugccaucuugauaacuacuguaacauugcauuucaagcaauaugaauucaacucccccccaaacaaccaagugaugcugugugaaccaacaauaauagaaagaaacauaacagagauaguguaucugaccaacaccaccauagagaaggaaauaugccccaaacuagcagaauacagaaauuggucaaagccgcaaugugacauuacaggauuugcaccuuuuucuaaggacaauucgauuaggcuuuccgcugguggggacaucugggugacaagagaaccuuaugugucaugcgauccugacaaauguuaucaauuugcccuuggacagggaacaacacuaaacaacgugcauucaaaugacacaguacaugauaggaccccuuaucggacccuauugaugaaugaguuagguguuccauuucaucuggggacuaagcaagugugcauagcaugguccagcucaaguugucacgauggaaaagcauggcugcauguuugugugacgggggaugauaaaaaugcaacugcuagcuucauuuacaaugggaggcuuguagauaguauuguuucaugguccaaagaaauccucagaacccaggagucagaaugcguuuguaucaauggaacuuguacaguaguaaugacugaugggagugcuucaggaaaagcugauacuaaaauacuauucauugaggaggggaaaaucguucauacuagcacauugucaggaagugcccagcaugucgaggagugcuccugcuauccucgauauccuggugucagaugugucugcagagauaacuggaaaggcuccaauaggcccaucguagauauaaacauaaaggauuauagcauuguuuccaguuaugugugcucaggacuuguuggagacacacccagaaaaaacgacagcuccagcaguagccauugcuuggauccuaacaaugaagaagguggucauggagugaaaggcugggccuuugaugauggaaaugacguguggaugggaagaacgaucagcgagaaguuacgcucaggauaugaaaccuucaaagucauugaaggcugguccaacccuaauuccaaauugcagauaaauaggcaagucauaguugacagagguaauagguccgguuauucugguauuuucucuguugaaggcaaaagcugcaucaaucggugcuuuuauguggaguugauaaggggaagaaaagaggaaacugaagucuuguggaccucaaacaguauuguuguguuuuguggcaccucagguacauauggaacaggcucauggccugauggggcggacaucaaucucaugccuauauaa

SEQ ID NO: 47477 - RNA, 1410 nt, Artificial Sequence; identical to SEQ ID NO: 46378
  derived and/or modified CDS sequence (wt) from neuraminidase__InfluenzaA__ABI92800

SEQ ID NO: 47478 - RNA, 1410 nt, Artificial Sequence
  derived and/or modified CDS sequence (wt) from neuraminidase__InfluenzaA__ABI92811
augaauccaaaucaaaagauaauaacgauuggcucuguuucucucaccauuuccacaauaugcuucuuuaugcaaauugccaucuugauaacuacuguaacauugcauuucaagcaauaugaauucaacucccccccaaacaaccaagugaugcugugugaaccaacaauaauagaaagaaacauaacagagauaguguaucugaccaacaccaccauagagaaggaaauaugccccaaacuagcagaauacagaaauuggucaaagccgcaaugugacauuacaggauuugccccuuuuucuaaggacaauucgauuaggcuuuccgcugguggggacaucugggugacaagagaaccuuaugugucaugcgauccugacaaauguuaucaauuugcccuuggacagggaacaacacuaaacaacgugcauucaaaugacacaguacaugauaggaccccuuaucggacccuauugaugaaugaguuagguguuccauuucaucuggggacuaagcaagugugcauagcaugguccagcucaaguugucacgauggaaaagcauggcugcauguuugugugacgggggaugauaaaaaugcaacugcuagcuucauuuacaaugggaggcuuguagauaguauuguuucaugguccaaagaaauccucagaacccaggagucagaaugcguuuguaucaauggaacuuguacaguaguaaugacugaugggagugcuucaggaaaagcugauacuaaaauacuauucauugaggaggggaaaaucguucauacuagcacauugucaggaagugcccagcaugucgaggagugcuccugcuauccucgauauccuggugucagaugugucugcagagauaacuggaaaggcuccaauaggcccaucguagauauaaacauaaaggauuauagcauuguuuccaguuaugugugcucaggacuuguuggagacacacccagaaaaaacgacagcuccagcaguagccauugcuuggauccuaacaaugaagaagguggucauggagugaaaggcugggccuuugaugauggaaaugacguguggaugggaagaacgaucagcgagaaguuacgcucaggauaugaaaccuucaaagucauugaaggcugguccaacccuaauuccaaauugcagauaaauaggcaagucauaguugacagagguaauagguccgguuauucugguauuuucucuguugaaggcaaaagcugcaucaaucggugcuuuuauguggaguugauaaggggaagaaaagaggaaacugaagucuuguggaccucaaacaguauuguuguguuuuguggcaccucagguacauauggaacaggcucauggccugauggggcggacaucaaucucaugccuauauaa

SEQ ID NO: 47479 - RNA, 1410 nt, Artificial Sequence
  derived and/or modified CDS sequence (wt) from neuraminidase__InfluenzaA__ABI92822
augaauccaaaucaaaagauaauaacgauuggcucuguuucucucaccauuuccacaauaugcuucuuuaugcaaauugccaucuugauaacuacuguaacauugcauuucaagcaauaugaauucaacucccccccaaacaaccaagugaugcugugugaaccaacaauaauagaaagaaacauaacagagauaguguaucugaccaacaccaccauagagaaggaaauaugccccaaacuagcagaauacagaaauuggucaaagccgcaaugugacauuacaggauuugcaccuuuuucuaaggacaauucgauuaggcuuuccgcugguggggacaucugggugacaagagaaccuuaugugucaugcgauccugacaaauguuaucaauuugcccuuggacagggaacaacacuaaacaacgugcauucaaaugacacaguacaugauaggaccccuuaucggacccuauugaugaaugaguuagguguuccauuucaucuggggacuaagcaagugugcauagcaugguccagcucaaguugucacgauggaaaagcauggcugcauguuuguguaacgggggaugauaaaaaugcaacugcuagcuucauuuacaaugggaggcuuguagauaguauuguuucaugguccaaagaaauccucagaacccaggagucagaaugcguuuguaucaauggaacuuguacaguaguaaugacugaugggagugcuucaggaaaagcugauacuaaaauacuauucauugaggaggggaaaaucguucauacuagcacauugucaggaagugcccagcaugucgaggagugcuccugcuauccucgauauccuggugucagaugugucugcagagacaacuggaaaggcuccaauaggcccaucguagauauaaacauaaaggauuauagcauuguuuccaguuaugugugcucaggacuuguuggagacacacccagaaaaaaugacagcuccagcaguagccauugcuuggauccuaacaaugaagaagguggucauggagugaaaggcugggccuuugaugauggaaaugacguguggaugggaagaacgaucagcgagaaguuacgcucaggauaugaaaccuucaaagucauugaaggcugguccaacccuaauuccaaauugcagauaaauaggcaagucauaguugacagagguaauagguccgguuauucugguauuuucucuguugaaggcaaaagcugcaucaaucggugcuuuuauguggaguugauaaggggaagaaaagaggaaacugaagucuuguggaccucaaacaguauuguuguguuuuguggcaccucagguacauauggaacaggcucauggccugauggggcggacaucaaucucaugccuauauaa

SEQ ID NO: 47480 - RNA, 1410 nt, Artificial Sequence; identical to SEQ ID NO: 47476
  derived and/or modified CDS sequence (wt) from neuraminidase__InfluenzaA__ABI92844

SEQ ID NO: 47481 - RNA, 1410 nt, Artificial Sequence; identical to SEQ ID NO: 47476
  derived and/or modified CDS sequence (wt) from neuraminidase__InfluenzaA__ABI92855

SEQ ID NO: 47482 - RNA, 1410 nt, Artificial Sequence
  derived and/or modified CDS sequence (wt) from neuraminidase__InfluenzaA__ABI92866
augaauccaaaucaaaagauaauaacaauuggcucugcuucucucaccauugccacaauaugcuuccuuauucaaauugcaauccugguaacuacuguaacauugcauuucaagcagcaugaaugcaacucccucccaaacaaccaaguaaugcugugugaaccaacaauaauagaaagaaacauaacagagauaguguaucugaccaacaccaccauagagaaggaaauaugccccaaacuagcagaauacagaaauuggucaaagccgcaauguaacauuacaggauuugcaccuuuuucuaaggacaauucgauucggcuuuccgcugguggggacaucugggugacaagagaaccuuaugugucaugcgauccugacaaguguuaccaauuugcccuugggcagggaacaacacuaaacaacgggcauucaaaugacacaguacaugauaggaccccuuaccggaccuuauugaugaaugaauuggguguuccauuucauuugggaaccaggcaagugugcauagcaugguccagcucaaguugucacgauggaaaagcauggcugcauguuuguguaacuggggaugauaaaaaugcaacugcuagcuucauuuacaaugggaggcuuguagauaguauuaguucaugguccaaaaaaauacucagaacccaggagucggaaugcguuuguaucaauggaacuuguacaguaguaaugacugaugggagcgcuucaggaaaagcugauacuaaaauacuauucauugaggaggggaaaaucauucauauuagcacauugucaggaagugcucagcaugucgaggagugcuccuguuauccucgauauccuggugucagaugugucugcagagacaauuggaaaggcuccaauaggcccauuguagauauaaauguaaaggauuauagcauuguuuccaguuaugugugcucaggacuuguuggagacacacccagaaaaaacgacagcuucagcaguagccauugccuagauccuaacaaugaggaagguggucauggagugaaaggcugggccuuugaugauggaaaugacguguggaugggaagaacgaucagcgagaaguuacgcucagguuaugaaaccuucaaagucaucgaaggcugguccaauccuaauuccaaauuacagauaaauaggcaaguuauaguugaaagagguaacagguccgguuauucugguauuuucuccguugaaggcaaaagcugcaucaaucggugcuuuuauguggaguugauaaggggaaggaaagaggaaacugaagucugguggaccucaaacaguauuguuguguuuuguggcaccucagguacauauggaacaggcucauggccugauggagcggauaucaaucucaugccuauauaa

SEQ ID NO: 47483 - RNA, 1410 nt, Artificial Sequence; identical to SEQ ID NO: 47478
  derived and/or modified CDS sequence (wt) from neuraminidase__InfluenzaA__ABI92877

SEQ ID NO: 47484 - RNA, 1410 nt, Artificial Sequence; identical to SEQ ID NO: 47478
  derived and/or modified CDS sequence (wt) from neuraminidase__InfluenzaA__ABI92888

SEQ ID NO: 47485 - RNA, 1410 nt, Artificial Sequence
  derived and/or modified CDS sequence (wt) from neuraminidase__InfluenzaA__ABI92899
augaauccaaaucaaaagauaauaacgauuggcucuguuucucucaccauuuccacaauaugcuucuuuaugcaaauugccaucuugauaacuacuguaacauugcauuucaagcaauaugaauucaacucccccccaaacaaccaagugaugcugugugaaccaacaauaauagaaagaaacauaacagagauaguguaucugaccaacaccaccauagagaaggaaauaugccccaaacuagcagaauacagaaauuggucaaagccgcaaugugacauuacaggauuugcaccuuuuucuaaggacaauucgauuaggcuuuccgcugguggggacaucugggugacaagagaaccuuaugugucaugcgauccugacaaauguuaucaauuugcccuuggacagggaacaacacuaaacaacgugcauucaaaugacacaguacaugauaggaccccuuaucggacccuauugaugaaugaguuagguguuccauuucaucuggggacuaagcaagugugcauagcaugguccagcucaaguugucacgauggaaaagcauggcugcauguuuguguaacgggggaugauaaaaaugcaacugcuagcuucauuuacaaugggaggcuuguagauaguauuguuucaugguccaaagaaauccucagaacccaggagucagaaugcguuuguaucaauggaacuuguacaguaguaaugacugaugggagugcuucaggaaaagcugauacuaaaauacuauucauugaggaggggaaaaucguucauacuagcacauugucaggaagugcccagcaugucgaggagugcuccugcuauccucgauauccuggugucagaugugucugcagagacaacuggaaaggcuccaauaggcccaucguagauauaaacauaaaggauuauagcauuguuuccaguuaugugugcucaggacuuguuggagacacacccagaaaaaacgacagcuccagcaguagccauugcuuggauccuaacaaugaagaagguggucauggagugaaaggcugggccuuugaugauggaaaugacguguggaugggaagaacgaucagcgagaaguuacgcucaggauaugaaaccuucaaagucauugaaggcugguccaacccuaauuccaaauugcagauaaauaggcaagucauaguugacagagguaauagauccgguuauucugguauuuucucuguugaaggcaaaagcugcaucaaucggugcuuuuauguggaguugauaaggggaagaaaagaggaaacugaagucuuguggaccucaaacaguauuguuguguuuuguggcaccucagguacauauggaacaggcucauggccugauggggcggacaucaaucucaugccuauauaa

SEQ ID NO: 47486 - RNA, 1410 nt, Artificial Sequence; identical to SEQ ID NO: 47485
  derived and/or modified CDS sequence (wt) from neuraminidase__InfluenzaA__ABI92910

SEQ ID NO: 47487 - RNA, 1410 nt, Artificial Sequence; identical to SEQ ID NO: 46378
  derived and/or modified CDS sequence (wt) from neuraminidase__InfluenzaA__ABI92921

SEQ ID NO: 47488 - RNA, 1410 nt, Artificial Sequence; identical to SEQ ID NO: 47485
  derived and/or modified CDS sequence (wt) from neuraminidase__InfluenzaA__ABI92932

SEQ ID NO: 47489 - RNA, 1410 nt, Artificial Sequence
  derived and/or modified CDS sequence (wt) from neuraminidase__InfluenzaA__ABI92943
augaauccaaaucaaaagauaauaacgauuggcucuguuucucucaccauuuccacaauaugcuucuucaugcaaauugccaucuugauaacuacuguaacauugcauuucaagcaauaugaauucaacucccccccaaacaaccaagugaugcugugugaaccaacaauaauagaaagaaacauaacagagauaguguaucugaccaacaccaccauagagaaggaaauaugccccaaacuagcagaauacagaaauuggucaaagccgcaaugugacauuacaggauuugcaccuuuuucuaaggacaauucgauuaggcuuuccgcugguggggacaucugggugacaagagaaccuuaugugucaugcgauccugacaaguguuaucaauuugcccuuggacaggggacaacacuaaacaacgugcauucaaaugacacaguacaugauaggaccccuuaucggacccuauugaugaaugaguuagguguuccauuucaucuggggaccaagcaagugugcauagcaugguccagcucaaguugucacgauggaaaagcauggcugcauguuuguguaacgggggaugauaaaaaugcaacugcuagcuucauuuacaaugggaggcuuguagauaguauuguuucaugguccaaaaaaauccucaggacccaggagucagaaugcguuuguaucaauggaacuuguacaguaguaaugacugaugggagugcuucaggaaaagcugauacuaaaauacuauucauugaggaggggaaaauuguucauacuagcacauugucaggaagugcucagcaugucgaggagugcuccugcuauccucgauauccuggugucagaugugucugcagagacaacuggaaaggcuccaauaggcccaucguagauauaaacauaaaggauuauagcauuguuuccaguuaugugugcucaggacuuguuggagacacacccagaaaaaacgacagcuccagcaguagccauugcuuggauccuaacaaugaagaagguggucauggagugaaaggcugggccuuugaugauggaaaugacguguggaugggaagaacgaucagcgagaaguuacgcucaggauaugaaacauucaaagucauugaaggcugguccaauccuaauuccaaauugcagauaaauaggcaagucauaguugacagagguaauagguccgguuauucugguauuuucucuguugaaggcaaaagcugcaucaaucggugcuuuuauguggaguugauaaggggaagaaaagaggaaacugaagucuuguggaccucaaacaguauuguuguguuuuguggcaccucagguacauauggaacaggcucauggccugauggggcggacaucaaucucaugccuauauaa

SEQ ID NO: 47490 - RNA, 1410 nt, Artificial Sequence; identical to SEQ ID NO: 46726
  derived and/or modified CDS sequence (wt) from neuraminidase__InfluenzaA__ABI92954

SEQ ID NO: 47491 - RNA, 1410 nt, Artificial Sequence
  derived and/or modified CDS sequence (wt) from neuraminidase__InfluenzaA__ABI92965
augaauccaaaucaaaagauaauaacgauuggcucuguuucucucaccauuuccacaauaugcuucuucaugcaaauugccaucuugauaacuacuguaacauugcauuuuaagcaauaugaauucaacucccccccaaacaaccaagugaugcugugugaaccaacaauaauagaaagaaacauaacagagauaguguaucugaccaacaccaccauagagaaggaaauaugccccaaacuagcagaauacaggaauuggucaaagccgcaaugugacauuacaggauuugcaccuuuuucuaaggacaauucgauuaggcuuuccgcugguggggacaucugggugacaagagaaccuuaugugucaugcgauccugacaaguguuaucaauuugcccuuggacagggaacaacacuaaacaacgugcauucaaaugacacaguacaugauaggaccccuuaucggacccuauugaugaaugaguuagguguuccauuucaucuggggaccaagcaagugugcauagcaugguccagcucaaguugucacgauggaaaagcauggcugcauguuuguguaacgggggaugauaaaaaugcaacugcuagcuucauuuacaaugggaggcuuguagauaguauuguuucaugguccaaaaaaauccucaggacccaggagucagaaugcguuuguaucaauggaacuuguacaguaguaaugacugaugggagugcuucaggaaaagcugauacuaaaauacuauucauugaggaggggaaaaucguucauacuagcacauugucaggaagugcucagcaugucgaggagugcuccugcuauccucgauauccuggugucagaugugucugcagagacaacuggaaaggcuccaauaggcccaucguagauauaaacauaaaggauuauagcauuguuuccaguuaugugugcucaggacuuguuggagacacacccagaaaaaacgaccgcuccagcaguagccauugcuuggauccuaacaaugaagaagguggucauggagugaaaggcugggccuuugaugauggaaaugacguguggaugggaagaacgaucagcgagaaguuacgcucaggauaugaaaccuucaaagucauugaaggcugguccaacccuaauuccaaauugcagauaaauaggcaagucauaguugacagagguaauagguccgguuauucugguauuuucucuguugaaggcaaaagcugcaucaaucggugcuuuuauguggaguugauaaggggaagaaaagaggaaacugaagucuuguggaccucaaacaguauuguuguguuuuguggcaccucagguacauauggaacaggcucauggccugauggggcggacaucaaucucaugccuauauaa

SEQ ID NO: 47492 - RNA, 1410 nt, Artificial Sequence; identical to SEQ ID NO: 46726
  derived and/or modified CDS sequence (wt) from neuraminidase__InfluenzaA__ABI92976

SEQ ID NO: 47493 - RNA, 1410 nt, Artificial Sequence; identical to SEQ ID NO: 46726
  derived and/or modified CDS sequence (wt) from neuraminidase__InfluenzaA__ABI92987

SEQ ID NO: 47494 - RNA, 1410 nt, Artificial Sequence; identical to SEQ ID NO: 46726
  derived and/or modified CDS sequence (wt) from neuraminidase__InfluenzaA__ABI92998

SEQ ID NO: 47495 - RNA, 1410 nt, Artificial Sequence
  derived and/or modified CDS sequence (wt) from neuraminidase__InfluenzaA__ABI93009
augaauccaaaucaaaagauaauaacgauuggcucuguuucucucaccauuuccacaauaugcuucuucaugcaaauugccaucuugauaacuacuguaacauugcauuuuaagcaauaugaauucaacucccccccaaacaaccaagugaugcugugugaaccaacaauaauagaaagaaacauaacagagauaguguaucugaccaacaccaccauagagaaggaaauaugccccaaacuagcagaauacaggaauuggucaaagccgcaaugugacauuacaggauuugcaccuuuuucuaaggacaauucgauuaggcuuuccgcugguggggacaucugggugacgagagaaccuuaugugucaugcgauccugacaaguguuaucaauuugcccuuggacagggaacaacacuaaacaacgugcauucaaaugacacaguacaugauaggaccccuuaucggacccuauugaugaaugaguuagguguuccauuucaucuggggaccaagcaagugugcauagcaugguccagcucaaguugucacgauggaaaagcauggcugcauguuuguguaacgggggaugauaaaaaugcaacugcuagcuucauuuacaaugggaggcuuguagauaguauuguuucaugguccaaaaaaauccucaggacccaggagucagaaugcguuuguaucaauggaacuuguacaguaguaaugacugaugggagugcuucaggaaaagcugauacuaaaauacuauucauugaggaggggaaaaucguucauacuagcacauugucaggaagugcucagcaugucgaggagugcuccugcuauccucgauauccuggugucagaugugucugcagagacaacuggaaaggcuccaauaggcccaucguagauauaaacauaaaggauuauagcauuguuuccaguuaugugugcucaggacuuguuggagacacacccagaaaaaacgacagcuccagcaguagccauugcuuggauccuaacaaugaagaagguggucauggagugaaaggcugggccuuugaugauggaaaugacguguggaugggaagaacgaucagcgagaaguuacgcucaggauaugaaaccuucaaagucauugaaggcugguccaacccuaauuccaaauugcagauaaauaggcaagucauaguugacagagguaauagguccgguuauucugguauuuucucuguugaaagcaaaagcugcaucaaucggugcuuuuauguggaguugauaaggggaagaaaagaggaaacugaagucuuguggaccucaaacaguauuguuguguuuuguggcaccucagguacauauggaacaggcucauggccugauggggcggacaucaaucucaugccuauauaa

SEQ ID NO: 47496 - RNA, 1410 nt, Artificial Sequence; identical to SEQ ID NO: 46726
  derived and/or modified CDS sequence (wt) from neuraminidase__InfluenzaA__ABI93020

SEQ ID NO: 47497 - RNA, 1413 nt, Artificial Sequence; identical to SEQ ID NO: 47368
  derived and/or modified CDS sequence (wt) from neuraminidase__InfluenzaA__ABI93031

SEQ ID NO: 47498 - RNA, 1410 nt, Artificial Sequence; identical to SEQ ID NO: 47123
  derived and/or modified CDS sequence (wt) from neuraminidase__InfluenzaA__ABI93042

SEQ ID NO: 47499 - RNA, 1410 nt, Artificial Sequence
  derived and/or modified CDS sequence (wt) from neuraminidase__InfluenzaA__ABI93053
augaauccaaaucaaaagauaauaacgauuggcucuguuucucucacuauugccacaauaugcuuccuuaugcaaauagccauccugguaacuacuguaacauugcauuucaagcaauaugaaugcaacucccccccaaacaaccaaguaaugcugugugaaccaacaauaauagaaagaaacauaacagagauaguguaucugaccaacaccaccauagagaaggaaauaugccccaaacuagcagaauacagaaauuggucaaagccgcaauguaaaauuacaggauuugcaccuuuuucuaaggauaauucaauucggcuuuccgcugguggggacauuugggugacaagagaaccuuaugugucaugcgauccugacaaguguuaucaauuugcccuuggacagggaacaacacuaaacaacaggcauucaaaugacacaguacaugauaggaccccuuaucgaacccuauugaugaaugaguuggguguuccauuucauuugggaaccaagcaaguguguauagcaugguccagcucaaguugucacgauggaaaagcauggcugcauguuuguguaacugggcaugaugaaaaugcaacugcuagcuucauuuacgaugggagacuuguagauaguauugguucaugguccaaaaaaauccucaggacccaggagucggaaugcguuuguaucaauggaacuuguacaguaguaaugacugaugggagugcuucaggaagagcugauacuaaaauacuauucauugaggaggggaaaaucguucauacuagcaaauugucaggaagugcucagcaugucgaggagugcuccuguuauccucgauauccuggugucagaugugucugcagagacaacuggaaaggcuccaauaggcccaucguagauauaaauguaaaggauuauagcauuguuuccaguuaugugugcucaggacuuguuggagacacacccagaaaaaacgacagcuccagcaguagccauugccuggauccuaacaaugaagaaggaggucauggagugaaaggcugggccuuugaugauggaaaugacguguggaugggaagaacgaucagcgagaagucacgcucagguuaugaaaccuucaaggucauugaaggcugguccaaaccuaacuccaaauugcagauaaauaggcaagucauaguugaaagagguaauauguccgguuauucugguauuuucucuguugaaggcaaaagcugcaucaaucggugcuuuuauguggaguugauaaggggaaggaaacaggaaacugaagucugguggaccucaaacaguauuguuguguuuuguggcaccucagguacauauggaacaggcucauggccugauggggcggacaucaaucucaugccuauauaa

SEQ ID NO: 47500 - RNA, 1410 nt, Artificial Sequence
  derived and/or modified CDS sequence (wt) from neuraminidase__InfluenzaA__ABI93064
augaauccaaaucaaaagauaauaacgauuggcucuguuucucucacuauugccacaauaugcuuccuuaugcaaauagccauccugguaacuacuguaacauugcauuucaagcaauaugaaugcaacucccccccaaacaaccaaguaaugcugugugaaccaacaauaauagaaagaaacauaacagagauaguguaucugaccaacaccaccauagagaaggaaauaugccccaaacuagcagaauauagaaauuggucaaagccgcaauguaaaauuacaggauuugcaccuuuuucuaaggacaauucaauucggcuuuccgcugguggggacauuugggugacaagagaaccuuaugugucaugcgauccugacaaguguuaucaauuugcccuuggacagggaacaacacuaaacaacaggcauucaaaugacacaguacaugauaggaccccuuaccgaacccuauugaugaaugaguuggguguuccauuucauuugggaaccaagcaaguaugcauagcaugguccagcucaaguugucacgauggaaaagcauggcugcauguuuguguaacugggcaugaugaaaaugcaacugcuagcuucauuuacgaugggagacuuguagauaguauugguucaugguccaaaaaaauccucaggacccaggagucggaaugcguuuguaucaauggaacuuguacaguaguaaugacugaugggagugcuucaggaagagcugauaccaaaauacuauucauugaggaggggaaaaucguucauacuagcaaauugucaggaagugcucagcaugucgaggagugcuccuguuauccucgauauccuggugucagaugugucugcagagacaacuggaaaggcuccaauaggcccaucguagauauaaauguaaaggauuauagcauuguuuccaguuaugugugcucaggacuuguuggagacacacccagaaaaaacgacagcuccagcaguagccauugccuggauccuaacaaugaagaagggggucauggagugaaaggcugggccuuugaugauggaaaugacguguggaugggaagaacgaucagcgagaagucacgcucagguuaugaaaccuucaaggucauugaaggcugguccaaaccuaacuccaaauugcagauaaauaggcaagucauaguugaaagagguaauagguccgguuauucugguauuuucucuguugaaggcaaaagcugcaucaaucggugcuuuuauguggaguugauaaggggaaggaaacaggaaacugaagucugguggaccucaaacaguauuguuguguucuguggcaccucagguacauauggaacaggcucauggccugauggggcggacaucaaucucaugccuauauaa

SEQ ID NO: 47501 - RNA, 1410 nt, Artificial Sequence
  derived and/or modified CDS sequence (wt) from neuraminidase__InfluenzaA__ABI93075
augaauccaaaucaaaagauaauaacgauuggcucuguuucucucaccauugccacaauaugcuuccuuaugcaaauugccauccugguaacuacuguaacguugcauuucaagcaauaugaaugcaacucccccccaaacaaccaagugaugcugugugaaccaacaauaauagaaagaaacauaacagagauaguguaucugaccaacaccaccauagagaaggaaauaugccccaaacuagcagaauacagaaauuggucaaagccgcaauguaacauuacaggauuugcaccuuuuucuaaggacaauucgauucggcuuuccgcugguggggacaucugggugacaagagaaccuuaugugucaugcgauccugacaaguguuaucaauuugcccuuggacagggaacaacacuaaacaacgggcauucaaaugacacaguacaugauaggaccccuuaucgaacccuauugaugaaugaguuggguguuccauuucauuugggaaccaagcaagugugcauagcaugguccagcucaaguugucacgauggaaaagcauggcugcauguuuguguaacgggggaugaugaaaaugcaacugcuagcuucauuuacaaugggaggcuuguagauaguaucgguucaugguccaaaaaaauccucaggacccaggagucggaaugcguuuguaucaauggaacuuguacaguaguaaugacugaugggagugcuucuggaaaagcugauacuaaaauacuauucauugaggaggggaaaaucguucauacuagcucauugucaggaagugcucagcaugucgaggagugcuccuguuauccucgauauccuggugucagaugugucugcagagacaacuggaaaggcuccaauaggcccaucguagauauaaauguaaaggauuauagcauuguuuccaguuaugugugcucaggacuuguuggagacacacccagaaaaaacgacagcuccagcaguagccauugcuuggauccuaacaaugaggaagguggucauggagugaaaggcugggccuuugaugauggaaaugacguguggaugggaagaacgaucagcgagaaguuacgcucaggauaugaaaccuucaaagucauugaaggcugguccaaaccuaacuccaaauugcagauaaauaggcaagucauaguugacagagguaauagguccgguuauucugguauuuucucuguugaaagcaaaagcugcaucaauaggugcuuuuauguggaguugauaaggggaaggaaacaggaaacugaagucuuguggaccucaaacaguauuguuguguuuuguggcaccucagguacauauggaacaggcucauggccugauggggcggacaucaaucucaugccuauauaa

SEQ ID NO: 47502 - RNA, 1410 nt, Artificial Sequence; identical to SEQ ID NO: 46755
  derived and/or modified CDS sequence (wt) from neuraminidase__InfluenzaA__ABI93086

SEQ ID NO: 47503 - RNA, 1410 nt, Artificial Sequence; identical to SEQ ID NO: 46755
  derived and/or modified CDS sequence (wt) from neuraminidase__InfluenzaA__ABI93097

SEQ ID NO: 47504 - RNA, 1410 nt, Artificial Sequence
  derived and/or modified CDS sequence (wt) from neuraminidase__InfluenzaA__ABI93108
augaauccaaaucaaaagauaauaacgauuggcucuguuucucucaccauugccacaauaugcuuccuuaugcaaauugccauccugguaacuacuguaacguugcauuucaagcaauaugaaugcaacucccccccaaacaaccaagugaugcugugugaaccaacaauaauagaaagaaacauaacagagauaguguaucugaccaacaccaccauagagaaggaaauaugccccaaacuagcagaauacagaaauuggucaaagccgcaauguaacauuacaggauuugcaccuuuuucuaaggacaauucgauucggcuuuccgcugguggggacaucugggugacaagagaaccuuaugugucaugcgauccugacaaguguuaucaauuugcccuuggacagggaacaacacuaaacaacgggcauucaaaugacacaguacaugauaggaccccuuaucgaacccuauugaugaaugaguuggguguuccauuucauuugggaaccaagcaagugugcauagcaugguccagcucaaguugucacgauggaaaagcauggcugcauguuuguguaacgggggaugaugaaaaugcaacugcuagcuucauuuacaaugggaggcuuguagauaguaucgguucaugguccaaaaaaauccucaggacccaggagucggaaugcguuuguaucaauggaacuuguacaguaguaaugacugaugggagugcuucaggaaaagcugauacuaaaauacuauucauugaggaggggaaaaucguucauacuagcucauugucaggaagugcucagcaugucgaggagugcuccuguuauccucgauauccuggugucagaugugucugcagagacaacuggaaaggcuccaauaggcccaucguagauauaaauguaaaugauuauagcauuguuuccaguuaugugugcucaggacuuguuggagacacacccagaaaaaacgacagcuccagcaguagccauugcuuggauccuaacaaugaggaagguggucauggagugaaaggcugggccuuugaugauggaaaugacguguggaugggaagaacgaucagcgagaaguuacgcucaggauaugaaaccuucaaagucauugaaggcugguccaaaccuaacuccaaauugcagauaaauaggcaagucauaguugacagagguaauagguccgguuauucugguauuuucucuguugaaagcaaaagcugcaucaauaggugcuuuuauguggaguugauaaggggaaggaaacaggaaacugaagucuuguggaccucaaacaguauuguuguguuuuguggcaccucagguacauauggaacaggcucauggccugauggggcggacaucaaucucaugccuauauaa

SEQ ID NO: 47505 - RNA, 1410 nt, Artificial Sequence
  derived and/or modified CDS sequence (wt) from neuraminidase__InfluenzaA__ABI93119
augaauccaaaucaaaagauaauaacgauuggcucuguuucucucaccauugccacaauaugcuuccuuaugcaaauugccauccugguaacuacuguaacguugcauuucaagcaauaugaaugcaacucccccccaaacaaccaagugaugcugugugaaccaacaauaauagaaagaaacauaacagagauaguguaucugaccaacaccaccauagagaaggaaauaugccccaaacuagcagaauacagaaauuggucaaagccgcaauguaacauuacaggauuugcaccuuuuucuaaggacaauucgauucggcuuuccgcugguggggacaucugggugacaagagaaccuuaugugucaugcgauccugacaaguguuaucaauuugcccuuggacagggaacaacacuaaacaacgggcauucaaaugacacaguacaugauaggaccccuuaucgaacccuauugaugaaugaguuggguguuccauuucauuugggaaccaagcaagugugcauagcaugguccagcucaaguugucacgauggaaaagcauggcugcauguuuguguaacgggggaugaugaaaaugcaacugcuagcuucauuuacaaugggaggcuuguagauaguaucgguucaugguccaaaaaaauccucaggacccaggagucggaaugcguuuguaucaauggaacuuguacaguaguaaugacugaugggagugcuucaggaaaagcugauacuaaaauacuauucauugaggaggggaaaaucguucauacuagcucauugucaggaagugcucagcaugucgaggagugcuccuguuauccucgauauccuggugucagaugugucugcagagacaacuggaaaggcuccaauaggcccaucguagauauaaauguaaaggauuauagcauuguuuccaguuaugugugcucaggacuuguuggagacacacccagaaaaaacgacaacuccagcaguagccauugcuuggauccuaacaaugaggaagguggucauggagugaaaggcugggccuuugaugauggaaaugacguguggaugggaagaacgaucagcgagaaguuacgcucaggauaugaaaccuucaaagucauugaaggcugguccaaaccuaacuccaaauugcagauaaauaggcaagucauaguugacagaaguaauagguccgguuauucugguauuuucucuguugaaagcaaaagcugcaucaauaggugcuuuuauguggaguugauaaggggaaggaaacaggaaacugaagucuuguggaccucaaacaguauuguuguguuuuguggcaccucagguacauauggaacaggcucauggccugauggggcggacaucaaucucaugccuauauaa

SEQ ID NO: 47506 - RNA, 1416 nt, Artificial Sequence
  derived and/or modified CDS sequence (wt) from neuraminidase__InfluenzaA__ABI94584
augaauccaaaucagaaacuauuugcauuaucuggaguggcaauagcacuuaguguacugaacuuauugauaggaaucucaaacgucggauugaacguaucucuacaucuaaaggaaaaaggacccaaacaggaggagaauuuaacaugcacgaccauuaaucaaaacaacacuacuguaguagaaaacacauauguaaauaauacaacaauaauuaccaagggaacugauuugaaaacaccaagcuaucugcuguugaacaagagccugugcaauguugaagggugggucgugauagcaaaagacaaugcaguaagauuuggggaaagugaacaaaucauuguuaccagggagccauauguaucaugcgacccaacaggaugcaaaauguaugccuugcaccaagggacuaccauuaggaacaaacauucaaauggaacgauucaugacagaacagcuuucagaggucucaucuccacuccauugggcacuccaccaaccguaaguaacagugacuuuauguguguuggauggucaagcacaacuugccaugaugggauugcuaggaugacuaucuguauacaaggaaauaaugacaaugcuacagcaacgguuuauuacaacagaaggcugaccacuaccauuaagaccugggccagaaacauucugaggacucaagaaucagaaugugugugccacaauggcacaugugcaguuguaaugaccgacggaucggcuaguagucaagccuauacaaaaguaauguauuuccacaagggauuaguaguuaaggaggaggaguuaaggggaucagccagacauauugaggaaugcuccuguuauggacacaaucaaaaggugaccugugugugcagagauaacuggcagggagcaaacaggccuauuauagaaauugauaugagcacauuggagcacacaaguagauacgugugcacuggaauucucacagacaccagcagaccuggggacaaaucuaguggugauuguuccaauccaauaacugggagucccggcguuccgggagugaagggauucggguuucuaaauggggauaacacauggcuugguaggaccaucagccccagaucaagaaguggauucgaaauguugaaaauaccuaaugcagguacugaucccaauucuagaauagcagaacgacaggaaauugucgacaauaacaauuggucaggcuauuccggaagcuuuauugacuauuggaaugauaacagugaaugcuacaauccaugcuuuuacguagaguuaauuagaggaagacccgaagaggcuaaauacguauggugggcaaguaacagucuaauugcccuauguggaagcccauucccaguugggucugguuccuuccccgauggggcacaaauccaauacuuuucguaa

SEQ ID NO: 47507 - RNA, 1413 nt, Artificial Sequence
  derived and/or modified CDS sequence (wt) from neuraminidase__InfluenzaA__ABI95220
augaauccaaaucaaaaaauaauaaccauuggaucaaucaguauagcaaucggaauaauuagucuaauguugcaaauaggaaauauuauuucaauaugggcuagucacucaauccaaacuggaagucaaaaccacacuggaauaugcaaccaaagaaucaucacauaugaaaacagcaccugggugaaucacacauauguuaauauuaacaacacuaauguuguugcuggaaaggacaaaacuucagugacauuggccggcaauucaucucuuuguuccaucaguggaugggcuauauacacaaaagacaacagcauaagaauuggauccaaaggagauguuuuugucauaagagaaccuuucauaucauguucucacuuggaaugcagaaccuuuuuucugacccaaggugcucuauuaaaugacaaacauucaaaugggaccguuaaggacagaaguccuuauagggccuuaaugagcugcccucuaggugaagcuccguccccauacaauucaaaguuugaaucaguugcauggucagcaagcgcaugccaugauggcaugggcugguuaacaaucggaauuucugguccagacaauggagcuguggcuguacuaaaauacaacggcauaauaacugaaaccauaaaaaguuggaaaaagcgaauauuaagaacacaagagucugaaugugucugugugaacgggucauguuucaccauaaugaccgauggcccgaguaauggggccgccucguacaaaaucuucaagaucgaaaaggggaagguuacuaaaucaauagaguugaaugcacccaauuuucauuaugaggaauguuccuguuacccagacacuggcacagugauguguguaugcagggacaacuggcaugguucaaaucgaccuugggugucuuuuaaucaaaaccuggauuaucaaauaggauacaucugcagugggguuuucggugacaauccgcgucccaaagauggagagggcagcuguaauccagugacuguugauggagcagacggaguaaagggguuuucauacaaauaugguaaugguguuuggauaggaaggacuaaaaguaacagacuuagaaagggguuugagaugauuugggauccuaauggauggacagauaccgacaguaauuucucagugaaacaggauguuguggcaauaacugauuggucaggguacagcggaaguuucguucaacauccugaguuaacaggauuggacuguauaagaccuugcuucuggguugaguuagucagaggacugccuagagaaaauacaacaaucuggacuagugggagcagcauuucuuuuuguggcguaaauagugauacugcaaacuggucuuggccagacggugcugaguugccguucaccauugacaaguag

SEQ ID NO: 47508 - RNA, 1410 nt, Artificial Sequence
  derived and/or modified CDS sequence (wt) from neuraminidase__InfluenzaA__ABI95242
augaauccaaaucaaaagauaauaacgauuggcucuguuucucucaccauuuccacaauaugcuucuucaugcaaauugccaucuugauaacuacuguaacauugcauuucaagcaauaugaauucaacucccccccaaacaaccaagugaugcugugugaaccaacaauaauagaaagaaacauaacagagauaguguaucugaccaacaccaccauagagaaggaaauaugccccaaacuagcagaauacagaaauuggucaaagccgcaaugugacauuacaggauuugcaccuuuuucuaaggacaauucgauuaggcuuuccgcugguggggacaucugggugacaagagaaccuuaugugucaugcgauccugacaaguguuaucaauuugcccuuggacagggaacaacacuaaacaacgugcauucaaaugacacaguacaugguaggaccccuuaucggacccuauugaugaaugaguuagguguuccauuucaucuggggaccaagcaagugugcauagcaugguccagcucaaguugucacgauggaaaagcauggcugcauguuuguguaacgggggaugauaaaaaugcaacugcuagcuucauuuacaaugggaggcuuguagauaguauuguuucaugguccaaagaaauccucaggacccaggagucagaaugcguuuguaucaauggaacuuguacaguaguaaugacugaugggagugcuucaggagaagcugauacuaaaauacuauucauugaggaggggaaaaucguucauacuagcacauugucaggaagugcucagcaugucgaggagugcuccugcuauccucgauauccuggugucagaugugucugcagagacaacuggaaaggcuccaauaggcccauuguagauauaaacauaaaggauuauagcauuguuuccaguuaugugugcucaggacuuguuggagacacacccagaaaaaacgacagcuccagcaguagccauugcuuggauccuaacaaugaagaagguggucauggagugaaaggcugggccuuugaugauggaaaugacguguggaugggaagaacgaucagcgagaaguuacgcucaggauaugaaaccuucaaagucauugaaggcugguccaacccuaauuccaaauugcagauaaauaggcaagucauaguugacagagguaauagguccgguuauucugguauuuucucuguugaaggcaaaagcugcaucaaucggugcuuuuauguggaguugauaaggggaagaaaagaggaaacugaagucuuguggaccucaaacaguauuguuguguuuuguggcaccucagguacauauggaacaggcucauggccugauggggcggacaucaaucucaugccuauauaa

SEQ ID NO: 47509 - RNA, 1413 nt, Artificial Sequence
  derived and/or modified CDS sequence (wt) from neuraminidase__InfluenzaA__ABI95253
augaauccaaaucaaaaaauaauaaccauuggaucaaucaguauagcaaucggaauaauuaguauaauguugcaaauagggaauauuauuucaauaugggcuagucacucaauccaaacuggaagucaaaaccacacuggaauaugcaaccaaagaaucaucacauaugaaaacagcaccugggugaaucacacauauguuaauauuaacaacacuaauguuguugcuggaaaggacaaaacuucagugacauuggccggcaauucaucucuuuguucuaucaguggaugggcuauauacacaaaagacaacagcauaagaauugguuccaaaggagauguuuuugucauaagagagccuuucauaucauguucucacuuggaaugcagaaccuuuuuucugacccaaggugcucuauuaaaugacaaacauucaaaugggaccguuaaggacagaaguccuuauagggccuuaaugagcuguccucuaggugaagcuccgucuccauauaauucaaaguuugaaucaguugcuuggucagcaagcgcaugccaugauggcaugggcugguuaacaaucggaauuucugguccagauaauggagcaguggcuguacuaaaauacaacggcauaaucacugaaaccauaaaaaguuggaaaaagcgaauauuaagaacacaagagucugaaugugucugugugaacgggucauguuuuaccauaaugaccgauggcccgagugauggggccgccucguacaaaaucuucaagaucgaaaaggggaagguuacuaaaucaauagaguugaaugcacccaauucucauuaugaggaauguuccuguuacccagacacuggcacagugauguguguaugcagggacaacuggcacgguucaaaucgaccuugggugucuuuuaaucaaaaccuggauuaucaaauaggauacaucugcagugggguguucggugacaacccgcgucccaaagauggagagggcagcuguaauccagugacuguugauggagcagacggaguaaagggguuuucauacaaauaugguaaugguguuuggauaggaaggacuaaaaguaacagacuuagaaagggguuugagaugauuugggauccuaauggauggacagauaccgacagugauuucucagugaaacaggauguuguggcaauaacugauuggucaggguacagcggaaguuucguucaacauccugaguuaacaggauuggacuguauaagaccuugcuucuggguugaguuagucagaggacggccuagagaaaauacaacaaucuggacuagugggagcagcauuucuuuuuguggcguaaauagugauacugcaaacuggucuuggccagacggugcugaguugccauucaccauugacaaguag

SEQ ID NO: 47510 - RNA, 1413 nt, Artificial Sequence; identical to SEQ ID NO: 47368
  derived and/or modified CDS sequence (wt) from neuraminidase__InfluenzaA__ABI95264

SEQ ID NO: 47511 - RNA, 1413 nt, Artificial Sequence; identical to SEQ ID NO: 47368
  derived and/or modified CDS sequence (wt) from neuraminidase__InfluenzaA__ABI95275

SEQ ID NO: 47512 - RNA, 1413 nt, Artificial Sequence; identical to SEQ ID NO: 47368
  derived and/or modified CDS sequence (wt) from neuraminidase__InfluenzaA__ABI95286

SEQ ID NO: 47513 - RNA, 1413 nt, Artificial Sequence
  derived and/or modified CDS sequence (wt) from neuraminidase__InfluenzaA__ABI95297
augaauccaaaucaaaaaauaauaaccauuggaucaaucaguauagcaaucggaauaauuagucuaauguugcaaauaggaaauauuauuucaauaugggcuagucacucaauccaaacuggaagucaaaaccacacuggaguaugcaaccaaagaaucaucacauaugaaaacagcaccugggugaaucacacauauguuaauauuaacaacacuaauguuauugcuggaaaggacaaaacuucagugacauuggccggcaauucaucucuuuguucuaucaguggaugggcuauauacacaaaagacaacagcauaagaauugguuccaaaggagauguuuuugucauaagagagccuuucauaucauguucucacuuggaaugcagaaccuuuuuucugacccaaggugcucuauuaaaugacaaacauucaaaugggaccguuaagaacagaagucccuauagggcuuuaaugagcuguccucuaggugaagcuccguccccauacaauucaaaguuugaaucaguugcuuggucagcaagcgcaugccaugauggcaugggcugguuaacaaucggaauuucugguccagacaauggagcaguggcuguacuaaaauacaacggcauaauaacugaaaccauaaaaaguuggaaaaagcaaauauuaagaacacaagagucugaaugugucugugugaacgggucauguuucaccauaaugaccgauggcccgaguaauggggccgccucguacaaaaucuucaagaucgaaaagggaaagguuacuaaaucaauagaguugaaugcacccaauuuucauuaugaggaauguuccuguuacccagacacuggcacagugauguguguaugcagggacaacuggcaugguucaaaucgaccuugggugucuuuuaaucaaaaccuggauuaucaaauaggauacaucugcagugggguguucggugacaauccgcgucccaaagauggagagggcagcuguaauccagugacuguugauggagcaaacggaguaaagggguuuucauacaaauaugguaaugguguuuggauaggaaggacuaaaaguaacagacuuagaaagggguuugagaugauuugggauccuaauggauggacagauaccgacagugauuucucagugaaacaggauguuguggcaauaacugauuggucaggguacagcggaaguuucguucaacauccugaguuaacaggauuggacuguauaagaccuugcuucuggguugaguuagucagaggacugccuaaagaaaauacaacaaucuggacuagugggagcagcauuucuuuuuguggcguaaauagugauacugcaaacuggucuuggccagacggugcugaguugccguucaccauugacaaguag

SEQ ID NO: 47514 - RNA, 1410 nt, Artificial Sequence
  derived and/or modified CDS sequence (wt) from neuraminidase__InfluenzaA__ABI95308
augaauccaaaucaaaagauaauaacgauuggcucuguuucucucacaauugccacaauaugcuuccuuaugcaaauugccauccugguaacuacuguaacguugcauuucaagcaauaugaaugcaacucccccccaaacaaccaagugaugcugugugaaccaacaauaauagaaagaaacauaacagagauaguguaucugaccaacaccaccauagagaaggaaauaugccccaaacuagcagaauacagaaauuggucaaagccgcaauguaacauuacaggauuugcaccuuuuucuaaggacaauucgauucggcuuuccgcugguggggacaucugggugacaagagaaccuuaugugucaugcgauccugacaaguguuaucaauuugcccuuggacagggaacaacacuaaacaacgggcauucaaaugacacaguacaugauaggaccccuuaucgaacccuauugaugaaugaguuggguguuccauuucauuugggaaccaagcaagugugcauagcaugguccagcucaaguugucacgauggaaaagcauggcugcauguuuguguaacgggggaugaugaaaaugcaacugcuagcuucauuuacaaugggaggcuuguagauaguaucgguucaugguccaaaaaaauccucaggacccaggagucggaaugcguuuguaucaauggaacuuguacaguaguaaugacugaugggagugcuucaggaaaagcugauacuaaaauacuauucauugaggaggggaagaucguucauacuagcucauugucaggaagugcucagcaugucgaggagugcuccuguuauccucgauauccuggugucagaugugucugcagagacaacuggaaaggcuccaauaggcccaucguagauauaaauguaaaggauuauagcauuguuuccaguuaugugugcucaggacuuguuggagacacacccagaaaaaacgacagcuccagcaguagccauugcuuggauccuaacaaugaggaagguggucauggagugaaaggcugggccuuugaugauggaaaugacguguggaugggaagaacgaucagcgagaaguuacgcucaggauaugaaaccuucaaagucauugaaggcugguccaaaccuaacuccaaauugcagauaaauaggcaagucauaguugacagagguaauagguccgguuauucugguauuuucucuguugaaagcaaaagcugcaucaauaggugcuuuuauguggaguugauaaggggaaggaaacaggaaacugaagucuuguggaccucaaacaguauuguuguguuuuguggcaccucagguacauauggaacaggcucauggccugauggggcggacaucaaucucaugccuauauaa

SEQ ID NO: 47515 - RNA, 1413 nt, Artificial Sequence
  derived and/or modified CDS sequence (wt) from neuraminidase__InfluenzaA__ABI96131
augaauccaaaucaaaaaauaauaaccauuggaucaaucaguauagcaaucggaauaauuagucuaauguugcaaauaggaaauauuauuucaauaugggcuagucacucaauccaaacuggaagucaaaaccacacuggaauaugcaaccaaagaaucaucacauaugaaaacagcaccugggugaaucacacauauguuaauauuaacaacacuaauguuguugcuggaaaggacaaaacuucagugacauuggccggcaauucaucucuuuguucuaucaguggaugggcuauauacacaaaagacaacagcauaagaauuggcuccaaaggagauguuuuugucauaagagaaccuuucauaucauguucucacuuggaaugcagaaccuuuuuucugacccaaggugcucuauuaaaugacaaacauucaaauggaaccguuaaggacagaaguccuuauagggccuuaaugagcuguccucuaggugaagcuccguccccauacaauucaaaguuugaaucaguugcauggucagcaagcgcaugccaugauggcaugggcugguuaacaaucggaauuucugguccagacaauggagcuguggcuguacuaaaauacaacggaauaauaacugaaaccauaaaaaguuggaaaaagcgaauauugagaacacaagagucugaaugugucugugugaacgggucauguuucaccauaaugaccgauggcccgaguaauggggccgccucguacaaaaucuucaagaucgaaaagggaaagguuacuaaaucaauagaguuaaaugcacccaauuuucauuaugaggaauguuccuguuacccagacacuggcacagugauguguguaugcagggacaacuggcaugguucaaaucgaccuugggugucuuuuaaucaaaacuuggauuaucaaauaggauacaucugcaguggaguguucggugacaauccgcgucccaaagauggaaagggcagcugcaauccagugacuguugauggagcagacggaguuaagggguuuucauacaaauaugguaaugguguuuggauaggaaggacuaaaaguaacagacuuagaaaggguuuugagaugauuugggauccuaauggguggacagauaccgacagugauuucucagugaaacaggauguuguggcaauaacugauuggucaggguacagcggaaguuucguucaacauccugaguuaacaggauuggacuguauaagaccuugcuucuggguugaguuagucagaggacugccuagagaaaauacaacaaucuggacuagugggagcagcauuucuuuuuguggcguugauagugauacugcaaacuggucuuggccagacggugcugaguugccguucaccauugacaaguag

SEQ ID NO: 47516 - RNA, 1413 nt, Artificial Sequence
  derived and/or modified CDS sequence (wt) from neuraminidase__InfluenzaA__ABI96133
augaauccaaaucaaaaaauaauaaccauuggaucaaucaguauagcaaucggaauaauuagucuaauguugcaaauaggaaauauuauuucaauaugggcuagucacucaauccaaacuggaagucaaaaccacacuggaauaugcaaccaaagaaucaucacauaugaaaacagcaccugggugaaucacacauauguuaauauuaacaacacuaauguuguugcuggaaaggacaaaacuucagugacauuggccggcaauucaucucuuuguucuaucaguggaugggcuauauacacaaaagacaacagcauaagaauuggcuccaaaggagauguuuuugucauaagagaaccuuucauaucauguucucacuuggaaugcagaaccuuuuuucugacccaaggugcucuauuaaaugacaaacauucaaauggaaccguuaaggacagaaguccuuauagggccuuaaugagcuguccucuaggugaagcuccguccccauacaauucaaaguuugaaucaguugcauggucagcaagcgcaugccaugauggcaugggcugguuaacaaucggaauuucugguccagacaauggagcuguggcuguacuaaaauacaacggaauaauaacugaaaccauaaaaaguuggaaaaagcgaauauugagaacacaagagucugaaugugucugugugaacgggucauguuucaccauaaugaccgauggcccgaguaauggggccgccucguacaaaaucuucaagaucgaaaagggaaagguuacuaaaucaauagaguuaaaugcacccaauuuucauuaugaggaauguuccuguuacccagacacuggcacagugauguguguaugcagggacaacuggcaugguucaaaucgaccuugggugucuuuuaaucaaaacuuggauuaucaaauaggauacaucugcaguggaguguucggugacaauccgcgucccaaagauggaaagggcagcuguaauccagugacuguugauggagcagacggaguuaagggguuuucauacaaauaugguaaugguguuuggauaggaaggacuaaaaguaacagacuuagaaaggguuuugagaugauuugggauccuaauggguggacagauaccgacagugauuucucagugaaacaggauguuguggcaauaacugauuggucaggguacagcggaaguuucguucaacauccugaguuaacaggauuggacuguauaagaccuugcuucuggguugaguuagucagaggacugccuagagaaaauacaacaaucuggacuagugggagcagcauuucuuuuuguggcguugauagugauacugcaaacuggucuuggccagacggugcugaguugccguucaccauugacaaguag

SEQ ID NO: 47517 - RNA, 1413 nt, Artificial Sequence
  derived and/or modified CDS sequence (wt) from neuraminidase__InfluenzaA__ABI96136
augaauccaaaucaaaaaauaauaaccauuggaucaaucaguauagcaaucggaauaauuagucuaauguugcaaauaggaaauauuauuucaauaugggcuagucacucaauccaaacuggaagucaaaaccacacuggaauaugcaaccaaagaaucaucacauaugaaaacagcaccugggugaaucacacauauguuaauauuaacaacacuaauguuguugcuggaaaggacaaaacuucagugacauuggccggcaauucaucucuuuguucuaucaguggaugggcuauauacacaaaagacaacagcauaagaauuggcuccaaaggagauguuuuugucauaagagaaccuuucauaucauguucucacuuggaaugcagaaccuuuuuucugacccaaggugcucuauuaaaugacaaacauucaaauggaaccguuaaggacagaaguccuuauagggccuuaaugagcuguccucuaggugaagcuccguccccauacaauucaaaguuugaaucaguugcauggucagcaagcgcaugccaugauggcaugggcugguuaacaaucggaauuucugguccagacaauggagcuguggcuguacuaaaauacaauggaauaauaacugaaaccauaaaaaguuggaaaaagcgaauauugagaacacaagagucugaaugugucugugugaacgggucauguuucaccauaaugaccgauggcccaaguaauggggccgccucguacaaaaucuucaagaucgaaaagggaaagguuacuaaaucaauagaguuaaaugcacccaauuuucauuaugaggaauguuccuguuacccagacacuggcacagugauguguguaugcagggacaacuggcaugguucaaaucgaccuugggugucuuuuaaucaaaacuuggauuaucaaauaggauacaucugcaguggaguguucggugacaauccgcgucccaaagauggaaagggcagcuguaauccagugacuguugauggagcagacggaguuaagggguuuucauacaaauaugguaaugguguuuggauaggaaggacuaaaaguaacagacuuagaaaggguuuugagaugauuugggauccuaauggauggacagauaccgacagugauuucucagugaaacaggauguuguggcaauaacugauuggucaggguacagcggaaguuucguucaacauccugaguuaacaggauuggauuguauaagaccuugcuucuggguugaguuagucagaggacugccuagagaaaauacaacaaucuggacuagugggagcagcauuucuuuuuguggcguugauagugauacugcaaacuggucuuggccagacggugcugaguugccguucaccauugacaaguag

SEQ ID NO: 47518 - RNA, 1410 nt, Artificial Sequence
  derived and/or modified CDS sequence (wt) from neuraminidase__InfluenzaA__ABJ09110
augaauccaaaucaaaagauaauaacgauuggcucuguuucucucaccauugccacaauaugcuuccuuaugcaaauugccauccugguaacuacuguaacguugcauuucaagcaauaugaaugcaacucccccccaaacaaccaagugaugcugugugaaccaacaauaauagaaagaaacauaacagagauaguguaucugaccaacaccaccauagagaaggaaauaugccccaaacuagcagaauacagaaauuggucaaagccgcaauguaacauuacaggauuugcaccuuuuucuaaggacaauucgauucggcuuuccgcugguggggacaucugggugacaagagaaccuuaugugucaugcgauccugacaaguguuaucaauuugcccuuggacagggaacaacacuaaacaacgggcauucaaaugacacaguacaugauaggaccccuuaucgaacccuauugaugaaugaguuggguguuccauuucauuugggaaccaagcaagugugcauagcaugguccagcucaaguugucacgauggaaaagcauggcugcauguuuguguaacgggggaugaugaaaaugcaacugcuagcuucauuuacaaugggaggcuuguagauaguaucgguucaugguccaaaaaaauccucaggacccaggagucggaaugcguuuguaucaauggaacuuguacaguaguaaugacugaugggagugcuucaggaaaagcugauacuaaaauacuauucauugaggaggggaaaaucauucauacuagcucauugucaggaagugcucagcaugucgaggagugcuccuguuauccucgauauccuggugucagaugugucugcagagacaacuggaaaggcuccaauaggcccaucguagauauaaauguaaaggauuauagcauuguuuccaguuaugugugcucaggacuuguuggagacacacccagaaaaaacgacagcuccagcagcagccauugcuuggauccuaacaaugaggaagguggucauggagugaaaggcugggccuuugaugauggaaaugacguguggaugggaagaacgaucagcgagaaguuacgcucaggauaugaaaccuucaaagucauugaaggcugguccaaaccuaacuccaaauugcagauaaauaggcaagucauaguugacagagguaauagguccgguuauucugguauuuucucuguugaaagcaaaagcugcaucaauaggugcuuuuauguggaguugauaaggggaaggaaacaggaaacugaagucuuguggaccucaaacaguauuguuguguuuuguggcaccucagguacauauggaacaggcucauggccugauggagcggacaucaaucucaugccuauauaa

SEQ ID NO: 47519 - RNA, 1410 nt, Artificial Sequence
  derived and/or modified CDS sequence (wt) from neuraminidase__InfluenzaA__ABJ09143
augaauccaaaucaaaagauaauaacaauuggcucuguuucucucacuauugccacaauaugcuuccuuaugcaaauugccauccugguaacuacuguaacauugcauuucaagcaauaugagugcaacucccccccaagcaaccaaguaaugcugugugaaccaacaauaauagaaagaaacauaacagagauaguguauuugacuaacaccaccauagagaaagaaauaugccccaaacuggcagaauacagaaauuggucaaagccgcaauguaaaauuacaggauuugcaccuuuuucuaaggacaauucaauucggcuuuccgcugguggagacauuugggugacaagagaaccuuaugugucaugcgauccuggcaaguguuaucaauuugcacuuggacagggaacaacacuaaacaacaggcauucaaaugacacaguacaugauaggaccccuuaucgaacccuauugaugaaugaguuggguguuccauuucauuugggaaccaagcaagugugcauagcaugguccagcucaaguugucacgauggaaaagcauggcugcauguuuguguaacugggcaugaugaaaaugcaacugcuagcuucauuuacgaugggaggcuuguagauaguauugguucaugguccaaaaauauccucaggacccaggagucggaaugcguuuguaucaauggaacuuguacaguaguaaugacugauggaagugcuucagaaagagcugauacuaaaauacuauuuauugaagaggggaaaaucguucauauuagcccauugucaggaagugcucagcaugucgaggagugcuccuguuauccucgauauccuggugucagaugugucugcagagacaacuggaaaggcuccaauaggcccaucguagauauaaaugugaaagauuauagcauuguuuccaguuaugugugcucaggacuuguuggagacacacccagaaaaaacgacagcuccagcaguagcuauugccggaauccuaacaaugagaaagggagucauggagugaaagguugggccuuugaugauggaaaugacguguggaugggaagaacgaucagcgaggaguuacgcucugguuaugaaaccuucaaaguuauuggaggcugguccaaaccuaacuccaaauugcagauaaauaggcaagucauaguugacagagguaauagguccgguuauucugguauuuucucuguugaaggcaaaagcugcaucaaucggugcuuuuauguggaguugauaaggggaaggaaacaggaaacugaagucugguggaccucaaacaguauuguuguguuuuguggcaccucagguacauauggaacaggcucauggccugauggggcggacaucaaucucaugccuauauaa

SEQ ID NO: 47520 - RNA, 1413 nt, Artificial Sequence; identical to SEQ ID NO: 46937
  derived and/or modified CDS sequence (wt) from neuraminidase__InfluenzaA__ABJ09154

SEQ ID NO: 47521 - RNA, 1410 nt, Artificial Sequence; identical to SEQ ID NO: 46378
  derived and/or modified CDS sequence (wt) from neuraminidase__InfluenzaA__ABJ09165

SEQ ID NO: 47522 - RNA, 1410 nt, Artificial Sequence; identical to SEQ ID NO: 46378
  derived and/or modified CDS sequence (wt) from neuraminidase__InfluenzaA__ABJ09176

SEQ ID NO: 47523 - RNA, 1410 nt, Artificial Sequence; identical to SEQ ID NO: 47401
  derived and/or modified CDS sequence (wt) from neuraminidase__InfluenzaA__ABJ09198

SEQ ID NO: 47524 - RNA, 1410 nt, Artificial Sequence
  derived and/or modified CDS sequence (wt) from neuraminidase__InfluenzaA__ABJ09209
augaauccaaaucaaaagauaauaacgauuggcucuguuucucucaccauuuccacaauaugcuucuucaugcaaauugccaucuugauaacuacuguaacauugcauuuuaagcaauaugaauucaacucccccccaaacaaccaagugaugcugugugaaccaacaauaauagaaagaaacauaacagagauaguguaucugaccaacaccaccauagagaaggaaauaugccccaaacuagcagaauacaggaauuggucaaagccacaaugugacauuacaggauuugcaccuuuuucuaaggacaauucgauuaggcuuuccgcugguggggacaucugggugacaagagaaccuuaugugucaugcgacccugacaaguguuaucaauuugcccuuggacagggaacaacacuaaacaacgugcauucaaaugacacaguacaugauaggaccccuuaucggacccuauugaugaaugaguuagguguuccauuucaucuggggaccaagcaagugugcauagcaugguccagcucaaguugucacgauggaaaagcauggcugcauguuuguguaacaggggaugauaaaaaugcaacugcuagcuucauuuacaaugggaggcuuguagauaguauuguuucaugguccaaaaaaauccucaggacccaggagucagaaugcguuuguaucaauggaacuuguacaguaguaaugacugaugggagugcuucaggaaaagcugauacuaaaauacuauucauugaggaggggaaaaucguucauacuagcacauugucaggaagugcucagcaugucgaggagugcuccugcuauccucgauauccuggugucagaugugucugcagagacaacuggaaaggcuccaauaggcccaucguagauauaaacauaaaggauuauagcauuguuuccaguuaugugugcucaggacuuguuggagacacacccagaaaaaacgacagcuccagcaguagccauugcuuggauccuaacaaugaagaagguggucauggagugaaaggcugggccuuugaugauggaaaugacguguggaugggaagaacgaucagcgagaaguuacgcucaggauaugaaaccuucaaagucauugaaggcugguccaacccuaauuccaaauugcagauaaauaggcaagucauaguugacagagguaauagguccgguuauucugguauuuucucuguugaaggcaaaagcugcaucaaucggugcuuuuauguggaguugauaaggggaagaaaagaggaaacugaagucuuguggaccucaaacaguauuguuguguuuuguggcaccucagguacauauggaacaggcucauggccugauggggcggacaucaaucucaugccuauauaa

SEQ ID NO: 47525 - RNA, 1410 nt, Artificial Sequence
  derived and/or modified CDS sequence (wt) from neuraminidase__InfluenzaA__ABJ09220
augaauccaaaucaaaagauaauaacaauuggcucuguuucucucacuauugccacaauaugcuuccuuaugcaaauugccauccugguaacuacuguaacauugcauuucaagcaauaugagugcaacucccccccaaacaaccaaguaaugcugugugaaccaacaauaauagaaagaaacauaacagagauaguguaucugaccaacaccaccauagagaaagaaauaugccccaaacuagcaaaauacagaaauuggucaaagccgcaauguaaaauuacaggauuugcaccuuuuucuaaggacaauucaauucggcuuuccgcugguggagacauuugggugacaagagaaccuuaugugucaugcgauccuggcaaguguuaucaauuugcccuuggacggggaacaacacuaaacaacaggcacucaaaugacacaguacaugauaggaccccuuaucgaacccuauugaugaaugaguuggguguuccauuucauuugggaaccaagcaagugugcauagcaugguccagcucaaguugucacgauggaaaagcauggcugcauguuuguguaacugggcaugaugaaaaugcaacugcuagcuucauuuacgaugggaggcuuguagauaguauugguucaugguccaaaaauauccucaggacccaggagucggaaugcguuuguaucaauggaacuuguacaguaguaaugacugauggaagugcuucagaaagagcugauacuaaaauacuauucauugaagaggggaaaaucguucauauuagcccauugucaggaagugcucagcaugucgaggagugcuccuguuauccucgguauccuggugucagaugugucugcagagacaacuggaaaggcuccaauaggcccaucguagauauaaaugugaaagauuauagcauuguuuccaguuaugugugcucaggacuuguuggagacacacccagaaaaaacgacagcuccagcaguagcuauugccggaauccuaacaaugagaaagggagucauggagugaaaggcugggccuuugaugauggaaaugacguguggaugggaagaacgaucagcgaggaguuacgcucagguuaugaaaccuucaaagucauuggaggcugguccaaaccuaacuccaaauugcagauaaauaggcaagucauaguugacagagguaauagguccgguuauucugguauuuucucuguugaaggcaaaagcugcaucaaucggugcuuuuauguggaguugauaaggggaaggaaacaggaaacugaagucugguggaccucaaacaguauuguuguguuuuguggcaccucagguacauauggaacaggcucauggccugauggggcggacaucaaucucaugccuauauaa

SEQ ID NO: 47526 - RNA, 1410 nt, Artificial Sequence; identical to SEQ ID NO: 46755
  derived and/or modified CDS sequence (wt) from neuraminidase__InfluenzaA__ABJ09231

SEQ ID NO: 47527 - RNA, 1410 nt, Artificial Sequence; identical to SEQ ID NO: 46755
  derived and/or modified CDS sequence (wt) from neuraminidase__InfluenzaA__ABJ09242

SEQ ID NO: 47528 - RNA, 1410 nt, Artificial Sequence; identical to SEQ ID NO: 47499
  derived and/or modified CDS sequence (wt) from neuraminidase__InfluenzaA__ABJ09253

SEQ ID NO: 47529 - RNA, 1410 nt, Artificial Sequence
  derived and/or modified CDS sequence (wt) from neuraminidase__InfluenzaA__ABJ09264
augaauccaaaucaaaagauaauaacgauuggcucuguuucucucacuauugccacaauaugcuuccuuaugcaaauugccauccugguaacuacuguaacauugcauuucaagcaauaugaaugcaacucccccccaaacaaccaaguaaugcugugugaaccaacaauaauagaaagaaacauaacagagauaguguauaugaccaacaccaccauagagaaggaaauaugccccaaacuagcagaauacagaaauuggucaaagccgcaauguaacauuacaggauuugcaccuuuuucuaaggacaauucaauucggcuuuccgcugguggggacauuugggugacaagagagccuuauguaucaugcgauccugacaaguguuaucaauuugcccuuggacagggaacaacacuaaacaacaggcauucaaaugacacaguacaugauaggaccccuuaucggacccuauugaugaaugaguuggguguuccauuucauuugggaaccaagcaagugugcauagcaugguccagcucaaguugucacgauggaaaagcauggcugcauguuuguguaacugggcaugaugaaaaugcaacugcuagcuucauuuacaaugggaggcuuguagauaguauugguucaugguccaaaaaaauccucaggacccaggagucggaaugcguuuguaucaauggaacuuguacaguaguaaugacugaugggagugcuucaggaaaagcugauacuaaaauacuauucauugaggaggggaaaaucguucauauuagcccauugucaggaagugcucagcaugucgaggagugcuccuguuauccucgauauccuggugucagaugugucugcagagacaacuggaaaggcuccaauaggcccaucguagauauaaauguaaaggauuauagcauuguuuccaguuaugugugcucaggacuuguuggagacacacccagaaaaaacgacagcuccagcaguagccauugccugaauccuaacaaugaggaagguggucauggagugaaaggcugggccuuugaugauggaaaugacguguggaugggaagaacgaucagcgagaaguuacgcucagguuaugaaaccuucaaagucauugaaggcugguccaaaccuaacuccaaauugcagauaaauaggcaagucauaguugacagagguaauaguuccgguuauucugguauuuucuccguugaaggcaaaagcugcaucaaucggugcuuuuauguggaguugauaaggggaaggaaacaggaaacugaagucugguggaccucaaacaguauuguugugcuuuguggcaccucagguacauauggaacaggcucauggccugauggggcggacaucaaucucaugccuauauaa

SEQ ID NO: 47530 - RNA, 1410 nt, Artificial Sequence
  derived and/or modified CDS sequence (wt) from neuraminidase__InfluenzaA__ABJ09286
augaauccaaaucaaaagauaauaacgauuggcucuguuucucucaccauugccacaauaugcuuccuuaugcaaauugccauccugguaacuacuguaacauugcauuucaagcaauaugaaugcaacucccccccaaacaaccaagugaugcugugugaaccaacaauaauagaaagaaacauaacagagauaguguaucugaccaacaccaccauagagaaggaaauaugccccaaacuagcagaauacagaaauuggucaaagccgcaauguaacauuacaggauuugcaccuuuuucuaaggacaauucgauucggcuuuccgcugguggggacaucugggugacaagagaaccuuaugugucaugcgauccugacaaguguuaucaauuugcccuuggacagggaacaacacuaaacaacgggcauucaaaugacacaguacaugauaggaccccuuaucggacccuauugaugaaugaguuggguguuccauuucauuugggaaccaagcaagugugcauagcaugguccagcucaaguugucacgauggaaaagcauggcugcauguuuguguaacgggggaugaugaaaaugcaacugcuagcuucauuuacaaugggaggcuuguagauaguauugguucaugguccaaaaaaauccucaggacccaggagucggaaugcguuuguaucaauggaacuuguacaguaguaaugacugaugggagugcuucaggaaaagcugauacuaaaauacuauucauugaggaggggaaaaucguucauacuagcccauugucaggaagugcucagcaugucgaggagugcuccuguuauccucgauauccuggugucagaugugucugcagagacaacuggaaaggcuccaauaggcccaucguagauauaaauguaaaggauuauagcauuguuuccaguuaugugugcucaggacuuguuggagacacacccagaaaaaacgacagcuccagcaguagccauugcuuggauccuaacaaugaggaagguggucauggagugaaaggcugggccuuugaugauggaaaugacguguggaugggaagaacgaucagcgagaaguuacgcucaggauaugaaaccuucaaagucauugaaggcugguccaaaccuaacuccaaauugcagauaaauaagcaagucauaguugacagagguaauagguccgguuauucugguauuuucucuguugaaggcaaaagcugcaucaaucggugcuuuuauguggaguugauaaggggaaggaaacaggaaacugaagucuuguggaccucaaacaguauuguuguguuuuguggcaccucagguacauauggaacaggcucauggccugauggggcggacaucaaucucaugccuauauaa

SEQ ID NO: 47531 - RNA, 1410 nt, Artificial Sequence
  derived and/or modified CDS sequence (wt) from neuraminidase__InfluenzaA__ABJ09308
augaauccaaaucaaaagauaauaacgauuggcucuguuucucucacuauugccacaauaugcuuccuuaugcaaauagccauccugguaacuacuguaacauugcauuucaagcaauaugaaugcaacucccccccaaacaaccaaguaaugcugugugaaccaacaauaauagaaagaaacauaacagagauaguguaucugaccaacaccaccauagagaaggaaauaugccccaaacuagcagaauacagaaauuggucaaagccgcaauguaaaauuacaggauuugcaccuuuuucuaaggauaauucaauucggcuuuccgcugguggggacauuugggugacaagagaaccuuaugugucaugcgauccugacaaguguuaucaauuugcccuuggacagggaacaacacuaaacaacaggcauucaaaugacacaguacaugauaggaccccuuaucgaacccuauugaugaaugaguuggguguuccauuucauuugggaaccaagcaaguguguauagcaugguccagcucaaguugucacgauggaaaagcauggcugcauguuuguguaacugggcaugaugaaaaugcaacugcuagcuucauuuacgaugggagacuuguagauaguauugguucaugguccaaaaaaauccucaggacccaggagucggaaugcguuuguaucaauggaacuuguacaguaguaaugacugaugggagugcuucaggaagagcugauacuaaaauacuauucauugaggaggggaaaaucguucauacuagcaaauugucaggaagugcucagcacgucgaggagugcuccuguuauccucgauauccuggugucagaugugucugcagagacaacuggaaaggcuccaauaggcccaucguagauauaaauguaaaggauuauagcauuguuuccaguuaugugugcucaggacuuguuggagacacacccagaaaaaacgacagcuccagcaguagccauugccuggauccuaacaaugaagaaggaggucauggagugaaaggcugggccuuugaugauggaaaugacguguggaugggaagaacgaucagcgagaagucacgcucagguuaugaaaccuucaaggucauugaaggcugguccaaaccuaacuccaaauugcagauaaauaggcaagucauaguugaaagagguaauauguccgguuauucugguauuuucucuguugaaggcaaaagcugcaucaaucggugcuuuuauguggaguugauaaggggaaggaaacaggaaacugaagucugguggaccucaaacaguauuguuguguuuuguggcaccucagguacauauggaacaggcucauggccugauggggcggacaucaaucucaugccuauauaa

SEQ ID NO: 47532 - RNA, 1410 nt, Artificial Sequence; identical to SEQ ID NO: 47500
  derived and/or modified CDS sequence (wt) from neuraminidase__InfluenzaA__ABJ09319

SEQ ID NO: 47533 - RNA, 1413 nt, Artificial Sequence
  derived and/or modified CDS sequence (wt) from neuraminidase__InfluenzaA__ABJ09330
augaauccaaaucaaaaaauaauaaccauuggaucaaucaguauagcaaucggaauaauuagucuaauguugcaaauaggaaauauuauuucaauaugggcuagucacucaauccaaacuggaagucaaaaccacacuggaguaugcaaccaaagaaucaucacauaugaaaacagcaccugggugaaucacacauauguuaauauuaacaacacuaauguuguugcuggaaaggacaaaacuucagugacauuggccggcaauucaucucuuuguucuaucaguggaugggcuauauacacaaaagacaacagcauaagaauugguuccaaaggagauguuuuugucauaagagagccuuucauaucauguucucacuuggaaugcagaaccuuuuuucugacccaaggugcucuauuaaaugacaaacauucaaaugggaccguuaaggacagaagucccuauagggccuuaaugagcuguccucuaggugaagcuccguccccauacaauucaaaguuugaaucaguugcuuggucagcaagcgcaugccaugauggcaugggcugguuaacaaucggaauuucugguccagacaauggagcaguggcuguacuaaaauacaacggcauaauaacugaaaccauaaaaaguuggaaaaagcaaauauuaagaacacaagagucugaaugugucugugugaacgggucauguuucaccauaaugaccgauggcccgaguaauggggccgccucguacaaaaucuucaagaucgaaaagggaaagguuaauaaaucaauagaguugaaugcacccaauuuucauuaugaggaauguuccuguuacccagacacuggcacagugauguguguaugcagggacaacuggcaugguucaaaucgaccuugggugucuuuuaaucaaaaccuggauuaucaaauaggauacaucugcagugggguguucggugacaauccccgucccaaagauggagagggcagcuguaauccagugacuguugauggagcaaacggaguaaagggguuuucauacaaauaugguaaugguguuuggauaggaaggacuaaaaguaacagacuuagaaagggguuugagaugauuugggauccuaauggauggacagauaccgacagugauuucucagugaaacaggauguuguggcaauaacugauuggucaggguacagcggaaguuucguucaacauccugaguuaacaggauuggacuguauaagaccuugcuucuggguugaguuagucagaggacugccuagagaaaauacaacaaucuggacuagugggagcagcauuucuuuuuguggcguaaauagugauacugcaaacuggucuuggccagacggugcugaguugccguucaccauugacaaguag

SEQ ID NO: 47534 - RNA, 1410 nt, Artificial Sequence
  derived and/or modified CDS sequence (wt) from neuraminidase__InfluenzaA__ABJ09341
augaauccaaaucaaaagauaauaacgauuggcucuguuucucucaccauugccacaauaugcuuccuuaugcaaauugccauccugguaacuacuguaacguugcauuucaagcaauaugaaugcaacucccccccaaacaaccaagugaugcugugugaaccaacaauaauagaaagaaacauaacagagauaguguaucugaccaacaccaccauagagaaggaaauaugccccaaacuagcagaauacagaaauuggucaaagccgcaauguaacauuacaggauuugcaccuuuuucuaaggacaauucgauucggcuuuccgcugguggggacaucugggugacaagagaaccuuaugugucaugcgauccugacaaguguuaucaauuugcccuuggacagggaacaacacuaaacaacgggcauucaaaugacacaguacaugauaggaccccuuaucgaacccuauugaugaaugaguuggguguuccauuucauuugggaaccaagcaagugugcauagcaugguccagcucaaguugucacgauggaaaagcauggcugcauguuuguguaacgggggaugaugaaaaugcaacugcuagcuucauuuacaaugggaggcuuguagauaguaucgguucaugguccaaaaaaauccucaggacccaggagucggaaugcguuuguaucaauggaacuuguacaguaguaaugacugaugggagugcuucaggaaaagcugauacuaaaauacuauucauugaggaggggaaaaucguucauacuagcucauuguuaggaagugcucagcaugucgaggagugcuccuguuauccucgauauccuggugucagaugugucugcagagacaacuggaaaggcuccaauaggcccaucguagauauaaauguaaaggauuauagcauuguuuccaguuaugugugcucaggacuuguuggagacacacccagaaaaaacgacagcuccagcaguagccauugcuuggauccuaacaaugaggaagguggucauggagugaaaggcugggccuuugaugauggaaaugacguguggaugggaagaacgaucagcgagaaguuacgcucaggauaugaaaccuucaaagucauugaaggcugguccaaaccuaacuccaaauugcagauaaauaggcaagucauaguugacagagguaauagguccgguuauucugguauuuucucuguugaaagcaaaagcugcaucaauaggugcuuuuauguggaguugauaaggggaaggaaacaggaaacugaagucuuguggaccucaaacaguauuguuguguuuuguggcaccucagguacauauggaacaggcucauggccugauggggcggacaucaaucucaugccuauauaa

SEQ ID NO: 47535 - RNA, 1410 nt, Artificial Sequence
  derived and/or modified CDS sequence (wt) from neuraminidase__InfluenzaA__ABJ09352
augaauccaaaucaaaagauaauaacgauuggcucuguuucucucaccauugccacaauaugcuuccuuaugcaaauugccauccugguaacuacuguaacguugcauuucaagcaauaugaaugcaacucccccccaaacaaccaagugaugcugugugaaccaacaauaauagaaagaaacauaacagagauaguguaucugaccaacaccaccauagagaaggaaauaugccccaaacuagcagaauacagaaauuggucaaagccgcaauguaacauuacaggauuugcaccuuuuucuaaggacaauucgauucggcuuuccgcugguggggacaucugggugacaagagaaccuuaugugucaugcgauccugacaaguguuaucaauuugcccuuggacagggaacaacacuaaacaacgggcauucaaaugacacaguacaugguaggaccccuuaucgaacccuauugaugaaugaguuggguguuccauuucauuugggaaccaagcaagugugcauagcaugguccagcucaaguugucacgauggaaaagcauggcugcauguuuguguaacgggggaugaugaaaaugcaacugcuagcuucauuuacaaugggaggcuuguagauaguaucgguucaugguccaaaaaaauccucaggacccaggagucggaaugcguuuguaucaauggaacuuguacaguaguaaugacugaugggagugcuucaggaaaagcugauacuaaaauacuauucauugaggaggggaaaaucguucauacuagcucauugucaggaagugcucagcaugucgaggagugcuccuguuauccucgauauccuggugucagaugugucugcagagacaacuggaaaggcuccaauaggcccaucguagauauaaauguaaaggauuauagcauuguuuccaguuaugugugcucaggacuuguuggagacacacccagaaaaaacgacagcuccagcaguagccauugcuuggauccuaacaaugaggaagguggucauggagugaaaggcugggccuuugaugauggaaaugacguguggaugggaagaacgaucagcgagaaguuacgcucaggauaugaaaccuucaaagucauugaaggcugguccaaaccuaacuccaaauugcagauaaauaggcaagucauaguugacagagguaauagguccgguuauucugguauuuucucuguugaaagcaaaagcugcaucaauaggugcuuuuauguggaguugauaaggggaaggaaacaggaaacugaagucuuguggaccucaaacaguauuguuguguuuuguggcaccucagguacauauggaacaggcucauggccugauggggcggacaucaaucucaugccuauauaa

SEQ ID NO: 47536 - RNA, 1407 nt, Artificial Sequence
  derived and/or modified CDS sequence (wt) from neuraminidase__InfluenzaA__ABJ09374
augauccaaucaaagauaauaacgauuggcucuguuucucucaccauuuccacaauaugcuucuucaugcaaauugccaucuugauaacuacuguaacauugcauuuuaagcaauaugaauucaacucccccccaaacaaccaagugaugcugugugaaccaacaauaauagaaagaaacauaacagagauaguguaucugaccaacaccaccauagagaaggaaauaugccccaaacuagcagaauacaggaauuggucaaagccgcaaugugacauuacaggauuugcaccuuuuucuaaggacaauucgauuaggcuuuccgcugguggggacaucugggugacaagagaaccuuacgugucaugcgauccugacaaguguuaucaauuugcccuuggacagggaacaacacuaaacaacgugcauucaaaugacacaguacaugauaggaccccuuaucggacccuauugaugaaugaguuagguguuccauuucaucuggggaccaagcaagugugcauagcaugguccagcucaaguugucacgauggaaaagcauggcugcauguuuguguaacgggggaugauaaaaaugcaacugcuagcuucauuuacaaugggaggcuuguagauaguauuguuucaugguccaaaaaaauccucaggacccaggagucagaaugcguuuguaucaauggaacuuguacaguaguaaugacugaugggagugcuucaggaaaagcugauacuaaaauacuauucauugaggaggggaaaaucguucauacuagcacauugucaggaagugcucagcaugucgaggagugcuccuguuauccucgauauccuggugucagaugugucugcagagacaacuggaaaggcuccaauaggcccaucguagauauaaacauaaaagauuauagcauuguuuccaguuaugugugcucaggacuuguuggagacacacccagaaaaaacgacagcuccagcaguagccauugcuuggauccuaacaaugaagaagguggucauggagugaaaggcugggccuuugaugauggaaaugacguguggaugggaagaacgaucagcgagaaguuacgcucaggauaugaaaccuucaaagucauugaaggcugguccaacccuaauuccaaauugcagauaaauaggcaagucauaguugacagagguaauagguccgguuauucugguauuuucucuguugaaggcaaaagcugcaucaaucggugcuuuuauguggaguugauaaggggaaaaaaagaggaaacugaagucuuguggaccucaaacaguauuguuguguuuuguggcaccucagguacauauggaacaggcucauggccugauggggcggacaucaaucucaugccuauauaa

SEQ ID NO: 47537 - RNA, 1410 nt, Artificial Sequence; identical to SEQ ID NO: 47524
  derived and/or modified CDS sequence (wt) from neuraminidase__InfluenzaA__ABJ09385

SEQ ID NO: 47538 - RNA, 1410 nt, Artificial Sequence
  derived and/or modified CDS sequence (wt) from neuraminidase__InfluenzaA__ABJ16590
augaauccaaaucaaaagauaauaacgauuggcucuguuucucucaccauugccacaauaugcuuccuuaugcaaauugccauccugguaacuacuguaacauugcauuucaagcaauaugaaugcaacucccccccaaacaaccaagugaugcugugugaaccaacaauaauagaaagaaacauaacagagauaguguaucugaccaacaccaccauagagaaggaaauaugccccaaacuagcagaauacagaaauuggucaaagccgcaauguaacauuacaggauuugcaccuuuuucuaaggacaauucgauucggcuuuccgcugguggggacaucugggugacaagagaaccuuaugugucaugcgauccugacaaguguuaucaauuugcccuuggacagggaacaacacuaaacaacgggcauucaaaugacacaguacaugauaggaccccuuaucgaacccuauugaugaaugaguuggguguuccauuucauuugggaaccaagcaagugugcauagcaugguccagcucaaguugucacgauggaaaagcauggcugcauguuuguguaacgggggaugaugaaaaugcaacugcuagcuucauuuacaaugggaggcuuguagauaguauugguucaugguccaaaaaaauccucaggacccaggagucggaaugcguuuguaucaauggaacuuguacaguaguaaugacugaugggagugcuucaggaaaagcugauacuaaaauacuauucauugaggaggggaaaaucguucauacuagcucauugucaggaagugcucagcaugucgaggagugcuccuguuauccucgauauccuggugucagaugugucugcagagacaacuggaaaggcuccaauaggcccaucguagauauaaauguaaaggauuauagcauuguuuccaguuaugugugcucaggacuuguuggagacacacccagaaaaaacgacagcuccagcaguagccauugcuuggauccuaacaaugaggaagguggucauggagugaaaggcugggccuuugaugauggaaaugacguguggaugggaagaacgaucagcgagaaguuacgcucaggauaugaaaccuucaaagucauugaaggcugguccaaaccuaacuccaaauugcagauaaauaggcaagucauaguugacagagguaauagguccgguuauucugguauuuucucuguugaaggcaaaagcugcaucaaucggugcuuuuauguggaguugauaaggggaaggaaacaggaaacugaagucuuguggaccucaaacaguauuguuguguuuuguggcaccucagguacauauggaacaggcucauggccugauggggcggacaucaaucucaugccuauauaa

SEQ ID NO: 47539 - RNA, 1410 nt, Artificial Sequence; identical to SEQ ID NO: 47530
  derived and/or modified CDS sequence (wt) from neuraminidase__InfluenzaA__ABJ16601

SEQ ID NO: 47540 - RNA, 1413 nt, Artificial Sequence
  derived and/or modified CDS sequence (wt) from neuraminidase__InfluenzaA__ABJ16612
augaauccaaaucaaaaaauaauaaccauuggaucaaucaguauagcaaucggaauaauuaguuuaauguugcaaauaggaaauauuauuucaauaugggcuagucacucaauccaaacuggaagucaaaaccacacuggaguaugcaaccaaagaaucaucacauaugaaaacagcaccugggugaaucacacauauguuaauauuaacaacacuaauguuguugcuggaaaggacaaaacuucagugacauuggccggcaauucaucucuuuguucuaucaguggaugggcuauauacacaaaagacaacagcauaagaauuggcuccaaaggagauguuuuugucauaagagaaccuuucauaucauguucucacuuggaaugcagaaccuuuuuucugacccaaggugcucuauuaaaugacaaacauucaaaugggaccguuaaggacagaaguccuuauagggccuuaaugagcuguccucuaggugaagcuccguccccauacaauucaaaguuugaaucaguugcauggucagcaagcgcaugccaugauggcaugggcugguuaacagucggaauuucugguccagacaauggagcuguggcuguacuaaaauacaacggcauaauaacugaaaccauaaaaaguuggaaaaagcgaauauuaagaacacaagagucugaaugugucugugugaacgggucauguuucaccauaaugaccgauggcccgaguaauggggccgccucguacaaaaucuucaagaucgaaaaggggaagguuacuaaaucaauagaguugaaugcacccaauuuucauuaugaggaauguuccuguuacccagacacuggcacagugauguguguaugcagggacaacuggcaugguucaaaucgaccuugggugucuuuuaaucaaaaccuggauuaucaaauaggauacaucugcagugggguguucggugacaauccgcgucccaaagauggagagggcagcuguaauccagugacuguugauggagcagacggaguaaagggguuuucauacaaauaugguaaugguguuuggauaggaaggacuaaaaguaacagacuuagaaagggguuugagaugauuugggauccuaauggauggacagauaccgacagugauuucucagugaaacaggauguuguggcaauaacugauuggucaggguacagcggaaguuucguucaacauccugaguuaacaggauuggacuguauaagaccuugcuucuggguugaguuagucagaggacugccuagagaaaauacaacaaucuggacuagugggagcagcauuucuuuuuguggcguaaauagugauacugcaaacuggucuuggccagacggugcugaguugccguucaccauugacaaguag

SEQ ID NO: 47541 - RNA, 1410 nt, Artificial Sequence
  derived and/or modified CDS sequence (wt) from neuraminidase__InfluenzaA__ABJ16623
augaauccaaaucaaaagauaauaacgauuggcucuguuucucucaccauugccacaauaugcuuccuuaugcaaauugccauccugguaacuacuguaacauugcauuucaagcaauaugaaugcaacucccccccaaacaaccaagugaugcugugugaaccaacaauaauagaaagaaacauaacagagauaguguaucugaccaacaccaccauagagaaggaaauaugccccaaacuagcagaauacagaaauuggucaaagccgcaauguaacauuacaggauuugcaccuuuuucuaaggacaauucgauucggcuuuccgcugguggggacaucugggugacaagagaaccuuaugugucaugcgauccugacaaguguuaucaauuugcccuuggacagggaacaacacuaaacaacgggcauucaaaugacacaguacaugauaggaccccuuaucggacccuauugaugaaugaguuggguguuccauuucauuugggaaccaagcaagugugcauagcaugguccaguucaaguugucacgauggaaaagcauggcugcauguuuguguaacgggggaugaugaaaaugcaacugcuagcuucauuuacaaugggaggcuuguagauaguauugguucaugguccaaaaaaauccucaggacccaggagucggaaugcguuuguaucaauggaacuuguacaguaguaaugacugaugggagugcuucaggaaaagcugauacuaaaauacuauucauugaggaggggaaaaucguucacacuagcccauugucaggaagugcucagcaugucgaggagugcuccuguuauccucgauauccuggugucagaugugucugcagagacaacuggaaaggcuccaauaggcccaucguagauauaaauguaaaggauuauagcauuguuuccaguuaugugugcucaggacuuguuggagacacacccagaaaaaacgacagcuccagcaguagccauugcuuggauccuaacaaugaggaagguggucauggagugaaaggcugggccuuugaugauggaaaugacguguggaugggaagaacgaucagcgagaaguuacgcucaggauaugaaaccuucaaagucauugaaggcugguccaaaccuaacuccaaauugcagauaaauaagcaagucauaguugacagagguaauagguccgguuauucugguauuuucucuguugaaggcaaaagcugcaucaaucgaugcuuuuauguggaguugauaaggggaaggaaacaggaaacugaagucuuguggaccucaaacaguauuguuguguuuuguggcaccucagguacauauggaacaggcucauggccugauggggcggacaucaaucucaugccuauauaa

SEQ ID NO: 47542 - RNA, 1410 nt, Artificial Sequence
  derived and/or modified CDS sequence (wt) from neuraminidase__InfluenzaA__ABJ16634
augaauccaaaucaaaagauaauaacgauuggcucaguuucucucaccauuuccacaauaugcuucuucaugcaaauugccaucuugauaacuacuguaacauugcauuuuaagcaauaugaauucaacucccccccaaacaaccaagugaugcugugugaaccaacaauaauagaaagaaacauaacagagauaguguaucugaccaacaucaccauagagaaggaaauaugccccaaacuagcagaauacaggaauuggucaaagccgcaaugugacauuacaggauuugcaccuuuuucuaaggacaauucgauuaggcuuuccgcugguggggacaucugggugacaagagaaccuuaugugucaugcgauccugacaaguguuaucaauuugcccuuggacagggaacaacacuaaacaacgugcauucaaaugacacaguacaugauaggaccccuuaucggacccuauugaugaaugaguuagguguuccauuucaucuggggaccaagcaagugugcauagcaugguccagcucaaguugucacgauggaaaagcauggcugcauguuuguguaacgggggaugauaaaaaugcaacugcuagcuucauuuacaaugggaggcuuguagauaguauuguuucaugguccaaaaaaauccucaggacccaggagucagaaugcguuuguaucaauggaacuuguacaguaguaaugacugaugggagugcuucaggaaaagcugauacuaaaauacuauucauugaggaggggaaaaucguucauacuagcacauugucaggaagugcucagcauguugaggagugcuccugcuauccucgauauccuggugucagaugugucugcagagacaacuggaaaggcuccaauaggcccaucguagauauaaacauaaaggauuauagcauuguuuccaguuaugugugcucaggacuuguuggagacacacccagaaaaaacgacagcuccagcaguagccauugcuuggauccuaacaaugaagaagguggucauggagugaaaggcugggccuuugaugauggaaaugacguguggaugggaagaacgaucagcgagaaguuacgcucaggauaugaaaccuucaaagucauugaaggcugguccaacccuaauuccaaauugcagauaaauaggcaagucauaguugacagagguaauagguccgguuauucugguauuuucucuguugaaggcaaaagcugcaucaaucggugcuuuuauguggaguugauaaggggaagaaaagaggaaacugaagucuuguggaccucaaacaguauuguuguguuuuguggcaccucagguacauauggaacaggcucauggccugauggggcggacaucaaucucaugccuauauaa

SEQ ID NO: 47543 - RNA, 1413 nt, Artificial Sequence
  derived and/or modified CDS sequence (wt) from neuraminidase__InfluenzaA__ABJ16656
augaauccaaaucaaaaaauaauaaccauuggaucaaucaguauagcaaucggaauaauuagucuaauguugcaaauaggaaauauuauuucaauaugggcuagucacucaauccaaacuggaagucaaaaccacacuggaauaugcaaccaaagaaucaucacauaugaaaacagcaccugggugaaucacacauauguuaauauuaacaacacuaauguuguugcuggaaaggacaaaacuucagugacauuggccggcaauucaucucuuuguucuaucaguggaugggcuauauacacaaaagacaacagcauaagaauuggcuccaaaggagauguuuuugucauaagagaaccuuucauaucauguucucauuuggaaugcaggaccuuuuuucugacccaaggugcucuauuaaaugacaaacauucaaauggaaccguuaaggacagaaguccuuauagggccuuaaugagcuguccucuaggugaagcuccguccccauacaauucaaaguuugaaucaguugcauggucagcaagcgcaugccaugauggcaugggcugguuaacaaucggaauuucugguccagacaauggagcuguggcuguacuaaaauacaacggaauaauaacugaaaccauaaaaaguuggaaaaagcgaauauugagaacacaagagucugaaugugucugugugaacgggucauguuucaccauaaugaccgauggcccgaguaauggggccgccucguacaaaaucuucaagaucgaaaaggggaagguuacuaaaucaauagaguuaaaugcacccaauuuucauuaugaggaauguuccuguuacccagacacuggcacagugauguguguaugcagggacaacuggcaugguucaaaucgaccuugggugucuuuuaaucaaaacuuggauuaucaaauaggauacaucugcaguggaguguucggugacaauccgcgucccaaagauggaaagggcagcuguaauccagugacuguugauggagcagacggaguuaagggguuuucauacaaauaugguaaugguguuuggauaggaaggacuaaaaguaacagacuuagaaagggguuugagaugauuugggauccuaauggauggacagauaccgacagugauuucucagugaaacaggauguuguggcaauaacugauuggucaggguacaguggaaguuucguucaacauccugaguuaacaggauuggacuguauaagaccuugcuucuggguugaguuagucagaggacugccuagagaaaauacaacaaucuggacuagugggagcagcauuucuuuuuguggcguugauagugauacugcaaacuggucuuggccagacggugcugaguugccguucaccauugacaaauag

SEQ ID NO: 47544 - RNA, 1413 nt, Artificial Sequence
  derived and/or modified CDS sequence (wt) from neuraminidase__InfluenzaA__ABJ16667
augaauccaaaucaaaaaauaauaaccauuggaucaaucaguauagcaaucggaauaauuagucuaauguugcaaauaggaaauauuauuucaauaugggcuagucacucaauccaaacuggaagucaaaaccacacuggaauaugcaaccaaagaaucaucacauaugaaaacagcaccugggugaaucacacauauguuaauauuaacaacacuaauguuguugcuggaaaggacaaaacuucagugacauuggccggcaauucaucucuuuguucuaucaguggaugggcuauauacacaaaagacaacagcauaagaauuggcuccaaaggagauguuuuugucauaagagaaccuuucauaucauguucucauuuggaaugcaggaccuuuuuucugacccaaggugcucuauuaaaugacaaacauucaaauggaaccguuaaggacagaaguccuuauagggccuuaaugagcuguccucuaggugaagcuccguccccauacaauucaaaguuugaaucaguugcauggucagcaagcgcaugccaugauggcaugggcugguuaacaaucggaauuucugguccagacaauggagcuguggcuguacuaaaauacaacggaauaauaacugaaaccauaaaaaguuggaaaaagcgaauauugagaacacaagagucugaaugugucugugugaacgggucauguuucaccauaaugaccgauggcccgaguaauggggccgccucguacaaaaucuucaagaucgaaaaggggaagguuacuaaaucaauagaguuaaaugcacccaauuuucauuaugaggaauguuccuguuacccagacacuggcacagugauguguguaugcagggacaacuggcaugguucaaaucgaccuugggugucuuuuaaucaaaacuuggauuaucaaauaggauacaucugcagugggguguucggugacaauccgcgucccaaagauggaaagggcagcuguaauccagugacuguugauggagcagacggaguuaagggguuuucauacaaauaugguaaugguguuuggauaggaaggacuaaaaguaacagacuuagaaagggguuugagaugauuugggauccuaauggauggacagauaccgacagugauuucucagugaaacaggauguuguggcaauaacugauuggucaggguacaguggaaguuucguucaacauccugaguuaacaggauuggacuguauaagaccuugcuucuggguugaguuagucagaggacugccuagagaaaauacaacaaucuggacuagugggagcagcauuucuuuuuguggcguugauagugauacugcaaacuggucuuggccagacggugcugaguugccguucaccauugacaaauag

SEQ ID NO: 47545 - RNA, 1413 nt, Artificial Sequence
  derived and/or modified CDS sequence (wt) from neuraminidase__InfluenzaA__ABJ16678
augaauccaaaucaaaaaauaauaaccauuggaucaaucaguauagcaaucggaauaauuagucuaauguugcaaauaggaaauauuauuucaauaugggcuagucacucaauccaaacuggaagucaaaaccacacuggaauaugcaaccaaagaaucaucacauaugaaaacagcaccugggugaaucacacauauguuaauauuaacaacacuaauguuguugcuggaaaggacaaaacuucagugacauuggccggcaauucaucucuuuguucuaucaguggaugggcuauauacacaaaagacaacagcauaagaauuggcuccaaaggagauguuuuugucauaagagaaccuuucauaucauguucucauuuggaaugcaggaccuuuuuucugacccaaggugcucuauuaaaugacaaacauucaaauggaaccguuaaggacagaaguccuuauagggccuuaaugagcuguccucuaggugaagcuccguccccauacaauucaaaguuugaaucaguugcauggucagcaagcgcaugccaugauggcaugggcugguuaacaaucggaauuucugguccagacaauggagcuguggcuguacuaaaauacaacggaauaauaacugaaaccauaaaaaguuggaaaaagcgaauauugagaacacaagagucugaaugugucugugugaacgggucauguuucaccauaaugaccgauggcccgaguaauggggccgccucguacaaaaucuucaagaucgaaaaggggaagguuacuaaaucaauagaguuaaaugcacccaauuuucauuaugaggaauguuccuguuacccagacacuggcacagugauguguguaugcagggacaacuggcaugguucaaaucgaccuugggugucuuuuaaucaaaacuuggauuaucaaauaggauacaucugcaguggaguguucggugacaauccgcgucccaaagauggaaagggcagcuguaauccagugacuguugauggagcagacggaguuaagggguuuucauacaaauaugguaaugguguuuggauaggaaggacuaaaaguaacagacuuagaaagggguuugagaugauuugggauccuaauggauggacagauaccgacagugauuucuuagugaaacaggauguuguggcaauaacugauuggucaggguacaguggaaguuucguucaacauccugaguuaacaggauuggacuguauaagaccuugcuucuggguugaguuagucagaggacugccuagagaaaauacaacaaucuggacuagugggagcagcauuucuuuuuguggcguugauagugauacugcaaacuggucuuggccagacggugcugaguugccguucaccauugacaaauag

SEQ ID NO: 47546 - RNA, 1413 nt, Artificial Sequence
  derived and/or modified CDS sequence (wt) from neuraminidase__InfluenzaA__ABJ16689
augaauccaaaucaaaaaauaauaaccauuggaucaaucaguauagcaaucggaauaauuagucuaauguugcaaauaggaaauauuauuucaauaugggcuagucacucaauccaaacuggaagucaaaaccacacuggaauaugcaaccaaagaaucaucacauaugaaaacagcaccugggugaaucacacauauguuaauauuaacaacacuaauguuguugcuggaaaggacaaaacuucagugacauuggccggcaauucaucucuuuguucuaucaguggaugggcuauauacacaaaagacaacagcauaagaauuggcuccaaaggagauguuuuugucauaagagaaccuuucauaucauguucucacuuggaaugcagaaccuuuuuucugacccaaggugcucuauuaaaugacaaacauucaaauggaaccguuaaggacagaaguccuuauagggccuuaaugagcuguccucuaggugaagcuccguccccauacaauucaaaguuugaaucaguugcauggucagcaagcgcaugccaugauggcaugggcugguuaacaaucggaauuucugguccagacaauggagcuguggcuguacuaaaauacaacggaauaauaacugaaaccauaaaaaguuggaaaaagcgaauauugagaacacaagagucugaaugugucugugugaacgggucauguuucaccauaaugaccgauggcccaaguaauggggccgccucguacaaaaucuucaagaucgaaaagggaaagguuacuaaaucaauagaguuaaaugcacccaauuuucauuaugaggaauguuccuguuacccagacacuggcacagugauguguguaugcagggacaacuggcaugguucaaaucgaccuugggugucuuuuaaucaaaacuuggauuaucaaauaggauacaucugcaguggaguguucggugacaauccgcgucccaaagauggaaagggcagcuguaauccagugacuguugauggagcagacggaguuaagggguuuucauacaaauaugguaaugguguuuggauaggaaggacuaaaaguaacagacuuagaaaggguuuugagaugauuugggauccuaauggauggacagauaccgacagugauuucucagugaaacaggauguuguggcaauaacugauuggucaggguacagcggaaguuucguucaacauccugaguuaacaggauuggacuguauaagaccuugcuucuggguugaguuagucagaggacugccuagagaaaauacaacaaucuggacuagugggagcagcauuucuuuuuguggcguugauagugauacugcaaacuggucuuggccagacggugcugaguugccguucaccauugacaaguag

SEQ ID NO: 47547 - RNA, 1410 nt, Artificial Sequence
  derived and/or modified CDS sequence (wt) from neuraminidase__InfluenzaA__ABJ16700
augaauccaaaucaaaagauaauaacgauuggcucuguuucucucaccauugccacaauaugcuuccuuaugcaaauugccauccugguaacuacuguaacguugcauuucaagcaauaugaaugcaacucccccccaaacaaccaagugaugcugugugaaccaacaauaauagaaagaaacauaacagagauaguguaucugaccaacaccaccauagagaaggaaauaugccccaaacuagcagaauacagaaauuggucaaagccgcaauguaacauuacaggauuugcaccuuuuucuaaggacaauucgauucggcuuuccgcugguggggacaucugggugacaagagaaccuuaugugucaugcgauccugacaaguguuaucaauuugcccuuggacagggaacaacacuaaacaacgggcauucaaaugacacaguacaugauaggaccccuuaucgaacccuauugaugaaugaguuggguguuccauuucauuugggaaccaagcaagugugcauagcaugguccagcucaaguugucacgauggaaaagcauggcugcauguuuguguaacgggggaugaugaaaaugcaacugcuagcuucauuuacaaugggaggcuuguagauaguaucgguucaugguccaaaaaaauccucaggacccaggagucggaaugcguuuguaucaauggaacuuguacaguaguaaugacugaugggagugcuucaggaaaagcugauacuaaaauacuauucauugaggaggggaaaaucguucauacuagcucauugucaggaagugcucagcaugucgaggagugcuccuguuauccucgauauccuggugucagaugugucugcagagacaacuggaaaggcuccaauaggcccaucguagauauaaauguaaaggauuauagcauuguuuccaguuaugugugcucaggacuuguuggagacacacccagaaaaaacgacagcuccagcaguagccauugcuuggauccuaacaaugaggaagguggucauggagugaaaggcugggccuuugaugauggaaaugacguguggaugggaagaacgaucagcgagaaguuacgcucaggauaugaaaccuucaaagucauugaaggcugguccaaaccuaacuccaaauugcagauaaauaggcaagucauaguugacagagguaauagguccgguuauucugguauuuucucuguugaaagcaaaagcugcaucaauaggugcuuuuauguggaguugauaaggggaaagaaacaggaaacugaagucuuguggaccucaaacaguauuguuguguuuuguggcaccucagguacauauggaacaggcucauggccugauggggcggacaucaaucucaugccuauauaa

SEQ ID NO: 47548 - RNA, 1410 nt, Artificial Sequence
  derived and/or modified CDS sequence (wt) from neuraminidase__InfluenzaA__ABJ16711
augaauccaaaucaaaagauaauaacgauuggcucuguuucucucaccauugccacaauaugcuuccuuaugcaaauugccauccugguaacuacuguaacauugcauuucaagcaauaugaaugcaacucccccccaaacaaccaagugaugcugugugaaccaacaauaauagaaagaaacauaacagagauaguauaucugaccaacaccaccauagagaaggaaauaugccccaaacuagcagaauacagaaauuggucaaagccgcaauguaacauuacaggauuugcaccuuuuucuaaggacaauucgauucggcuuuccgcugguggggacaucugggugacaagagaaccuuaugugucaugcgauccugacaaguguuaucaauuugcccuuggacagggaacaacacuaaacaacgggcauucaaaugacacaguacaugauaggaccccuuaucgaacccuauugaugaaugaguuggguguuccauuucauuugggaaccaagcaagugugcauagcaugguccaguucaaguugucacgauggaaaagcauggcugcauguuuguguaacgggggaugaugaaaaugcaacugcuagcuucauuuacaaugggaggcuuguagauaguauugguucaugguccaaaaaaauccucaggacccaggagucggaaugcguuuguaucaauggaacuuguacaguaguaaugacugaugggagugcuucaggaaaagcugauacuaaaauucuauucauugaggaggggaaaaucguucauacuagcucauugucaggaagugcucagcaugucgaggagugcuccuguuauccucgauauccuggugucagaugugucugcagagacaacuggaaaggcuccaauaggcccaucguagauauaaauauaaaggauuauagcauuguuuccaguuaugugugcucaggacuuguuggagacacacccagaaaaaacgacagcuccagcaguagccauugcuuggauccuaacaaugaggaagguggucauggagugaaaggcugggccuuugaugauggaaaugacgcguggaugggaagaacgaucagcgagaaguuacgcucaggauaugaaaccuucaaagucauugaaggcugguccaaaucuaacuccaaauugcagauaaauaggcaagucauaguugacagaggcaauagguccgguuauucugguauuuucucuguugaaggcaaaagcugcaucaaucggugcuuuuauguggaguugauaaggggaaggaaacaggaaacugaagucuuguggaccucaaacaguauuguuguguuuuguggcaccucagguacauauggaacaggcucauggccugauggggcggacaucaaucucaugccuauauaa

SEQ ID NO: 47549 - RNA, 1413 nt, Artificial Sequence
  derived and/or modified CDS sequence (wt) from neuraminidase__InfluenzaA__ABJ16733
augaauccaaaucaaaaaauaauaaccauuggaucaaucaguguggcaaucggaauaauuaaucuaauauugcaaauaggaaauauuauuucaauaugggcuagccacucaauccaaacuggaagucaaaacuacacuggaauaugcaaccaaagaaucauuacauaugaaaauagaaccuggguaaaucaaacauauguuaauauuaacaacacuaauguuguugcuggaaaggacaaaaccucgaugacauuggccggcaauucaucucuuugcccuauccguggaugggcaauauacacaaaagacaacagcauaagaauugguuccaaaggagauauuuuugucauaagagagccuuuuauaucauguucucacuuggaaugcagaaccuuuuuucugacccaaggugcucuauuaaaugacaagcauucaaaugggaccauuaaggacagaagcccuuuuagggccuuaaugagcuguccucugggugaagcuccgucuccauacaauucaagauuugaaucaguugcuuggucagcaagcgcaugccaugauggccugggcuggcuaacaaucggaauuucugguccagauaauggagcaguggcuguacuaaaauacaacggcauaauaacugaaaccauaaaaaguuggaaaaagcaaauccuaagaacacaagagucugaaugugucugugugaacgguucauguuuuaccauaaugaccgauggcccgaguaacagggccgcaucguacagaaucuucaaaauugagaaggggagaguuacuaaaucaauagaguuggaugcacccaauuaucauuacgaggaauguuccuguuauccagacaccggcacaguaaugugugugugcagggacaauuggcacgguucaaaucgaccuuggguguccuuuaaucaaaaccuggauuaucaaauaggauacaucugcagugggguguucggugacaauccgcgucccaaagauggagaaggcagcuguaauccagugacuguugauggagcagacggaguaaagggguuuucauacagauaugguaaugguguuuggauaggaaggacuaaaaguaacagacuaagaaagggauuugagaugauuugggauccuaauggauggacagauaccgacagugauuucucaaugaaacaggaugucguggcaaugacugauuggucaggguacagcggaaguuuuguucaacacccugagcuaacaggauuggacuguaugagaccuugcuucuggguugaauuagucagagggcuaccuagagaaaauacaacaaucuggacuagugggagcagcauuucuuuuuguggcgugaauagcgagacugcaaacuggucuuggccagacggugcugaguugccauucaccauugacaaguag

SEQ ID NO: 47550 - RNA, 1410 nt, Artificial Sequence; identical to SEQ ID NO: 46755
  derived and/or modified CDS sequence (wt) from neuraminidase__InfluenzaA__ABJ16744

SEQ ID NO: 47551 - RNA, 1410 nt, Artificial Sequence
  derived and/or modified CDS sequence (wt) from neuraminidase__InfluenzaA__ABJ16755
augaauccaaaucaaaagauaauaacgauuggcucuguuucucucaccauugccacaauaugcuuccuuaugcaaauugccauccugguaacuacuguaacguugcauuucaagcaauaugaaugcaacucccccccaaacaaccaagugaugcugugugaaccaacaauaauagaaagaaacauaacagagauaguguaucugaccaacaccaccauagagaaggaaauaugccccaaacuagcagaauacagaaauuggucaaagccgcaauguaacauuacaggauuugcaccuuuuucuaaggacaauucgauucggcuuuccgcugguggggacaucugggugacaagagaaccuuaugugucaugcgauccugacaaguguuaucaauuugcccuuggacagggaacaacacuaaacaacgggcauucaaaugacacaguacaugauaggaccccuuaucgaacccuauugaugaaugaguuggguguuccauuucauuugggaaccaagcaagugugcauagcaugguccaguucaaguugucacgauggaaaagcauggcugcauguuuguguaacgggggaugaugaaaaugcaacugcuagcuucauuuacaaugggaggcuuguagauaguaucgguucaugguccaaaaaaauccucaggacccaggagucggaaugcguuuguaucaauggaacuuguacaguaguaaugacugaugggagugcuucaggaaaagcugauacuaaaauacuauucauugaggaggggaaaaucguucauacuagcucauugucaggaagugcucagcaugucgaggagugcuccuguuauccucgauauccuggugucagaugugucugcagagacaacuggaaaggcuccaauaggcccaucguagauauaaauguaaaggauuauagcauuguuuccaguuaugugugcucaggacuuguuggagacacacccagaaaaaacgacagcuccagcaguagccauugcuuggauccuaacaaugaggaagguggucauggagugaaaggcugggccuuugaugauggaaaugacguguggaugggaagaacgaucagcgagaaguuacgcucaggauaugaaaccuucaaagucauugaaggcugguccaaaccuaacuccaaauugcagauaaauaggcaagucauaguugacagagguaauagguccgguuauucugguauuuucucuguugaaagcaaaagcugcaucaauaggugcuuuuauguggaguugauaaggggaaggaaacaggaaacugaagucuuguggaccucaaacaguauuguuguguuuuguggcaccucagguacauauggaacaggcucauggccugauggggcggacaucaaucucaugccuauauaa

SEQ ID NO: 47552 - RNA, 1410 nt, Artificial Sequence
  derived and/or modified CDS sequence (wt) from neuraminidase__InfluenzaA__ABJ16766
augaauccaaaucaaaagauaauaacgauuggcucuguuucucucacuauugccacaauaugcuuccuuaugcaaauugccauccugguaacuacuguaacauugcauuucaagcaauaugaaugcaacucccccccaaacaaccaagugaugcugugugaaccaacaauaauagaaagaaacauaacagagauaguguaucugaccaacaccaccauagagaaggaaauaugccccaaacuagcagaauacagaaauuggucaaagccgcaauguaacauuacaggauuugcaccuuuuucuaaggacaauucgauucggcuuuccgcugguggggacaucugggugacaagagaaccuuaugugucaugcgauccugacaaguguuaucaauuugcccuuggacagggaacaacacuaaacaacgggcauucaaaugacacaguacaugauaggaccccuuaucgaacccuauugaugaaugaguuggguguuccauuucauuugggaaccaagcaagugugcauagcaugguccagcucaaguugucacgauggaaaagcauggcugcauguuuguguaacgggggaugaugaaaaugcaacugcuagcuucauuuacaaugggaggcuuguagauaguaucgguucaugguccaaaaaaauccucaggacccaggagucggaaugcguuuguaucaauggaacuuguacaguaguaaugacugaugggagugcuucaggaaaagcugauacuaaaauacuauucauugaggaggggaaaaucguucauacuagcucauugucaggaagugcucagcaugucgaggagugcuccuguuauccucgauauccuggugucagaugugucugcagagacaacuggaaaggcuccaauaggcccaucguagauauaaauguaaaggauuauagcauuguuuccaguuaugugugcucaggacuuguuggagacacacccagaaaaaacgacagcuccagcaguagccauugcuuggauccuaacaaugaggaagguggucauggagugaaaggcugggccuuugaugauggaaaugacguguggaugggaagaacgaucagcgagaaguuacgcucaggauaugaaaccuucaaagucauugaaggcugguccaaaccuaacuccaaauugcagauaaauaggcaagucauaguugacagagguaauagguccgguuauucugguauuuucucuguugaaagcaaaagcugcaucaauaggugcuuuuauguggaguugauaaggggaaggaaacaggaaacugaagucuuguggaccucaaacaguauuguuguguuuuguggcaccucagguacauauggaacaggcucauggccugauggggcggacaucaaucucaugccuauauaa

SEQ ID NO: 47553 - RNA, 1410 nt, Artificial Sequence
  derived and/or modified CDS sequence (wt) from neuraminidase__InfluenzaA__ABJ16777
augaauccaaaucaaaagauaauaacgauuggcucuguuucucucaccauugccacaauaugcuuccuuaugcaaauugccauccugguaacuacuguaacauugcauuucaagcaauaugaaugcaacucccccccaaacaaccaagugaugcugugugaaccaacaauaauagaaagaaacauaacagagauaguauaucugaccaacaccaccauagagaaggaaauaugccccaaacuagcagaauacagaaauuggucaaagccgcaauguaacauuacaggauuugcaccuuuuucuaaggacaauucgauucggcuuuccgcugguggggacaucugggugacaagagaaccuuaugugucaugcgauccugacaaguguuaucaauuugcccuuggacagggaacaacacuaaacaacgggcauucaaaugacacaguacaugauaggaccccuuaucgaacccuauugaugaaugaguuggguguuccauuucauuugggaaccaagcaagugugcauagcaugguccaguucaaguugucacgauggaaaagcauggcugcauguuuguguaacgggggaugaugaaaaugcaacugcuagcuucauuuacaaugggaggcuuguagauaguauugguucaugguccaaaaaaauccucaggacccaggagucggaaugcguuuguaucaauggaacuuguacaguaguaaugacugaugggagugcuucaggaaaagcugauacuaaaauucuauucauugaggaggggaaaaucguucauacuagcucauugucaggaagugcucagcaugucgaggagugcuccuguuauccucgauauccuggugucagaugugucugcagagacaacuggaaaggcuccaauaggcccaucguagauauaaauauaaaggauuauagcauuguuuccaguuaugugugcucaggacuuguuggagacacacccagaaaaaacgacagcuccagcaguagccauugcuuggauccuaacaaugaggaagguggucauggagugaaaggcugggccuuugaugauggaaaugacguguggaugggaagaacgaucagcgagaaguuacgcucaggauaugaaaccuucaaagucauugaaggcugguccaaaccuaacuccaaauugcagauaaauaggcaagucauaguugacagaggcaauagguccgguuauucugguauuuucucuguugaaggcaaaagcugcaucaaucggugcuuuuauguggaguugauaaggggaaggaaacaggaaacugaagucuuguggaccucaaacaguauuguuguguuuuguggcaccucagguacauauggaacaggcucauggccugauggggcggacaucaaucucaugccuauauaa

SEQ ID NO: 47554 - RNA, 1410 nt, Artificial Sequence; identical to SEQ ID NO: 47551
  derived and/or modified CDS sequence (wt) from neuraminidase__InfluenzaA__ABJ16788

SEQ ID NO: 47555 - RNA, 1413 nt, Artificial Sequence
  derived and/or modified CDS sequence (wt) from neuraminidase__InfluenzaA__ABJ53441
augaauccaaaccaaaaaauaauaaccauuggaucaaucaguauugcaauuggaauaauuagucugauauugcaaauaggaaauauuauuucaauaugggcuagccacucaauccaaacuggaagucaaaaccacacuggaauaugcaaccaaagaaucauuacauaugaaaauagcaccuggguaaaucaaacauauguuaauauuaacaacacuaauguuguugcuggaaaggacaaaaccucaaugacauuggccggcaauucaucucuuugcccuauccguggaugggcuauauacacaaaagacaacagcauaagaauugguuccaaaggagauguuuuugucauaagagagccuuuuauaucaugcucucacuuggaaugcagaaccuuuuuucugacccaaggugcucuauuaaaugacaagcauucaaaugggaccguuaaggacagaagcccuuauagggccuuaaugagcuguccucuaggugaagcuccgucuccauacaauucaagauuugaaucaguugcuuggucagcaagcgcaugccaugauggcuugggcuggcuaacaaucggaauuucugguccagauaauggggcaguggcuguacuaaaauacaacggcauaauaacugaaaccauuaaaaguuggaagaagcgaauauuaagaacacaagagucugaaugugucuguaugaacgguucauguuuuaccauaaugaccgauggcccgaguaauggggccgcaucguacagaaucuucaaaaucgagaaggggagaguuacuaaaucaauagaguuggaugcacccaauuaucauuaugaggaauguucauguuacccagacaccggcacagugaugugugugugcagggacaauuggcacgguucaaaucgaccuugggugucuuuuaaucaaaaccuggauuaucaaauaggauacaucugcagugggguguucggugacaauccgcgucccaaagauggagaaggcagcuguaauccagugacuguugauggagcagacggaguaaagggguuuucauacagauaugguaaugguguuuggauaggaaggacuaaaaguaacagacucagaaagggauuugagaugauuugggauccuaauggauggacagauaccgacagugauuucucaaugaaacaggauaucguggcaaugacugauuggucaggguacagcggaaguuuuguucaacauccugagcuaacaggauuggacuguaugagaccuugcuucuggguugaauuagucagagggcuaccuagagaaaauacaacaaucuggacuagugggagcagcauuucuuuuuguggcguaaauagcgauacugcaaacuggucuuggccagacggugccgaguugccauucaccauugacaaguag

SEQ ID NO: 47556 - RNA, 1413 nt, Artificial Sequence
  derived and/or modified CDS sequence (wt) from neuraminidase__InfluenzaA__ABJ53452
augaauccaaaucaaaaaauaauaaccauuggaucaaucaguauagcaaucggaauaauuagucuaauguugcaaauaggaaauauuauuucaauaugggcuagucacucaauccaaacuggaagucaaaaccacacuggaauaugcaaccaaagaaucaucacauaugaaaacagcaccugggugaaucacacauauguuaauauuaacaacacuaauguuauugcuggaaaggacaaaacuucagugacauuggccggcaauucaucucuuuguuccaucaguggaugggcuauauacacaaaagacaacagcauaagaauuggauccaaaggagauguuuuugucauaagagaaccuuucauaucauguucucacuuggaaugcagaaccuuuuuucugacccaaggugcucuauuaaaugacaaacauucaaaugggaccguuaaggacagaaguccuuauagggccuuaaugagcugcccucuaggugaagcuccguccccauacaauucaaaguuugaaucaguugcauggucagcaagcgcaugccaugauggcaugggcugguuaacaaucggaauuucugguccagacaauggagcuguggcuguacuaaaauacaacggcauaauaacugaaaccauaaaaaguuggaaaaagcgaauauuaagaacacaagagucugaaugugucugugugaacgggucauguuucaccauaaugaccgauggcccgaguaauggggccgccucguacaaaaucuucaagaucgaaaaggggaagguuacuaaaucaauagaguugaaugcacccaauuuucauuaugaggaauguuccuguuacccagacacuggcacagugauguguguaugcagggacaacuggcaugguucaaaucgaccuugggugucuuuuaaucaaaaccuggauuaucaaauaggauacaucugcagugggguguucggugacaauccgcgucccaaagauggagagggcagcuguaauccagugacuguugauggagcagacggaguaaagggguuuucauacaaauaugguaaugguguuuggauaggaaggacuaaaaguaacagacuuagaaagggguuugagaugauuugggauccuaauggauggacagauaccgacaguaauuucucagugaaacaggauguuguggcaauaacugauuggucaggguacagcggaaguuucguucaacauccugaguuaacaggauuggacuguauaagaccuugcuucuggguugaguuagucagaggacugccuagagaaaauacaacaaucuggacuagugggagcagcauuucuuuuuguggcguaaauagugauacugcaaacuggucuuggccagacggugcugaguugccguucaccauugacaaguag

SEQ ID NO: 47557 - RNA, 1410 nt, Artificial Sequence; identical to SEQ ID NO: 46740
  derived and/or modified CDS sequence (wt) from neuraminidase__InfluenzaA__ABJ53463

SEQ ID NO: 47558 - RNA, 1410 nt, Artificial Sequence; identical to SEQ ID NO: 46740
  derived and/or modified CDS sequence (wt) from neuraminidase__InfluenzaA__ABJ53474

SEQ ID NO: 47559 - RNA, 1410 nt, Artificial Sequence
  derived and/or modified CDS sequence (wt) from neuraminidase__InfluenzaA__ABJ53485
augaauccaaaucaaaagauaauaacgauuggcucuguuucucucaccauuuccacaauaugcuucuucaugcaaauugccaucuugauaacuacuguaacauugcauuucaagcaauaugaauucaacucccccccaaacaaccaagugaugcugugugaaccaacaauaauagaaagaaacauaacagagauaguguaucugaccaacaccaccauagagaaggaaauaugccccaaacuagcagaauacagaaauuggucaaagccgcaauguaacauuacaggauuugcacccuuuucuaaggacaauucgauuaggcuuuccgcugguggggacaucugggugacaagagaaccuuaugugucaugcgauccugacaaguguuaucaauuugcccuuggacagggaacaacacuaaacaacgugcauucaaaugacacaguacaugauaggaccccuuaucggacccuauugaugaaugaguuagguguuccauuucaucuggggaccaagcaagugugcauagcaugguccagcucaaguugucacgauggaaaagcauggcugcauguuuguguaacgggggaugauaaaaaugcaacugcuagcuucauuuacaaugggaggcuuguagauaguauuguuucaugguccaaagaaauccucaggacccaggagucagaaugcguuuguaucaauggaacuuguacaguaguaaugacugaugggagugcuucaggaaaagcugauacuaaaauacuauucauugaggaggggaaaaucguucauacuagcacauugucaggaagugcucagcaugucgaggagugcuccugcuauccucgauauccuggugucagaugugucugcagagacaacuggaaaggcuccaauaggcccauaguagauauaaacauaaaggauuauagcauuguuuccaguuaugugugcucaggacuuguuggagacacacccagaaaaaacgacagcuccagcaguagccauugcuuggauccuaacaaugaagaagguggucauggagugaaaggcugggccuuugaugauggaaaugacguguggaugggaagaacgaucagcgagaaguuacgcuuaggauaugaaaccuucaaagucauugaaggcugguccaacucuaauuccaaauugcagacaaauaggcaagucauaguugacagagguaauagguccgguuauucugguauuuucucuguugaaggcaaaagcugcaucaaucggugcuuuuauguggaguugauaaggggaagaaaagaggaaacugaagucuuguggaccucaaacaguauuguuguguuuuguggcaccucagguacauauggaacaggcucauggccugauggggcggacaucaaucucaugccuauauaa

SEQ ID NO: 47560 - RNA, 1413 nt, Artificial Sequence; identical to SEQ ID NO: 47368
  derived and/or modified CDS sequence (wt) from neuraminidase__InfluenzaA__ABJ53496

SEQ ID NO: 47561 - RNA, 1413 nt, Artificial Sequence; identical to SEQ ID NO: 47368
  derived and/or modified CDS sequence (wt) from neuraminidase__InfluenzaA__ABJ53507

SEQ ID NO: 47562 - RNA, 1413 nt, Artificial Sequence
  derived and/or modified CDS sequence (wt) from neuraminidase__InfluenzaA__ABJ53518
augaauccaaaucaaaaaauaauaaccauuggaucaaucaguguggcaaucggaauaauuaaucuaauauugcaaauaggaaauauuauuucaauaugggcuagccacucaauccaaacuggaagucaaaacuacacuggaauaugcaaccaaagaaucauuacauaugaaaauagaaccuggguaaaucaaacauauguuaauauuaacaacacuaauguuguugcuggaaaggacaaaaccucgaugacauuggccggcaauuuaucucuuugcccuauccguggaugggcaauauacacaaaagacaacagcauaagaauugguuccaaaggagauguuuuugucauaagagagccuuuuauaucauguucucacuuggaaugcagaaccuuuuuucugacccaaggugcucuauuaaaugacaagcauucaaaugggaccauuaaggacagaagcccuuuuagggccuuaaugagcuguccucugggugaagcuccgucuccauacaauucaagauuugaaucaguugcuuggucagcaagcgcaugccaugauggccugggcuggcuaacaaucggaauuucugguccagauaauggagcaguggcuguacuaaaauacaacggcauaauaacugaaaccauaaaaaguuggaaaaagcaaauccuaagaacacaagagucugaaugugucugugugaacgguucauguuuuaccauaaugaccgauggcccgaguaacagggccgcaucguacagaaucuucaaaauugagaaggggagaguuacuaaaucaauagaguuggaugcacccaauuaucauuacgaggaauguuccuguuauccagacaccggcacaguaaugugugugugcagggacaauuggcacgguucaaaucgaccuuggguguccuuuaaucaaaaccuggauuaucaaauaggauacaucugcagugggguguucggugacaauccgcgucccaaagauggagaaggcagcuguaauccagugacuguugauggagcagacggaguaaagggguuuucauacagauaugguaaugguguuuggauaggaaggacuaaaaguaacagacuaagaaagggauuugagaugauuugggauccuaauggauggacagauaccgacagugauuucucaaugaaacaggaugucguggcaaugacugauuggucaggguacagcggaaguuuuguucaacauccugagcuaacaggauuggacuguaugagaccuugcuucuggguugaauuagucagagggcuaccuagagaaaauacaacaaucuggacuagugggagcagcauuucuuuuuguggcgugaauagcgagacugcaaacuggucuuggccagacggugcugaguugccauucaccauugacaaguag

SEQ ID NO: 47563 - RNA, 1410 nt, Artificial Sequence
  derived and/or modified CDS sequence (wt) from neuraminidase__InfluenzaA__ABK39965
augaauccaaaucaaaagauaauaacaauuggcucuguuucucucaccauugccacaauaugcuuccuuaugcaaauugccauccugguaacuacuguaacauugcauuucaagcaguaugaaugcaacucccccccaaauaaccaaguaaugcugugugaaccaacaauaauagaaagaaacauaacagagauaguguaucugaccaauaccaccauagagaaggaaauaugccccaaauuagcagaauacagaaauuggucaaagccgcaauguaacauuacaggauuugcaccuuuuucuaaggacaauucgauucggcuuuccgcugguggggacaucugggugacaagagaaccuuaugugucaugcgauccugacaaguguuaucaauuugcccuugggcagggaacaacacuaaacaacgggcauucaaaugacacaguacaugauaggaccccuuaccggacccuauugaugaacgaauuggguguuccauuucauuugggaaccaggcaagugugcauagcaugguccagcucaaguugucacgauggaaaagcauggcugcauguuuguguaacuggggaugaugaaaaugcaacugcuagcuucauuuacaaugggaggcuuguagauaguauugguucaugguccaaaaaaauacucagaacccaggagucggaaugcguuuguaucaauggaacuuguacaguaguaaugacugaugggagcgcuucaggaaaagcugauacuaaaauacuauucauugaggaggggaaaaucguucauauuagcacauugucaggaagugcucagcaugucgaggagugcuccuguuauccucgauauccuggugucagaugugucugcagagacaacuggaaaggcuccaauaggcccaucguagauauaaauguaaaagauuauagcauuguuuccaguuaugugugcucaggacuuguuggagacacacccagaaaaaaugacagcuucagcaguagccauugccuagauccuaacaaugaggaagguggucauggagugaaaggcugggccuuugaugauggaaaugacguguggaugggaagaacgaucagcgagaaguuacgcucagguuaugaaaccuucaaagucaucgaaggcugguccaaaccuaacuccaaauuacagauaaauaggcaagucauaguugaaagagguaacagguccgguuauucugguauuuucuccguugaaggcaaaagcugcaucaaucggugcuuuuauguggaguugauaaggggaaggaaagaggaaacugaagucugguggaccucaaacaguauuguuguguuuuguggcaccucagguacauauggaacaggcucauggccugauggggcggauaucaaucucaugccuauauaa

SEQ ID NO: 47564 - RNA, 1410 nt, Artificial Sequence
  derived and/or modified CDS sequence (wt) from neuraminidase__InfluenzaA__ABK39976
augaauccaaaucaaaagauaauaacgauuggcucuguuucucucaccauuuccacaacaugcuucuucaugcaaauugccaucuugauaacuacuguaacauugcauuucaagcaauaugaauucaacucccccccaaacaaccaagugaugcugugugaaccaacaauaauagaaagaaacauaacagagauaguguaucugaccaacaccaccauagagaaggaaauaugccccaaacuagcagaauacagaaauuggucaaagccgcaauguaacauuacaggauuugcaccuuuuucuaaggacaauucgauuaggcuuuccgcugguggggacaucugggugacaagagaaccuuaugugucaugcgauccugacaaguguuaucaauuugcccuuggacagggaacaacacuaaacaacgugcauucaaaugacacaguacaugauaggaccccuuaucggacccuauugaugaaugaguuagguguuccauuucaucuggggaccaagcaagugugcauagcaugguccagcucaaguugucacgauggaaaagcauggcugcauguuuguguaacgggggaugauaaaaaugcaacugcuagcuucauuuacaaugggaggcuuguagauaguauuguuucaugguccaaagaaauccucaggacccaggagucagaaugcguuuguaucaauggaacuugugcaguaguaaugacugaugggagugcuucaggaaaagcugauacuaaaauacuauucauugaggaggggaaaaucguucauacuagcacauugucaggaagugcucagcaugucgaggagugcuccugcuauccucgauauccuggugucagaugugucugcagagacaacuggaaaggcuccaauaggcccauaguagauauaaacauaaaggauuauagcauuguuuccaguuaugugugcucaggacuuguuggagacacacccagaaaaaacgacagcuccagcaguagccauugcuuggauccuaacaaugaagaagguggucauggagugaaaggcugggccuuugaugauggaaaugacguguggaugggaagaacgaucagcgagaaguuacgcucaggauaugaaaccuucaaagucauugaaggcugguccaacccuaauuccaaauugcagauaaauaggcaagucauaguugacagagguaauagguccgguuauucugguauuuucucuguugaaggcaaaagcugcaucaaucggugcuuuuauguggaguugauaaggggaagaaaagaggaaacugaagucuuguggaccucaaacaguauuguuguguuuuguggcaccucagguacauauggaacaggcucauggccugauggggcggacaucaaucucaugccuauauaa

SEQ ID NO: 47565 - RNA, 1410 nt, Artificial Sequence
  derived and/or modified CDS sequence (wt) from neuraminidase__InfluenzaA__ABK39987
augaauccaaaucaaaagauaauaacgauuggcucuguuucucucaccauuuccacaauaugcuucuucaugcaaauugccaucuugauaacuacuguaacauugcauuucaagcaauaugaauucaacucccccccaaacaaccaagugaugcugugugaaccaacaauaauagaaagaaacauaacagagauaguguaucugaccaacaccaccauagagaaggaaauaugccccaaacuagcagaauacagaaauuggucaaagccgcaauguaacauuacaggauuugcaccuuuuucuaaggacaauucgauuaggcuuuccgcugguggggacaucugggugacaagagaaccuuaugugucaugcgauccugacaaguguuaucaauuugcccuuggacagggaacaacacuaaacaacgugcauucaaaugacacaguacaugauagaaccccuuaucggacccuauugaugaaugaguuagguguuccauuucaucuggggaccaagcaagugugcauagcaugguccagcucaaguugucacgauggaaaagcauggcugcauguuuguguaacgggggaugauaaaaaugcaacugcuagcuucauuuacaaugggaggcuuguagauaguauuguuucaugguccaaagaaauccucaggacccaggagucagaaugcguuuguaucaauggaacuuguacaguaguaaugacugaugggagugcuucaggaaaagcugauacuaaaauacuauucauugaggaggggaaaaucguucauacuagcacauugucaggaagugcucagcaugucgaggagugcuccugcuauccucgauauccuggugucagaugugucugcagagacaacuggaaaggcuccaauaggcccauaguagauauaaacauaaaggauuauagcauuguuuccaguuaugugugcucaggacuuguuggagacacacccagaaaaaacgacagcuccagcaguagccauugcuuggauccuaacaaugaagaagguggucauggagugaaaggcugggccuuugaugauggaaaugacguguggaugggaagaacgaucagcgagaaguuacgcucaggauaugaaaccuucaaagucauugaaggcugguccaacccuaauuccaaauugcagauaaauaggcaagucauaguugacagagguaauagguccgguuauucugguauuuucucuguugaaggcaaaagcugcaucaaucggugcuuuuauguggaguugauaaggggaagaaaagaggaaacugaagucuuguggaccucaaacaguauuguuguauuuuguggcaccucagguacauauggaacaggcucauggccugauggggcggacaucaaucucaugccuauauaa

SEQ ID NO: 47566 - RNA, 1410 nt, Artificial Sequence
  derived and/or modified CDS sequence (wt) from neuraminidase__InfluenzaA__ABK39998
augaauccaaaucaaaaaauaauaacgauuggcucuguuucucucaccauugccacaauaugcuuccuuacgcaaauugccauccugguaacuacuguaacauugcauuucaagcaauaugaaugcaacucccccccaaacaaccaagugaugcugugugaaccaacaauaauagaaagaaacauaacagagauaguguaucugaccaacaccaccauagagaaggaaauaugccccaaacuagcagaauacagaaauuggucaaagccgcaaugcaacauuacuggauuugcaccuuuuucuaaggacaauucgauucggcuuuccgcugguggggacaucuggguuacaagagaaccuuaugugucaugcgauccugacaaguguuaucaauuugcccuuggacagggaacaacacuaaacaacgggcauucaaaugacacaguacaugauaggaccccuuauaggacccuauugaugaaugaguuggguguuccauuucauuugggaaccaagcaagugugcauagcaugguccagcucaaguugucacgauggaaaagcauggcugcauguuuguguaacgggggaugauaaaaaugcaacugcuagcuucauuuacaaugggaggcuuguagauaguauagguucaugguccaaaaaaauccucaggacccaggagucggaaugcguuuguaucaauggaacuuguacaguaguaaugacugaugggagugcuucaggaaaagcugauacuaaaauacuauucauugaggaggggaaaaucguucauacuagccuauugucagggagugcucagcaugucgaggagugcuccuguuauccucgauauccuggugucagaugugucugcagagacaacuggaaaggcuccaauaggcccaucguagauauaaauguaaaggauuauagcauuguuuccaguuaugugugcucaggacuuguuggagacacacccagaaaaaacgacagcuccagcaguagccauugcuuggauccuaacaaugaggaagguggucauggagugaaaggcugggccuuugaugauggaaaugacguguggaugggaagaacaaucagcgagaaguuacgcucaggauaugaaaccuucaaagucauugaaggcugguccaaaccuaacuccaaacugcagauaaauaggcaagucauaguugacagagauaauagguccgguuauucugguauuuucucuguugaaggcaaaagcugcaucaaucggugcuuuuauguggaguugauaaggggaaggaaccaggaaacugaagucuuguggaccucaaacaguauuguuguguuuuguggcaccucagguacauauggaacaggcucauggccugauggggcggacaucaaucucaugccuauauaa

SEQ ID NO: 47567 - RNA, 1410 nt, Artificial Sequence
  derived and/or modified CDS sequence (wt) from neuraminidase__InfluenzaA__ABK40020
augaauccaaaucaaaagauaauaacgauuggcucuguuucucucaccauuuccacaauaugcuucuucaugcaaauugccaucuugauaacuacuguaacauugcauuucaagcaauaugaauucaacucccccccaaacaaccaagugaugcugugugaaccaacaauaauagaaagaaacauaacagagauaguguaucugaccaacaccaccauagagaaggaaauaugccccaaacuagcagaauacagaaauuggucaaagccgcaaugugacauuacaggauuugcaccuuuuucuaaggacaauucgauuaggcuuuccgcugguggggacaucugggugacaagagaaccuuaugugucaugcgauccugacaaguguuaucaauuugcccuuggacagggaacaacacuaaacaacgugcauucaaaugacacaguacaugauaggaccccuuaucggacccuauugaugaaugaguuagguguuccauuucaucuggggaccaagcaagugugcauagcaugguccagcucaaguugucacgauggaaaagcauggcugcauguuuguguaacgggagaugauaaaaaugcaacugcuagcuucauuuacaaugggaggcuuguagauaguauuguuucaugguccaaagaaauccucagaacccaggagucagaaugcguuuguaucaauggaacuuguacaguaguaaugacugaugggagugcuucaggaaaagcugauacuaaaauacuauucauugaggaggggaaaaucguucauacuagcacauugucaggaagugcucagcaugucgaggagugcuccugcuauccucgauauccuggugucagaugugucugcagagacaacuggaaaggcuccaauaggcccaucguagauauaaacauaaaggauuauagcauuguuuccaguuaugugugcucaggacuuguuggagacacacccagaaaaaacgacagcuccagcaguagccauugcuuggauccuaacaaugaagaagguggucauggagugaaaggcugggccuuugaugauggaaaugauguguggaugggaagaacgaucagcgagaaguuacgcucaggauaugaaaccuucaaagucauugaaggcugguccaacccuaauuccaaauugcagauaaauaggcaagucauaguugacagagguaauagguccgguuauucugguauuuucucuguugaaggcaaaagcugcaucaaucggugcuuuuauguggaguugauaaggggaagaaaagaggaaacugaagucuuguggaccucaaacaguauuguuguguuuuguggcaccucagguacauauggaacaggcucauggccugauggggcggacaucaaucucaugccuauauaa

SEQ ID NO: 47568 - RNA, 1413 nt, Artificial Sequence
  derived and/or modified CDS sequence (wt) from neuraminidase__InfluenzaA__ABK40031
augaauccaaaucaaaaaauaauaaccauuggaucaaucaguguggcaaucggaauaauuaaucuaauauugcaaauaggaaauauuauuucaauaugggcuagccacucaauccaaacuggaagucaaaacuacacuggaauaugcaaccaaagaaucauuacauaugaaaauagaaccuggguaaaucaaacauauguuaauauuaacaacacuaauguuguugcuggaaaggacaaaaccucgaugacauuggccggcaauucaucucuuugcccuauccguggaugggcaauauacacaaaagacaacagcauaagaauugguuccaaaggagauguuuuugucauaagagagccuuuuauaucauguucucacuuggaaugcagaaccuuuuuucugacccaaggugcucuauuaaaugacaagcauucaaaugggaccauuaaggacagaagcccuuuuagggccuuaaugagcuguccucugggugaagcuccgucuccauacaauucaagauuugaaucaguugcuuggucagcaagcgcaugccaugauggccugggcuggcuaacaaucggaauuucugguccagauaauggagcaguggcuguacuaaaauacaacggcauaauaacugaaaccauaaaaaguuggaaaaagcaaauccuaagaacacaagagucugaaugugucugugugaacgguucauguuuuaccauaaugaccgauggcccgaguaacagggccgcaucguacagaaucuucaaaauugagaaggggagaguuacuaaaucaauagaguuggaugcacccaauuaucauuacgaggaauguuccuguuauccagacaccggcacaguaaugugugugugcagggacaauuggcacgguucaaaucgaccuuggguguccuuuaaucaaaaccuggauuaucaaauaggauacaucugcagugggguguucggugacaauccgcgucccaaagauggagaaggcagcuguaauccagugacuguugauggagcagacggaguaaagggguuuucauacagauaugguaaugguguuuggauaggaaggacuaaaaguaacagacuaagaaagggauuugagaugauuugggauccuaauggauggacagauaccgacagugauuucucaaugaaacaggaugucguggcaaugacugauuggucaggguacagcggaaguuuuguucaacauccugagcuaacaggauuggacuguaugagaccuugcuucuggguugaauuagucagagggcuaccuagagaaaauacaacaaucuggacuagugggagcagcauuucuuuuuguggcgugaauagcgagacugcaaacuggucuuggccagacggugcugaguugccauucaccauugacaaguag

SEQ ID NO: 47569 - RNA, 1413 nt, Artificial Sequence; identical to SEQ ID NO: 47568
  derived and/or modified CDS sequence (wt) from neuraminidase__InfluenzaA__ABK40042

SEQ ID NO: 47570 - RNA, 1413 nt, Artificial Sequence
  derived and/or modified CDS sequence (wt) from neuraminidase__InfluenzaA__ABK40053
augaauccaaaucaaaaaauaauaaccauuggaucaaucaguguggcaaucggaauaauuaaucuaauauugcaaauaggaaauauuauuucaauaugggcuagccacucaauccaaacuggaagucaaaacuacacuggaauaugcaaccaaagaaucauuacauaugaaaauagaaccuggguaaaucaaacauauguuaauauuaacaacacuaauguuguugcuggaaaggacaaaaccucgaugacauuggccggcaauucaucucuuugcccuauccguggaugggcaauauacacaaaagacaacagcauaagaauugguuccaaaggagauguuuuugucauaagagagccuuuuauaucauguucucacuuggaaugcagaaccuuuuuucugacccaaggugcucuauuaaaugacaagcauucaaaugggaccauuaaggacagaagcccuuuuagggccuuaaugagcuguccucugggugaagcuccgucuccauacaauucaagauuugaaucaguugcuuggucagcaagcgcaugccaugauggccugggcuggcuaacaaucggaauuucugguccagauaauggagcaguggcuguacuaaaauacaacggcauaauaacugaaaccauaaaaaguuggaaaaagcaaauccuaagaacacaagagucugaaugugucugugugaacgguucauguuuuaccauaaugaccgauggcccgaguaacagggccgcaucguacagaaucuucaaaauugagaaggggagaguuacuaaaucaauagaguuggaugcacccaauuaucauuacgaggaauguuccuguuauccagacaccggcacaguaaugugugugugcagggacaauuggcacgguucaaaucgaccuuggguguccuuuaaucaaaaccuggauuaucaaauaggauacaucugcagugggguguucggugacaauccgcgucccaaagauggagaaggcagcuguaauccagugacuguugauggagcagacggaguaaagggguuuucauacagauaugguaaugguguuuggauaggaaggacuaaaaguaacagacuaagaaagggauuugagaugauuugggauccuaauggauggacagauaccgacagugauuucucaaugaaacaggaugucguggcaaugacugauuggucaggguacagcggaaguuuuguucaacacccugagcuaacaggauuggacuguaugagaccuugcuucuggguugaauuagucagagggcuaccuagagaaaauacaacaaucuggacuagugggagcagcauuucuuuuuguggcgugaauagcgagacugcaaacuggucuuggccagacggugcugaguugccauucaccauugacaaguag

SEQ ID NO: 47571 - RNA, 1410 nt, Artificial Sequence; identical to SEQ ID NO: 47551
  derived and/or modified CDS sequence (wt) from neuraminidase__InfluenzaA__ABK40064

SEQ ID NO: 47572 - RNA, 1410 nt, Artificial Sequence; identical to SEQ ID NO: 47551
  derived and/or modified CDS sequence (wt) from neuraminidase__InfluenzaA__ABK40078

SEQ ID NO: 47573 - RNA, 1413 nt, Artificial Sequence; identical to SEQ ID NO: 47071
  derived and/or modified CDS sequence (wt) from neuraminidase__InfluenzaA__ABK40513

SEQ ID NO: 47574 - RNA, 1413 nt, Artificial Sequence; identical to SEQ ID NO: 47071
  derived and/or modified CDS sequence (wt) from neuraminidase__InfluenzaA__ABK40538

SEQ ID NO: 47575 - RNA, 1413 nt, Artificial Sequence
  derived and/or modified CDS sequence (wt) from neuraminidase__InfluenzaA__ABK40549
augaauccaaaucagaaaauaauaaccauuggaucaaucuguaugacaaucggaauaauuagucuaauauugcaaauaggaaauauuauuucaauauggguuagccacucaauccaaacuggaagucaaaaccacacuggaauaugcaaccaaagaaucauuaccuaugaaaauagcaccuggguaaaucaaacauaugucaauauuaacaacacuaacguuguugcuggaaaggacacaacuucagugacauuagccggcaauucaucucuuuguccuauccgugggugggcuauauacagcaaagacaacagcauaagaauugguuccaaaggagauguuuuugucauaagagaaccuuuuauaucauguucucacuuggaaugcagaaccuuuuuucugacccaaggugcucuauuaaaugacaagcauucaaaugggaccguuaaggacagaagcccuuauagggccuuaaugagcuguccuauaggugaagcuccgucuccauacaauucaagguuugaaucaguugcuuggucagcaagcgcaugucaugauggcaugggcuggcuaacaaucggaauuucugguccagaugauggagcaguggcuguacuaaaauacaacggcauaauaacugaaaccauaaaaaguuggaggaagcgaauauuaagaacacaagagucugaaugugucuguguaaacgguucauguuuuaccauaaugaccgauggcccgaguaauggaccugccucguacagaaucuucaaaaucgagaaggggaagauuacuaaaucaauagaguuggaugcacccaauucucauuacgaggaauguuccuguuacccagacaccggcacagugaugugugugugcagagacaauuggcaugguucgaaucgaccuugggugucuuuuaaucaaaaccuggauuauaaaauaggauacaucugcagugggguguucggugacaauccgcgucccaaagauggaaaaggcagcugugauccaguaacuguugauggagcagacggaguaaagggguuuucauacagguaugguaaugguguuuggauaggaaggacuaaaaguaacagcuccagaaagggauuugagaugauuugggauccuaauggauggacagauaccgauaguaauuucuuagugaaacaggauguaguggcaaugacugauuggucaggguacagcggaaguuucguucaacauccugagcuaacaggauuggacuguaugaggccuugcuucuggguugaauuaaucagaggacgaccuagagaaaagacaacaaucuggacuagugggagcagcauuucuuuuuguggcgugaauagugauacugcaaauuggucuuggccagacggugccgaguugccauucaccauugacaaguag

SEQ ID NO: 47576 - RNA, 1413 nt, Artificial Sequence
  derived and/or modified CDS sequence (wt) from neuraminidase__InfluenzaA__ABK40560
augaauccaaaucagaaaauaauaaccauuggaucaaucuguaugacaaucggaauaauuagucuaauauugcaaauaggaaauauuauuucaauauggguuagccacucaauccaaacuggaagucaaaaccacacuggaauaugcaaccaaagaaucauuaccuaugaaaauagcaccuggguaaaucaaacauaugucaauauuaacaacacuaacguuguugcuggaaaggacacaacuucagugacauuagccggcaauucaucucuuuguccuauccgugggugggcuauauacagcaaagacaacagcauaagaauugguuccaaaggagauguuuuugucauaagagaaccuuuuauaucauguucucacuuggaaugcagaaccuuuuuucugacccaaggugcucuauuaaaugacaagcauucaaaugggaccguuaaggacagaagcccuuauagggccuuaaugagcuguccuauaggugaagcuccgucuccauacaauucaagguuugaaucaguugcuuggucagcaagcgcaugucaugauggcaugggcuggcuaacaaucggaauuucugguccagaugauggagcaguggcuguacuaaaauacaacggcauaauaacugaaaccauaaaaaguuggaggaagcgaauauuaagaacacaagagucugaaugugucuguguaaacgguucauguuuuaccauaaugaccgauggcccgaguaauggaccugccucguacagaaucuucaaaaucgagaaggggaagauuacuaaaucaauagaguuggaugcacccaauucucauuacgaggaauguuccuguuacccagacaccggcacagugaugugugugugcagagacaauuggcaugguucgaaucgaccuugggugucuuuuaaucaaaaccuggauuaucaaauaggauacaucugcagugggguguucggugacaauccgcgucccaaagauggaaaaggcagcugugauccaguaacuguugauggagcagacggaguaaagggguuuucauacagguaugguaaugguguuuggauaggaaggacuaaaaguaacagcuccagaaagggauuugagaugauuugggauccuaauggauggacagauaccgauaguaauuucuuagugaaacaggauguaguggcaaugacugauuggucaggguacagcggaaguuucguucaacauccugagcuaacaggauuggacuguaugaggccuugcuucuggguugaauuaaucagaggacgaccuagagaaaagacaacaaucuggacuagugggagcagcauuuccuuuuguggcgugaauagugauacugcaaauuggucuuggccagacggugccgaguugccauucaccauugacaaguag

SEQ ID NO: 47577 - RNA, 1413 nt, Artificial Sequence; identical to SEQ ID NO: 47071
  derived and/or modified CDS sequence (wt) from neuraminidase__InfluenzaA__ABK40571

SEQ ID NO: 47578 - RNA, 1413 nt, Artificial Sequence
  derived and/or modified CDS sequence (wt) from neuraminidase__InfluenzaA__ABK40582
augaauccaaaucagaaaauaauaaccauuggaucaaucuguaugacaaucggaauaauuagucuaauauugcaaauaggaaauauuauuucaauauggguuagccacucaauccaaacuggaagucaaaaccacacuggaauaugcaaccaaagaaucauuaccuaugaaaauagcaccuggguaaaucaaacauaugucaauauuaacaacacuaacguuguugcuggaaaggacacaacuucagugacauuagccggcaauucaucucuuuguccuauccgugggugggcuauauacagcaaagacaacagcauaagaauugguuccaaaggagauguuuuugucauaagagaaccuuuuauaucauguucucacuuggaaugcagaaccuuuuuucugacucaaggugcucuauuaaaugacaagcauucaaaugggaccguuaaggacagaagcccuuauagggccuuaaugagcuguccuauaggugaagcuccgucuccauacaauucaagguuugaaucaguugcuuggucagcaagcgcaugucaugauggcaugggcuggcuaacaaucggaauuucugguccagaugauggagcaguggcuguacuaaaauacaacggcauaauaacugaaaccauaaaaaguuggaggaagcgaauauuaagaacacaagagucugaaugugucuguguaaacgguucauguuuuaccauaaugaccgauggcccgaguaauggaccugccucguacagaaucuucaaaaucgagaaggggaagauuacuaaaucaauagaguuggaugcacccaauucucauuacgaggaauguuccuguuacccagacaccggcacagugaugugugugugcagagacaauuggcaugguucgaaucgaccuugggugucuuuuaaucaaaaccuggauuaucaaauaggauacaucugcagugggguguucggugacaauccgcgucccaaagauggaaaaggcagcugugauccaguaacuguugauggagcagacggaguaaagggguuuucauacagguaugguaaugguguuuggauaggaaggacuaaaaguaacagcuccagaaagggauuugagaugauuugggauccuaauggauggacagauaccgauaguaauuucuuagugaaacaggauguaguggcaaugacugauuggucaggguacagcggaaguuucguucaacauccugagcuaacaggauuggacuguaugaggccuugcuucuggguugaauuaaucagaggacgaccuagagaaaagacaacaaucuggacuagugggagcagcauuucuuuuuguggcgugaauagugauacugcaaauuggucuuggccagacggugccgaguugccauucaccauugacaaguag

SEQ ID NO: 47579 - RNA, 1413 nt, Artificial Sequence
  derived and/or modified CDS sequence (wt) from neuraminidase__InfluenzaA__ABK40593
augaauccaaaucagaaaauaauaaccauuggaucaaucuguaugacaaucggaauaauuagucuaauauugcaaauaggaaauauuauuucaauauggguuagccacucaauccaaacuggaagucaaaaccacacuggaauaugcaaccaaagaaucauuaccuaugaaaauagcaccuggguaaaucaaacauaugucaauauuaacaacacuaacguuguugcuggaaaggacacaacuucagugacauuagccggcaauucaucucuuuguccuauccgugggugggcuauauacagcaaagacaacagcauaagaauugguuccaaaggagauguuuuugucauaagagaaccuuuuauaucauguucucacuuggaaugcagaaccuuuuuucugacccaaggugcucuauuaaaugacaagcauucaaaugggaccguuaaggacagaagcccuuauagggccuuaaugagcuguccuauaggugaagcuccgucuccauacaauucaagguuugaaucaguugcuuggucagcaagcgcaugucaugauggcaugggcuggcuaacaaucggaauuucugguccagaugauggagcaguggcuguacuaaaauacaacggcauaauaacugaaaccauaaaaaguuggaggaagcgaauauuaagaacacaagagucugaaugugucuguguaaacgguucauguuuuaccauaaugaccgauggcccgaguaauggaccugccucgcacagaaucuucaaaaucgagaaggggaagauuacuaaaucaauagaguuggaugcacccaauucucauuacgaggaauguuccuguuacccagacaccggcacagugaugugugugugcagagacaauuggcaugguucgaaucgaccuugggugucuuuuaaucaaaaccuggauuauaaaauaggauacaucugcagugggguguucggugacaauccgcgucccaaagauggaaaaggcagcugugauccaguaacuguugauggagcagacggaguaaagggguuuucauacagguaugguaaugguguuuggauaggaaggacuaaaaguaacagcuccagaaagggauuugagaugauuugggauccuaauggauggacagauaccgauaguaauuucuuagugaaacaggauguaguggcaaugacugauuggucaggguacagcggaaguuucguucaacauccugagcuaacaggauuggacuguaugaggccuugcuucuggguugaauuaaucagaggacgaccuagagaaaagacaacaaucuggacuagugggagcagcauuucuuuuuguggcgugaauagugauacugcaaauuggucuuggccagacggugccgaguugccauucaccauugacaaguag

SEQ ID NO: 47580 - RNA, 1413 nt, Artificial Sequence; identical to SEQ ID NO: 47075
  derived and/or modified CDS sequence (wt) from neuraminidase__InfluenzaA__ABK40604

SEQ ID NO: 47581 - RNA, 1410 nt, Artificial Sequence; identical to SEQ ID NO: 46755
  derived and/or modified CDS sequence (wt) from neuraminidase__InfluenzaA__ABK40615

SEQ ID NO: 47582 - RNA, 1410 nt, Artificial Sequence; identical to SEQ ID NO: 46181
  derived and/or modified CDS sequence (wt) from neuraminidase__InfluenzaA__ABK40626

SEQ ID NO: 47583 - RNA, 1410 nt, Artificial Sequence
  derived and/or modified CDS sequence (wt) from neuraminidase__InfluenzaA__ABK40648
augaauccaaaucaaaagauaauaacaauuggcucuguuucucucacuauugccacaauaugcuuccuuaugcaaauugccauccugguaacuacuguaacauugcauuucaagcaauaugagugcaacucccccccaaacaaccaaguaaugcugugugaaccaacaauaauagaaagaaacauaacagagauaguguaucugaccaacaccaccauagagaaagaaauaugccccaaacuggcagaauacagaaauuggucaaagccgcaauguaaaauuacaggauuugcaccuuuuucuaaggacaauucaauucggcuuuccgcugguggagacauuugggugacaagagaaccuuaugugucaugcgauccuggcaaguguuaucaauuugcccuuggacagggaacaacacuaaacaacaggcauucaaaugacacaguacaugauaggaccccuuaucgaacccuauugaugaaugaguuggguauuccauuucauuugggaaccaagcaagugugcauagcgugguccagcucaaguugucacgauggaaaagcauggcugcauguuuguguaacugggcaugaugaaaaugcaacugcuagcuucauuuacgaugggaggcuuguagauaguauugguucaugguccaaaaauauccucaggacccaggagucggaaugcguuuguaucaauggaacuuguacaguaguaaugacugauggaagugcuucagacagagcugauacuaaaauacuauucauugaagaggggaaaaucguucauauuagcccauugucaggaagugcucagcaugucgaggagugcuccuguuauccucgauauccuggugucagaugugucugcagagacaacuggaaaggcuccaauaggcccaucguagauauaaaugugaaagauuauagcauuguuuccaguuaugugugcucaggacuuguuggagacacacccagaaaaaacgacagcuccagcaguagcuauugcuggaauccuaacaaugagaaagggggucauggagugaaaggcugggccuuugaugauggaaaugacguguggaugggaagaacgaucagcgaggagucacgcucagguuaugaaaccuucaaagucauuggaggcugguccaaaccuaacuccaaauugcagauaaauaggcaagucauaguugacagagguaauagguccgguuauucugguauuuucucuguugaaggcaaaagcugcaucaaucggugcuuuuauguggaguugauaaggggaaggaaacaggaaacugaagucugguggaccucaaacaguauuguuguguuuuguggcaccucagguacauauggaacaggcucauggccugauggggcggacaucaaucucaugccuauauaa

SEQ ID NO: 47584 - RNA, 1410 nt, Artificial Sequence
  derived and/or modified CDS sequence (wt) from neuraminidase__InfluenzaA__ABK40659
augaauccaaaucaaaagauaauaacaauuggcucuguuucucucacuauugccacaauaugcuuccuuaugcaaauugccauccugguaacuacuguaacauugcauuucaagcaauaugagugcaacucccccccaaacaaccaaguaaugcugugugaaccaacaauaauagaaagaaacauaacagagauaguguaucugaccaacaccaccauagagaaagaaauaugccccaaacuggcagaauacagaaauuggucaaagccgcaauguaaaauuacaggauuugcaccuuuuucuaaggacaauucaauucggcuuuccgcugguggagacauuugggugacaagagaaccuuaugugucaugcgauccuggcaaguguuaucaauuugcccuuggacagggaacaacacuaaacaacaggcauucaaaugacacaguacaugauaggaccccuuaucgaacccuauugaugaaugaguuggguguuccauuucauuugggaaccaagcaagugugcauagcgugguccagcucaaguugucacgauggaaaagcauggcugcauguuuguguaacugggcaugaugaaaaugcaacugcuagcuucauuuacgaugggaggcuuguagauaguauugguucaugguccaaaaauauccucaggacccaggagucggaaugcguuuguaucaauggaacuuguacaguaguaaugacugauggaagugcuucagacagagcugauacuaaaauacuauucauugaagaggggaaaaucguucauauuagcccauugucaggaagugcucagcaugucgaggagugcuccuguuauccucgauauccuggugucagaugugucugcagagacaacuggaaaggcucaaauaggcccaucguagauauaaaugugaaagauuauagcauuguuuccaguuaugugugcucaggacuuguuggagacacacccagaaaaaacgacagcuccagcaguagcuauugcuggaauccuaacaaugagaaagggggucauggagugaaaggcugggccuuugaugauggaaaugacguguggaugggaagaacgaucagcgaggagucacgcucagguuaugaaaccuucaaagucauuggaggcugguccaaaccuaacuccaaauugcagauaaauaggcaagucauaguugacagagguaauagguccgguuauucugguauuuucucuguugaaggcaaaagcugcaucaaucggugcuuuuauguggaguugauaaggggaaggaaacaggaaacugaagucugguggaccucaaacaguauuguuguguuuuguggcaccucagguacauauggaacaggcucauggccugauggggcggacaucaaucucaugccuauauaa

SEQ ID NO: 47585 - RNA, 1410 nt, Artificial Sequence; identical to SEQ ID NO: 47174
  derived and/or modified CDS sequence (wt) from neuraminidase__InfluenzaA__ABK40681

SEQ ID NO: 47586 - RNA, 1413 nt, Artificial Sequence
  derived and/or modified CDS sequence (wt) from neuraminidase__InfluenzaA__ABK40692
augaauccaaaucaaaaaauaauaaccauuggaucaaucaguauagcaaucggaauaauuagucuaauguugcaaauaggaaauauuauuucaauaugggcuagucacucaauccaaacuggaagucaaaaccacacuggaauaugcaaccaaagaaucaucacauaugaaaacagcaccugggugaaucacacauauguuaauauuaacaacacuaauguuguugcuggaaaggacaaaacuucagugacauuggccggcaauucaucucuuuguucuaucaguggaugggcuauauacacaaaagacaacagcauaagaauuggcuccaagggagauguuuuugucauaagagaaccuuucauaucauguucucacuuggaaugcagaaccuuuuuucugacccaaggugcucuauuaaaugacaaacauucaaauggaaccguuaaggacagaaguccuuauagggccuuaaugagcuguccucuaggugaagcuccguccccauacaauucaaaguuugaaucaguugcauggucagcaagcgcaugccaugauggcaugggcugguuaacaaucggaauuucugguccagacaauggagcuguggcuguacuaaaauacaacggaauaauaacugaaaccauaaaaaguugggaaaagcgaauauugagaacacaagagucugaaugugucugugugaacgggucauguuucaccauaaugaccgauggcccaaguaauggggccgccucguacaaaaucuucaagaucgaaaagggaaagguuacuaaaucaguagaguuaaaugcacccaauuuucauuaugaggaauguuccuguuacccagacacuggcacaguaauguguguaugcagggacaacuggcaugguucaaaucgaccuugggugucuuuuaaucaaaacuuggauuaucaaauaggauacaucugcaguggaguguucggugacaauccgcgccccaaagauggaaagggcagcuguaauccagugacuguugauggagcagacggaguuaagggguuuucauacaaauaugguaaugguguuuggauaggaaggacuaaaaguaacagacuuagaaaggguuuugagaugauuugggauccuaauggauggacagauaccgacagugauuucucagugaaacaggauguuguggcaauaacugauuggucaggguacagcggaaguuucguucaacauccugaguugacaggauuggacuguauaagaccuugcuucuggguugaguuagucagaggacugccuagagaaaauacaacaaucuggacuagugggagcagcauuucuuuuuguggcguugauagugauacugcaaacuggucuuggccagacggugcugaguugccguucaccauugacaaguag

SEQ ID NO: 47587 - RNA, 1410 nt, Artificial Sequence
  derived and/or modified CDS sequence (wt) from neuraminidase__InfluenzaA__ABK40703
augaauccaaaucaaaagauaauaacgauuggcucuguuucucucaccauugccacaauaugcuuccuuaugcaaauugccauccugguaacuacuguaacguugcauuucaagcaauaugaaugcaacucccccccaaacaaccaagugaugcugugugaaccaacaauaauagaaagaaacauaacagagauaguguaucugaccaacaccaccauagagaaggaaauaugccccaaacuagcagaauacagaaauuggucaaagccgcaauguaacauuacaggauuugcaccuuuuucuaaggacaauucgauucggcuuuccgcugguggggacaucugggugacaagagaaccuuaugugucaugcgauccugacaaguguuaucaauuugcccuuggacaggggacaacacuaaacaacgggcauucaaaugacacaguacaugauaggaccccuuaucgaacccuauugaugaaugaguuggguguuccauuucauuugggaaccaagcaagugugcauagcaugguccagcucaaguugucacgauggaaaagcauggcugcauguuuguguaacgggggaugaugaaaaugcaacugcuagcuucauuuacaaugggaggcuuguagauaguaucgguucaugguccaaaaaaauccucaggacccaggagucggaaugcguuuguaucaauggaacuuguacaguaguaaugacugaugggagugcuucaggaaaagcugauacuaaaauacuauucauugaggaggggaaaaucguucauacuagcucauugucaggaagugcucagcaugucgaggagugcuccuguuauccucgauauccuggugucagaugugucugcagagacaacuggaaaggcuccaauaggcccaucguagauauaaauguaaaggauuauagcauuguuuccaguuaugugugcucaggacuuguuggagacacacccagaaaaaacgacagcuccagcaguagccauugcuuggauccuaacaaugaggaagguggucauggagugaaaggcugggccuuugaugauggaaaugacguguggaugggaagaacgaucagcgagaaguuacgcucaggauaugaaaccuucaaagucauugaaggcugguccaaaccuaacuccaaauugcagauaaauaggcaagucauaguugacagagguaauagguccgguuauucugguauuuucucuguugaaagcaaaagcugcaucaauaggugcuuuuauguggaguugauaaggggaaggaaacaggaaacugaagucuuguggaccucaaacaguauuguuguguuuuguggcaccucagguacauauggaacaggcucauggccugauggggcggacaucaaucucaugccuauauaa

SEQ ID NO: 47588 - RNA, 1410 nt, Artificial Sequence; identical to SEQ ID NO: 46755
  derived and/or modified CDS sequence (wt) from neuraminidase__InfluenzaA__ABK40714

SEQ ID NO: 47589 - RNA, 1410 nt, Artificial Sequence
  derived and/or modified CDS sequence (wt) from neuraminidase__InfluenzaA__ABK40725
augaauccaaaucaaaagauaauaacgauuggcucuguuucucucaccauugccacaauaugcuuccuuaugcaaauugccauccugguaacuacuguaacguugcauuucaagcaauaugaaugcaacucccccccaaacaaccaagugaugcugugugaaccaacaauaauagaaagaaacauaacagagauaguguaucugaccaacaccaccauagagaaggaaauaugccccaaacuagcagaauacagaaauuggucaaagccgcaauguaacauuacaggauuugcaccuuuuucuaaggacaauucgauucggcuuuccgcugguggggacaucugggugacaagagaaccuuaugugucaugcgauccugacaaguguuaucaauuugcccuuggacagggaacaacacuaaacaacgggcauucaaaugacacaguacaugauaggaccccuuaucgaacccuauugaugaaugaguuggguguuccauuucauuugggaaccaagcaagugugcauagcaugguccagcucaaguugucacgauggaaaagcauggcugcauguuuguguaacgggggaugaugaaaaugcaacugcuagcuucauuuacaaugggaggcuuguagauaguaucgguucaugguccaaaaaaauccucaggacccaggagucggaaugcguuuguaucaauggaacuuguacaguaguaaugacugaugggagugcuucaggaaaagcugauacuaaaauacuauucauugaggagggaaaaaucguucauacuagcucauugucaggaagugcucagcaugucgaggagugcuccuguuauccucgauauccuggugucagaugugucugcagagacaacuggaaaggcuccaauaggcccaucguagauauaaauguaaaggauuauagcauuguuuccaguuaugugugcucaggacuuguuggagacacacccagaaaaaacgacagcuccagcaguagccauugcuuggauccuaacaaugaggaagguggucauggagugaaaggcugggccuuugaugauggaaaugacguguggaugggaagaacgaucagcgagaaguuacgcucaggauaugaaaccuucaaagucauugaaggcugguccaaaccuaacuccaaauugcagauaaauaggcaagucauaguugacagagguaauagguccgguuauucugguauuuucucuguugaaagcaaaagcugcaucaauaggugcuuuuauguggaguugauaaggggaaggaaacaggaaacugaagucuuguggaccucaaacaguauuguuguguuuuguggcaccucagguacauauggaacaggcucauggccugauggggcggacaucaaucucaugccuauauaa

SEQ ID NO: 47590 - RNA, 1410 nt, Artificial Sequence; identical to SEQ ID NO: 46755
  derived and/or modified CDS sequence (wt) from neuraminidase__InfluenzaA__ABK40736

SEQ ID NO: 47591 - RNA, 1410 nt, Artificial Sequence; identical to SEQ ID NO: 47457
  derived and/or modified CDS sequence (wt) from neuraminidase__InfluenzaA__ABK40747

SEQ ID NO: 47592 - RNA, 1413 nt, Artificial Sequence; identical to SEQ ID NO: 46963
  derived and/or modified CDS sequence (wt) from neuraminidase__InfluenzaA__ABK79951

SEQ ID NO: 47593 - RNA, 1413 nt, Artificial Sequence; identical to SEQ ID NO: 47570
  derived and/or modified CDS sequence (wt) from neuraminidase__InfluenzaA__ABK79973

SEQ ID NO: 47594 - RNA, 1410 nt, Artificial Sequence; identical to SEQ ID NO: 46755
  derived and/or modified CDS sequence (wt) from neuraminidase__InfluenzaA__ABK79984

SEQ ID NO: 47595 - RNA, 1410 nt, Artificial Sequence; identical to SEQ ID NO: 47552
  derived and/or modified CDS sequence (wt) from neuraminidase__InfluenzaA__ABK79995

SEQ ID NO: 47596 - RNA, 1413 nt, Artificial Sequence; identical to SEQ ID NO: 47071
  derived and/or modified CDS sequence (wt) from neuraminidase__InfluenzaA__ABK80028

SEQ ID NO: 47597 - RNA, 1413 nt, Artificial Sequence; identical to SEQ ID NO: 47071
  derived and/or modified CDS sequence (wt) from neuraminidase__InfluenzaA__ABK80039

SEQ ID NO: 47598 - RNA, 1413 nt, Artificial Sequence; identical to SEQ ID NO: 47071
  derived and/or modified CDS sequence (wt) from neuraminidase__InfluenzaA__ABK80050

SEQ ID NO: 47599 - RNA, 1410 nt, Artificial Sequence
  derived and/or modified CDS sequence (wt) from neuraminidase__InfluenzaA__ABK80061
augaauccaaaucaaaagauaauaacgauuggcucuguuucucucaccauugccacaauaugcuuccuuaugcaaauugccauccugguaacuacuguaacauugcauuucaagcaauaugaaugcaacucccccccaaacaaccaagugaugcugugugaaccaacaauaauagaaagaaacauaacagagauaguauaucugaccaacaccaccauagagaaggaaauaugccccaaacuagcagaauacagaaauuggucaaagccgcaauguaacauuacaggauuugcaccuuuuucuaaggacaauucgauucggcuuuccgcugguggggacaucugggugacaagagaaccuuaugugucaugcgauccugacaaguguuaucaauuugcccuuggacagggaacaacacuaaacaacgggcauucaaaugacacaguacaugauaggaccccuuaucgaacccuauugaugaaugaguuggguguuccauuucauuugggaaccaagcaagugugcauagcaugguccagcucaaguugucacgauggaaaagcauggcugcauguuuguguaacgggggaugaugaaaaugcaacugcuagcuucauuuacaaugggaggcuuguagauaguauugguucaugguccaaaaaaauccucaggacccaggagucggaaugcguuuguaucaauggaacuuguacaguaguaaugacugaugggagugcuucaggaaaagcugauacuaaaauucuauucauugaggaggggaaaaucguucauacuagcucauugucaggaagugcucagcaugucgaggagugcuccuguuauccucgauauccuggugucagaugugucugcagagacaacuggaaaggcuccaauaggcccaucguagauauaaauguaaaggauuauagcauuguuuccaguuaugugugcucaggacuuguuggagacacacccagaaaaaacgacagcuccagcaguagccauugcuuggauccuaacaaugaggaagguggucauggagugaaaggcugggccuuugaugauggaaaugacguguggaugggaagaacgaucagcgagaagucacgcucaggauaugaaaccuucaaagucauugaaggcugguccaaaccuaacuccaaauugcagauaaauaggcaagucauaguugacagaggcaauagguccgguuauucugguauuuucucuguugaaggcaaaagcugcaucaaucggugcuuuuauguggaguugauaaggggaaggaaacaggaaacugaagucuuguggaccucaaacaguauuguuguguuuuguggcaccucagguacauauggaacaggcucauggccugauggggcggacaucaaucucaugccuauauaa

SEQ ID NO: 47600 - RNA, 1410 nt, Artificial Sequence; identical to SEQ ID NO: 46181
  derived and/or modified CDS sequence (wt) from neuraminidase__InfluenzaA__ABK80072

SEQ ID NO: 47601 - RNA, 1410 nt, Artificial Sequence
  derived and/or modified CDS sequence (wt) from neuraminidase__InfluenzaA__ABK80083
augaauccaaaucaaaagauaauaacgauuggcucaguuucucucaccauugccacaauaugcuuccuuaugcaaauugccauccugguaacuacuguaacauugcauuucaagcaauaugaaugcagcucccccccaaacaaccaagugaugcugugugaaccaacaauaauagaaagaaacauaacagagauaguguaucugaccaacaccaccauagagaaggaaauaugccccaaacuagcagaauacagaaauuggucaaagccgcaauguaacauuacaggauuugcaccuuuuucuaaggacaauucgauucggcuuuccgcugguggggacaucugggugacaagagaaccuuaugugucaugcgauccugacaaguguuaucaauuugcccuuggacagggaacaacacuaaacaacggacauucaaaugacacaguacaugauaggaccccuuaucggacccuauugaugaaugaguuggguguuccauuucauuugggaaccaagcaagugugcauagcaugguccagcucaaguugucacgauggaaaagcauggcugcauguuuguguaacgggggaugaugaaaaugcaacugcuagcuucauuuacaaugggaggcuuguagauaguauugguucaugguccaaaaaaauccucaggacccaggagucggaaugcguuuguaucaauggaacuuguacaguaguaaugacugaugggagugcuucaggaaaagcugauacuaaaauacuauucauugaggaagggaaaaucguucauacuagccuauugucaggaagugcucagcaugucgaggagugcuccuguuauccucgauacccuggugucagaugugucugcagagacaacuggaaaggcuccaauaggcccaucguagauauaaauguaaaggauuauagcauuguuuccaguuaugugugcucaggacuuguuggagacacacccagaaaaaacgacagcuccagcaguagccauugcuuggauccuaacaaugaggaagguggucauggagugaaaggcugggccuuugaugauggaaaugacguguggaugggaagaacgaucagcgagaaguuacgcucaggauaugaaaccuucaaagucauugaaggcugguccaaaccuaacuccaaauugcagauaaauaggcaagucauaguugacagagguaauagguccgguuauucugguauuuucucuguugaaggcaaaagcugcaucaaucggugcuuuuauguggaguugauaaggggaaggaaacaggaaacugaagucuuguggaccucaaacaguauuguuguguuuuguggcaccucagguacauauggaacaggcucauggccugauggggcggacaucaaucucaugccuauauaa

SEQ ID NO: 47602 - RNA, 1410 nt, Artificial Sequence
  derived and/or modified CDS sequence (wt) from neuraminidase__InfluenzaA__ABK80094
augaauccaaaucaaaagauaauaacgauuggcucuguuucucucaucauugccacaauaugcuuccuuaugcaaauugccauccugguaacuacuguaacguugcauuucaagcaauaugaaugcaacucccccccaaacaaccaagugaugcugugugaaccaacaauaauagaaagaaacauaacagagauaguguaucugaccaacaccaccauagagaaggaaauaugccccaaacuagcagaauacagaaauuggucaaagccgcaauguaacauuacaggauuugcaccuuuuucuaaggacaauucgauucggcuuuccgcugguggggacaucugggugacaagagaaccuuaugugucaugcgauccugacaaguguuaucaauuugcccuuggacagggaacaacacuaaacaacgggcauucaaaugacacaguacaugauaggaccccuuaucgaacccuauugaugaaugaguuggguguuccauuucauuugggaaccaagcaagugugcauagcaugguccagcucaaguugucacgauggaaaagcauggcugcauguuuguguaacgggggaugaugaaaaugcaacugcuagcuucauuuacaaugggaggcuuguagauaguaucgguucaugguccaaaaaaauccucaggacccaggagucggaaugcguuuguaucaauggaacuuguacaguaguaaugacugaugggagugcuucaggaaaagcugauacuaaaauacuauucauugaggaggggaaaaucguucauacuagcucauugucaggaagugcucagcaugucgaggagugcuccuguuauccucgauauccuggugucagaugugucugcagagacaacuggaaaggcuccaauaggcccaucguagauauaaauguaaaggauuauagcauuguuuccaguuaugugugcucaggacuuguuggagacacacccagaaaaaacgacagcuccagcaguagccauugcuuggauccuaacaaugaggaagguggucauggagugaaaggcugggccuuugaugauggaaaugacguguggaugggaagaacgaucagcgagaaguuacgcucaggauaugaaaccuucaaagucauugaaggcugguccaaaccuaacuccaaauugcagauaaauaggcaagucauaguugacagagguaauagguccgguuauucugguauuuucucuguugaaagcaaaagcugcaucaauaggugcuuuuauguggaguugauaaggggaaggaaacaggaaacugaagucuuguggaccucaaacaguauuguuguguuuuguggcaccucagguacauauggaacaggcucauggccugauggggcggacaucaaucucaugccuauauaa

SEQ ID NO: 47603 - RNA, 1410 nt, Artificial Sequence; identical to SEQ ID NO: 46755
  derived and/or modified CDS sequence (wt) from neuraminidase__InfluenzaA__ABK80105

SEQ ID NO: 47604 - RNA, 1410 nt, Artificial Sequence
  derived and/or modified CDS sequence (wt) from neuraminidase__InfluenzaA__ABK80138
augaauccaaaucaaaagauaauaacaauuggcucuguuucucucaccauugccacaauaugcuuccuuaugcaaacugccauccugguaacuacuguaacauugcauuucaagcaguaugaaugcaacucccccccaaacaaccaaguaaugcugugugaaccaacaauaauagaaagaaacauaacagagauaguguaucugaccaacaccaccauagagaaggaaauaugccccaaacuagcagaauacagaaauuggucaaagccgcaauguaacauuacaggauuugcaccuuuuucuaaggacaauucgauucggcuuuccgcugguggggacaucugggugacaagagaaccuuaugugucaugcgauccugacaaguguuaucaauuugcccuugggcagggaacaacacuaaacaacgggcauucaaaugacacaguacaugauaggaccccuuaccggacccuauugaugaaugaauuggguguuccauuucauuugggaaccaggcaagugugcauagcaugguccagcucaaguugucacgauggaaaagcauggcugcauguuuguguaacuggggaugaugaaaaugcaacugcuagcuucauuuacaaugggaggcuuguagauaguauugguucaugguccaaaaaaauacucagaacccaggagucggaaugcguuuguaucaauggaacuuguacaguaguaaugacugaugggagcgcuucaggaaaagcugauacuaaaauacuauucauugaggaggggaaaaucguucauauuagcacauugucaggaagugcucagcaugucgaggagugcuccuguuauccucgauauccuggugucagaugugucugcagagacaacuggaaaggcuccaauaggcccaucguagauauaaauguaaaggauuauagcauuguuuccaguuaugugugcucaggacuuguuggagacacacccagaaaaaacgacagcuucagcaguagccauugccuagauccuaacaaugaggaagguggucauggagugaaaggcugggccuuugaugauggaaaugacguguggaugggaagaacgaucagcgagaaguuacgcucagguuaugaaaccuucaaagucaucgaaggcugguccaaaccuaacuccaaauuacagauaaauaggcaagucauaguugaaagagguaacagguccgguuauucugguauuuucuccguugaaggcaaaagcugcaucaaucggugcuuuuauguggaguugauaaggggaaggaaagaggaaacugaagucugguggaccucaaacaguauuguuguguuuuguggcaccucagguacauauggaacaggcucauggccugauggggcggauaucaaucucaugccuauauaa

SEQ ID NO: 47605 - RNA, 1410 nt, Artificial Sequence
  derived and/or modified CDS sequence (wt) from neuraminidase__InfluenzaA__ABK80149
augaauccaaaucaaaagauaauaacaauuggcucuguuucucucaccauugccacaauaugcuuccuuaugcaaauugccauccugguaacuacuguaacauugcauuucaagcaguaugaaugcaacucccccccaaacaaccaagcaaugcuguaugaaccaacaauaauagaaagaaacauaacagagauaguguaucugaccaacaccaccauagagaaggaaauaugccccaaacuagcagaauacagaaauuggucaaagccgcaauguaacauuacaggauuugcaccuuuuucuaaggacaauucgauucggcuuuccgcugguggggacaucugggugacaagagaaccuuaugugucaugcgauccugacaaguguuaucaauuugcccuugggcagggaacaacacuaaacaacgggcauucaaaugacacaguacaugauaggaccccuuaccggacccuauugaugaaugaauuggguguuccauuucauuugggaaccaggcaagugugcauagcaugguccagcucaaguugucacgauggaaaagcauggcugcauguuuguguaacuggggaugaugaaaaugcaacugcuagcuucauuuacaaugggaggcuuguagauaguauugguucaugguccaaaaaaauacucagaacccaggagucggaaugcguuuguaucaauggaacuuguacaguaguaaugacugaugggagcgcuucaggaaaagcugauacuaaaauacuauucauugaggaggggaaaaucguucauauuagcacauugucaggaagugcucagcaugucgaggagugcuccuguuauccucgauauccuggugucagaugugucugcagagacaacuggaaaggcuccaauaggcccaucguagauauaaauguaaaggauuauagcauuguuuccaguuaugugugcucaggacuuguuggagacacacccagaaaaaacgacagcuucagcaguagccauugccuagauccuaacaaugaggaagguggucauggagugaaaggcugggccuuugaugauggaaaugacguguggaugggaagaacgaucagcgagaaguuacgcucagguuaugaaaccuucaaagucaucgaaggcugguccaaaccuaacuccaaauuacagauaaauaggcaagucauaguugaaagagguaacagguccgguuauucugguauuuucuccguugaaggcaaaagcugcaucaaucggugcuuuuauguggaguugauaaggggaaggaaagaggaaacugaagucugguggaccucaaacaguauuguuguguuuuguggcaccucagguacauauggaacaggcucauggccugauggggcggauaucaaucucaugccuauauaa

SEQ ID NO: 47606 - RNA, 1410 nt, Artificial Sequence; identical to SEQ ID NO: 47605
  derived and/or modified CDS sequence (wt) from neuraminidase__InfluenzaA__ABK80160

SEQ ID NO: 47607 - RNA, 1410 nt, Artificial Sequence
  derived and/or modified CDS sequence (wt) from neuraminidase__InfluenzaA__ABK80171
augaauccaaaucaaaagauaauaacaauuggcucuguuucucucaccauugccacaauaugcuuccuuaugcaaauugccauccugguaacuacuguaacauugcauuucaagcaguaugaaugcaacccccccccaaacaaccaaguaaugcugugugaaccaacaauaauagaaagaaacauaacagagauaguguaucugaccaacaccaccauagagaaggaaauaugccccaaauuagcagaauacagaaauuggucaaagccgcaauguaacauuacaggauuugcaccuuuuucuaaggacaauucgauucggcuuuccgcugguggggacaucugggugacaagagaaccuuaugugucaugcgauccugacaaguguuaucaauuugcccuugggcagggaacaacacuaaacaacgggcauucaaaugacacaguacaugauaggaccccuuaccggacccuauugaugaaugaauuggguguuccauuucauuugggaaccaggcaagugugcauagcaugguccagcucaaguugucacgauggaaaagcauggcugcauguuuguguaacuggggaugaugaaaaugcaacugcuagcuucauuuacaaugggaggcuuguagauaguauugguucaugguccaaaaaaauacucagaacccaggagucggaaugcguuuguaucaauggaacuuguacaguaguaaugacugaugggagcgcuucaggaaaagcugauacuaaaauacuauucauugaggaggggaaaaucguucauauuagcacauugucaggaagugcucagcaugucgaggagugcuccuguuauccucgauauccuggugucagaugugucugcagagacaacuggaaaggcuccaauaggcccaucguagauauaaauguaaaggauuauagcauuuuuuccaguuaugugugcucaggacuuguuggagacacacccagaaaaaacgacagcuucagcaguagccauugccuagauccuaacaaugaggaagguggucauggagugaaaggcugggccuuugaugauggaaaugacguguggaugggaagaacgaucagcgagaaguuacgcucagguuaugaaaccuucaaagucaucgaaggcugguccaaaccuaacuccaaauuacagacaaauaggcaagucauaguugaaagagguaacagguccgguuauucugguauuuucuccguugaaggcaaaagcugcaucaaucggugcuuuuauguggaguugauaaggggaaggaaagaggaaacugaagucugguggaccucaaacaguauuguuguguuuuguggcaccucagguacauauggaacaggcucauggccugauggggcggauaucaaucucaugccuauauaa

SEQ ID NO: 47608 - RNA, 1410 nt, Artificial Sequence
  derived and/or modified CDS sequence (wt) from neuraminidase__InfluenzaA__ABK80182
augaauccaaaucaaaagauaauaacaauuggcucuguuucucucaccauugccacaauaugcuuccuuaugcaaauugccauccugguaacuacuguaacauugcauuucaagcaguaugaaugcaacucccccccaaacaaccaaguaaugcugugugaaccaacaauaauagaaagaaacauaacagagauaguguaucugaccaacaccaccauagagaaggaaauaugccccaaauuagcagaauacagaaauuggucaaagccgcaauguaacauuacaggauuugcaccuuuuucuaaggacaauucgauucggcuuuccgcugguggggacaucugggugacaagagaaccuuaugugucaugcgauccugacaaguguuaucaauuugcccuugggcagggaacaacacuaaacaacgggcauucaaaugacacaguacaugauaggaccccuuaccggacccuauugaugaaugaauuggguguuccauuucauuugggaaccaggcaagugugcauagcaugguccagcucaaguugucacgaugggaaagcauggcugcauguuuguguaacuggggaugauaaaaaugcaacugcuagcuucauuuacaaugggaagcuuguagauaguauugguucaugguccaaaaaaauacucagaacccaggagucggaaugcguuuguaucaauggaacuugugcaguaguaaugacugaugggagcgcuucaggaaaagcugauacuaaaauacuauucauugaggaggggaaaaucguucauauuagcacauugucaggaagugcucagcaugucgaggagugcuccuguuauccucgauauccuggugucagaugugucugcagagacaacuggaaaggcuccaauaggcccaucguagauauaaauguaaaggauuauagcauuguuuccaguuaugugugcucaggacuuguuggagacacacccagaaaaaacgacagcuucagcaguagccauugccuagauccuaacaaugaggaagguggucauggagugaaaggcugggccuuugaugauggaaaugacguguggaugggaagaacgaucagcgagaaguuacgcucagguuaugaaaccuucaaagucaucgaaggcugguccaaaccuaacuccaaauuacagacaaauaggcaagucauaguugaaagagguaacagguccgguuauucugguauuuucuccguugaaggcaaaagcugcaucaaucggugcuuuuauguggaguugauaaggggaaggaaagaggaaacugaagucugguggaccucaaacaguauuguuguguuuuguggcaccucagguacauauggaacaggcucauggccugauggggcggauaucaaucucaugccuauauaa

SEQ ID NO: 47609 - RNA, 1410 nt, Artificial Sequence
  derived and/or modified CDS sequence (wt) from neuraminidase__InfluenzaA__ABK80193
augaauccaaaucaaaagauaauaacaauuggcucuguuucucucaccauugccacaauaugcuuccuuaugcaaauugccauccugguaacuacuguaacauugcauuucaagcaguaugaaugcaacucccccccaaacaaccaaguaaugcugugugaaccaacaauaauagaaagaaacauaacagagauaguguaucugaccaacaccaccauagagaaggaaauaugccccaaauuagcagaauacagaaauuggucaaagccgcaauguaacauuacaggauuugcaccuuuuucuaaggacaauucgauucggcuuuccgcugguggggacaucugggugacaagagaaccuuaugugucaugcgauccugacaaguguuaucaauuugcccuugggcagggaacaacacuaaacaacgggcauucaaaugacacaguacaugauaggaccccuuaccggacccuauugaugaaugaauuggguguuccauuucauuugggaaccaggcaagugugcauagcaugguccagcucaaguugucacgauggaaaagcauggcugcauguuuguguaacuggggaugaugaaaaugcaacugcuagcuucauuuacaaugggaggcuuguagauaguauugguucaugguccaaaaaaauacucagaacccaggagucggaaugcguuuguaucaauggaacuuguacaguaguaaugacugaugggagcgcuucaggaaaagcugauacuaaaauacuauucauugaggaggggaaaaucguucauauuagcacauugucaggaagugcucagcaugucgaggagugcuccuguuauccucgauauccuggugucagaugugucugcagagacaacuggaaaggcuccaauaggcccaucguagauauaaauguaaaggauuauagcauuguuuccaguuaugugugcucaggacuuguuggagacacacccagaaaaaacgacagcuucagcaguagccauugccuagauccuaacaaugaggaagguggucauggagugaaaggcugggccuuugaugauggaaaugacguguggaugggaagaacgaucggcgagaaguuacgcucagguuaugaaaccuucaaagucaucgaaggcugguccaaaccuaacuccaaauuacagacaaauaggcaagucauaguugaaagagguaacagguccgguuauucugguauuuucuccguugaaggcaaaagcugcaucaaucggugcuuuuauguggaguugauaaggggaaggaaagaggaaacugaagucugguggaccucaaacaguauuguuguguuuuguggcaccucagguacauauggaacaggcucauggccugauggggcggauaucaaucucaugccuauauaa

SEQ ID NO: 47610 - RNA, 1410 nt, Artificial Sequence
  derived and/or modified CDS sequence (wt) from neuraminidase__InfluenzaA__ABK80204
augaauccaaaucaaaagauaauaacaauuggcucuguuucucucaccauugccacaauaugcuuccuuaugcaaauugccauccugguaacuacuguaacauugcauuucaagcaguaugaaugcaacucccccccaaacaaccaaguaaugcugugugaaccaacaauaauagaaagaaacauaacagagauaguguaucugaccaacaccaccauagagaaggaaauaugccccaaauuagcagaauacagaaauuggucaaagccgcaauguaacauuacaggauuugcaccuuuuucuaaggacaauucgauucggcuuuccgcugguggggacaucugggugacaagagaaccuuaugugucaugcgauccugacaaguguuaucaauuugcccuugggcagggaacaacacuaaacaacgggcauucaaacgacacaguacaugauaggaccccuuaccggacccuauugaugaaugaauuggguguuccauuucauuugggaaccaggcaagugugcauagcaugguccagcucaaguugucacgauggaaaagcauggcugcauguuuguguaacuggggaugaugaaaaugcaacugcuagcuucauuuacaaugggaagcuuguagauaguauugguucaugguccaaaaaaauacucagaacccaggagucggaaugcguuuguaucaauggaacuugugcaguaguaaugacugaugggagcgcuucaggaaaagcugauacuaaaauacuauucauugaggaggggaaaaucguucauauuagcacauugucaggaagugcucagcaugucgaggagugcuccuguuauccucgauauccuggugucagaugugucugcagagacaacuggaaaggcuccaauaggcccaucguagauauaaauguaaaggauuauagcauuguuuccaguuaugugugcucaggacuuguuggagacacacccagaaaaaacgacagcuucagcaguagccauugccuagauccuaacaaugaggaagguggucauggagugaaaggcugggccuuugaugauggaaaugacgcguggaugggaagaacgaucagcgagaaguuacgcucagguuaugaaaccuucaaagucaucgaaggcugguccaaaccuaacuccaaauuacagacaaauaggcaagucauaguugaaagagguaacagguccgguuauucugguauuuucuccguugaaggcaaaagcugcaucaaucggugcuuuuauguggaguugauaaggggaaggaaagaggaaacugaagucugguggaccucaaacaguauuguuguguuuuguggcaccucagguacauauggaacaggcucauggccugauggggcggauaucaaucucaugccuauauaa

SEQ ID NO: 47611 - RNA, 1410 nt, Artificial Sequence; identical to SEQ ID NO: 46603
  derived and/or modified CDS sequence (wt) from neuraminidase__InfluenzaA__ABK80215

SEQ ID NO: 47612 - RNA, 1410 nt, Artificial Sequence
  derived and/or modified CDS sequence (wt) from neuraminidase__InfluenzaA__ABK80226
augaauccaaaucaaaagauaauaacaauuggcucuguuucucucaccauugccacaauaugcuuccuuaugcaaauugccauccugguaacuacuguaacauugcauuucaagcagcaugaaugcaacucccccccaaacaaccaaguaaugcugugugaaccaacaauaauagaaagaaacauaacagagauaguguaucugaccaacaccaccauagagaaggaaauaugccccaaacuaguagaauacagaaauuggucaaagccgcaauguaacauuacaggauuugcaccuuuuucuaaggacaauucgauucggcuuuccgcugguggggacaucugggugacaagagaaccuuaugugucaugcgauccugacaaguguuaucaauuugcccuugggcagggaacaacacuaaacaacgggcauucaaaugacacaguacaugauaggaccccuuaccggacccuauugaugaaugaauuggguguuccauuucauuugggaaccaggcaagugugcauagcaugguccagcucaaguugucacgauggaaaagcauggcugcauguuuguguaacuggggaugauaaaaaugcaacugcuagcuucauuuacaaugggaggcuuguagauaguauugguucaugguccaaaaaaauacucagaacccaggagucggaaugcguuuguaucaauggaacuuguacaguaguaaugacugaugggagcgcuucaggaaaagcugauacuaaaauacuauucauugaggaggggaaaaucguucauauuagcacauugucaggaagugcucagcaugucgaggagugcuccuguuauccucgauauccuggugucagaugugucugcagagacaacuggaaaggcuccaauaggcccauuguagauauaaauguaaaggauuauagcauuguuuccaguuaugugugcucaggacuuguuggagacacacccagaaaaaacgacagcuucagcaguagccauugccuagauccuaacaaugaggaagguggucauggagugaaaggcugggccuuugaugauggaaaugacguguggaugggaagaacgaucagcgagaaguuacgcucagguuaugaaaccuucaaagucaucgaaggcugguccaaaccuaacuccaaauuacagauaaauagacaaguuauaguugaaagagguaacagguccgguuauucugguauuuucuccguugaaggcaaaagcugcaucaaucggugcuuuuauguggaguugauaaggggaaggaaagaggaaacugaagucugguggaccucaaacaguauuguuguguuuuguggcaccucagguacauauggaacaggcucauggccugauggggcggauaucaaucucaugccuauauaa

SEQ ID NO: 47613 - RNA, 1410 nt, Artificial Sequence
  derived and/or modified CDS sequence (wt) from neuraminidase__InfluenzaA__ABK80237
augaauccaaaucaaaagauaauaacaauuggcucuguuucucucaccauugccacaauaugcuuccuuaugcaaauugccauccugguaacuacuguaacauugcauuucaagcagcaugaaugcaacucccccccaaacaaccaaguaaugcugugugaaccaacaauaauagaaagaaacauaacagagauaguguaucugaccaacaccaccauagagaaggaaauaugccccaaacuaguagaauacagaaauuggucaaagccgcaauguaacauuacaggauuugcaccuuuuucuaaggacaauucgauucggcuuuccgcugguggggacaucugggugacaagagaaccuuaugugucaugcgauccugacaaguguuaucaauuugcccuugggcagggaacaacacuaaacaacgggcauucaaaugacacaguacaugauaggaccccuuaccggacccuauugaugaaugaauuggguguuccauuucauuugggaaccaggcaagugugcauagcaugguccagcucaaguugucacgauggaaaagcauggcugcauguuuguguaacuggggaugauaaaaaugcaacugcuagcuucauuuacaaugggaggcuuguagauaguauugguucaugguccaaaaaaauacucagaacccaggagucggaaugcguuuguaucaauggaacuuguacaguaguaaugacugaugggagcgcuucaggaaaagcugauacuaaaauacuauucauugaggaggggaaaaucguucauauuagcacauugucaggaagugcucagcaugucgaggagugcuccuguuauccucgauauccuggugucagaugugucugcagagacaacuggaaaggcuccaauaggcccauuguagauauaaauguaaaggauuauagcauuguuucaaguuaugugugcucaggacuuguuggagacacacccagaaaaaccgacagcuucagcaguagccauugccuagauccuaacaaugaggaagguggucauggagugaaaggcugggccuuugaugauggaaaugacguguggaugggaagaacgaucagcgagaaguuacgcucagguuaugaaaccuucaaagucaucgaaggcugguccaaaccuaacuccaaauuacagauaaauaggcaaguuauaguugaaagagguaacagguccgguuauucugguauuuucuccguugaaggcaaaagcugcaucaaccggugcuuuuauguggaguugauaaggggaaggaaagaggaaacugaagucugguggaccucaaacaguauuguuguguuuuguggcaccucagguacauauggaacaggcucauggccugauggggcggauaucaaucucaugccuauauaa

SEQ ID NO: 47614 - RNA, 1410 nt, Artificial Sequence
  derived and/or modified CDS sequence (wt) from neuraminidase__InfluenzaA__ABK80259
augaauccaaaucaaaagauaauaacaauuggcucugcuucucucaccauugccacaauaugcuuccuuauucaaauugcaauccugguaacuacuguaacauugcauuucaagcagcaugaaugcaacucccccccaaacaaccaaguaaugcugugugaaccaacaauaauagaaagaaacauaacagagauaguguaucugaccaacaccaccauagagaaggaaauaugccccaaacuagcagaauacagaaauuggucaaagccgcaauguaacauuacaggauuugcaccuuuuucuaaggacaauucgauucggcuuuccgcugguggggacaucugggugacaagagaaccuuaugugucaugcgauccugacaaguguuaccaauuugcccuugggcagggaacaacacuaaacaacgggcauucaaaugacacaguacaugauaggaccccuuaccggaccuuauugaugaaugaauuggguguuccauuucauuugggaaccaggcaagugugcauagcaugguccagcucaaguugucacgauggaaaagcauggcugcauguuuguguaacuggggaugauaaaaaugcaacugcuagcuucauuuacaaugggaggcuuguagauaguauuaguucaugguccaaaaaaauacucagaacccaggagucggaaugcguuuguaucaauggaacuuguacaguaguaaugacugaugggagcgcuucaggaaaagcugauacuaaaauauuauucauugaggaggggaaaaucauucauauuagcacauugucaggaagugcucagcaugucgaggagugcuccuguuauccucgauauccuggugucagaugugucugcagagacaauuggaaaggcuccaauaggcccauuguagauauaaauguaaaggauuauagcauuguuuccaguuaugugugcucaggacuuguuggagacacacccagaaaaaacgacagcuucagcaguagccauugccuagauccuaacaaugaggaagguggucauggagugaaaggcugggccuuugaugauggaaaugacguguggaugggaagaacgaucagcgagaaguuacgcucagguuaugaaaccuucaaagucaucgaaggcugguccaauccuaauuccaaauuacagauaaauaggcaaguuauaguugaaagagguaacagguccgguuauucugguauuuucuccguugaaggcaaaagcugcaucaaucggugcuuuuauguggaguugauaaggggaaggaaagaggaaacugaagucugguggaccucaaacaguauuguuguguuuuguggcaccucagguacauauggaacaggcucauggccugauggagcggauaucaaucucaugccuauauaa

SEQ ID NO: 47615 - RNA, 1410 nt, Artificial Sequence; identical to SEQ ID NO: 47485
  derived and/or modified CDS sequence (wt) from neuraminidase__InfluenzaA__ABK80270

SEQ ID NO: 47616 - RNA, 1410 nt, Artificial Sequence; identical to SEQ ID NO: 46726
  derived and/or modified CDS sequence (wt) from neuraminidase__InfluenzaA__ABK80281

SEQ ID NO: 47617 - RNA, 1410 nt, Artificial Sequence
  derived and/or modified CDS sequence (wt) from neuraminidase__InfluenzaA__ABK80292
augaauccaaaucaaaagauaauaacgauuggcucuguuucucucaccauuuccacaauaugcuucuucaugcaaauugccaucuugauaacuacuguaacauugcauuucaagcaauaugaauucaacucccccccaaacaaccaagugaugcugugugaaccaacaauaauagaaagaaacauaacagagauaguguaucugaccaacaccaccauagagaaggaaauaugccccaaacuagcagaauacagaaauuggucaaagccgcaauguaacauuacaggauuugcaccuuuuucuaaggacaauucgauuaggcuuuccgcugguggggacaucugggugacaagagaaccuuaugugucaugcgauccugacaaguguuaucaauuugcccuuggacagggaacaacacuaaacaacgugcauucaaaugacacaguacaugauaggaccccuuaucggacccuauugaugaaugaguuagguguuccauuucaucuggggaccaagcaagugugcauagcaugguccagcucaaguugucacgauggaaaagcauggcugcauguuuguguaacgggggaugauaaaaaugcaacugcuagcuucauuuacaaugggaggcuuguagauaguauuguuucaugguccaaagaaauccucaggacccaggagucagaaugcguuuguaucaauggaacuuguacaguaguaaugacugaugggagugcuucaggaaaagcugauacuaaaauacuauucauugaggaggggaaaaucauucauacuagcacauugucaggaagugcucagcaugucgaggagugcuccugcuauccucgauauccuggugucagaugugucugcagagacaacuggaaaggcuccaauaggcccauaguagauauaaacauaaaggauuauagcauuguuuccaguuaugugugcucaggacuuguuggagacacacccagaaaaaacgacagcuccagcaguagccauugcuuggauccuaacaaugaagaagguggucauggagugaaaggcugggccuuugaugauggaaaugacguguggaugggaagaacgaucagcgagaaguuacgcucaggauaugaaaccuucaaagucauugaaggcugguccaacccuaauuccaaauugcagauaaauaggcaagucauaguugacagaaguaauagguccgguuauucugguauuuucucuguugaaggcaaaagcugcaucaaucggugcuuuuauguggaguugauaaggggaagaaaagaggaaacugaagucuuguggaccucaaacaguauuguuguguuuuguggcaccucagguacauauggaacaggcucauggccugauggggcggacaucaaucucaugccuauauaa

SEQ ID NO: 47618 - RNA, 1410 nt, Artificial Sequence
  derived and/or modified CDS sequence (wt) from neuraminidase__InfluenzaA__ABK80303
augaauccaaaucaaaagauaauaacaauuggcucuguuucucucaccauugccacaauaugcuuccuuaugcaaauugccauccugguaacuacuguaacauugcauuucaagcaguaugaaugcaacucccccccaaacaaccaaguaaugcuguaugaaccaacaauaauagaaagaaacauaacagagauaguguaucugaccaacaccaccauagagaaggaaauaugccccaaacuagcagaauacagaaauuggucaaagccgcaauguaacauuacaggauuugcaccuuuuucuaaggacaauucgauucggcuuuccgcugguggggacaucugggugacaagagaaccuuaugugucaugcgauccugacaaguguuaucaauuugcccuugggcagggaacaacacuaaacaacgggcauucaaaugacacaguacaugauaggaccccuuaccggacccuauugaugaaugaauuggguguuccauuucauuugggaaccaggcaagugugcauagcaugguccagcucaaguugucacgauggaaaagcauggcugcauguuuguguaacuggggaugaugaaaaugcaacugcuagcuucauuuacaaugggaggcuuguagauaguauugguucaugguccaaaaaaauacucagaacccaggagucggaaugcguuuguaucaauggaacuuguacaguaguaaugacugaugggaacgcuucaggaaaagcugauacuaaaauacuauucauugaggaggggaaaaucguucauauuagcacauugucaggaagugcucagcaugucgaggagugcuccuguuauccucgauauccuggugucagaugugucugcagagacaacuggaaaggcuccaauaggcccaucguagauauaaauguaaaggauuauagcauuguuuccaguuaugugugcucaggacuuguuggagacacacccagaaaaaacgacagcuucagcaguagccauugccuagauccuaacaaugaggaagguggucauggagugaaaggcugggccuuugaugauggaaaugacguguggaugggaagaacgaucagcgagaaguuacgcucagguuaugaaaccuucaaagucaucgaaggcugguccaaaccuaacuccaaauuacagauaaauaggcaagucauaguugaaagagguaacagguccgguuauucugguauuuucuccguugaaggcaaaagcugcaucaaucggugcuuuuauguggaguugauaaggggaaggaaagaggaaacugaagucugguggaccucaaacaguauuguuguguuuuguggcaccucagguacauauggaacaggcucauggccugauggggcggauaucaaucucaugccuauauaa

SEQ ID NO: 47619 - RNA, 1410 nt, Artificial Sequence
  derived and/or modified CDS sequence (wt) from neuraminidase__InfluenzaA__ABK80314
augaauccaaaucaaaagauaauaacaauuggcucuguuucucucaccauugccacaauaugcuuccuuaugcaaauugccauccugguaacuacuguaacauugcauuucaagcaguaugaaugcgacucccccccaaacaaccaaguaaugcuguaugaaccaacaauaauagaaagaaacauaacagagauaguguaucugaccaacaccaccauagagaaggaaauaugccccaaacuagcagaauacagaaauuggucaaagccgcaauguaacauuacaggauuugcaccuuuuucuaaggacaauucgauucggcuuuccgcugguggggacaucugggugacaagagaaccuuaugugucaugcgauccugacaaguguuaucaauuugcccuugggcagggaacaacacuaaacaacgggcauucaaaugacacaguacaugauaggaccccuuaccggacccuauugaugaaugaauuggguguuccauuucauuugggaaccaggcaagugugcauagcaugguccagcucaaguugucacgauggaaaagcauggcugcauguuuguguaacuggggaugaugaaaaugcaacugcuagcuucauuuacaaugggaggcuuguagauaguauugguucaugguccaaaaaaauacucagaacccaggagucggaaugcguuuguaucaauggaacuuguacaguaguaaugacugaugggagcgcuucaggaaaagcugauacuaaaauacuauucauugaggaggggaaaaucguucauauuagcacauugucaggaagugcucagcaugucgaggagugcuccuguuauccucgauauccuggugucagaugugucugcagagacaacuggaaaggcuccaauaggcccaucguagauauaaauguaaaggauuauagcauuguuuccaguuaugugugcucaggacuuguuggagacacacccagaaaaaacgacagcuucagcaguagccauugccuagauccuaacaaugaggaagguggucauggagugaaaggcugggccuuugaugauggaaaugacguguggaugggaagaacgaucagcgagaaguuacgcucagguuaugaaaccuucaaagucaucgaaggcugguccaaaccuaacuccaaauuacagauaaauaggcaagucauaguugaaagagguaacagguccgguuauucugguauuuucuccguugaaggcaaaagcugcaucaaucggugcuuuuauguggaguugauaaggggaaggaaagaggaaacugaagucugguggaccucaaacaguauuguuguguuuuguggcaccucagguacauauggaacaggcucauggccugauggggcggauaucaaucucaugccuauauaa

SEQ ID NO: 47620 - RNA, 1350 nt, Artificial Sequence
  derived and/or modified CDS sequence (wt) from neuraminidase__InfluenzaA__ABL07021
augaauccaaaucagaagauaauaaccauuggaucaaucuguaugguaauuggaauaguuagcuuaauguuacaaauugggaacaugaucucaauaugggucagucauucaauucagaaagggaaucaacaccaagcugaaucaaucagcaauacuaacccucuuacugagaaagcuguggcuucaauaacauuagcgggcaauucaucucuuugccccauuagaggaugggcuguacacaguaaggacaacaauauaaggaucgguuccaagggggauguguuuguuauuagagagccguucaucucaugcucccaccuggaauguagaacuuucuucuugacucagggagccuugcugaaugacaagcacuccaacgggacugucaaagacagaagcccucacagaacauuaaugaguuguccugugggugaggcucccucuccauauaacucaagguuugagucuguugcuuggucagcaagugcuugccaugauggcaccaguugguugacaauuggaauuucuggcccagacaaugaggcuguggcuguauugaaauacaauggcauaauaacagacacuaucaagaguuggaggaacaacauacugagaacucaagagucugaaugugcauguguaaauggcucuugcuuuacuguaaugacugauggaccaaguaaugggcaggcaucauauaagaucuucaaaaugaaaaaaggaaaaguggucaaaucagucgaauuggaugcuccuaauuaucacuaugaggagugcuccuguuauccugaugccggcgaaaucacauguguuugcagggauaauuggcauggcucaaauaggccauggguauccuucaaucaaaauuuggaguaccaaauaggauauauaugcaguggaguuuucggagacaauccacgccccaaugauggaacagguaguuguggcccgauguccccuaauggggcauaugggguaaaaggguuuucauuuaaauacggcaaugguguuuggaucgggagaaccaaaagcacuaacuccaggagcggcuuugaaaugauuugggauccaaauggguggacuggaacggacaguagcuuuucagugaaacaagauauaguagcaauaacugauuggucaggauauagcgggaguuuuguccagcauccagaacugacaggacuagauugcauaagaccuuguuucuggguugaguuaaucagagggcggcccaaagagagcacaauuuggacuagugggaguagcauauccuuuugugguguaaauagugacacugugagcuggucuuggccagacggugcugaguugccauucaccauugacaaguag

SEQ ID NO: 47621 - RNA, 1350 nt, Artificial Sequence
  derived and/or modified CDS sequence (wt) from neuraminidase__InfluenzaA__ABL07032
augaauccaaaucagaagauaauaaccauuggaucaaucuguaugguaauuggaauaguuaguuuaauguuacaaauugggaacauggucucaacaugggucagucauucaauucagacagggaaucaauaccaagcugaaucaaucagcaauacuaacccucuuacugagaaagcuguggcuucaguaacauuagcgggcaauucaucucuuugccccauuagaggaugggcuguacacaguaaggacaacaauauaaggaucgguucaaagggggauguguuuguuauuagagagccguucaucucaugcucccaccuggaaugcagaacuuucuucuugacucagggagccuugcugaaugacaagcacuccaacgggacugucaaagacagaagcccucacagaacauuaaugaguuguccugugggugaggcucccucuccauauaacucaagguuugagucuguugcuuggucagcaagugcuugccaugauggcaccaguugguugacaauuggaauuucuggcccagacaaugaggcuguggcuguauugaaauacaauggcauaauaacagacacuaucaagaguuggaggaacaacauacugaggacucaagagucugaaugugcauguguaaauggcucuugcuuuacuguaaugacugauggaccaaguaaugggcaggcaucauauaagaucuucaaaauggaaaaaggaaaaguggucaaaucagucgaauuggaugcuccuaauuaucacuaugaggagugcuccuguuauccugaugccggcgaaaucacauguguuugcagggauaauuggcauggaucaaauaggccauggguaucuuucaaucaaaauuuggaguaucaaauaggauauauaugcaguggaguuuucggagacaauccacgccccaaugauggaacagguaguuguggcccgauguccccuaacggggcauaugggguaaaaggguuuucauuuaaauacggcaaugguguuuggaucgggagaaccaaaagcacuaacuccaggagcggcuuugaaaugauuugggauccaaauggguggacuggaacggacaguagcuuuucagugaaacaagauauaguagcaauaacugauuggucaggauauagcgggaguuuuguccagcauccagaacugacaggauuagauugcauaagaccuuguuucuggguugaguuaaucagagggcggcccaaagagagcacaauuuggacuagugggagcagcauaucuuuuugugguguaaauagugacacugugaguuggucuuggccagacggugcugaguugccauucaccauugacaaguag

SEQ ID NO: 47622 - RNA, 1350 nt, Artificial Sequence
  derived and/or modified CDS sequence (wt) from neuraminidase__InfluenzaA__ABL31746
augaauccaaaucagaagauaauaaccauuggaucaaucuguaugguaauuggaauaguuagcuuaauguuacaaauugggaacaugaucucaauaugggucagucauucaauucagacagggaaucaacaccaagcugaaucaaucagcaauacuaacccucucacugagaaagcuguggcuucaguaacauuagcgggcaauucaucucuuugccccauuagaggaugggcuguacacaguaaggacaacaauauaaggaucgguucaaagggggauguguuuguuauuagagagccguucaucucaugcucccaccuggaaugcagaacuuucuucuugacucagggggccuugcugaaugacaagcacuccaacgggacugucaaagacagaagcccucacagaacauuaaugaguuguccugugggugaggcucccucuccauauaacucaagguuugagucuguugcuuggucagcaagugcuugccaugauggcaacaguugguugacaauuggaauuucuggcccagacaaugaggcuguggcuguauugaaauacaauggcauaauaacagacacuaucaagaguuggaggaaaaacauacugagaacucaagagucugaaugugcauguguaaauggcucuugcuuuacuguaaugacugauggaccaaguaaugggcaggcaucauauaagaucuucaaaauggaaaaaggaaaaguggucaaaucagucgaauuggaugcuccuaauuaucacuaugaggagugcucuuguuauccugaugccggcgaaaucacauguguuugcagggauaauuggcauggaucaaauaggccauggguaucuuucaaucaaaauuuggaguaucaaauaggauauauaugcaguggaguuuucggagacaauccacgccccaaugauggaacagguaguuguggcccgauguccccuaacggggcauaugggguaaaaggguuuucauuuaaauacggcaaugguguuuggaucgggagaaccaaaagcacuaacuccaggagcggcuuugaaaugauuugggauccaaauggguggacuggaacugacaguagcuuuucagugaaacaagauauaguagcaauaacugauuggucaggauauagcgggaguuuuguccagcauccagaacugacaggauuagacugcauaagaccuuguuucuggguugaguuaaucagagggcggcccaaagagagcacaauuuggacuagugggagcagcauaucuuuuugugguguaaauagugacacugugaguuggucuuggccagacggugcugaguugccauucaccauugacaaguag

SEQ ID NO: 47623 - RNA, 1350 nt, Artificial Sequence
  derived and/or modified CDS sequence (wt) from neuraminidase__InfluenzaA__ABL31757
augaauccaaaucagaagauaauaaccauuggaucaaucuguaugguaauuggaauaguuagcuuaauguuacaaauugggaacaugaucucaauaugggucagucauucaauucagacagggaaucaacaccaagcugaaucaaucagcaauacuaacccucuuacugagaaagcuguggcuucaguaacauuagcgggcaauucaucucuuugccccauuagaggaugggcuguacacaguaaggacaacaauauaaggaucgguucaaagggggauguguuuguuauuagagagccguucaucucaugcucccaccuggaaugcagaacuuucuucuugacucagggagccuugcugaaugacaagcacuccaacgggacugucaaagacagaagcccucacagaacauuaaugaguuguccugugggugaggcucccucuccauauaacucaagguuugagucuguugcuuggucagcaagugcuugccaugauggcaccaguugguugacaauuggaauuucuggcccagacaaugaggcuguggcuguauugaaauacaauggcauaauaacagacacuaucaagaguuggaggaacaacauacugaggacucaagagucugaaugugcauguguaaauggcucuugcuuuacuguaaugacugauggaccaaguaaugggcaggcaucauauaagaucuucaaaauggaaaaaggaaaaguggucaaaucagucgaauuggaugcuccuaauuaucacuaugaggagugcuccuguuauccugaugccggcgaaaucacauguguuugcagggauaauuggcauggaucaaauaggccauggguaucuuucaaucaaaauuuggaguaucaaauaggauauauaugcaguggaguuuucggagacaauccacgccccaaugauggaacagguaguuguggcccgauguccccuaacggggcauaugggguaaaaggguuuucauuuaaauacggcaaugguguuuggaucgggagaaccaaaagcacuaacuccaggagcggcuuugaaaugauuugggauccaaauggguggacuggaacggacaguagcuuuucagugaaacaagauauaguagcaauaacugauuggucaggauauagcgggaguuuuguccagcauccagaacugacaggauuagauugcauaagaccuuguuucuggguugaguuaaucagagggcggcccaaagagagcacaauuuggacuagugggagcagcauaucuuuuugugguguaaauagugacacugugaguuggucuuggccagacggugcugaguugccauucaccauugacaaguag

SEQ ID NO: 47624 - RNA, 1350 nt, Artificial Sequence; identical to SEQ ID NO: 47623
  derived and/or modified CDS sequence (wt) from neuraminidase__InfluenzaA__ABL31768

SEQ ID NO: 47625 - RNA, 1410 nt, Artificial Sequence
  derived and/or modified CDS sequence (wt) from neuraminidase__InfluenzaA__ABL67168
augaauccaaaucaaaagauaauaacaauuggcucuguuucucucaccauugccacaauaugcuuccuuaugcaaauugccauccugguaacuacuguaacauugcauuucaagcagcaugaaugcaacucccccccaaacaaccaaguaaugcugugugaaccaacaauaauagaaagaaacauaacagagauaguguaucugaccaacaccaccauagagaaggaaauaugccccaaacuaguagaauacagaaauuggucaaagccgcaauguaacauuacaggauuugcaccuuuuucuaaggacaauucgauucggcuuuccgcugguggggacaucuggguaacaagagaaccuuaugugucaugcgauccugacaaguguuaucaauuugcccuugggcagggaacaacacuaaacaacgggcauucaaaugacacaguacaugauaggaccccuuaccggacccuauugaugaaugaauuggguguuccauuucauuugggaaccaggcaagugugcauagcaugguccagcucaaguugucacgauggaaaagcauggcugcauguuuguguaacuggggaugauaaaaaugcaacugcuagcuucauuuacaaugggaggcuuguagauaguauugguucaugguccaaaaaaauacucagaacccaggagucggaaugcguuuguaucaauggaacuuguacaguaguaaugacugaugggagcgcuucaggaaaagcugauacuaaaauacuauucauugaggaggggaaaaucguucauauuagcacauugucaggaagugcucagcaugucgaggagugcuccuguuauccucgauauccuggugucagaugugucugcagagacaacuggaaaggcuccaauaggcccauuguagauauaaauguaaaggauuauagcauuguuuccaguuaugugugcucaggacuuguuggagacacacccagaaaaaacgacagcuucagcaguagccauugccuagaucccaacaaugaggaagguggucauggagugaaaggcugggccuuugaugauggaaaugacguguggaugggaagaacaaucagcgagaaguuacgcucagguuaugaaaccuucaaagucaucgaaggcugguccaaaccuaacuccaaauuacagauaaauaggcaaguuauaguugaaagagguaacagguccgguuauucugguauuuucuccguugaaggcaaaagcugcaucaaucggugcuuuuauguggaguugauaaggggaaggaaagaggaaacugaagucugguggaccucaaacaguauuguuguguuuuguggcaccucagguacauauggaacaggcucauggccugauggggcggauaucaaucucaugccuauauaa

SEQ ID NO: 47626 - RNA, 1410 nt, Artificial Sequence; identical to SEQ ID NO: 46755
  derived and/or modified CDS sequence (wt) from neuraminidase__InfluenzaA__ABL67179

SEQ ID NO: 47627 - RNA, 1413 nt, Artificial Sequence; identical to SEQ ID NO: 47570
  derived and/or modified CDS sequence (wt) from neuraminidase__InfluenzaA__ABL67190

SEQ ID NO: 47628 - RNA, 1410 nt, Artificial Sequence
  derived and/or modified CDS sequence (wt) from neuraminidase__InfluenzaA__ABL67201
augaauccaaaucaaaagauaauaacgauuagcucuguuucucucaccauuuccacaauaugcuucuucaugcaaauugccaucuugauaacuacuguaacauugcauuuuaagcaauaugaauucaacucccccccaaacaaccaagugaugcugugugaaccaacaauaauagaaagaaacauaacagagauaguguauuugaccaacaccaccauagagaaggaaauaugccccaaacuagcagaauacaggaauuggucaaagccgcaaugugacauuacaggauuugcaccuuuuucuaaggacaauucgauuaggcuuuccgcugguggggacaucugggugacaagagaaccuuaugugucaugcgauccugacaaguguuaucaauuugcccuuggacagggaacaacacuaaacaacgugcauucaaaugacacaguacaugauaggaccccuuaucggacccuauugaugaaugaguuagguguuccauuucaucuggggaccaagcaagugugcauagcaugguccagcucaaguugucacgauggaaaagcauggcugcauguuuguguaacgggggaugauaaaaaugcaacugcuagcuucauuuacaaugggaggcuuguagauaguauuguuucaugguccaaaaaaauccucaggacccaggagucagaaugcguuuguaucaauggaacuuguacaguaguaaugacugaugggagugcuucaggaaaagcugauacuaaaauacuauucauugaggaggggaaaaucguucauacuagcacauugucaggaagugcucagcaugucgaggagugcuccugcuauccucgauauccuggugucagaugugucugcagagacaacuggaaaggcuccaauaggcccaucguagauauaaacauaaaggauuauagcauuguuuccaguuaugugugcucaggacuuguuggagacacacccagaaaaaacgacagcuccagcaguagccauugcuuggauccuaacaaugaagaagguggucauggagugaaaggcugggccuuugaugauggaaaugacguguggaugggaagaacgaucagcgagaaguuacgcucaggauaugaaaccuucaaagucauugaaggcugguccaacccuaauuccaaauugcagauaaauaggcaagucauaguugacagagguaauagguccgguuauucugguauuuucucuguugaaggcaaaagcugcaucaaucggugcuuuuauguggaguugauaaggggaagaaaagaagaaacugaagucuuguggaccucaaacaguauuguuguguuuuguggcaccucagguacauauggaacaggcucauggccugauggggcggacaucaaucucaugccuauauaa

SEQ ID NO: 47629 - RNA, 1413 nt, Artificial Sequence; identical to SEQ ID NO: 47568
  derived and/or modified CDS sequence (wt) from neuraminidase__InfluenzaA__ABL67212

SEQ ID NO: 47630 - RNA, 1413 nt, Artificial Sequence; identical to SEQ ID NO: 47071
  derived and/or modified CDS sequence (wt) from neuraminidase__InfluenzaA__ABL67256

SEQ ID NO: 47631 - RNA, 1413 nt, Artificial Sequence; identical to SEQ ID NO: 47071
  derived and/or modified CDS sequence (wt) from neuraminidase__InfluenzaA__ABL67267

SEQ ID NO: 47632 - RNA, 1410 nt, Artificial Sequence; identical to SEQ ID NO: 46181
  derived and/or modified CDS sequence (wt) from neuraminidase__InfluenzaA__ABL67278

SEQ ID NO: 47633 - RNA, 1410 nt, Artificial Sequence
  derived and/or modified CDS sequence (wt) from neuraminidase__InfluenzaA__ABL67289
augaauccaaaucaaaagauaauaacaauuggcucuguuucucucaccauugccacaauaugcuuccuuaugcaaauugccauccugguaacuacuguaacauugcauuucaagcaguaugaaugcaacucccccccaaacaaccaaguaaugcuguaugaaccaacaauaauagaaagaaacauaacagagauaguguaucugaccaacaccaccauagagaaggaaauaugccccaaacuagcagaauacagaaauuggucaaagccgcaauguaacauuacaggauuugcaccuuuuucuaaggacaauucgauucggcuuuccgcugguggggacaucugggugacaagagaaccuuaugugucaugcgauccugacaaguguuaucaauuugcccuugggcagggaacaacacuaaacaacgggcauucaaaugacacaguacaugauaggaccccuuaccggacccuauugaugaaugaauuggguguuccauuucauuugggaaccaggcaagugugcauagcaugguccagcucaaguugucacgauggaaaagcauggcugcauguuuguguaacuggggaugaugaaaaugcaacugcuagcuucauuuacaaugggaggcuuguagauaguauugguucaugguccaaaaaaauacucagaacccaggagucggaaugcguuuguaucaauggaacuuguacaguaguaaugacugaugggagcgcuucaggaaaagcugauacuaaaauacuauucauugaggaggggaaaaucguucauauuagcacauugucaggaagugcucagcaugucgaggagugcuccuguuauccucgauauccuggugucagaugugucugcagagacaacuggaaaggcuccaauaggcccaucguagauauaaauguaaaggauuauagcauuguuuccaguuaugugugcucaggacuuguuggagacacacccagaaaaaacgacagcuucagcaguagccauugccuagauccuaacaaugaggaagguggucauggagugaaaggcugggccuuugaugauggaaaugacguguggaugggaagaacgaucagcgagaaguuacgcucagguuaugaaaccuucaaagucaucgaaggcugguccaaaccuaacuccaaauuacagauaaauaggcaagucauaguugaaagagguaacagguccgguuauucugguauuuucuccguugaaggcaaaagcugcaucaaucggugcuuuuauguggaguugauaaggggaaggaaagaggaaacugaagucugguggaccucaaacaguauuguuguguuuuguggcaccucagguacauauggaacaggcucauggccugauggggcggauaucaaucucaugccuauauaa

SEQ ID NO: 47634 - RNA, 1410 nt, Artificial Sequence
  derived and/or modified CDS sequence (wt) from neuraminidase__InfluenzaA__ABL67300
augaauccaaaucaaaagauaauaacaauuggcucuguuucccucaccauugccacaauaugcuuccuuaugcaaauugccauccugguaacuacuguaacauugcauuucaagcaguaugaaugcaacucccccccaaacaaccaaguaaugcugugugaaccaacaauaauagaaagaaacauaacagagauaguguaucugaccaacaccaccauagagaaggaaauaugccccaaacuagcagaauacagaaauuggucaaagccgcaauguaacauuacaggauuugcaccuuuuucuaaggacaauucgauucggcuuuccgcugguggggacaucugggugacaagagaaccuuaugugucaugcgauccugacaaguguuaucaauuugcccuugggcagggaacaacacuaaacaacgggcauucaaaugacacaguacaugauaggaccccuuaccggacccuauugaugaaugaauuggguguuccauuucauuugggaaccaggcaagugugcauagcaugguccagcucaaguugucacgauggaaaagcauggcugcauguuuguguaacuggggaugaugaaaaugcaacugcuagcuucauuuacaaugggaggcuuguagauaguauugguucaugguccaaaaauauacucagaacccaggagucggaaugcguuuguaucaauggaacuuguacaguaguaaugacugaugggagcgcuucaggaaaagcugauacuaaaauacuauucauugaggaggggaaaaucguucauauuagcacauugucaggaagugcucagcaugucgaggagugcuccuguuauccucgauauccuggugucagaugugucugcagagacaacuggaaaggcuccaauaggcccaucguagauauaaauguaaaggaucauagcauuguuuccaguuaugugugcucaggacuuguuggagacacacccagaaaaaacgacagcuucagcaguagccauugccuagacccuaacaaugaggaagguggucauggagugaaaggcugggccuuugaugauggaaaugacguguggaugggaagaacgaucagcgagaaguuacgcucagguuaugaaaccuucaaagucaucgaaggcugguccaaaccuaacuccaaauuacagauaaauaggcaagucauaguugaaagagguaacagguccgguuauucugguauuuucuccguugaaggcaaaagcugcaucaaucggugcuuuuauguggaguugauaaggggaaggaaagaggaaacugaagucugguggaccucaaacaguauuguuguguuuuguggcaccucagguacauauggaacaggcucauggccugauggggcggauaucaaucucaugccuauauaa

SEQ ID NO: 47635 - RNA, 1410 nt, Artificial Sequence
  derived and/or modified CDS sequence (wt) from neuraminidase__InfluenzaA__ABL67311
augaauccaaaucaaaagauaauaacaauuggcucuguuucccucaccauugccacaauaugcuuccuuaugcaaauugccauccugguaacuacuguaacauugcauuucaagcaguaugaaugcaacucccccccaaacaaccaaguaaugcugugugaaccaacaauaauagaaagaaacauaacagagauaguguaucugaccaacaccaccauagagaaggaaauaugccccaaacuagcagaauacagaaauuggucaaagccgcaauguaacauuacaggauuugcaccuuuuucuaaggacaauucgauucggcuuuccgcugguggggacaucugggugacaagagaaccuuaugugucaugcgauccugacaaguguuaucaauuugcccuugggcagggaacaacacuaaacaacgggcauucaaaugacacaguacaugauaggaccccuuaccggacccuauugaugaaugaauuggguguuccauuucauuugggaaccaggcaagugugcauagcaugguccagcucaaguugucacgauggaaaagcauggcugcauguuuguguaacuggggaugaugaaaaugcaacugcuagcuucauuuacaaugggaggcuuguagauaguauugguucaugguccaaaaaaauacucagaacccaggagucggaaugcguuuguaucaauggaacuuguacaguaguaaugacugaugggagcgcgucaggaaaagcugauacuaaaauacuauucauugaggaggggaaaaucguucauauuagcacauugucaggaagugcucagcaugucgaggagugcuccuguuauccucgauauccuggugucagaugugucugcagagacaacuggaaaggcuccaauaggcccaucguagauauaaauguaaaggaucauagcauuguuuccaguuaugugugcucaggacuuguuggagacacacccagaaaaaacgacaguuucagcaguagccauugccuagacccuaacaaugaggaagguggucauggagugaaaggcugggccuuugaugauggaaaugacguguggaugggaagaacgaucagcgagaaguuacgcucagguuaugaaaccuucaaagucaucgaaggcugguccaaaccuaacuccaaauuacagauaaauaggcaagucauaguugaaagagguaacagguccgguuauucugguauuuucuccguugaaggcaaaagcugcaucaaucggugcuuuuauguggaguugauaaggggaaggaaagaggaaacugaagucugguggaccucaaacaguauuguuguguuuuguggcaccucagguacauauggaacaggcucauggccugauggggcggauaucaaucucaugccuauauaa

SEQ ID NO: 47636 - RNA, 1410 nt, Artificial Sequence
  derived and/or modified CDS sequence (wt) from neuraminidase__InfluenzaA__ABL67322
augaauccaaaucaaaagauaauaacaauuggcucuguuucucucaccauugccacaauaugcuuccuuaugcaaauugccauccugguaacuacuguaacauugcauuucaagcaguaugaaugcaacccccccccaaacaaccaaguaaugcugugugaaccaacaauaauagaaagaaacauaacagagauaguguaucugaccaacacuaccauagagaaggaaauaugccccaaauuagcagaauacagaaauuggucaaagccgcaauguaacauuacaggauuugcaccuuuuucuaaggacaauucgauucggcuuuccgcugguggggacaucugggugacaagagaaccuuaugugucaugcgauccugacaaguguuaucaauuugcccuugggcagggaacaacacuaaacaacgggcauucaaaugacacaguacaugauaggaccccuuaccggacccuauugaugaaugaauuggguguuccauuucauuugggaaccaggcaagugugcauagcaugguccagcucaaguugucacgauggaaaagcauggcugcauguuuguguaacuggggaugaugaaaaugcaacugcuagcuucauuuacaaugggaggcuuguagauaguauugguucaugguccaaaaaaauacucagaacccaggagucggaaugcguuuguaucaauggaacuuguacaguaguaaugacugaugggagcgcuucaggaaaagcugauacuaaaauacuauucauugaggaggggaaaaucguucauacuagcacauugucaggaagugcucagcaugucgaggagugcuccuguuauccucgauauccuggugucagaugugucugcagagacaacuggaaaggcuccaauaggcccaucguagauauaaauguaaaggauuauagcauuguuuccaguuaugugugcucaggacuuguuggagacacacccagaaaaaacgacagcuucagcaguagccauugccuagauccuaacaaugaggaagguggucauggagugaaaggcugggccuuugaugauggaaaugacguguggaugggaagaacgaucagcgagaaguuacgcucagguuaugaaaccuucaaagucaucgaaggcugguccaaaccuaacuccaaauuacagacaaauaggcaagucauaguugaaagagguaacagguccgguuauucugguauuuucuccguugaaggcaaaagcugcaucaaucggugcuuuuauguggaguugauaaggggaaggaaagaggaaacugaagucugguggaccucaaacaguauuguuguguuuuguggcaccucagguacauauggaacaggcucauggccugauggggcggauaucaaucucaugccuauauaa

SEQ ID NO: 47637 - RNA, 1410 nt, Artificial Sequence
  derived and/or modified CDS sequence (wt) from neuraminidase__InfluenzaA__ABL67333
augaauccaaaucaaaagauaauaacaauuggcucuguuucucucaccauugccacaauaugcuuccuuaugcaaauugccauccugguaauuacuguaacauugcauuucaagcaguaugaaugcaacucccccccaaacaaccaaguaaugcugugugaaccaacaauaauagaaagaaacauaacagagauaguguaucugaccaacaccaccauagagaaagaaauaugccccaaauuagcagaauacagaaauuggucaaagccgcaauguaacauuacaggauuugcaccuuuuucuaaggacaauucgauucggcuuuccgcugguggggacaucugggugacaagagaaccuuaugugucaugcgauccugacaaguguuaucaauuugcccuugggcagggaacaacacuaaacaacgggcauucaaaugacacaguacaugauaggaccccuuaccggacccuauugaugaaugaauuggguguuccauuucauuugggaaccaggcaagugugcauagcaugguccagcucaaguugucacgauggaaaagcauggcugcauguuuguguaacuggggaugaugaaaaugcaacugcuagcuucauuuacaaugggaagcuuguagauaguauugguucaugguccaaaaaaauacucagaacccaggagucggaaugcguuuguaucaauggaacuugugcaguaguaaugacugaugggagcgcuucaggaaaagcugauacuaaaauacuauucauugaggaggggaaaaucguucauauuagcacauugucaggaagugcucagcaugucgaggagugcuccuguuauccucgauauccuggugucagaugugucugcagagacaacuggaaaggcuccaauaggcccaucguagauauaaauguaaaggauuauagcauuguuuccaguuaugugugcucaggacuuguuggagacacacccagaaaaaacgacagcuucagcaguagccauugccuagauccuaacaaugaggaagguggucauggagugaaaggcugggccuuugaugauggaaaugacguguggaugggaagaacgaucagcgagaaguuacgcucagguuaugaaaccuucaaagucaucgaaggcugguccaaaccuaacuccaaauuacagacaaauaggcaagucauaguugaaagagguaacagguccgguuauucugguauuuucuccguugaaggcaaaagcugcaucaaucggugcuuuuauguggaguugauaaggggaaggaaagaggaaacugaagucugguggaccucaaacaguauuguuguguuuuguggcaccucagguacauauggaacaggcucauggccugauggggcggauaucaaucucaugccuauauaa

SEQ ID NO: 47638 - RNA, 1410 nt, Artificial Sequence
  derived and/or modified CDS sequence (wt) from neuraminidase__InfluenzaA__ABL67344
augaauccaaaucaaaagauaauaacaauuggcucuguuucucucaccauugccacaauaugcuuccuuaugcaaauugccauccugguaacuacuguaacauugcauuucaagcagcaugaaugcaacucccccccaaacaaccaaguaaugcugugugaaccaacaauaauagaaagaaacauaacagagauaguguaucugaccaacaccaccauagagaaggaaauaugccccaaacuaguagaauacagaaauuggucaaagccgcaauguaacauuacaggauuugcaccuuuuucuaaggacaauucgauucggcuuuccgcugguggggacaucugggugacaagagaaccuuaugugucaugcgauccugacaaguguuaucaauuugcccuugggcagggaacaacacuaaacaacgggcauucaaaugacacaguacaugauaggaccccuuaccggacccuauugaugaaugaauuggguguuccauuucauuugggaaccaggcaagugugcauagcaugguccagcucaaguugucacgauggaaaagcauggcugcauguuuguguaacuggggaugauaaaaaugcaacugcuagcuucauuuacaaugggaggcuuguagauaguauugguucaugguccaaaaagauacucagaacccaggagucggaaugcguuuguaucaauggaacuuguacaguaguaaugacugaugggagcgcuucaggaaaagcugauacuaaaauacuauucauugaggaggggaaaaucguucauauuagcacauugucaggaagugcucagcaugucgaggagugcuccuguuauccucgauauccuggugucagaugugucugcagagacaacuggaaaggcuccaauaggcccauuguagauauaaauguaaaggauuauagcauuguuuccaguuaugugugcucaggacuuguuggagacacacccagaaaaaacgacagcuucagcaguagccauugccuagauccuaacaaugaggaagguggucauggagugaaaggcugggccuuugaugauggaaaugacguguggaugggaagaacgaucagcgagaaguuacgcucagguuaugaaaccuucaaagucaucgaaggcugguccaaaccuaacuccaaauuacagauaaauaggcaaguuauaguugaaagagguaacagguccgguuauucugguauuuucuccguugaaggcaaaagcugcaucaaucggugcuuuuauguggaguugauaaggggaaggaaagaggaaacugaagucugguggaccucaaacaguauuguuguguuuuguggcaccucagguacauauggaacaggcucauggccugauggggcggauaucaaucucaugccuauauaa

SEQ ID NO: 47639 - RNA, 1410 nt, Artificial Sequence
  derived and/or modified CDS sequence (wt) from neuraminidase__InfluenzaA__ABL67355
augaauccaaaucaaaagauaauaacaauuggcucuguuucucucaccauugccacaauaugcuuccuuaugcaaauugccauccugguaacuacuguaacauugcauuucaagcagcaugaaugcaacucccccccaaacaaccaaguaaugcugugugaaccaacaauaauagaaagaaacauaacagagauaguguaucugaccaacaccaccauagagaaggaaauaugccccaaacuaguagaauacagaaauuggucaaagccgcaauguaacauuacaggauuugcaccuuuuucuaaggacaauucgauucggcuuuccgcugguggggacaucugggugacaagagaaccuuaugugucaugcgauccugaaaaguguuaucaauuugcccuugggcagggaacaacacuaaacaacgggcauucaaaugacacaguacaugauaggaccccuuaccggacccuauugaugaaugaauuggguguuccauuucauuugggaaccaagcaagugugcauagcaugguccagcucaaguugucacgauggaaaagcauggcugcauguuuguguaacuggggaugauaaaaaugcaacugcuagcuucauuuacaaugggaggcuuguagauaguauugguucaugguccaaaaaaauacucagaacccaggagucggaaugcguuuguaucaauggaacuuguacaguaguaaugacugaugggagcgcuucaggaaaagcugauacuaaaauacuauucauugaggaggggaaaaucguucauauuagcacauugucaggaagugcucagcaugucgaggagugcuccuguuauccucgauauccuggugucagaugugucugcagagacaacuggaaaggcuccaauaggcccauuguagauauaaauguaaaggauuauagcauuguuuccaguuaugugugcucaggacuuguuggagacacacccagaaaaaacgacagcuucagcaguagccauugccuagauccuaacaaugaggaagguggucauggagugaaaggcugggccuuugaugauggaaaugacguguggaugggaagaacgaucagcgagaaguuacgcucagguuaugaaaccuucaaagucaucgaaggcugguccaaaccuaacuccaaauuacagauaaauaggcaaguuauaguugaaagagguaacagguccgguuauucugguauuuucuccguugaaggcaaaagcugcaucaaucggugcuuuuauguggaguugauaaggggaaggaaagaggaaacugaagucugguggaccucaaacaguauuguuguguuuuguggcaccucagguacauauggaacaggcucauggccugauggggcggauaucaaucucaugccuauauaa

SEQ ID NO: 47640 - RNA, 1410 nt, Artificial Sequence
  derived and/or modified CDS sequence (wt) from neuraminidase__InfluenzaA__ABL67366
augaauccaaaucaaaagauaauaacaauuggcucuguuucucucaccauugccacaauaugcuuccuuaugcaaauugccauccugguaacuacuguaacauugcauuucaagcagcaugaaugcaacucccccccaaacaaccaaguaaugcugugugaaccaacaauaauagaaagaaacauaacagagauaguguaucugaccaacaccaccauagagaaggaaauaugccccaaacuagcagaauacagaaauuggucaaagccgcaauguaacauuacaggauuugcaccuuuuucuaaggacaauucgauucggcuuuccgcugguggggacaucugggugacaagagaaccuuaugugucaugugauccugacaaguguuaucaauuugcccuugggcagggaacaacacuaaacaacgggcauucaaaugacacaguacaugauaggaccccuuaccggacccuauugaugaaugaauuggguguuccauuucauuugggaaccaggcaagugugcauagcaugguccagcucaaguugucacgauggaaaagcauggcugcauguuuguguaacuggggaugauaaaaaugcaacugcuagcuucauuuacaaugggaggcuuguagauaguauugguucaugguccaaaaaaauacucagaacccaggagucggaaugcguuuguaucaauggaacuuguacaguaguaaugacugaugggagcgcuucaggaaaagcugauacuagaauacuauucauugaggaggggaaaaucguucauauuagcacauugucaggaagugcucagcaugucgaggagugcuccuguuauccucgauauccuggugucagaugugucugcagagacaacuggaaaggcuccaauaggcccauuguagauauaaauguaaaggauuauagcauuguuuccaguuaugugugcucaggacuuguuggagacacacccagaaaaaacgacagcuucagcaguagccauugccuagauccuaacaaugaggaagguggucauggggugaaaggcugggccuuugaugauggaaaugacguguggaugggaagaacgaucagcgagaaguuacgcucagguuaugaaaccuucaaagucaucgaaggcugguccaaaccuaacuccaaauuacagauaaauaggcaaguuauaguugaaagagguaacagguccgguuauucugguauuuucuccguugaaggcaaaagcugcaucaaucggugcuuuuauguggaguugauaaggggaaggaaagaggaaacugaagucugguggaccucaaacaguauuguuguguuuuguggcaccucagguacauauggaacaggcucauggccugauggggcggauaucaaucucaugccuauauaa

SEQ ID NO: 47641 - RNA, 1410 nt, Artificial Sequence
  derived and/or modified CDS sequence (wt) from neuraminidase__InfluenzaA__ABL67377
augaauccaaaucaaaagauaauaacaauuggcucugcuucucucaccauugccauaauaugcuuccuuauucaaauugcaauccugguaacuacuguaacauugcauuucaagcagcaugaaugcaacucccccccaaacaaccaaguaaugcugugugaaccaacaauaauagaaagaaacauaacagagauaguguaucugaccaacaccaccauagagaaggaaauaugccccaaacuagcagaauacagaaauuggucaaagccgcaauguaacauuacaggauuugcaccuuuuucuaaggacaauucgauucggcuuuccgcugguggggacaucugggugacaagagaaccuuaugugucaugcgauccugacaaguguuaccaauuugcccuugggcagggaacaacacuaaacaacgggcauucaaaugacacaguacaugauaggaccccuuaccggaccuuauugaugaaugaauuggguguuccauuucauuugggaaccaggcaagugugcauagcaugguccagcucaaguugucacgauggaaaagcauggcugcauguuuguguaacuggggaugauaaaaaugcaacugcuagcuucauuuacaaugggaggcuuguagauaguauuaguucaugguccaaaaaaauacucagaacccaggagucggaaugcguuuguaucaauggaacuuguacaguaguaaugacugaugggagcgcuucaggaaaagcugacacuaaaauauuauucauugaggaggggaaaaucauucauauuagcacauugucaggaagugcucagcaugucgaggagugcuccuguuauccucgauauccuggugucagaugugucugcagagacaauuggaaaggcuccaauaggcccauuguagauauaaauguaaaggauuauagcauuguuuccaguuaugugugcucaggacuuguuggagacacacccagaaaaaacgacagcuucagcaguagccauugccuagauccuaacaaugaggaagguggucauggagugaaaggcugggccuuugaugauggaaaugacguguggaugggaagaacgaucagcgagaaguuacgcucagguuaugaaaccuucaaagucaucgaaggcugguccaauccuaauuccaaauuacagauaaauaggcaaguuauaguugaaagagguaacagguccgguuauucugguauuuucuccguugaaggcaaaagcugcaucaaucggugcuuuuauguggaguugauaaggggaaggaaagaggaaacugaagucugguggaccucaaacaguauuguuguguuuuguggcaccucagguacauauggaacaggcucauggccugauggagcggaucucaaucucaugccuauauaa

SEQ ID NO: 47642 - RNA, 1410 nt, Artificial Sequence
  derived and/or modified CDS sequence (wt) from neuraminidase__InfluenzaA__ABL67388
augaauccaaaucaaaagauaauaacgauuggcucuguuucucucaccauuuccacaauaugcuucuuuaugcaaauugccaucuugauaacuacuguaacauugcauuucaagcaauaugaauucaacucccccccaaacaaccaagugaugcugugugaaccaacaauaauagaaagaaacauaacagagauaguguaucugaccaacaccaccauagagaaggaaauaugccccaaacuagcagaauacagaaauuggucaaagccgcaaugugacauuacaggauuugcaccuuuuucuaaggacaauucgauuaggcuuuccgcugguggggacaucugggugacaagagaaccuuaugugucaugcgauccugacaaauguuaucaauuugcccuuggacagggaacaacacuaaacaacgugcauucaaaugacacaguacaugauaggaccccuuaucggacccuauugaugaaugaguuagguguuccauuucaucuggggacuaagcaagugugcauagcaugguccagcucaaguugucacgauggaaaagcauggcugcauguuuguguaacgggggaugauaaaaaugcaacugcuagcuucauuuacaaugggaggcuuguagauaguauuguuucaugguccaaagaaauccucagaacccaggagucagaaugcguuuguaucaauggaacuuguacaguaguaaugacugaugggagugcuucaggaaaagcugauacuaaaauacuauucauugaggaggggaaaaucguucauacuagcacauugucaggaagugcccagcaugucgaggagugcuccugcuauccucgauauccuggugucaggugugucugcagagacaacuggaaaggcuccaauaggcccaucguagauauaaacauaaaggauuauagcauuguuuccaguuaugugugcucaggacuuguuggagacacacccagaaaaaacgacagcuccagcaguagccauugcuuggauccuaacaaugaagaagguggucauggagugaaaggcugggccuuugaugauggaaaugacguguggaugggaagaacgaucagcgagaaguuacgcucaggauaugaaaccuucaaagucauugaaggcugguccaacccuaauuccaaauugcagauaaauaggcaagucauaguugacagagguaauagguccgguuauucugguauuuucucuguugaaggcaaaagcugcaucaaucggugcuuuuauguggaguugauaaggggaagaaaagaggaaacugaagucuuguggaccucaaacaguauuguuguguuuuguggcaccucagguacauauggaacaggcucauggccugauggggcggacaucaaucucaugccuauauaa

SEQ ID NO: 47643 - RNA, 1410 nt, Artificial Sequence; identical to SEQ ID NO: 47485
  derived and/or modified CDS sequence (wt) from neuraminidase__InfluenzaA__ABL67399

SEQ ID NO: 47644 - RNA, 1410 nt, Artificial Sequence
  derived and/or modified CDS sequence (wt) from neuraminidase__InfluenzaA__ABL67410
augaauccaaaucaaaagauaauaacgauuggcucuguuucucucaccauuuccacaauaugcuucuucaugcaaauugccaucuugauaacuacuguaacauugcauuucaagcaauaugaauucaacucccccccaaacaaccaagugaugcugugugaaccaacaauaauagaaagaaacauaacagagauaguguaucugaccaacaccaccauagagaaggaaauaugccccaaacuagcagaauacagaaauuggucaaagccgcaauguaacauuacaggauuugcaccuuuuucuaaggacaauucgauuaggcuuuccgcugguggggacaucugggugacaagagaaccuuaugugucaugcgauccugacaaguguuaucaauuugcccuuggacagggaacaacacuaaacaacgugcauucaaaugacacaguacaugauaggaccccuuaucggacccuauugaugaaugaguuagguguuccauuucaucuggggaccaagcaagugugcauagcaugguccagcucaaguugucacgacggaaaagcauggcugcauguuuguguaacgggggaugauaaaaaugcaacugcuagcuucauuuacaaugggaggcuuguagauaguauuguuucaugguccaaagaaauccucaggacccaggagucagaaugcguuuguaucaauggaacuuguacaguaguaaugacugaugggagugcuucaggaaaagcugauacuaaaauacuauucauugaggaggggaaaaucguucauacuagcacauugucaggaagugcucagcaugucgaggagugcuccugcuauccucgauauccuggugucagaugugucugcagagacaacuggaaaggcuccaauaggcccauaguagauauaaacauaaaggauuauagcauuguuuccaguuaugugugcucaggacuuguuggagacacacccagaaaaaacgacagcuccagcaguagccauugcuuggauccuaacaaugaagaagguggucauggagugaaaggcugggccuuugaugauggaaaugacguguggaugggaagaacgaucagcgagaaguuacgcucaggauaugaaaccuucaaagucauugaaggcugguccaacccuaauuccaaauugcagauaaauaggcaagucauaguugacagagguaauagguccgguuauucugguauuuucucuguugaaggcaaaagcugcaucaaucggugcuuuuauguggaguugauaaggggaagaaaagaggaaacugaagucuuguggaccucaaacaguauuguuguguuuuguggcaccucagguacauauggaacaggcucauggccugauggggcggacaucaaucucaugccuauauaa

SEQ ID NO: 47645 - RNA, 1410 nt, Artificial Sequence
  derived and/or modified CDS sequence (wt) from neuraminidase__InfluenzaA__ABL67421
augaauccaaaucaaaagauaauaacgauuggcucuauuucucucaccauuuccacaauaugcuucuucaugcaaauugccaucuugauaacuacuguaacauugcauuucaagcaauaugaauucaacucccccccaaacaaccaagugaugcugugugaaccaacaauaauagaaagaaacauaacagagauaguguaucugaccaacaccaccauagagaaggaaauaugccccaaacuagcagaauacagaaauuggucaaagccgcaauguaacauuacaggauuugcaccuuuuucuaaggacaauucgauuaggcuuuccgcugguggggacaucugggugacaagagaaccuuaugugucaugcgauccugacaaguguuaucaauuugcccuuggacagggaacaacacuaaacaacgugcauucaaaugacacaguacaugauaggaccccuuaucggacccuauugaugaaugaguuagguguuccauuucaucuggggaccaagcaagugugcauagcaugguccagcucaaguugucacgauggaaaagcauggcugcauguuuguguaacgggggaugauaaaaaugcaacugcuagcuucauuuacaaugggaggcuuguagauaguauuguuucaugguccaaagaaauccucaggacccaggagucagaaugcguuuguaucaauggaacuuguacaguaguaaugacugaugggagugcuucaggaaaagcugauacuaaaauacuauucauugaggaggggaaaaucguucauacuagcacauugucaggaagugcucagcaugucgaggagugcuccugcuauccucgauauccuggugucagaugugucugcagagacaacuggaaaggcuccaauaggcccauaguagauauaaacauaaaggauuauagcauuguuucuaguuaugugugcucaggacuuguuggagacacacccagaaaaaacgacagcuccagcaguagccauugcuuggauccuaacaaugaagaagguggucauggagugaaaggcugggccuuugaugauggaaaugacguguggaugggaagaacgaucagcgagaaguuacgcucaggauaugaaaccuucaaagucauugaaggcugguccaacccuaauuccaaauugcagauaaauaggcaagucauaguugacagagguaauagguccgguuauucugguauuuucucuguugaaggcaaaagcugcaucaaucggugcuuuuauguggaguugauaaggggaagaaaagaggaaacugaagucuuguggaccucaaacaguauuguuguguuuuguggcaccucagguacauauggaacaggcucauggccugauggggcggacaucaaucucaugccuauauaa

SEQ ID NO: 47646 - RNA, 1350 nt, Artificial Sequence
  derived and/or modified CDS sequence (wt) from neuraminidase__InfluenzaA__ABL67772
augaauccaaauaagaagauaauaaccaucggaucaaucuguaugguaacuggaaugguuagcuuaauguuacaaauugggaacuugaucucaauaugggucagucauucaauucacacagggaaucaacacaaagcugaaccaaucagcaauacuaauuuucuuacugagaaagcuguggcuucaguaaaauuagcgggcaauucaucucuuugccccauuaauggaugggcuguauacaguaaggacaauaguauaaggaucgguuccaagggggauguguuuguuauaagagagccauucaucucaugcucccacuuggaaugcagaacuuucuuuuugacucagggagccuugcugaaugacaagcacuccaaugggacugucaaagacagaagcccucacagaacauuaaugaguuguccugugggugaggcucccuccccauauaacucaagguuugagucuguugcuuggucagcaagugcuugccaugauggcaccaguugguugacaauuggaauuucuggcccagacaauggggcuguggcuguauugaaauacaauggcauaauaacagacacuaucaagaguuggaggaauaacauacugagaacucaagagucugaaugugcauguguaaauggcucuugcuuuacuguaaugacugacggaccaaguaauggucaggcaucacauaagaucuucaaaauggaaaaagggaaagugguuaaaucagucgaauuggaugcuccuaauuaucacuaugaggaaugcuccuguuauccugaugccggcgaaaucacaugugugugcagggauaauuggcauggcucaaaucggccauggguaucuuucaaucaaaauuugaaguaucaaauaggauauauaugcaguggagucuucggagacaauccacgccccaaugauggaacagguaguugugguccgguguccucuaacggggcauaugggguaaaaggguuuucauuuaaauacggcaauggugucuggaucgggagaacaaaaagcacuaauuccaggagcggcuuugaaaugauuugggauccaaauggguggacugaaacggacaguagcuuuucagugaaacaagauaucguagcaauaacugauuggucaggauauagcgggaguuuuguccagcauccagaacugacaggacuagauugcauaagaccuuguuucuggguugaguugaucagagggcggcccaaagagagcacaauuuggacuagugggagcagcauaucuuuuugugguguaaauagugacacuguggguuggucuuggccagacggugcugaguugccauucaccauugacaaguag

SEQ ID NO: 47647 - RNA, 1350 nt, Artificial Sequence
  derived and/or modified CDS sequence (wt) from neuraminidase__InfluenzaA__ABL67783
augaauccaaauaagaagauaauaaccaucggaucaaucuguaugguaacuggaaugguuagcuuaauguuacaaauugggaacuugaucucaauaugggucagucauucaauucacacagggaaucaacacaaagcugaaccaaucagcaauacuaauuuucuuacugagaaagcuguggcuucaguaaaauuagcgggcaauucaucucuuugccccauuaauggaugggcuguauacaguaaggacaacaguauaaggaucgguuccaagggggauguguuuguuauaagagagccauucaucucaugcucccacuuggaaugcagaacuuucuuuuugacucagggagccuugcugaaugacaagcacuccaaugggacugucaaagacagaagcccucacagaacauuaaugaguuguccugugggugaggcucccuccccauauaacucaagguuugagucuguugcuuggucagcaagugcuugccaugauggcaccaguugguugacaauuggaauuucuggcccagacaguggggcuguggcuguauugaaauacaauggcauaauaacagacacuaucaagaguuggaggaauaacauacugagaacucaagagucugaaugugcauguguaaauggcucuugcuuuacuguaaugacugacggaccaaguaauggucaggcaucacauaagaucuucaaaauggaaaaagggaaagugguuaaaucagucgaauuggaugcuccuaauuaucacuaugaggaaugcuccuguuauccugaugccggcgaaaucacaugugugugcagggauaauuggcauggcucaaaucggccauggguaucuuucaaucaaaauuuggaguaucaaauaggauauauaugcaguggaguuuucggagacaauccacgccccaaugauggaacagguaguugugguccgguguccucuaacggggcauaugggguaaaaggguuuucauuuaaauacggcaauggugucuggaucgggagaacaaaaagcacuaauuccaggagcggcuuugaaaugauuugggauccaaauggguggacugaaacggacaguagcuuuucagugaaacaagauaucguagcaauaacugauuggucaggauauagcgggaguuuuguccagcauccagaacugacaggacuagauugcauaagaccuuguuucuggguugaguugaucagagggcggcccaaagagagcacaauuuggacuagugggagcagcauaucuuuuugugguguaaauagugacacuguggguuggucuuggccagacggugcugaguugccauucaccauugacaaguag

SEQ ID NO: 47648 - RNA, 1350 nt, Artificial Sequence
  derived and/or modified CDS sequence (wt) from neuraminidase__InfluenzaA__ABL67796
augaauccaaauaagaagauaauaaccaucggaucaaucuguaugguaacuggaaugguuagcuuaauguuacaaauugggaacuugaucucaauaugggucagucauucaauucacacagggaaucaacacaaagcugaaccaaucagcaauacuaauuuucuuacugagaaagcuguggcuucaguaaaauuagcgggcaauucaucucuuugccccauuaauggaugggcuguauacaguaaggacaacaguauaaggaucgguuccaagggggauguguuuguuauaagagagccauucaucucaugcucccacuuggaaugcagaacuuucuuuuugacucagggagccuugcugaaugacaagcacuccaaugggacugucaaagacagaagcccucacagaacauuaaugaguuguccugugggugaggcucccuccccauauaacucaagguuugagucuguugcuuggucagcaagugcuugccaugauggcaccaguugguugacaauuggaauuucuggcccagacaauggggcuguggcuguauugaaauacaauggcauaauaacagacacuaucaagaguuggaggaauaacauacugagaacucaagagucugaaugugcauguguaaauggcucuugcuuuacuguaaugacugacggaccaaguaauggucaggcaucacauaagaucuucaaaauggaaaaagggaaagugguuaaaucagucgaauuagaugcuccuaauuaucacuaugaggaaugcuccuguuauccugaugccggcgaaaucacaugugugugcagggauaauuggcauggcucaaaucggccauggguaucuuucaaucaaaauuuggaguaucaaauaggauauauaugcaguggaguuuucggagacaauccacgccccaaugauggaacagguaguugugguccgguguccuauaacggggcauaugggguaaaaggguuuucauuuaaauacggcaauggugucuggaucgggagaacaaaaagcacuaauuccaggagcggcuuugaaaugauuugggauccaaauggguggacugaaacggacaguagcuuuucagugaaacaagauaucguagcaauaacugauuggucaggauauagcgggaguuuuguccagcauccagaacugacaggacuagauugcauaagaccuuguuucuggguugaguugaucagagggcggcccaaagagagcacaauuuggacuagugggagcagcauaucuuuuugugguguaaauagugacacuguggguuggucuuggccagacggugcugaguugccauucaccauugacaaguag

SEQ ID NO: 47649 - RNA, 1350 nt, Artificial Sequence
  derived and/or modified CDS sequence (wt) from neuraminidase__InfluenzaA__ABL67807
augaauccaaauaagaagauaauaaccaucggaucaaucuguaugguaacuggaaugguuagcuuaauguuacaaauugggaacuugaucucaauaugggucagucauucaauucacacagggaaucaacacaaagcugaaccaaucagcaauacuaaucuucuuacugagaaagcuguggcuucaguaaaauuagcgggcaauucaucucuuugccccauugauggaugggcuguauacaguaaggacaacaguauaaggaucgguuccaagggggauguguuuguuguaagagagccauucaucucaugcucccacuuggaaugcagaacuuucuuuuugacucagggagccuugcugaaugacaagcacuccaaugggacugucaaagacagaaguccucacagaacauuaaugaguuguccugugggugaggcucccuccccauacaacucaagguuugagucuguugcuuggucagcaagugcuugccaugauggcaccaguugguugacaauuggaauuucuggcccagacaauggggcuguggcuguauugaaauacaauggcauaauaacagacacuaucaagaguuggaggaauaacauacugagaacucaagagucugaaugugcauguguaaauggcucuugcuuuacuguaaugacugacggaccaaguaauggucaggcaucacauaagaucuucaaaauggaaaaaggaaaagugguuaaaucagucgaauuggaugcucccaauuaucacuaugaggaaugcuccuguuauccugaugccggcgaaaucacaugugugugcagggauaauuggcauggcucaaaucggccauggguaucuuucaaucaaaauuuggaguaucaaauaggauauauaugcaguggaguuuucggagacaauccacgccccaaugauggagcagguaguugugguccgguguccucuaacggggcauaugggguaaaaggguuuucauuuaaauacggcaauggugucuggaucgggagaacaaaaagcacuaauuccaggagcggcuuugaaaugauuugggauccaaauggguggacugaaacggacaguagcuuuucagugaaacaagauaucguagcaauaacugauuggucaggauauagcgggaguuuuguccagcauccagaacugacaggacuagauugcauaagaccuuguuucuggguugaguugaucagagggcggcccaaagagagcacaauuuggacuagugggagcagcauaucuuuuugugguguaaauagugacacuguggguuggucuuggccagacggugcugaguugccauucaccauugacaaguag

SEQ ID NO: 47650 - RNA, 1350 nt, Artificial Sequence
  derived and/or modified CDS sequence (wt) from neuraminidase__InfluenzaA__ABL67818
augaauccaaauaagaagauaauaaccaucggaucaaucuguaugguaacuggaaugguuagcuuaauguuacaaauugggaacuugaucucaauaugggucagucauucaauucacacagggaaucaacacaaagcugaaccaaucagcaauacuaaucuucuuacugagaaagcuguggcuucaguaaaauuagcgggcaauucaucucuuugccccauugauggaugggcuguauacaguaaggacaacaguauaaggaucgguuccaagggggauguguuuguuguaagagagccauucaucucaugcucccacuuggaaugcagaacuuucuuuuugacucagggagccuugcugaaugacaagcacuccaaugggacugucaaagacagaaguccucacagaacauuaaugaguuguccugugggugaggcucccuccccauacaacucaagguuugagucuguugcuuggucagcaagugcuugccaugauggcaccaguugguugacaauuggaauuucuggcccagacaauggggcuguggcuguauugaaauacaauggcauaauaacagacacuaucaagaguuggaggaauaacauacugagaacucaagagucugaaugugcauguguaaauggcuauugcuuuacuguaaugacugacggaccaaguaauggucaggcaucacauaagaucuucaaaauggaaaaaggaaaagugguuaaaucagucgaauuggaugcucccaauuaucacuaugaggaaugcuccuguuauccugaugccggcgaaaucacaugugugugcagggauaauuggcauggcucaaaucggccauggguaucuuucaaucaaaauuuggaguaucaaauaggauauauaugcaguggaguuuucggagacaauccacgccccaaugauggagcagguaguugugguccgguguccucuaacggggcauaugggguaaaaggguuuucauuuaaauacggcaauggugucuggaucgggagaacaaaaagcacuaauuccaggagcggcuuugaaaugauuugggauccaaauggguggacugaaacggacaguagcuuuucagugaaacaagauaucguagcaauaacugauuggucaggauauagcgggaguuuuguccagcauccagaacugacaggacuagauugcauaagaccuuguuucuggguugaguugaucagagggcggcccaaagagagcacaauuuggacuagugggagcagcauaucuuuuugugguguaaauagugacacuguggguuggucuuggccagacggugcugaguugccauucaccauugacaaguag

SEQ ID NO: 47651 - RNA, 1350 nt, Artificial Sequence
  derived and/or modified CDS sequence (wt) from neuraminidase__InfluenzaA__ABL67829
augaauccaaauaagaagauaauaaccaucggaucaaucuguaugguaacuggaaugguuagcuuaauguuacaaauugggaacuugaucucaauaugggucagucauucaauucacacagggaaucaacacaaagcugaaccaaucagcaauacuaaucuucuuacugagaaagcuguggcuucaguaaaauuagcgggcaauucaucucuuugccccauuaauggaugggcuguauacaguaaggacaacaguauaaggaucgguuccaagggggauguguuuguuguaagagagccauucaucucaugcucccacuuggaaugcagaacuuucuuuuugacucagggagccuugcugaaugacaagcacuccaaugggacugucaaagacagaaguccucacagaacauuaaugaguuguccugugggugaggcucccuccccauacaacucaagguuugagucuguugcuuggucagcaagcgcuugccaugauggcaccaguugguugacaauuggaauuucuggcccagacaauggggcuguggcuguauugaaauacaauggcauaauaacagacacuaucaagagcuggaggaauaacauacugagaacucaagagucugaaugugcauguguaaauggcuuuugcuuuacuguaaugacugacggaccaagcaauggucaggcaucacauaagaucuucaaaauggaaaaaggaaaagugguuaaaucagucgaauuggaugcucccaauuaucacuaugaggaaugcuccuguuauccugaugccggcgaaaucacaugugugugcagggauaauuggcauggcucaaaucggccauggguaucuuucaaucaaaauuuggaguaucaaauaggauauauaugcaguggaguuuucggagacaauccacgccccaaugauggagcagguaguugugguccgguggccucuaacggggcauaugggguaaaaggguuuucauuuaaauacggcaauggugucuggaucgggagaacaaaaagcacuaauuccaggagcggcuuugaaaugauuugggacccaaauggguggacugaaacggacaguagcuuuucagugaaacaagauaucguagcaauaacugauuggucaggauauagcgggaguuuuguccagcauccagaacugacaggacuagauugcauaagaccuuguuucuggguugaguugaucagagggcggcccaaagagagcacaauuuggacuagugggagcagcauaucuuuuugugguguaaauagugacacuguggguuggucuuggccagacggugcugaguugccauucaccauugacaaguag

SEQ ID NO: 47652 - RNA, 1410 nt, Artificial Sequence
  derived and/or modified CDS sequence (wt) from neuraminidase__InfluenzaA__ABM22018
augaauccaaaucaaaagauaauaacgauuggcucuguuucucucaccauuuccacaauaugcuucuucaugcaaauugccaucuugauaacuacuguaacacugcauuucaagcaauaugaauucaacucccccccaaacaaccaagugaugcugugugaaccaacaauaauagaaagaaacauaacagagauaguguaucugaccaacaccaccauagagaaggaaauaugccccaaacuagcagaauacagaaauuggucaaagccgcaauguaacauuacaggauuugcaccuuuuucuaaggacaauucgauuaggcuuuccgcugguggggacaucugggugacaagagaaccuuaugugucaugcgauccugacaaguguuaucaauuugcccuuggacagggaacaacacuaaacaacgugcauucaaaugacacaguacaugauaggaccccuuaucggacccuauugaugaaugaguuagguguuccauuucaucuggggaccaagcaagugugcauagcaugguccagcucaaguugucacgauggaaaagcauggcugcauguuuguguaacgggggaugauaaaaaugcaacugcuagcuucauuuacaaugggaggcuuguagauaguauuguuucaugguccaaagaaauccucaggacccaggagucagaaugcguuuguaucaauggaacuuguacaguaguaaugacugaugggagugcuucaggaaaagcugauacuaaaauacuauucauugaggaggggaaaaucguucauacuagcacauugucaggaagugcucagcaugucgaggagugcuccugcuauccucgauauccuggugucagaugugucugcagagacaacuggaaaggcuccaauaggcccauaguagauauaaacauaaaggauuauagcauuguuuccaguuaugugugcucaggacuuguuggagacacacccagaaaaaacgacagcuccagcaguagccauugcuuggauccuaacaaugaagaagguggucauggagugaaaggcugggccuuugaugauggaaaugacguguggaugggaagaacgaucagcgagaaguuacgcucaggauaugaaaccuucaaagucauugaaggcugguccaacccuaauuccaaauugcagauaaauaggcaagucauaguugacagagguaauagguccgguuauucugguauuuucucuguugaaggcaaaagcugcaucaaucggugcuuuuauguggaguugauaaggggaagaaaagaggaaacugaagucuuguggaccucaaacaguauuguuguguuuuguggcaccucagguacauauggaacaggcucauggccugauggggcggacaucaaucucaugccuauauaa

SEQ ID NO: 47653 - RNA, 1413 nt, Artificial Sequence; identical to SEQ ID NO: 47568
  derived and/or modified CDS sequence (wt) from neuraminidase__InfluenzaA__ABM22029

SEQ ID NO: 47654 - RNA, 1410 nt, Artificial Sequence; identical to SEQ ID NO: 46726
  derived and/or modified CDS sequence (wt) from neuraminidase__InfluenzaA__ABM22040

SEQ ID NO: 47655 - RNA, 1410 nt, Artificial Sequence
  derived and/or modified CDS sequence (wt) from neuraminidase__InfluenzaA__ABM22062
augaauccaaaucaaaagauaauaacaauuggcucuguuucucucaccauugccacaauaugcuuccuuaugcaaauugccauccugguaacuacuguaacauugcauuucaagcaguaugaaugcaacucccccccaaacaaccaaguaaugcuguaugaaccaacaauaauagaaagaaacauaacagagauaguguaucugaccaacaccaccauagagaaggaaauaugccccaaacuagcagaauacagaaauuggucaaagccgcaauguaacauuacaggauuugcaccuuuuucuaaggacaauucgauucggcuuuccgcugguggggacaucugggugacaagagaaccuuaugugucaugcgauccugacaaguguuaucaauuugcccuugggcagggaacaacacuaaacaacgggcauucaaaugacacaguacaugauaggaccccuuaccggacccuauugaugaaugaauuggguguuccauuucauuugggaaccaggcaagugugcauagcaugguccagcucaaguugucacgauggaaaagcauggcugcauguuuguguaacuggagaugaugaaaaugcaacugcuagcuucauuuacaaugggaggcuuguagauaguauugguucaugguccaaaaaaauacucagaacccaggagucggaaugcguuuguaucaauggaacuuguacaguaguaaugacugaugggagcgcuucaggaaaagcugauacuaaaauacuauucauugaggaggggaaaaucguucauauuagcacauugucaggaagugcucagcaugucgaggagugcuccuguuauccucgauauccuggugucagaugugucugcagagacaacuggaaaggcuccaauaggcccaucguagauauaaauguaaaggauuauagcauuguuuccaguuaugugugcucaggacuuguuggagacacacccagaaaaaacgacagcuucagcaguagccauugccuagauccuaacaaugaggaagguggucauggagugaaaggcugggccuuugaugauggaaaugacguguggaugggaagaacgaucagcgagaaguuacgcucagguuaugaaaccuucaaagucaucgaaggcugguccaaaccuaacuccaaauuacagauaaauaggcaagucauaguugaaagagguaacagguccgguuauucugguauuuucuccguugaaggcaaaagcugcaucaaucggugcuuuuauguggaguugauaaggggaaggaaagaggaaacugaagucugguggaccucaaacaguauuguuguguuuuguggcaccucagguacauauggaacaggcucauggccugauggggcggauaucaaucucaugccuauauaa

SEQ ID NO: 47656 - RNA, 1410 nt, Artificial Sequence
  derived and/or modified CDS sequence (wt) from neuraminidase__InfluenzaA__ABM22073
augaauccaaaucaaaagauaauaacaauuggcucuguuucucucaccauugccacaauaugcuuccuuaugcaaauugccauccugguaacuacuguaacauugcauuucaagcaauaugaaugcaacucccccccaaacaaccaaguaaugcugugugaaccaacaauaauagaaagaaacauaacagagauaguguaucugaccaacaccaccauagagaaggaaauaugccccaaauuagcagaauacagaaauuggucaaagccgcaauguaacauuacaggauuugcaccuuuuucuaaggacaauucgauucggcuuuccgcugguggggacaucugggugacaagagaaccuuaugugucaugcgauccugacaaguguuaucaauuugcccuugggcagggaacaacacuaaacaacgggcauucaaaugacacaguacaugauaggaccccuuaccggacccuauugaugaaugaauuggguguuccauuuaauuugggaaccaggcaagugugcauagcaugguccagcucaaguugucacgauggaaaagcauggcugcauguuuguguaacuggggaugaugaaaaugcaacugcuagcuucauuuacaaugggaagcuuguagauaguauugguucaugguccaaaaaaauacucagaacccaggagucggaaugcguuuguaucaauggaacuugugcaguaguaaugacugaugggagcgcuucaggaaaagcugauacuaaaauacuauucauugaggaggggaaaaucguucauauuagcacauugucaggaagugcucagcaugucgaggagugcuccuguuauccucgauauccuggugucagaugugucugcagagacaacuggaaaggcuccaauaggcccaucguagauauaaauguaaaggauuauagcauuguuuccaguuaugugugcucaggacuuguuggagacacacccagaaaaaacgacagcuucagcaguagccauugucuagauccuaacaaugaggaagguggucauggagugaaaggcugggccuuugaugauggaaaugacguguggaugggaagaacgaucagcgagaaguuacgcucagguuaugaaaccuucaaagucaucgaaggcugguccaaaccuaacuccaaauuacagacaaauaggcaagucauaguugaaagagguaacagguccgguuauucugguauuuucuccguugaaggcaaaagcugcaucaaucggugcuuuuauguggaguugauaaggggaaggaaagaggaaacugaagucugguggaccucaaacaguauuguuguguuuuguggcacuucagguacauauggaacaggcucauggccugauggggcggauaucaaucucaugccuauauaa

SEQ ID NO: 47657 - RNA, 1410 nt, Artificial Sequence; identical to SEQ ID NO: 46603
  derived and/or modified CDS sequence (wt) from neuraminidase__InfluenzaA__ABM22084

SEQ ID NO: 47658 - RNA, 1410 nt, Artificial Sequence
  derived and/or modified CDS sequence (wt) from neuraminidase__InfluenzaA__ABM22095
augaauccaaaucaaaagauaauaacaauuggcucuguuucucucaccauugccacaauaugcuuccuuaugcaaauugccauccugguaacuacuguaacauugcauuucaagcagcaugaaugcaacucccccccaaacaaccaagcaaugcugugugaaccaacaauaauagaaagaaacauaacagagauaguacaucugaccaacaccaccauagagaaggaaauaugccccaaacuaguagaauacagaaauuggucaaagccgcaauguaacauuacaggauuugcaccuuuuucuaaggacaauucgauucggcuuuccgcugguggggacaucugggugacaagagaaccuuaugugucaugcgauccugacaaguguuaucaauuugcccuugggcagggaacaacacuaaacaacgggcauucaaaugacacaguacaugauaggaccccuuaccggacccuauugaugaaugaauuggguguuccauuucauuugggaaccaggcaagugugcauagcaugguccagcucaaguugucacgauggaaaagcauggcugcauguuuguguaacuggggaugauaaaaaugcaacugcuagcuucauuuacaaugggaggcuuguagauaguauugguucaugguccaaaaaaauacucagaacccaggagucggaaugcguuuguaucaauggaacuuguacaguaguaaugacugaugggagcgcuucaggaaaagcugauacuaaaauacuauucauugaggaggggaaaaucguucauauuagcacauugucaggaagugcucagcaugucgaggagugcuccuguuauccucgauauccuggugucagaugugucugcagagacaacuggaaaggcuccaauaggcccauuguagauauaaauguaaaggauuauagcauuguuuccaguuaugugugcucaggacuuguuggagacacacccagaaaaaacgacagcuucagcaguagccauugccuagauccuaacaaugaggaagguggucauggagugaaaggcugggccuuugaugauggaaaugacguguggaugggaagaacgaucagcgagaaguuacgcucagguuaugaaaccuucaaagucaucgaaggcugguccaaaccuaacuccaaauuacagauaaauaggcaaguuauaguugaaagagguaacagguccgguuauucugguauuuucuccguugaaggcaaaagcugcaucaaucggugcuuuuauguggaguugauaaggggaaggaaagaggaaacugaagucugguggaccucaaacaguauuguuguguuuuguggcaccucagguacauauggaacaggcucauggccugauggggcggauaucaaucucaugccuauauaa

SEQ ID NO: 47659 - RNA, 1410 nt, Artificial Sequence; identical to SEQ ID NO: 46603
  derived and/or modified CDS sequence (wt) from neuraminidase__InfluenzaA__ABM22106

SEQ ID NO: 47660 - RNA, 1410 nt, Artificial Sequence; identical to SEQ ID NO: 46603
  derived and/or modified CDS sequence (wt) from neuraminidase__InfluenzaA__ABM22117

SEQ ID NO: 47661 - RNA, 1410 nt, Artificial Sequence
  derived and/or modified CDS sequence (wt) from neuraminidase__InfluenzaA__ABM22128
augaauccaaaucaaaagauaauaacaauuggcucugcuucucucaccauugccacaauaugcuuccuuauucaaauugcaauccugguaacuacuguaacauugcauuucaagcagcaugaaugcaacucccccccaaacaaccaaguaaugcugugugaaccaacaauaauagaaagaaacauaacagagauaguguaucugaccaacaccaccauagagaaggaaauaugccccaaacuagcagaauacagaaauuggucaaagccgcaauguaacauuacaggauuugcaccuuuuucuaaggacaauucgauucggcuuuccgcugguggggacaucugggugacaagagaaccuuaugugucaugcgauccugacaaguguuaccaauuugcccuugggcagggaacaacacuaaacaacgggcauucaaaugacacaguacaugauaggaccccuuaccggaccuuauugaugaaugaauuggguguuccauuucauuugggaaccaggcaagugugcauagcaugguccagcucaaguugucacgauggaaaagcauggcugcauguuuguguaacuggggaugauaaaaaugcaacugcuagcuucauuuacaaugggaggcuuguagauaguauuaguucgugguccaaaaaaauacucagaacccaggagucggaaugcguuuguaucaauggaacuuguacaguaguaaugacugaugggagcgcuucaggaaaagcugauacuaaaauauuauucauugaggaggggaaaaucauucauauuagcacauugucaggaagugcucagcaugucgaggagugcuccuguuauccucgauauccuggugucagaugugucugcagagacaauuggaaaggcuccaauaggcccauuguagauauaaauguaaaggauuauagcauuguuuccaguuaugugugcucaggacuuguuggagacacacccagaaaaaacgacagcuucagcaguagccauugccuagauccuaacaaugaggaagguggucauggagugaaaggcugggccuuugaugauggaaaugacguguggaugggaagaacgaucagcgagaaguuacgcucagguuaugaaaccuucaaagucaucgaaggcugguccaauccuaauuccaaauuacagauaaauaggcaaguuauaguugaaagagguaacagguccgguuauucugguauuuucuccguugaaggcaaaagcugcaucaaucggugcuuuuauguggaguugauaaggggaaggaaagaggaaacugaagucugguggaccucaaacaguauuguuguguuuuguggcaccucagguacauauggaacaggcucauggccugauggagcggauaucaaucucaugccuauauaa

SEQ ID NO: 47662 - RNA, 1410 nt, Artificial Sequence
  derived and/or modified CDS sequence (wt) from neuraminidase__InfluenzaA__ABM22139
augaauccaaaucaaaagauaauaacgauuggcucuguuucucucaccauuuccacaauaugcuucuucaugcaaauugccaucuugauaacuacuguaacauugcauuucaagcaauaugaauucaacucccccccaaacaaccaagugaugcugugugaaccaacaauaauagaaagaaacauaacagagauaguguaucugaccaacaccaccauagagaaggaaauaugccccaaacuagcagaauacagaaauuggucaaagccgcaauguaacauuacaggauuugcaccuuuuucuaaggacaauucgauuaggcuuuccgcugguggggacaucugggugacaagagaaccuuaugugucaugcgauccugacaaguguuaucaauuugcccuuggacagggaacaacacuaaacaacgugcauucaaaugacacaguacaugauaggaccccuuaucggacccuauugaugaaugaauuagguguuccauuucaucuggggaccaagcaagugugcauagcaugguccaguucaaguugucacgacggaaaagcauggcugcauguuuguguaacgggggaugauaaaaaugcaacugcuagcuucauuuacaaugggaggcuuguagauaguauuguuucaugguccaaagaaauccucaggacccaggagucagaaugcguuuguaucaauggaacuuguacaguaguaaugacugaugggagugcuucagaaaaagcugauacuaaaauacuauucauugaggaggggaaaaucguucauacuagcacauugucaggaagugcucagcaugucgaggagugcuccugcuauccucgauauccuggugucagaugugucugcagagacaacuggaaaggcuccaauaggcccauaguagauauaaacauaaaggauuauagcauuguuuccaguuaugugugcucaggacuuguuggagacacacccagaaaaaacgacagcuccagcaguagccauugcuuggauccuaacaaugaagaagguggucauggagugaaaggcugggccuuugaugauggaaaugacguguggaugggaagaacgaucagcgagaaguuacgcucaggauaugaaaccuucaaagucauugaaggcugguccaacccuaauuccaaauugcagauaaauaggcaagucauaguugacagagguaauagguccgguuauucugguauuuucucuguugaaggcaaaagcugcaucaaucggugcuuuuauguggaguugauaaggggaagaaaagaggaaacugaagucuuguggaccucaaacaguauuguuguguuuuguggcaccucagguacauauggaacaggcucauggccugauggggcggacaucaaucucaugccuauauaa

SEQ ID NO: 47663 - RNA, 1410 nt, Artificial Sequence
  derived and/or modified CDS sequence (wt) from neuraminidase__InfluenzaA__ABM22150
augaauccaaaucaaaagauaauaacgauuggcucuguuucucucaccauuuccacaauaugcuucuucaugcaaauugccaucuugauaacuacuguaacauugcauuuuaagcaauaugaauucaacucccucccaaacaaccaagugaugcugugugaaccaacaauaauagaaagaaacauaacagagauaguguaucugaccaacaccaccauagagaaggaaauaugccccgaacuagcagaauacaggaauuggucaaagccgcaaugugacauuacaggauuugcaccuuuuucuaaggacaauucgauuaggcuuuccgcugguggggacaucugggugacaagagaaccuuaugugucaugcgauccugacaaguguuaucaauuugcccuuggacagggaacaacacuaaacaacgugcauucaaaugacacaguacaugauaggaccccuuaucggacccuauugaugaaugaguuggguguuccauuucaucuggggaccaagcaagugugcauagcaugguccagcucaaguugucacgauggaaaagcauggcugcauguuuguguaacgggggaugauaaaaaugcaacugcuagcuucauuuacaaugggaggcuuguagauaguauuguuucaugguccaaaaaaauccucaggacccaggagucagaaugcguuuguaucaauggaacuuguacaguaguaaugacugaugggagugcuucaggaaaagcugauacuaaaauacuauucauugaggaggggaaaaucguccauacuagcacauugucaggaagugcucagcaugucgaggagugcuccugcuauccucgauauccuggugucagaugugucugcagagacaacuggaaaggcuccaauaggcccaucguagauauaaacauaaaggauuauagcauuguuuccaguuaugugugcucaggacuuguuggagacacacccagaaaaaacgacagcuccagcaguagccauugcuuggauccuaacaaugaagaagguggucauggagugaaaggcugggccuuugaugauggaaaugacguguggaugggaagaacaaucagcgagaaguuacgcucaggauaugaaaccuucaaagucauugaaggcugguccaacccuaauuccaaauugcagauaaauaggcaagucauaguugacagagguaauagguccgguuauucugguauuuucucuguugaaggcaaaagcugcaucaaucggugcuuuuauguggaguugauaaggggaagaaaagaggaaacugaagucuuguggaccucaaacaguauuguuguguuuuguggcaccucagguacauauggaacaggcucauggccugauggggcggacaucaaucucaugccuauauaa

SEQ ID NO: 47664 - RNA, 1413 nt, Artificial Sequence; identical to SEQ ID NO: 47071
  derived and/or modified CDS sequence (wt) from neuraminidase__InfluenzaA__ABM22161

SEQ ID NO: 47665 - RNA, 1413 nt, Artificial Sequence
  derived and/or modified CDS sequence (wt) from neuraminidase__InfluenzaA__ABM22172
augaauccaaaucagaaaauaauaaccauuggaucaaucuguaugacaaucggaauaauuagucuaauauugcaaauaggaaauauuauuucaauauggguuagccacucaauccaaacuggaagucaaaaccacacuggaauaugcaaccaaagaaucauuaccuaugaaaauagcaccuggguaaaucaaacauaugucaauauuaacaacacuaacguuguugcuggaaaggacacaacuucagugacauuagccggcaauucaucucuuuguccuauccgugggugggcuauauacagcaaagacaacagcauaagaauugguuccaaaggagauguuuuugucauaagagaaccuuuuauaucauguucucacuuggaaugcagaaccuuuuuucugacccaaggugcucuauuaaaugacaagcauucaaaugggaccguuaaggacagaagcccuuauagggccuuaaugagcuguccuauaggugaagcuccgucuccauacaauucaagguuugaaucaguugcuuggucagcaagcgcaugucaugauggcaugggcuggcuaacaaucggaauuucugguccagaugauggagcaguggcuguacuaaaauacaacggcauaauaacugaaaccauaaaaaguuggaggaagcgaauauuaagaacacaagagucugaaugugucuguguaaacgguucauguuuuaccauaaugaccgauggcccgaguaauggaccugccucguacagaaucuucaaaaucgagaaggggaagauuacuaaaucaauagaguuggaugcacccaauucucauuacgaggaauguuccuguuacccagacacuggcacagugaugugugugugcagagacaauuggcaugguucgaaucgaccuugggugucuuuuaaucaaaaccuggauuaucaaauaggauacaucugcagugggguguucggugacaauccgcgucccaaagauggaaaaggcagcugugauccaguaacuguugauggagcagacggaguaaagggguuuucauacagguaugguaaugguguuuggauaggaaggacuaaaaguaacagcuccagaaagggauuugagaugauuugggauccuaauggauggacagauaccgauaguaauuucuuagugaaacaggauguaguggcaaugacugauuggucaggguacagcggaaguuucguucaacauccugagcuaacaggauuggacuguaugaggccuugcuucuggguugaauuaaucagaggacgaccuagagaaaagacaacaaucuggacuagugggagcagcauuucuuuuuguggagugaauagugauacugcaaauuggucuuggccagacggugccgaguugccauucaccauugacaaguag

SEQ ID NO: 47666 - RNA, 1413 nt, Artificial Sequence; identical to SEQ ID NO: 47071
  derived and/or modified CDS sequence (wt) from neuraminidase__InfluenzaA__ABM22183

SEQ ID NO: 47667 - RNA, 1413 nt, Artificial Sequence
  derived and/or modified CDS sequence (wt) from neuraminidase__InfluenzaA__ABM22194
augaauccaaaucagaaaauaauaaccauuggaucaaucuguaugacaaucggaauaauuagucuaauauugcaaauaggaaauauuauuucaauaugggucagccacucaauccaaacuggaagucaaaaccacacuggaauaugcaaccaaagaaucauuaccuaugaaaauagcaccuggguaaaucaaacauaugucaauauuaacaacacuaacguuguugcuggaaaggacacaacuucagugacauuagccggcaauucaucucuuuguccuauccgugggugggcuauauacagcaaagacaacagcauaagaauugguuccaaaggagauguuuuugucauaagagaaccuuuuauaucauguucucacuuggaaugcagaaccuuuuuucugacccaaggugcucuauuaaaugacaagcauucaaaugggaccguuaaagacagaagcccuuauagggccuuaaugagcuguccuauaggugaagcuccgucuccauacaauucaagguuugaaucaguugcuuggucagcaagcgcaugucaugauggcaugggcuggcuaacaaucggaauuucugguccagaugauggagcaguggcuguacuaaaauacaacggcauaauaacugaaaccauaaaaaguuggaggaagcgaauauuaagaacacaagaaucugaaugugucuguguaaacgguucauguuuuaccauaaugaccgauggcccgaguaauggaccugccucguacagaaucuucaaaaucgagaaggggaagauuacuaaaucaauagaguuggaugcacccaauucucauuacgaggaauguuccuguuacccagacaccggcacagugaugugugugugcagagacaauuggcaugguucgaaucgaccuugggugucuuuuaaucaaaaccuggauuaucaaauaggauacaucugcagugggguguucggugacaauccgcgucccaaagauggaaaaggcagcugugauccaguaacuguugauggagcagacggaguaaagggguuuucauacagguaugguaaugguguuuggauaggaaggacuaaaaguaacagcuccagaaagggauuugagaugauuugggauccuaauggauggacagauaccgauaguaauuucuuagugaaacaggauguaguggcaaugacugauuggucaggguacagcggaaguuucguucaacauccugagcuaacaggauuagacuguaugaggccuugcuucuggguugaauuaaucagaggacgaccuagagaaaagacaacaaucuggacuagugggagcagcauuucuuuuuguggcgugaauagugauacugcaaauuggucuuggccagacggugccgaguugccauucaccauugacaaguag

SEQ ID NO: 47668 - RNA, 1413 nt, Artificial Sequence; identical to SEQ ID NO: 47071
  derived and/or modified CDS sequence (wt) from neuraminidase__InfluenzaA__ABM22205

SEQ ID NO: 47669 - RNA, 1413 nt, Artificial Sequence; identical to SEQ ID NO: 47071
  derived and/or modified CDS sequence (wt) from neuraminidase__InfluenzaA__ABM22216

SEQ ID NO: 47670 - RNA, 1413 nt, Artificial Sequence; identical to SEQ ID NO: 47075
  derived and/or modified CDS sequence (wt) from neuraminidase__InfluenzaA__ABM22227

SEQ ID NO: 47671 - RNA, 1413 nt, Artificial Sequence; identical to SEQ ID NO: 47576
  derived and/or modified CDS sequence (wt) from neuraminidase__InfluenzaA__ABM22238

SEQ ID NO: 47672 - RNA, 1413 nt, Artificial Sequence
  derived and/or modified CDS sequence (wt) from neuraminidase__InfluenzaA__ABM22271
augaauccaaaucaaaaaauaauaaccauuggaucaaucaguauuguaauuggaauaauuagucugauauugcaaauaggaaauauuauuucaauaugggcuagccacucaauccaaacuggaagucaaaaccacacuggaauaugcaaccaaagaaucauuacauaugagaauagcaccuggguaaaucaaacauauguuaauauuaacaacacuaauguuguugcuggaaaggacaaaaccucaaugacauuggccggcaauucaucucuuugcccuauccguggaugggcuauauacacaaaagacaacagcauaagaauugguuccaaaggagauguuuuugucauaagagagccuuuuauaucauguucucacuuggaaugcagaaccuuuuuucugacccaaggugcucuauuaaaugacaagcauucaaaugggaccguuaaggacagaagcccuuauagggccuuaaugagcuguccucuaggugaagcuccgucuccauacaauucaagauuugaaucaguugcuuggucagcaagcgcaugccaugauggcuugggcuggcuaacaaucggaauuucugguccagauaauggggcaguggcuguacuaaaauacaacggcauaauaacugaaaccauuaaaaguuggaagaagcgaauauuaagaacacaagagucugaaugugucuguaugaacgguucauguuuuaccauaaugaccgauggcccgaguaauggggccgcaucguacagaaucuucaaaaucgagaaagggagaguuacuaaaucaauagaguugggugcacccaauuaucauuacgaggaauguucauguuacccagacaccggcacagugaugugugugugcagggacaauuggcacgguucaaaucgaccuugggugucuuuuaaucaaaaccuggauuaucaaauaggauacaucugcagugggguguucggugacaauccgcgucccaaagauggagaaggcagcuguaauccagugacuguugauggagcagacggaguaaagggguuuucauacagauaugguaaugguguuuggauaggaaggacuaaaaguaacagacucagaaagggauuugagaugauuugggauccuaauggauggacagauaccgacagugauuucucaaugaaacaggauaucguggcaaugacugauuggucaggguacagcggaaguuuuguucaacauccugagcuaacaggauuggacuguaugagaccuugcuucuggguugaauuagucagagggcuaccuagagaaaauacaacaaucuggacuagugggagcagcauuucuuuuuguggcguaaauagcgauacugcaaacuggucuuggccagacggugccgaguugccauucaccauugacaaguag

SEQ ID NO: 47673 - RNA, 1413 nt, Artificial Sequence; identical to SEQ ID NO: 46980
  derived and/or modified CDS sequence (wt) from neuraminidase__InfluenzaA__ABM22282

SEQ ID NO: 47674 - RNA, 1410 nt, Artificial Sequence; identical to SEQ ID NO: 46357
  derived and/or modified CDS sequence (wt) from neuraminidase__InfluenzaA__ABM22304

SEQ ID NO: 47675 - RNA, 1410 nt, Artificial Sequence; identical to SEQ ID NO: 46357
  derived and/or modified CDS sequence (wt) from neuraminidase__InfluenzaA__ABM22315

SEQ ID NO: 47676 - RNA, 1410 nt, Artificial Sequence; identical to SEQ ID NO: 46357
  derived and/or modified CDS sequence (wt) from neuraminidase__InfluenzaA__ABM22326

SEQ ID NO: 47677 - RNA, 1410 nt, Artificial Sequence; identical to SEQ ID NO: 46357
  derived and/or modified CDS sequence (wt) from neuraminidase__InfluenzaA__ABM22337

SEQ ID NO: 47678 - RNA, 1410 nt, Artificial Sequence; identical to SEQ ID NO: 46358
  derived and/or modified CDS sequence (wt) from neuraminidase__InfluenzaA__ABM22348

SEQ ID NO: 47679 - RNA, 1410 nt, Artificial Sequence; identical to SEQ ID NO: 46358
  derived and/or modified CDS sequence (wt) from neuraminidase__InfluenzaA__ABM22359

SEQ ID NO: 47680 - RNA, 1410 nt, Artificial Sequence; identical to SEQ ID NO: 46407
  derived and/or modified CDS sequence (wt) from neuraminidase__InfluenzaA__ABM22370

SEQ ID NO: 47681 - RNA, 1413 nt, Artificial Sequence; identical to SEQ ID NO: 46937
  derived and/or modified CDS sequence (wt) from neuraminidase__InfluenzaA__ABM66867

SEQ ID NO: 47682 - RNA, 1413 nt, Artificial Sequence; identical to SEQ ID NO: 47075
  derived and/or modified CDS sequence (wt) from neuraminidase__InfluenzaA__ABM66900

SEQ ID NO: 47683 - RNA, 1413 nt, Artificial Sequence; identical to SEQ ID NO: 47071
  derived and/or modified CDS sequence (wt) from neuraminidase__InfluenzaA__ABM66911

SEQ ID NO: 47684 - RNA, 1410 nt, Artificial Sequence; identical to SEQ ID NO: 46358
  derived and/or modified CDS sequence (wt) from neuraminidase__InfluenzaA__ABM66922

SEQ ID NO: 47685 - RNA, 1410 nt, Artificial Sequence; identical to SEQ ID NO: 46358
  derived and/or modified CDS sequence (wt) from neuraminidase__InfluenzaA__ABM66933

SEQ ID NO: 47686 - RNA, 1410 nt, Artificial Sequence; identical to SEQ ID NO: 46358
  derived and/or modified CDS sequence (wt) from neuraminidase__InfluenzaA__ABM66944

SEQ ID NO: 47687 - RNA, 1410 nt, Artificial Sequence; identical to SEQ ID NO: 46407
  derived and/or modified CDS sequence (wt) from neuraminidase__InfluenzaA__ABM66955

SEQ ID NO: 47688 - RNA, 1410 nt, Artificial Sequence; identical to SEQ ID NO: 46407
  derived and/or modified CDS sequence (wt) from neuraminidase__InfluenzaA__ABM66966

SEQ ID NO: 47689 - RNA, 1410 nt, Artificial Sequence; identical to SEQ ID NO: 46407
  derived and/or modified CDS sequence (wt) from neuraminidase__InfluenzaA__ABM66977

SEQ ID NO: 47690 - RNA, 1410 nt, Artificial Sequence; identical to SEQ ID NO: 46407
  derived and/or modified CDS sequence (wt) from neuraminidase__InfluenzaA__ABM66988

SEQ ID NO: 47691 - RNA, 1410 nt, Artificial Sequence; identical to SEQ ID NO: 46407
  derived and/or modified CDS sequence (wt) from neuraminidase__InfluenzaA__ABM66999

SEQ ID NO: 47692 - RNA, 1410 nt, Artificial Sequence; identical to SEQ ID NO: 46407
  derived and/or modified CDS sequence (wt) from neuraminidase__InfluenzaA__ABM67010

SEQ ID NO: 47693 - RNA, 1410 nt, Artificial Sequence; identical to SEQ ID NO: 46407
  derived and/or modified CDS sequence (wt) from neuraminidase__InfluenzaA__ABM67021

SEQ ID NO: 47694 - RNA, 1413 nt, Artificial Sequence
  derived and/or modified CDS sequence (wt) from neuraminidase__InfluenzaA__ABM67054
augaauccaaaucaaaaaauaauaaccauuggaucaaucaguauagcaaucggaacaauuagucuaauguugcaaauaggaaauaugauuucaauaugggcuagucacucaauccaaacuggaagucaaaaccacacuggaauaugcaaccaaagaaucaucacauaugaaaacagcaccugggugaaucacacauauguuaauauuaacaacacuaauguuguugcuggaaaggacaaaacuucagugacauuggccggcaauucaucucuuuguucuaucaguggaugggcuauauacacaaaagacaacagcauaagaauuggcuccaaaggagauguuuuugucauaagagaaccuuucauaucauguucucacuuggaaugcagaaccuuuuuucugacccaaggugcucuauuaaaugacaaacauucaaauggaaccguuaaggacagaaguccuuauagggccuuaaugagcuguccucuaggugaagcuccguccccauacaauucaaaguuugaaucaguugcauggucagcaagcgcaugccaugauggcaugggcugguuaacaaucggaauuucugguccagacaauggagcuguggcuguacuaaaauacaacggaauaauaacugaaaccauaaaaaguuggaaaaagcgaauauugagaacacaagagucugaaugugucugugugaacgggucauguuucaccauaaugaccgauggcccgaguaauggggccgccucguacaaaaucuucaagaucgaaaaggggaagguuacuaaaucaauagaguugaaugcacccaauuuucauuaugaggaauguuccuguuacccagacacuggcacagugauguguguaugcagggacaauuggcauggcucaaaucgaccuugggugucuuuuaaucaaaacuuggauuaucaaauaggauacaucugcaguggaguguucggugacaauccgcgucccaaagauggaaagggcagcuguaauccagugacuguugauggagcagacggaguuaagggguuuucauacaaauaugguaaugguguuuggauaggaaggacuaaaaguaacagacuuagaaagggguuugagaugauuugggauccuaauggauggacagauaccgacagugauuucucagugaaacaggauguuguggcaauaacugauuggucaggguacagcggaaguuucguucaacauccugaguuaacaggauuggacuguauaagaccuugcuucuggguugaguuagucagaggacugccuagagaaaauacaacaaucuggacuagugggagcagcauuucuuuuuguggcguugauagugauacugcaaacuggucuuggccagacggugcugaguugccguucaccauugacaaguag

SEQ ID NO: 47695 - RNA, 1350 nt, Artificial Sequence
  derived and/or modified CDS sequence (wt) from neuraminidase__InfluenzaA__ABM68048
augaauccaaaucagaagauaauaaccaucggaucaaucuguaugguaauuggaauaguuagcuuaauguuacaaauugggaacauaaucucaauauggaucagucauucaauucaaacagggaaucaaugccaagcuggaccaaucagcaauacuaaauuucuuacugagaaagcuguggcuucaguaacauuagcgggcaauucaucucuuugucccauuagcggaugggcuguauacaguaaggacaacaguauaaggaucgguuccaggggggauguguuuguuauaagagagucguucaucucaugcucccacuuggaaugcagaacuuucuuuuugacucagggagccuugcugaaugacaagcacuccaauggaacugucaaagacagaagcccucacagaacauuaaugaguuguccugugggugaggcucccucuccauauaacucaagguuugagucuguugcuuggucagcaagugcuugccaugauggcaccaguugguugacaauuggaauuucugguccagacaauggggcuguggcuguauugaaauacaauggcauaauaacagacaccaucaagaguuggaggaacaacauacugagaacucaagagucugaaugugcauguguaaauggcucuugcuuuacuguaaugacugauggaccaaguaaugggcaggcaucauauaagaucuucaaaauggaaaaggggaaagugguuaaaucagucgaauuggaugcuccuaauuaucacuaugaggagugcuccuguuauccugaugccggugaaaucacgugugugugcagggauaguuggcauggcucaaauaggccauggguaucuuucaaucaaaauuuggaguaucaaauaggauauauaugcaguggaguuuucggagacaauccacgccccaaugauggaacagguaguugugguccgguguccccuaacggggcauauggaguaaaaggguuuucauuuaaauacggcaaugguguuuggaucgggagaaccaaaagcacuaauuccaggagcggcuuugaaaugauuugggacccaaauggguggacuggaacggacaguagcuuuucggugaagcaagauaucguagcaauaacugauuggucaggauauagcgggaguuuuguccagcauccagaacugacaggauuagauugcauaagaccuuguuucuggguugaguuaaucagagggcggccuaaagagagcacaauuuggaccaguggaagcagcauaucuuuuugugguguaaauagugacacuguuaguuggucuuggccagacggugcugaguugccauucaccauugacaaguag

SEQ ID NO: 47696 - RNA, 1350 nt, Artificial Sequence
  derived and/or modified CDS sequence (wt) from neuraminidase__InfluenzaA__ABM68049
augaauccaaaucagaagauaauaaccaucggaucaaucuguaugguaauuggaauaguuagcuuaauguuacaaauugggaacauaaucucaauauggaucagucauucaauucagacagggaaucaaugccaagcugaaccaaucagcaauacuaaauuucuuacugagaaagcuguggcuucaguaacauuagcgggcaauucaucucuuugucccauuagcggaugggcuguauacaguaaggacaacaguauaaggaucgguuccaggggggauguguuuguuauaagagagccguucaucucaugcucccacuuggaaugcagaacuuucuuuuugacucagggagccuugcugaaugacaagcacuccaauggaacugucaaagacagaagcccucacagaacauuaaugaguuguccugugggugaggcucccuccccauauaacucaagguuugagucuguugcuuggucagcaagugcuugccaugauggcaccaguugguugacaauuggaauuucugguccagacaauggggcuguggcuguauugaaauacaauggcauaauaacagacaccaucaagaguuggaggaacaacauacugagaacucaagagucugaaugugcauguguaaauggcucuugcuuuacuguaaugacugauggaccaaguagugggcaggcaucauauaagaucuucaaaauggaaaaggggaaagugguuaaaucagucgaauuggaugcuccuaauuaucacuaugaggagugcuccuguuauccugaugccggugaaaucacgugugugugcagggauaguuggcauggcucaaauaggccauggguaucuuucaaucaaaauuuggaguaucaaauaggauauauaugcaguggaguuuucggagacaauccacgccccaaugauggaacagguaguugugguccgguguccccuaacggggcauauggaguaaaaggguuuucauuuaaauacggcaaugguguuuggaucgggagaaccaaaagcacuaauuccaggagcggcuuugaaaugauuugggacccaaauggguggacuggaacggacaguagcuuuucggugaagcaagauaucguagcaauaacugauuggucaggauauagcgggaguuuuguccagcauccagaacugacaggauuagauugcauaagaccuuguuucuggguugaguuaaucagagggcggccuaaagagagcacaauuuggaccaguggaagcagcauaucuuuuugugguguaaauagugacacuguuaguuggucuuggccagacggugcugaguugccauucaccauugacaaguag

SEQ ID NO: 47697 - RNA, 1350 nt, Artificial Sequence
  derived and/or modified CDS sequence (wt) from neuraminidase__InfluenzaA__ABM90436
augaauccaaaucagaagauaauaaccauuggaucaaucuguaugguaauuggaauaguuagcuuaauguuacaaauugggaacaugaucucaauaugggucagucauucaauucagaaagggaaucaacaccaagcugaaucaaucagcaauacuaacccucuuacugagaaagcuguggcuucaguaacauuagcgggcaauucaucucuuugccccauuagaggaugggcuguacacaguaaggacaacaauauaaggaucgguuccaagggggauguguuuguuauuagagagccguucaucucaugcucccaccuggaauguagaacuuucuucuugacucagggagccuugcugaaugacaagcacuccaacgggacugucaaagacagaagcccucacagaacauuaaugaguuguccugugggugaggcucccucuccauauaacucaagguuugagucuguugcuuggucagcaagugcuugccaugauggcaccaguugguugacaauuggaauuucuggcccagacaaugaggcuguggcuguauugaaauacaauggcauaauaacagacacuaucaagaguuggaggaacaacauacugaggacucaagagucugaaugugcauguguaaauggcucuugcuuuacuguaaugacugauggaccaaguaaugggcaggcaucauauaagaucuucaaaaugaaaaaaggaaaaguggucaaaucagucgaauuggaugcuccuaauuaucacuaugaggagugcuccuguuauccugaugccggcgaaaucacauguguuugcagggauaauuggcauggcucaaauaggccauggguauccuucaaucaaaauuuggaguaucaaauaggauauauaugcaguggaguuuucggagacaauccacgccccaaugauggaacagguaguuguggcccgauguccccuaacggggcauaugggguaaaaggguuuucauuuaaauacggcaaugguguuuggaucgggagaaccaaaagcacuaacuccaggagcggcuuugaaaugauuugggauccaaauggguggacuggaacggacaguagcuuuucagugaaacaagauauaguagcaauaacugauuggucaggauauagcgggaguuuuguccagcauccagaacuuacaggauuagauugcauaagaccuuguuucuggguugaguuaaucagagggcggcccaaagagagcacaauuuggacuagugggaguagcauaucuuuuugugguguaaauagugacacugugagcuggucuuggccagacggugcugaguugccauucaccauugacaaguag

SEQ ID NO: 47698 - RNA, 1350 nt, Artificial Sequence; identical to SEQ ID NO: 47697
  derived and/or modified CDS sequence (wt) from neuraminidase__InfluenzaA__ABM90447

SEQ ID NO: 47699 - RNA, 1350 nt, Artificial Sequence; identical to SEQ ID NO: 47697
  derived and/or modified CDS sequence (wt) from neuraminidase__InfluenzaA__ABM90458

SEQ ID NO: 47700 - RNA, 1350 nt, Artificial Sequence; identical to SEQ ID NO: 47697
  derived and/or modified CDS sequence (wt) from neuraminidase__InfluenzaA__ABM90469

SEQ ID NO: 47701 - RNA, 1350 nt, Artificial Sequence
  derived and/or modified CDS sequence (wt) from neuraminidase__InfluenzaA__ABM90491
augaauccaaaucagaagauaauaaccauuggaucaaucuguaugguaauuggaauaguuagcuuaauguuacaaauugggaacaugaucucaauaugggucagucauucaauucaaaaagggaaucaacaccaagcugaaucaaucagcaauacuaacccucuuacugagaaagcuguggcuucaguaacauuagcgggcaauucaucucuuugccccauuagaggaugggcuguacacaguaaggacaacaauauaaggaucgguuccaagggggauguguuuguuauuagagagccguucaucucaugcucccaccuggaauguagaacuuucuucuugacucagggagccuugcugaaugacaagcacuccaacgggacugucaaagacagaagcccucacagaacauuaaugaguuguccugugggugaggcucccucuccauauaacucaagguuugagucuguugcuuggucagcaagugcuugccaugauggcaccaguugguugacaauuggaauuucuggcccagacaaugaggcuguggcuguauugaaauacaauggcauaauaacagacacuaucaagaguuggaggaacaacauacugagaacucaagagucugaaugugcauguguaaauggcucuugcuuuacuguaaugacugauggaccaaguaaugggcaggcaucauauaagaucuucaaaaugaaaaaaggaaaagugaucaaaucagucgaauuggaugcuacuaauuaucacuaugaggagugcuccuguuauccugaugccggcgaaaucacauguguuugcagggauaauuggcauggcucaaauaggccauggguauccuucaaucaaaauuuggaguaccaaauaggauauauaugcaguggaguuuucggagacaauccacgccccaaugauggaacagguaguuguggcccgauguccccuaacggggcauaugggguaaaaggguuuucauuuaaauacggcaaugguguuuggaucgggagaaccaaaagcacuaacuccaggagcggcuuugaaaugauuugggauccaaauggguggacuggaacggacaguagcuuuucagugaaacaagauauaguagcaauaacugauuggucaggauauagcgggaguuuuguccagcauccagaacugacaggacuagauugcauaagaccuuguuucuggguugaguuaaucagagggcggcccaaagagagcacaauuuggacuagugggaguagcauaucuuuuugugguguaaauagugacacugugagcuggucuuggccagacggugcugaguugccauucaccauugacaaguag

SEQ ID NO: 47702 - RNA, 1350 nt, Artificial Sequence; identical to SEQ ID NO: 47701
  derived and/or modified CDS sequence (wt) from neuraminidase__InfluenzaA__ABM90502

SEQ ID NO: 47703 - RNA, 1350 nt, Artificial Sequence
  derived and/or modified CDS sequence (wt) from neuraminidase__InfluenzaA__ABM90524
augaauccaaaucagaagauaauaaccauuggaucaaucuguaugguaauuggaauaguuagcuuaauguuacaaauugggaacaugaucucaauaugggucagucauucaauucagacagggaaucaacaccaagcugaaucaaucagcaauacuaacccucuuacugagaaagcugugguuucaguaacauuagcgggcaauucaucucuuugccccauuagaggaugggcuguacacaguaaggacaacaauauaaggaucgguucaaagggggauguguuuguuauuagagagccguucaucucaugcucccaccuggaaugcagaacuuucuucuugacucagggagccuugcugaaugacaagcacuccaacgggacugucaaagacagaagcccucacagaacauuaaugaguuguccugugggugaggcucccucuccauauaacucaagguuugagucuguugcuuggucagcaagugcuugccaugauggcaccaguugguugacaauuggaauuucuggcccagacaaugaggcuguggcuguauugaaauacaauggcauaauaacagacacuaucaagaguuggaggaacaacauacugaggacucaagagucugaaugugcauguguaaauggcucuugcuuuacuguaaugacugauggaccaaguaaugggcaggcaucauauaagaucuucaaaauggaaaaaggaaaaguggucaaaucagucgaauuggaugcuccuaauuaucacuaugaggagugcuccuguuauccugaugccggcgaaaucacauguguuugcagggauaauuggcauggaucaaauaggccauggguaucuuucaaucaaaauuuggaguaucaaauaggauauauaugcaguggaguuuucggagacaauccacgccccaaugauggaacagguaguuguggcccgauguccccuaacggggcauaugggguaaaaggguuuucauuuaaauacggcaaugguguuuggaucgggagaaccaaaagcacuaacuccaggagcggcuuugaaaugauuugggauccaaauggguggacuggaacggacaguagcuuuucagugaaacaagauauaguagcaauaacugauuggucaggauauagcgggaguuuuguccagcauccagaacugacaggauuagauugcauaagaccuuguuucuggguugaguuaaucagagggcggcccaaagagagcacaauuuggacuagugggagcagcauaucuuuuugugguguaaauagugacacugugaguuggucuuggccagacggugcugaguugccauucaccauugacaaguag

SEQ ID NO: 47704 - RNA, 1350 nt, Artificial Sequence; identical to SEQ ID NO: 47703
  derived and/or modified CDS sequence (wt) from neuraminidase__InfluenzaA__ABM90535

SEQ ID NO: 47705 - RNA, 1350 nt, Artificial Sequence; identical to SEQ ID NO: 47703
  derived and/or modified CDS sequence (wt) from neuraminidase__InfluenzaA__ABM90546

SEQ ID NO: 47706 - RNA, 1413 nt, Artificial Sequence
  derived and/or modified CDS sequence (wt) from neuraminidase__InfluenzaA__ABN50759
augaauccaaaucagaaaauaauaaccauuggaucaaucuguauggcaaucggaauaauuagucuaauauugcaaauagggaauauuaucucaauauggguuagccacucaauucaaacuggaagucaaaaccauacuggaauaugcaaccaaagaaucauuaccuaugaaaauagcaccuggguaaaucaaacauauguuaauauuagcaacacuaacguuguugcuggaaaggacacaacuucaaugacauuagccggcaauucaucucuuuguccuauccgugggugggcuauauacagcaaagacaacagcauaagaauugguuccaaaggagauguuuuugucauaagagaaccuuuuauaucauguucucacuuggaaugcagaaccuuuuuucugacccaaggcgcucuauuaaaugacaagcauucaaaugggaccguuaaggacagaagcccuuauagggccuuaaugagcuguccuauaggugaagcuccgucuccauacaauucaagguuugaaucgguugcuuggucagcaagugcaugucaugauggcaugggcuggcuaacaaucggaauuucugguccagaugauggagcaguggcuguacuaaaauacaacggcauaauaacugaaaccauaaaaaguuggaggaagcaaauauuaagaacacaagagucugaaugugucuguguaaacgguucauguuuuaccauaaugaccgauggcccgagugaugggcaggccucguacagaaucuucaaaaucgagaaggggaagauuacuaaaucaauagaguuggaugcacccaauucucauuacgaggaauguuccuguuacccagacaccggcacagugaugugugugugcagagacaauuggcaugguucgaaucgaccuugggugucuuuuaaucaaaaccuggauuaucaaauaggauacaucugcagugggguuuucggugacaauccgcgucccaaagauggaaaaggcagcugugauccaguaaauguugauggagcagacggaguaaagggguuuucauacagguaugguaaugguguuuggauaggaaggacuaaaaguaacagcuccagaaagggauuugagaugauuugggauccuaauggauggacagauaccgauaguaauuucuuagugaaacaggauguaguggcaaugacugauuggucaggguacaguggaaguuuuguucaacauccugagcuaacaggauuggacuguauaaggccuugcuucuggguugaauuaaucagaggacgacccagagaaaaaacaacaaucuggacuagugggagcagcauuucuuuuuguggcgugaauagugauacuguaaauuggucuuggccagacggugcugaguugccauucaccauugacaaguag

SEQ ID NO: 47707 - RNA, 1410 nt, Artificial Sequence
  derived and/or modified CDS sequence (wt) from neuraminidase__InfluenzaA__ABN50770
augaauccaaaucaaaagauaauaacgauuggcucuguuucucucaccauuuccacaauaugcuucuucaugcaaauugccaucuugauaacuacuguaacauugcacuuuaagcaauaugaauucaacucccccccaaacaaccaagugaugcugugugaaccaacaauaauagaaagaaacauaacagagauaguguaucugaccaacaccaccauagagaaggaaauaugccccaaacuagcagaauacaggaauuggucaaagccgcaaugugacauuacaggauuugcaccuuuuucuaaggacaauucgauuaggcuuuccgcugguggggacaucugggugacaagagaaccuuaugugucaugcgauccugacaaguguuaucaauuugcccuuggacagggaacaacacuaaacaacgugcauucaaaugacacaguacaugauaggaccccuuaucggacccuauugaugaaugaguuagguguuccauuucaucuggggaccaagcaagugugcauagcaugguccagcucaaguugucacgauggaaaagcauggcugcauguuuguguaacgggggaugauaaaaaugcaacugcuagcuucauuuacaaugggaggcuuguagauaguguuguuucaugguccaaaaaaauccucaggacccaggagucagaaugcguuuguaucaauggaacuuguacaguaguaaugacugaugggagugcuucaggaaaagcugauacuaaaauacuauucauugaggaggggaaaaucguucauacuagcacauugucaggaagugcucagcaugucgaggagugcuccugcuauccucgauauccuggugucagaugugucugcagagacaacuggaaaggcuccaauaggcccaucguagauauaaacauaaaggauuauagcauuguuuccaguuaugugugcucaggacuuguuggagacacacccagaaaaaacgacagcuccagcaguagccauugcuuggauccuaacaaugaagaagguggucauggagugaaaggcugggccuuugaugauggaaaugacguguggaugggaagaacgaucagcgagaaauuacgcucaggauaugaaaccuucaaagucauugaaggcugguccaacccuaauuccaaauugcagauaaauaggcaagucauaguugacagagguaauagguccgguuauucugguauuuucucuguugaaggcaaaagcugcaucaaucggugcuuuuauguggaguugauaaggggaagaaaagaggaaacugaagucuuguggaccucaaacaguauuguuguguuuuguggcaccucagguacauauggaacaggcucauggccugauggggcggacaucaaucucaugccuauauaa

SEQ ID NO: 47708 - RNA, 1413 nt, Artificial Sequence
  derived and/or modified CDS sequence (wt) from neuraminidase__InfluenzaA__ABN50903
augaauccaaaucagaaaauaauuaccauuggaucaaucuguauggcaaucgggauaauuagucuaauauugcaaauaggaaauauuauuucaauauggguuagccacucaauccaaacuggaagucaaaaccacacuggaauaugcaaccaaagaaucaucaccuaugaaaauagcaccuggguaaaucaaacauauguuaauauuaacaacacuaacguuguugcuggaaaggacacaacuucagugacacuagccggcaauucaucucuuuguccuguccgugggugggcuauauacagcaaagacaacagcauaagaauugguuccaaaggagauguuuuugucauaagagaaccuuuuauaucauguucucacuuggaaugcagaaccuuuuuucuaacccaaggugcucuauuaaaugacaagcauucaaaugggaccguuaaggacagaagcccuuauagggccuuaaugagcuguccuauaggugaagcuccgucuccauacaauucaagguuugaaucaguugcuuggucagcaagcgcaugucaugauggcaugggcuggcuaacaaucggaauuucuggaccagaugauggagcaguggcuguacuaaaauacaacggcauaauaacugaaaccauaaaaaguuggaggaaacgaauauuaagaacacaagagucugaaugugucuguguaaacgguucauguuuuaccauaaugaccgauggcccaaguaaugggccggccucguacagaaucuucaaaaucgagaaggggaaaauuacuaaaucaauagaguuggaugcacccaauucucacuacgaggaauguuccuguuacccagacaccggcacagugaugugugugugcagagacaauuggcaugguucgaaucgaccuugggugucuuuuaaucaaaaccuggauuaucaaauaggauacaucugcagugggguuuucggugacaauccgcgucccaaagauggaaaaggcagcugugguccaguaacuguugauggagcagacggaguaaagggguuuucauacagguaugguaauggugucuggauaggaaggacuaaaaguaacagcuccagaaagggauuugagaugauuugggauccuaauggauggacagauaccgauaguaauuucuuagugaaacaggauguaguggcaaugacugauuggucaggguacagcggaaguuucauucaacauccugagcuaacaggauuggacuguaugaggccuugcuucuggguugaauuaaucagaggacgaccuagagaaaagacaacaaucuggacuagugggaguagcauuucuuuuuguggcgugaauagugauacuguaaauuggucuuggccagacggugccgaguugccauucaccauugacaaguag

SEQ ID NO: 47709 - RNA, 1413 nt, Artificial Sequence; identical to SEQ ID NO: 47071
  derived and/or modified CDS sequence (wt) from neuraminidase__InfluenzaA__ABN50920

SEQ ID NO: 47710 - RNA, 1413 nt, Artificial Sequence
  derived and/or modified CDS sequence (wt) from neuraminidase__InfluenzaA__ABN50931
augaauccaaaucagaaaauaauaaccauaggaucaaucuguauggcaauaggaauaauuagucuaauauugcaaauaggaaauauuguuucaauauggaucagccacucaauccaaacuggaagucaaaacuacacuggaauaugcaaccaaagaaucauuaccuaugaaaauagcaccuggguaaaucaaacauauguuaauaucaacaacacuaauguuguugcuggacaggacacaacuucaguggcauuagccggcaauucaucucuuuguccuaucagugggugggcuauauacagcaaagacaacagcauaagaauugguuccaaaggggauguuuuugucauaagagaaccuuuuauaucauguucucacuuggaaugcagaaccuuuuuucugacccaaggugcucuauuaaaugacaagcauucaaacggaaccguuaaggacagaagcccuuauagggccuuaaugagcuguccuauaggugaagcuccgucucccuacaauucaagauuugaaucaguugcuuggucagcaagcgcaugucaugauggcaugggcuggcuaacaaucggaauuucugguccagaugauggagcaguggcuguacuaaaauacaacgguauaauaacugaaaccauaaaaaguuggaggaagcgaauauuaagaacacaagagucugaaugugucuguguaaacgguucauguuuuaccauaaugaccgauggcccgaauaaugggccugccucguacaaaaucuucaaaaucgagaaggggaagauuacuaaaucaauagaguuggaugcacccaauucucauuacgaggaauguuccuguuacccagacgccggcacagugaugugugugugcagagacaauuggcaugguucgaaucgaccuugggugucuuuuaaucaaaaccuggauuaucaaauaggauacaucugcagugguguuuuuggugacaauccgcgucccaaagauggaaaaggcagcugugguccaguaacuguugauggagcagacggaguaaagggguuuucauacagguaugguaaugguguuuggauaggaaggacuaaaaguaacagcuccagaagaggauuugagaugauuugggauccuaauggauggacagauaccgauaguaaauucuuagugaaacaggauguaguggcaauuacugauuggucaggguacagcggaagcuucguucaacauccugaacuaacaggauuagauuguaugaggccuugcuucuggguugaauugaucagaggacgaccuagagaaaauacaacaaucuggacuagugggagcagcauuucuuuuuguggcgugaauggugauacugcaaauuggucuuggccagacggugccgaguugccauucaccauugacaaguag

SEQ ID NO: 47711 - RNA, 1413 nt, Artificial Sequence
  derived and/or modified CDS sequence (wt) from neuraminidase__InfluenzaA__ABN50943
augaauccaaaucagaaaauaauaaccauaggaucaaucuguauggcaauaggaauaauuagucuaauauugcaaauaggaaauauuguuucaauauggaucagccacucaauccaaacuggaagucaaaacuacacuggaauaugcaaccaaagaaucauuaccuaugaaaauagcaccuggguaaaucaaacauauguuaauaucaacaacacuaauguuguugcuggacaggacacaacuucaguggcauuagccggcaauucaucucuuuguccuaucagugggugggcuauauacagcaaagacaacagcauaagaauugguuccaaaggagauguuuuugucauaagagaaccuuuuauaucauguucucacuuggaaugcagaaccuuuuuucugacccaaggugcucuauuaaaugacaagcauucaaacggaaccguuaaggacagaagcccuuauagggccuuaaugagcuguccuauaggugaagcuccgucucccuacaauucaagguuugaaucaguugcuuggucagcaagcgcaugucaugauggcaugggcuggcuaacaaucggaauuucugguccagaugauggagcaguggcuguacuaaaauacaacgguauaauaacugaaaccauaaaaaguuggaggaagcgaauauuaagaacacaagagucugaaugugucuguguaaacgguucauguuuuaccauaaugaccgauggcccgaauaaugggccugccucguacaaaaucuucaaaaucgagaaggggaagauuacuaaaucaauagaguuggaugcacccaauucucauuacgaggaauguuccuguuacccagacgccggcacagugaugugugugugcagagacaauuggcaugguucgaaucgaccuugggugucuuuuaaucaaaaccuggauuaucaaauaggauacaucugcagugguguuuuuggugacaauccgcgucccaaagauggaaaaggcagcugugguccaguaacuguugauggagcagacggaguaaagggguuuucauacagguaugguaaugguguuuggauaggaaggacuaaaaguaacagcuccagaagaggauuugagaugauuugggauccuaauggauggacagauaccgauaguaaauucuuagugaaacaggauguaguggcaaugacugauuggucaggguacagcggaagcuucguucaacauccugaacuaacaggauuggauuguaugaggccuugcuucuggguugaauugaucagaggacgaccuagagaaaauacaacaaucuggacuagugggagcagcauuucuuuuuguggagugaauggugauacugcaaauuggucuuggccagacggugccgaguugccauucaccauugacaaguag

SEQ ID NO: 47712 - RNA, 1413 nt, Artificial Sequence
  derived and/or modified CDS sequence (wt) from neuraminidase__InfluenzaA__ABN50954
augaauccaaaucaaaaaauaauaaccauuggaucaaucaguauugcaauuggaauaauuagucugauauugcaaauaggaaauauuauuucaauaugggcuagccacucaauccaaacuggaagucaaaaccacacuggaauaugcaaccaaagaaucauuacauaugagaauagcaccuggguaaaucaaacauauguuaauauuaacaacacuaauguuguugcuggaaaggacaaaaccucaaugacauuggccggcaauucaucucuuugcccuauccguggaugggcuauauacacaaaagacaacagcauaagaauugguuccaaaggagauguuuuugucauaagagagccuuuuauaucauguucucacuuggaaugcagaaccuuuuuucugacccaaggugcucuauuaaaugacaagcauucaaaugggaccguuaaggacagaagcccuuauagggccuuaaugagcuguccucuaggugaagcuccgucuccauacaauucaagauuugaaucaguugcuuggucagcaagcgcaugccaugauggcuugggcuggcuaacaaucggaauuucugguccagauaauggggcaguggcuguacuaaaauacaacggcauaauaacugaaaccauuaaaaguuggaagaagcgaauauuaagaacacaagagucugaaugugucuguaugaacgguucauguuuuaccauaaugaccgauggcccgaguaauggggccgcaucguacagaaucuucaaaaucgagaaggggagaguuacuaaaucaauagaguuggaugcacccaauuaucauuacgaggaauguucauguuacccagacaccggcacagugaugugugugugcagggacaauuggcacgguucaaaucgaccuugggugucuuuuaaucaaaaccuggauuaucaaauaggauacaucugcagugggguguucggugacaauccgcgucccaaagauggagaaggcagcuguaauccagugacuguugauggagcagacggaguaaagggguuuucauacagauaugguaaugguguuuggauaggaaggacuaaaaguaacagacucagaaagggauuugagaugauuugggauccuaauggauggacagauaccgacagugauuucucaaugaaacaggauaucguggcaaugacugauuggucaggguacagcggaaguuuuguucaacauccugagcuaacaggauuggacuguaugagaccuugcuucuggguugaauuagucagagggcuaccuagagaaaauacaacaaucuggacuagugggagcagcauuucuuuuuguggcguaaauagcgauacugcaaacuggucuuggccagacggugccgaguugccauucaccauugacaaguag

SEQ ID NO: 47713 - RNA, 1413 nt, Artificial Sequence; identical to SEQ ID NO: 46980
  derived and/or modified CDS sequence (wt) from neuraminidase__InfluenzaA__ABN50965

SEQ ID NO: 47714 - RNA, 1413 nt, Artificial Sequence; identical to SEQ ID NO: 46980
  derived and/or modified CDS sequence (wt) from neuraminidase__InfluenzaA__ABN50976

SEQ ID NO: 47715 - RNA, 1410 nt, Artificial Sequence; identical to SEQ ID NO: 46357
  derived and/or modified CDS sequence (wt) from neuraminidase__InfluenzaA__ABN50987

SEQ ID NO: 47716 - RNA, 1410 nt, Artificial Sequence; identical to SEQ ID NO: 46358
  derived and/or modified CDS sequence (wt) from neuraminidase__InfluenzaA__ABN50998

SEQ ID NO: 47717 - RNA, 1410 nt, Artificial Sequence
  derived and/or modified CDS sequence (wt) from neuraminidase__InfluenzaA__ABN51013
augaauccaaaucaaaagauaauaacgauuggcucuguuucucucaccauuuccacaauaugcuucuucaugcaaauugccaucuugauaacuacuguaacauugcauuucaagcaauaugaauucaacucccccccaaacaaccaagugaugcugugugaaccaacaauaauagaaagaaacauaacagagauaguguaucugaccaacaccaccauagagaaggaaauaugccccaaacuagcagaauacagaaauuggucaaaaccgcaauguaacauuacaggauuugcaccuuuuucuaaggacaauucgauuaggcuuuccgcugguggggacaucugggugacaagagaaccuuaugugucaugcgauccugacaaguguuaucaauuugcccuuggacagggaacaacacuaaacaacgugcauucaaaugacacaguacaugauaggaccccuuaucggacccuauugaugaaugaguuagguguuccauuucaucuggggaccaagcaagugugcauagcaugguccagcucaaguugucacgauggaaaagcauggcugcauguuuguguaacgggggaugauaaaaaugcaacugcuagcuucauuuacaaugggaggcuuguagauaguauuguuucaugguccaaagaaauccucaggacccaggagucagaaugcguuuguaucaauggaacuuguacaguaguaaugacugaugggagugcuucaggaaaagcugauacuaaaauacuauucauugaggaggggaaaaucguucauacuagcacauugucaggaagugcucagcaugucgaggaguguuccugcuauccucgauauccuggugucagaugugucugcagagacaacuggaaaggcuccaauaggcccauaguagauauaaacauaaaggauuauagcauuguuuccaguuaugugugcucaggacuuguuggagacacacccagaaaaaacgacagcuccagcaguagccuuugcuuggauccuaacaaugaagaagguggucauggagugaaaggcugggccuuugaugauggaaaugacguguggaugggaagaacgaucagcgagaaguuacgcucaggauaugaaaccuucaaagucauugaaggcugguccaacccuaauuccaaauugcagauaaauaggcaagucauaguugacagagguaauagguccgguuauucugguauuuucucuguugaaggcaaaagcugcaucaaucggugcuuuuauguggaguugauaaggggaagaaaagaggaaacugaagucuuguggaccucaaacaguauuguuguguuuuguggcaccucagguacauauggaacaggcucauggccugauggggcggauaucaaucucaugccuauauaa

SEQ ID NO: 47718 - RNA, 1410 nt, Artificial Sequence
  derived and/or modified CDS sequence (wt) from neuraminidase__InfluenzaA__ABN51024
augaauccaaaucaaaagauaauaacgauuggcucuguuucucucaccguuuccacaauaugcuucuucaugcaaauugccaucuugauaacuacuguaacacugcauuucaagcaauaugaauucaacucccccccaaacaaccaagugaugcugugugaaccaacaauaauagaaagaaacauaacagagauaguguaucugaccaacaccaccauagagaaggaaauaugccccaaacuagcagaauacagaaauuggucaaagccgcaauguaacauuacaggauuugcaccuuuuucuaaggacaauucgauuaggcuuuccgcugguggggacaucugggugacaagagaaccuuaugugucaugcgauccugacaaguguuaucaauuugcccuuggacagggaacaacacuaaacaacgugcauucaaaugacacaguacaugauaggaccccuuaucggacccuauugaugaaugaguuagguguuccauuucaucuggggaccaagcaagugugcauagcaugguccagcucaaguugucacgauggaaaagcauggcugcauguuuguguaacgggggaugauaaaaaugcaacugcuagcuucauuuacaaugggaggcuuguagauaguauuguuucaugguccaaagaaauccucaggacccaggagucagaaugcguuuguaucaauggaacuuguacaguaguaaugacugaugggagugcuucaggaaaagcugauacuaaaauacuauucauugaggaggggaaaaucguucauacuagcacauugucaggaagugcucagcaugucgaggagugcuccugcuauccucgauauccuggugucagaugugucugcagagacaacuggaaaggcuccaauaggcccauaguagauauaaacauaaaggauuauagcauuguuuccaguuaugugugcucaggacuuguuggagacacacccagaaaaaacgacagcuccagcaguagccauugcuuggauccuaacaaugaagaagguggucauggagugaaaggcugggccuuugaugauggaaaugacguguggaugggaagaacgaucagcgagaaguuacgcucaggauaugaaaccuucaaagucauugaaggcugguccaacccuaauuccaaauugcagacaaauaggcaagucauaguugacagagguaauagguccgguuauucugguauuuucucuguugaaggcaaaagcugcaucaaucggugcuuuuauguggaguugauaaggggaagaaaagaggaaacugaagucuuguggaccucaaacaguauuguuguguuuuguggcaccucagguacauauggaacaggcucauggccugauggggcggacaucaaucucaugccuauauaa

SEQ ID NO: 47719 - RNA, 1410 nt, Artificial Sequence
  derived and/or modified CDS sequence (wt) from neuraminidase__InfluenzaA__ABN51035
augaauccaaaucaaaagauaauaacgauuggcucuguuucucucaccauuuccacaauaugcuucuucaugcaaauugccaucuugauaacuacuguaacauugcauuucaagcaauaugaauucaacucccccccaaacaaccaagugaugcugugugaaccaacaauaauagaaagaaacauaacagagauaguguaucugaccaacaccaccauagagaaggaaauaugccccaaacuagcagaauacagaaauuggucaaagccgcaaugugacauuacaggauuugcaccuuuuucuaaggacaauucgauuaggcuuuccgcugguggggacaucugggugacaagagaaccuuaugugucaugcgauccugacaaguguuaucaauuugcccuuggacagggaacaacacuaaacaacgugcauucaaacgacacaguacaugauaggaccccuuaucggacccuauugaugaaugaguuagguguuccauuucaucuggggaccaagcaagugugcauagcaugguccagcucaaguugucacgauggaaaagcauggcugcauguuuguguaacgggggaugauaaaaaugcaacugcuagcuucauuuacaaugggaggcuuguagauaguguuguuucaugguccaaagauauccucaggacccaggagucagaaugcguuuguaucaauggaacuuguacaguaguaaugacugaugggagugcuucaggaaaagcugauacuaaaauacuauucauugaggaggggaaaaucguucauacuagcacauugucaggaagugcucagcaugucgaggagugcuccugcuauccucgauauccuggugucagaugugucugcagagacaacuggaaaggcuccaauaggcccauuguagauauaaacauaaagaauuauagcauuguuuccaguuaugugugcucaggacuuguuggagacacacccagaaaaaccgacagcuccagcaguagccauugcuuggauccuaacaaugaagaagguggucauggagugaaaggcugggccuuugaugauggaaaugacguguggaugggaagaacgaucagcgagaaguuacgcuuaggauaugaaaccuucaaagucauugaaggcugguccaacccuaauuccaaauugcagauaaauaggcaagucauaguugacagagguaauagguccgguuauucugguauuuucucuguugaaggcaaaagcugcaucaaucggugcuuuuauguggaguugauaaggggaagaaaagaggaaacugaagucuuguggaccucaaacaguauuguuguauuuuguggaaccucagguacauauggaacaggcucauggccugauggggcggacaucaaucucaugccuauauaa

SEQ ID NO: 47720 - RNA, 1410 nt, Artificial Sequence; identical to SEQ ID NO: 47719
  derived and/or modified CDS sequence (wt) from neuraminidase__InfluenzaA__ABN51046

SEQ ID NO: 47721 - RNA, 1413 nt, Artificial Sequence
  derived and/or modified CDS sequence (wt) from neuraminidase__InfluenzaA__ABN51069
augaauccaaaucaaaaaauaauaaccauuggaucaaucaguauugcaauuggaauaauuagucugauauugcaaauaggaaauauuauuucaauaugggccagccacucaauccaaacuggaagucaaaaccacacuggaauaugcaaccaaagaaucauuacauaugaaaauagcaccuggguaaaucaaacauauguuaauauuaacaacacuaauguuguugcuggaaaggacaaaaccucaaugacauuggccggcaauucaucucuuugcccuauccguggaugggcuauauacacaaaagacaacagcauaagaauugguuccaaaggagauguuuuugucauaagagagccuuuuauaucauguucucacuuggaaugcagaaccuuuuuucugacccaaggugcucuauuaaaugacaagcauucaaaugggaccguuaaggacagaagcccuuauagggccuuaaugagcuguccucuaggugaagcuccgucuccauacaauucaagauuugaaucaguugcuuggucagcaagcgcaugccaugauggcuugggcuggcuaacaaucggaauuucugguccagauaauggggcaguggcuguacuaaaauacaacggcauaauaacugaaaccauuaaaaguuggaagaagcgaauauuaagaacacaagagucugaaugugucuguaugaacgguucauguuuuaccauaaugaccgauggcccgaguaauggggccgcaucguacagaaucuucaaaaucgagaaggggagaguuacuaaaucaauagaguuggaugcacccaauuaucauuacgaggaauguucauguuacccagacaccggcacagugaugugugugugcagggacaauuggcacgguucaaaucgaccuugggugucuuuuaaucaaaaccuggauuaucaaauaggauacaucuguagugggguguucggugacaauccgcgucccaaagauggagaaggcagcuguaauccagugacuguugauggagcagacggaguaaagggguuuucauacagauaugguaaugguguuuggauaggaaggacuaaaaguaacagacucagaaagggauuugagaugguuugggauccuaauggauggacagauaccgacagugauuucucaaugaaacaggauaucguggcaaugacugauuggucaggguacagcggaaguuuuguucaacauccugagcuaacaggauuggacuguaugagaccuugcuucuggguugaauuagucagggggcuaccuagagaaaauacaacaaucuggacuagugggagcagcauuucuuuuuguggcguaaauagcgauacugcaaacuggucuuggccagacggugccgaguugccauucaccauugacaaguag

SEQ ID NO: 47722 - RNA, 1413 nt, Artificial Sequence
  derived and/or modified CDS sequence (wt) from neuraminidase__InfluenzaA__ABN51080
augaauccaaaucaaaaaauaauaaccauuggaucaaucaguauagcaaucggaauaauuagccuaauguugcaaauaggaaacauuauuucaauaugggcuagucacucaauccaaacuggaagucaaaaccacacuggaguaugcaaccaaagaaucaucacauaugaaaacagcaccugggugaaucacacauauguuaauauuaacaacaccaauguuauugcugaaaaggacaaaacuucagugacauuggccggcaauucaucucuuuguucuaucaguggaugggcuauauacacaaaagacaacagcauaagaauugguuccaaaggagauguuuuugucauaagagagccuuucauaucauguucucacuuggaaugcagaaccuuuuuucugacccaaggugcucuauuaaaugacaaacauucaaaugggaccguuaaggacagaagucccuauagggcuuuaaugagcuguccucuaggugaagcuccguccccauacaauucaaaguuugaaucaguugcuuggucagcaagcgcaugccaugauggcaugggcugguuaacaaucggaauuucugguccagacaauggagcaguggcuguacuaaaauacaacggcauaauaacugaaacuauaaaaaguuggaaaaagcaaauauuaagaacacaagagucugaaugugucugugugaacgggucauguuucaccauaaugaccgauggcccgaguaauggggccgccucguacaaaaucuucaagaucgaaaagggaaagguuacuaaaucaguagaguugaaugcacccaauuuucauuaugaggaauguuccuguuacccagacacuggcacagugauguguguaugcagggacaacuggcaugguucaaaucgaccuugggugucuuuuaaucaaaaccuggauuaucaaauaggauacaucugcagugggguguucggugacaauccgcgucccaaagauggagagggcagcuguaauccagugacuguugauggagcaaauggaguaaagggguuuucauacaaauaugguaaugguguuuggauaggaaggacuaaaaguaacagacuuagaaagggguuugagaugauuugggauccuaauggauggacagauaccgacagugauuucucagugaaacaggauguuguggcaauaacugacuggucaggguacagcggaaguuucguucaacauccugaguuaacaggauuggacuguauaagaccuugcuucuggguugaguuagucagaggacugccuaaagaaaauacaacaaucuggacuagugggagcagcauuucuuuuuguggcguaaauagugauacugcaaacuggucuuggccagacggugcugaguugccguucaccauugacaaguag

SEQ ID NO: 47723 - RNA, 1413 nt, Artificial Sequence
  derived and/or modified CDS sequence (wt) from neuraminidase__InfluenzaA__ABN51091
augaauccaaaucaaaaaauaauaaccauuggaucaaucaguauagcaaucggaauaauuagucuaauguugcaaauaggaaauauuauuucaauaugggcuagucacucaauccaaacuggaagucaaaaccacacuggaauaugcaaccaaagaaucaucacauaugaaaacagcaccugggugaaucacacauauguuaauauuaacaacacuaauguuguugcuggaaaggacaaaacuucagugacauuggccggcaauucaucucuuuguucuaucaguggaugggcuauauacacaaaagacaacagcauaagaauuggcuccaaaggagauguuuuugucauaagagaaccuuucauaucauguucucacuuggaaugcagaaccuuuuuucugacccaaggugcucuauuaaaugacaaacauucaaauggaaccguuaaggacagaaguccuuauagggccuuaaugagcuguccucuaggugaagccccguccccauacaauucaaaguuugaaucaguugcauggucagcaagcgcaugccaugauggcaugggcugguuaacaaucggaauuucugguccagacaauggagcuguggcuguacuaaaauacaacggaauaauaacugaaaccauaaaaaguuggaaaaagcgaauauugagaacacaagagucugaaugugucugugugaacgggucauguuucaccauaaugaccgauggcccgaguaauggggccgccucguacaaaaucuucaagaucgaaaaggggaagguuacuaaaucaauagaguugaaugcacccaauuuucauuaugaggaauguuccuguuacccagacacuggcacagugauguguguaugcagggacaacuggcaugguucaaaucgaccuugggugucuuuuaaucaaaacuuggauuaucaaauaggauacaucugcaguggaguguucggugacaauccgcgucccaaagaugggaagggcagcuguaauccagugacuguugauggagcagacggaguuaagggguuuucauacaaauaugguaaugguguuuggauaggaaggacuaaaaguaacagacuuagaaagggguuugagaugauuugggauccuaauggauggacagauaccgacagugauuucucagugaaacaggauguuguggcaauaacugauuggucaggguacagcggaaguuucguucaacauccugaguuaacaggauuggacuguauaagaccuugcuucuggguugaguuagucagaggacugccuagagaaaauacaacaaucuggacuagugggagcagcauuucuuuuuguggcguugauagugauacugcaaacuggucuuggccagacggugcugaguugccguucaccauugacaaguag

SEQ ID NO: 47724 - RNA, 1410 nt, Artificial Sequence
  derived and/or modified CDS sequence (wt) from neuraminidase__InfluenzaA__ABN51102
augaauccaaaucaaaagauaauaacaauuggcucugucucucucaccauugcaacaguaugcuuccucaugcagauugccauccugguaacuacuguaacauugcauuuuaagcaauaugagugcgacucccccgcgagcaaccaaguaaugccgugugaaccaauaauaauagaaaggaacauaacagagauaguguauuugaauaacaccaccauagagaaagagauaugccccaaaguaguggaauacagaaauuggucaaagccgcaaugucaaauuacaggauuugcaccuuuuucuaaggacaauucaauccggcuuucugcugguggggacauuugggugacgagagaaccuuaugugucaugcgaucauggcaaguguuaucaauuugcacucgggcaggggaccacacuagacaacaaacauucaaaugacacaauacaugauagaaucccucaucgaacccuauuaaugaaugaguuggguguuccauuucauuuaggaaccagacaaguguguauagcaugguccagcucaaguugucacgauggaaaagcauggcugcauguuuguaucacuggggaugacaaaaaugcaacugcuagcuucauuuaugacgggaggcuuguggacaguauugguucauggucucaaaauauccucagaacccaggagucggaaugcguuuguaucaaugggacuugcacaguaguaaugacugauggaagugcuucaggaagagccgauacuagaauacuauucauugaagaggggaaaauuguccauauuagcccauugucaggaagugcucagcauguagaagaguguuccuguuauccuagauauccuggcgucagauguaucugcagagacaacuggaaaggcucuaauaggcccgucguagacauaaauauggaagauuauagcauugauuccaguuaugugugcucagggcuuguuggcgacacaccuagaaacgacgacagaucuagcaauagcaauugcaggaauccuaacaaugagagagggaaucaaggagugaaaggcugggccuuugacaauggagaugacguguggaugggaagaacgaucagcaaggauuuacgcucagguuaugaaacuuucaaagucauuggugguugguccacaccuaauuccaaaucgcagaucaauagacaagucauaguugacagcgauaaucggucagguuacucugguauuuucucuguugagggcaaaagcugcaucaauaggugcuuuuauguggaguugauaaggggaaggaaacaggagacuagagugugguggaccucaaacaguauuguuguguuuuguggcacuucagguaccuauggaacaggcucauggccugauggggcgaacaucaauuucaugccuauauaa

SEQ ID NO: 47725 - RNA, 1410 nt, Artificial Sequence
  derived and/or modified CDS sequence (wt) from neuraminidase__InfluenzaA__ABN51113
augaauccaaaucaaaagauaauaacaauuggcucugucucucucaccauugcaacaguaugcuuccucaugcagauugccauccugguaacuacuguaacauugcauuuuaagcaauaugagugcgacucccccgcgagcaaccaaguaaugccgugugaaccaauaauaauagaaaggaacauaacagagauaguguauuugaauaacaccaccauagagaaagagauaugccccaaaguaguggaauacagaaauuggucaaagccacaaugucaaauuacaggauuugcaccuuuuucuaaggacaauucaauccggcuuucugcugguggggacauuugggugacgagagaaccuuaugugucaugcgauccuggcaaguguuaucaauuugcacucgggcaggggaccacacuagacaacaaacauucaaaugacacaauacaugauagaaucccucaucgaacccuauuaaugaaugaguuggguguuccauuucauuuaggaaccaggcaaguguguauagcaugguccagcucaaguugucacgauggaaaagcauggcugcauguuuguaucacuggggaugacaaaaaugcaacugcuagcuucauuuaugacgggaggcuuguggacaguauugguucauggucucaaaauauccucagaacccaggagucggaaugcguuuguaucaaugggacuugcacaguaguaaugacugauggaagugcuucaggaagagccgauacuagaauacuauucauugaagaggggaaaauuguccauauuagcccauugucaggaagugcucagcauguagaagaguguuccuguuauccuagauauccuggcgucagauguaucugcagagacaacuggaaaggcucuaauaggcccgucguagacauaaauauggaagauuauagcauugauuccaguuaugugugcucagggcuuguuggcgacacaccuagaaacgacgacagaucuagcaauagcaauugcaggaauccuaacaaugagagagggaaucaaggggugaaaggcugggccuuugacaauggagaugacguguggaugggaagaacgaucagcaaggauuuacgcucagguuaugaaacuuucaaagucauuggugguugguccacaccuaauuccaaaucgcagaucaauagacaagucauaguugacagcgauaaucggucagguuacucugguauuuucucuguugagggcaaaagcugcaucaauaggugcuuuuauguggaguugauaaggggaaggaaacaggagacuagaguaugguggaccucaaacaguauuguuguguuuuguggcacuucagguaccuauggaacaggcucauggccugauggggcgaacaucaauuucaugccuauauaa

SEQ ID NO: 47726 - RNA, 1410 nt, Artificial Sequence
  derived and/or modified CDS sequence (wt) from neuraminidase__InfluenzaA__ABN51124
augaauccaaaucaaaagauaauaacaauuggcucugucucucucaccauugcaacaguaugcuuccucaugcagauugccauccugguaacuacuguaacauugcauuuuaagcaauaugagugcgacucccccgcgagcaaccaaguaaugccgugugaaccaauaauaauagaaaggaacauaacagagauaguguauuugaauaacaccaccauagagaaagagauaugccccaaaguaguggaauacagaaauuggucaaagccgcaaugucaaauuacaggauuugcaccuuuuucuaaggacaauucaauccggcuuucugcugguggggacauuugggugacgagagaaccuuaugugucaugcgauccuggcaaguguuaucaauuugcacucgggcaggggaccacacuagacaacaaacauucaaaugacacaauacaugauagagucccucaucgaacccuauuaaugaaugaguuggguguuccauuucauuuaggaaccaggcaaguguguauagcaugguccagcucaaguugucacgauggaaaagcauggcugcauguuuguaucacuggggaugacaaaaaugcaacugcuagcuucauuuaugacgggaggcuuguggacaguauugguucauggucucaaaauauccucagaacccaggagucggaaugcguuuguaucaaugggaccugcacaguaguaaugacugauggaagugcuucaggaagagccgauacuagaauacuauucauugaagaggggaaaauuguccauauuagcccauugucaggaagugcucagcauguagaagaguguuccuguuauccuagauauccuggcgucagauguaucugcagagacaacuggaaaggcucuaauaggcccgucguagacauaaauauggaagauuauagcauugauuccaguuaugugugcucagggcuuguuggcgacacaccuagaaacgacgacagaucuagcaauagcaauugcaggaauccuaacaaugagagagggaaucaaggagugaaaggcugggccuuugacaauggagaugacguguggaugggaagaacgaucagcaaggauuuacgcucagguuaugaaacuuucaaagucauuggugguugguccacaccuaauuccaaaucgcagaucaauagacaagucauaguugacagcgauaaucggucagguuacucugguauuuucucuguugagggcaaaagcugcaucaauaggugcuuuuauguggaguugauaaggggaaggaaacaggagacuagaguaugguggaccucaaacaguauuguuguguuuuguggcacuucagguaccuauggaacaggcucauggccugauggggcgaacaucaauuucaugccuauauaa

SEQ ID NO: 47727 - RNA, 1410 nt, Artificial Sequence
  derived and/or modified CDS sequence (wt) from neuraminidase__InfluenzaA__ABN51135
augaauccaaaucaaaagauaauaacaauuggcucugucucucucaccauugcaacaguaugcuuccucaugcagauugccauccugguaacuacuguaacauugcauuuuaagcaauaugagugcgacucccccgcgagcaaucaaguaaugccgugugaaccaauaauaauagaaaggaacauaacagagauaguguauuugaauaacaccaccauagagaaagagauaugccccaaaguaguggaauacagaaauuggucaaagccgcaaugucaaauuacaggauuugcaccuuuuucuaaggacaauucaauccggcuuucugcugguggggacauuugggugacgagagaaccuuaugugucaugcgauccuggcaaguguuaucaauuugcacucgggcaggggaccacacuagacaacaaacauucaaaugacacaauacaugauagaaucccucaucgaacccuauuaaugaaugaguuggguguuccauuucauuuaggaaccaggcaaguguguauagcaugguccagcucaaguugucacgauggaaaagcauggcugcauguuuguaucacuggggaugacaaaaaugcaacugcuagcuucauuuaugacgggaggcuuguggacaguauugguucauggucucaaaauauccucagaacccaggagucggaaugcguuuguaucaaugggacuugcacaguaguaaugacugauggaagugcuucaggaagagccgauacuagaauacuauucauugaagaggggaaaauuguccauauuagcccauugucaggaagugcucagcauguagaagaguguuccuguuauccuagauauccuggcgucagauguaucugcagagacaacuggaaaggcucuaauaggcccgucguagacauaaauauggaagauuauagcauugauuccaguuaugugugcucagggcuuguuggcgacacaccuagaaacgacgacagaucuagcaauagcaauugcaggaauccuaacaaugagagagggaaucaaggagugaaaggcugggccuuugacaauggagaugacguguggaugggaagaacgaucagcaaggauuuacgcucagguuaugaaacuuucaaagucauuggugguugguccacaccuaauuccaaaucgcagaucaauagacaagucauaguugacagcgauaaucggucagguuacucugguauuuucucuguugagggcaaaagcugcaucaauaggugcuuuuauguggaguugauaaggggaaggaaacaggagacuagaguaugguggaccucaaacaguauuguuguguuuuguggcacuucagguaccuauggaacaggcucauggccugauggggcgaacaucaauuucaugccuauauaa

SEQ ID NO: 47728 - RNA, 1413 nt, Artificial Sequence
  derived and/or modified CDS sequence (wt) from neuraminidase__InfluenzaA__ABN51146
augaauccaaaucaaaaaauaauaaccauuggaucaaucaguauagcaaucggaauaauuagccuaauguugcaaauaggaaacauuauuucaauaugggcuagucacucaauccaaacuggaagucaaaaccacacuggaguaugcaaccaaagaaucaucacauaugaaaacagcaccugggugaaucacacauauguuaauauuaacaacaccaauguuauugcuggaaaggacaaaacuucagugacauuggccggcaauucaucucuuuguucuaucaguggaugggcuauauacacaaaagacaacagcauaagaauugguuccaaaggagauguuuuugucauaagagagccuuucauaucauguucucacuuggaaugcagaaccuuuuuucugacccaaggugcucuauuaaaugacaaacauucaaaugggaccguuaaggacagaagccccuauagggcuuuaaugagcuguccucuaggugaagcuccguccccauacaauucaaaguuugaaucaguugcuuggucagcaagcgcaugccaugauggcaugggcugguuaacaaucggaauuucugguccagacaauggagcaguggcuguacuaaaauacaacggcauaauaacugaaaccauaaaaaguuggaaaaagcaaauauuaagaacacaagagucugaaugugucugugugaacgggucauguuucaccauaaugaccgauggcccgaguaauggggccgccucguacaaaaucuucaagaucgaaaagggaaagguuacuaaaucaauagaguugaaugcacccaauuuucauuaugaggaauguuccuguuacccagacacuggcacagugauguguguaugcagggacaacuggcaugguucaaaucgacccugggugucuuuuaaucaaaaccuggauuaucaaauaggauacaucugcagugggguguucggugacaauccgcgucccaaagauggagagggcagcuguaauccagugacuguugauggagcaaacggaguaaagggguuuucauacaaauaugguaaugguguuuggauaggaaggacuaaaaguaacagacuuagaaagggguuugagaugauuugggauccuaauggauggacagauaccgacagugauuucucagugaaacaggauguuguggcaauaacugauuggucuggguacagcggaaguuucguucaacauccugaguuaacaggauuggacuguauaagaccuugcuucuggguugaguuagucagaggacugccaaaagaaaauacaacaaucuggacuagugggagcagcauuucuuuuuguggcguaaauagugauacugcaaacuggucuuggccagacggugcugaguugccguuuaccauugacaaauaa

SEQ ID NO: 47729 - RNA, 1410 nt, Artificial Sequence
  derived and/or modified CDS sequence (wt) from neuraminidase__InfluenzaA__ABN51157
augaauccaaaucaaaagauaauaacaauuggcucuguuucucucaccauugccacaauaugcuuccuuaugcaaauugccauccugguaacuacuguaacauugcauuucaagcaguaugaaugcaacucccccccaaacaaccaaguaaugcugugugaaccaacaauaauagaaagaaacauaacagagauaguguaucuaaccaacaccaccauagagaaggaaauaugccccaaacuagcagaauacagaaauuggucaaagccgcaauguaacauuacaggauuugcaccuuuuucuaaggacaauucgauucggcuuuccgcugguggggacaucugggugacaagagaaccuuaugugucaugcgauccugacaaguguuaucaauuugcccuugggcagggaacaacacuaaacaacgggcauucaaaugacacaguacaugauaggaccccuuaccggacccuauugaugaaugaauuggguguuccauuucacuugggaaccaggcaagugugcauagcaugguccagcucaaguugucacgauggaaaagcauggcugcauguuuguguaacuggggaugaugaaaaugcaacugcuaguuucauuuacaaugggaggcuuguagauaguauugguucaugguccaaaaaaauacucagaacccaggagucggaaugcguuuguaucaauggaacuuguacaguaguaaugacugaugggagcgcuucaggaaaagcugaaacuaaaauacuauucauugaggaggggaaaaucguucauauuagcacauugucaggaagugcucagcaugucgaggagugcuccuguuauccucgauauccuggugucagaugugucugcagagacaacuggaaaggcuccaauaggcccaucguagauauaaauguaaaggauuauagcauuguuuccaguuaugugugcucaggacuuguuggagacacacccagaaaaaacgacagcuucagcaguagccauugccuagacccuaacaaugaggaagguggucauggagugaaaggcugggccuuugaugauggaaaugacguguggaugggaagaacgaucagcgagaaguuacgcucagguuaugaaaccuucaaagucaucgaaggcugguccaaaccuaacuccaaauuacagacaaauaggcaagucauaguugaaagagguaacagguccgguuauucugguauuuucuccguugaaggcaaaagcugcaucaaucggugcuuuuauguggaguugauaaggggaaggaaagaggaaacugaagucugguggaccucaaacaguauuguuguguuuuguggcaccucagguacauauggaacaggcucauggccugauggggcggauaucaaucucaugccuauauaa

SEQ ID NO: 47730 - RNA, 1410 nt, Artificial Sequence; identical to SEQ ID NO: 47718
  derived and/or modified CDS sequence (wt) from neuraminidase__InfluenzaA__ABN59393

SEQ ID NO: 47731 - RNA, 1365 nt, Artificial Sequence
  derived and/or modified CDS sequence (wt) from neuraminidase__InfluenzaA__ABN59415
augaauccaaaucagaaaauaauaaccauuggaucaaucugucugguagucggacuaauuagccuaauauugcaaauagggaauauaaucucaauauggauuagccauucaauucaaacuggaagucaaaaccauacuggaauaugcaaccaaaacaucauuaccuauaaaaauagcaccuggguaaaggacacaacuucagugauauuaaccggcaauucaucucuuugucccauccgugggugggcuauauacagcaaagacaauagcauaagaauugguuccaaaggagacguuuuugucauaagagagcccuuuauuucauguucucacuuggaaugcaggaccuuuuuucugacccaaggugccuuacugaaugacaagcauucaagugggacuguuaaggacagaagcccuuauagggccuuaaugagcugcccugucggugaagcuccguccccguacaauucaagauuugaaucgguugcuuggucagcaagugcaugucaugauggcaugggcuggcuaacaaucggaauuucagguccagauaauggagcaguggcuguauuaaaauacaacggcauaauaacugaaaccauaaaaaguuggaggaagaaaauauugaggacacaagagucugaaugugccuguguaaaugguucauguuuuacuauaaugacugauggcccgagugaugggcuggccucguacaaaauuuucaagaucgaaaaggggaagguuacuaaaucaauagaguugaaugcaccuaauucucacuaugaggaauguuccuguuacccugauaccggcaaagugaugugugugugcagagacaauuggcaugguucgaaccggccaugggugucuuucgaucaaaaccuggauuaucaaauaggauacaucugcagugggguuuucggugacaacccgcgucccgaagauggaacaggcagcugugguccaguguauguugauggagcaaacggaguaaagggauuuucauauagguaugguaaugguguuuggauaggaaggaccaaaagucacaguuccagacauggguuugagaugauuugggauccuaauggauggacagagacugauaguaaguucucugugaggcaagauguuguggcaaugacugauuggucaggguauagcggaaguuucguucaacauccugagcugacagggcuagacuguaugaggccgugcuucuggguugaauuaaucaggggacgaccuaaagaaaaaacaaucuggacuagugcgagcagcauuucuuuuuguggcgugaauagugauacuguagauuggucuuggccagacggugcugaguugccauucagcauugacaaguag

SEQ ID NO: 47732 - RNA, 1413 nt, Artificial Sequence
  derived and/or modified CDS sequence (wt) from neuraminidase__InfluenzaA__ABN59426
augaauccaaaucagaaaauaauaaccauuggaucaaucuguauggcaaucggaauaauuagucuaauauugcaaauagggaauauuaucucaauauggguuagccacucaauucaaacuggaagucaaaaccauacuggaauaugcaaccaaagaaucauuaccuaugaaaauagcaccuggguaaaucaaacauauguuaauauuagcaacacuaacguuguugcugggaaggacacaacuucaaugacauuagccggcaauucaucucuuuguccuauccgugggugggcuauauacagcaaagacaacagcauaagaauugguuccaaaggagauguuuuugucauaagagaaccuuuuauaucauguucucacuuggaaugcagaaccuuuuuucugacccaaggcgcucuauuaaaugacaagcauucaaaugggaccguuaaggacagaagcccuuauagggccuuaaugagcuguccuauaggugaagcuccgucuccauacaauucaagguuugaaucgguugcuuggucagcaagugcaugucaugauggcaugggcuggcuaacaaucggaauuucugguccagaugauggagcaguggcuguacuaaaauacaacggcauaauaacugaaaccauaaaaaguuggaggaagcaaauauuaagaacacaagagucugaaugugucuguguaaacgguucauguuuuaccauaaugaccgauggcccgagugaugggccggccucguacagaaucuucaaaaucgagaaggggaagauuacuaaaucaauagaguuggaugcacccaauucucauuacgaggaauguuccuguuacccagacaccggcacagugaugugugugugcagagacaauuggcaugguucgaaucgaccuugggugucuuuuaaucaaaaccuggauuaucaaauaggauacaucugcagugggguuuucggugacaauccgcgucccaaagauggaaaaggcagcugugauccaguaaauguugauggagcagacggaguaaagggguuuucauacagguaugguaaugguguuuggauaggaaggacuaaaaguaacagcuccagaaagggauuugagaugauuugggauccuaauggauggacagauaccgauaguaauuucuuagugaaacaggauguaguggcaaugacugauuggucaggguacagcggaaguuucguucaacauccugagcuaacaggauuggacuguaugaggccuugcuucuggguugaauuaaucagaggacgacccagagaaaaaacaacaaucuggacuagugggagcagcauuucuuuuuguggcgugaauagugauacuguaaauuggucuuggccagacggugccgaguugccauucaccauugacaaguag

SEQ ID NO: 47733 - RNA, 1410 nt, Artificial Sequence; identical to SEQ ID NO: 46800
  derived and/or modified CDS sequence (wt) from neuraminidase__InfluenzaA__ABO32659

SEQ ID NO: 47734 - RNA, 1410 nt, Artificial Sequence
  derived and/or modified CDS sequence (wt) from neuraminidase__InfluenzaA__ABO32670
augaauccaaaucaaaagauaauaacgauuggcucuguuucucucaccauuuccacaauaugcuucuuuaugcaaauugccauccugguaacuacuguaacauugcauuucaagcaauaugaaugcaacucccccccaaacaaccaagugaugcugugugaaccaacaauaauagaaagaaacauaacagagauaguguaucugaccaacaccaccauagagaaggaaauaugccccaaacuagcagaauacagaaauuggucaaagccgcaauguaacauuacaggauuugcaccuuuuucuaaggacaauucgauucggcuuuccgcugguggggacaucugggugacaagagaaccuuaugugucaugcgauccugacaaguguuaucaauuugcccuuggacagggaacaacacuaaacaacgggcauucaaaugacacaguacaugauaggaccccuuaucggaccuuauugaugaaugaguuggguguuccauuucauauggggaccaagcaagugugcauagcaugguccagcucaaguugucacgauggaaaagcauggcugcauguuuguguaacgggggaugaugaaaaugcaacugcuagcuucauuuacaaugggaggcuuguagauaguauugguucaugguccaaaaaaauccucaggacccaggagucagaaugcguuuguaucaauggaacuuguacaguaguaaugacugaugggagugcuucaggaaaagcugauacuaaaauacuauucauugaggaggggaaaaucguucauacuagcacauugucaggaagugcucagcaugucgaggagugcuccuguuauccucgauauccuggugucagaugugucugcagagacaacuggaaaggcuccaauaggcccaucguagauauaaauauaaaggauuauagcauuguuuccaguuaugugugcucaggacuuguuggagacacacccagaaaaaacgacagcuccagcaguagccauugcuuggauccuaacaaugaggaagguggucauggagugaaaggcugggccuuugaugauggaaaugacguguggaugggaagaacgaucagcgagaaguuacgcucaggauaugaaaccuucaaagucauugaaggcugguccaaaccuaacuccaaauugcagauaaauaggcaagucauaguugacagagguaauagguccgguuauucugguauuuucucuguugaaggcaaaagcugcaucaaucggugcuuuuauguggaguugauaaggggaaggaaacaggaaacugaagucuuguggaccucaaacaguauuguuguguuuuguggcaccucagguacauauggaacaggcucauggccugauggggcggacaucaaucucaugccuauauaa

SEQ ID NO: 47735 - RNA, 1413 nt, Artificial Sequence; identical to SEQ ID NO: 47586
  derived and/or modified CDS sequence (wt) from neuraminidase__InfluenzaA__ABO32681

SEQ ID NO: 47736 - RNA, 1410 nt, Artificial Sequence
  derived and/or modified CDS sequence (wt) from neuraminidase__InfluenzaA__ABO32695
augaauccaaaucaaaagauaauaacgauuggcucuguuucucucaccauuuccacaauaugcuucuucaugcaaauugccaucuugauaacuacuguaacauugcauuucaagcaauaugaauucaacucccccccaaacaaccaagugaugcugugugaaccaacaauaauagaaagaaacauaacagagauaguguaucugaccaacaccaccauagagaaggaaauaugccccaaacuagcagaauacagaaauuggucaaagccgcaauguaacauuacaggauuugcaccuuuuucuaaggacaauucgauuaggcuuuccgcugguggggacaucugggugacaagagaaccuuaugugucaugcgauccugacaaguguuaucaauuugcccuuggacagggaacaacacuaaacaacgugcauucaaaugacacaguacaugauaggaccccuuaucggacccuauugaugaaugaguuagguguuccauuucaucuggggaccaagcaagugugcauagcaugguccagcucaaguugucacgauggaaaagcauggcugcauguuuguguaacgggggaugauaaaaaugcaacugcuagcuucauuuacaaugggaggcuuguagauaguauuguuucaugguccaaagaaauccucaggacccaggagucagaaugcguuuguaucaauggaacuuguacaguagugaugacugaugggagugcuucaggaaaagcugauacuaaaauacuauucauugaggaggggaaaaucguucauacuagcacauugucaggaagugcucagcaugucgaggagugcuccugcuauccucgauauccuggugucagaugugucugcagagacaacuggaaaggcuccaauaggcccauaguagauauaaacauaaaggauuauagcauuguuuccaguuaugugugcucaggacuuguuggagacacacccagaaaaaacgacagcuccagcaguagccauugcucggauccuaacaaugaagaagguggucauggagugaaaggcugggccuuugaugauggaaaugacguguggaugggaagaacgaucagcgagaaguuacgcucaggauaugaaaccuucaaagucaucgaaggcugguccaacccuaauuccaaauugcagauaaauaggcaagucauaguugacagagguaauagguccgguuauucugguauuuucucuguugaaggcaaaagcugcaucaaucggugcuuuuauguggaguugauaaggggaagaaaagaggaaacugaagucuuguggaccucaaacaguauuguuguguuuuguggcaccucagguacauauggaacaggcucauggccugauggggcggacaucaaucucaugccuauauaa

SEQ ID NO: 47737 - RNA, 1410 nt, Artificial Sequence; identical to SEQ ID NO: 46755
  derived and/or modified CDS sequence (wt) from neuraminidase__InfluenzaA__ABO32754

SEQ ID NO: 47738 - RNA, 1410 nt, Artificial Sequence; identical to SEQ ID NO: 46755
  derived and/or modified CDS sequence (wt) from neuraminidase__InfluenzaA__ABO32765

SEQ ID NO: 47739 - RNA, 1410 nt, Artificial Sequence; identical to SEQ ID NO: 47614
  derived and/or modified CDS sequence (wt) from neuraminidase__InfluenzaA__ABO32778

SEQ ID NO: 47740 - RNA, 1410 nt, Artificial Sequence
  derived and/or modified CDS sequence (wt) from neuraminidase__InfluenzaA__ABO32793
augaauccaaaucaaaagauaauaacgauuggcucuguuucucucaccauuuccacaauaugcuucuuuaugcaaauugucaucuugauaacuacuguaacauugcauuucaagcaauaugaauucaacucccccccaaacaaccaagugaugcugugugaaccaacaauaauagaaagaaacauaacagagauaguguaucugaccaacaccaccauagagaaggaaauaugccccaaacuagcagaauacagaaauuggucaaagccgcaaugugacauuacaggauuugcaccuuuuucuaaggacaauucgauuaggcuuuccgcugguggggacaucugggugacaagagaaccuuaugugucaugcgauccugacaaauguuaucaauuugcccuuggacagggaacaacacuaaacaacgugcauucaaaugacacaguacaugauaggaccccuuaucggacccuauugaugaaugaguuagguguuccauuucaucuggggacuaagcaagugugcauagcaugguccagcucaaguugucacgauggaaaagcauggcugcauguuugugugacgggggaugauaaaaaugcaacugcuagcuucauuuacaaugggaggcuuguagauaguauuguuucaugguccaaagaaauccucagaacccaggagucagaaugcguuuguaucaauggaacuuguacaguaguaaugacugaugggagugcuucaggaaaaacugauacuaaaauacuauucauugaggaggggaaaaucguucauacuagcacauugucaggaagugcccagcaugucgaggagugcuccugcuauccucgauauccuggugucagaugugucugcagagacaacuggaaaggcuccaauaggcccaucguagauauaaacauaaaggauuauagcauuguuuccaguuaugugugcucaggacuuguuggagacacacccagaaaaaacgacagcuccagcaguagccauugcuuggauccuaacaaugaagaagguggucauggagugaaaggcugggccuuugaugauggaaaugacguguggaugggaagaacgaucagcgagaaguuacgcucaggauaugaaaccuucaaagucauugaaggcugguccaacccuaauuccaaauugcagauaaauaggcaagucauaguugacagagguaauagguccgguuauucugguauuuucucuguugaaggcaaaagcugcaucaaucggugcuuuuauguggaguugauaaggggaagaaaagaggaaacugaagucuuguggaccucaaacaguauuguuguguuuuguggcaccucagguacauauggaacaggcucauggccugauggggcggacaucaaucucaugccuauauaa

SEQ ID NO: 47741 - RNA, 1410 nt, Artificial Sequence; identical to SEQ ID NO: 47485
  derived and/or modified CDS sequence (wt) from neuraminidase__InfluenzaA__ABO32806

SEQ ID NO: 47742 - RNA, 1410 nt, Artificial Sequence; identical to SEQ ID NO: 46726
  derived and/or modified CDS sequence (wt) from neuraminidase__InfluenzaA__ABO32819

SEQ ID NO: 47743 - RNA, 1410 nt, Artificial Sequence; identical to SEQ ID NO: 46407
  derived and/or modified CDS sequence (wt) from neuraminidase__InfluenzaA__ABO32830

SEQ ID NO: 47744 - RNA, 1410 nt, Artificial Sequence
  derived and/or modified CDS sequence (wt) from neuraminidase__InfluenzaA__ABO32841
augaauccaaaucaaaagauaauaacgauuggcucuguuucucucaccauuuccacaauaugcuucuucaugcaaauugccaucuugauaacuacuguaacauugcauuucaagcaauaugaauucaacucccccccaaacaaccaagugaugcugugugaaccaacaauaauagaaagaaacauaacagagauaguguaucugaccaacaccaccauagagaaggaaauaugccccaaacuagcagaauacagaaauuggucaaaaccgcaauguaacauuacaggauuugcaccuuuuucuaaggacaauucgauuaggcuuuccgcugguggggacaucugggugacaagagaaccuuaugugucaugcgauccugacaaguguuaucaauuugcccuuggacagggaacaacacuaaacaacgugcauucaaaugacacaguacaugauaggaccccuuaucggacccuauugaugaaugaguuagguguuccauuucaucuggggaccaagcaagugugcauagcaugguccagcucaaguugucacgauggaaaagcauggcugcauguuuguguaacgggggaugauaaaaaugcaacugcuagcuucauuuacaaugggaggcuuguagauaguauuguuucaugguccaaagaaauccucaggacccaggagucagaaugcguuuguaucaauggaacuuguacaguaguaaugacugaugggagugcuucaggaaaagcugauacuaaaauacuauucauugaggaggggaaaaucguucauacuagcacauugucaggaagugcucagcaugucgaggaguguuccugcuauccucgauauccuggugucagaugugucugcagagacaacuggaaaggcuccaauaggcccauaguagauauaaacauaaaggauuauagcauuguuuccaguuaugugugcucaggacuuguuggagacacacccagaaaaaacgacagcuccagcaguagccauugcuuggauccuaacaaugaagaagguggucauggagugaaaggcugggccuuugaugauggaaaugacguguggaugggaagaacgaucagcgagaaguuacgcucaggauaugaaaccuucaaagucauugaaggcugguccaacccuaauuccaaauugcagauaaauaggcaagucauaguugacagagguaauagguccgguuauucugguauuuucucuguugaaggcaaaagcugcaucaaucggugcuuuuauguggaguugauaaggggaagaaaagaggaaacugaagucuuguggaccucaaacaguauuguuguguuuuguggcaccucagguacauauggaacaggcucauggccugauggggcggauaucaaucucaugccuauauaa

SEQ ID NO: 47745 - RNA, 1410 nt, Artificial Sequence; identical to SEQ ID NO: 47744
  derived and/or modified CDS sequence (wt) from neuraminidase__InfluenzaA__ABO32852

SEQ ID NO: 47746 - RNA, 1410 nt, Artificial Sequence; identical to SEQ ID NO: 47744
  derived and/or modified CDS sequence (wt) from neuraminidase__InfluenzaA__ABO32863

SEQ ID NO: 47747 - RNA, 1410 nt, Artificial Sequence; identical to SEQ ID NO: 47718
  derived and/or modified CDS sequence (wt) from neuraminidase__InfluenzaA__ABO32874

SEQ ID NO: 47748 - RNA, 1410 nt, Artificial Sequence; identical to SEQ ID NO: 47718
  derived and/or modified CDS sequence (wt) from neuraminidase__InfluenzaA__ABO32885

SEQ ID NO: 47749 - RNA, 1410 nt, Artificial Sequence; identical to SEQ ID NO: 47719
  derived and/or modified CDS sequence (wt) from neuraminidase__InfluenzaA__ABO32896

SEQ ID NO: 47750 - RNA, 1410 nt, Artificial Sequence; identical to SEQ ID NO: 47719
  derived and/or modified CDS sequence (wt) from neuraminidase__InfluenzaA__ABO32907

SEQ ID NO: 47751 - RNA, 1410 nt, Artificial Sequence
  derived and/or modified CDS sequence (wt) from neuraminidase__InfluenzaA__ABO32918
augaauccaaaucaaaagauaauaacgauuggcucuguuucucucaccauuuccacaauaugcuucuucaugcaaauugccaucuugauaacuacuguaacauugcauuucaagcaauaugaauucaacucccccccaaacaaccaagugaugcugugugaaccaacaauaauagaaagaaacauaacagagauaguguaucugaccaacaccaccauagagaaggaaacaugccccaaacuagcagaauacagaaauuggucaaagccgcaauguaacauuacaggauuugcacccuuuucuaaggacaauucgauuaggcuuuccgcugguggggacaucugggugacaagagaaccuuaugugucaugcgauccugacaaguguuaucaauuugcccuuggacagggaacaacacuaaacaacgugcauucaaaugacacaguacaugauaggaccccuuaucggacccuauugaugaaugaguuagguguuccauuucaucuggggaccaagcaagugugcauagcaugguccagcucaaguugucacgauggaaaagcauggcugcauguuuguguaacgggggaugauaaaaaugcaacugcuagcuucauuuacaaugggaggcuuguagauaguauuguuucauggucuaaagaaauccucaggacccaggagucagaaugcguuuguaucaauggaacuuguacaguaguaaugacugaugggagugcuucaggaaaagcugauacuaaaauacuauucauugaggaggggaaaaucguucauacuagcacauugucaggaagugcucagcaugucgaggagugcuccugcuauccucgauauccuggugucagaugugucugcagagacaacuggaaaggcuccaauaggcccauaguagauauaaacauaaaggauuauagcauuguuuccaguuaugugugcucaggacuuguuggagacacacccagaaaaaacgacagcuccagcaguagccauugcuuggauccuaacaaugaagaagguggucauggagugaaaggcugggccuuugaugaugggaaugacguguggaugggaagaacgaucagcgagaaguuacgcucaggauaugaaaccuucaaagucauugaaggcugguccaacucuaauuccaaauugcagacaaauaggcaagucauaguugacagagguaauagguccgguuauucugguauuuucucuguugaaggcaaaagcugcaucaaucggugcuuuuauguggaguugauaaggggaagaaaagaggaaacugaagucuuguggaccucaaacaguauuguuguguuuuguggcaccucagguacauauggaacaggcucauggccugauggggcggacaucaaucucaugccuauauaa

SEQ ID NO: 47752 - RNA, 1410 nt, Artificial Sequence; identical to SEQ ID NO: 47751
  derived and/or modified CDS sequence (wt) from neuraminidase__InfluenzaA__ABO32929

SEQ ID NO: 47753 - RNA, 1410 nt, Artificial Sequence; identical to SEQ ID NO: 47751
  derived and/or modified CDS sequence (wt) from neuraminidase__InfluenzaA__ABO32940

SEQ ID NO: 47754 - RNA, 1413 nt, Artificial Sequence
  derived and/or modified CDS sequence (wt) from neuraminidase__InfluenzaA__ABO32951
augaauccaaaucaaaaaauaauaaccauuggaucaaucaguauagcaaucggaauaauuaguuuaauguugcaaauaggaaauauuauuucaauaugggcuagucacucaauccaaacuggaagucaaaaccacacuggaguaugcaaccaaagaaucaucacauaugaaaacagcaccugggugaaucacacauauguuaauauuaacaacacuaauguuauugcuggaaaggacaaaacuucagugacauuggccggcaauucaucucuuuguucuaucaguggaugggcuauauacacaaaagacaacagcauaagaauugguuccaaaggagauguuuuugucauaagagagccuuucauaucauguucucacuuggaaugcagaaccuuuuuucugacccaaggugcucuauuaaaugacaaacauucaaaugggaccguuaaggacagaagucccuauagggcuuuaaugagcuguccucuaggugaagcuccguccccauacaauucaaaguuugaaucaguugcuuggucagcaagcgcaugccaugauggcaugggcugguuaacaaucgggauuucugguccagacaauggagcaguggcuguacuaaaauacaacggcauaauaacugaaaccauaaaaaguuggaaaaagcaaauauuaagaacacaagagucugaaugugucugugugaacgggucauguuucaccauaaugaccgauggcccgaguaauggggccgccucguacaaaaucuucaagaucgaaaagggaaagguuacuaaaucaauagaguugaaugcacccaauuuucauuaugaggaauguuccuguuacccagacacuggcacagugauguguguaugcagggacaacuggcaugguucaaaucgaccuugggugucuuuuaaucaaaaccuggauuaucaaauaggauacaucugcagugggguguucggugacaauccgcgucccaaagauggagagggcagcugcaauccagugacuguugauggagcaaacggaguaaagggguuuucauacaaauaugguaaugguguuuggauaggaaggacuaaaaguaacagacuuagaaagggguuugagaugauuugggauccuaauggauggacagauaccgacagugauuucucagugaaacaggauguuguggcaauaacugauuggucaggguacagcggaaguuucguucaacauccugaguuaacaggauuggacuguauaagaccuugcuucuggguugaguuagucagaggacugccuagagaaaauacaacaaucuggacuagugggagcagcauuucuuuuuguggcguaaauagugauacugcaaacuggucuuggccagacggugcugaguugccguucaccauugacaaguag

SEQ ID NO: 47755 - RNA, 1413 nt, Artificial Sequence
  derived and/or modified CDS sequence (wt) from neuraminidase__InfluenzaA__ABO32962
augaauccaaaucaaaaaauaauaaccauuggaucaaucaguauagcaaucggaauaauuagucuaauguugcaaauaggaaauauuauuucaauaugggcuagucacucaauccaaacuggaaguaaaaaccacacuggaguaugcaaccaaagaaucaucacauaugaaaacagcaccugggugaaucacacauauguuaauauuaacaacacuaauguuguugcuggaaaggacaaaacuucagugacauuggccggcaauucaucucuuuguucuaucaguggaugggcuauauacacaaaagacaacagcauaagaauugguuccaaaggagauguguuugucauaagagagccuuucauaucauguucucacuuggaaugcagaaccuuuuuucugacccaaggugcucuauuaaaugacaaacauucaaaugggaccguuaaggacagaagucccuauagggcuuuaaugagcuguccucuaggugaagcuccguccccauacaauucaaaguuugaaucaguugcuuggucagcaaacgcaugccaugauggcaugggcugguuaacaaucggaauuucugguccagacaauggagcaguggcuguacuaaaauacaacggcauaauaacugaaaccauaaaaaguuggaaaaagcaaauauuaagaacacaagagucugaaugugucugugugaacgggucauguuucaccauaaugaccgauggcccgaguaauggggccgccucguacaaaaucuucaagauaaaaaagggaaagguuacuaaaucaauagaguugaaugcacccaauuuucauuaugaggaauguuccuguuacccagacacuggcacagugauguguguaugcagggacaacuggcaugguucaaaucgaccuugggugucuuuuaaucaaaaccuggauuaucaaauaggauacaucugcagugggguguucggugacaauccgcgucccaaagauggagagggcagcuguaauccagugacuguugauggagcaaacggaguaaagggguuuucauacaaauaugguaaugguguuuggauaggaaggacuaaaaguaacagacuuagaaagggguuugagaugauuugggauccuaauggauggacagauaccgacagugauuucucagugagacaggauguuguggcaauaacugauuggucaggauacagcggaaguuucguucaacauccugaguuaacaggauuggacuguauaagaccuugcuucuggguugaguuagucagaggacugccuagagagaauacaacaaucuggacuagugggagcagcauuucuuuuuguggcguaaauagugauacugcaaacuggucuuggccagacggugcugaguugccguucaccauugacaaguag

SEQ ID NO: 47756 - RNA, 1413 nt, Artificial Sequence; identical to SEQ ID NO: 47543
  derived and/or modified CDS sequence (wt) from neuraminidase__InfluenzaA__ABO32973

SEQ ID NO: 47757 - RNA, 1413 nt, Artificial Sequence
  derived and/or modified CDS sequence (wt) from neuraminidase__InfluenzaA__ABO32984
augaauccaaaucagaaaauaauaaccauuggaucaaucuguauggcaaucggaauaauuagucuaauauugcaaauagggaauauuaucucaauauggguuagccacucaauucaaacuggaagucaaaaccauacuggaauaugcaaccaaagaaucauuaccuaugaaaauagcaccuggguaaaucaaacauauguuaauauuagcaacacuaacguuguugcuggaaaggacacaacuucaaugacauuagccggcaauucaucucuuuguccuauccgugggugggcuauauacagcaaagacaacagcauaagaauugguuccaaaggagauguuuuugucauaagagaaccuuuuauaucauguucucacuuggaaugcagaaccuuuuuucugacccaaggcgcucuauuaaaugacaagcauucaaaugggaccguuaaggacagaagcccuuauagggccuuaaugagcuguccuauaggugaagcuccgucuccauacaauucaagguuugaaucgguugcuuggucagcaagugcaugucaugauggcaugggcuggcuaacaaucggaauuucugguccagaugauggagcaguggcuguacuaaaauacaacggcauaauaacugaaaccauaaaaaguuggaggaagcaaauauuaagaacacaagagucugaaugugucuguguaaacgguucauguuuuaccauaaugaccgauggcccgagugaugggccggccucguacagaaucuucaaaaucgagaaggggaagauuacuaaaucaauagaguuggaugcacccaauucucauuacgaggaauguuccuguuacccagacaccggcacagugaugugugugugcagagacaauuggcaugguucgaaucgaccuugggugucuuuuaaucaaaaccuggauuaucaaauaggauacaucugcagugggguuuucggugacaauccgcgucccaaagauggaaaaggcagcugugauccaguaaauguugauggagcagacggaguaaagggguuuucauacagguaugguaaugguguuuggauaggaaggacuaaaaguaacagcuccagaaagggauuugagaugauuugggauccuaauggauggacagauaccgauaguaauuucuuagugaaacaggauguaguggcaaugacugauuggucaggguacagcggaaguuucguucaacauccugagcuaacaggauuggacuguaugaggccuugcuucuggguugaauuaaucagaggacgacccagagaaaaaacaacaaucuggacuagugggagcagcauuucuuuuuguggcgugaauagugauacuguaaauuggucuuggccagacggugccgaguugccauucaccauugacaaguag

SEQ ID NO: 47758 - RNA, 1413 nt, Artificial Sequence
  derived and/or modified CDS sequence (wt) from neuraminidase__InfluenzaA__ABO32995
augaauccaaaucagaaaauaauaaccauuggaucaaucuguauggcaaucggaauaauuagucuaauauugcaaauagggaauauuaucucaauauggguuagccacucaauucaaacuggaagucaaaaccauacuggaauaugcaaccaaagaaucauuaccuaugaaaauagcaccuggguaaaucaaacauauguuaauauuagcaacacuaacguuguugcuggaaaggacacaacuucaaugacauuagccggcaauucaucucuuuguccuauccgugggugggcuauauacagcaaagacaacagcauaagaauugguuccaaaggagauguuuuugucauaagagaaccuuuuauaucauguucucacuuggaaugcagaaccuuuuuucugacccaaggcgcucuauuaaaugacaagcauucaaaugggaccguuaaggacagaagcccuuauagggccuuaaugagcuguccuauaggugaagcuccgucaccauacaauucaagguuugaaucgguugcuuggucagcaagugcaugucaugauggcaugggcuggcuaacaaucggaauuucugguccagaugauggagcaguggcuguacuaaaauacaacggcauaauaacugaaaccauaaaaaguuggaggaagcaaauauuaagaacacaagagucugaaugugucuguguaaacgguucauguuuuaccauaaugaccgauggcccgagugaugggccggccucguacagaaucuucaaaaucgagaaggggaagauuacuaaaucaauagaguuggaugcacccaauucucauuacgaggaauguuccuguuacccagacaccggcacagugaugugugugugcagagacaauuggcaugguucgaaucgaccuugggugucuuuuaaucaaaaccuggauuaucaaauaggauacaucugcagugggguuuucggugacaauccgcgucccaaagauggaaaaggcagcugugauccaguaaauguugauggagcagacggaguaaagggguuuucauacagguaugguaaugguguuuggauaggaaggacuaaaaguaacagcuccagaaagggauuugagaugauuugggauccuaauggauggacagauaccgauaguaauuucuuagugaaacaggauguaguggcaaugacugauuggucaggguacagcggaaguuucguucaacauccugagcuaacaggauuggacuguaugaggccuugcuucuggguugaauuaaucagaggacgacccagagaaaaaacaacaaucuggacuagugggagcagcauuucuuuuuguggcgugaauagugauacuguaaauuggucuuggccagacggugccgaguugccauucaccauugacaaguag

SEQ ID NO: 47759 - RNA, 1413 nt, Artificial Sequence
  derived and/or modified CDS sequence (wt) from neuraminidase__InfluenzaA__ABO33009
augaauccaaaccagaaaauaauaaccauuggaucaaucuguauggcaaucggaaugauuagucuaauauugcaaauagggaauauuaucucaauauggguuagccacucaauucaaacuggaagucaaaaccauacugggauaugcaaccaaagaaucauuaccuaugaaaauagcaccuggguaaaucaaacauauguuaauauuagcaacacuaacguuguugcuggaaaggacacaacuucaaugacauuagccggcaauucaucucuuuguccuauccgugggugggcuauauacagcaaagacaacagcauaagaauugguuccaaaggagauguuuuugucauaagagaaccuuuuauaucauguucucacuuggaaugcagaaccuuuuuucugacccaaggcgcucuguuaaaugacaagcauucaaaugggaccguuaaggacagaagcccuuauagggccuuaaugagcugcccuauaggugaagcuccgucuccauacaauucaagguuugaaucaguugcuuggucagcaagugcaugucaugauggcaugggcuggcuaacaaucggaauuucugguccagaugauggagcaguggcuguacuaaaauacaacggcauaauaacugaaaccauaaaaaguuggaggaagcaaauauuaagaacacaagagucugaaugugucuguguaaacgguucauguuuuaccauaaugaccgauggcccgagugaugggccggccucguacagaaucuucaaaaucgagaaggggaagauuacuaaaucaauagaguuggaugcacccaauucucauuacgaggaauguuccuguuacccagacaccggcacagugaugugugugugcagagacaauuggcaugguucgaaucgaccuugggugucuuuuaaucaaaaccuggauuaucaaauaggauacaucugcagugggguuuucggugacaauccgcgucccaaagauggaaaaggcagcugugauccaguaaauguugauggagcagacggaguaaagggguuuucauacagguaugguaaugguguuuggauaggaaggacuaaaaguaacagcuccagaaagggauuugagaugauuugggauccuaauggauggacagauaccgacaguaauuucuuagugaaacaggauguaguggcaaugacugauuggucaggguacagcggaaguuucguucaacauccugagcuaacaggauuggacuguaugaggccuugcuucuggguugaauuaaucagaggacgacccagagaaaaaacaacaaucuggacuagugggagcagcauuucuuuuuguggcgugaauagugauacuguaaauuggucuuggccagacggugccgaguugccauucaccauugacaaguag

SEQ ID NO: 47760 - RNA, 1410 nt, Artificial Sequence; identical to SEQ ID NO: 47530
  derived and/or modified CDS sequence (wt) from neuraminidase__InfluenzaA__ABO33039

SEQ ID NO: 47761 - RNA, 1410 nt, Artificial Sequence
  derived and/or modified CDS sequence (wt) from neuraminidase__InfluenzaA__ABO33050
augaauccaaaucaaaagauaauaacgauuggcucuguuucucucaccauugccacaauaugcuuccuuaugcaaauugccauccugguaacuacuguaacauugcauuucaagcaauaugaaugcaacucccccccaaacaaccaagugaugcugugugaaccaacaauaauagaaagaaacauaacagagauaguguaucugaccaacaccaccauagagaaggaaauaugccccaaacuagcagaauacagaaauuggucaaagccgcaauguaacauuacaggauuugcaccuuuuucuaaggacaauucgauucggcuuuccgcugguggggacaucugggugacaagagaaccuuaugugucaugcgauccugacaaguguuaucaauuugcccuuggacagggaacaacacuaaacaacgggcauucaaaugacacaguacaugauaggaccccuuaucggacccuauugaugaaugaguuggguguuccauuucauuugggaaccaagcaagugugcauagcaugguccagcucaaguugucacgauggaaaagcauggcugcauguuuguguaacgggggaugaugaaaaugcaacugcuagcuucauuuacaaugggaggcuuguagauaguauugguucaugguccaaaaaaauccucaggacccaggagucggaaugcguuuguaucaauggaacuuguacaguaguaaugacugaugggagugcuucaggaaaagcugauacuaaaauacuauucauugaggaggggaaaaucguucauacuagcccauugucaggaagugcucagcaugucgaggagugcuccuguuauccucgauauccuggugucagaugugucugcagagacaacuggaaaggcuccaauaggcccaucguagauauaaauguaaaggauuauagcauuguuuccaguuaugugugcucaggacuuguuggagacacacccagaaaaaacgacagcuccagcaguagccauugcuuggauccuaacaaugaggaagguggucauggagugaaaggcugggccuuugaugauggaaaugacguguggaugggaagaacgaucagcgagaaguuacgcucaggauaugaaaccuucaaagucauugaaggcugguccaaaccuaacuccaaauugcagauaaauaggcaagucauaguugacagagguaauagguccgguuauucugguauuuucucuguugaaggcaaaagcugcaucaaucggugcuuuuauguggaguugauaaggggaaggaaacaggaaacugaagucuuguggaccucaaacaguauuguuguguuuuguggcaccucagguacauauggaacaggcucauggccugauggggcggacaucaaucucaugccuauauaa

SEQ ID NO: 47762 - RNA, 1410 nt, Artificial Sequence; identical to SEQ ID NO: 46755
  derived and/or modified CDS sequence (wt) from neuraminidase__InfluenzaA__ABO33061

SEQ ID NO: 47763 - RNA, 1410 nt, Artificial Sequence
  derived and/or modified CDS sequence (wt) from neuraminidase__InfluenzaA__ABO33072
augaauccaaaucaaaagauaauaacaauuggcucugucucucucaccauugcaacaauaugcuuccucaugcaaauugccaucuugguaacuacuguaacauugcauuucaagcaauaugagugcggcucccccgcaaacaaccaaguaaugccgugugaaccaauaauaauagaaaggaacauaacagagauaguguauuugacuaacaccaccauagagaaagagauaugccccaaauuaguggaauacagaaauuggucaaagccgcaauguaaaauuacaggauuugcaccuuuuucuaaggacaauucaauucggcuuucugcugguggggacauuugggugacgagagaaccuuaugugucaugcgauccuggcaaguguuaucaauuugcacucgggcaggggaccacacuagacaacaagcauucaaaugacacaauacaugauagaaccccucaucgaacccuauugaugaaugaguuggguguuccauuucauuugggaaccaggcaaguguguauagcaugguccagcucaaguugucacgauggaaaagcauggcugcauguuugugucacuggguaugauaaaaaugcaacugcuagcuucauuuacgaugggaggcuuguagacaguauugguucaugguccaaaaauauccucaggacccaggagucggaaugcguuuguaucaaugggacuuguacaguaguaaugacugauggaagugcuucagaaagagcugauacuaaaauacuauucauugaagaggggaaaauuguucauauuagcccauugucaggaagugcucagcauguagaggaguguuccuguuauccucgauauccuggugucagaugugucugcagagacaacuggaaaggcucuaauaggcccgucguagauauaaaugugaaagauuauagcauuguuuccaguuaugugugcucagggcuuguuggcgacacacccagaaaaaacgacagaucuagcaguagcuauugccggaauccuaacaaugagaaagggaaucauggagugaaaggcugggccuuugacgauggaaaugacguguggaugggaagaacgaucagcgaggagucacgcucagguuaugaaaccuucaaagucauuggugguugguccacaccuaauuccaaauugcagauaaauaggcaagucauaguugacagcgauaauagguccgguuauucugguauuuucucuguugagggcaaaagcugcaucaauaggugcuuuuauguggaguugauaaggggaagggaacaggaaacuagagucugguggaccucaaacaguauuguuguguuuuguggcacuucagguaccuaugggacaggcucauggccugauggagcggacaucaaucucaugccuauauaa

SEQ ID NO: 47764 - RNA, 1413 nt, Artificial Sequence; identical to SEQ ID NO: 47665
  derived and/or modified CDS sequence (wt) from neuraminidase__InfluenzaA__ABO37991

SEQ ID NO: 47765 - RNA, 1413 nt, Artificial Sequence
  derived and/or modified CDS sequence (wt) from neuraminidase__InfluenzaA__ABO38013
augaauccaaaucaaaaaauaauaaccauuggaucaaucaguauugcaauuggaauaauuagucugauauugcaaauaggaaauauuauuucaauaugggcuagccacucaauccaaacuggaagucaaaaccacacuggaauaugcaaccaaagaaucauuacauaugaaaauagcaccuggguaaaucaaacauauguuaauauuaacaacacuaauguuguugcuggaaaggacaaaaccucaaugacauuggccggcaauucaucucuuugcccuauccguggaugggcuauauacacaaaagacaacagcauaagaauugguuccaaaggagauguuuuugucauaagagagccuuuuauaucauguucucacuuggaaugcagaaccuuuuuucugacccaaggugcucuauuaaaugacaagcauucaaaugggaccguuaaggacagaagcccuuauagggccuuaaugagcuguccucuaggugaagcuccgucuccauacaauucaagauuugaaucaguugcuuggucagcaagcgcaugccaugauggcuugggcuggcuaacaaucggaauuucugguccagauaauggggcaguggcuguacuaaaauacaacggcauaauaacugaaaccauuaaaaguuggaagaagcgaauauuaagaacacaagagucugaaugugucuguaugaacgguucauguuuuaccauaaugaccgauggcccgaguaauggggccgcaucguacagaaucuucaaaaucgagaaggggagaguuacuaaaucaauagaguuggaugcacccaauuaucauuacgaggaauguucauguuacccagacaccggcacagugaugugugugugcagggacaauuggcacgguucaaaucgaccuugggugucuuuuaaucaaaaccuggauuaucaaauaggauacaucugcagugggguguucggugacaauccgcgucccaaagauggagaaggcagcuguaauccagugacuguugauggagcagacggaguaaagggguuuucauacagauaugguaaugguguuuggauaggaaggacuaaaaguaacagacucagaaagggauaugagaugauuugggauccuaauggauggacagauaccgacagugauuucucaaugaaacaggauaucguggcaaugacugauuggucaggguacagcggaaguuuuguucaacauccugagcuaacaggauuggacuguaugagaccuugcuucuggguugaauuagucagagggcuaccuagagaaaauacaacaaucuggacuagugggagcagcauuucuuuuuguggcguaaauagcgauacugcaaacuggucuuggccagacggugccgaguugccauucaccauugacaaguag

SEQ ID NO: 47766 - RNA, 1413 nt, Artificial Sequence
  derived and/or modified CDS sequence (wt) from neuraminidase__InfluenzaA__ABO38024
augaauccaaaucaaaaaauaauaaccauuggaucaaucaguauagcaaucggaauaauuagucuaauguugcaaauaggaaauauuauuucaauaugggcuagucacucaauccaaacuggaagucaaaaccacacuggaauaugcaaccaaagaaucaucacauaugagaacaacaccugggugaaucacacguauguuaauauuaacaacacuaauauuguugcuggaaaggacaaaacuucagugacauuggccggcaauucaucucuuuguucuaucaguggaugggcuauauacacaaaagacaacagcauaagaauuggcuccaaaggagauguuuuugucauaagagaaccuuucauaucauguucucacuuggaaugcagaaccuuuuuucugacccaaggugcucuauuaaaugacaaacauucaaaugggaccguuaaggacagaaguccuuauagggccuuaaugagcuguccucuaggugaagcuccguccccauacaauucaaaguuugaaucaguugcauggucagcaagcgcaugccaugauggcaugggcugguuaacaaucggaauaucugguccagacaauggagcuguggcuguacuaaaauacaacggcauaauaacugaaaccauaaaaaguuggaaaaagcgaauauuaagaacacaagagucugaaugugucugugugaacgggucauguuucaccauaaugaccgauggcccgaguaauggggcugccucguacaaaaucuucaagaucgaaaaagggaaaguuacuaaaucaauagaguugaaugcacccaauuuucauuaugaggaauguuccuguuacccagacacuggcacagugauguguguaugcagggacaacuggcaugguucaaaucgaccuugggugucuuuuaaucaaaaccuggauuaucaaauaggauacaucugcagugggguguucggugacaauccgcgucccaaagauggagagggcagcuguaauccagugacuguugauggggcagacggaguaaagggguuuucauacaaauaugguaaugguguuuggauaggaaggacuaaaaguaacagacuuagaaagggguuugagaugguuugggauccuaauggauggacagauaccgacagugauuucucagugaaacaggauguuguggcaauaacugauuggucaggguacagcggaaguuucguucaacauccugaguuaacaggauuggacuguauaagaccuugcuucuggguugaguuagucagaggacugccuagagaaaauacaacaaucuggacuagugggagcagcauuucuuuuuguggcguaaauagugauacugcaaacuggucuuggccagacggugcugaguugccguucaccauugacaaguag

SEQ ID NO: 47767 - RNA, 1413 nt, Artificial Sequence
  derived and/or modified CDS sequence (wt) from neuraminidase__InfluenzaA__ABO38035
augaauccaaaucaaaaaauaauaaccauuggaucaaucaguauagcaaucggaauaauuagucuaauguugcaaauaggaaauauuauuucaauaugggcuagucacucaauccaaacuggaagucaaaaccacacuggaacaugcaaccaaagaaucaucacauaugaaaacagcaccugggugaaucacacauauguuaauauuaacaacacuaauguuguugcuggaaaggacaaaacuucagugacauuggccggcaauucaucucuuuguucuaucaguggaugggcuauauacacaaaagacaacagcauaagaauuggauccaaaggagauguuuuugucauaagagaaccuuucauaucauguucucacuuggaaugcagaaccuuuuuucugacccaaggugcucuauuaaaugacaaacauucaaaugggaccguuaaggacagaaguccuuauagggccuuaaugagcuguccucuaggugaagcuccguccccauacaauucaaaguuugaaucaguugcauggucagcaagcgcaugccaugauggcaugggcugguuaacaaucggaauuucugguccagacaauggagcuguggcuguacuaaaauacaacggcauaauaacugaaaccauaaaaaguuggaaaaagcgaauauuaagaacacaagagucugaaugugucugugugaacgggucauguuucaccauaaugaccgauggcccaaguaauggggccgccucguacaaaaucuucaagaucgaaaaggggaagguuacuaaaucaauagaguugaaugcacccaauuuucauuaugaggaauguuccuguuacccagacacuggcacagugauguguguaugcagggacaacuggcaugguucaaaucgaccuugggugucuuuuaaucaaaaccuggauuaucaaauaggauacaucugcagugggguguucggugacaauccgcgucccaaagauggagagggcagcuguaauccagugacuguugauggagcagacggaguaaagggguuuucauacaaauaugguaaugguguuuggauaggaaggacuaaaaguaacagacuuagaaagggguuugaggugauuugggauccuaauggauggacagauaccgacagugauuucucagugaaacaggauguuguggcaauaacugauuggucaggguacagcggaaguuucguucaacauccugaguuaacaggauuggacuguauaagaccuugcuucuggguugaguuagucagaggaaugccuagagaaaauacaacaaucuggacuagugggagcagcauuucuuuuuguggcguaaauagugauacugcaaacuggucuuggccagacggugcugaguugccguucaccauugacaaguag

SEQ ID NO: 47768 - RNA, 1413 nt, Artificial Sequence; identical to SEQ ID NO: 46897
  derived and/or modified CDS sequence (wt) from neuraminidase__InfluenzaA__ABO38046

SEQ ID NO: 47769 - RNA, 1413 nt, Artificial Sequence
  derived and/or modified CDS sequence (wt) from neuraminidase__InfluenzaA__ABO38068
augaauccaaaucagaaaauaauaaccauuggaucaaucuguauggcaaucggaauaauuagucuaauauugcaaauagggaauauuaucucaauauggguuagccacucaauucaaacuggaagucaaaaccauacuggaauaugcaaccaaagaaucauuaccuaugaaaauagcaccuggguaaaucaaacauauguuaauauuagcaacacuaacguuguugcuggaaaggacacaacuucaaugacauuagccggcaauucaucucucuguccuauccgugggugggcuauauacagcaaagacaacagcauaagaauugguuccaaaggagauguuuuugucauaagagaaccuuuuauaucauguucucacuuggaaugcagaaccuuuuuucugacccaaggcgcucuauuaaaugacaagcauucaaaugggaccguuaaggacagaagcccuuauagggccuuaaugagcuguccuauaggugaagcuccgucuccauacaauucaagguuugaaucgguugcuuggucagcaagugcaugucaugauggcaugggcuggcuaacaaucggaauuucugguccagaugauggagcaguggcuguacuaaaauacaacggcauaauaacugaaaccauaaaaaguuggaggaagcaaauauuaagaacacaagagucugaaugugucuguguaaacgguucauguuuuaccauaaugaccgauggcccgagugaugggccggccucguacagaaucuucaaaaucgagaaggggaagauuacuaaaucaauagaguuggaugcacccaauucucauuacgaggaauguuccuguuacccagacaccggcacagugaugugugugugcagagacaauuggcaugguucgaaucgaccuugggugucuuuuaaucaaaaccuggauuaucaaauaggauacaucugcagugggguuuucggugacaauccgcgucccaaagauggaaaaggcagcugugauccaguaaauguugauggagcagacggaguaaagggguuuucauacagguaugguaaugguguuuggauaggaaggacuaaaaguaacagcuccagaaagggauuugagaugauuugggauccuaauggauggacagauaccgauaguaauuucuuagugaaacaggauguaguggcaaugacugauuggucaggguacagcggaaguuucguucaacauccugagcuaacaggauuggacuguaugaggccuugcuucuggguugaauuaaucagaggacgacccagagaaaaaacaacaaucuggacuagugggagcagcauuucuuuuuguggcgugaauagugauacuguaaauuggucuuggccagacggugccgaguugccauucaccauugacaaguag

SEQ ID NO: 47770 - RNA, 1410 nt, Artificial Sequence; identical to SEQ ID NO: 46378
  derived and/or modified CDS sequence (wt) from neuraminidase__InfluenzaA__ABO38079

SEQ ID NO: 47771 - RNA, 1410 nt, Artificial Sequence
  derived and/or modified CDS sequence (wt) from neuraminidase__InfluenzaA__ABO38090
augaauccaaaucaaaagauaauaacgauuggcucuguuucucucaccauugccacaauaugcuuccuuaugcaaauugccauccugguaacuacuguaacauugcauuucaagcaauaugaaugcaacucccccccaaacaaccaagugaugcugugugaaccaacaauaauagaaagaaacauaacagagauaguguaucugaccaacaccaccauagagaaggaaauaugccccaaacuagcagaauacagaaauuggucaaagccgcaauguaacauuacaggauuugcaccuuuuucuaaggacaauucgauucggcuuuccgcugguggggacaucugggugacaagagaaccuuaugugucaugcgauccugacaaguguuaucaauuugcccuuggacagggaacaacacuaaacaacggacauucaaaugacacaguacaugaaaggaccccuuaucggacccuauugaugaaugaguuggguguuccauuucauuugggaaccaagcaagugugcauagcaugguccagcucaaguugucacgauggaaaagcauggcugcauguuuguguaacgggggaugaugaaaaugcaacugcuagcuucauuuacaaugggaggcuuguagauaguauugguucaugguccaaaaaaauccucaggacccaggagucggaaugcguuuguaucaauggaacuuguacaguaguaaugacugaugggagugcuucaggaaaagcugauacuaaaauacuauucauugaggaggggaaaaucguucauacuagccuauugucaggaagugcucagcaugucgaggagugcuccuguuauccucgauacccuggugucagaugugucugcagagacaacuggaaaggcuccaauaggcccaucguagauauaaauguaaaggauuauagcauuguuuccaguuaugugugcucaggacuuguuggagacacacccagaaaaaacgacagcuccagcaguagccauugcuuggauccuaacaaugaggaagguggucauggagugaaaggcugggccuuugaugauggaaaugacguguggaugggaagaacgaucagcgagaaguuacgcucaggauaugaaaccuucaaagucauugaaggcugguccaaaccuaacuccaaauugcagauaaauaggcaagucauaguugacagagguaauagguccgguuauucugguauuuucucuguugaaggcaaaagcugcaucaaucggugcuuuuauguggaguugauaaggggaaggaaacaggaaacugaagucuuguggaccucaaacaguauuguuguguuuuguggcaccucagguacauauggaacaggcucauggccugauggggcggacaucaaucucaugccuauauaa

SEQ ID NO: 47772 - RNA, 1410 nt, Artificial Sequence
  derived and/or modified CDS sequence (wt) from neuraminidase__InfluenzaA__ABO38101
augaauccaaaucaaaagauaauaacaauuggcucugucucucucaccauugcaacaguaugcuuccucaugcagauugccauccuggcaacuacugugacauugcauuuuaaacaacaugagugcgacucccccgcgagcaaccaaguaaugccaugugaaccaauaauaauagaaaggaacauaacagagauaguguauuugaauaacaccaccauagagaaagagauuugccccgaaguaguggaauacagaaauuggucaaagccgcaaugucaaauuacaggauuugcaccuuuuucuaaggacaauucaauccggcuuucugcugguggggacauuugggugacgagagaaccuuaugugucaugcgauccuggcaaguguuaucaauuugcacucgggcaagggaccacacuagacaacaaacauucaaauggcacaauacaugauagaaucccucaccgaacccuauuaaugaaugaguuggguguuccauuucauuuaggaaccaaacaaguguguguagcaugguccagcucaaguugucacgauggaaaagcaugguugcauguuugugucacuggggaugauagaaaugcgacugccagcuucauuuaugacgggaggcuuguggacaguauugguucauggucucaaaauauccucaggacccaggagucggaaugcguuuguaucaaugggacuugcacaguaguaaugacugauggaagugcaucaggaagagccgauacuagaauacuauucauuaaagaggggaaaauuguccauaucagcccauugucaggaagugcucagcauauagaggaguguuccuguuacccucgauauccugacgucagauguaucugcagagacaacuggaaaggcucuaauaggcccguuauagacauaaauauggaagauuauagcauugauuccaguuaugugugcucagggcuuguuggcgacacacccaggaacgacgacagcucuagcaauagcaauugcagggauccuaacaaugagagagggaauccaggagugaaaggcugggccuuugacaauggagaugauguauggaugggaagaacaaucaacaaagauucacgcucagguuaugaaacuuucaaagucauuggugguugguccacaccuaauuccaaaucgcaggucaauagacaggucauaguugacaacaauaauuggucugguuacucugguauuuucucuguugagggcaaaagcugcaucaauaggugcuuuuauguggaguugauaaggggaaggccacaggagacuagaguaugguggaccucaaacaguauuguuguguuuuguggcacuucagguacuuauggaacaggcucauggccugauggggcgaacaucaauuucaugccuauauaa

SEQ ID NO: 47773 - RNA, 1410 nt, Artificial Sequence
  derived and/or modified CDS sequence (wt) from neuraminidase__InfluenzaA__ABO38233
augaauccaaaucaaaagauaauaacaauuggcucugucucucucaccauugcaacaauaugcuuccucaugcaaauugccauccugguaacuacuguaacauugcauuucaagcaauaugagugcgacucccccgcaaacaaccaaguaaugccgugugaaccaauaauaauagaaaggaacauaacagagauaguguauuugacuaacaccaccauagagaaagagauaugccccaaauuaguggaauacagaaauuggucaaagccgcaauguaaaauuacaggauuugcaccuuuuucuaaggacaauucaauucggcuuucugcugguggggacauuugggugacgagagaaccuuaugugucaugcgauccuggcaaguguuaucaauuugcacucgggcaggggaccacacuagacaacaagcauucaaaugacacaauacaugauagaaccccucaucgaacccuauugaugaaugaguuggguguuccauuucauuugggaaccaggcaaguguguauagcaugguccagcucaaguugucacgauggaaaagcauggcugcauguuugugucacuggauaugauaaaaaugcaacugcuagcuucauuuacgaugggaggcuuguagacaguauugguucauggucuaaaaauauccucaggacccaggagucggaaugcguuuguaucaaugggacuuguacaguaguaaugacugauggaagugcuucagaaagagcugauacuaaaauacuauucauugaagaggggaaaauuguucauauuagcccauugucaggaagugcucagcauguagaggaguguuccuguuauccucgauauccuggugucagaugugucugcagagacaacuggaaaggcucuaauaggcccgucguagauauaaaugugaaagauuauagcauugcuuccaguuaugugugcucagggcuuguuggcgacacacccagaaaaaacgacagauauagcaguagcuauugccggaauccuaacaaugagaaagggaaucauggagugaaaggcugggccuuugacgauggaaaugacguguggaugggaagaacgaucagcgaugagucacgcucagguuaugaaacuuucaaagucauuggugguugguccacaccuaauuccaaauugcagauaaauaggcaagucauaguugacagcgauaauagguccgguuauucugguauuuucucuguugagggcaaaagcugcaucaauaggugcuuuuauguggaguugauaaggggaagggaacaggaaacuagagucugguggaccucaaacaguauuguuguguuuuguggcacuucagguaccuaugggacaggcucauggccugauggagcggacaucaaucucaugccuauauaa

SEQ ID NO: 47774 - RNA, 1410 nt, Artificial Sequence; identical to SEQ ID NO: 47123
  derived and/or modified CDS sequence (wt) from neuraminidase__InfluenzaA__ABO38244

SEQ ID NO: 47775 - RNA, 1410 nt, Artificial Sequence
  derived and/or modified CDS sequence (wt) from neuraminidase__InfluenzaA__ABO38255
augaauccaaaucaaaagauaauaacgauuggcucuguuucucucaccauuuccacaauaugcuucuuuaugcaaauugccaucuugauaacuacuguaacacugcauuucaagcaauaugaauucaacucccccccaaacaaccaagugaugcugugugaaccaacaauaauagaaagaaacauaacagagauaguguaucugaccaacaccaccauagagaaggaaauaugccccaaacuagcagaauacagaaauuggucaaagccgcaaugugacauuacaggauuugcaccuuuuucuaaggacaauucgauuaggcuuuccgcugguggggacaucugggugacaagagaaccuuaugugucaugcgauccugacaaauguuaucaauuugcccuuggacagggaacaacacuaaacaacgugcauucaaaugacacaguacaugauaggaccccuuaucggacccuauugaugaaugaguuagguguuccauuucaucuggggacuaagcaagugugcauagcaugguccagcucaaguugucacgauggaaaagcauggcugcauguuuguguaacgggggaugauaaaaaugcaacugcuagcuucauuuacaaugggaggcuuguagauaguauuguuucaugguccaaagaaauccucagaacccaggagucagaaugcguuuguaucaauggaacuuguacaguaguaaugacugaugggagugcuucaggaaaagcugauacuaaaauacuauucauugaggaggggaaaaucguucauacuagcacauugucaggaagugcccagcaugucgaggagugcuccugcuauccucgauauccuggugucagaugugucugcagagacaacuggaaaggcuccaauaggcccaucguagauauaaacauaaaggauuauagcauuguuuccaguuaugugugcucaggacuuguuggagacacacccagaaaaaacgacagcuccagcaguagccauugcuuggauccuaacaaugaagaagguggucauggagugaaaggcugggccuuugaugauggaaaugacguguggaugggaagaacgaucagcgagaaguuacgcucaggauaugaaaccuucaaagucauugaaggcugguccaacccuaauuccaaauugcagauaaauaggcaagucauaguugacagagguaauagguccgguuauucugguauuuucucuguugaaggcaaaagcugcaucaaucggugcuuuuauguggaguugauaaggggaagaaaagaggaaacugaagucuuguggaccucaaacaguauuguuguguuuuguggcaccucagguacauauggaacaggcucauggccugauggggcggacaucaaucucaugccuauauaa

SEQ ID NO: 47776 - RNA, 1410 nt, Artificial Sequence; identical to SEQ ID NO: 47744
  derived and/or modified CDS sequence (wt) from neuraminidase__InfluenzaA__ABO38277

SEQ ID NO: 47777 - RNA, 1410 nt, Artificial Sequence; identical to SEQ ID NO: 47751
  derived and/or modified CDS sequence (wt) from neuraminidase__InfluenzaA__ABO38288

SEQ ID NO: 47778 - RNA, 1410 nt, Artificial Sequence
  derived and/or modified CDS sequence (wt) from neuraminidase__InfluenzaA__ABO38299
augaauccaaaucaaaagauaauaacaauuggcucugucucucucaccauugcaacaguaugcuucaucaugcagauugccauccuggcaacuacugugacauugcauuuuaaacaacaugagugcgacucccccgcgagcaaccaaguaaugccaugugaaccaauaauaauagaaaggaacauaacagagauaguguauuugaauaacaccaccauagagaaagagauuugccccgaagcaguggaauacagaaauuggucaaagccgcaaugucaaauuacaggauuugcaccuuuuucuaaggacaauucaauccggcuuucugcugguggggacauuugggugacgagagaaccuuaugugucaugcgauccuggcaaguguuaucaauuugcacucgggcaggggaccacacuagacaacaaacauucaaauggcacaauacaugauagaaucccucaccgaacccuauuaaugaaugaguuggguguuccauuucauuuaggaaccaaacaaguguguguagcaugguccagcucaaguugucacgauggaaaagcaugguugcauguuugugucacuggggaugauagaaaugcgacugcuagcuucauuuaugacgggaggcuuguggacaguauugguucauggucucaaaauauccucaggacccaggagucggaaugcguuuguaucaaugggacuugcacaguaguaaugacugauggaagugcaucaggaagagccgauacuagaauacuauucauuaaagaggggaaaauuguccauauuagcccauugucaggaagugcucagcauguagaggaguguuccuguuacccucgauauccugacgucagauguaccugcagagacaacuggaaaggcucuaauaggcccguuauagacauaaauauggaagauuauagcauugauuccaguuacgugugcucaggacuuguuggcgacacacccaggaacgacgacagcucuagcaauagcaauugcagggauccuaacaaugaaagagggaauccaggagugaaaggcugggccuuugacaauggagaugauguauggaugggaagaacaaucaacaaagauucacgcucagguuaugaaacuuucaaagucauuggugguugguccacaccuaauuccaaaucgcaggucaauagacaggucauaguugacaacaauaauuggucugguuacucugguauuuucucuguugagggcaaaaguugcaucaauaggugcuuuuauguggaguugauaaggggaaggccacaggagacuagaguaugguggaccucaaacaguauuguuguguuuuguggcacuucagguacuuauggaacaggcucauggccugauggggcgaacaucaauuucaugccuauauaa

SEQ ID NO: 47779 - RNA, 1410 nt, Artificial Sequence
  derived and/or modified CDS sequence (wt) from neuraminidase__InfluenzaA__ABO38310
augaauccaaaucaaaagauaauaacaauuggcucugucucucucaccauugcaacaguaugcuuccucaugcagauugccauccuggcaacuacugugacauugcauuuuaaacaacaugagugcgacucccccacgagcaaccaaguaaugccaugugaaccaauaauaauagaaaggaacauaacagagauaguguauuugaauaacaccaccauagagaaagagauuugccccgaaguaguggaauacagaaauuggucaaagccgcaaugucaaauuacaggauuugcaccuuuuucuaaggacaauucaauccggcuuucugcugguggggacauuugggugacgagagaaccuuaugugucaugcgauccuggcaaguguuaucaauuugcacucgggcaggggaccacacuagacaacaaacauucaaauggcacaauacaugauagaaucccucaccgaacccuauuaaugaaugaguuggguguuccauuucauuuaggaaccaaacaaguguguguagcaugguccagcucaaguugucacgauggaaaagcaugguugcauguuugugucacuggggaugauagaaaugcgacugcuagcuucauuuaugacgggaggcuuguggacaguauugguucauggucucaaaauauccucaggacccaggagucggaaugcguuuguaucaaugggacuugcacaguaguaaugacugauggaagugcaucaggaagagccgauacuagaauacuauucauuaaagaggggaaaauuguccauauuagcccauugucaggaagugcucagcauauagaggaguguuccuguuacccucgauauccugacgucagauguaucugcagagacaacuggaaaggcucuaauaggcccguuauagacauaaauauggaagauuauagcauugauuccaguuaugugugcucagggcuuguuggcgacacacccaggaacggcgacagcucuagcaauagcaauugcagggauccuaacaaugaaagagggaauccaggagugaaaggcugggccuuugacaauggagaugauguauggaugggaagaacaaucaacaaagaaucacgcucagguuaugaaacuuucaaagucauuggugguugguccacaccuaauuccaaaucgcaggucaauagacaggucauaguugacaacaauaauuggucugguuacucugguauuuucucuguugagggcaaaagcugcaucaauaggugcuuuuauguggaguugauaaggggaaggccacaggagacuagaguaugguggaccucaaacaguauuguuguguuuuguggcacuucagguacuuauggaacaggcucauggccugauggggcgaacaucaauuucaugccuauauaa

SEQ ID NO: 47780 - RNA, 1413 nt, Artificial Sequence
  derived and/or modified CDS sequence (wt) from neuraminidase__InfluenzaA__ABO38332
augaauccaaaucaaaaaauaauaaccauuggaucaaucaguauagcaaucggaaugauuagccuaauguugcaaauaggaaacauuauuucaauaugggcuagucacucaauccaaacuggaagucaaaaccacacuggaguaugcaaccaaagaaucaucacauaugaaaacagcaccugggugaaucacacauauguuaauauuaacaacaccaauguuauugcuggaaaggacaaaacuucagugacauuggccggcaauucaucucuuuguucuaucaguggaugggcuauauacacaaaagacaacagcauaagaauugguuccaaaggagauguuuuugucauaagagagccuuucauaucauguucucacuuggaaugcagaaccuuuuuucugacccaaggugcucuauuaaaugacaaacauucaaaugggaccguuaaggacagaagccccuauagggcuuuaaugagcuguccucuaggugaagcuccguccccauacaauucaaaguuugaaucaguugcuuggucagcaagcgcaugccaugauggcaugggcugguuaacaaucggaauuucugguccagacaauggagcaguggcuguacuaaaauacaacggcauaauaacugaaaccauaaaaaguuggaaaaagcaaauauuaagaacacaagagucugaaugugucugugugaacgggucauguuucaccauaaugaccgauggcccgaguaauggggccgccucguacaaaaucuucaagaucgaaaagggaaagguuacuaaaucaauagaguugaaugcacccaauuuucauuaugaggaauguuccuguuacccagacacuggcacagugauguguguaugcagggacaacuggcaugguucaaaucgacccugggugucuuuuaaucaaaaccuggauuaucaaauaggauacaucugcagugggguguucggugacaauccgcgucccaaagauggagagggcagcuguaauccagugacuguugauggagcaaacggaguaaagggguuuucauacaaauaugguaaugguguuuggauaggaaggacuaaaaguaacagacuuagaaagggguuugagaugauuugggauccuaauggauggacagauacagacagugauuucucagugaaacaggauguuguggcaauaacugauuggucuggguacagcggaaguuucguucaacauccugaguuaacaggauuggacuguauaagaccuugcuucuggguugaguuagucagaggacugccaaaagaaaauacaacaaucuggacuagugggagcagcauuucuuuuuguggcguaaauagugauacugcaaacuggucuuggccagacggugcugaguugccguuuaccauugacaaguag

SEQ ID NO: 47781 - RNA, 1413 nt, Artificial Sequence
  derived and/or modified CDS sequence (wt) from neuraminidase__InfluenzaA__ABO38343
augaauccaaaucagaaaauaauaaccauuggaucaaucuguaugacaaucggaauaauuagucuaauauugcaaauaggaaauauuauuucaauauggguuagccacucaauccaaacuggaagucaaaaccacacuggaauaugcaaccaaagaaucauuacuuaugaaaauagcaccuggguaaaucaaacauaugucaauauuaacaacacuaacguuguugcuggaaaggacacaacuucagugacauuagccggcaauucaucucuuuguccuauccgugggugggcuauauacagcaaagacaacagcauaagaauugguuccaaaggagauguuuuugucauaagagaaccuuuuauaucauguucucacuuggaaugcagaaccuuuuuucugacccaaggugcucuauuaaaugacaagcauucaaaugggaccguuaaggacagaagcccuuauagggccuuaaugagcuguccuauaggugaagcuccgucuccauacaauucaagguuugaaucaguugcuuggucagcaagcgcaugucaugauggcaugggcuggcuaacaaucggaauuucugguccagaugauggagcaguggcuguacuaaaauacaacggcauaauaacugaaaccauaaaaaguuggaggaagcgaauauuaagaacacaagagucugaaugugucuguguaaacgguucauguuuuaccauaaugaccgauggcccgaguaauggaccugccucguacagaaucuucaaaaucgagaaggggaagauuacuaaaucaauagaguuggaugcacccaauucucauuacgaggaauguuccuguuacccagacaccggcacagugaugugugugugcagagacaauuggcaugguucgaaucgaccuugggugucuuuuaaucaaaaccuggauuaucaaauaggauacaucugcagugggguguucggugacaauccgcgucccaaagauggaaaaggcagcugugauccaguaacuguugauggagcagacggaguaaagggguuuucauacagguaugguaaugguguuuggauaggaaggacuaaaaguaacagcuccagaaagggauuugagaugauuugggauccuaauggauggacagauaccgauaguaauuucuuagugaaacaggauguaguggcaaugacugauuggucaggguacagcggaaguuucguucaacauccugagcuaacaggauuggacuguaugaggccuugcuucuggguugaauuggucagaggacgaccuagagaggggacaacggucuggacuagugggagcagcauuucuuuuuguggcgugaauagugauacugcaaauuggucuuggccagacggugccgaguugccauucaccauugacaaguag

SEQ ID NO: 47782 - RNA, 1410 nt, Artificial Sequence
  derived and/or modified CDS sequence (wt) from neuraminidase__InfluenzaA__ABO38354
augaauccaaaucagaaaauaauaaccauuggaucaaucuguaugguagucggaauaauuagccuaauauugcaaauagggaauauaaucucaauauggauuagccauucaauucaaacuggaagucaaaaccauacuggaauaugcaaccaaaacaucauuaccuauaaaaauagcaccuggguaaaucaaacauauguuaauauuagcaacacuaacguuguugcuggacaggacacaacuucagugauauuaaccggcaauucaucucuuugucccauccgugggugggcuauauacagcaaagacaauagcauaagaauugguuccaaaggagacguuuuugucauaagagagcccuuuauuucauguucucacuuggaaugcaggaccuuuuuucugacccaaggugccuuacugaaugacaggcauucaaaugggaccguuaaggacagaagcccuuauagggccuuaaugagcugcccugucggugaagcuccguccccguacaauucaagauuugaaucgguugcuuggucagcaagugcaugucaugauggcaugggcuggcuaacaaucggaauuucagguccagauaauggagcaguggcuguauuaaaauacaacggcauaauaacugaaaccauaaaaaguuggaggaagaaaauauugagaacacaagagucugaaugugccuguguaaaugguucauguuuuacuauaaugacugauggcccgaguaaugggcuggccucguacaaaauuuucaagaucgagaaggggaagguuacuaaaucaauagaguugaaugcaccuaauucucacuacgaggaauguuccuguuacccugauaccggcaaagugaugugugugugcagagacaauuggcaugguucgaaccgaccaugggugucuuucgaucaaaaccuggauuaucaaauaggauacaucugcagugggguuuucggugacaauccgcgucccaaagauggaacaggcagcugugguccaguguauguugauggagcaaacggaguaaagggauuuucauauagguaugguaaugguguuuggauaggaaggaccaaaaguaacaguuccagacauggguuugagaugauuugggauccuaauggauggacagagacugauaguaaguucucugugagacaagauguuguggcaaugacugauuggucaggguauagcggaaguuucguucaacauccugagcuaacagggcuagacuguaugaggccgugcuucuggguugaauugaucaggggacgaccuaaagaaaacacaaucuggacuagugggagcagcauuucuuuuuguggcgugaauagugauacuguagauuggucuuggccagacggugcugaguugccauucaccauugacaaguag

SEQ ID NO: 47783 - RNA, 1413 nt, Artificial Sequence
  derived and/or modified CDS sequence (wt) from neuraminidase__InfluenzaA__ABO38365
augaauccaaaucagaaaauaauaaccauuggaucaaucuguauggcaaucggaauaauuagucuaauauugcaaaugggaaauauuauuucaauauggguuagccacucaauccaaacuggaagucaaaaccacacuggaauaugcaaccaaagaaucauuaccuaugaaaauagcaccuggguaaaucaaacauauguuaauauuaacaacacuaacguuguugcuggaaaggacacaacuucagugacauuagccggcaauucaucucuuuguccuauccgugggugggcuauauacagcaaagacaacagcauaagaauugguuccaaaggagauguuuuugucauaagagaaccuuuuauaucauguucucacuuggaaugcagaaccuuuuuccugacccaaggugcucuauuaaaugacaagcauucaaaugggaccguuaaggacagaagcccuuauagggccuuaaugagcuguccuauaggugaagcuccgucuccauacaauucaagguuugaaucaguugcuuggucagcaagcgcaugucaugauggcaugggcuggcuaacaaucggaauuucugguccagaugauggagcaguggcuguacuaaaauacaacggcauaauaacugaaaccauaaaaaguuggaggaagcgaauauuaagaacacaagagucugaaugugucuguguaaacgguucauguuuuaccauaaugaccgauggcccgaguaaugggccugccucguacagaaucuucaaaaucgagaaggggaagauuacuaaaucaauagaguuggaugcacccaauucucauuacgaggaauguuccuguuacccagacaccggcacagugaugugugugugcagagacaauuggcaugguucgaaucgaccuugggugucuuuuaaucaaaaccuggauuaucaaauaggauacaucugcagugggguuuucggugacaauccgcgucccaaagauggaaaaggcagcugugauccaguaacuguugauggagcagacggaguaaagggguuuucauacagguaugguaaugguguuuggauaggaaggacuaaaaguaacagcuccagaaagggauuugagaugauuugggauccuaauggauggacagauaccgauaguaauuucuuagugaaacaggauguaguggcaaugacugauuggucaggguacagcggaaguuucguucaacauccugagcuaacaggauuggacuguaugaggccuugcuuuuggguugaauuaaucagaggacgaccuagagaaaagacaacaaucuggacuagugggagcagcauuucuuuuuguggcgugaauagugauacugcaaauuggucuuggccagacggugccgaguugccauucaccauugacaaguag

SEQ ID NO: 47784 - RNA, 1410 nt, Artificial Sequence
  derived and/or modified CDS sequence (wt) from neuraminidase__InfluenzaA__ABO38376
augaauccaaaucagaaaauaauaaccauuggaucaaucuguaugguagucggaauaauuagccuaauauugcaaauagggaauauuaucucaauauggaucagccauucaauucaaacuggaagucaaaaccauacuggaacuugcaaccaaagcaucauuaccuauaaaaauagcaccuggguaaaucaaacauauguuaauauuagcaacacuaacguuguugcuggaaaggauacaacuucagugauauuagccggcaauucaucucuuuguccuauccgugggugggcuauauacagcaaagauaauggcguaagaauugguuccaaaggagauguuuuugucauaagagaacccuuuauuucauguucucacuuggaaugcaggaccuuuuuucugacccaaggcgcccuguugaaugacaagcauucaaaugggaccguuaaggacagaagcccuuauagggccuuaaugagcugcccugucggugaagcuccguccccguacaauucaagguuugaaucgguugcuuggucagcaagugcaugucaugauggcaugggcuggcuaacaaucggaauuucugguccagaugauggagcaguggcuguguuaaaauacaacgguauaauaacugaaaccauaaaaaguuggaggaaggaaauauugagaacacaagagucugaaugugccugcguaaaugguucauguuucacuauaaugaccgacggcccgaguggugggccggccucguacaaaauuuucaagaucgagaaggggaagguuacuaaaucaauagaauuggaugcaccuaauucucacuaugaggaauguuccuguuacccugauaccggcaaggugaugugugugugcagagacaauuggcacgguucgaaccgaccaugggugucuuucgaucaaaaucuggauuaucaaaugggcuacaucugcagugggguuuucggugacaauccgcgucccaaagauggaaaaggcaacugugguccaguguauguugauggagcaaacggaguaaagggauuuucauacagguaugguaaugguguuuggauaggaaggacuaaaaguaacaguuccagacagggguuugagaugauuugggaucccaauggguggacagagacugauaguaauuucuuugugaaacaagauguaguggcagugacugauuggucaggguacagcggaaguuucguucaacauccugaguuaacagggcuggacuguaugaggccuugcuucuggguugaauuaaucaggggacggccuaaagaaaaaacaaucuggaccagugggagcagcauuucuuuuuguggcgugaauagugauacuguagauuggucuuggccagacggugccgaguugccauucaccauugacaaguag

SEQ ID NO: 47785 - RNA, 1410 nt, Artificial Sequence
  derived and/or modified CDS sequence (wt) from neuraminidase__InfluenzaA__ABO38387
augaauccaaaucagaaaauaauaaccauuggaucaaucuguaugguagucggaauaauuagccuaauauugcaaauagggaauauaaucucaauauggauuagccauucaauucaaacuggaagucaaaaccauacuggaauaugcaaccaaagcaucauuaccuauaaaaauagcaccuggguaaaucaaacauauguuaauauuagcaacacuaauguuguugcuggacaggacacaacuucagugauauuaaccggcaauucaucucuuugucccauccgugggugggcuauauacagcaaagacaauggcauaagaauugguuccaaaggagacguuuuugucauaagagagccuuuuauuucauguucucacuuggaaugcaggaccuuuuuucugacccaaggcgccuuacugaaugacaagcauucaaaugggaccguuaaggacagaagcccuuauagggccuuaaugagcugcccugucggugaagcuccguccccguacaauucaagauuugaaucgguugcuuggucagcaagugcaugucaugauggcaugggcuggcuaacaaucggaauuucugguccagauaaugaagcaguggcuguauuaaaauacaacggcauaauaacugaaaccauaaaaaguuggaggaagaaaauauugagaacacaagagucugaaugugccuguguaaaugguucauguuuuacuauaaugaccgauggcccgagugaugggcuggccucguacaaaauuuucaagaucgagaaggggaagguuacuaaaucaauagaguugaaugcaccuaauucucacuacgaggaauguuccuguuacccugauaccggcaaagugaugugugugugcagagacaauuggcacgguucgaaccgaccaugggugucuuucgaucaaaaccuggauuaucaaauaggauacauuugcagugggguuuucggugacaauccgcgucccaaagauggaacaggcagcugugguccaguguauguugauggagcaaacggaguaaagggauuuucauauagguaugguaaugguguuuggauaggaaggaccaaaaguaccaguuccagacauggguuugagaugauuugggauccuaauggauggacagagacugauaguaaguucucugugagacaagauguuguggcaaugacugauuggucaggauauagcggaaguuucguucaacauccugagcuaacagggcuagacuguaugaggccuugcuucuggguugaauuaaucaggggacaaccuaaagaaaaaacaaucuggacuagugggagcagcauuucuuuuuguggcgugaauagugauacuguagauuggucuuggccagacggugcugaguugccauucaccauugacaaguag

SEQ ID NO: 47786 - RNA, 1413 nt, Artificial Sequence
  derived and/or modified CDS sequence (wt) from neuraminidase__InfluenzaA__ABO38398
augaauccaaaucagaaaauaauaaccauaggaucaaucuguauggcaauaggaauaauuagucuaauauugcaaauaggaaauauuguuucaauauggaucagccacucaauccaaacuggaagucaaaacuacacuggaauaugcaaccaaagaaucauuaccuaugaaaauagcaccuggguaaaucaaacauauguuaauaucaacaacacuaauguuguugcuggacaggacacaacuucaguggcauuagccggcaauucaucucuuuguccuaucagugggugggcuauauacagcaaagacaacagcauaagaauugguuccaaaggagauguuuuugucauaagagaaccuuuuauaucauguucucacuuggaaugcaggaacuuuuuucugacccaaggugcucuauuaaaugacaagcauucaaauggaaccguuaaggacagaagcccuuauagggccuuaaugagcuguccuauaggugaagcuccgucucccuacaauucaagguuugaaucaguugcuuggucagcaagcgcaugucaugauggcaugggcuggcuaacaaucggaauuucugguccagaugauggagcaguggcuguacuaaaauacaacgguauaauaacugaaaccauaaaaaguuggaggaagcgaauauuaagaacacaagagucugaaugugucuguguaaacgguucauguuuuaccauaaugaccgauggcccgaauaauggaccugccucguacaaaaucuucaaaaucgagaaggggaagauuacuaaaucaauagaguuggaugcacccaauucucauuacgaggaauguuccuguuacccagacgccggcacagugaugugugugugcagagacaauuggcaugguucgaaucgaccuugggugucuuuuaaucaaaaccuggauuaucaaauaggauacaucugcagugguguuuuuggugacaauccgcgucccaaagauggaaaaggcagcugugauccaguaacuguugauggagcagacggaguaaagggguuuucauacagguaugguaaugguguuuggauaggaaggacuaaaaguaacagcuccagaagaggauuugagaugauuugggauccuaauggauggacagauaccgauaguaaauucuuagugaaacaggauguaguggcaaugacugauuggucaggguacagcggaagcuucguucaacauccugaacuaacaggauuggauuguaugaggccuugcuucuggguugaauugaucagaggacgaccuagagaaaauacaacaaucuggacuagugggagcagcauuucuuuuuguggcgugaauggugauacugcaaauuggucuuggccagacggugccgaguugccauucaccauugacaaguag

SEQ ID NO: 47787 - RNA, 1410 nt, Artificial Sequence
  derived and/or modified CDS sequence (wt) from neuraminidase__InfluenzaA__ABO38420
augaauccaaaucaaaagauaauaacgauuggcucuguuucucucaccauugccacaauaugcuuccuuaugcaaauugccauccugguaacuacuguaacauugcauuucaagcaauaugaaugcaacucccccccaaacaaccaagugaugcugugugaaccaacaauaauagaaagaaacauaacagagauaguauaucugaccaacaccaccauagagaaggaaauaugccccaaacuagcagaauacagaaauuggucaaagccgcaauguaacauuacaggauuugcaccuuuuucuaaggacaauucgauucggcuuuccgcugguggggacaucugggugacaagagaaccuuaugugucaugcgauccugacaaguguuaucaauuugcccuuggacagggaacaacacuaaacaacgggcauucaaaugacacaguacaugauaggaccccuuaucgaacccuauugaugaaugaguuggguguuccauuucauuugggaaccaagcaagugugcauagcaugguccagcucaaguugucacgauggaaaagcauggcugcauguuuguguaacgggggaugaugaaaaugcaacugcuagcuucauuuacaaugggaggcuuguagauaguauugguucaugguccaaaaaaauccucaggacccaggagucggaaugcguuuguaucaauggaacuuguacaguaguaaugacugaugggagugcuucaggaaaagcugauacuaaaauucuauucauugaggaggggaaaaucguucauacuagcucauugucaggaagugcucagcaugucgaggagugcuccuguuauccucgauauccuggugucagaugugucugcagagacaacuggaaaggcuccaauaggcccaucguagauauaaauguaaaggauuauagcauuguuuccaguuaugugugcucaggacuuguuggagacacacccagaaaaaacgacagcuccagcaguagccauugcuuggauccuaacaaugaggaagguggucauggagugaaaggcugggccuuugaugauggaaaugacguguggaugggaagaacgaucagcgagaaguuacgcucaggauaugaaaccuucaaagucauugaaggcugguccaaaccuaacucuaaauugcagauaaauaggcaagucauaguugacagaggcaauagguccgguuauucugguauuuucucuguugaaggcaaaagcugcaucaaucggugcuuuuauguggaguugauaaggggaaggaaacaggaaacugaagucuuguggaccucaaacaguauuguuguguuuuguggcaccucagguacauauggaacaggcucauggccugauggggcggacaucaaucucaugccuauauaa

SEQ ID NO: 47788 - RNA, 1410 nt, Artificial Sequence
  derived and/or modified CDS sequence (wt) from neuraminidase__InfluenzaA__ABO38715
augaauccaaaucaaaagauaauaacaauuggcucugucucucucaccauugcaacaguaugcuuccucaugcagauugccauccugguaacuacuguaacauugcauuuuaagcaacaugagugcgacucccccgcgagcaaccaaguaaugccgugugaaccaauaauaauagaaaggaacauaacagagauaguguauuugaauaacaccaccauagagaaagagacaugccccaaaguaguggaauacagaaguuggucaaagccgcaauguaaaauuacaggauuugcaccuuuuucuaaggacaauucaauccggcuuucugcugguggggacauuugggugacgagagagccuuaugugucaugcgauccuggcaaguguuaucaauuugcacucgggcaggggaccacacuagacaacaaacauucaaaugacacaauacaugauagaaucccucaucgaacccuauugaugaaugaguuggguguuccauuucauuuaggaaccaggcaaguguguauagcaugguccagcucaaguugucacgauggaaaagcauggcugcauguuugugucacuggggaugauaaaaaugcaacugcuagcuucauuuaugacgggaggcuuguggacaguauugguucauggucucaaaauauccucaggacccaggagucggaaugcguuuguaucaaugggacuugcacaguaguaaugacugauggaagcgcuucaggaagagccgauacuagaauacuauucauugaagaggggaaaauuguccauauuagcccauugucaggaagugcucagcauguagaggaguguuccuguuauccucgauauccugacgucagauguaucugcagagacaacuggaaaggcucuaauaggcccaucguagacauaaauauggaagauuauagcauugauuccaguuaugugugcucagggcuuguuggcgacacaccuagaaacgacgacagaucuagcaauagcaauugcaggaauccuaauaaugagagagggaaucaaggagugaaaggcugggccuuugacaauggagaugacguguggaugggaagaacgaucagcaaggauuuacgcucagguuaugaaacuuucaaagucauuggugguugguccacaccuaauuccaaaucgcagaucaauaggcaagucauaguugacagcgauaaucggucagguuauucugguauuuucucuguugagggcaaaagcugcaucaauaggugcuuuuauguggaguugauaaggggaaggaaacaggagacuagaguaugguggaccucaaacaguauuguuguguuuuguggcacuucagguaccuauggaacaggcucauggccugauggggcgaacaucaauuucaugccuauauaa

SEQ ID NO: 47789 - RNA, 1410 nt, Artificial Sequence; identical to SEQ ID NO: 47788
  derived and/or modified CDS sequence (wt) from neuraminidase__InfluenzaA__ABO38726

SEQ ID NO: 47790 - RNA, 1413 nt, Artificial Sequence
  derived and/or modified CDS sequence (wt) from neuraminidase__InfluenzaA__ABO44049
augaauccaaaucaaaaaauaauaaccauuggaucaaucaguauagcaauuggaauaauuagucuaauguugcaaauaggaaauauuauuucaauaugggcuagucacucaauccaaacuggaagucaaaaccacacuggaauaugcaaccaaagaaucaucacauaugaaaacagcaccugggugaaucacacauauguuaauauuaacaacacuaauguuguugcuggaaaggacaaaacuucagugacauuggccggcaauucaucucuuuguucuaucaguggaugggcuauauacacaaaagacaacagcauaagaauuggauccaaaggagauguuuuugucauaagagaaccuuucauaucauguucucacuuggaaugcagaaccuuuuuucugacccaaggugcucuauuaaaugacaaacauucaaaugggaccguuaaggacagaaguccuuauagggccuuaaugagcugcccucuaggugaagcuccguccccauacaauucaaaguuugaaucaguugcauggucagcaagcgcaugccaugauggcaugggcugguuaacaaucggaauuucugguccagacaauggagcuguggcuguacuaaaauacaacggcauaauaacugaaaccauaaaaaguuggaaaaagcgaauauuaagaacacaagagucugaaugugucugugugaacgggucauguuucaccauaaugaccgauggcccgaguaauggggccgccucguacaaaaucuucaagaucgaaaaggggaagguuacuaaaucaauagaguugaaugcacccaauuuccauuaugaggaauguuccuguuacccagacacuggcacagugauuuguguaugcagggacaacuggcaugguucaaaucgaccuugggugucuuuuaaucaaaaccuggauuaucaaauaggauacaucugcagugggguguucggugacaauccgcgucccaaagauggagagggcagcuguaauccagugacuguugauggagcagacggaguaaagggguuuucauacaaauaugguaaugguguuuggauaggaaggacuaaaaguaacagacuuagaaagggguuugagaugauuugggauccuaauggauggacagauaccgacaguaauuucucagugaaacaggauguuguggcaauaacugauuggucaggguacagcggaaguuucguucaacauccugaguuaacaggauuggacuguauaagaccuugcuucuggguugaguuagucagaggacugccuagagaaaauacaacaaucuggacuagugggagcagcauuucuuuuuguggcguaaauagugauacugcaaacuggucuuggccagacggugcugaguugccguucaccauugacaaguag

SEQ ID NO: 47791 - RNA, 1410 nt, Artificial Sequence
  derived and/or modified CDS sequence (wt) from neuraminidase__InfluenzaA__ABO44060
augaauccaaaucaaaagauaauaacaauuggcucugucucucucaccauugcaacaguaugcuuccucaugcagauugccauccugguaacuacuguaacauugcauuucaagcaacaugagugcgacucccccgcgagcaaccaaguaaugccgugugaaccaauaauaauagaaaggaacauaacagagauaguguauuugaauaacaccaccauagagaaagagauaugccccaaaguaguggaauacagaaauuggucaaagccgcaauguaaaauuacaggauuugcaccuuuuucuaaggacaauucaauccggcuuucugcugguggggacauuugggugacgagagaaccuuaugugucaugcgauccuggcaaguguuaucaauuugcacucgggcaggggaccacacuagacaacaaacauucaaaugacacaauacaugauagaaucccucaucgaacccuauugaugaaugaguuggguguuccauuucauuuaggaaccaggcaaguguguauagcaugguccagcucaaguugucacgauggaaaagcauggcugcauguuugugucacuggggaugauaaaaaugcaacugcuagcuucauuuaugacgggaggcuuguggacaguauugguucauggucucaaaauauccucaggacccaggagucggaaugcguuuguaucaaugggacuuguacaguaguaaugacugauggaagugcuucaggaagagccgauacuaaaauacuauucauugaagaggggaaaauuguccauauuagcccauugucaggaagugcucagcauguagaggaguguuccuguuauccucgauacccugacgucagauguaucugcagagacaacuggaaaggcuccaauaggcccgucguagacauaaauauggaagauuauagcauugauuccaguuaugugugcucagggcuuguuggcgacacaccuagaaacgacgacagaucuagcaauagcaauugcaggaauccuaacaaugagagagggaaucaaggagugaaaggcugggccuuugacaauggagaugacguguggaugggaagaacgaucagcaaggauuuacgcucagguuaugaaacuuucaaagucauuggugguugguccacaccuaauuccaaaucgcagaucaauaggcaagucauaguugacagcgauaauaggucagguuauucugguauuuucucuguugagggcaaaagcugcaucaauaggugcuuuuauguggaguugauaaggggaaggaaacaggagacuagaguaugguggaccucaaacaguauuguuguguuuuguggcacuucagguaccuaugggacaggcucauggccugauggggcgaacaucaaucucaugccuauauaa

SEQ ID NO: 47792 - RNA, 1410 nt, Artificial Sequence
  derived and/or modified CDS sequence (wt) from neuraminidase__InfluenzaA__ABO44071
augaauccaaaucaaaagauaauaacaauugguuuuguuuuucucaccauugcaacaguauguuuccucaugcagauugccauccugguaacuacuguaacauugcauuuuaagcaauaugagugcgacucccccgcgagcaaccaaguaaugccgugugaaccaauaauaauagaaaggaacauaacagagauaguguauuugaauaacaccaccauagagaaagagauaugccccaaaguaguggaauacagaaauuggucaaagccgcaaugucaaauuacaggauuugcaccuuuuucuaaggacaauucaauccggcuuucugcugguggggacauuugggugacgagagaaccuuaugugucaugcgaucauggcaaguguuaucaauuugcacucgggcaggggaccacacuagacaacaaacauucaaaugacacaauacaugauagaaucccucaucgaacccuauuaaugaaugaguuggguguuccauuucauuuaggaaccaggcaaguguguauagcaugguccagcucaaguugucacgauggaaaagcauggcugcauguuuguaucacuggggaugacaaaaaugcaacugcuagcuucauuuaugacgggaggcuuguggacaguauugguucauggucucaaaauauccucagaacccaggagucggaaugcguuuguaucaaugggacuugcacaguaguaaugacugauggaagugcuucaggaagagccgauacuagaauacuauucauugaagaggggaaaauuguccauauuagcccauugucaggaagugcucagcauguagaagaguguuccuguuauccuagauauccuggcgucagauguaucugcagagacaacuggaaaggcucuaauaggcccgucguagacauaaauauggaagauuauagcauugauuccaguuaugugugcucagggcuuguuggcgacacaccuagaaacgacgacagaucuagcaauagcaauugcaagaauccuaacaaugagagagggaaucaaggagugaaaggcugggccuuugacaauggagaugacguguggaugggaagaacgaucagcaaggauuuacgcucagguuaugaaacuuucaaagucauuggugguugguccacaccuaauuccaaaucgcagaucaauagacaagucauaguugacagcgauaaucggucagguuacucugguauuuucucuguugagggcaaaagcugcaucaauaggugcuuuuauguggaguugauaaggggaaggaaacaggagacuagagugugguggaccucaaacaguauuguuguguuuuguggcacuucagguaccuauggaacaggcucauggccugauggggcgaacaucaauuucaugccuauauaa

SEQ ID NO: 47793 - RNA, 1410 nt, Artificial Sequence; identical to SEQ ID NO: 46407
  derived and/or modified CDS sequence (wt) from neuraminidase__InfluenzaA__ABO44082

SEQ ID NO: 47794 - RNA, 1410 nt, Artificial Sequence
  derived and/or modified CDS sequence (wt) from neuraminidase__InfluenzaA__ABO44093
augaauccaaaucaaaagauaauaacaauuggcucugucucucucaccauugcaacaguaugcuuccucaugcagauugccauccuggcaacuacugugacauugcauuuuaagcaacaugagugcgacucccccgcgagcaaccaaguaaugccaugugaaccaauaauaauagaaaggaacauaacagagauaguguauuugaauaacaccaccauagagaaagagauuugccccgaaguaguagaauacagaaauuggucaaagccgcaaugucaaauuacaggauuugcaccuuucucuaaggacaauucaauccggcuuucugcugguggggacauuugggugacgagagaaccuuaugugucaugugauccuggcaaguguuaucaauuugcacucgggcaggggaccacacuagacaacaaacauucaaauggcacaauacaugauagaaucccucaucgaacccuauuaaugaaugaguuggguguuccauuucauuuaggaaccaaacaaguguguguagcaugguccagcucaaguugccacgauggaaaagcaugguugcauguuugugucacuggggaugauagaaaugcaacugcuagcuucauuuaugacgggaggcuuguggacaguauugguucauggucucaaaauauccucaggacccaggagucggaaugcguuuguaucaaugggacuugcacaguaguaaugacugauggaagugcaucaggaagagccgauacuagaauacuauucauuaaagaggggaaaauuguccauauuagcccauugucaggaagugcucagcauauagaggaguguuccuguuacccucgauauccugacgucagauguaucugcagagacaacuggaaaggcucuaauaggcccguuuuagacauaaguauggaagauuauagcauugauuccaguuaugugugcucagggcuuguuggcgacacacccaggaacgacgacagcucuagcaauagcaacugcagggauccuaacaaugagagagggaauccaggagugaaaggcugggccuuugacaauggagaugauguauggaugggaagaacaaucagcaaagauuuacgcucagguuaugaaacuuucaaagucauuggugguugguccacaccuaacuccaaaucgcaggucaauagacaggucauaguggacaacaauaauuggucugguuacucugguauuuucucuguugagggcaaaagcugcaucaauaggugcuuuuauguggaguugauaaggggaaggucacaggagacuagaguaugguggaccucaaacaguauuguuguguucuguggcacuucagguacuuauggaacaggcucauggccugauggggcgaacaucaauuucaugccuauauaa

SEQ ID NO: 47795 - RNA, 1410 nt, Artificial Sequence
  derived and/or modified CDS sequence (wt) from neuraminidase__InfluenzaA__ABO44104
augaauccaaaucaaaagauaauaacaauuggcucugccucucucaccauugcaacaguaugcuuccucaugcagauugccauccugguaacuacuguaacauugcauuucaagcaacaugagugcgacucccccgcgagcaaccaaguaaugccgugugaaccaauaauaauagaaaggaacauaacagagauaguguauuugaauaacaccaccauagagaaagagauaugccccaaaguaguggaauacagaaauuggucaaagccgcaauguaaaauuacaggauuugcaccuuuuucuaaggacaauucaauccggcuuucugcugguggggacauuugggugacgagagaaccuuaugugucaugcgauccuggcaaguguuaucaauuugcacucgggcaggggaccacacuagacaacaaacauucaaaugacacaauacaugauagaaucccucaucgaacccuauugaugaaugaguuggguguuccauuucauuuaggaaccaggcaaguguguauagcaugguccagcucaaguugucacgauggaaaagcauggcugcauguuugugucacuggggaugauaaaaaugcaacugcuagcuucauuuaugacgggaggcuuguggacaguauugguucauggucucaaaauauccucaggacccaggagucggaaugcguuuguaucaaugggacuuguacaguaguaaugacugauggaagugcuucaggaagagccgauacuagaauacuauucauugaagaggggaaaauuguccauauuagcccauugucaggaagugcucagcauguagaggaguguuccuguuauccucgauauccugacgucagauguaucugcagagacaacuggaaaggcucuaauaggcccgucguagacauaaauauggaagauuauagcauugauuccaguuaugugugcucagggcuuguuggagacacaccuagaaacgacgacagaucuagcaauagcaauugcagaaauccuaacaaugagaaagggaaucaaggagugaaaggcugggccuuugacaauggagaugacguguggaugggaagaacgaucagcaaggauuuacgcucagguuaugaaacuuucaaagucauuggugguugguccacaccuaauuccaaaucgcagaucaauaggcaagucauaguugacagcgauaauaggucagguuauucugguauuuucucuguugagggcaaaagcugcaucaauaggugcuuuuauguggaguugauaaggggaaggaaacaggagacuagaguaugguggaccucaaacaguauuguuguguucuguggcacuucagguaccuaugggacaggcucauggccugauggggcgaacaucaaucucaugccuauauaa

SEQ ID NO: 47796 - RNA, 1413 nt, Artificial Sequence
  derived and/or modified CDS sequence (wt) from neuraminidase__InfluenzaA__ABO44126
augaauccaaaucagaaaauaauaaccauaggaucaaucuguauggcaauaggaauaauuagucuaauauuacaaauaggaaauauuguuucaauauggaucagccacucaauccaaacuggaagucaaaacuacacuggaauaugcaaccaaagaaucauuaccuaugaaaauagcaccuggguaaaucaaacauauguuaauaucaacaacacuaauguuguugcuggacaggacacaacuucaguggcauuagccggcaauucaucucuuuguccuaucagugggugggcuauauacagcaaagacaacagcauaagaauugguuccaaaggagauguuuuugucauaagagaaccuuuuauaucauguucucacuuggaaugcagaaccuuuuuucugacccaaggugcucuauuaaaugacaagcauucaaacggaaccguuaaggacagaagcccuuauagggccuuaaugagcuguccuauaggugaagcuccgucucccuacaauucaagguuugaaucaguugcuuggucagcaagcgcaugucaugauggcaugggcuggcuaacaaucggaauuucugguccagaugauggagcaguggcuguacuaaaauacaacgguauaauaacugaaaccauaaaaaguuggaggaagcgaauauuaagaacacaagagucugaaugugucuguguaaacgguucauguuuuaccauaaugaccgauggcccgaauaaugggccugccucguacaaaaucuucaaaaucgagaaggggaagauuacuaaaucaauagaguugaaugcacccaauucucauuacgaggaauguuccuguuacccagacgccggcacagugaugugugugugcagagacaauuggcaugguucgaaucgaccuugggugucuuuuaaucaaaaccuggauuaucaaauaggauacaucugcagugguguuuuuggugacaauccgcgucccaaagauggaaaaggcagcugugguccaguaacuguugauggagcagacggaguaaagggguuuucauacagguaugguaaugguguuuggauaggaaggacuaaaaguaacagcuccagaagaggauuugagaugauuugggauccuaauggauggacagauaccgauaguaaauucuuagugaaacaggauguaguggcaauuacugauuggucaggguacagcggaagcuucguucaacauccugaacuaacaggauuggauuguaugaggccuugcuucuggguugaauugaucagaggacgaccuagagaaaauacaacaaucuggacuagugggagcagcauuucuuuuuguggcgugaauggugauacugcaaauuggucuuggccagacggugccgaguugccauucaccauugacaaguag

SEQ ID NO: 47797 - RNA, 1413 nt, Artificial Sequence
  derived and/or modified CDS sequence (wt) from neuraminidase__InfluenzaA__ABO52228
augaauccaaaucaaaaaauaauaaccauuggaucaaucaguauugcaauuggaauaauuaguuugauauugcaaauuggaaauauuauuucaauaugggcuagccacucaauccaaacuggaagucaaaaccacacuggaauaugcaaccaaagaaucauuacauaugaaaauagcaccuggguaaaucaaacauauguuaauauuaacaacacuaauguuguugcuggaaaggacaaaaccucaaugacauuggccggcaauucaucucuuugcccuauccguggaugggcuauauacacaaaagacaacagcauaagaauugguuccaaaggagauguuuuugucauaagagagccuuuuauaucauguucucacuuggaaugcagaaccuuuuuucugacccaaggugcucuauuaaaugacaagcauucaaaugggaccguuaaggacagaagcccuuauagggccuuaaugagcuguccucuaggugaagcuccgucuccauacaauucaaaauuugaaucaguugcuuggucagcaagcgcaugccaugauggcuugggcuggcuaacaaucggaauuucugguccagauaauggggcaguggcuguacuaaaauacaacggcauaauaacugaaaccauuaaaaguuggaagaagcgaauauuaagaacacaagagucugaaugugucuguaugaacgguucauguuuuaccauaaugaccgauggcccgaguaauggggccgcaucguacagaaucuucaaaaucgagaaggggagaguuacuaaaucaauagaguuggaugcacccaauuaucauuacgaggaauguucauguuacccagacaccggcacagugaugugugugugcagggacaauuggcacgguucaaaucgaccuugggugucuuuuaaucaaaaccuggauuaucaaauaggauacaucugcagugggguguucggugacaauccgcgucccaaagauggagaaggcagcuguaauccagugacuguugauggagcagacggaguaaagggguuuucauacagauaugguaaugguguuuggauaggaaggacuaaaaguaacagacucagaaagggauuugagaugauuugggauccuaauggauggacagauaccgacagugauuucucaaugaaacaggauaucguggcaaugacugauuggucaggguacagcggaaguuuuguucaacauccugagcuaacaggauuggacuguaugagaccuugcuucuggguugaauuagucagagggcuaccuagagaaaauacaacaaucuggacuagugggagcagcauuucuuuuuguggcguaaauagcgauacugcaaacuggucuuggccagacggugccgaguugccauucaccauugacaaguag

SEQ ID NO: 47798 - RNA, 1410 nt, Artificial Sequence
  derived and/or modified CDS sequence (wt) from neuraminidase__InfluenzaA__ABO52239
augaauccaaaucaaaagauaauaacaauuggcucugucucucucaccauugcaacaguaugcuucaucaugcagauugccauccuggcaacuacugugacauugcauuuuaaacaacaugagugcgacucccccgcgagcaaccaaguaaugccaugugaaccaauaauaauagaaaggaacauaacagagauaguguauuugaauaacaccaccauagagaaagagauuugccccgaagcaguggaauacagaaauuggucaaagccgcaaugucaaauuacaggauuugcaccuuuuucuaaggacaauucaauccggcuuucugcugguggggacauuugggugacgagagaaccuuaugugucaugcgauccuggcaaguguuaucaauuugcacucgggcaggggaccacacuagacaacaaacauucaaauggcacaauacaugauagaaucccucaccgaacccuauuaaugaaugaguuggguguuccauuucauuuaggaaccaaacaaguguguguagcaugguccagcucaaguugucacgauggaaaagcaugguugcauguuugugucacuggggaugauaaaaaugcgacugcuagcuucauuuaugacgggaggcuuguggacaguauugguucauggucucaaaauauccucaggacccaggagucggaaugcguuuguaucaaugggacuugcacaguaguaaugacugauggaagugcaucaggaagagccgauacuagaauacuauucauuaaagaggggaaaauuguccauauuagcccauugucaggaagugcucagcauguagaggaguguuccuguuacccucgauauccugacgucagauguaucugcagagacaacuggaaaggcucuaauaggcccguuauagacauaaauauggaagauuauagcauugauuccaguuacgugugcucaggacuuguuggcgacacacccaggaacgacgacagcucuagcaauagcaauugcagggauccuaacaaugaaagagggaauccaggagugaaaggcugggccuuugacaauggagaugauguauggaugggaagaacaaucaacaaagauucacgcucagguuaugaaacuuucaaagucauuggugguugguccacaccuaauuccaaaucgcaggucaauagacaggucauaguugacaacaauaauuggucugguuacucugguauuuucucuguugagggcaaaaguugcaucaauaggugcuuuuauguggaguugauaaggggaaggccacaggagacuagaguaugguggaccucaaacaguauuguuguguuuuguggcacuucagguacuuauggaacaggcucauggccugauggggcgaacaucaauuucaugccuauauaa

SEQ ID NO: 47799 - RNA, 1410 nt, Artificial Sequence; identical to SEQ ID NO: 47795
  derived and/or modified CDS sequence (wt) from neuraminidase__InfluenzaA__ABO52250

SEQ ID NO: 47800 - RNA, 1413 nt, Artificial Sequence
  derived and/or modified CDS sequence (wt) from neuraminidase__InfluenzaA__ABO52261
augaauccaaaucagaaaauaauaaccauuggaucaaucuguauggcaaucggaauaauuagucuaauauugcaaauaggaaauauuauuucaauauggguuagccacucaauccaaacuggaagucaaaaccacacuggaauaugcaaccaaagaaucauuaccuacgaaaauagcaccuggguaaaucaaacauauguuaauauuaacaacacuaacguuguugcuggaaaggacacaacuucagugacauuagccggcaauucaucucuuuguccuauccgugggugggcuauauacagcaaagacaacagcauaagaauugguuccaaaggagauguuuuugucauaagagaaccuuuuauaucauguucucacuuggaaugcagaaccuuuuuucugacccaaggugcucuauuaaaugacaagcauucaaaugggaccguuaaggacagaagcccuuauagggccuuaaugagcuguccuauaggugaagcuccgucuccauacaauucaagguuugaaucaguugcuuggucagcaagcgcaugucaugauggcaugggcuggcuaacaaucggaauuucugguccagaugauggagcaguggcuguacuaaaauacaacggcauaauaacugaaaccauaaaaaguuggaggaagcgaauauuaagaacacaagagucugaaugugucuguguaaacgguucauguuuuaccauaaugaccgauggcccgaguaaugggccggccucguacagaaucuucaaaaucgagaaggggaagauuacuaaaucaauagaguuggaugcacccaauucucauuacgaggaauguuccuguuacccagacaccggcacagugaugugugugugcagagacaauuggcaugguucgaaucgaccuugggugucuuuuaaucaaaaccuggauuaucaaauaggauacaucugcagugggguuuucggugacaauccgcgucccaaagauggaaaaggcagcugugauccaguaacuguugauggagcagacggaguaaagggguuuucauacagguaugguaaugguguuuggauaggaaggacuaaaaguaacagcuccagaaagggauuugagaugauuugggauccugauggauggacagauaccgauaguaauuucuuagugaaacaggauguaguggcaaugacugauuggucaggguacagcggaaguuucguucaacauccugagcuaacaggauuggacuguauaaggccuugcuucuggguugaauuaaucagaggacgaccuagagaaaagacaacaaucuggacuagugggagcagcauuucuuuuuguggcgugaauagugauacuguaaauuggucuuggccagacggugccgaguugccauucaccauugacaaguag

SEQ ID NO: 47801 - RNA, 1413 nt, Artificial Sequence
  derived and/or modified CDS sequence (wt) from neuraminidase__InfluenzaA__ABO52283
augaauccaaaucagaaaauaauaaccauuggaucaaucuguaugacaaucggaacaauuagucuaauauugcaaauagggaauauuaucucaauauggauuagccacucaauucaaacuggaagucaaaaccauacuggaauaugcaaccaaagaaucauuaccuaugaaaauaacaccuggguaaaucaaacauauguuaauauuagcaacaccaacguuguugcuggaaaggacacaacuucaaugauauuagccggcaauucaucucuuuguccuauccgugggugggcuauauacagcaaagacaacagcauaaggauugguuccaaaggagauguuuuugucauaagagaaccuuuuauaucaugcucucacuuggaaugcagaaccuuuuuucugacccaaggcgcucuauuaaaugacaagcauucaaacgggaccguuaaagacagaagcccuuauagggccuuaaugagcuguccuaucggugaagcuccgucuccguacaauucaagauuugaaucgguugcuuggucagcgagugcaugucaugauggcaugggcuggcuaacuaucggaauuucugguccagaugauggagcaguggcuguauuaaaauacaauggcauaauaacugaaaucauaaaaaguuggaggaagcaaauauuaagaacacaagagucugaaugugucuguguaaacgguucauguuuuaccauaaugaccgauggcccgagugaugggccggccucguacagaaucuucaaaaucgaaaaggggaagauuacuaaaucaauagaguuggaugcaccuaauucucauuacgaggaauguuccuguuacccagacaccggcaaagugaugugugugugcagagacaauuggcaugguucgaaucgaccaugggugucuuuuaaucaaaaccuggauuaucaaauaggauacaucugcagugggguuuucggugacaauccgcgucccaaagauggaaaaggcagcugugauccaguaaauguugauggagcagacggaguaaagggguuuucauacagguauggugaugguguuuggauaggaaggacuaaaaguaacaguuccagaaagggguuugagaugauuugggauccuaauggguggacagauaccgaugauaauuucuuagugaaacaggauguaguggcaaugacugauuggucaggguauagcggaaguuucguucaacauccugagcuaacaggauuggacuguaugaggccuugcuucuggguugaauuaaucagaggacgacccagagaaaaaacaacaaucuggacuagugggagcagcauuucuuuuuguggcgugaauagugauacuguaaauuggucuuggccagacggugccgaguugccauucacaauugacauguag

SEQ ID NO: 47802 - RNA, 1410 nt, Artificial Sequence; identical to SEQ ID NO: 47530
  derived and/or modified CDS sequence (wt) from neuraminidase__InfluenzaA__ABO52294

SEQ ID NO: 47803 - RNA, 1410 nt, Artificial Sequence
  derived and/or modified CDS sequence (wt) from neuraminidase__InfluenzaA__ABO52316
augaauccaaaucaaaagauaauaacaauuggcucugucucucucaccauugcaacaauaugcuuccucaugcagauugccauccugguaacuacuguaacauugcauuucaagcaguaugagugcgacucccccgcgaacaaucaaauaaugccgugugaaccaacaauaauagaaaggaacauaacagagauaguguauuugacuaacaucaccauagaaaaagagauaugccccaaauuaguggaauacaggaauuggucaaagccgcaauguaaaauuacaggauuugcaccuuuuucuaaggacaauucaauucggcuuucugcugguggggacauuugggugacgagagaaccuuaugugucaugcgauccuagcagguguuaucaauuugcacuugggcaggggaccacacuagacaacaaacauucaaaugacacaauacaugauagaaccccucaucgaacccuauugaugaaugaguuggguguuccauuucauuugggaaccaggcaaguguguauagcaugguccagcucaaguugucacgauggaaaagcauggcugcauguuugugucacuggguaugauaaaaaugcaacugcuagcuucauuuacgaugggaggcuuguagacaguauugguucauggucucaaaauauccucaggacccaggagucggaaugcguuuguaucaaugggacuuguacaguaguaaugacugauggaagugcuucaggaagagcugauacuaaaauacuauucauugaagaggggaaaauuguucauauuagcccauugucaggaagugcucagcauguagaggaguguuccuguuacccucgauauccuggugucagauguaucugcagagacaacuggaaaggcucuaauaggcccgucguagauauaaaugugaaagauuauagcauugauuccaguuaugugugcucagggcuuguuggcgacacacccagaaaaaacgacagaucuagcaauagcuauugccggaauccuaacaaugagaaagggaaucacggagugaaaggcugggccuuugacgauggaaaugacguguggaugggaagaacgaucagcgaggauucacgcucagguuaugaaaccuucaaagucauuggugguugguccacaccuaauuccaaauugcagauaaauaggcaagucauaguugacagcgauaauaggucagguuauucugguauuuucucuguugagggcaaaagcugcaucaauaggugcuuuuauguggaguugauaaggggaagggaacaggaaacuagaguaugguggaccucaaacaguauuguuguguuuuguggcacuucagguaccuauggggcaggcucauggccugauggggcggacaucaaucucaugccuauauaa

SEQ ID NO: 47804 - RNA, 1410 nt, Artificial Sequence; identical to SEQ ID NO: 46126
  derived and/or modified CDS sequence (wt) from neuraminidase__InfluenzaA__ABO52327

SEQ ID NO: 47805 - RNA, 1410 nt, Artificial Sequence
  derived and/or modified CDS sequence (wt) from neuraminidase__InfluenzaA__ABO52338
augaauccaaaucaaaagauaauaacaauuggcucugucucucucaccauugcaacaauaugcuuccucaugcagauugccauccugguaacuacuguaacauugcauuucaagcaauaugagugcgacucccccgcgaacaaccaaguaaugccgugugaaccaauaauaauagaaaggaacauaacagagauaguguauuugacuaacaccaccauagagaaagagauaugccccaaauuaguggaauacagaaauuggucaaagccgcaauguaaaauuacaggauuugcaccuuuuucuaaggacaauucaauucggcuuucugcugguggggacauuugggugacgagagaaccuuaugugucaugcgauccuggcaaguguuaucaauuugcacucgggcaggggaccacacuagacaacaaacauucaaaugacacaauacaugauaggaccccucaucgaacccuauugaugaaugaguuggguguuccauuucauuugggaaccaggcaaguguguauagcaugguccagcucaaguugucacgauggaaaagcauggcugcauguuugugucacuggguaugauaaaaaugcaacugcuagcuucauuuacgaugggaggcuuguagacaguauugguucauggucuaaaaauauccucaggacccaggagucggaaugcguuuguaucaaugggacuuguacaguaguaaugacugauggaagugcuucaggaagagcugauacuaaaauacuauucauugaagaggggaaaauuguucauauuagcccauugucaggaagugcucaacauguagaggaguguuccuguuauccucgauauccuggugucagauguaucugcagagacaacuggaaaggcucuaauaggcccgucguagauauaaaugugaaagauuauagcauugauuccaguuaugugugcucagggcuuguuggcgacacacccagaaacaacgacagaucuagcaguagcuauugccggaauccuaacaaugagaaagggaaucauggagugaaaggcugggccuuugacgauggaaaugacguguggaugggaagaacgaucagcgaggauucacgcucagguuaugaaaccuucaaagucauuggugguugguccacaccuaauuccaaauugcagauaaauaggcaagucauaguugacagcgauaauaggucagguuauucugguauuuucucuguugagggcaaaagcugcaucaauaggugcuuuuauguggaguugauaaggggaagggaacaggaaacuagagucugguggaccucaaacaguauuguuguguuuuguggcacuucagguaccuaugggacaggcucauggccugauggggcggacaucaaucucaugccuauauaa

SEQ ID NO: 47806 - RNA, 1410 nt, Artificial Sequence
  derived and/or modified CDS sequence (wt) from neuraminidase__InfluenzaA__ABO52349
augaauccaaaucaaaagauaauaacaauuggcucugucucucucaccauugcaacaauaugcuuccucaugcaaauugccauccugguaacuacuguaacauugcauuucaagcaauaugagugcgacucccccgcgaacaaccaaguaaugccgugugaaccaauaauaauagaaaggaacguaacagagauaguguauuugacuaacaccaccauagagaaagaaauaugccccaaauuaguggaauacagaaauuggucaaagccgcaauguaaaauuacaggauuugcaccuuuuucuaaggacaauucaauccgacuuucugcugguggggacauuugggugacgagagaaccuuaugugucaugcgauccuggcaaguguuaucaauuugcacucgggcaggggaccacacuagacaacaaacauucaaaugacacaauacaugauagaaccccuuaucgaacccuauugaugaaugaguuggguguuccauuucauuugggaaccaggcaaguguguauagcaugguccagcucaaguugucacgauggaaaagcauggcugcauguuugugucacuggguaugauaaaaaugcaacugcuagcuucauuuacgaugggaggcuuguagacaguauugguucauggucuaaaaauauccucaggacccaggagucggaaugcguuuguaucaaugggacuuguacaguaguaaugacugauggaagugcuucagaaagagcugacacuaaaauacuauucauugaagaggggaaaauuauucauauuagcccauugucagggagugcucagcauguagaggaguguuccuguuauccucgauauccuggugucagauguaucugcagagauaacuggaaaggcucuaauaggcccgucguagauauaaauaugagagauuauagcauuguuuccaguuaugugugcucagggcuuguuggcgacacacccagaaaaaacgacagaucuagcaguagcuauugccggaauccuaacaaugagaaagggaaucauggagugaaaggcugggccuuugaugauggaaaugacguguggaugggaagaacgaucagcgaggagucacgcucagguuaugaaaccuucaaagucauuggugguugguccacaccuaauuccaaauugcagauaaauaggcaagucauaguugacagcaauaauagguccgguuauucugguauuuucucuguugagggcaaaagcugcaucaauaggugcuuuuauguggaguugauaaggggaagggaacaggaaacuagagucugguggacaucaaacaguauuguuguguuuuguggcacuucagguaccuaugggacaggcucauggccugauggggcggacaucaaucucaugccuauauaa

SEQ ID NO: 47807 - RNA, 1410 nt, Artificial Sequence
  derived and/or modified CDS sequence (wt) from neuraminidase__InfluenzaA__ABO52360
augaauccaaaucaaaagauaauaacaauuggcucugucucucucaccauugcaacaguaugcuuccucaugcagauugccauccugguaacuacuguaacauugcauuuuaagcaauaugagugcgacucccccgcgagcaaccaaguaaugccgugugaaccaauaauaauagaaaggaacauaacagagauaguguauuugaauaacaccaccauagagaaagagauaugccccaaaguaguggaauacagaaauuggucaaagccgcaaugucaaauuacaggauuugcaccuuuuucuaaggacaauucaauccggcuuucugcugguggggacauuugggugacgagagaaccuuaugugucaugcgaucauggcaaguguuaucaauuugcacucgggcaggggaccacacuagacaacaaacauucaaaugacacaauacaugauagaaucccucaucgaacccuauuaaugaaugaguuggguguuccauuucauuuaggaaccaggcaaguguguauagcaugguccagcucaaguugucacgauggaaaagcauggcugcauguuuguaucacuggggaugacaaaaaugcaacugcuagcuucauuuaugacgggaggcuuguggacaguauugguucauggucucaaaauauccucagaacccaggagucggaaugcguuuguaucaaugggacuugcacaguaguaaugacugauggaagugcuucaggaagagccgauacuagaauacuauucauugaagaggggaaaauuguccauauuagcccauugucaggaagugcucagcauguggaagaguguuccuguuauccuagauauccuggcgucagauguaucugcagagacaacuggaaaggcucuaauaggcccgucguagacauaaauauggaagauuauagcauugauuccaguuaugugugcucagggcuuguuggcgacacaccuagaaacgacgacagaucuagcaauagcaauugcaggaauccuaacaaugagagagggaaucaaggagugaaaggcugggccuuugacaauggaaaugacguguggaugggaagaacgaucagcaaggauuuacgcucagguuaugaaacuuucaaagucauuggugguugguccacaccuaauuccaaaucgcagaucaauagacaagucauaguugacagcgauaaucggucagguuacucugguauuuucucuguugagggcaaaagcugcaucaauaggugcuuuuauguggaguugauaaggggaaggaaacaggagacuagagugugguggaccucaaacaguauuguuguguuuuguggcacuucagguaccuauggaacaggcucauggccugauggggcgaacaucaauuucaugccuauauaa

SEQ ID NO: 47808 - RNA, 1410 nt, Artificial Sequence
  derived and/or modified CDS sequence (wt) from neuraminidase__InfluenzaA__ABO52371
augaauccaaaucaaaagauaauaacaauuggcucugucucucucaccauugcaacaguaugcuuccucaugcagauugccauccugguaacuacuguaacauugcauuucaggcaauaugagugcgacucccccgcgaacaaccaaguaaugccgugugaaccaauaauaauagaaaggaacauaacagagauaguguauuugaauaacaccaccauagagaaagaaauaugccccaaauuaguggaauacagaaauuggucaaagccgcaauguaaaauuacaggauuugcaccuuuuucuaaggacaauucaauccggcuuucugcugguggggacauuugggugacgagagaaccuuaugugucaugcgauccuggcaaguguuaucaauuugcacucgggcaggggaccacacuagacaacaaacauucaaaugacacaauacaugauagaaucccucaucgaacccuauugaugaaugaguuggguguuccauuucauuuaggaaccaggcaaguguguauagcaugguccagcucaaguugucacgauggaaaagcauggcugcauguuugugucacuggggaugauaaaaaugcaacagcuagcuucauuuaugacgggaagcuuguggacaguauugguucauggucucaaaauauccucaggacccaggagucggaaugcguuuguaucaaugggacuuguacaguaguaaugacugauggaagugcuucaggaagagcugauacuagaauacuauucauugaagaggggaaaauuguccauauuagcccauugucaggaagugcucagcauguagaggaguguuccuguuauccucgauauccuggcgucagauguaucugcagagacaacuggaaaggcucuaauaggcccgucguagauauaaauguggaagauuauagcauugauuccaguuaugugugcucagggcuuguuggugacacacccagaaacaacgacagaucuggcaauagcaauugcaggaauccuaacaaugagagagggaaucacggagugaaaggcugggccuuugacgauggaaaugacguguggaugggaagaacgaucaacaaggauuuacgcucagguuaugaaaccuucaaagucauuggugguugguccacaccuaauuccaaaucgcagauaaauaggcaagucauaguugacagcgauaauaggucagguuauucugguauuuucucuguugagggcaaaagcugcaucaauaggugcuuuuauguggaguuaauaaggggaagggaacaggagacuagaguaugguggaccucaaacaguauuguuguguuuuguggcacuucagguaccuaugggacaggcucauggccugauggggcggacaucaaucucaugccuauauaa

SEQ ID NO: 47809 - RNA, 1413 nt, Artificial Sequence
  derived and/or modified CDS sequence (wt) from neuraminidase__InfluenzaA__ABO52800
augaauccaaaucagaaaauaauaaccauuggaucgaucuguaugacaaucggaauaauuagucuaauauugcaaauaggaaauauuauuucaauauggguuagccacucaauccaaacuggaagucaaaaccacacuggaauaugcaaccaaagaaucauuaccuaugaaaauagcaccuggguaaaucaaacauaugucaauauuaacaacacuaacguuguugcuggaaaggacacaacuucagugacauuagccggcaauucaucucuuuguccuauccgugggugggcuauauacagcaaagacaacagcauaagaauugguuccaaaggagauguuuuugucauaagagaaccuuuuauaucauguucucacuuggaaugcagaaccuuuuuucugacccaaggugcucuauuaaaugacaagcauucaaaugggaccguuaaggacagaagcccuuauagggccuuaaugagcuguccuauaggugaagcuccgucuccauacaauucaagguuugaaucaguugcuuggucagcaagcgcaugucaugauggcauggguuggcuaacaaucggaauuucugguccagaugauggagcaguggcuguacuaaaauacaacggcauaauaacugaaaccauaaaaaguuggaggaagcgaauauuaagaacacaagagucugaaugugucuguguaaacgguucauguuuuaccauaaugaccgauggcccgaguaauggaccugccucguacagaaucuucaaaaucgagaaggggaagauuacuaaaucaauagaguuggaugcacccaauucucauuacgaggaauguuccuguuacccagacaccggcacagugaugugugugugcagagacaauuggcaugguucgaaucgaccuugggugucuuuuaaucaaaaccuggauuaucaaauaggauacaucugcagugggguuuucggugacaauccgcgucccaaagauggaaaaggcagcugugauccaguaacuguugauggagcagacggaguaaagggguuuucauacagguaugguaaugguguuuggauaggaaggacuaaaaguaacagcuccagaaagggauuugagaugauuugggauccuaauggauggacggauaccgauaguaauuucuuagugaaacaggauguaguggcaaugacugauuggucaggguacagcggaaguuucguucaacauccugagcuaacaggauuggacuguaugaggccuugcuucuggguugaauuaaucagaggacgaccuagagaaaggacaacaaucuggacuagugguagcagcauuucuuuuuguggcgugaauagugauacugcaaauuggucuuggccagacggugccgaguugccauucaccauugacaaguag

SEQ ID NO: 47810 - RNA, 1413 nt, Artificial Sequence; identical to SEQ ID NO: 46840
  derived and/or modified CDS sequence (wt) from neuraminidase__InfluenzaA__ABP49220

SEQ ID NO: 47811 - RNA, 1413 nt, Artificial Sequence
  derived and/or modified CDS sequence (wt) from neuraminidase__InfluenzaA__ABP49319
augaauccaaaucagaaaauaauaaccauuggaucaaucuguauggcaaucggaauaauuagucuaauauugcaaauagggaauauuaucucaauauggguuagccacucaauucaaacuggaagucaaaaccauacuggaauaugcaaccaaagaaucauuaccuaugaaaauaacaccuggguaaaucaaacauauguuaauauuagcaacacuaacguuguugcuggaaaggacacaacuucaaugauauuagccggcaauucaucucuuuguccuauccgugggugggcuauauacagcaaagacaacagcauaagaauugguuccaaaggagauguuuuugucauaagagaaccuuuuauaucauguucucacuuggaaugcagaaccuuuuuucugacccaaggcgcucuauuaaaugacaagcauucaaaugggaccguuaaggacagaagcccuuauagggccuuaaugagcuguccuaucggugaagcuccgucuccguacaauucaagguuugaaucgguugcuuggucagcaagugcaugucaugauggcaugggcuggcuaacaaucggaauuucugguccagaugauggagcaguggcuguacuaaaauacaacggcauaauaacugaaaccauaaaaaguuggaggaagcaaauauuaagaacacaagagucugaaugugucuguguaaacgguucauguuuuaccauaaugaccgauggcccgagugaugggccggccucguacagaaucuucaaaaucgagaaggggaagauuacuaaaucaauagaguuggaugcaccuaauucucauuacgaggaauguuccuguuacccagacaccggcaaagugaugugugugugcagagacaauuggcaugguucgaaucgaccaugggugucuuuuaaucaaaaccuggauuaucaaauaggauacaucugcagugggguuuucggugacaauccgcgucccaaagauggaaaaggcagcugugauccaguaaauguugauggagcagacggaguaaagggguuuucauacagguaugguaaugguguuuggauaggaaggacuaaaaguaacaguuccagaaagggguuugagaugauuugggauccuaauggguggacagauaccgaugguaauuucuuagugaaacaggauguaguggcaaugacugauuggucaggguacagcggaaguuucguucaacauccugagcuaacaggauuggacuguaugaggccuugcuucuggguugaauuaaucagaggacgacccagagaaaaaacaacaaucuggacuagugggagcagcauuucuuuuuguggcgugaauagugauacuguaaauuggucuuggccagacggugccgaguugccauucaccauugacaaguag

SEQ ID NO: 47812 - RNA, 1410 nt, Artificial Sequence
  derived and/or modified CDS sequence (wt) from neuraminidase__InfluenzaA__ABP49330
augaauccaaaucagaaaauaauaaccauuggaucaaucuguaugguagucggaauaauuagccuaauauugcaaauagggaauauuaucucaauauggauuagccauucaauucaaacuggaagucaaaaccauacuggaauaugcaaccaaagcaucauuaccuauaaaaauagcaccuggguaaaucaaacauauguuaauauuagcaacacuaacguuguugcuggaaaaggcacaacuccagugauauuagccggcaauucaucucuuuguccuauccgugggugggcuauauacagcaaagauaacggcauaagaauugguuccaaaggagauguuuuugucauaagagagccuuuuauuucauguucucacuuggaaugcaggacuuuuuuucugacccaaggcgcccuguugaaugacaagcauucaaaugggaccguuaaggacagaagcccuuauagggccuugaugagcugcccugucggugaagcuccguccccguacaauucaagguuugaaucgguugcuuggucagcaugugcaugucaugauggcaugggcuggcuaacaaucggaauuucugguccagaugaugaagcaguggcuguguuaaaauacaacggcauaauaacugaaaccauaaaaaguuggaggaagaaaauauugagaacacaagagucugaaugugucuguguaaaugguucauguuuuacuauaaugaccgacggcccgagugaugggccggccucguacaaaauuuucaagaucgagaaggggaagguuacuaaaucaauagaguuggaugcaccuaauucucacuacgaggaauguuccuguuacccugauaccggcaaggugaugugugugugcagagacaauuggcacgguucgaaccgaccaugggugucuuucgaucaaaaucuggauuaucaaauaggauacaucugcagugggguuuucggugacaauccgcgucccaaagauggaaaaggcagcugugguccgguguauguugauggagcaaacggaguaaagggauuuucauacagguaugguaaugguguuuggauaggaaggauuaaaaguaacaguuccagacagggguuugagaugauuugggauccuaauggguggacagagacugauaguaguuucuuugugaaacaagauguaguggcuaugacugauuggucaggguacagcggaaguuucguucaacauccugagcuaacagggcuggacuguaugaggccuugcuucuggguugaauuaaucaggggacgaccuaaagaaaaaacaaucuggacuagugggagcagcauuucuuuuuguggcgugaauagugauacuguagauuggucuuggccagacggugccgaauugccauucaccauugacaaguag

SEQ ID NO: 47813 - RNA, 1413 nt, Artificial Sequence
  derived and/or modified CDS sequence (wt) from neuraminidase__InfluenzaA__ABP49352
augaauccaaaucagaaaauaauaaccauuggaucgaucuguaugacaaucggaauaauuagucuaauauugcaaauaggaaauauuauuucaauauggguuagccacucaauccaaacuggaagucaaaaccacacuggaauaugcaaccaaagaaucauuaccuaugaaaauagcaccuggguaaaccaaacauaugucaacauuaacaacacuaacguuguugcuggaaaggacacaaccucaguggcauuagccggcaauucaucucuuuguccuauccgugggugggcuauauacagcaaagacaacagcauaagaauugguuccaaaggagauguuuuugucauaagagaaccuuuuauaucauguucucacuuggaaugcagaaccuuuuuucugacccaaggugcucuauuaaaugacaagcauucaaaugggaccguuaaggacagaagcccuuauagggccuuaaugagcuguccuauaggugaagcuccgucuccauacaauucaagguuugaaucaguugcuuggucagcaagcgcaugucaugauggcauggguuggcuaacaaucggaauuucugguccagaugauggagcaguggcuguacuaaaauacaacggcauaauaacugaaaccauaaaaaguuggaggaagcgaauauuaagaacacaagagucugaaugugucuguguaaacgguucauguuuuaccauaaugaccgauggcccgagugacggaccugccucguacagaaucuucaaaaucgagaaggggaagauuacuaaaucaauagaguuggaugcacccaauucucauuacgaggaauguuccuguuacccagacaccggcacagugaugugugugugcagagacaauuggcaugguucgaaucgaccuugggugucuuuuaaucaaaaccuggauuaucaaauaggauacaucugcagugggguuuucggugacaauccgcgucccaaagauggaaaaggcagcugugguccaguaacuguugauggagcagacggaguaaagggguuuucauacaaguaugguaaugguguuuggauaggaaggacuaaaaguaacagcuccagaaagggauuugagaugauuugggauccuaauggauggacggauaccgauaguaauuucuuagugaaacaggauguaguggcaaugacugauuggucaggguacagcggaaguuucguucaacauccugagcuaacaggauuggacuguaugaggccuugcuucuggguugaauuaaucagaggacgaccuagagaaaggacaacaaucuggacuagugguagcagcauuucuuuuuguggcguggauagugauacugcaaauugguccuggccagacggugccgagcugccauucaccauugacaaguag

SEQ ID NO: 47814 - RNA, 1413 nt, Artificial Sequence
  derived and/or modified CDS sequence (wt) from neuraminidase__InfluenzaA__ABP49363
augaauccaaaucagaaaauaauaaccauaggaucaaucuguauggcaauaggaauaauuagucuaauauugcaaauaggaaauauuguuucaauauggaucagccacucaauccaaacuggaagucaaaacuacacuggaauaugcaaccaaagaaucauuaccuaugaaaauagcaccuggguaaaucaaacauauguuaauaucaacaacacuaauguuguugcuggacaggacacaacuucaguggcauuagccggcaauucaucucuuuguccuaucagugggugggcuauauacagcaaagacaacagcauaagaauuggcuccaaaggggauguuuuugucauaagagaaccuuuuauaucauguucucacuuggaaugcagaaccuuuuuucugacccaaggugcucuauuaaaugacaagcauucaaacggaaccguuaaggacagaagcccuuauagggccuuaaugagcuguccuauaggugaagcuccgucucccuacaauucaagguuugaaucaguugcuuggucagcaagcgcaugucaugauggcaugggcuggcuaacaaucggaauuucugguccagaugauggagcaguggcuguacuaaaauacaacgguauaauaacugaaaccauaaaaaguuggaggaagcgaauauuaagaacacaagagucugaaugugucuguguaaacgguucauguuuuaccauaaugaccgauggcccgaauaaugggccugccucguacaaaaucuucaaaaucgagaaggggaagauuacuaaaucaauagaguuggaugcacccaauucucauuacgaggaauguuccuguuacccagacgccggcacagugaugugugugugcagagacaauuggcaugguucgaaucgaccuugggugucuuuuaaucaaaaccuggauuaucaaauaggauacaucugcagugguguuuuuggugacaauccgcgucccaaagauggaaaaggcagcugugguccaguaacuguugauggagcagacggaguaaagggguuuucauacagguaugguaaugguguuuggauaggaaggacuaaaaguaacagcuccagaagaggauuugagaugauuugggauccuaauggauggacagauaccgauaguaaauucuuagugaaacaggauguaguggcaauuacugauuggucgggguacagcggaagcuucguucaacauccugaacuaacaggauuggauuguaugaggccuugcuucuggguugaauugaucagaggacgaccuagagaaaauacaacaaucuggacuagugggagcagcauuucuuuuuguggcgugaauggugauacugcaaauuggucuuggccagacggugccgaguugccauucaccauugacaaguag

SEQ ID NO: 47815 - RNA, 1410 nt, Artificial Sequence; identical to SEQ ID NO: 46755
  derived and/or modified CDS sequence (wt) from neuraminidase__InfluenzaA__ABP49374

SEQ ID NO: 47816 - RNA, 1413 nt, Artificial Sequence
  derived and/or modified CDS sequence (wt) from neuraminidase__InfluenzaA__ABP49385
augaauccaaaucaaaaaauaauaaccauuggaucaaucaguguggcaaucggaauaauuaaucuaacauugcaaauaggaaauauuauuucaauaugggcuagccacucaauccaaacuggaagucaaaacuacacuggaauaugcaaccaaagaaucauuacauaugaaaauagaaccuggguaaaucaaacauauguuaauauuaacaacacuaauguuguugcuggaaaggacaaaaccucgaugacauuggccggcaauucaucucuuugcccuauccguggaugggcaauauacacaaaagacaacagcauaagaauugguuccaaaggagauguuuuugucauaagagagccuuuuauaucauguucucacuuggaaugcagaaccuuuuuucugacccaaggugcucuauuaaaugacaagcauucaaaugggaccauuaaggacagaagcccuuuuagggccuuaaugagcuguccucugggugaagcuccgucuccauacaauucaagauuugaaucaguugcuuggucagcaagcgcaugccaugauggccugggcuggcuaacaaucggaauuucugguccagauaauggagcaguggcuguacuaaaauacaacggcauaauaacugaaaccauaaaaaguuggaaaaagcaaauccuaagaacacaagagucugaaugugucugugugaacgguucauguuuuaccauaaugaccgauggcccgaguaacagggccgcaucguacagaaucuucaaaauugagaaggggagaguuacuaaaucaauagaguuggaugcacccaauuaucauuacgaggaauguuccuguuauccagacaccggcacaguaaugugugugugcagggacaauuggcacgguucaaaucgaccuuggguguccuuuaaucaaaaccuggauuaucaaauaggauacaucugcagugggguguucggugacaauccgcgucccaaagauggagaaggcagcuguaauccagugacuguugauggagcagacggaguaaagggguuuucauacagauaugguaaugguguuuggauaggaaggacuaaaaguaacagacuaagaaagggauuugagaugauuugggauccuaauggauggacagauaccgacagugauuucucaaugaaacaggaugucguggcaaugacugauuggucaggguacagcggaaguuuuguucaacauccugagcuaacaggauuggacuguaugagaccuugcuucuggguugaauuagucagagggcuaccuagagaaaauacaacaaucuggacuagugggagcagcauuucuuuuuguggcgugaauagcgagacugcaaacuggucuuggccagacggugcugaguugccauucaccauugacaaguag

SEQ ID NO: 47817 - RNA, 1413 nt, Artificial Sequence
  derived and/or modified CDS sequence (wt) from neuraminidase__InfluenzaA__ABP49396
augaauccaaaucaaaaaauaauaaccauuggaucaaucaguauagcaaucggaauaauuagucuaauguugcaaauaggaaauauuauuucaauaugggcuagucacucaauccaaacuggaagucaaaaccacacuggaauaugcaaccaaagaaucaucacauaugaaaacagcaccugggugaaucacacauauguuaauauuaacaacacuaauguuguugcuggaaaggacaaaacuucagugacauuggccggcaauucaucucuuuguucuaucaguggaugggcuauauacacaaaagacaacagcauaagaauuggcuccaaaggagauguuuuugucauaagagaaccuuucauaucauguucucauuuggaaugcaggaccuuuuuucugacccaaggugcucuauuaaaugacaaacauucaaauggaaccguuaaggacagaaguccuuauagggccuuaaugagcuguccucuaggugaagcuccguccccauacaauucaaaguuugaaucaguugcauggucagcaagcgcaugccaugauggcaugggcugguuaacaaucggaauuucugguccagacaauggagcuguggcuguacuaaaauacaacggaauaauaacugaaaccauaaaaaguuggaaaaagcgaauauugagaacacaagagucugaaugugucugugugaacgggucauguuucaccauaaugaccgauggcccgaguaauggggccgccucguacaaaaucuucaagaucgaaaaggggaagguuacuaaaucaauagaguuaaaugcacccaauuuucauuaugaggaauguuccuguuacccagacacuggcacagugauguguguaugcagggacaacuggcaugguucaaaucgaccuugggugucuuuuaaucaaaacuuggauuaucaaauaggauacaucugcaguggaguguucggugacaauccgcgucccaaagauggaaagggcagcuguaauccagugacuguugauggagcagacggaguuaagggguuuucauacaaauaugguaaugguguuuggauaggaaggacuaaaaguaacagacuuagaaagggguuugagaugauuugggauccuaauggauggacagauaccgacagugauuucucagugaaacaggauguuguggcaauaacugauuggucaggguacaguggaaguuucguucaacauccugaguuaacaggauuggacuguauaagaccuugcuucuggguugaguuagucagaggacugccuagagaaaauacaacaaucuggacuagugggagcagcauuucuuuuuguggcgucgauagugauacugcaaacuggucuuggccagacggugcugaguugccguucaccauugacaaauag

SEQ ID NO: 47818 - RNA, 1410 nt, Artificial Sequence
  derived and/or modified CDS sequence (wt) from neuraminidase__InfluenzaA__ABP49407
augaauccaaaucaaaagauaauaacgauuggcucuguuucucucaccauuuccacaauaugcuucuuuaugcaaauugccaucuugauaacuacuguaacauugcauuucaagcaauaugaauucaacucccccccaaacaaccaagugaugcugugugaaccaacaauaauagaaagaaacauaacagagauaguguaucugaccaacaccaccauagagaaggaaauaugccccaaacuagcagaauacagaaauuggucaaagccgcaaugugacauuacaggauuugcaccuuuuucuaaggacaauucgauuaggcuuuccgcugguggggacaucugggugacaagagaaccuuaugugucaugcgauccugacaaauguuaucaauuugcccuuggacagggaacaacacuaaacaacgugcauucaaaugacacaguacaugauaggaccccuuaucggacccuauugaugagugaguuagguguuccauuucaucuggggacuaagcaagugugcauagcaugguccagcucaaguugucacgauggaaaagcauggcugcauguuuguguaacgggggaugauaaaaaugcaacugcuagcuucauuuacaaugggagacuuguagauaguauuguuucaugguccaaagaaauccucagaacccaggagucagaaugcguuuguaucaauggaacuuguacaguaguaaugacugaugggagugcuucaggaaaagcugauacuaaaauacuauucauugaggaggggaaaaucguucauacuagcacauugucaggaagugcccagcaugucgaggagugcuccugcuauccucgauauccuggugucagaugugucugcagagacaacuggaaaggcuccaauaggcccaucguagauauaaacauaaaggauuauagcauuguuuccaguuaugugugcucaggacuuguuggagacacacccagaaaaaacgacagcuccagcaguagccauugcuuggauccuaacaaugaagaagguggucauggagugaaaggcugggccuuugaugauggaaaugacguguggaugggaagaacgaucagcgagaaguuacgcucaggauaugaaaccuucaaagucauugaaggcugguccaacccuaauuccaaauugcagauaaauaggcaagucauaguugacagagguaauagguccgguuauucugguauuuucucuguugaaggcaaaaucugcaucaaucggugcuuuuauguggaguugauaaggggaagaaaagaggaaacugaagucuuguggaccucaaacaguauuguuguguuuuguggcaccucagguacauauggaacaggcucauggccugauggggcggacaucaaucucaugccuauauaa

SEQ ID NO: 47819 - RNA, 1410 nt, Artificial Sequence; identical to SEQ ID NO: 46755
  derived and/or modified CDS sequence (wt) from neuraminidase__InfluenzaA__ABP49418

SEQ ID NO: 47820 - RNA, 1410 nt, Artificial Sequence
  derived and/or modified CDS sequence (wt) from neuraminidase__InfluenzaA__ABP49429
augaauccaaaucaaaagauaauaacgauuggcucuguuucucucaccauugccacaauaugcuuccuuaugcaaauugccauccugguaacuacuguaacguugcauuucaagcaauaugaaugcaacucccccccaaacaaccaagugaugcugugugaaccaacaauaauagaaagaaacauaacagagauaguguaucugaccaacaccaccauagagaaggaaauaugccccaaacuagcagaauacagaaauuggucaaagccgcaauguaacauuacaggauuugcaccuuuuucuaaggacaauucgauucggcuuuccgcugguggggacaucugggugacaagagaaccuuaugugucaugcgauccugacaaguguuaucaauuugcccuuggacagggaacaacacuaaacaacgggcauucaaaugacacaguacaugauaggaccccuuaucgaacccuauugaugaaugaguuggguguuccauuucauuugggaaccaagcaagugugcauagcaugguccagcucaaguugucacgauggaaaagcauggcugcauguuuguguaacgggggaugaugaaaaugcaacugcuagcuucauuuacaaugggaggcuuguagauaguaucgguucaugguccaaaaaaauccucaggacccaggagucggaaugcguuuguaucaauggaacuuguacaguaguaaugacugaugggagugcuucaggaaaagcugauacuaaaauacuauucauugaggaggggaaaaucguucauacuagcucauugucaggaagugcucagcaugucgaggagugcuccuguuauccucgauauccuggugucagaugugucugcagagacaacuggaaaggcuccaauaggcccaucguagauauaaauguaaaggauuauagcauuguuuccaguuaugugugcucaggacuuguuggagacacacccagaaaaaacgacagcuccagcaguagccauugcuuggauccuaacaaugaggaagguggucauggagugaaaggcugggccuuugaugauggaaaugacguauggaugggaagaacgaucagcgagaaguuacgcucaggauaugaaaccuucaaagucauugaaggcugguccaaaccuaacuccaaauugcagauaaauaggcaagucauaguugacagagguaauagguccgguuauucugguauuuucucuguugaaagcaaaagcugcaucaauaggugcuuuuauguggaguugauaaggggaaggaaacaggaaacugaagucuuguggaccucaaacaguauuguuguguuuuguggcaccucagguacauauggaacaggcucauggccugauggggcggacaucaaucucaugccuauauaa

SEQ ID NO: 47821 - RNA, 1410 nt, Artificial Sequence
  derived and/or modified CDS sequence (wt) from neuraminidase__InfluenzaA__ABP49440
augaauccaaaucaaaagauaauaacaauuggcucugucucucucaccauugcaacaguaugcuuccucauucagauugccauccuggcaacuacugugacauugcauuuuaagcaacaugagugcgacucccccgcgagcaaccaaguaaugccaugugaaccaauaauaauagaaaggaacauaacagagauaguguauuugaauaacaccaccauagagaaagagauuugccccgaaguaguggaauacagaaauuggucaaagccgcaaugucaaauuacaggauuugcaccuuuuucuaaggacaauucaauccggcuuucugcugguggggacauuugggugacgagagaaccuuaugugucaugcgauccuggcaaguguuaucaauuugcacucgggcaggggaccacacuagacaacaaacauucaaauggcacaauacaugauagaaucccucaucgaacccuauuaaugaaugaguuggguguuccauuucauuuaggaaccaaacaaguguguguagcaugguccagcucaaguugucacgauggaaaagcaugguugcauguuugugucacuggggaugauagaaaugcaacugcuagcuucauuuaugacgggaggcuuguggacaguauugguucauggucacaaaauauccucaggacccaggagucggaaugcguuuguaucaaugggacuugcacaguaguaaugacugauggaagugcaucaggaagagccgauacuagaauacuauucauuaaagaggggaaaauuguccauauuagcccauugucaggaagugcucagcauauagaggaguguuccuguuacccucgauauccugacgucagauguaucugcagagacaacuggaaaggcucuaauaggcccguuauagacauaaauauggaagauuauagcauugauuccaguuaugugugcucagggcuuguuggcgacacacccaggaacgacgacagcucuagcaauagcaauugcagggauccuaacaaugagagagggaauccaggagugaaaggcugggccuuugacaauggagaugauguauggaugggaagaacaaucagcaaagauucacgcucagguuaugaaacuuucaaagucauuggugguugguccacaccuaauuccaaaucgcaggccaauagacaggucauaguugacaaaaauaauuggucugguuacucugguauuuucucuguugagggcaaaagcugcaucaauaggugcuuuuauguggaguugauaaggggaaggccacaggagacuagaguaugguggaccucaaacaguauuguuguguuuuguggcacuucagguacuuauggaacaggcucauggccugauggggcgaacaucaauuucaugccuauauaa

SEQ ID NO: 47822 - RNA, 1413 nt, Artificial Sequence; identical to SEQ ID NO: 47758
  derived and/or modified CDS sequence (wt) from neuraminidase__InfluenzaA__ABP49451

SEQ ID NO: 47823 - RNA, 1410 nt, Artificial Sequence
  derived and/or modified CDS sequence (wt) from neuraminidase__InfluenzaA__ABP49462
augaauccaaaucaaaagauaauaacaauuggcucugucucucucaccauugcaacaguaugcuucaucaugcagauugccauccuggcaacuacugugacauugcauuuuaaacaacaugagugcgacucccccgcgagcaaccaaguaaugccaugugaaccaauaauaauagaaaggaacauaacagagauaguguauuugaauaacaccaccauagagaaagagauuugccccgaagcaguggaauacagaaauuggucaaagccgcaaugucaaauuacaggauuugcaccuuuuucuaaggacaauucaauccggcuuucugcugguggggacauuugggugacgagagaaccuuaugugucaugcgauccuggcaaguguuaucaauuugcacucgggcaggggaccacacuagacaacaaacauucaaauggcacaauacaugauagaaucccucaccgaacccuauuaaugaaugaguuggguguuccauuucauuuaggaaccaaacaaguguguguagcaugguccagcucaaguugucacgauggaaaagcaugguugcauguuugugucacuggggaugauagaaaugcgacugcuagcuucauuuaugacgggaggcuuguggacaguauugguucauggucucaaaauauccucaggacccaggagucggaaugcguuuguaucaaugggacuugcacaguaguaaugacugauggaagugcaucaggaagagccgauacuagaauacuauucauuaaagaggggaaaauuguccauauuagcccauugucaggaagugcucagcauauagaggaguguuccuguuacccucgauauccugacgucagauguaucugcagagacaacuggaaaggcucuaauaggcccguuauagacauaaauauggaagauuauagcauugauuccaguuaugugugcucagggcuuguuggcgacacacccaggaacgacgacagcucuagcaauagcaauugcagggauccuaacaaugagagagggaauccaggagugaaaggcugggccuuugacaauggagaugauguauggaugggaagaacaaucaacaaagauucacgcucagguuaugaaacuuucaaagucauuggugguugguccacaccuaauuccaaaucgcaggucaauagacaggucauaguugacaacaauaauuggucugguuacucugguauuuucucuguugagggcaaaagcugcaucaauaggugcuuuuauguggaguugauaaggggaaggccacaggagacuagaguaugguggaccucaaacaguauuguuguguuuuguggcacuucagguacuuauggaacaggcucauggccugauggggcgaacaucaauuucaugccuauauaa

SEQ ID NO: 47824 - RNA, 1410 nt, Artificial Sequence
  derived and/or modified CDS sequence (wt) from neuraminidase__InfluenzaA__ABP49473
augaauccaaaucaaaagauaauaacaauuggcucugucucucucaccauugcaacaguaugcuuccucaugcagauugccauccuggcaacuacugugacauugcauuuuaaacaacaugagugcgacucccccgcgagcaaccaaguaaugccaugugaaccaauaauaauagaaaggaacauaacagagauaguguauuugaauaacaccaccauagagaaagagauuugccccgaaguaguggaauacagaaauuggucaaagccgcaaugucaaauuacaggauuugcaccuuuuucuaaggacaauucaauccggcuuucugcugguggggacauuugggugacgagagaaccuuaugugucaugcgauccuggcaaguguuaccaauuugcacucgggcaggggaccacacuagacaacaaacauucaaauggcacaauacaugauagaaucccucaccgaacccuauuaaugaaugaguuggguguuccauuucauuuaggaaccaaacaaguguguguagcaugguccagcucaaguugucacgauggaaaagcaugguugcauguuugugucacuggggaugauagaaaugcgacugcuagcuucauuuaugacgggaggcuuguggacaguauugguucauggucucaaaauauccucaggacccaggagucggaaugcguuuguaucaaugggacuugcacaguaguaaugacugauggaagugcaucaggaagagccgauacuagaauacuauucauuaaagaggggaaaauuguccauauuagcccauugucaggaagugcucagcauauagaggaguguuccuguuacccucgauauccugacgucagauguaucugcagagacaacuggaaaggcucuaauaggcccguuauagacauaaauauggaagauuauagcauugauuccaguuaugugugcucagggcuuguuggcgacacacccaggaacgacgacagcucuagcaauagcaauugcagggauccuaacaaugagagagggaauccaggagugaaaggcugggccuuugacaauggagaugauguauggaugggaagaacaaucaacaaagauucacgcucagguuaugaaacuuucaaagucauuggugguugguccacaccuaauuccaaaucgcaggucaauagacaggucauaguugacaacaauaauuggucugguuacucugguauuuucucuguugagggcaaaagcugcaucaauaggugcuuuuauguggaguugauaaggggaaggccacaggagacuagaguaugguggaccucaaacaguauuguuguguuuuguggcacuucagguacuuauggaacaggcucauggccugauggggcgaacaucaauuucaugccuauauaa

SEQ ID NO: 47825 - RNA, 1410 nt, Artificial Sequence
  derived and/or modified CDS sequence (wt) from neuraminidase__InfluenzaA__ABP49495
augaauccaaaucaaaagauaauaacaauuggcucugucucucucaccauugcaacaauaugcuuccucaugcagauugccauccugguaaccacuguaacauugcauuucaagcaauaugagugcgacuccccagcgaacaaccaaguaaugccgugugaaccaauaauaauagaaaggaacauaacagagauaguguauuugacuaacaccaccauagaaaaagagauaugccccaaauuaguggaauacaggaauuggucaaagccacaauguaaaauuacaggauuugcaccuuucucuaaggacaauucaauucggcuuucugcugguggggacauuugggugacgagagaaccuuaugugucaugcgauccuggcaaguguuaucaauuugcacucgggcaggggaccacacuagacaacaaacauucaaaugacacaauacaugauagaaccccucaucgaacccuauugaugaaugaguuggguguuccauuucacuugggaaccaggcaaguguguauagcaugguccagcucaaguugucacgauggaaaagcauggcugcauguuugugucacuggguaugauaaaaaugcaacugcuagcuucauuuacgaugggaggcuuguagacagcauugguucauggucucaaaauauccucaggacccaggagucggaauguguuuguaucaaugggacuuguacaguaguaaugacugauggaagugcuucaggaagagcugauacuaaaauacuauucauugaagaggggaaaauuguucauacuagcccauugucaggaagugcucagcauguagaggaguguuccuguuauccucgauauccuggugucagauguaucugcagagacaacuggagaggcucuaauaggccagucguagauauaaaugugaaagauuauagcauugauuccaguuaugugugcucagggcuugugggcgacacacccagaaacaacgacagaucuagcaguagcuauugccggaauccuaacaaugaaaaagggacucacggagugaaaggcugggccuuugacgauggaaaugacguguggaugggaagaacaaucagcgaggauucacgcucagguuaugaaaccuucaaagucauuggugguugguccacaccuaauuccaaauugcagauaaauaggcaagucauaguugacagcgauaauaggucagguuauucugguauuuucucuguugagggcaaaagcugcaucaauaggugcuuuuauguggaguugauaaggggaagggaacaggaaacuagaguaugguggaccucaaacaguauuguuguguuuuguggcacuucagguaccuaugggacaggcucauggccugauggggcggacaucaaucucaugccuauauaa

SEQ ID NO: 47826 - RNA, 1410 nt, Artificial Sequence
  derived and/or modified CDS sequence (wt) from neuraminidase__InfluenzaA__ABP49506
augaauccaaaucaaaagauaauaacaauuggcucugucucucucaccauugcaacaguaugcuuccucaugcagauugccauccugguaacuacuguaacauugcauuuuaagcaauaugagugcgacucccccgcgagcaaccaaguaaugccgugugaaccaauaauaauagaaaggaacauaacagagauaguguauuugaauaacaccaccauagagaaagagauaugccccaaaguaguggaauacagaaauuggucaaagccgcaaugucaaauuacaggauuugcaccuuuuucuaaggacaauucaauccggcuuucugcugguggggacauuugggugacgagagaaccuuaugugucaugcgauccuggcaaguguuaucaauuugcacucgggcaggggaccacacuagacaacaaacauucaaaugacacaauacaugauagaaucccucaucgaacucuauuaaugaaugaguuggguguuccauuucauuuaggaaccagacaaguguguauagcaugguccagcucaaguugucacgauggaaaagcauggcugcauguuuguaucacuggggaugacaaaaaugcaacugcuagcuucauuuaugacgggaggcuuguggacaguauugguucauggucucaaaauauccucagaacccaggagucggaaugcguuuguaucaauggaaccugcacaguaguaaugacugauggaagugcuucaggaagagccgauacuagaauacuauucauugaagaggggaaaauuguccauauuagcccauugucaggaagugcucagcauguagaagaguguuccuguuauccuagauauccuggcgucagauguaucugcagagacaacuggaaaggcucuaauaggcccgucguagacauaaauauggaagauuauagcauugauuccaguuaugugugcucagggcuuguuggcgacacaccuagaaacgacgacagaucuagcaauagcaauugcaggaauccuaacaaugagagagggaaucaaggagugaaaggcugggccuuugacaauggagaugacguguggaugggaagaacgaucagcaaggauuuacgcucagguuaugaaacuuucaaagucauuggugguugguccacaccuaauuccaaaucgcagaucaauagacaagucauaguugacagcgauaaucggucagguuacucugguauuuucucuguugagggcaaaagcugcaucaauaggugcuuuuauguggaguugauaaggggaaggaaacaggagacuagaguaugguggaccucaaacaguauuguuguguuuuguggcacuucagguaccuauggaacaggcucauggccugauggggcgaacaucaauuucaugccuauauaa

SEQ ID NO: 47827 - RNA, 1410 nt, Artificial Sequence; identical to SEQ ID NO: 46107
  derived and/or modified CDS sequence (wt) from neuraminidase__InfluenzaA__ABP49517

SEQ ID NO: 47828 - RNA, 1413 nt, Artificial Sequence
  derived and/or modified CDS sequence (wt) from neuraminidase__InfluenzaA__ABQ01314
augaauccaaaucagaaaauaauaaccauuggaucaaucuguauggcaaucggaacaauuagucuaauauugcaaauagggaauauuaucucaauauggguuagccacucaauucaaacuggaagucaaaaccauacuggaauaugcaaccaaagaaucauuaccuaugaaaauaacaccuggguaaaucaaacauauguuaauauuagcaacacuaauguuguugcuggaaaggacacaacuucaaugauauuagccggcaauucaucucuuuguccuauccgugggugggcuauauacagcaaagacaacagcauaagaauugguuccaaaggagauguuuuugucauaagagaaccuuuuauaucaugcucucacuuggaaugcagaaccuuuuuccugacccaaggcgcucuauuaaaugacaagcauucaaaugggaccguuaaagacagaagcccuuauagggccuuaaugagcuguccuaucggugaagcuccgucuccguacaauucaagauuugaaucgguugcuuggucagcgagugcaugucaugauggcaugggcuggcuaacuaucggaauuucugguccagaugauggagcaguggcuguauuaaaauacaacggcauaauaacugaaaucauaaaaaguuggaggaagcaaauauuaagaacacaagagucugaaugugucuguguaaacgguucauguuuuaccauaaugaccgauggcccgagugaugggccggccucguacagaaucuucaaaaucgagaaggggaagauuacuaaaucaauagaguuggaugcaccuaauucucauuacgaggaauguuccuguuacccagacaccggcaaagugaugugugugugcagagacaauuggcaugguucgaaucgaccaugggugucuuuuaaucaaaaccuggauuaucaaauaggauacaucugcagugggguuuucggugacaauccgcgucccaaagauggaaaaggcagcugugauccaguaaauguugauggagcagacggaguaaagggguuuucauacagguaugguaaugguguuuggauaggaaggacuaaaaguaacaguuccagaaagggguuugagaugauuugggauccuaauggguggacagauaccgaugguaauuucuuagugaaacaggauguaguggcaaugacugauuggucaggguauagcggaaguuucguucaacauccugagcuaacaggauuggacuguaugaggccuuguuucuggguugaauuaaucagaggacgacccagagaaaaaacaacaaucuggacuagugggagcagcauuucuuuuuguggcgugaauagugauacuguaaauuggucuuggccagacggugccgaguugccauucaccauugacaaguag

SEQ ID NO: 47829 - RNA, 1413 nt, Artificial Sequence
  derived and/or modified CDS sequence (wt) from neuraminidase__InfluenzaA__ABQ01325
augaauccaaaucagaaaauaauaaccauuggaucaaucuguauggcaaucggaauaauuagucuaauauugcaaauagggaauauuaucucaauauggguuagccacucaauucaaacuggaagucaaaaccauacuggaauaugcaaccaaagaaucauuaccuaugaaaauagcaccuggguaaaucaaacauauguuaauauuagcaacacuaacguuguugcuggaaaggacacaacuucaaugacauuagccggcaauucaucucuuuguccuauccgugggugggcuauauacagcaaagacaacagcauaagaauugguuccaaaggagauguuuuugucauaagagaaccuuuuauaucauguucucacuuggaaugcagaaccuuuuuucugacccaaggcgcucuauuaaaugacaagcauucaaaugggaccguuaaggacaggagcccuuauagggccuuaaugagcuguccuauaggugaagcuccgucuccauacaauucaagguuugaaucgguugcuuggucagcaagugcaugucaugauggcaugggcuggcuaacaaucggaauuucugguccagaugauggagcaguggcuguacuaaaauacaacggcauaauaacugaaaccauaaaaaguuggaggaagcaaauauuaagaacacaagagucugaaugugucuguguaaacgguucauguuuuaccauaaugaccgauggcccgagugaugggcaggccucguacagaaucuucaaaaucgagaaggggaagauuacuaaaucaauagaguuggaugcacccaauucucauuacgaggaauguuccuguuacccagacaccggcacagugaugugugugugcagagacaauuggcaugguucgaaucgaccuugggugucuuuuaaucaaaaccuggauuaucaaauaggauacaucugcagugggguuuucggugacaauccgcgucccaaagauggaaaaggcagcugugauccaguaaauguugauggagcagacggaguaaagggguuuucauacagguaugguaaugguguuuggauaggaaggacuaaaaguaacagcuccagaaagggauuugagaugauuugggauccuaauggauggacagauaccgauaguaauuucuuagugaaacaggauguaguggcaaugacugauuggucaggguacagcggaaguuucguucaacauccugagcuaacaggauuggacuguaugaggccuugcuucuggguugaauuaaucagaggacgacccagagaaaaaacaacaaucuggacuagugggagcagcauuucuuuuuguggcgugaauagugauacuguaaauuggucuuggccagacggugcugaguugccauucaccauugacaaguag

SEQ ID NO: 47830 - RNA, 1410 nt, Artificial Sequence
  derived and/or modified CDS sequence (wt) from neuraminidase__InfluenzaA__ABQ01336
augaauccaaaucaaaagauaauaacgauuggcucuguuucucucaccauugccacaauaugcuuccuuaugcaaauugccauccugguaacuacuguaacguugcauuucaagcaauaugaaugcaacucccccccaaacaaccaagugaugcugugugaaccaacaauaauagaaagaaacauaacagagauaguguaucugaccaacaccaccauagagaaggaaauaugccccaaacuagcagaauacagaaauuggucaaagccgcaauguaacauuacaggauuugcaccuuuuucuaaggacaauucgauucggcuuuccgcugguggggacaucugggugacaagagaaccuuaugugucaugcgacccugacaaguguuaucaauuugcccuuggacagggaacaacacuaaacaacgggcauucaaaugacacaguacaugauaggaccccuuaucgaacccuauugaugaaugaguuggguguuccauuucauuugggaaccaagcaagugugcauagcaugguccagcucaaguugucacgauggaaaagcauggcugcauguuuguguaacgggggaugaugaaaaugcaacugcuagcuucauuuacaaugggaggcuuguagauaguaucgguucaugguccaaaaaaauccucaggacccaggagucggaaugcguuuguaucaauggaacuuguacaguaguaaugacugaugggagugcuucaggaaaagcugauacuaaaauacuauucauugaggaggggaaaaucguucauacuagcucauugucaggaagugcucagcaugucgaggagugcuccuguuauccucgauauccuggugucagaugugucugcagagacaacuggaaaggcuccaauaggcccaucguagauauaaauguaaaggauuauagcauuguuuccaguuaugugugcucaggacuuguuggagacacacccagaaaaaacgacagcuccagcaguagccauugcuuggauccuaacaaugaggaagguggucauggagugaaaggcugggccuuugaugauggaaaugacguguggaugggaagaacgaucagcgagaaguuacgcucaggauaugaaaccuucaaagucauugaaggcugguccaaaccuaacuccaaauugcagauaaauaggcaagucauaguugacagagguaauagguccgguuauucugguauuuucucuguugaaagcaaaagcugcaucaauaggugcuuuuauguggaguugauaaggggaaggaaacaggaaacugaagucuuauggaccucaaacaguauuguuguguuuuguggcaccucagguacauauggaacaggcucauggccugauggggcggacaucaaucucaugccuauauaa

SEQ ID NO: 47831 - RNA, 1410 nt, Artificial Sequence; identical to SEQ ID NO: 46755
  derived and/or modified CDS sequence (wt) from neuraminidase__InfluenzaA__ABQ01347

SEQ ID NO: 47832 - RNA, 1410 nt, Artificial Sequence
  derived and/or modified CDS sequence (wt) from neuraminidase__InfluenzaA__ABQ01358
augaauccaaaucaaaagauaauaacaauuggcucugucucucucaccauugcaacaguaugcuuccucaugcagauugccauccuggcaacuacugugacauugcauuuuaagcaacaugagugcaacucccccgcgagcaaccaaguaaugccaugugaaccaauaauaauagaaaggaacauaacagagauaguguauuugaauaacaccaccauagaaaaagagauuugccccgaaguaguagaauacagaaauuggucaaagccgcaaugucaaauuacaggauuugcaccuuucucuaaggacaauucaauccggcuuucugcugguggggacauuugggugacgagagaaccuuaugugucaugugauccuggcaaguguuaucaauuugcacucgggcaggggaccacacuagacaacaaacauucaaauggcacaauacaugauagaaucccucaucgaacccuauuaaugaaugaguuggguguuccauuucauuuaggaaccaaacaaguguguguagcaugguccagcucaaguugccacgauggaaaagcaugguugcauguuugugucacuggggaugauagaaaugcaacugcuagcuucauuuaugacgggaggcuugaggacaguauugguucauggucucaaaauauccucaggacccaggagucggaaugcguuuguaucaaugggacuugcacaguaguaaugacugauggaaaugcaucgggaagagccgauacuagaauacuauucauuaaagaggggaaaauuguccauauuagcccauugucaggaagugcucagcauauagaggaguguuccuguuacccucgauauccugacgucagauguaucugcagagacaacuggaaaggcucuaauaggcccguuuuagacauaaguauggaagauuauagcauugauuccaguuaugugugcucagggcuuguuggcgacacacccaggaacgacgacagcucuagcaauagcaacugcagggauccuaacaaugagagagggaauccgggagugaaaggcugggccuuugacaauggagaugauguauggaugggaagaacaaucagcaaagauuuacgcucagguuaugaaacuuucaaagucauuggugguugguccacaccuaacuccaaaucgcaggucaauagacaggucauaguagacaacaauaauuggucugguuacucugguauuuucucuguugagggcaaaagcugcaucaauaggugcuuuuauguggaguugauaaggggaaggucacaggagacuagaguaugguggaccucaaacaguauuguuguguucuguggcacuucagguacuuauggaacaggcucauggccugauggggcgaacaucaauuucaugccuauauaa

SEQ ID NO: 47833 - RNA, 1410 nt, Artificial Sequence
  derived and/or modified CDS sequence (wt) from neuraminidase__InfluenzaA__ABQ01369
augaauccaaaucaaaagauaauaacaauuggcucugucucucucaccauugcaacaauaugcuucgucaugcagauugccauccugguaacuacuguaacauugcauuucaagcaauaugagugcgacuccccagcgaacaaccaaguaaugccgugugaaccaauaauaauagaaaggaacauaacagagauaguguauuugacuaacaccaccauagaaaaagagauaugccccaaauuaguggaauacaggaauuggucaaagccacaauguaaaauuacaggauuugcaccuuucucuaaggacaauucaauucggcuuucugcugguggggacauuugggugacgagagaaccuuaugugucaugcgauccuggcaaguguuaucaauuugcacucgggcaggggaccacacuagacaacaaacauucaaaugacacaauacaugauagaaccccucaucgaacccuauugaugaaugaguuggguguuccauuucacuugggaaccaggcaaguguguauagcaugguccagcucaaguugucacgauggaaaagcauggcugcauguuugugucacuggguaugauaaaaaugcaacugcuagcuucauuuacgaugggaggcuuguagacagcauugguucauggucucaaaauauccucaggacccaggagucggaauguguuuguaucaaugggacuuguacaguaguaaugacugauggaagugcuucaggaagagcugauacuaaaauacuauucauugaagaggggaaaauuguucauacuagcccauugucaggaagugcucagcauguagaggaguguuccuguuauccucgauauccuggugucagauguaucugcagagacaacuggaaaggcucuaauaggccagucguagauauaaaugugaaagauuauagcauugauuccaguuaugugugcucagggcuugugggcgacacacccagaaaaaacgacagaucuagcaguagcuauugccggaauccuaacaaugaaaaagggacucacggagugaaaggcugggccuuugacgauggaaaugacguguggaugggaagaacgaucagcgaggauucacgcucagguuaugaaaccuucaaagucauuggugguugguccacaccuaacuccaaauugcagauaaauaggcaagucauaguugacagcgauaauaggucagguuauucugguauuuucucuguugagggcaaaagcugcaucaauaggugcuuuuauguggaguugauaaggggaagggaacaggaaacuagaguaugguggaccucaaacaguauuguuguguuuuguggcacuucggguaccuauggaacaggcucauggccugauggggcggacaucaaucucaugccuauauaa

SEQ ID NO: 47834 - RNA, 1410 nt, Artificial Sequence
  derived and/or modified CDS sequence (wt) from neuraminidase__InfluenzaA__ABQ44386
augaauccaaaucaaaagauaauaacgauuggcucuguuucucucaccauugccacaauaugcuuccuuaugcaaauugccauccugguaacuacuguaacguugcauuucaagcaauaugaaugcaacucccccccaaacaaccaagugaugcugugugaaccaacaauaauagaaagaaacauaacagagauaguguaucugaccaacaccaccauagagaaggaaauaugccccaaacuagcagaauacagaaauuggucaaagccgcaauguaacauuacaggauuugcaccuuuuucuaaggacaauucgauucggcuuuccgcugguggggacaucugggugacaagagaaccuuaugugucaugcgauccugacaaguguuaucaauuugcccuuggacagggaacaacacuaaacaacgggcauucaaaugacacaguacaugauaggaccccuuaucgaacccuauugaugaaugaguuggguguuccauuucauuugggaaccaagcaagugugcauagcaugguccagcucaaguugucacgauggaaaagcauggcugcauguuuguguaacgggggaugaugaaaaugcaacugcuagcuucauuuacaaugggaggcuuguagauaguaucgguucaugguccaaaaaaauccucaggacccaggagucggaaugcguuuguaucaauggaacuuguacaguaguaaugacugaugggagugcuucaggaaaagcugauacuaaaauacuauucauugaggaggggaaaaucguucauacuagcucauugucaggaagugcucagcaugucgaggagugcuccuguuauccucgauauccuggugucagaugugucugcagagacaacuggaaaggcuccaauaggcccaucguagauauaaauguaaaggauuauagcauuguuuccaguuaugugugcucaggacuuguuggagacacacccagaaaaaacgacagcuccagcaguagccauugcuuggauccuaacaaugaggaagguggucauggagugaaaggcugggccuuugaugauggaaaugacguguggaugggaagaacgaucagcgagaaguuacgcucaggauaugaaaccuucaaagucauugaaggcugguccaaaccuaacuccaaauugcagauaaauaggcaagucauaguugacagagguaauagguccgguuauucugguauuuucucuguugaaagcaaaagcugcaucaauaggugcuuuuauguggaguugauaaggggaaggaaacaggaaaaugaagucuuguggaccucaaacaguauuguuguguuuuguggcaccucagguacauauggaacaggcucauggccugauggggcggacaucaaucucaugccuauauaa

SEQ ID NO: 47835 - RNA, 1410 nt, Artificial Sequence; identical to SEQ ID NO: 47401
  derived and/or modified CDS sequence (wt) from neuraminidase__InfluenzaA__ABQ44408

SEQ ID NO: 47836 - RNA, 1413 nt, Artificial Sequence
  derived and/or modified CDS sequence (wt) from neuraminidase__InfluenzaA__ABQ44419
augaauccaaaucagaaaauaauaaccauaggaucaaucuguauggcaauaggaauaauuagucuaauauugcaaauaggaaauauuguuucaauauggaucagccacucaauccaaaauggaagucaaaacuacacuggaauaugcaaccaaagaaucauuaccuaugaaaauagcaccuggguaaaucaaacauauguuaauaucaacaacacuaauguuguugcuggacaggacacaacuucaguggcauuagccggcaauucaucucuuuguccuaucagugggugggcuauauacagcaaagacaacagcauaagaauugguuccaaaggagauguuuuugucauaagagaaccuuuuauaucauguucucacuuggaaugcagaaccuuuuuucugacccaaggugcucuauuaaaugacaagcauucaaacggaaccguuaaggacagaagcccuuauagggccuuaaugagcuguccuauaggugaagcuccaucucccuacaauucaagguuugaaucaguugcuuggucagcaagcgcaugucaugauggcaugggcuggcuaacaaucggaauuucugguccagaugauggagcaguggcuguacuaaaauacaacgguauaauaacugaaaccauaaaaaguuggaggaagcgaauauuaagaacacaagagucugaaugugucuguguaaacgguucauguuuuaccauaaugaccgauggcccgaauaaugggccugccucguacaaaaucuucaaaaucgagaaggggaagauuacuaaaucaauagaguuggaugcacccaauucucauuacgaggaauguuccuguuacccagacgccggcacagugaugugugugugcagagacaauuggcaugguucgaaucgaccuugggugucuuuuaaucaaaaccuggauuaucaaauaggauacaucugcagugguguuuuuggugacaauccgcgucccaaagauggaaaaggcagcugugguccaguaacuguugauggagcagacggaguaaagggguuuucauacagguaugguaaugguguuuggauaggaaggacuaaaaguaacagcuccagaagaggauuugagaugauuugggauccuaauggauggacagauaccgauaguaaauucuuagugaaacaggauguaguggcaaugacugauuggucaggguacagcggaagcuucguucaacauccugaacuaacaggauuggauuguaugaggccuugcuucuggguugaauugaucagaggacgaccuagagaaaauacaacaaucuggacuagugggagcagcauuucuuuuuguggagugaauggugauacugcaaauuggucuuggccagacggugccgaguugccauucaccauugacaaguag

SEQ ID NO: 47837 - RNA, 1410 nt, Artificial Sequence; identical to SEQ ID NO: 46358
  derived and/or modified CDS sequence (wt) from neuraminidase__InfluenzaA__ABQ44430

SEQ ID NO: 47838 - RNA, 1410 nt, Artificial Sequence; identical to SEQ ID NO: 47788
  derived and/or modified CDS sequence (wt) from neuraminidase__InfluenzaA__ABQ44441

SEQ ID NO: 47839 - RNA, 1410 nt, Artificial Sequence; identical to SEQ ID NO: 47772
  derived and/or modified CDS sequence (wt) from neuraminidase__InfluenzaA__ABQ44463

SEQ ID NO: 47840 - RNA, 1413 nt, Artificial Sequence
  derived and/or modified CDS sequence (wt) from neuraminidase__InfluenzaA__ABQ44474
augaauccaaaucagaaaauaauaaccauuggaucaaucuguaugacaaucggaacaauuagucuaauauugcaaauagggaauauuaucucaauauggguuagccacucaauucaaacuggaagucaaaaccauacuggaauaugcaaccaaagaaucauuaccuaugaaaauaacaccuggguaaaucaaacauauguuaauauuagcaacacuaauguuguugcuggaaaggacacaacgucaaugauauuagccggcaauucaucucuuuguccuauccgugggugggcuauauacagcaaagacaacagcauaagaauugguuccaaaggagauguuuuugucauaagagaaccuuuuauaucaugcucucacuuggaaugcagaaccuuuuuucugacccaaggcgcucuauuaaaugacaagcauucaaaugggaccguuaaagacagaagcccuuauagggccuuaaugagcuguccuaucggugaagcuccgucuccguacaauucaagauuugaaucgguugcuuggucagcgagugcaugucaugauggcaugggcuggcuaacuaucggaauuucugguccagaugauggagcaguggcuguauuaaaauacaacggcauaauaacugaaaucauaaaaaguuggaggaagcaaauauuaagaacacaagagucugaaugugucuguguaaacgguucauguuuuaccauaaugaccgauggcccgagugaugggccggccucguacagaaucuucaaaaucgagaaggggaagauuacuaaaucaauagaguuggaugcaccuaauucucauuacgaggaauguuccuguuacccagacaccggcaaagugaugugugugugcagagacaauuggcaugguucgaaucgaccaugggugucuuuuaaucaaaaccuggauuaucaaauaggauacaucugcagugggguuuucggugacaauccgcgucccaaagauggaaaaggcagcugugauccaguaaauguugauggagcagacggaguaaagggguuuucauacagguaugguaaugguguuuggauaggaaggacuaaaaguaacaguuccagaaagggguuugagaugauuugggauccuaauggguggacagauaccgaugguaauuucuuagugaaacaggauguaguggcaaugacugauuggucaggguauagcggaaguuucguucaacauccugagcuaacaggauuggacuguaugaggccuugcuucuggguugaauuaaucagaggacgacccagagaaaaaacaacaaucuggacuagugggagcagcauuucuuuuuguggcgugaauagugauacuguaaauuggucuuggccagacggugccgaguugccauucaccauugacaaguag

SEQ ID NO: 47841 - RNA, 1410 nt, Artificial Sequence; identical to SEQ ID NO: 46107
  derived and/or modified CDS sequence (wt) from neuraminidase__InfluenzaA__ABR15800

SEQ ID NO: 47842 - RNA, 1413 nt, Artificial Sequence
  derived and/or modified CDS sequence (wt) from neuraminidase__InfluenzaA__ABR15811
augaauccaaaucagaaaauaauaaccauuggaucaaucuguauggcaaucggaacaauuagucuaauauugcaaauagggaauauuaucucaauauggguuagccacucaauucaaacuggaagucaaaaccauacuggaauaugcaaccaaagaaucauuaccuaugaaaauaacaccuggguaaaucaaacauauguuaauauuagcaacacuaauguuguugcuggaaaggacacaacuucaaugauauuagccggcaauucaucucuuuguccuauccgugggugggcuauauacagcaaagacaacagcauaagaauugguuccaaaggagauguuuuugucauaagagaaccuuuuauaucaugcucucacuuggaaugcagaaccuuuuuucugacccaaggcgcucuauuaaaugacaagcauucaaaugggaccguuaaagacagaagcccuuauagggccuuaaugagcuguccuaucggugaagcuccgucuccguacaauucaagauuugaaucgguugcuuggucagcgagugcaugucaugauggcaugggcuggcuaacuaucggaauuucugguccagaugauggagcaguggcuguauuaaaauacaacggcauaauaacugaaaucauaaaaaguuggaggaagcaaauauuaagaacacaagagucugaaugugucuguguaaacgguucauguuuuaccauaaugaccgauggcccgagugaugggccggccucguacagaaucuucaaaaucgagaaggggaagauuacuaaaucaauagaguuggaugcaccuaauucucauuacgaggaauguuccuguuacccagacaccggcaaagugaugugugugugcagagacaauuggcaugguucgaaucgaccaugggugucuuuuaaucaaaaccuggauuaucaaauaggauacaucugcagugggguuuucggugacaauccgcgucccaaagauggaaaaggcagcugugauccaguaaauguugauggagcagacggaguaaagggguuuucauacagguaugguaaugguguuuggauaggaaggacuaaaaguaacaguuccagaaagggguuugagaugauuugggauccuaauggguggacagauaccgaugguaauuucuuagugaaacaggauguaguggcaaugacugauuggucaggguauagcggaaguuucguucaacauccugagcuaacaggauuggacuguaugaggccuugcuucuggguugaauuaaucagaggacgacccagagaaaaaacaacaaucuggacuagugggagcagcauuucuuuuuguggcgugaauagugauacuguaaauuggucuuggccagacggugccgaguugcccuucaccauugacaaguag

SEQ ID NO: 47843 - RNA, 1413 nt, Artificial Sequence; identical to SEQ ID NO: 46891
  derived and/or modified CDS sequence (wt) from neuraminidase__InfluenzaA__ABR15910

SEQ ID NO: 47844 - RNA, 1410 nt, Artificial Sequence; identical to SEQ ID NO: 47213
  derived and/or modified CDS sequence (wt) from neuraminidase__InfluenzaA__ABR15932

SEQ ID NO: 47845 - RNA, 1410 nt, Artificial Sequence
  derived and/or modified CDS sequence (wt) from neuraminidase__InfluenzaA__ABR15943
augaauccaaaucaaaagauaauaacaauuggcucuguuucucucaccauugccacaauaugcuuccuuaugcaaauugccauccugguaacuacuguaacauugcauuucaggcaguaugaaugcaacucccccccaaacaaccaaguaaugcugugugaaccaacaauaauagaaagaaacauaacagagauaguguaucugaccaacaccaccauagagaaggaaauaugccccaaauuagcagaauacagaaauuggucaaagccgcaauguaacauuacaggauuugcaccuuuuucuaaggacaauucgauucggcuuuccgcugguggggacaucugggugacaagagaaccuuaugugucaugcgauccugacaaguguuaucaauuugcccuugggcagggaacaacacuaaacaacgggcauucaaaugacacaguacaugauaggaccccuuaccggacccuauugaugaaugaauuggguguuccauuucauuugggaaccaggcaagugugcauagcaugguccagcucaaguugucacgauggaaaagcauggcugcauguuuguguaacuggggaugaugaaaaugcaacugcuagcuucauuuacaaugggaggcuuguagauaguauugguucaugguccaaaaaaauacucagaacccaggagucggaaugcguuuguaucaauggaacuuguacaguaguaaugacugaugggagcgcuucaggaaaagcugauacuaaaauacuauucauugaggaggggaaaaucguucauauuagcacauugucaggaagugcucagcaugucgaggagugcuccuguuauccucgguauccuggugucagaugugucugcagagacaacuggaaaggcuccaauaggcccaucguagauauaaauguaaaggauuauagcauuguuuccaguuaugugugcucaggacuuguuggagacacacccagaaaaaacgacagcuucagcaguagccauugccuagauccuaacaaugaggaagguggucauggagugaaaggcugggccuuugaugauggaaaugacguguggaugggaagaacgaucagcgagaaguuacgcucagguuaugaaaccuucaaagucaucgaaggcugguccaaaccuaacuccaaauuacagacaaauaggcaagucauaguugaaagagguaacagguccgguuauucugguauuuucuccguugaaggcaaaagcugcaucaaucggugcuuuuauguggaguugauaaggggaaggaaagaggaaacugaagucugguggaccucaaacaguauuguuguguuuuguggcaccucagguacauauggaacaggcucauggccugauggggcggauaucaaucucaugccuauauaa

SEQ ID NO: 47846 - RNA, 1410 nt, Artificial Sequence
  derived and/or modified CDS sequence (wt) from neuraminidase__InfluenzaA__ABR15954
augaauccaaaucaaaagauaauaacaauuggcucuguuucucucaccauugccacaauaugcuuccuuaugcaaauugccauccugguaacuacuguaacauugcauuucaagcaguaugaaugcaacucccccccaaacaaccaaguaaugcugugugaaccaacaauaauagaaagaaacauaacagagauaguguaucugaccaacaccaccauagagaaggaaauaugccccaaauuagcagaauacagaaauuggucaaagccgcaauguaacauuacaggauuugcaccuuuuucuaaggacaauucgauucggcuuuccgcugguggggacaucugggugacaagagaaccuuaugugucaugugauccugacaaguguuaucaauuugcccuugggcagggaacaacacuaaacaacgggcauucaaaugacacaguacaugauaggaccccuuaccggacccuauugaugaaugaauuggguguuccauuucauuugggaaccaggcaagugugcauagcaugguccagcucaaguugucacgauggaaaagcauggcugcauguuuguguaacuggggaugaugaaaaugcaacugcuagcuucauuuacaaugggaggcuuguagauaguauugguucaugguccaaaaaaauacucagaacccaggagucggaaugcguuuguaucaauggaacuuguacaguaguaaugacugaugggagcgcuucaggaaaagcugauacuaaaauacuauucauugaggaggggaaaaucguucauauuagcacauugucaggaagugcucagcaugucgaggagugcuccuguuauccucgauauccuggugucagaugugucugcagagacaacuggaaaggcuccaauaggcccaucguagauauaaauguaaaggauuauagcauuguuuccaguuaugugugcucaggacuuguuggagacacacccagaaaaaacaacagcuucagcaguagccauugccuagauccuaacaaugaggaagguggucauggagugaaaggcugggccuuugaugauggaaaugacguguggaugggaagaacgaucagcgagaaguuacgcucagguuaugaaaccuucaaagucaucgaaggcugguccaaaccuaacuccaaauuacagacaaauaggcaagucauaguugaaagagguaacagguccgguuauucugguauuuucuccguugaaggcaaaagcugcaucaaucggugcuuuuauguggaguugauaaggggaaggaaagaggaaacugaagucugguggaccucaaacaguauuguuguguuuuguggcaccucagguacauauggaacaggcucauggccugauggggcggauaucaaucucaugccuauauaa

SEQ ID NO: 47847 - RNA, 1410 nt, Artificial Sequence; identical to SEQ ID NO: 46194
  derived and/or modified CDS sequence (wt) from neuraminidase__InfluenzaA__ABR15965

SEQ ID NO: 47848 - RNA, 1410 nt, Artificial Sequence
  derived and/or modified CDS sequence (wt) from neuraminidase__InfluenzaA__ABR22243
augaauccaaaucaaaagauaauaacgauuggcucuguuucucucaccauugccacaauaugcuuccuuaugcaaauugccauccugguaacuacuguaacauugcauuucaagcaauaugaaugcaacucccccccaaacaaccaagugaugcugugugaaccaacaauaauagaaagaaacauaacagagauaguguaucugaccaacaccaccauagagaaggaaauaugccccaaacuagcagaauacagaaauuggucaaagccgcaauguaacauuacaggauuugcaccuuuuucuaaggacaauucgauucggcuuuccgcugguggggacaucugggugacaagagaaccuuacgugucaugcgauccugacaaguguuaucaauuugcccuuggacagggaacaacacuaaacaacgggcauucaaaugacacaguacaugauaggaccccuuaucggacccuauugaugaaugaguuggguguuccauuucauuugggaaccaagcaagugugcauagcaugguccagcucaaguugucacgauggaaaagcauggcugcauguuuguguaacgggggaugaugaaaaugcaacugcuagcuucauuuacaaugggaggcuuguagauaguauugguucaugguccaaaaaaauccucaggacccaggagucggaaugcguuuguaucaauggaacuuguacaguaguaaugacugaugggagugcuucaggaaaagcugauacuaaaauacuauucauugaggaggggaaaaucguucauacuagcccauugucaggaagugcucagcaugucgaggagugcuccuguuauccucgauauccuggugucagaugugucugcagagacaacuggaaaggcuccaauaggcccaucguagauauaaauguaaaggauuauagcauuguuuccaguuaugugugcucaggacuuguuggagacacacccagaaaaaccgacagcuccagcaguagccauugcuuggauccuaacaaugaggaagguggucauggagugaaaggcugggccuuugaugauggaaaugacguguggaugggaagaacgaucagcgagaagucacgcucaggauaugaaaccuucaaagucauugaaggcugguccaaaccuaacuccaaauugcagauaaauaggcaagucauaguugacagagguaauagguccgguuauucugguauuuucucuguugaaggcaaaagcugcaucaaucggugcuuuuauguggaguugauaaggggaaggaaacaggaaacugaagucuuguggaccucaaacaguauuguuguguuuuguggcaccucagguacauauggaacaggcucauggccugauggggcggaccucaaucucaugccuauauaa

SEQ ID NO: 47849 - RNA, 1410 nt, Artificial Sequence
  derived and/or modified CDS sequence (wt) from neuraminidase__InfluenzaA__ABR28518
augaauccaaaucaaaagauaauaacgauuggcucuguuucucucaccauugccacaauaugcuuccuuaugcaaauugccauccugguaacuacuguaacguugcauuucaagcaauaugaaugcaacucccccccaaacaaccaagugaugcugugugaaccaacaauaauagaaagaaacauaacagagauaguguaucugaccaacaccaccauagagaaggaaauaugccccaaacuagcagaauacagaaauuggucaaagccgcaauguaacauuacaggauuugcaccuuuuucuaaggacaauucgauucggcuuuccgcugguggggacaucugggugacaagagaaccuuaugugucaugcgauccugacaaguguuaucaauuugcccuuggacagggaacaacacuaaacaacgggcauucaaaugacacaguacaugauaggaccccuuaucgaacccuauugaugaaugaguuggguguuccauuucauuugggaaccaagcaagugugcauagcaugguccagcucaaguugucacgauggaaaagcauggcugcauguuuguguaacgggggaugaugaaaaugcaacugcuagcuucauuuacaaugggaggcuuguagauaguaucgguucaugguccaaaaaaauccucaggacccaggagucggaaugcguuuguaucaauggaacuuguacaguaguaaugacugaugggagugcuucaggaaaagcugauacuaaaauacuauucauugaggaggggaaaaucguucauacuagcucauugucaggaagugcucagcaugucgaggagugcuccuguuauccucgauauccuggugucagaugugucugcagagacaacuggaaaggcuccaauaggcccaucguagauauaaauguaaaggauuauagcauuguuuccaguuaugugugcucaggacuuguuggagacacacccagaaaaaacgacagcuccagcagcagccauugcuuggauccuaacaaugaggaagguggucauggagugaaaggcugggccuuugaugauggaaaugacguguggaugggaagaacgaucagcgagaaguuacgcucaggauaugaaaccuucaaagucauugaaggcugguccaaaccuaacuccaaauugcagauaaauaggcaagucauaguugacagagguaauagguccgguuauucugguauuuucucuguugaaagcaaaagcugcaucaauaggugcuuuuauguggaguugauaaggggaaggaaacaggaaacugaagucuuguggaccucaaacaguauuguuguguuuuguggcaccucagguacauauggaacaggcucauggccugauggggcggacaucaaucucaugccuauauaa

SEQ ID NO: 47850 - RNA, 1410 nt, Artificial Sequence; identical to SEQ ID NO: 46588
  derived and/or modified CDS sequence (wt) from neuraminidase__InfluenzaA__ABR28595

SEQ ID NO: 47851 - RNA, 1413 nt, Artificial Sequence
  derived and/or modified CDS sequence (wt) from neuraminidase__InfluenzaA__ABR28771
augaauccaaaucaaaaaauaauaaccauuggaucaaucaguauagcaaucggaauaauuagucuaauguugcaaauaggaaauauuauuucaauaugggcuagucacucaauccaaacuggaagucaaaaccacacuggaauaugcaaccaaagaaucaucacauaugaaaacagcaccugggugaaucacacauauguuaauauuaacaacacuaauguuguugcuggaaaggacaaaacuucagugacauuggccggcaauucaucucuuuguuccaucaguggaugggcuauauacacaaaagacaacagcauaagaauuggauccaaaggagauguuuuugucauaagagaaccuuucauaucauguucucacuuggaaugcagaaccuuuuuucugacccaaggugcucuauuaaaugacaaacauucaaaugggaccguuaaggacagaaguccuuauagggccuuaaugagcugcccucuaggugaagcuccguccccauacaauucaaaguuugaaucaguugcauggucagcaagcgcaugccaugauggcaugggcugguuaacaaucggaauuucugguccagacaauggagcuguggcuguacuaaaauacaacggcauaauaacugaaaccauaaaaaguuggaaaaagcgaauauuaagaacacaagagucugaaugugucugugugaacgggucauguuucaccauaaugaccgauggcccgaguaauggggccgccucguacaaaaucuucaagaucgaaaaggggaagguuacuaaaucaagagaguugaaugcacccaauuuucauuaugaggaauguuccuguuacccagacacuggcacagugauguguguaugcagggacaacuggcaugguucaaaucgaccuugggugucuuuuaaucaaaaccuggauuaucaaauaggauacaucugcagugggguguucggugacaauccgcgucccaaagauggagagggcagcuguaauccagugacuguugauggagcagacggaguaaagggguuuucauacaaauaugguaaugguguuuggauaggaaggacuaaaaguaacagacuuagaaagggguuugagaugauuugggauccuaauggauggacagauaccgacaguaauuucucagugaaacaggauguuguggcaauaacugauuggucaggguacagcggaaguuucguucaacauccugaguuaacaggauuggacuguauaagaccuugcuucuggguugaguuagucagaggacugccuagagaaaauacaacaaucuggacuagugggagcagcauuucuuuuuguggcguaaauagugauacugcaaacuggucuuggccagacggugcugaguugccguucaccauugacaaguag

SEQ ID NO: 47852 - RNA, 1413 nt, Artificial Sequence
  derived and/or modified CDS sequence (wt) from neuraminidase__InfluenzaA__ABR28782
augaauccaaaucaaaaaauaauaaccauuggaucaaucaguauagcaaucggaauacuuagucuaauguugcaaauaggaaauauuauuucaauaugggcuagucacucaauccaaacuggaagucaaaaccacacuggaauaugcaaccaaagaaucaucacauaugaaaacagcaccugggugaaucacacauauguuaauauuaacaacacuaauguuguugcuggaaaggacaaaacuucagugacauuggccggcaauucaucucuuuguuccaucaguggaugggcuauauacacaaaagacaacagcauaagaauuggauccaaaggagauguuuuugucauaagagaaccuuucauaucauguucucacuuggaaugcagaaccuuuuuucugacccaaggugcucuauuaaaugacaaacauucaaaugggaccguuaaggacagaaguccuuauagggccuuaaugagcugcccucuaggugaagcuccguccccauacaauucaaaguuugaaucaguugcauggucagcaagcgcaugccaugauggcaugggcugguuaacaaucggaauuucugguccagacaauggagcuguggcuguacuaaaauacaacggcauaauaacugaaaccauaaaaaguuggaaaaagcgaauauuaagaacacaagagucugaaugugucugugugaacgggucauguuucaccauaaugaccgauggcccgaguaauggggccgccucguacaaaaucuucaagaucgaaaaggggaagguuacuaaaucaauagaguugaaugcacccaauuuucauuaugaggaauguuccuguuacccagacacuggcacagugauguguguaugcagggacaacuggcaugguucaaaucgaccuugggugucuuuuaaucaaaaccuggauuaucaaauaggauacaucugcagugggguguucggugacaauccgcgucccaaagauggagagggcagcuguaauccagugacuguugauggagcagacggaguaaagggguuuucauacaaauaugguaaugguguuuggauaggaaggacuaaaaguaacagacuuagaaagggguuugagaugauuugggauccuaauggauggacagauaccgacaguaauuucucagugaaacaggauguuguggcaauaacugauuggucaggguacagcggaaguuucguucaacauccugaguuaacaggauuggacuguauaagaccuugcuucuggguugaguuagucagaggacugccuagagaaaauacaacaaucuggacuagugggagcagcauuucuuuuuguggcguaaauagugauacugcaaacuggucuuggccagacggugcugaguugccguucaccauugacaaguag

SEQ ID NO: 47853 - RNA, 1410 nt, Artificial Sequence; identical to SEQ ID NO: 46856
  derived and/or modified CDS sequence (wt) from neuraminidase__InfluenzaA__ABR28793

SEQ ID NO: 47854 - RNA, 1413 nt, Artificial Sequence; identical to SEQ ID NO: 46889
  derived and/or modified CDS sequence (wt) from neuraminidase__InfluenzaA__ABR28804

SEQ ID NO: 47855 - RNA, 1410 nt, Artificial Sequence; identical to SEQ ID NO: 46755
  derived and/or modified CDS sequence (wt) from neuraminidase__InfluenzaA__ABR28815

SEQ ID NO: 47856 - RNA, 1410 nt, Artificial Sequence; identical to SEQ ID NO: 47213
  derived and/or modified CDS sequence (wt) from neuraminidase__InfluenzaA__ABR28826

SEQ ID NO: 47857 - RNA, 1413 nt, Artificial Sequence
  derived and/or modified CDS sequence (wt) from neuraminidase__InfluenzaA__ABR28837
augaauccaaaucaaaaaauaauaaccauuggaucaaucaguauagcaaucggaauaauuagccuaauguugcaaauaggaaacauuauuucaauaugggcuagucacucaauccaaacuggaagucaaaaccacacuggaguaugcaaccaaagaaucaucacauaugaaaacagcaccugggugaaucacacauauguuaauauuaacaacaccaauguuauugcuggaaaggacaaaacuucagugacauuggccggcaauucaucccuuuguucuaucaguggaugggcuauauacacaaaagacaacagcauaagaauugguuccaaaggagauguuuuugucauaagagagccuuucauaucauguucucacuuggaaugcagaaccuuuuuucugacccaaggugcucuauuaaaugacaaacauucaaaugggaccguuaaggacagaagccccuauagggcuuuaaugagcuguccucuaggugaagcuccguccccauacaauucaaaguuugaaucaguugcuuggucagcaagcgcaugccaugauggcaugggcugguuaacaaucggaauuucugguccagacaauggagcaguggcuguacuaaaauacaacggcauaauaacugaaaccauaaaaaguuggaaaaagcaaauauuaagaacacaagagucugaaugugucugugugaacgggucauguuucaccauaaugaccgaugguccgaguaauggggccgccucguacaaaaucuucaagaucgaaaagggaaagguuacuaaaucaauagaguugaaugcacccaauuuucauuaugaggaauguuccuguuacccagacacuggcacagugauguguguaugcagggacaacuggcaugguucaaaucgacccugggugucuuuuaaucaaaaccuggauuaucaaauaggauacaucugcagugggguguucggugacaauccgcgucccaaagauggagagggcagcuguaauccagugacuguugauggagcaaacggaguaaagggguuuucauacaaauaugguaaugguguuuggauaggaaggacuaaaaguaacagacuuagaaagggguuugagaugauuugggauccuaauggauggacagauaccgacagugauuucucagugaaacaggauguuguggcaauaacugauuggucuggguacagcggaaguuucguucaacauccugaguuaacaggauuggacuguauaagaccuugcuucuggguugaguuagucagaggacugccaaaagaaaauacaacaaucuggacuagugggagcagcauuucuuuuuguggcguaaauagugauacugcaaacuggucuuggccagacggugcugaguugccguuuaccauugacaaguag

SEQ ID NO: 47858 - RNA, 1413 nt, Artificial Sequence
  derived and/or modified CDS sequence (wt) from neuraminidase__InfluenzaA__ABR28848
augaauccaaaucaaaaaauaauaaccauuggaucaaucaguauagcaaucggaauaauuagccuaauguugcaaauaggaaacauuauuucaauaugggcuagucacucaauccaaacuggaagucaaaaccacacuggaguaugcaaccaaagaaucaucacauaugaaaacagcaccugggugaaucacacauauguuaauauuaacaacaccaauguuauuguuggaaaggacaaaacuucagugacauuggccggcaauucaucucuuuguucuaucaguggaugggcuauauacacaaaagacaacagcauaagaauugguuccaaaggagauguuuuugucauaagagagccuuucauaucauguucucacuuggaaugcagaaccuuuuuucugacccaaggugcucuauuaaaugacaaacauucaaaugggaccguuaaggacagaagccccuauagggcuuuaaugagcuguccucuaggugaagcuccguccccauacaauucaaaguuugaaucaguugcuuggucagcaagcgcaugccaugauggcaugggcugguuaacaaucggaauuucugguccagacaauggagcaguggcuguacuaaaauacaacggcauaauaacugaaaccauaaaaaguuggaaaaagcaaauauuaagaacacaagagucugaaugugucugugugaacgggucauguuucaccauaaugaccgauggcccgaguaauggggccgccucguacaaaaucuucaagaucgaaaagggaaagauuacuaaaucaauagaguugaaugcacccaauuuucauuaugaggaauguuccuguuacccagacacuggcacagugauguguguaugcagggacaacuggcaugguucaaaucgacccugggugucuuuuaaucaaaaccuggauuaucaaauaggauacaucugcagugggguguucggugacaauccgcgucccaaagauggagagggcagcuguaauccagugacuguugauggagcaaacggaguaaagggguuuucauacaaauaugguaaugguguuuggauaggaaggacuaaaaguaacagacuuagaaagggguuugagaugguuugggauccuaauggauggacagauaccgacagugauuucucagugaaacaggauguuguggcaauaacugauuggucuggguacagcggaaguuucguucaacauccugaguuaacaggauugaacuguauaagaccuugcuucuggguugaguuagucagaggacugccaaaagaaaauacaacaaucuggacuagugggagcagcauuucuuuuuguggcguaaauagugauacugcaaacuggucuuggccagacggugcugaguugccguuuaccauugacaaguag

SEQ ID NO: 47859 - RNA, 1410 nt, Artificial Sequence
  derived and/or modified CDS sequence (wt) from neuraminidase__InfluenzaA__ABR28859
augaauccaaaucaaaagauaauaacaauuggcucuguuucucucaccauugccacaauaugcuuccuuaugcaaauugccauccugguaacuacuguaacauugcauuucaagcaguaugaaugcaacucccccccaaacaaccaaguaaugcugugugaaccaacaauaauagaaagaaacauaacagagauaguguaucugaccaauaccaccauagagaaggaaauaugccccaaauuagcagaauacagaaauuggucaaagccgcaauguaacauuacaggauuugcaccuuuuucuaaggacaauucgauucggcuuuccgcugguggggacaucugggugacaagagaacccuaugugucaugcgauccugacaaguguuaucaauuugcccuugggcagggaacaacacuaaacaacgggcauucaaaugacacaguacaugguaggaccccuuaccggacccuauugaugaaugaauuggguguuccauuucauuugggaaccaggcaagugugcauagcaugguccagcucaaguugucacgauggaaaagcauggcugcauguuuguguaacuggggaugaugaaaaugcaacugcuagcuucauuuacaaugggaggcuuguagauaguauugguucaugguccaaaaaaauacucagaacccaggagucggaaugcguuuguaucaauggaacuuguacaguaguaaugacugaugggagcgcuucaggaaaagcugauacuaaaauacuauucauugaggaggggaaaaucguucauauuagcacauugucaggaagugcucagcaugucgaggagugcuccuguuauccucgauauccuggugucagaugugucugcagagacaacuggaaaggcuccaauaggcccaucguagauauaaauguaaaggauuauagcauuguuuccaguuaugugugcucaggacuuguuggagacacacccagaaaaaacgacagcuucagcaguagccauugccuagauccuaacaaugaggaagguggucauggagugaaaggcugggccuuugaugauggaaaugacguguggaugggaagaacgaucagcgagaaguuacgcucagguuaugaaaccuucaaagucaucgaaggcugguccaaaccuaacuccaaauuacagauaaauaggcaagucauaguugaaagagguaacagguccgguuauucugguauuuucuccguugaaggcaaaagcugcaucaaucggugcuuuuauguggaguugauaaggggaaggaaagaggaaacugaagucugguggaccucaaacaguauuguuguguuuuguggcaccucagguacauauggaacaggcucauggccugauggggcggauaucaaucucaugccuauauaa

SEQ ID NO: 47860 - RNA, 1410 nt, Artificial Sequence
  derived and/or modified CDS sequence (wt) from neuraminidase__InfluenzaA__ABR28870
augaauccaaaucaaaagauaauaacaauuggcucuguuucucucaccauugccacaauaugcuuccuuaugcaaauugccauccugguaacuacuguaacauugcauuucaagcaguaugaaugcaacucccccccaaacaaccaaguaaugcugugugaaccaacaauaauagaaagaaacauaacagagacaguguaucugaccaauaccaccauagagaaggaaauaugccccaaauuagcagaauacagaaauuggucaaagccgcaauguaacauuacaggauuugcaccuuuuucuaaggacaauucgauucggcuuuccgcugguggggacaucugggugacaagagaaccuuaugugucaugcgauccugacaaguguuaucaauuugcccuugggcagggaacaacacuaaacaacgggcauucaaaugacacaguacaugauaggaccccuuaccggacccuauugaugaaugaauuggguguuccauuucauuugggaaccaggcaagugugcauagcaugguccagcucaaguugucacgauggaaaagcauggcugcauguuuguguaacuggggaugaugaaaaugcaacugcuagcuucauuuacaaugggaggcuuguagauaguauugguucaugguccaaaaaaauacucagaacccaggagucggaaugcguuuguaucaauggaacuuguacaguaguaaugacugaugggagcgcuucaggaaaagcugauacuaaaauacuauucauugaggaggggaaaaucguucauauuagcacauugucaggaagugcucagcaugucgaggagugcuccuguuauccucgauauccuggugucagaugugucugcagagacaacuggaaaggcuccaauaggcccaucguagauauaaauguaaaggauuauagcauuguuuccaguuaugugugcucaggacuuguuggagacacacccagaaaaaacgacagcuucagcaguagccauugccuagauccuaacaaugaggaagguggucauggagugaaaggcugggccuuugaugauggaaaugacguguggaugggaagaacgaucagcgagaaguuacgcucagguuaugaaaccuucaaagucaucgaaggcugguccaaaccuaacuccaaauuacagauaaauaggcaagucauaguugaaagagguaacagguccgguuauucugguauuuucuccguugaaggcaaaagcugcaucaaucggugcuuuuauguggaguugauaaggggaaggaaagaggaaacugaagucugguggaccucaaacaguauuguuguguuuuguggcaccucagguacauauggaacaggcucauggccugauggggcggauaucaaucucaugccuauauaa

SEQ ID NO: 47861 - RNA, 1410 nt, Artificial Sequence
  derived and/or modified CDS sequence (wt) from neuraminidase__InfluenzaA__ABR28881
augaauccaaaucaaaagauaauaacaauuggcucuguuucucucaccauugccacaguaugcuuccuuaugcaaauugccauccugguaacuacuguaacauugcauuucaagcaguaugaaugcaacucccccccaaacaaccaaguaaugcugugugaaccaacaauaauagaaagaaacauaacagagauaguguaucugaccaacaccaccauagagaaggaaauaugccccaaauuagcagaauacagaaauuggucaaagccgcaauguaacauuacaggauuugcaccuuuuucuaaggacaauucgauucggcuuuccgcugguggggacaucugggugacaagagaaccuuaugugucaugcgauccugacaaguguuaucaauuugcccuugggcagggaacaacacuaaacaacgggcauucaaaugacacaguacaugauaggaccccuuaccggacccuauugaugaaugaauuggguguuccauuucauuugggaaccaggcaagugugcauagcaugguccagcucaaguugucacgauggaaaagcauggcugcauguuuguguaacuggggaugaugaaaaugcaacugcuagcuucauuuacaaugggaggcuuguagauaguauugguucaugguccaaaaaaauacucagaacccaggagucggaaugcguuuguaucaauggaacuuguacaguaguaaugacugaugggagcgcuucaggaaaagcugauacuaaaauacuauucauugaggaggggaaaaucguucauauuagcacauugucaggaagugcucagcaugucgaggagugcuccuguuauccucgauauccuggugucagaugugucugcagagacaacuggaaaggcuccaauaggcccaucguagauauaaauguaaaggauuauagcauuguuuccaguuaugugugcucaggacuuguuggagacacacccagaaaaaacgacagcuucagcaguagccauugccuagauccuaacaaugaggaagguggucauggagugaaaggcugggccuuugaugauggaaaugacguguggaugggaagaacgaucagcgagaaguuacgcucagguuaugaaaccuucaaagucaucgaaggcugguccaaaccuaacuccaaauuacagacaaauaggcaagucauaguugaaagagguaacagguccgguuauucugguauuuucuccguugaaggcaaaagcugcaucaaucggugcuuuuauguggaguugauaaggggaaggaaagaggaaacugaagucugguggaccucaaacaguauuguuguguuuuguggcaccucagguacauauggaacaggcucauggccugauggggcggauaucaaucucaugccuauauaa

SEQ ID NO: 47862 - RNA, 1410 nt, Artificial Sequence; identical to SEQ ID NO: 47401
  derived and/or modified CDS sequence (wt) from neuraminidase__InfluenzaA__ABR28892

SEQ ID NO: 47863 - RNA, 1413 nt, Artificial Sequence
  derived and/or modified CDS sequence (wt) from neuraminidase__InfluenzaA__ABR28903
augaauccaaaucaaaaaauaauaaccauuggaucaaucaguauagcaaucggaauaauuagucuaauguugcaaauaggaaauauuauuucaauaugggcuagucacucaauccaaacuggaagucaaaaccacacuggaauaugcaaccaaagaaucaucacauaugaaaacagcaccugggugaaucacacauauguuaauauuaacaacacuaauguuguugcuggaaaggacaaaacuucagugacauuggccggcaauucaucucuuuguucuaucaguggaugggcuauauacacaaaagacaacagcauaagaauuggcucuaaaggagauguuuuugucauaagagaaccuuucauaucauguucucauuuggaaugcaggaccuuuuuucugacccaaggugcucuauuaaaugacaaacauucaaauggaaccguuaaggacagaaguccuuauagggccuuaaugagcuguccucuaggugaagcuccguccccauacaauucaaaguuugaaucaguugcauggucagcaagcgcaugccaugauggcaugggcugguuaacaaucggaauuucugguccagacaauggagcuguggcuguacuaaaauacaacggaauaauaacugaaaccauaaaaaguuggaaaaagcggauauugagaacacaagagucugaaugugucugugugaacgggucauguuucaccauaaugaccgauggcccgaguaauggggccgccucguacaaaaucuucaagaucgaaaaggggaagguuacuaaaucaauagaguuaaaugcacccaauuuucauuaugaggaauguuccuguuacccagacacuggcacagugauguguguaugcagggacaacuggcaugguucaaaucgaccuugggugucuuuuaaucaaaacuuggauuaucaaauaggauacaucugcaguggaguguucggugacaauccgcgucccaaagauggaaagggcagcuguaauccagugacuguugauggagcagacggaguuaagggguuuucauacaaauaugguaaugguguuuggauaggaaggacuaaaaguaacagacuuagaaagggguuugagaugauuugggauccuaauggauggacagauaccgacagugauuucucagugaaacaggauguuguggcaauaacugauuggucaggguacaguggaaguuucguucaacauccugaguuaacaggauuggacuguauaagaccuugcuucuggguugaguuagucagaggacugccuagagaaaauacaacaaucuggacuagugggagcagcauuucuuuuuguggcguugauagugauacugcaaacuggucuuggccagacggugcugaguugccguucaccauugacaaguag

SEQ ID NO: 47864 - RNA, 1410 nt, Artificial Sequence
  derived and/or modified CDS sequence (wt) from neuraminidase__InfluenzaA__ABR28925
augaauccaaaucaaaagauaauaacgauuggcucuguuucucucaccauuuccacaauaugcuucuuuaugcaaauugccaucuugauaacuacuguaacauugcauuucaagcaauaugaauucaacucccccccaaacaaccaagugaugcugugugaaccaacaauaauagaaagaaacauaacagagauaguguaucugaccaacaccaccauagagaaggaaauaugccccaaacuagcagaauacagaaauuggucaaagccgcaaugugacauuacaggauuugcaccuuuuucuaaggacaauucgauuaggcuuuccgcugguggggacaucugggugacaagagaaccuuaugugucaugcgauccugacaaauguuaucaauuugcccuuggacagggaacaacacuaaacaacgugcauucaaaugacacagugcaugauaggaccccuuaucggacccuauugaugaaugaguuagguguuccauuucaucuggggacuaagcaagugugcauagcaugguccagcucaaguugucacgauggaaaagcauggcugcauguuuguguaacgggggaugauaaaaaugcaacugcuagcuucauuuacaaugggaggcuuguagauaguauuguuucaugguccaaagaaguccucagaacccaggagucagaaugcguuuguaucaauggaacuuguacaguaguaaugacugaugggagugcuucaggaaaagcugauacuaaaauacuauucauugaggaggggaaaaucguucauacuagcacauugucaggaagugcccagcaugucgaggagugcuccugcuauccucgauauccuggugucagaugugucugcagagacaacuggaaaggcuccaauaggcccaucguagauauaaacauaaaggauuacagcauuguuuccaguuaugugugcucaggacuuguuggagacacacccagaaaaaacgacagcuccagcaguagccauugcuuggauccuaacaaugaagaagguggucauggagugaaaggcugggccuuugaugauggaaaugacguguggaugggaagaacgaucagcgagaaguuacgcucaggauaugaaaccuucaaagucauugaaggcugguccaacccuaauuccaaauuacagauaaauaggcaagucauaguugacagagguaauagguccgguuauucugguauuuucucuguugaaggcaaaagcugcaucaaucggugcuuuuauguggaguugauaaggggaagaaaagaggaaacugaagucuuguggaccucaaacaguauuguuguguuuuguggcaccucagguacauauggaacaggcucauggccugauggggcggacaucaaucucaugccuauauaa

SEQ ID NO: 47865 - RNA, 1410 nt, Artificial Sequence
  derived and/or modified CDS sequence (wt) from neuraminidase__InfluenzaA__ABR88082
auggauccaaaucaaaagauaauaacgauuggcucuguuucucucaccauuuccacaauaugcuucuucaugcaaacugccaucuugauaacuacuguaacauugcauuucaagcaauaugaauucaacucccccccaaacaaccaagugaugcugugugaaccaacaauaauagaaagaaacauaacagagauaguguaucugaccaacaccaucauagagaaggaaauaugccccaaacuagcagaauacagaaauuggucaaagccgcaaugugacauuacaggauuugcaccuuuuucuaaggacaauucgauuaggcuuuccgcugguggggacaucugggugacaagagaaccuuaugugucaugcgauccugacaaguguuaucaauuugcccuuggacagggaacaacacuaaacaacgugcauucaaacgacacaguacaugauaggaccccuuaucggacccuauugaugaaugaguuagguguuccauuucaucugggaaccaagcaagugugcauagcaugguccagcucaaguugucacgauggaaaagcauggcugcauguuuguguaacgggggaugauaaaaaugcaacugcuagcuucauuuacaaugggaggcuuguagauaguguuguuucaugguccaaagauauccucaggacccaggagucagaaugcguuuguaucaauggaacuuguacaguaguaaugacugaugggagugcuucaggaaaagcugauacuaaaauacuauucauugaggaggggaaaaucguucauacuagcacauugucaggaagugcucagcaugucgaggagugcuccugcuauccucgauauccuggugucagaugugucugcagagacaacuggaaaggcuccaauaggcccauuguagauauaaacauaaagaauuauagcauuguuuccaguuaugugugcucaggacuuguuggagacacacccagaaaaaccgacagcuccagcaguagccauugcuuggauccuaacaaugaagaagguggucauggagugaaaggcugggccuuugaugauggaaaugacguguggaugggaagaacgaucagcgagaaguuacgcuuaggauaugaaaccuucaaagucauugaaggcugguccaacccuaauuccaaauugcagauaaauaggcaagucauaguugacagagguaauagguccgguuauucugguauuuucucuguugaaggcaaaagcugcaucaaucggugcuuuuauguggaguugauaaggggaagaaaagaggaaacugaagucuuguggaccucaaacaguauuguuguauuuuguggaaccucagguacauauggaacaggcucauggccugauggggcggacaucaaucucaugccuauauaa

SEQ ID NO: 47866 - RNA, 1413 nt, Artificial Sequence
  derived and/or modified CDS sequence (wt) from neuraminidase__InfluenzaA__ABS00324
augaauccaaaucagaaaauaauaaccauaggaucaaucuguauggcaauaggaauaauuagucuaauauugcaaauaggaaauauuguuucaauauggaucagccacucaauccaaacuggaagucaaaacuacacuggaauaugcaaccaaagaaucauuaccuaugaaaauagcaccuggguaaaucaaacauauguuaauaucaacaacacuaauguuguugcuggacaggacacaacuucaguggcauuagccggcaauucaucucuuuguccuaucagugggugggcuauauacagcaaagacaacagcauaagaauugguuccaaaggagauguuuuugucauaagagaaccuuuuauaucauguucucacuuggaaugcagaaccuuuuuucugacccaaggugcucuauuaaaugacaagcauucaaauggaaccguuaaggacagaagcccuuauagggccuuaaugagcuguccuauaggugaagcuccgucucccuacaauucaagguuugaaucaguugcuuggucagcaagcgcaugucaugauggcaugggcuggcuaacaaucggaauuucugguccagaugauggagcaguggcuguacuaaaauacaacgguauaauaacugaaaccauaaaaaguuggaggaagcgaauauuaagaacacaagagucugaaugugucuguguaaacgguucauguuuuaccauaaugaccgauggcccgaauaaugggccugccucguacaaaaucuucaaaaucgagaaggggaagauuacuaaaucaauagaguuggaugcacccaauucucauuacgaggaauguuccuguuacccagacgccggcacagugaugugugugugcagagacaauuggcgugguucgaaucgaccuugggugucuuuuaaucaaagccuggauuaucaaauaggauacaucugcagugguguuuuuggugacaauccgcgucccaaagauggaaaaggcagcugugauccaguaacuguugauggagcagacggaguaaagggguuuucauacagguaugguaaugguguuuggauaggaaggacuaaaaguaacagcuccagaagaggauuugagaugauuugggauccuaauggauggacagauaccgauaguaaauucuuagugaaacaggauguaguggcaaugacugauuggucaggguacagcggaagcuucguucaacauccugaacuaacaggauuggauuguaugaggccuugcuucuggguugaauugaucagaggacgaccuagagaaaauacaacaaucuggacuagugggagcagcauuucuuuuuguggcgugaauggugauacugcaaauuggucuuggccagacgguuccgaguugccauucaccauugacaaguag

SEQ ID NO: 47867 - RNA, 1410 nt, Artificial Sequence; identical to SEQ ID NO: 46126
  derived and/or modified CDS sequence (wt) from neuraminidase__InfluenzaA__ABS49902

SEQ ID NO: 47868 - RNA, 1410 nt, Artificial Sequence
  derived and/or modified CDS sequence (wt) from neuraminidase__InfluenzaA__ABS49913
augaauccaaaucaaaagauaauaacaauuggcucugucucucucaccauugcaacaguaugcuuccucaugcagauugccauccugguaacuacuguaacauugcauuucaggcaauaugagugcgacucccccacgaacaaccaaguaaugccgugugaaccaauaauaauagaaaggaacauaacagagauaguguauuugaauaacaccaccauagagaaagagauaugccccaaauuaguggaauacagaaauuggucaaagccgcaauguaaaauuacaggauuugcaccuuuuucuaaggacaauucaauccggcuuucugcugguggggacauuugggugacgagagaaccuuaugugucaugcgauccuggcaaguguuaucaauuugcacucgggcaggggaccacacuagacaacaaacauucaaaugacacaauacaugauagaaucccucaucgaacccuauugaugaaugaguuggguguuccauuucauuuaggaaccaggcaaguguguauagcaugguccagcucaaguugucacgauggaaaagcauggcugcauguuugugucacuggggaugauaaaaaugcaacugcuagcuucauuuaugacgggaggcuuguggacaguauugguucauggucucaaaauauccucaggacccaggagucggaaugcguuuguaucaaugggacuuguacaguaguaaugacugauggaagugcuucaggaagagcugauacuagaauacuauucauugaagaggggaaaauuguccauauuagcccauugucaggaagugcucagcauguagaggaguguuccuguuauccucgauauccuggcgucagauguaucugcagagacaacuggaaaggcucuaauaggcccgucguagauauaaauguggaagauuauagcauugauuccaguuaugugugcucagggcuuguuggcgacacacccagaaacaacgacagaucuagcaauagcaauugcaggaauccuaacaaugagagagggaaucacggagugaaaggcugggccuuugacgauggaaaugacguguggaugggaagaacgaucagcaaggauuuacgcucagguuaugaaaccuucaaagucauuggugguugguccacaccuaauuccaaaucgcagauaaauaggcaagucauaguugacagcgauaauaggucagguuauucugguauuuucucuguugagggcaaaagcugcaucaauaggugcuuuuauguggaguuaauaaggggaagggaacaggagacuagaguaugguggaccucaaacaguauuguuguguuuuguggcacuucagguaccuaugggacaggcucauggccugauggggcggacaucaaucucaugccuauauaa

SEQ ID NO: 47869 - RNA, 1410 nt, Artificial Sequence; identical to SEQ ID NO: 46856
  derived and/or modified CDS sequence (wt) from neuraminidase__InfluenzaA__ABS49968

SEQ ID NO: 47870 - RNA, 1413 nt, Artificial Sequence; identical to SEQ ID NO: 47852
  derived and/or modified CDS sequence (wt) from neuraminidase__InfluenzaA__ABS49979

SEQ ID NO: 47871 - RNA, 1413 nt, Artificial Sequence
  derived and/or modified CDS sequence (wt) from neuraminidase__InfluenzaA__ABS49990
augaauccaaaucaaaaaauaauaaccauuggaucaaucaguauagcaaucggaauaauuagucuaauguugcaaauaggaaauauuauuucaauaugggcuagucacucaauccaaacuggaagucaaaaccacacuggaauaugcaaccaaagaaucaucacauaugaaaacagcaccugggugaaucacacauauguuaauauuaacaacacuaauguuguugcuggaaaggacaaaacuucagugauauuggccggcaauucaucucuuuguuccaucaguggaugggcuauauacacaaaagacaacagcauaagaauuggauccaaaggagauguuuuugucauaagagaaccuuucauaucauguucucacuuggaaugcagaaccuuuuuucugacccaaggugcucuauuaaaugacaaacauucaaaugggaccguuaaggacagaaguccuuauagggccuuaaugagcugcccucuaggugaagcuccguccccauacaauucaaaguuugaaucaguugcauggucagcaagcgcaugccaugauggcaugggcugguuaacaaucggaauuucugguccagacaauggagcuguggcuguacuaaaauacaacggcauaauaacugaaaccauaaaaaguuggaaaaagcgaauauuaagaacacaagagucugaaugugucugugugaacgggucauguuucaccauaaugaccgauggcccgaguaauggggccgccucguacaaaaucuucaagaucgaaaaggggaagguuacuaaaucaauagaguugaaugcacccaauuuucauuaugaggaauguuccuguuacccagacacuggcacagugauguguguaugcagggacaacuggcaugguucaaaucgaccuugggugucuuuuaaucaaaaccuggauuaucaaauaggauacaucugcagugggguguucggugacaauccgcgucccaaagauggagagggcagcuguaauccagugacuguugauggagcagacggaguaaagggguuuucauacaaauaugguaaugguguuuggauaggaaggacuaaaaguaacagacuuagaaagggguuugagaugauuugggauccuaauggauggacagauaccgacaguaauuucucagugaaacaggauguuguggcaauaacugauuggucaggguacagcggaaguuucguucaacauccugaguuaacaggauuggacuguauaagaccuugcuucuggguugaguuagucagaggacugccuagagaaaauacaacaaucuggacuagugggagcagcauuucuuuuuguggcguaaauagugauacugcaaacuggucuuggccagacggugcugaguugccguucaccauugacaaguag

SEQ ID NO: 47872 - RNA, 1410 nt, Artificial Sequence; identical to SEQ ID NO: 46755
  derived and/or modified CDS sequence (wt) from neuraminidase__InfluenzaA__ABS50001

SEQ ID NO: 47873 - RNA, 1410 nt, Artificial Sequence
  derived and/or modified CDS sequence (wt) from neuraminidase__InfluenzaA__ABS50012
augaauccaaaucaaaagauaauaacgauuggcucuguuucucucaccauugccacaauaugcuuccuuaugcaaauugccauccugguaacuacuguaacguugcauuucaagcaauaugaaugcaacucccccccaaacaaccaagugaugcugugugaaccaacaauaauagaaagaaacauaacagagauaguguaucugaccaacaccaccauagagaaggaaauaugccccaaacuagcagaauacagaaauuggucaaagccgcaauguaacauuacaggauuugcaccuuuuucuaaggacaauucgauucggcuuuccgcugguggggacaucugggugacaagagaaccuuaugugucaugcgauccugacaaguguuaucaauuugcccuuggacagggaacaacacuaaacaacgggcauucaaaugacacaguacaugauaggaccccuuaucgaacccuauugaugaaugaguuggguguuccauuucauuugggaaccaagcaagugugcauagcaugguccagcucaaguugucacgauggaaaagcauggcugcauguuuguguaacgggggaugaugaaaaugcaacugcuagcuucauuuacaaugggaggcuuguagauaguaucgguucaugguccaaaaaaauccucaggacccaggagucggaaugcguuuguaucaauggaacuuguacaguaguaaugacugaugggagugcuucaggaaaagcugauacuaaaauacuauucauugaggaggggaaaaucguucauacuagcucauugucaggaagugcucagcaugucgaggagugcuccuguuauccucgauauccuggugucagaugugucugcagagacaacuggaaaggcuccaauaggcccaucguagauauaaauguaaaggauuauagcauuguuuccaguuaugugugcucaggacuuguuggagacacgcccagaaaaaacgacagcuccagcaguagccauugcuuggauccuaacaaugaggaagguggucauggagugaaaggcugggccuuugaugauggaaaugacguguggaugggaagaacgaucagcgagaaguuacgcucaggauaugaaaccuucaaagucauugaaggcugguccaaaccuaacuccaaauugcagauaaauaggcaagucauaguugacagagguaauagguccgguuauucugguauuuucucuguugaaagcaaaagcugcaucaauaggugcuuuuauguggaguugauaaggggaaggaaacaggaaacugaagucuuguggaccucaaacaguauuguuguguuuuguggcaccucagguacauauggaacaggcucauggccugauggggcggacaucaaucucaugccuauauaa

SEQ ID NO: 47874 - RNA, 1410 nt, Artificial Sequence
  derived and/or modified CDS sequence (wt) from neuraminidase__InfluenzaA__ABS50023
augaauccaaaucaaaagauaauaacgauuggcucuguuucucucaccauugccacaauaugcuuccuuaugcaaauugccguccugguaacuacuguaacauugcauuucaagcaauaugaaugcaacccccccccaaacaaccaagugaugcugugugaaccaacaauaauagaaagaaacauaacagagauaguguaucugaccaacaccaccauagagaaggaaauaugccccaaacuagcagaauacagaaauuggucaaagccgcaauguaacauuacaggauuugcaccuuuuucuaaggacaauucgauucggcuuuccgcugguggggacaucugggugacaagagaaccuuaugugucaugcgauccugacaaguguuaucaauuugcccuuggacagggaacaacacuaaacaacggacauucaaaugacauaguacaugauaggaccccuuaucggacccuauugaugaaugaguuggguguuccauuucauuugggaaccaagcaagugugcauagcaugguccagcucaaguugucacgauggaaaagcauggcugcauguuuguguaacgggggaugaugaaaaugcaacugcuagcuucauuuacaaugggaggcuuguagauaguauugguucaugguccaaaaaaauccucaggacccaggagucggaaugcguuuguaucaauggaacuuguacaguaguaaugacugaugggagugcuucaggaaaagcugauacuaaaauacuauucauugaggaggggaaaaucguucauacuagccuauugucaggaagugcucagcaugucgaggagugcuccuguuauccucgauacccuggugucagaugugucugcagagacaacuggaaaggcuccaauaggcccaucguagauauaaauguaaaggauuauagcauuguuuccaguuaugugugcucaggacuuguuggagacacacccagaaaaaacgacagcuccagcaguagccauugcuuggauccuaacaaugaggaagguggucauggagugaaaggcugggccuuugaugauggaaaugacguguggaugggaagaacgaucagcgagaaguuacgcucaggauaugaaaccuucaaagucauugaaggcugguccaaaccuaacuccaaauugcagauaaauaggcaagucauaguugacagagguaauagguccgguuauucugguauuuucucuguugaaggcaaaagcugcaucaaucggugcuuuuauguggaguugauaaggggaaggaaacaggaaacugaagucuuguggaccucaaacaguauuguuguguuuuguggcaccucagguacauauggaacaggcucauggccugauggggcggacaucaaucucaugccuauauaa

SEQ ID NO: 47875 - RNA, 1410 nt, Artificial Sequence; identical to SEQ ID NO: 46755
  derived and/or modified CDS sequence (wt) from neuraminidase__InfluenzaA__ABS50034

SEQ ID NO: 47876 - RNA, 1410 nt, Artificial Sequence
  derived and/or modified CDS sequence (wt) from neuraminidase__InfluenzaA__ABS50045
augaauccaaaucaaaagauaauaacaauuggcucuguuucucucaccauugccacaauaugcuuccuuaugcaaacugccauccugguaacuacuguaacauugcauuucaagcaguaugaaugcaacucccccccaaacaaccaaguaaugcugugugaaccaacaauaauagaaagaaacauaacagagauaguguaucugaccaacaccaccauagagaaggaaauaugccccaaacuagcagaauacagaaauuggucaaagccgcaauguaacauuacaggauuugcaccuuuuucuaaggacaauucgauucggcuuuccgcugguggggacaucugggugacaagagaaccuuaugugucaugcgauccugacaaguguuaucaauuugcccuugggcagggaacaacacuaaacaacgggcauucaaaugacacaauacaugauaggaccccuuaccggacccuauugaugaaugaauuggguguuccauuucauuugggaaccaggcaagugugcauagcaugguccagcucaaguugucacgauggaaaagcauggcugcauguuuguguaacuggggaugaugaaaaugcaacugcuagcuucauuuacaaugggaggcuuguagauaguauugguucaugguccaaaaaaauacucagaacccaggagucggaaugcguuuguaucaauggaacuuguacaguaguaaugacugaugggagcgcuucaggaaaagcugauacuaaaauacuauucauugaggaggggaaaaucguucauauuagcacauugucaggaagugcucagcaugucgaggagugcuccuguuauccucgauauccuggugucagaugugucugcagagacaacuggaaaggcuccaauaggcccaucguagauauaaauguaaaggauuauagcauuguuuccaguuaugugugcucaggacuuguuggagacacacccagaaaaaacgacagcuucagcaguagccauugccuagauccuaacaaugaggaagguggucauggagugaaaggcugggccuuugaugauggaaaugacguguggaugggaagaacgaucagcgagaaguuacgcucagguuaugaaaccuucaaagucaucgaaggcugguccaaaccuaacuccaaauuacagauaaauaggcaagucauaguugaaagagguaacagguccgguuauucugguauuuucuccguugaaggcaaaagcugcaucaaucggugcuuuuauguggaguugauaaggggaaggaaagaggaaacugaagucugguggaccucaaacaguauuguuguguuuuguggcaccucagguacauauggaacaggcucauggccugauggggcggauaucaaucucaugccuauauaa

SEQ ID NO: 47877 - RNA, 1410 nt, Artificial Sequence
  derived and/or modified CDS sequence (wt) from neuraminidase__InfluenzaA__ABS50056
augaauccaaaucaaaagauaauaacaauuggcucuguuucucucaccauugccacaauaugcuuccuuaugcaaauugccauccugguaacuacuguaacauugcauuucaagcaguaugaaugcaacucccccccaaacaaccaaguaaugcugugugaaccaacaauaauagaaagaaacauaacagagauaguguaucugaccaacaccaccauagagaaggaaauaugccccaaacuagcagaauacagaaauuggucaaagccgcaauguaacauuacaggauuugcaccuuuuucuaaggacaauucgauucggcuuuccgcugguggggacaucugggugacaagagaaccuuaugugucaugcgauccugacaaguguuaucaauuugcccuugggcagggaacaacacuaaacaacgggcauucaaaugacacaguacaugauaggaccccuuaccggacccuauugaugaaugaauuggguguuccauuucauuugggaaccaggcaagugugcauagcaugguccagcucaaguugucacgauggaaaagcauggcugcauguuuguguaacuggggaugaugaaaaugcaacugcuagcuucauuuacaaugggaggcuuguagauaguauugguucaugguccaaaaaaauacucaggacccaggagucggaaugcguuuguaucaauggaacuuguacaguaguaaugacugaugggagcgcuucagggaaagccgauacuaaaauacuauucauugaggaggggaaaaucguucauauuagcacauugucaggaagugcucagcaugucgaggagugcuccuguuauccucgauauccuggugucagaugugucugcagagacaacuggaaaggcuccaauaggcccaucguagauauaaauguaaaggauuauagcauuguuuccaguuaugugugcucaggacuuguuggagacacacccagaaaaaacgacagcuucagcaguagccauugccuagauccuaacaaugaggaagguggucauggagugaaaggcugggccuuugaugauggaaaugacguguggaugggaagaacgaucagcgagaaguuacgcucagguuaugaaaccuucaaagucaucgaaggcugguccaaaccuaacuccaaauuacagauaaauaggcaagucauaguugaaagagguaacagguccgguuauucugguauuuucuccguugaaggcaaaagcugcaucaaucggugcuuuuauguggaguugauaaggggaaggaaagaggaaacugaagucugguggaccucaaacaguauuguuguguuuuguggcaccucagguacauauggaacaggcucauggccugauggggcggauaucaaucucaugccuauauaa

SEQ ID NO: 47878 - RNA, 1410 nt, Artificial Sequence
  derived and/or modified CDS sequence (wt) from neuraminidase__InfluenzaA__ABS50067
augaauccaaaucaaaagauaauaacaauuggcucuguuucucucaccauugccacaauaugcuuccuuaugcaaauugccauccugguaacuacuguaacauugcauuucaagcaguaugaaugcaacucccccccaaacaaccaaguaaugcugugugaaccaacaauaauagaaagaaacauaacagagauaguguaucugaccaacaccaccauagagaaggaaauaugccccaaacuagcagaauacagaaauuggucaaagccgcaauguaacauuacaggauuugcaccuuuuucuaaggacaauucgauucggcuuuccgcugguggggacaucugggugacaagagaaccuuaugugucaugcgauccugacaaguguuaucaauuugcccuugggcagggaacaacacuaaacaacgggcauucaaaugacacaguacaugauaggaccccuuaccggacccuauugaugaaugaauuggguguuccauuucauuugggaaccaggcaagugugcauagcaugguccagcucaaguugucacgauggaaaagcauggcugcauguuuguguaacuggggaugaugaaaaugcaacugcuagcuucauuuacaaugggaggcuuguagauaguauugguucaugguccaaaaaaauacucagaacccaggagucggaaugcguuuguaucaauggaacuuguacaguaguaaugacugaugggagcgcuucaggaaaagcugauacuaaaauacuauucauugaggaggggaaaaucguucauauuagcacauugucaggaagugcucagcaugucgaggagugcuccuguuauccucgauauccuggugucagaugugucugcagagacaacuggaaaggcuccaauaggcccaucguagauauaaauguaaaggaucauagcauuguuuccaguuaugugugcucaggacuuguuggagacacacccagaaaaaacgacagcuucagcaguagccauugccuagacccuaacaaugaggaagguggucauggagugaaaggcugggccuuugaugauggaaaugacguguggaugggaagaacgaucagcgagaaguuacgcucagguuaugaaaccuucaaagucaucgaaggcugguccaaaccuaacuccaaauuacagauaaauaggcaagucauaguugaaagagguaacaggucugguuauucugguauuuucuccguugaaggcaaaagcugcaucaaucggugcuuuuauguggaguugauaaggggaaggaaagaggaaacugaagucugguggaccucaaacaguauuguuguguuuuguggcaccucagguacauauggaacaggcucauggccugauggggcggauaucaaucucaugccuauauaa

SEQ ID NO: 47879 - RNA, 1410 nt, Artificial Sequence; identical to SEQ ID NO: 47401
  derived and/or modified CDS sequence (wt) from neuraminidase__InfluenzaA__ABS50078

SEQ ID NO: 47880 - RNA, 1413 nt, Artificial Sequence
  derived and/or modified CDS sequence (wt) from neuraminidase__InfluenzaA__ABS71644
augaaaccaaaucaaaaaauaauaaccauuggaucaaucaguauagcaaucggaauaauuagucuaauauugcaaauaggaaauauuauuucaauaugggcuagucacucaauccaaacugaaagucaaaaccacacuggaauaugcaaccaaagaaucaucacauaugaaaacagcaccugggugaauaacacauauguuaauauuaacaacacuaauguuguugcugaaaaggacaaaacuucagugacauuggccggcaauucaucucuuuguucuaucaguggaugggcuauauacacaaaagacaacagcauaagaauuggcuccaaaggagauguuuuugucauaagagaaccuuucauaucauguucucacuuggaaugcagaaccuuuuuucugacccaaggugcucuauuaaaugacaaacauucaaaugggaccguaaaggacagaaguccuuauagggccuuaaugagcuguccucuaggugaagcuccguccccauacaauucaagguucgaaucaguugcauggucagcaagcgcaugccaugauggcaugggcugguuaacaaucggaauuucugguccagacaauggagcuguggcuguacuaaaauacaacggaauaauaacugaaaccauaaaaaguuggaaaaagcgaauauuaagaacacaagagucugaaugugucuguaugaacgggucauguuucaccauaaugaccgauggcccgaguaauggggccgccucguacaaaauuuucaagaucgaaaaggggaagguuaccaaaacaauggaguugaaugcacccaauuuucauuaugaggaauguuccuguuacccagacacuggcacaguaauguguguaugcagagacaacuggcaugguucaaaucgaccuugggugucuuuuaaucaaaacuuggauuaucaaauaggauacaucugcaguggaguguucggugacaauccgcgucccaaagauggggagggcagcugcaauccagugacuguugauggagcagacggaguaaaaggguuuucauacaaauaugguaaugguguuuggaugggaaggaccaaaaguaacagacuuagaaagggguuugagaugauuugggauccuaauggauggacaaauaccgacagugauuucucagugaaacaggauguuguagcaauaacugauuggucaggguacagcggaaguuuuguucaacauccugaguuaacaggauuggacuguauaagaccuugcuucuggguugaguuagucagagggcuaccuagggaaaauacaacaaucuggacuagugggagcagcauuucuuuuuguggcguuaauagugguacugcaaacuggucuuggccagacggugcugaguugccguucaccauugacaaguag

SEQ ID NO: 47881 - RNA, 1413 nt, Artificial Sequence
  derived and/or modified CDS sequence (wt) from neuraminidase__InfluenzaA__ABS71646
augaacccaaaucaaaaaauaauaaccauuggaucaaucaguauagcaaucggaauaauuagucuaauauugcaaauaggaaauauuauuucaauaugggcuagucacucaauccaaacugaaagucaaaaccacacuggaauaugcaaccaaagaaucaucacauaugaaaacagcaccugggugaauaacacauauguuaauauuaacaacacuaauguuguugcugaaaaggacaaaacuucagugacauuggccggcaauucaucucuuuguucuaucaguggaugggcuauauacacaaaagacaacagcauaagaauuggcuccaaaggagauguuuuugucauaagagaaccuuucauaucauguucucacuuggaaugcagaaccuuuuuucugacccaaggugcucuauuaaaugacaaacauucaaaugggaccguaaaggacagaaguccuuauagggccuuaaugagcuguccucuaggugaagcuccguccccauacaauucaagguucgaaucaguugcauggucagcaagcgcaugccaugauggcaugggcugguuaacaaucggaauuucugguccagacaauggagcuguggcuguacuaaaauacaacggaauaauaacugaaaccauaaaaaguuggaaaaagcgaauauuaagaacacaagagucugaaugugucuguaugaacgggucauguuucaccauaaugaccgauggcccgaguaauggggccgccucguacaaaauuuucaagaucgaaaaggggaagguuaccaaaacaauggaguugaaugcacccaauuuucauuaugaggaauguuccuguuacccagacacuggcacaguaauguguguaugcagagacaacuggcaugguucaaaucgaccuugggugucuuuuaaucaaaacuuggauuaucaaauaggauacaucugcaguggaguguucggugacaauccgcgucccaaagauggggagggcagcugcaauccagugacuguugauggagcagacggaguaaaaggguuuucauacaaauaugguaaugguguuuggaugggaaggaccaaaaguaacagacuuagaaagggguuugagaugauuugggauccuaauggauggacaaauaccgacagugauuucucagugaaacaggauguuguagcaauaacugauuggucaggguacagcggaaguuuuguucaacauccugaguuaacaggauuggacuguauaagaccuugcuucuggguugaguuagucagagggcuaccuagggaaaauacaacaaucuggacuagugggagcagcauuucuuuuuguggcguuaauagugguacugcaaacuggucuuggccagacggugcugaguugccguucaccauugacaaguag

SEQ ID NO: 47882 - RNA, 1413 nt, Artificial Sequence
  derived and/or modified CDS sequence (wt) from neuraminidase__InfluenzaA__ABS71647
augaacccaaaucaaaaaauaauaaccauuggaucaaucaguauagcaaucggaauaauuagucuaauauugcaaauaggaaauauuauuucaauaugggcuagucacucaauccaaacugaaagucaaaaccacacuggaauaugcaaccaaagaaucaucacauaugaaaacagcaccugggugaauaacacauauguuaauauuaacaacacuaauguuguugcugaaaaggacaaaacuucagugacauuggccggcaauucaucucuuuguucuaucaguggaugggcuauauacacaaaagacaacagcauaagaauuggcuccaaaggagauguuuuugucauaagagaaccuuucauaucauguucucacuuggaaugcagaaccuuuuuucugacccaaggugcucuauuaaaugacaaacauucaaaugggaccguaaaggacagaaguccuuauagggccuuaaugagcuguccucuaggugaagcuccguccccauacaauucaagguucgaaucaguugcauggucagcaagcgcaugccaugauggcaugggcugguuaacaaucggaauuucugguccagacaauggagcuguggcuguacuaaaauacaacggaauaauaacugaaaccauaaaaaguuggagaaagcgaauauuaagaacacaagagucugaaugugucuguaugaacgggucauguuucaccauaaugaccgauggcccgaguaauggggccgccucguacaaaauuuucaagaucgaaaaggggaagguuaccaaaacaauggaguugaaugcacccaauuuucauuaugaggaauguuccugcuacccagacacuggcacaguaauguguguaugcagagacaacuggcaugguucaaaucgaccuugggugucuuuuaaucaaaacuuggauuaucaaauaggauacaucugcaguggaguguucggugacaauccgcgucccaaagauggggagggcagcugcaauccagugacuguugauggagcagacgggguaaaaggguuuucauacaaauaugguaaugguguuuggaugggaaggaccaaaaguaacagacuuagaaagggguuugagaugauuugggauccuaauggauggacaaauaccgacagugauuucucagugaaacaggauguuguagcaauaacugauuggucaggguacagcggaaguuuuguucaacauccugaguuaacaggauuggacuguauaagaccuugcuucuggguugaguuagucagagggcuaccuagggaaaauacaacaaucuggacuagugggagcagcauuucuuuuuguggcguuaauaguggugcugcaaacuggucuuggccagacggugcugaguugccguucaccauugacaaguag

SEQ ID NO: 47883 - RNA, 1413 nt, Artificial Sequence
  derived and/or modified CDS sequence (wt) from neuraminidase__InfluenzaA__ABS71648
augaacccaaaucaaaaaauaauaaccauuggaucaaucaguauagcaaucggaauaauuagucuaauauugcaaauaggaaauauuauuucaauaugggcuagucacucaauccaaacuggaaaucaaaaccacacuggaauaugcaaccaaagaaucaucacauaugaaaacagcaccugggugaauaacacauauguuaauauuaacaacacuaauguuguugcugaaaaggacaaaacuucagugacauuggccggcaauucaucucuuuguucuaucaguggaugggcuauauacacaaaagacaacagcauaagaauuggcuccaaaggagauguuuuugucauaagagaaccuuucauaucauguucucacuuggaaugcagaaccuuuuuucugacccaaggugcucuauuaaaugacaaacauucaaaugggaccguaaaggacagaaguccuuauagggccuuaaugagcuguccucuaggugaagcuccguccccauacaauucaagguucgaaucaguugcauggucagcaagcgcaugccaugauggcaugggcugguuaacaaucggaauuucugguccagacaauggagcuguggcuguacuaaaauacaacggaauaauaacugaaaccauaaaaaguuggaaaaagcgaauauuaagaacacaagagucugaaugugucuguaugaacgggucauguuucaccauaaugaccgauggcccgaguaauggggccgccucguacaaaauuuucaagaucgaaaaggggaagguuaccaaaacaauagaguugaaugcacccaauuuucauuaugaggaauguuccuguuacccagacacuggcacagugauguguguaugcagagacaacuggcaugguucaaaucgaccuugggugucuuuuaaucaaaacuuggauuaucaaauaggauacaucugcaguggaguguucggugacaauccgcgucccaaagauggggagggcagcugcaauccagugacuguugauggagcagacggaguaaaaggguuuucauacaaauaugguaaugguguuuggauaggaaggaccaaaaguaacagacuuagaaagggguuugagaugauuugggauccuaauggauggacaaauaccgacagugauuucucagugaaacaggauguuguagcaauaacugauuggucaggguacagcggaaguuuuguucaacauccugaguuaacaggauuggacuguauaagaccuugcuucuggguugaguuagucagagggcugccuaaggaaaauacaacaaucuggacuagugggagcagcauuucuuuuuguggcguuaauagugguacugcaaacuggucuuggccagacggugcugaguugccguucaccauugacaaguag

SEQ ID NO: 47884 - RNA, 1413 nt, Artificial Sequence
  derived and/or modified CDS sequence (wt) from neuraminidase__InfluenzaA__ABS71649
augaacccaaaucaaaagauaauaaccauuggaucaaucaguauagcaaucggaauaauuagucuaauguugcaaauaggaaauauuauuucaauaugggcuagucacucaauccaaacuggaagucaaaaccacacuggaauaugcaaccaaagaaucaucacauaugaaaacagcaccugggugaaucacacauauguuaauauuaacaacacuaauguuguugcugaaaaggacaaaacuucagugacauuggccggcaauucaucucuuuguucuaucaguggaugggcuauauacacaaaagacaacagcauaagaauuggcuccaaaggagauguuuuugucauaagagaaccuuucauaucauguucucacuuggaaugcagaaccuuuuuucugacccaaggcgcucuauuaaaugacaaacauucaaaugggaccguaaaggacagaaguccuuauagggccuuaaugagcuguccucuaggugaagcuccguccccauacaauucaaaguucgaaucaguugcuuggucagcaagcgcaugccaugauggcaugggcugguuaacaaucggaauuucugguccagacaauggagcuguggcuguacuaaaauacaacggaauaauaacuggaaccauaaaaaguuggaaaaagcaaauauuaagaacacaagagucugaaugugucuguaugaacgggucauguuucaccauaaugaccgauggcccgaguaauagggccgcuucguacaaaauuuucaagaucgaaaaggggaagguuacuaaaucaauagaguugaaugcacccaauuuucauuaugaggaauguuccuguuacccagacacuggcauagugauguguguaugcagggacaacuggcaugguucaaaucgaccuugggugucuuuuaaucaaaacuuggauuaucaaauaggauacaucugcaguggaguguucggugacaauccgcgucccaaagauggagagggcagcugcaauccagugacuguugauggagcagacggaguaaaaggguuuucauacaaauaugauaaugguguuuggauaggaaggaccaaaaguaacagacuuagaaagggguuugagaugauuugggauccuaauggauggacaaauaccgacagugauuucucagugaaacaggauguuguagcaauaacugauuggucaggguacagcggaaguuucguccaacauccugaguuaacaggauuggacuguauaagaccuugcuucuggguugaguuagucagagggcugccuagagaaaauacaacaaucuggacuagugggagcagcauuucuuuuuguggcguuaauagugauacugcaaacuggucuuggccagacggugcugaguugccguucaccauugacaaguag

SEQ ID NO: 47885 - RNA, 1413 nt, Artificial Sequence
  derived and/or modified CDS sequence (wt) from neuraminidase__InfluenzaA__ABS71651
augaacccaaaucaaaaaauaauaaccauuggaucaaucaguauagcaauuggaauaauuagucuaauguugcaaauaggaaauauuauuucaauaugggcuagucacucaauccaaacuggaagucaaaaccacacuggaauaugcaaccagagaaucaucacauaugaaaacaacaccugggugaaucacacauauguuaauauuaacaacacuaauguuguugcuggaaaggacaaaacuucagugacauuggccggcaauucaucucuuuguucugucaguggaugggcuauauacacaaaagacaacagcauaagaauuggcuccaaaggagauguuuuugucauaagagaaccuuucauaucauguucucacuuggaaugcagaaccuuuuuucugacccaaggugcucuauuaaaugacaaacauucaaaugggaccguaaaggacagaagucccuauagggccuuaaugagcuguccucuaggugaagcuccguccccauacaauucaaaguucgaaucaguugcauggucagcaagcgcaugccaugauggcaugggcugguuaacaaucggaauuucugguccagacaauggagcuguggcuguacuaaaauacaacggaauaauaacuggaaccauaaaaaguuggaaaaagcgaauauuaagaacacaagagucugaaugugucuguaugaacgggucauguuucaccauaaugaccgauggcccuaguaauggggccgccucguacaaaauuuucaagauugagaaggggaaaguuacuaaaucaauagaguugaaugcacccaguuuucauuaugaggaauguuccuguuacccagacacuggcacagugauguguguaugcagggacaacuggcaugguucaaaucgaccuuggguaucuuuuaaucaaaacuuggauuaucaaauaggauacaucugcaguggaguguucggugacaauccgcgucccaaagauggagagggcagcugcaauccagugacuguugauggagcagacggaguaaaaggguuuucauacaaauaugguaaugguguuugguuagggaggaccaaaaguaacagacuuagaaagggguuugagaugauuugggauccuaauggauggacaaauaccgacagugauuucucagugaaacaggauguuguagcaauaacugauuggucgggguacaguggaaguuucguucaacauccugaguuaacaggauuggacuguauaagaccuugcuucuggguugaguuagucagagggcuuccuagagaaaauacaacaaucuggacuagugggagcagcauuucuuuuuguggcguuaauaguaauacugcaaacuggucuuggccagacggugcugaguugccguucaccauugacaaguag

SEQ ID NO: 47886 - RNA, 1413 nt, Artificial Sequence
  derived and/or modified CDS sequence (wt) from neuraminidase__InfluenzaA__ABS71652
augaacccaaaucaaaaaauaauaaccauuggaucaaucaguauagcaauuggaauaauuagucuaauguugcaaauaggaaauauuauuucaauaugggcuagucacucaauccaaacuggaagucaaaaccacacuggaauaugcaaccagagaaucaucacauaugaaaacaacaccugggugaaucacacauauguuaauauuaacaacacuaauguuguugcuggaaaggacaaaacuucagugacauuggccggcaauucaucucuuuguucugucaguggaugggcuauauacacaaaagacaacagcauaagaauuggcuccaaaggagauguuuuugucauaagagaaccuuucauaucauguucucacuuggaaugcagaaccuuuuuucugacccaaggugcucuauuaaaugacaaacauucaaaugggaccguaaaggacagaagucccuauagggccuuaaugagcuguccucuaggugaagcuccguccccauacaauucaaaguucgaaucaguugcauggucagcaagcgcaugccaugauggcaugggcugguuaacaaucggaauuucugguccagacaauggagcuguggcuguacuaaaauacaacggaauaauaacugaaaccauaaaaaguuggaaaaagcgaauauuaagaacacaagagucugaaugugucuguaugaacgggucauguuucaccauaaugaccgauggcccuaguaauggggccgccucguacaaaauuuucaagauugagaaggggaaaguuacuaaaucaauagaguugaaugcacccaguuuucauuaugaggaauguuccuguuacccagacacuggcacagugauguguguaugcagggauaacuggcaugguucaaaucgaccuuggguaucuuuuaaucaaaacuuggauuaucaaauaggauacaucugcaguggaguguucggugacaauccgcgucccaaagauggagagggcagcugcaauccagugacuguugauggagcagacggaguaaaaggguuuucauacaaauaugguaaugguguuuggauagggaggaccaaaaguaacagacuuagaaagggguuugagaugauuugggauccuaauggauggacaaauaccgacagugauuucucagugaaacaggauguuguagcaauaacugauuggucgggguacaguggaaguuucguucaacauccugaguuaacaggauuggacuguauaagaccuugcuucuggguugaguuagucagagggcuuccuagagaaaauacaacaaucuggacuagugggagcagcauuucuuuuuguggcguuaauaguaauacugcaaacuggucuuggccagacggugcugaguugccguucaccauugacaaguag

SEQ ID NO: 47887 - RNA, 1413 nt, Artificial Sequence
  derived and/or modified CDS sequence (wt) from neuraminidase__InfluenzaA__ABS71653
augaauccaaaucaaaaaauaauaaccauuggaucaaucaguauagcaaucggaauaauuagucuaauguugcaaauaggaaauauuauuucaauaugggcuagucacucaauccaaacuggaagucaaaaccacacuggaauaugcaaccaaagaaucaucacauaugaaaacagcaccugggugaaucacacauauguuaauauuaacaacacuaauguuguugcuggaaaggacaaaacuucagugacauuggccggcaauucaucucuuuguucuaucaguggaugggcuauauacacaaaagacaacagcauaagaauuggcuccaaaggagauguuuuugucauaagagaaccuuucauaucauguucucacuuggaaugcagaaccuuuuuucugacccaaggugcucuauuaaaugacaaacauucaaauggaaccguuaaggacagaaguccuuauagggccuuaaugaucuguccucuaggugaagcuccguccccauacaauucaaaguuugaaucaguugcauggucagcaagugcaugccaugauggcaugggcugguuaacaaucggaauuucugguccagacaauggagcuguggcuguacuaaaauacaacggaauaauaacugaaaccauaaaaaguuggaaaaagcgaauauugagaacacaagagucugaaugugucugugugaacgggucauguuucaccauaaugaccgauggcccgaguaauggggccgccucguacaaaaucuucaagaucgaaaagggaaagguuacuaaaucaagagaguuaaaugcacccaauuuucauuaugaggaauguuccuguuacccggacauuggcacagugauguguguaugcagggacaacuggcaugguucaaaucgaccuugggugucuuuuaaucaaaacuuggauuaucaaauaggauacaucugcaguggaguguucggugacaauccgcgucccaaagauggaaagggcagcuguaauccagugacugcugauggagcagacggaguuaagggguuuucauacaaauaugguaaugguguuuggauaggaaggacuaaaaguaacagacuuagaaaggguuuugagaugauuugggauccuaauggauggacagauaccgacagugauuucucagugaaacaggauguuguggcaauaacugauuggucaggguacagcggaaguuucguucaacauccugaguuaacaggauuggacuguauaagaccuugcuucuggguugaguuagucagaggacugccuagagaaaauacaacaaucuggacuaguggaagcagcauuucuuuuuguggcguugauagugauacugcaaacuggucuuggccagacggugcugaguugccguucaccauugacaaguaa

SEQ ID NO: 47888 - RNA, 1410 nt, Artificial Sequence
  derived and/or modified CDS sequence (wt) from neuraminidase__InfluenzaA__ABS71655
augaauccaaucaaaaagauaauaacgauuggcucuguuucucucaccauuuccacaauaugcuucuucaugcaaauugccaucuugauaacuacuguaacauugcauuucaagcaauaugaauucaacucccccccaaacaaccaagugaugcugugugaaccaacaauaauagaaagaaacauaacagagauaguguaucugaccaacaccaccauagagaaggaaauaugccccaaacuagcagaauacagaaauuggucaaagccgcaauguaacauuacaggauuugcaccuuuuucuaaggacaauucgauuaggcuuuccgcugguggggacaucugggugacaagagaaccuuaugugucaugcgauccugacaaguguuaucaauuugcccuuggacagggaacaacacuaaacaacgugcauucaaaugacacaguacaugauaggaccccuuaucggacccuauugaugaaugaguuagguguuccauuucaucuggggaccaagcaagugugcauagcaugguccagcucaaguugucacgauggaaaagcauggcugcauguuuguguaacgggggaugauaaaaaugcaacugcuagcuucauuuacaaugggaggcuuguagauaguauuguuucaugguccaaagaaauccucaggacccaggagucagaaugcguuuguaucaauggaacuuguacaguaguaaugacugaugggagugcuucaggaaaagcugauacuaaaauacuauucauugaggaggggaaaaucguucauacuagcacauugucaggaagugcucagcaugucgaggagugcuccugcuauccucgauauccuggugucagaugugucugcagagacaacuggaaaggcuccaauaggcccauaguagauauaaacauaaaggauuauagcauuguuuccaguuaugugugcucaggacuuguuggagacacacccagaaaaaacgacagcuccagcaguagccauugcuuggauccuaacaaugaagaagguggucauggagugaaaggcugggccuuugaugauggaaaugacguguggaugggaagaacgaucagugagaaguuacgcucaggauaugaaaccuucaaagucauugaaggcugguccaacccuaauuccaaauugcagauaaauaggcaagucauaguugacagagguaauagguccgguuauucugguauuuucucuguugaaggcaaaagcugcaucaaucggugcuuuuauguggaguugauaaggggaagaaaagaggaaacugaaguuuuguggaccucaaacaguauuguuguguuuuguggcaccucagguacauauggaacaggcucauggccugauggggcggacaucaaucucaugccuauauaa

SEQ ID NO: 47889 - RNA, 1410 nt, Artificial Sequence
  derived and/or modified CDS sequence (wt) from neuraminidase__InfluenzaA__ABS71657
augaauccaaaucaaaagauaauaacgauuggcucuguuucucucaccauuuccacaauaugcuucuucaugcaaauugccaucuugauaacuacuguaacauugcauuucaagcaauaugaauucagcucccccccaaacaaccaagugaugcugugugaaccaacaauaauagaaagaaacauaacagagauaguguaucugaccaacaccaccauagagaaggaaauaugccccaaacuagcagaauacagaaauuggucaaagccgcaaugugacauuacaggauuugcaccuuuuucuaaggacaauucgauuaggcuuuccgcugguggggacaucugggugacaagagaaccuuaugugucaugcgauccugacaaguguuaucaauuugcccuuggacagggaacaacacuaaacaacgugcauucaaaugacacaguacaugauaggaccccuuaucggacccuauugaugaaugagcuagguguuccauuucaucuggggaccaagcaagugugcauagcaugguccagcucaaguugucacgauggaaaagcauggcugcauguuuguguaacgggggaugacaaaaaugcaacugcuagcuucauuuacaauggaaggcuuguagauaguauuguuucaugguccaaagaaauccucaggacccaggagucagaaugcguuuguaucaauggaacuuguacaguaguaaugacugaugggagugcuucaggaaaagcugauacuaaaauacuauucauugaggaggggaaaaucguucauacuagcacauugucaggaagugcucagcaugucgaggagugcuccugcuauccucgauauccuggugucagaugugucugcagagacaauuggaaaggcuccaauaggcccaucguagauauaaacauaaaggauuauagcauuguuuccagauaugugugcucaggacuuguuggagacacacccagaaaaaacgacagcuccagcaguagccauugcuuggauccuaacaaugaagaagguggucauggagugaaaggcugggccuuugaugauggaaaugacgcguggaugggaagaacgaucagcgagaagucacgcucaggauaugaaaccuucaaagucauugaaggcugguccaacccuaauuccaaauugcagauaaauaggcaagucauaguugacagagguaauagguccgguuauucugguauuuucucuguugaaggcaaaagcugcaucaaucggugcuuuuauguggaguugauaaggggaagaaaagaggaaaccgaaguuuuguggaccucaaacaguauuguuguguuuuguggcaccucagguacauauggaacaggcucauggccugauggggcggacaucaaucucaugccuauauaa

SEQ ID NO: 47890 - RNA, 1410 nt, Artificial Sequence
  derived and/or modified CDS sequence (wt) from neuraminidase__InfluenzaA__ABS71659
augaauccaaucaaaaagauaauaacgauuggcucuguuucucucaccauuuccacaauaugcuucuucaugcaaauugccaucuugauaacuacuguaacauugcauuucaagcaauaugaauucagcucccccccaaacaaccaagugaugcugugugaaccaacaauaauagaaagaaacauaacagagauaguguaucugaccaacaccaccauagagaaggaaauaugccccaaacuagcagaauacagaaauuggucaaagccgcaaugcgacauuacaggauuugcaccuuuuucuaaggacaauucgauuaggcuuuccgcugguggggacaucugggugacaagagaaccuuaugugucaugcgauccugacaaguguuaucaauuugcccuuggacagggaacaacacuaaacaacgugcauucaaaugacacaguacaugauaggaccccuuaucggacccuauugaugaaugagcuagguguuccauuucaucuggggaccaagcaagugugcauagcaugguccagcucaaguugucacgauggaaaagcauggcugcauguuuguguaacgggggaugacaaaaaugcaacugcuagcuucauuuacaaugggaggcuuguagauaguauuguuucaugguccaaagaaauccucaggacccaggagucagaaugcguuuguaucaauggaacuuguacaguaguaaugacugaugggagugcuucaggaaaagcugauacuaaaauacuauucauugaggaggggaaaaucguucauacuagcacauugucaggaagugcucagcaugucgaggagugcuccugcuauccucgauauccuggugucagaugugucugcagagacaauuggaaaggcuccaauaggcccaucguagauauaaacauaaaggacuauagcauuguuuccagauaugugugcucaggacuuguuggagacacacccagaaaaaacgacagcuccagcaguagccauugcuuggauccuaacaaugaagaagguggucauggagugaaaggcugggccuuugaugauggaaaugacguguggaugggaagaacgaucggcgagaagucacgcucaggauaugaaaccuucaaagucauugaaggcugguccaacccuaauuccaaauugcagauaaauaggcaagucauaguugacagagguaauagguccgguuauucugguauuuucucuguugaaggcaaaagcugcaucaaucggugcuuuuauguggaguugauaaggggaagaaaagaggaaaccgaaguuuuguggaccucaaacaguauuguuguguuuuguggcaccucagguacauauggaacaggcucauggccugauggggcggacaucaaucacaugccuauauaa

SEQ ID NO: 47891 - RNA, 1410 nt, Artificial Sequence
  derived and/or modified CDS sequence (wt) from neuraminidase__InfluenzaA__ABS71660
augaauccaaucaaaaagauaauaacgauuggcucuguuucucucaccauuuccacaauaugcuucuucaugcaaauugccaucuugauaacuacuguaacauugcauuucaagcaauaugaauucagcucccccccaaacaaccaagugaugcugugugaaccaacaauaauagaaagaaacauaacagagauaguguaucugaccaacaccaccauagagaaggaaauaugccccaaacuagcagaauacagaaauuggucaaagccgcaaugugacauuacaggauuugcaccuuuuucuaaggacaauucgauuaggcuuuccgcugguggggacaucugggugacaagagaaccuuaugugucaugcgauccugacaaguguuaucaauuugcccuuggacagggaacaacacuaaacaacgugcauucaaaugacacaguacaugauaggaccccuuaucggacccuauugaugaaugagcuagguguuccauuucaucuggggaccaagcaagugugcauagcaugguccagcucaaguugucacgauggaaaagcauggcugcauguuuguguaacgggggaugacaaaaaugcaacugcuagcuucauuuacaaugggaggcuuguagauaguauuguuucaugguccaaagaaauccucaggacccaggagucagaaugcguuuguaucaauggaacuuguacaguaguaaugacugaugggagugcuucaggaaaagcugauacuaaaauacuauucauugaggaggggaaaaucguucauacuagcacauugucaggaagugcucagcaugucgaggagugcuccugcuauccucgauauccuggugucagaugugucugcagagacaauuggaaaggcuccaauaggcccaucguagauauaaacauaaaggauuauagcauuguuuccagauaugugugcucaggacuuguuggagacacacccagaaaaaacgacagcuccagcaguagccauugcuuggauccuaacaaugaagaagguggucauggagugaaaggcugggccuuugaugauggaaaugacguguggaugggaagaacgaucagcgagaagucacgcucaggauaugaaaccuucaaagucauugaaggcugguccaacccuaauuccaaauugcagauaaauaggcaagucauaguugacagagguaauagguccgguuauucugguauuuucucuguugaaggcaaaagcugcaucaaucggugcuuuuauguggaguugauaaggggaagaaaagaggaaaccgaaguuuuguggaccucaaacaguauuguuguguuuuguggcaccucagguacauauggaacaggcucauggccugauggggcggacaucaaucucaugccuauauaa

SEQ ID NO: 47892 - RNA, 1410 nt, Artificial Sequence
  derived and/or modified CDS sequence (wt) from neuraminidase__InfluenzaA__ABS71661
auguauccaaucaaaaagauaauaacgauuggcucuguuucucucaccauuuccacaauaugcuucuucaugcaaauugccaucuugauaacuacuguaacauugcauuucaagcaauaugaauucagcucccccccaaacaaccaagugaugcugugugaaccaacaauaauagaaagaaacauaacagagauaguguaucugaccaacaccaccauagagaaggaaauaugccccaaacuagcagaauacagaaauuggucaaagccgcaaugugacauuacaggauuugcaccuuuuucuaaggacaauucgauuaggcuuuccgcugguggggacaucugggugacaagagaaccuuaugugucaugcgauccugacaaguguuaucaauuugcccuuggacagggaacaacacuaaacaacgugcauucaaaugacacaguacaugauaggaccccuuaucggacccuauugaugaaugagcuagguguuccauuucaucuggggaccaagcaagugugcauagcaugguccagcucaaguugucacgauggaaaagcauggcugcauguuuguguaacgggggaugacaaaaaugcaacugcuagcuucauuuacaaugggaggcuuguagauaguauuguuucaugguccaaagaaauccucaggacccaggagucagaaugcguuuguaucaauggaacuuguacaguaguaaugacugaugggagugcuucaggaaaagcugauacuaaaauacuauucauugaggaggggaaaaucguucauacuagcacauugucaggaagugcucagcaugucgaggagugcuccugcuauccucgauauccuggugucagaugugucugcagagacaauuggaaaggcuccaauaggcccaucguagauauaaacauaaaggacuauagcauuguuuccagauaugugugcucaggacuuguuggagacacacccagaaaaaacgacagcuccagcaguagccauugcuuggauccuaacaaugaagaagguggucauggagugaaaggcugggccuuugaugauggaaaugacguguggaugggaagaacgaucagcgagaagucacgcucaggauaugaaaccuucaaagucauugaaggcugguccaacccuaauuccaaauugcagauaaauaggcaagucauaguugacagagguaauagguccgguuauucugguauuuucucuguugaaggcaaaagcugcaucaaucggugcuuuuauguggaguugauaaggggaagaaaagaggaaaccgaaguuuuguggaccucaaacaguauuguuguguuuuguggcaccucagguacauauggaacaggcucauggccugauggggcggacaucaaucucaugccuauauag

SEQ ID NO: 47893 - RNA, 1410 nt, Artificial Sequence
  derived and/or modified CDS sequence (wt) from neuraminidase__InfluenzaA__ABS71662
augaauccaaucaaaaagauaauaacgauuggcucuguuucccucaccauuuccacaauaugcuucuucaugcaaauugcuaucuugauaacuacuguaacauugcauuucaagcaauaugaguucaacucccccccaaacaaccaagugaugcugugugaaccaacaauaauagaaagaaacauaacagagauaguguaucugaccaacaccaccauagagaaggaaauaugccccaaacuagcagaauacagaaauuggucaaagccgcaaugugacauuacaggauuugcaccuuuuucuaaggacaauucgauuaggcuuuccgcugguggggacaucugggugacaagagaaccuuaugugucaugcgauccugacaaguguuaucaauuugcccuuggacagggaacaacacuaaacaacgugcauucaaaugacacaguacgugauaggaccccuuaucggacccuauugaugaaugaguuagguguuccuuuucaucuggggaccaagcaagugugcauagcauggucaaguucaaguugucacgauggaaaagcauggcugcauguuuguauaacgggggaugauaaaaaugcaacugcuagcuucauuuauaaugggaggcuuguagauaguauuguuucaugguccaaagaaauccucaggacccaggagucagaaugcguuuguaucaauggaacuuguacaguaguaaugacugaugggagugcuucagggaaagcugauacuaaaauacuauucauugaggaggggaaaaucguucauacuagcacauugucaggaagugcucagcaugucgaggaguguuccugcuauccucgauauccuggugucagaugugucugcagagacaacuggaaaggcuccaauaggcccaucguagauauaaacauaaaggaucauagcauuguuuccaguuauguguguucaggacuuguuggagacacacccagaaaaaacgacagcuccagcaguagccauuguuuggauccuaacaaugaagaagguggucauggagugaaaggcugggccuuugaugauggaaaugacguguggaugggaagaacgaucagcgagaagucacgcuuaggauaugaaaccuucaaagucauugaaggcugguccaacccuaauuccaaauugcagauaaauaggcaagucauaguugacagagguaauagguccgguuauucugguauuuucucuguugaaggcaaaagcugcaucaaucggugcuuuuauguggaguugauaaggggaagaaaagaggaaacugaagucuuguggaccucaaacaguauuguuguguuuuguggcaccucagguacauauggaacaggcucauggccugauggggcggacaucaaucucaugccuauauaa

SEQ ID NO: 47894 - RNA, 1410 nt, Artificial Sequence
  derived and/or modified CDS sequence (wt) from neuraminidase__InfluenzaA__ABS71663
auguauccaaucaaaaagauaauaacgauuggcucuguuucucucaccauuuccacaauaugcuucuucaugcaaauugccaucuugauaacuacuguaacauugcauuucaagcaauaugaauucaacucccccccaaacaaccaagugaugcugugugaaccaacaauaauagaaagaaacauaacagagauaguguaucugaccaacaccaccauagagaaggaaauaugccccaaacuagcagaauacagaaauuggucaaagccgcaaugugacauuacaggauuugcaccuuuuucuaaggacaauucgauuaggcuuuccgcugguggggacaucugggugacaagagaaccuuaugugucaugcgauccugacaaguguuaucaauuugcccuuggacagggaacaacacuaaacaacgugcauucaaaugacacaguacgugauaggaccccuuauaggacccuauugaugaaugaguuagguguuccuuuucaucuggggaccaagcaagugugcauagcauggucaagcucaaguugucacgauggaaaagcauggcugcauguuuguauaacgggggaugaucaaaaugcaacugcuagcuucauuuacaaugggaggcuuguagauaguauuguuucaugguccaaagaaauccucaggacccaggagucagaaugcguuuguaucaauggaacuuguacaguaguaaugacugaugggagugcuucaggaaaagcugauacuaaaauacuauucauugaggaggggaaaaucguucauacuagcacauugucaggaagugcucagcaugucgaggagugcuccugcuauccucgauauccuggugucagaugugucugcagagacaacuggaaaggcuccaauaggcccaucguagauauaaacauaaaggaucauagcauuguuuccaguuauguguguucaggacuuguuggagacacacccagaaaaaacgacagcuccagcaguagccauuguuuggauccuaacaaugaagaagguggucauggagugaaaggcugggccuuugaugauggaaaugacguguggaugggaaggacgaucagcgagaagucacgcuuaggauaugaaaccuucaaagucauugaaggcugguccaacccuaauuccaaauugcagaugaauaggcaagucauaguugacagagguaauagguccgguuauucugguauuuucucuguugaaggcaaaagcugcaucaaucggugcuuuuauguggaguugauaaggggaagaaaagaggaaacugaagucuuguggaccucaaacaguauuguuguguuuuguggcaccucagguacauauggaacaggcucauggccugauggggcggacaucaaucucaugccuauauaa

SEQ ID NO: 47895 - RNA, 1410 nt, Artificial Sequence
  derived and/or modified CDS sequence (wt) from neuraminidase__InfluenzaA__ABU40956
augaauccaaaucaaaagauaauaacgauuggcucuguuucucucaccauuuccacaauaugcuucuucaugcaaauugccaucuugauaacuacugugacauugcauuucaagcaauaugaauucaacucccccccaaacaaccaagugaugcugugugaaccaacaauaauagaaagaaacauaacagagauaguguaucugaccaacaccaccauagagaaggaaauaugccccaaacuagcagaauacagaaauuggucaaagccgcaaugugacauuacaggauuugcaccuuuuucuaaggacaauucgauuaggcuuuccgcugguggggacaucugggugacaagagaaccuuaugugucaugcgauccugacaauuguuaucaauuugcccuuggacagggaacaacacuaaacaacgugcauucaaaugacacaguacgugauaggaccccuuaccggacccuauugaugaaugaguuagguguuccuuuucaucuggggaccaagcaagugugcauagcaugguccagcucaaguugucacgauggaaaagcauggcugcauguuuguauaacgggggaugauaaaaaugcaacugcuagcuucauuuacaaugggaggcuuguagauaguauuguuucaugguccaaagaaauccucaggacccaggagucagaaugcguuuguaucaauggaacuuguacaguaguaaugacugaugggagugcuucaggaaaagcugauacuaaaauacuauucauugaggaggggaaaauuguucauacuagcacauugucaggaagugcucagcaugucgaggagugcuccugcuauccucgauauccuggugucagaugugucugcagagacaacuggaaaggcuccaauaggcccaucauagauauaaacauaaaggaucauagcauuguuuccaguuauguguguucaggacuuguuggagacacacccagaaaaaacgacagcuccagcaguagccauuguuuggauccuaacaaugaagaagguggucauggagugaaaggcugggccuuugaugauggaaaugacguguggaugggaagaacgaucagcgagaagucacgcuuaggguaugaaaccuucaaagucauugaaggcugguccaacccuaaguccaaauugcagauaaauaggcaagucauaguugacagagguaauagguccgguuauucugguauuuucucuguugaaggcaaaagcugcaucaaucggugcuuuuauguggaguugauaaggggaagaaaagaggaaacugaagucuuguggaccucaaacaguauuguuguguuuuguggcaccucagguacauauggaacaggcucauggccugauggggcggacaucaaucucaugccuauauaa

SEQ ID NO: 47896 - RNA, 1410 nt, Artificial Sequence
  derived and/or modified CDS sequence (wt) from neuraminidase__InfluenzaA__ABU50651
augaauccaaaucaaaagauaauaacgauuggcucuguuucucucaccauuuccacaauaugcuucuucaugcaaauugccaucuugauaacuacuguaacauugcauuucaagcaauaugaauucaacucccccccaaacaaccaagugaugcugugugaaccaacaauaauagaaagaaacauaacagagauaguguaucugaccaacaccaccauagagaaggaaauaugccccaaacuagcagaauacagaaauuggucaaagccgcaaugugacauuacaggauuugcaccuuuuucuaaggacaauucgauuaggcuuuccgcugguggggacaucugggugacaagagaaccuuaugugucaugcgauccugacaaguguuaucaauuugcccuuggacagggaacaacacuaaacaacgugcauucaaaugacacaguacgugauaggaccccuuaucggacccuauugaugaaugaguuagguguuccuuuucaucuggggaccaagcaagugugcauagcaugguccagcucaaguugucacgauggaaaagcauggcugcauguuuguauaacgggggaugauaaaaaugcaacugcuagcuucauuuacaaugggaggcuuguagauaguauuguuucaugguccaaagaaauccucaggacccaggagucagaaugcguuuguaucaauggaacuuguacaguaguaaugacugaugggagugcuucaggaaaagcugauacuaaaauacuauucauugaggaggggaaaaucguucauacuagcacauugucaggaagugcucagcaugucgaggagugcuccugcuauccucgauauccuggugucagaugugucugcagagacaacuggaaaggcuccaauaggcccaucguagauauaaacauaaaggaucauagcauuguuuccaguuauguguguucaggacuuguuggagacacacccagaaaaaacgacagcuccagcaguagccauuguuuggauccuaacaaugaagaagguggucauggagugaaaggcugggccuuugaugauggaaaugacguguggaugggaagaacgaucagcgagaagucacgcuuaggguaugagaccuucaaagucauugaaggcugguccaacccuaaguccaaauugcagauaaauaggcaagucauaguugacagagguaauagguccgguuauucugguauuuucucuguugaaggcaaaagcugcaucaaucggugcuuuuauguggaguugauaaggggaagaaaagaggaaacugaagucuuguggaccucaaacaguauuguuguguuuuguggcaccucagguacauauggaacaggcucauggccugauggggcggacaucaaucucaugccuauauaa

SEQ ID NO: 47897 - RNA, 1410 nt, Artificial Sequence
  derived and/or modified CDS sequence (wt) from neuraminidase__InfluenzaA__ABU80180
augaauccaaaucaaaagauaauaacgauuggcucuguuucucucaccauugccacaauaugcuuccuuaugcaaauugccauccugguaacuacuguaacauugcauuucaagcaauaugaaugcaacuccuucccaaacaaccaagugaugcugugugaaccaacaauaauagaaagaaacauaacagagauaguauaucugaccaacaccaccauagagaaggaaauaugccccaaacuagcagaauacagaaauuggucaaagccgcaauguaacauuacaggauuugcaccuuuuucuaaggacaauucgauucggcuuuccgcugguggggacaucugggugacaagagaaccuuaugugucaugcgauccugacaaguguuaucaauuugcccuuggacagggaacaacacuaaacaacgggcauucaaaugacacaguacaugauaggaccccuuaucgaacccuauugaugaaugaguuggguguuccauuucauuugggaaccaagcaagugugcauagcaugguccagcucaaguugucacgauggaaaagcauggcugcauguuuguguaacgggggaugaugaaaaugcaacugcuagcuucauuuacaaugggaggcuuguagauaguauugguucaugguccaaaaaaauccucaggacccaggagucggaaugcguuuguaucaauggaacuuguacaguaguaaugacugaugggagugcuucaggaaaagcugauacuaaaauacuauucauugaggaggggaaaaucguucauacuagcucauugucaggaagugcucagcaugucgaggagugcuccuguuauccucgauauccuggugucagaugugucugcagagacaacuggaaaggcuccaauaggcccaucguagauauaaauguaaaggauuauagcauuguuuccaguuaugugugcucaggacuuguuggagacacacccagaaaaaacgacagcuccagcaguagccauugcuuggauccuaacaaugaggaagguggucauggagugaaaggcugggccuuugaugauggaaaugacguguggaugggaagaacgaucagcgagaaguuacgcucaggauaugaaaccuucaaagucauugaaggcugguccaaaccuaacuccaaauugcagauaaauaggcaagucauaguugacagagguaauagguccgguuauucugguauuuucucuguugaaggcaaaagcugcaucaaucggugcuuuuauguggaguugauaaggggaaggaaacaggaaacugaagucuuguggaccucaaacaguauuguuguguuuuguggcaccucagguacauauggaacaggcucauggccugauggggcggacaucaaucucaugccuauauaa

SEQ ID NO: 47898 - RNA, 1413 nt, Artificial Sequence; identical to SEQ ID NO: 46889
  derived and/or modified CDS sequence (wt) from neuraminidase__InfluenzaA__ABU80301

SEQ ID NO: 47899 - RNA, 1413 nt, Artificial Sequence
  derived and/or modified CDS sequence (wt) from neuraminidase__InfluenzaA__ABU80312
augaauacaaaucaaaaaauaauaaccauuggaucaaucaguauagcaaucggaauaauuagucuaauguugcaaauaggaaauauuauuucaauaugggcuagucacucaauccaaacuggaagucaaaaccacacuggaauaugcaaccaaagaaucaucacauaugaaaacagcaccugggugaaucacacauauguuaauauuaacaacacuaauguuguugcuggaaaggacaaaacuucagugacauuggccggcaauucaucucuuuguuccaucaguggaugggcuauauacacaaaagacaacagcauaagaauuggauccaaaggagauguuuuugucaugagagaaccuuucauaucauguucucacuuggaaugcagaaccuuuuuucugacccaaggugcucuauuaaaugacaaacauucaaaugggaccguuaaggacagaaguccuuauagggccuuaaugagcugcccucuaggugaagcuccguccccauacaauucaaaguuugaaucaguugcauggucagcaagcgcaugccaugauggcaugggcugguuaacaaucggaauuucugguccagacaauggagcuguggcuguacuaaaauacaacggcauaauaacugaaaccauaaaaaguuggaaaaagcgaauauuaagaacacaagagucugaaugugucugugugaacgggucauguuucaccauaaugaccgauggcccgaguaauggggccgccucguacaaaaucuucaagaucgaaaaggggaagguuacuaaaucaauagaguugaaugcacccaauuuucauuaugaggaauguuccuguuacccagacacuggcacagugauguguguaugcagggacaacuggcaugguucaaaucgaccuugggugucuuuuaaucaaaaccuggauuaucaaauaggauacaucugcagugggguguucggugacaauccgcgucccaaagauggagagggcagcuguaauccagugacuguugauggagcagacggaguaaagggguuuucauacaaauaugguaaugguguuuggauaggaaggacuaaaaguaacagacuuagaaagggguuugagaugauuugggauccuaauggauggacagauaccgacaguaauuucucagugaaacaggauguuguggcaauaacugauuggucaggguacagcggaaguuucguucaacauccugaguuaacaggauuggacuguauaagaccuugcuucuggguugaguuagucagaggacugccuagagaaaauacaacaaucuggacuagugggagcagcauuucuuuuuguggcguaaauagugauacugcaaacuggucuuggccagacggugcugaguugccguucaccauugacaaguag

SEQ ID NO: 47900 - RNA, 1410 nt, Artificial Sequence; identical to SEQ ID NO: 46755
  derived and/or modified CDS sequence (wt) from neuraminidase__InfluenzaA__ABU80323

SEQ ID NO: 47901 - RNA, 1410 nt, Artificial Sequence
  derived and/or modified CDS sequence (wt) from neuraminidase__InfluenzaA__ABU80334
augaauccaaaucaaaagauaauaacaauuggcucuguuucucucaccauugccacaauaugcuuccuuaugcaaauugccauccugguaacuacuguaacauugcauuucaagcaguaugaaugcaacucccccccaaacaaccaaguaaugcugugugaaccaacaauaauagaaagaaacauaacagagauaguguaucugaccaacaccaccauagagaaggaaauaugccccaaacuagcagaauacagaaauuggucaaagccgcaauguaacauuacaggauuugcaccuuuuucuaaggacaauucgauucggcuuuccgcugguggggacaucugggugacaagagaaccuuaugugucaugcgauccugacaaguguuaucaauuugcccuugggcagggaacaacacuaaacaacgggcauucaaaugacacaguacaugauaggaccccuuaccggacccuauugaugaaugaauuggguguuccauuucauuugggaaccaggcaagugugcauagcaugguccagcucaaguugucacgauggaaaagcauggcugcauguuuguguaacuggggaugaugaaaaugcaacugcuagcuucauuuacaaugggaggcuuguagauaguauugguucaugguccaaaaaaacacucagaacccaggagucggaaugcguuuguaucaauggaacuuguacaguaguaaugacugaugggagcgcuucaggaaaagcugauacuaaaauacuauucauugaggaggggaaaaucauucauauuagcacauugucaggaagugcucagcaugucgaggagugcuccuguuauccucgauauccuggugucagaugugucugcagagacaacuggaaaggcuccaauaggcccaucguagauauaaauguaaaggauuauagcauuguuuccaguuaugugugcucaggacuuguuggagacacacccagaaaaaacgacagcuucagcaguagccauugccuagauccuaacaaugaggaagguggucauggagugaaaggcugggccuuugaugauggaaaugacguguggaugggaagaacgaucagcgagaaguuacgcucagguuaugaaaccuucaaagucaucgaaggcugguccaaaccuaacuccaaauuacagauaaauaggcaagucauaguugaaagagguaacagguccgguuauucugguauuuucuccguugaaggcaaaagcugcaucaaucggugcuuuuauguggaguugauacggggaaggaaagaggaaacugaagucugguggaccucaaacaguauuguuguguuuuguggcaccucagguacauauggaacaggcucauggccugauggggcggauaucaaucucaugccuauauaa

SEQ ID NO: 47902 - RNA, 1410 nt, Artificial Sequence
  derived and/or modified CDS sequence (wt) from neuraminidase__InfluenzaA__ABU92762
augaauccaaaucaaaagauaauaacaauuggcucuguuucucucaccauugccacaauaugcuuccuuaugcaaauugccauccugguaacuacuguaacauugcauuucaagcaguaugaaugcaacucccccccaaacaaccaaguaaugcugugugaaccaacaauaauagaaagaaacauaacagagauaguguaucugaccaauaccaccauagagaaggaaauaugccccaaauuagcagaauacagaaauuggucaaagccgcaauguaacauuacaggauuugcaccuuuuucuaaggacaauucgauucggcuuuccgcugguggggacaucugggugacaagagaaccuuaugugucaugcgauccugacaaguguuaucaauuugcccuugggcagggaacaacacuaaacaacgggcauucaaaugacacaguacaugauaggaccccuuaccggacccuauugaugaaugaauuggguguuccauuucauuugggaaccaggcaagugugcauagcaugguccagcucaaguugucacgauggaaaagcauggcugcauguuuguguaacuggggaugaugaaaaugcaacugcuagcuucauuuacaaugggaggcuuguagauaguauugguucaugguccaaaaaaauacucagaacccaggagucggaaugcguuuguaucaauggaacuuguacaguaguaaugacugaugggagcgcuucaggaaaagcugauacuaaaauacuauucauugaggaggggaaaaucguucauauuagcacauugucaggaagugcucagcaugucgaggagugcuccuguuauccucgauauccuggugucagaugugucugcagagacaacuggaaaggcuccaauaggcccaucguagauauaaauguaaaggauuauagcauuguuuccaguuaugugugcucaggacuuguuggagacacacccagaaaaaacgacagcuucagcaguagccauugccuagauccuaacaaugaggaagguggucauggagugaaaggcugggccuuugaugauggaaaugacguguggaugggaagaacgaucagcgagaaguuacgcucagguuaugaaaccuucaaagucaucgagggcugguccaaaccuaacuccaaauuacagauaaauaggcaagucauaguugaaagagguaacagguccgguuauucugguauuuucuccguugaaggcaaaagcugcaucaaucggugcuuuuauguggaguugauaaggggaaggaaagaggaaacugaagucugguggaccucaaacaguauuguuguguuuuguggcaccucagguacauauggaacaggcucauggccugauggggcggauaucaaucucaugccuauauaa

SEQ ID NO: 47903 - RNA, 1410 nt, Artificial Sequence
  derived and/or modified CDS sequence (wt) from neuraminidase__InfluenzaA__ABU92764
augaauccaaaucaaaagauaauaacaauuggcucuguuucucucaccauugccacaauaugcuuccuuaugcaaauugccauccugguaacuacuguaacauugcauuucaagcaguaugaaugcaacucccccccaaacaaccaaguaaugcugugugaaccaacaauaauggaaagaaacauaacagagauaguguaucugaccaacaccaccauagagaaggaaauaugccccaaacuagcagaauacagaaauuggucaaagccgcaauguaacguuacaggauuugcaccuuuuucuaaggacaauucgauucggcuuuccgcugguggggacaucugggugacaagagaaccuuaugugucaugcgauccugacaaguguuaucaauuugcccuugggcagggaacaacacuaaacaacgggcauucaaaugacacaguacaugauaggaccccuuaccggacccuauugaugaaugaauuggguguuccauuucauuugggaaccaggcaagugugcauagcaugguccagcucaaguugucacgauggaaaagcauggcugcauguuuguguaacuggggaugaugaaaaugcaacugcuagcuucauuuacaaugggaggcuuguagauaguauugguucaugguccaaaaaaauacucagaacccaggagucggaaugcguuuguaucaauggaacuuguacaguaguaaugacugaugggagcgcuucaggaaaagcugauacuaaaauacuauucauugaggaggggaaaaucguucauauuagcacauugucaggaagugcucagcaugucgaggagugcuccuguuauccucgauauccuggugucagaugugucugcagagacaacuggaaaggcuccaauaggcccauuguagauauaaauguaaaggauuauagcauuguuuccaguuaugugugcucaggacuuguuggagacacacccagaaaaaacgacagcuucagcaguagccauugccuagauccuaacaaugaggaagguggucauggagugaaaggcugggccuuugaugauggaaaugacguguggaugggaagaacgaucagcgagaaguuacgcucagguuaugaaaccuucaaagucaucgaaggcugguccaaaccuaacuccaaauuacagauaaauaggcaagucauaguugaaagagguaacagguccgguuauucugguauuuucuccguugaaggcaaaagcugcaucaaucggugcuuuuauguggaguugauaaggggaaagaaagaggaaacugaagucugguggaccucaaacaguauuguuguguuuuguggcaccucagguacauauggaacaggcucauggccugauggggcggauaucaaucucaugccuauauaa

SEQ ID NO: 47904 - RNA, 1410 nt, Artificial Sequence
  derived and/or modified CDS sequence (wt) from neuraminidase__InfluenzaA__ABU92765
augaauccaaaucaaaagauaauaacaauuggcucuguuucucucaccauugccacaauaugcuuccuuaugcaaauugccauccugguaacuacuguaacauugcauuucaagcaguaugaaugcaacucccccccaaacaaccaaguaaugcugugugaaccaacaauaauagaaagaaacauaacagagauaguguaucugaccaacaccaccauagagaaggaaauaugccccaaacuagcagaauacagaaauuggucaaagccgcaauguaacauuacaggauuugcaccuuuuucuaaggacaauucgauucggcuuuccgcugguggggacaucugggugacaagagaaccuuaugugucaugcgauccugacaaguguuaucaauuugcccuugggcagggaacaacacuaaacaacgggcauucaaaugacacaguacaugauaggaccccuuaccggacccuauugaugaaugaauuggguguuccauuucauuugggaaccaggcaagugugcauagcaugguccagcucaaguugucacgauggaaaagcauggcugcauguuuguguaacuggggaugaugaaaaugcaacugcuagcuucauuuacaaugggaggcuuguagauaguauugguucaugguccaaaaaaauacucagaacccaggagucggaaugcguuuguaucaauggaacuuguacaguaguaaugacugauggaagcgcuucaggaaaagcugauacuaaaauacuauucauugaggaggggaaaaucguucauauuagcacauugucaggaagugcucagcaugucgaggagugcuccuguuauccucgauauccuggugucagaugugucugcagagacaacuggaaaggcuccaauaggcccauuguagauauaaauguaaaggauuauagcauuguuuccaguuaugugugcucaggacuuguuggagacacacccagaaaaaacgacagcuucagcaguagccauugccuagauccuaacaaugaggaagguggucauggagugaaaggcugggccuuugaugauggaaaugacguguggaugggaagaacgaucagcgagaaguuacgcucagguuaugaaaccuucaaagucaucgaaggcugguccaaaccuaacuccaaauuacagauaaauaggcaagucauaguugaaagagguaacagguccgguuauucugguauuuucuccguugaaggcaaaagcugcaucaaucggugcuuuuauguggaguugauaaggggaaggaaagaggaaacugaagucugguggaccucaaacaguauuguuguguuuuguggcaccucagguacauauggaacaggcucauggccugauggggcggauaucaaucucaugccuauauaa

SEQ ID NO: 47905 - RNA, 1410 nt, Artificial Sequence; identical to SEQ ID NO: 47178
  derived and/or modified CDS sequence (wt) from neuraminidase__InfluenzaA__ABU92766

SEQ ID NO: 47906 - RNA, 1410 nt, Artificial Sequence; identical to SEQ ID NO: 47178
  derived and/or modified CDS sequence (wt) from neuraminidase__InfluenzaA__ABU92767

SEQ ID NO: 47907 - RNA, 1410 nt, Artificial Sequence
  derived and/or modified CDS sequence (wt) from neuraminidase__InfluenzaA__ABU92768
augaauccaaaucaaaagauaauaacaauuggcucuguuucucucaccauugccacaauaugcuuccuuaugcaaauugccauccugguaacuacuguaacauugcauuucaagcaguaugaaugcaacucccccccaaacaaccaaguaaugcugugugaaccaacaauaauagaaagaaacauaacagagauaguguaucugaccaacaccaccauagagaaggaaauaugccccaaacuagcagaauacagaaauuggucaaagccgcaauguaacauuacaggauuugcaccuuuuucuaaggacaauucgauucggcuuuccgcugguggggacaucugggugacaagagaaccuuaugugucaugcgauccugacaaguguuaucaauuugcccuugggcagggaacaacacuaaacaacgggcauucaaaugacacaguacaugauaggaccccuuaccggacccuauugaugaaugaauuggguguuccauuucauuugggaaccaggcaagugugcauagcaugguccagcucaaguugucacgauggaaaagcauggcugcauguuuguguaacuggggaugaugaaaaugcaacugcuagcuucauuuacaaugggaggcuuguagauaguauugguucaugguccaaaaaaauacucagaacccaggagucggaaugcguuuguaucaauggaacuuguacaguaguaaugacugaugggagcgcuucaggaaaagcugauacuaaaauacuauucauugaggaggggaaaaucguucauauuagcacauugucaggaagugcucagcaugucgaggagugcuccuguuauccucgauauccuggugucagaugugucugcagagacaacuggaaaggcuccaauaggcccauuguagauauaaauguaaaggauuauagcauuguuuccaguuaugugugcucaggacuuguuggagacacacccagaaaaaacgacagcuucagcaguagccauugccuagauccuaacaaugaggaagguggucauggagugaaaggcugggccuuugaugauggaaaugacguguggaugggaagaacgaucagcgagaaguuacgcucagguuaugaaaccuucaaagucaucgaaggcugguccaaaccuaacuccaaauuacagauaaauaggcaagucauaguugaaagagguaacagguccgguuauucugguauuuucuccguugaaggcaaaagcugcaucaaucggugcuuuuauguggaguugauaaggggaaggaaagaggaaacugaagucugguggaccucaaacaguauuguuguguuuuguggcaccucagguacauauggaacaggcucauggccugauggggcggauaucaaucucaugccuauauaa

SEQ ID NO: 47908 - RNA, 1410 nt, Artificial Sequence
  derived and/or modified CDS sequence (wt) from neuraminidase__InfluenzaA__ABU92769
augaauccaaaucaaaagauaauaacgauuggcucuguuucucucaccauugccacaauaugcuuccuuaugcaaauugccauccugguaacuacuguaacauugcauuucaagcaauaugaaugcaacucccccccaaacaaccaagugaugcugugugaaccaacaauaauagaaagaaacauaacagagauaguguaucugaccaacaccaccauagagaaggaaauaugccccaaacuagcagaauacagaaauuggucaaagccgcaauguaacauuacaggauuugcaccuuuuucuaaggacaauucgauucggcuuuccgcugguggggacaucugggugacaagagaaccuuaugugucaugcgauccugacaaguguuaucaauuugcccuuggacagggaacaacacuaaacaacggacauucaaaugacacaguacaugauaggaccccuuaucggacccuauugaugaaugaguuggguguuccauuucauuugggaaccaagcaagugugcauagcaugguccagcucaaguugucacgauggaaaagcauggcugcauguuuguguaacgggggaugaugaaaaugcaacugcuagcuucauuuacaaugggaggcuuguagauaguauugguucaugguccaaaaaaauccucaggacccaggagucggaaugcguuuguaucaaugggacuuguacaguaguaaugacugaugggagugcuucaggaaaagcugauacuaaaauacuauucauugaggaggggaaaaucguucauacuagccuauugucaggaagugcucagcaugucgaggagugcuccuguuauccucgauacccuggugucagaugugucugcagagacaacuggaaaggcuccaauaggcccaucguagauauaaauguaaaggauuauagcauuguuuccaguuaugugugcucaggacuuguuggagacacacccagaaaaaacgacagcuccagcaguagccauugcuuggauccuaacaaugaggaagguggucauggagugaaaggcugggccuuugaugauggaaaugacguguggaugggaagaacgaucagcgagaaguuacgcucaggauaugaaaccuucaaagucauugaaggcugguccaaaccuaacuccaaauugcagauaaauaggcaagucauaguugacagagguaauagguccgguuauucugguauuuucucuguugaaggcaaaagcugcaucaaucggugcuuuuauguggaguugauaaggggaaggaaacaggaaacugaagucuuguggaccucaaacaguauuguuguguuuuguggcaccucagguacauauggaacaggcucauggccugauggggcggacaucaaucucaugccuauauaa

SEQ ID NO: 47909 - RNA, 1410 nt, Artificial Sequence
  derived and/or modified CDS sequence (wt) from neuraminidase__InfluenzaA__ABU92770
augaauccaaaucaaaagauaauaacgauuggcucuguuucucucaccauugccacaaucugcuuccuuaugcaaauugccauccuaguaacuacuguaacauugcauuucaagcaauaugaaugcaacucccccccaaacaaccaagugaugcugugugaaccaacaauaauagaaagaaacauaacagagauaguauaucugaccaacaccaccauagagaaggaaauaugccccaaacuagcagaauacagaaauuggucaaagccgcaauguaacauuacaggauuugcaccuuuuucuaaggacaauucgauucggcuuuccgcugguggggacaucugggugacaagagaaccuuaugugucaugcgauccugacaaguguuaucaauuugcccuuggacagggaacaacacuaaacaacgggcauucaaaugacacaguacaugauaggaccccuuaucgaacccuauugaugaaugaguuggguguuccauuucauuugggaaccaagcaagugugcauagcaugguccagcucaaguugucacgauggaaaagcauggcugcauguuuguguaacgggggaugaugaaaaugcaacugcuagcuucauuuacaaugggaggcuuguagauaguauugguucaugguccaaaaaaauccucaggacccaggagucggaaugcguuuguaucaauggaacuuguacaguaguaaugacugaugggagugcuucaggaaaagcugauacuaaaauacuauucauugaggaggggaaaaucguucauacuagcucauugucaggaagugcucagcaugucgaggagugcuccuguuauccucgauauccuggugucagaugugucugcagagacaacuggaaaggcuccaauaggcccaucguagauauaaauguaaaggauuauagcauuguuuccaguuaugugugcucaggacuuguuggagacacacccagaaaaaacgacagcuccagcaguagccauugcuuggauccuaacaaugaggaagguggucauggagugaaaggcugggccuuugaugauggaaaugacguguggaugggaagaacgaucagcgagaaguuacgcucaggauaugaaaccuucaaagucauugaaggcugguccaaaccuaacuccaaauugcagauaaauaggcaagucauaguugacagagguaauagauccgguuauucugguauuuucucuguugaaggcaaaagcugcaucaaucggugcuuuuauguggaguugauaaggggaaggaaacaggaaacugaagucuuguggaccucaaacaguauuguuguguuuuguggcaccucagguacauauggaacaggcucauggccugauggggcggacaucaaucucaugccuauauaa

SEQ ID NO: 47910 - RNA, 1410 nt, Artificial Sequence
  derived and/or modified CDS sequence (wt) from neuraminidase__InfluenzaA__ABU92771
augaauccaaaucaaaagauaauaacgauuggcucuguuucucucaccauugccacaauaugcuuccuuaugcaaauugccauccugguaacuacuguaacauugcauuucaagcaauaugaaugcaacucccccccaaacaaccaagugaugcugugugaaccaacaauaauagaaagaaacauaacagagauaguguaucugaccaacaccaccauagagaaggaaauaugccccaaacuagcagaauacagaaauuggucaaagccgcaauguaacauuacaggauuugcaccuuuuucuaaggacaauucgauucggcuuuccgcugguggggacaucugggugacaagagaaccuuaugugucaugcgauccuaacaaguguuaucaauuugcccuuggacagggaacaacacuaaacaacggacauucaaaugacacaguacaugauaggaccccuuaucggacccuauugaugaaugaguuggguguuccauuucauuugggaaccaagcaagugugcauagcaugguccagcucaaguugucacgauggaaaagcauggcugcauguuuguguaacgggggaugaugaaaaugcaacugcuagcuucauuuacaaugggaggcuuguagauaguauugguucaugguccaaaaaaauccucaggacccaggagucggaaugcguuuguaucaauggaacuuguacaguaguaaugacugaugggagugcuucaggaaaagcugauacuaaaauacuauucauugaggaggggaaaaucguucauacuagccuauugucaggaagugcucagcaugucgaggagugcuccuguuauccucgauacccuggugucagaugugucugcagagacaacuggaaaggcuccaauaggcccaucguagauauaaauguaaaggauuauagcauuguuuccaguuaugugugcucaggacuuguuggagacacacccagaaaaaacgacagcuccagcaguagccauugcuuggauccuaacaaugaggaagguggucauggagugaaaggcugggccuuugaugauggaaaugacguguggaugggaagaacgaucagcgagaaguuacgcucaggauaugaaaccuucaaagucauugaaggcugguccaaaccuaacuccaaauugcagauaaauaggcaagucauaguugacagagguaacagguccgguuauucugguauuuucucuguugaaggcaaaagcugcaucaaucggugcuuuuauguggaguugauaaggggaaggaaacaggaaacugaagucuuguggaccucaaacaguauuguuguguuuuguggcaccucagguacauauggaacaggcucauggccugauggggcggacaucaaucucaugccuauauaa

SEQ ID NO: 47911 - RNA, 1410 nt, Artificial Sequence
  derived and/or modified CDS sequence (wt) from neuraminidase__InfluenzaA__ABU92772
augaauccaaaucaaaagauaauaacaauuggcucuguuucucucaccauugccacaauaugcuuccuuaugcaaauugccauccugguaacuacuguaacauugcauuucaagcaguaugaaugcaacucccccccaaacaaccaaguaaugcugugugaaccaacaauaauagaaagaaacauaacagagauaguguaucugaccaacaccaccauagagaaggaaauaugccccaaacuagcagaauacagaaauuggucaaagccgcaauguaacauuacaggauuugcaccuuuuucuaaggacaauucgauucggcuuuccgcugguggggacaucugggugacaagagaaccuuaugugucaugcgauccugacaaguguuaucaauuugcccuugggcagggaacaacacuaaacaacgggcauucaaaugacacaguacaugauaggaccccuuaccggacccuauugaugaaugaauuggguguuccauuucauuugggaaccaggcaagugugcauagcaugguccagcucaaguugucacgauggaaaagcauggcugcauguuuguguaacuggggaugaugaaaaugcaacugcuagcuucauuuacaaugggaggcuuguagauaguauugguucaugguccaaaaauauacucagaacccaggagucggaaugcguuuguaucaauggaacuuguacaguaguaaugacugaugggagcgcuucaggaaaagcugauacuaaaauacuauucauugaggaggggaaaaucguucauauuagcacauugucaggaagugcucagcaugucgaggagugcuccuguuauccucgauauccuggugucagaugugucugcagagacaacuggaaaggcuccaauaggcccaucguagauauaaauguaaaggauuauagcauuguuuccaguuaugugugcucaggacuuguuggagacacacccagaaaaaacgacagcuucagcaguagccauugccuagauccuaacaaugaggaagguggucauggagugaaaggcugggccuuugaugauggaaaugacguguggaugggaagaacgaucagcgagaaguuacgcucagguuaugaaaccuucaaagucaucgaaggcugguccaaaccuaacuccaaauuacagauaaauaggcaagucauaguugaaagagguaacagguccgguuauucugguauuuucuccguugaaggcaaaagcugcaucaaucggugcuuuuauguggaguugauaaggggaaggaaagaggaaacugaagucugguggaccucaaacaguauuguuguguuuuguggcaccucagguacauauggaacaggcucauggccugauggggcggauaucaaucucaugccuauauaa

SEQ ID NO: 47912 - RNA, 1410 nt, Artificial Sequence
  derived and/or modified CDS sequence (wt) from neuraminidase__InfluenzaA__ABU92773
augaauccaaaucaaaagauaauaacaauuggcucuguuucucucaccauugccacaauaugcuuccuuaugcaaauugccauccugguaacuacuguaacauugcauuucaagcaguaugaaugcaacucccccccaaacaaccaaguaaugcugugugaaccaacaauaauagaaagaaacauaacagagacaguguaucugaccaacaccaccauagagaaggaaauaugccccaaauuagcagaauacagaaauuggucaaagccgcaauguaacauuacaggauuugcaccuuuuucuaaggacaauucgauucggcuuuccgcugguggggacaucugggugacaagagaaccuuaugugucaugcgauccugacaaguguuaucaauuugcccuugggcagggaacaacacuaaacaacgggcauucaaaugacacaguacaugauaggaccccuuaccggacccuauugaugaaugaauuggguguuccauuucauuugggaaccaggcaagugugcauagcaugguccagcucaaguugucacgauggaaaagcauggcugcauguuuguguaacuggggaugaugaaaaugcaacugcuagcuucauuuacaaugggaggcuuguagauaguauugguucaugguccaaaaaaauacucagaacccaggagucggaaugcguuuguaucaauggaacuuguacaguaguaaugacugaugggagcgcuucaggaaaagcugauacuaaaauacuauucauugaggaggggaaaaucguucauauuagcacauugucaggaagugcucagcaugucgaggagugcuccuguuauccucgauauccuggugucagaugugucugcagagacaacuggaaaggcuccaauaggcccaucguagauauaaauguaaaggauuauagcauuguuuccaguuaugugugcucaggacuuguuggagacacacccagaaaaaacgacagcuucagcaguagccauugccuagauccuaacaaugaggaagguggucauggagugaaaggcugggccuuugaugauggaaaugacguguggaugggaagaacgaucagcgagaaguuacgcucagguuaugaaaccuucaaagucaucgaaggcugguccaaaccuaacuccaaauuacagacaaauaggcaagucauaguugaaagagguaacagguccgguuauucugguauuuucuccguugaaggcaaaagcugcaucaaucggugcuuuuauguggaguugauaaggggaaggaaagaggaaacugaagucugguggaccucaaacaguauuguuguguuuuguggcaccucagguacauauggaacaggcucauggccugauggggcggauaucaaucucaugccuauauaa

SEQ ID NO: 47913 - RNA, 1410 nt, Artificial Sequence
  derived and/or modified CDS sequence (wt) from neuraminidase__InfluenzaA__ABU92774
augaauccaaaucgaaagauaauaacaauuggcucuguuucucucaccauugccacaauaugcuuccuuaugcaaauugccauccugguaacuacuguaacauugcauuucaagcaguaugaaugcaacucccccccaaacaaccaaguaaugcugugugaaccaacaauaauagaaagaaacauaacagagacaguguaucugaccaacaccaccauagagaaggaaauaugccccaaauuagcagaauacagaaauuggucaaagccgcaauguaacauuacaggauuugcaccuuuuucuaaggacaauucgauucggcuuuccgcugguggggacaucugggugacaagagaaccuuaugugucaugcgauccugacaaguguuaucaauuugcccuugggcagggaacaacacuaaacaacgggcauucaaaugacacaguacaugauaggaccccuuaccggacccuauugaugaaugaauuggguguuccauuucauuugggaaccaggcaagugugcauagcaugguccagcucaaguugucacgauggaaaagcauggcugcauguuuguguaacuggggaugaugaaaaugcaacugcuagcuucauuuacaaugggaggcuuguagauaguauugguucaugguccaaaaaaauacucagaacccaggagucggaaugcguuuguaucaauggaacuuguacaguaguaaugacugaugggagcgcuucaggaaaagcugauacuaaaauacuauucauugaggaggggaaaaucguucauauuagcacauugucaggaagugcucagcaugucgaggagugcuccuguuauccucgauauccuggugucagaugugucugcagagacaacuggaaaggcuccaauaggcccaucguagauauaaauguaaaggauuauagcauuguuuccaguuaugugugcucaggacuuguuggagacacacccagaaaaaacgacagcuucagcaguagccauugccuagauccuaacaaugaggaagguggucauggagugaaaggcugggccuuugaugauggaaaugacguguggaugggaagaacgaucagcgagaaguuacgcucagguuaugaaaccuucaaagucaucgaaggcugguccaaaccuaacuccaaauuacagacaaauaggcaagucauaguugaaagagguaacagguccgguuauucugguauuuucuccguugaaggcaaaagcugcaucaaucggugcuuuuauguggaguugauaaggggaaggaaagaggaaacugaagucugguggaccucaaacaguauuguuguguuuuguggcaccucagguacauauggaacaggcucauggccugauggggcggauaucaaucucaugccuauauaa

SEQ ID NO: 47914 - RNA, 1410 nt, Artificial Sequence
  derived and/or modified CDS sequence (wt) from neuraminidase__InfluenzaA__ABU92775
augaauccaaaucaaaagauaauaacaauuggcucuguuucucucaccauugccacaauaugcuuccuuaugcaaauugccauccugguaacuacuguaacauugcauuucaagcaguaugaaugcaacucccccccaaacaaccaaguaaugcugugugaaccaacaauaauagaaagaaacauaacagagauuguguaucugaccaauaccaccauagagaaggaaauaugccccaaauuagcagaauacagaaauuggucaaagccgcaauguaacauuacaggauuugcaccuuuuucuaaggacaauucgauucggcuuuccgcugguggggacaucugggugacaagagaaccuuaugugucaugcgauccugacaaguguuaucaauuugcccuugggcagggaacaacacuaaacaacgggcauucaaaugacacaguacaugauaggaccccuuaccggacccuauugaugaaugaauuggguguuccauuucauuugggaaccaggcaagugugcauagcaugguccagcucaaguugucacgauggaaaagcauggcugcauguuuguguaacuggggaugauaaaaaugcaacugcuagcuucauuuacaaugggaggcuuguagauaguauugguucaugguccaaaaaaauacucagaacccaggagucggaaugcguuuguaucaauggaacuuguacaguaguaaugacugaugggagcgcuucaggaaaagcugauacuaaaauacuauucauugaggaggggaaaaucguucauauuagcacauugucaggaagugcucagcaugucgaggagugcuccuguuauccucgauauccuggugucagauguguaugcagagacaacuggaaaggcuccaauaggcccaucguagauauaaauguaaaggauuauagcauuguuuccaguuaugugugcucaggacuuguuggagacacacccagaaaaaacgacagcuucagcaguagccauugccuagauccuaacaaugaggaagguggucauggagugaaaggcugggccuuugaugauggaaaugacguguggaugggaagaacgaucagcgagaaguuacgcucagguuaugaaaccuucaaagucaucgaaggcugguccaaaccuaacuccaaauuacagauaaauaggcaagucauaguugaaagagguaacagguccgguuauucugguauuuucuccguugaaggcaaaagcugcaucaaucggugcuuuuauguggaguugauaaggggaaggaaagaggaaacugaagucugguggaccucaaacaguauuguuguguuuuguggcaccucagguacauauggaacaggcucauggccugauggggcggauaucaaucucaugccuauauaa

SEQ ID NO: 47915 - RNA, 1410 nt, Artificial Sequence
  derived and/or modified CDS sequence (wt) from neuraminidase__InfluenzaA__ABU92777
augaauccaaaucaaaagauaauaacgauuggcucuguuucucucaccauuuccacaauaugcuucuucaugcaaauugccaucuugauaacuacuguaacauugcauuucaagcaauaugaauucaacucccccccaaacaaccaagugaugcugugugaaccaacaauaauagaaagaaacauaacagagauaguguaucugaccaacaccaccauagagaaggaaauaugccccaaacuagcagaauacagaaauuggucaaagccgcaaugugacauuacaggauuugcaccuuuuucuaaggacaauucgauuaggcuuuccgcugguggggacaucugggugacaagagaaccuuaugugucaugcgauccugacaaguguuaucaauuugcccuuggacagggaacaacacuaaacaacgugcauucaaaugacacaguacaugauaggaccccuuaucggacccuauugaugaaugaguuagguguuccauuucaucuggggaccaagcaagugugcauagcaugguccagcucaaguugucacgauggaaaagcauggcugcauguuuguguaacgggggaugauaaaaaugcaacugcuagcuucauuuacaaugggaggcuuguagauaguauuguuucaugguccaaagaaauccucaggacccaggagucagaaugcguuuguaucaauggaacuuguacaguaguaaugacugaugggagugcuucaggaaaagcugauacuaaaauacuauucauugaggaggggaaaaucguucacacuagcacauugucaggaagugcucagcaugucgaggagugcuccugcuauccucgauauccuggugucagaugugucugcagagacaacuggaaaggcuccaauaggcccaucguagauauaaacauaaaggauuauagcauuguuuccaguuaugugugcucaggacuuguuggagacacacccagaaaaaacgacagcuccagcaguagccauugcuuggauccuaacaaugaagaagguggucauggagugaaaggcugggccuuugaugauggaaaugacguguggaugggaagaacgaucagcgagaaguuacgcucaggauaugaaaccuucaaagucauugaaggcugguccaacccuaauuccaaauugcagauaaauaggcaagucauaguugacagagguaauagguccgguuauucugguauuuucucuguugaaggcaaaagcugcaucaaucggugcuuuuauguggagcugauaaggggaagaaaagaggaaacugaagucuuguggaccucaaacaguauuguuguguuuuguggcaccucagguacauauggaacaggcucauggccugauggggcggacaucaaucucaugccuauauaa

SEQ ID NO: 47916 - RNA, 1410 nt, Artificial Sequence
  derived and/or modified CDS sequence (wt) from neuraminidase__InfluenzaA__ABU92778
augaauccaaaucaaaagauaauaacgauuggcucuguuucucucaccauuuccacaauaugcuucuucaugcaaauugccaucuugauaacuacuguaacauugcauuucaagcaauaugaauucaacucccccccaaacaaccaagugaugcugugugaaccaacaauaauagaaagaaacauaacagagauaguguaucugaccaacaccaccauagagaaggaaguaugccccaaacuagcagaauacagaaauuggucaaaaccgcaauguaacauuacaggauuugcaccuuuuucuaaggacaauucgauuaggcuuuccgcugguggggacaucugggugacaagagaaccuuaugugucaugcgauccugacaaguguuaucaauuugcccuuggacagggaacaacacuaaacaacgugcauucaaaugacacaguacaugauaggaccccuuaucggacccuauugaugaaugaguuagguguuccauuucaucuggggaccaagcaagugugcauagcaugguccagcucaaguugucacgauggaaaagcauggcugcauguuuguguaacgggggaugauaaaaaugcaacugcuagcuucauuuacaaugggaggcuuguagauaguauuguuucaugguccaaagaaauccucaggacccaggagucagaaugcguuuguaucaauggaacuuguacaguaguaaugacugaugggagugcuucaggaaaagcugauacuaaaauacuauucauugaggaggggaaaaucguucauacuagcacauugucaggaagugcucagcaugucgaggaguguuccugcuauccucgauauccuggugucagaugugucugcagagacaacuggaaaggcuccaauaggcccauaguagauauaaacauaaaggauuauagcauuguuuccaguuaugugugcucaggacuuguuggagacacacccagaaaaaacgacagcuccagcaguagccauugcuuggauccuaacaaugaagaagguggucauggagugaaaggcugggccuuugaugauggaaaugacguguggaugggaagaacgaucagcgaaaaguuacgcucaggauaugaaaccuucaaagucauugaaggcugguccaacccuaauuccaaauugcagauaaauaggcaagucauaguugacagagguaauagguccgguuauucugguauuuucucuguugaaggcaaaagcugcaucaaucggugcuuuuauguggaguugauaaggggaagaaaagaggaaacugaagucuuguggaccucaaacaguauuguuguguuuuguggcaccucagguacauauggaacaggcucauggccugauggggcggauaucaaucucaugccuauauaa

SEQ ID NO: 47917 - RNA, 1410 nt, Artificial Sequence
  derived and/or modified CDS sequence (wt) from neuraminidase__InfluenzaA__ABU92779
augaauccaaaucaaaagauaauaacaauuggcucuguuucucucaccauugccgcgauaugcuuccuuaugcaaauugccauccugguaacuacuguaacauugcauuucaagcagcaugaaugcaacucccccccaaacaaccaaguaaugcugugugaaccaacaauaauagaaagaaacauaacagagauaguguaucugaccaacaccaccauagagaaggaaauaugccccaaacuagcagaauacagaaauuggucaaagccgcaauguaacauuacaggauuugcaccuuuuucuaaggacaauucgauucggcuuuccgcugguggggacaucugggugacaagagaaccuuaugugucaugcgauccugacaaguguuaucaauuugcccuugggcagggaacaacacuaaacaacgggcauucaaaugacacaguacaugauaggaccccuuaccggacccuauugaugaaugaauuggguguuccauuucauuugggaaccaggcaagugugcauagcaugguccagcucaaguugucacgauggaaaagcguggcugcauguuuguguaacuggggaugauaaaaaugcaacugcuagcuucauuuacaaugggaggcuuguagauaguauugguucaugguccaaaaaaauacucagaacccaggagucggaaugcguuuguaucaauggaacuuguacagugguaaugacugauggaagcgcuucagggaaagcugauacuaaaauacuauucauugaggaggggaaaaucguucauauuagcacauugucaggaagugcucagcaugucgaggagugcuccuguuauccucgauauccuggugucagaugugucugcagagacaacuggaaaggcuccaauaggcccauuguagauauaaauguaaaggauuauagcauuguuuccaguuaugugugcucaggacuuguuggagacacacccagaaaaaacgacagcuucagcaguagccauugccuagauccuaacaaugaggaagguggucauggagugaaaggcugggccuuugaugauggaaaugacguguggaugggaagaacgaucagcgagaaguuacgcucagguuaugaaaccuucaaagucaucgaaggcugguccaaaccuaacuccaaauuacagauaaauaggcaaguuauaguugaaagagguaacagguccgguuauucugguauuuucuccguugaaggcaaaagcugcaucaaucggugcuuuuauguggaguugauaaggggaaggaaagaggaaacugaagucugguggaccucaaacaguauuguuguguuuuguggcaccucagguacauauggaacaggcucauggccugauggggcggauaucaaucucaugccuauauaa

SEQ ID NO: 47918 - RNA, 1410 nt, Artificial Sequence
  derived and/or modified CDS sequence (wt) from neuraminidase__InfluenzaA__ABU92780
augaauccaaaucaaaagauaauaacaauuggcucuguuucucucaccauugccgcgauaugcuuccuuaugcaaauugccauccugguaacuacuguaacauugcauuucaagcagcaugaaugcaacucccccccaaacaaccaaguaaugcugugugaaccaacaauaauagaaagaaacauaacagagauaguguaucugaccaacaccaccauagagaaggaaauaugccccaaacuagcagaauacagaaauuggucaaagccgcaauguaacauuacaggauuugcaccuuuuucuaaggacaauucgauucggcuuuccgcugguggggacaucugggugacaagagaaccuuaugugucaugcgauccugauaaguguuaucaauuugcccuuggacagggaacaacacuaaacaacgggcauucaaaugacacaguacaugauaggaccccuuaccggacccuauugaugaaugaauuggguguuccauuucauuugggaaccaggcaagugugcauagcaugguccagcucaaguugucacgauggaaaagcguggcugcauguuuguguaacuggggaugauaaaaaugcaacugcuagcuucauuuacaaugggaggcuuguagauaguauugguucaugguccaaaaaaauacucagaacucaggagucggaaugcguuuguaucaauggaacuuguacagugguaaugacugauggaagcgcuucagggaaagcugauacuaaaauacuauucauugaggaggggaaaaucguucauauuagcacauugucaggaagugcucagcaugucgaggagugcuccuguuauccucgauauccuggugucagaugugucugcagagacaacuggaaaggcuccaauaggcccauuguagauauaaauguaaaggauuauagcauuguuuccaguuaugugugcucaggacucguuggagacacacccagaaaaaacgacagcuucagcaguagccauugccuagauccuaacaaugaggaagguggucauggagugaaaggcugggccuuugaugauggaaaugacguguggaugggaagaacgaucagcgagaaguuacgcucagguuaugaaaccuucaaagucaucgaaggcugguccaaaccuaacuccaaauuacagauaaauaggcaaguuauaguugaaagagguaacagguccgguuauucugguauuuucuccguugaaggcaaaagcugcaucaaucggugcuuuuauguggaguugauaaggggaaggaaagaggaaacugaagucugguggaccucaaacaguauuguuguguuuuguggcaccucagguacauauggaacaggcucauggccugauggggcggauaucaaucucaugccuauauaa

SEQ ID NO: 47919 - RNA, 1410 nt, Artificial Sequence
  derived and/or modified CDS sequence (wt) from neuraminidase__InfluenzaA__ABU92781
augaauccaaaucaaaagauaauaacaauuggcucuguuucucucaccauugccgcaauaugcuuccuuaugcaaauugccauccugguaacuacuguaacauugcauuucaagcagcaugaaugcaacucccccccaaacaaccaaguaaugcugugugaaccaacaauaauagaaagaaacauaacagagauaguguaucugaccaacaccaccauagagaaggaaauaugccccaaacuagcagaauacagaaauuggucaaagccgcaauguaacauuacaggauuugcaccuuuuucuaaggacaauucgauucggcuuuccgcugguggggacaucugggugacaagagaaccuuaugugucaugcgauccugacaaguguuaucaauuugcccuugggcagggaacaacacuaaacaacgggcauucaaaugacacaguacaugauaggaccccuuaccggacccuauugaugaaugaauuggguguuccauuucauuugggaaccaggcaagugugcauagcaugguccagcucaaguugucacgauggaaaagcguggcugcauguuuguguaacuggggaugauaaaaaugcaacugcuagcuucauuuacaaugggaggcuuguagauaguauugguucaugguccaaaaaaauacucagaacccaggagucggaaugcguuuguaucaauggaacuuguacagugguaaugacugauggaagcgcuucaggaaaagcugauacuaaaauacuauucauugaggaggggaaaaucguucauauuagcacauugucaggaagugcucagcaugucgaggagugcuccuguuauccucgauauccuggugucagaugugucugcagagacaacuggaaaggcuccaauaggcccauuguagauauaaauguaaaggauuauagcauuguuuccaguuaugugugcucaggacuuguuggagacacacccagaaaaaacgacagcuucagcaguagccauugccuagaucccaacaaugaggaagguggucauggagugaaaggcugggccuuugaugauggaaaugacguguggaugggaagaacgaucagcgagaaguuacgcucagguuaugaaaccuucaaagucaucgaaggcugguccaaaccuaacuccaaauuacagauaaauaggcaaguuauaguugaaagagguaacagguccgguuauucugguauuuucuccguugaaggcaaaagcugcaucaaucggugcuuuuauguggaguugauaaggggaaggaaagaggaaacugaagucugguggaccucaaacaguauuguuguguuuuguggcaccucagguacauauggaacaggcucauggccugauggggcggauaucaaucucaugccuauauaa

SEQ ID NO: 47920 - RNA, 1410 nt, Artificial Sequence
  derived and/or modified CDS sequence (wt) from neuraminidase__InfluenzaA__ABU92782
augaauccaaaucaaaagauaauaacaauuggcucuguuucucucaccauugccgcaauaugcuuccuuaugcaaauugccauccugguaacuacuguaacauugcauuucaagcagcaugaaugcaacucccccccaaacaaccaaguaaugcugugugaaccaacaauaauagaaagaaacauaacagagauaguguaucugaccaacaccaccauagagaaggaaauaugccccaaacuagcagaauacagaaauuggucaaagccgcaauguaacauuacaggauuugcaccuuuuucuaaggacaauucgauucggcuuuccgcugguggggacaucugggugacaagagaaccuuaugugucaugcgauccugacaaguguuaucaauuugcccuugggcagggaacaacacuaaacaacgggcauucaaaugacacaguacaugauaggaccccuuaccggacccuauugaugaaugaauuggguguuccauuucauuugggaaccaggcaagugugcauagcaugguccagcucaaguugucacgauggaaaagcguggcugcauguuuguguaacuggggaugauaaaaaugcaacugcuagcuucauuuacaaugggaggcuuguagauaguauugguucaugguccaaaaaaauacucagaacccaggagucggaaugcguuuguaucaauggaacuuguacagugguaaugacugauggaagcgcuucaggaaaagcugauacuaaaauacuauucauugaggaggggaaaaucguucauauuagcacauugucaggaagugcucagcaugucgaggagugcuccuguuauccucgauauccuggugucagaugugucugcagagacaacuggaaaggcuccaauaggcccauuguagauauaaauguaaaggauuauagcauuguuuccaguuaugugugcucaggacuuguuggagacacacccagaaaaaacgacagcuucagcaguagccauugccuagauccuaacaaugaggaagguggucauggagugaaaggcugggccuuugaugauggaaaugacguguggaugggaagaacgaucagcgagaaguuacgcucagguuaugaaaccuucaaagucaucgaaggcugguccaaaccuaacuccaaauuacagauaaauaggcaaguuauaguugaaagagguaacagguccgguuauucugguauuuucuccguugaaggcaaaagcugcaucaaucggugcuuuuauguggaguugauaaggggaaggagagaggaaacugaagucugguggaccucaaacaguauuguuguguuuuguggcaccucagguacauauggaacaggcucauggccugauggggcggauaucaaucucaugccuauauaa

SEQ ID NO: 47921 - RNA, 1410 nt, Artificial Sequence; identical to SEQ ID NO: 47917
  derived and/or modified CDS sequence (wt) from neuraminidase__InfluenzaA__ABU92783

SEQ ID NO: 47922 - RNA, 1410 nt, Artificial Sequence; identical to SEQ ID NO: 46784
  derived and/or modified CDS sequence (wt) from neuraminidase__InfluenzaA__ABU92784

SEQ ID NO: 47923 - RNA, 1410 nt, Artificial Sequence; identical to SEQ ID NO: 46784
  derived and/or modified CDS sequence (wt) from neuraminidase__InfluenzaA__ABU92785

SEQ ID NO: 47924 - RNA, 1410 nt, Artificial Sequence
  derived and/or modified CDS sequence (wt) from neuraminidase__InfluenzaA__ABU92786
augaauccaaaucaaaagauaauaacaauuggcucuguuucucucaccauugccgcgauaugcuuccuuaugcaaauugccauccugguaacuacuguaacauugcauuucaagcagcaugaaugcaacucccccccaaacaaccaaguaaugcugugugaaccaacaauaauagaaagaaacauaacagagauaguguaucugaccaacaccaccauagagaaggaaauaugccccaaacuagcagaauacagaaauuggucaaagccgcaauguaacauuacaggauuugcaccuuuuucuaaggacaauucgauucggcuuuccgcugguggggacaucugggugacaagagaaccuuaugugucaugcgauccugacaaguguuaucaauuugcccuugggcagggaacaacacuaaacaacgggcauucaaaugacacaguacaugauaggaccccuuaccggacccuauugaugaaugaauuggguguuccauuucauuugggaaccaggcaagugugcauagcaugguccagcucaaguugucacgauggaaaagcguggcugcauguuuguguaacuggggaugauaaaaaugcaacugcuagcuucauuuacaaugggaggcuuguagauaguauugguucaugguccaaaaaaauacucagaacucaggagucggaaugcguuuguaucaauggaacuuguacagugguaaugacugauggaagcgcuucagggaaagcugauacuaaaauacuauucauugaggaggggaaaaucguucauauuagcacauugucaggaagugcucagcaugucgaggagugcuccuguuauccucgauauccuggugucagaugugucugcagagacaacuggaaaggcuccaauaggcccauuguagauauaaauguaaaggauuauagcauuguuuccaguuaugugugcucaggacuuguuggagacacacccagaaaaaacgacagcuucagcaguagccauugccuagauccuaacaaugaggaagguggucauggagugaaaggcugggccuuugaugauggaaaugacguguggaugggaagaacgaucagcgagaaguuacgcucagguuaugaaaccuucaaagucaucgaaggcugguccaaaccuaacuccaaauuacagauaaauaggcaaguuauaguugaaagagguaacagguccgguuauucugguauuuucuccguugaaggcaaaagcugcaucaaucggugcuuuuauguggaguugauaaggggaaggaaagaggaaacugaagucugguggaccucaaacaguauuguuguguuuuguggcaccucagguacauauggaacaggcucauggccugauggggcggauaucaaucucaugccuauauaa

SEQ ID NO: 47925 - RNA, 1410 nt, Artificial Sequence
  derived and/or modified CDS sequence (wt) from neuraminidase__InfluenzaA__ABU92787
augaauccaaaucaaaagauaauaacaauuggcucuguuucucucaccauugccgcgauaugcuuccuuaugcaaauugccauccugguaacuacuguaacauugcauuucaagcagcaugaaugcaacucccccccaaacaaccaaguaaugcugugugaaccaacaauaauagaaagaaacauaacagagauaguguaucugaccaacaccaccauagagaaggaaauaugccccaaacuagcagaauacagaaauuggucaaagccgcaauguaacauuacaggauuugcaccuuuuucuaaggacaauucgauucggcuuuccgcugguggggacaucugggugacaagagaaccuuaugugucaugcgauccugacaaguguuaucaauuugcccuugggcagggaacaacacuaaacaacgggcauucaaaugacacaguacaugauaggaccccuuaccggacccuauugaugaaugaauuggguguuccauuucauuugggaaccaggcaagugugcauagcaugguccagcucaaguugucacgauggaaaagcguggcugcauguuuguguaacuggggaugauaaaaaugcaacugcuagcuucauuuacaaugggaggcuuguagauaguauugguucaugguccaaaaaaauacucagaacccaggagucggaaugcguuuguaucaauggaacuuguacagugguaaugacugauggaagcgcuucagggaaagcugauacuaaaauacuauucauugaggaggggaaaaucguucauauuagcacauugucaggaagugcucagcaugucgaggagugcuccuguuauccucgacauccuggugucagaugugucugcagagacaacuggaaaggcuccaauaggcccauuguagauauaaauguaaaggauuauagcauuguuuccaguuaugugugcucaggacuuguuggagacacacccagaaaaaacgacagcuucagcaguagccauugccuagauccuaacaaugaggaagguggucauggagugaaaggcugggccuuugaugauggaaaugacguguggaugggaagaacgaucagcgagaaguuacgcucagguuaugaaaccuucaaagucaucgaaggcugguccaaaccuaacuccaaauuacagauaaauaggcaaguuauaguugaaagagguaacagguccgguuauucugguauuuucuccguugaaggcaaaagcugcaucaaucggugcuuuuauguggaguugauaaggggaaggaaagaggaaacugaagucugguggaccucaaacaguauuguuguguuuuguggcaccucagguacauauggaacaggcucauggccugauggggcggauaucaaucucaugccuauauaa

SEQ ID NO: 47926 - RNA, 1410 nt, Artificial Sequence
  derived and/or modified CDS sequence (wt) from neuraminidase__InfluenzaA__ABU92789
augaauccaaaucaaaagauaauaacgauuggcucuguuucucucaccauuuccacaauaugcuucuucaugcaaauugccaucuugauaacuacuguaacauugcauuucaagcaauaugaauucaacccccccccaaacaaccaagugaugcugugugaaccaacaauaauagaaagaaacauaacagagauaguguaucugaccaacaccaccauagagaaggaaauaugccccaaacuagcagaauacagaaauuggucaaagccgcaauguagcauuacaggauuugcaccuuuuucuaaggacaauucgauuaggcuuuccgcugguggggacaucugggugacaagagaaccuuaugugucaugcgauccugacaaguguuaucaauuugcccuuggacagggaacaacacuaaacaacgugcauucaaaugacacaguacaugauagaaccccuuaucggacccuauugaugaaugaguuagguguuccauuucaucuggggaccaagcaaguaugcauagcaugguccagcucaaguugucacgauggaaaagcauggcugcauguuuguguaacgggggaugauaaaaaugcaacugcuagcuucauuuacaaugggaggcuuguagauaguauuguuucaugguccaaagaaauccucaggacccaggagucagaaugcguuuguaucaauggaacuuguacaguaguaaugacugauggaagugcuucaggaaaagcugauacuaaaauacuauucauugaggaggggaaaaucguucauacuagcacauugucaggaagugcucagcaugucgaggagugcuccugcuauccucgauauccuggugucagaugugucugcagagacaacuggaaaggcuccaauaggcccauaguagacauaaacauaaaggauuauagcauuguuuccaguuaugugugcucgggacuuguuggagacacacccagaaaaaacgacagcuccagcaguagccauugcuuggauccuaacaaugaagaagguggucauggagugaaaggcugggccuuugaugauggaaaugacguguggaugggaagaacgaucagcgagaagucacgcucaggauaugaaaccuucaaagucauugaaggcugguccaacccuaauuccaaauugcagauaaauaggcaagucauaguugacagagguaauagguccgguuauucugguauuuucucuguugaaggcaaaagcugcaucaaucggugcuuuuauguggaguugauaaggggaagaaaagaggaaacugaagucuuguggaccucaaacaguauuguuguguuuuguggcaccucagguacauauggaacaggcucauggccugauggggcggacaucaaucucaugccuauauaa

SEQ ID NO: 47927 - RNA, 1410 nt, Artificial Sequence
  derived and/or modified CDS sequence (wt) from neuraminidase__InfluenzaA__ABU92790
augaauccaaaucaaaagauaauaacgauuggcucuguuucucucaccauuuccacaauaugcuucuucaugcaaauugccaucuugauaacuacuguaacauugcauuucaagcaauaugaauucaacucccccccaaacaaccaagugaugcugugugaaccaacaauaauagaaagaaacauaacagagauaguguaucugaccaacaccaccauagagaaggaaauaugccccaaacuagcagaauacagaaauuggucaaagccgcaaugugacauuacaggauuugcaccuuuuucuaaggacaauucgauuaggcuuuccgcugguggggacaucugggugacaagagaaccuuaugugucaugcgauccugacaaguguuaucaauuugcccuuggacagggaacaacacuaaacaaugugcauucaaaugacacaguacaugauaggaccccuuaucggacccuauugaugaaugaguuagguguuccauuucaucuggggaccaagcaagugugcauagcaugguccagcucaaguugucacgauggaaaagcauggcugcauguuuguguaacgggggaugauaaaaaugcaacugcuagcuucauuuacaaugggaggcuuguagauaguauuguuucaugguccaaagaaauccucaggacccaggagucagaaugcguuuguaucaauggaacuuguacaguaguaaugacugaugggagugcuucaggaaaagcugauacuaaaauacuauucauugaggaggggaaaaucguucacacuagcacauugucaggaagugcucagcaugucgaggagugcuccugcuauccucgauauccuggugucagaugugucugcagagacaacuggaaaggcuccaauaggcccaucguagauauaaacauaaaggauuauagcauuguuuccaguuaugugugcucgggacuuguuggagacacacccagaaaaaacgacagcuccagcaguagccauugcuuggauccuaacaaugaagaagguggucauggagugaaaggcugggccuuugaugauggaaaugacguguggaugggaagaacgaucagcgagaaguuacgcucaggauaugaaaccuucaaagucauugaaggcugguccaacccuaauuccaaauugcagauaaauaggcaagucauaguugacagagguaauagguccgguuauucugguauuuucucuguugaaggcaaaagcugcaucaaucggugcuuuuauguggaguugauaaggggaagaaaagaggaaacugaagucuuguggaccucaaacaguauuguuguguuuuguggcaccucagguacauauggaacaggcucauggccugauggggcggacaucaaucucaugccuauauaa

SEQ ID NO: 47928 - RNA, 1410 nt, Artificial Sequence
  derived and/or modified CDS sequence (wt) from neuraminidase__InfluenzaA__ABU92791
augaauccaaaucaaaagauaauaacgauuggcucuguuucucucaccauuuccacaauaugcuucuucaugcaaauugccaucuugauaacuacuguaacauugcauuuuaagcaauaugaauucaacucccccccaaacaaccaagugaugcugugugaaccaacaauaauagaaagaaacauaacagagauaguguaucugaccaacaccaccauagagaaggaaauaugccccaaacuagcagaauacaggaauuggucaaagccgcaaugugacauuacaggauuugcaccuuuuucuaaggacaauucgauuaggcuuuccgcugguggggacaucugggugacaagagaaccuuaugugucaugcgauccugacaaguguuaucaauuugcccuuggacagggaacaacacuaaacaacgugcauucaaaugacacaguacaugauaggaccccuuaucggacccuauugaugaaugaguuagguguuccauuucaucuggggaccaagcaagugugcauagcaugguccagcucaaguugucacgauggaaaagcauggcugcauguuuguguaacgggggaugauaaaaaugcaacugcuagcuucauuuacaaugggaggcuuguagauaguauuguuucaugguccaaaaaaauccucaggacccaggagucagaaugcguuuguaucaauggaacuuguacaguaguaaugacugaugggagugcuucaggaaaagcugauacuaaaauacuauucauugaggaggggaaaaucguucauacuagcacauugucaggaagugcucagcaugucgaggagugcuccugcuauccucgauauccuggugucagaugugucugcagagacaacuggaaaggcuccaauaggcccaucguagauauaaacauaaaggauuauagcacuguuuccaguuaugugugcucaggacuuguuggagacacacccagaaaaaacgacagcuccagcaguagccauugcuuggauccuaacaaugaagaagguggucauggagugaaaggcugggccuuugaugauggaaaugacguguggaugggaagaacgaucagcgagaaguuacgcucaggauaugaaaccuucaaagucauugaaggcugguccaacccuaauuccaaauugcagauaaauaggcaagucauaguugacagagguaauagguccgguuauucugguauuuucucuguugaaggcaaaagcugcaucaaucggugcuuuuauguggaguugauaaggggaagaaaagaggaaacugaagucuuguggaccucaaacaguauuguuguguuuuguggcaccucagguacauauggaacaggcucauggccugauggggcggacaucaaucucaugccuauauaa

SEQ ID NO: 47929 - RNA, 1410 nt, Artificial Sequence
  derived and/or modified CDS sequence (wt) from neuraminidase__InfluenzaA__ABU92792
augaauccaaaucaaaagauaauaacgauuggcucuguuucucucaccauuuccacaauaugcuucuucaugcaaauugccaucuugauaacuacuguaacauugcauuucaagcaauauguauucaacucccccccaaacaaccaagugaugcugugugaaccaacaauaauagaaagaaacauaacagagauaguguaucugaccaacaccaccauagagaaggaaauaugccccaaacuagcagaauacagaaauuggucaaagccgcaaugugacauuacaggauuugcaccuuuuucuaaggacaauucgauuaggcuuuccgcugguggggacaucugggugacaagagaaccuuaugugucaugcgauccugacaaguguuaucaauuugcccuuggacagggaacaacacuaaacaacgugcauucaaacgacacaguacaugauaggaccccuuaucggacccuauugaugaaugaguuagguguuccauuucaucuggggaccaagcaagugugcauagcaugguccagcucaaguugucacgauggaaaagcauggcugcauguuuguguaacgggggaugauaaaaaugcaacugcuagcuucauuuacaaugggaggcuuguagauaguguuguuucaugguccaaagauauccucaggacccaggagucagaaugcguuuguaucaauggaacuuguacaguaguaaugacugaugggagugcuucaggaaaagcugauacuaaaauacuauucauugaggaggggaaaaucguucauacuagcacauugucaggaagugcucagcaugucgaggagugcuccugcuauccucgauauccuggugucagaugugucugcagagacaacuggaaaggcuccaauaggcccauuguagauauaaacauaaagaauuauagcauuguuuccaguuaugugugcucaggacuuguuggagacacacccagaaaaaccgacagcuccagcaguagccauugcuuggauccuaacaaugaagaagguggucauggagugaaaggcugggccuuugaugauggaaaugacguguggaugggaagaacgaucagcgagaaguuacgcuuaggauaugaaaccuucaaagucauugaaggcugguccaacccuaauuccaaauugcagauaaauaggcaagucauaguugacagagguaauagguccgguuauucugguauuuucucuguugaaggcaaaagcugcaucaaucggugcuuuuauguggaguugauaaggggaagaaaagaggaaacugaagucuuguggaccucaaacaguauuguuguauuuuguggaaccucagguacauauggaacaggcucauggccugauggggcggacaucaaucucaugccuauauaa

SEQ ID NO: 47930 - RNA, 1410 nt, Artificial Sequence; identical to SEQ ID NO: 47396
  derived and/or modified CDS sequence (wt) from neuraminidase__InfluenzaA__ABU92793

SEQ ID NO: 47931 - RNA, 1410 nt, Artificial Sequence; identical to SEQ ID NO: 47926
  derived and/or modified CDS sequence (wt) from neuraminidase__InfluenzaA__ABU92794

SEQ ID NO: 47932 - RNA, 1410 nt, Artificial Sequence; identical to SEQ ID NO: 47917
  derived and/or modified CDS sequence (wt) from neuraminidase__InfluenzaA__ABU92795

SEQ ID NO: 47933 - RNA, 1410 nt, Artificial Sequence
  derived and/or modified CDS sequence (wt) from neuraminidase__InfluenzaA__ABU92796
augaauccaaaucaaaagauaauaacaauuggcucuguuucucucaccauugccgcaauaugcuuccuuaugcaaauugccauccugguaacuacuguaacauugcauuucaagcagcaugaaugcaacucccccccaaacaaccaaguaaugcugugugaaccaacaauaauagaaagaaacauaacagagauaguguaucugaccaacaccaccauagagaaggaaauaugccccaaacuagcagaauacagaaauuggucaaagccgcaauguaacauuacaggauuugcaccuuuuucuaaggacaauucgauucggcuuuccgcugguggggacaucugggugacaagagaaccuuaugugucaugcgauccugacaaguguuaucaauuugcccuugggcagggaacaacacuaaacaacgggcauucaaaugacacaguacaugauaggaccccuuaccggacccuauugaugaaugaauuggguguuccauuucauuugggaaccaggcaagugugcauagcaugguccagcucaaguugucacgauggaaaagcguggcugcauguuuguguaacuggggaugauaaaaaugcaacugcuagcuucauuuacaaugggaggcuuguagauaguauugguucaugguccaaaaaaauacucagaacccaggagucggaaugcguuuguaucaauggaacuuguacagugguaaugacugauggaagcgcuucaggaaaagcugauacuaaaauacuauucauugaggaggggaaaaucguucauauuagcacauugucaggaagugcucagcaugucgaggagugcuccuguuauccucgauauccuggugucagaugugucugcagagacaacuggaaaggcuccaauaggcccauuguagauauaaauguaaaggauuauagcauuguuuccaguuaugugugcucaggacuuguuggagacacacccagaaaaaacgacagcuucagcaguagccauugccuagauccuaacaaugaggaagguggucauggagugaaaggcugggccuuugaugauggaaaugacguguggaugggaagaacgaucagugagaaguugcgcucagguuaugaaaccuucaaagucaucgaaggcugguccaaaccuaacuccaaauuacagauaaauaggcaaguuauaguugaaagagguaacagguccgguuauucugguauuuucuccguugaaggcaaaagcugcaucaaucggugcuuuuauguggaguugauaaggggaaggaaagaggaaacugaagucugguggaccucaaacaguauuguuguguuuuguggcaccucagguacauauggaacaggcucauggccugauggggcggauaucaaucucaugccuauauaa

SEQ ID NO: 47934 - RNA, 1410 nt, Artificial Sequence
  derived and/or modified CDS sequence (wt) from neuraminidase__InfluenzaA__ABU92797
augaauccaaaucaaaagauaauaacaauuggcucuguuucucucaccauugccgcgauaugcuuccuuaugcaaauugccauccugguaacuacuguaacauugcauuucaagcagcaugaaugcaacucccccccaaacaaccaaguaaugcugugugaaccaacaauaauagaaagaaacauaacagagauaguguaucugaccaacaccaccauagagaaggaaauaugccccaaacuagcagaauacagaaauuggucaaagccgcaauguaacauuacaggauuugcaccuuuuucuaaggacaauucgauucggcuuuccgcugguggggacaucugggugacaagagaaccuuaugugucaugcgauccugacaaguguuaucaauuugcccuugggcagggaacaacacuaaacaacgggcauucaaaugacacaguacaugauaggaccccuuaccggacccuauugaugaaugaauuggguguuccauuucauuugggaaccaggcaagugugcauagcaugguccagcucaaguugucacgauggaaaagcguggcugcauguuuguguaacuggggaugauaaaaaugcaacugcuagcuucauuuacaaugggaggcuuguagauaguauugguucaugguccaaaagaauacucagaacccaggagucggaaugcguuuguaucaauggaacuuguacagugguaaugacugauggaagcgcuucagggaaagcugauacuaaaauacuauucauugaggaggggaaaaucguucauauuagcacauugucaggaagugcucagcaugucgaggagugcuccuguuauccucgauauccuggugucagaugugucugcagagacaacuggaaaggcuccaauaggcccauuguagauauaaauguaaaggauuauagcauuguuuccaguuaugugugcucaggacuuguuggagacacacccagaaaaaacgacagcuucagcaguagccauugccuagauccuaacaaugaggaagguggucauggagugaaaggcugggccuuugaugauggaaaugacguguggaugggaagaacgaucaacgagaaguuacgcucagguuaugaaaccuucaaagucaucgaaggcugguccaaaccuaacuccaaauuacagauaaauaggcaaguuauaguugaaagagguaacagguccgguuauucugguauuuucuccguugaaggcaaaagcugcaucaaucggugcuuuuauguggaguugauaaggggaaggaaagaggaaacugaagucugguggaccucaaacaguauuguuguguuuuguggcaccucagguacauauggaacaggcucauggccugauggggcggauaucaaucucaugccuauauaa

SEQ ID NO: 47935 - RNA, 1410 nt, Artificial Sequence; identical to SEQ ID NO: 47917
  derived and/or modified CDS sequence (wt) from neuraminidase__InfluenzaA__ABU92798

SEQ ID NO: 47936 - RNA, 1410 nt, Artificial Sequence; identical to SEQ ID NO: 46784
  derived and/or modified CDS sequence (wt) from neuraminidase__InfluenzaA__ABU92799

SEQ ID NO: 47937 - RNA, 1410 nt, Artificial Sequence; identical to SEQ ID NO: 47917
  derived and/or modified CDS sequence (wt) from neuraminidase__InfluenzaA__ABU92800

SEQ ID NO: 47938 - RNA, 1410 nt, Artificial Sequence
  derived and/or modified CDS sequence (wt) from neuraminidase__InfluenzaA__ABU92801
augaauccaaaucaaaagauaauaacaauuggcucuguuucucucaccauugccgcgauaugcuuccuuaugcaaauugccauccugguaacuacuguaacauugcauuucaagcagcaugaaugcaacucccccccaaacaaccaaguaaugcugugugaaccaacaauaauagaaagaaacauaacagagauagugcaucugaccaacaccaccauagagaaggaaauaugccccaaacuagcagaauacagaaauuggucaaagccgcaauguaacauuacaggauuugcaccuuuuucuaaggacaauucgauucggcuuuccgcugguggggacaucugggugacaagagaaccuuaugugucaugcgauccugacaaguguuaucaauuugcccuugggcagggaacaacacuaaacaacgggcauucaaaugacacaguacaugauaggaccccuuaccggacccuauugaugaaugaauuggguguuccauuucauuugggaaccaggcaagugugcauagcaugguccagcucaaguugucacgauggaaaagcguggcugcauguuuguguaacuggggaugauaaaaaugcaacugcuagcuucauuuacaaugggaggcuuguagauaguauugguucaugguccaaaaaaauacucagaacccaggagucggaaugcguuuguaucaauggaacuuguacagugguaaugacugauggaagcgcuucagggaaagcugauacuaaaauacuauucauugaggaggggaaaaucguucauauuagcacauugucaggaagugcucagcaugucgaggagugcuccuguuauccucgauauccuggugucagaugugucugcagagacaacuggaaaggcuccaauaggcccauuguagauauaaauguaaaggauuauagcauuguuuccaguuaugugugcucaggacuuguuggagacacacccagaaaaaacgacagcuucagcaguagccauugccuagauccuaacaaugaggaagguggucauggagugaaaggcugggccuuugaugauggaaaugacguguggaugggaagaacgaucagcgagaaguuacgcucagguuaugaaaccuucaaagucaucgaaggcugguccaaaccuaacuccaaauuacagauaaauaggcaaguuauaguugaaagagguaacagguccgguuauucugguauuuucuccguugaaggcaaaagcugcaucaaucggugcuuuuauguggaguugauaaggggaaggaaagaggaaacugaagucugguggaccucaaacaguauuguuguguuuuguggcaccucagguacauauggaacaggcucauggccugauggggcggauaucaaucucaugccuauauaa

SEQ ID NO: 47939 - RNA, 1410 nt, Artificial Sequence; identical to SEQ ID NO: 46784
  derived and/or modified CDS sequence (wt) from neuraminidase__InfluenzaA__ABU92802

SEQ ID NO: 47940 - RNA, 1410 nt, Artificial Sequence
  derived and/or modified CDS sequence (wt) from neuraminidase__InfluenzaA__ABU92804
augaauccaaaucaaaagauaauaacaauuggcucuguuucucucaccauugccgcgauaugcuuccuuaugcaaauugccauccugguaacuacuguaacauugcauuucaagcagcaugaaugcaacucccccccaaacaaccaaguaaugcugugugaaccaacaauaauagaaagaaacauaacagagauaguguaucugaccaacaccaccauagagaaggaaauaugccccaaacuagcagaauacagaaauuggucaaagccgcaauguaacauuacaggauuugcaccuuuuucuaaggacaauucgauucggcuuuccgcugguggggacaucugggugacaagagaaccuuaugugucaugcgauccugacaaguguuaucaauuugcccuugggcagggaacaacacuaaacaacgggcauucaaaugacacaguacaugauaggaccccuuaccggacccuauugaugaaugaauuggguguuccauuucauuugggaaccaggcaagugugcauagcaugguccagcucaaguugucacgauggaaaagcguggcugcauguuuguguaacuggggaugauaaaaaugcaacugcuagcuucauuuacaaugggaggcuuguagauaguauugguucaugguccaaaaaaauacucagaacccaggagucggaaugcguuuguaucaauggaacuuguacagugguaaugacugauggaagcgcuucagggaaagcugauacuaaaauacuauucauugaggaggggaaaaucguucauauuagcacauugucaggaagugcucagcaugucgaggagugcuccuguuauccucgauauccuggugucagaugugucugcagagacaacuggaaagguuccaauaggcccauuguagauauaaauguaaaggauuauagcauuguuuccaguuaugugugcucaggacuuguuggagacacacccagaaaaaacgacagcuucagcaguagccauugccuagauccuaacaaugaggaagguggucauggagugaaaggcugggccuuugaugauggaaaugacguguggaugggaagaacgaucagcgagaaguuacgcucagguuaugaaaccuucaaagucaucgaaggcugguccaaaccuaacuccaaauuacagauaaauaggcaaguuauaguugaaagagguaacagguccgguuauucugguauuuucuccguugaaggcaaaagcugcaucaaucggugcuuuuauguggaguugauaaggggaaggaaagaggaaacugaagucugguggaccucaaacaguauuguuguguuuuguggcaccucagguacauauggaacaggcucauggccugauggggcggauaucaaucucaugccuauauaa

SEQ ID NO: 47941 - RNA, 1410 nt, Artificial Sequence
  derived and/or modified CDS sequence (wt) from neuraminidase__InfluenzaA__ABU92805
augaauccaaaucaaaagauaauaacgauuggcucuguuucccucaccauuuccacaauaugcuucuucaugcaaauugccauccugauaacuacuguaacauugcauuucaagcaauaugaauucaacucccccccaaacaaccaagugaugcugugugaaccaacaauaauagaaagaaacauaacagagauaguguaucugaccaacaccaccauagagaaggaaauaugucccaaacuagcagaauacagaaauuggucaaagccgcaauguaacauuacaggauuugcaccuuuuucuaaggacaauucgauucggcuuuccgcugguggggacaucugggugacaagagaaccuuaugugucaugcgauccugacaaguguuaucaauuugcccuuggacagggaacaacacuaaacaacgugcauucaaaugacacaguacaugauaggaccccuuaucggacccuauugaugaaugaauuggguguuccauuucaucuggggaccaagcaagugugcauagcaugguccagcucaaguugucacgauggaaaagcauggcugcauguuuguguaacgggggaugaugaaaaugcaacugcuagcuucauuuacaaugggaggcuuguagauaguauuguuucaugguccaaaaaaauccucaggacccaggagucagaaugcguuuguaucaauggaacuuguacaguaguaaugacugaugggagugcuucaggaaaagcugauacuaaaauacuauucauugaggaggggaaaauuguucauacuagcacauugucaggaagugcucagcaugucgaggagugcuccuguuauccucgauauccuggugucagaugugucugcagagacaacuggaaaggcuccaauaggcccaucguagauauaaacauaaaggauuauagcauuguuuccaguuaugugugcucaggacuuguuggagacacacccagaaaaaacgacagcuccagcaguagccauugcuuggauccaaacaaugaggaagguggucauggagugaaaggcugggccuuugaugauggaaaugacguguggaugggaagaacgaucagcgagaaguuacgcucaggauaugaaaccuucaaagucauugaaggcugguccaacccuaacuccaaauugcagauaaauaggcaagucauaguugacagagguaauagguccgguuauucugguauuuucucuguugaaggcaaaagcugcaucaaucggugcuuuuauguggaguugauaaggggaagaaaacaggaaacugaagucuuguggaccucaaacaguauuguuguguuuuguggcaccucagguacauauggaacaggcucauggccugauggggcggacaucaaucucaugccuauauaa

SEQ ID NO: 47942 - RNA, 1410 nt, Artificial Sequence
  derived and/or modified CDS sequence (wt) from neuraminidase__InfluenzaA__ABU92806
augaauccaaaucaaaagauaauaacgauuggcucuguuucccucaccauuuccacaauaugcuucuucaugcaaauugccauccugauaacuacuguaacauugcauuucaagcaauaugaauucaacucccccccaaacaaccaagugaugcugugugaaccaacaauaauagaaagaaacauaacagagauaguguaucugaccaacaccaccauagagaaggaaauaugccccaaacuagcagaauacagaaauuggucaaagccgcaauguaacauuacaggauuugcaccuuuuucuaaggacaauucgauucggcuuuccgcugguggggacaucugggugacaagagaaccuuaugugucaugcgauccugacaaguguuaucaauuugcccuuggacagggaacaacacuaaacaacgugcauucaaaugacacaguacaugauaggaccccuuaucggacccuauugaugaaugaguuggguguuccauuucaucuggggaccaagcaagugugcauagcaugguccagcucaaguugucacgauggaaaagcauggcugcauguuuguguaacgggggaugaugaaaaugcaacugcuagcuucauuuacaaugggaggcuuguagauaguauuguuucaugguccaaaaaaauccucaggacccaggagucagaaugcguuuguaucaauggaacuuguacaguaguaaugacugaugggagugcuucaggaaaagcugauacuaaaauacuauucauugaggaggggaaaauuguucauacuagcacauuaucaggaagugcucagcaugucgaggagugcuccuguuauccucgauauccuggugucagaugugucugcagagacaacuggaaaggcuccaauaggcccaucguagauauaaacauaaaggauuauagcauuguuuccaguuaugugugcucaggacuuguuggagacacacccagaaaaaacgacagcuccagcaguagccauugcuuggauccaaacaaugaggaagguggucauggagugaaaggcugggccuuugaugauggaaaugacguguggaugggaagaacgaucagcgagaaguuacgcucaggauaugaaaccuucaaagucauugaaggcugguccaacccuaacuccaaauugcagauaaauaggcaagucauaguugacagagguaacagguccgguuauucugguauuuucucuguugaaggcaaaagcugcaucaaucggugcuuuuauguggaguugauaaggggaagaaaacaggaaacugaagucuuguggaccucaaacaguauuguuguguuuuguggcaccucagguacauauggaacaggcucauggccugauggggcggacaucaaucucaugccuauauaa

SEQ ID NO: 47943 - RNA, 1410 nt, Artificial Sequence
  derived and/or modified CDS sequence (wt) from neuraminidase__InfluenzaA__ABU92808
augaauccaaaucaaaagauaauaacaauuggcucuguuucucucaccauugccacaauaugcuuccuuaugcaaauuaccauccugguaacuacuguaacauugcauuucaagcaguaugaaugcaacucccccccaaacaaccaaguaaugcugugugaaccaacaauaauagaaagaaacauaacagagauaguguaucugaccaauaccacuauagagaaggaaauaugccccaaauuagcagaauacagaaauuggucaaagccgcaauguaacauuacaggauuugcaccuuuuucuaaggacaauucgauucggcuuuccgcugguggggacaucugggugacaagagagccuuaugugucaugcgauccugacaaguguuaucaauuugcccuugggcagggaacaacacuaaacaacgggcauucaaaugacacaguacaugauaggaccccuuaccggacccuauugaugaaugaauuggguguuccauuucauuugggaaccaggcaagugugcauagcaugguccagcucaaguugucacgauggaaaagcauggcugcauguuuguguaacuggggaugauaaaaaugcaacugcuaguuucauuuacaaugggaggcuuguagauaguauugguucaugguccaaaaaaauacucagaacccaggagucggaaugcguuuguaucaauggaacuuguacaguaguaaugacugaugggagcgcuucaggaaaagcugauacuaaaauacuauucauugaggaggggaaaaucauucauauuagcacauugucaggaagugcucagcaugucgaggagugcuccuguuauccucgauauccuggcgucagauguguaugccgagacaacuggaaaggcuccaauagacccaucguagauauaaauguaaaggauuauagcauuguuuccaguuaugugugcucaggacuuguuggagacacacccagaaaaaacgacagcuccagcaguagccauugccuagauccuaacaaugaggaagguggucauggagugaaaggcugggccuuugaugauggaaaugacguguggaugggaagaacgaucagcgagaaguuacgcucagguuaugaaaccuucaaagucaucgaaggcugguccaaaccuaacuccaaauuacagauaaacaggcaagucauaguugaaagagguaacagguccgguuauucugguauuuucuccguugaaggcaaaagcugcaucaaucggugcuuuuauguggaguugauaaggggaaggaaagaggaaacugaagucugguggaccucaaacaguauuguuguguuuuguggcaccucagguacauauggaacaggcucauggccugauggggcggauaucaaucucaugccuauauaa

SEQ ID NO: 47944 - RNA, 1410 nt, Artificial Sequence
  derived and/or modified CDS sequence (wt) from neuraminidase__InfluenzaA__ABU92809
augaauccaaaucaaaagauaauaacgauuggcucuguuucucucaccauuuccacaauaugcuucuucaugcaaauugccaucuugauaacuacuguaacauugcauuucaagcaauaugaauucaacucccccccaaacaaccaagugaugcugugugaaccaacaauaauagaaagaaacauaacagagauaguguaucugaccaacaccaccauagagaaggaaauaugccccaaacuagcagaauacagaaauuggucaaaaccgcaauguaacauuacaggauuugcaccuuuuucuaaggacaauucgauuaggcuuuccgcugguggggacaucugggugacaagagaaccuuaugugucaugcgauccugacaaguguuaucaauuugcccuuggacagggaacaacacuaaacaacgugcauucaaaugacacaguacaugauaggaccccuuaucggacccuauugaugaaugaguuagguguuccauuucaucuggggaccaagcaagugugcauagcaugguccagcucaaguugucacgauggaaaagcauggcugcauguuuguguaacgggggaugauaaaaaugcaacugcuagcuucauuuacaaugggaggcuuguagauaguauuguuucgugguccaaagaaauccucaggacccaggagucagaaugcguuuguaucaauggaacuuguacaguaguaaugacugaugggagugcuucaggaaaagcugauacuaaaauacuauucauugaggaggggaaaaucguucauacuagcacauugucaggaagugcucagcaugucgaggaguguuccugcuauccucgauauccuggugucagaugugucugcagagacaacuggaaaggcuccaauaggcccauaguagauauaaacauaaaggauuauagcauuguuuccaguuaugugugcucaggacuuguuggagacacacccagaaaaaacgacagcuccagcaguggccauugcuuggauccuaacaaugaagaagguggucauggagugaaaggcugggccuuugaugauggaaaugacguguggaugggaagaacgaucagcgagaaguuacgcucaggauaugaaaccuucaaagucauugaaggcugguccaacccuaauuccaaauugcagauaaauaggcaagucauaguugacagagguaauagguccgguuauucugguauuuucucuguugaaggcaaaagcugcaucaaucggugcuuuuauguggaguugauaaggggaagaaaagaggaaacugacgucuuguggaccucaaacaguauuguuguguuuuguggcaccucagguacauauggaacaggcucauggccugauggggcggauaucaaucucaugccuauauaa

SEQ ID NO: 47945 - RNA, 1410 nt, Artificial Sequence
  derived and/or modified CDS sequence (wt) from neuraminidase__InfluenzaA__ABU92810
augaauccaaaucaaaagauaauaacaauuggcucuguuucucucaccauugccgcgauaugcuuccuuaugcaaauugccauccugguaacuacuguaacauugcauuucaagcagcaugaaugcaacucccccccaaacaaccaaguaaugcugugugaaccaacaauaauagaaagaaacauaacagagauaguguaucugaccaacaccaccauagagaaggaaauaugccccaaacuagcagaauacagaaauuggucaaagccgcaauguaacauuacaggauuugcaccuuuuucuaaggacaauucgauucggcuuuccgcugguggggacaucugggugacaagagaaccuuaugugucaugcgauccugacaaguguuaucaauuugcccuugggcagggaacaacacuaaacaacgggcauucaaaugacacaguacaugauaggaccccuuaccggacccuauugaugaaugaauuggguguuccauuucauuugggaaccaggcaagugugcauagcaugguccagcucaaguugucacgauggaaaagcguggcugcauguuuguguaacuggggaugauaaaaaugcaacugcuagcuucauuuacaaugggaggcuuguagauaguauugguucaugguccaaaaaaauacucagaacccaggagucggaaugcguuuguaucaauggaacuuguacagugguaaugacugauggaagcgcuucagggaaagcugauacuaaaauacuauucauugaggaggggaaaaucguucauauuagcacauugucaggaagugcucagcaugucgaggagugcuccuguuauccucgauauccuggugucagaugugucugcagagacaacuggaaaggcuccaauaggcccauuguagauauaaauguaaaggauuauagcauuguuuccaguuaugugugcucaggacuuguuggagacacacccagaaaaaacgacagcuucagcaguagccauugccuagauccuaacaaugaggaagguggucauggagugaaaggcugggccuuugaugauggaaaugacguguggaugggaagaacgaucagcgagaaguuacgcucagguuaugaaaccuucaaagucaucgaaggcugguccaaaccuaacuccaaauuacagauaaauaggcaaguuauaguugaaggagguaacagguccgguuauucugguauuuucuccguugaaggcaaaagcugcaucaaucggugcuuuuauguggaguugauaaggggaaggaaagaggaaacugaagucugguggaccucaaacaguauuguuguguuuuguggcaccucagguacauauggaacaggcucauggccugauggggcggauaucaaucucaugccuauauaa

SEQ ID NO: 47946 - RNA, 1410 nt, Artificial Sequence
  derived and/or modified CDS sequence (wt) from neuraminidase__InfluenzaA__ABU92811
augaauccaaaucaaaagauaauaacaauuggcucuguuucucucaccauugccgcgauaugcuuccuuaugcaaauugccauccugguaacuacuguaacauugcauuucaagcagcaugaaugcaacucccccccaaacaaccaaguaaugcugugugaaccaacaaugauagaaagaaacauaacagagauaguguaucugaccaacaccaccauagagaaggaaauaugccccaaacuagcagaauacagaaauuggucaaagccgcaauguaacauuacaggauuugcaccuuuuucuaaggacaauucgauucggcuuuccgcuguuggggacaucugggugacaagagaaccuuaugugucaugcgauccugauaaguguuaucaauuugcccuuggacagggaacaacacuaaacaacgggcauucaaaugacacaguacaugauaggaccccuuaccggacccuauugaugaaugaauuggguguuccauuucauuugggaaccaggcaagugugcauagcaugguccagcucaaguugucacgauggaaaagcguggcugcauguuuguguaacuggggaugauaaaaaugcaacugcuagcuucauuuacaaugggaggcuuguagauaguauugguucaugguccaaaaaaauacucagaacucaggagucggaaugcguuuguaucaauggaacuuguacagugguaaugacugauggaagcgcuucagggaaagcugauacuaaaauacuauucauugaggaggggaaaaucguucauauuagcacauugucaggaagugcucagcaugucgaggagugcuccuguuauccucgauauccuggugucagaugugucugcagagacaacuggaaaggcuccaauaggcccauuguagauauaaauguaaaggauuauagcauuguuuccaguuaugugugcucaggacucguuggagacacacccagaaaaaacgacagcuucagcaguagccauugccuagauccuaacaaugaggaagguggucauggagugaaaggcugggccuuugaugauggaaaugacguguggaugggaagaacgaucagcgagaaguuacgcucagguuaugaaaccuucaaagucaucgaaggcugguccaaaccuaacuccaaauuacagauaaauaggcaaguuauaguugaaagagguaacagguccgguuauucugguauuuucuccguugaaggcaaaagcugcaucaaucggugcuuuuauguggaguugauaaggggaaggaaagaggaaacugaagucugguggacaucaaacaguauuguuguguuuuguggcaccucagguacauauggaacaggcucauggccugauggggcggauaucaaucucaugccuauauaa

SEQ ID NO: 47947 - RNA, 1410 nt, Artificial Sequence; identical to SEQ ID NO: 47917
  derived and/or modified CDS sequence (wt) from neuraminidase__InfluenzaA__ABU92814

SEQ ID NO: 47948 - RNA, 1410 nt, Artificial Sequence
  derived and/or modified CDS sequence (wt) from neuraminidase__InfluenzaA__ABU92815
augaauccaaaucaaaagauaauaacgauuggcucuguuucucucaccauuuccacaauaugcuucuucaugcaaauugccaucuugauaacuacuguaacauugcauuucaagcaauaugaauucaacucccccccaaacaaccaagugaugcugugugaaccaacaauaauagaaagaaacauaacagagauaguguaucugaccaacaccaccauagagaaggaaauaugccccaaacuagcagaauacagaaauuggucaaagccgcaaugugacauuacaggauuugcaccuuuuucuaaggacaauucgauuaggcuuuccgcugguggggacaucugggugacaagagaaccuuaugugucaugcgauccugacaaguguuaucaauuugcccuuggacagggaacaacacuaaacaacgugcauucaaaugacacaguacaugauaggaccccuuaucggacccuauugaugaaugaguuagguguuccauuucaucuggggaccaagcaagugugcauagcaugguccagcucaaguugucacgauggaaaagcauggcugcauguuuguguaacgggggaugauaaaaaugcaacugcuagcuucauuuacaaugggaggcuuguagauaguauuguuucaugguccaaaaaaauccucaggacccaggagucagaaugcguuuguaucaauggaacuuguacaguaguaaugacugaugggagugcuucaggaaaagccgauacuaaaauacuauucauugaggaggggaaaaucguucauacuagcacauugucaggaagugcucagcaugucgaggagugcuccugcuauccucgauauccuggugucagaugugucugcagagacaacuggaaaggcuccaauaggcccaucguagauauaaacauaaaggauuauagcauuguuuccaguuaugugugcucaggacuuguuggagacacacccagaaaaaacgacagcuccagcaguagccauugcuuggauccuaacaaugaagaagguggucauggagugaaaggcugggccuuugaugauggaaaugacguguggaugggaagaacgaucagcgagaaguuacgcucaggauaugaaaccuucaaagucauugaaggcugguccaacccuaauuccaaauugcagauaaauaggcaagucauaguugacagagguaauagguccgguuauucugguauuuucucuguugaaggcaaaagcugcaucaaucggugcuuuuauguggaguugauaaggggaagaaaagaggaaacugaagucuuguggaccucaaacaguauuguuguguuuuguggcaccucagguacauauggaacaggcucauggccugauggggcggacaucaaucucaugccuauauaa

SEQ ID NO: 47949 - RNA, 1410 nt, Artificial Sequence; identical to SEQ ID NO: 46784
  derived and/or modified CDS sequence (wt) from neuraminidase__InfluenzaA__ABU92816

SEQ ID NO: 47950 - RNA, 1410 nt, Artificial Sequence
  derived and/or modified CDS sequence (wt) from neuraminidase__InfluenzaA__ABU92817
augaauccaaaucaaaagauaauaacaauuggcucuguuucucucaccauugccgcgauaugcuuccuuaugcaaauugccauccugguaacuacuguaacauugcauuucaagcagcaugaaugcaacucccccccaaacaaccaaguaaugcugugugaaccaacaauaauagaaagaaacauaacagagauaguguaucugaccaacaccaccauagagaaggaaauaugccccaaacuagcagaauacagaaauuggucaaagccgcaauguaacauuacaggauuugcaccuuuuucuaaggacaauucgauucggcuuuccgcugguggggacaucugggugacaagagaaccuuaugugucaugcgauccugacaaguguuaucaauuugcccuugggcagggaacaacacuaaacaacgggcauucaaaugacacaguacaugauaggaccccuuaccggacccuauugaugaaugaauuggguguuccauuucauuugggaaccaggcaagugugcauagcaugguccagcucaaguugucacgauggaaaagcguggcugcauguuuguguaacuggggaugauaaaaaugcaacugcuagcuucauuuacaaugggaggcuuguagauaguauugguucaugguccaaaaaaauacucagaacccaggagucggaaugcguuuguaucaauggaacuuguacagugguaaugacugauggaagcgcuucagggaaagcugauacuaaaauacuauucauugaggaggggaaaaucguucauauuagcacauugucaggaagugcucagcaugucgaggagugcuccuguuauccucgauauccuggugucagaugugucugcagagacaacuggaaaggcuccaauaggcccauuguagauauaaauguaaaggauuauagcauuguuuccaguuaugugugcucaggacuuguuggagacacacccagaaaaaacgacagcuucagcaguagccauugccuagauccuaacaaugaggaagguggucauggagugaaaggcugggccuuugaugauggaaaugacguguggaugggaagaacgaucagcgagaaguuacgcucagguuaugaaaccuucaaagucaucgaaggcugguccaaaccuaacuccaaauuacagauaaauaggcaaguuauaguugaaagagguaacagguccgguuauucugguauuuucuccguugaaagcaaaagcugcaucaaucggugcuuuuauguggaguugauaaggggaaggaaagaggaaacugaagucugguggaccucaaacaguauuguuguguuuuguggcaccucagguacauauggaacaggcucauggccugauggggcggauaucaaucucaugccuauauaa

SEQ ID NO: 47951 - RNA, 1410 nt, Artificial Sequence; identical to SEQ ID NO: 47917
  derived and/or modified CDS sequence (wt) from neuraminidase__InfluenzaA__ABU92818

SEQ ID NO: 47952 - RNA, 1410 nt, Artificial Sequence; identical to SEQ ID NO: 47917
  derived and/or modified CDS sequence (wt) from neuraminidase__InfluenzaA__ABU92819

SEQ ID NO: 47953 - RNA, 1410 nt, Artificial Sequence
  derived and/or modified CDS sequence (wt) from neuraminidase__InfluenzaA__ABU92821
augaauccaaaucaaaagauaauaacaauuggcucuguuucucucaccauugccgcgauaugcuuccuuaugcaaauugccauccugguaacuacuguaacauugcauuucaagcagcaugaaugcaacucccccccaaacaaccaaguaaugcugugugaaccaacaauaauagaaagaaacauaacagagauaguguaucugaccaacaccaccauagagaaggaaauaugccccaaacuagcagaauacagaaauuggucaaagccgcaauguaacauuacaggauuugcaccuuuuucuaaggacaauucgauucggcuuuccgcugguggggacaucugggugacaagagaaccuuaugugucaugcgauccugacaaguguuaucaauuugcccuugggcagggaacaacacuaaacaacgggcauucaaaugacacaguacaugauaggaccccuuaccggacccuauugaugaaugaauuggguguuccauuucauuugggaaccaggcaagugugcauagcaugguccagcucaaguugucacgauggaaaagcguggcugcauguuuguguaacuggggaugauaaaaaugcaacugcuagcuucauuuacaaugggaggcuuguagauaguauugguucaugguccaaaaaaauacucagaacccaggagucggaaugcguuuguaucaauggaacuuguacagugguaaugacugauggaagcgcuucaggaaaagcugauacuaaaauacuauucauugaggaggggaaaaucguucauauuagcacauugucaggaagugcucagcaugucgaggagugcuccuguuauccucgauauccuggugucagaugugucugcagagacaacuggaaaggcuccaauaggcccauuguagauauaaauguaaaggauuauagcauuguuuccaguuaugugugcucaggacuuguuggagacacacccagaaaaaacgacagcuucagcaguagccauugccuagauccuaacaaugaggaagguggucauggagugaaaggcugggccuuugaugauggaaaugacguguggaugggaagaacgaucagcgagaaguuacgcucagguuaugaaaccuucaaagucaucgaaggcugguccaaaccuaacuccaaauuacagauaaauaggcaaguuauaguugaaagagguaacagguccgguuauucugguauuuucuccguugaaggcaaaagcugcaucaaucggugcuuuuauguggaguugauaaggggaaggaaagaggaaacugaagucugguggaccucaaacaguauuguuguguuuuguggcaccucagguacauauggaacaggcucauggccugauggggcggauaucaaucucaugccuauauaa

SEQ ID NO: 47954 - RNA, 1410 nt, Artificial Sequence; identical to SEQ ID NO: 47917
  derived and/or modified CDS sequence (wt) from neuraminidase__InfluenzaA__ABU92822

SEQ ID NO: 47955 - RNA, 1410 nt, Artificial Sequence; identical to SEQ ID NO: 46149
  derived and/or modified CDS sequence (wt) from neuraminidase__InfluenzaA__ABU92823

SEQ ID NO: 47956 - RNA, 1410 nt, Artificial Sequence
  derived and/or modified CDS sequence (wt) from neuraminidase__InfluenzaA__ABU92824
augaauccaaaucaaaagauaauaacaauuggcucuguuucucucaccauugccgcgauaugcuuccuuaugcaaauugccauccugguaacuacuguaacauugcauuucaagcagcaugaaugcaacucccccccaaacaaccaaguaaugcugugugaaccaacaauaauagaaagaaacauaacagagauaguguaucugaccaacaccaccauagagaaggaaauaugccccaaacuagcagaauacagaaauuggucaaagccgcaauguaacauuacaggauuugcaccuuuuucuaaggacaauucgauucggcuuuccgcugguggggacaucugggugacaagagaaccuuaugugucaugcgauccugacaaguguuaucaauuugcccuugggcagggaacaacacuaaacaacgggcauucaaaugacacaguacaugauaggaccccuuaccggacccuauugaugaaugaauuggguguuccauuucauuugggaaccaggcaagugugcauagcaugguccagcucaaguugucacgauggaaaagcguggcugcauguuuguguaacuggggaugauaaaaaugcaacugcuagcuucauuuacaaugggaggcuuguagauaguauugguucaugguccaaaaaaauacucagaacccaggagucggaaugcguuuguaucaauggaacuuguacagugguaaugacugauggaagcgcuucagggaaagcugauacuaaaauacuauucauugaggaggggaaaaucguucauauuagcacauugucaggaagugcucagcaugucgaggagugcuccuguuauccucgauauccuggugucagaugugucugcagagacaacuggaaaggcuccaauaggcccauuguagauauaaauguaaaggauuauagcauuguuuccaguuaugugugcucaggacuuguuggagacacacccagaagaaaugacagcuucagcaguagccauugccuagauccuaacaaugaggaagguggucauggagugaaaggcugggccuuugaugauggaaaugacguguggaugggaagaacgaucagcgagaaguuacgcucagguuaugaaaccuucaaagucaucgaaggcugguccaaaccuaacuccaaauuacagauaaauaggcaaguuauaguugaaagagguaacagguccgguuauucugguauuuucuccguugaaggcaaaagcugcaucaaucggugcuuuuauguggaguugauaaggggaaggaaagaggaaacugaagucugguggaccucaaacaguauuguuguguuuuguggcaccucagguacauauggaacaggcucauggccugauggggcggauaucaaucucaugccuauauaa

SEQ ID NO: 47957 - RNA, 1410 nt, Artificial Sequence
  derived and/or modified CDS sequence (wt) from neuraminidase__InfluenzaA__ABU92825
augaauccaaaucaaaagauaauaacgauuggcucuguuucucucaccauuuccacaauaugcuucuucaugcaaauugccaucuugauaacuacuguaacauugcauuucaagcaauaugaauucaacucccccccaaacaaccaagugaugcugugugaaccaacaauaauagaaagaaacauaacagagauaguguaucugaccaacaccaccauagagaaggaaauaugccccaaacuagcagaauacagaaauuggucaaagccgcaaugugacauuacaggauuugcaccuuuuucuaaggacaauucgauuaggcuuuccgcugguggggacaucugggugacaagagaaccuuaugugucaugcgauccuaacaaguguuaucaauuugcccuuggacagggaacaacacuaaacaacgugcauucaaaugacacaguacaugauaggaccccuuaucggacccuauugaugaaugaguuagguguuccauuucaucuggggaccaagcaagugugcauagcaugguccagcucaaguugucacgauggaaaagcauggcugcauguuuguguaacgggggaugauaaaaaugcaacugcuagcuucauuuacaaugggaggcuuguagauaguauuguuucaugguccaaaaaaauccucaggacccaggagucagaaugcguuuguaucaauggaacuuguacaguaguaaugacugaugggagugcuucaggaaaagcugauacuaaaauacuauucauugaggaggggaaaaucguucauacuagcacauugucaggaagugcucagcaugucgaggagugcuccugcuauccucgauauccuggugucagaugugucugcagagacaacuggaaaggcuccaauaggcccaucguagauauaaacauaaaggauuauagcauuguuuccaguuaugugugcucaggacuuguuggagacacacccagaaaaaacgacagcuccagcaguagccauugcuuggauccuaacaaugaagaagguggucauggagugaaaggcugggccuuugaugauggaaaugacguguggaugggaagaacgaucagcgagaagucacgcucaggauaugaaaccuucaaagucauugaaggcugguccaacccuaauuccaaauugcagauaaauaggcaagucauaguugacagagguaauagguccgguuauucugguauuuucucuguugaaggcaaaagcugcaucaaucggugcuuuuauguggaguugauaaggggaagaaaagaggaaacugaagucuuguggaccucaaacaguauuguuguguuuuguggcaccucagguacauauggaacaggcucauggccugauggggcggacaucaaucucaugccuauauaa

SEQ ID NO: 47958 - RNA, 1410 nt, Artificial Sequence
  derived and/or modified CDS sequence (wt) from neuraminidase__InfluenzaA__ABU92826
augaauccaaaucaaaagauaauaacgauuggcucuguuucucucaccauuuccacaauaugcuucuucaugcaaauugccaucuugauaacuacuguaacauugcauuucaagcaauaugaauucaacucccccccaaacaaccaagugaugcugugugaaccaacaauaauagaaagaaacauaacagagauaguguaucugaccaacaccaccauagagaaggaaauaugccccaaacuagcagaauacagaaauuggucaaagccgcaaugugacauuacaggauuugcaccuuuuucuaaggacaauucgauuaggcuuuccgcugguggggacaucugggugacaagagaaccuuaugugucaugcgauccuaacaaguguuaucaauuugcccuuggacagggaacaacacuaaacaacgugcauucaaaugacacaguacaugauaggaccccuuaucggacccuauugaugaaugaguuaggugucccauuucaucuggggaccaagcaagugugcauagcaugguccagcucaaguugucacgauggaaaagcauggcugcauguuuguguaacgggggaugauaaaaaugcaacugcuagcuucauuuacaaugggaggcuuguagauaguauuguuucaugguccaaaaaaauccucaggacccaggagucagaaugcguuuguaucaauggaacuuguacaguaguaaugacugaugggagugcuucaggaaaagcugauacuaaaauacuauucauugaggaggggaaaaucguucauacuagcacauugucaggaagugcucagcaugucgaggagugcuccugcuauccucgauauccuggugucagaugugucugcagagacaauuggaaaggcuccaauaggcccaucguagauauaaacauaaaggauuauagcauuguuuccaguuaugugugcucaggacuuguuggagacacacccagaaaaaacgacagcuccagcaguagccauugcuuggauccuaacaaugaagaagguggucauggagugaaaggcugggccuuugaugauggaaaugacguguggaugggaagaacgaucagcgagaagucacgcucaggauaugaaaccuucaaagucauugaaggcugguccaacccuaauuccaaauugcagauaaauaggcaagucauaguugacagagguaauagguccgguuauucugguauuuucucuguugaaggcaaaagcugcaucaaucggugcuuuuauguggaguugauaaggggaagaaaagaggaaacugaagucuuguggaccucaaacaguauuguuguguuuuguggcaccucagguacauauggaacaggcucauggccugauggggcggacaucaaucucaugccuauauaa

SEQ ID NO: 47959 - RNA, 1410 nt, Artificial Sequence
  derived and/or modified CDS sequence (wt) from neuraminidase__InfluenzaA__ABU92827
augaauccaaaucaaaagauaauaacaauuggcucuguuucucucaccauugccgcgauaugcuuccuuaugcaaauugccauccugguaacuacuguaacauugcauuucaagcagcaugaaugcaacucccccccaaacaaccaaguaaugcugugugaaccaacaauaauagaaagaaacauaacagagauaguguaucugaccaacaccaccauagagaaggaaauaugccccaaacuagcagaauacagaaauuggucaaagccgcaauguaacauuacaggauuugcaccuuuuucuaaggacaauucgauucggcuuuccgcugguggggacaucugggugacaagagaaccuuaugugucaugcgauccugacaaguguuaucaauuugcccuugggcagggaacaacacuaaacaacgggcauucaaaugacacaguacaugauaggaccccuuaccggacccuauugaugaaugaauuggguguuccauuucauuugggaaccaggcaagugugcauagcaugguccagcucaaguugucacgauggaaaagcguggcugcauguuuguguaacuggggaugauaaaaaugcaacugcuagcuucauuuacaauggaaggcuuguagauaguauugguucaugguccaaaaaaauacucagaacccaggagucggaaugcguuuguaucaauggaacuuguacagugguaaugacugauggaagcgcuucagggaaagcugauacuaaaauacuauucauugaggaggggaaaaucguucauauuagcacauugucaggaagugcucagcaugucgaggagugcuccuguuauccucgauauccuggugucagaugugucugcagagacaacuggaaaggcuccaauaggcccauuguagauauaaauguaaaggauuauagcauuguuuccaguuaugugugcucaggacuuguuggagacacacccagaaaaaacgacagcuucagcaguagccauugccuagauccuaacaaugaggaagguggucauggagugaaaggcugggccuuugaugauggaaaugacguguggaugggaagaacgaucagcgagaaguuacgcucagguuaugaaaccuucaaagucaucgaaggcugguccaaaccuaacuccaaauuacagauaaauaggcaaguuauaguugaaagagguaacagguccgguuauucugguauuuucuccguugaaggcaaaagcugcaucaaucggugcuuuuauguggaguugauaaggggaaggaaagaggaaacugaagucugguggaccucaaacaguauuguuguguuuuguggcaccucagguacauauggaacaggcucauggccugauggggcggauaucaaucucaugccuauauaa

SEQ ID NO: 47960 - RNA, 1410 nt, Artificial Sequence
  derived and/or modified CDS sequence (wt) from neuraminidase__InfluenzaA__ABU92828
augaauccaaaucaaaagauaauaacaauuggcucuguuucucucaccauugccgcgauaugcuuccuuaugcaaauugccauccugguaacuacuguaacauugcauuucaagcagcaugaaugcaacucccccccaaacaaccaaguaaugcugugugaaccaacaauaauagaaagaaacauaacagagauaguguaucugaccaacaccaccauagagaaggaaauaugccccaaacuagcagaauacagaaauuggucaaagccgcaauguaacauuacaggauuugcaccuuuuucuaaggacaauucgauucggcuuuccgcugguggggacaucugggugacaagagaaccuuaugugucaugcgauccugacaaguguuaucaauuugcccuugggcagggaacaacacuaaacaacgggcauucaaaugacacaguucaugauaggaccccuuaccggacccuauugaugaaugaauuggguguuccauuucauuugggaaccaggcaagugugcauagcaugguccagcucaaguugucacgauggaaaagcguggcugcauguuuguguaacuggggaugauaaaaaugcaacugcuagcuucauuuacaaugggaggcuuguagauaguauugguucaugguccaaaaaaauacucagaacccaggagucggaaugcguuuguaucaauggaacuuguacagugguaaugacugauggaagcgcuucagggaaagcugauacuaaaauacuauucauugaggaggggaaaaucguucauauuagcacauugucaggaagugcucagcaugucgaggagugcuccuguuauccucgauauccuggugucagaugugucugcagagacaacuggaaaggcuccaauaggcccauuguagauauaaauguaaaggauuauagcauuguuuccaguuaugugugcucaggacuuguuggagacacacccagaaaaaacgacagcuucagcaguagccauugccuagauccuaacaaugaggaagguggucauggagugaaaggcugggccuuugaugauggaaaugacguguggaugggaagaacgaucagcgagaaguuacgcucagguuaugaaaccuucaaagucaucgaaggcugguccaaaccuaacuccaaauuacagauaaauaggcaaguuauaguugaaagagguaacagguccgguuauucugguauuuucuccguugaaggcaaaagcugcaucaaucggugcuuuuauguggaguugauaaggggaaggaaagaggaaacugaagucugguggaccucaaacaguauuguuguguuuuguggcaccucagguacauauggaacaggcucauggccugauggggcggauaucaaucucaugccuauauaa

SEQ ID NO: 47961 - RNA, 1410 nt, Artificial Sequence
  derived and/or modified CDS sequence (wt) from neuraminidase__InfluenzaA__ABU92829
augaauccaaaucaaaagauaauaacgauuggcucuguuucucucaccauuuccacaauaugcuucuucaugcaaauugccaucuugauaacuacuguaacauugcauuuuaagcaauaugaauucaacucccccccaaacaaccaagugaugcugugugaaccaacaauaauagaaagaaacauaacagagauaguguaucugaccaacaccaccauagagaaggaaauaugccccaaacuagcagaauacaggaauuggucaaagccacaaugugacauuacaggauuugcaccuuuuucuaaggacaauucgauuaggcuuuccgcugguggggacaucugggugacaagagaaccuuaugugucaugcgauccugacaaguguuaucaauuugcccuuggacagggaacaacacuaaacaacgugcauucaaaugacacaguacaugauaggaccccuuaucggacccuauugaugaaugaguuagguguuccauuucaucuggggaccaagcaagugugcauagcaugguccagcucaaguugucacgauggaaaagcauggcugcauguuuguguaacgggggaugauaaaaaugcaacugcuagcuucauuuacaaugggaggcuuguagauaguauuguuucaugguccaaaaaaauccucaggacccaggagucagaaugcguuuguaucaauggaacuuguacaguaguaaugacugaugggagugcuucaggaaaagcugauacuaaaauacuauucauugaggaggggaaaaucguucauacuagcacauugucaggaagugcucagcaugucgaggagugcuccugcuauccucgauauccuggugucagaugugucugcagagacaacuggaaaggcuccaauaggcccaucguagauauaaacauaaaggauuauagcauuguuuccaguuaugugugcucaggacuuguuggagacacacccagaaaaaacgacagcuccagcaguagccauugcuuggauccuaacaaugaagaagguggucauggagugaaaggcugggccuuugaugauggaaaugacguguggaugggaagaacgaucagcgagaaguuacgcucaggauaugaaaccuucaaagucauugaaggcugguccaacccuaauuccaaauugcagauaaauaggcaagucauaguugacagagguaauagguccgguuauucugguauuuucucuguugaaggcaaaagcugcaucaaucggugcuuuuauguggaguugauaaggggaagaaaagaggaaacugaagucuuguggaccucaaacaguauuguuguguuuuguggcaccucagguacauauggaacaggcucauggccugauggggcggacaucaaucucaugccuauauaa

SEQ ID NO: 47962 - RNA, 1410 nt, Artificial Sequence
  derived and/or modified CDS sequence (wt) from neuraminidase__InfluenzaA__ABU92830
augaauccaaaucaaaagauaauaacaauuggcucuguuucucucaccauugccgcaauaugcuuccuuaugcaaauugccauccugguaacuacuguaacauugcauuucaagcagcaugaaugcaacucccccccaaacaaccaaguaaugcugugugaaccaacaauaauagaaagaaacauaacagagauaguguaucugaccaacaccaccauagagaaggaaauaugccccaaacuagcagaauacagaaauuggucaaaaccgcaauguaacauuacaggauuugcaccuuuuucuaaggacaauucgauucggcuuuccgcugguggggacaucugggugacaagagaaccuuaugugucaugcgauccugacaaguguuaucaauuugcccuugggcagggaacaacacuaaacaacgggcauucaaaugacacaguacaugauaggaccccuuaccggacccuauugaugaaugaauuggguguuccauuucauuugggaaccaggcaagugugcauagcaugguccagcucaaguugucacgauggaaaagcguggcugcauguuuguguaacuggggaugauaaaaaugcaacugcuagcuucauuuacaaugggaggcuuguagauaguauugguucaugguccaaaaaaauacucagaacccaggagucggaaugcguuuguaucaauggaacuuguacagugguaaugacugauggaagcgcuucaggaaaagcugauacuaaaauacuauucauugaggaggggaaaaucguucauauuagcacauugucaggaagugcucagcaugucgaggagugcuccuguuauccucgauauccuggugucagaugugucugcagagacaacuggaaaggcuccaauaggcccauuguagauauaaauguaaaggauuauagcauuguuuccaguuaugugugcucaggacuuguuggagacacacccagaaaaaacgacagcuucagcaguagccguugccuagauccuaacaaugaggaagguggucauggagugaaaggcugggccuuugaugauggaaaugacguguggaugggaagaacgaucagcgagaaguuacgcucagguuaugaaaccuucaaagucaucgaaggcugguccaaaccuaacuccaaauuacagauaaauaggcaaguuauaguugaaagagguaacagguccgguuauucugguauuuucuccguugaaggcaaaagcugcaucaaucggugcuuuuauguggaguugauaaggggaaggaaagaggaaacugaagucugguggaccucaaacaguauuguuguguuuuguggcaccucagguacauauggaacaggcucauggccugauggggcggauaucaaucucaugccuauauaa

SEQ ID NO: 47963 - RNA, 1410 nt, Artificial Sequence; identical to SEQ ID NO: 47917
  derived and/or modified CDS sequence (wt) from neuraminidase__InfluenzaA__ABU92831

SEQ ID NO: 47964 - RNA, 1410 nt, Artificial Sequence; identical to SEQ ID NO: 47917
  derived and/or modified CDS sequence (wt) from neuraminidase__InfluenzaA__ABU92832

SEQ ID NO: 47965 - RNA, 1410 nt, Artificial Sequence
  derived and/or modified CDS sequence (wt) from neuraminidase__InfluenzaA__ABU92833
augaauccaaaucaaaagauaauaacaauuggcucuguuucucucaccauugccgcaauaugcuuccuuaugcaaauugccauccugguaacuacuguaacauugcauuucaagcagcaugaaugcaacucccccccaaacaaccaaguaaugcugugugaaccaacaauaauagaaagaaacauaacagagauaguguaucugaccaacaccaccauagagaaggaaauaugccccaaacuagcagaauacagaaauuggucaaagccgcaauguaacauuacaggauuugcaccuuuuucuaaggacaauucgauucggcuuuccgcugguggggacaucugggugacaagagaaccuuaugugucaugcgauccugacaaguguuaucaauuugcccuugggcagggaacaacacuaaacaacgggcauucaaaugacacaguacaugauaggaccccuuaccggacccuauugaugaaugaauuggguguuccauuucauuugggaaccaggcaagugugcauagcaugguccagcucaaguugucacgauggaaaagcguggcugcauguuuguguaacuggggaugauaaaaaugcaacugcuagcuucauauacaaugggaggcuuguagauaguauugguucaugguccaaaaaaauacucagaacccaggagucggaaugcguuuguaucaauggaacuuguacagugguaaugacugauggaagcgcuucaggaaaagcugauacuaaaauacuauucauugaggaggggaaaaucguucauauuagcacauugucaggaagugcucagcaugucgaggagugcuccuguuauccucgauauccuggugucagaugugucugcagagacaacuggaaaggcuccaauaggcccauuguagauauaaauguaaaggauuauagcauuguuuccaguuaugugugcucaggacuuguuggagacacacccagaaaaaacgacagcuucagcaguagccauugccuagauccuaacaaugaggaagguggucauggagugaaaggcugggccuuugaugauggaaaugacguguggaugggaagaacgaucagcgagaaguuacgcucagguuaugaaaccuucaaagucaucgaaggcugguccaaaccaaacuccaaauuacagauaaauaggcaaguuauaguugaaagagguaacagguccgguuauucugguauuuucuccguugaaggcaaaaguugcaucaaucggugcuuuuauguggaguugauaaggggaaggaaagaggaaacugaagucugguggaccucaaacaguauuguuguuuuuuguggcaccucagguacauauggaacaggcucauggccugauggggcggauaucaaucucaugccuauauaa

SEQ ID NO: 47966 - RNA, 1410 nt, Artificial Sequence
  derived and/or modified CDS sequence (wt) from neuraminidase__InfluenzaA__ABU92834
augaauccaaaucaaaagauaauaacaauuggcucuguuucucucaccauugccgcaauaugcuuccuuaugcauauugccauccugguaacuacuguaacauugcauuucaagcagcaugaaugcaacucccccccaaacaaccaaguaaugcugugugaaccaacaauaauagaaagaaacauaacagagauaguguaucugaccaacaccaccauagagaaggaaauaugccccaaacuagcagaauacagaaauuggucaaagccgcaauguaacauuacaggauuugcaccuuuuucuaaggacaauucgauucggcuuuccgcugguggggacaucugggugacaagagaaccuuaugugucaugcgauccugacaaguguuaucaauuugcccuugggcagggaacaacacuaaacaacgggcauucaaaugacacaguacaugauaggaccccuuaccggacccuauugaugaaugaauuggguguuccauuucauuugggaaccaggcaagugugcauagcaugguccagcucaaguugucacgauggaaaagcguggcugcauguuuguguaacuggggaugaugaaaaugcaacugcuagcuucauuuacaaugggaggcuuguagauaguauugguucaugguccaaaaaaauacucagaacccaggagucggaaugcguuuguaucaauggaacuuguacagugguaaugacugauggaagcgcuucaggaaaagcugauacuaaaauacuauucauugaggaggggaaaaucguucauauuagcacauugucaggaagugcucagcaugucgaggagugcuccuguuauccucgauauccuggugucagaugugucugcagagacaacuggaaaggcuccaauaggcccauuguagauauaaauguaaaggauuauagcauuguuuccaguuaugugugcucaggacuuguuggagacacacccagaaaaaacgacagcuucagcaguagccauugccuagauccuaacaaugaggaagguggucauggagugaaaggcugggccuuugaugauggaaaugacguguggaugggaagaacgaucagcgagaaguuacgcucagguuaugaaaccuucaaagucaucgaaggcugguccaaaccuaacuccaaauuacagauaaauaggcaaguuauaguugaaagagguaacagguccgguuauucugguauuuucuccguugaaggcaaaagcugcaucaaucggugcuuuuauguggaguugauaaggggaaggaaagaggaaacugaagucugguggaccucaaacaguauuguuguguuuuguggcaccucagguacauauggaacaggcucauggccugauggggcggauaucagucucaugccuauauaa

SEQ ID NO: 47967 - RNA, 1410 nt, Artificial Sequence; identical to SEQ ID NO: 47917
  derived and/or modified CDS sequence (wt) from neuraminidase__InfluenzaA__ABU92835

SEQ ID NO: 47968 - RNA, 1410 nt, Artificial Sequence
  derived and/or modified CDS sequence (wt) from neuraminidase__InfluenzaA__ABU92836
augaauccaaaucaaaagauaauaacaauuggcuccguuucucucaccauugccgcgauaugcuuccuuaugcaaauugccauccugguaacuacuguaacauugcauuucaagcagcaugaaugcaacucccccccaaacaaccaaguaaugcugugugaaccaacaauaauagaaagaaacauaacagagauaguguaucugaccaacaccaccauagagaaggaaauaugccccaaacuagcagaauacagaaauuggucaaagccgcaauguaacauuacaggauuugcaccuuuuucuaaggacaauucgauucggcuuuccgcugguggggacaucugggugacaagagaaccuuaugugucaugcgauccugacaaguguuaucaauuugcccuugggcagggaacaacacuaaacaacgggcauucaaaugacacaguacaugauaggaccccuuaccggacccuauugaugaaugaauuggguguuccauuucauuugggaaccagacaagugugcauagcaugguccagcucaaguugucacgauggaaaagcguggcugcauguuuguguaacuggggaugauaaaaaugcaacugcuagcuucauuuacaaugggaggcuuguagauaguauugguucaugguccaaaaaaauacucagaacccaggagucggaaugcguuuguaucaauggaacuuguacagugguaaugacugauggaagcgcuucagggaaagcugauacuaaaauacuauucauugaggaggggaaaaucguucauauuagcacauugucaggaagugcucagcaugucgaggagugcuccuguuauccucgauauccuggugucagaugugucugcagagacaacuggaaaggcuccaauaggcccauuguagauauaaauguaaaggauuauagcauuguuuccaguuaugugugcucaggacuuguuggagacacacccagaaaaaacgacagcuucagcaguagccauugccuagauccuaacaaugaggaagguggucauggagugaaaggcugggccuuugaugauggaaaugacguguggaugggaagaacgaucagcgagaaguuacgcucagguuaugaaaccuucaaagucaucgaaggcugguccaaaccuaacuccaaauuacagauaaauaggcaaguuauaguugaaagagguaacagguccgguuauucugguauuuucuccguugaaggcaaaagcugcaucaaucggugcuuuuauguggaguugauaaggggaaggaaagaggaaacugaagucugguggaccucaaacaguauuguuguguuuuguggcaccucagguacauauggaacaggcucauggccugauggggcggauaucaaucucaugccuauauaa

SEQ ID NO: 47969 - RNA, 1410 nt, Artificial Sequence
  derived and/or modified CDS sequence (wt) from neuraminidase__InfluenzaA__ABU92837
augaauccaaaucaaaagauaauaacgauuggcucuguuucucucaccauuuccacaauaugcuucuucaugcaaauugccaucuugauaacuacuguaacauugcauuucaagcaauaugaauucaacucccccccaaacaaccaagugaugcugugugaaccaacaauaauagaaagaaacauaacagagauaguguaucugaccaacaccaccauagagaaggaaauaugccccaaacuagcagaauacagaaauuggucaaagccgcaaugugacauuacaggauuugcaccuuuuucuaaggacaauucgauuaggcuuuccgcugguggggacaucugggugacaagagaaccuuaugugucaugcgauccugacaaguguuaucaauuugcccuuggacagggaacaacacuaaacaacgugcauucaaaugacacaguacaugauaggaccccuuaucggacccuauugaugaaugaguuagguguuccauuucaucuggggaccaagcaagugugcauagcaugguccagcucaaguugucacgauggaaaagcauggcugcauguuuguguaacgggggaugauaaaaaugcaacugcuagcuucauuuacaaugggaggcuuguagauaguauuguuucaugguccaaaaaaauccucaggacccaggagucagaaugcguuuguaucaauggaacuuguacaguaguaaugacugaugggagugcuucaggaaaggcugauacuaaaauacuauucauugaggaggggaaaaucguucauacuagcacauugucaggaagugcucagcaugucgaggagugcuccugcuauccucgauauccuggugucagaugugucugcagagacaacuggaaaggcuccaauaggcccauaguagauauaaacauaaaggauuauagcauugcuuccaguuaugugugcucaggacuuguuggagacacacccagaaaaaacgacagcuccagcaguagccauugcuuggauccuaacaaugaagaagguggucauggagugaaaggcugggccuuugaugauggaaaugacguguggaugggaagaacgaucagcgagaaguuacgcucaggauaugaaaccuucaaagucauugaaggcugguccaacccuaauuccaaauugcagauaaauaggcaagucauaguugacagagguaauagguccgguuauucugguauuuucucuguugaaggcaaaagcugcgucaaucggugcuuuuauguggaguugauaaggggaagaaaagaggaaacugaagucuuguggaccucaaacaguauuguuguguuuuguggcaccucagguacauauggaacaggcucauggccugauggggcggacaucaaucucaugccuauauaa

SEQ ID NO: 47970 - RNA, 1410 nt, Artificial Sequence
  derived and/or modified CDS sequence (wt) from neuraminidase__InfluenzaA__ABU92838
augaauccaaaucaaaagauaauaacaauuggcucuguuucucucaccauugccgcgauaugcuuccuuaugcaaauugccauccugguaacuacuguaacauugcauuucaagcagcaugaaugcaacucccccccaaacaaccaaguaaugcugugugaaccaacaauaauagaaagaaacauaacagagauaguguaucugaccaacaccaccauagagaaggaaauaugccccaaacuagcagaauacagaaauuggucaaagccgcaauguaacauuacaggauuugcaccuuuuucuaaggacaauucgauucggcuuuccgcugguggggacaucugggugacaagagaaccuuaugugucaugcgauccugacaaguguuaucaauuugcccuugggcagggaacaacacuaaacaacgggcauucaaaugacacaguacaugauaggaccccuuaccggacccuauugaugaaugaauuggguguuccauuucauuugggaaccaggcaagugugcauagcaugguccagcucaaguugucacgauggaaaagcguggcugcauguuuguguaacuggggaugauaaaaaugcaacugcuagcuucauuuacaaugggaggcuuguagauaguauugguucaugguccaaaaaaauacucagaacccaggagucggaaugcguuuguaucaauggaacuuguacagugguaaugacugauggaagcgcuucagggaaagcugauacuaaaauacuauucauugaggaggggaaaaucguucauauuagcacauugucaggaagugcucagcaugucgaggagugcuccuguuauccucgauauccuggugucagaugugucugcagagacaacuggaaaggcuccaauaggcccauuguagauauaaauguaaaggauuauagcauuguuuccaguuaugugugcucaggacuuguuggagacacacccagaaaaaacgacagcuucagcaguagccauugccuagauccuaacaaugaggaagguggucauggagugaaaggcugggccuuugaugauggaaaugacguguggaugggaagaacgaucagcgagaaguuacgcucagguuaugaaaccuucaaagucaucgaaggcugguccaaaccuaacuccaaauuacagauaaauaggcaaguuauaguugaaagagguaacagguccgguuauucugguauuuucucuguugaaggcaaaagcugcaucaaucggugcuuuuauguggaguugauaaggggaaggaaagaggaaacugaagucugguggaccucaaacaguauuguuguguuuuguggcaccucagguacauauggaacaggcucauggccugauggggcggauaucaaucucaugccuauauaa

SEQ ID NO: 47971 - RNA, 1410 nt, Artificial Sequence; identical to SEQ ID NO: 46181
  derived and/or modified CDS sequence (wt) from neuraminidase__InfluenzaA__ABU92839

SEQ ID NO: 47972 - RNA, 1410 nt, Artificial Sequence
  derived and/or modified CDS sequence (wt) from neuraminidase__InfluenzaA__ABU92840
augaauccaaaucaaaagauaauaacgauuggcucuguuucucucaccauugccacaauaugcuuccuuaugcaaauugccauccugguaacuacuguaacauugcauuucaagcaauaugaaugcaacucccccccaaacaaccaagugaugcugugugaaccaacaauaauagaaagaaacauaacagagauaguguaucugaccaacaccaccauagagaaggaaauaugccccaaacuagcagaauacagaaauuggucaaagccgcaauguaacauuacaggauuugcaccuuuuucuaaggacaauucgauucggcuuuccgcugguggggacaucugggugacaagagaaccuuaugugucaugcgauccugacaaguguuaucaauuugcccuuggacagggaacaacacuaaacaacggacauucaaaugacacaguacaugauaggaccccuuaucggacccuauugaugaaugaguuggguguuccauuucauuugggaaccaagcaagugugcauagcaugguccagcucaaguugucacgauggaaaagcauggcugcauguuuguguaacgggggaugaugaaaaugcaacugcuagcuucauuuacaaugggaggcuuguagauaguauugguucaugguccaaaaaaauccucaggacccaggagucggaaugcguuuguaucaauggaacuuguacaguaguaaugacugaugggagugcuucaggaaaagcugauacuaaaauacuauucauugaggaggggaaaaucguucauauuagccuauugucaggaagugcucagcaugucgaggagugcuccuguuauccucgauacccuggugucagaugugucugcagagacaacuggaaaggcuccaauaggcccaucguagauauaaauguaaaggauuauagcauuguuuccaguuaugugugcucaggacuuguuggagacacacccagaaaaaacgacagcuccagcaguagccauugcuuggauccuaacaaugaggaagguggucauggagugaaaggcugggccuuugaugauggaaaugacguguggaugggaagaacgaucagcgagaaguuacgcucaggauaugaaaccuucaaagucauugaaggcugguccaaaccuaacuccaaauugcagauaaauaggcaagucauaguugacagagauaauagguccgguuauucugguauuuucucuguugaaggcaaaagcugcaucaaucggugcuuuuauguggaguugauaaggggaaggaaacaggaaacugaagucuuguggaccucaaacaguauuguuguguuuuguggcaccucagguacauauggaacaggcucauggccugauggggcggacaucaaucucaugccuauauaa

SEQ ID NO: 47973 - RNA, 1410 nt, Artificial Sequence
  derived and/or modified CDS sequence (wt) from neuraminidase__InfluenzaA__ABU92841
augaauccaaaucaaaagauaauaacgauuggcucuguuucucucaccauugccacaauaugcuuccuuaugcaaauugccauccugguaacuacuguaacauugcauuucaagcaauaugaaugcaacucccccccaaacaaccaagugaugcugugugaaccaacaauaauagaaagaaacauaacagagauaguguaucugaccaacaccaccauagagaaggaaauaugccccaaacuagcagaauacagaaauuggucaaagccgcaauguaacauuacaggauuugcaccuuuuucuaaggacaauucgauucggcuuuccgcugguggggacaucugggugacaagagaaccuuaugugucaugcgauccugacaaguguuaucaauuugcccuuggacagggaacaacacuaaacaacggacauucaaaugacacaguacaugauaggaccccuuaucggacccuauugaugaaugaguuggguguuccauuucauuugggaaccaagcaagugugcauagcaugguccagcucaaguugucacgauggaaaagcauggcugcauguuuguguaacgggggaugaugaaaaugcaacugcuagcuucauuuacaaugggaggcuuguagauaguauugguucaugguccaaaaaaauccucaggacccaggagucggaaugcguuuguaucaauggaacuuguacaguaguaaugacugaugggagugcuucaggaaaagcugauacuaaaauacuauucauugaggaggggaaaaucguucauacuagccuauugucaggaagugcucagcaugucgaggagugcuccuguuauccucgauacccuggugucagaugugucugcagagacaacuggaaaggcuccaauaggcccaucguagauauaaauguaaaggauuauagcauuguuuccaguuaugugugcucaggacuuguuggagacacacccagaaaaaacgacagcuccagcaguagccauugcuuggauccuaacaaugaggaagguggucauggagugaaaggcugggccuuugaugauggaaaugacguguggaugggaagaacgaucagcgagaaguuacgcucaggauaugaaaccuucaaagucauugaaggcugguccaaaccuaacuccaaauugcagauaaauaggcaagucauaguugacagagauaauagguccgguuauucugguauuuucucuguugaaggcaaaagcugcaucaaucggugcuuuuauguggaguugauaaggggaaggaaacaggaaacugaagucuuguggaccucaaacaguauuguuguguuuuguggcaccucagguacauauggaacaggcucauggccugauggggcggacaucaaucucaugccuauauaa

SEQ ID NO: 47974 - RNA, 1410 nt, Artificial Sequence
  derived and/or modified CDS sequence (wt) from neuraminidase__InfluenzaA__ABU92842
augaauccaaaucaaaagauaauaacgauuggcucuguuucucucaccauugccacaauaugcuuccuuaugcaaauugccauccugguaacuacuguaacauugcauuucaagcaauaugacugcaacucccccccaaacaaccaagugaugcugugugaaccaacaauaauagaaagaaacauaacagagauaguguaucugaccaacaccaccauagagaaggaaauaugccccaaacuagcagaauacagaaauuggucaaagccgcaauguaacauuacaggauuugcaccuuuuucuaaggacaauucgauucggcuuuccgcugguggggacaucugggugacaagagaaccuuaugugucaugcgauccugacaaguguuaucaauuugcccuuggacagggaacaacacuaaacaacggacauucaaaugacacaguacaugauaggaccccuuaucggacccuauugaugaaugaguuggguguuccauuucauuugggaaccaagcaagugugcauagcaugguccagcucaaguugucacgauggaaaagcauggcugcauguuuguguaacgggggaugaugaaaaugcaacugcuagcuucauuuacaaugggaggcuuguagauaguauugguucaugguccaaaaaaauccucaggacccaggagucggaaugcguuuguaucaauggaacuuguacaguaguaaugacugaugggagugcuucaggaaaagcugauacuaaaauacuauucauugaggaggggaaaaucguucauacuagccuauugucaggaagugcucagcaugucgaggagugcuccuguuauccucgauacccuggugucagaugugucugcagagacaacuggaaaggcuccaauaggcccaucguagauauaaauguaaaggauuauagcauuguuuccaguuaugugugcucaggacuuguuggagacacacccagaaaaaacgacagcuccagcaguagccauugcuuggauccuaacaaugaggaagguggucauggagugaaaggcugggccuuugaugauggaaaugacguguggaugggaagaacgaucagcgagaaguuacgcucaggauaugaaaccuucaaagucauugaaggcugguccaaaccuaacuccaaauugcagauaaauaggcaagucauaguugacagagguaauagguccgguuauucugguauuuucucuguugaaggcaaaagcugcaucaaucggugcuuuuauguggaguugauaaggggaaggaaacaggaaacugaagucuuguggaccucaaacaguauuguuguguuuuguggcaccucagguacauauggaacaggcucauggccugauggggcggacaucaaucucaugccuauauaa

SEQ ID NO: 47975 - RNA, 1410 nt, Artificial Sequence; identical to SEQ ID NO: 46181
  derived and/or modified CDS sequence (wt) from neuraminidase__InfluenzaA__ABU92843

SEQ ID NO: 47976 - RNA, 1410 nt, Artificial Sequence
  derived and/or modified CDS sequence (wt) from neuraminidase__InfluenzaA__ABU92844
augaauccaaaucaaaagauaauaacgauuggcucuguuucucucaccauugccacaauaugcuuccuuaugcaaauugccauccugguaacuacuguaacauugcauuucaaacaauaugaaugcaacucccccccaaacaaccaagugaugcugugugaaccaacaauaauagaaagaaacauaacagagauaguguaucugaccaacaccaccauagagaaggaaauaugccccaaacuagcagaauacagaaauuggucaaagccgcaauguaacauuacaggauuugcaccuuuuucuaaggacaauucgauucggcuuuccgcugguggggacaucugggugacaagagaaccuuaugugucaugcgauccugacaaauguuaucaauuugcccuuggacagggaacaacacuaaacaacgggcauucaaaugacacaguacaugauaggaccccuuaucggacccuauugaugaaugaguuggguguuccauuucauuugggaaccaagcaagugugcauagcaugguccagcucaaguugucacgauggaaaagcauggcugcauguuuguguaacgggggaugaugaaaaugcaacugcuagcuucauuuacaaugggaggcuuguagauaguauuggcucaugguccaaaaaaauccucaggacccaggagucggaaugcguuuguaucaauggaacuuguacaguaguaaugacugaugggagugcuucaggaaaagcugauacuaaaauacuauucauugaggaggggaaaaucguucauacuagcccauugucaggaagugcucagcaugucgaggagugcuccuguuauccucgauauccuggugucagaugugucugcagagacaacuggaaaggcuccaauaggcccaucguagauauaaauguaaaggauuauagcauuguuuccaguuaugugugcucaggacuuguuggagacacacccagaaaaaacgacagcuccagcaguagccauugcuuggauccuaacaaugaggaagguggucauggagugaaaggcugggccuuugaugauggaaaugacguguggaugggaagaacgaucagcgagaaguuacgcucaggauaugaaaccuucaaagucauugaaggcugguccaaaccuaacuccaaauugcagauaaauaggcaagucauaguugacagagguaauaggucugguuauucugguauuuucucuguugaaggcaaaagcugcaucaaucggugcuuuuauguggaguugauaaggggaaggaaacaggaaacugaagucuuguggaccucaaacaguauuguuguguuuuguggcaccucagguacauauggaacaggcucauggccugauggggcggacaucaaucucaugccuauauaa

SEQ ID NO: 47977 - RNA, 1410 nt, Artificial Sequence; identical to SEQ ID NO: 46181
  derived and/or modified CDS sequence (wt) from neuraminidase__InfluenzaA__ABU92845

SEQ ID NO: 47978 - RNA, 1410 nt, Artificial Sequence; identical to SEQ ID NO: 46181
  derived and/or modified CDS sequence (wt) from neuraminidase__InfluenzaA__ABU92846

SEQ ID NO: 47979 - RNA, 1410 nt, Artificial Sequence; identical to SEQ ID NO: 46181
  derived and/or modified CDS sequence (wt) from neuraminidase__InfluenzaA__ABU92847

SEQ ID NO: 47980 - RNA, 1410 nt, Artificial Sequence; identical to SEQ ID NO: 46181
  derived and/or modified CDS sequence (wt) from neuraminidase__InfluenzaA__ABU92848

SEQ ID NO: 47981 - RNA, 1410 nt, Artificial Sequence
  derived and/or modified CDS sequence (wt) from neuraminidase__InfluenzaA__ABU92849
augaauccaaaucaaaagauaauaacgauuggcucuguuucucucaccauuuccacaauaugcuucuucaugcaaauugccaucuugauaacuacuguaacauugcauuuuaagcaauaugaauucaacucccccccaaacaaccaagugaugcugugugaaccaacaauaauagaaagaaacauaacagagauaguguaucugaccaacaccaccauagagaaggaaauaugccccaaacuagcagaauacaggaauuggucaaaaccgcaaugugacauuacaggauuugcaccuuuuucuaaggacaauucgauuaggcuuuccgcugguggggacaucugggugacaagagaaccuuaugugucaugugauccugacaaguguuaucaauuugcccuuggacagggaacaacacuaaacaacgugcauucaaaugacacaguacaugauaggaccccuuaucggacccuauugaugaaugaguuagguguuccauuucaucuagggaccaagcaagugugcauagcaugguccagcucaaguugucacgauggaaaagcauggcugcauguuuguguaacgggggaugauaaaaaugcaacugcuagcuucauuuacaaugggaggcuuguagauaguauuguuucaugguccaaaaaaauccucaggacccaggagucagaaugcguuuguaucaauggaacuuguacaguaguaaugacugaugggagugcuucaggaaaagcugauacuaaaauacuauucauugaggaggggaaaaucguucauacuagcacauugucaggaagugcucagcaugucgaggagugcuccugcuauccucgauauccuggugucagaugugucugcagagacaacuggaaaggcuccaauaggcccaucguagauauaaacauaaaggauuauagcauuguuuccaguuaugugugcucaggacuuguuggagacacacccagaaaaaacgacagcuccagcaguagccauugcuuggauccuaacaaugaagaagguggucauggagugaaaggcugggccuuugaugauggaaaugacguguggaugggaagaacgaucagcgagaaguuacgcucaggauaugaaaccuucaaagucauugaaggcugguccaacccuaauuccaaauugcagauaaauaggcaagucauaguugacagagguaauagguccgguuauucugguauuuucucuguugaaggcaaaagcugcaucaaucggugcuuuuauguggaguugauaaggggaagaaaagaggaaacugaagucuuguggaccucaaacaguauuguuguguuuuguggcaccucagguacauauggaacaggcucauggccugauggggcggacaucaaucucaugccuauauaa

SEQ ID NO: 47982 - RNA, 1410 nt, Artificial Sequence
  derived and/or modified CDS sequence (wt) from neuraminidase__InfluenzaA__ABU92850
augaauccaaaucaaaagauaauaacgauuggcucuguuucucucaccauuuccacaauaugcuucuucaugcaaauugccaucuugauaacuacuguaacauugcauuuuaagcaauaugaauucaacucccccccaaacaaccaagugaugcugugugaaccaacaauaauagaaagaaacauaacagagauaguguaucugaccaacaccaccauagagaaggaaauaugccccaaacuaguagaauacagaaauuggucaaagccgcaaugugacauuacaggauuugcaccuuuuucuaaggacaauucgauuaggcuuuccgcugguggggacaucugggugacaagagaaccuuaugugucaugcgauccugacaaguguuaucaauuugcccuuggacagggaacaacacuaaacaacgugcauucaaaugacacaguacaugauaggaccccuuaucggacccuauugaugacugaguuagguguuccauuucaucuggggaccaagcaagugugcauagcaugguccagcucaaguugucacgauggaaaagcauggcugcauguuuguguaacgggggaugauaaaaaugcaacugccagcuucauuuacaaugggaggcuuguagauaguauuguuucaugguccaaaaaaauccucaggacccaggagucagaaugcguuuguaucaauggaacuuguacaguaguaaugacugaugggagugcuucaggaaaagcugauacuaaaauacuauucauugaggaggggaaaaucguccauacuagcacauugucaggaagugcucagcaugucgaggagugcuccugcuauccucgauauccuggugucagaugugucugcagagacaacuggaagggcuccaauaggcccaucguagauauaaacauaaaggauuauagcauuguuuccaguuaugugugcucaggacuuguuggagacacaccaagaaaaaacgacagcuccagcaguagccauugcuuggauccuaacaaugaagaagguggucauggagugaaaggcugggccuuugaugauggaaaugacguguggaugggaagaacgaucagcgagaaguuacgcucaggauaugaaaccuucaaagucauugaaggcugguccaacccuaauuccaaauugcagauaaauaggcaagucauaguugacagagguaauagguccgguuauucugguauuuucucuguugaaggcaaaagcugcaucaaucggugcuuuuauguggaguugauaaggggaagaaaagaggaaaaugaagucuuguggaccucaaacaguauuguuguguuuuguggcaccucagguacauauggaacaggcucauggccugauggggcggacaucaaucucaugccuauauaa

SEQ ID NO: 47983 - RNA, 1410 nt, Artificial Sequence
  derived and/or modified CDS sequence (wt) from neuraminidase__InfluenzaA__ABU92851
augaauccaaaucaaaagauaauaacgauuggcucuguuucucucaccauuuccacaauaugcuucuucaugcaaauugccaucuugauaacuacuguaacauugcauuucaagcaauaugaauucaacucccccccaaacaaccaagugaugcugugugaaccaacaauaauagaaagaaacauaacagagauaguguaucugaccaacaccaccauagagaaggaaauaugccccaaacuagcagaauacagaaauuggucaaagccgcaauguagcauuacaggauuugcaccuuuuucuaaggacaauucgauuaggcuuuccgcugguggggacaucugggugacaagagaaccuuaugugucaugcgauccugacaaguguuaucaauuugcccuuggacagggaacaacacuaaacaacgugcauucaaaugacacaguacaugauagaaccccuuaucggacccuauugaugaaugaguuagguguuccauuucaucuggggaccaagcaagugugcauagcaugguccagcucaaguugucacgauggaaaagcauggcugcauguuuguguaacgggggaugauaaaaaugcaacugcuagcuucauuuacaaugggaggcuuguagauaguauuguuucaugguccaaagaaauccucaggacccaggagucagaaugcguuuguaucaauggaacuuguacaguaguaaugacugauggaagugcuucaggaaaagcugauacuaaaauacuauucauugaggaggggaaaaucguucauacuagcacauugucaggaagugcucagcauguugaggaaugcuccugcuauccucgauauccuggugucagaugugucugcagagacaacuggaaaggcuccaauaggcccauaguagacauaaacauaaaggauuauagcauuguuuccaguuaugugugcucaggacuuguuggagacacacccagaaaagacgacagcuccagcaguagccauugcuuggauccuaacaaugaagaagguggucauggagugaaaggcugggccuuugaugauggaaaugacguguggaugggaagaacgaucagcgagaagucacgcucaggauaugaaaccuucaaagucauugaaggcugguccaacccuaauuccaaauugcagauaaauaggcaagucauaguugacagagguaauagguccgguuauucugguauuuucucuguugaaggcaaaagcugcaucaaucggugcuuuuauguggaguugauaaggggaagaaaagaggaaacugaagucuuguggaccucaaacaguauuguuguguuuuguggcaccucagguacauauggaacaggcucauggccugauggggcggacaucaaucucaugccuauauaa

SEQ ID NO: 47984 - RNA, 1410 nt, Artificial Sequence; identical to SEQ ID NO: 47917
  derived and/or modified CDS sequence (wt) from neuraminidase__InfluenzaA__ABU92852

SEQ ID NO: 47985 - RNA, 1410 nt, Artificial Sequence
  derived and/or modified CDS sequence (wt) from neuraminidase__InfluenzaA__ABU92853
augaauccaaaucaaaagauaauaacaauuggcucuguuucucucaccauugccgccauaugcuuccuuaugcaaauugccauccugguaacuacuguaacauugcauuucaagcagcaugaaugcaacucccccccaaaaaaccaaguaaugcugugugaaccaacaauaauagaaagaaacauaacagagauaguguauaugaccaacaccaccauagagaaggaaauaugccccaaacuagcagaauacagaaauuggucaaagccgcaauguaacauuacaggauuugcaccuuuuucuaaggacaauucgauucggcuuuccgcugguggggacaucugggugacaagagaaccuuaugugucaugcgauccugacaaguguuaucaauuugcccuugggcagggaacaacacuaaacaacgggcauucaaaugacacaguacaugauaggaccccuuaccggacccuauugaugaaugaauuggguguuccauuucauuugggaaccaggcaagugugcauagcaugguccagcucaaguugucacgauggaaaagcguggcugcauguuuguguaacuggggaugauaaaaaugcaacugcuagcuucauuuacaaugggaggcuuguagauaguauuguuucaugguccaaaaaaauacucagaacccaggagucggaaugcguuuguaucaauggaacuuguacagugguaaugacugauggaagcgcuucaggaaaagcugauacuaaaauacuauucauugaggaggggaaaaucguucauauuagcacauugucaggaagugcucagcaugucgaggagugcuccuguuauccucgauauccuggugucagaugugucugcagagacaacuggaaaggcuccaauaggcccauuguagauauaaauguaaaggauuauagcauuguuuccaguuaugugugcucaggacuuguuggagacacacccagaaaaaacgacagcuucagcaguagccauugccuagauccuaacaaugaggaagguggucauggagugaaaggcugggccuuugaugauggaaaugacguguggaugggaagaacgaucagcgagaaguuacguucagguuaugaaaccuucaaagucaucgaaggcugguccaaaccaaacuccaaauuacagauaaauaggcaaguuauaguugaaagagguaacagguccgguuauucugguauuuucuccguugaaggcaaaagcugcaucaaucggugcuuuuauguggaguugauaaggggaaggaaagaggaaacugaagucugguggaccucaaacaguauuguuguguuuuguggcaccucagguacauauggaacaggcucauggccugauggggcggauaucaaucucaugccuauauaa

SEQ ID NO: 47986 - RNA, 1410 nt, Artificial Sequence; identical to SEQ ID NO: 47917
  derived and/or modified CDS sequence (wt) from neuraminidase__InfluenzaA__ABU92854

SEQ ID NO: 47987 - RNA, 1410 nt, Artificial Sequence
  derived and/or modified CDS sequence (wt) from neuraminidase__InfluenzaA__ABU92855
augaauccaaaucaaaagauaauaacaauuggcucuguuucucucaccauugccgcaauaugcuuccuuaugcaaauugccauccugguaacuacuguaacauugcauuucaagcagcaugaaugcaacucccccccaaacaaccaaguaaugcugugugaaccaacaauaauagaaagaaacauaacagagauaguguaucugaccaacaccaccauagagaaggaaauaugccccaaacuagcagaauacagaaauuggucaaagccgcaauguaacauuacaggauuugcaccuuuuucuaaggacaauucgauucggcuuuccgcugguggggacaucugggugacaagagaaccuuaugugucaugcgauccugacaaguguuaucaauuugcccuugggcagggaacaacacuaaacaacgggcauucaaaugacacaguacaugauaggaccccuuaccggacccuauugaugaaugaauuggguguuccauuucauuugggaaccaggcaagugugcauagcaugguccagcucaaguugucacgauggaaaagcguggcugcauguuuguguaacuggggaugauaaaaaugcaacugcuagcuucauuuacaaugggaggcuuguagauaguauugguucaugguccaaaaaaauacucagaacccaggagucggaaugcguuuguaucaauggaacuuguacagugguaaugacugauggaagcgcuucaggaaaagcugauacuaaaauacuauucauugaggaggggaaaaucguucauauuagcacacugucaggaagugcucagcaugucgaggagugcuccuguuauccucgauauccuggugucagaugugucugcagagacaacuggaaaggcuccaauaggcccauuguagauauaaauguaaaggauuauagcauuguuuccaguuaugugugcucaggacuuguuggagacacacccagaaaaaacgacagcuucagcaguagccauugccuagauccuaacaaugaggaagguggucauggagugaaaggcugggccuuugaugauggaaaugacguguggaugggaagaacgaucagcgagaaguuacgcucagguuaugaaaccuucaaagucaucgaaggcugguccaaaccuaacuccaaauuacagauaaauaggcaaguuauaauugaaagagguaacagguccgguuauucugguauuuucuccguugaaggcaaaagcugcaucaaucggugcuuuuauguggaguugauaaggggaaggaaagaggaaacugaagucugguggaccucaaacaguauuguuguguuuuguggcaccucagguacauauggaacaggcucauggccugauggggcggauaucaaucucaugccuauauaa

SEQ ID NO: 47988 - RNA, 1410 nt, Artificial Sequence
  derived and/or modified CDS sequence (wt) from neuraminidase__InfluenzaA__ABU92856
augaauccaaaucaaaagauaauaacaauuggcucuguuucucucaccauugccacaauaugcuuccuuaugcaaauugccauccugguaacuacuguaacauugcauuucaagcagcaugaaugcaacucccccccaaacaaccaaguaaugcugugugaaccaacaauaauagaaagaaacauaacagagauaguguaucugaccaacaccaccauagagaaggaaauaugccccaaacuagcagaauacagaaauuggucaaagccgcaauguaacauuacaggauuugcaccuuuuucuaaggacaauucgauucggcuuuccgcugguggggacaucugggugacaagagaaccuuaugugucaugcgacccugacaaguguuaucaauuugcccuugggcagggaacaacacuaaacaacgggcauucaaaugacacaguacaugauaggaccccuuaccggacccuauugaugaaugaauuggguguuccauuucauuugggaaccaggcaagugugcauagcaugguccagcucaaguugucacgauggaaaagcguggcugcauguuuguguaacuggagaugauaaaaaugcaacugcuagcuucauuuacaaugggaggcuuguagauaguauugguucaugguccaaaaaaauacucagaacccaggagucggaauguguuuguaucaauggaacuuguacaguaguaaugacugaugggagcgcuucaggaaaagcugauacuaaaauacuauucauugaggaggggaaaaucguucauauuagcacauugucaggaagugcucagcaugucgaggaaugcuccuguuauccucgauauccuggugucagaugugucugcagagacaacuggaaaggcuccaauaggcccauuguagauauaaauguaaaggauuauagcauuguuuccaguuaugugugcucaggacuuguuggagacacacccagaaaaaacgacagcuucagcaguagccauugccuagauccuaacaaugaggaagguggucauggagugaaaggcugggccuuugaugauggaaaugacguguggaugggaagaacgaucagcgagaaguuacgcucagguuaugaaaccuucaaagucaucgaaggcugguccaaaccuaacuccaaauuacagauaaauaggcaaguuauaguugaaagagguaacagguccgguuauucugguauuuucuccguugaaggcaaaagcugcaucaaucggugcuuuuauguggaguugauaaggggaaggaaagaggaaacugaagucugguggaccucaaacaguauuguuguguuuuguggcaccucagguacauauggaacaggcucauggccugauggggcggauaucaaucucaugccuauauaa

SEQ ID NO: 47989 - RNA, 1410 nt, Artificial Sequence; identical to SEQ ID NO: 47917
  derived and/or modified CDS sequence (wt) from neuraminidase__InfluenzaA__ABU92857

SEQ ID NO: 47990 - RNA, 1410 nt, Artificial Sequence
  derived and/or modified CDS sequence (wt) from neuraminidase__InfluenzaA__ABU92858
augaauccaaaucaaaagauaauaacgauuggcucuguuucucucaccauuuccacaauaugcuucuucaugcaaauugccaucuugauaacuacuguaacauugcauuucaagcaauaugaauucaacucccccccaaacaaccaagugauacugugugaaccaacaauaauagaaagaaacauaacagagauaguguaucugaccaacaccaccauagagaaggaaauaugccccaaacuagcagaauacagaaauuggucaaagccgcaaugugacauuacaggauuugcaccuuuuucuaaggacaauucgauuaggcuuuccgcugguggggacaucugggugacaagagaaccuuaugugucaugcgauccugacaaguguuaucaauuugcccuuggacagggaacaacacugaacaacgugcauucaaaugacacaguacaugauaggaccccuuaucggacccuauugaugaaugaguuagguguuccauuucaucuggggaccaagcaagugugcauagcaugguccagcucaaguugucacgauggaaaagcauggcugcauguuuguguaacgggggaugauaaaaaugcaacugcuagcuucauuuacaaugggaggcuuguagauaguauuguuucaugguccaaaaaaauccucaggacccaggagucagaaugcguuuguaucaauggaacuuguacaguaguaaugacugaugggagugcuucaggaaaagcugauacuaaaauacuauucauugaggaggggaaaaucguucauacuagcacauugucaggaagugcucagcaugucgaggagugcuccugcuauccucgauauccuggugucagaugugucugcagagacaauuggaaaggcuccaauaggcccaucguagauauaaacauaaaggauuauagcauuguuuccaguuaugugugcucaggacuuguuggagacacacccagaaaaaacgacagcuccagcaguagccauugcuuggauccuaacaaugaagaagguggucauggagugaaaggcugggccuuugaugauggaaaugacguguggaugggaagaacgaucagcgagaaguuacgcucaggauaugaaaccuucaaagucauugaaggcugguccaacccuaauuccaaauugcagauaaauaggcaagucauaguugacagagguaauagguccgguuauucugguauuuucucuguugaaggcaaaagcugcaucaaucggugcuuuuauguggaguugauaaggggaagaaaagaggaaacugaagucuuguggaccucaaacaguauuguuguguuuuguggcaccucagguacauauggaacaggcucauggccugauggggcggacaucaaucucaugccuauauaa

SEQ ID NO: 47991 - RNA, 1410 nt, Artificial Sequence
  derived and/or modified CDS sequence (wt) from neuraminidase__InfluenzaA__ABU92859
augaauccaaaucaaaagauaauaacaauuggcucuguuucucucaccauugccgcgauaugcuuccuuaugcaaauugccauccugguaacuacuguaacauugcauuucaagcagcaugaaugcaacucccccccaaacaaccaaguaaugcugugugaaccaacaauaauagaaagaaacauaacagagauaguguaucugaccaacaccaccauagagaaggaaauaugccccaaacuagcaggauacagaaauuggucaaagccgcaauguaacauuacaggauuugcaccuuuuucuaaggacaauucgauucggcuuuccgcugguggggacaucugggugacaagagaaccuuaugugucaugcgauccugacaaguguuaucaauuugcccuugggcagggaacaacacuaaacaacgggcauucaaaugacacaguacaugauaggaccccuuaccggacccuauugaugaaugaauuggguguuccauuucauuugggaaccaggcaagugugcauagcaugguccagcucaaguugucacgauggaaaagcguggcugcauguuuguguaacuggggaugauaaaaaugcaacugcuagcuucauuuacaaugggaggcuuguagauaguauugguucaugguccaaaaaaauacucagaacccaggagucggaaugcguuuguaucaauggaacuuguacagugguaaugacugauggaagcgcuucagggaaagcugauacuaaaauacuauucauugaggaggggaaaaucguucauauuagcacauugucaggaagugcucagcaugucgaggagugcuccuguuauccucgauauccuggugucagaugugucugcagagacaacuggaaaggcuccaauaggcccauuguagauauaaauguaaaggauuauagcauuguuuccaguuaugugugcucaggacuuguuggagacacacccagaaaaaacgacagcuucagcaguagccauugccuagauccuaacaaugaggaagguggucauggagugaaaggcugggccuuugaugauggaaaugacguguggaugggaagaacgaucagcgagaaguuacgcucagguuaugaaaccuucaaagucaucgaaggcugguccaaaccuaacuccaaauuacagauaaauaggcaaguuauaguugaaagagguaacagguccgguuauucugguauuuucuccguugaaggcaaaagcugcaucaaucggugcuuuuauguggaguugauaaggggaaggaaagaggaaacugaagucugguggaccucaaacaguauuguuguguuuuguggcaccucagguacauauggaacaggcucauggccugauggggcggauaucaaucucaugccuauauaa

SEQ ID NO: 47992 - RNA, 1410 nt, Artificial Sequence
  derived and/or modified CDS sequence (wt) from neuraminidase__InfluenzaA__ABU92860
augaauccaaaucaaaagauaauaacaauuggcucuguuucucucaccauugccgcgauaugcuuccuuaugcaaauugccauccugguaacuacuguaacauugcauuucaagcaacaugaaugcaacucccccccaaacaaccaaguaaugcugugugaaccaacaauaauagaaagaaacauaacagagauaguguaucugaccaacaccaccauagagaaggaaauaugccccaaacuagcagaauacagaaauuggucaaagccgcaauguaacauuacaggauuugcaccuuuuucuaaggacaauucgauucggcuuuccgcugguggggacaucugggugacaagagaaccuuaugugucaugcgauccugacaaguguuaucaauuugcccuugggcagggaacaacacuaaacaacgggcauucaaaugacacaguacaugauaggaccccuuaccggacccuauugaugaaugaauuggguguuccauuucauuugggaaccaggcaagugugcauagcaugguccagcucaaguugucacgauggaaaagcguggcugcauguuuguguaacuggggaugauaaaaaugcaacugcuagcuucauuuacaaugggaggcuuguagauaguauugguucaugguacaaaaaaauacucagaacccaggagucggaaugcguuuguaucaauggaacuuguacagugguaaugacugauggaagcgcuucagggaaagcugauacuaaaauacuauucauugaggaggggaaaaucguucauauuagcacauugucaggaagugcucagcaugucgaggagugcuccuguuauccucgauauccuggugucagaugugucugcagagacaacuggaaaggcuccaauaggcccauuguagauauaaauguaaaggauuauagcauuauuuccaguuaugugugcucaggacuuguuggagacacacccagaaaaaacgacagcuucagcaguagccauugccuagauccuaacaaugaggaagguggucauggagugaaaggcugggccuuugaugauggaaaugacguguggaugggaagaacgaucagcgagaaguugcgcucagguuaugaaaccuucaaagucaucgaaggcugguccaaaccuaacuccaaauuacagauaaauaggcaaguuauaguugaaagagguaacagguccgguuauucugguauuuucuccguugaaggcaaaagcugcaucaaucggugcuuuuauguggaguugauaaggggaaggaaagaggaaacugaagucugguggaccucaaacaguauuguuguguuuuguggcaccucagguacauauggaacaggcucauggccugauggggcggauaucaaucucaugccuauauaa

SEQ ID NO: 47993 - RNA, 1410 nt, Artificial Sequence
  derived and/or modified CDS sequence (wt) from neuraminidase__InfluenzaA__ABU92861
augaauccaaaucaaaagauaauaacaauuggcucuguuucucucaccauugccgcaauaugcuuccuuaugcaaauugccauccugguaacuacuguaacauugcauuucaagcagcaugaaugcaacucccccccaaacaaccaaguaaugcugugugaaccaacaauaauagaaagaaacauaacagagauaguguaucugaccaacaccaccauagagaaggaaauaugccccaaacuagcagaauacagaaauuggucaaagccgcaauguaacauuacaggauuugcaccuuuuucuaaggacaauucgauucggcuuuccgcugguggggacaucugggugacaagagaaccuuaugugucaugcgauccugacaaguguuaucaauuugcccuugggcagggaacaacacuaaacaacgggcauucaaaugacacaguacaugauaggaccccuuaccggacccuauugaugaaugaauuggguguuccauuucauuugggaaccaggcaagugugcauggcaugguccagcucaaguugucacgauggaaaagcguggcugcauguuuguguaacuggggaugauaaaaaugcaacugcuagcuucauuuacaaugggaggcuuguagauaguauugguucaugguccaaaaaaauacucagaacccaggagucggaaugcguuuguaucaauggaacuuguacagugguaaugacugauggaagcgcuucaggaaaagcugauacuaaaauacuauucauugaggaggggaaaaucguucauauuagcacauugucaggaagugcucagcaugucgaggagugcuccuguuauccucgauauccuggugucagaugugucugcagagacaacuggaaaggcuccaauaggcccauuguagauauaaauguaaaggauuauagcauuguuuccaguuaugugugcucaggacuuguuggagacacacccagaaaaaacgacagcuucagcaguagccauugccuagauccuaacaaugaggaagguggucauggagugaaaggcugggccuuugaugauggaaaugacguguggaugggaagaacgaucagcgagaaguuacgcucagguuaugaaaccuucaaagucaucgaaggcugguccaaaccuaacuccaaauuacagauaaauaggcaaguuauaguugaaagagguaacagguccgguuauucuggcauuuucuccguugaaggcaaaagcugcaucaaucggugcuuuuauguggaguugauaaggggaaggaaagaggaaacugaagucugguggaccucaaacaguauuguuguguuuuguggcaccucagguacauauggaacaggcucauggccugauggggcggauaucaaucucaugccuauauaa

SEQ ID NO: 47994 - RNA, 1410 nt, Artificial Sequence
  derived and/or modified CDS sequence (wt) from neuraminidase__InfluenzaA__ABU92862
augaauccaaaucaaaagauaauaacaauuggcucuguuucucucaccauugccgcaauaugcuuccuuaugcaaauugccauccugguaacuacuguaacauugcauuucaagcagcaugaaugcaacucccccccaaacaaccaaguaaugcugugugaaccaacaauaauagaaagaaacauaacagagauaguguaucugaccaacaccaccauagagaaggaaauaugccccaaacuagcagaauacagaaauuggucaaagccgcaauguaacauuacaggauuugcaccuuuuucuagggacaauucgauucggcuuuccgcugguggggacaucugggugacaagagaaccuuaugugucaugcgauccugacaaguguuaucaauuugcccuugggcagggaacaacacuaaacaacgggcauucaaaugacacaguacaugauaggaccccuuaccggacccuauugaugaaugaauuggguguuccauuucauuugggaaccaggcaagugugcauagcaugguccagcucaaguugucacgauggaaaagcguggcugcauguuuguguaacuggggaugauaaaaaugcaacugcuagcuucauuuacaaugggaggcuuguagauaguauugguucaugguccaaaaaaauacucagaacccaggagucggaaugcguuuguaucaauggaacuuguacagugguaaugacugauggaagcgcuucaggaaaagcugauacuaaaauacuauucauugaggaggggaaaaucguucauauuagcacauugucaggaagugcucagcaugucgaggagugcuccuguuauccucgauauccuggugucagaugugucugcagagacaacuggaaaggcuccaauaggcccauuguagauauaaauguaaaggauuauagcauuguuuccaguuaugugugcucaggacuuguuggagacacacccagaaaaaacgacagcuucagcaguagccauugccuagauccuaacaaugaggaagguggucauggagugaaaggcugggccuuugaugauggaaaugacguguggaugggaagaacgaucagcgagaaguuacgcucagguuaugaaaccuucaaagucaucgaaggcugguccaaaccuaacuccaaauuacagauaaauaggcaaguuauaguugaaagagguaacagguccgguuauucugguauuuucuccguugaaggcaaaagcugcaucaaucggugcuuuuauguggaguugauaaggggaaggaaagaggaaacugaagucugguggaccucaaacaguauuguuguguuuuguggcaccucagguacauauggaacaggcucauggccugauggggcggauaucaaucucaugccuauauaa

SEQ ID NO: 47995 - RNA, 1410 nt, Artificial Sequence; identical to SEQ ID NO: 47960
  derived and/or modified CDS sequence (wt) from neuraminidase__InfluenzaA__ABU92863

SEQ ID NO: 47996 - RNA, 1410 nt, Artificial Sequence
  derived and/or modified CDS sequence (wt) from neuraminidase__InfluenzaA__ABU92865
augaauccaaaucaaaagauaauaacgauuggcucuguuucucucaccauuuccacaauaugcuucuucaugcaaauugccaucuugauaacuacuguaacauugcauuuuaagcaauaugaauucaacucccccccaaacaaccaagugaugcugugugaaccaacaauaauagaaagaaacauaacagagauaguguaucugaccaacaccaccauagagaaggaaauaugccccaaacuagcagaauacaggaauuggucaaagccgcaaugugacauuacaggauuugcaccuuuuucuaaggacaauucgauuaggcuuuccgcugguggggacaucugggugacaagagaaccuuaugugucaugcgaucuugacaaguguuaucaauuugcccuuggacagggaacaacacuaaacaacgugcauucaaaugacacaguacaugauaggaccccuuaucggacccuauugaugaaugaguuagguguuccauuucaucuggggaccaagcaagugugcauagcaugguccagcucaaguugucacgauggaaaagcauggcugcauguuuguguaacgggggaugauaaaaaugcaacugcuagcuucauuuacaaugggaggcuuguagauaguauuguuucaugguccaaaaaaauccucaggacccaggagucagaaugcguuuguaucaauggaacuuguacaguaguaaugacugaugggagugcuucaggaaaagcugauacuaaaauacuauucauugaggaggggaaaaucguucauacuagcacauugucaggaagugcucagcaugucgaggagugcuccugcuauccucgauauccuggugucagaugugucugcagagacaacuggaaaggcuccaauaggcccaucguagauauaaacauaaaggauuauagcauuguuuccaguuaugugugcucaggacuuguuggagacacacccagaaaaaacgacagcuccagcaguagccauugcuuggauccuaacaaugaagaagguggucauggagugaaaggcugggccuuugaugauggaaaugacguguggaugggaagaacgaucagcgagaaguuacgcucaggauaugaaaccuucaaagucauugaaggcugguccaacccuaauuccaaauugcagauaaauaggcaagucauaguugacagagguaauagguccgguuauucugguauuuucucuguugaaggcaaaagcugcaucaaucggugcuuuuauguggaguugauaaggggaagaaaagaggaaacugaagucuuguggaccucaaacaguauuguuguguuuuguggcaccucagguacauauggaacaggcucauggccugauggggcggacaucaaucucaugccuauauaa

SEQ ID NO: 47997 - RNA, 1410 nt, Artificial Sequence
  derived and/or modified CDS sequence (wt) from neuraminidase__InfluenzaA__ABU92866
augaauccaaaucaaaagauaauaacgauuggcucuguuucucucaccauuuccacaauaugcuucuucaugcaaauugccaucuugauaacuacuguaacauugcauuucaagcaauaugaauucaacuccccuccaaacaaccaagugaugcugugugaaccaacaauaauagaaagaaacauaacagagauaguguaucugaccaacaccaccauagagaaggaaguaugccccaaacuagcagaauacagaaauuggucaaagccgcaaugugacauuacaggauuugcaccuuuuucuaaggacaauucgauuaggcuuuccgcugguggggacaucugggugacaagagaaccuuaugugucaugcgauccugacaaguguuaucaauuugcccuuggacaaggaacaacacuaaacaacgugcauucaaaugacacaguacaugauaggaccccuuaucggacccuauugaugaaugaguuagguguuccauuucaccuggggaccaagcaagugugcauagcaugguccagcucaaguugucacgauggaaaagcauggcugcauguuuguguaacgggggaugauaaaaaugcaacugcuagcuucauuuacaaugggaggcuuguagauaguauuguuucaugguccaaagaaauccucaggacccaggagucagaaugcguuuguaucaauggaacuuguacaguaguaaugacugacgggagugcuucaggaaaagcugauacuaaaauacuauucauugaggaggggaaaaucguucauacuagcacauugucaggaagugcucagcaugucgaggagugcuccugcuauccucgauauccuggugucagaugugucugcagagacaacuggaaaggcuccaauaggcccaucguagauauaaacauaaaggauuauagcauuguuuccaguuaugugugcucaggacuuguuggagacacacccagaaaaaacgacagcuccagcaauagccauugcuuggauccuaacaaugaagaagguggucauggagugaaaggcugggccuuugaugauggaaaugacguguggaugggaagaacgaucagcgagaaguuacgcucaggauaugaaaccuucaaagucauugaaggcugguccaacccuaauuccaaauugcagauaaauaggcaagucauaguugacagagguaauagguccgguuauucugguauuuucucuguugaaggcaaaagcugcaucaaucggugcuuuuauguggaguugauaaggggaagaaaagaggaaacugaagucuuguggaccucgaacaguauuguuguguuuuguggcaccucagguacauauggaacaggcucauggccugauggggcggacaucaaucucaugccuauauaa

SEQ ID NO: 47998 - RNA, 1410 nt, Artificial Sequence; identical to SEQ ID NO: 47396
  derived and/or modified CDS sequence (wt) from neuraminidase__InfluenzaA__ABU92867

SEQ ID NO: 47999 - RNA, 1410 nt, Artificial Sequence; identical to SEQ ID NO: 47926
  derived and/or modified CDS sequence (wt) from neuraminidase__InfluenzaA__ABU92868

SEQ ID NO: 48000 - RNA, 1410 nt, Artificial Sequence
  derived and/or modified CDS sequence (wt) from neuraminidase__InfluenzaA__ABU92869
augaauccaaaucaaaagauaauaacgauuggcucuguuucucucaccauuuccacaauaugcuucuuuaugcaaauugccaucuugauaacuacuguaacauugcauuucaagcaauaugaauucaacucccccccaaacaaccaagugaugcugugugaaccaacaauaauagaaagaaacauaacagagauaguguaucugaccaacaccaccauagagaaggaaauaugccccaaacuagcagaauacagaaauuggucaaagccgcaaugugacauuacaggauuugcaccuuuuucuaaggacaauucgauuaggcuuuccgcugguggggacaucugggugacaagagaaccuuaugugucaugcgauccugacaaauguuaucaauuugcccuuggacagggaacaacacuaaacaacgugcauucaaaugacacaguacaugauaggaccccuuaucggacccuauugaugaaugaguuagguguuccauuucaucuggggacuaagcaagugugcauagcaugguccagcucaaguugucacgauggaaaagcauggcugcauguuuguguaacgggggaugauaaaaaugcaacugcuagcuucauuuacaaugggaggcuuguagauaguauuguuucaugguccaaagaaauccucagaacccaggagucagaaugcguuuguaucaauggaacuuguacaguaguaaugacugaugggagugcuucaggaaaagcugauacuaaaauacuauucauugaggaggggaaaaucguucauacuagcacauugucaggaagugcccagcaugucgaggagugcuccugcuauccucgauauccuggugucagaugugucugcagagacaacuggaaaggcuccaauaggcccaucguagauauaaacauaaaggauuauagcauuguuuccaguuaugugugcucaggacuuguuggagacacacccagaaaaaacgacagcuccagcaguagccauugcuuggauccuaacaaugaagaagguggucauggagugaaaggcugggccuuugaugauggaaaugacguguggaugggaagaacgaucagcgagaaguuacgcuuaggauaugaaaccuucaaagucauugaaggcugguccaacccuaauuccaaauugcagauaaauaggcaagucauaguugacagagguaauagauccgguuauucugguauuuucucuguugaaggcaaaagcugcaucaaucggugcuuuuauguggaguugauaaggggaagaaaagaggaaacugaagucuuguggaccucaaacaguauuguuguguuuuguggcaccucagguacauauggaacaggcucauggccugauggggcggacaucaaucucaugccuauauaa

SEQ ID NO: 48001 - RNA, 1410 nt, Artificial Sequence
  derived and/or modified CDS sequence (wt) from neuraminidase__InfluenzaA__ABU92870
augaauccaaaucaaaagauaauaacgauuggcucuguuucucucaccauuuccacaauaugcuucuucaugcaaauugccaucuugauaacuacuguaacauugcauuucaagcaauaugaauucaacucccccccaaacaaccaagugaugcugugugaaccaacaauaauagaaagaaacauaacagagauaguguaucugaccaacaccaccauagagaaggaaauaugccccaaacuagcagaauacagaaauuggucaaagccgcaaugugacauuacaggauuugcaccuuuuucuaaggacaauucgauuaggcuuuccgcugguggggacaucugggugacaagagaaccuuaugugucaugcgauccugacaaguguuaucaauuugcccuuggacagggaacaacacuaaacaacgugcauucaaaugacacaguacgugauaggaccccuuaucggacccuauugaugaaugaguuagguguuccuuuucaucuggggaccaagcaagugugcauagcaugguccagcucaaguugucacgauggaaaagcauggcugcauguuuguauaacgggggaugauaaaaaugcaacugcuagcuucauuuacaaugggagacuuguagauaguauuguuucaugguccaaagaaauccucaggacccaggagucagaaugcguuuguaucaauggaacuuguacaguaguaaugacugaugggagugcuucaggaaaagcugauacuaaaauacuauucauugaggaggggaaaaucguucauacuagcacauugucaggaagugcucagcaugucgaggagugcuccugcuauccucgauauccuggugucagaugugucugcagagacaacuggaaaggcuccaauaggcccaucguagauauaaacauaaaggaucauagcauuguuuccaguuauguguguucaggacuuguuggagacacacccagaaaaaacgacagcuccagcaguagccauuguuuggauccuaacaaugaagaagguggucauggagugaaaggcugggccuuugaugauggaaaugacguguggaugggaagaacgaucagcgagaagucacgcuuaggauaugaaaccuucaaagucauugaaggcugguccaacccuaaguccaaauugcagauaaauaggcaagucauaguugacagagguaauagguccgguuauucugguauuuucucuguugaaggcaaaagcugcaucaaucggugcuuuuauguggaguugauaaggggaagaaaagaggaaacugaagucuuguggaccucaaacaguauuguuguguuuuguggcaccucagguacauauggaacaggcucauggccugauggggcggacaucaaucucaugccuauauaa

SEQ ID NO: 48002 - RNA, 1410 nt, Artificial Sequence
  derived and/or modified CDS sequence (wt) from neuraminidase__InfluenzaA__ABU92872
augaauccaaaucaaaagauaauaacaauuggcucuguuucucucaccauugccgcgauaugcuuccuuaugcaaauugccauccugguaacuacuguaacauugcauuucaagcagcaugaaugcaacucccccccaaacaaccaaguaaugcugugugaaccaacaauaauagaaagaaacauaacagagauaguguaucugaccaacaccaccauagagaaggaaauaugccccaaacuagcagaauacagaaauuggucaaagccgcaauguaacauuacaggauuugcaccuuuuucuaaggacaauucgauucggcuuuccgcugguggggacaucugggugacaagagaaccuuaugugucaugcgauccugacaaguguuaucaauuugcccuugggcagggaacaacacuaaacaacgggcauucaaaugacacaguacaugauaggaccccuuaccggacccuauugaugaaugaauuggguguuccauuucauuugggaaccaggcaagugugcauagcaugguccagcucaaguugucacgauggaaaagcguggcugcauguuuguguaacuggggaugauaaaaaugcaacugcuagcuucauuuacaaugggaggcuuguagauaguauugguucaugguccaaaaaaauacucagaacccaggagucggaaugcguuuguaucaauggaacuuguacagugguaaugacugauggaagcgcuucagggaaagcugauacuaaaauacuauucauugaggaggggaaaaucguucauauuagcacauugucaggaagugcucagcaugucgaggagugcuccuguuauccucgauauccuggugucagaugugucugcagagacaacuggaaaggcuccaauaggcccauuguagauauaaauguaaaggauuauaacauuguuuccaguuaugugugcucaggacuuguuggagacacacccagaaaaaacgacagcuucagcaguagccauugccuagauccuaacaaugaggaagguggucauggagugaaaggcugggccuuugaugauggaaaugacguguggaugggaagaacgaucagcgagaaguuacgcucagguuaugaaaccuucaaagucaucgaaggcugguccaaaccuaacuccaaauuacagauaaauaggcaaguuauaguugaaagagguaacagguccgguuauucugguauuuucuccguugaaggcaaaagcugcaucaaucggugcuuuuauguggaguugauaaggggaaggaaagaggaaacugaagucugguggaccucaaacaguauuguuguguuuuguggcaccucaggcacauauggaacaggcucauggccugauggggcggauaucaaucucaugccuauauaa

SEQ ID NO: 48003 - RNA, 1410 nt, Artificial Sequence
  derived and/or modified CDS sequence (wt) from neuraminidase__InfluenzaA__ABU92873
augaauccaaaucaaaagauaauaacaauuggcucuguuucucucaccauuuccacaauaugcuucuucaugcaaauugccauccugauaacuacuguaacauugcauuucaagcaauaugaauucaacucccccccaaacaaccaagugaugcugugugaaccaacaauaauagaaagaaacauaacagagauaguguaucugaccaacaccaccauagagaaggaaauaugccccaaacuagcagaauacagaaauuggucaaagccgcaauguaacauuacaggauuugcaccuuuuucuaaggacaauucgauucggcuuuccgcugguggggacaucugggugacaagagaaccuuaugugucaugcgauccugacaaguguuaucaauuugcccuuggacagggaacaacacuaaacaacgugcauucaaaugacacaguacaugauaggaccccuuaucggacccuauugaugaaugaguuggguguuccauuucaucuggggaccaagcaagugugcauagcaugguccagcucaaguugucacgauggaaaagcauggcugcauguuuguguaacgggggaugaugaaaaugcaacugcuagcuucauuuacaaugggaggcuuguagauaguauuguuucaugguccaaaaaaauccucaggacccaggagucagaaugcguuuguaucaauggaacuuguacaguaguaaugacugaugggagugcuucaggaaaagcugauacuaaaauacuauucauugaggaggggaaaaucguucauacuagcacauugucaggaagugcucagcaugucgaggagugcuccuguuauccucgauauccuggugucagaugugucugcagagacaauuggaaaggcuccaauaggcccaucguagauauaaacauaaaggauuauagcauuguuuccaguuaugugugcucaggacuuguuggagacacacccagaaaaaacgacagcuccagcaguagccauugcuuggauccaaacaaugaggaagguggucauggagugaaaggcugggccuuugaugauggaaaugacguguggaugggaagaacgaucagcgagaaguuacgcucaggauaugaaaccuucaaagucauugaaggcugguccaacccuaacuccaaauugcagauaaauaggcaagucauaguugacagagguaauagguccgguuauucugguauuuucucuguugaaggcaaaagcugcaucaaucggugcuuuuauguggaguugauaagaggaagaaaacaggaaacugaagucuuguggaccucaaacaguauuguuguguuuuguggcaccucagguacauauggaacaggcucauggccugauggggcggacaucaauaucaugccuauauaa

SEQ ID NO: 48004 - RNA, 1410 nt, Artificial Sequence
  derived and/or modified CDS sequence (wt) from neuraminidase__InfluenzaA__ABU92874
augaauccaaaucaaaagauaauaacgauuggcucuguuucccucaccauuuccacaauaugcuucuucaugcaaauugccauccugauaacuacuguaacauugcauuucaagcaauaugaauucaacucccccccaaacaaccaagugaugcugugugaaccaacaauaauagaaagaaacauaacagagauaguguaucugaccaacaccaccauagagaaggaaauaugccccaaacuagcagaauacagaaauuggucaaagccgcaauguaacauuacaggauuugcaccuuuuucuaaggacaauucgauucggcuuuccgcugguggggacaucugggugacaagagaaccuuaugugucaugcgauccugacaaguguuaucaauuugcccuuggacagggaacaacacuaaacaacgugcauucaaaugacacaguacaugauaggaccccuuaucggacccuauugaugaaugaauuggguguuccauuucaucuggggaccaagcaagugugcauagcaugguccagcucaaguugucacgauggaaaagcauggcugcauguuuguguaacgggggaugaugaaaaugcaacugcuagcuucauuuacaaugggaggcuuguagauaguauuguuucaugguccaaaaaaauccucaggacucaggagucagaaugcguuuguaucaauggaacuuguacaguaguaaugacugaugggagugcuucaggaaaagcugauacuaaaauacuauucauugaggaggggaaaauuguucauacuagcacauuaucaggaagugcucagcaugucgaggagugcuccuguuauccucgauauccuggugucagaugugucugcagagacaacuggaaaggcucaaauaggcccaucguagauauaaacauaaaggauuauagcauuguuuccaguuaugugugcucaggacuuguuggagacacacccagaaaaaacgacagcuccagcaguagccauugcuuggauccaaacaaugaggaagguggucauggagugaaaggcugggccuuugaugauggaaaugacguguggaugggaagaacgaucagcgagaaguuacgcucaggauaugaaaccuucaaagucauugaaggcugguccaacccuaacuccaaauugcagauaaauaggcaagucauaguugacagagguaacagguccgguuauucugguauuuucucuguugaaggcaaaagcugcaucaaucggugcuuuuauguggaguugauaaggggaagaaaacaggaaacugaagucuuguggaccucaaacaguauuguuguguuuuguggcaccucagguacauauggaacaggcucauggccugauggggcggacaucaaucucaugccuauauaa

SEQ ID NO: 48005 - RNA, 1410 nt, Artificial Sequence
  derived and/or modified CDS sequence (wt) from neuraminidase__InfluenzaA__ABU92875
augaauccaaaucaaaagauaauaacaauuggcucuguuucucucaccauugccgcaauaugcuuccuuaugcaaauugccauccugguaacuacuguaacauugcauuucaagcagcaugaaugcaacucccccccaaacaaccaaguaaugcugugugaaccaacaauaauagaaagaaacauaacagagauaguguaucugaccaacaccaccauagagaaggaaauaugccccaaacuagcagaauacagaaauuggucaaagccgcaauguaacauuacaggauuugcaccuuuuucuaaggacaauucgauucggcuuuccgcugguggggacaucugggugacaagagaaccuuaugugucaugcgauccugacaaguguuaucaauuugcccuugggcagggaacaacacuaaacaacgggcauucaaaugacacaguacaugauaggacuccuuaccggacccuauugaugaaugaauuggguguuccauuucauuugggaaccaggcaagugugcauagcaugguccagcucaaguugucacgauggaaaagcauggcugcauguuuguguaacuggggaugauaaaaaugcaacugcuagcuucauuuacaaugggaggcuuguagauaguauugguucaugguccaaaaaaauacucagaacccaggagucggaaugcguuuguaucaauggaacuuguacagugguaaugacugauggaagcgcuucaggaaaagcugauacuaaaauacuauucauugaggaggggaaaaucguucauauuagcacauugucaggaagugcucagcaugucgaggagugcuccuguuauccucgauauccuggugucagaugugucugcagagacaacuggaaaggcuccaauaggcccauuguagauauaaauguaaaggauuauagcauuguuuccaguuaugugugcucaggacuuguuggagacacacccagaaaaaacgacagcuucagcaguagccauugccuagauccuaacaaugaggaagguggucauggagugaaaggcugggccuuugaugauggaaaugacguguggaugggaagaacgaucagcgagaaguuacgcucagguuaugaaaccuucaaagucaucgaaggcugguccaaaccuaacuccaaauuacagauaaauaggcaaguuauaguugaaagagguaacagguccgguuauucugguauuuucuccguugaaggcaaaagcugcaucaaucggugcuuuuauguggaguugauaaggggaaggaaagaggaaacugaagucugguggaccucaaacaguauuguuguguuuuguggcaccucagguacauauggaacaggcucauggccugauggggcggauaucaaucucaugccuauauaa

SEQ ID NO: 48006 - RNA, 1410 nt, Artificial Sequence
  derived and/or modified CDS sequence (wt) from neuraminidase__InfluenzaA__ABU92876
augaauccaaaucaaaagauaauaacaauuggcucuguuucucucaccauugccgcaauaugcuuccuuaugcaaauugccauccugguaacuacuguaacauugcauuucaagcagcaugaaugcaacucccccccaaacaaccaaguaaugcugugugaaccaacaauaauagaaagaaacauaacagagauaguguaucugaccaacaccaccauagagaaggaaauaugccccaaacuagcagaauacagaaauuggucaaagccgcaauguaacauuacaggauuugcaccuuuuucuaaggacaauucgauucggcuuuccgcugguggggacaucugggugacaagagaaccuuaugugucaugcgauccugacaaguguuaucaauuugcccuugggcagggaacaacacuaaacaacgggcauucaaaugacacaguacaugauaggaccccuuaccggacccuauugaugaaugaauuggguguuccauuucauuugggaaccaggcaagugugcauagcaugguccagcucaaguugucacgauggaaaagcguggcugcauguuuguguaacuggggaugauaaaaaugcaacugcuagcuuuauuuacaaugggaggcuuguagauaguauugguucaugguccaaaaaaauacucagaacccaggagucggaaugcguuuguaucaauggaacuuguacagugguaaugacugauggaagcgcuucaggaaaagcugauacuaaaauacuauucauugaggaggggaaaaucguucauauuagcacauugucaggaagugcucagcaugucgaggagugcuccuguuauccucgauauccuggugucagaugugucugcagagacaacuggaaaggcuccaauaggcccauuguagauauaaauguaaaggauuauagcauuguuuccaguuaugugugcucaggacuuguuggagacacacccagaaaaaacgacagcuucagcaguagccauugccuagauccuaacaaugaggaagguggucauggagugaaaggcugggccuuugaugauggaaaugacguguggaugggaagaacgaucagcgagaaguuacgcucagguuaugaaaccuucaaagucaucgaaggcugguccaaaccuaacuccaaauuacagauaaauaggcaaguuauaguugaaagagguaacagguccgguuauucugguauuuucuccguugaaggcaaaagcugcaucaaucggugcuuuuauguggaguugauaaggggaaggaaagaggaaacugaagucugguggaccucaaacaguauuguuguguuuuguggcaccucagguacauauggaacaggcucauggccugauggggcggauaucaaucucaugccuauauaa

SEQ ID NO: 48007 - RNA, 1410 nt, Artificial Sequence
  derived and/or modified CDS sequence (wt) from neuraminidase__InfluenzaA__ABU92877
augaauccaaaucaaaagauaauaacaauuggcucuguuucucucaccauugccacaauaugcuuccuuaugcaaauugccauccugguaacuacuguaacauugcauuucaagcagcaugaaugcaacucccccccaaacaaccaaguaaugcugugugaaccaacaauaauagaaagaaacauaacagagauaguguaucugaccaacaccaccauagagaaggaaauaugccccaaacuagcagaauacagaaauuggucaaagccgcaauguaacauuacaggauuugcaccuuuuucuaaggacaauucgauucggcuuuccgcugguggggacaucugggugacaagagaaccuuaugugucaugcgauccugacaaguguuaucaauuugcccuugggcagggaacaacacuaaacaacgggcauucaaaugacacaguacaugauaggaccccuuaccggacccuauugaugaaugaauuggguguuccauuucauuugggaaccaggcaagugugcauagcaugguccagcucaaguugucacgauggaaaagcguggcugcauguuuguguaacuggggaugauaaaaaugcaacugcuagcuucauuuacaaugggaggcuuguagauaguauugguucaugguccaaaaaaauacucagaacccaggagucggaaugcguuuguaucaauggaacuuguacagugguaaugacugauggaagcgcuucagggaaagcugauacuaaaauacuauucauugaggaggggaaaaucguucauauuagcacauugucaggaagugcucagcaugucgaggagugcuccuguuauccucgauauccuggugucagaugugucugcagagacaacuggaaaggcuccaauaggcccauuguagauauaaauguaaaggauuauagcauuguuuccaguuaugugugcucaggacuuguuggagacacacccagaaaaaacgacagcuucagcaguagccauugccuagauccuaacaaugaggaagguggucauggagugaaaggcugggccuuugaugauggaaaugacguguggaugggaagaacgaucagcgagaaguuacgcucagguuaugaaaccuucaaagucaucgaaggcugguccaaaccuaacuccaaauuacagauaaauaggcaaguuauaguugaaagagguaacagguccgguuauucugguauuuucuccguugaaggcaaaagcugcaucaaucggugcuuuuauguggaguugauaaggggaaggaaagaggaaacugaagucugguggaccucaaacaguauuguuguguuuuguggcaccucagguacauauggaacaggcucauggccugauggggcggauaucaaucucaugccuauauaa

SEQ ID NO: 48008 - RNA, 1410 nt, Artificial Sequence; identical to SEQ ID NO: 47917
  derived and/or modified CDS sequence (wt) from neuraminidase__InfluenzaA__ABU92878

SEQ ID NO: 48009 - RNA, 1410 nt, Artificial Sequence
  derived and/or modified CDS sequence (wt) from neuraminidase__InfluenzaA__ABU92879
augaauccaaaucaaaagauaauaacaauuggcucuguuucccucaccauugccacaauaugcuuccuuaugcaaauugccauccugguaacuacuguaacauugcauuucaagcagcaugaaugcaacucccccccaaacaaccaaguaaugcugugugaaccaacaauaauagaaagaaacauaacagagauaguguaucugaccaacaccaccauagagaaggaaauaugccccaaacuagcagaauacagaaauuggucaaagccgcaauguaacauuacaggauuugcaccuuuuucuaaggacaauucgauucggcuuuccgcugguggggacaucugggugacaagagaaccuuaugugucaugcgauccugacaaguguuaucaauuugcccuugggcagggaacaacacuaaacaacgggcauucaaaugacacaguacaugauaggaccccuuaccggacccuauugaugaaugaauuggguguuccauuucauuugggaaccaggcaagugugcauagcaugguccagcucaaguugucacgauggaaaagcguggcugcauguuuguguaacuggggaugauaaaaaugcaacugcuagcuucauuuacaaugggaggcuuguagauaguauugguucaugguccaaaaaaauacucagaacccaggagucggaaugcguuuguaucaauggaacuuguacaguaguaaugacugaugggagcgcuucaggaaaagcugauacuaaaauacuauucauugaggaggggaaaaucguucauauuagcacauugucaggaagugcucagcaugucgaggagugcuccuguuauccucgauauccuggugucagaugugucugcagagacaacuggaaaggcuccaauaggcccauuguagauauaaauguaaaggauuauagcauuguuuccaguuaugugugcucaggacuuguuggagacacacccagaaaaaacgacagcuucagcaguagccauugccuagauccuaacaaugaggaagguggucauggagugaaaggcugggccuuugaugauggaaaugacguguggaugggaagaacgaucagcgagaaguuacgcucagguuaugaaaccuucaaagucaucgaaggcugguccaaaccuaacuccaaauuacagauaaauaggcaaguuauaguugaaagagguaacagguccgguuauucugguauuuucuccguugaaggcaaaagcugcaucaaucggugcuuuuauguggaguugauaaggggaaggaaaggggaaacugaagucugguggaccucaaacaguauuguuguguuuuguggcaccucagguacauauggaacaggcucauggccugauggggcggauaucaaucucaugccuauauaa

SEQ ID NO: 48010 - RNA, 1410 nt, Artificial Sequence
  derived and/or modified CDS sequence (wt) from neuraminidase__InfluenzaA__ABU92880
augaauccaaaucaaaagauaauaacaauuggcucuguuucucucaccauugccgcgauaugcuuccuuaugcaaauugccauccugguaacuacuguaacauugcauuucaagcagcaugaaugcaacucccccccaaacaaccaaguaaugcugugugaaccaacaauaauagaaagaaacauaacagagauaguguaucugaccaacaccaccauagagaaggaaauaugccccaaacuagcagaauacagaaauuggucaaagccgcaauguaacauuacaggauuugcaccuuuuucuaaggacaauucgauucggcuuuccgcugguggggacaucugggugacaagagaaccuuaugugucaugcgauccugacaaguguuaucaauuugcccuugggcagggaacaacacuaaacaacgggcauucaaaugacacaguacaugauaggaccccuuaccggacccuauugaugaaugaauuggguguuccauuucauuugggaaccaggcaagugugcauagcaugguccagcucaaguugucacgauggaaaagcguggcugcauguuuguguaacuggggaugauaaaaaugcaacugcuagcuucauuuacaaugggaggcuuguagauaguauugguucaugguccaaaaaaauacucagaacccaggagucggaaugcguuuguaucaauggaacuuguacagugguaaugacugauggaagcgcuucagggaaagcugauacuaaaauacuauucauugaggaggggaaaaucguucauauuagcacauugucaggaagugcucagcaugucgaggagugcuccuguuauccucgauauccuggugucagaugugucugcagagacaacuggaaaggcuccaauaggcccauuguagauauaaauguaaaggauuauaacauuguuuccaguuaugugugcucaggacuuguuggagacacacccagaaaaaacgacagcuucagcaguagccauugccuagauccuaacaaugaggaagguggucauggagugaaaggcugggccuuugaugauggaaaugacguguggaugggaagaacgaucagcgagaaguuacgcucagguuaugaaaccuucaaagucaucgaaggcugguccaaaccuaacuccaaauuacagauaaauaggcaaguuauaguugaaagagguaacagguccgguuauucugguauuuucuccguugaaggcaaaagcugcaucaaucggugcuuuuauguggaguugauaaggggaaggaaagaggaaacugaagucugguggaccucaaacaguauuguuguguuuuguggcaccucagguacauauggaacaggcucauggccugauggggcggauaucaaucucaugccuauauaa

SEQ ID NO: 48011 - RNA, 1410 nt, Artificial Sequence; identical to SEQ ID NO: 47917
  derived and/or modified CDS sequence (wt) from neuraminidase__InfluenzaA__ABU92881

SEQ ID NO: 48012 - RNA, 1410 nt, Artificial Sequence; identical to SEQ ID NO: 46784
  derived and/or modified CDS sequence (wt) from neuraminidase__InfluenzaA__ABU92882

SEQ ID NO: 48013 - RNA, 1410 nt, Artificial Sequence
  derived and/or modified CDS sequence (wt) from neuraminidase__InfluenzaA__ABU92883
augaauccaaaucaaaagauaauaacaauuggcucuguuucucucaccauugccgcaauaugcuuccuuaugcaaauugccauccugguaacuacuguaacauugcauuucaagcagcaugaaugcaacucccccccaaaaaaccaaguaaugcugugugaaccaacaauaauagaaagaaacauaacagagauaguguaucugaccaacaccaccauagagaaggaaauaugccccaaacuagcagaauacagaaauuggucaaagccgcaauguaacauuacaggauuugcaccuuuuucuaaggacaauucgauucggcuuuccgcugguggggacaucugggugacaagagaaccuuaugugucaugcgauccugacaaguguuaucaauuugcccuugggcagggaacaacacuaaacaacgggcauucaaaugacacaguacaugauaggaccccuuaccggacccuauugaugaaugaauuggguguuccauuucauuugggaaccaggcaagugugcauagcaugguccagcucaaguugucacgauggaaaagcguggcugcauguuuguguaacuggggaugauaaaaaugcaacugcuagcuucauuuacaaugggaggcuuguagauaguauuguuucaugguccaaaaaaauacucagaacccaggagucggaaugcguuuguaucaauggaacuuguacagugguaaugacugauggaagcgcuucaggaaaagcugauacuaaaauacuauucauugaggaggggaaaaucguucauauuagcacauugucaggaagugcucagcaugucgaggagugcuccuguuauccucgauauccuggugucagaugugucugcagagacaacuggaaaggcuccaauaggcccauuguagauauaaauguaaaggauuauagcauuguuuccaguuaugugugcucaggacuuguuggagacacacccagaaaaaacgacagcuucagcaguagccauugccuagauccuaacaaugaggaagguggucauggagugaaaggcugggccuuugaugauggaaaugacguguggaugggaagaacgaucagcgagaaguuacguucagguuaugaaaccuucaaagucaucgaaggcugguccaaaccaaacuccaaauuacagauaaauaggcaaguuauaguugaaagagguaacagguccgguuauucugguauuuucuccguugaaggcaaaagcugcaucaaucggugcuuuuauguggaguugauaaggggaaggaaagaggaaacugaagucugguggaccucaaacaguauuguuguguuuuguggcaccucagguacauauggaacaggcucauggccugauggggcggauaucaaucucaugccuauauaa

SEQ ID NO: 48014 - RNA, 1410 nt, Artificial Sequence
  derived and/or modified CDS sequence (wt) from neuraminidase__InfluenzaA__ABU92884
augaauccaaaucaaaagauaauaacaauuggcucuguuucucucaccauugccgcgauaugcuuccuuaugcaaauugccauccugguaacuacuguaacauugcauuucaagcagcaugaaugcaacucccccccaaacaaccaaguaaugcugugugaaccaacaauaauagaaagaaacauaacagagauaguguaucugaccaacaccaccauagagaaggaaauaugccccaaacuagcagaauacagaaauuggucaaagccgcaauguaacauuacaggauuugcaccuuuuucuaaggacaauucgauucggcuuuccgcugguggggacaucugggugacaagagaaccuuaugugucaugcgauccugacaaguguuaucaauuugcccuugggcagggaacaacacuaaacaacgggcauucaaaugacacaguacaugauaggaccccuuaccggacccuauugaugaaugaauuggguguuccauuucauuugggaaccaggcaagugugcauagcaugguccagcucaaguugucacgauggaaaagcguggcugcauguuuguguaacuggggaugauaaaaaugcaacugcuagcuucauuuacaaugggaggcuuguagauaguauugguucaugguccaaaaaaauacucagaacccaggagucggaaugcguuuguaucaauggaacuuguacagugguaaugacugauggaagcgcuucagggaaagcugauacuaaaauacuauucauugaggaggggaaaaucguucauauuagcacauugucaggaagugcucagcaugucgaggagugcuccuguuauccucgauauccuggugucagaugugucugcagagacaacuggaaaggcuccaauaggcccauuguagauauaaauguaaaggauuauagcauuguuuccaguuaugugugcucagggcuuguuggagacacacccagaaaaaacgacagcuucagcaguagccauugccuagauccuaacaaugaggaagguggucauggagugaaaggcugggccuuugaugauggaaaugacguguggaugggaagaacgaucagcgagaaguuacgcucagguuaugaaaccuucaaagucaucgaaggcugguccaaaccuaacuccaaauuacagauaaauaggcaaguuauaguugaaagagguaacagguccgguuauucugguauuuucuccguugaaggcaaaagcugcaucaaucggugcuuuuauguggaguugauaaggggaaggaaagaggaaacugaagucugguggaccucaaacaguauuguuguguuuuguggcaccucagguacauauggaacaggcucauggccugauggggcggauaucaaucucaugccuauauaa

SEQ ID NO: 48015 - RNA, 1410 nt, Artificial Sequence
  derived and/or modified CDS sequence (wt) from neuraminidase__InfluenzaA__ABU92885
augaauccaaaucaaaagauaauaacaauuggcucuguuucucucaccauugccgcgauaugcuuccuuaugcaaauugccauccugguaacuacuguaacauugcauuucaagcagcaugaaugcaacucccccccaaacaaccaaguaaugcugugugaaccaacaauaauagaaagaaacauaacagagauaguguaucugaccaacaccaccauagagaaggaaauaugccccaaacuagcagaauacagaaauuggucaaagccgcaauguaacauuacaggauuugcaccuuuuucuaaggacaauucgauucggcuuuccgcugguggggacaucugggugacaagagaaccuuaugugucaugcgauccugacaaguguuaucaauuugcccuugggcagggaacaacacuaaacaacgggcauucaaaugacacaguacaugauaggaccccuuaccggacccuauugaugaaugaauuggguguuccauuucauuugggaaccaggcaagugugcauagcaugguccagcucaaguugucacgauggaaaagcguggcugcauguuuguguaacuggggaugauaaaaaugcaacugcuagcuucauuuacaaugggaggcuuguagauaguauugguucaugguccaaaaaaauacucagaacccaggagucggaaugcguuuguaucaauggaacuuguacagugguaaugacugauggaagcgcuucagggaaagcugauacuaaaauacuauucauugaggaggggaaaaucguucauauuagcacauugucaggaagugcucagcaugucgaggagugcuccuguuauccucgauauccuggugucaggugugucuguagagacaacuggaaaggcuccaauaggcccauuguagauauaaauguaaaggauuauagcauuguuuccaguuaugugugcucaggacuuguuggagacacacccagaaaaaacgacagcuucagcaguagccauugccuagauccuaacaaugaggaagguggucauggagugaaaggcugggccuuugaugauggaaaugacguguggaugggaagaacgaucagcgagaaguuacgcucagguuaugaaaccuucaaagucaucgaaggcugguccaaaccuaacuccaaauuacagauaaauaggcaaguuauaguugaaagagguaacagguccgguuauucugguauuuucuccguugaaggcaaaagcugcaucaaucggugcuuuuauguggaguugauaaggggaaggaaagaggaaacugaagucugguggaccucaaacaguauuguuguguuuuguggcaccucagguacauauggaacaggcucauggccugauggggcggauaucaaucucaugccuauauaa

SEQ ID NO: 48016 - RNA, 1410 nt, Artificial Sequence
  derived and/or modified CDS sequence (wt) from neuraminidase__InfluenzaA__ABU92886
augaauccaaaucaaaagauaauaacgauuggcucuguuucucucaccauuuccacaauaugcuucuucaugcaaauugccaucuugauaacuacuguaacauugcauuuuaagcaauaugaauucaacucccccccaaacaaccaagugaugcugugugaaccaacaauaauagaaagaaacauaacagagauaguguaucugaccaacaccaccauagagaaggaaauaugccccaaacuagcagaauacaggaauuggucaaaaccgcaaugugacauuacaggauuugcaccuuuuucuaaggacaauucgauuaggcuuuccgcugguggggacaucugggugacaagagaaccuuaugugucaugcgauccugacaaguguuaucaauuugcccuuggacagggaacaacacuaaacaacgugcauucaaaugacacaguacaugauaggaccccuuaucggacccuauugaugaaugaguuagguguuccauuucaucuagggaccaagcaagugugcauagcaugguccagcucaaguugucacgauggaaaagcauggcugcauguuuguguaacgggggaugauaaaaaugcaacugcuagcuucauuuacaaugggaggcuuguagauaguauuguuucaugguccaaaaaaauccucaggacccaggagucagaaugcguuuguaucaauggaacuuguacaguaguaaugacugaugggagugcuucaggaaaagcugauacuaaaauacuauucauugaggaggggaaaaucguucauacuagcacauugucaggaagugcucagcaugucgaggagugcuccugcuauccucgauauccuggugucagaugugucugcagagacaacuggaaaggcuccaauaggcccaucguagauauaaacauaaaggauuauagcauuguuuccaguuaugugugcucaggacuuguuggagacacacccagaaaaaacgacagcuccagcaguagccauugcuuggauccuaacaaugaagaagguggucauggagugaaaggcugggccuuugaugauggaaaugacguguggaugggaagaacgaucagcgagaaguuacgcucaggauaugaaaccuucaaagucauugaaggcugguccaacccuaauuccaaauugcagauaaauaggcaagucauaguugacagagguaauagguccgguuauucugguauuuucucuguugaaggcaaaagcugcaucaaucggugcuuuuauguggaguugauaaggggaagaaaagaggaaacugaagucuuguggaccucaaacaguauuguuguguuuuguggcaccucagguacauauggaacaggcucauggccugauggggcggacaucaaucucaugccuauauaa

SEQ ID NO: 48017 - RNA, 1410 nt, Artificial Sequence
  derived and/or modified CDS sequence (wt) from neuraminidase__InfluenzaA__ABU92887
augaauccaaaucaaaagauaauaacaauuggcucuguuucucucaccauugccgcaauaugcuuccuuaugcaaauugccauccugguaacuacuguaacauugcauuucaagcagcaugaaugcaacucccccccaaacaaccaaguaaugcugugugaaccaacaauaauagaaagaaacauaacagagauaguguaucugaccaacaccaccauagagaaggaaauaugccccaaacuagcagaauacagaaauuggucaaagccgcaauguaacauuacaggauuugcaccuuuuucuaaggacaauucgauucggcuuucagcugguggggacaucugggugacaagagaaccuuaugugucaugcgauccugacaaguguuaucaauuugcccuugggcagggaacaacacuaaacaacgggcauucaaaugacacaguacaugauaggaccccuuaccggacccuauugaugaaugaauuggguguuccauuucauuugggaaccaggcaagugugcauagccugguccagcucaaguugucacgauggaaaagcguggcuacauguuuguguaacuggggaugauaaaaaugcaacugcuagcuucauauacaaugggaggcuuguagauaguauugguucaugguccaaaaaaauacucagaacccaggagucggaaugcguuuguaucaauggaacuuguacagugguaaugacugauggaagcgcuucaggaaaagcugauacuaaaauacuauucauugaggaggggaaaaucguucauauuagcacauugucaggaagugcucagcaugucgaggagugcuccuguuauccucgauauccuggugucagaugugucugcagagacaacuggaaaggcuccaauaggcccauuguagauauaaauguaaaggauuauagcauuguuuccaguuaugugugcucaggacuuguuggagacacacccagaaaaaacgacagcuucagcaguagccauugccuagauccuaacaaugaggaagguggucauggagugaaaggcugggccuuugaugauggaaaugacguguggaugggaagaacgaucagcgagaaguuacgcucagguuaugaaaccuucaaagucaucgaaggcugguccaaaccaaacuccaaauuacagauaaauaggcaaguuauaguugaaagagguaacagguccgguuauucugguauuuucuccguugaaggcaaaagcugcaucaaucggugcuuuuauguggaguugauaaggggaaggaaagaggaaacugaagucugguggaccucaaacaguauuguuguuuuuuguggcaccucagguacauauggaacaggcucauggccugauggggcggauaucaaucucaugccuauauaa

SEQ ID NO: 48018 - RNA, 1410 nt, Artificial Sequence
  derived and/or modified CDS sequence (wt) from neuraminidase__InfluenzaA__ABU92888
augaauccaaaucaaaagauaauaacgauuggcucuguuucucucaccauuuccacaauaugcuucuucaugcaaauugccauccugauaacuacuguaacauugcauuucaagcaauaugaauucaacucccccccaaacaaccaagugaugcugugugaaccaacaauaauagaaagaaacauaacagagauaguguaucugaccaacaccaccauagagaaggaaauaugccccaaacuagcagaauacagaaauuggucaaagccgcaauguaacauuacaggauuugcaccuuuuucuaaggacaauucgauucggcuuuccgcugguggggacaucugggugacaagagaaccuuaugugucaugcgauccugacaaguguuaucaauuugcccuuggacagggaacaacacuaaacaacgugcauucaaaugacacaguacaugauaggaccccuuaucggacccuauugaugaaugaguuggguguuccauuucaucuggggaccaagcaagugugcauagcaugguccagcucaaguugucacgauggaaaagcauggcugcauguuuguguaacgggggaugaugaaaaugcaacugcuagcuucauuuacaaugggaggcuuguagauaguauuguuucaugguccaaaaaaauccucaggacccaggagucagaaugcguuuguaucaauggaacuuguacaguaguaaugacugaugggagugcuucaggaaaagcugauacuaaaauacuauucauugaggaggggaaaaucguucauacuagcacauugucaggaagugcucagcaugucgaggaguguuccuguuauccucgauauccuggugucagaugugucugcagagacaacuggaaaggcuccaauaggcccaucguagauauaaacauaaaggauuauagcauuauuuccaguuaugugugcucaggacuuguuggagacacacccagaaaaaacgacagcuccagcaguagccauugcuuggauccaaacaaugaggaagguggucauggagugaaaggcugggccuuugaugauggaaaugacguguggaugggaagaacgaucagcgagaaguuacgcucaggauaugaaaccuucaaagucguugaaggcugguccaacccuaacuccaaauugcagauaaauaggcaagucauaguugacagagauaauagguccgguuauucugguauuuucucuguugaaggcaaaagcugcaucaaucggugcuuuuauguggaguugauaaggggaagaaaccaggaaacugaagucuuguggaccucaaacaguauuguuguguuuuguggcaccucagguacauauggaacaggcucauggccugauggggcggacaucaaucucaugccuauauaa

SEQ ID NO: 48019 - RNA, 1410 nt, Artificial Sequence; identical to SEQ ID NO: 47942
  derived and/or modified CDS sequence (wt) from neuraminidase__InfluenzaA__ABU92889

SEQ ID NO: 48020 - RNA, 1410 nt, Artificial Sequence
  derived and/or modified CDS sequence (wt) from neuraminidase__InfluenzaA__ABU92890
augaauccaaaucaaaagauaauaacaauuggcucuguuucucucaccauugccgcgauaugcuuccuuaugcaaauugccauccugguaacuacuguaacauugcauuucaagcagcaugaaugcaacucccccccaaacaaccaaguaaugcugugugaaccaacaauaauagaaagaaacauaacagagauaguguaucugaccaacaccaccauagagaaggaaauaugccccaaacuagcagaauacagaaauuggucaaagccgcaauguaacauuacaggauuugcaccuuuuucuaaggacaauucgauucggcuuuccgcugguggggacaucugggugacaagagaaccuuaugugucaugcgauccugacaaguguuaucaauuugcccuugggcagggaacaacacuaaacaacgggcauucaaaugacacaguacaugauaggaccccuuaccggacccuauugaugaaugaauuggguguuccauuucauuugggaaccagacaagugugcauagcaugguccagcucaaguugucacgauggaaaagcguggcugcauguuuguguaacuggggaugauaaaaaugcaacugcuagcuucauuuacaaugggaggcuuguagauaguauugguucaugguccaaaaaaauacucagaacccaggagucggaaugcguuuguaucaauggaacuuguacagugguaaugacugauggaagcgcuucagggaaagcugauacuaaaauacuauucauugaggaggggaaaaucguucauauuagcacauugucaggaagugcucagcaugucgaggagugcuccuguuauccucgauauccuggugucagaugugucugcagagacaacuggaaaggcuccaauaggcccauuguagauauaaauguaaaggauuauagcauuguuuccaguuaugugugcucaggacuuguuggagacacacccagaaaaaacgacagcuucagcaguagccauugccuagauccuaacaaugaggaagguggucauggagugaaaggcugggccuuugaugauggaaaugacguguggaugggaagaacgaucagcgagaaguuacgcucagguuaugaaaccuucaaagucaucgaaggcugguccaaaccuaacuccaaauuacagauaaauaggcaaguuauaguugaaagagguaacagguccgguuauucugguauuuucuccguugaaggcaaaagcugcaucaaucggugcuuuuauguggaguugguaaggggaaggaaagaggaaacugaagucugguggaccucaaacaguauuguuguguuuuguggcaccucagguacauauggaacaggcucauggccugauggggcggauaucaaucucaugccuauauaa

SEQ ID NO: 48021 - RNA, 1410 nt, Artificial Sequence; identical to SEQ ID NO: 47957
  derived and/or modified CDS sequence (wt) from neuraminidase__InfluenzaA__ABU92891

SEQ ID NO: 48022 - RNA, 1410 nt, Artificial Sequence
  derived and/or modified CDS sequence (wt) from neuraminidase__InfluenzaA__ABU92892
augaauccaaaucaaaagauaauaacgauuggcucuguuucucucaccauuuccacaauaugcuucuucaugcaaauugccaucuugauaacuacuguaacauugcauuuuaagcaauaugaauucaacucccccccaaacaaccaagugaugcugugugaaccaacaauaauagaaagaaacauaacagagauaguguaucugaccaacaccaccauagagaaggaaauaugccccaaacuagcagaauacaggaauuggucaaagccgcaaugugacauuacaggauuugcaccuuuuucuaaggacaauucgauuaggcuuuccgcuggugggaacaucugggugacaagagaaccuuaugugucaugcgauccugacaaguguuaucaauuugcccuuggacagggaacaacacuaaacaacgugcauucaaaugacacaguacaugauaggaccccuuaucggacccuauugaugaaugaguuagguguuccauuucaucuggggaccaagcaagugugcauagcaugguccagcucaaguugucacgauggaaaagcauggcugcauguuuguguaacgggggaugauaaaaaugcaacugcuagcuucauuuacaaugggaggcuuguagauaguauuguuucaugguccaaaaaaauccucaggacccaggagucagaaugcguuuguaucaauggaacuuguacaguaguaaugacugaugggagugcuucaggaaaagcugauacuaaaauacuauucauugaggaggggaaaaucguucauacuagcacauugucaggaagugcucagcaugucgaggagugcuccugcuauccucgauauccuggugucagaugugucugcagagacaacuggaaaggcuccaauaggcccaucguagauauaaacauaaaggauuauagcauuguuuccaguuaugugugcucaggacuuguuggagacacacccagaaaaaacgacagcuccagcaguagccauugcuuggauccuaacaaugaagaagguggucauggagugaaaggcugggccuuugaugauggaaaugacguguggaugggaagaacgaucagcgagaaguuacgcucaggauaugaaaccuucaaagucauugaaggcugguccaacccuaauuccaaauugcagauaaauaggcaagucauaguugacagagguaauagguccgguuauucugguauuuucucuguugaaggcaaaagcugcaucaaucggugcuuuuauguggaguugauaaggggaagaaaagaggaaacugaagucuuguggaccucaaacaguauuguuguguuuuguggcaccucagguacauauggaacaggcucauggccugauggggcggacaucaaucucaugccuauauaa

SEQ ID NO: 48023 - RNA, 1410 nt, Artificial Sequence
  derived and/or modified CDS sequence (wt) from neuraminidase__InfluenzaA__ABU92893
augaauccaaaucaaaagauaauaacaauuggcucuguuucucucaccauuuccacaauaugcuucuucaugcaaauugccaucuugauaacuacuguaacauugcauuucaagcaauaugaauucaacucccccccaaacaaccaagugaugcugugugaaccaacaauaauagaaagaaacauaacagagauaguguaucugaccaacaccaccauagagaaggaaauaugccccaaacuagcagaauacagaaauuggucaaagccgcaaugugacauuacaggauuugcaccuuuuucuaaggacaauucgauuaggcuuuccgcugguggggacaucugggugacaagagaaccuuaugugucaugcgauccugacaaguguuaucaauuugcccuuggacagggaacaacacuaaacaacgugcauucaaaugacacaguacaugauaggaccccuuaucggacccuauugaugaaugaguuagguguuccauuucaucuggggaccaagcaagugugcauagcaugguccagcucaaguugucacgauggaaaagcauggcugcauguuuguguaacgggggaugauaaaaaugcaacugcuagcuucauuuacaaugggaggcuuguagauaguauuguuucaugguccaaagauauccucaggacccaggagucagaaugcguuuguaucaauggaacuuguacaguaguaaugacugaugggagugcuucaggaaaagcugauacuaaaauacuauucauugaggaggggaaaaucguucauacuagcacauugucaggaagugcucagcaugucgaggagugcuccugcuauccucgauauccuggugucagaugugucugcagagacaacuggaaaggcuccaauaggcccauuguagauauaaacauaaaggauuauagcauuguuuccaguuaugugugcucaggacuuguuggagacacacccagaaaaaccgacagcuccagcaguagccauugcuuggauccuaacaaugaagaagguggucauggagugaaaggcugggccuuugaugauggaaaugacguguggaugggaagaacgaucagcgagaaguuacgcuuaggauaugaaaccuucaaagucauugaaggcugguccaacccuaauuccaaauugcagauaaauaggcaagucauaguugacagggguaauagguccgguuauucugguauuuucucuguugaaggcaaaagcugcaucaaucggugcuuuuauguggaguugauaaggggaagaaaagaggaaacugaagucuuguggaccucaaacaguauuguuguauuuuguggaaccucagguacauauggaacaggcucauggccugauggggcggacaucaaucucaugccuauauaa

SEQ ID NO: 48024 - RNA, 1410 nt, Artificial Sequence
  derived and/or modified CDS sequence (wt) from neuraminidase__InfluenzaA__ABU92895
augaauccaaaucaaaagauaauaacgguuggcucuguuucucucaccauuuccacaauaugcuucuucaugcaaauugccaucuugauaacuacuguaacauugcauuuuaagcaauaugaauucaacucccccccaaacaaccaagugaugcugugugaaccaacaauaauagaaagaaacauaacagagauaguguaucugaccaacaccaccauagagaaggaaauaugccccaaacuagcagaauacagaaauuggucaaagccgcaaugugacauuacaggauuugcaccuuuuucuaaggacaauucgauuaggcuuuccgcugguggggacaucugggugacaagagaaccuuaugugucaugcgauccugacaaguguuaucaauuugcccuuggacagggaacaacacuaaacaacgugcauucaaaugacacaguacaugauaggaccccuuaucggacccuauugaugaaugaguuagguguuccauuucaucuggggaccaagcaagugugcauagcaugguccagcucaaguugucacgauggaaaagcauggcugcauguuuguguaacgggggacgauaaaaaugcaacugcuagcuucauuuacaaugggaggcuuguagauaguauuguuucaugguccaaagaaauccucaggacccaggagucagaaugcguuuguaucaauggaacuuguacaguaguaaugaccgaugggagugcuucaggaaaagcugauacuaaaauacuguucauugaggaggggaaaaucguucauacuagcacauugucaggaagugcucagcaugucgaggagugcuccugcuauccucgauauccuggugucagaugugucugcagagacaacuggaaaggcuccaauaggcccaucguagauauaaacauaaaggauuauagcauugcuuccaguuaugugugcucaggacuuguuggagacacacccagaaaaaacgacagcuccagcaguagccauugcuuggauccuaacaaugaagaagguggucauggagugaaaggcugggccuuugaugauggaaaugacguguggaugggaagaacgaucagcgagaaguuacgcucaggauaugaaaccuucaaagucauugaaggcugguccaacccuaauuccaaauugcagauaaauaggcaagucauaguugacagagguaauagguccgguuauucugguauuuucucuguugaaggcaaaagcugcaucaaucggugcuuuuauguggaguugauaaggggaagaaaagaggaaacugaagucuuguggaccucaaacaguauuguuguguuuuguggcaccucagguacauauggaacaggcucauggccugauggggcggacaucaaucucaugccuauauaa

SEQ ID NO: 48025 - RNA, 1410 nt, Artificial Sequence
  derived and/or modified CDS sequence (wt) from neuraminidase__InfluenzaA__ABU92896
augaauccaaaucaaaagauaauaacgauuggcucuguuucucucaccauuuccacaauaugcuucuucaugcaaauugccaucuugauaacuacuguaacauugcauuucaagcaauaugaauucaacucccccccaaacaaccaagugaugcugugugaaccaacaauaauagaaagaaacauaacagagauaguguaucugaccaacaccaccauagagaaggaaauaugccccaaacuagcagaauacagaaauuggucaaagccgcaaugugacauuacaggauuugcaccuuuuucuaaggacaauucgauuaggcuuuccgcugguggggacaucugggugacaagagaaccuuaugugucaugcgauccugacaaguguuaucaauuugcccuuggacagggaacaacacuaaacaacgugcauucaaaugacacaguacgugauaggaccccuuaucggacccuauugaugaaugaguuagguguuccuuuucaucuggggaccaagcaagugugcauagcauggucaagcucaaguugucacgauggaaaagcauggcugcauguuuguauaacggggaaugauaaaaaugcaacugcuagcuucauuuacaaugggaggcuuguagauaguauuguuucaugguccaaagaaauccucaggacccaggagucagaaugcguuuguaucaauggaacuuguacaguaguaaugacugaugggagugcuucaggaaaagcugauacuaaaauacuauucauugaggaggggaaaaucguucauacuagcacauugucaggaagugcucagcaugucgaggagugcuccugcuauccucgauauccuggugucagaugugucugcagagacaacuggaaaggcuccaauaggcccaucguagauauaaacauaaaggaucauagcauuguuuccaguuauguguguucaggacuuguuggagacacacccagaaaaaacgacagcuccagcaguagccauuguuuggauccuaacaaugaagaagguggucauggagugaaaggcugggccuuugaugauagaaaugacguguggaugggaagaacgaucagcgagaagucacgcuuaggauaugagaccuucaaagucauugaaggcugguccaacccuaauuccaaauugcagauaaauaggcaagucauaguugacagagguaauagguccgguuauucugguauuuucucuguugaaggcaaaagcugcaucaaucggugcuuuuauguggaguugauaaggggaagaaaagaggaaacugaagucuuguggaccucaaacaguauuguuguauuuuguggcaccucagguacauauggaacaggcucauggccugauggggcggacaucaaucucaugccuauauaa

SEQ ID NO: 48026 - RNA, 1410 nt, Artificial Sequence
  derived and/or modified CDS sequence (wt) from neuraminidase__InfluenzaA__ABU92897
augaauccaaaucaaaagauaauaacgauuggcucuguuucucucaccauuuccacaauaugcuucuucaugcaaauugccaucuugauaacuacuguaacauugcauuucaagcaauaugaacucaacucccccccaaacaaccaagugaugcugugugaaccaacaauaauagaaagaaacauaacagagauaguguaucugaccaacaccaccauagagaaggaaauaugccccaaacuagcagaauacagaaauuggucaaagccgcaauguaacauuacaggauuugcaccuuuuucuaaggacaacucgauuaggcuuuccgcugguggggacaucugggugacaagagaaccuuaugugucaugcgauccugacaaguguuaucaauuugcccuuggacagggaacaacacuaaacaacgugcauucaaaugacacaguacaugauagaaccccuuaucggacccuauugaugaaugaguuagguguuccauuucaucuggggaccaagcaagugugcauagcaugguccagcucaaguugucacgauggaaaagcauggcugcauguuuguguaacgggggaugauaaaaaugcaacugcuagcuucauuuacaaugggaggcuuguagauaguauuguuucaugguccaaagaaauccucaggacccaggagucagaaugcguuuguaucaauggaacuuguacaguaguaaugacugauggaagugcuucaggaaaagcugauacuaaaauacuauucauugaggaggggaaaaucguucauacuagcacauugucaggaagugcucagcaugucgaggagugcuccugcuauccucgauauccuggugucagaugugucugcagagacaacuggaaaggcuccaacaggcccauaguagacauaaacauaaaggauuauagcauuguuuccaguuaugugugcucaggacuuguuggagacacacccagaaaaaacgacagcuccagcaguagccauugcuuggauccuaacaaugaagaagguggucauggagugaaaggcugggccuuugaugauggaaaugacguguggaugggaagaacgaucagcgagaagucacgcucaggauaugaaaccuucaaagucauugaaggcugguccaacccuaauuccaaauugcagauaaauaggcaagucauaguugacagagguaauagguccgguuauucugguauuuucucuguugaaggcaaaagcugcaucaaucggugcuuuuauguggaguugauaaggggaagaaaagaggaaacugaaguauuguggaccucaaacaguauuguuguguuuuguggcaccucugguacauauggaacaggcucauggccugauggggcggacaucaaucucaugccuauauaa

SEQ ID NO: 48027 - RNA, 1410 nt, Artificial Sequence
  derived and/or modified CDS sequence (wt) from neuraminidase__InfluenzaA__ABU92898
augaauccaaaucaaaagauaauaacgauuggcucuguuucucucaccauuuccacaauaugcuucuucaugcaaauugccaucuugauaacuacuguaacauugcauuucaagcaauaugaauucaacucccccccaaacaaccaagugaugcugugugaaccaacaauaauagaaagaaacauaacagagauaguguaucugaccaacaccaccauagagaaggaaauaugccccaaacuagcagaauacagaaauuggucaaagccgcaaugugacauuacaggauuugcaccuuuuucuaaggacaauucgauuaggcuuuccgcugguggggacaucugggugacaagagaaccuuaugugucaugcgauccugacaaguguuaucaauuugcccuuggacagggaacaacacuaaacaacgugcauucaaacgacacaguacaugauaggaccccuuaucggacccuauugaugaaugaguuagguguuccauuucaucuggggaccaagcaagugugcauagcaugguccagcucaaguugucacgauggaaaagcauggcugcauguuuguguaacgggggaugauaaaaaugcaacugcuagcuucauuuacaaugggaggcuuguagauaguguuguuucaugguccaaagauauccucaggacccaggagucagaaugcguuuguaucaauggaacuuguacaguaguaaugacugaugggagugcuucaggaaaagcugauacuaaaauacuauucauugaggagggaaaaaucguucauacuagcacauugucaggaagugcucagcaugucgaggagugcuccugcuauccucgauauccuggugucagaugugucugcagagacaacuggaaaggcuccaauaggcccauuguagauauaaacauaaagaauuauagcauuguuuccaguuaugugugcucaggacuuguuggagacacacccagaaaaaccgacagcuccagcaguagccauugcuuggauccuaacaaugaagaagguggucauggagugaaaggcugggccuuugaugauggaaaugacguguggaugggaagaacgaucagcgagaaguuacgcuuaggauaugaaaccuucaaagucauugaaggcugguccaacccuaauuccaaauugcagauaaauaggcaagucauaguugacagagguaauagaaccgguuauucugguauuuucucuguugaaggcaaaagcugcaucaaucggugcuuuuauguggaguugauaaggggaagaaaagaggaaacugaagucuuguggaccucaaacaguauuguuguauuuuguggaaccucagguacauauggaacaggcucauggccugauggggcggacaucaaucucaugccuauauaa

SEQ ID NO: 48028 - RNA, 1410 nt, Artificial Sequence
  derived and/or modified CDS sequence (wt) from neuraminidase__InfluenzaA__ABU92899
augaauccaaaucaaaagauaauaacaauuggcucuguuucucucaccauugccgcaauaugcuuccuuaugcaaauugccauccugguaacuacuguaacauugcauuucaagcagcaugaaugcaacucccccccaaacaaccaaguaaugcugugugaaccaacaauaauagaaagaaacauaacagagauaguguaucugaccaacaccaccauagagaaggaaauaugccccaaacuagcagaauacagaaauuggucaaagccgcaauguaacauuacaggauuugcaccuuuuucuaaggacaauucgauucggcuuuccgcugguggggacaucugggugacaagagaaccuuaugugucaugcgauccugacaaguguuaucaauuugcccuugggcagggaacaacacuaaacaacgggcauucaaaugacacaguacaugauaggaccccuuaccggacccuauugaugaaugaauuggguguuccauuucauuugggaaccaggcaagugugcauagcaugguccagcucaaguugucacgauggaaaagcguggcugcauguuuguguaacuggggaugauaaaaaugcaacugcuagcuucauuuacaaugggaggcuuguagauaguauugguucaugguccaaaaaaauacucagaacccaggagucggaaugcguuuguaucaauggaacuuguacagugguaaugacugauggaagcgcuucaggaaaagcugauacuaaaauacuauucauugaggaggggaaaaucguucauauuagcacauugucaggaagugcucagcaugucgaggagugcuccuguuauccucgauauccuggugucagaugugucugcagagacaacuggaaaggcuccaauaggcccauuguagauauaaauguaaaggauuauagcauuguuuccaguuaugugugcucaggacuuguuggagacacacccagaaaaaacgacagcuucagcaguagccauugccuagauccuaacaaugaggaagguggucauggagugaaaggcugggccuuugaugauggaaaugacguguggaugggaagaacgaucagcgagaaguuacgcucagguuaugaaaccuucaaagucaucgaaggcugguccaaaccaaacuccaaauuacagauaaauaggcaaguuauaguugaaagagguaacagguccgguuauucugguauuuucuccguugaaggcaaaagcugcaucaaucggugcuuuuauguggaguugauaaggggaaggaaagaggaaacugaagucugguggaccucaaacaguauuguuguguuuuguggcaccucagguacauauggaacaggcucauggccugauggggcggauaucaaucucaugccuauauaa

SEQ ID NO: 48029 - RNA, 1410 nt, Artificial Sequence
  derived and/or modified CDS sequence (wt) from neuraminidase__InfluenzaA__ABU92900
augaauccaaaucaaaagauaauaacaauuggcucuguuucucucaccauugccgcaauaugcuuccuuaugcaaauugccauccugguaacuacuguaacauugcauuucaagcagcaugaaugcaacccccccccaaacaaccaaguaaugcugugugaaccaacaauaauagaaagaaacauaacagagauaguguaucugaccaacaccaccauagagaaggaaauaugccccaaacuagcagaauacagaaauuggucaaagccgcaauguaacauuacaggauuugcaccuuuuucuaaggacaauucgauucggcuuuccgcugguggggacaucugggugacaagagaaccuuaugugucaugcgauccugacaaguguuaucaauuugcccuugggcagggaacaacacuaaacaacgggcauucaaaugacacaguacaugauaggaccccuuaccggacccuauugaugaaugaauuggguguuccauuucauuugggaaccaggcaagugugcauagcaugguccagcucaaguugucacgauggaaaagcguggcugcauguuuguguaacuggggaugauaaaaaugcaacugcuagcuucauuuacaaugggaggcuuguagauaguauugguucaugguccaaaaaaauacucagaacccaggagucggaaugcguuuguaucaauggaacuuguacaguaguaaugacugauggaagcgcuucaggaaaagcugauacuaaaauacuauucauugaggaggggaaaaucguucauauuagcacauugucaggaagugcucagcaugucgaggagugcuccuguuauccucgauauccuggugucagaugugucugcagagacaacuggaaaggcuccaauaggcccauuguagauauaaauguaaaggauuauagcauuguuuccaguuaugugugcucaggacuuguuggagacacacccagaaaaaacgacagcuucagcaguagccauugccuagauccuaacaaugaggaagguggucauggagugaaaggcugggccuuugaugauggaaaugacguguggaugggaagaacgaucagcgagaaguuacgcucagguuaugaaaccuucaaagucaucgaaggcugguccaaaccaaacuccaaauuacagauaaauaggcaaguuauaguugaaagagguaacagguccgguuauucugguauuuucuccguugaaggcaaaagcugcaucaaucggugcuuuuauguggaguugauaaggggaaggaaagaggaaacugaagucugguggaccucaaacaguauuguuguguuuuguggcaccucagguacauauggaacaggcucauggccugauggggcggauaucaaucucaugccuauauaa

SEQ ID NO: 48030 - RNA, 1410 nt, Artificial Sequence
  derived and/or modified CDS sequence (wt) from neuraminidase__InfluenzaA__ABU92901
augaauccaaaucaaaagauaauaacaauuggcucuguuucucucaccauugccgcaauaugcuuccuuaugcaaauugccauccugguaacuacuguaacauugcauuucaagcagcaugaaugcaacucccccccaaacaaccaaguaaugcugugugaaccaacaauaauagaaagaaacauaacagagauaguguaucugaccaacaccaccauagagaaggaaauaugccccaaacuagcagaauacagaaauuggucaaagccgcaauguaacauuacaggauuugcaccuuuuucuaaggacaauucgauucggcuuuccgcugguggggacaucugggugacaagagaaccuuaugugucaugcgauccugacaaguguuaucaauuugcccuugggcagggaacaacacuaaacaacgggcauucaaaugacacaguacaugauaggaccccuuaccggacccuauugaugaaugaauuggguguuccauuucauuugggaaccaggcaagugugcauagcaugguccagcucaaguugucacgauggaaaagcguggcugcauguuuguguaacuggggaugauaaaaaugcaacugcuagcuucauuuacaaugggaggcuuguagauaguauuaguucaugguccaaaaaaauacucagaacccaggagucggaaugcguuuguaucaauggaacuuguacagugguaaugacugauggaagcgcuucaggaaaagcugauacuaaaauacuauucauugaggaggggaaaaucguucauauuagcacauugucaggaagugcucagcaugucgaggagugcuccuguuauccucgauauccuggugucagaugugucugcagagacaacuggaaaggcuccaauaggcccauuguagauauaaauguaaaggauuauagcauuguuuccaguuaugugugcucaggacuuguuggagacacacccagaaaaaacgacagcuucagcaguagccauugccuagauccuaacaaugaggaagguggucauggagugaaaggcugggccuuugaugauggaaaugacguguggaugggaagaacgaucagcgagaaguuacgcucagguuaugaaaccuucaaagucaucgaaggcugguccaaaccuaacuccaaauuacagauaaauaggcaaguuauaguugaaagagguaacagguccgguuauucugguauuuucuccguugaaggcaaaagcugcaucaaucggugcuuuuauguggaguugauaaggggaaggaaagaggaaacugaagucugguggaccucaaacaguauuguuguguuuuguggcaccucagguacauauggaacaggcucauggccugauggggcggauaucaaucucaugccuauauaa

SEQ ID NO: 48031 - RNA, 1410 nt, Artificial Sequence; identical to SEQ ID NO: 47917
  derived and/or modified CDS sequence (wt) from neuraminidase__InfluenzaA__ABU92902

SEQ ID NO: 48032 - RNA, 1410 nt, Artificial Sequence; identical to SEQ ID NO: 47968
  derived and/or modified CDS sequence (wt) from neuraminidase__InfluenzaA__ABU92903

SEQ ID NO: 48033 - RNA, 1410 nt, Artificial Sequence
  derived and/or modified CDS sequence (wt) from neuraminidase__InfluenzaA__ABU92904
augaauccaaaucaaaagauaauaacgauuggcucuguuucucucacuauuuccacaauaugcuucuucaugcaaauugccaucuugauaacuacuguaacauugcauuucaagcaauaugaauucaacucccccccaaacaaccaagugaugcugugugaaccaacaauaauagaaagaaacauaacagagauaguguaucugaccaacaccaccauagagaaggaaauaugccccaaacuagcagaauacagaaauuggucaaagccgcaaugugacauuacaggauuugcaccuuuuucuaaggacaauucgauuaggcuuuccgcugguggggacaucugggugacaagagaaccuuaugugucaugcgauccugacaaguguuaucaauuugcccuuggacagggaacaacacuaaacaacgugcauucaaaugacacaguacaugauaggaccccuuaucggacccuauugaugaaugaguuagguguuccauuucaucuggggaccaagcaagugugcauagcaugguccagcucaaguugucacgauggaaaagcauggcugcauguuuguguaacgggggaugauaaaaaugcaacugcuagcuucauuuacaaugggaggcuuguagauaguauuguuucaugguccaaaaaaauccucaggacccaggagucagaaugcguuuguaucaauggaacuuguacaguaguaaugacugaugggagugcuucaggaaaagcugauacuaaaauacuauucauugaggaggggaaaaucguucauacuagcacauugucaggaagugcucagcaugucgaggagugcuccugcuauccucgauauccuggugucagaugugucugcagagacaacuggaaaggcuccaauaggcccaucguagauauaaacauaaaggauuauagcauuguuuccaguuaugugugcucaggacuuguuggagacacacccagaaaaaacgacagcuccagcaguagccauugcuuggauccuaacaaugaagaagguggucauggagugaaaggcugggccuuugaugauggaaaugacguguggaugggaagaacgaucagcgagaagucacgcucaggauaugaaaccuucaaagucauugaaggcugguccaacccuaauuccaaauugcagauaaauaggcaagucauaguugacagagguaauagguccgguuauucugguauuuucucuguugaaggcaaaagcugcaucaaucggugcuuuuauguggaguugauaaggggaagaaaagaggaaacugaagucuuguggaccucaaacaguauuguuguguuuuguggcaccucagguacauauggaacaggcucauggccugauggggcggacaucaaucucaugccuauauaa

SEQ ID NO: 48034 - RNA, 1410 nt, Artificial Sequence; identical to SEQ ID NO: 47919
  derived and/or modified CDS sequence (wt) from neuraminidase__InfluenzaA__ABU92905

SEQ ID NO: 48035 - RNA, 1410 nt, Artificial Sequence
  derived and/or modified CDS sequence (wt) from neuraminidase__InfluenzaA__ABU92906
augaauccaaaucaaaagauaauaacaauuggcucuguuucucucaccauugccgcgauaugcuuccuuaugcaaauugccauccugguaacuacuguaacauugcauuucaagcagcaugaaugcaacucccccccaaacaaccaaguaaugcugugugaaccaacaauaauagaaagaaacauaacagagauaguguaucugaccaacaccaccauagagaaggaaauaugccccaaacuagcagaauacagaaauuggucaaagccgcaauguaacauuacaggauuugcaccuuuuucuaaggacaauucgauucggcuuuccgcugguggggacaucugggugacaagagaaccuuaugugucaugcgauccugacaaguguuaucaauuugcccuugggcagggaacaacacuaaacaacgggcauucaaaugacacaguacaugauaggaccccuuaccggacccuauugaugaaugaauuggguguuccauuucauuugggaaccaggcaagugugcauagcaugguccagcucaaguugucacgauggaaaagcguggcugcauguuuguguaacuggggaugauaaaaaugcaacugcuagcuucauuuacaaugggaggcuuguagauaguauugguucaugguccaaaaaaauacucagaacccaggagucggaaugcguuuguaucaauggaacuuguacagugguaaugacugauggaagcgcuucagggaaagcugauacuaaaauacuauucauugaggaggggaaaaucguucauauuagcacauugucaggaagugcucagcaugucgaggagugcuccuguuauccucgauauccuggugucagaugugucugcagagacaacuggaaaggcuccaauaggcccauuguagauauaaauguaaaggauuauagcauuguuuccaguuaugugugcucaggacuuguuggagacacacccagaaaaaacgacagcuucagcaguagccauugccuagauccuaacaaugaggaagguggucauggagugaaaggcugggccuuugaugauggaaaugacguguggaugggaagaacgaucagcgagaaguuacgcucagguuaugaaaccuucaaagucaucgaaggcugguccaaaccuaacuccaaauuacagauaaauaggcaaguuauaguugaaagagguaacagguccgguuauucugguauuuucuccguugaaggcaaaagcugcaucaaucggugcuuuuauguggaguugauaaggggaaggaaagaggaaacugaagucugguggaccucaaacaguauuguuguguuuuguggcaccucagguacauauggaacaggcucauggccugauggggcggauaucaaacucaugccuauauaa

SEQ ID NO: 48036 - RNA, 1410 nt, Artificial Sequence
  derived and/or modified CDS sequence (wt) from neuraminidase__InfluenzaA__ABU92907
augaauccaaaucaaaagauaauaacaauuggcucuauuucucucaccauugccgcgauaugcuuccuuaugcaaauugccauccugguaacuacuguaacauugcauuucaagcagcaugaaugcaacucccccccaaacaaccaaguaaugcugugugaaccaacaauaauagaaagaaacauaacagagauaguguaucugaccaacaccaccauagagaaggaaauaugccccaaacuagcagaauacagaaauuggucaaagccgcaauguaacauuacaggauuugcaccuuuuucuaaggacaauucgauucggcuuuccgcugguggggacaucugggugacaagagaaccuuaugugucaugcgauccugacaaguguuaucaauuugcccuugggcagggaacaacacuaaacaacgggcauucaaaugacacaguacaugauaggaccccuuaccggacccuauugaugaaugaauuggguguuccauuucauuugggaaccaggcaagugugcauagcaugguccagcucaaguugucacgauggaaaagcguggcugcauguuuguguaacuggggaugauaaaaaugcaacugcuagcuucauuuacaaugggaggcuuguagauaguauugguucaugguccaaaaaaauacucagaacccaggagucggaaugcguuuguaucaauggaacuuguacagugguaaugacugauggaagcgcuucagggaaagcugauacuaaaauacuauucauugaggaggggaaaaucguucauauuagcacauugucaggaagugcucagcaugucgaggagugcuccuguuauccucgauauccuggugucagaugugucugcagagacaacuggaaaggcuccaauaggcccauuguagauauaaauguaaaggauuauagcauuguuuccaguuaugugugcucaggacuuguuggagacacacccagaaaaaacgacagcuucagcaguagccauugccuagauccuaacaaugaggaagguggucauggagugaaaggcugggccuuugaugauggaaaugacguguggaugggaagaacgaucagcgagaaguuacgcucagguuaugaaaccuucaaagucaucgaaggcugguccaaaccuaacuccaaauuacagauaaauaggcaaguuauaguugaaagagguaacagguccgguuauucugguauuuucuccguugaaggcaaaagcugcaucaaucggugcuuuuauguggaguugauaaggggaaggaaagaggaaacugaagucugguggaccucaaacaguauuguuguguuuuguggcaccucagguacauauggaacaggcucauggccugauggggcggauaucaaucucaugccuauauaa

SEQ ID NO: 48037 - RNA, 1410 nt, Artificial Sequence; identical to SEQ ID NO: 47917
  derived and/or modified CDS sequence (wt) from neuraminidase__InfluenzaA__ABU92908

SEQ ID NO: 48038 - RNA, 1410 nt, Artificial Sequence
  derived and/or modified CDS sequence (wt) from neuraminidase__InfluenzaA__ABU92909
augaauccaaaucaaaagauaauaacaauuggcucuguuucucucaccauugccgcaauaugcuuccuuaugcaaauugccauccugguaacuacuguaacauugcauuucaagcagcaugaaugcaacucccccccaaacaaccaaguaaugcugugugaaccaacaauaauagaaagaaacauaacagagauaguguaucugaccaacaccaccauagagaaggaaauaugccccaaacuagcagaauacagaaauuggucaaagccgcaauguaacauuacaggauuugcaccuuuuucuaaggacaauucgauucggcuuuccgcugguggggacaucugggugacaagagaaccuuaugugucaugcgauccugacaaguguuaucaauuugcccuugggcagggaacaacacuaaacaacgggcauucaaaugacacaguacaugauaggaccccuuaccggacccuauugaugaaugaauuggguguuccauuucauuugggaaccaggcaagugugcauagcaugguccagcucaaguugucacgauggaaaagcguggcugcauguuuguguaacuggggaugauaaaaaugcaacugcuagcuucauuuacaaugggaggcuuguagauaguauugguucaugguccaaaaaaauacucagaacccaggagucggaaugcguuuguaucaauggaacuuguacagugguaaugacugauggaagcgcuucaggaaaagcugauacuaaaauacuauucauugaggaggggaaaaucguucauauuagcacauugucaggaagugcucagcaugucgaggagugcuccuguuauccucgauauccuggugucagaugugucugcagagacaacuggaaaggcuccaauaggcccauuguagauauaaauguaaaggauuauagcauuguuuccaguuaugugugcucaggacuuguuggagacacacccagaaaaaacgacagcuucagcaguagccauugccuagauccuaacaaugaggaagguggucauggagugaaaggcugggccuuugaugauggaaaugacguguggaugggaagaacgaucagcgagaaguuacgcucagguuaugaaaccuucaaagucaucgaaggcugguccaaaccaaacuccaaauuacagauaaauaggcaaguuauaguugaaagagguaacagguccgguuauucugguauuuucuccguugaaggcaaaagcugcaucaaucggugcuucuauguggaguugauaaggggaaggaaagaggaaacugaagucugguggaccucaaacaguauuguuguguuuuguggcaccucagguacauauggaacaggcucauggccugauggggcggauaucaaucucaugccuauauaa

SEQ ID NO: 48039 - RNA, 1410 nt, Artificial Sequence
  derived and/or modified CDS sequence (wt) from neuraminidase__InfluenzaA__ABU92910
augaauccaaaucaaaaaauaauaacgauuggcucuguuucucucaccauugccacaauaugcuuccuuacgcaaauugcuauccugauaacuacuguaacauugcauuucaagcaauaugaaugcaacucccccccaaacaaccaagugaugcugugugaaccaacaauaauagaaaggaacauaacagagauaguguaucugaccaacaccaccauagagaaggaaauaugccccaaacuagcagaauacagaaauuggucaaagccgcaauguaacauuacuggauuugcaccuuuuucuaaggacaauucgauucggcuuuccgcugguggggacaucuggguuacaagagaaccuuaugugucaugcgauccugacaaguguuaucaauuugcccuuggacagggaacaacacuaaacaacgggcauucaaaugacacaguacaugauaggaccccuuaucggacccuauugaugaaugaguuggguguuccauuucauuugggaaccaagcaagugugcauagcaugguccagcucaaguugucacgauggaaaagcauggcugcauguuuguguaacgggggaugauaaaaaugcaacugcuagcuucauuuacaaugggaggcuuguagauaguauagguucaugguccaaaaaaauccucaggacccaggagucggaaugcguuuguaucaaugggacuuguacaguaguaaugacugaugggagugcuucaggaaaagcugauacuaaaauacuauucauugaggaggggaaaaucguucauacuagccuauugucagggagugcucagcaugucgaggagugcuccuguuauccucgauauccuggugucagaugugucugcagagacaacuggaaaggcuccaauaggcccaucguagauauaaauguaagggauuauagcauuguuuccaguuaugugugcucaggacuuguuggagacacacccagaaaaaacgacagcuccagcaguagccauugcuuggauccuaacaaugaggaagguggucauggagugaaaggcugggccuuugaugauggaaaugacguguggaugggaagaacgaucagcgagaaguuacgcucaggauaugaaaccuucaaagucauugaaggcugguccaaaccuaacuccaaacugcagauaaauaggcaagucauaguugacaaagguaauagguccgguuauucugguauuuucucuguugaaggcaaaagcugcaucaaucggugcuuuuauguggaguugauaaggggaaggaaccaggaaacugaagucuuguggaccucaaacaguauuguuguguuuuguggcacuucagguacauauggaacaggcucauggccugauggggcggacaucaaucucaugccuauauaa

SEQ ID NO: 48040 - RNA, 1410 nt, Artificial Sequence
  derived and/or modified CDS sequence (wt) from neuraminidase__InfluenzaA__ABU92911
augaauccaaaucaaaagauaauaacgauuggcucuguuucucucaccauugccacaauaugcuuccuuacgcaaauugccauccugguaacuacuguaacauugcauuucaagcaauaugaaugcaacucccccccaaacaaccaagugaugcugugugaaccaacaauaauagaaagaaacauaacagagauaguguaucugacaaacaccaccauagagaaggaaauaugccccaaacaagcagaauacagaaauuggucaaagccgcaaugcaacauuacuggauuugcaccuuuuucuaaggacaauucgauucggcuuuccgcugguggggacaucuggguuacaagagaaccuuaugugucaugcgauccugacaaguguuaucaauuugcccuuggacagggaacaacacuaaacaacgggcauucaaaugacacaguacaugauaggaccccuuauaggacccuauugaugaaugaguuggguguuccauuucauuugggaaccaagcaagugugcauagcaugguccagcucaaguugucacgauggaaaagcauggcugcauguuuguguaacgggggaugauaaaaaugcaacugcuagcuucauuuacaaugggaggcuuguagauaguauagguucaugguccaaaaaaauccucaggacccaggagucggaaugcguuuguaucaauggaacuuguacaguaguaaugacugaugggagugcuucaggaaaagcugauacuaaaauacuauucauuaaggaggggaaaaucguucauacuagccuauugucagggagugcucagcaugucgaggagugcuccuguuauccucgauauccuggugucagaugugucugcagagacaacuggaaaggcuccaauaggcccaucguagauauaaauguaaaggauuauagcauuguuuccaguuaugugugcucaggacuuguuggagacacacccagaaaaaacgacagcuccagcaguagccauugcuuggauccuaacaaugaggaagguggucauggagugaaaggcugggccuuugaugauggaaaugacguguggaugggaagaacgaucagcgagaaguuacgcucaggauaugaaaccuucaaagucauugaaggcugguccaaaccuaacuccaaacugcagauaaauaggcaagucauaguugacagagauaauagguccgguuauucugguauuuucucuguugaaggcaaaagcugcaucaaucggugcuuuuauguggaguuaauaaggggaaggaaccaggaaacugaagucuuguggaccucaaacaguauuguuguguuuuguggcaccucagguacauauggaacaggcucauggccugauggggcggacaucaaucucaugccuauauaa

SEQ ID NO: 48041 - RNA, 1410 nt, Artificial Sequence
  derived and/or modified CDS sequence (wt) from neuraminidase__InfluenzaA__ABU92913
augaauccaaaucaaaaaauaauaacgauuggcucuguuucucucaccauugccacaauaugcuuccuuacgcaaauugccauccugguaacuacuguaacauugcauuucaagcaauaugaaugcaacucccccccaaacaaccaagugaugcugugugaaccaacaauaauagaaagaaacauaacagagauaguguaucugaccaacaccaccauagagaaggaaauaugccccaaacuagcagaauacagaaauuggucaaagccgcaaugcaacauuacuggauuugcaccuuuuucuaaggacaauucgauucggcuuuccgcugguggggacaucuggguuacaagagaaccuuaugugucaugcgauccugacaaguguuaucaauuugcccuuggacagggaacaacacuaaacaacgggcauucaaaugacacaguacaugauaggaccccuuauaggacccuauugaugaaugaguuggguguuccauuucauuugggaaccaagcaagugugcauagcaugguccagcucaaguugucacgauggaaaagcauggcugcauguuuguguaacgggggaugauaaaaaugcaacugcuagcuucauuuacaaugggaggcuuguagauaguauagguucaugguccaaaaaaauccucaggacccaggagucggaaugcguuuguaucaauggaacuuguacaguaguaaugacugaugggagugcuucaggaaaagcugauacuaaaauacuauucauuaaggaggggaaaaucguucauacuagccuauugucagggagugcucagcaugucgaggagugcuccuguuauccucgauauccuggugucagaugugucugcagagacaacuggaaaggcuccaauaggcccaucguagauauaaauguaaaggauuauagcauuguuuccaguuaugugugcucaggacuuguuggagacacacccagaaaaaacgacagcuccagcaguagccauugcuuggauccuaacaaugaggaagguggucauggagugaaaggcugggccuuugaugauggaaaugacguguggaugggaagaacgaucagcgagaaguuacgcucaggauaugaaaccuucaaagucauugaaggcugguccaaaccuaacuccaaacugcagauaaauaggcaagucauaguugacagagauaauagguccgguuauucugguauuuucucuguugaaggcaaaagcugcaucaaucggugcuuuuauguggaguuaauaaggggaaggaaccaggaaacugaagucuuguggaccucaaacaguauuguuguguuuuguggcaccucagguacauauggaacaggcucauggccugauggggcggacaucaaucucaugccuauauaa

SEQ ID NO: 48042 - RNA, 1413 nt, Artificial Sequence
  derived and/or modified CDS sequence (wt) from neuraminidase__InfluenzaA__ABV29560
augaauccaaaucaaaaaauaauaaccauuggaucaaucaguauagcaaucgggauaauuagucuaauguugcaaauaggaaauauuauuucaauaugggcuagucacucaauccaaacuggaagucaaaaccacacuggaauaugcaaccaaagaaucaucacauaugaaaacagcaccugggugaaucacacauauguuaguauuaacaacacuaauguuguugcuggaaaggacaaaacuucagugacauuggccggcaauucaucucuuuguucuaucaguggaugggcuauauacacaaaagacaacagcauaagaauuggcuccaaaggagauguuuuugucauaagagaaccuuucauaucauguucucauuuggaaugcaggaccuuuuuucugacccaaggugcucuauuaaaugacaaacauucaaauggaaccguuaaggaccgaaguccuuauagggccuuaaugagcuguccucuaggugaagcuccguccccauacaauucaaaguuugaaucaguugcauggucagcaagcgcaugccaugauggcaugggcugguuaacaaucggaauuucugguccagacaauggagcuguggcuguacuaaaauacaacggaauaauaacugaaaccauaaaaaguuggaaaaagcgaauauugagaacacaagagucugaaugugucugugugaacgggucauguuucaccauaaugaccgauggcccgaguaauggggccgccucguacaaaaucuucaagaucgaaaaggggaagguuacuaaaucaauagaguuaaaugcacccaauuuucauuaugaggaauguuccuguuacccagacacuggcacagugauguguguaugcagggacaauuggcaugguucaaaucgaccuugggugucuuuuaaucaaaacuuggauuaucaaauaggauacaucugcaguggaguguucggugacaauccgcgucccaaagauggaaagggcagcuguaauccagugacuguugauggagcagacgggguuaagggguuuucauacaaauaugguaaugguguuuggauaggaagaacuaaaaguaacagacuuagaaagggguuugagaugauuugggauccuaauggauggacagauaccgacagugauuucucagugaaacaggauguuguggcaauaacugauuggucaggguacaguggaaguuucguucaacauccugaguuaacaggauuggacuguauaagaccuugcuucuggguugaguuagucagaggacugccuagagaaaauacaacaaucuggacuagugggagcagcauuucuuuuuguggcguugauagugauacugcaaacuggucuuggccagacggugcugaguugccguucaccauugacaaguag

SEQ ID NO: 48043 - RNA, 1413 nt, Artificial Sequence
  derived and/or modified CDS sequence (wt) from neuraminidase__InfluenzaA__ABV29571
augaauccaaaucaaaaaauaauaaccauuggaucaaucaguauagcaaucgggauaauuagucuaauguugcaaauaggaaauauuauuucaauaugggcuagucacucaauccaaacuggaagucaaaaccacacuggaauaugcaaccaaagaaucaucacauaugaaaacagcaccugggugaaucacacauauguuaguauuaacaacacuaauguuguugcuggaaaggacaaaacuucagugacauuggccggcaauucaucucuuuguucuaucaguggaugggcuauauacacaaaagacaacagcauaagaauuggcuccaaaggagauguuuuugucauaagagaaccuuucauaucauguucucauuuggaaugcaggaccuuuuuucugacccaaggugcucuauuaaaugacaaacauucaaauggaaccguuaaggaccgaaguccuuauagggccuuaaugagcuguccucuaggugaagcuccguccccauacaauucaaaguuugaaucaguugcauggucagcaagcgcaugccaugauggcaugggcugguuaacaaucggaauuucugguccagacaauggagcuguggcuguacuaaaauacaacggaauaauaacugaaaccauaaaaaguuggaaaaagcgaauauugagaacacaagagucugaaugugucugugugaacgggucauguuucaccauaaugaccgauggcccgaguaauggggccgccucguacaaaaucuucaagaucgaaaaggggaagguuacuaaaucaauagaguuaaaugcacccaauuuucauuaugaggaauguuccuguuacccagacacuggcacagugauguguguaugcagggacaacuggcaugguucaaaucgaccuugggugucuuuuaaucaaaacuuggauuaucaaauaggauacaucugcaguggaguguuuggugacaauccgcgucccaaagauggaaagggcagcuguaauccagugacuguugauggagcagacgggguuaagggguuuucauacaaauaugguaaugguguuuggauaggaagaacuaaaaguaacagacuuagaaagggguuugagaugauuugggauccuaauggauggacagauaccgacagugauuucucagugaaacaggauguuguggcaauaacugauuggucaggguacaguggaaguuucguucaacauccugaguuaacaggauuggacuguauaagaccuugcuucuggguugaguuagucagaggacugccuagagaaaauacaacaaucuggacuagugggagcagcauuucuuuuuguggcguugauagugauacugcaaacuggucuuggccagacggugcugaguugccguucacuauugacaaguag

SEQ ID NO: 48044 - RNA, 1413 nt, Artificial Sequence; identical to SEQ ID NO: 48043
  derived and/or modified CDS sequence (wt) from neuraminidase__InfluenzaA__ABV29582

SEQ ID NO: 48045 - RNA, 1413 nt, Artificial Sequence
  derived and/or modified CDS sequence (wt) from neuraminidase__InfluenzaA__ABV29615
augaauccaaaucaaaaaauaauaaccauuggaucaaucaguauagcaaucgggauaauuagucuaauguugcaaauaggaaauauuauuucaauaugggcuagucacucaauccaaacuggaagucaaaaccacacuggaauaugcaaccaaagaaucaucacauaugaaaacagcaccugggugaaucacacauauguuaguauuaacaacacuaauguuguugcuggaaaggacaaaacuucagugacauuggccggcaauucaucucuuuguucuaucaguggaugggcuauauacacaaaagacaacagcauaagaauuggcuccaaaggagauguuuuugucauaagagaaccuuucauaucauguucucauuuggaaugcaggaccuuuuuucugacccaaggugcucuauuaaaugacaaacauucaaauggaaccguuaaggaccgaaguccuuauagggccuuaaugagcuguccucuaggugaagcuccguccccauacaauucaaaguuugaaucaguugcauggucagcaagcgcaugccaugauggcaugggcugguuaacaaucggaauuucugguccagacaauggagcuguggcuguacuaaaauacaacggaauaauaacugaaaccauaaaaaguuggaaaaagcgaauauugagaacacaagagucugaaugugucugugugaacgggucauguuucaccauaaugaccgauggcccgaguaauggggccgccucguacaaaaucuucaagaucgaaaaggggaagguuacuaaaucaauagaguuaaaugcacccaauuuucauuaugaggaauguuccuguuacccagacacuggcacagugauguguguaugcagggacaacuggcaugguucaaaucgaccuugggugucuuuuaaucaaaacuuggauuaucaaauaggauacaucugcaguggaguguucggugacaauccgcgucccaaagauggaaagggcagcuguaauccagugacuguugauggagcagacgggguuaagggguuuucauacaaauaugguaaugguguuuggauaggaagaacuaaaaguaacagacuuagaaagggguuugagaugauuugggauccuaauggauggacagauaccgacagugauuucucagugaaacaggauguuguggcaauaacugauuggucaggguacaguggaaguuucguucaacauccugaguuaacaggauuggacuguauaagaccuugcuucuggguugaguuagucagaggacugccuagagaaaauacaacaaucuggacuagugggagcagcauuucuuuuuguggcguugauagugauacugcaaacuggucuuggccagacggugcugaguugccguucaccauugacaaguag

SEQ ID NO: 48046 - RNA, 1413 nt, Artificial Sequence
  derived and/or modified CDS sequence (wt) from neuraminidase__InfluenzaA__ABV29637
augaauccaaaucaaaaaauaauaaccauuggaucaaucaguauagcaauuggaauaauuagucuaauguugcaaauaggaaauauuauuucaauaugggcuagucacucaauccaaacuggaagucaaaaccacacuggaauaugcaaccaaagaaucaucacauaugaaaacagcaccugggugaaucacacauauguuaauauuaacaacacuaauguuguugcuggaaaggacaaaacuucagugacauuggccggcaauucaucucuuuguucuaucaguggaugggcuauauacacaaaagacaacagcauaagaauuggcuccaaaggagauguuuuugucauaagagaaccuuucauaucauguucucauuuggaaugcaggaccuuuuuucugacccaaggugcucuauuaaaugacaaacauucaaauggaaccguuaaggacagaaguccuuauagggccuuaaugagcuguccucuaggugaagcuccguccccauacaauucaaaguuugaaucaguugcauggucagcaagcgcaugccaugauggcaugggcugguuaacaaucgggauuucugguccagacaauggagcuguggcuguacuaaaauacaacggaauaauaacugaaaccauaaaaaguuggaaaaagcgaauauugagaacacaggagucugaaugugucugugugaacgggucauguuucaccauaaugaccgauggcccgaguaaugggaccgccucguacaaaaucuucaagaucgaaaaggggaagguuacuaaaucaauagaguuaaaugcacccaauuuucauuaugaggaauguuccuguuacccagacacuggcacagugauguguguaugcagggauaacuggcaugguucaaaucgaccuugggugucuuuuaaucaaaacuuggauuaucaaguaggauacaucugcaguggaguguucggugacaauccgcgucccaaagauggaaagggcagcuguaauccaaugacuguugauggagcagacggaguuaagggguuuucauacaaauaugguaaugguguuuggauaggaaggacuaaaaguaacaaacuuagaaagggguuugagaugauuugggauccuaauggauggacagauaccgacagugauuucucagugaaacaggauguuguggcaauaucugauuggucaggguacaguggaaguuucguucaacauccugaguuaacaggauuggacuguauaagaccuugcuucuggguugaguuagucagaggacugccuagagaaaauacaacaaucuggacuagugggagcagcauuucuuuuuguggcguugauagugauacugcaaacuggucuuggccagacggugcugaguugccguucaccauugacaaauag

SEQ ID NO: 48047 - RNA, 1413 nt, Artificial Sequence
  derived and/or modified CDS sequence (wt) from neuraminidase__InfluenzaA__ABV29648
augaauccaaaucaaaaaauaauaaccauuggaucaaucaguauagcaaucgggauaauuagucuaauguugcaaauaggaaauauuauuucaauaugggcuagucacucaauccaaacuggaagucaaaaccacacuggaauaugcaaccaaagaaucaucacauaugaaaacagcaccugggugaaucacacauauguuaguauuaacaacacuaauguuguugcuggaaaggacaaaacuucagugacauuggccggcaauucaucucuuuguucuauuaguggaugggcuauauacacaaaagacaacagcauaagaauuggcuccaaaggagauguuuuugucauaagagaaccuuucauaucauguucucauuuggaaugcaggaccuuuuuucugacccaaggugcucuauuaaaugacaaacauucaaauggaaccguuaaggaccgaaguccuuauagggccuuaaugaguuguccucuaggugaagcuccguccccauacaauucaaaguuugaaucaguugcauggucagcaagcgcaugccaugauggcaugggcugguuaacaaucggaauuucugguccagacaauggagcuguggcuguacuaaaauacaacggaauaauaacugaaaccauaaaaaguuggaaaaagcgaauauugagaacacaagagucugaaugugucugugugaacgggucauguuucaccauaaugaccgauggcccgaguaauggggccgccucguacaaaaucuucaagaucgaaaaggggaagguuacuaaaucaauagaguuaaaugcacccaauuuucauuaugaggaauguuccuguuacccagacacuggcacagugauguguguaugcagggacaacuggcaugguucaaaucgaccuugggugucuuuuaaucaaaacuuggauuaucaaauaggauacaucugcaguggaguguucggugacaauccgcgucccaaagauggaaagggcagcuguaauccagugacuguugauggagcagacgggguuaagggguuuucauacaaauaugguaaugguguuuggauaggaagaacuaaaaguaacagacuuagaaagggguuugagaugauuugggauccuaauggauggacagauaccgacagugauuucucagugaaacaggauguuguggcaauaacugauuggucaggguacaguggaaguuucguucaacauccugaguuaacaggauuggacuguauaagaccuugcuucuggguugaguuagucagaggacugccuagagaaaauacaacaaucuggacuagugggagcagcauuucuuuuuguggcguugauagugauacugcaaacuggucuuggccagacggugcugaguugccguucaccauugacaaguag

SEQ ID NO: 48048 - RNA, 1413 nt, Artificial Sequence
  derived and/or modified CDS sequence (wt) from neuraminidase__InfluenzaA__ABV29659
augaauccaaaucaaaaaauaauaaccauuggaucaaucaguauagcaauagggauaauuagucuaauguugcaaauaggaaauauuauuucaauaugggcuagucacucaauccaaacuggaagucaaaaccacacuggaauaugcaaccaaagaaucaucacauaugaaaacagcaccugggugaaucacacauauguuaguauuaacaacacuaauguuguugcuggaaaggacaaaacuucagugacauuggccggcaauucaucucuuuguucuaucaguggaugggcuauauacacaaaagacaacagcauaagaauuggcuccaaaggagauguuuuugucauaagagaaccuuucauaucauguucucauuuggaaugcaggaccuuuuuucugacccaaggugcucuauuaaaugacaaacauucaaauggaaccguuaaggaccgaaguccuuauagggccuuaaugagcuguccucuaggugaagcuccguccccauacaauucaaaguuugaaucaguugcauggucagcaagcgcaugccaugauggcaugggcugguuaacaaucggaauuucugguccagacaauggagcuguggcuguacuaaaauacaacggaauaauaacugaaaccauaaaaaguuggaaaaagcgaauauugagaacacaagagucugaaugugucugugugaacgggucauguuucaccauaaugaccgauggcccgaguaauggggccgccucguacaaaaucuucaagaucgaaaaggggaagguuacuaaaucaauagaguuaaaugcacccaauuuucauuaugaggaauguuccuguuacccagacacuggcacagugauguguguaugcagggacaacuggcaugguucaaaucgaccuugggugucuuuuaaucaaaacuuggauuaucaaauaggauacaucugcaguggaguguucggugacaauccgcgucccaaagauggaaagggcagcuguaauccagugacuguugauggagcagacgggguuaagggguuuucauacaaauaugguaaugguguuuggauaggaagaacuaaaaguaacagacuuagaaagggguuugagaugauuugggauccuaauggauggacagauaccgacagugauuucucagugaaacaggauguuguggcaauaacugauuggucaggguacaguggaaguuucguucaacauccugaguuaacaggauuggacuguauaagaccuugcuucuggguugaguuagucagaggacugccuagagaaaauacaacaaucuggacuagugggagcagcauuucuuuuuguggcguugauagugauacugcaaacuggucuuggccagacggugcugaguugccguucaccauugacaaguag

SEQ ID NO: 48049 - RNA, 1413 nt, Artificial Sequence
  derived and/or modified CDS sequence (wt) from neuraminidase__InfluenzaA__ABV29670
augaauccaaaucaaaaaauaauaaccauuggaucaaucaguauagcaaucgggauaauuagucuaauguugcaaauaggaaauauuauuucaauaugggcuagucacucaauccaaacuggaagucaaaaccacacuggaauaugcaaccaaagaaucaucacauaugaaaacagcaccugggugaaucacacauauguuaguauuaacaacacuaauguuguugcuggaaaggacaaaacuucagugacauuggccggcaauucaucucuuuguucuaucaguggaugggcuauauacacaaaagacaacagcauaagaauuggcuccaaaggagauguuuuugucauaagagaaccuuucauaucauguucucauuuggaaugcaggaccuuuuuucugacccaaggugcucuauuaaaugacaaacauucaaauggaaccguuaaggaccgaaguccuuauagggccuuaaugagcuguccucuaggugaagcuccguccccauacaauucaaaguuugaaucaguugcauggucagcaagcgcaugccaugauggcaugggcugguuaacaaucggaauuucugguccagacaauggagcuguggcuguacuaaaauacaacggaauaauaacugaaaccauaaaaaguuggaaaaaacgaauauugagaacacaagagucugaaugugucugugugaacgggucauguuucaccauaaugaccgauggcccgaguaauggggccgccucguacaaaaucuucaagaucgaaaaggggaagguuacuaaaucaauagaguuaaaugcacccaauuuucauuaugaggaauguuccuguuacccagacacuggcacagugauguguguaugcagggacaacuggcaugguucaaaucgaccuugggugucuuuuaaucaaaacuuggauuaucaaauaggauacaucugcaguggaguguucggugacaauccgcgucccaaagauggaaagggcagcuguaauccagugacuguugauggagcagacgggguuaagggguuuucauacaaauaugguaaugguguuuggauaggaagaacuaaaaguaacagacuuagaaagggguuugagaugauuugggauccuaauggauggacagauaccgacagugauuucucagugaaacaggauguuguggcaauaacugauuggucaggguacaguggaaguuucguucaacauccugaguuaacaggauuggacuguauaagaccuugcuucuggguugaguuagucagaggacugccuagagaaaauacaacaaucuggacuagugggagcagcauuucuuuuuguggcguugauagugauacugcaaacuggucuuggccagacggugcugaguugccguucaccauugacaaguag

SEQ ID NO: 48050 - RNA, 1413 nt, Artificial Sequence
  derived and/or modified CDS sequence (wt) from neuraminidase__InfluenzaA__ABV29681
augaauccaaaucaaaaaauaauaaccauuggaucaaucaguauagcaaucgggauaauuagucuaauguugcaaauaggaaauauuauuucaauaugggcuagucacucaauccaaacuggaagucaaaaccacacuggaauaugcaaccaaagaaucaucacauaugaaaacagcaccugggugaaucacacauauguuaguauuaacaacacuaauguuguugcuggaaaggacaaaacuucagugacauuggccggcaauucaucucuuuguucuaucaguggaugggcuauauacacaaaagacaacagcauaagaauuggcuccaaaggagauguuuuugucauaagagaaccuuucauaucauguucucauuuggaaugcaggaccuuuuuucugacccaaggugcucuauuaaaugacaaacauucaaauggaaccguuaaggaccgaaguccuuauagggccuuaaugagcuguccucuaggugaagcuccguccccauacaauucaaaguuugaaucaguugcauggucagcaagcgcaugccaugauggcaugggcugguuaacaaucggaauuucugguccagacaauggagcuguggcuguacuaaaauacaacggaauaauaacugaaaccauaaaaaguuggaaaaagcgaauauugagaacacaagagucugaaugugucugugugaacgggucauguuucaccauaaugaccgauggcccgaguaauggggccgccucguacaaaaucuucaagaucgaaaaggggaagguuacuaaaucaauagaguuaaaugcacccaauuuucauuaugaggaauguuccuguuacccagacacuggcacagugauguguguaugcagggacaacuggcaugguucaaaucgaccuugggugucuuuuaaucaaaacuuggauuaucaaauaggauacaucugcaguggaguguucggugacaauccgcgucccaaagauggaaagggcagcuguaauccagugacuguugauggagcagacgggguuaagggguuuucauacaaauaugguaaugguguuuggauaggaagaacuaaaaguaacagacuuagaaagggguuugagaugauuugggauccuaauggauggacagauaccgacagugauuucucagugaaacaggauguuguggcaauaacugauuggucaggguacaguggaaguuucguucaacauccugaguuaacaggauuggacuguauaagaccuugcuucuggguugaguuagucagaggacugccuagagaaaauacaacaaucuggacuagugggagcagcauuucuuuuuguggcauugauagugauacugcaaacuggucuuggccagacggugcugaguugccguucaccauugacaaguag

SEQ ID NO: 48051 - RNA, 1413 nt, Artificial Sequence
  derived and/or modified CDS sequence (wt) from neuraminidase__InfluenzaA__ABV29692
augaauccaaaucaaaaaauaauaaccauuggaucaaucaguauagcaaucgggauaauuagucuaauguugcaaauaggaaauauuauuucaauaugggcuagucacucaauccaaacuggaagucaaaaccacacuggaauaugcaaccaaagaaucaucacauaugaaaacagcaccugggugaaucacacauauguuaguauuaacaacacuaauguuguugcuggaaaggacaaaacuucagugacauuggccggcaauucaucucuuuguucuaucaguggaugggcuauauacacaaaagacaacagcauaagaauuggcuccaaaggagauguuuuugucauaagagaaccuuucauaucauguucucauuuggaaugcaggaccuuuuuucugacccaaggugcucuauuaaaugacaaacauucaaauggaaccguuaaggaccgaaguccuuauagggccuuaaugagcuguccucuaggugaagcuccguccccauacaauucaaaguuugaaucaguugcauggucagcaagcgcaugccaugauggcaugggcugguuaacaaucggaauuucugguccagacaauggagcuguggcuguacuaaaauacaacggaauaauaacugaaaccauaaaaaguuggaaaaagagaauauugagaacacaagagucugaaugugucugugugaacgggucauguuucaccauaaugaccgauggcccgaguaauggggccgccucguacaaaaucuucaagaucgaaaaggggaagguuacuaaaucaauagaguuaaaugcacccaauuuucauuaugaggaauguuccuguuacccagacacuggcacagugauguguguaugcagggacaacuggcaugguucaaaucgaccuugggugucuuuuaaucaaaacuuggauuaucaaauaggauacaucugcaguggaguguuuggugacaauccgcgucccaaagauggaaagggcagcuguaauccagugacuguugauggagcagacgggguuaagggguuuucauacaaauaugguaaugguguuuggauaggaagaacuaaaaguaacagacuuagaaaaggguuugagaugauuugggauccuaauggauggacagauaccgacagugauuucucagugaaacaggauguuguggcaauaacugauuggucaggguacaguggaaguuucguucaacauccugaguuaacaggauuggacuguauaagaccuugcuucuggguugaguuagucagaggacugccuagagaaaauacaacaaucuggacuagugggagcagcauuucuuuuuguggcguugauagugauacugcaaacuggucuuggccagacggugcugaguugccguucacuauugacaaguag

SEQ ID NO: 48052 - RNA, 1413 nt, Artificial Sequence
  derived and/or modified CDS sequence (wt) from neuraminidase__InfluenzaA__ABV29703
augaauccaaaucaaaaaauaauaaccauuggaucaaucaguauagcaaucgggauaauuagucuaauguugcaaauaggaaauauuauuucaauaugggcuagucacucaauccaaacuggaagucaaaaccacacuggaauaugcaaccaaagaaucaucacauaugaaaacagcaccugggugaaucacacauauguuaguauuaacaacacuaauguuguugcuggaaaggacaaaacuucagugacauuggccggcaauucaucucuuuguucuaucaguggaugggcuauauacacaaaagacaacagcauaagaauuggcuccaaaggagauguuuuugucauaagagaaccuuucauaucauguucucauuuggaaugcaggaccuuuuuucugacccaaggugcucuauuaaaugacaaacauucaaauggaaccguuaaggaccgaaguccuuauagggccuuaaugagcugcccucuaggugaagcuccguccccauacaauucaaaguuugaaucaguugcauggucagcaagcgcaugccaugauggcaugggcugguuaacaaucggaauuucugguccagacaauggagcuguggcuguacuaaaauacaacggaauaauaacugaaaccauaaaaaguuggaaaaagcgaauauugagaacacaagagucugaaugugucugugugaacgggucauguuucaccauaaugaccgauggcccgaguaauggggccgccucguacaaaaucuucaaaaucgaaaaggggaagguuacuaaaucaauagaguuaaaugcacccaauuuucauuaugaggaauguuccuguuacccagacacuggcacagugauguguguaugcagggacaacuggcaugguucaaaucgaccuugggugucuuuuaaucaaaacuuggauuaucaaauaggauacaucugcaguggaguguucggugacaauccgcgucccaaagauggaaagggcagcuguaauccagugacuguugauggagcagacgggguuaagggguuuucauacaaauaugguaaugguguuuggauaggaagaacuaaaaguaacagacuuagaaagggguuugagaugauuugggauccuaauggauggacagauaccgacagugauuucucagugaaacaggauguuguggcaauaacugauuggucaggguacaguggaaguuucguucaacauccugaguuaacaggauuggacuguauaagaccuugcuucuggguugaguuagucagaggacugccuagagaaaauacaacaaucuggacuagugggagcagcauuucuuuuuguggcguugauagugauacugcaaacuggucuuggccagacggugcugaguugccguucaccauugacaaguag

SEQ ID NO: 48053 - RNA, 1410 nt, Artificial Sequence
  derived and/or modified CDS sequence (wt) from neuraminidase__InfluenzaA__ABV29714
augaauccaaaucaaaagauaauaacgauuggcucuguuucucucaccauuuccacaauaugcuucuucaugcaaauugccaucuugauaacuacuguaacauugcauuucaagcaauaugaauucaacucccccccaaacaaccaagugaugcugugugaaccaacaauaauagaaagaaacauaacagaaauaguguaucugaccaacaccaccauagagaaggaaauaugccccaaacuagcagaauacagaaauuggucaaagccgcaaugugacauuacaggauuugcaccuuuuucuaaggacaauucgauuaggcuuuccgcugguggggacaucugggugacaagagaaccuuaugugucaugcgauccugacaaguguuaucaauuugcccuuggacagggaacaacacuaaacaacgugcauucaaaugacacaguacgugauaggaccccuuaucggacccuauugaugaaugaguuagguguuccuuuucaucuggggaccaagcaagugugcauagcaugguccagcucaaguugucacgauggaaaagcauggcugcauguuuguauaacgggggaugauaaaaaugcaacugcuagcuucauuuacaaugggaggcuuguagauaguauuguuucaugguccaaagaaauccucaggacccaggagucagaaugcguuuguaucaauggaacuuguacaguaguaaugacugaugggagugcuucaggagaagcugauacuaaaauacuauucauugaggaggggaaaaucguucauacuagcacauugucaggaagugcucagcaugucgaggagugcuccugcuauccucgauauccuggugucagaugugucugcagagacaacuggaaaggcuccaauaggcccaucguagauauaaacauaaaggaucauagcauuguuuccaguuauguguguucaggacuuguuggagacacacccagaaaaaacgacagcuccagcaguagccauuguuuggauccuaacaaugaagaagguggucauggagugaaaggcugggccuuugaugauggaaaugacguguggaugggaagaacgaucagcgagaagucacgcuuaggguaugaaaccuucaaagucauugaaggcugguccaacccuaaguccaaauugcagauaaauaggcaagucauaguugacagagguaauagguccgguuauucugguauuuucucuguugaaggcaaaagcugcaucaaucggugcuuuuauguggaguugauaaggggaagaaaagaggaaacugaagucuuguggaccucaaacaguauuguuguguuuuguggcaccucagguacauauggaacaggcucauggccugauggggcggacaucaaucucaugccuauauaa

SEQ ID NO: 48054 - RNA, 1410 nt, Artificial Sequence
  derived and/or modified CDS sequence (wt) from neuraminidase__InfluenzaA__ABV29725
augaauccaaaucaaaagauaauaacgauuggcucuguuucucucaccauuuccacaauaugcuucuucaugcaaacugccaucuugauaacuacuguaacauugcauuucaagcaauaugaauucaacucccccccaaacaaccaagggaugcugugugaaccaacaauaauagaaagaaacauaacagagauaguguaucugaccaacaccaccauagagaaggaaauaugccccaaacuagcagaauacagaaauuggucaaagccgcaaugugacauuacaggauuugcaccuuuuucuaaggacaauucgauuaggcuuuccgcugguggggacaucugggugacaagagaaccuuaugugucaugcgauccugacaaguguuaucaauuugcccuuggacagggaacaacacuaaacaacgugcauucaaaugacacaguacgugauaggaccccuuaucggacccuauugaugaaugaguuagguguuccuuuucaucuggggaccaagcaagugugcauagcaugguccagcucaaguugucacgauggaaaagcauggcugcauguuuguauaacgggggaugauaaaaaugcaacugcuagcuucauuuacaaugggaggcuuguagauaguauuguuucaugguccaaagaaauccucaggacccaggagucagaaugcguuuguaucaauggaacuuguacaguaguaaugacugaugggagugcuucaggaaaagcugauacuaaaauacuauucauugaggaggggaaaaucguucauacuagcacauugucaggaagugcucagcaugucgaggagugcuccugcuuuccucgauauccuggugucagaugugucugcagagacaacuggaaaggcuccaauaggcccaucguagauauaaacauaaaggaucauagcauuguuuccaguuauguguguucaggacuuguuggagacacacccagaaaaaacgacagcuccagcaguagccauuguuuggauccuaauaaugaagaagguggucauggagugaaaggcugggccuuugaugauggaaaugacguguggaugggaagaacgaucagcgagaagucacgcuuaggguaugaaaccuucaaagucauugaaggcugguccaacccuaaguccaaauugcagauaaauaggcaagucauaguugacagagguaauagguccgguuauucugguauuuucucuguugaaggcaaaagcugcaucaaucggugcuuuuauguggaguugauaaggggaagaaaagaggaaacugaagucuuguggaccucaaacaguauuguuguguuuuguggcaccucagguacauauggaacaggcucauggccugauggggcggacaucaaucucaugccuauauaa

SEQ ID NO: 48055 - RNA, 1413 nt, Artificial Sequence
  derived and/or modified CDS sequence (wt) from neuraminidase__InfluenzaA__ABV29736
augaauccaaaucaaaaaauaauaaccauuggaucaaucaguauagcaaucggaauaauuagucuaauguugcaaauaggaaauauuauuucaauaugggcuagucacucaauccaaacuggaagucaaaaccacacuggaauaugcaaccaaagaaucaucacauaugaaaacagcaccugggugaaucacacauauguuaauauuaacaacacuaauguuguuacuggaaaggacaaaacuucagugacauuggccggcaauucaucucuuuguucuaucaguggaugggcuauauacacaaaagacaacagcauaagaauuggcuccaaaggagauguuuuugucauaagagaaccuuucauaucauguucucauuuggaaugcaggaccuuuuuucugacccaaggugcucuauuaaaugacaaacauucaaauggaaccguuaaggacagaaguccuuauagggccuuaaugagcuguccucuaggugaagcuccguccccauacaauucaaaguuugaaucaguugcauggucagcaagcgcaugccaugauggcaugggcugguuaacaaucggaauuucugguccagacaauggagcuguggcuguacuaaaauacaacggaauaauaacugaaaccauaaaaaguuggaaaaagcgaauauugagaacacaagagucugaaugugucugugugaacgggucauguuucacuauaaugaccgauggcccgagugauggggccgccucguacaaaaucuucaagaucgaaaaggggaagguuacuaaaucaauagaguuaaaugcacccaauuuucauuaugaggaauguuccuguuacccagacacuggcacagugauguguguaugcagggacaacuggcaugguucaaaucgaccuugggugucuuuuaaucaaaacuuggauuaucaaauaggauacaucugcaguggaguguucggugacaauccgcgucccaaagauggaaagggcagcuguaauccagugacuguugauggagcagacggaguuaagggguuuucauacaaauaugguaaugguguuuggauaggaaggacuaaaaguaacaaacuuagaaaaggguuugagaugauuugggauccuaauggauggacagauaccgacaaugauuucucagugaaacaggauguuguggcaauaacugauuggucaggguacaguggaaguuucguucaacauccugaguuaacaggauuggacuguauaagaccuugcuucuggguugaguuagucagaggacugccuagagaaaauacaacaaucuggacuagugggagcagcauuucuuuuuguggcguugauagugauacugcaaacuggucuuggccagacggugcugaguugccguucaccauugacaaauag

SEQ ID NO: 48056 - RNA, 1413 nt, Artificial Sequence
  derived and/or modified CDS sequence (wt) from neuraminidase__InfluenzaA__ABV29747
augaauccaaaucaaaaaauaauaaccauuggaucaaucaguauagcaaucgggauaauuagucuaauguugcaaauaggaaauauuauuucaauaugggcuagucacucaauccaaacuggaagucaaaaccacacuggaauaugcaaccaaagaaucaucacauaugaaaacagcaccugggugaaucacacauauguuaguauuaacaacacuaauguuguugcuggaaaggacaaaacuucagugacauuggccggcaauucaucucuuuguucuaucaguggaugggcuauauacacaaaagacaacagcauaagaauuggcuccaaaggagauguuuuugucauaagagaaccuuucauaucauguucucauuuggaaugcaggaccuuuuuucugacccaaggugcucuauuaaaugacaaacauucaaauggaaccguuaaggaccgaaguccuuauagggccuuaaugagcuguccucuaggugaagcuccguccccauacaauucaaaguuugaaucaguugcauggucagcaagcgcaugccaugauggcaugggcugguuaacaaucggaauuucugguccagacaauggagcuguggcuguacuaaaauacaacggaauaauaacugaaaccauaaaaaguuggaaaaagcgaauauugagaacacaagagucugaaugugucugugugaacgggucauguuucaccauaaugaccgauggcccgaguaauggggccgccucguacaaaaucuucaagaucgaaaaggggaagguuacuaaaucaauagaguuaaaugcacccaauuuucauuaugaggaguguuccuguuacccagacacuggcacagugauguguguaugcagggacaacuggcaugguucaaaucgaccuugggugucuuuuaaucaaaacuuggauuaucaaauaggauacaucugcaguggaguguucggugacaauccgcgucccaaagauggaaagggcagcuguaauccagugacuguugauggagcagacgggguuaagggguuuucauacaaauaugguaaugguguuuggauaggaagaacuaaaaguaacagacuuagaaagggguuugagaugauuugggauccuaauggauggacagauaccgacagugauuucucagugagacaggauguuguggcaauaacugauuggucaggguacaguggaaguuucguucaacauccugaguuaacaggauuggacuguauaagaccuugcuucuggguugaguuagucagaggacugccuagagaaaauacaacaaucuggacuagugggagcagcauuucuuuuuguggcguugauagugauacugcaaacuggucuuggccagacggugcugaguugccguucaccauugacaaguag

SEQ ID NO: 48057 - RNA, 1413 nt, Artificial Sequence
  derived and/or modified CDS sequence (wt) from neuraminidase__InfluenzaA__ABV29769
augaauccaaaucaaaaaauaauaaccauuggaucaaucaguauagcaaucgggauaauuagucuaauguugcaaauaggaaauauuauuucaauaugggcuagucacucaauccaaacuggaagucaaaaccacacuggaauaugcaaccaaagaaucaucacauaugaaaacagcaccugggugaaucacacauauguuaguauuaacaacacuaauguuguugcuggaaaggacaaaacuucagugacauuggccggcaauucaucucuuuguucuaucaguggaugggcuauauacacaaaagacaacagcauaagaauuggcuccaaaggagauguuuuugucauaagagaaccuuucauaucauguucucauuuggaaugcaggaccuuuuuucugacccaaggugcucuauuaaaugacaaacauucaaauggaaccguuaaggaccgaaguccuuauagggcccuaaugagcuguccucuaggugaagcuccgucuccauacaauucaaaguuugaaucaguugcauggucagcaagcgcaugccaugauggcaugggcugguuaacaaucggaauuucugguccagacaauggagcuguggcuguacuaaaauacaacggaauaauaacugaaaccauaaaaaguuggaaaaagcgaauauugagaacacaagagucugaaugugucugugugaacgggucauguuucaccauaaugaccgauggcccgaguaauggggccgccucguacaaaaucuucaagaucgaaaaggggaagguuacuaaaucaauagaguuaaaugcacccaauuuucauuaugaggaauguuccuguuacccagacacuggcacagugauguguguaugcagggacaacuggcaugguucaaaucgaccuugggugucuuuuaaucaaaacuuggauuaucaaauaggauacaucugcaguggaguguucggugacaauccgcgucccaaagauggaaagggcagcuguaauccagugacuguugauggagcagacgggguuaagggguuuucauacaaauaugguaaugguguuuggauaggaagaacuaaaaguaacagacuuagaaagggguuugagaugauuugggauccuaauggauggacagauaccgacagugauuucucagugaaacaggauguuguggcaauaacugauuggucaggguacaguggaaguuucguucaacauccugaguuaacaggauuggacuguauaagaccuugcuucuggguugaguuagucagaggacugccuagagaaaauacaacaaucuggacuagugggagcagcauuucuuuuuguggcguugauagugauacugcaaacuggucuuggccagacggugcugaguugccguucaccauugacaaguag

SEQ ID NO: 48058 - RNA, 1413 nt, Artificial Sequence
  derived and/or modified CDS sequence (wt) from neuraminidase__InfluenzaA__ABV29780
augaauccaaaucaaaaaauaauaaccauuggaucaaucaguauagcaaucggaauaauuaguuuaauguugcaaauaggaaauauuauuucaauaugggcuagucacucaauccaaacuggaagucaaaaccacacuggaauaugcaaccaaagaaucaucacauaugaaaacagcaccugggugaaccacacauauguuaauauuaacaacacuaauguuguuacuggaaaggacaaaacuucagugacauuggccggcaauucaucccuuuguucuaucaguggaugggcuauauacacaaaagacaacagcauaagaauuggcuccaaaggagauguuuuugucauaagagaaccuuucauaucauguucucauuuggaaugcaggaccuuuuuucugacccaaggugcucuauuaaaugacaaacauucaaauggaaccguuaaggacagaaguccuuauagggccuuaaugagcuguccucuaggugaagcuccguccccauacaauucaaaguuugaaucaguugcauggucagcaagcgcaugccaugauggcaugggcugguuaacaaucggaauuucugguccagacaauggagcuguggcuguacuaaaauacaacggaauaauaacugaaaccauaaaaaguuggaaaaagcgaauauugagaacacaagagucugaaugugucugugugaacggaucauguuucacuauaaugaccgauggcccgagugauggggccgccucguacaaaaucuucaagaucgaaaaggggaagguuacuaaaucaauagaguuaaaugcacccaauuuucauuaugaggaauguuccuguuacccagacacuggcacagugauguguguaugcagggacaacuggcaugguucaaaucgaccuugggugucuuuuaaucaaaacuuggauuaucaaauaggauacaucugcaguggaguguucggugacaauccgcgucccaaagauggaaagggcagcuguaauccagugacuguugauggagcagacggaguuaagggguuuucauacaaauaugguaaugguguuuggauaggaaggacuaaaaguagcaaacuuagaaaaggguuugagaugauuugggauccuaauggauggacagauaccgacaaugauuucucagugaaacaggauguuguggcaauaacugauuggucaggguacaguggaaguuucguucaacauccugaguuaacaggauuggacuguauaaggccuugcuucuggguugaguuagucagaggacugccuagagaaaauacaacaaucuggacuagugggagcagcauuucuuuuuguggcguugauagugauacugcaaacuggucuuggccagacggugcugaguugccguucaccauugacaaauag

SEQ ID NO: 48059 - RNA, 1413 nt, Artificial Sequence
  derived and/or modified CDS sequence (wt) from neuraminidase__InfluenzaA__ABV29791
augaauccaaaucaaaaaauaauaaccauuggaucaaucaguauagcaaucgggauaauuagucuaauguugcaaauaggaaauauuauuucaauaugggcuagucacucaauccaaacuggaagucaaaaccacacuggaauaugcaaccaaagaaucaucacauaugaaaacagcaccugggugaaucacacauauguuaguauuaacaacacuaauguuguugcuggaaaggacaaaacuucagugacauuggccggcaauucaucucuuuguucuauuaguggaugggcuauauacacaaaagacaacagcauaagaauuggcuccaaaggagauguuuuugucauaagagaaccuuucauaucauguucucauuuggaaugcaggaccuuuuuucugacccaaggugcucuauuaaaugacaaacauucaaauggaaccguuaaggaccgaaguccuuauagggccuuaaugagcuguccucuaggugaagcuccguccccauacaauucaaaguuugaaucaguugcauggucagcaagcgcaugccaugauggcaugggcugguuaacaaucggaauuucugguccagacaauggagcuguggcuguacuaaaauacaacggaauaauaacugaaaccauaaaaaguuggaaaaagcgaauauugagaacacaagagucugaaugugucugugugaacgggucauguuucaccauaaugaccgauggcccgaguaauggggccgccucguacaaaaucuucaagaucgaaaaggggaagguuacuaaaucaauagaguuaaaugcacccaauuuucauuaugaggaauguuccuguuacccagacacuggcacagugauguguguaugcagggacaacuggcaugguucaaaucgaccuugggugucuuuuaaucaaaacuuggauuaucaaauaggauacaucugcaguggaguguucggugacaauccgcgucccaaagauggaaagggcagcuguaauccagugacuguugauggagcagacgggguuaagggguuuucauacaaauaugguaaugguguuuggauaggaagaacuaaaaguaacagacuuagaaagggguuugagaugauuugggauccuaauggauggacagauaccgacagugauuucucagugaaacaggauguuguggcaauaacugauuggucaggguacaguggaaguuucguucaacauccugaguuaacaggauuggacuguauaagaccuugcuucuggguugaguuagucagaggacugccuagagaaaauacaacaaucuggacuagugggagcagcauuucuuuuuguggcguugauagugauacugcaaacuggucuuggccagacggugcugaguugccguucaccauugacaaguag

SEQ ID NO: 48060 - RNA, 1413 nt, Artificial Sequence
  derived and/or modified CDS sequence (wt) from neuraminidase__InfluenzaA__ABV29802
augaauccaaaucaaaaaauaauaaccauuggaucaaucaguauagcaaucgggauaauuagucuaauguugcaaauaggaaauauuauuucaauaugggcuagucacucaauccaaacuggaagucaaaaccacacuggaauaugcaaccaaagaaucaucacauaugaaaacagcaccugggugaaucacacauauguuaguauuaacaacacuaauguuguugcuggaaaggacaaaacuucagugacauuggccggcaauucaucucuuuguucuaucaguggaugggcuauauacacaaaagacaacagcauaagaauuggcuccaaaggagauguuuuugucauaagagaaccuuucauaucauguucucauuuggaaugcaggaccuuuuuucugacccaaggugcucuauuaaaugacaaacauucaaauggaaccguuaaggaccgaaguccuuauagggccuuaaugagcuguccucuaggugaagcuccguccccauacaauucaaaguuugaaucaguugcauggucagcaagcgcaugccaugauggcaugggcugguuaacaaucggaauuucugguccagacaauggagcuguggcuguacuaaaauacaacggaauaauaacugaaaccauaaaaaguuggaaaaagcgaauauugagaacacaagagucugaaugugucugugugaacgggucauguuucaccauaaugaccgauggcccgaguaauggggccgccucguacaaaaucuucaaaaucgaaaaggggaagguuacuaaaucaauagaguuaaaugcacccaauuuucauuaugaggaauguuccuguuacccagacacuggcacagugauguguguaugcagggacaacuggcaugguucaaaucgaccuugggugucuuuuaaucaaaacuuggauuaucaaauaggauacaucugcaguggaguguucggugacaauccgcgucccaaagauggaaagggcagcuguaauccagugacuguugauggagcagacgggguuaagggguuuucauacaaauaugguaaugguguuuggauaggaagaacuaaaaguaacagacuuagaaagggguuugagaugauuugggauccuaauggauggacagauaccgacagugauuucucagugaaacaggauguuguggcaauaacugauuggucaggguacaguggaaguuucguucaacauccugaguuaacaggauuggacuguauaagaccuugcuucuggguugaguuagucagaggacugccuagagaaaauacaacaaucuggacuagugggagcagcauuucuuuuuguggcguugauagugauacugcaaacuggucuuggccagacggugcugaguugccguucaccauugacaaguag

SEQ ID NO: 48061 - RNA, 1410 nt, Artificial Sequence
  derived and/or modified CDS sequence (wt) from neuraminidase__InfluenzaA__ABV29824
augaauccaaaucaaaagauaauaacgauuggcucuguuucucucaccauuuccacaauaugcuucuucaugcaaauugccaucuugauaacuacuguaacauugcauuucaagcaauaugaauucaacucccccccaaacaaccaagugaugcugugugaaccaacaauaauagaaagaaacauaacagagauaguguaucugaccaacaccaccauagagaaggaaauaugccccaaacuagcagaauacagaaauuggucaaagccgcaaugugacauuacaggauuugcaccuuuuucuaaggacaauucgauuaggcuuuccgcugguggggacaucugggugacaagagaaccuuaugugucaugcgauccugacaaguguuaucaauuugcccuuggacagggaacaacacuaaacaacgugcauucaaaugacacaguacgugauaggaccccuuaucggacccuauugaugaaugaguuagguguuccuuuucaucuggggaccaagcaagugugcauagcaugguccagcucaaguugucacgauggaaaagcauggcugcauguuuguauaacgggggaugauaaaaaugcaacugcuagcuucauuuacaaugggaggcuuguagauaguauuguuucaugguccaaagaaauccucaggacccaggagucagaaugcguuuguaucaauggaacuuguacaguaguaaugacugaugggagugcuucaggaaaagcugauacuaaaauacuauucauugaggaggggaaaaucguucauacuagcacauugucaggaagugcucagcaugucgaggagugcuccugcuauccucgauauccuggugucagaugugucugcagagacaacuggaaaggcuccaauaggcccaucguagauauaaacauaaaggaucauagcauuguuuccaguuauguguguucaggacuuguuggagacacacccagaaaaaacgacagcuccagcaguagccauuguuuggauccuaacaaugaagaagguggucauggagugaaaggcugggccuuugaugauggaaaugacguguggaugggaagaacgaucagcgagaagucacgcuuaggguaugaaaccuucaaagucauugaaggcugguccaacccuaaguccaaauugcagauaaauaggcaagucauaguugacagagguaauagguccgguuauucugguauuuucucuguugaaggcaaaagcugcaucaaucggugcuuuuauguggaguugauaaggggaagaaaagaggaaacugaagucuuguggaccucaaacaguauuguuguguuuuguggcaccucagguacauauggaacaggcucauggccugauggggcggacaucaaucucaugccuauauaa

SEQ ID NO: 48062 - RNA, 1413 nt, Artificial Sequence
  derived and/or modified CDS sequence (wt) from neuraminidase__InfluenzaA__ABV29835
augaauccaaaucaaaaaauaauaaccauuggaucaaucaguauagcaaucgggauaauuagucuaauguugcaaauaggaaauauuauuucaauaugggcuagucacucaauccaaacuggaagucaaaaccacacuggaauaugcaaccaaagaaucaucacauaugaaaacagcaccugggugaaucacacauauguuaguauuaacaacacuaauguuguugcuggaaaggacaaaacuucagugacauuggccggcaauucaucucuuuguucuaucaguggaugggcuauauacacaaaagacaacagcauaagaaucggcuccaaaggagauguuuuugucauaagagaaccuuucauaucauguucucauuuggaaugcaggaccuuuuuucugacccaaggugcucuauuaaaugacaaacauucaaauggaaccguuaaggaccgaaguccuuauagggccuuaaugagcuguccucuaggugaagcuccguccccauacaauucaaaguuugaaucaguugcauggucagcaagcgcaugccaugauggcaugggcugguuaacaaucggaauuucugguccagacaauggagcuguggcuguacuaaaauacaacggaauaauaacugaaaccauaaaaaguuggaaaaagcgaauauugagaacacaagagucugaaugugucugugugaaugggucauguuucaccauaaugaccgauggcccgaguaauggggccgccucguacaaaaucuucaagaucgaaaaggggaagguuacuaaaucaauagaguuaaaugcacccaauuuucauuaugaggaauguuccuguuacccagacacuggcacagugauguguguaugcagggacaacuggcaugguucaaaucgaccuugggugucuuuuaaucaaaacuuggauuaucaaauaggauacaucugcaguggaguguuuggugacaauccgcgucccaaagauggaaagggcagcuguaauccagugacuguugauggagcagacgggguuaagggguuuucauacaaauaugguaaugguguuuggauaggaagaacuaaaaguaacagacuuagaaagggguuugagaugauuugggauccuaauggauggacagauaccgacagugauuucucagugaaacaggauguuguggcaauaacugauuggucaggguacaguggaaguuucguucaacauccugaguuaacaggauuggacuguauaagaccuugcuucuggguugaguuagucagaggacugccuagagaaaauacaacaaucuggacuagugggagcagcauuucuuuuuguggcguugauagugauacugcaaacuggucuuggccagacggugcugaguugccguucacuauugacaaguag

SEQ ID NO: 48063 - RNA, 1413 nt, Artificial Sequence
  derived and/or modified CDS sequence (wt) from neuraminidase__InfluenzaA__ABV29846
augaauccaaaucaaaaaauaauaaccauuggaucaaucaguauagcaauuggaauaauuagucuaauguugcaaauaggaaauauuauuucaauaugggcuagucacucaauccaaauuggaagucaaaaccacacuggaauaugcaaccaaagaaucaucacauaugaaaacagcaccugggugaaucacacauauguuaauauuaacaacacuaauguuguugcuggaaaggacaaaacuucagugacauuggccggcaauucaucucuuuguucuaucaguggaugggcuauauacacaaaagacaacagcauaagaauuggcuccaaaggagauguuuuugucauaagagaaccuuucauaucauguucucauuuggaaugcaggaccuuuuuucugacccaaggugcucuauuaaaugacaaacauucaaauggaaccguuaaggacagaaguccuuauagggccuuaaugagcuguccucuaggugaagcuccguccccauacaauucaaaguuugaaucaguugcauggucagcaagcgcaugccaugauggcaugggcugguuaacaaucgggauuucugguccagacaauggagcuguggcuguacuaaaauacaacggaauaauaacugaaaccauaaaaaguuggaaaaagcgaauauugagaacacaggagucugaaugugucugugugaacgggucauguuucaccauaaugaccgauggcccgaguaauggggccgccucguacaaaaucuucaagaucgaaaaggggaagguuacuaaaucaauagaguuaaaugcacccaauuuucauuaugaggaauguuccuguuacccagacacuggcacagugauguguguaugcagggauaacuggcaugguucaaaucgaccuuggguaucuuuuaaucaaaacuuggauuaucaaguaggauacaucugcaguggaguguucggugacaauccgcgucccaaagauggaaagggcagcuguaauccaaugacuguugauggagcagacggaguuaagggguuuucauacaaauaugguaaugguguuuggauaggaaggacuaaaaguaacaaacuuagaaagggguuugagaugauuugggauccuaauggauggacagauaccgacagugauuucucagugaaacaggauguuguggcaauaacugauuggucaggguacaguggaaguuucguucaacauccugaguuaacaggauuggacuguauaagaccuugcuucuggguugaguuagucagaggacugccuagagaaaauacaacaaucuggacuagugggagcagcauuucuuuuuguggcguugauagugacacugcaaacuggucuuggccagacggugcugaguugccguucaccauugacaaauag

SEQ ID NO: 48064 - RNA, 1413 nt, Artificial Sequence
  derived and/or modified CDS sequence (wt) from neuraminidase__InfluenzaA__ABV29879
augaauccaaaucaaaaaauaauaaccauuggaucaaucaguauagcaaucgggauaauuagucuaauguuacaaauaggaaauauuauuucaauaugggcuagucacucaauccaaacuggaagucaaaaccacacuggaauaugcaaccaaagaaucaucacauaugaaaacagcaccugggugaaucacacauauguuaguauuaacaacacuaauguuguugcuggaaaggacaaaacuucagugacauuggccggcaauucaucucuuuguucuaucaguggaugggcuauauacacaaaagacaacagcauaagaauuggcuccaaaggagauguuuuuaucauaagagaaccuuucauaucauguucucauuuggaaugcaggaccuuuuuucugacccaaggugcucuauuaaaugacaaacauucaaauggaaccguuaaggaccgaaguccuuauagggccuuaaugagcuguccucuaggugaagcuccguccccauacaauucaaaguuugaaucaguugcauggucagcaagcgcaugccaugauggcaugggcugguuaacaaucggaauuucugguccagacaauggagcuguggcuguacuaaaauacaacggaauaauaacugaaaccauaaaaaguuggaaaaagcgaauauugagaacacaagagucugaaugugucugugugaacgggucauguuucaccauaaugaccgauggcccgaguaauggggccgccucguacaaaaucuucaagaucgaaaaggggaagguuacuaaaucaauagaguuaaaugcacccaauuuucauuaugaggaauguuccuguuacccagacacuggcacagugauguguguaugcagggacaacuggcaugguucaaaucgaccuugggugucuuuuaaucaaaacuuggauuaucaaauaggauacaucugcaguggaguguucggugacaauccgcgucccaaagauggaaagggcagcuguaauccagugacuguugauggagcagacgggguuaagggguuuucauacaaauaugguaaugguguuuggauaggaagaacuaaaaguaacagacuuagaaagggguuugagaugauuugggauccuaauggauggacagauaccgacagugauuucucagugaaacaggauguuguggcaauaacugauuggucaggguacaguggaaguuucguucaacauccugaguuaacaggauuggacuguauaagaccuugcuucuggguugaguuagucagaggacugccuagagaaaauacaacaaucuggacuagugggagcagcauuucuuuuuguggcguugauagugauacugcaaacuggucuuggccagacggugcugaguugccguucaccauugacaaguag

SEQ ID NO: 48065 - RNA, 1413 nt, Artificial Sequence
  derived and/or modified CDS sequence (wt) from neuraminidase__InfluenzaA__ABV29890
augaauccaaaucaaaaaauaauaaccauuggaucaaucaguauagcaauagggauaauuagucuaauguugcaaauaggaaauauuauuucaauaugggcuagucacucaauccaaacuggaagucaaaaccacacuggaauaugcaaccaaagaaucaucacauaugaaaacagcaccugggugaaucacacauauguuaguauuaacaacacuaauguuguugcuggaaaggacaaaacuucagugacauuggccggcaauucaucucuuuguucuaucaguggaugggcuauauacacaaaagacaacagcauaagaauuggcuccaaaggagauguuuuugucauaagagaaccuuucauaucauguucucauuuggaaugcaggaccuuuuuucugacccaaggugcucuauuaaaugacaaacauucaaauggaaccguuaaggaccgaaguccuuauagggccuuaaugagcuguccucuaggugaagcuccguccccauacaauucaaaguuugaaucaguugcauggucagcaagcgcaugccaugauggcaugggcugguuaacaaucggaauuucugguccagacaauggagcuguggcuguacuaaaauacaacggaauaauaacugaaaccauaaaaaguuggaaaaagcgaauauugagaacacaagagucugaaugugucugugugaacgggucauguuucaccauaaugaccgauggcccgaguaauggggccgccucguacaaaaucuucaagaucgaaaaggggaagguuacuaaaucaauagaguuaaaugcacccaauuuucauuaugaggaauguuccuguuacccagacacuggcacagugauguguguaugcagggacaacuggcaugguucaaaucgaccuugggugucuuuuaaucaaaacuuggauuaucaaauaggauacaucugcaguggaguguucggugacaauccgcgucccaaagauggaaagggcagcuguaacccagugacuguugauggagcagacgggguuaagggguuuucauacaaauaugguaaugguguuuggauaggaagaacuaaaaguaacagacuuagaaagggguuugagaugauuugggauccuaauggauggacagauaccgacagugauuucucagugaaacaggauguuguggcaauaacugauuggucaggguacaguggaaguuucguucaacauccugaguuaacaggauuggacuguauaagaccuugcuucuggguugaguuagucagaggacugccuagagaaaauacaacaaucuggacuagugggagcagcauuucuuuuuguggcguugauagugauacugcaaacuggucuuggccagacggugcugaguugccguucaccauugacaaguag

SEQ ID NO: 48066 - RNA, 1410 nt, Artificial Sequence
  derived and/or modified CDS sequence (wt) from neuraminidase__InfluenzaA__ABV29901
augaauccaaaucaaaagauaauaacgauuggcucuguuucucucaccauuuccacaauaugcuucuucaugcaaauugccaucuugauaacuacuguaacauugcauuucaagcaauaugaauucaacucccccccaaacaaccaagugaugcugugugaaccaacaauaauagaaagaaacauaacagagauaguguaucugaccaacaccaccauagagaaggaaauaugccccaaacuagcagaauacagaaauuggucaaagccgcaaugugacauuacaggauuugcaccuuuuucuaaggacaauucgauuaggcuuuccgcugguggggacaucugggugacaagagaaccuuaugugucaugcgauccugacaaguguuaucaauuugcccuuggacagggaacaacacuaaacaacgugcauucaaaugacacaguacgugauaggaccccuuaucggacccuauugaugaaugaguuagguguuccuuuucaucuggggaccaagcaagugugcauagcaugguccagcucaaguugucacgauggaaaagcauggcugcauguuuguauaacgggggaugauaaaaaugcaacugcuagcuucauuuacaaugggaggcuuguggauaguauuguuucaugguccaaagaaauccucaggacccaggagucagaaugcguuuguaucaauggaacuuguacaguaguaaugacugaugggagugcuucaggaaaagcugauacuaaaauacuauucauugaggaggggaaaaucguucauacuagcacauugucaggaagugcucagcaugucgaggagugcuccugcuauccucgauauccuggugucagaugugucugcagagacaacuggaaaggcuccaauaggcccaucguagauauaaacauaaaggaucauagcauuguuuccaguuauguguguucaggacuuguuggagacacacccagaaaaaacgacagcuccagcaguagccauuguuuggauccuaacaaugaagaagguggucauggagugaaaggcugggccuuugaugauggaaaugacguguggaugggaagaacgaucagcgagaagucacgcuuaggguaugaaaccuucaaagucauugaaggcugguccaacccuaaguccaaauugcagauaaauaggcaagucauaguugacagagguaauagguccgguuauucugguauuuucucuguugaaggcaaaagcuguaucaaucggugcuuuuauguggaguugauaaggggaagaaaagaggaaacugaagucuuguggaccucaaacaguauuguuguguuuuguggcaccucagguacauauggaacaggcucauggccugauggggcggacaucaaucucaugccuauauaa

SEQ ID NO: 48067 - RNA, 1410 nt, Artificial Sequence
  derived and/or modified CDS sequence (wt) from neuraminidase__InfluenzaA__ABV29912
augaauccaaaucaaaagauaauaacgauuggcucuguuucucucaccauuuccacaauaugcuucuucaugcaaauugccaucuugauaacuacuguaacauugcauuucaagcaauaugaauucaacucccccccaaacaaccaagugaugcugugugaaccaacaauaauagaaagaaacauaacagagauaguguaucugaccaacaccaccauagagaaggaaauaugccccaaacuagcagaauacagaaauuggucaaagccgcaaugugacauuacaggauuugcaccuuuuucuaaggacaauucgauuaggcuuuccgcugguggggacaucugggugacaagagaaccuuaugugucaugcgauccugauaaguguuaucaauuugcccuuggacagggaacaacacuaaacaacgugcauucaaaugacacaguacaugauaggaccccuuaucggacccuauugaugaaugaguuagguguuccauuucaucuggggaccaagcaagugugcauagcaugguccagcucaaguugucaugauggaaaagcauggcugcauguuuguguaacuggggaugauaaaaaugcaacugcuagcuucauuuauaaugggaggcuuguggauaguauuguuucaugguccaaagauauccucaggacccaggagucagaaugcauuuguaucaauggaacuuguacaguaguaaugacugaugggagugcuucaggaaaagcugauacuaagauacuauucauugaggaggggaaaaucguucauacuagcacauugucaggaagugcucagcaugucgaggagugcuccugcuauccucgauauccuggugucagaugugucugcagagacaauuggaaaggcuccaauaggcccaucguagauauaaacauaaaggauuauagcauuguuuccaguuauguaugcucaggacuuguuggagacacacccagaaaaaaugacaguuccagcaguagccauugcuuggauccuaacaaugaagaagguggucauggagugaaaggcugggccuuugaugauggaaaugacguguggaugggaagaacgaucagcgagaaguuacgcuuaggauaugaaaccuucaaagucauugaaggcugguccaacccuaacuccaaauugcagauaaauaggcaagucauaguugacaaagguaauagguccggcuauucugguauuuucucuguugaaggcaaaagcugcaucaaucggugcuuuuauguggaguugauaaggggaagaaaagaggaaacugaagucuuguggaccucaaacaguauuguuguguuuuguggcaccucagguacauauggaacaggcucauggccugauggagcggacaucaaucucaugccuauauaa

SEQ ID NO: 48068 - RNA, 1413 nt, Artificial Sequence
  derived and/or modified CDS sequence (wt) from neuraminidase__InfluenzaA__ABV29923
augaauccaaaucaaaaaauaauaaccauuggaucgaucaguauagcaauuggaauaauuagucuaauguugcaaauaggaaauauuauuucaauaugggcuagucacucaauccaaacuggaagucaaaaccacacuggaauaugcaaccaaagaaucaucacauaugaaaacagcaccugggugaaucacacauauguuaauauuaacaacacuaauguuguugcuggaaaggacaaaacuucagugacauuggccggcaauucaucucuuuguucuaucaguggaugggcuauauacacaaaagacaacagcauaagaauuggcuccaaaggagauguuuuugucauaagagaaccuuucauaucauguucucauuuggaaugcaggaccuuuuuucugacccaaggugcucuauuaaaugacaaacauucaaauggaaccguuaaggacagaaguccuuauagggccuuaaugagcuguccucuaggugaagcuccguccccauacaauucaaaguuugaaucaguugcauggucagcaagcgcaugccaugauggcaugggcugguuaacaaucgggauuucugguccagacaauggagcuguggcuguacuaaaauacaacggaauaauaacugaaaccauaaaaaguuggaaaaagcgaauauugagaacacaggagucugaaugugucugugugaacgggucauguuucaccauaaugaccgauggcccgaguaauggggccgccucguacaaaaucuucaagaucgaaaaggggaagguuacuaaaucaauagaguuaaaugcacccaauuuucauuaugaggaauguuccuguuacccagacacuggcacagugauguguguaugcagggauaacuggcaugguucaaaucgaccuugggugucuuuuaaucaaaacuuggauuaucaaguaggauacaucugcaguggaguguucggugacaauccgcgucccaaagauggaaagggcagcuguaauccaaugacuguugauggagcagacggaguuaagggguuuucauacaaauaugguaaugguguuuggauaggaaggacuaaaaguaacaaacuuagaaagggguuugagaugauuugggauccuaauggauggacagauaccgacagugauuucucagugaaacaggauguuguggcaauaaccgauuggucaggguacaguggaaguuucguucaacauccugaguuaacaggauuggacuguauaagaccuugcuucuggguugaguuagucagaggacugccuagagaaaaugcaacaaucuggacuagugggagcagcauuucuuuuuguggcguugauagugauacugcaaauuggucuuggccagacggugcugaguugccguucaccauugacaaauag

SEQ ID NO: 48069 - RNA, 1410 nt, Artificial Sequence
  derived and/or modified CDS sequence (wt) from neuraminidase__InfluenzaA__ABV29934
augaauccaaaucaaaagauaauaacgauuggcucuguuucucucaccauuuccacaauaugcuucuucaugcaaauugccaucuugauaacuacuguaacauugcauuucaagcaauaugaauucaacucccccccaaacaaccaagugaugcugugugaaccaacaauaauagaaagaaacauaacagagauaguguaucugaccaacaccaccauagagaaggaaauaugccccaaacuagcagaauacagaaauuggucaaagccgcaaugugacauuacaggauuugcaccuuuuucuaaggacaauucgauuaggcuuuccgcugguggggacaucugggugacaagagaaccuuaugugucaugcgauccugacaaguguuaucaauuugcccuuggacagggaacaacacuaaacaacgugcauucaaaugacacaguacgugauaggaccccuuaucggacccuauugaugaaugaguuagguguuccuuuucaucuggggaccaagcaagugugcauagcaugguccagcucaaguugucacgauggaaaagcauggcugcauguuuguauaacgggggaugauaaaaaugcaacugcuagcuucauuuacaaugggaggcuuguagauaguauuguuucaugguccaaagaaauccucaggacccaggagucagaaugcguuuguaucaauggaacuuguacaguaguaaugacugaugggagugcuucaggaaaagcugauacuaaaauacuauucauugaggaggggaaaaucguucauacuagcacauugucaggaagugcucagcaugucgaggagugcuccugcuauccucgauauccuggugucagaugugucugcagagacaacuggaaaggcuccaauaggcccaucguagauauaaacauaaaggaucauagcauuguuuccaguuauguguguucaggacuuguuggagacacacccagaaaaaacgacagcuccagcaguagccauuguuuggauccuaacaaugaagaagguggucauggagugaaaggcugggccuuugaugauggaaaugacguguggaugggaagaacgaucagcgagaagucacgcuuaggguaugaaaccuucaaagucauugaaggcugguccaacccuaaguccaaauugcagauaaauaggcaagucauaguugacagagguaauaggaccgguuauucugguauuuucucuguugaaggcaaaagcugcaucaaucggugcuuuuauguggaguugauaaggggaagaaaagaggaaacugaagucuuguggaccucaaacaguauuguuguguuuuguggcaccucagguacauauggaacaggcucauggccugauggggcggacaucaaucucaugccuauauaa

SEQ ID NO: 48070 - RNA, 1413 nt, Artificial Sequence; identical to SEQ ID NO: 48055
  derived and/or modified CDS sequence (wt) from neuraminidase__InfluenzaA__ABV29945

SEQ ID NO: 48071 - RNA, 1413 nt, Artificial Sequence
  derived and/or modified CDS sequence (wt) from neuraminidase__InfluenzaA__ABV29956
augaauccaaaucaaaaaauaauaaccauuggaucaaucaguauagcaaucgggauaauuagucuaauguugcaaauaggaaauauuauuucaauaugggcuagucacucaauccaaacuggaagucaaaaccacacuggaauaugcaaccaaagaaucaucacauaugaaaacagcaccugggugaaucacacauauguuaguauuaacaacacuaauguuguugcuggaaaggacaaaacuucagugacauuggccggcaauucaucucuuuguucuaucaguggaugggcuauauacacaaaagacaacagcauaagaauuggcuccaaaggagauguuuuugucauaagagaaccuuucauaucauguucucauuuggaaugcaggaccuuuuuucugacccaaggugcucuauuaaaugacaaacauucaaauggaaccguuaaggaccgaaguccuuauagggccuuaaugagcuguccucuaggugaagcuccguccccauacaauucaaaguuugaaucaguugcauggucagcaagcgcaugccaugauggcaugggcugguuaacaaucggaauuucugguccagacaauggagcuguggcuguacuaaaauacaaaggaauaauaacugaaaccauaaaaaguuggaaaaagcgaauauugagaacacaagagucugaaugugucugugugaacgggucauguuucaccauaaugaccgauggcccgaguaauggggccgccucguacaaaaucuucaagaucgaaaaggggaagguuacuaaaucaauagaguuaaaugcacccaauuuucauuaugaggaauguuccuguuacccagacacuggcacagugauguguguaugcagggacaacuggcaugguucaaaucgaccuugggugucuuuuaaucaaaacuuggauuaucaaauaggauacaucugcaguggaguguuuggugacaauccgcgucccaaagauggaaagggcagcuguaauccagugacuguugauggagcagacgggguuaagggguuuucauacaaauaugguaaugguguuuggauaggaagaacuaaaaguaacagacuuagaaagggguuugagaugauuugggauccuaauggauggacagauaccgacagugauuucucagugaaacaggauguuguggcaauaacugauuggucaggguacaguggaaguuucguucaacauccugaguuaacaggauuggacuguauaagaccuugcuucuggguugaguuagucagaggacugccuagagaaaauacaacaaucuggacuagugggagcagcauuucuuuuuguggcguugauagugauacugcaaacuggucuuggccagacggugcugaguugccguucacuauugacaaguag

SEQ ID NO: 48072 - RNA, 1413 nt, Artificial Sequence
  derived and/or modified CDS sequence (wt) from neuraminidase__InfluenzaA__ABV29989
augaauccaaaucaaaaaauaauaaccauuggaucaaucaguauagcaaucgggauaauuagucuaauguugcaaauaggaaauauuauuucaauaugggcuagucacucaauccaaacuggaagucaaaaccacacuggaauaugcaaccaaagaaucaucacauaugaaaacagcaccugggugaaucacacauauguuaguauuaacaacacuaauguuguugcuggaaaggacaaaacuucagugacauuggccggcaauucaucucuuuguucuaucaguggaugggcuauauacacaaaagacaacagcauaagaauuggcuccaaaggagauguuuuugucaugagagaaccuuucauaucauguucucauuuggaaugcaggaccuuuuuucugacccaaggugcucuauuaaaugacaaacauucaaauggaaccguuaaggaccgaaguccuuauagggccuuaaugagcuguccucuaggugaagcuccguccccauacaauucaaaguuugaaucaguugcauggucagcaagcgcaugccaugauggcaugggcugguuaacaaucggaauuucugguccagacaauggagcuguggcuguacuaaaauacaacggaauaauaacugaaaccauaaaaaguuggaaaaagcgaauauugagaacacaagagucugaaugugucugugugaacgggucauguuucaccauaaugaccgauggcccgaguaauggggccgccucguacaaaaucuucaagaucgaaaaggggaagguuacuaaaucaauagaguuaaaugcacccaauuuucauuaugaggaauguuccuguuacccagacacuggcacagugauguguguaugcagggacaacuggcaugguucaaaucgaccuugggugucuuuuaaucaaaacuuggauuaucaaauaggauacaucugcaguggaguguucggugacaauccgcgucccaaagauggaaagggcagcuguaauccagugacuguugauggagcagacgggguuaagggguuuucauacaaauaugguaaugguguuuggauaggaagaacuaaaaguaacagacuuagaaagggguuugagaugauuugggauccuaauggauggacagauaccgacagugauuucucagugaaacaggauguuguggcaauaacugauuggucaggguacaguggaaguuucguucaacauccugaguuaacaggauuggacuguauaagaccuugcuucuggguugaguuagucagaggacugccuagagaaaauacaacaaucuggacuagugggagcagcauuucuuuuuguggcguugauagugauacugcaaacuggucuuggccagacggugcugaguugccguucaccauugacaaguag

SEQ ID NO: 48073 - RNA, 1413 nt, Artificial Sequence
  derived and/or modified CDS sequence (wt) from neuraminidase__InfluenzaA__ABV30000
augaauccaaaucaaaaaauaauaaccauuggaucaaucaguauagcaaucgggauaauuagucuaauguugcaaauaggaaauauuauuucaauaugggcuagucacucaauccaaacuggaagucaaaaccacacuggaauaugcaaccaaagaaucaucacauaugaaaacagcaccugggugaaucacacauauguuaguauuaacaacacuaauguuguugcuggaaaggacaaaacuucagugacauuggccggcaauucaucucuuuguucuaucaguggaugggcuauauacacaaaagacaacagcauaagaauuggcuccaaaggagauguuuuugucauaagagaaccuuucauaucauguucucauuuggaaugcaggaccuuuuuucugacccaaggugcucuauuaaaugacaaacauucaaauggaaccguuaaggaccgaaguccuuauagggccuuaaugagcuguccucuaggugaagcuccguccccauacaauucaaaguuugaaucaguugcauggucagcaagcgcaugccaugauggcaugggcugguuaacaaucggaauuucugguccagacaauggagcuguggcuguacuaaaauacaacggaauaauaacugaaaccauaaaaaguuggaaaaagcgaauauugagaacacaagagucugaaugugucugugugaacgggucauguuucaccauaaugaccgauggcccgaguaauggggccgccucguacaaaaucuucaaaaucgaaaaggggaagguuacuaaaucaauagaguuaaaugcacccaauuuucauuaugaggaauguuccuguuacccagacacuggcacagugauguguguaugcagggacaacuggcaugguucaaaucgaccuugggugucuuuuaaucaaaacuuggauuaucaaauaggauacaucugcaguggaguguucggugacaauccgcgucccaaagauggaaagggcagcuguaauccagugacuguugauggagcagacgggguuaagggguuuucauacaaauaugguaaugguguuuggauaggaagaacuaaaaguaacagacuuagaaagggguuugagaugauuugggauccuaauggauggacagauaccgacagugauuucucagugaaacaggauguuguggcaauaacugauuggucaggguacaguggaaguuucguucaacauccugaguuaacaggauuggacuguauaagaccuugcuucuggguugaguuagucagaggacugccuagggaaaauacaacaaucuggacuagugggagcagcauuucuuuuuguggcguugauagugauacugcaaacuggucuuggccagacggugcugaguugccguucaccauugacaaguag

SEQ ID NO: 48074 - RNA, 1413 nt, Artificial Sequence
  derived and/or modified CDS sequence (wt) from neuraminidase__InfluenzaA__ABV30011
augaauccaaaucaaaaaauaauaaccauuggaucaaucaguauagcaaucgggauaauuagucuaauguugcaaauaggaaauauuauuucaauaugggcuagucacucaauccaaacuggaagucaaaaccacacuggaauaugcaaccaaagaaucaucacauaugaaaacagcaccugggugaaucacacauauguuaguauuaacaacacuaauguuguugcuggaaaggacaaaacuucagugacauuggccggcaauucaucucuuuguucuauuaguggaugggcuauauacacaaaagacaacagcauaagaauuggcuccaaaggagauguuuuugucauaagagaaccuuucauaucauguucucauuuggaaugcaggaccuuuuuucugacccaaggugcucuauuaaaugacaaacauucaaauggaaccguuaaggaccgaaguccuuauagggccuuaaugagcuguccucuaggugaagcuccauccccauacaauucaaaguuugaaucaguugcauggucagcaagcgcaugccaugauggcaugggcugguuaacaaucggaauuucugguccagacaauggagcuguggcuguacuaaaauacaacggaauaauaacugaaaccauaaaaaguuggaaaaagcgaauauugagaacacaagagucugaaugugucugugugaacgggucauguuucaccauaaugaccgauggcccgaguaauggggccgccucguacaaaaucuucaagaucgaaaaggggaagguuacuaaaucaauagaguuaaaugcacccaauuuucauuaugaggaauguuccuguuacccagacacuggcacagugauguguguaugcagggacaacuggcaugguucaaaucgaccuugggugucuuuuaaucaaaacuuggauuaucaaauaggauacaucugcaguggaguguucggugacaauccgcgucccaaagauggaaagggcagcuguaauccagugacuguugauggagcagacgggguuaagggguuuucauacaaauaugguaaugguguuuggauaggaagaacuaaaaguaacagacuuagaaagggguuugagaugauuugggauccuaauggauggacagauaccgacagugauuucucagugaaacaggauguuguggcaauaacugauuggucaggguacaguggaaguuucguucaacauccugaguuaacaggauuggacuguauaagaccuugcuucuggguugaguuagucagaggacugccuagagaaaauacaacaaucuggacuagugggagcagcauuucuuuuuguggcguugauagugauacugcaaacuggucuuggccagacggugcugaguugccguucaccauugacaaguag

SEQ ID NO: 48075 - RNA, 1413 nt, Artificial Sequence; identical to SEQ ID NO: 48043
  derived and/or modified CDS sequence (wt) from neuraminidase__InfluenzaA__ABV30022

SEQ ID NO: 48076 - RNA, 1413 nt, Artificial Sequence
  derived and/or modified CDS sequence (wt) from neuraminidase__InfluenzaA__ABV30044
augaauccaaaucaaaaaauaauaaccauuggaucaaucaguauagcaauuggaauaauuagucuaauguugcaaauaggaaauauuauuucaauaugggcuagucacucaauccaaacuggaagucaaaaccacacuggaauaugcaaccaaagaaucaucacauaugaaaacagcaccugggugaaucacacauauguuaauauuaacaacacuaauguuguugcuggaaaggacaaaacuucagggacauuggccggcaauucaucucuuuguucuaucaguggaugggcuauauacacaaaagacaacagcauaagaauuggcuccaaaggagauguuuuugucauaagagaaccuuucauaucauguucucauuuggaaugcaggaccuuuuuucugacccaaggugcucuauuaaaugacaaacauucaaauggaaccguuaaggacagaaguccuuauagggccuuaaugagcuguccucuaggugaagcuccguccccauacaauucaaaguuugaaucaguugcauggucagcaagcgcaugccaugauggcaugggcugguuaacaaucgggauuucugguccagacaauggagcuguggcuguacuaaaauacaacggaauaauaacugaaaccauaaaaaguuggaaaaagcgaauauugagaacacaggagucugaaugugucugugugaacgggucauguuucaccauaaugaccgauggcccgaguaauggggccgccucguacaaaaucuucaagaucgaaaaggggaagguuacuaaaucaauagaguuaaaugcacccaauuuucauuaugaggaauguuccuguuacccagacacuggcacagugauguguguaugcagggauaacuggcaugguucaaaucgaccuugggugucuuuuaaucaaaacuuggauuaucaaguaggauacaucugcaguggaguguucggugacaauccgcgucccaaagauggaaagggcagcuguaauccaaugacuguugauggagcagacggaguuaagggguuuucauacaaauaugguaaugguguuuggauaggaaggacuaaaaguaacaaacuuagaaagggguuugagaugauuugggauccuaauggauggacagauaccgacagugauuucucagugaaacaggauguuguggcaauaacugauuggucaggguacaguggaagcuucguucaacauccugaguuaacaggauuggacuguauaagaccuugcuucuggguugaguuagucagaggacugccuagagaaaauacaacaaucuggacuagugggagcagcauuuccuuuuguggcguugauagugauacugcaaacuggucuuggccagacggugcugaguugccguucaccauugacaaauag

SEQ ID NO: 48077 - RNA, 1413 nt, Artificial Sequence
  derived and/or modified CDS sequence (wt) from neuraminidase__InfluenzaA__ABV30055
augaauccaaaucaaaaaauaauaaccauuggaucaaucaguauagcaauuggaauaauuagucuaauguugcaaauaggaaauauuauuucaauaugggcuagucacucaauccaaacuggaagucaaaaccacacuggaauaugcaaccaaagaaucaucacauaugaaaacagcaccugggugaaucacacauauguuaauauuaacaacacuaauguuguugcuggaaaggacaaaacuucagugacauuggccggcaauucaucucuuuguucuaucaguggaugggcuauauacacaaaagacaacagcauaagaauuggcuccaaaggagauguuuuugucauaagagaaccuuucauaucauguucucauuuggaaugcaggaccuuuuuucugacccaaggugcucuauuaaaugacaaacauucaaauggaaccguuaaggacagaaguccuuauagggccuuaaugagcuguccucuaggugaagcuccguccccauacaauucaaaguuugaaucaguugcauggucagcaagcgcaugccaugauggcaugggcugguuaacaaucgggauuucugguccagacaauggagcuguggcuguacuaaaauacaacggaauaauaacugaaaccauaaaaaguuggaaaaagcgaauauugagaacacaggagucugaaugugucugugugaacgggucauguuucaccauaaugaccgauggcccgaguaauggggccgccucguacaaaaucuucaagaucgaaaaggggaagguuacuaaaucaauagaguugaaugcacccaauuuucauuaugaggaauguuccuguuacccagacacuggcacagugauguguguuugcagggauaacuggcaugguucaaaucgaccuugggugucuuuuaaucaaaacuuggauuaucaaguaggauacaucugcaguggaguguucggugacaauccgcgucccaaagauggaaagggcagcuguaauccaaugacuguugauggagcagacggaguuaagggguuuucauacaaauaugguaaugguguuuggauaggaaggacuaaaaguaacaaacuuagaaagggguuugagaugauuugggauccuaauggauggacagauaccgacagugauuucucagugaaacaggauguuguggcaauaacugauuggucaggguacaguggaaguuucguucaacauccugaguuaacaggauuggacuguauaagaccuugcuucuggguugaguuagucagaggacugccuagagaaaauacaacaaucuggacuagugggagcagcauuucuuuuuguggcguugauagugauacugcaaacuggucuuggccagacggugcugaguugccguucaccauugacaaauag

SEQ ID NO: 48078 - RNA, 1410 nt, Artificial Sequence
  derived and/or modified CDS sequence (wt) from neuraminidase__InfluenzaA__ABV30077
augaauccaaaucaaaagauaauaacgauuggcucuguuucucucaccauuuccacaauaugcuucuucaugcaaacugccaucuugauaacuacuguaacauugcauuucaagcaauaugaauucaacucccccccaaacaaccaagugaugcugugugaaccaacaauaauagaaagaaacauaacagagauaguguaucugaccaacaccaccauagagaaggaaauaugccccaaacuagcagaauacagaaauuggucaaagccgcaaugugacauuacaggauuugcaccuuuuucuaaggacaauucgauuaggcuuuccgcugguggggacaucugggugacaagagaaccuuaugugucaugcgauccugacaaguguuaucaauuugcccuuggacagggaacaacacuaaacaacgugcauucaaaugacacaguacgugauaggaccccuuaucggacccuauugaugaaugaguuagguguuccuuuucaucuggggaccaagcaagugugcauagcaugguccagcucaaguugucacgauggaaaagcauggcugcauguuuguauaacgggggaugauaaaaaugcaacugcuagcuucauuuacaaugggaggcuuguagauaguauuguuucaugguccaaagaaauccucaggacccaggagucagaaugcguuuguaucaauggaacuuguacaguaguaaugacugaugggagugcuucaggaaaagcugauacuaaaauacuauucauugaggaggggaaaaucguucauacuagcacauugucaggaagugcucagcaugucgaggagugcuccugcuauccucgauauccuggugucagaugugucugcagagacaacuggaaaggcuccaauaggcccaucguagauauaaacauaaaggaucauagcauuguuuccaguuauguguguucaggacuuguuggagacacacccagaaaaaacgacagcuccagcaguagccauuguuuggauccuaacaaugaagaagguggucauggagugaaaggcugggccuuugaugauggaaaugacguguggaugggaagaacgaucagcgagaagucacgcuuaggguaugaaaccuucaaagucauugaaggcugguccaacccuaaguccaaauugcagauaaauagacaagucauaguugacagagguaauagguccgguuauucugguauuuucucuguugaaggcaaaagcugcaucaaucggugcuuuuauguggaguugauaaggggaagaaaagaggaaacugaagucuuguggaccucaaacaguauuguuguguuuuguggcaccucagguacauauggaacaggcucauggccugauggggcggacaucaaucucaugccuauauaa

SEQ ID NO: 48079 - RNA, 1413 nt, Artificial Sequence; identical to SEQ ID NO: 48060
  derived and/or modified CDS sequence (wt) from neuraminidase__InfluenzaA__ABV30088

SEQ ID NO: 48080 - RNA, 1413 nt, Artificial Sequence; identical to SEQ ID NO: 48073
  derived and/or modified CDS sequence (wt) from neuraminidase__InfluenzaA__ABV30099

SEQ ID NO: 48081 - RNA, 1413 nt, Artificial Sequence
  derived and/or modified CDS sequence (wt) from neuraminidase__InfluenzaA__ABV30110
augaauccaaaucaaaaaauaauaaccauuggaucaaucaguauagcaaucgggauaauuagucuaauguugcaaauaggaaauauuauuucaauaugggcuagucacucaauccaaacuggaagucaaaaccacacuggaauaugcaaccaaagaaucaucacauaugaaaacagcaccugggugaaucacacauauguuaguauuaacaacacuaauguuguugcuggaaaggacaaaacuucagugacauuggccggcaauucaucucuuuguucuaucaguggaugggcuauauacacaaaagacaacagcauaagaauuggcuccaaaggagauguuuuugucauaagagaaccuuucauaucauguucucauuuggaaugcaggaccuuuuuucugacccaaggugcucuauuaaaugacaaacauucaaauggaaccguuaaggaccgaaguccuuauagggccuuaaugagcuguccucuaggugaagcuccguccccauacaauucaaaguuugaaucaguugcauggucagcaagcgcaugccaugauggcaugggcugguuaacaaucggaauuucugguccagacaauggagcuguggcuguacuaaaauacaacggaauaauaacuggaaccauaaaaaguuggaaaaagcgaauauugagaacacaagagucugaaugugucugugugaacgggucauguuucaccauaaugaccgauggcccgaguaauggggccgccucguacaaaaucuucaagaucgaaaaggggaagguuacuaaaucaauagaguuaaaugcacccaauuuucauuaugaggaauguuccuguuacccagacacuggcacagugauguguguaugcagggacaacuggcaugguucaaaucgaccuugggugucuuuuaaucaaaacuuggauuaucaaauaggauacaucugcaguggaguguucggugacaauccgcgucccaaagauggaaagggcagcuguaauccagugacuguugauggagcagacgggguuaagggguuuucauacaaauaugguaaugguguuuggauaggaagaacuaaaaguaacagacuuagaaagggguuugagaugauuugggauccuaauggauggacagauaccgacagugauuucucagugaaacaggauguuguggcaauaacugauuggucaggguacaguggaaguuucguucaacauccugaguuaacaggauuggacuguauaagaccuugcuucuggguugaguuagucagaggacugccuagagaaaauacaacaaucuggacuagugggagcagcauuucuuuuuguggcguugauagugauacugcaaacuggucuuggccagacggugcugaguugccguucaccauugacaaguag

SEQ ID NO: 48082 - RNA, 1413 nt, Artificial Sequence; identical to SEQ ID NO: 48048
  derived and/or modified CDS sequence (wt) from neuraminidase__InfluenzaA__ABV30132

SEQ ID NO: 48083 - RNA, 1413 nt, Artificial Sequence
  derived and/or modified CDS sequence (wt) from neuraminidase__InfluenzaA__ABV30143
augaauccaaaucaaaaaauaauaaccauuggaucaaucaguauagcaaucggaauaauuagucuaauguugcaaauaggaaauauuauuucaauaugggcuagucacucaauccaaacuggaagucaaaaccacacuggaauaugcaaccaaagaaucaucacauaugaaaacagcaccugggugaaucacacauauguuaauauuaacaacacuaauguuguugcuggaaaggacaaaacuucagugacauuggccggcaauucaucucuuuguucuaucaguggaugggcuauauacacaaaagacaacagcauaagaauuggcuccaagggagauguuuuugucauaagagaaccuuuuauaucauguucucauuuggaaugcaggaccuuuuuucugacccaaggugcucuauuaaaugacaaacauucaaauggaaccguuaaggacagaaguccuuauagggccuuaaugagcuguccucuaggugaagcuccguccccauacaauucaaaguuugaaucaguugcauggucagcaagcgcaugccaugauggcaugggcugguuaacaaucggaauuucugguccagacaauggagcuguggcuguacuaaaauacaacggaauaauaacugaaaccauaaaaaguuggaaaaaacgaauauugagaacacaagagucugaaugugucugugugaacgggucuuguuucaccauaaugaccgauggcccgaguaauggggccgccucguacaaaaucuucaagaucgaaaagggaaagguuacuaaaucaauagaguuaaaugcacccaauuuucauuaugaggaauguuccuguuacccagacacuggcacagugauguguguaugcagagacaacuggcaugguucaaaucgaccuugggugucuuuuaaucaaaacuuggauuaucaaauaggauacaucugcaguggaguguucggugacaauccgcgucccaaagauggaaagggcagcuguaauccagugacuguugauggagcagacggaguuaagggguuuucauacaaauaugguaaugguguuuggauaggaagaacuaaaaguaacagacuuagaaagggguuugagaugauuugggauccuaauggauggacaaauaccgacagugauuucucagugaaacaggauguuguggcaauaacugauuggucaggguacaguggaaguuucguucaacauccugaguuaacaggauuggacuguauaagaccuugcuucuggguugaauuagucagaggacugccuagagaaaauacaacaaucuggacuagugggagcagcauuucuuuuuguggcguugauagugauacugcaaacuggucuuggccagacggugcugaguugccguucaccauugacaaauag

SEQ ID NO: 48084 - RNA, 1413 nt, Artificial Sequence
  derived and/or modified CDS sequence (wt) from neuraminidase__InfluenzaA__ABV30154
augaauccaaaucaaaaaauaauaaccauuggaucaaucaguauagcaauuggaauaauuagucuaauguugcaaauaggaaauauuauuucaauaugggcuagucacucaauccaaacuggaagucaaaaccacacuggaauaugcaaccaaagaaucaucacauaugaaaacagcaccugggugaaucacacauauguuaauauuaacaacacuaauguuguugcuggaaaggacaaaacuucagugacauuggccggcaauucaucucuuuguucuaucaguggaugggcuauauacacaaaagacaacagcauaagaauuggcuccaaaggagauguuuuugucauaagagaaccuuucauaucauguucucauuuggaaugcaggaccuuuuuucugacccaaggugcucuauuaaaugacaaacauucaaauggaaccguuaaggacagaaguccuuauagggccuuaaugagcuguccucuaggugaagcuccguccccauacaauucaaaguuugaaucaguugcauggucagcaagcgcaugccaugauggcaugggcugguuaacaaucgggauuucugguccagacaauggagcuguggcuguacuaaaauacaacggaauaauaacugaaaccauaaaaaguuggaaaaagcgaauauugagaacacaggagucugaaugugucugugugaacgggucauguuucaccauaaugaccgauggcccgaguaauggggccgccucguacaaaaucuucaagaucgaaaaggggaagguuacuaaaucaauagaguuaaaugcacccaauuuucauuaugaggaauguuccuguuacccagacacuggcacagugauguguguaugcagggauaacuggcaugguucaaaucgaccuugggugucuuuuaaucaaaacuuggauuaucaaguaggauacaucugcaguggaguguucggugacaauccgcgucccaaagauggaaagggcagcuguaauccaaugacuguugauggagcagacggaguuaagggguuuucauacaaauaugguaaugguguuuggauaggaaggacuaaaaguaacaaacuuagaaagggguuugaaaugauuugggauccuaauggauggacagauaccgacagugauuucucagugaaacaggauguuguggcaauaaccgauuggucaggguacaguggaaguuucguucaacauccugaguuaacaggauuggacuguauaagaccuugcuucuggguugaguuagucagaggacugccuagagaaaaugcaacaaucuggacuagugggagcagcauuucuuuuuguggcguugauagugauacugcaaacuggucuuggccagacggugcugaguugccguucaccauugacaaguag

SEQ ID NO: 48085 - RNA, 1413 nt, Artificial Sequence
  derived and/or modified CDS sequence (wt) from neuraminidase__InfluenzaA__ABV30165
augaauccaaaucaaaaaauaauaaccauuggaucaaucaguauagcaaucgggauaauuagucuaauguugcaaauaggaaauauuauuucaauaugggcuagucacucaauccaaacuggaagucaaaaccacacuggaauaugcaaccaaagaaucaucacauaugaaaacagcaccugggugaaucacacauauguuaguauuaacaacacuaauguuguugcuggaaaggacaaaacuucagugacauuggccggcaauuuaucucuuuguucuaucaguggaugggcuauauacacaaaagacaacagcauaagaauuggcuccaaaggagauguuuuugucauaagagaaccuuucauaucauguucucauuuggaaugcaggaccuuuuuucugacccaaggugcucuauuaaaugacaaacauucaaauggaaccguuaaggaccgaaguccuuauagggccuuaaugagcuguccucuaggugaagcuccguccccauacaauucaaaguuugaaucaguugcauggucagcaagcgcaugccaugauggcaugggcugguuaacaaucggaauuucugguccagacaauggagcuguggcuguacuaaaauacaacggaauaauaacugaaaccauaaaaaguuggaaaaagcgaauauugagaacacaagagucugaaugugucugugugaacgggucauguuucaccauaaugaccgauggcccgaguaauggggccgcaucguacaaaaucuucaagaucgaaaaggggaagguuacuaaaucaauagaguuaaaugcacccaauuuucauuaugaggaauguuccuguuacccagacacuggcacagugauguguguaugcagggacaacuggcaugguucaaaucgaccuugggugucuuuuaaucaaaacuuggauuaucaaauaggauacaucugcaguggaguguuuggugacaauccgcgucccaaagauggaaagggcagcuguaauccagugacuguugauggagcagacgggguuaagggguuuucauacaaauaugguaaugguguuuggauaggaagaacuaaaaguaacagacuuagaaagggguuugagaugauuugggauccuaauggauggacagauaccgacagugauuucucagugaaacaggauguuguggcaauaacugauuggucaggguacaguggaaguuucguucaacauccugaguuaacaggauuggacuguauaagaccuugcuucuggguugaguuagucagaggacugccuagagaaaauacaacaaucuggacuagugggagcagcauuucuuuuuguggcguugauagugauacugcaaacuggucuuggccagacggugcugaguugccguucacuauugacaaguag

SEQ ID NO: 48086 - RNA, 1413 nt, Artificial Sequence; identical to SEQ ID NO: 48060
  derived and/or modified CDS sequence (wt) from neuraminidase__InfluenzaA__ABV30187

SEQ ID NO: 48087 - RNA, 1413 nt, Artificial Sequence
  derived and/or modified CDS sequence (wt) from neuraminidase__InfluenzaA__ABV30198
augaauccaaaucaaaaaauaauaaccauuggaucaaucaguauagcaaucgggauaauuagucuaauguugcaaauaggaaauauuauuucaauaugggcuagucacucaauccaaacuggaagucaaaaccacacuggaauaugcaaccaaagaaucaucacauaugaaaacagcaccugggugaaucacacauauguuaguauuaacaacacuaauguuguugcuggaaaggacaaaacuucagugacauuggccggcaauucaucucuuuguucuaucaguggaugggcuauauacacaaaagacaacagcauaagaauuggcuccaaaggagauguuuuugucauaagagaaccuuucauaucauguucucauuuggaaugcaggaccuuuuuucugacccaaggugcucuauuaaaugacaaacauucaaauggaaccguuaaggaccgaaguccuuauagggccuuaaugagcuguccucuaggugaagcuccguccccauacaauucaaaguuugaaucaguugcauggucagcaagcgcaugccaugauggcaugggcugguuaacaaucggaauuucugguccagacaauggagcuguggcuguacuaaaauacaacggaauaauaacugaaaccauaaaaaguuggaaaaagcgaauauugagaacacaagagucugaaugugucugugugaacgggucauguuucaccauaaugaccgauggcccgaguaauggggccgccucguacaaaaucuucaagaucgaaaaggggaagguuacuaaaucaauagaauuaaaugcacccaauuuucauuaugaggaauguuccuguuacccagacacuggcacagugauguguguaugcagggacaacuggcaugguucaaaucgaccuugggugucuuuuaaucaaaacuuggauuaucaaauaggauacaucugcaguggaguguucggugacaauccgcgucccaaagauggaaagggcagcuguaauccagugacuguugauggagcagacgggguuaagggguuuucauacaaauaugguaaugguguuuggauaggaagaacuaaaaguaacagacuuagaaagggguuugagaugauuugggauccuaauggauggacagauaccgacagugauuucucagugaaacaggauguuguggcaauaacugauuggucaggguacaguggaaguuucguucaacauccugaguuaacaggauuggacuguauaagaccuugcuucuggguugaguuagucagaggacugccuagagaaaauacaacaaucuggacuagugggagcagcauuucuuuuuguggcguugauagugauacugcaaacuggucuuggccagacggugcugaguugccguucaccauugacaaguag

SEQ ID NO: 48088 - RNA, 1410 nt, Artificial Sequence
  derived and/or modified CDS sequence (wt) from neuraminidase__InfluenzaA__ABV30209
augaauccaaaucaaaagauaauaacgauuggcucuguuucucucaccauuuccacaauaugcuucuucaugcaaauugccaucuugauaacuacuguaacauugcauuucaagcaauaugaauucaacucccccccaaacaaccaagugaugcugugugaaccaacaauaauagaaagaaacauaacagagauaguguaucugaccaacaccaccauagagaaggaaauaugccccaaacuagcagaauacagaaauuggucaaagccacaaugugacauuacaggauuugcaccuuuuucuaaggacaauucgauuaggcuuuccgcugguggggacaucugggugacaagagaaccuuaugugucaugcgauccugacaaguguuaucaauuugcccuuggacagggaacaacacuaaacaacgugcauucaaaugacacaguacgugauaggaccccuuaucggacccuauugaugaaugaguuagguguuccuuuucaucuggggaccaagcaagugugcauagcaugguccagcucaaguugucacgauggaaaagcauggcugcauguuuguauaacgggggaugauaaaaaugcaacugcuagcuucauuuacaaugggaggcuuguagauaguauuguuucaugguccaaagaaauccucaggacccaggagucagaaugcguuuguaucaauggaacuuguacaguaguaaugacugaugggagugcuucaggaaaagcugauacuaaaauacuauucauugaggaggggaaaaucguucauacuagcacauugucaggaagugcucagcaugucgaggagugcuccugcuauccucgauauccuggugucagaugugucugcagagacaacuggaaaggcuccaauaggcccaucguagauauaaacauaaaggaucauagcauuguuuccaguuauguguguucaggacuuguuggagacacacccagaaaaaacgacagcuccagcaguagccauuguuuggauccuaacaaugaagaagguggucauggagugaaaggcugggccuuugaugauggaaaugacguguggaugggaagaacgaucagcgagaagucacgcuuaggguaugaaaccuucaaagucauugaaggcugguccaacccuaaguccaaauugcagauaaauaggcaagucauaguugacagagguaauagguccgguuauucugguauuuucucuguugaaggcaaaagcugcaucaaucggugcuuuuauguggaguugauaaggggaagaaaagaggaaacugaagucuuguggaccucaaacaguauuguuguguuuuguggcaccucagguacauauggaacaggcucauggccugauggggcggacaucaaucucaugccuauauaa

SEQ ID NO: 48089 - RNA, 1410 nt, Artificial Sequence
  derived and/or modified CDS sequence (wt) from neuraminidase__InfluenzaA__ABV30220
augaauccaaaucaaaagauaauaacgauuggcucuguuucucucaccauuuccacaauauguuucuucaugcaaacugccaucuugauaacuacuguaacauugcauuucaagcaauaugaauucaacucccccccaaacaaccaagugaugcugugugaaccaacaauaauagaaagaaacauaacagagauaguguaucugaccaacaccaccauagagaaggaaauaugccccaaacuagcagaauacagaaauuggucaaagccgcaaugugacauuacaggauuugcaccuuuuucuaaggacaauucgauuaggcuuuccgcugguggggacaucugggugacaagagaaccuuaugugucaugcgauccugacaaguguuaucaauuugcccuuggacagggaacaacacuaaacaacgugcauucaaaugacacaguacgugauaggaccccuuaucggacccuauugaugaaugaguuagguguuccuuuucaucuggggaccaagcaagugugcauagcaugguccagcucaaguugucacgauggaaaagcauggcugcauguuuguauaacgggggaugauaaaaaugcaacugcuagcuucauuuacaaugggaggcuuguagauaguauuguuucaugguccaaagaaauccucaggacccaggagucagaaugcguuuguaucaauggaacuuguacaguaguaaugacugaugggagugcuucaggaaaagcugauacuaaaauacuauucauugaggaggggaaaaucguucauacuagcacauugucaggaagugcucagcaugucgaggagugcuccugcuauccucgauauccuggugucagaugugucugcagagacaacuggaaaggcuccaauaggcccaucguagauauaaacauaaaggaucauagcauuguuuccaguuauguguguucaggacuuguuggagacacacccagaaaaaacgacagcuccagcaguagccauuguuuggauccuaacaaugaagaagguggucauggaguaaaaggcugggccuuugaugauggaaaugacguguggaugggaagaacgaucagcgagaagucacgcuuaggguaugaaaccuucaaagucauugaaggcugguccaacccuaaguccaaauugcagauaaauaggcaagucauaguugacagagguaauagguccgguuauucugguauuuucucuguugaaggcaaaagcugcaucaaucggugcuuuuauguggaguugauaaggggaagaaaagaggaaacugaagucuuguggaccucaaacaguauuguuguguuuuguggcaccucagguacauauggaacaggcucauggccugauggggcggacaucaaucucaugccuauauaa

SEQ ID NO: 48090 - RNA, 1410 nt, Artificial Sequence
  derived and/or modified CDS sequence (wt) from neuraminidase__InfluenzaA__ABV30231
augaauccaaaucaaaagauaauaacgauuggcucuguuucucucaccauuuccacaauaugcuucuucaugcaaacugccaucuugauaacuacuguaacauugcauuucaagcaauaugaauucaacucccccccaaacaaccaagugaugcugugugaaccaacaauaauagaaagaaacauaacagagauaguguaucugaccaacaccaccauagagaaggaaauaugccccaaacuagcagaauacagaaauuggucaaagccgcaaugugacauuacaggauuugcaccuuuuucuaaggacaauucgauuaggcuuuccgcugguggggacaucugggugacaagagaaccuuaugugucaugcgauccugacaaguguuaucaauuugcccuuggacagggaacaacacuaaacaacgugcauucaaaugacacaguacgugauaggaccccuuaucggacccuauugaugaaugaguuagguguuccuuuucaucuggggaccaagcaagugugcauagcaugguccagcucaaguugucacgauggaaaagcauggcugcauguuuguauaacgggggaugauaaaaaugcaacugcuagcuucauuuacaaugggaggcuuguagauaguauuguuucaugguccaaagaaauccucaggacccaggagucagaaugcguuuguaucaauggaacuuguacaguaguaaugacugaugggagugcuucaggaaaagcugauacuaaaauacuauucauugaggaggggaaaaucguucauacuagcacauugucaggaagugcucagcaugucgaggagugcuccugcuauccucgauauccuggugucagaugugucugcagagacaacuggaaaggcuccaauaggcccaucguagauauaaacauaaaggaucauagcauuguuuccaguuauguguguucaggacuuguuggagacacacccagaaaaaacgacagcuccagcaguagccauuguuuggauccuaacaaugaagaagguggucauggagugaaaggcugggccuuugaugauggaaaugacguguggaugggaagaacgaucagcgagaagucacgcuuaggguaugaaaccuucaaagucauugaaggcugguccaacccuaaguccaaauugcagauaaauaggcaagucauaguugacagagguaauagguccgguuauucugguauuuucucuguugaaggcaaaagcugcaucaaucggugcuuuuauguggaguugauaaggggaagaaaagaggaaacugaagucuuguggaccucaaacaguauuguuguguuuuguggcaccucagguacauauggaacaggcucauggccugauggggcggacaucaaucucaugccuauauaa

SEQ ID NO: 48091 - RNA, 1410 nt, Artificial Sequence
  derived and/or modified CDS sequence (wt) from neuraminidase__InfluenzaA__ABV30264
augaauccaaaucaaaagauaauaacgauuggcucuguuucucucaccauuuccacaauaugcuucuucaugcaaauugccaucuugauaacuacuguaacauugcauuucaagcaauaugaauucagcucccccccaaacaaccaggugaugcugugugaaccaacaauaauagaaagaaacauaacagagguaguguaucugaccaacaccaccauagagaaggaaauaugccccaaacuagcagaauacagaaauuggucaaagccgcaaugugacauuacaggauuugcaccuuuuucuaaggacaauucgauuaggcuuuccgcugguggggacaucugggugacaagagaaccuuaugugucaugcgauccugacaaguguuaucaauuugcccuuggacagggaacaacacuaaacaacgugcauucaaaugacacaguacaugauaggaccccuuaucggacccuauugaugaaugagcuagguguuccauuucaucuggggaccaagcaagugugcauagcaugguccagcucaaguugucacgauggaaaagcauggcugcauguuuguguaacgggggaugacaaaaaugcaacugcuagcuucauuuacaaugggaggcuuguagauaguauuguuucaugguccaaagaaauccucaggacccaggagucagaaugcguuuguaucaauggaacuuguacaguaguaaugacugaugggagugcuucaggaaaagcugauacuaaaauacuauucauugaggaggggaaaaucguucauacuagcacauugucaggaagugcucagcaugucgaggagugcuccugcuauccucgauauccuggugucagaugugucugcagagacaauuggaaaggcuccaauaggcccaucguagauauaaacauaaaggauuauagcauuguuuccagauaugugugcucaggacuuguuggagacacacccagaaaaaacgacagcuccagcaguagccauugcuuggauccuaacaaugaagaagguggucauggagugaaaggcugggccuuugaugauggaaaugacguguggaugggaagaacgaucagcgagaagucacgcucaggauaugaaaccuucaaagucauugaaggcugguccaacccuaauuccaaauugcagauaaacaggcaagucauaguugacagagguaauagguccgguuauucugguauuuucucuguugaaggcaaaagcugcaucaaucggugcuuuuauguggaguugauaaggggaagaaaagaggaaacugaaguuuuguggaccucaaacaguauuguuguguuuuguggcaccucagguacauauggaacaggcucauggccugauggggcggacaucaaucucaugccuauauaa

SEQ ID NO: 48092 - RNA, 1410 nt, Artificial Sequence
  derived and/or modified CDS sequence (wt) from neuraminidase__InfluenzaA__ABV30275
augaauccaaaucaaaagauaauaacgauuggcucuguuucucucaccauuuccacaauaugcuucuucaugcaaacugccaucuugauaacuacuguaacauugcauuucaagcaauaugaauucaacuccaccccaaacaaccaagugaugcugugugaaccaacaauaauagaaagaaacauaacagagauaguguaucugaccaacaccaccauagagaaggaaauaugccccaaacuagcagaauacagaaauuggucaaagccgcaaugugacauuacaggauuugcaccuuuuucuaaggacaauucgauuaggcuuuccgcugguggggacaucugggugacaagagaaccuuaugugucaugcgauccugacaaguguuaucaauuugcccuuggacagggaacaacacuaaacaacgugcauucaaaugacacaguacgugauaggaccccuuaucggacccuauugaugaaugaguuagguguuccuuuucaucuggggaccaagcaagugugcauagcaugguccagcucaaguugucacgauggaaaagcauggcugcauguuuguauaacgggggaugauaaaaaugcaacugcuagcuucauuuacaaugggaggcuuguagauaguauuguuucaugguccaaagaaauccucaggacccaggagucagaaugcguuuguaucaauggaacuuguacaguaguaaugacugaugggagugcuucaggaaaagcugauacuaaaauacuauucauugaggaggggaaaaucguucauacuagcacauugucaggaagugcucagcaugucgaggagugcuccugcuauccucgauauccuggugucagaugugucugcagagacaacuggaaaggcuccaauaggcccaucguagauauaaacauaaaggaucauagcauuguuuccaguuauguguguucaggacuuguuggagacacacccagaaaaaacgacagcuccagcaguagccauuguuuggauccuaacaaugaagaagguggucauggagugaaaggcugggccuuugaugauggaaaugacguguggaugggaagaacgaucagcgagaagucacgcuuaggguaugaaaccuucaaagucauugaaggcugguccaacccuaaguccaaauugcagauaaauaggcaagucauaguugacagagguaauagguccgguuauucugguauuuucucuguugaaggcaaaagcugcaucaaucggugcuuuuauguggaguugauaaggggaagaaaagaggaaacugaagucuuguggaccucaaacaguauuguuguguuuuguggcaccucagguacauauggaacaggcucauggccugauggggcggacaucaaucucaugccuauauaa

SEQ ID NO: 48093 - RNA, 1413 nt, Artificial Sequence
  derived and/or modified CDS sequence (wt) from neuraminidase__InfluenzaA__ABV30297
augaauccaaaucaaaaaauaauaaccauuggaucaaucaguauagcaaucggaauaauuagucuaauguugcaaauaggaaauauuauuucaauaugggcuagucacucaauccaaacuggaagucaaaaccacacuggaauaugcaaccaaagaaucaucacauaugaaaacagcaccugggugaaucacacauauguuaauauuaacaacacuaauguuguugcuggaaaggacaaaacuucagugacauuggccggcaauucaucucuuuguucuaucaguggaugggcuauauacacaaaagacaacagcauaagaauuggcuccaagggagauguuuuugucauaagagaaccuuucauaucauguucucauuuggaaugcaggaccuuuuuucugacccaaggugcucuauuaaaugacaaacauucaaauggaaccguuaaggacagaaguccuuauagggccuuaaugagcuguccucuaggugaagcuccguccccauacaauucaaaguuugaaucaguugcauggucagcaagcgcaugccaugauggcaugggcugguuaacaaucggaauuucugguccagacaauggagcuguggcuguacuaaaauacaacggaauaauaacugaaaccauaaaaaguuggaaaaaacgaauauugagaacacaagagucugaaugugucugugugaacgggucuuguuucaccauaaugaccgauggcccgaguaauggggccgccucguacaaaaucuucaagaucgaaaagggaaagguuacuaaaucaauagaguuaaaugcacccaauuuucauuaugaggaauguuccuguuacccagacacuggcacagugauguguguaugcagagacaacuggcaugguucaaaucgaccuugggugucuuuuaaucaaaacuuggauuaucaaauaggauacaucugcaguggaguguucggugacaauccgcgucccaaagauggaaagggcagcuguaauccagugacuguugauggagcagacggaguuaagggguuuucauacaaauaugguaaugguguuuggauaggaagaacuaaaaguaacagacuuagaaagggguuugagaugauuugggauccuaauggauggacaaauaccgacagugauuucucagugaaacaggauguuguggcaauaacugauuggucaggguacaguggaaguuucguucaacauccugaguuaacaggauuggacuguauaagaccuugcuucuggguugaauuagucagaggacugccuagagaaaauacaacaaucuggacuagugggagcagcauuucuuuuuguggcguugauagugauacugcaaacuggucuuggccagacggugcugaguugccguucaccauugacaaauag

SEQ ID NO: 48094 - RNA, 1413 nt, Artificial Sequence
  derived and/or modified CDS sequence (wt) from neuraminidase__InfluenzaA__ABV30308
augaauccaaaucaaaaaauaauaaccauuggaucaaucaguauagcaaucgggauaauuagucuaauguugcaaauaggaaauauuauuucaauaugggcuagucacucaauccaaacuggaagucaaaaccacacuggaauaugcaaccaaagaaucaucacauaugaaaacagcaccugggugaaucacacauauguuaguauuaacaacacuaauguuguugcuggaaaggacaaaacuucagugacauuggccggcaauucaucucuuuguucuaucaguggaugggcuauauacacaaaagacaacagcauaagaauuggcuccaaaggagauguuuuugucauaagagaaccuuucauaucauguucucauuuggaaugcaggaccuuuuuucugacccaaggugcucuauuaaaugacaaacauucaaauggaaccguuaaggaccgaaguccuuauagggccuuaaugagcuguccucuaggugaagcuccguccccauacaauucaaaguuugaaucaguugcauggucagcaagcgcaugccaugauggcaugggcugguuaacaaucggaauuucugguccagacaauggagcuguggcuguacuaaaauacaacggaauaauaacugaaaccauaaaaaguuggaaaaagcgaauauugagaacacaagagucugaaugugucuguuugaacgggucauguuucaccauaaugaccgauggcccgaguaauggggccgccucguacaaaaucuucaaaaucgaaaaggggaagguuacuaaaucaauagaguuaaaugcacccaauuuucauuaugaggaauguuccuguuacccagacacuggcacagugauguguguaugcagggacaacuggcaugguucaaaucgaccuugggugucuuuuaaucaaaacuuggauuaucaaauaggauacaucugcaguggaguguucggugacaauccgcgucccaaagauggaaagggcagcuguaauccagugacuguugauggagcagacgggguuaagggguuuucauacaaauaugguaaugguguuuggauaggaagaacuaaaaguaacagacuuagaaagggguuugagaugauuugggauccuaauggauggacagauaccgacagugauuucucagugaaacaggauguuguggcaauaacugauuggucaggguacaguggaaguuucguucaacauccugaguuaacaggauuggacuguauaagaccuugcuucuggguugaguuagucagaggacugccuagagaaaauacaacaaucuggacuagugggagcagcauuucuuuuuguggcguugauagugauacugcaaacuggucuuggccagacggugcugaguugccguucaccauugacaaguag

SEQ ID NO: 48095 - RNA, 1413 nt, Artificial Sequence
  derived and/or modified CDS sequence (wt) from neuraminidase__InfluenzaA__ABV30319
augaauccaaaucaaaaaauaauaaccauuggaucaaucaguauagcaaucgggauaauuagucuaauguugcaaauaggaaauauuguuucaauaugggcuagucacucaauccaaacuggaagucaaaaccacacuggaauaugcaaccaaagaaucaucacauaugaaaacagcaccugggugaaucacacauauguuaguauuaacaacacuaauguuguugcuggaaaggacaaaacuucagugacauuggccggcaauucaucucuuuguucuaucaguggaugggcuauauacacaaaggacaacagcauaagaauuggcuccaaaggagauguuuuugucauaagagaaccuuucauaucauguucucauuuggaaugcaggaccuuuuuucugacccaaggugcuuuauuaaaugacaaacauucaaauggaaccguuaaggaccgaaguccuuauagggccuuaaugagcuguccucuaggugaagcuccguccccauacaauucaaaguuugaaucaguugcauggucagcaagcgcaugccaugauggcaugggcugguuaacaaucggaauuucugguccagacaauggagcuguggcuguacuaaaauacaacggaauaauaacugaaaccauaaaaaguuggaaaaagcgaauauugagaacacaagagucugaaugugucugugugaacgggucauguuucaccauaaugaccgauggcccgaguaauggggccgccucguacaaaaucuucaagaucgaaaaggggaagguuacuaaaucaauagaguuaaaugcacccaauuuucauuaugaggaauguuccuguuacccagacacuggcacagugauguguguaugcagggacaacuggcaugguucaaaucgaccuugggugucuuuuaaucaaaacuuggauuaucaaauaggauacaucugcaguggaguguucggugacaauccgcgucccaaagauggaaagggcagcuguaauccagugacuguugauggagcagacgggguuaagggguuuucauacaaauaugguaaugguguuuggauaggaagaacuaaaaguaacagacuuagaaagggguuugagaugauuugggauccuaauggauggacagauaccgacagugauuucucagugaaacaggauguuguggcaauaacugauuggucaggguacaguggaaguuucguucaacauccugaguuaacaggauuggacuguauaagaccuugcuucuggguugaguuagucagaggacugccuagagaaaauacaacaaucuggacuagugggagcagcauuucuuuuuguggcguugauagugauacugcaaacuggucuuggccagacggugcugaguugccguucaccauugacaaguag

SEQ ID NO: 48096 - RNA, 1413 nt, Artificial Sequence; identical to SEQ ID NO: 48093
  derived and/or modified CDS sequence (wt) from neuraminidase__InfluenzaA__ABV30330

SEQ ID NO: 48097 - RNA, 1413 nt, Artificial Sequence; identical to SEQ ID NO: 48045
  derived and/or modified CDS sequence (wt) from neuraminidase__InfluenzaA__ABV30341

SEQ ID NO: 48098 - RNA, 1413 nt, Artificial Sequence; identical to SEQ ID NO: 48065
  derived and/or modified CDS sequence (wt) from neuraminidase__InfluenzaA__ABV30363

SEQ ID NO: 48099 - RNA, 1413 nt, Artificial Sequence
  derived and/or modified CDS sequence (wt) from neuraminidase__InfluenzaA__ABV30374
augaauccaaaucaaaaaauaauaaccauuggaucaaucaguauagcaaucgggauaauuagucuaauguugcaaauaggaaauauuauuucaauaugggcuagucacucaauccaaacuggaagucaaaaccacacuggaauaugcaaccaaagaaucaucacauaugaaaacagcaccugggugaaucacacauauguuaguauuaacaacacuaauguuguugcuggaaaggacaaaacuucagugacauuggccggcaauucaucucuuuguucuaucaguggaugggcuauauacacaaaagacaacagcauaagaauuggcuccaaaggagauguuuuugucauaagagaaccuuucauaucauguucucauuuggaaugcaggaccuuuuuucugacccaaggugcucuauuaaaugacaaacauucaaauggaaccguuaaggaccgaaguccuuauagggccuuaaugagcuguccucuaggugaagcuccguccccauacaauucaaaguuugaaucaguugcauggucagcaagcgcaugucaugauggcaugggcugguuaacaaucggaauuucugguccagacaauggagcuguggcuguacuaaaauacaacggaauaauaacugaaaccauaaaaaguuggaaaaagcgaauauugagaacacaagagucugaaugugucugugugaacgggucauguuucaccauaaugaccgauggcccgaguaauggggccgccucguacaaaaucuucaaaaucgaaaaggggaagguuacuaaaucaauagaguuaaaugcacccaauuuucauuaugaggaauguuccuguuacccagacacuggcacagugauguguguaugcagggacaacuggcaugguucaaaucgaccuugggugucuuuuaaucaaaacuuggauuaucaaauaggauacaucugcaguggaguguucggugacaauccgcgucccaaagauggaaagggcagcuguaauccagugacuguugauggagcagacgggguuaagggguuuucauacaaauaugguaaugguguuuggauaggaagaacuaaaaguaacagacuuagaaagggguuugagaugauuugggauccuaauggauggacagauaccgacagugauuucucagugaaacaggauguuguggcaauaacugauuggucaggguacaguggaaguuucguucaacauccugaguuaacaggauuggacuguauaagaccuugcuucuggguugaguuagucagaggacugccuagagaaaauacaacaaucuggacuagugggagcagcauuucuuuuuguggcguugauagugauacugcaaacuggucuuggccagacggugcugaguugccguucaccauugacaaguag

SEQ ID NO: 48100 - RNA, 1410 nt, Artificial Sequence
  derived and/or modified CDS sequence (wt) from neuraminidase__InfluenzaA__ABV30385
augaauccaaaucaaaagauaauaacgauuggcucuguuucucucaccauuuccacaauaugcuucuucaugcaaauugccaucuugauaacuacuguaacauugcauuucaagcaauaugaauucagcccccccccaaacaaccaagugaugcugugugaaccaacaauaauagaaagaaacauaacagagauaguguaucugaccaacaccaccauagagaaggaaauaugccccaaacuagcagaauacagaaauuggucaaagccgcaaugugacauuacaggauuugcaccuuuuucuaaggacaauucgauuaggcuuuccgcugguggggacaucugggugacaagagaaccuuaugugucaugcgauccugacaaguguuaucaauuugcccuuggacagggaacaacacuaaacaacgugcauucaaaugacacaguacaugauaggaccccuuaucggacccuauugaugaaugagcuagguguuccauuucaucuggggaccaagcaagugugcauagcaugguccagcucaaguugucacgauggaaaagcauggcugcauguuuguguaacgggggaugacaaaaaugcaacugcuagcuucauuuacaaugggagacuuguagauaguauuguuucaugguccaaagaaauccucaggacccaggagucagaaugcguuuguaucaauggaacuuguacaguaguaaugacugaugggagugcuucaggaaaagcugauacuaaaauacuguucauugaggaggggaaaaucguucauacuagcacauugucaggaagugcucaacaugucgaggagugcuccugcuauccucgauauccuggugucagaugugucugcagagacaauuggaaaggcuccaauaggcccaucguagauauaaacauaaaggauuauagcauuguuuccagauaugugugcucaggacuuguuggagacacacccagaaaaaacgacagcuccagcaguagccauugcuuggauccuaacaaugaagaagguggucauggagugaaaggcugggccuuugaugauggaaaugacguguggaugggaagaacgaucagcgagaagucacgcucaggauaugaaaccuucaaagucauugaaggcugguccaacccuaauuccaaauugcagauaaauaggcaagucauaguugacagagguaauagguccgguuauucugguauuuucucuguugaaggcaaaagcugcaucaaucggugcuuuuauguggaguugauaaggggaagaaaagaggaaaccgaaguuuuguggaccucaaacaguauuguuguguuuuguggcaccucagguacauauggaacaggcucauggccugauggggcggacaucaaucucaugccuauauaa

SEQ ID NO: 48101 - RNA, 1410 nt, Artificial Sequence
  derived and/or modified CDS sequence (wt) from neuraminidase__InfluenzaA__ABV30396
augaauccaaaucaaaagauaauaacgauuggcucuguuucucucaccauuuccacaauaugcuucuucaugcaaauugccaucuugauaacuacuguaacauugcauuucaagcaauaugaauucaacuccuccccaaacaaccaagugaugcugugugaaccaacaauaauagaaaggaacauaacagagauaguguaucugaccaacaccaccauagagaaggaaauaugccccaaacuaucagaauacagaaauuggucaaagccgcaauguaacauuacaggauuugcaccuuuuucuaaggacaauucgauuaggcuuuccgcugguggggacaucuggguaacaagagaaccuuaugugucaugcgauccugacaaguguuaucaauucgcccuuggacagggaacaacacuaaacaacgugcauucaaaugacacaguacaugauaggaccccuuaucggacccuauugaugaaugaguuagguguuccauuucaucuggggaccaagcaagugugcauagcaugguccagcucaaguugucacgauggaaaagcauggcugcauguuuguguaacgggggaugauaaaaaugcaacugcuagcuucauuuacaaugggaggcuuguagauaguauuguuucaugguccaaggaaauccucaggacccaggagucagaaugcguuuguaucaauggaacuuguacaguaguaaugacugaugggagugcuucaggaaaagcugauacuaaaauacuauucauugaagaggggaaaaucguucauacuagcacauugucaggaagugcucagcaugucgaggagugcuccugcuauccucgauauccuggugucagaugugucugcagagacaacuggaaaggcuccaauaggcccauaguagauauuaacauaaaggauuauagcauuguuuccaguuaugugugcucaggacuuguuggagacacacccagaaaaaacgacagcuccagcaguagccauugcuuggacccuaacaaugaagaagguggucauggagugaaaggcugggcauuugaugauggaaaugacguguggaugggaagaacgaucagcgagaaguuacgcucaggauaugaaaccuucaaagucauugaaggcugguccaacccuaauuccaaauugcagauaaauaggcaagucauaguugacagagguaauagguccgguuauucugguauuuucucuguugaaggcaaaagcugcaucaaucggugcuuuuauguggaguugauaaggggaagaaaagaggaaaaugaagucuuguggaccucaaacaguauuguuguguuuuguggcaccucagguacauauggaacaggcucauggccugauggggcggacaucaaucuuaugccuauauaa

SEQ ID NO: 48102 - RNA, 1410 nt, Artificial Sequence
  derived and/or modified CDS sequence (wt) from neuraminidase__InfluenzaA__ABV30407
augaauccaaaucaaaagauaauaacgauuggcucuguuucucucaccauuuccacaauaugcuucuucaugcaaauugccaucuugauaacuacuguaacauugcauuucaagcaauaugaauucaacucccccccaaacaaccaagugaugcugugugaaccaacaauaauagaaagaaacauaacagagauaguguaucugaccaacaccaccauagagaaggaaauaugccccaaacuagcagaauacagaaauuggucaaagccgcaaugugacauuacaggauuugcaccuuuuucuaaggacaauucgauuaggcuuuccgcugguggggacaucugggugacaagagaaccuuaugugucaugcgauccugacaaguguuaucaauuugcccuuggacagggaacaacacuaaacaacgugcauucaaaugacacaguacgugauaggaccccuuaucggacccuauugaugaaugaguuagguguuccuuuucaucuggggaccaagcaagugugcauagcaugguccagcucaaguugucacgauggaaaagcauggcugcauguauguauaacgggggaugauaaaaaugcaacugcuagcuucauuuacaaugggaggcuuguagauaguauuguuucaugguccaaagaaauccucaggacccaggagucagaaugcguuuguaucaauggaacuuguacaguaguaaugacugaugggagugcuucaggaaaagcugauacuaaaauacuauucauugaggaggggaaaaucguucauacuagcacauugucaggaagugcucagcaugucgaggagugcuccugcuauccucgauauccuggugucagaugugucugcagagacaacuggaaaggcuccaauaggcccaucguagauauaaacauaaaggaucauagcauuguuuccaguuauguguguucaggacuuguuggagacacacccagaaaaaacgacagcuccagcaguggccauuguuuggauccuaacaaugaagaagguggucauggagugaaaggcugggccuuugaugauggaaaugacguguggaugggaagaacgaucagcgagaagucacgcuuaggguaugaaaccuucaaagucauugaaggcugguccaacccuaaguccaaauugcagauaaauaggcaagucauaguugacagagguaauagguccgguuauucugguauuuucucuguugaaggcaaaagcugcaucaaucggugcuuuuauguggaguugauaaggggaagaaaagaggaaacugaagucuuguggaccucaaacaguauuguuguguuuuguggcaccucagguacauauggaacaggcucauggccugauggggcggacaucaaucucaugccuauauaa

SEQ ID NO: 48103 - RNA, 1410 nt, Artificial Sequence
  derived and/or modified CDS sequence (wt) from neuraminidase__InfluenzaA__ABV30418
augaauccaaaucaaaagauaauaacgauuggcucuguuucucucaccauuuccacaauaugcuucuucaugcaaauugccaucuugauaacuacuguaacauugcauuucaagcaauaugaauucagcucccucccaaacaaccaagugaugcugugugaaccaacaauaauagaaagaaacauaacagagauaguguaucugaccaacaccaccauagagaaggaaauaugccccaaacuagcagaauacagaaauuggucaaagccgcaaugugacauuacaggauuugcaccuuuuucuaaggacaauucgauuaggcuuuccgcugguggggacaucugggugacaagagaaccuuaugugucaugcgauccugacaaguguuaucaauuugcccuuggacagggaacaacacuaaacaacgugcauucaaaugacacaguacaugauaggaccccuuaucggacccuauugaugaaugagcuagguguuccauuucaucuggggaccaagcaagugugcauagcaugguccagcucaaguugucacgauggaaaagcauggcugcauguuuguguaacgggggaugacaaaaaugcaacugcuagcuucauuuacaaugggaggcuuguagauaguauuguuucaugguccaaagaaauccucaggacccaggagucagaaugcguuuguaucaauggaacuuguacaguaguaaugacugaugggagugcuucaggaaaagcugauacuaaaauacuauucauugaggaggggaaaaucguucauacuagcacauugucaggaagugcucagcaugucgaggagugcuccugcuauccucgauauccuggugucagaugugucugcagagacaauuggaaaggcuccaauaggcccaucguagauauaaacauaaaggauuauagcauuguuuccagauaugugugcucaggacuuguuggagacacacccagaaaaaacgacagcuccagcaguagccauugcuuggauccuaacaaugaagaagguggucauggagugaaaggcugggccuuugaugauggaaaugacguguggaugggaagaacgaucagcgagaagucacgcucaggauaugaaaccuucaaagucauugaaggcugguccaacccuaauuccaaauugcagauaaauaggcaagucauaguugacagagguaauagguccgguuauucugguauuuucucuguugaaggcaaaagcugcaucaaucgguguuuuuauguggaguugauaaggggaagaagagaggagacugaaguuuuguggaccucaaacaguauuguuguguuuuguggcaccucggguacauauggaacaggcucauggccugauggggcggacaucaaucucaugccuauauaa

SEQ ID NO: 48104 - RNA, 1410 nt, Artificial Sequence; identical to SEQ ID NO: 48069
  derived and/or modified CDS sequence (wt) from neuraminidase__InfluenzaA__ABV30429

SEQ ID NO: 48105 - RNA, 1410 nt, Artificial Sequence; identical to SEQ ID NO: 48069
  derived and/or modified CDS sequence (wt) from neuraminidase__InfluenzaA__ABV30440

SEQ ID NO: 48106 - RNA, 1410 nt, Artificial Sequence; identical to SEQ ID NO: 48069
  derived and/or modified CDS sequence (wt) from neuraminidase__InfluenzaA__ABV30451

SEQ ID NO: 48107 - RNA, 1413 nt, Artificial Sequence; identical to SEQ ID NO: 48045
  derived and/or modified CDS sequence (wt) from neuraminidase__InfluenzaA__ABV30462

SEQ ID NO: 48108 - RNA, 1410 nt, Artificial Sequence; identical to SEQ ID NO: 48069
  derived and/or modified CDS sequence (wt) from neuraminidase__InfluenzaA__ABV30473

SEQ ID NO: 48109 - RNA, 1410 nt, Artificial Sequence
  derived and/or modified CDS sequence (wt) from neuraminidase__InfluenzaA__ABV30484
augaauccaaaucaaaagauaauaacgauuggcucuguuucucucaccauuuccacaauaugcuucuucaugcaaauugccaucuugauaacuacuguaacauugcauuucaagcaauaugaauucaacucccccccaaacaaccaagugaugcugugugaaccaacaauaauagaaagaaacauaacagagauaguguaucugaccaacaccaccauagagaaggaaauaugccccaaacuagcagaauacagaaauuggucaaagccgcaaugugacauuacaggauuugcaccuuuuucuaaggacaauucgauuaggcuuuccgcugguggggacaucugggugacaagagaaccuuaugugucaugcgauccugacaaguguuaucaauuugcccuuggacagggaacaacacuaaacaacgugcauucaaaugacacaguacaugauaggaccccuuaucggacccuauugaugaaugagcuagguguuccauuucaucuggggaccaagcaagugugcauagcaugguccagcucaaguugucacgauggaaaagcauggcugcauguuuguguaacgggggaugacaaaaaugcaacugcuagcuucauuuacaaugggaggcuuguagauaguauuguuucaugguccaaagaaauccucaggacccaggagucagaaugcguuuguaucaauggaacuuguacaguaguaaugacugaugggagugcuucaggaaaagcugauacuaaaauacuauucauugaggaggggaaaaucguucauacuagcacauugucaggaagugcucagcaugucgaggagugcuccugcuauccucgauauccuggugucagaugugucugcagagacaauuggaaaggcuccaauaggcccaucguagauauaaacauaaaggauuauagcauuguuuccagauaugugugcucaggacuuguuggagacacacccagaaaaaacgacagcuccagcaauagccauugcuuggauccuaacaaugaagaagguggucauggagugaaaggcugggccuuugaugauggaaaugacguguggaugggaagaacgaucagcgagaagucacgcucaggauaugaaaccuucaaagucauugaaggcugguccaacccuaauuccaaauugcagauaaacaggcaagucauaguugacagagguaauagguccgguuauucugguauuuucucuguugaaggcaaaagcugcaucaaucggugcuuuuauguggaguugauaaggggaagaaaagaggaaacugaaguuuuguggaccucaaacaguauuguuguguuuuguggcaccucagguacauauggaacaggcucauggccugauggggcggacaucaaucucaugccuauauaa

SEQ ID NO: 48110 - RNA, 1413 nt, Artificial Sequence; identical to SEQ ID NO: 48081
  derived and/or modified CDS sequence (wt) from neuraminidase__InfluenzaA__ABV30495

SEQ ID NO: 48111 - RNA, 1413 nt, Artificial Sequence; identical to SEQ ID NO: 48087
  derived and/or modified CDS sequence (wt) from neuraminidase__InfluenzaA__ABV30506

SEQ ID NO: 48112 - RNA, 1410 nt, Artificial Sequence; identical to SEQ ID NO: 48090
  derived and/or modified CDS sequence (wt) from neuraminidase__InfluenzaA__ABV30517

SEQ ID NO: 48113 - RNA, 1413 nt, Artificial Sequence
  derived and/or modified CDS sequence (wt) from neuraminidase__InfluenzaA__ABV30528
augaauucaaaucaaaaaauaauaaccauuggaucaaucaguauagcaauuggaauaauuagucuaauguugcaaauaggaaauauuauuucaaugugggcuagucacucaauccaaacuggaagucaaaaccacacuggaauaugcaaccaaagaaucaucacauaugaaaacagcaccugggugaaucacacauauguuaauauuaacaacacuaauguuguugcuggaaaggacaaaacuucagugacauuggccggcaauucaucucuuuguucuaucaguggaugggcuauauacacaaaagacaacagcauaagaauuggcuccaaaggagauguuuuugucauaagagaaccuuucauaucauguucucauuuggaaugcaggaccuuuuuucugacccaaggugcucuauuaaaugacaaacauucaaauggaaccguuaaggacagaaguccuuauagggccuuaaugagcuguccucuaggugaagcuccguccccauacaauucaaaguuugaaucaguugcauggucagcaagcgcaugccaugauggcaugggcugguuaacaaucgggauuucugguccagacaauggagcuguggcuguacuaaaauacaacggaauaauaacugaaaccauaaaaaguuggaaaaagcgaauauugagaacacaggagucugaaugugucugugugaacgggucauguuucaccauaaugaccgauggcccgaguaauggggccgccucguacaaaaucuucaagaucgaaaaggggaagguuacuaaaucaauagaguuaaaugcacccaauuuucauuaugaggaauguuccuguuacccagacacuggcacagugauguguguaugcagggauaacuggcaugguucaaaucgaccuugggugucuuuuaaucaaaacuuggauuaucaaguaggauacaucugcaguggaguguucggugacaauccgcgucccaaagauggaaagggcagcuguaauccaaugacuguugauggagcagacggaguuaagggguuuucauacaaauaugguaaugguguuuggauaggaaggacuaaaaguaacaaacuuagaaagggguuugaaaugauuugggauccuaauggauggacagauaccgacagugauuucucagugaaacaggauguuguggcaauaaccgauuggucaggguacaguggcaguuucguucaacauccugaguuaacaggauuggacuguauaagaccuugcuucuggguugaguuagucagaggacugccuagagaaaaugcaacaaucuggacuagugggagcagcauuucuuuuuguggcguugauagugauacugcaaacuggucuuggccagacggugcugaguugccguucaccauugacaaauag

SEQ ID NO: 48114 - RNA, 1413 nt, Artificial Sequence
  derived and/or modified CDS sequence (wt) from neuraminidase__InfluenzaA__ABV30539
augaauccaaaucaaaaaauaauaaccauuggaucaaucaguauagcaaucgggauaauuagucuaauguugcaaauaggaaauauuauuucaauaugggcuagucacucaauccaaacuggaagucaaaaccacacuggaauaugcaaccaaagaaucaucacauaugaaaacagcaccugggugaaucacacauauguuaguauuaacaacacuaauguuguugcuggaaaggacaaaacuucagugacauuggccggcaauucaucucuuuguucuaucaguggaugggcuauauacacaaaagacaacagcauaagaauuggcuccaaaggagauguuuuugucauaagagaaccuuucauaucauguucucauuuggaaugcaggaccuuuuuucugacccaaggugcucuauuaaaugacaaacauucaaauggaaccguuaaggaccgaaguccuuauagggccuuaaugagcuguccucuaggugaagcuccguccccauacaauucaaaguuugaaucaguugcauggucagcaagcgcaugccaugauggcaugggcugguuaacaaucggaauuucugguccagacaauggagcuguggcuguacuaaaauacaacggaauaauaacugaaaccauaaaaaguuggaaaaagcgaauauugagaacacaagagucugaaugugucugugugaacgggucauguuucaccauaaugaccgauggcccgaguaauggggccgccucguacaaaaucuucaagaucgaaaaggggaagguuacuaaaucaauagaguuaaaugcacccaauuuucauuaugaggaauguuccuguuacccagacacuggcacagugauguguguaugcagggacaacuggcaugguucaaaucgaccuugggugucuuuuaaucaaaacuuggauuaucaaauaggauacaucugcaguggaguguuuggugacaauccgcgucccaaagauggaaagggcagcuguaauccagugacuguugauggagcagacgggguuaagggguuuucauacaaauaugguaaugguguuuggauaggaagaacuaaaaguaacagacuuagaaagggguuugagaugauuugggauccuaauggauggacagauaccgacagugauuucucagugaaacaggauguuguggcaauaacugauuggucaggguacaguggaaguuucguucaacauccugaguuaacaggauuggacuguauaagaccuugcuucuggguugagcuagucagaggacugccuagagaaaauacaacaaucuggacuagugggagcagcauuucuuuuuguggcguugauagugauacugcaaacuggucuuggccagacggugcugaguugccguucacuauugacaaguag

SEQ ID NO: 48115 - RNA, 1413 nt, Artificial Sequence
  derived and/or modified CDS sequence (wt) from neuraminidase__InfluenzaA__ABV30561
augaauccaaaucaaaaaauaauaaccauuggaucaaucaguauagcaaucgggauaauuagucuaauguugcaaauaggaaauauuauuucaauaugggcuagucacucaauccaaacuggaagucaaaaccacacuggaauaugcaaccaaagaaucaucacauaugaaaacagcaccugggugaaucacacauauguuaguauuaacaacacuaauguuguugcuggaaaggacaaaacuucagugacauuggccggcaauucaucucuuuguucuaucaguggaugggcuauauacacaaaagacaacagcauaagaauuggcuccaaaggagauguuuuugucauaagagaaccuuucauaucauguucucauuuggaaugcaggaccuuuuuucugacccaaggugcucucuuaaaugacaaacauucaaauggaaccguuaaggaccgaaguccuuauagggccuuaaugagcuguccucuaggugaagcuccguccccauacaauucaaaguuugaaucaguugcauggucagcaagcgcaugccaugauggcaugggcugguuaacaaucggaauuucugguccagacaauggagcuguggcuguacuaaaauacaacggaauaauaacugaaaccauaaaaaguuggaaaaagcgaauauugagaacacaagagucugaaugugucugugugaacgggucauguuucaccauaaugaccgauggcccgaguaauggggccgccucguacaaaaucuucaagaucgaaaaggggaagguuacuaaaucaauagaguuaaaugcacccaauuuucauuaugaggaauguuccuguuacccagacacuggcacagugauguguguaugcagggacaacuggcaugguucaaaucgaccuugggugucuuuuaaucaaaacuuggauuaucaaauaggauacaucugcaguggaguguuuggugacaauccgcgucccaaagauggaaagggcagcuguaauccagugacuguugauggagcagacgggguuaagggguuuucauacaaauaugguaaugguguuuggauaggaagaacuaaaaguaacagacuuagaaagggguuugagaugauuugggauccuaauggauggacagauaccgacagugauuucucagugaaacaggauguuguggcaauaacugauuggucaggguacaguggaaguuucguucaacauccugaguuaacaggauuggacuguauaagaccuugcuucuggguugaguuagucagaggacugccuagagaaaauacaacaaucuggacuagugggagcagcauuucuuuuuguggcguugauagugauacugcaaacuggucuuggccagacggugcugaguugccguucacuauugacaaguag

SEQ ID NO: 48116 - RNA, 1413 nt, Artificial Sequence
  derived and/or modified CDS sequence (wt) from neuraminidase__InfluenzaA__ABV30572
augaauccaaaucaaaaaauaauaaccauuggaucaaucaguauagcaaucgggauaauuagucuaauguugcaaauaggaaauauuauuucaauaugggcuagucacucaauccaaacuggaagucaaaaccacacuggaauaugcaaccaaagaaucaucacauaugaaaacagcaccugggugaaucacacauauguuaguauuaacaacacuaauguuguugcuggaaaggacaaaacuucagugacauuggccggcaauucaucucuuuguucuaucaguggaugggcuauauacacaaaagacaacagcauaagaauuggcuccaaaggagauguuuuugucauaagagaaccuuucauaucauguucucauuuggaaugcaggaccuuuuuucugacccaaggugcucuauuaaaugacaaacauucaaauggaaccguuaaggaccgaaguccuuauagggccuuaaugagcuguccucuaggugaagcuccguccccauacaauucaaaguuugaaucaguugcauggucagcaagcgcaugccaugauggcaugggcugguuaacaaucggaauuucugguccagacaauggagcuguggcuguacuaaaauacaacggaauaauaacugaaaccauaaaaaguuggaaaaagcgaauauugagaacacaagagucugaaugugucugugugaacgggucauguuucaccauaaugaccgauggcccgaguaauggagccgccucguacaaaaucuucaagaucgaaaaggggaagguuacuaaaucaauagaguuaaaugcacccaauuuucauuaugaggaauguuccuguuacccagacacuggcacagugauguguguaugcagggacaacuggcaugguucaaaucgaccuugggugucuuuuaaucaaaacuuggauuaucaaauaggauacaucugcaguggaguguucggugacaauccgcgucccaaagauggaaagggcagcuguaauccagugacuguugauggagcagacgggguuaagggguuuucauacaaauaugguaaugguguuuggauaggaagaacuaaaaguaacagacuuagaaagggguuugagaugauuugggauccuaauggauggacagauaccgacagugauuucucagugaaacaggauguuguggcaauaacugauuggucaggguacaguggaaguuucguucaacauccugaguuaacaggauuggacuguauaagaccuugcuucuggguugaguuagucagaggacugccuagagaaaauacaacaaucuggacuagugggagcagcauuucuuuuuguggcguugauagugauacugcaaacuggucuuggccagacggugcugaguugccguucaccauugacaaguag

SEQ ID NO: 48117 - RNA, 1413 nt, Artificial Sequence; identical to SEQ ID NO: 48114
  derived and/or modified CDS sequence (wt) from neuraminidase__InfluenzaA__ABV30583

SEQ ID NO: 48118 - RNA, 1413 nt, Artificial Sequence
  derived and/or modified CDS sequence (wt) from neuraminidase__InfluenzaA__ABV30594
augaauccaaaucaaaaaauaauaaccauuggaucaaucaguauagcaaucgggauaauuagucuaauguugcaaauaggaaauauuauuucaauaugggcuagucacucaauccaaacuggaagucaaaaccacacuggaauaugcaaccaaagaaucaucacauaugaaaacagcaccugggugaaucacacauauguuaguauuaacaacacuaauguuguugcuggaaaggacaaaacuucagugacauuggccggcaauucaucucuuuguucuaucaguggaugggcuauauacacaaaagacaacagcauaagaauuggcuccaaaggagauguuuuugucauaagagaaccuuucauaucauguucucauuuggaaugcaggaccuuuuuucugacccaaggugcucuauuaaaugacaaacauucaaauggaaccguuaaggaccgaaguccuuauagggccuuaaugagcuguccucuaggugaagcuccguccccauacaauucaaaguuugaaucaguugcauggucagcaagcgcaugccaugauggcaugggcugguuaacaaucggaauuucugguccagacaauggagcuguggcuguacuaaaauacaacggaauaauaacugaaaccauaaaaaguuggaaaaagcgaauauugagaacacaagagucugaaugugucugugugaacgggucauguuucaccauaaugaccgauggcccgaguaauggggccgccucguacaaaaucuucaagaucgaaaaggggaagguuacuaaaucaauagaguuaaaugcacccaauuuucauuaugaggaauguuccuguuacccagacacuggcacagugauguguguaugcagggacaacuggcaugguucaaaucgaccuugggugucuuuuaaucaaaacuuggauuaucaaauaggauacaucugcaguggaguguucggugacaauccgcgucccaaagauggaaagggcagcuguaauccagugacuguugauggagcagacgggguuaagggguuuucauacaaauaugguaaugguguuuggauaggaagaacuaaaaguaacagacuuagaaagggguuugagaugauuugggauccuaauggauggacagauaccgacagugauuucucagugaaacaagauguuguggcaauaacugauuggucaggguacaguggaaguuucguccaacauccugaguuaacaggauuggacuguauaagaccuugcuucuggguugaguuagucagaggacugccuagagaaaauacaacaaucuggacuagugggagcagcauuucuuuuuguggcguugauagugauacugcaaacuggucuuggccagacggugcugaguugccguucaccauugacaaguag

SEQ ID NO: 48119 - RNA, 1413 nt, Artificial Sequence
  derived and/or modified CDS sequence (wt) from neuraminidase__InfluenzaA__ABV30605
augaauccaaaucaaaaaauaauaaccauuggaucaaucaguauagcaaucgggauaauuagucuaauguugcaaauaggaaauauuauuucaauaugggcuagucacucaauccaaacuggaagucaaaaccacacuggaauaugcaaccaaagaaucaucacauaugaaaacagcaccugggugaaucacacauauguuaguauuaacaacacuaauguuguuguuggaaaggacaaaacuucagugacauuggccggcaauucaucucuuuguucuaucaguggaugggcuauauacacaaaagacaacagcauaagaauuggcuccaaaggagauguuuuugucauaagagaaccuuucauaucauguucucauuuggaaugcaggaccuuuuuucugacccaaggugcucuauuaaaugacaaacauucaaauggaaccguuaaggaccgaaguccuuauagggccuuaaugagcuguccucuaggugaagcuccguccccauacaauucaaaguuugaaucaguugcauggucagcaagcgcaugccaugauggcaugggcugguuaacaaucggaauuucugguccagacaauggagcuguggcuguacuaaaauacaacggaauaauaacugaaaccauaaaaaguuggaaaaagcgaauauugagaacacaagagucugaaugugucugugugaacgggucauguuucaccauaaugaccgauggcccgaguaauggggccgccucguacaaaaucuucaagaucgaaaaggggaagguuacuaaaucaauagaguuaaaugcacccaauuuucauuaugaggaauguuccuguuacccagacacuggcacagugauguguguaugcagggacaacuggcaugguucaaaucgaccuugggugucuuuuaaucaaaacuuggauuaucaaauaggauacaucugcaguggaguguucggugacaauccgcgucccaaagauggaaagggcagcuguaauccagugacuguugauggagcagacgggguuaagggguuuucauacaaauaugguaaugguguuuggauaggaagaacuaaaaguaacagacuuagaaagggguuugagaugauuugggauccuaauggauggacagauaccgacagugauuucucagugaaacaggauguuguggcaauaacugauuggucaggguacaguggaaguuucguucaacauccugaguuaacaggauuggacuguauaagaccuugcuucuggguugaguuagucagaggacugccuagagaaaauacaacaaucuggacuagugggagcagcauuucuuuuuguggcguugauagugauacugcaaacuggucuuggccagacggugcugaguugccguucaccauugacaaguag

SEQ ID NO: 48120 - RNA, 1413 nt, Artificial Sequence; identical to SEQ ID NO: 48045
  derived and/or modified CDS sequence (wt) from neuraminidase__InfluenzaA__ABV30616

SEQ ID NO: 48121 - RNA, 1413 nt, Artificial Sequence; identical to SEQ ID NO: 48045
  derived and/or modified CDS sequence (wt) from neuraminidase__InfluenzaA__ABV30627

SEQ ID NO: 48122 - RNA, 1410 nt, Artificial Sequence
  derived and/or modified CDS sequence (wt) from neuraminidase__InfluenzaA__ABV30649
augaauccaaaucaaaagauaauaacgauuggcucuguuucucucaccauuuccacaauaugcuucuucaugcaaauugccaucuugauaacuacuguaacauugcauuucaagcaauaugaauucaacucccccccaaacaaccaagugaugcugugugaaccaacaauaauagaaagaaacauaacagagauaguguaucugaccaacaccaccauagagaaggaaauaugccccaaacuagcagaauacagaaauuggucaaagccgcaaugugacauuacaggauuugcaccuuuuucuaaggacaauucgauuaggcuuuccgcugguggggacaucugggugacaagagaaccuuaugugucaugcgauccugacaaguguuaucaauuugcccuuggacagggaacaacacuaaacaacgugcauucaaaugacacaguacgugauaggaccccuuaucggacccuauugaugaaugaguuagguguuccuuuucaucuggggaccaagcaagugugcauagcaugguccagcucaaguugucacgauggaaaagcauggcugcauguuuguauaacgggggaugauaaaaaugcaacugcuagcuucauuuacaaugggaggcuuguagauaguauuguuucaugguccaaagaaauccucaggacccaggagucagaaugcguuuguaucaauggaacuuguacaguaguaaugacugaugggagugcuucaggaaaugcugauacuaaaauacuauucauugaggaggggaaaaucguucauacuagcacauugucaggaagugcucagcaugucgaggagugcuccugcuauccucgauauccuggugucagaugugucugcagagacaacuggaaaggcuccaauaggcccaucguagauauaaacauaaaggaucauagcauuguuuccaguuauguguguucaggacuuguuggagacacacccagaaaaaacgacagcuccagcaguagccacuguuuggauccuaacaaugaagaagguggucauggagugaaaggcugggccuuugaugauggaaaugacguguggaugggaagaacgaucagcgagaagucacgcuuaggguaugaaaccuucaaagucauugaaggcugguccaacccuaaguccaaauugcagauaaauaggcaagucauaguugacagagguaauagguccgguuauucugguauuuucucuguugaaggcaaaagcugcaucaaucggugcuuuuauguggaguugauaaggggaagaaaagaggaaacugaagucuuguggaccucaaacaguauuguuguguuuuguggcaccucagguacauauggaacaggcucauggccugauggggcggacaucaaucucaugccuauauaa

SEQ ID NO: 48123 - RNA, 1410 nt, Artificial Sequence; identical to SEQ ID NO: 48061
  derived and/or modified CDS sequence (wt) from neuraminidase__InfluenzaA__ABV30660

SEQ ID NO: 48124 - RNA, 1413 nt, Artificial Sequence
  derived and/or modified CDS sequence (wt) from neuraminidase__InfluenzaA__ABV45852
augaauccaaaucaaaaaauaauaaccauuggaucaaucaguauagcaaucggaauaauuagucuaauguugcaaauaggaaauauuauuucaauaugggcuagucacucaauccaaacuggaagucaaaaccacacuggaauaugcaaccaaagaaucaucacauaugaaaacagcaccugggugaaucacacauauguuaauauuaacaacacuaauguuguugcuggaaaggacaaaacuucagugacauuggccggcaauucaucucuuuguuccaucaguggaugggcuauauacacaaaagacaacagcauaagaauuggauccaaaggagauguuuuugucauaagagaaccuuucauaucauguucucacuuggaaugcagaaccuuuuuucugacccaaggugcucuauuaaaugacaaacauucaaaugggaccguuaaggacagaaguccuuauagggccuuaaugagcugcccucuaggugaagcuccguccccauacaauucaaaguuugaaucaguugcauggucagcaagcgcaugccaugauggcaugggcugguuaacaaucggaauuucugguccagacaauggagcuguggcuguacuaaaauacaacggcauaauaacugaaaccauaaaaaguuggaaaaagcgaauauuaagaacacaagagucugaaugugucugugugaacgggucauguuucaccauaaugaccgauggcccgaauaauggggccgccucguacaaaaucuucaagaucgaaaaggggaagguuacuaaaucaauagaguugaaugcacccaauuuucauuaugaggaauguuccuguuacccagacacuggcacagugauguguguaugcagggacaacuggcaugguucaaaucgaccuugggugucuuuuaaucaaaaccuggauuaucaaauaggauacaucugcagugggguguucggugacaauccgcgucccaaagauggagagggcagcuguaauccagugacuguugauggagcagacggaguaaagggguuuucauacaaauaugguaaugguguuuggauaggaaggacuaaaaguaacagacuuagaaagggguuugagaugauuugggauccuaauggauggacagauaccgacaguaauuucucagugaaacaggauguuguggcaauaacugauuggucaggguacagcggaaguuucguucaacauccugaguuaacaggauuggacuguauaagaccuugcuucuggguugaguuagucagaggacugccuagagaaaauacaacaaucuggacuagugggagcagcauuucuuuuuguggcguaaauagugauacugcaaacuggucuuggccagacggugcugaguugccguucaccauugacaaguag

SEQ ID NO: 48125 - RNA, 1410 nt, Artificial Sequence; identical to SEQ ID NO: 48061
  derived and/or modified CDS sequence (wt) from neuraminidase__InfluenzaA__ABV45863

SEQ ID NO: 48126 - RNA, 1413 nt, Artificial Sequence
  derived and/or modified CDS sequence (wt) from neuraminidase__InfluenzaA__ABV45874
augaauccaaaucaaaaaauaauaaccauuggaucaaucaguauagcaauagggauaauuagucuaauguugcaaauaggaaauauuauuucaauaugggcuaguuacucaauccaaacuggaagucaaaaccacacuggaauaugcaaccaaagaaucaucacauaugaaaacagcaccugggugaaucacacauauguuaguauuaacaacacuaauguuguugcuggaaaggacaaaacuucagugacauuggccggcaauucaucucuuuguucuaucaguggaugggcuauauacacaaaagacaacagcauaagaauuggcuccaaaggagauguuuuugucauaagagaaccuuucauaucauguucucauuuggaaugcaggaccuuuuuucugacccaaggugcucuauuaaaugacaaacauucaaauggaaccguuaaggaccgaaguccuuauagggccuuaaugagcuguccucuaggugaagcuccguccccauacaauucaaaguuugaaucaguugcauggucagcaagcgcaugccaugauggcaugggcugguuaacaaucggaauuucugguccagacaauggagcuguggcuguacuaaaauacaacggaauaauaacugaaaccauaaaaaguuggaaaaagcgaauauugagaacacaagagucugaaugugucugugugaacgggucauguuucaccauaaugaccgauggcccgaguaauggggccgccucguacaaaaucuucaagaucgaaaaggggaagguuacuaaaucaauagaguuaaaugcacccaauuuucauuaugaggaauguuccuguuacccagacacuggcacagugauguguguaugcagggacaacuggcaugguucaaaucgaccuugggugucuuuuaaucaaaacuuggauuaucaaauaggauacaucugcaguggaguguucggugacaauccgcgucccaaagauggaaagggcagcuguaacccagugacuguugauggagcagacgggguuaagggguuuucauacaaauaugguaaugguguuuggauaggaagaacuaaaaguaacagacuuagaaagggguuugagaugauuugggauccuaauggauggacagauaccgacagugauuucucagugaaacaggauguuguggcaauaacugauuggucaggguacaguggaaguuucguucaacauccugaguuaacaggauuggacuguauaagaccuugcuucuggguugaguuagucagaggacugccuagagaaaauacaacaaucuggacuagugggagcaguauuucuuuuuguggcguugauagugauacugcaaacuggucuuggccagacggugcugaguugccguucaccauugacaaguag

SEQ ID NO: 48127 - RNA, 1413 nt, Artificial Sequence
  derived and/or modified CDS sequence (wt) from neuraminidase__InfluenzaA__ABV45885
augaauccaaaucaaaaaauaauaaccauuggaucaaucaguauagcaaucgggauaauuagucuaauguugcaaauaggaaauauuauuucaauaugggcuagucacucaauccaaacuggaagucaaaaccacacuggaauaugcaaccaaagaaucaucacauaugaaaacagcaccugggugaaucacacauauguuaguauuaacaacacuaauguuguugcuggaaaggacaaaacuucagugacauuggccggcaauucaucucuuuguucuaucaguggaugggcuauauacacaaaagacaacagcauaagaauuggcuccaaaggagauguuuuugucauaagagaaccuuucauaucauguucucauuuggaaugcaggaccuuuuuucugacccaaggugcucuauuaaaugacaaacauucaaauggaaccguuaaggaccgaaguccuuauagggccuuaaugagcuguccucuaggugaagcuccguccccauacaauucaaaguuugaaucaguugcauggucagcaagcgcaugccaugauggcaugggcugguuaacaaucggaauuucugguccagacaauggagcuguggcuguacuaaaauacaacggaauaauaacugaaaccauaaaaaguuggaaaaagcgaauauugagaacacaagagucugaaugugucugugugaacgggucauguuucaccauaaugaccgauggcccgaguaauggggccgccucguacaaaaucuucaagaucgaaaaggggaagguuacuaaaucaauagaguuaaaugcacccaauuuucauuaugaggaauguuccuguuacccagacacuggcacagugauguguguaugcagggacaacuggcaugguucaaaucgaccuugggugucuuuuaaucaaaacuuggauuaucaaauaggauacaucugcaguggaguguuuggugacaauccgcgucccaaagauggaaagggcagcuguaauccagugacuguugauggagcagacgggguuaagggguuuucauacaaauaugguaaugguguuuggauaggaagaacuaaaaguaacagacuuagaaagggguuugagaugauuugggauccuaauggauggacagauaccgacagugauuucucagugaaacaggauguuguggcaauaacugauuggucaggguacaguggaaguuucguucaacauccugaguuaacaggauuggacuguauaagaccuugcuucuggguugaguuagucagaggacugccuagagaaaauacaacaaucuggacuagugggagcagcauuucuuuuuguggcguugauagugauacugcaaacuggucuuggccagacggugcugaguugccguuuacuauugacaaguag

SEQ ID NO: 48128 - RNA, 1413 nt, Artificial Sequence
  derived and/or modified CDS sequence (wt) from neuraminidase__InfluenzaA__ABV45896
augaauccaaaucaaaaaauaauaaccauuggaucaaucaguauagcaaucggaauaauuagucuaauguugcaaauaggaaauauuauuucaauaugggcuagucacucaauccaaacuggaagucaaaaccacacuggaauaugcaaccaaagaaucaucacauaugaaaacagcaccugggugaaucacacauauguuaauauuaacaacacuaauguuguuacuggaaaggacaaaacuucagugacauuggccggcaauucaucucuuuguucuaucaguggaugggcuauauacacaaaagacaacagcauaagaauuggcuccaaaggagauguuuuugucauaagagaaccuuucauaucauguucucauuuggaaugcaggaccuuuuuucugacccaaggugcucuauuaaaugacaaacauucaaauggaaccguuaaggacagaaguccuuauagggccuuaaugagcuguccucuaggugaagcuccguccccauacaauucaaaguuugaaucaguugcauggucagcaagcgcaugccaugauggcaugggcugguuaacaaucggaauuucugguccagacaauggagcuguggcuguacuaaaauacaacggaauaauaacugaaaccauaaaaaguuggaaaaagcgaauauugagaacacaagagucugaaugugucugugugaacgggucauguuucacuauaaugaccgauggcccgagugauggggccgccucguacaaaaucuucaagaucgaaaaggggaagguuacuaaaucaauagaguuaaaugcacccaauuuucauuaugaggaauguuccuguuacccagacacuggcacagugauguguguaugcagggacaacuggcaugguucaaaucgaccuugggugucuuuuaaucaaaacuuggauuaucaaauaggauacaucugcaguggaguguucggugacaauccgcgucccaaagauggaaagggcagcuguaauccagugacuguugauggagcagacggaguuaagggguuuucauacaaauaugguaaugguguuuggauaggaaggacuaaaaguaacaaacuuagaaagggguuugagaugauuugggauccuaauggauggacagauaccgacaaugauuucucagugaaacaggauguuguggcaauaacugauuggucaggguacaguggaaguuucguucaacauccugaguuaacaggauuggacuguauaagaccuugcuucuggguugaguuagucagaggacugccuagagaaaauacaacaaucuggacuagugggagcagcauuucuuuuuguggcguugauagugauacugcaaacuggucuuggccagacggugcugaguugccguucaccauugacaaauag

SEQ ID NO: 48129 - RNA, 1413 nt, Artificial Sequence; identical to SEQ ID NO: 48045
  derived and/or modified CDS sequence (wt) from neuraminidase__InfluenzaA__ABV45918

SEQ ID NO: 48130 - RNA, 1413 nt, Artificial Sequence
  derived and/or modified CDS sequence (wt) from neuraminidase__InfluenzaA__ABV45929
augaauccaaaucaaaaaauaauaaccauuggaucaaucaguauagcaaucggaauaauuagucuaauguugcaaauaggaaauauuauuucaaugugggcuagucacucaauccaaacuggaagucaaaaccacacuggaauaugcaaccaaagaaucaucacauaugaaaacagcaccugggugaaucacacauauguuaauauuaacaacacuaauguuguuacuggaaaggacaaaacuucagugacauuggccggcaauucaucucuuuguucuaucaguggaugggcuauauacacaaaagacaacagcauaagaauuggcuccaaaggagauguuuuugucauaagagaaccuuucauaucauguucucauuuggaaugcaggaccuuuuuucugacccaaggugcucuauuaaaugacaaacauucaaauggaaccguuaaggacagaaguccuuauagggccuuaaugagcuguccucuaggugaagcuccguccccauacaauucaaaguuugaaucaguugcauggucagcaagcgcaugccaugauggcaugggcugguuaacaaucggaauuucugguccagacaauggagcuguggcuguacuaaaauacaacggaauaauaacugaaaccauaaaaaguuggaaaaagcgaauauugagaacacaagagucugaaugugucugugugaacgggucauguuucacuauaaugaccgauggcccgagugauggggccgccucguacaaaaucuucaagaucgaaaaggggaagguuacuaaaucaauagaguuaaaugcacccaauuuucauuaugaggaauguuccuguuacccagacacuggcacagugauguguguaugcagggacaacuggcaugguucaaaucgaccuugggugucuuuuaaucaaaacuuggauuaucaaauaggauacaucugcaguggaguguucggugacaauccgcgucccaaagauggaaagggcagcuguaauccagugacuguugauggagcagacggaguuaagggguuuucauacaaauaugguaaugguguuuggauaggaaggacuaaaaguaacaaacuuagaaagggguuugagaugauuugggauccuaauggauggacagauaccgacaaugauuucucagugaaacaggauguuguggcaauaacugauuggucaggauacaguggaaguuucguucaacauccugaguuaacaggauuggacuguauaagaccuugcuucuggguugaguuagucagaggacugccuagagaaaaugcaacaaucuggacuagugggagcagcauuucuuuuuguggcguugauagugauacugcaaacuggucuuggccagacggugcugaguugccguucaccauugacaaauag

SEQ ID NO: 48131 - RNA, 1413 nt, Artificial Sequence
  derived and/or modified CDS sequence (wt) from neuraminidase__InfluenzaA__ABV45940
augaauccaaaucaaaaaauaauaaccauuggaucaaucaguauagcaauuggaauaauuagucuaauguugcaaauaggaaauauuauuucaauaugggcuagucacucaauccaaacuggaagucaaaaccacacuggaauaugcaaccaaagaaucaucagauaugaaaacagcaccugggugaaucacacauauguuaauauuaacaacacuaauguuguugcuggaaaggacaaaacuucagugacauuggccggcaauucaucucuuuguucuaucaguggaugggcuauauacacaaaagacaacagcauaagaauuggcuccaaaggagauguuuuugucauaagagaaccuuucauaucauguucucauuuggaaugcaggaccuuuuuucugacccaaggugcucuauuaaaugacaaacauucaaauggaaccguuaaggacagaaguccuuauagggccuuaaugagcuguccucuaggugaagcuccguccccauacaauucaaaguuugaaucaguugcauggucagcaagcgcaugccaugauggcaugggcugguuaacaaucgggauuucugguccagacaauggagcuguggcuguacuaaaauacaacggaauaauaacugaaaccauaaaaaguuggaaaaagcaaauauugagaacacaggagucugaaugugucugugugaacgggucauguuucaccauaaugaccgauggcccgaguaauggggccgccucguacaaaaucuucaagaucgaaaaggggaagguuacuaaaucaauagaguuaaaugcacccaauuuucauuaugaggaauguuccuguuacccagacacuggcacagugauguguguaugcagggauaacuggcaugguucaaaucgaccuugggugucuuuuaaucaaagcuuggauuaucaaguaggauacaucugcaguggaguguucggugacaauccgcgucccaaagauggaaagggcagcuguaauccaaugacuguugauggagcagacggaguuaagggguuuucauacaaauaugguaaugguguuuggauaggaaggacuaaaaguaacaaacuuagaaagggguuugagaugauuugggauccaaauggauggacagauaccgacagugauuucucagugaaacaggauguuguggcaauaacugauuggucaggguacaguggaaguuucguucaacauccugaguuaacaggauuggacuguauaagaccuugcuucuggguugaguuagucagaggacugccuagagaaaauacaacaaucuggacuagugggagcagcauuucuuuuuguggcguugauagugauacugcaaacuggucuuggccagacggugcugaguugccguucaccauugacaaauag

SEQ ID NO: 48132 - RNA, 1413 nt, Artificial Sequence
  derived and/or modified CDS sequence (wt) from neuraminidase__InfluenzaA__ABV45951
augaauccaaaucaaaaaauaauaaccauuggaucaaucaguauagcaauuggaauaauuagucuaauguugcaaauaggaaauauuauuucaauaugggcuagucacucaauccaaacuggaagucaaaaccacacuggaauaugcaaccaaagaaucaucacauaugaaaacagcaccugggugaaucacacauauguuaauauuaacaacacuaauguuguugcuggaaaggacaaaacuucagugacauuggccggcaauucaucucuuuguucuaucaguggaugggcuauauacacaaaagacaacagcauaagaauuggcuccaaaggagauguuuuugucauaagagaaccuuucauaucauguucucauuuggaaugcaggaccuuuuuucugacccaaggugcucuauuaaaugacaaacauucaaauggaaccguuaaggacagaaguccuuauagggccuuaaugagcuguccucuaggugaagcuccguccccauacaauucaaaguuugaaucaguugcauggucagcaagcgcaugccaugauggcaugggcugguuaacaaucgggauuucugguccagacaauggagcuguggcuguacuaaaauacaacggaauaauaacugaaaccauaaaaaguuggaaaaagcgaauauugagaacacaggagucugaaugugucugugugaacgggucauguuucaccauaaugaccgauggcccgaguaauggggccgccucguacaaaaucuucaagaucgaaaaggggaagguuacuaaaucaauagaguuaaaugcacccaauuuucauuaugaggaauguuccuguuacccagacacuggcacagugauguguguaugcagggauaacuggcaugguucaaaucgaccuugggugucuuuuaaucaaaacuuggauuaucaaguaggauacaucugcaguggaguguucggugacaauccgcgucccaaagauggaaagggcagcuguaauccaaugacuguugauggagcagacggaguuaagggguuuucauacaaauaugguaaugguguuuggauaggaaggacuaaaaguaacaaacuuagaaagggguuugaaaugauuugggauccuaauggauggacagauaccgacagugauuucucagugaaacaggauguuguggcaauaaccgauuggucaggguacaguggaaguuucguucaacauccugaguuaacaggauuggacuguauaagaccuugcuucuggguugaguuagucagaggacugccuagagaaaaugcaacaaucuggacuagugggagcagcauuucuuuuuguggcguugauagugauacugcaaacuggucuuggccagacggugcugaguugccguucaccauugacaaauag

SEQ ID NO: 48133 - RNA, 1410 nt, Artificial Sequence
  derived and/or modified CDS sequence (wt) from neuraminidase__InfluenzaA__ABV45973
augaauccaaaucaaaagauaauaacgauuggcucuguuucucucaccauuuccacaauaugcuucuucaugcaaauugccaucuugauaacuacuguaacacugcauuucaagcaauaugaauucaacucccccccaaacaaccaagugaugcugugugaaccaacaauaauagaaagaaacauaacagagauaguguaucugaccaacaccaccauagagaaggaaauaugccccaaacuagcagaauacagaaauuggucaaagccgcaaugugacauuacaggauuugcaccuuuuucuaaggacaauucgauuaggcuuuccgcugguggggacaucugggugacaagagaaccuuaugugucaugcgauccugacaaguguuaucaauuugcccuuggacagggaacaacacuaaacaacgugcauucaaaugacacaguacgugauaggaccccuuaucggacccuauugaugaaugaguuagguguuccuuuucaucuggggaccaagcaagugugcauagcaugguccagcucaaguugucacgauggaaaagcauggcugcauguuuguauaacgggggaugauaaaaaugcaacugcuaguuucauuuacaaugggaggcuuguagauaguauuguuucaugguccaaagaaauccucaggacccaggagucagaaugcguuuguaucaauggaacuuguacaguaguaaugacugaugggagugcuucaggagaagcugauacuaaaauacuauucauugaggaggggaaaaucguucauacuagcacauugucaggaagugcucagcaugucgaggagugcuccugcuauccucgauauccuggugucagaugugucugcagagacaacuggaaaggcuccaauaggcccaucguagauauaaacauaaaggaucauagcauuguuuccaguuauguguguucaggacuuguuggagacacacccagaaaaaacgacaguuccagcaguagccauuguuuggauccuaacaaugaagaagguggucauggagugaaaggcugggccuuugaugauggaaaugacguguggaugggaagaacgaucagcgagaagucacgcuuaggguaugaaaccuucaaagucauugaaggcugguccaacccuaaguccaaauugcagauaaauaggcaagucauaguugacagagguaauagguccgguuauucugguauuuucucuguugaaggcaaaagcugcaucaaucggugcuuuuauguggaguugauaaggggaagaaaagaggaaacugacgucuuguggaccucaaacaguauuguuguguuuuguggcaccucagguacauauggaacaggcucauggccugauggggcggacaucaaucucaugccuauauaa

SEQ ID NO: 48134 - RNA, 1410 nt, Artificial Sequence
  derived and/or modified CDS sequence (wt) from neuraminidase__InfluenzaA__ABV45984
augaauccaaaucaaaagauaauaacgauuggcucuguuucucucaccauuuccacaauaugcuucuucaugcaaauugccaucuugguaacuacuguaacauugcauuucaagcaauaugaauucaacucccccccaaacaaccaagugaugcugugugaaccaacaauaauagaaagaaacauaacagagauaguguaucugaccaacaccaccauagagaaggaaauaugccccaaacuagcagaauacagaaauuggucaaagccgcaaugugacauuacaggauuugcaccuuuuucuaaggacaauucgauuaggcuuuccgcugguggggacaucugggugacaagagaaccuuaugugucaugcgauccugacaaguguuaucaauuugcccuuggacagggaacaacacuaaacaacgugcauucaaaugacacaguacgugauaggaccccuuaucggacccuauugaugaaugaguuagguguuccuuuucaucuggggaccaagcaagugugcauagcaugguccagcucaaguugucacgauggaaaagcauggcugcauguuuguauaacgggggaugauaaaaaugcaacugcuagcuucauuuacaaugggaggcuuguagauaguauuguuucaugguccaaagaaauccucaggacccaggagucagaaugcguuuguaucaauggaacuuguacaguaguaaugacugaugggagugcuucaggaaaagcugauacuaaaauacuauucauugaggaggggaaaaucguucauacuagcacauugucaggaagugcucagcaugucgaggagugcuccugcuauccucgauauccuggugucagaugugucugcagagacaacuggaaaggcuccaauaggcccaucguagauauaaacauaaaggaucauagcauuguuuccaguuauguguguucaggacuuguuggagacacacccagaaaaaacgacagcuccagcaguagccauuguuuggauccuaacaaugaagaagguggucauggagugaaaggcugggccuuugaugauggaaaugacguguggaugggaagaacgaucagcgagaagucacgcuuaggguaugaaaccuucaaagucauugaaggcugguccaacccuaaguccaaauugcagauaaauaggcaagucauaguugacagagguaauagguccgguuauucugguauuuucucuguugaaggcaaaagcugcaucaaucggugcuuuuauguggaguugauaaggggaagaaaagaggaaacugaagucuuguggaccucaaacaguauuguuguguuuuguggcaccucagguacauauggaacaggcucauggccugauggggcggacaucaaucucaugccuauauaa

SEQ ID NO: 48135 - RNA, 1410 nt, Artificial Sequence; identical to SEQ ID NO: 48061
  derived and/or modified CDS sequence (wt) from neuraminidase__InfluenzaA__ABV45995

SEQ ID NO: 48136 - RNA, 1413 nt, Artificial Sequence; identical to SEQ ID NO: 48128
  derived and/or modified CDS sequence (wt) from neuraminidase__InfluenzaA__ABV82554

SEQ ID NO: 48137 - RNA, 1410 nt, Artificial Sequence
  derived and/or modified CDS sequence (wt) from neuraminidase__InfluenzaA__ABV82565
augaauccaaaucaaaagauaauaacgauuggcucuguuucucucaccauuuccacaauaugcuucuucaugcaaacugccaucuugauaacuacuguaacauugcauuucaagcaauaugaauucaacucccccccaaacaaccaagugaugcugugugaaccaacaauaauagaaagaaacauaacagagauaguguaucugaccaacacaaccauagagaaggaaauaugcccuaaacuagcagaauacagaaauuggucaaagccgcaaugugacauuacaggauuugcaccuuuuucuaaggacaauucgauuaggcuuuccgcugguggggacaucugggugacaagagaaccuuaugugucaugcgauccugacaaguguuaucaauuugcccuuggacagggaacaacacuaaacaacgugcauucaaaugacacaguacgugauaggaccccuuaucggacccuauugaugaaugaguuagguguuccuuuucaucuggggaccaagcaagugugcauagcaugguccagcucaaguugucacgauggaaaagcauggcugcauguuuguauaacgggggaugauaaaaaugcaacugcuagcuucauuuacaaugggaggcuuguagauaguauuguuucaugguccaaagaaauccucaggacccaggagucagaaugcguuuguaucaauggaacuuguacaguaguaaugacugaugggagugcuucaggaaaagcugauacuaaaauacuauucauugaggaggggaaaaucguucauacuagcacauugucaggaagugcucagcaugucgaggagugcuccugcuauccucgauauccuggugucagaugugucugcagagacaacuggaaaggcuccaauaggcccaucguagauauaaacauaaaggaucauagcauuguuuccaguuauguguguucaggacuugucggagacacacccagaaaaaacgacagcuccagcaguagccauuguuuggauccuaacaaugaagaagguggucauggagugaaaggcugggccuuugaugauggaaaugacguguggaugggaagaacgaucagcgagaagucacgcuuaggguaugaaaccuucaaagucauugaaggcugguccaacccuaaguccaaauugcagauaaauaggcaagucauaguugacagagguaauagguccgguuauucugguauuuucucuguugaaggcaaaagcugcaucaaucggugcuuuuauguggaguugauaaggggaagaaaagaggaaacugaagucuuguggaccucaaacaguauuguuguuuuuuguggcaccucagguacauauggaacaggcucauggccugauggggcggacaucaaucucaugccuauauaa

SEQ ID NO: 48138 - RNA, 1410 nt, Artificial Sequence; identical to SEQ ID NO: 48090
  derived and/or modified CDS sequence (wt) from neuraminidase__InfluenzaA__ABW36171

SEQ ID NO: 48139 - RNA, 1413 nt, Artificial Sequence; identical to SEQ ID NO: 48094
  derived and/or modified CDS sequence (wt) from neuraminidase__InfluenzaA__ABW36193

SEQ ID NO: 48140 - RNA, 1413 nt, Artificial Sequence; identical to SEQ ID NO: 48060
  derived and/or modified CDS sequence (wt) from neuraminidase__InfluenzaA__ABW36204

SEQ ID NO: 48141 - RNA, 1413 nt, Artificial Sequence
  derived and/or modified CDS sequence (wt) from neuraminidase__InfluenzaA__ABW36215
augaauccaaaucaaaaaauaauaaccauuggaucaaucaguauagcaaucggaauaauuagucuaauguugcaaauaggaaauauuauuucaauaugggcuagucacucaauccaaacuggaagucaaaaccacacuggaauaugcaaccaaaggaucaucacauaugaaaacagcaccugggugaaucacacauauguuaauauuaacaacacuaauguuguugcuggaaaggacaaaacuucagugacacuggccggcaauucaucucuuuguucuauuaguggaugggcuauauacacaaaagacaacagcauaagaauuggcuccaaaggagauguuuuugucauaagagaaccuuucauaucauguucucacuuggaaugcagaaccuuuuuucugacccaaggugcucuauuaaaugacaaacauucaaauggaaccguuaaggacagaaguccuuauagggccuuaaugagcuguccucuaggugaagccccguccccauacaauucaaaguuugaaucaguugcauggucagcaagcgcaugccaugauggcaagggcugguuaacaaucggaauuucugguccagacaauggagcuguggcuguacuaaaauacaacggaauaauaacugaaaccauaaaaaguuggaacaagcaaauauugagaacacaagagucugaauguguuugugugaacgggucauguuucaccauaaugaccgauggcccgaguaauggggccgccucguacaaaaucuucaagaucgaaaaggggaagguuacuaaaucaauagaguugaaugcacccaauuuucauuaugaggaauguuccuguuacccagacacuggcacagugauguguguaugcagggacaacuggcaugguucaaaucgaccuugggugucuuuuaaucaaaacuuggauuaucaaauuggauacaucugcaguggaguuuucggugacaauccgcgucccaaagauggaaggggcagcuguaauccagugacuguugauggagcagacggaguuaagggguuuucauacaaauaugguaaugguguuuggauaggaaggacuaaaaguaacagacuaagaaagggguuugagaugauuugggauccuaauggauggacagauaccgacagucauuucucagugaaacaggauguuguggcaauaacugauuggucaggguacagcggaaguuucguccaacauccugaguuaacaggguuggacuguauaaaaccuugcuucuggguugaguuagucagaggacugccuagagaaaauacaacaaucuggacuagcgggagcagcauuucuuuuuguggcguugauagugauacugcaaacuggucuuggccagacggugcugaguugccguucaucauugacaaguag

SEQ ID NO: 48142 - RNA, 1413 nt, Artificial Sequence; identical to SEQ ID NO: 48059
  derived and/or modified CDS sequence (wt) from neuraminidase__InfluenzaA__ABW36226

SEQ ID NO: 48143 - RNA, 1413 nt, Artificial Sequence
  derived and/or modified CDS sequence (wt) from neuraminidase__InfluenzaA__ABW36237
augaauccaaaucaaaaaauaauaaccauuggaucaaucaguauaacaauuggaauaauuagucuaauguugcaaauaggaaauauuauuucaauaugggcuagucacucaauccaaacuggaagucaaaaccacacuggaauaugcaaccaaagaaucaucacauaugaaaacagcaccugggugaaucacacauauguuaauauuaacaacacuaauguuguugcuggaaaggacaaaacuucagugacauuggccggcaauucaucucuuuguucuaucaguggaugggcuauauacacaaaagacaacagcauaagaauuggcuccaaaggagauguuuuugucauaagagaaccuuucauaucauguucucauuuggaaugcaggaccuuuuuucugacccaaggugcucuauuaaaugacaaacauucaaauggaaccguuaaggacagaaguccuuauagggccuuaaugagcuguccucuaggugaagcuccguccccauacaauucaaaguuugaaucaguugcauggucagcaagcgcaugccaugauggcaugggcugguuaacaaucgggauuucugguccagacaauggagcuguggcuguacuaaaauacaacggaauaauaacugaaaccauaaaaaguuggaaaaagcgaauauugagaacacaggagucugaaugugucugugugaacgggucauguuucaccauaaugaccgauggcccgaguaauggggccgccucguacaaaaucuucaagaucgaaaaggggaagguuacuaaaucaauagaguuaaaugcacccaauuuucauuaugaggaauguuccuguuacccagacacuggcacagugauguguguaugcagggauaacuggcaugguucaaaucgaccuugggugucuuuuaaucaaaacuuggauuaucaaguaggauacaucugcaguggaguguucggugacaauccgcgucccaaagauggaaagggcagcuguaauccaaugacuguugauggagcagacggaguuaagggguuuucauacaaauaugguaaugguguuuggauaggaaggacuaaaaguaacaaacuuagaaagggguuugagaugauuugggauccuaauggauggacagauaccgacagugauuucucagugaaacaggauguuguggcaauaacugauuggucaggguacaguggaaguuucguucaacauccugaguuaacaggauuggacuguauaagaccuugcuucuggguugaguuagucagaggacugccuagagaaaauacaacaaucuggacuagugggagcagcauuucuuuuuguggcguugauagugauacugcaaacuggucuuggccagacggugcugaguugccguucaccauugacaaauag

SEQ ID NO: 48144 - RNA, 1413 nt, Artificial Sequence; identical to SEQ ID NO: 48059
  derived and/or modified CDS sequence (wt) from neuraminidase__InfluenzaA__ABW36248

SEQ ID NO: 48145 - RNA, 1413 nt, Artificial Sequence
  derived and/or modified CDS sequence (wt) from neuraminidase__InfluenzaA__ABW36259
augaacccaaaucaaaagauaauaaccauuggaucaaucaguauagcaaucggaauaauuagucuaauguugcaaauaggaaauauuauuucaauaugggcuagucacucaauccaaacuggaagucaaaacaacacuggaauaugcaaccaaagaaucaucacauaugaaaacagcaccugggugaaucacacauauguuaauauuaacaacacuaauguuguugcuggaaaggacaaaacuucagugacauuggccggcaauucaucucuuuguucuaucaguggaugggcuauauacacaaaagacaacagcauaagaauuggcuccaaaggagauguuuuugucauaagagaaccuuucauaucauguucucacuuggaaugcagaaccuuuuuucugacccaaggcgcucuauuaaaugacaaacauucaaaugggaccguaaaggacagaaguccuuauagggccuuaaugagcuguccucuaggugaagcuccguccccauacaauucaaaguucgaaucaguugcauggucagcaagcgcaugccaugauggcaugggcugguuaacaaucggaauuucugguccagacaauggagcuguggcuguacuaaaauacaacggaauaauaacuggaaccauaaaaaguuggaaaaagcaaauauuaagaacacaagagucugaaugugucuguaugaacgggucauguuucaccauaaugaccgauggcccgaguaauagggccgccucguacaaaauuuucaagaucgaaaaggggaagguuacuaaaucaauagaguugaaugcacccaauuuucauuaugaggaauguuccuguuacccagacacuggcauagugauguguguaugcagggacaacuggcacgguucaaaucgaccuugggugucuuuuaaucaaaacuuggauuaucaaauaggauacaucugcaguggagugcucggugacaauccgcgucccgaagauggagagggcagcugcaauccagugacuguugauggagcagacggagugaaaggguuuucauacaaauaugauaaugguguuuggauaggaaggaccaaaaguaacagacuuagaaagggguuugagaugauuugggauccuaauggauggacaaauaccgacagugauuucucagugaaacaggauguuguagcaauaacugauuggucaggguacagcggaaguuucguccaacauccugagcuaacaggauuggacuguauaagaccuugcuucuggguugaguuagucagagggcugccuagagaaaauacaacaaucuggacuagugggagcagcauuucuuuuuguggcguuaguagugauacugcaaacuggucuuggccagacggugcugaguugccguucaccauugacaaguag

SEQ ID NO: 48146 - RNA, 1413 nt, Artificial Sequence
  derived and/or modified CDS sequence (wt) from neuraminidase__InfluenzaA__ABW36281
augaauccaaaucaaaaaauaauaaccauuggaucaaucaguauagcaaucgggauaauuagucuaauguugcaaauaggaaauauuauuucaauaugggcuagucacucaauccaaacuggaagucaaaaccacacuggaauaugcaaccaaagaaucaucacauaugaaaacagcaccugggugaaucacacauauguuaguauuaacaacacuaauguuguugcuggaaaggacaaaacuucagugacauuggccggcaauucaucucuuuguucuaucaguggaugggcuauauacacaaaagacaacagcauaagaauuggcuccaaaggagauguuuuugucauaagagaaccuuucauaucauguucucauuuggaaugcaggaccuuuuuucugacccaaggugcucuauuaaaugacaaacauucaaauggaaccguuaaggaccgaaguccuuauagggccuuaaugagcuguccucuaggugaagcuccguccccauacaauucaaaguuugaaucaguugcauggucagcaagcgcaugccaugauggcaugggcugguuaacaaucggaauuucugguccagacaauggagcuguggcuguacuaaaauacaacggaauaauaacugaaaccauaaaaaguuggaaaaagcgaauauugagaacacaagagucugaaugugucugugugaacgggucauguuucaccauaaugaccgauggcccgaguaauggggccgccucguacaaaaucuucaagaucgaaaaggggaagguuacuaaaucaauagaguuaaaugcacccaauuuucauuaugaggaauguuccuguuacccagacacuggcacagugauguguguaugcagggacaacuggcaugguucaaaucgaccuugggugucuuuuaaucaaaacuuggauuaucaaauaggauacaucugcaguggaguguuuggugacaauccgcgucccaaagauggaaagggcagcuguaauccagugacuguugauggagcagacgggguuaagggguuuucauacaaauaugguaaugguguuuggauaggaagaacuaaaaguaacagacuuagaaagggguuugagaugauuugggauccuaauggauggacagauaccgacagugauuucucagugaaacaggauguuguggcaauaacugauuggucaggguacaguggaaguuucguucaacauccugaguuaacaggauuggacuguauaagaccuugcuucuggguugaguuagucagaggacugccuagagaaaauacaacaaucuggacuagugggagcagcauuucuuuuuguggcguugauagugauacugcaaacuggucuuggccagacggcgcugaguugccguucacuauugacaaguag

SEQ ID NO: 48147 - RNA, 1413 nt, Artificial Sequence
  derived and/or modified CDS sequence (wt) from neuraminidase__InfluenzaA__ABW36292
augaauccaaaucaaaaaauaauaaccauuggaucaaucaguauagcaaucgggauaauuagucuaauguugcaaauaggaaauauuauuucaauaugggcuagucacucaauccaaacuggaagucaaaaccacacuggaauaugcaaccaaagaaucaucacauaugaaaacagcaccugggugaaucacacauauguuaguauuaacaacacuaauguuguugcuggaaaggacaaaacuucagugacauuggccggcaauucaucucuuuguucuaucaguggaugggcuauauacacaaaagacaacagcauaagaauuggcuccaaaggagauguuuuugucauaagagaaccuuucauaucauguucucauuuggaaugcaggaccuuuuuucugacccaaggugcucuauuaaaugacaaacauucaaauggaaccguuaaggaccgaaguccuuauagggccuuaaugagcuguccucuaggugaagcuccguccccauacaauucaaaguuugaaucaguugcauggucagcaagcgcaugccaugauggcaugggcugguuaacaaucggaauuucugguccagacaauggagcuguggcuguacuaaaauacaacggaauaauaacugaaaccauaaaaaguuggaaaaagcgaauauugagaacacaagagucugaaugugucugugugaacgggucauguuucaccauaaugaccgauggcccgaguaauggggccgccucguacaaaaucuucaaaaucgaaaaggggaagguuacuaaaucaauagaguuaaaugcacccaauuuucauuacgaggaauguuccuguuacccagacacuggcacagugauguguguaugcagggacaacuggcaugguucaaaucgaccuugggugucuuuuaaucaaaacuuggauuaucaaauaggauacaucugcaguggaguguucggugacaauccgcgucccaaagauggaaagggcagcuguaauccagugacuguugauggagcagacgggguuaagggguuuucauacaaauaugguaaugguguuuggauaggaagaacuaaaaguaacagacuuagaaagggguuugagaugauuugggauccuaauggauggacagauaccgacagugauuucucagugaaacaggauguuguggcaauaacugauuggucaggguacaguggaaguuucguucaacauccugaguuaacaggauuggacuguauaagaccuugcuucuggguugaguuagucagaggacugccuagagaaaauacaacaaucuggacuagugggagcagcauuucuuuuuguggcguugauagugauacugcaaacuggucuuggccagacggugcugaguugccguucaccauugacaaguag

SEQ ID NO: 48148 - RNA, 1413 nt, Artificial Sequence
  derived and/or modified CDS sequence (wt) from neuraminidase__InfluenzaA__ABW36303
augaauccaaaucaaaaaauaauaaccauuggaucaaucaguauagcaaucggaauaauuagucuaauguugcaaauaggaaauauuauuucaauaugggcuagucacucaauccaaacuggaagucaaaaccacacuggaauaugcaaccaaagaaucaucacauaugaaaacagcaccugggugaaucacacauauguuaauauuaacaacacuaauguuguuacuggaaaggacaaaacuucagugacauuggccggcaauucaucucuuuguucuaucaguggaugggcuauauacacaaaagacaacagcauaagaauuggcuccaaaggagauguuuuugucauaagagaaccuuucauaucauguucucauuuggaaugcaggaccuuuuuucugacccaaggugcucuauuaaaugacaaacauucaaauggaaccguuaaggacagaaguccuuauagggccuuaaugagcuguccucuaggugaagcuccguccccauacaauucaaaguuugaaucaguugcauggucagcaagcgcaugccaugauggcaugggcugguuaacaaucggaauuucugguccagacaauggagcuguggcuguacuaaaauacaacggaauaauaacugaaaccauaaaaaguuggaaaaagcgaauauugagaacacaagagucugaaugugucugugugaacgggucauguuucacuauaaugaccgauggcccgagugauggggccgccucguacaaaaucuucaagaucgaaaaggggaagguuacuaaaucaauagaguuaaaugcacccaauuuucauuaugaggaauguuccuguuacccagacacuggcacagugauguguguaugcagggacaacuggcaugguucaaaucgaccuugggugucuuuuaaucaaaacuuggauuaucaaauaggauacaucugcaguggaguguucggugacaauccgcgucccaaagauggaaagggcagcuguaauccagugacuguugauggagcagacggaguuaagggguuuucauacaaauaugguaaugguguuuggauaggaaggacuaagaguaacaaacuuagaaaaggguuugagaugauuugggauccuaauggauggacagauaccgacaaugauuucucagugaaacaggauguuguggcaauaacugauuggucaggguacaguggaaguuucguucaacauccugaguuaacaggauuggacuguauaagaccuugcuucuggguugaguuagucagaggacugccuagagaaaauacaacaaucuggacuagugggagcagcauuucuuuuuguggcguugauagugauacugcaaacuggucuuggccagacggugcugaguugccguucaccauugacaaauag

SEQ ID NO: 48149 - RNA, 1413 nt, Artificial Sequence
  derived and/or modified CDS sequence (wt) from neuraminidase__InfluenzaA__ABW36314
augaauccaaaucagaaaauaauaaccauuggaucaaucuguauggcaaucggaauaauuagucuaauauugcaaauagggaauauuaucucaauauggguuagccacucaauucaaacuggaagucaaaaccauacuggaauaugcaaccaaagaaucauuaccuaugaaaauagcaccuggguaaaucaaacauauguuaauauuagcaacacuaacguuguugcuggaaaggacacaacuucaaugacauuagcuggcaauucaucucuuuguccuauccgugggugggcuauauacagcaaagacaacagcauaagaauugguuccaaaggagauguuuuugucauaagagaaccuuuuauaucauguucucacuuggaaugcagaaccuuuuuucugacccaaggcgcucuauuaaaugacaagcauucaaaugggaccguuaaggacagaagcccuuauagggccuuaaugagcuguccuauaggugaagcuccgucuccauacaauucaagguuugaaucgguugcuuggucagcaagugcaugucaugauggcaugggcuggcuaacaaucggaauuucugguccagaugauggagcaguggcuguacuaaaauacaacggcauaauaacugaaaccauaaaaaguuggaggaagcaaauauuaagaacacaagagucugaaugugucuguguaaacgguucauguuuuaccauaaugaccgauggcccgagugaugggcaggccucguacagaaucuucaaaaucgagaaggggaagauuacuaaaucaauagaguuggaugcacccaauuuucauuacgaggaauguuccuguuacccagacaccggcacagugaugugugugugcagagacaauuggcaugguucgaaucgaccuugggugucuuuuaaucaaaaccuggauuaucaaauaggauacaucugcagugggguuuucggugacaauccgcgucccaaagauggaaaaggcagcugugauccaguaaauguugauggagcagacggaguaaagggguuuucauacagguaugguaaugguguuuggauaggaaggacuaaaaguaacagcuccagaaagggauuugagaugauuugggauccuaauggauggacagauaccgauaguaauuucuuagugaaacaggauguaguggcaaugacugauuggucaggguacagcggaaguuucguucaacauccugaguuaacaggauuggacuguaugaggccuugcuucuggguugaauuaaucagaggacgacccagagaaaaaacaacgaucuggacuagugggagcagcauuucuuuuuguggcgugaauagugauacuguaaauuggucuuggccagacggugcugaguugccauucaccauugacaaguag

SEQ ID NO: 48150 - RNA, 1410 nt, Artificial Sequence
  derived and/or modified CDS sequence (wt) from neuraminidase__InfluenzaA__ABW38366
augaauccaaaucaaaagauaauaacgauuggcucuguuucucucaccauuuccacaauaugcuucuucaugcaaauugccaucuugauaacuacuguaacauugcauuucaagcaauaugaauucaacucccccccaaacaaccaagugaugcugugugaaccaacaauaauagaaagaaacauaacagagauaguguaucugaccaacaccaccauagagaaggaaauaugccccaaacuagcagaauacagaaauuggucaaaaccgcaauguaacauuacaggauuugcaccuuuuucuaaggacaauucgauuaggcuuuccgcugguggggacaucugggugacaagagaaccuuaugugucaugcgauccugacaaguguuaucaauuugcccuuggacagggaacaacacuaaacaacgugcauucaaaugacacaguacaugauaggaccccuuaucggacccuauugaugaaugaguuagguguuccauuucaucuggggaccaagcaagugugcauagcaugguccagcucaaguugucacgauggaaaagcauggcugcauguuuguguaacaggggaugauaaaaaugcaacugcuagcuucauuuacaaugggaggcuuguagauaguauugcuucaugguccaaagaaauccucaggacccaggagucagaaugcguuuguaucaauggaacuuguacaguaguaaugacugaugggagugcuucaggaaaagcugauacuaaaauacuauucauugaggaggggaaaaucguucauacuagcacauugucaggaagugcucagcaugucgaggaguguuccugcuauccucgauauccuggugucagaugugucugcagagacaacuggaaaggcuccaauaggcccauaguagauauaaacauaaaggauuauagcauuguuuccaguuaugugugcucaggacuuguuggagacacacccagaaaaaacgacagcuccagcaguagccauugcuuggauccuaacaaugaagaagguggucauggagugaaaggcugggccuuugaugauggaaaugacguguggaugggaagaacgaucagcgagaaguuacgcucaggauaugaaaccuucaaagucauugaaggcugguccaacccuaauuccaaauugcagauaaauaggcaagucauaguugacagagguaauagguccgguuauucugguauuuucucuguugaaggcaaaagcugcaucaaucggugcuuuuauguggaguugauaaggggaagaaaagaggaaacugaagucuuguggaccucaaacaguauuguuguguuuuguggcaccucagguacauauggaacaggcucauggccugauggggcggauaucaaucucaugccuauauaa

SEQ ID NO: 48151 - RNA, 1413 nt, Artificial Sequence; identical to SEQ ID NO: 48141
  derived and/or modified CDS sequence (wt) from neuraminidase__InfluenzaA__ABW39780

SEQ ID NO: 48152 - RNA, 1413 nt, Artificial Sequence
  derived and/or modified CDS sequence (wt) from neuraminidase__InfluenzaA__ABW39809
augaauccaaaucaaaaaauaauaaccauuggaucaaucaguauagcaaucgggauaauuagucuaauguugcaaauaggaaauauuauuucaauaugggcuagucacucaauccaaacuggaagucaaaaccacacuggaauaugcaaccaaagaaucaucacauaugaaaacagcaccugggugaaucacacauauguuaguauuaacaacacuaauguuguugcuggaaaggacaaaacuuuagugacauuggccggcaauucaucucuuuguucuaucaguggaugggcuauauacacaaaagacaacagcauaagaauuggcuccaaaggagauguuuuugucauaagagaaccuuucauaucauguucucauuuggaaugcaggaccuuuuuucugacccaaggugcucuauuaaaugacaaacauucaaauggaaccguuaaggaccgaaguccuuauagggccuuaaugagcuguccucuaggugaagcuccguccccauacaauucaaaguuugaaucaguugcauggucagcaagcgcaugccaugauggcaugggcugguuaacaaucggaauuucugguccagacaauggagcuguggcuguacuaaaauacaacggaauaauaacugaaaccauaaaaaguuggaaaaagcgaauauugagaacacaagagucugaaugugucugugugaacgggucauguuucaccauaaugaccgauggcccgaguaauggggccgccucguacaaaaucuucaaaaucgaaaaggggaagguuacuaaaucaauagaguuaaaugcacccaauuuucauuaugaggaauguuccuguuacccagacacuggcacagugauguguguaugcagggacaacuggcaugguucaaaucgaccuugggugucuuuuaaucaaaacuuggauuaucaaauaggauacaucugcaguggaguguucggugacaauccgcgucccaaagauggaaagggcagcuguaauccagugacuguugauggagcagacgggguuaagggguuuucauacaaauaugguaaugguguuuggauaggaagaacuaaaaguaacagacuuagaaagggguuugagaugauuugggauccuaauggauggacagauaccgacagugauuucucagugaaacaggauguuguggcaauaacugauuggucaggguacaguggaaguuucguucaacauccugaguuaacaggauuggacuguauaagacccugcuucuggguugaguuagucagaggacugccuagagaaaauacaacaaucuggacuagugggagcagcauuucuuuuuguggcguugauagugauacugcaaacuggucuuggccagacggugcugaguugccguucaccauugacaaguag

SEQ ID NO: 48153 - RNA, 1413 nt, Artificial Sequence; identical to SEQ ID NO: 48055
  derived and/or modified CDS sequence (wt) from neuraminidase__InfluenzaA__ABW39820

SEQ ID NO: 48154 - RNA, 1413 nt, Artificial Sequence
  derived and/or modified CDS sequence (wt) from neuraminidase__InfluenzaA__ABW39831
augaacccaaaucaaaaaauaauaaccauuggaucaaucaguauagcaaucggaauaauuagucuaauguugcaaauaggaaauauuauuucaauaugggcuagucacucaauccaaacuggaagucaaaaccacacuggaauaugcaaccaaagaaucaucacauaugaaaacagcaccugggugaaucacacauauguuaauauuaacaacacuaauguuguugcuggaaaggacaaaacuccagugacauuggucggcaacucaucucuuuguucuaucaguggaugggcuauauacacaaaagacaacagcauaagaauuggcuccaaaggagauguuuuugucauaagagaaccuuucauaucauguucucacuuggaaugcaaaaccuuuuuucugacccaaggcgcucuauuaaaugacaaacauucaaaugggaccguaaaggacagaaguccuuauagggccuuaaugagcuguccucuaggugaagcuccguccccauacaauucaaaguucgaaucaguugcauggucagcaagcgcaugccaugauggcauaggcugguuaacaauaggaauuucugguccagacaauggagcuguggcuguacuaaaauacaacggaauaauaacuggaaccauaaaaaguuggaaaaagcaaauauuaagaacacaagagucugaaugugucuguaugaacgggucauguuucaccauaaugaccgaugguccgaguaauggggccgccucguacaaaauuuucaagaucgaaaaggggaagguuacuaaaucaauggaguugaaugcacccaauuuucauuaugaggaauguucuuguuacccagacacuggcacagugauguguguaugcagggacaacuggcaugguucaaaucgaccuugggugucuuuuaaucaaaacuuggauuaucaaauaggauacaucugcaguggaguguucggugacaauccgcgucccaaagauggagagggcagcugcaauccagugacuguugauggagcaaacggaguaaaaggguuuucauacaaauaugguaaugguguuuggauaggaaggaccaaaaguaacagaauuagaaagggguuugagaugauuugggauccuaauggauggacaaauaccgacagugauuucucagugaaacaggauauuguagcaauaacugauuggucaggguacagcggaaguuucguccaacauccugaguuaacaggauuggacuguauaagaccuugcuucuggguugaguuagucagagggcugccuagagaaaauacaacaaucuggacuagugggagcagcauuucuuuuuguggcguuaauggugauauugcaaauuggucuuggccagacggugcugaguugccguucaccauugacaaguag

SEQ ID NO: 48155 - RNA, 1413 nt, Artificial Sequence
  derived and/or modified CDS sequence (wt) from neuraminidase__InfluenzaA__ABW39842
augaauccaaaucaaaaaauaauaaccauuggaucaaucaguauagcaauuggaauaauuagucuaauguuacaaauaggaaauauuauuucaauaugggcuagucacucaauccaaacuggaagucaaaaccacacuggaauaugcaaccaaagaaucaucacauaugaaaacagcaccugggugaaucacacauauguuaauauuaacaacacuaauguuguugcuggaaaggacaaaacuucagugacauuggccggcaauucaucucuuuguucuaucaguggaugggcuauauacacaaaagacaacagcauaagaauuggcuccaaaggagauguuuuugucauaagagaaccuuucauaucauguucucauuuggaaugcaggaccuuuuuucugacccaaggugcucuauuaaaugacaaacauucaaauggaaccguuaaggacagaaguccuuauagggccuuaaugagcuguccucuaggugaagcuccguccccauacaauucaaaguuugaaucaguugcauggucagcaagcgcaugccaugauggcaugggcugguuaacaaucgggauuucugguccagacaauggagcuguggcuguacuaaaauacaacggaauaauaacugaaaccauaaaaaguuggaaaaagcgaauauugagaacacaggagucugaaugugucugugugaacgggucauguuucaccauaaugaccgauggcccgaguaauggggccgccucguacaaaaucuucaagaucgaaaaggggaagguuacuaaaucaauagaguuaaaugcacccaauuuucauuaugaggaauguuccuguuacccagacacuggcacagugauguguguaugcagggauaacuggcaugguucaaaucgaccuugggugucuuuuaaucaaaacuuggauuaucaaguaggauacaucugcaguggaguguucggugacaauccgcgucccaaagauggaaagggcagcuguaauccaaugacuguugauggagcagacggaguuaaaggguuuucauacaaauaugguaaugguguuuggauaggaaggacuaaaaguaacaaacuuagaaagggguuugagaugauuugggauccuaauggauggacagauaccgacagugauuucucagugaaacaggauguuguggcaauaaccgauuggucaggguacaguggaaguuucguucaacauccugaguuaacaggauuggacuguauaagaccuugcuucuggguugaguuagucagaggacugccuagagaaaaugcaacaaucuggacuagugggagcagcauuucuuuuuguggcguugauagugauacugcaaauuggucuuggccagacggugcugaguugccguucaccauugacaaauag

SEQ ID NO: 48156 - RNA, 1413 nt, Artificial Sequence
  derived and/or modified CDS sequence (wt) from neuraminidase__InfluenzaA__ABW39864
augaauccaaaucaaaaaauaauaaccauuggaucaaucaguauagcaauagggauaauuagucuaauguugcaaauaggaaauauuauuucaauaugggcuagucacucaauccaaacuggaagucaaaaccacacuggaauaugcaaccaaagaaucaucacauaugaaaacagcaccugggugaaucacacauauguuaguauuaacaacacuaauguuguugcugggaaggacaaaacuucagugacauuggccggcaauucaucucuuuguucuaucaguggaugggcuauauacacaaaagacaacagcauaagaauuggcuccaaaggagauguuuuugucauaagagaaccuuucauaucauguucucauuuggaaugcaggaccuuuuuucugacccaaggugcucuauuaaaugacaaacauucaaauggaaccguuaaggaccgaaguccuuauagggccuuaaugagcuguccucuaggugaagcuccguccccauacaauucaaaguuugaaucaguugcauggucagcaagcgcaugccaugauggcaugggcugguuaacaaucggaauuucugguccagacaauggagcuguggcuguacuaaaauacaacggaauaauaacugaaaccauaaaaaguuggaaaaagcgaauauugagaacacaagagucugaaugugucugugugaacgggucauguuucaccauaaugaccgauggcccgaguaauggggccgccucguacaaaaucuucaagaucgaaaaggggaagguuacuaaaucaauagaguuaaaugcacccaauuuucauuaugaggaauguuccuguuacccagacacuggcacagugauguguguaugcagggacaacuggcaugguucaaaucgaccuugggugucuuuuaaucaaaacuuggauuaucaaauaggauacaucugcaguggaguguucggugacaauccgcgucccaaagauggaaagggcagcuguaauccagugacuguugauggagcagacgggguuaagggguuuucauacaaauaugguaaugguguuuggauaggaagaacuaaaaguaacagacuuagaaagggguuugagaugauuugggauccuaauggauggacagauaccgacagugauuucucagugaaacaggauguuguggcaauaacugauuggucaggguacaguggaaguuucguucaacauccugaguuaacaggauuggacuguauaagaccuugcuucuggguugaguuagucagaggacugccuagagaaaauacaacaaucuggacuagugggagcagcauuucuuuuuguggcguugauagugauacugcaaacuggucuuggccagacggugcugaguugccguucaccauugacaaguag

SEQ ID NO: 48157 - RNA, 1410 nt, Artificial Sequence; identical to SEQ ID NO: 48090
  derived and/or modified CDS sequence (wt) from neuraminidase__InfluenzaA__ABW39875

SEQ ID NO: 48158 - RNA, 1413 nt, Artificial Sequence
  derived and/or modified CDS sequence (wt) from neuraminidase__InfluenzaA__ABW39886
augaauccaaaucaaaaaauaauaaccauuggaucaaucaguauagcaaucgggauaauuagucuaauauugcaaauaggaaauauuauuucaauaugggcuagucacucaauccaaacuagaaaucaaaaccacacuggaauaugcaaccaaagaaucaucacauaugaaaacagcaccugggugaaucacacauauguuaguaucaacaacacuaauguuguugcuggaaaggacaaaacuucagugacauuggccggcaauucaucucuuuguucuaucaguggaugggcuauauacacaaaagacaacagcauaagaauuggcuccaaaggagauguuuuugucauaagagaaccuuucauaucauguucucauuuggaaugcaggaccuuuuuucugacccaaggugcucuauuaaaugacaaacauucaaauggaaccguuaaggaccgaaguccuuauagggccuuaaugagcuguccucuaggugaagcuccguccccauacaauucaaaguuugaaucaguugcauggucagcaagcgcaugccaugauggcaugggcugguuaacaaucggaauuucugguccagacaauggagcuguggcuguacuaaaauacaacggaauaauaacugaaaccauaaaaaguuggaaaaagcgaauauugagaacacaagagucugaaugugucugugugaacgggucauguuucaccauaaugaccgaugguccgaguaauggggccgccucguacaaaaucuucaaaaucgaaaaggggaagguuacuaaaucaauagaguuaaaugcacccaauuuucauuaugaggaauguuccuguuacccagacacuggcacagugauguguguaugcagggacaacuggcaugguucaaaucgaccuugggugucuuuuaaucaaaacuuggauuaucaaauaggauacaucugcaguggaguguucggugacaauccgcguccuaaagauggaaagggcagcuguaauccagugacuguugauggagcagacgggguuaagggguuuucauacaaauaugguaaugguguuuggauaggaagaacuaaaaguaacagacuuagaaagggguuugagaugauuugggauccuaauggauggacagauaccgacagugauuucucagugaaacaggauguuguggcaauaacugauuggucaggguacaguggaaguuucguucaacauccugaguuaacaggauuggacuguauaagaccuugcuucuggguugaguuagucagaggacugccuagagaaaauacaacaaucuggacuagugggagcagcauuucuuuuuguggcguugauagugauacugcaaacuggucuuggccagacggugcugaguugccguucaccauugacaaguag

SEQ ID NO: 48159 - RNA, 1413 nt, Artificial Sequence; identical to SEQ ID NO: 48065
  derived and/or modified CDS sequence (wt) from neuraminidase__InfluenzaA__ABW39897

SEQ ID NO: 48160 - RNA, 1413 nt, Artificial Sequence
  derived and/or modified CDS sequence (wt) from neuraminidase__InfluenzaA__ABW39908
augaauccaaaucaaaaaauaauaaccauuggaucaaucaguauagcaaucggaauaacuagucuaauguugcaaauaggaaauauuauuucaauaugggcuagucacucaauccaaacuggaagucaaaaccacacuggaauaugcaaccaaagaaucaucacauaugaaaacagcaccugggugaaucacacauauguuaguauuaacaacacuaauguuguugcuggaaaggacaaaacuucagugacauuggccggcaauucaucucuuuguucuaucaguggaugggcuauauacacaaaagacaacagcauaagaauuggcuccaaaggagauguuuuugucauaagagaaccuuucauaucauguucucauuuggaaugcaggaccuuuuuucugacccaaggugcucuauuaaaugacaaacauucaaauggaaccguuaaggaccgaaguccuuauagggccuuaaugagcuguccucuaggugaagcuccguccccauacaauucaaaguuugaaucaguugcauggucagcaagcgcaugccaugauggcaugggcugguuaacaaucggaauuucugguccagacaauggagcuguggcuguacuaaaauacaacggaauaauaacugaaaccauaaaaaguuggaaaaagcgaauauugagaacacaagagucugaaugugucugugugaacgggucauguuucaccauaaugaccgauggcccgaguaauggggccgccucguacaaaaucuucaagaucgaaaaggggaagguuacuaaaucaauagaguugaaugcacccaauuuucauuaugaggaauguuccuguuacccagacacuggcacagugauguguguaugcagggacaacuggcaugguucaaaucgaccuugggugucuuuuaaucaaaacuuggauuaucaaauaggauacaucugcaguggaguguucggugacaauccgcgucccaaagauggaaagggcagcuguaauccagugacuguugauggagcagacgggguuaagggguuuucauacaaauaugguaaugguguuuggauaggaagaacuaaaaguaacagacuuagaaagggguuugagaugauuugggauccuaauggauggacagauaccgacagugauuucucagugaaacaggauguuguggcaauaacugauuggucaggguacaguggaaguuucguucaacauccugaguuaacaggauuggacuguauaagaccuugcuucuggguugaguuagucagaggacugccuagagaaaauacaacaaucuggacuagugggagcagcauuucuuuuuguggcguugauagugauacugcaaacuggucuuggccagacggugcugaguugccguucaccauugacaaguag

SEQ ID NO: 48161 - RNA, 1413 nt, Artificial Sequence
  derived and/or modified CDS sequence (wt) from neuraminidase__InfluenzaA__ABW39930
augaauccaaaucaaaaaauaauaaccauuggaucaaucaguauagcaaucgggauaauuagucuaauguugcaaauaggaaauauuauuucaauaugggcuagucacucaauccaaacuggaagucaaaaccacacuggaauaugcaaccaaagaaucaucacauaugaaaacagcaccugggugaaucacacauauguuaguauuaacaacacuaauguuguugcuggaaaggacaaaacuucagugacauuggccggcaauucaucucuuuguucuaucaguggaugggcuauauacacaaaagacaacagcauaagaauuggcuccaaaggagauguuuuugucauaagagaaccuuucauaucauguucucauuuggaaugcaggaccuuuuuucugacccaaggugcucuauuaaaugacaaacauucaaauggaaccguuaaggaccgaaguccuuauagggccuuaaugagcuguccucuaggugaagcuccguccccauacaauucaaaguuugaaucaguugcauggucagcaagcgcaugccaugauggcaugggcugguuaacaaucggaauuucugguccagacaauggagcuguggcuguacuaaaauacaacggaauaauaacugaaaccauaaaaaguuggaaaaagcgaauauugaggacacaagagucugaaugugucugugugaacgggucauguuucaccauaaugaccgauggcccgagugauggggccgccucguacaaaaucuucaagaucgaaaaggggaagguuacuaaaucaauagaguuaaaugcacccaauuuucauuaugaggaauguuccuguuacccagacacuggcacagugauguguguaugcagggacaacuggcaugguucaaaucgaccuugggugucuuuuaaucaaaacuuggauuaucaaauaggauacaucugcaguggaguguuuggugacaauccgcgucccaaagauggaaagggcagcuguaauccagugacuguugauggagcagacgggguuaagggguuuucauacaaauaugguaaugguguuuggauaggaagaacuaaaaguaacagacuuagaaagggguuugagaugauuugggauccuaauggauggacagauaccgacagugauuucucagugaaacaggauguuguggcaauaacugauuggucaggguacaguggaaguuucguucaacauccugaguuaacaggauuggacuguauaagaccuugcuucuggguugaguuagucagaggacugccuagagaaaauacaacaaucuggacuagugggagcagcauuucuuuuuguggcguugauagugauacugcaaacuggucuuggccagacggugcugaguugccguucacuauugacaaguag

SEQ ID NO: 48162 - RNA, 1413 nt, Artificial Sequence
  derived and/or modified CDS sequence (wt) from neuraminidase__InfluenzaA__ABW39952
augaauccaaaucaaaaaauaauaaccauuggaucaaucaguauaacaaucgggauaauuagucuaauguugcaaauaggaaauauuauuucaauaugggcuagucacucaauccaaacuggaagucaaaaccacacuggaaugugcaaccaaagaaucaucacauaugaaaacagcaccugggugaaucacacauauguuaguauuaacaacacuaauguuguugcuggaaaggacaaaacuucagugacauuggccggcaauucaucucuuuguucuaucaguggaugggcuauauacacaaaagacaacagcauaagaauuggcuccaaaggagauguuuuugucauaagagaaccuuucauaucauguucucauuuggaaugcaggaccuuuuuucugacccaaggugcucuauuaaaugacaaacauucaaauggaaccguuaaggaccgaaguccuuauagggccuuaaugagcuguccucuaggugaagcuccguccccauacaauucaaaguuugaaucaguugcauggucagcaagcgcaugccaugauggcaugggcugguuaacaaucggaauuucugguccagacaauggagcuguggcuguacuaaaauacaacggaauaauaacugaaaccauaaaaaguuggaaaaagcgaauauugagaacacaagagucugaaugugucugugugaacgggucauguuucaccauaaugaccgauggcccgaguaauggggccgccucguacaaaaucuucaagaucgaaaaggggaagguuacuaaaucaauagaguuaaaugcacccaauuuucauuaugaggaauguuccuguuacccagacacuggcacagugauguguguaugcagggacaacuggcaugguucaaaucgaccuugggugucuuuuaaucaaaacuuggauuaucaaauaggauacaucugcaguggaguguuuggugacaauccgcgucccaaagauggaaagggcagcuguaauccagugacuguugauggagcagacgggguuaagggguuuucauacaaauaugguaaugguguuuggauaggaagaacuaaaaguaacagacuuagaaagggguuugagaugauuugggauccuaauggauggacagauaccgacagugauuucucagugaaacaggauguuguggcaauaacugauuggucaggguacaguggaaguuucguucaacauccugaguuaacaggauuggacuguauaagaccuugcuucuggguugaguuagucagaggacugccuagagaaaauacaacaaucuggacuagugggagcagcauuucuuuuuguggcguugauagugauacugcaaacuggucuuggccagacggugcugaguugccguucacuauugacaaguag

SEQ ID NO: 48163 - RNA, 1413 nt, Artificial Sequence; identical to SEQ ID NO: 48065
  derived and/or modified CDS sequence (wt) from neuraminidase__InfluenzaA__ABW39963

SEQ ID NO: 48164 - RNA, 1413 nt, Artificial Sequence; identical to SEQ ID NO: 48059
  derived and/or modified CDS sequence (wt) from neuraminidase__InfluenzaA__ABW39985

SEQ ID NO: 48165 - RNA, 1413 nt, Artificial Sequence
  derived and/or modified CDS sequence (wt) from neuraminidase__InfluenzaA__ABW39996
augaauccaaaucaaaaaauaauaaccauuggaucaaucaguauagcaauuggaauaauuagucuaauguugcaaauaggaaauauuauuucaauaugggcuagucacucaauccaaacuggaagucaaaaccacacuggaauaugcaaccaaagaauuaucacauaugaaaacagcaccugggugaaucacacauauguuaauauuaacaacacuaauguuguugcuggaaaggacaaaacuucagugacauuggccggcaauucaucucuuuguucuaucaguggaugggcuauauacacaaaagacaacagcauaagaauuggcuccaaaggagauguuuuugucauaagagaaccuuucauaucauguucucauuuggaaugcaggaccuuuuuucugacccaaggugcucuauuaaaugacaaacauucaaauggaaccguuaaggacagaaguccuuauagggccuuaaugagcuguccucuaggugaagcuccguccccauacaauucaaaguuugaaucaguugcauggucagcaagcgcaugccaugauggcaugggcugguuaacaaucgggauuucugguccagacaauggagcuguggcuguacuaaaauacaacggaauaauaacugaaaccauaaaaaguuggaaaaagcgaauauugagaacacaggagucugaaugugucugugugaacgggucauguuucaccauaaugaccgauggcccgaguaaugggaccgccucguacaaaaucuucaagaucgaaaaggggaagguuacuaaaucaauagaguuaaaugcacccaauuuucauuaugaggaauguuccuguuacccagacacuggcacagugauguguguaugcagggauaacuggcaugguucaaaucgaccuugggugucuuuuaaucaaaacuuggauuaucaaguaggauacaucugcaguggaguguucggugacaauccgcgucccaaagauggaaagggcagcuguaauccaaugacuguugauggagcagacggaguuaagggguuuucauacaaauaugguaaugguguuuggauaggaaggacuaaaaguaacaaacuuagaaagggguuugagaugauuugggauccuaauggauggacagauaccgacagugauuucucagugaaacaggauguuguggcaauaacugauuggucaggguacaguggaaguuucguucagcauccugaguuaacaggauuggacuguauaagaccuugcuucuggguugaguuagucagaggacugccuagagaaaauacaacaaucuggacuagugggagcagcauuucuuuuuguggcguugauagugauacugcaaacuggucuuggccagacggugcugaguugccguucaccauugacaaauag

SEQ ID NO: 48166 - RNA, 1413 nt, Artificial Sequence; identical to SEQ ID NO: 48045
  derived and/or modified CDS sequence (wt) from neuraminidase__InfluenzaA__ABW40007

SEQ ID NO: 48167 - RNA, 1413 nt, Artificial Sequence
  derived and/or modified CDS sequence (wt) from neuraminidase__InfluenzaA__ABW40018
augaauccaaaucaaaaaauaauaaccauuggaucaaucaguauagcaaucggaauaauuagucuaauguugcaaauaggaaauauuauuucaauaugggcuagucacucaauccaaacuggaagucaaaaccacacuggaauaugcaaccaaagaaucaucacauaugaaaacagcaccugggugaaucacacauauguuaauauuaacaacacuaauguuguugcuggaaaggacaaaacuucagugacauuggccggcaauucaucucuuuguucuaucaguggaugggcuauauacacaaaagacaacagcauaagaauuggcuccaagggagauguuuuugucauaagagaaccuuucauaucauguucucauuuggaaugcaggaccuuuuuucugacccaaggugcucuauuaaaugacaaacauucaaauggaaccguuaaggacagaaguccuuauagggccuuaaugagcuguccucuaggugaagcuccguccccauacaauucaaaguuugaaucaguugcauggucagcaagcgcaugccaugauggcaugggcugguuaacaaucggaauuucugguccagacaauggagcuguggcuguacuaaaauacaacggaauaauaacugaaaccauaaaaaguuggaaaaagcgaauauugagaacacaagagucugaaugugucugugugaacgggucuuguuucaccauaaugaccgauggcccgaguaauggggccgccucguacaaaaucuucaagaucgaaaagggaaagguuacuaaaucaauagaguuaaaugcacccaauuuucauuaugaggaauguuccuguuacccagacacuggcacagugauguguguaugcagagacaacuggcaugguucaaaucgaccuugggugucuuuuaaucaaaacuuggauuaucaaauaggauacaucugcaguggaguguucggugacaauccgcgucccaaagauggaaagggcagcuguaauccagugacuguugauggagcagacggaauuaagggguuuucauacaaauaugguaaugguguuuggauaggaagaacuaaaaguaacagacuuagaaagggguuugagaugauuugggauccuaauggauggacaaauaccgacagugauuucucagugaaacaggauguuguggcaauaacugauuggucaggguacaguggaaguuucguucaacauccugaguuaacaggauuggacuguauaagaccuugcuucuggguugaauuagucagaggacugccuagagaaaauacaacaaucuggacuagugggagcagcauuucuuuuuguggcguugauggugauacugcaaacuggucuuggccagacggugcugaguugccguucaccauugacaaauag

SEQ ID NO: 48168 - RNA, 1410 nt, Artificial Sequence; identical to SEQ ID NO: 48061
  derived and/or modified CDS sequence (wt) from neuraminidase__InfluenzaA__ABW40029

SEQ ID NO: 48169 - RNA, 1413 nt, Artificial Sequence
  derived and/or modified CDS sequence (wt) from neuraminidase__InfluenzaA__ABW40040
augaauccaaaucaaaaaauaauaaccauuggaucaaucaguauagcaaucgggauaauuagucuaauguugcaaauaggaaauauuauuucaauaugggcuagucacucaauccaaacuggaagucaaaaccacacuggaauaugcaaccaaagaaucaucacauaugaaaacagcaccugggugaaucacacauauguuaguauuaacaacacuaauguuguugcuggaaaggacaaaacuucagugacauuggccggcaauucaucucuuuguucuaucaguggaugggcuauauacacaaaagacaacagcauaagaauuggcuccaaaggagauguuuuugucauaagagaaccuuucauaucauguucucauuuggaaugcaggaccuuuuuucugacccaaggugcucuauuaaaugacaaacauucaaauggaaccguuaaggaccgaaguccuuauagggccuuaaugagcuguccucuaggugaagcuccguccccauacaauucaaaguuugaaucaguugcauggucagcaagcgcaugccaugauggcaugggcugguuaacaaucggaauuucugguccagacaauggagcuguggcuguacuaaaauacaacggaauaauaacugaaaccauaaaaaguuggaaaaagcgaauauugagaacacaagagucugaaugugucugugugaacgggucauguuucaccauaaugaccgauggcccgaguaauggggccgccucguacaaaaucuucaagaucgaaaaggggaaaguuacuaaaucaauagaguuaaaugcacccaauuuucauuaugaggaauguuccuguuacccagacacuggcacagugauguguguaugcagggacaacuggcaugguucaaaucgaccuugggugucuuuuaaucaaaacuuggauuaucaaauaggauacaucugcaguggaguguucggugacaauccgcgucccaaagauggaaagggcagcuguaauccagugacuguugauggagcagacgggguuaagggguuuucauacaaauaugguaaugguauuuggauaggaagaacuaaaaguaacagacuuagaaagggguuugagaugauuugggauccuaauggauggacagauaccgacagugauuucucagugaaacaggauguuguggcaauaacugauuggucaggguacaguggaaguuucguucaacauccugaguuaacaggauuggacuguauaagaccuugcuucuggguugaguuagucagaggacugccuagagaaaauacaacaaucuggacuagugggagcagcauuucuuuuuguggcguugauagugauacugcaaacuggucuuggccagacggugcugaguugccguucaccauugacaaguag

SEQ ID NO: 48170 - RNA, 1413 nt, Artificial Sequence
  derived and/or modified CDS sequence (wt) from neuraminidase__InfluenzaA__ABW40051
augaauccaaaucaaaaaauaauaaccauuggaucaaucaguauagcaaucggaauaauuagucuaauguugcaaauaggaaauauuauuucaauaugggcuagucacucaauccaaacuggaagucaaaaccacacuggaauaugcaaccaaagaaucaucacauaugaaaacagcaccugggugaaucacacauauguuaguauuaacaacacuaauguuguugcuggaaaggacaaaacuucagugacauuggccggcaauucaucucuuuguucuaucaguggaugggcuauauacacaaaagacaacagcauaagaauuggcuccaaaggagauguuuuugucauaagagaaccuuucauaucauguucucauuuggaaugcaggaccuuuuuucugacccaaggugcucuauuaaaugacaaacauucaaauggaaccguuaaggaccgaaguccuuauagggccuuaaugagcuguccucuaggugaagcuccguccccauacaauucaaaguuugaaucaguugcauggucagcaagcgcaugccaugauggcaugggcugguuaacaaucggaauuucugguccagacaauggagcuguggcuguacuaaaauacaacggaauaauaacugaaaccauaaaaaguuggaaaaagcgaauauugagaacacaagagucugaaugugucugugugaacgggucauguuucaccauaaugaccgauggcccgaguaauggggccgccucguacaaaaucuucaagaucgaaaaggggaagguuacuaaaucaauagaguuaaaugcacccaauuuucauuaugaggaauguuccuguuacccagacacuggcacagugauguguguaugcagggacaacuggcaugguucaaaucgaccuugggugucuuuuaaucaaaacuuggauuaucaaauaggauacaucugcaguggaguguucggugacaauccgcgucccaaagauggaaagggcagcuguaauccagugacuguugauggagcagacgggguuaagggguuuucauacaaauaugguaaugguguuuggauaggaagaacuaaaaguaacagacuuagaaagggguuugagaugauuugggauccuaauggauggacagauaccgacagugauuucucagugaaacaggauguuguggcaauaacugauuggucaggguacaguggaaguuucguucaacauccugaguuaacaggauuggacuguauaagaccuugcuucuggguugaguuagucagaggacugccuagagaaaauacaacaaucuggacuagugggagcagcauuucuuuuuguggcguugauagugauacugcaaacuggucuuggccagacggugcugaguugccguucaccauugacaaguag

SEQ ID NO: 48171 - RNA, 1413 nt, Artificial Sequence; identical to SEQ ID NO: 48043
  derived and/or modified CDS sequence (wt) from neuraminidase__InfluenzaA__ABW40062

SEQ ID NO: 48172 - RNA, 1410 nt, Artificial Sequence
  derived and/or modified CDS sequence (wt) from neuraminidase__InfluenzaA__ABW40084
augaauccaaaucaaaagauaauaacgauuggcucuguuucucucaccauuuccacaauaugcuucuucaugcaaacugccaucuugauaacuacuguaacauugcauuucaagcaauaugaauucaacucccccccaaacaaccaagugaugcugugugaaccaacaauaauagaaagaaacauaacagagauaguguaucugaccaacaccaccauagagaaggaaauaugccccaaacuagcagaauacagaaauuggucaaagccgcaaugugacauuacaggauuugcaccuuuuucuaaggacaauucgauuaggcuuuccgcugguggggacaucugggugacaagagaaccuuaugugucaugcgauccugacaaguguuaucaauuugcccuuggacagggaacaacacuaaacaacgugcauucaaaugacacaguacgugauaggaccccuuaucggacccuauugaugaaugaguuagguguuccuuuucaucuggggaccaagcaagugugcauagcaugguccagcucaaguugucacgauggaaaagcauggcugcauguuuguauaacgggggaugauaaaaaugcaacugcuagcuucauuuacaaugggaggcuuguagauaguauuguuucaugguccaaagaaauccucaggacccaggagucagaaugcguuuguaucaauggaacuuguacaguaguaaugacugaugggagugcuucaggaaaagcugauacuaaaauacuauucauugaggaggggaaaaucguucauacuagcacauugucaggaagugcucagcaugucgaggagugcuccugcuauccucgauauccuggugucagaugugucugcagagacaacuggaaaggcuccaauaggcccaucguagauauaaacauaaaggaucauagcauuguuuccaguuauguguguucaggacuuguuggagacacacccagaaaaaacgacagcuccagcaguagccauuguuuggauccuaacaaugaagaagguggucauggagugaaaggcugggccuuugaugauggaaaugacguguggaugggaagaacaaucagcgagaagucacgcuuaggguaugaaaccuucaaagucauugaaggcugguccaacccuaaguccaaauugcagauaaauaggcaagucauaguugacagagguaauagguccgguuauucugguauuuucucuguugaaggcaaaagcugcaucaaucggugcuuuuauguggaguugauaaggggaagaaaagaggaaacugaagucuuguggaccucaaacaguauuguuguguuuuguggcaccucagguacauauggaacaggcucauggccugauggggcggacaucaaucucaugccuauauaa

SEQ ID NO: 48173 - RNA, 1413 nt, Artificial Sequence
  derived and/or modified CDS sequence (wt) from neuraminidase__InfluenzaA__ABW40095
augaauccaaaucaaaaaauaauaaccauuggaucaaucaguguagcaaucgggauaauuagucuaauguugcaaauaggaaauauuauuucaauaugggcuagucacucaauccaaacuggaagucaaaaccacacuggaauaugcaaccaaagaaucaucacauaugaaaacagcaccugggugaaucacacauauguuaguauuaacaacacuaauguuguugcuggaaaggacaaaacuucagugacauuggccggcaauucaucucuuuguucuaucaguggaugggcuauauacacaaaagacaacagcauaagaauuggcuccaaaggagauguuuuugucauaagagaaccuuucauaucauguucucauuuggaaugcaggaccuuuuuucugacccaaggugcucuauuaaaugacaaacauucaaauggaaccguuaaggaccgaaguccuuauagggccuuaaugagcuguccucuaggugaagcuccguccccauacaauucaaaguuugaaucaguugcauggucagcaagcgcaugccaugauggcaugggcugguuaacaaucggaauuucugguccagacaauggagcuguggcuguacuaaaauacaacggaauaauaacugaaaccauaaaaaguuggaaaaagcgaauauugagaacacaagagucugaaugugucugugugaacgggucauguuucaccauaaugaccgauggcccgaguaauggggccgccucauacaaaaucuucaagaucgaaaaggggaagguuacuaaaucaauagaguuaaaugcacccaauuuucauuaugaggaauguuccuguuacccagacacuggcacagugauguguguaugcagggacaacuggcaugguucaaaucgaccuugggugucuuuuaaucaaaacuuggauuaucaaauaggauacaucugcaguggaguguucggugacaauccgcgucccaaagauggaaagggcagcuguaauccaaugacuguugauggagcagacgggguuaagggguuuucauacaaauaugguaaugguguuuggauaggaagaacuaaaaguaacaggcuuagaaagggguuugagaugauuugggauccuaauggauggacagauaccgacagugauuucucagugaaacaggauguuguggcaauaacugauuggucaggguacaguggaaguuucguucaacauccugaguuaacaggauuggacuguauaagaccuugcuucuggguugaguuagucagaggacugccuagagaaaauacaacaaucuggacuagugggagcagcauuucuuuuuguggcguugauagugauacugcaaacuggucuuggccagacggugcugaguugccguucaccauugacaaguag

SEQ ID NO: 48174 - RNA, 1413 nt, Artificial Sequence
  derived and/or modified CDS sequence (wt) from neuraminidase__InfluenzaA__ABW40106
augaauccaaaucaaaaaauaauaaccauuggaucaaucaguauagcaaucgggauaauuagucuaauguugcaaauaggaaauauuauuucaauaugggcuagucacucaauccaaacuggaagucaaaaccacacuggaauaugcaaccaaagaaucaucacauaugaaaacagcaccugggugaaucacacauauguuaguauuaacaacacuaauguuguugcuggaaaggacaaaacuucagugacauuggccggcaauucaucucuuuguucuaucaguggaugggcuauauacacaaaagacaacagcauaagaauuggcuccaaaggagauguuuuugucauaagagaaccuuucauaucauguucucauuuggaaugcaggaccuuuuuucugacccaaggugcucuauuaaaugacaaacauucaaauggaaccguuaaggaccgaaguccuuauagggccuuaaugagcuguccucuaggugaagcuccguccccauacaauucaaaguuugaaucaguugcauggucagcaagcgcaugccaugauggcaugggcugguuaacaaucggaauuucugguccagacaauggagcuguggcuguacuaaaauacaacggaauaauaacugaaaccauaaaaaguuggaaaaagcgaauauugagaacacaagagucugaaugugucuguuugaacgggucauguuucaccauaaugaccgauggcccgaguaauggggccgccucguacaaaaucuucaaaaucgaaaaggggaagguuacuaaaucaauagaguuaaaugcacccaauuuucauuaugaggaauguuccuguuacccagacacuggcacagugauguguguaugcagggacaacuggcaugguucaaaucgaccuugggugucuuuuaaucaaaacuuggauuaucaaauaggauacaucugcaguggaguguucggugacaauccgcgucccaaagauggaaagggcagcuguaauccagugacuguugauggagcagacgggguuaagggguuuucauacaaauaugguaaugguguuuggauaggaagaacuaaaaguaacagacuuagaaagggguuugagaugguuugggauccuaauggauggacagauaccgacagugauuucucagugaaacaggauguuguggcaauaacugauuggucaggguacaguggaaguuucguucaacauccugaguuaacaggauuggacuguauaagaccuugcuucuggguugaguuagucagaggacugccuagagaaaauacaacaaucuggacuagugggagcagcauuucuuuuuguggcguugauagugauacugcaaacuggucuuggccagacggugcugaguugccguucaccauugacaaguag

SEQ ID NO: 48175 - RNA, 1413 nt, Artificial Sequence
  derived and/or modified CDS sequence (wt) from neuraminidase__InfluenzaA__ABW40117
augaauccaaaucaaaaaauaauaaccauuggaucaaucaguauagcaaucgggauaauuagucuaauguugcaaauaggaaauauuauuucaauaugggcuagucacucaauccaaacuggaagucaaaaccacacuggaauaugcaaccaaagaaucaucacauaugaaaacagcaccugggugaaucacacauauguuaguauuaacaacacuaauguuguugcuggaaaggacaaaacuucagugacauuggccggcaauucaucucuuuguucuaucaguggaugggcuauauacacaaaagacaacagcauaagaauuggcuccaaaggagauguuuuugucauaagagaaccuuucauaucauguucucauuuggaaugcaggaccuuuuuucugacccaaggugcucuauuaaaugacaaacauucaaauggaaccguuaaggaccgaaguccuuauagggccuuaaugagcuguccacuaggugaagcuccguccccauacaauucaaaguuugaaucaguugcauggucagcaagcgcaugccaugauggcaugggcugguuaacaaucggaauuucugguccagacaauggagcuguggcuguacuaaaauacaacggaauaauaacugaaaccauaaaaaguuggaaaaagcgaauauugagaacacaagagucugaaugugucugugugaacgggucauguuucaccauaaugaccgauggcccgaguaauggggccgccucguacaaaaucuucaagaucgaaaaggggaagguuacuaaaucaauagaguuaaaugcacccaauuuucauuaugaggaauguuccuguuacccagacacuggcacagugauguguguaugcagggacaacuggcaugguucaaaucgaccuugggugucuuuuaaucaaaacuuggauuaucaaauaggauacaucugcaguggaguguucggugacaauccgcgucccaaagauggaaagggcagcuguaauccagugacuguugauggagcagacgggguuaagggguuuucauacaaauaugguaaugguguuuggauaggaagaacuaaaaguaacagacuuagaaagggguuugagaugauuugggauccuaauggauggacagauaccgacagugauuucucagugaaacaggauguuguggcaauaacugauuggucaggguacaguggaaguuucguucaacauccugaguuaacaggauuggacuguauaagaccuugcuucuggguugaguuagucagaggacugccuagagaaaauacaacaaucuggacuagugggagcagcauuucuuuuuguggcguugauagugauacugcaaacuggucuuggccagacggugcugaguugccguucaccauugacaaguag

SEQ ID NO: 48176 - RNA, 1413 nt, Artificial Sequence; identical to SEQ ID NO: 48045
  derived and/or modified CDS sequence (wt) from neuraminidase__InfluenzaA__ABW40128

SEQ ID NO: 48177 - RNA, 1410 nt, Artificial Sequence; identical to SEQ ID NO: 48061
  derived and/or modified CDS sequence (wt) from neuraminidase__InfluenzaA__ABW40139

SEQ ID NO: 48178 - RNA, 1413 nt, Artificial Sequence; identical to SEQ ID NO: 48048
  derived and/or modified CDS sequence (wt) from neuraminidase__InfluenzaA__ABW40150

SEQ ID NO: 48179 - RNA, 1413 nt, Artificial Sequence
  derived and/or modified CDS sequence (wt) from neuraminidase__InfluenzaA__ABW40161
augaauccaaaucaaaaaauaauaaccauuggaucaaucaguauagcaaucgggauaauuagucuaauguugcaaauaggaaauauuauuucaauaugggcuagucacucaauccaaacuggaagucaaaaccacacuggaauaugcaaccaaagaaucaucacauaugaaaacagcaccugggugaaucacacauauguuaguauuaacaacacuaauguuguugcuggaaaggacaaaacuucagugacauuggccggcaauucaucucuuuguucuaucaguggaugggcuauauacacaaaagacaacagcauaagaauuggcuccaaaggagauguuuuugucauaagagaaccuuucauaucauguucucauuuggaaugcaggaccuuuuuucugacccaaggugcucuauuaaaugacaaacauucaaauggaaccguuaaggaccgaaguccuuauagggccuuaaugagcuguccucuaggugaagcuccguccccauacaauucaaaguuugaaucaguugcauggucagcaagcgcaugccaugauggcaugggcugguuaacaaucggaauuucugguccagacaauggagcuguggcuguacuaaaauacaacggaauaauaacugaaaccauaaaaaguuggaaaaagcgaauauugagaacacaagagucugaaugugucugugugaacgggucauguuucaccauaaugaccgauggcccgaguaauggggccgccucguacaaaaucuucaaaaucgaaaaggggaagguuacuaaaucaauagaguuaaaugcacccaauuuucauuaugaggaauguuccuguuacccagacacuggcacagugauguguguaugcagggacaacuggcaugguucaaaucgaccuugggugucuuuuaaucaaaacuuggauuaucaaauaggauacaucugcaguggaguguucggugacaauccgcgucccaaagauggaaagggcagcuguaauccagugacuguugauggagcagacgggguuaagggguuuucauacaaauaugguaaugguguuuggauaggaagaacuaaaaguaauagacuuagaaagggguuugagaugauuugggauccuaauggauggacagauaccgacagugauuucucagugaaacaggauguuguggcaauaacugauuggucaggguacaguggaaguuucguucaacauccugaguuaacaggauuggacuguauaagaccuugcuucuggguugaguuagucagaggacugccuagagaaaauacaacaaucuggacuagugggagcagcauuucuuuuuguggcguugauagugauacugcaaacuggucuuggccagacggugcugaguugccguucaccauugacaaguag

SEQ ID NO: 48180 - RNA, 1410 nt, Artificial Sequence
  derived and/or modified CDS sequence (wt) from neuraminidase__InfluenzaA__ABW40172
augaauccaaaucaaaagauaauaacgauuggcucuguuucucucaccauuuccacaauaugcuucuucaugcaaauugccaucuugauaacuacuguaacauugcauuucaagcaauaugaauucaacucccccccaaacaaccaagugaugcugugugaaccaacaauaauagaaagaaacauaacagagauaguguaucugaccaacaccaccauagagaaggaaauaugccccaaacuagcagaauacagaaauuggucaaagccgcaaugugacauuacaggauuugcaccuuuuucuaaggacaauucgauuaggcuuuccgcugguggggacaucugggugacaagagaaccuuaugugucaugcgauccugacaaguguuaucaauuugcccuuggacagggaacaacacuaaacaacgugcauucaaaugacacaguacgugauaggaccccuuaucggacccuauugaugaaugaguuagguguuccuuuucaucuggggaccaagcaagugugcauagcaugguccagcucaaguugucacgauggaaaagcauggcugcauguuuguauaacgggggaugauaaaaaugcaacugcuagcuucauuuacaaugggaggcuuguagauaguauuguuucaugguccaaagaaauccucaggacccaggagucagaaugcguuuguaucaauggaacuuguacaguaguaaugacugaugggagugcuucaggaaaagcugauacuaaaauacuauucauugaggaggggaaaaucguucauacuagcacauugucaggaagugcucagcaugucgaggagugcuccugcuauccucgauauccuggugucagaugugucugcagagacaacuggaaaggcuccaauaggcccaucguagauauaaacauaaaggaucauagcauuguuuccaguuauguguguucaggacuuguuggagacacacccagaaaaaacgacagcuccagcaguagccauuguuuggauccuaacaaugaagaagguggucauggagugaaaggcugggccuuugaugauggaaaugacguguggaugggaagaacgaucagcgagaagucacgcuuaggguaugaaaccuucaaagucauugaaggcugguccaacccuaaguccaaauugcagauaaauaggcaagucauaguugacagagguaauagguccgguuauucugguauuuucucuguugaaggcaaaagcugcaucaaucggugcuuuuauguggaguugacaaggggaagaaaagaggaaacugaagucuuguggaccucaaacaguauuguuguguuuuguggcaccucagguacauauggaacaggcucauggccugauggggcggacaucaaucucaugccuauauaa

SEQ ID NO: 48181 - RNA, 1413 nt, Artificial Sequence; identical to SEQ ID NO: 48052
  derived and/or modified CDS sequence (wt) from neuraminidase__InfluenzaA__ABW40183

SEQ ID NO: 48182 - RNA, 1410 nt, Artificial Sequence
  derived and/or modified CDS sequence (wt) from neuraminidase__InfluenzaA__ABW40194
augaauccaaaucaaaagauaauaacgauuggcucuguuucucucaccauuuccacaauaugcuucuucaugcaaauugccaucuugauaacuacuguaacauugcauuucaagcaauaugaauucaacucccccccaaacaaccaagugaugcugugugaaccaacaauaauagaaagaaacauaacagagauaguguaucugaccaacaccaccauagagaaggaaauaugccccaaacuagcagaauacagaaauuggucaaagccgcaaugugacauuacaggauuugcaccuuuuucuaaggacaauucgauuaggcuuuccgcugguggggacaucugggugacaagagaaccuuaugugucaugcgauccugacaaguguuaucaauuugcccuuggacagggaacaacacuaaacaacgugcauucaaaugacacaguacgugauaggaccccuuaucggacccuauugaugaaugaguuagguguuccuuuucaucuggggaccaagcaagugugcauagcaugguccagcucaaguugucacgauggaaaagcauggcugcauguuuguauaacgggggaugauaaaaaugcaacugcuagcuucauuuacaaugggaggcuuguggauaguauuguuucaugguccaaagaaauccucaggacccaggagucagaaugcguuuguaucaauggaacuuguacaguaguaaugacugaugggagugcuucaggaaaagcugauacuaaaauacuauucauugaggaggggaaaaucguucauacuagcacauugucaggaagugcucagcaugucgaggagugcuccugcuauccucgauauccuggugucagaugugucugcagagacaacuggaaaggcuccaauaggcccaucguagauauaaacauaaaggaucauagcauuguuuccaguuauguguguucaggacuuguuggagacacacccagaaaaaacgacagcuccagcaguagccauuguuuggauccuaacaaugaagaagguggucauggagugaaaggcugggccuuugaugauggaaaugacguguggaugggaagaacgaucagcgagaagucacgcuuaggguaugaaaccuucaaagucauugaaggcugguccaacccuaaguccaaauugcagauaaauaggcaagucauaguugacagagguaauagguccgguuauucugguauuuucucuguugaaggcaaaagcugcaucaaucggugcuuuuauguggaguugauaaggggaagaaaagaggaaacugaagucuuguggaccucaaacaguauuguuguguuuuguggcaccucagguacauauggaacaggcucauggccugauggggcggacaucaaucucaugccuauauaa

SEQ ID NO: 48183 - RNA, 1413 nt, Artificial Sequence
  derived and/or modified CDS sequence (wt) from neuraminidase__InfluenzaA__ABW40205
augaauccaaaucaaaaaauaauaaccauuggaucaaucaguauagcaauuggaauaauuagucuaauguugcaaauaggaaauauuauuucaauaugggcuagucacucaauccaaacuggaagucaaaaccacacuggaauaugcaaccaaagaaucaucacauaugaaaacagcaccugggugaaucacacauauguuaauauuaacaacacuaauguuguugcuggaaaggacaaaacuucagugacauuggccggcaauucaucucuuuguucuaucaguggaugggcuauauacacaaaagacaacagcauaagaauuggcuccaaaggagauguuuuugucauaagagaaccuuucauaucauguucucauuuggaaugcaggaccuuuuuucugacccaaggugcucuauuaaaugacaaacauucaaauggaaccguuaaggacagaaguccuuauagggccuuaaugagcuguccucuaggugaagcuccguccccauacaauucaaaguuugaaucaguugcauggucagcaagcgcaugccaugauggcaugggcugguuaacaaucgggauuucugguccagacaauggagcuguggcuguacuaaaauacaacggaauaauaacugaaaccauaaaaaguuggaaaaagcgaauauugagaacacaggagucugaaugugucugugugaacgggucauguuucaccauaaugaccgauggcccgaguaauggggccgccucguacaaaaucuucaagaucgaaaaggggaagguuacuaaaucaauagaguuaaaugcacccaauuuucauuaugaggaauguuccuguuacccagacacuggcacagugauguguguaugcagggauaacuggcaugguucaaaucgaccuuggguaucuuuuaaucaaaacuuggauuaucaaguaggauacaucugcaguggaguguucggugacaauccgcgucccaaagauggaaagggcagcuguaauccaaugacuguugauggagcagacggaguuaagggguuuucauacaaauaugguaaugguguuuggauaggaaggacuaaaaguaacaaacuuagaaagggguuugagaugauuugggauccuaauggauggacagauaccgacagugauuucucagugaaacaggauguuguggcaauaacugauuggucaggguacaguggaaguuucguucaacauccugaguuaacaggauuggacuguauaagaccuugcuucuggguugaguuagucagaggacugccuagagaaaauacaacaaucuggacuagugggagcagcauuucuuuuuguggcguugauagugacacugcaaacuggucuuggccagacggugcugaguugccguucaccauugacaaauag

SEQ ID NO: 48184 - RNA, 1413 nt, Artificial Sequence; identical to SEQ ID NO: 48081
  derived and/or modified CDS sequence (wt) from neuraminidase__InfluenzaA__ABW40216

SEQ ID NO: 48185 - RNA, 1413 nt, Artificial Sequence; identical to SEQ ID NO: 48081
  derived and/or modified CDS sequence (wt) from neuraminidase__InfluenzaA__ABW40227

SEQ ID NO: 48186 - RNA, 1413 nt, Artificial Sequence; identical to SEQ ID NO: 48099
  derived and/or modified CDS sequence (wt) from neuraminidase__InfluenzaA__ABW40238

SEQ ID NO: 48187 - RNA, 1410 nt, Artificial Sequence
  derived and/or modified CDS sequence (wt) from neuraminidase__InfluenzaA__ABW40249
augaauccaaaucaaaagauaauaacgauuggcucuguuucucucaccauuuccacaauaugcuucuucaugcaaauugccaucuugauaacuacuguaacauugcauuucaagcaauaugaauucaacucccccccaaacaaccaagugaugcugugugaaccaacaauaauagaaagaaacauaacagagauaguguaucugaccaacaccaccauagagaaggaaauaugccccaaacuagcagaauacagaaauuggucaaagccgcaaugugacauuacaggauuugcaccuuuuucuaaggacaauucgauuaggcuuuccgcugguggggacaucugggugacaagagaaccuuaugugucaugcgauccugacaaguguuaucaauuugcccuuggacagggaacaacacuaaacaacgugcauucaaaugacacaguacgugauaggaccccuuaucggacccuauugaugaaugaguuagguguuccuuuucaucuggggaccaagcaagugugcauagcaugguccagcucaaguugucacgauggaaaagcauggcugcauguuuguauaacgggggaugauaaaaaugcaacugcuagcuucauuuacaaugggaggcuuguagauaguauuguuucaugguccaaagaaauccucaggacccaggagucagaaugcguuuguaucaauggaacuuguacaguaguaaugacugaugggagugcuucaggaaaagcugauacuaaaauacuauucauugaggaggggaaaaucguucauacuagcacauugucaggaagugcucagcaugucgaggagugcuccugcuauccucgauauccuggugucagaugugucugcagagacaacuggaaaggcuccaauaggcccaucguagauauaaacauaaaggaucauagcauuguuuccaguuauguguguucaggacuuguuggagacacacccagaaaaaacgacagcuccagcaguagccauuguuuggauccuaacaaugaagaagguggucauggagugaaaggcugggccuuugaugauggaaaugacguguggaugggaagaacgaucagcgagaagucacgcuuaggguaugaaaccuucaaagucauugaaggcugguccaaccauaaguccaaauugcagauaaauaggcaagucauaguugacagagguaauagguccgguuauucugguauuuucucuguugaaggcaaaagcugcaucaaucggugcuuuuauguggaguugauaaggggaagaaaagaggaaacugaagucuuguggaccucaaacaguauuguuguguuuuguggcaccucagguacauauggaacaggcucauggccugauggggcggacaucaaucucaugccuauauaa

SEQ ID NO: 48188 - RNA, 1413 nt, Artificial Sequence; identical to SEQ ID NO: 48045
  derived and/or modified CDS sequence (wt) from neuraminidase__InfluenzaA__ABW40260

SEQ ID NO: 48189 - RNA, 1410 nt, Artificial Sequence
  derived and/or modified CDS sequence (wt) from neuraminidase__InfluenzaA__ABW40271
augaauccaaaucaaaagauaauaacgauuggcucuguuucucucaccauuuccacaauaugcuucuucaugcaaauugccaucuugauaacuacuguaacauugcauuucaagcaauaugaauucaacucccccccaaacaaccaagugaugcugugugaaccaacaauaauagaaagaaacauaacagagauaguguaucugaccaacaccaccauagagaaggaaauaugccccaaacuagcagaacacagaaauuggucaaagccgcaaugugacauuacaggauuugcaccuuuuucuaaggacaauucgauuaggcuuuccgcugguggggacaucugggugacaagagaaccuuaugugucaugcgauccugacaaguguuaucaauuugcccuuggacagggaacaacacuaaacaacgugcauucaaaugacacaguacgugauaggaccccuuaucggacccuauugaugaaugaguuagguguuccuuuucaucuggggaccaagcaagugugcauagcaugguccagcucaaguugucacgauggaaaagcauggcugcauguuuguauaacgggggaugauaaaaaugcaacugcuagcuucauuuacaaugggaggcuuguagauaguauuguuucaugguccaaagaaauccucaggacccaggagucagaaugcguuuguaucaauggaacuuguacaguaguaaugacugaugggagugcuucaggaaaagcugauacuaaaauacuauucauugaggaggggaaaaucguucauacuagcacauugucaggaagugcucagcaugucgaggagugcuccugcuauccucgauauccuggugucagaugugucugcagagacaacuggaaaggcuccaauaggcccaucguagauauaaacauaaaagaucauagcauuguuuccaguuauguguguucaggacuuguuggagacacacccagaaaaaacgacagcuccagcaguagccauuguuuggauccuaacaaugaagaagguggucauggagugaaaggcugggccuuugaugauggaaaugacguguggaugggaagaacgaucagcgagaagucacgcuuaggguaugaaaccuucaaagucauugaaggcugguccaacccuaaguccaaauugcagauaaauaggcaagucauaguugacagagguaauagguccgguuauucugguauuuucucuguugaaggcaaaagcugcaucaaucggugcuuuuauguggaguugauaaggggaagaaaagaggaaacugaagucuuguggaccucaaacaguauuguuguguuuuguggcaccucagguacauauggaacaggcucauggccugauggggcggacaucaaucucaugccuauauaa

SEQ ID NO: 48190 - RNA, 1413 nt, Artificial Sequence
  derived and/or modified CDS sequence (wt) from neuraminidase__InfluenzaA__ABW40282
augaauccaaaucaaaaaauaauaaccauuggaucaaucaguauagcaaucgggauaauuagucuaauguugcaaauaggaaauauuauuucaauaugggcuagucacucaauccaaacuggaagucaaaaccacacuggaauaugcaaccaaagaaucaucacauaugaaaacagcaccugggugaaucacacauauguuaguauuaacaacacuaauguuguugcuggaaaggacaaaacuucagugacauuggccggcaauucaucucuuuguucuaucaguggaugggcuauauacacaaaagacaacagcauaagaauuggcuccaaaggagauguuuuugucauaagagaaccuuucauaucauguucucauuuggaaugcagaaccuuuuuucugacccaaggugcucuauuaaaugacaaacauucaaauggaaccguuaaggaccgaaguccuuauagggccuuaaugagcuguccucuaggugaagcuccguccccauacaauucaaaguuugaaucaguugcauggucagcaagcgcaugccaugauggcaugggcugguuaacaaucggaauuucugguccagacaauggagcuguggcuguacuaaaauacaacggaauaauaacugaaaccauaaaaaguuggaaaaagcgaauauugagaacacaagagucugaaugugucugugugaacgggucauguuucaccauaaugaccgauggcccgaguaauggggccgccucguacaaaaucuucaagaucgaaaaggggaagguuacuaaaucaauagaguuaaaugcacccaauuuucauuaugaggaauguuccuguuacccagacacuggcacagugauguguguaugcagggacaacuggcaugguucaaaucgaccuugggugucuuuuaaucaaaacuuggauuaucaaauaggauacaucugcaguggaguguucggugacaauccgcgucccaaagauggaaagggcagcuguaauccagugacuguugauggagcagacgggguuaagggguuuucauacaaauaugguaaugguguuuggauaggaagaacuaaaaguaacagacuuagaaagggguuugagaugauuugggauccuaauggauggacagauaccgacagugauuucucagugaaacaggauguuguggcaauaacugauuggucaggguacaguggaaguuucguucaacauccugaguuaacaggauuggacuguauaagaccuugcuucuggguugaguuagucagaggacugccuagagaaaauacaacaaucuggacuagugggagcagcauuucuuuuuguggcguugauagugauacugcaaacuggucuuggccagacggugcugaguugccguucaccauugacaaguag

SEQ ID NO: 48191 - RNA, 1413 nt, Artificial Sequence
  derived and/or modified CDS sequence (wt) from neuraminidase__InfluenzaA__ABW40293
augaauccaaaucaaaaaauaauaaccauuggaucaaucaguauagcaauuggaauaauuagucuaauguugcaaauaggaaauauuauuucaauaugggcuagucacucaauccaaacuggaagucaaaaccacacuggaauaugcaaccaaagaaucaucacauaugaaaacagcaccugggugaaucacacauauguuaauauuaacaacacuaauguuguugcuggaaaggacaaaacuucagugacacuggccggcaauucaucucuuuguucuaucaguggaugggcuauauacacaaaagacaacagcauaagaauuggcuccaaaggagauguuuuugucauaagagaaccuuucauaucauguucucauuuggaaugcaggaccuuuuuucugacccaaggugcucuauuaaaugacaaacauucaaauggaaccguuaaggacagaaguccuuauagggccuuaaugagcuguccucuaggugaagcuccguccccauacaauucaaaauuugaaucaguugcauggucagcaagcgcaugccaugauggcaugggcugguuaacaaucgggauuucugguccagacaauggagcuguggcuguacuaaaauacaacggaauaauaacugaaaccauaaaaaguuggaaaaagcgaauauugagaacacaggagucugaaugugucugugugaacgggucauguuucaccauaaugaccgauggcccgaguaauggggccgccucguacaaaaucuucaagaucgaaaaggggaagguuacuaaaucaauagaguuaaaugcacccaauuuucauuaugaggaauguuccuguuacccagacacuggcacagugauguguguaugcagggauaacuggcaugguucaaaucgaccuugggugucuuuuaaucaaaacuuggauuaucaaguaggauacaucugcaguggaguguucggugacaauccgcgucccaaagauggaaagggcagcuguaauccaaugacuguugauggagcagacggaguuaagggguuuucauacaaauaugguaaugguguuuggauaggaaggacuaaaaguaacaaacuuagaaagggguuugagaugauuugggauccuaauggauggacagauaccgacagugauuucucagugaaacaggauguuguggcaauaacugauuggucaggguacaguggaaguuucguucaacauccugaguuaacaggauuggacuguauaagaccuugcuucuggguugaguuagucagaggacugccuagagaaaauacaacaaucuggacuagugggagcagcauuucuuuuuguggcguugauagugacacugcaaacuggucuuggccagacggugcugaguugccguucaccauugacaaauag

SEQ ID NO: 48192 - RNA, 1413 nt, Artificial Sequence
  derived and/or modified CDS sequence (wt) from neuraminidase__InfluenzaA__ABW40304
augaauccaaaucaaaaaauaauaaccauuggaucaaucaguauagcaaucggaauaauuagucuaauguugcaaauaggaaauauuauuucaauaugggcuagucacucaauccaaacuggaagucaaaaccacacuggaauaugcaaccaaagaaucaucacauaugaaaacagcaccugggugaaucacacauauguuaguauuaacaacacuaauguuguugcuggaaaggacaaaacuucagugacauuggccggcaauucaucucuuuguucuaucaguggaugggcuauauacacaaaagacaacagcauaagaauuggcuccaaaggggauguuuuugucauaagagaaccuuucauaucauguucucauuuggaaugcaggaccuuuuuucugacccaaggugcucuauuaaaugacaaacauucaaauggaaccguuaaggaccgaaguccuuauagggccuuaaugagcuguccucuaggugaagcuccguccccauacaauucaaaguuugaaucaguugcauggucagcaagcgcaugccaugauggcaugggcugguuaacaaucggaauuucugguccagacaauggagcuguggcuguacuaaaauacaacggaauaauaacugaaaccauaaaaaguuggaaaaagcgaauauugagaacacaagagucugaaugugucugugugaacgggucauguuucaccauaaugaccgauggcccgaguaauggggccgccucguacaaaaucuucaagaucgaaaaggggaagguuacuaaaucaauagaguuaaaugcacccaauuuucauuaugaggaauguuccuguuacccagacacuggcacagugauguguguaugcagggacaacuggcaugguucaaaucgaccuugggugucuuuuaaucaaaacuuggauuaucaaauaggauacaucugcaguggaguguucggugacaauccgcgucccaaagauggaaagggcagcuguaauccagugacuguugauggagcagacgggguuaagggguuuucauacaaauaugguaaugguguuuggauaggaagaacuaaaaguaacagacuuagaaagggguuugagaugauuugggauccuaauggauggacagauaccgacagugauuucucagugaaacaggauguuguggcaauaacugauuggucggguuacaguggaaguuucguucaacauccugaguuaacaggauuggacuguauaagaccuugcuucuggguugaguuagucagaggacugccuagagaaaauacaacaaucuggacuagugggagcagcauuucuuuuuguggcguugauagugauacugcaaacuggucuuggccagacggugcugaguugccguucaccauugacaaguag

SEQ ID NO: 48193 - RNA, 1413 nt, Artificial Sequence
  derived and/or modified CDS sequence (wt) from neuraminidase__InfluenzaA__ABW40315
augaauccaaaucaaaaaauaauaaccauuggaucaaucaguauagcaaucggaauaauuagccuaauguugcaaauaggaaauauuauuucaauaugggcuagucacucaauccaaacuggaagucaaaaccacacuggaauaugcaaccaaagaaucaucacauaugaaaacagcaccugggugaaucacacauauguuaguauuaacaacacuaauguuguugcuggaaaggacaaaacuucagugacauuggccggcaauucaucucuuuguucuaucaguggaugggcuauauacacaaaagacaacagcauaagaauuggcuccaaaggggauguuuuugucauaagagaaccuuucauaucauguucucauuuggaaugcaggaccuuuuuucugacccaaggugcucuauuaaaugacaaacauucaaauggaaccguuaaggaccgaaguccuuauagggccuuaaugagcuguccucuaggugaagcuccguccccauacaauucaaaguuugaaucaguugcauggucagcaagcgcaugccaugauggcaugggcugguuaacaaucggaauuucugguccagacaauggagcuguggcuguacuaaaauacaacggaauaauaacugaaaccauaaaaaguuggaaaaagcgaauauugagaacacaagagucugaaugugucugugugaacgggucauguuucaccauaaugaccgauggcccgaguaauggggccgccucguacaaaaucuucaagaucgaaaaggggaagguuacuaaaucaauagaguuaaaugcacccaauuuucauuaugaggaauguuccuguuacccagacacuggcacagugauguguguaugcagggacaacuggcaugguucaaaucgaccuugggugucuuuuaaucaaaacuuggauuaucaaauaggauacaucugcaguggaguguucggugacaauccgcgucccaaagauggaaagggcagcuguaauccagugacuguugauggagcagacgggguuaagggguuuucauacaaauaugguaaugguguuuggauaggaagaacuaaaaguaacagacuuagaaagggguuugagaugauuugggauccuaauggauggacagauaccgacagugauuucucagugaaacaggauguuguggcaauaacugauuggucggguuacaguggaaguuucguucaacauccugaguuaacaggauuggacuguauaagaccuugcuucuggguugaguuagucagaggacugccuagagaaaauacaacaaucuggacuagugggagcagcauuucuuuuuguggcguugauagugauacugcaaacuggucuuggccagacggugcugaguugccguucaccauugacaaguag

SEQ ID NO: 48194 - RNA, 1410 nt, Artificial Sequence; identical to SEQ ID NO: 48061
  derived and/or modified CDS sequence (wt) from neuraminidase__InfluenzaA__ABW40326

SEQ ID NO: 48195 - RNA, 1413 nt, Artificial Sequence
  derived and/or modified CDS sequence (wt) from neuraminidase__InfluenzaA__ABW40337
augaauccaaaucaaaaaauaauaaccauuggaucaaucaguauagcaaucggaauaauuagucuaauguugcaaauaggaaauauuauuucaauaugggcuagucacucaauccaaacuggaagucaaaaccacacuggaauaugcaaccaaagaaucaucacauaugaaaacagcaccugggugaaucacacauauguuaauauuaacaacacuaauguuguugcuggaaaggacaaaacuucagugacauuggccggcaauucaucucuuuguucuaucaguggaugggcuauauacacaaaagacaacagcauaagaauuggcuccaagggagauguuuuugucauaagagaaccuuucauaucauguucucauuuggaaugcaggaccuuuuuucugacccaaggugcucuauuaaaugacaaacauucaaauggaaccguuaaggacagaaguccuuauagagccuuaaugagcuguccucuaggugaagcuccguccccauacaauucaaaguuugaaucaguugcauggucagcaagcgcaugccaugauggcaugggcugguuaacaaucggaauuucugguccagacaauggagcuguggcuguacuaaaauacaacggaauaauaacugaaaccauaaaaaguuggaaaaaacgaauauugagaacacaagagucugaaugugucugugugaacgggucuuguuucaccauaaugaccgauggcccgaguaauggggccgccucguacaaaaucuucaagaucgaaaagggaaagguuacuaaaucaauagaguuaaaugcacccaauuuucauuaugaggaauguuccuguuacccagacacuggcacagugauguguguaugcagagacaacuggcaugguucaaaucgaccuugggugucuuuuaaucaaaacuuggauuaucaaauaggauacaucugcaguggaguguucggugacaauccgcgucccaaagauggaaagggcagcuguaauccagugacuguugauggagcagacggaguuaagggguuuucauacaaauaugguaaugguguuuggauaggaagaacuaaaaguaacaggcuuagaaagggguuugagaugauuugggauccuaauggauggacaaauaccgacagugauuucucagugaaacaggauguuguggcaauaacugauuggucaggguacaguggaaguuucguucaacauccugaguuaacaggauuggacuguauaagaccuugcuucuggguugaauuagucagaggacugccuagagaaaauacaacaaucuggacuagugggagcagcauuucuuuuuguggcguugauagugauacugcaaacuggucuuggccagacggugcugaguugccguucaccauugacaaauag

SEQ ID NO: 48196 - RNA, 1413 nt, Artificial Sequence
  derived and/or modified CDS sequence (wt) from neuraminidase__InfluenzaA__ABW40359
augaauccaaaucaaaaaauaauaaccauuggaucaaucaguauagcaauuggaauaauuagucuaauguugcaaauaggaaauauuauuucaauaugggcuagucacucaauccaaacuggaagucaaaaccacacuggaauaugcaaccaaagaaucaucacauaugaaaacagcaccugggugaaucacacauauguuaauauuaacaacacuaauguuguugcuggaaaggacaaaacuucagugacauuggccggcaauucaucucuuuguucuaucaguggaugggcuauauacacaaaagacaacagcauaagaauuggcuccaaaggagauguuuuugucauaagagaaccuuucauaucauguucucauuuggaaugcaggaccuuuuuucugacccaaggugcucuauuaaaugacaaacauucaaauggaaccguuaaggacagaaguccuuauagggccuuaaugagcuguccucuaggugaagcuccguccccauacaauucaaaguuugaaucaguugcauggucagcaagcgcaugccaugauggcaugggcugguuaacaaucgggauuucugguccagacaauggagcuguggcuguacuaaaauacaacggaauaauaacugaaaccauaaaaaguuggaaaaagcgaauauugagaacacaggagucugaaugugucugugugaacgggucauguuucaccauaaugaccgauggcccgaguaauggggccgccucguacaaaaucuucaagaucgaaaaggggaagguuacuaaaucaauagaguuaaaugcacccaauuuucauuaugaggaauguuccuguuacccagacacuggcacagugauguguguaugcagggauaacuggcaugguucaaaucgaccuugggugucuuuuaaucaaaacuuggauuaucaaguaggauacaucugcaguggaguguucggugacaauccgcgucccaaagauggaaagggcagcuguaauccaaugacuguugauggagcagacggaguuaagggguuuucauacaaauaugguaaugguguuuggauaggaaggacuaaaaguaacaaacuuagaaagggguuugagaugauuugggauccuaauggauggacagauaccgacagugauuucucagugaaacaggauguuguggcaauaacugauuggucaggguacaguggaaguuucguucaacauccugaguuaacaggauuggacuguauaagaccuugcuucuggguugaguuagucagaggacugccuagagaaaauaccacaaucuggacuagugggagcagcauuucuuuuuguggcguugauagugacacugcaaacuggucuuggccagacggugcugaguugccguucaccauugacaaauag

SEQ ID NO: 48197 - RNA, 1413 nt, Artificial Sequence
  derived and/or modified CDS sequence (wt) from neuraminidase__InfluenzaA__ABW40370
augaauccaaaucaaaaaauaauaaccauuggaucaaucaguauagcaaucgggauaauuagucuaauguugcaaauaggaaauauuauuucaauaugggcuagucacucaauccaaacuggaagucaaaaccacacuggaauaugcaaccaaagaaucaucacauaugaaaacagcaccugggugaaucacacauauguuaguauuaacaacacuaauguuguugcuggaaaggacaaaacuucagugacauuggccggcaauucaucucuuuguucuaucaguggaugggcuauauacacaaaagacaacagcauaagaauuggcuccaaaggagauguuuuugucauaagagaaccuuucauaucauguucucauuuggaaugcaggaccuuuuuucugacccaaggugcucuauuaaaugacaaacauucaaauggaaccguuaaggaccgaaguccuuauagggccuuaaugagcuguccucuaggugaagcuccguccccauacaauucaaaguuugaaucaguugcauggucagcaagcgcaugccaugauggcaugggcugguuaacaaucggaauuucugguccagacaauggagcuguggcuguacuaaaauacaacggaauaauaacugaaaccauaaaaaguuggaaaaagcgaauauugagaacacaagagucugaaugugucugugugaacgggucauguuucaccauaaugaccgauggcccgaguaauggggccgccucguacaaaaucuucaaaaucgaaaaggggaagguuacuaaaucaauagaguuaaaugcacccaauuuucauuaugaggaauguuccuguuacccagacuccggcacagugauguguguaugcagggacaacuggcaugguucaaaucgaccuugggugucuuuuaaucaaaacuuggauuaucaaauaggauacaucugcaguggaguguucggugacaauccgcgucccaaggauggaaagggcagcuguaauccagugacuguugauggagcagacgggguuaagggguuuucauacaaauaugguaaugguguuuggauaggaagaacuaaaaguaacagacuuagaaagggguuugagaugauuugggauccuaauggauggacagauaccgacagugauuucucagugaaacaggauguuguggcaauaacugauuggucaggguacaguggaaguuucguucaacauccugaguuaacaggauuggacuguauaagaccuugcuucuggguugaguuagucagaggacugccuagagaaaauacaacaaucuggacuagugggagcagcauuuccuuuuguggcguugauagugauacugcaaacuggucuuggccagacggugcugaguugccguucaccauugacaaguag

SEQ ID NO: 48198 - RNA, 1413 nt, Artificial Sequence; identical to SEQ ID NO: 48045
  derived and/or modified CDS sequence (wt) from neuraminidase__InfluenzaA__ABW40403

SEQ ID NO: 48199 - RNA, 1413 nt, Artificial Sequence
  derived and/or modified CDS sequence (wt) from neuraminidase__InfluenzaA__ABW40414
augaauccaaaucaaaaaauaauaaccauuggaucaaucaguauagcaaucgggauaauuagucuaauguugcaaauaggaaauauuauuucaauaugggcuagucacucaauccaaacuggaagucaaaaccacacuggaauaugcaaccaaagaaucaucacauaugaaaacagcaccugggugaaucacacauauguuaguauuaacaacacuaauguuguugcuggaaaggacaaaacuucagugacauuggccggcaauucaucucuuuguucuaucaguggaugggcuauauacacaaaagacaacagcauaagaauuggcuccaaaggagauguuuuugucauaagagaaccuuucauaucauguucucauuuggaaugcaggaccuuuuuucugacccaaggugcucuauuaaaugacaaacauucaaauggaaccguuaaggaccgaaguccuuauagggccuuaaugagcuguccucuaggugaagcuccguccccauacaauucaaaguuugaaucaguugcauggucagcaagcgcaugccaugauggcaugggcugguuaacaaucggaauuucugguccagacaauggagcuguggcuguacuaaaauacaacggaauaauaacugaaaccauaaaaaguuggaaaaagcgaauauugagaacacaagagucugaaugugucugugugaacgggucauguuucaccauaaugaccgauggcccgaguaauggggccgccucauacaaaaucuucaagaucgaaaagggaaagguuacuaaaucaauagaguuaaaugcacccaauuuucauuaugaggaauguuccuguuacccagacacuggcacagugauguguguaugcagggacaacuggcaugguucaaaucgaccuugggugucuuuugaucaaaacuuggauuaucaaauaggauacaucugcaguggaguguucggugacaauccgcgucccaaagauggaaaaggcagcuguaauccagugacuguugauggagcagacgggguuaagggguuuucauacaaauaugguaaugguguuuggauaggaagaacuaaaaguaacagacuuagaaagggguuugagaugauuugggauccuaauggauggacagauaccgacagugauuucucagugaaacaggauguuguggcaauaacugauuggucaggguacaguggaaguuucguucaacauccugaguuaacaggauuggacuguauaagaccuugcuucuggguugaguuagucagaggacugccuagagaaaauacaacaaucuggacuagugggagcagcauuucuuuuuguggcguugauagugauacugcaaacuggucuuggccagacggugcugaguugccguucaccauugacaaguag

SEQ ID NO: 48200 - RNA, 1413 nt, Artificial Sequence; identical to SEQ ID NO: 48045
  derived and/or modified CDS sequence (wt) from neuraminidase__InfluenzaA__ABW40425

SEQ ID NO: 48201 - RNA, 1413 nt, Artificial Sequence; identical to SEQ ID NO: 48093
  derived and/or modified CDS sequence (wt) from neuraminidase__InfluenzaA__ABW40436

SEQ ID NO: 48202 - RNA, 1413 nt, Artificial Sequence
  derived and/or modified CDS sequence (wt) from neuraminidase__InfluenzaA__ABW40447
augaauccaaaucaaaaaauaauaaccauuggaucaaucaguauagcaauuggaauaauuagucuaauguugcaaauaggaaauauuauuucaauaugggcuagucacucaauccaaacuggaagucaaaaccacacuggaauaugcaaccaaagaaucaucacauaugaaaacagcaccugggugaaucacacauauguuaauauuaacaacacuaauguuguugcuggaaaggacaaaacuucagugacauuggccggcaauucaucucuuuguucuaucaguggaugggcuauauacacaaaagacaacagcauaagaauuggcuccaaaggagauguuuuugucauaagagaaccuuucauaucauguucucauuuggaaugcaggaccuuuuuucugacccaaggugcucuauuaaaugacaaacauucaaauggaaccguuaaggacagaaguccuuauagggccuuaaugagcuguccucuaggugaagcuccguccccauacaauucaaaguuugaaucaguugcauggucagcaagcgcaugccaugauggcaugggcugguuaacaaucgggauuucugguccagacaauggagcuguggcuguacuaaaauacaacggaauaauaacugaaaccauaaaaaguuggaaaaagcgaauauugagaacacaggagucugaaugugucugugugaacgggucauguuucaccauaaugaccgauggcccgaguaauggggccgccucguacaaaaucuucaagaucgaaaaggggaagguuacuaaaucaauagaguuaaaugcacccaauuuucauuaugaggaauguuccuguuacccagacacuggcacagugauguguguaugcagggauaacuggcaugguucaaaucgaccuugggugucuuuuaaucaaaacuuggauuaucaaguaggauacaucugcaguggaguguucggugacaauccgcgucccaaagauggaaagggcagcuguaauccaaugacuguugauggagcagacggaguuaagggguuuucauacaaauaugguaaugguguuuggauaggaaggacuaaaaguaacaaacuuagaaagggguuugagaugauuugggauccuaauggauggacagauaccgacagugauuucucagugaaacaggauguuguggcaauaacugauuggucaggguacaguggaaguuucguucaacauccugaguuaacaggauugaacuguauaagaccuugcuucuggguugaguuagucagaggacugccuagagaaaauacaacaaucuggacuagugggagcagcauuucuuuuuguggcguugauagugauacugcaaacuggucuuggccagacggugcugaguugccguucaccauugacaaauag

SEQ ID NO: 48203 - RNA, 1413 nt, Artificial Sequence; identical to SEQ ID NO: 48132
  derived and/or modified CDS sequence (wt) from neuraminidase__InfluenzaA__ABW40458

SEQ ID NO: 48204 - RNA, 1413 nt, Artificial Sequence; identical to SEQ ID NO: 48114
  derived and/or modified CDS sequence (wt) from neuraminidase__InfluenzaA__ABW40469

SEQ ID NO: 48205 - RNA, 1413 nt, Artificial Sequence
  derived and/or modified CDS sequence (wt) from neuraminidase__InfluenzaA__ABW40491
augaauccaaaucaaaaaauaauaaccauuggaucaaucaguauagcaaucgggauaauuagucuaauguugcaaauaggaaauauuauuucaauaugggcuagucacucaauccaaacuggaagucaaaaccacacuggaauaugcaaccaaagaaucaucacauaugaaaacagcaccugggugaaucacacauauguuaguauuaacaacacuaauguuguugcuggaaaggacaaaacuucagugacauuggccggcaauucaucucuuuguucuaucaguggaugggcuauauacacaaaagacaacagcauaagaauuggcuccaaaggagauguuuuugucauaagagaaccuuucauaucauguucucauuuggaaugcaggaccuuuuuucugacccaaggugcucuauuaaaugacaaacauucaaauggaaccguuaaggaccgaaguccuuauagggccuuaaugagcuguccucuaggugaagcuccguccccauacaauucaaaguuugaaucaguugcauggucagcaagcgcaugccaugauggcaugggcugguuaacaaucggaauuucugguccagacaauggagcuguagcuguacuaaaauacaacggaauaauaacugaaaccauaaaaaguuggaaaaagcgaauauugagaacacaagagucugaaugugucugugugaacgggucauguuucaccauaaugaccgauggcccgaguaauggagccgccucguacaaaaucuucaagaucgaaaaggggaagguuacuaaaucaauagaguuaaaugcacccaauuuucauuaugaggaauguuccuguuacccagacacuggcacagugauguguguaugcagggacaacuggcaugguucaaaucgaccuugggugucuuuuaaucaaaacuuggauuaucaaauaggauacaucugcaguggaguguucggugacaauccgcgucccaaagauggaaagggcagcuguaauccagugacuguugauggagcagacgggguuaagggguuuucauacaaauaugguaaugguguuuggauaggaagaacuaaaaguaacagacuuagaaagggguuugagaugauuugggauccuaauggauggacagauaccgacagugauuucucagugaaacaggauguuguggcaauaacugauuggucaggguacaguggaaguuucguucaacauccugaguuaacaggauuggacuguauaagaccuugcuucuggguugaguuagucagaggacugccuagagaaaauacaacaaucuggacuagugggagcagcauuucuuuuuguggcguugauagugauacugcaaacuggucuuggccagacggugcugaguugccguucaccauugacaaguag

SEQ ID NO: 48206 - RNA, 1413 nt, Artificial Sequence; identical to SEQ ID NO: 48114
  derived and/or modified CDS sequence (wt) from neuraminidase__InfluenzaA__ABW40502

SEQ ID NO: 48207 - RNA, 1413 nt, Artificial Sequence
  derived and/or modified CDS sequence (wt) from neuraminidase__InfluenzaA__ABW40513
augaauccaaaucaaaaaauaauaaccauuggaucaaucaguauagcaaucggaauaauuagucugauguugcaaauaggaaauauuauuucaauaugggcuagucacucaauccaaacuggaagucaaaaccacacuggaauaugcaaccaaagaaucauaacauaugaaaacagcaccugggugaaucacacauauguuaauauuaacaacacuaauguuguugcuggaaaggacaaaacuucagugacauuggccggcaauucaucucuuuguucuaucaguggaugggcuauauacacaaaagacaacagcauaagaauuggcuccaagggagauguuuuugucauaagagaaccuuucauaucauguucucauuuggaaugcaggaccuuuuuucugacccaaggugcacuauuaaaugacaaacauucaaauggaaccguuaaggacagaaguccuuauagggccuuaaugagcuguccucuaggugaagcuccguccccauacaauucaaaguuugaaucaguugcauggucagcaagcgcaugccaugauggcaugggcugguuaacaaucggaauuucugguccagacaauggagcuguggcuguacuaaaauacaacggaauaauaacugaaaccauaaaaaguuggaaaaaacgaauauugagaacacaagagucugaaugugucugugugaacgggucuuguuucaccauaaugaccgauggcccgaguaauggggccgccucguacaaaaucuucaagaucgaaaagggaaagguuaccaaaucaauagaguuaaaugcacccaauuuucauuaugaggaauguuccuguuacccagacacuggcacagugauguguguaugcagagacaacuggcaugguucaaaucgaccuugggugucuuuuaaucaaaacuuggauuaucaaauaggauacaucugcaguggaguguucggugacaauccgcgucccaaagauggaaagggcagcuguaauccagugacuguugauggagcagacggaguuaagggguuuucauacaaauaugguaaugguguuuggauaggaagaacuaaaaguaacagacuuagaaagggguuugagaugauuugggauccuaauggauggacaaauaccgacagugauuucucagugaaacaggauguuguggcaauaacugauuggucaggguacaguggaaguuucguucaacauccugaguuaacaggauuggacuguauaagaccuugcuucuggguugaauuagucagaggacugccuagagaaaauacaacaaucuggacuagugggagcagcauuucuuuuuguggcguugauagugauacugcaaacuggucuuggccagacggugcugaguugccguucaccauugacaaauag

SEQ ID NO: 48208 - RNA, 1413 nt, Artificial Sequence; identical to SEQ ID NO: 48118
  derived and/or modified CDS sequence (wt) from neuraminidase__InfluenzaA__ABW40524

SEQ ID NO: 48209 - RNA, 1413 nt, Artificial Sequence
  derived and/or modified CDS sequence (wt) from neuraminidase__InfluenzaA__ABW40546
augaauccaaaucaaaaaauaauaaccauuggaucaaucaguauagcaaucggaauaauuagucuaauguugcaaauaggaaauauuauuucaauaugggcuagucacucaauccaaacuggaagucaaaaccacacuggaauaugcaaccaaagaaucaucacauaugaaaacagcaccugggugaaucacacauauguuaauauuaacaacacuaauguuguugcuggaaaggacaaaacuucagugacauuggccggcaauucaucucuuuguucuaucaguggaugggcuauauacacaaaagacaacagcauaagaauuggcuccaaaggagauguuuuugucauaagagaaccuuucauaucauguucucauuuggaaugcaggaccuuuuuucugacccaaggugcucuauuaaaugacaaacauucaaauggaaccguuaaggacagaaguccuuauagggccuuaaugagcugcccucuaggugaagcuccguccccauacaauucaaaguuugaaucaguugcauggucagcaagcgcaugccaugauggcaugggcugguuaacaaucggaauuucugguccagacaauggagcuguggcuguacuaaaauacaacggaauaauaacugaaaccauaaaaaguuggaaaaagcggauauugagaacacaagagucugaaugugucugugugaacgggucuuguuucaccauaaugaccgauggcccgaguaauggggccgccucguacaaaaucuucaagaucgaaaagggaaagguuacuaaaucaauggaguuaaaugcacccaauuuucauuaugaggaauguuccuguuacccagacacuggcacagugauguguguaugcagggacaacuggcaugguucaaaucgaccuugggugucuuuuaaucaaaacuuggauuaucaaauaggauacauaugcaguggaguguucggugacaauccgcgucccaaagauggaaagggcagcuguaauccagugacuguugauggagcagacggaguuaagggguuuucauacaaauaugguaaugguguuuggauaggaagaacuaaaaguaacagacuuagaaagggguuugagaugauuugggauccuaauggauggacagauaccgacagugauuucucagugaaacaggauguuguggcaauaacugauuggucaggguacaguggaaguuucguucaacauccugaguuaacaggauuggacuguauaagaccuugcuucuggguugaauuagucagaggacugccuagagaaaauacaacaaucuggacuagugggagcagcauuucuuuuuguggcguugauagugauacugcaaacuggucuuggccagacggugcugaguugccguucaccauugacaaauag

SEQ ID NO: 48210 - RNA, 1413 nt, Artificial Sequence; identical to SEQ ID NO: 48192
  derived and/or modified CDS sequence (wt) from neuraminidase__InfluenzaA__ABW40557

SEQ ID NO: 48211 - RNA, 1413 nt, Artificial Sequence
  derived and/or modified CDS sequence (wt) from neuraminidase__InfluenzaA__ABW40568
augaauccaaaucaaaaaauaauaaccauuggaucaaucaguauagcaaucgggauaauuagucuaauguugcaaauaggaaauauuauuucaauaugggcuagucacucaauccaaacuggaagucaaaaccacacuggaauaugcaaccaaagaaucaucacauaugaaaacagcaccugggugaaucacacauauguuaguauuaacaacacuaauguuguugcuggaaaggacaaaacuucagugacauuggccggcaauucaucucuuuguucuaucaguggaugggcuauauacacaaaagacaacagcauaagaauuggcuccaaaggagauguuuuugucauaagagaaccuuucauaucauguucucauuuggaaugcaggaccuuuuuucugacccaaggugcucuauuaaaugacaaacauucaaauggaaccguuaaggaccgaaguccuuauagggccuuaaugagcuguccucuaggugaagcuccguccccauacaauucaaaguuugaaucaguugcauggucagcaagcgcaugccaugauggcaugggcugguuaacaaucggaauuucugguccagacaauggagcuguggcuguacuaaaauacaacggaauaauaacugaaaccauaaaaaguuggaaaaagcaaauauugagaacacaagagucugaaugugucugugugaacgggucauguuucaccauaaugaccgauggcccgaguaauggggccgccucguacaaaaucuucaaaaucgaaaaggggaagguuacuaaaucaauagaguuaaaugcacccaauuuucauuaugaggaauguuccuguuacccagacacuggcacagugauguguguaugcagggacaacuggcaugguucaaaucgaccuugggugucuuuuaaucaaaacuuggauuaucaaauaggauacaucugcaguggaguguucggugacaauccgcgucccaaagauggaaagggcagcuguaauccagugacuguugauggagcagacgggguuaagggguuuucauacaaauaugguaaugguguuuggauaggaagaacuaaaaguaacagacuuagaaagggguuugagaugauuugggauccuaauggauggacagauaccgacagugauuucucagugaaacaggauguuguggcaauaacugauuggucaggguacaguggaaguuucguucaacauccugaguuaacaggauuggacuguauaagaccuugcuucuggguugaguuagucagaggacugccucgagaaaauacaacaaucuggacuagugggagcagcauuucuuuuuguggcguugauagugauacugcaaacuggucuuggccagacggugcugaguugccguucaccauugacaaguag

SEQ ID NO: 48212 - RNA, 1413 nt, Artificial Sequence
  derived and/or modified CDS sequence (wt) from neuraminidase__InfluenzaA__ABW40579
augaauccaaaucaaaaaauaauaaccauuggaucaaucaguauagcaaucgggauaauuagucuaauguugcaaauaggaaauauuauuucaauaugggcuagucacucaauccaaacuggaagucaaaaccacacuggaauaugcaaccaaagaaucaucacauaugaaaacagcaccugggugaaucacacauauguuaguauuaacaacacuaauguuguugcuggaaaggacaaaacuucagugacauuggccggcaauucaucucuuuguucuaucaguggaugggcuauauacacaaaagacaacagcauaagaauuggcuccaaaggagauguuuuugucauaagagaaccuuucauaucauguucucauuuggaaugcaggaccuuuuuucugacccaaggugcucuauuaaaugacaaacauucaaauggaaccguuaaggaccgaaguccuuauagggccuuaaugagcuguccucuaggugaagcuccguccccauacaauucaaaguuugaaucaguugcauggucagcaagcgcaugccaugauggcaugggcugguuaacaaucggaauuucugguccagacaauggagcuguggcuguacuaaaauacaacggaauaauaacugaaaccauaaaaaguuggaaaaagcgaauauugagaacacaagagucugaaugugucugugugaacgggucauguuuuaccauaaugaccgauggcccgaauaauggggccgccucguacaaaaucuucaagaucgaaaaggggaagguuacuaaaucaauagaguuaaaugcacccaauuuucauuaugaggaauguuccuguuacccagacacuggcacagugauguguguaugcagggacaacuggcaugguucaaaucgaccuugggugucuuuuaaucaaaacuuggauuaucaaauaggauacaucugcaguggaguguucggugacaauccgcgucccaaagauggaaagggcagcuguaauccagugacuguugauggagcagacgggguuaagggguuuucauacaaauaugguaaugguguuuggauaggaagaacuaaaaguaacagacuuagaaagggguuugagaugauuugggauccuaauggauggacagauaccgacagugauuucucagugaaacaggauguuguggcaauaacugauuggucaggguacaguggaaguuucguucaacauccugaguuaacaggauuggacuguauaagaccuugcuucuggguugaguuagucagaggacugccuagagaaaauacaacaaucuggacuagugggagcagcauuucuuuuuguggcguugauagugauacugcaaacuggucuuggccagacggugcugaguugccguucaccauugacaaguag

SEQ ID NO: 48213 - RNA, 1413 nt, Artificial Sequence
  derived and/or modified CDS sequence (wt) from neuraminidase__InfluenzaA__ABW40601
augaauccaaaucaaaaaauaauaaccauuggaucaaucaguauagcaaucggaguaauuagucuaauguugcaaauaggaaauauuauuucaauaugggcuagucacucaauccaaacuggaagucaaaaccacacuggaauaugcaaccaaagaaucaucacauaugaaaacagcaccugggugaaucacacauauguuaauauuaacaacacuaauguuguugcuggaaaggacaaaacuucagugacauuggccggcaauucaucucuuuguucuaucaguggaugggcuauauacacaaaagacaacagcauaagaauuggcuccaagggagauguuuuugucauaagagaaccuuucauaucauguucucauuuggaaugcaggaccuuuuuucugacccaaggugcucuauuaaaugacaaacauucaaauggaaccguuaaggacagaaguccuuauagggccuuaaugagcuguccucuaggugaagcuccguccccauacaauucaaaguuugaaucaguugcauggucagcaagcgcaugccaugauggcaugggcugguuaacaaucggaauuucugguccagacaauggagcuguggcuguacuaaaauacaacggaauaauaacugaaaccauaaaaaguuggaaaaagcgaauauugagaacacaagagucugaaugugucugugugaacgggucuuguuucaccauaaugaccgauggcccgaguaauggggccgccucguacaaaaucuucaagaucgaaaagggaaagguuacuaaaucaauagaguuaaaugcacccaauuuucauuaugaggaauguuccuguuacccagacacuggcacagugauguguguaugcagagacaacuggcaugguucaaaucgaccuugggugucuuuuaaucaaaacuuggauuaucaaauaggauacaucugcaguggaguguucggugacaauccgcgucccaaagauggaaagggcagcuguaauccagugacuguugauggagcagacggaauuaagggguuuucauacaaauaugguaaugguguuuggauaggaagaacuaaaaguaacagacuuagaaagggguuugagaugauuugggauccuaauggauggacaaauaccgacagugauuucucagugaaacaggauguuguggcgauaacugauuggucaggguacaguggaaguuucguucaacauccugaguuaacaggauuggacuguauaagaccuugcuucuggguugaauuagucagaggacugccuagagaaaauacaacaaucuggacuagugggagcagcauuucuuuuuguggcguugauggugauacugcaaacuggucuuggccagacggugcugaguugccguucaccauugacaaauag

SEQ ID NO: 48214 - RNA, 1413 nt, Artificial Sequence
  derived and/or modified CDS sequence (wt) from neuraminidase__InfluenzaA__ABW40612
augaauccaaaucaaaaaauaauaaccauuggaucaaucaguauagcaauuggaauaauuagucuaauguugcaaauaggaaauauuauuucaauaugggcuagucacucaauccaaacuggaagucaaaaccacacuggaauaugcaaccaaagaaucaucacauaugaaaacagcaccugggugaaucacacauauguuaauauuaacaacacuaauguuguugcuggaaaggacaaaacuucagugacauuggccggcaauucaucucuuuguucuaucaguggaugggcuauauacacaaaagacaacagcauaagaauuggcuccaaaggagauguuuuugucauaagagaaccuuucauaucauguucucauuuggaaugcaggaccuuuuuucugacccaaggugcucuauuaaaugacaaacauucaaauggaaccguuaaggacagaaguccuuauagggccuuaaugagcuguccucuaggugaagcuccguccccauacaauucaaaguuugaaucaguugcauggucagcaagcgcaugccaugauggcaugggcugguuaacaaucgggauuucugguccagacaauggagcuguggcuguacuaaaauacaacggaauaauaacugaaaccauaaaaaguuggaaaaagcgaauauugagaacacaggagucugaaugugucugugugaacgggucauguuucaccauaaugaccgauggcccgaguaauggggccgccucguacaaaaucuucaagaucgaaaaggggaagguuacuaaaucaauagaguuaaaugcacccaauuuucauuaugaggaauguuccuguuacccagacacuggcacagugauguguguaugcagggauaacuggcaugguucaaaucgaccuugggugucuuuuaaucaaaacuuggauuaucaaguaggauacaucugcaguggaguguucggugacaauccgcgucccaaagauggaaagggcagcuguaauccaaugacuguugauggagcagacggaguuaagggguuuucauacaaauaugguaaugguguuuggauaggaaggacuaaaaguaacaaacuuagaaagggguuugagaugauuugggauccuaauggauggacagauaccgacagugauuucucagugaaacaggauguuguggcaauaacugauuggucaggguacaguggaaguuucguucaacauccugaguuaacaggauuggacuguauaagaccuugcuucuggguugaguuagucagaggacugccuagagaaaauacaacaaucuggacuagugggagcagcauuucuuuuuguggcguugauagugauacugcaaacuggucuuggccagacggugcugaguugccguucaccauugacaaauag

SEQ ID NO: 48215 - RNA, 1413 nt, Artificial Sequence; identical to SEQ ID NO: 48048
  derived and/or modified CDS sequence (wt) from neuraminidase__InfluenzaA__ABW40623

SEQ ID NO: 48216 - RNA, 1410 nt, Artificial Sequence
  derived and/or modified CDS sequence (wt) from neuraminidase__InfluenzaA__ABW40634
augaauccaaaucaaaagauaauaacgauuggcucuguuucucucaccauuuccacaauaugcuucuucaugcaaauugccaucuugauaacuacuguaacauugcauuucaagcaauaugaauucaacucccccccaaacaaccaagugaugcugugugaaccaacaauaauagaaagaaacauaacagagauaguguaucugaccaacaccaccauagagaaggaaauaugccccaaacuagcagaauacagaaauuggucaaagccgcaaugugacauuacaggauuugcaccuuuuucuaaggacaauucgauuaggcuuuccgcugguggggacaucugggugacaagagaaccuuaugugucaugcgauccugacaaguguuaucaauuugcccuuggacagggaacaacacuaaacaacgugcauucaaaugacacaguacgugauaggaccccuuaucggacccuauugaugaaugaguuagguguuccuuuucaucuggggaccaagcaagugugcauagcaugguccagcucaaguugucacgauggaaaagcauggcugcauguuuguauaacgggggaugauaaaaaugcaacugcuagcuucauuuacaaugggaggcuuguagauaguauuguuucaugguccaaagaaauccucaggacccaggagucagaaugcguuuguaucaauggaacuuguacaguaguaaugacugaugggagugcuucaggaaaagcugauacuaaaauacuauucauugaggaggggaaaaucguucauacuagcacauugucaggaagugcucagcaugucgaggagugcuccugcuauccucgauauccuggugucagaugugucugcagagacaacuggaaaggcuccaauaggcccaucguagauauaaacauaaaagaucauagcauuguuuccaguuauguguguucaggacuuguuggagacacacccagaaaaaacgacagcuccagcaguagccauuguuuggauccuaacaaugaagaagguggucauggagugaaaggcugggccuuugaugauggaaaugacguguggaugggaagaacgaucagcgagaagucacgcuuaggguaugaaaccuucaaagucauugaaggcugguccaacccuaaguccaaauugcagauaaauaggcaagucauaguugacagagguaauagguccgguuauucugguauuuucucuguugaaggcaaaagcugcaucaaucggugcuuuuauguggaguugauaaggggaagaaaagaggaaacugaagucuuguggaccucaaacaguauuguuguguuuuguggcaccucagguacauauggaacaggcucauggccugauggggcggacaucaaucucaugccuauauaa

SEQ ID NO: 48217 - RNA, 1413 nt, Artificial Sequence; identical to SEQ ID NO: 48045
  derived and/or modified CDS sequence (wt) from neuraminidase__InfluenzaA__ABW40645

SEQ ID NO: 48218 - RNA, 1410 nt, Artificial Sequence
  derived and/or modified CDS sequence (wt) from neuraminidase__InfluenzaA__ABW40656
augaauccaaaucaaaagauaauaacgauuggcucuguuucucucaccauuuccacaauaugcuucuucaugcaaauugccaucuugauaacuacuguaacauugcauuucaagcaauaugaauucaacucccccccaaacaaccaagugaugcugugugaaccaacaauaauagaaagaaacauaacagagauaguguaucugaccaacaccaccauagagaaggaaauaugccccaaacuagcagaauacagaaauuggucaaagccgcaaugugacauuacaggauuugcaccuuuuucuaaggacaauucgauuaggcuuuccgcuggugggggcaucugggugacaagagaaccuuaugugucaugcgauccugacaaguguuaucaauuugcccuuggacagggaacaacacuaaacaacgugcauucaaaugacacaguacgugauaggaccccuuaucggacccuauugaugaaugaguuagguguuccuuuucaucuggggaccaagcaagugugcauagcaugguccagcucaaguugucacgauggaaaagcauggcugcauguuuguauaacgggggaugauaaaaaugcaacugcuagcuucauuuacaaugggaggcuuguagauaguauuguuucaugguccaaagaaauccucaggacccaggagucagaaugcguuuguaucaauggaacuuguacaguaguaaugacugaugggagugcuucaggaaaagcugauacuaaaauacuauucauugaggaggggaaaaucguucauacuagcacauugucaggaagugcucagcaugucgaggagugcuccugcuauccucgauauccuggugucagaugugucugcagagacaacuggaaaggcuccaauaggcccaucguagauauaaacauaaaagaucauagcauuguuuccaguuauguguguucaggacuuguuggagacacacccagaaaaaacgacagcuccagcaguagccauuguuuggauccuaacaaugaagaagguggucauggagugaaaggcugggccuuugaugauggaaaugacguguggaugggaagaacgaucagcgagaagucacgcuuaggguaugaaaccuucaaagucauugaaggcugguccaacccuaaguccaaauugcagauaaauaggcaagucauaguugacagagguaauagguccgguuauucugguauuuucucuguugaaggcaaaagcugcaucaaucggugcuuuuauguggaguugauaaggggaagaaaagaggaaacugaagucuuguggaccucaaacaguauuguuguguuuuguggcaccucagguacauauggaacaggcucauggccugauggggcggacaucaaucucaugccuauauaa

SEQ ID NO: 48219 - RNA, 1413 nt, Artificial Sequence
  derived and/or modified CDS sequence (wt) from neuraminidase__InfluenzaA__ABW40667
augaauccaaaucaaaaaauaauaaccauuggaucaaucaguauagcaaucggaauaauuagucuaauguugcaaauaggaaauauuauuucaauaugggcuagucacucaauccaaacuggaagucaaaaccacacuggaauaugcaaccaaagaaucaucacauaugaaaacagcaccugggugaaucacacauauguuaauauuaacaacacuaauguuguugcuggaaaggacaaaacuucagugacauuggccggcaauucaucucuuuguucuaucaguggaugggcuauauacacaaaagacaacagcauaagaauuggcuccaagggagauguuuuugucauaagagaaccuuucauaucauguucucauuuggaaugcaggaccuuuuuucugacccaaggugcucuauuaaaugacaaacauucaaauggaaccguuaaggacagaaguccuuauagggccuuaaugagcuguccucuaggugaagcuccguccccauacaauucaaaguuugaaucaguugcauggucagcaagcgcaugccaugauggcaugggcugguuaacaaucggaauuucugguccagacaauggagcuguggcuguacuaaaauacaacggaauaauaacugaaaccauaaaaaguuggaaaaaacgaauauugagaacacaagagucugaaugugucugugugaacgggucuuguuucaccauaaugaccgauggcccgaguaauggggccgccucguacaaaaucuucaagaucgaaaagggaaagguuaccaaaucaauagaguuaaaugcacccaauuuucauuaugaggaauguuccuguuacccagacacuggcacagugauguguguaugcagagacaacuggcaugguucaaaucgaccuugggugucuuuuaaucaaaacuuggauuaucaaauaggauacaucugcaguggaguguucggugacaauccgcgucccaaagauggaaagggcagcuguaauccagugacuguugauggagcagacggaguuaagggguuuucauacaaauaugguaaugguguuuggauaggaagaacuaaaaguaacagacuuagaaagggguuugagaugauuugggauccuaauggauggacaaauaccgacagugauuucucagugaaacaggauguuguggcaauaacugauuggucaggguacaguggaaguuucguucaacauccugaguuaacaggauuggacuguauaagaccuugcuucuggguugaauuagucagaggacugccuagagaaaauacaacaaucuggacuagugggagcagcauuucuuuuuguggcguugauagugauacugcaaacuggucuuggccagacggugcugaguugccguucaccauugacaaauag

SEQ ID NO: 48220 - RNA, 1413 nt, Artificial Sequence; identical to SEQ ID NO: 48068
  derived and/or modified CDS sequence (wt) from neuraminidase__InfluenzaA__ABW40678

SEQ ID NO: 48221 - RNA, 1413 nt, Artificial Sequence
  derived and/or modified CDS sequence (wt) from neuraminidase__InfluenzaA__ABW71297
augaauccaaaucaaaaaauaauaaccauuggaucaaucaguauagcaauuggaauaauuaguuuaauguugcaaauaggaaauauuauuucaauaugggcuagucacucaauccaaacuggaagucaaaaccacacuggaauaugcaaccaaagaaucaucacauaugaaaacagcaccugggugaaucacacauauguuaauauuaacaacacuaauguuguugcuggaaaggacaaaacuucagugacauuggccggcaauucaucucuuuguucuaucaguggaugggcuauauacacaaaagacaacagcauaagaauuggcuccaaaggagauguuuuugucauaagagaaccuuucauaucauguucucauuuggaaugcaggaccuuuuuucugacccaaggugcucuauuaaaugacaaacauucaaauggaaccguuaaggacagaaguccuuauagggccuuaaugagcuguccucuaggugaagcuccguccccauacaauucaaaguuugaaucaguugcauggucagcaagcgcaugccaugauggcaugggcugguuaacaaucgggauuucugguccagacaauggagcuguggcuguacuaaaauacaacggaauaauaacugaaaccauaaaaaguuggaaaaagcgaauauugagaacacaggagucugaaugugucugugugaacgggucauguuucaccauaaugaccgauggcccgaguaauggggccgccucguacaaaaucuucaagaucgaaaaggggaagguuacuaaaucaauagaguuaaaugcacccaauuuucauuaugaggaauguuccuguuacccagacacuggcacagugauguguguaugcagggauaacuggcaugguucaaaucgaccuugggugucuuuuaaucaaaacuuggauuaucaaguaggauacaucugcaguggaguguucggugacaauccgcgucccaaagauggaaagggcagcuguaauccaaugacuguugauggagcagacggaguuaagggguuuucauacaaauaugguaaugguguuuggauaggaaggacuaaaaguaacaaacuuagaaagggguuugagaugauuugggauccuaauggauggacagauaccgacagugauuucucagugaaacaggauguuguggcaauaacugauuggucaggguacaguggaaguuucguucaacauccugaguuaacaggauuggacuguauaagaccuugcuucuggguugaguuagucagaggacugccuagagaaaauacaacaaucuggacuagugggagcagcauuucuuuuuguggcguugauagugacacugcaaacuggucuuggccagacggugcugaguugccguucaccauugacaaauag

SEQ ID NO: 48222 - RNA, 1413 nt, Artificial Sequence; identical to SEQ ID NO: 48093
  derived and/or modified CDS sequence (wt) from neuraminidase__InfluenzaA__ABW71308

SEQ ID NO: 48223 - RNA, 1413 nt, Artificial Sequence; identical to SEQ ID NO: 48045
  derived and/or modified CDS sequence (wt) from neuraminidase__InfluenzaA__ABW71319

SEQ ID NO: 48224 - RNA, 1413 nt, Artificial Sequence; identical to SEQ ID NO: 48074
  derived and/or modified CDS sequence (wt) from neuraminidase__InfluenzaA__ABW71330

SEQ ID NO: 48225 - RNA, 1413 nt, Artificial Sequence
  derived and/or modified CDS sequence (wt) from neuraminidase__InfluenzaA__ABW71341
augaauccaaaucaaaaaauaauaaccauuggaucuaucaguauagcgaucgggauaauuagucuaauguugcaaauaggaaauauuauuucaauaugggcuagucacucaauccaaacuggaagucaaaaccacacuggaauaugcaaccaaagaaucaucacauaugaaaacagcaccugggugaaucacacauauguuaguauuaacaacacuaauguuguugcuggaaaggacaaaacuucagugacauuggccggcaauucaucucuuuguucuaucaguggaugggcuauauacacaaaagacaacagcauaagaauuggcuccaaaggagauguuuuugucauaagagaaccuuucauaucauguucucauuuggaaugcaggaccuuuuuucugacccaaggugcucuauuaaaugacaaacauucaaauggaaccguuaaggaccgaaguccuuauagggccuuaaugagcuguccucuaggugaagccccguccccauacaauucaaaguuugaaucaguugcauggucagcaagcgcaugccaugauggcaugggcugguuaacaaucggaauuucugguccagacaauggagcuguggcuguacuaaaauacaacggaauaauaacugaaaccauaaaaaguuggaaaaagcgaauauugagaacacaagagucugaaugugucugugugaacgggucauguuucaccauaaugaccgauggcccgaguaauggggccgccucguacaaaaucuucaaaaucgaaaaggggaagguuacuaaaucaauagaauuaaaugcacccaauuuucauuaugaggaauguuccuguuacccagacacuggcacagugauguguguaugcagggacaacuggcaugguucaaaucgaccuugggugucuuuuaaucaaaacuuggauuaucaaauaggauacaucugcaguggaguguucggugacaauccgcgucccaaagauggaaagggcagcuguaauccagugacuguugauggagcagacgggguuaagggguuuucauacaaauaugguaaugguguuuggcuaggaagaacuaaaaguaacagacuuagaaagggguuugagaugauuugggauccuaauggauggacagauaccgacagugauuucucagugaaacaggauguuguggcaauaacugauuggucaggguacaguggaaguuucguucaacauccugaguuaacaggauuggacuguauaagaccuugcuucuggguugaguuagucagaggacugccuagagaaaauacaacaaucuggacuagugggagcagcauuucuuuuuguggcguugauagugauacugcaaacuggucuuggccagacggugcugaguugccguucaccauugacaaguag

SEQ ID NO: 48226 - RNA, 1410 nt, Artificial Sequence; identical to SEQ ID NO: 48069
  derived and/or modified CDS sequence (wt) from neuraminidase__InfluenzaA__ABW71352

SEQ ID NO: 48227 - RNA, 1413 nt, Artificial Sequence; identical to SEQ ID NO: 48093
  derived and/or modified CDS sequence (wt) from neuraminidase__InfluenzaA__ABW71363

SEQ ID NO: 48228 - RNA, 1413 nt, Artificial Sequence
  derived and/or modified CDS sequence (wt) from neuraminidase__InfluenzaA__ABW71374
augaauccaaaucaaaaaauaauaaccauuggaucaaucaguauagcaauuggaauaauuagucuaauguugcaaauaggaaauauuauuucaauaugggcuagucacucaauccaaacuggaagucaaaaccacacuggaauaugcaaccaaagaaucaucacauaugaaaacagcaccugggugaaucacacauauguuaauauuaacaacacuaauguuguugcuggaaaggacaaaacuucagugacauuggccggcaauucaucucuuuguucuaucaguggaugggcuauauacacaaaagacaacagcauaagaauuggcuccaaaggagauguuuuugucauaagagaaccuuucauaucauguucucauuuggaaugcaggaccuuuuuucugacccaaggugcucuauuaaaugacaaacauucaaauggaaccguuaaggacagaaguccuuauagggccuuaaugagcuguccucuaggugaagcuccguccccauacaauucaaaguuugaaucaguugcauggucagcaagcgcaugccaugauggcaugggcugguuaacaaucgggauuucugguccagacaauggagcuguggcuguacuaaaauacaacggaauaauaacugaaaccauaaaaaguuggaaaaagcgaauauugagaacacaggagucugaaugugucugugugaacgggucauguuucaccauaaugaccgauggcccgaguaauggggccgccucguacaaaaucuucaagaucgaaaaggggaagguuacuaaaucaauagaguuaaaugcacccaauuuucauuaugaggaauguuccuguuacccagacacuggcacagugauguguguaugcagggauaacuggcaugguucaaaucgaccuugggugucuuuuaaucaaaacuuggauuaucaaguaggauacaucugcaguggaguguucggugacaauccgcgucccaaagauggaaagggcagcuguaauccaaugacuguugauggagcagacggaguuaagggguuuucauacaaauaugguaaugguguuuggauaggaaggacuaaaaguaacaaacuuagaaagggguuugagaugauuugggauccuaauggauggacagauaccgacagugauuucucagugaaacaggauguuguggcaauaaccgauuggucaggguacaguggaaguuucguucaacauccugaguuaacaggauuggacuguauaagaccuugcuucuggguugaguuagucagaggacugccuagagaaaaugcaacaaucuggacuagugggagcagcauuucuuuuuguggcguugauagugauacugcaaacuggucuuggccagacggugcugaguugccguucaccauugacaaauag

SEQ ID NO: 48229 - RNA, 1413 nt, Artificial Sequence; identical to SEQ ID NO: 48045
  derived and/or modified CDS sequence (wt) from neuraminidase__InfluenzaA__ABW71385

SEQ ID NO: 48230 - RNA, 1413 nt, Artificial Sequence
  derived and/or modified CDS sequence (wt) from neuraminidase__InfluenzaA__ABW71396
augaauccaaaucaaaaaauaauaaccauuggaucaaucaguauagcaauuggaauaauuagucuaauguugcaaauaggaaauauuauuucaauaugggcuagucacucaguccaaacuggaagucaaaaccacacuggaauaugcaaccaaagaaucaucacauaugaaaacagcaccugggugaaucacacauauguuaauauuaacaacacuaauguuguugcuggaaaggacaaaacuucagugacauuggccggcaauucaucucuuuguucuaucaguggaugggcuauauacacaaaagacaacagcauaagaauuggcuccaaaggagauguuuuugucauaagagaaccuuucauaucauguucucauuuggaaugcaggaccuuuuuucugacccaaggugcucuauuaaaugacaaacauucaaauggaaccguuaaggacagaaguccuuauagggccuuaaugagcugcccucuaggugaagcuccguccccauacaauucaaaguuugaaucaguugcauggucagcaagcgcaugccaugauggcaugggcugguuaacaaucgggauuucugguccagacaauggagcuguggcuguacuaaaauacaacggaauaauaacugaaaccauaaaaaguuggaaaaagcgaauauugagaacacaggagucugaaugugucugugugaacggaucauguuucaccauaaugaccgauggcccgaguaauggggccgccucguacaaaaucuucaagaucgaaaaggggaagguuacuaaaucaauagaguuaaaugcacccaauuuucauuaugaggaauguuccuguuacccagacacuggcacagugauguguguaugcagggauaacuggcaugguucaaaucgaccuugggugucuuuuaaucaaaacuuggauuaucaaguaggauacaucugcaguggaguguucggugacaauccgcgucccaaagauggaaagggcagcuguaauccaaugacuguugauggagcagacggaguuaagggguuuucauacaaauaugguaaugguguuuggauaggaaggacuaaaaguaacaaacuuagaaagggguuugagaugauuugggauccuaauggauggacagauaccgacagugauuucucagugaaacaggauguuguggcaauaaccgauuggucaggguacaguggaaguuucguucaacauccugaguuaacaggauuggacuguauaagaccuugcuucuggguugaguuagucagaggacugccuagagaaaaugcaacaaucuggacuagugggagcagcauuucuuuuuguggcguugauagugauacugcaaacuggucuuggccagacggugcugaguugccguucaccauugacaaauag

SEQ ID NO: 48231 - RNA, 1413 nt, Artificial Sequence
  derived and/or modified CDS sequence (wt) from neuraminidase__InfluenzaA__ABW71407
augaauccaaaucaaaaaauaauaaccauuggaucaaucaguauagcaauuggaauaauuagucuaauguugcaaauaggaaauauuauuucaauaugggcuagucacucaauccaaacuggaagucaaaaccacacuggaauaugcaaccaaagaaucaucacauaugaaaacagcaccugggugaaucacacauauguuaauauuaacaacacuaauguuguugcuggaaaggacaaaacuucagugacauuggccggcaauucaucucuuuguucuaucaguggaugggcuauauacacaaaagacaacagcauaagaauuggcuccaaaggagauguuuuugucauaagagaaccuuucauaucauguucucauuuggaaugcaggaccuuuuuucugacccaaggugcucuauuaaaugacaaacauucaaauggaaccguuaaggacagaaguccuuauagggccuuaaugagcuguccucuaggugaagcuccguccccauacaauucaaaguuugaaucaguugcauggucagcaagcgcaugccaugauggcaugggcugguuaacaaucgggauuucugguccagacaauggagcuguggcuguacuaaaauacaacggaauaauaacugaaaccauaaaaaguuggaaaaagcgaauauugagaacacaggagucugaaugugucugugugaacgggucauguuucaccauaaugaccgauggcccgaguaauggggccgccucguacaaaaucuucaagaucgaaaaggggaagguuacuaaaucaauagaguuaaaugcacccaauuuucauuaugaggaauguuccuguuacccagacacuggcacagugauguguguaugcagggauaacuggcaugguucaaaucgaccuugggugucuuuuaaucaaaacuuggauuaucaaguaggauacaucugcaguggaguguucggugacaauccgcgucccaaagauggaaagggcagcuguaauccaaugacuguugauggagcagacggaguuaagggguuuucauacaaauaugguaaugguguuuggauaggaaggacuaaaaguaacaaaauuagaaagggguuugagaugauuugggauccuaauggauggacagauaccgacagugauuucucagugaaacaggauguuguggcaauaacugauuggucaggguacaguggaaguuucguucaacauccugaguuaacaggauuggacuguauaagaccuugcuucuggguugaguuagucagaggacugccuagagaaaauacaacaaucuggacuagugggagcagcauuucuuuuuguggcguugauagugacacugcaaacuggucuuggccagacggugcugaguugccguucaccauugacaaauag

SEQ ID NO: 48232 - RNA, 1413 nt, Artificial Sequence; identical to SEQ ID NO: 48228
  derived and/or modified CDS sequence (wt) from neuraminidase__InfluenzaA__ABW71418

SEQ ID NO: 48233 - RNA, 1413 nt, Artificial Sequence; identical to SEQ ID NO: 48045
  derived and/or modified CDS sequence (wt) from neuraminidase__InfluenzaA__ABW71440

SEQ ID NO: 48234 - RNA, 1413 nt, Artificial Sequence; identical to SEQ ID NO: 48060
  derived and/or modified CDS sequence (wt) from neuraminidase__InfluenzaA__ABW71451

SEQ ID NO: 48235 - RNA, 1413 nt, Artificial Sequence; identical to SEQ ID NO: 48214
  derived and/or modified CDS sequence (wt) from neuraminidase__InfluenzaA__ABW71462

SEQ ID NO: 48236 - RNA, 1410 nt, Artificial Sequence; identical to SEQ ID NO: 46378
  derived and/or modified CDS sequence (wt) from neuraminidase__InfluenzaA__ABW80980

SEQ ID NO: 48237 - RNA, 1410 nt, Artificial Sequence; identical to SEQ ID NO: 46183
  derived and/or modified CDS sequence (wt) from neuraminidase__InfluenzaA__ABW80981

SEQ ID NO: 48238 - RNA, 1413 nt, Artificial Sequence
  derived and/or modified CDS sequence (wt) from neuraminidase__InfluenzaA__ABW81474
augaauccaaaucaaaaaauaauaaccauuggaucaaucaguguggcaaucggaauaauuagucuaauauugcaaauaggaaauauuauuucaauaugggcuagccacucaauccaaacuggaagucaaaacuacacuggaauaugcaaccaaaaaaucauuacauaugaaaauagaaccuggguaaaucaaacauauguuaauuuuaacaacacuaauguuguugcuggaaaggacaaacccucgaugacauuggccggcaauucaucucuuugcccuauccguggaugggcaauauacacaaaagacaacagcauaagaauugguuccaaaggagauguuuuugucauaagagagccuuuuauaucauguucucacuuggaaugcagaaccuuuuuucugacccaaggugcucuauuaaaugacaagcauucaaaugggaccauuaaggacagaagcccuuuuagggccuuaaugagcuguccucuuggugaagcuccgucuccauacaauucaagauuugaaucaguugcuuggucagcaagcgcaugccaugauggccugggcuggcuaacaaucggaauuucugguccagauaauggagcaguggcuguacuaaaauacaacggcauaauaacugaaaccauaaaaaguuggaaaaagcaaauccuaagaacacaagagucugaaugugucugugugaacgguucauguuuuaccauaaugaccgauggcccgaguaacagggccgcaucguacagaaucuucaaaauugagaaggggagaguuacuaaaucaauagaguuggaugcacccaauuaucauuacgaggaauguuccuguuacccagacaccggcacaguaaugugugugugcagggacaauuggcacgguucaaaucgaccuuggguguccuuuaaucaaaaccuggauuaucaaauaggauacaucugcagugggguguucggugacaauccgcgucccaaagauggagaaggcagcuguaauccagugacuguugauggagcagacggaguaaagggguuuucauacagauaugguaaugguguuuggauaggaaggacuaaaaguaacagacuaagaaagggauuugagaugauuugggauccuaauggauggacagauaccgacagugauuucucaaugaaacaggaugucguggcaaugacugauuggucaggguacagcggaaguuuuguucaacauccugagcuaacaggauuggacuguaugagaccuugcuucuggguugaauuagucagagggcuaccuagagaaaauacaacaaucuggacuagugggagcagcauuucuuuuuguggcgugaauagcgagacugcaaacuggucuuggccagacggugcugaguugccauucaccauugacaaguag

SEQ ID NO: 48239 - RNA, 1413 nt, Artificial Sequence
  derived and/or modified CDS sequence (wt) from neuraminidase__InfluenzaA__ABW81475
augaauccaaaucaaaaaauaauaaccauuggaucaaucaguauagcaaucggaauaauuagucuaauguugcaaauaggaaauauuauuucaauaugggcuagucacucaauccaaacuggaagucaaaaccacacuggaauaugcaaccaaagaaucaucacauaugaaaacagcaccugggugaaucacacauauguuaauauuaacaacacuaauguuguugcuggaaaagacaaaaguucagugacauuggccggcaauucaucucuuuguucuaucaguggaugggcuauauacacaaaagacaacagcauaagaauuggcuccaaaggagauguuuuugucauaagagaaccuuucauaucauguucucacuuggaaugcagaaccuuuuuucugacccaaggugcucuauuaaaugacaaacauucaaaugggaccguuaaggacagaaguccuuauagggccuuaaugagcuguccucuaggugaagcuccgucuccauacaauucaaaguuugaaucaguugcauggucagcaagcgcaugccaugauggcaugggcugguuaacaaucggaauuucugguccagacaauggagcuguggcuguacuaaaauacaacggaauaauaacugaaaccauaaaaaguuggaaaaagcgaauauuaagaacacaagagucugaaugugucugugugaacgggucauguuucaccauaaugaccgauggcccgaguaauggggcugccucguacaaaaucuucaagaucgaaaaggggaagguuacuaaaucaauagaguugaaugcacccaauuuucauuaugaggaauguuccuguuacccagacacuggcacagugauguguguaugcagggacaacuggcaugguucaaaucgaccuugggugucuuuuaaucaaaacuuggauuaucaaauaggauacaucugcaguggaguguucggugacaauccgcgucccaaagauggagagggcagcuguaauccagugacuguugauggagcagacggaguaaagggguuuucauacaaauaugguaaugguguuuggauaggaaggacuaaaaguaacagacuuagaaagggguuugagaugauuugggauccuaauggauggacagauaccgacagugauuucucauugaaacaggauguuguggcaauaacugauuggucaggguacagcggaaguuucguucaacauccugaguuaacaggauuggacuguauaagaccuugcuucuggguugaguuagucagaggacugccaagagaaaauacaacaaucuggacuagugggagcagcauuucuuuuuguggcguuaauagugauacugcaaacuggucuuggccagacggugcugaguugccguucaccauugacaaguag

SEQ ID NO: 48240 - RNA, 1413 nt, Artificial Sequence
  derived and/or modified CDS sequence (wt) from neuraminidase__InfluenzaA__ABW81477
augaauccaaaucaaaaaauaauaaccauuggaucaaucaguauagcaaucggaauaauuagccuaauguugcaaauaggaaacauuauuucaauaugggcuagucacucaauccaaacuggaagucaaaaccacacuggaguaugcaaccaaagaaucaucacauaugaaaacagcaccugggugaaucacacauauguuaauauuaacaacaccaauguuauugcuggaaaggacaaaacuucggugacauuggccggcaauucaucucuuuguucuaucaguggaugggcuauauacacaaaagacaacagcauaagaauugguuccaaaggagauguuuuugucauaagagagccuuucauaucauguucucacuuggaaugcagaaccuuuuuucugacccaaggugcucuauuaaaugacaaacauucaaaugggaccguuaaggacagaagucccuauagggcuuuaaugagcuguccucuaggugaagcuccguccccauacaauucaaaguuugaaucaguugcuuggucagcaagcgcaugccaugauggcaugggcugguuaacaaucggaauuucugguccagacaauggagcaguggcuguacuaaaauacaacggcauaauaacugaaaccauaaaaaguuggaaaaagcaaauauuaagaacacaagagucugaaugugucugugugaacgggucauguuucaccauaaugaccgauggcccgaguaauggggccgcuucguacaaaaucuucaagaucgaaaagggaaagguuacuaaaucaauagaguugagugcacccaauuuucauuaugaggaauguuccuguuacccagacacuggcacagugauguguguaugcagggacaacuggcaugguucaaaucgacccugggugucuuuuaaucaaaaccuggauuaucaaauaggauacaucugcagugggguguucggugacaauccgcgucccaaagauggagagggcagcuguaauccagugacuguugauggagcaaacggaguaaagggguuuucauacaaauaugguaaugguguuuggauaggaaggacuaaaaguaacagacuuagaaagggguuugagaugauuugggauccuaauggauggccagauaccgacagugauuucucagugaaacaggauguuguggcaauaacugauuggucaggguacagcggaaguuucguucaacauccugaguuaacaggauuggacuguauaagaccuugcuucuggguugaguuagucagaggacugccaaaagaaaauacaacaaucuggacuagugggagcagcauuucuuuuuguggcguaaauagugauacugcaaacuggucuuggccagacggugcugaguugccguuuaccauugacaaguag

SEQ ID NO: 48241 - RNA, 1413 nt, Artificial Sequence
  derived and/or modified CDS sequence (wt) from neuraminidase__InfluenzaA__ABW81478
augaauccaaaucaaaaaauaauaaccauuggaucaaucaguauagcaaucggaauaauuagccuaauguugcaaauaggaaauauuauuucaauaugggcuagucacucaauccaaacuggaagucaaaaccacacuggaauaugcaaccaaagaaucaucacauaugaaaacagcaccugggugaaucacacauauguuaauauuaacaacacuaauguuguugcuggaaaggacaaaacuucagugacauuggccggcaauucaucucuuuguucuaucaguggaugggcuauauacacaaaagacaacagcauaagaauuggauccaaaggagauguuuuugucauaagagaaccuuuuauaucauguucucacuuggaaugcagaaccuuuuuucugacccaaggugcucuauuaaaugacaaacauucaaaugggaccguuaaggacagaaguccuuauagggccuuaaugagcuguccucuaggugaagcuccguccccauacaauucaaaguuugaaucaguugcauggucagcaagcgcaugccaugauggcaugggcugguuaacaaucggaauuucugguccagacaauggagcuguggcuguacuaaaauacaacggcauaauaacugaaaccauaaaaaguuggaaaaagcgaauauuaagaacacaagagucugaaugugucugugugaacgggucauguuucaccauaaugaccgauggcccgaguaauggggccgccucguacaaaaucuucaaaaucgaaaaggggaagguuacuaaaucaauagaguugaaugcacccaauuuucauuaugaggaauguuccuguuacccagacacuggcacagugauguguguaugcagggacaacuggcaugguucaaaucgaccuuggguguccuuuaaucaaaaccuggauuaccaaauaggauacaucugcagugggguuuucggugacaauccgcgucccaaagauggagagggcagcuguaauccagugacuguugauggagcagacggaguaaagggguuuucauacaaauaugguaaugguguuuggauaggaaggacuaaaaauaacagacuuagaaagggguuugagaugauuugggauccuaauggauggacagauaccgacagugauuucucagugaaacaggauguuguggcaauaacugauuggucaggguacagcgggaguuucguucaacauccugaguuaacaggauuggacuguauaagaccuugcuucuggguugaguuagucagaggacugccuagagaaaauacaacaaucuggacuagugggagcagcauuucuuuuuguggcguaaauagugacacugcaaacuggucuuggccagacggugcugaguugccguucaccauugacaaguag

SEQ ID NO: 48242 - RNA, 1413 nt, Artificial Sequence
  derived and/or modified CDS sequence (wt) from neuraminidase__InfluenzaA__ABW81479
augaauccaaaucaaaaaauaauaaccauuggaucaaucaguguggcaaucggaauaauuagucuaauauugcaaauaggaaauauuauuucaauaugggcuagccacucaauccaaacuggaagucaaaacuacacuggaauaugcaaccaaaaaaucauuacauaugaaaauagaaccuggguaaaucaaacauauguuaauauuaacaacacuaauguuguugcuggaaaggacaaacccucgaugacauuggccggcaauucaucucuuugcccuauccguggaugggcaauauacacaaaagacaacagcauaagaauugguuccaaaggagauguuuuugucauaagagagccuuuuauaucauguucucacuuggaaugcagaaccuuuuuucugacccaaggugcucuauuaaaugacaagcauucaaaugggaccauuaaggacagaagcccuuuuagggccuuaaugagcuguccucugggugaagcuccgucuccauacaauucaagauuugaaucaguugcuuggucagcaagcgcaugccaugauggccugggcuggcuaacaaucggaauuucugguccagauaauggagcaguggcuguacuaaaauacaacggcauaauaacugaaaccauaaaaaguuggaaaaagcaaauccuaagaacacaagagucugaaugugucugugugaacgguucauguuuuaccauaaugaccgauggcccgaguaacagggccgcaucguacagaaucuucaaaauugagaaggggagaguuacuaaaucaauagaguuggaugcacccaauuaucauuacgaggaauguuccuguuacccagacaccggcacaguaaugugugugugcagggacaauuggcacgguucaaaucgaccuuggguguccuuuaaucaaaaccuggauuaucaaauaggauacaucugcagugggguguucggugacaauccgcgucccaaagauggagaaggcagcuguaauccagugacuguugauggagcagacggaauaaagggguuuucauacagauaugguaaugguguuuggauaggaaggacuaaaaguaacagacuaagaaagggauuugagaugauuugggauccuaauggauggacagauaccgacagugauuucucaaugaaacaggaugucguggcaaugacugauuggucaggguacagcggaaguuuuguucaacauccugagcuaacaggauuggacuguaugagaccuugcuucuggguugaauuagucagagggcuaccuagagaaaauacaacaaucuggacuagugggagcagcauuucuuuuuguggcgugaauagcgagacugcaaacuggucuuggccagacggugcugaguugccauucaccauugacaaguag

SEQ ID NO: 48243 - RNA, 1413 nt, Artificial Sequence
  derived and/or modified CDS sequence (wt) from neuraminidase__InfluenzaA__ABW81480
augaauccaaaucaaaaaauaauaaccauuggaucaaucaguauagcaaucggaauaauuagccuaauguugcaaauaggaaacauuauuucaauaugggcuagucacucaauccaaacuggaagucaaaaccacacuggaguaugcaaccaaagaaucaucacauaugaaaacagcaccugggugaaucacacauauguuaauauuaacaacaccaauguuauugcuggaaaggacaaaacuucggugacauuggccggcaauucaucucuuuguucuaucaguggaugggcuauauacacaaaagacaacagcauaagaauugguuccaaaggagauguuuuugucauaagagagccuuucauaucauguucucacuuggaaugcagaaccuuuuuucugacccaaggugcucuauuaaaugacaaacauucaaaugggaccguuaaggacagaagucccuauagggcuuuaaugagcuguccucuaggugaagcuccguccccauacaauucaaaguuugaaucaguugcuuggucagcaagcgcaugccaugauggcaugggcugguuaacaaucggaauuucugguccagacaauggagcaguggcuguacuaaaauacaacggcauaauaacugaaaccauaaaaaguuggaaaaagcaaauauuaagaacacaagagucugaaugugucugugugaacgggucauguuucaccauaaugaccgauggcccgaguaauggggccgcuucguacaaaaucuucaagaucgaaaagggaaagguuacuaaaucaauagaguugaaugcacccaauuuucauuaugaggaauguuccuguuacccagacacuggcacagugauguguguaugcagggacaacuggcaugguucaaaucgacccugggugucuuuuaaucaaaaccuggauuaucaaauaggauacaucugcagugggguguucggugacaauccgcgucccaaagauggagagggcagcuguaauccagugacuguugauggagcaaacggaguaaagggguuuucauacaaauaugguaaugguguuuggauaggaaggacuaaaaguaacagacuuagaaagggguuugagaugauuugggauccuaauggauggacagauaccgacagugauuucucagugaaacaggauguuguggcaauaacugauuggucaggguacagcggaaguuucguucaacauccugaguuaacaggauuggacuguauaagaccuugcuucuggguugaguuagucagaggacugccaaaagaaaauacaacaaucuggacuagugggagcagcauuucuuuuuguggcguaaauagugauacugcaaacuggucuuggccagacggugcugaguugccguuuaccauugacaaguag

SEQ ID NO: 48244 - RNA, 1413 nt, Artificial Sequence
  derived and/or modified CDS sequence (wt) from neuraminidase__InfluenzaA__ABW81481
augaauccaaaucaaaaaauaauaaccauuggaucaaucaguguggcaaucggaauaauuagucuaauauugcaaauaggaaauauuauuucaauaugggcuagccacucaauccaaacuggaagucaaaacuacacuggaauaugcaaccaaaaaaucauuacauaugaaaauagaaccuggguaaaucaaacauauguuaauauuaacaacacuaauguuguugcuggaaaggacaaacccucgaugacauuggcaggcaauucaucucuuugcccuauccguggaugggcaauauacacaaaagacaacagcauaagaauugguuccaaaggagauguuuuugucauaagagagccuuuuauaucauguucucacuuggaaugcagaaccuuuuuucugacccaaggugcucuauuaaaugacaagcauucaaaugggaccauuaaggacagaagcccuuuuagggccuuaaugagcuguccucugggugaagcuccgucuccauacaauucaagauuugaaucaguugcuuggucagcaagcgcaugccaugauggccugggcuggcuaacaaucggaauuucugguccagauaauggagcaguggcuguacuaaaauacaacggcauaauaacugaaaccauaaaaaguuggaaaaagcaaauccuaagaacacaagagucugaaugugucugugugaacgguucauguuuuaccauaaugaccgauggcccgaguaacagggccgcaucguacagaaucuucaaaauugagaaggggagaguuacuaaaucaauagaguuggaugcacccaauuaucauuacgaggaauguuccuguuacccagacaccggcacaguaaugugugugugcagggacaauuggcacgguucaaaucgaccuuggguguccuuuaaucaaaaccuggauuaucaaauaggauacaucugcagugggguguucggugacaauccgcgucccaaagauggagaaggcagcuguaauccagugacuguugauggagcagacggaguaaagggguuuucauacagauaugguaaugguguuuggauaggaaggacuaaaaguaacagacuaagaaagggauuugagaugauuugggauccuaauggauggacagauaccgacagugauuucucaaugaaacaggaugucguggcaaugacugauuggucaggguacagcggaaguuuuguucaacauccugagcuaacaggauuggacuguaugagaccuugcuucuggguugaauuagucagagggcuaccuagagaaaauacaacaaucuggacuagugggagcagcauuucuuuuuguggcgugaauagcgagacugcaaacuggucuuggccagacggugcugaguugccauucaccauugacaaguag

SEQ ID NO: 48245 - RNA, 1413 nt, Artificial Sequence
  derived and/or modified CDS sequence (wt) from neuraminidase__InfluenzaA__ABW81482
augaauccaaaucaaaaaauaauaaccauuggaucaaucaguguggcaaucggaauaauuagucuaauauugcaaauaggaaauauuauuucaauaugggcuagccacucaauccaaacuggaagucaaaacuacacuggaauaugcaaccaaaaaaucauuacauaugaaaauagaaccuggguaaaucaaacauauguuaauauuaacaacacuaauguuguugcuggaaaggacaaacccucgaugacauuggccggcaauucaucucuuugcccuauccguggaugggcaauauacacaaaagacaacagcauaagaauugguuccaaaggagauguuuuugucauaagagagccuuuuauaucauguucucacuuggaaugcagaaccuuuuuucugacccaaggugcucuauuaaaugacaagcauucaaaugggaccauuaaggacagaagcccuuuuagggccuuaaugagcuguccucuuggugaagcuccgucuccauacaauucaagauuugaaucaguugcuuggucagcaagcgcaugccaugauggccugggcuggcuaacaaucggaauuucugguccagauaauggagcaguggcuguacuaaaauacaacggcauaauaacugaaaccauaaaaaguuggaaaaagcaaauccuaagaacacaagagucugaaugugucugugugaacgguucauguuuuaccauaaugaccgauggcccgaguaacagggccgcaucguacagaaucuucaaaauugagaaggggagaguuacuaaaucaauagaguuggaugcacccaauuaucauuacgaggaauguuccuguuacccagacaccggcacaguaaugugugugugcagggacaauuggcacgguucaaaucgaccuuggguguccuuuaaucaaaaccuggauuaucaaauaggauacaucugcagugggguguucggugacaauccgcgucccaaagauggagaaggcagcuguaauccagugacuguugauggagcagacggaguaaagggguuuucauacagauaugguaaugguguuuggauaggaaggacuaaaaguaacagacuaagaaagggauuugagaugauuugggauccuaauggauggacagauaccgacagugauuucucaaugaaacaggaugucguggcaaugacugauuggucaggguacagcggaaguuuuguucaacauccugagcuaacaggauuggccuguaugagaccuugcuucuggguugaauuagucagagggcuaccuagagaaaauacaacaaucuggacuagugggagcagcauuucuuuuuguggcgugaauagcgagacugcaaacuggucuuggccagacggugcugaguugccauucaccauugacaaguag

SEQ ID NO: 48246 - RNA, 1413 nt, Artificial Sequence
  derived and/or modified CDS sequence (wt) from neuraminidase__InfluenzaA__ABW81483
augaauccaaaucaaaaaauaauaaccauuggaucaaucaguauagcaaucggaauaauuagucuaauguugcaaauaggaaauauuauuucaauaugggcuagucacucaauccaaacuggaagucaaaaccacacuggaauaugcaaccaaagaaucaucacauaugaaaacagcaccugggugaaucacacauauguuaauauuaacaacacuaauguuguugcuggaaaggacaaaacuucagugacauuggccggcaauucaucucuuuguucuaucaguggaugggcuauauacacaaaagacaacagcauaagaauuggcuccaaaggagauguuuuugucauaagagaaccuuucauaucauguucucacuuggaaugcagaaccuuuuuucugacccaaggugcucuauuaaaugacaaacauucaaauggaaccguuaaggacagaaguccuuauagggccuuaaugagcuguccucuaggugaagcuccauccccauacaauucaaaguuugaaucaguugcauggucagcaagcgcaugccacgauggcaugggcugguuaacaaucggaauuucugguccagacaauggagcuguggcaguacuaaaauacaacggaauaauaacugaaaccauaaaaaguuggaaaaagcgaauauugagaacacaagagucugaaugugucugugugaacgggucauguuucaccauaaugaccgaugguccgaguaauggggccgccucguacaaaaucuucaagaucgaaaagggaaagguuacuaaaucaauagaguuaaaugcacccaauuuucauuaugaggaauguuccuguuacccagacacuggcacagugauguguguaugcagggacaacuggcaugguucaaaucgaccuugggugucuuuuaaucaaaacuuggauuaucaaauaggauacaucugcaguggaguguucggugacaauccgcgucccaaagauggaaagggcagcuguaauccagugacuguugauggagcagacggaguuaagggguuuucauacaaauaugguaaugguguuuggauaggaaggacuaaaaguaacagacuuagaaaggguuuugagaugauuugggauccuaauggauggacagauaccgacagugauuucucagugaaacaggauguuguggcaauaacugauuggucaggguacagcggaaguuucguucaacauccugaguuaacaggauuggacuguauaagaccuugcuucuggguugaguuagucagaggacugccuagagaaaauacaacaaucuggacuagugggagcagcauuucuuuuuguggcguugauagugauacugcaaacuggucuuggccagacggugcugaguugccguucaccauugacaaguag

SEQ ID NO: 48247 - RNA, 1413 nt, Artificial Sequence
  derived and/or modified CDS sequence (wt) from neuraminidase__InfluenzaA__ABW81484
augaauccaaaucaaaaaauaauaaccauuggaucaaucaguauagcaaucggaauaauuagucuaauguugcaaauaggaaauauuauuucaauaugggcuagucacucaauccaaacuggaaaucaaaaccacacuggaauaugcaaccaaagaaucaucacauaugaaaacagcaccugggugaaucacacauauguuaauauuaacaacacuaauguuguugcuggaaagggcaaaacuucagugacauuggccggcaauucaucucuuuguucuaucaguggaugggcuauauacacaaaagacaauagcauaagaauuggcuccaaaggagauguuuuugucauaagagaaccuuucauaucauguucucacuuggaaugcagaaccuuuuuucugacccaaggugcucuauuaaaugacaaacauucaaauggaaccguuaaggacagaaguccuuauagggccuuaaugagcuguccucuaggugaagcuccguccccauacaauucaaaguuugaaucaguugcauggucagcaagcgcaugccacgauggcaugggcugguuaacaaucggaauuucugguccagacaauggagcuguggcuguacuaaaauacaacggaauaauaacugaaaccauaaaaaguuggaaaaagcgaauauugagaacacaagagucugaaugugucugugugaacgggucauguuucaccauaaugaccgaugguccgaguaauggggccgccucguacaaaaucuucaagaucgaaaagggaaagguuacuaaaucaauagaguuaaaugcacccaauuuucauuaugaggaauguuccuguuacccagacacuggcacagugauguguguaugcagggacaacuggcaugguucaaaucgaccuugggugucuuuuaaucaaaacuuggauuaucaaauaggauacaucugcaguggaguguucggugacaauccgcgucccaaagauggaaagggcagcuguaauccagugacuguugauggagcagacggaguuaagggguuuucauacaaauaugguaaugguguuuggauaggaaggacuaaaaguaacagacuuagaaaggguuuugagaugauuugggauccuaauggauggacagauaccgacagugauuucucagugaaacaggauguuguggcaauaacugauuggucaggguacagcggaaguuucguucaacauccugaguuaacaggauuggacuguauaagaccuugcuucuggguugaguuagucagaggacugccuagagaaaauacaacaaucuggacuagugggagcagcauuucuuuuuguggcguugauagugauacugcaaacuggucuuggccagacggugcugaguugccguucaccauugacaaguag

SEQ ID NO: 48248 - RNA, 1413 nt, Artificial Sequence
  derived and/or modified CDS sequence (wt) from neuraminidase__InfluenzaA__ABW81487
augaauccaaaucaaaaaauaauaaccauuggaucaaucaguauagcaaucggaauaauuagucuaauguugcaaauaggaaauauuauuucaauaugggcuagucacucaauccaaacuggaagucaaaaccacacuggaauaugcaaccaaagaaucaucacauaugaaaacagcaccugggugaaucacacauauguuaauauuaacaacacuaauguuguugcuggaaaggacaaaacuucagugacauuggccggcaauucaucucuuuguucuaucaguggaugggcuauauacacaaaagacaacagcauaagaauuggcuccaaaggagauguuuuugucauaagagaaccuuucauaucauguucucacuuggaaugcagaaccuuuuuucugacccaaggugcucuauuaaaugacaaacauucaaauggaaccguuaaggacagaaguccuuauagggccuuaaugagcuguccucuaggugaagcuccguccccauacaauucaaaguuugaaucaguugcauggucagcaagcgcaugccaugauggcaugggcugguuaacaaucggaauuucugguccagacaauggagcuguggcuguacuaaaauacaacggaauaauaacugaaaccauaaaaaguuggaaaaagcgaauauugagaacacaagagucugaaugugucuguguaaacgggucauguuucaccauaaugaccgauggcccgaguaauggggccgccucguacaaaaucuucaagaucgaaaagggaaagguuacuaaaucaauagaguuaaaugcacccaauuuucauuaugaggaauguuccuguuacccagacacuggcacagugauguguguaugcagggacaacuggcaugguucaaaucgaccuugggugucuuuuaaucaaaacuuggauuaucaaauaggauacaucugcaguggaguguucggugacaauccgcgucccaaagauggaaagggcagcuguaauccagugacuguugauggagcagacggaguuaagggguuuucauacaaauaugguaaugguguuuggauaggaaggacuaaaaguaacagacuuagaaaggguuuugagaugauuugggauccuaauggauggacagauaccgacagugauuucucagugaaacaggauguuguggcaauaacugauuggucaggguacagcggaaguuucauucaacauccugaguuaacaggauuggacuguauaagaccuugcuucuggguugaguuagucagaggacugccuagagaaaauacaacaaucuggacuagugggagcagcauuucuuuuuguggcguugauagugauacugcaaacuggucuuggccagacggugcugaguugccguucaccauugacaaguag

SEQ ID NO: 48249 - RNA, 1413 nt, Artificial Sequence
  derived and/or modified CDS sequence (wt) from neuraminidase__InfluenzaA__ABW81488
augaauccaaaucaaaaaauaauaaccauuggaucaaucaguauagcaaucggaauaauuagucuaauguugcaaauaggaaauauuauuucaauaugggcuagucacucaauccaaacuggaagucaaaaccacacuggaauaugcaaccaaagaaucaucacauaugaaaacagcaccugggugaaucacacauauguuaauauuaacaacacuaauguuguugcuggaaaggacaaaacuucagugacauuggccggcaauucaucucuuuguucuaucaguggaugggcuauauacacaaaagacaacagcauaagaauuggcuccaaaggagauguuuuugucauaagagaaccuuucauaucauguucucacuuggaaugcagaaccuuuuuucugacccaaggugcucuauuaaaugacaaacauucaaauggaaccguuaaggacagaaguccuuauagggccuuaaugagcuguccucuaggugaagcuccguccccauacaauucaaaguuugaaucaguugcauggucagcaagcgcaugccaugauggcaugggcugguuaacaaucggaauuucugguccagacaauggagcuguggcuguacuaaaauacaacggaauaauaacugaaaccauaaaaaguuggaaaaagcgaauauugagaacacaagagucugaaugugucugugugaacgggucauguuucaccauaaugaccgauggcccgaguaauggggccgccucguacaaaaucuucaagaucgaaaagggaaagguuacuaaaucaauagaguuaaaugcacccaauuuucauuaugaggaauguuccuguuacccagacacuggcacagugauguguguaugcagggacaacuggcaugguucaaaucgaccuugggugucuuuuaaucaaaacuuggauuaucaaauaggauacaucugcaguggaguguucggugacaauccgcgucccaaagauggaaagggcagcuguaauccagugacuguugauggagcagacggaguuaagggguuuucauacaaauaugguaaugguguuuggauaggaaggacuaaaaguaacagacuuagaaaggguuuugagaugauuugggauccuaauggauggacagauaccgacagugauuucucagugaaacaggauguuguggcaauaacugauuggucaggguacagcggaaguuucguucaacauccugaguuaacaggauuggacuguauaagaccuugcuucuggguugaguuagucagaggacugccuagagaaaauacaacaaucuggacuagugggagcagcauuucuuuuuguggcguugauagugauacugcaaacuggucuuggccagacggugcugaguugccguucaccauugacaaguag

SEQ ID NO: 48250 - RNA, 1413 nt, Artificial Sequence
  derived and/or modified CDS sequence (wt) from neuraminidase__InfluenzaA__ABW81489
augaauccaaaucaaaaaauaauaaccauuggaucaaucaguauagcaaucggaauaauuagucuaauguugcaaauaggaaauauuauuucaauaugggcuagucacucaauccaaacuggaagucaaaaccacacuggaauaugcaaccaaagaaucaucacauaugaaaacagcaccugggugaaucacacauauguuaauauuaacaacacuaauguuguugcuggaaaggacaaaacuucagugacauuggccggcaauucaucucuuuguucuaucaguggaugggcuauauacacaaaagacaacagcauaagaauuggcuccaaaggagauguuuuugucauaagagaaccuuucauaucauguucucacuuggaaugcagaaccuuuuuucugacccaaggugcucuauuaaaugacaaacauucaaauggaaccguuaaggacagaaguccuuauagggccuuaaugagcuguccucuaggugaagcuccguccccauacaauucaaaguuugaaucaguugcauggucagcaagcgcaugccacgauggcaugggcugguuaacaaucggaauuucugguccagacaauggagcuguggcuguacuaaaauacaacggaauaauaacugaaaccauaaaaaguuggaaaaagcgaauauugagaacacaagagucugaaugugucugugugaacgggucauguuucaccauaaugaccgauggcccgaguaauggggccgccucguacaaaaucuucaagaucgaaaagggaaagguuacuaaaucaauagaguuaaaugcacccaauuuucauuaugaggaauguuccuguuacccagacacuggcacagugauguguguaugcagggacaacuggcaugguucaaaucgaccuugggugucuuuuaaucaaaacuuggauuaucaaauaggauacaucugcaguggaguguucggugacaauccgcgucccaaagauggaaagggcagcuguaauccagugacuguugauggagcagacggaguuaagggguuuucauacaaauaugguaaugguguuuggauaggaaggacuaaaaguaacagacuuagaaaggguuuugagaugauuugggauccuaauggauggacagauaccgacagugauuucucagugaaacaggauguuguggcaauaacugauuggucaggguacagcggaaguuucguucaacauccugaguuaacaggauuggacuguauaagaccuugcuucuggguugaguuagucagaggacugccuagagaaaauacaacaaucuggacuagugggagcagcauuucuuuuuguggcguugauagugauacugcaaacuggucuuggccagacggugcugaguugccguucaccauugacaaguag

SEQ ID NO: 48251 - RNA, 1413 nt, Artificial Sequence
  derived and/or modified CDS sequence (wt) from neuraminidase__InfluenzaA__ABW81490
augaauccaaaucaaaaaauaauaaccauuggaucaaucaguauagcaaucggaauaauuagucuaauguugcaaauaggaaauauuauuucaauaugggcuagucacucaauccaaacuggaagucaaaaccacacuggaauaugcaaccaaagaaucaucacauaugaaaacagcaccugggugaaucacacauauguuaauauuaacaacacuaauguuguugcuggaaaggacaaaacuucagugacauuggccggcaauucaucucuuuguucuaucaguggaugggcuauauacacaaaagacaacagcauaagaauuggcuccaaaggagauguuuuugucauaagagaaccuuucauaucauguucucacuuggaaugcaaaaccuuuuuucugacccaaggugcucuauuaaaugacaaacauucaaauggaaccguuaaggacagaaguccuuauagggccuuaaugagcuguccucuaggugaagcuccguccccauacaauucaaaguuugaaucaguugcauggucagcaagcgcaugccacgauggcaugggcugguuaacaaucggaauuucugguccagacaauggagcuguggcuguacuaaaauacaacggaauaauaacugaaaccauaaaaaguuggaaaaagcgaauauugagaacacaagagucugaaugugucugugugaacgggucauguuucaccauaaugaccgaugguccgaguaauggggccgccucguacaaaaucuucaagaucgaaaagggaaagguuacuaaaucaauagaguuaaaugcacccaauuuucauuaugaggaauguuccuguuacccagacacuggcacagugauguguguaugcagggacaacuggcaugguucaaaucgaccuugggugucuuuuaaucaaaacuuggauuaucaaauaggauacaucugcaguggaguguucggugacaauccgcgucccaaagauggaaagggcagcuguaauccagugacuguugauggagcagacggaguuaagggguuuucauacaaauaugguaaugguguuuggauaggaaggacuaaaaguaacagacuuagaaaggguuuugagaugauuugggauccuaauggauggacagauaccgacagugauuucucagugaaacaggauguuguggcaauaacugauuggucaggguacagcggaaguuucguucaacauccugaguuaacaggauuggacuguauaagaccuugcuucuggguugaguuagucagaggacugccuagagaaaauacaacaaucuggacuagugggagcagcauuucuuuuuguggcguugauagugauacugcaaacuggucuuggccagacggugcugaguugccguucaccauugacaaguag

SEQ ID NO: 48252 - RNA, 1413 nt, Artificial Sequence
  derived and/or modified CDS sequence (wt) from neuraminidase__InfluenzaA__ABW81491
augaauccaaaucaaaaaauaauaaccauuggaucaaucaguauagcaaucggaauaauuagucuaauguugcaaauaggaaauauuauuucaauaugggcuagucacucaauccaaacuggaagucaaaaccacacuggaauaugcaaccaaagaaucaucacauaugaaaacagcaccugggugaaucacacauauguuaauauuaacaacacuaauguuguugcuggaaaggacaaaacuucagugacauuggccggcaauucaucucuuuguucuaucaguggaugggcuauauacacaaaagacaacagcauaagaauuggcuccaaaggagauguuuuugucauaagagaaccuuucauaucauguucucacuuggaaugcagaaccuuuuuucugacccaaggugcucuauuaaaugacaaacauucaaauggaaccguuaaggacagaaguccuuauagggccuuaaugagcuguccucuaggugaagcuccguccccauacaauucaaaguuugaaucaguugcauggucagcaagcgcaugccaugauggcaugggcugguuaacaaucggaauuucugguccagacaauggagcuguggcuguacuaaaauacaacggaauaauaacugaaaccauaaaaaguugggaaaagcgaauauugagaacacaagagucugaaugugucugugugaacgggucauguuucaccauaaugaccgauggcccaaguaauggggccgccucguacaaaaucuucaagaucgaaaagggaaagguuacuaaaucaauagaguuaaaugcacccaauuuucauuaugaggaauguuccuguuacccagacacuggcacaguaauguguguaugcagggacaacuggcaugguucaaaucgaccuugggugucuuuuaaucaaaacuuggauuaucaaauaggauacaucugcaguggaguguucggugacaauccgcgucccaaagauggaaagggcagcuguaauccagugacuguugauggagcagacggaguuaagggguuuucauacaaauaugguaaugguguuuggauaggaaggacuaaaaguaacagacuuagaaaggguuuugagaugauuugggauccuaauggauggacagauaccgacagugauuucucagugaaacaggauguuguggcaauaacugauuggucaggguacagcggaaguuucguucaacauccugaguuaacaggauuggacuguauaagaccuugcuucuggguugaguuagucagaggacugccuagagaaaauacaacaaucuggacuagugggagcagcauuucuuuuuguggcguugauagugauacugcaaacuggucuuggccagacggugcugaguugccguucaccauugacaaguag

SEQ ID NO: 48253 - RNA, 1413 nt, Artificial Sequence
  derived and/or modified CDS sequence (wt) from neuraminidase__InfluenzaA__ABW81492
augaauccaaaucaaaaaauaauaaccauuggaucaaucaguauagcaaucggaauaauuagucuaauguugcaaauaggaaauauuauuucaauaugggcuagucacucaauccaaacuggaagucaaaaccacacuggaauaugcaaccaaagaaucaucacauaugaaaacagcaccugggugaaucacacauauguuaauauuaacaacacuaauguuguugcuggaaaggacaaaacuucagugacauuggccggcaauucaucucuuuguucuaucaguggaugggcuauauacacaaaagacaacagcauaagaauuggcuccaaaggagauguuuuugucauaagagaaccuuucauaucauguucucacuuggaaugcagaaccuuuuuucugacccaaggugcucuauuaaaugacaaacauucaaauggaaccguuaaggacagaaguccuuauagggccuuaaugagcuguccucuaggugaagcuccguccccauacaauucaaaguuugaaucaguugcauggucagcaagcgcaugccacgauggcaugggcugguuaacaaucggaauuucugguccagacaauggagcuguggcuguacuaaaauacaacggaauaauaacugaaaccauaaaaaguuggaaaaagcgaauauugagaacacaagagucugaaugugucugugugaacgggucauguuucaccauaaugaccgauggcccgaguaauggggccgccucguacaaaaucuucaagaucgaaaagggaaagguuacuaaaucaauagaguuaaaugcacccaauuuucauuaugaggaauguuccuguuacccagacacuggcacagugauguguguaugcagggacaacuggcaugguucaaaucgaccuugggugucuuuuaaucaaaacuuggauuaucaaauaggauacaucugcaguggaguguucggugacaauccgcgucccaaagauggaaagggcagcuguaauccagugacuguugauggagcagacggaguuaagggguuuucauacaaauaugguaaugguguuuggauaggaaggacuaaaaguaacagacuuagaaaggguuuugagaugauuugggauccuaauggauggacagauaccgacagugauuucucagugaaacaggauguuguggcaauaacugauuggucaggguacagcggaaguuucguucaacauccugaguuaacaggauuggacuguauaagaccuugcuucuggguugaguuagucagaggacugccuagagaaaauacaacaaucugggcuagugggagcagcauuucuuuuuguggcguugauagugauacugcaaacuggucuuggccagacggugcugaguugccguucaccauugacaaguag

SEQ ID NO: 48254 - RNA, 1413 nt, Artificial Sequence; identical to SEQ ID NO: 48249
  derived and/or modified CDS sequence (wt) from neuraminidase__InfluenzaA__ABW81493

SEQ ID NO: 48255 - RNA, 1413 nt, Artificial Sequence
  derived and/or modified CDS sequence (wt) from neuraminidase__InfluenzaA__ABW81494
augaauccaaaucaaaaaauaauaaccauuggaucaaucaguauagcaaucggaauaauuagucuaauguugcaaauaggaaauauuauuucaauaugggcuagucacucaauccaaacuggaagucaaaaccacacuggaauaugcaaccaaagaaucaucacauaugaaaacagcaccugggugaaucacacauauguuaauauuaacaacacuaauguuguugcuggaaaggacaaaacuucagugacauuggccggcaauucaucucuuuguucuaucaguggaugggcuauauacacaaaagacaacagcauaagaauuggcuccaaaggagauguuuuugucauaagagaaccuuucauaucauguucucacuuggaaugcagaaccuuuuuucugacccaaggugcucuauuaaaugacaaacauucaaauggaaccguuaaggacagaaguccuuauagggccuuaaugagcuguccucuaggugaagcuccguccccauacaauucaaaguuugaaucaguugcauggucagcaagcgcaugccacgauggcaugggcugguuaacaaucggaauuucugguccagacaauggagcuguggcuguacuaaaauacaacggaauaauaacugaaaccauaaaaaguuggaaaaagcgaauauugagaacacaagagucugaaugugucugugugaacgggucauguuucaccauaaugaccgaugguccgaguaauggggccgccucguacaaaaucuucaagaucgaaaagggaaagguuacuaaaucaauagaguuaaaugcacccaauuuucauuaugaggaauguuccuguuacccagacacuggcacagugauguguguaugcagggacaacuggcaugguucaaaucgaccuugggugucuuuuaaucaaaacuuggauuaucaaauaggauacaucugcaguggaguguucggugacaauccgcgucccaaagauggaaagggcagcuguaauccagugacuguugauggagcagacggaguuaagggguuuucauacaaauaugguaaugguguuuggauaggaaggacuaaaaguaacagacuuagaaaggguuuugagaugauuugggauccuaauggauggacagauaccgacagugauuucucagugaaacaggauguuguggcaauaacugauuggucaggguacagcggaaguuucguucaacauccugaguuaacaggauuggacuguauaagaccuugcuucuggguugaguuagucagaggacugccuagagaaaauacaacaaucuggacuagugggagcagcauuucuuuuuguggcguugauagugauacugcaaacuggucuuggccagacggugcugaguugccguucaccauugacaaguag

SEQ ID NO: 48256 - RNA, 1413 nt, Artificial Sequence
  derived and/or modified CDS sequence (wt) from neuraminidase__InfluenzaA__ABW81495
augaauccaaaucaaaaaauaauaaccauuggaucaaucaguauagcaaucggaauaauuagucuaauguugcaaauaggaaauauuauuucaauaugggcuagucacucaauccaaacuggaagucaaaaccacacuggaauaugcaaccaaagaaucaucacauaugaaaacagcaccugggugaaucacacauauguuaauauuaacaacacuaauguuguugcuggaaaggacaaaacuucagugacauuggccggcaauucaucucuuuguucuaucaguggaugggcuauauacacaaaagacaacagcauaagaauuggcuccaaaggagauguuuuugucauaagagaaccuuucauaucauguucucacuuggagugcagaaccuuuuuucugacccaaggugcucuauuaaaugacaaacauucaaauggaaccguuaaggacagaaguccuuauagggccuuaaugagcuguccucuaggugaagcuccguccccauacaauucaaaguuugaaucaguugcauggucagcaagcgcaugccacgauggcaugggcugguuaacaaucggaauuucugguccagacaauggagcuguggcuguacuaaaauacaacggaauaauaacugaaaccauaaaaaguuggaaaaagcgaauauugagaacacaagagucugaaugugucugugugaacgggucauguuucaccauaaugaccgaugguccgaguaauggggccgccucguacaaaaucuucaagaucgaaaagggaaagguuacuaaaucaauagaguuaaaugcacccaauuuucauuaugaggaauguuccuguuacccagacacuggcacagugauguguguaugcagggacaacuggcaugguucaaaucgaccuugggugucuuuuaaucaaaacuuggauuaucaaauaggauacaucugcaguggaguguucggugacaauccgcgucccaaagauggaaagggcagcuguaauccagugacuguugauggagcagacggaguuaagggguuuucauacaaauaugguaaugguguuuggauaggaaggacuaaaaguaacagacuuagaaaggguuuugagaugauuugggauccuaauggauggacagauaccgacagugauuucucagugaaacaggauguuguggcaauaacugauuggucaggguacagcggaaguuucguucaacauccugaguuaacaggauuggacuguauaagaccuugcuucuggguugaguuagucagaggacugccuagagaaaauacaacaaucuggacuagugggagcagcauuucuuuuuguggcguugauagugauacugcaaacuggucuuggccagacggugcugaguugccguucaccauugacaaguag

SEQ ID NO: 48257 - RNA, 1413 nt, Artificial Sequence
  derived and/or modified CDS sequence (wt) from neuraminidase__InfluenzaA__ABW81497
augaauccaaaucaaaaaauaauaaccauuggaucaaucaguauagcaaucggaauaauuagucuaauguugcaaauaggaaauauuauuucaauaugggcuagucacucaauccaaacuggaagucaaaaccacacuggaauaugcaaccaaagaaucaucacauaugaaaacagcaccugggugaaucacacauauguuaauauuaacaacacuaauguuguugcuggaaaggacaaaacuucagugacauuggccggcaauucaucucuuuguucuaucaguggaugggcuauauacacaaaagacaacagcauaagaauuggcuccaaaggagauguuuuugucauaagagaaccuuucauaucauguucucacuuggaaugcagaaccuuuuuucugacccaaggugcucuauuaaaugacaaacauucaaauggaaccguuaaggacagaaguccuuauagggccuuaaugagcuguccucuaggugaagcuccguccccauacaauucaaaguuugaaucaguugcauggucagcaagcgcaugccaugauggcaugggcugguuaacaaucggaauuucugguccagacaauggagcuguggcuguacuaaaauacaacggaauaauaacugaaaccauaaaaaguugggaaaaacgaauauugagaacacaagagucugaaugugucugugugaacgggucauguuucaccauaaugaccgauggcccaaguaauggggccgccucguacaaaaucuucaagaucgaaaagggaaagguuacuaaaucaauagaguuaaaugcacccaauuuucauuaugaggaauguuccuguuacccagacacuggcacaguaauguguguaugcagggacaacuggcaugguucaaaucgaccuugggugucuuuuaaucaaaacuuggauuaucaaauaggauacaucugcaguggaguguucggugacaauccgcgucccaaagauggaaagggcagcuguaauccagugacuguugauggagcagacggaguuaagggguuuucauacaaauaugguaaugguguuuggauaggaaggacuaaaaguaacagacuuagaaaggguuuugagaugauuugggauccuaauggauggacagauaccgacagugauuucucagugaaacaggauguuguggcaauaacugauuggucaggguacagcggaaguuucguucaacauccugaguuaacaggauuggacuguauaagaccuugcuucuggguugaguuagucagaggacugccuagagaaaauacaacaaucuggacuagugggagcagcauuucuuuuuguggcguugauagugauacugcaaacuggucuuggccagacggugcugaguugccguucaccauugacaaguag

SEQ ID NO: 48258 - RNA, 1413 nt, Artificial Sequence
  derived and/or modified CDS sequence (wt) from neuraminidase__InfluenzaA__ABW81498
augaauccaaaucaaaaaauaauaaccauuggaucaaucaguauagcaaucggaauaauuagucuaauguugcaaauaggaaauauuauuucaauaugggcuagucacucaauccaaacuggaagucaaaaccacacuggaauaugcaaccaaagaaucaucacauaugaaaacagcaccugggugaaucacacauauguuaauauuaacaacacuaauguuguugcuggaaaggacaaaacuucagugacauuggccggcaauucaucucuuuguucuaucaguggaugggcuauauacacaaaagacaacagcauaagaauuggcuccaaaggagauguuuuugucauaagagaaccuuucauaucauguucucacuuggaaugcagaaccuuuuuucugacccaaggugcucuauuaaaugacaaacauucaaauggaaccguuaaggacagaaguccuuauagggccuuaaugagcuguccucuaggugaagcuccguccccauacaauucaaaguuugaaucaguugcauggucagcaagcgcaugccaugauggcaugggcugguuaacaaucggaauuucugguccagacaauggagcuguggcuguacuaaaauacaacggaauaauaacugaaaccauaaaaaguugggaaaagcgaauauugagaacacaagagucugaaugugucugugugaacgggucauguuucaccauaaugaccgauggcccaaguaauggggccgccucguacaaaaucuucaagaucgaaaagggaaagguuacuaaaucaauagaguuaaaugcacccaauuuucauuaugaggaauguuccuguuacccagacacuggcacaguaauguguguaugcagggacaacuggcaugguucaaaucgaccuugggugucuuuuaaucaaaacuuggauuaucaaguaggauacaucugcaguggaguguucggugacaauccgcgucccaaagauggaaagggcagcuguaauccagugacuguugauggagcagacggaguuaagggguuuucauacaaauaugguaaugguguuuggauaggaaggacuaaaaguaacagacuuagaaaggguuuugagaugauuugggauccuaauggauggacagauaccgacagugauuucucagugaaacaggauguuguggcaauaacugauuggucaggguacagcggaaguuucguucaacauccugaguuaacaggauuggacuguauaagaccuugcuucuggguugaguuagucagaggacugccuagagaaaauacaacaaucuggacuagugggagcagcauuucuuuuuguggcguugauagugauacugcaaacuggucuuggccagacggugcugaguugccguucaccauugacaaguag

SEQ ID NO: 48259 - RNA, 1413 nt, Artificial Sequence
  derived and/or modified CDS sequence (wt) from neuraminidase__InfluenzaA__ABW81499
augaauccaaaucaaaaaauaauaaccauuggaucaaucaguauagcaaucggaauaauuagucuaauguugcaaauaggaaauauuauuucaauaugggcuagucacucaauccaaacuggaagucaaaaccacacuggaauaugcaaccaaagaaucaucacauaugaaaacagcaccugggugaaucacacauauguuaauauuaacaacacuaauguuguugcuggaagggacaaaacuucagugacauuggccggcaauucaucucuuuguucuaucaguggaugggcuauauacacaaaagacaacagcauaagaauuggcuccaaaggagauguuuuugucauaagagaaccuuucauaucauguucucacuuggaaugcagaaccuuuuuucugacccaaggugcucuauuaaaugacaaacauucaaauggaaccguuaaggacagaaguccuuauagggccuuaaugagcuguccucuaggugaagcuccguccccauacaauucaaaguuugaaucaguugcauggucagcaagcgcaugccacgauggcaugggcugguuaacaaucggaauuucugguccagacaauggagcuguggcuguacuaaaauacaacggaauaauaacugaaaccauaaaaaguuggaaaaagcgaauauugagaacacaagagucugaaugugucugugugaacgggucauguuucaccauaaugaccgaugguccgaguaauggggccgccucguacaaaaucuucaagaucgaaaagggaaagguuacuaaaucaauagaguuaaaugcacccaauuuucauuaugaggaauguuccuguuacccagacacuggcacagugauguguguaugcagggacaacuggcaugguucaaaucgaccuugggugucuuuuaaucaaaacuuggauuaucaaauaggauacaucugcaguggaguguucggugacaauccgcgucccaaagauggaaagggcagcuguaauccagugacuguugauggagcagacggaguuaagggguuuucauacaaauaugguaaugguguuuggauaggaaggacuaaaaguaacagacuuagaaaggguuuugagaugauuugggauccuaauggauggacagauaccgacagugauuucucagugaaacaggauguuguggcaauaacugauuggucaggguacagcggaaguuucguucaacauccugaguuaacaggauuggacuguauaagaccuugcuucuggguugaguuagucagaggacugccuagagaaaauacaacaaucuggacuagugggagcagcauuucuuuuuguggcguugauagugauacugcaaacuggucuuggccagacggugcugaguugccguucaccauugacaaguag

SEQ ID NO: 48260 - RNA, 1413 nt, Artificial Sequence
  derived and/or modified CDS sequence (wt) from neuraminidase__InfluenzaA__ABW81500
augaauccaaaucaaaaaauaauaaccauuggaucaaucaguauagcaaucggaauaauuagucuaauguugcaaauaggaaauauuauuucaauaugggcuagucacucaauccaaacuggaagucaaaaccacacuggaauaugcaaccaaagaaucaucacauaugaaaacagcaccugggugaaucacacauauguuaauauuaacaacacuaauguuguugcuggaaaggacaaaacuucagugacauuggccggcaauucaucucuuuguucuaucaguggaugggcuauauacacaaaagacaacagcauaagaauuggcuccaaaggagauguuuuugucauaagagaaccuuucauaucauguucucacuuggaaugcagaaccuuuuuucugacccaaggugcucuauuaaaugacaaacauucaaauggaaccguuaaggacagaaguccuuauagggccuuaaugagcuguccucuaggugaagcuccguccccauacaauucaaaguuugaaucaguugcauggucagcaagugcaugccaugauggcaugggcugguuaacaaucggaauuucugguccagacaauggagcuguggcuguacuaaaguacaacggaauaauaacugaaaccauaaaaaguuggaaaaagcgaauauugagaacacaagagucugaaugugucugugugaacgggucauguuucaccauaaugaccgauggcccgaguaauggggccgccucguacaaaaucuucaagaucgaaaagggaaagguuacuaaaucaauagaguuaaaugcacccaauuuucauuaugaggaauguuccuguuacccagacacuggcacagugauguguguaugcagggacaacuggcaugguucaaaucgaccuugggugucuuuuaaucaaaacuuggauuaucaaauaggauacaucugcaguggaguguucggugacaauccgcgucccaaagauggaaagggcagcuguaauccagugacugcugauggagcagacggaguuaagggguuuucauacaaauaugguaaugguguuuggauaggaaggacuaaaaguaacagacuuagaaaggguuuugagaugauuugggauccuaauggauggacagauaccgacagugauuucucagugaaacaggauguuguggcaauaacugauuggucaggguacagcggaaguuucguucaacauccugaguuaacaggauuggacuguauaagaccuugcuucuggguugaguuagucagaggacugccuagagaaaauacaacaaucuggacuagugggagcagcauuucuuuuuguggcguugauagugauacugcaaacuggucuuggccagacggugcugaguugccguucaccauugacaaguag

SEQ ID NO: 48261 - RNA, 1413 nt, Artificial Sequence
  derived and/or modified CDS sequence (wt) from neuraminidase__InfluenzaA__ABW81501
augaauccaaaucaaaaaauaauaaccauuggaucaaucaguauagcaaucggaauaauuagucuaauguugcaaauagggaauauuauuucaauaugggcuagucacucaauccaaacuggaagucaaaaccacacuggaauaugcaaccaaaaaaucaucacauaugagaacagcaccugggugaaucacacauauguuaauauuaacaacacuaauguuguugcuggaaaggacaaaacuucagugacauuggccggcaauucaucucuuuguucugucaguggaugggcuauauacacaaaagacaacagcauaagaauuggcuccaaaggagauguuuuugucauaagagaaccuuucauaucauguucucauuuggaaugcaggaccuuuuuucugacccaaggugcucuauuaaaugacaaacauucaaauggaaccguuaaggacagaaguccuuauagggccuuaaugagcuguccucuaggugaagcuccguccccauacaauucaaaguuugaaucaguugcauggucagcaagugcaugucaugauggcaugggcugguuaacaaucggaauuucugguccagacaauggagcuguggcuguacuaaaauacaacggaauaauaacugaaaccauaaaaaguuggaaaaagcgaauauugagaacacaagagucugaaugugucugugugaacgggucauguuucaccauaaugaccgauggcccgaguaauggggccgccucguacaaaaucuucaagaucgaaaaggggaagguuacuaaaucaauagaguuaaaugcacccaauuuucauuaugaggaauguuccuguuacccagacacuggcacagugauguguguaugcagggacaacuggcaugguucaaaucgaccuugggugucuuuuaaucaaaacuuggauuaucaaauaggauacaucugcaguggaguauucggugacaauccgcgucccaaagauggaaagggcagcuguaauccagugacuguugauggagcagacggaguuaagggguuuucauacaaauaugguaaugguguuuggauaggaaggacuaaaaguaacagacuuagaaagggguuugagaugauuugggauccuaauggauggacagauaccgacagugauuucucagugaaacaggauguuguggcaauaacugauuggucaggauacaguggaaguuucguucaacauccugaauuaacaggauuggacuguauaagaccuugcuucuggguugaguuagucagaggacugccuagagaaaauacaacaaucuggacuagugggagcagcauuucuuuuuguggcguugauagugauacugcaaacuggucuuggccagacggugcugaguugccguucaccauugacaaguag

SEQ ID NO: 48262 - RNA, 1413 nt, Artificial Sequence; identical to SEQ ID NO: 48093
  derived and/or modified CDS sequence (wt) from neuraminidase__InfluenzaA__ABW86324

SEQ ID NO: 48263 - RNA, 1413 nt, Artificial Sequence; identical to SEQ ID NO: 48128
  derived and/or modified CDS sequence (wt) from neuraminidase__InfluenzaA__ABW86335

SEQ ID NO: 48264 - RNA, 1413 nt, Artificial Sequence; identical to SEQ ID NO: 48045
  derived and/or modified CDS sequence (wt) from neuraminidase__InfluenzaA__ABW86346

SEQ ID NO: 48265 - RNA, 1413 nt, Artificial Sequence
  derived and/or modified CDS sequence (wt) from neuraminidase__InfluenzaA__ABW86357
augaauccaaaucaaaaaauaauaaccauuggaucaaucaguauagcaaucgggauaauuagucuaauguugcaaauaggaaauauuauuucaauaugggcuagucacucaauccaaacuggaagucaaaaccacacuggaauaugcaaccaaagaaucaucacauaugaaaacagcaccugggugaaucacacauauguuaguauuaacaacacuaauguuguugcuggaaaggacaaaacuucagugacauuggccggcaauucaucucuuuguucuaucaguggaugggcuauauacacaaaagacaacagcauaagaauuggcuccaaaggagauguuuuugucauaagagaaccuuucauaucauguucucauuuggaaugcaggacauuuuuucugacccaaggugcucuauuaaaugacaaacauucaaauggaaccguuaaggaccgaaguccuuauagggccuuaaugagcuguccucuaggugaagcuccguccccauacaauucaaaguuugaaucaguugcauggucagcaagcgcaugccaugauggcaugggcugguuaacaaucggaauuucugguccagacaauggagcuguggcuguacuaaaauacaacggaauaauaacugaaaccauaaaaaguuggaaaaagcgaauauugagaacacaagagucugaaugugucugugugaacgggucauguuucaccauaaugaccgauggcccgaguaauggggccgccucguacaaaaucuucaaaaucgaaaaggggaagguuacuaaaucaauagaguuaaaugcacccaauuuucauuaugaggaauguuccuguuacccagacacuggcacagugauguguguaugcagggacaacuggcaugguucaaaucgaccuugggugucuuuuaaucaaaacuuggauuaucaaauaggauacaucugcaguggaguguucggugacaauccgcgucccaaagauggaaagggcagcuguaauccagugacuguugauggagcagacgggguuaagggguuuucauacaaauaugguaaugguguuuggauaggaagaacuaaaaguaacagacuuagaaagggguuugagaugauuugggauccuaauggauggacagauaccgacagugauuucucagugaaacaggauguuguggcaauaacugauuggucaggguacaguggaaguuucguucaacauccugaguuaacaggauuggacuguauaagaccuugcuucuggguugaguuagucagaggacugccuagagaaaauacaacaaucuggacuagugggagcagcauuucuuuuuguggcguugauagugauacugcaaacuggucuuggccagacggugcugaguugccguucaccauugacaaguag

SEQ ID NO: 48266 - RNA, 1413 nt, Artificial Sequence; identical to SEQ ID NO: 48127
  derived and/or modified CDS sequence (wt) from neuraminidase__InfluenzaA__ABW86368

SEQ ID NO: 48267 - RNA, 1413 nt, Artificial Sequence
  derived and/or modified CDS sequence (wt) from neuraminidase__InfluenzaA__ABW86379
augaauccaaaucaaaaaauaauaaccauuggaucaaucaguauagcaauuggaauaauuagucuaauguugcaaauaggaaauauuauuucaauaugggcuagucacucaauccaaacuggaagucaaaaccacacuggaauaugcaaccaaagaaucaucacauaugaaaacagcaccugggugaaucacacauaugucaauauuaacaacacuaauguuguugcuggaaaggacaaaacuucagugacauuggccggcaauucaucucuuuguucuaucaguggaugggcuauauacacaaaagacaacagcauaagaauuggcuccaaaggagauguuuuugucauaagagaaccuuucauaucauguucucauuuggaaugcaggaccuuuuuucugacccaaggugcucuauuaaaugacaaacauucaaauggaaccguuaaggacagaaguccuuauagggccuuaaugagcuguccucuaggugaagcuccguccccauacaauucaaaguuugaaucaguugcauggucagcaagcgcaugccaugauggcaugggcugguuaacaaucgggauuucugguccagacaauggagcuguggcuguacuaaaauacaacggaauaauaacugaaaccauaaaaaguuggaaaaagcgaauauugagaacacaggagucugaaugugucugugugaacgggucauguuucaccauaaugaccgauggcccgaguaauggggccgccucguacaaaaucuucaagaucgaaaaggggaagguuacuaaaucaauagaguuaaaugcacccaauuuucauuaugaggaauguuccuguuacccagacacuggcacagugauguguguaugcagggauaacuggcaugguucaaaucgaccuugggugucuuuuaaucaaaacuuggauuaucaaguaggauacaucugcaguggaguguucggugacaauccgcgucccaaagauggaaagggcagcuguaauccaaugacuguugauggagcagacggaguuaagggguuuucauacaaauaugguaaugguguuuggauaggaaggacuaaaaguaacaaacuuagaaagggguuugagaugauuugggauccuaauggauggacagauaccgacagugauuucucagugaaacaggauguuguggcaauaaccgauuggucaggguacaguggaaguuucguucaacauccugaguuaacaggauuggacuguauaagaccuugcuucuggguugaguuagucagaggacugccuagagaaaaugcaacaaucuggacuagugggagcagcauuucuuuuuguggcguugauagugauacugcaaacuggucuuggccagacggugcugaguugccguucaccauugacaaauag

SEQ ID NO: 48268 - RNA, 1413 nt, Artificial Sequence; identical to SEQ ID NO: 48043
  derived and/or modified CDS sequence (wt) from neuraminidase__InfluenzaA__ABW86390

SEQ ID NO: 48269 - RNA, 1413 nt, Artificial Sequence; identical to SEQ ID NO: 48219
  derived and/or modified CDS sequence (wt) from neuraminidase__InfluenzaA__ABW86401

SEQ ID NO: 48270 - RNA, 1413 nt, Artificial Sequence
  derived and/or modified CDS sequence (wt) from neuraminidase__InfluenzaA__ABW86412
augaauccaaaucaaaaaauaauaaccauuggaucaaucaguauagcaaucgggauaauuagucuaauguugcaaauaggaaauauuauuucaauaugggcuagucacucaauccaaacuggaagucaaaaccacacuggaauaugcaaccaaagaaucaucacauaugaaaacagcaccugggugaaucacacauauguuaguauuaacaacacuaauguuguugcuggaaaagacaaaacuucagugacauuggccggcaauucaucucuuuguucuaucaguggaugggcuauauacacaaaagacaacagcauaagaauuggcuccaaaggagauguuuuugucauaagagaaccuuucauaucauguucucauuuggaaugcaggaccuuuuuucugacccaaggugcucuauuaaaugacaaacauucaaauggaaccguuaaggaccgaaguccuuauagggccuuaaugagcuguccucuaggugaagcuccguccccauacaauucaaaguuugaaucaguugcauggucagcaagcgcaugccaugauggcaugggcugguuaacaaucggaauuucugguccagacaauggagcuguggcuguacuaaaauacaacggaauaauaacugaaaccauaaaaaguuggaaaaagcgaauauugagaacacaagagucugaaugugucugugugaacgggucauguuucaccauaaugaccgauggcccgaguaauggggccgccucguacaaaaucuucaagaucgaaaaggggaagguuacuaaaucaauagaguuaaaugcacccaauuuucauuaugaggaauguuccuguuacccagacacuggcacagugauguguguaugcagggacaacuggcaugguucaaaucgaccuugggugucuuuuaaucaaaacuuggauuaucaaauaggauacaucugcaguggaguguucggugacaauccgcgucccaaagauggaaagggcagcuguaauccagugacuguugauggagcagacgggguuaagggguuuucauacaaauaugguaaugguguuuggauaggaagaacuaaaaguaacagacuuagaaagggguuugagaugauuugggauccuaauggauggacagauaccgacagugauuucucagugaaacaggauguuguggcaauaacugauuggucaggguacaguggaaguuucguucaacauccugaguuaacaggauuggacuguauaagaccuugcuucuggguugaguuagucagaggacugccuagagaaaauacaacaaucuggacuagugggagcagcauuucuuuuuguggcguugauagugauacugcaaacuggucuuggccagacggugcugaguugccguucaccauugacaaguag

SEQ ID NO: 48271 - RNA, 1413 nt, Artificial Sequence
  derived and/or modified CDS sequence (wt) from neuraminidase__InfluenzaA__ABW86423
augaauccaaaucaaaaaauaauaaccauuggaucaaucaguauagcaauuggaauaauuagucuaauguugcaaauaggaaauauuauuucaauaugggcuagucacucaauccaaacuggaagucaaaaccacacuggaauaugcaaccaaagaaucaucacauaugaaaacagcaccugggugaaucacacauauguuaauauuaacaacacuaauguuguugcuggaaaggacaaaacuucagugacauuggccggcaauucaucucuuuguucuaucaguggaugggcuauauacacaaaagacaacagcauaagaauuggcuccaaaggagauguuuuugucauaagagaaccuuucauaucauguucucauuuggaaugcaggaccuuuuuucugacccaaggugcucuauuaaaugacaaacauucaaauggaaccguuaaggacagaaguccuuauagggccuuaaugagcuguccucuaggugaagcuccguccccauacaauucaaaguuugaaucaguugcauggucagcaagcgcaugccaugauggcaugggcugguuaacaaucgggauuucugguccagacaauggagcuguggcuguacuaaaauacaacggaauaauaacugaaaccauaaaaaguuggaaaaagcgaauauugagaacacaagagucugaaugugucugugugaacgggucauguuucgccauaaugaccgauggcccgaguaauggggccgccucguacaaaaucuucaagaucgaaaaggggaagguuacuaaaucaauagaguuaaaugcacccaauuuucauuaugaggaauguuccuguuacccagacacuggcacagugauguguguaugcagggauaacuggcaugguucaaaucgaccuugggugucuuuuaaucaaaacuuggauuaucaaguaggauacaucugcaguggaguguucggugacaauccgcgucccaaagauggaaagggcagcuguaauccaaugacuguugauggagcagacggaguuaagggguuuucauacaaauaugguaaugguguuuggauaggaaggacuaaaaguaacaaacuuagaaagggguuugagaugauuugggauccuaauggauggacagauaccgacagugauuucucagugaaacaggauguuguggcaauaacugauuggucaggguacaguggaaguuucguucaacauccugaguuaacaggauuggacuguauaagaccuugcuucuggguugaguuagucagaggacugccuagagaaaauacaacaaucuggacuagugggagcagcauuucuuuuuguggcguugauagugauacugcaaacuggucuuggccagacggugcugaguugccguucaccauugacaaauag

SEQ ID NO: 48272 - RNA, 1413 nt, Artificial Sequence; identical to SEQ ID NO: 48045
  derived and/or modified CDS sequence (wt) from neuraminidase__InfluenzaA__ABW86434

SEQ ID NO: 48273 - RNA, 1413 nt, Artificial Sequence
  derived and/or modified CDS sequence (wt) from neuraminidase__InfluenzaA__ABW86445
augaauccaaaucaaaaaauaauaaccauuggaucaaucaguauagcaaucgggauaauuagucuaauguugcaaauaggaaauauuauuucaauaugggcuagucacucaauccaaacuggaagucaaaaccacacuggaauaugcaaccaaagaaucaucacauaugaaaacagcaccugggugaaucacacauauguuaguauuaacaacacuaauguuguugcuggaaaggacaaaacuucagugacauuggccggcaauucaucucuuuguucuaucaguggaugggcuauauacacaaaagacaacagcauaagaauuggcuccaaaggagauguuuuugucauaagagaaccuuucauaucauguucucauuuggaaugcaggaccuuuuuucugacccaaggugcucuauuaaaugacaaacauucaaauggaaccguuaaggaccgaaguccuuauagggccuuaaugagcuguccucuaggugaagcuccguccccauacaauucaaaguuugaaucaguugcauggucagcaagcgcaugccaugauggcaugggcugguuaacaaucggaauuucugguccagacaauggagcuguggcuguacuaaaauacaacggaauaauaacugaaaccauaaaaaguuggaaaaagcgaauauugagaacacaggagucugaaugugucugugugaaugggucauguuucaccauaaugaccgauggcccgaguaauggggccgccucguacaaaaucuucaaaaucgaaaaggggaagguuacuaaaucaauagaguuaaaugcacccaauuuucauuaugaggaauguuccuguuacccagacacuggcacagugauguguguaugcagggacaacuggcaugguucaaaucgaccuugggugucuuuuaaucaaaacuuggauuaucaaauaggauacaucugcaguggaguguucggugacaauccgcgucccaaagauggaaagggcagcuguaauccagugacuguugauggagcagacgggguuaagggguuuucauacaaauaugguaaugguguuuggauaggaagaacuaaaaguaacagacuuagaaagggguuugagaugauuugggauccuaauggauggacagauaccgacagugauuucucagugaaacaggauguuguggcaauaacugauuggucaggguacaguggaaguuucguucaacauccugaguuaacaggauuggacuguauaagaccuugcuucuggguugaguuagucagaggacugccuagagaaaauacaacaaucuggacuagugggagcagcauuucuuuuuguggcguugauagugauacugcaaacuggucuuggccagacggugcugaguugccguucaccauugacaaguag

SEQ ID NO: 48274 - RNA, 1413 nt, Artificial Sequence
  derived and/or modified CDS sequence (wt) from neuraminidase__InfluenzaA__ABW86456
augaauccaaaucaaaaaauaauaaccauuggaucaaucaguauagcaauuggaauaauuagucuaauguugcaaauaggaaauauuauuucaauaugggcuagucacucaauccaaacuggaagucaaaaccacacuggaauaugcaaccaaagaaucaucacauaugaaaacagcaccugggugaaucacacauaugucaauauuaacaacacuaauguuguugcuggaaaggacaaaacuucagugacauuggccggcaauucaucucuuuguucuaucaguggaugggcuauauacacaaaagacaacagcauaagaauuggcuccaaaggagauguuuuugucauaagagaaccuuucauaucauguucucauuuggaaugcaggaccuuuuuucugacccaaggugcucuauuaaaugacaaacauucaaauggaaccguuaaggacagaaguccuuauagggccuuaaugagcuguccucuaggugaagcuccguccccauacaauucaaaguuugaaucaguugcauggucagcaagcgcaugccaugauggcaugggcugguuaacaaucgggauuucugguccagacaauggagcuguggcuguacuaaaauacaacggaauaauaacugaaaccauaaaaaguuggaaaaagcgaauauugagaacacaggagucugaaugugucugugugaacgggucauguuucaccauaaugaccgauggcccgaguaauggggccgccucguacaaaaucuucaagaucgaaaaggggaagguuacuaaaucaauagaguuaaaugcacccaauuuucauuaugaggaauguuccuguuacccagacacuggcacagugauguguguaugcagggauaacuggcaugguucaaaucgaccuugggugucuuuuaaucaaaacuuggauuaucaaguaggauacaucugcaguggaguguucggugacaauccgcgucccaaagauggaaagggcagcuguaauccaaugacuguugauggagcagacggaguuaagggguuuucauacaaauaugguaaugguguuuggauaggaaggacuaaaaguaacaaacuuagaaagggguuugagaugauuugggauccuaauggauggacagauaccgacagugauuucucagugaaacaggauguuguggcaauaacugauuggucaggguacaguggaaguuucguucaacauccugaguuaacaggauuggacuguauaagaccuugcuucuggguugaguuagucagaggacugccuagagaaaauacaacaaucuggacuagugggagcagcauuucuuuuuguggcguugauagugauacugcaaacugguccuggccagacggugcugaguugccguucaccauugacaaauag

SEQ ID NO: 48275 - RNA, 1413 nt, Artificial Sequence
  derived and/or modified CDS sequence (wt) from neuraminidase__InfluenzaA__ABW86467
augaauacaaaucaaaaaauaauaaccauuggaucaaucaguauagcaaucgggauaauuagucuaauguugcaaauaggaaauauuauuucaauaugggcuagucacucaauccaaacuggaagucaaaaccacacuggaauaugcaaccaaagaaucaucacauaugaaaacagcaccugggugaaucacacauauguuaguauuaacaacacuaauguuguugcuggaaaggacaaaacuucagugacauuggccggcaauucaucucuuuguucuaucaguggaugggcuauauacacaaaagacaacagcauaagaauuggcuccaaaggagauguuuuugucauaagagaaccuuucauaucauguucucauuuggaaugcaggaccuuuuuucugacccaaggugcucuauuaaaugacaaacauucaaauggaaccguuaaggaccgaaguccuuauagggccuuaaugagcuguccucuaggugaagcuccguccccauacaauucaaaguuugaaucaguugcauggucagcaagcgcaugccaugauggcaugggcugguuaacaaucggaauuucugguccagacaauggagcuguggcuguacuaaaauacaacggaauaauaacugaaaccauaaaaaguuggaaaaagcgaauauugagaacacaagagucugaaugugucugugugaacgggucauguuucaccauaaugaccgauggcccgaguaauggggccgccucguacaaaaucuucaagaucgaaaaggggaagguuacuaaaucaauagaguuaaaugcacccaauuuucauuaugaggaauguuccuguuacccagacacuggcacagugauguguguaugcagggacaacuggcaugguucaaaucgaccuugggugucuuuuaaucaaaacuuggauuaucaaauaggauacaucugcaguggaguguuuggugacaauccgcgucccaaagauggaaagggcagcuguaauccagugacuguugauggagcagacgggguuaagggguuuucauacaaauaugguaaugguguuuggauaggaagaacuaaaaguaacagacuuagaaagggguuugagaugauuugggauccuaauggauggacagauaccgacagugauuucucaauuaaacaggauguuguggcaauaacugauuggucaggguacaguggaaguuucguucaacauccugaguuaacaggauuggacuguauaagaccuugcuucuggguugaguuagucagaggacugccuagagaaaauacaacaaucuggacuagugggagcagcauuucuuuuuguggcguugauagugauacugcaaacuggucuuggccagacggugcugaguugccguucacuauugacaaguag

SEQ ID NO: 48276 - RNA, 1413 nt, Artificial Sequence; identical to SEQ ID NO: 48214
  derived and/or modified CDS sequence (wt) from neuraminidase__InfluenzaA__ABW86478

SEQ ID NO: 48277 - RNA, 1413 nt, Artificial Sequence
  derived and/or modified CDS sequence (wt) from neuraminidase__InfluenzaA__ABW86489
augaauccaaaucaaaaaauaauaaccauuggaucaaucaguauagcaaucgggauaauuagucuaauguugcaaauaggaaauauuauuucaauaugggcuagucacucaauccaaacuggaagucaaaaccacacuggaauaugcaaccaaagaaucaucacauaugaaaacagcaccugggugaaucacacauauguuaguauuaacaacacuaauguuguugcuggaaaggacaaaacuucagugacauuggccggcaauucaucucuuuguucuaucaguggaugggcuauauacacaaaagacaacagcauaagaauuggcuccaaaggagauguuuuugucauaagagaaccuuucauaucauguucucauuuggaaugcaggaccuuuuuucugacccaaggugcucuauuaaaugacaaacauucaaauggaaccguuaaggaccgaaguccuuauagggccuuaaugagcuguccucuaggugaagcuccguccccauacaauucaaaguuugaaucaguugcauggucagcaagcgcaugccaugauggcaugggcugguuaacaaucggaauuucugguccagacaauggagcuguggcuguacuaaaauacaacggaauaauaacugaaaccauaaaaaguuggaaaaagcgaauauugagaacacaagagucugaaugugucugugugaacgggucauguuucaccauaaugaccgauggcccgaguaauggggccgccucguacaaaaucuucaagaucgaaaaggggaagguuacuaaaucaauagaguuaaaugcacccaauuuucauuaugaggaauguuccuguuacccagacacuggcacagugauguguguaugcagggacaacuggcaugguucaaaucgaccuugggugucuuuuaaucaaaacuuggauuaucaaauaggauacaucugcaguggaguguucggugacaauccgcgucccaaagauggaaagggcagcuguaauccagugacuguugauggagcagacgggguuaagggguuuucauacaaauaugguaaugguguuuggauaggaagaacuaaaaguaacagacuuagaaagggguuugagaugauuugggauccuaauggauggacagauaccgacagugauuucucagugaaacaggauguugugggaauaacugauuggucaggguacaguggaaguuucguucaacauccugaguuaacaggauuggacuguauaagaccuugcuucuggguugaguuagucagaggacugccuagagaaaauacaacaaucuggacuagugggagcagcauuucuuuuuguggcguugauagugauacugcaaacuggucuuggccagacggugcugaguugccguucaccauugacaaguag

SEQ ID NO: 48278 - RNA, 1413 nt, Artificial Sequence
  derived and/or modified CDS sequence (wt) from neuraminidase__InfluenzaA__ABW86500
augaauccaaaucaaaaaauaaugaccauuggaucaaucaguauagcaaucggaauaauuagucuaauguugcaaauaggaaauauuauuucaauaugggcuagucacucaauccaaacuggaagucaaaaccacacuggaauaugcaaccaaagaaucaucacauaugaaaacagcaccugggugaaucacacauauguuaauauuaacaacacuaauguuguugcuggaaaggacaaaacuucagugacauuggccggcaauucaucucuuuguucuaucaguggaugggcuauauacacaaaagacaacagcauaagaauuggcuccaagggagauguuuuugucauaagagaaccuuucauaucauguucucauuuggaaugcaggaccuuuuuucugacccaaggugcucuauuaaaugacaaacauucaaauggaaccguuaaggacagaaguccuuauagagccuuaaugagcuguccucuaggugaagcuccguccccauacaauucaaaguuugaaucaguugcauggucagcaagcgcaugccaugauggcaugggcugguuaacaaucggaauuucugguccagacaauggagcuguggcuguacuaaaauacaacggaauaauaacugaaaccauaaaaaguuggaaaaaacgaauauugagaacacaagagucugaaugugucugugugaacgggucuuguuucaccauaaugaccgauggcccgaguaauggggccgccucguacaaaaucuucaagaucgaaaagggaaagguuacuaaaucaauagaguuaaaugcacccaauuuucauuaugaggaauguuccuguuacccagacacuggcacagugauguguguaugcagagacaacuggcaugguucaaaucgaccuugggugucuuuuaaucaaaacuuggauuaucaaauaggauacaucugcaguggaguguucggugacaauccgcgucccaaagauggaaagggcagcuguaauccagugacuguugauggagcagacggaguuaagggguuuucauacaaauaugguaaugguguuuggauaggaagaacuaaaaguaacaggcuuagaaagggguuugagaugauuugggauccuaauggauggacaaauaccgacagugauuucucaaugaaacaggauguuguggcaauaacugauuggucaggguacaguggaaguuucguucaacauccugaguuaacaggauuggacuguauaagaccuugcuucuggguugaauuagucagaggacugccuagagaaaauacaacaaucuggacuagugggagcagcauuucuuuuuguggcguugauagugauacugcaaacuggucuuggccagacggugcugaguugccguucaccauugacaaauag

SEQ ID NO: 48279 - RNA, 1413 nt, Artificial Sequence; identical to SEQ ID NO: 48114
  derived and/or modified CDS sequence (wt) from neuraminidase__InfluenzaA__ABW86511

SEQ ID NO: 48280 - RNA, 1413 nt, Artificial Sequence
  derived and/or modified CDS sequence (wt) from neuraminidase__InfluenzaA__ABW86522
augaauccaaaucaaaaaauaauaaccauuggaucaaucaguauagcaauuggaauaauuagucuaauguugcaaauaggaaauauuauuucaauaugggcuagucacucaauccaaacuggaagucaaaaccacacuggaauaugcaaccaaagaaucaucacauaugaaaacagcaccugggugaaucacacauauguuaauauuaacaacacuaauguuguugcuggaaaggacaaaacuucagugacauuggccggcaauucaucucuuuguucuaucaguggaugggcuauauacacaaaagacaacagcauaagaauuggcuccaaaggagauguuuuugucauaagagaaccuuucauaucauguucucauuuggaaugcaggaccuuuuuucugacccaaggugcucuauuaaaugacaaacauucaaauggaaccguuaaggacagaaguccuuauagggccuuaaugagcuguccucuaggugaagcuccguccccauacaauucaaaguuugaaucaguugcauggucagcaagcgcaugccaugauggcaugggcugguuaacaaucgggauuucugguccagacaauggagcuguggcuguacuaaaauacaacggaauaauaacugaaaccauaaaaaguuggaaaaagcgaauauugagaacacaggagucugaaugugucugugugaacgggucauguuucaccauaaugacugauggcccgaguaauggggccgccucguacaaaaucuucaagaucgaaaaggggaagguuacuaaaucaauagaguuaaaugcacccaauuuucauuaugaggaauguuccuguuacccagacacuggcacagugauguguguaugcagggauaacuggcaugguucaaaucgaccuugggugucuuuuaaucaaaacuuggauuaucaaguaggauacaucugcaguggaguguucggugacaauccgcgucccaaagauggaaagggcagcuguaauccaaugacuguugauggagcagacggaguuaagggguuuucauacaaauaugguaaugguguuuggauaggaaggacuaaaaguaacaaacuuagaaagggguuugagaugauuugggauccuaauggauggacagauaccgacagugauuucucagugaaacaggauguuguggcaguaaccgauuggucaggguacaguggaaguuucguucaacauccugaguuaacaggauuggacuguauaagaccuugcuucuggguugaguuagucagaggacugccuagagaaaaugcaacaaucuggacuagugggagcagcauuucuuuuuguggcguugauagugauacugcaaacuggucuuggccagacggugcugaguugccguucaccauugacaaauag

SEQ ID NO: 48281 - RNA, 1413 nt, Artificial Sequence
  derived and/or modified CDS sequence (wt) from neuraminidase__InfluenzaA__ABW86533
augaauccaaaucaaaaaauaauaaccauuggaucaaucaguauagcaaucgggauaauuagucuaauguugcaaauaggaaauauuauuucaauaugggcuagucacucaauccaaacuggaagucaaaaccacacuggaauaugcaaccaaagaaucaucacauaugaaaacagcaccugggugaaucacacauauguuaguauuaacaacacuaauguuguugcuggaaaggacaaaacuucagugacauuggccggcaauucaucucuuuguucuaucaguggaugggcuauauacacaaaagacaacagcauaagaauuggcuccaaaggagauguuuuugucauaagagaaccuuucauaucauguucucauuuggaaugcaggaccuuuuuucugacccaaggugcucuauuaaaugacaaacauucaaauggaaccguuaaggaccgaaguccuuauagggccuuaaugagcuguccucuaggugaagcuccguccccauacaauucaaaguuugaaucaguugcauggucagcaagcgcaugccaugauggcaugggcugguuaacaaucggaauuucugguccagacaauggagcuguggcuguacuaaaauacaacggaauaauaacugaaaccauaaaaaguuggaaaaagcgaauauugagaacacaagagucugaaugugucugugugaacgggucauguuucaccauaaugaccgauggcccgaguaauggggccgccucauacaaaaucuucaagaucgaaaaggggaagguuacuaaaucaauagaguuaaaugcacccaauuuucauuaugaggaauguuccuguuacccagacacuggcacagugauguguguaugcagggacaacuggcaugguucaaaucgaccuugggugucuuuuaaucaaaacuuggauuaucaaauaggauacaucugcaguggaguguucggugacaauccgcgucccaaagauggaaagggcagcuguaauccagugacuguugauggagcagacgggguuaagggguuuucauacaaauaugguaaugguguuuggauaggaagaacuaaaaguaacagacuuagaaagggguuugagaugauuugggauccuaauggauggacagauaccgacagugauuucucagugaaacaggauguuguggcaauaacugauuggucaggguacaguggaaguuucguucaacauccugaguuaacaggauuggacuguauaagaccuugcuucuggguugaguuagucagaggacugccuagagaaaauacaacaaucuggacuagugggagcagcauuucuuuuuguggcguugauagugauacugcaaacuggucuuggccagacggugcugaguugccguucaccauugacaaguag

SEQ ID NO: 48282 - RNA, 1413 nt, Artificial Sequence; identical to SEQ ID NO: 48214
  derived and/or modified CDS sequence (wt) from neuraminidase__InfluenzaA__ABW86544

SEQ ID NO: 48283 - RNA, 1413 nt, Artificial Sequence; identical to SEQ ID NO: 48045
  derived and/or modified CDS sequence (wt) from neuraminidase__InfluenzaA__ABW86555

SEQ ID NO: 48284 - RNA, 1410 nt, Artificial Sequence
  derived and/or modified CDS sequence (wt) from neuraminidase__InfluenzaA__ABW86566
augaauccaaaucaaaagauaauaacgauuggcucuguuucucucaccauuuccacaauaugcuucuucaugcaaacugccaucuugauaacuacuguaacauugcauuucaagcaauaugaauucaacucccccccaaacaaccaagugaugcugugugaaccaacaguaauagaaagaaacauaacagagauaguguaucugaccaacaccaccauagagaaggaaauaugccccaaacuagcagaauacagaaauuggucaaagccgcaaugugacauuacaggauuugcaccuuuuucuaaggacaauucgauuaggcuuuccgcugguggggacaucugggugacaagagaaccuuaugugucaugcgauccugacaaguguuaucaauuugcccuuggacagggaacaacacuaaacaacgugcauucaaaugacacaguacgugauaggaccccuuaucggacccuauugaugaaugaguuagguguuccuuuucaucuggggaccaagcaagugugcauagcaugguccagcucaaguugucacgauggaaaagcauggcugcauguuuguauaacgggggaugauaaaaaugcaacugcuagcuucauuuacaaugggaggcuuguagauaguauuguuucaugguccaaagaaauccucaggacccaggagucagaaugcguuuguaucaauggaacuuguacaguaguaaugacugaugggagugcuucaggaaaagcugauacuaaaauacuauucauugaggaggggaaaaucguucauacuagcacauugucaggaagugcucagcaugucgaggagugcuccugcuauccucgauauccuggugucagaugugucugcagagacaacuggaaaggcuccaauaggcccaucguagauauaaacauaaaggaucauagcauuguuuccaguuauguguguucaggacuuguuggagacacacccagaaaaaacgacagcuccagcaguagccauuguuuggauccuaacaaugaagaagguggucauggagugaaaggcugggccuuugaugauggaaaugacguguggaugggaagaacgaucagcgagaagucacgcuuaggguaugaaaccuucaaagucauugaaggcugguccaacccuaaguccaaauugcagauaaauaggcaagucauaguugacagagguaauagguccgguuauucugguauuuucucuguugaaggcaaaagcugcaucaaucggugcuuuuauguggaguugauaaggggaagaaaagaggaaacugaagucuuguggaccucaaacaguauuguuguguuuuguggcaccucagguacauauggaacaggcucauggccugauggggcggacaucaaucucaugccuauauaa

SEQ ID NO: 48285 - RNA, 1413 nt, Artificial Sequence; identical to SEQ ID NO: 48132
  derived and/or modified CDS sequence (wt) from neuraminidase__InfluenzaA__ABW86609

SEQ ID NO: 48286 - RNA, 1413 nt, Artificial Sequence; identical to SEQ ID NO: 47071
  derived and/or modified CDS sequence (wt) from neuraminidase__InfluenzaA__ABW91188

SEQ ID NO: 48287 - RNA, 1410 nt, Artificial Sequence
  derived and/or modified CDS sequence (wt) from neuraminidase__InfluenzaA__ABW91210
augaauccaaaucaaaagauaauaacgauuggcucuguuucucucaccauuuccacaauaugcuucuucaugcaaauugccaucuugauaacuacuguaacauugcauuucaagcaauaugaauucaacucccccccaaacaaccaagugauacugugugaaccaacaauaauagaaagaaacauaacagagauaguguaucugaccaacaccaccauagagaaggaaauaugccccaaacuagcagaauacagaaauuggucaaagccgcaaugugacauuacaggauuugcaccuuuuucuaaggacaauucgauuaggcuuuccgcugguggggacaucugggugacaagagaaccuuaugugucaugcgauccugacaaguguuaucaauuugcccuuggacagggaacaacacuaaacaacgugcauucaaaugacacaguacgugauaggaccccuuaucggacccuauugaugaaugaguuagguguuccuuuucaucuggggaccaagcaagugugcauagcaugguccagcucaaguugucacgauggaaaagcauggcugcauguuuguauaacgggggaugauaaaaaugcaacugcuagcuucauuuacaaugggaggcuuguagauaguauuguuucaugguccaaagaaauccucaggacccaggagucagaaugcguuuguaucaauggaacuuguacaguaguaaugacugaugggagugcuucaggaaaagcugauacuaaaauacuauucauugaggaggggaaaaucguucauacuagcacauugucaggaagugcucagcaugucgaggagugcuccugcuauccucgauauccuggugucagaugugucugcagagacaacuggaaaggcuccaauaggcccaucguagauauaaacauaaaggaucauagcauuguuuccaguuauguguguucaggacuuguuggagacacacccagaaaaaacgacagcuccagcaguagccauuguuuggauccuaacaaugaagaagguggucauggagugaaaggcugggccuuugaugauggaaaugacguguggaugggaagaacgaucagcgagaagucacgcuuaggguaugaaaccuucaaagucauugaaggcugguccaacccuaaguccaaauugcagauaaauaggcaagucauaguugacagagguaauagguccgguuauucugguauuuucucuguugaaggcaaaagcugcaucaaucggugcuuuuauguggaguugauaaggggaagaaaagaggaaacugaagucuuguggaccucaaacaguauuguuguguuuuguggcaccucagguacauauggaacaggcucauggccugauggggcggacaucaaucucaugccuauauaa

SEQ ID NO: 48288 - RNA, 1413 nt, Artificial Sequence; identical to SEQ ID NO: 48059
  derived and/or modified CDS sequence (wt) from neuraminidase__InfluenzaA__ABW91221

SEQ ID NO: 48289 - RNA, 1410 nt, Artificial Sequence
  derived and/or modified CDS sequence (wt) from neuraminidase__InfluenzaA__ABW91232
augaauccaaaucaaaagauaauaacgauuggcucuguuucucucaccauuuccacaauaugcuucuucaugcaaauugccaucuugauaacuacuguaacauugcauuucaagcaauaugaauucaacucccccccaaacaaccaagugaugcugugugaaucaacaauaauagaaagaaacauaacagagauaguguaucugaccaacaccaccauagagaaggaaauaugccccaaacuagcagaauacagaaauuggucaaagccgcaaugugacauuacaggauuugcaccuuuuucuaaggacaauucgauuaggcuuuccgcugguggggacaucugggugacaagagaaccuuaugugucaugcgauccugacaaguguuaucaauuugcccuuggacagggaacaacacuaaacaacgugcauucaaaugacacaguacgugauaggaccccuuaucggacccuauugaugaaugaguuagguguuccuuuucaucuggggaccaagcaagugugcauagcaugguccagcucaaguugucacgauggaaaagcauggcugcauguuuguauaacgggggaugauaaaaaugcaacugcuagcuucauuuacaaugggaggcuuguagauaguauuguuucaugguccaaagaaauccucaggacccaggagucagaaugcguuuguaucaauggaacuuguacaguaguaaugacugaugggagugcuucaggaaaagcugauacuaaaauacuauucauugaggaggggaaaaucguucauacuagcacauugucaggaagugcucagcaugucgaggagugcuccugcuauccucgauauccuggugucagaugugucugcagagacaacuggaaaggcuccaauaggcccaucguagauauaaacauaaaggaucauagcauuguuuccaguuauguguguucaggacuuguuggagacacacccagaaaaaacgacagcuccagcaguggccauuguuuggauccuaacaaugaagaagguggucauggagugaaaggcugggccuuugaugauggaaaugacguguggaugggaagaacgaucagcgagaagucacgcuuaggguaugaaaccuucaaagucauugaaggcugguccaacccuaaguccaaauugcagauaaauaggcaagucauaguugacagagguaauagguccgguuauucugguauuuucucuguugaaggcaaaagcugcaucaaucggugcuuuuauguggaguugauaaggggaagaaaagaggaaacugaagucuuguggaccucaaacaguauuguuguguuuuguggcaccucagguacauauggaacaggcucauggccugauggggcggacaucaaucucaugccuauauaa

SEQ ID NO: 48290 - RNA, 1410 nt, Artificial Sequence; identical to SEQ ID NO: 48090
  derived and/or modified CDS sequence (wt) from neuraminidase__InfluenzaA__ABW91243

SEQ ID NO: 48291 - RNA, 1410 nt, Artificial Sequence
  derived and/or modified CDS sequence (wt) from neuraminidase__InfluenzaA__ABW91254
augaauccaaaucaaaagauaauaacgauuggcucuguuucucucaccauuuccacaauaugcuucuucaugcaaauugccaucuugauaacuacuguaacauugcauuucaagcaauaugaauucaacucccccccaaacaaccaagugaugcugugugaaccaacaauaauagaaagaaacauaacagagauaguguaucugaccaacaccaccauagagaaggaaauaugccccaaacuagcagaauacagaaauuggucaaagccgcaaugugacauuacaggauuugcaccuuuuucuaaggacaauucgauuaggcuuuccgcugguggggacaucugggugacaagagaaccuuaugugucaugcgauccugacaaguguuaucaauuugcccuuggacagggaacaacacuaaacaaugugcauucaaaugacacaguacgugauaggaccccuuaucggacccuauugaugaaugaguuagguguuccuuuucaucuggggaccaagcaagugugcauagcaugguccagcucaaguugucacgauggaaaagcauggcugcauguuuguauaacgggggaugauaaaaaugcaacugcuagcuucauuuacaaugggaggcuuguagauaguauuguuucaugguccaaagaaauccucaggacccaggagucagaaugcguuuguaucaauggaacuuguacaguaguaaugacugaugggagugcuucaggaaaagcugauacuaaaauacuauucauugaggaggggaaaaucguucauacuagcacauugucaggaagugcucagcaugucgaggagugcuccugcuauccucgauauccuggugucagaugugucugcagagacaacuggaaaggcuccaauaggcccaucguagauauaaacauaaaggaucauagcauuguuuccaguuauguguguucaggacuuguuggagacacacccagaaaaaacgacagcuccagcaguagccauuguuuggauccuaacaaugaagaagguggucauggagugaaaggcugggccuuugaugauggaaaugacguguggaugggaagaacgaucagcgagaagucacgcuuaggguaugaaaccuucaaagucauugaaggcugguccaacccuaaguccaaauugcagauaaauaggcaagucauaguugacagagguaauagguccgguuauucugguauuuucucuguugaaggcaaaagcugcaucaaucggugcuuuuauguggaguugauaaggggaagaaaagaggaaacugaagucuuguggaccucaaacaguauuguuguguuuuguggcaccucagguacauauggaacaggcucauggccugauggggcggacaucaaucucaugccuauauaa

SEQ ID NO: 48292 - RNA, 1410 nt, Artificial Sequence; identical to SEQ ID NO: 48182
  derived and/or modified CDS sequence (wt) from neuraminidase__InfluenzaA__ABW91265

SEQ ID NO: 48293 - RNA, 1413 nt, Artificial Sequence; identical to SEQ ID NO: 48048
  derived and/or modified CDS sequence (wt) from neuraminidase__InfluenzaA__ABW91276

SEQ ID NO: 48294 - RNA, 1413 nt, Artificial Sequence
  derived and/or modified CDS sequence (wt) from neuraminidase__InfluenzaA__ABW91287
augaacccaaaucaaaaaauaauaaccauuggaucaaucaguauagcaaucggaauaauuagucuaauauugcaaauaggaaauauuauuucaauaugggcuagccacucaauccaaacuggaagucaaaaccacacuggaauaugcaaccaaagaaucaucacauaugaaaacagcaccugggugaauaacacauauguuaauauuaacaacacuaauguuguugcugaaaaggacaaaacuucagugacauuggccggcaauucaucucuuuguucuaucaguggaugggcuauauacacaaaagacaacagcauaagaauuggcuccaaaggagauauuuuugucauaagagaaccuuucauaucauguucucacuuggaaugcagaaccuuuuuucugacccaaggugcucuauuaaaugacaaacauucaaaugggaccguaaaggacagaaguccuuauagggccuuaaugagcuguccucuaggugaagcuccguccccauacaauucaagguucgaaucaguugcauggucagcaagcgcaugccaugauggcaugggcugguuaacaaucggaauuucugguccagacaauggagcuguggcuguacuaaaauacaacggaauaauaacugaaacuauaaaaaguuggaaaaagcgaauauuaagaacacaagagucugaauguguuuguaugaacgggucauguuucaccauaaugaccgauggcccgaguaauggggccgccucguacaaaauuuucaagaucgaaaaggggaagguuaccaaaacaauagaguugaaugcacccaauuuucauuaugaggaauguuccuguuacccagacacuggcacagugauguguguaugcagagacaacuggcaugguucaaaucgaccuugggugucuuuuaaucaaaacuuggauuaucaaauaggauacaucugcaguggaguguucggugacaauccgcgccccaaagauggggagggcagcugcaauccagugacuguugauggagcagacggaguaaaaggguuuucauacaaauaugguaaugguguuuggauaggaaggaccaaaaguaacagacuuagaaagggguuugagaugauuugggauccuaauggauggacaaauaccgacagugauuucucagugaaacaggauauuguagcaauaacugauuggucaggguacagcggaaguuuuguucaacauccugaguuaacaggguuggacuguauaagaccuugcuucuggguugaguuagucagagggcugccuagggaaaauacaacaaucuggacuagugggagcagcauuucuuuuuguggcguuaauagugguacugcaaacuggucuuggccagacggugcugaguugccguucaccauugacaaguag

SEQ ID NO: 48295 - RNA, 1413 nt, Artificial Sequence; identical to SEQ ID NO: 48156
  derived and/or modified CDS sequence (wt) from neuraminidase__InfluenzaA__ABW91298

SEQ ID NO: 48296 - RNA, 1413 nt, Artificial Sequence
  derived and/or modified CDS sequence (wt) from neuraminidase__InfluenzaA__ABW91309
augaauccaaaucaaaaaauaauaaccauuggaucaaucaguauagcaaucgggauaauuagucuaauguugcaaauaggaaauauuauuucaauaugggcuagucacucaauccaaacuggaagucaaaaccacacuggaauaugcaaccaaagaaucaucacauaugaaaacagcaccugggugaaucacacauauguuaguauuaacaacacuaauguuguugcuggaaaggacaaaacuucagugacauuggccggcaauucaucucuuuguucuaucaguggaugggcuauauacacaaaagacaacagcauaagaauuggcuccaaaggagauguuuuugucauaagagaaccuuucauaucauguucucauuuggaaugcaggaccuuuuuucugacccaaggugcucuauuaaaugacaaacauucaaauggaaccguuaaggaccgaaguccuuauagggccuuaaugagcuguccucuaggugaagcuccguccccauacaauucaaaguuugaaucaguugcauggucagcaagcgcaugccaugauggcaugggcugguuaacaaucggaauuucugguccagacaauggagcuguggcuguacuaaaauacaacggaauaauaacugaaaccauaaaaaguuggaaaaagcgaauauugagaacacaagagucugaaugugucugugugaacgggucauguuucaccauaaugaccgauggcccgagugauggggccgccucguacaaaaucuucaagaucgaaaaggggaagguuacuaaaucaauagaguuaaaugcacccaauuuucauuaugaggaauguuccuguuacccagacacuggcacagugauguguguaugcagggacaacuggcaugguucaaaucgaccuugggugucuuuuaaucaaaacuuggauuaucaaauaggauacaucugcaguggaguguuuggugacaauccgcgucccaaagauggaaagggcagcuguaauccagugacugcugauggagcagacgggguuaagggguuuucauacaaauaugguaaugguguuuggauaggaagaacuaaaaguaacagacuuagaaagggguuugagaugauuugggauccuaauggauggacagauaccgacagugauuucucagugaaacaggauguuguggcaauaacugauuggucaggguacaguggaaguuucguucaacauccugaguuaacaggauuggacuguauaagaccuugcuucuggguugaguuagucagaggacugccuagagaaaauacaacaaucuggacuagugggagcagcauuucuuuuuguggcguugauagugauacugcaaacuggucuuggccagacggugcugaguugccguucacuauugacaaguag

SEQ ID NO: 48297 - RNA, 1413 nt, Artificial Sequence; identical to SEQ ID NO: 48060
  derived and/or modified CDS sequence (wt) from neuraminidase__InfluenzaA__ABW91320

SEQ ID NO: 48298 - RNA, 1413 nt, Artificial Sequence; identical to SEQ ID NO: 48045
  derived and/or modified CDS sequence (wt) from neuraminidase__InfluenzaA__ABW91331

SEQ ID NO: 48299 - RNA, 1413 nt, Artificial Sequence; identical to SEQ ID NO: 48147
  derived and/or modified CDS sequence (wt) from neuraminidase__InfluenzaA__ABW91342

SEQ ID NO: 48300 - RNA, 1413 nt, Artificial Sequence
  derived and/or modified CDS sequence (wt) from neuraminidase__InfluenzaA__ABW91353
augaauccaaaucaaaaaauaauaaccauuggaucaaucaguauagcaaucgggauaauuagucuaauguugcaaauaggaaauauuauuucaauaugggcuagucacucaauccaaacuggaagucaaaaccacacuggaauaugcaaccaaagaaucaucacauaugaaaacagcaccugggugaaucacacauauguuaguauuaacaacacuaauguuguugcuggaaaggacaaaacuucagugaccuuggccggcaauucaucucuuuguucuaucaguggaugggcuauauacacaaaagacaacagcauaagaauuggcuccaaaggagauguuuuugucauaagagaaccuuucauaucauguucucauuuggaaugcaggaccuuuuuucugacccaaggugcucuauuaaaugacaaacauucaaauggaaccguuaaggaccgaaguccuuauagggccuuaaugagcuguccucuaggugaagcuccguccccauacaauucaaaguuugaaucaguugcauggucagcaagcgcaugccaugauggcaugggcugguuaacaaucggaauuucugguccagacaauggagcuguggcuguacuaaaauacaacggaauaauaacugaaaccauaaaaaguuggaaaaagcgaauauugagaacacaagagucugaaugugucugugugaacgggucauguuucaccauaaugaccgauggcccgaguaauggggccgccucguacaaaaucuucaagaucgaaaaggggaagguuacuaaaucaauagaauuaaaugcacccaauuuucauuaugaggaauguuccuguuacccagacacuggcacagugauguguguaugcagggacaacuggcaugguucaaaucgaccuugggugucuuuuaaucaaaacuuggauuaucaaauaggauacaucugcaguggaguguuuggugacaauccgcgucccaaagauggaaagggcagcugcaauccagugacuguugauggagcagacgggguuaagggguuuucauacaaauaugguaaugguguuuggauaggaagaacuaaaaguaacagacuuagaaagggguucgagaugauuugggaucccaauggauggacagauaccgacagugauuucucaguuaaacaggauguuguagcaauaacugauuggucaggguacaguggaaguuucguucaacauccugaguuaacaggauuggacuguauaagaccuugcuucuggguugaguuagucagaggacugcccagagaaaauacaacaaucuggacuagugggagcagcauuucuuuuuguggcguugauagugauacugcaaacuggucuuggccagacggugcugaguugccguucacuauugacaaguag

SEQ ID NO: 48301 - RNA, 1413 nt, Artificial Sequence
  derived and/or modified CDS sequence (wt) from neuraminidase__InfluenzaA__ABW91364
augaauacaaaucaaaaaauaauaaccauuggaucaaucaguauagcaaucggaauaauuagucuaauguugcaaauaggaaauauuauuucaauaugggcuagucacucaauccaaacuggaagucaaaaccacacuggaauaugcaaccaaagaaucaucacauaugaaaacagcaccugggugaaucacacauauguuaauauuaacaacacuaauguuguuacuggaaaggacaaaacuucagugacauuggccggcaauucaucucuuuguucuaucaguggaugggcuauauacacaaaagacaacagcauaagaauuggcuccaaaggagauguuuuugucauaagagaaccuuucauaucauguucucauuuggaaugcaggaccuuuuuucugacccaaggugcucuauuaaaugacaaacauucaaauggaaccguuaaggacagaaguccuuauagggccuuaaugagcuguccucuaggugaagcuccguccccauacaauucaaaguuugaaucaguugcauggucagcaagcgcaugccaugauggcaugggcugguuaacaaucggaauuucugguccagacaauggagcuguggcuguacuaaaauacaacggaauaauaacugaaaccauaaaaaguuggaaaaagcgaauauugagaacacaagagucugaaugugucugugugaacgggucauguuucacuauaaugaccgauggcccgagugauggggccgccucguacaaaaucuucaagaucgaaaaggggaagguuacuaaaucaauagaguuaaaugcacccaauuuucauuaugaggaauguuccuguuacccagacacuggcacagugauguguguaugcagggacaacuggcaugguucaaaucgaccuugggugucuuuuaaucaaaacuuggauuaucaaauaggauacaucugcaguggaguguucggugacaauccgcgucccaaagauggaaagggcagcuguaauccagugacuguugauggagcagacggaguuaagggguuuucauacaaauaugguaaugguguuuggauaggaaggacuaaaaguaacaaacuuagaaagggguuugagaugauuugggauccuaauggauggacagauaccgacaaugauuucucagugaaacaggauguuguggcaauaacugauuggucaggguacaguggaaguuucguucaacauccugaguuaacaggauuggacuguauaagaccuugcuucuggguugaguuagucagaggacugccuagagaaaauacaacaaucuggacuagugggagcagcauuucuuuuuguggcguugauagugauacugcaaacuggucuuggccagacggugcugaguugccguucaccauugacaaauag

SEQ ID NO: 48302 - RNA, 1413 nt, Artificial Sequence; identical to SEQ ID NO: 48043
  derived and/or modified CDS sequence (wt) from neuraminidase__InfluenzaA__ABW91375

SEQ ID NO: 48303 - RNA, 1413 nt, Artificial Sequence
  derived and/or modified CDS sequence (wt) from neuraminidase__InfluenzaA__ABW91386
augaauccaaaucaaaaaauaauaaccauuggaucaaucaguauagcaauuggaauaauuagucuaauguugcaaauaggaaauauuauuucaauaugggcuagucacucaauccaaacuggaagucaaaaccacacuggaauaugcaaccaaagaaucaucacauaugaaaacagcaccugggugaaucacacauauguuaauauuaacaacacuaauguuguugcuggaaaggacaaaacuucagugacauuggccggcaauucaucucuuuguucuaucaguggaugggcuauauacacaaaagacaacagcauaagaauuggcuccaaaggagauguuuuugucauaagagaaccuuucauaucauguucucauuuggaaugcaggaccuuuuuucugacccaaggugcucuauuaaaugacaaacauucaaauggaaccguuaaggacagaaguccuuauagggccuuaaugagcuguccucuaggugaagcuccguccccauacaauucaaaguuugaaucaguugcauggucagcaagcgcaugccaugauggcaugggcugguuaacaaucgggauuucugguccagacaauggagcuguggcuguacuaaaauacaacggaauaauaacugaaaccauaaaaaguuggaaaaagcgaauauugagaacacaggagucugaaugugucugugugaacgggucauguuucaccauaaugaccgauggcccgaguaauggggccgccucguacaaaaucuucaagaucgaaaaggggaagguuacuaaaucaauagaguuaaaugcacccaauuuucauuaugaggaauguuccuguuacccagacacuggcacagugauguguguaugcagggauaacuggcaugguucaaaucgaccuugggugucuuuuaaucaaaacuuggauuaucaaguaggauacaucugcaguggaguguucggugacaauccgcgucccaaagauggaaagggcagcuguaauccaaugacuguugauggagcagacggaguuaagggguuuucguacaaauaugguaaugguguuuggauaggaaggacuaaaaguaacaaacuuagaaagggguuugaaaugauuugggauccuaauggauggacagauaccgacagugauuucucagugaaacaggauguuguggcaauaaccgauuggucaggguacaguggaaguuucguucaacauccugaguuaacaggauuggacuguauaagaccuugcuucuggguugaguuagucagaggacugccuagagaaaaugcaacaaucuggacuagugggagcagcauuucuuuuuguggcguugauagugauacugcaaacuggucuuggccagacggugcugaguugccguucaccauugacaaauag

SEQ ID NO: 48304 - RNA, 1410 nt, Artificial Sequence
  derived and/or modified CDS sequence (wt) from neuraminidase__InfluenzaA__ABW91397
augaauccaaaucaaaagauaauaacgauuggcucuguuucucucaccauuuccacaauaugcuucuucaugcaaauugccaucuugauaacuacuguaacauugcauuucaagcaauaugaauucaacucccccccaaacaaccaagugaugcugugugaaccaacaauaauagaaagaaacauaacagagauaguguaucugaccaacaccaccauagagaaggaaauaugccccaaacuagcagaauacagaaauuggucaaagccgcaaugugacauuacaggauuugcaccuuuuucuaaggacaauucgauuaggcuuuccgcugguggggacaucugggugacaagagaaccuuaugugucaugcgauccugacaaguguuaucaauuugcccuuggacagggaacaacacuaaacaacgugcauucaaaugacacaguacgugauaggaccccuuaucggacccuauugaugaaugaguuagguguuccuuuucaucuggggaccaagcaagugugcauagcaugguccagcucaaguugucacgauggaaaagcauggcugcauguuuguauaacgggggaugauaaaaaugcaacugcuagcuucauuuacaaugggaggcuuguagauaguauuguuucaugguccaaagaaauccucaggacccaggagucagaaugcauuuguaucaauggaacuuguacaguaguaaugacugaugggagugcuucaggaaaagcugauacuaaaauacuauucauugaggaggggaaaaucguucauacuagcacauugucaggaagugcucagcaugucgaggagugcuccugcuauccucgauauccuggugucagaugugucugcagagacaacuggaaaggcuccaauaggcccaucguagauauaaacauaaaggaucauagcauuguuuccaguuauguguguucaggacuuguuggagacacacccagaaaaaacgacagcuccagcaguagccauuguuuggauccuaacaaugaagaagguggucauggagugaaaggcugggccuuugaugauggaaaugacguguggaugggaagaacgaucagcgagaagucacgcuuaggguaugaaaccuucaaaguuauugaaggcugguccaacccuaaguccaaauugcagauaaauaggcaagucauaguugacagagguaauaggucagguuauucugguauuuucucuguugaaggcaaaagcugcaucaaucggugcuuuuauguggaguugauaaggggaagaaaagaggaaacugaagucuuguggaccucaaacaguauuguuguguuuuguggcaccucagguacauauggaacaggcucauggccugauggggcggauaucaaucucaugccuauauaa

SEQ ID NO: 48305 - RNA, 1413 nt, Artificial Sequence
  derived and/or modified CDS sequence (wt) from neuraminidase__InfluenzaA__ABW91408
augaauccaaaucaaaaaauaauaaccauuggaucaaucaguauagcaaucggaguaauuagucuaauguugcaaauaggaaauauuauuucaauaugggcuagucacucaauccaaacuggaagucaaaaccacacuggaauaugcaaccaaagaaucaucacauaugaaaacagcaccugggugaaucacacauauguuaauauuaacaacacuaauguuguugcuggaaaggacaaaacuucagugacauuggccggcaauucaucucuuuguucuaucaguggaugggcuauauacacaaaagacaacagcauaagaauuggcuccaagggagauguuuuugucauaagagaaccuuucauaucauguucucauuuggaaugcaggaccuuuuuucugacccaaggugcucuauuaaaugacaaacauucaaauggaaccguuaaggacagaaguccuuauagggccuuaaugagcuguccucuaggugaagcuccguccccauacaauucaaaguuugaaucaguugcauggucagcaagcgcaugccaugauggcaugggcugguuaacaaucggaauuucugguccagacaauggagcuguggcuguacuaaaauacaacggaauaauaacugaaaccauaaaaaguuggaaaaagcgaauauugagaacacaagagucugaaugugucugugugaacgggucuuguuucaccauaaugaccgauggcccgaguaauggggccgccucguacaaaaucuucaagaucgaaaagggaaagguuacuaaaucaauagaguuaaaugcacccaauuuucauuaugaggaauguuccuguuacccagacacuggcacagugauguguguaugcagagacaacuggcaugguucaaaucgaccuugggugucuuuuaaucaaaacuuggauuaucaaauaggauacaucuguaguggaguguucggugacaauccgcgucccaaagauggaaagggcagcuguaauccagugacuguugauggagcagacggaauuaagggguuuucauacaaauaugguaaugguguuuggauaggaagaacuaaaaguaacagacuuagaaagggguuugagaugauuugggauccuaauggauggacaaauaccgacagugauuucucagugaaacaggauguuguggcgauaacugauuggucaggguacaguggaaguuucguucaacauccugaguuaacaggauuggacuguauaagaccuugcuucuggguugaauuagucagaggacugccuagagaaaauacaacaaucuggacuagugggagcagcauuucuuuuuguggcguugauggugauacugcaaacuggucuuggccagacggugcugaguugccguucaccauugacaaauag

SEQ ID NO: 48306 - RNA, 1413 nt, Artificial Sequence
  derived and/or modified CDS sequence (wt) from neuraminidase__InfluenzaA__ABW91419
augaauccaaaucaaaaaauaauaaccauuggaucaaucaguauagcaauuggaauaauuagucuaauguugcaaauaggaaauauuauuucaauaugggcuagucacucaauccaaacuggaagucaaaaccacacuggaauaugcaaccaaagaaucaucacauaugaaaacagcaccugggugaaucacacauauguuaauauuaacaacacuaauguuguugcugaaaaggacaaaacuucagugacauuggccggcaauucaucucuuuguucuaucaguggaugggcuauauacacaaaagacaacagcauaagaauuggcuccaaaggagauguuuuugucauaagagaaccuuucauaucauguucucauuuggaaugcaggaccuuuuuucugacccaaggugcucuauuaaaugacaaacauucaaauggaaccguuaaggacagaaguccuuauagggccuuaaugagcuguccucuaggugaagcuccguccccauacaauucaaaguuugaaucaguugcauggucagcaagcgcaugccaugauggcaugggcugguuaacaaucgggauuucugguccagacaauggagcuguggcuguacuaaaauacaacggaauaauaacugaaaccauaaaaaguuggaaaaagcgaauauugagaacacaggagucugaaugugucugugugaacgggucauguuucaccauaaugaccgauggcccgaguaauggggccgccucguacaaaaucuucaagaucgaaaaggggaagguuacuaaaucaauagaguuaaaugcacccaauuuucauuaugaggaauguuccuguuacccagacacuggcacagugauguguguaugcagggauaacuggcaugguucaaaucgaccuugggugucuuuuaaucaaaacuuggauuaucaaguaggauacaucugcaguggaguguucggugacaauccgcgucccaaagauggaaagggcagcuguaauccaaugacuguugauggagcagacggaguuaagggguuuucauacaaauaugguaaugguguuuggauaggaaggacuaaaaguaacaaacuuagaaagggguuugagaugauuugggauccuaauggauggacagauaccgacagugauuucucagugaaacaggauguuguggcaauaacugauuggucaggguacaguggaaguuucguucaacauccugaguuaacaggauuggacuguauaagaccuugcuucuggguugaguuagucagaggacugccuagagaaaauacaacaaucuggacuagugggagcagcauuucuuuuuguggcguugauagugauacugcaaacuggucuuggccagacggugcugaguugccguucaccauugacaaauag

SEQ ID NO: 48307 - RNA, 1413 nt, Artificial Sequence
  derived and/or modified CDS sequence (wt) from neuraminidase__InfluenzaA__ABW91430
augaauccaaaucaaaaaauaauaaccauuggaucaaucaguauagcaauuggaauaauuagucuaauguugcaaauaggaaauauuauuucaauaugggcuagucacucaauccaaacuggaagucaaaaccacacuggaauaugcaaccaaagaaucaucacauaugaaaacagcaccugggugaaucacacauauguuaauauuaacaacacuaauguuguugcuggaaaggacaaaacuucagugacauuggccggcaauucaucucuuuguucuaucaguggaugggcuauauacacaaaagacaacagcauaagaauuggcuccaaaggagauguuuuugucauaagagaaccuuucauaucauguucucauuuggaaugcaggaccuuuuuucugacccaaggugcucuauuaaaugacaaacauucaaauggaaccguuaaggacagaaguccuuauagggccuuaaugagcuguccucuaggugaagcuccguccccauacaauucaaaguuugaaucaguugcauggucagcaagcgcaugccaugauggcaugggcugguuaacaaucgggauuucugguccagacaauggaucuguggcuguacuaaaauacaacggaauaauaacugaaaccauaaaaaguuggaaaaagcgaauauugagaacacaggagucugaaugugucugugugaacgggucauguuucaccauaaugaccgaugguccgaguaauggggccgccucguacaaaaucuucaagaucgaaaaggggaagguuacuaaaucaauagaguuaaaugcacccaauuuucauuaugaggaauguuccuguuacccagacacuggcacagugauguguguaugcagggauaacuggcaugguucaaaucgaccuugggugucuuuuaaucaaaacuuggauuaucaaguaggauacaucugcaguggaguguucggugacaauccgcgucccaaagauggaaagggcagcuguaauccaaugacuguugauggagcagacggaguuaagggguuuucauacaaauaugguaaugguguuuggauaggaaggacuaaaaguaacaaacuuagaaagggguuugagaugauuugggauccuaauggauggacagauaccgacagugauuucucagugaaacaggauguuguggcaauaacugauuggucaggguacaguggaaguuucguucaacauccugaguuaacaggauuggacuguauaagaccuugcuucuggguugaguuagucagaggacugccuagagaaaauacaacaaucuggacuagugggagcagcauuucuuuuuguggcguugauagugacacugcaaacuggucuuggccagacggugcugaguugccguucaccauugacaaauag

SEQ ID NO: 48308 - RNA, 1410 nt, Artificial Sequence; identical to SEQ ID NO: 48182
  derived and/or modified CDS sequence (wt) from neuraminidase__InfluenzaA__ABW91441

SEQ ID NO: 48309 - RNA, 1413 nt, Artificial Sequence
  derived and/or modified CDS sequence (wt) from neuraminidase__InfluenzaA__ABW91452
augaauccaaaucaaaaaauaauaaccauuggaucaaucaguauagcaaucggaauaauuagucuaauguugcaaauaggaaauauuauuucaauaugggcuagucacucaauccaaacuggaagucaaaaccacacuggaauaugcaaccaaagaaucaucacauaugaaaacagcaccugggugaaucacacauauguuaauauuaacaacacuaauguuguugcuggaaaggacaaaacuucagugacauuggccggcaauucaucucuuuguucuaucaguggaugggcuauauacacaaaagacaacagcauaagaauuggcuccaagggagauguuuuugucauaagagaaccuuucauaucauguucucauuuggaaugcaggaccuuuuuucugacccaaggugcucuauuaaaugacaaacauucaaauggaaccguuaaggacagaaguccuuauagggccuuaaugagcuguccucuaggugaagcuccguccccauacaauucaaaguuugaaucaguugcauggucagcaagcgcaugccaugauggcaugggcugguuaacaaucggaauuucugguccagacaauggagcuguggcuguacuaaaauacaacggaauaauaacugaaaccauaaaaaguuggaaaaaacgaauauugagaacacaagagucugaaugugucugugugaacgggucuuguuucaccauaaugaccgauggcccgaguaauggggccgccucguacaaaaucuucaagaucgaaaagggaaagguuaccaaaucaauagaguuaaaugcacccaauuuucauuaugaggaauguuccuguuacccagacacuggcacagugauguguguaugcagagacaacuggcaugguucaaaucgaccuugggugucuuuuaaucaaaacuuggauuaucaaauaggauacaucugcaguggaguguucggugacaauccgcgucccaaagauggaaagggcagcuguaauccagugacuguugauggagcagacggaguuaagggguuuucauacaaauaugguaaugguguuuggauaggaagaacuaaaaguaacagacuuagaaagggguuugagaugauuugggauccuaauggauggacaaauaccgacagugauuucucagugaaacaggauguuguggcaauaacugauuggucaggguacaguggaaguuucguucaacauccugaguuaacaggauuggacuguauaagaccuugcuucuggguugaauuagucagaggauugccuagagaaaauacaacaaucuggacuagugggagcagcauuucuuuuuguggcguugauagugauacugcaaacuggucuuggccagacggugcugaguugccguucaccauugacaaauag

SEQ ID NO: 48310 - RNA, 1413 nt, Artificial Sequence; identical to SEQ ID NO: 48093
  derived and/or modified CDS sequence (wt) from neuraminidase__InfluenzaA__ABW91463

SEQ ID NO: 48311 - RNA, 1413 nt, Artificial Sequence; identical to SEQ ID NO: 48043
  derived and/or modified CDS sequence (wt) from neuraminidase__InfluenzaA__ABW91474

SEQ ID NO: 48312 - RNA, 1413 nt, Artificial Sequence; identical to SEQ ID NO: 48219
  derived and/or modified CDS sequence (wt) from neuraminidase__InfluenzaA__ABW91485

SEQ ID NO: 48313 - RNA, 1413 nt, Artificial Sequence; identical to SEQ ID NO: 48045
  derived and/or modified CDS sequence (wt) from neuraminidase__InfluenzaA__ABW91496

SEQ ID NO: 48314 - RNA, 1413 nt, Artificial Sequence; identical to SEQ ID NO: 48228
  derived and/or modified CDS sequence (wt) from neuraminidase__InfluenzaA__ABW91507

SEQ ID NO: 48315 - RNA, 1413 nt, Artificial Sequence
  derived and/or modified CDS sequence (wt) from neuraminidase__InfluenzaA__ABW91518
augaauccaaaucaaaaaauaauaaccauuggaucaaucaguauagcaaucggaauaauuagucuaauguugcaaauaggaaacauuauuucaauaugggcuagucacucaauccaaacuggaagucaaaaccacacuggaauaugcaaccaaagaaucaucacauaugaaaacagcaccugggugaaucacacauauguuaauauuaacaacacuaauguuguugcuggaaaggacaaaacuucagugacauuggccggcaauucaucucuuuguucuaucaguggaugggcuauauacacaaaagacaacagcauaagaauuggcuccaagggagauguuuuugucauaagagaaccuuucauaucauguucucauuuggaaugcaggaccuuuuuucugacccaaggugcucuauuaaaugacaaacauucaaauggaaccguuaaggacagaaguccuuauagggccuuaaugagcuguccucuaggugaagcuccguccccauacaauucaaaguuugaaucaguugcauggucagcaagcgcaugccaugauggcaugggcugguuaacaaucggaauuucugguccagacaauggagcuguggcuguacuaaaauacaacggaauaauaacugaaaccauaaaaaguuggaaaaagcgaauauugagaacacaagagucugaaugugucugugugaacgggucuuguuucaccauaaugaccgauggcccgaguaauggggccgccucguacaaaaucuucaagaucgaaaagggaaagguuacuaaaucaauagaguugaaugcacccaauuuucauuaugaggaauguuccuguuacccagacacuggcacagugauguguguaugcagggacaacuggcaugguucaaaucgaccuugggugucuuuuaaucaaaacuuggauuaucaaauaggauacaucugcaguggaguguucggugacaauccgcgucccaaagauggaaagggcagcuguaauccagugacuguugauggagcagacggaguuaagggguuuucauacaaauaugguaaugguguuuggauaggaagaacuaaaaguaacagacuuagaaagggguuugagaugauuugggauccuaauggauggacaaauaccgacagugauuucucagugaaacaggauguuguggcaauaacugauuggucaggauacaguggaaguuucguucaacauccugaguuaacaggauuggacuguauaagaccuugcuucuggguugaauuagucagaggacugccuagagaaaauacaacaaucuggacuagugggagcagcauuucuuuuuguggcguugauagugauacugcaaacuggucuuggccagacggugcugaguugccguucaccauugacaaauag

SEQ ID NO: 48316 - RNA, 1413 nt, Artificial Sequence
  derived and/or modified CDS sequence (wt) from neuraminidase__InfluenzaA__ABW91529
augaauccaaaucaaaaaauaauaaccauuggaucaaucaguauagcaaucgggacaauuagucuaauguugcaaauaggaaauauuauuucaauaugggcuagucacucaauccaaacuggaagucaaaaccacacuggaauaugcaaccaaagaaucaucacauaugaaaacagcaccugggugaaucacacauauguuaguauuaacaacacuaauguuguugcuggaaaggacaaaacuucagugacauuggccggcaauucaucucuuuguucuaucaguggaugggcuauauacacaaaagacaacagcauaagaauuggcuccaaaggagauguuuuugucauaagagaaccuuucauaucauguucucauuuggaaugcaggaccuuuuuucugacccaaggugcucuauuaaaugacaaacauucaaauggaaccauuaaggaccgaaguccuuauagggccuuaaugagcuguccucuaggugaagcuccguccccauacaauucaaaguuugaaucaguugcauggucagcaagcgcaugccaugauggcaugggcugguuaacaaucggaauuucugguccagacaauggagcuguggcuguacuaaaauacaacggaauaauaacugaaaccauaaaaaguuggaaaaagcgaauauugagaacacaagagucugaaugugucugugugaacgggucauguuucaccauaaugaccgauggcccgaguaauggggccgccucguacaaaaucuucaagaucgaaaaggggaagguuacuaaaucaauagaguuaaaugcacccaauuuucauuaugaggaauguuccuguuacccagacacuggcacagugauguguguaugcagggacaacuggcaugguucaaaucgaccuugggugucuuuuaaucaaaacuuggauuaucaaauaggauacaucugcaguggaguguuuggugacaauccgcgucccaaagauggaaagggcagcuguaauccagugacuguugauggagcagacgggguuaagggguuuucauacaaauaugguaaugguguuuggauaggaagaacuaaaaguaacagacuuagaaagggguuugagaugauuugggauccuaauggauggacagauaccgacagugauuucucagugaaacaggauguuguggcaauaacugauuggucaggguacaguggaaguuucguucaacauccugaguuaacaggauuggacuguauaagaccuugcuucuggguugaguuagucagaggacugccuagagaaaauacaacaaucuggacuagugggagcagcauuucuuuuuguggcguugauagugauacugcaaacuggucuuggccagacggugcugaguugccguucacuauugacaaguag

SEQ ID NO: 48317 - RNA, 1413 nt, Artificial Sequence
  derived and/or modified CDS sequence (wt) from neuraminidase__InfluenzaA__ABW91540
augaauccaaaucaaaaaauaauaaccauuggaucaaucaguauagcaaucgggauaauuagucuaauguugcaaauaggaaauauuauuucaauaugggcuagucacucaauccaaacuggaagucaaaaccacacuggaauaugcaaccaaagaaucaucacauaugaaaacagcaccuggaugaaucacacauauguuaguauuaacaacacuaauguuguugcuggaaaggacaaaacuucagugacauuggccggcaauucaucucuuuguucuaucaguggaugggcuauauacacaaaagacaacagcauaagaauuggcuccaaaggagauguuuuugucauaagagaaccuuucauaucauguucucauuuggaaugcaggaccuuuuuucugacccaaggugcucuauuaaaugacaaacauucaaauggaaccguuaaggaccgaaguccuuauagggccuuaaugagcuguccucuaggugaagcuccguccccauacaauucaaaguuugaaucaguugcauggucagcaagcgcaugccaugauggcaugggcugguuaacaaucggaauuucugguccagacaauggagcuguggcuguacuaaaauacaacggaauaauaacugaaaccauaaaaaguuggaaaaagcgaauauugagaacacaagagucugaaugugucugugugaacgggucauguuucaccauaaugaccgauggcccgaguaauggggccgccucguacaaaaucuucaagaucgaaaaggggaagguuacuaaaucaguagaguuaaaugcacccaauuuucauuaugaggaauguuccuguuacccagacacuggcacagugauguguguaugcagggacaacuggcaugguucaaaucgaccuugggugucuuuuaaucaaaacuuggauuaucaaauaggauacaucugcaguggaguguuuggugacaauccgcgucccaaagauggaaagggcagcuguaauccagugacuguugauggagcagacgggguuaagggguuuucauacaaauaugguaaugguguuuggauaggaagaacuaaaaguaacagacuuagaaagggguuugagaugauuugggauccuaauggauggacagauaccgacagugauuucucagugaaacaggauguuguggcaauaacugauuggucaggguacaguggaaguuucguucaacauccugaguuaacaggauuggacuguauaagaccuugcuucuggguugaguuagucagaggacugccuagagaaaauacaacaaucuggacuagugggagcagcauuucuuuuuguggcguugauagugauacugcaaacuggucuuggccagacggugcugaguugccguucacuauugacaaguag

SEQ ID NO: 48318 - RNA, 1410 nt, Artificial Sequence
  derived and/or modified CDS sequence (wt) from neuraminidase__InfluenzaA__ABW91551
augaauccaaaucaaaagauaauaacgauuggcucuguuucucucaccauuuccacaauaugcuucuucaugcaaauugccaucuugauaacuacuguaacauugcauuucaagcaauaugaauucaacuuccccccaaacaaccaagugaugcugugugaaccaacaauaauagaaagaaacauaacagagauaguguaucugaccaacaccaccauagagaaggaaauaugccccaaacuagcagaauacagaaauuggucaaagccgcaaugugacauuacaggauuugcaccuuuuucuaaggacaauucgauuaggcuuuccgcugguggggacaucugggugacaagagaaccuuaugugucaugcgauccugacaaguguuaucaauuugcccuuggacagggaacaacacuaaacaacgugcauucaaaugacacaguacgugauaggaccccuuaucggacccuauugaugaaugaguuagguguuccuuuucaucuggggaccaagcaagugugcauagcaugguccagcucaaguugccacgauggaaaagcauggcugcauguuuguauaacgggggaugauaaaaaugcaacugcuagcuucauuuacaaugggaggcuuguagauaguauuguuucaugguccaaagaaauccucaggacccaggagucagaaugcguuuguaucaauggaacuuguacaguaguaaugacugaugggagugcuucaggaaaagcugauacuaaaauacuauucauugaggaggggaaaaucguucauacuagcacauugucaggaagugcucagcaugucgaggagugcuccugcuauccucgauauccuggugucagaugugucugcagagacaacuggaaaggcuccaauaggcccaucguagauauaaacauaaaggaucauagcauuguuuccaguuauguguguucaggacuuguuggagacacacccagaaaaaacgacagcuccagcaguagccauuguuuggauccuaacaaugaagaagguggucauggagugaaaggcugggccuuugaugauggaaaugacguguggaugggaagaacgaucagcgagaagucacgcuuaggguaugaaaccuucaaagucauugaaggcugguccaacccuaaguccaaauugcagauaaauaggcaagucauaguugacagagguaauagguccgguuauucugguauuuucucuguugaaggcaaaagcugcaucaaucggugcuuuuauguggaguugauaaggggaagaaaagaggaaacugaagucuuguggaccucaaacaguauuguuguguuuuguggcaccucagguacauauggaacaggcucauggccugauggggcggacaucaaucucaugccuauauaa

SEQ ID NO: 48319 - RNA, 1413 nt, Artificial Sequence; identical to SEQ ID NO: 48045
  derived and/or modified CDS sequence (wt) from neuraminidase__InfluenzaA__ABW91562

SEQ ID NO: 48320 - RNA, 1413 nt, Artificial Sequence; identical to SEQ ID NO: 48214
  derived and/or modified CDS sequence (wt) from neuraminidase__InfluenzaA__ABW91584

SEQ ID NO: 48321 - RNA, 1413 nt, Artificial Sequence; identical to SEQ ID NO: 48045
  derived and/or modified CDS sequence (wt) from neuraminidase__InfluenzaA__ABW91595

SEQ ID NO: 48322 - RNA, 1413 nt, Artificial Sequence; identical to SEQ ID NO: 48093
  derived and/or modified CDS sequence (wt) from neuraminidase__InfluenzaA__ABW91606

SEQ ID NO: 48323 - RNA, 1413 nt, Artificial Sequence; identical to SEQ ID NO: 48214
  derived and/or modified CDS sequence (wt) from neuraminidase__InfluenzaA__ABW91617

SEQ ID NO: 48324 - RNA, 1413 nt, Artificial Sequence
  derived and/or modified CDS sequence (wt) from neuraminidase__InfluenzaA__ABW91628
augaauccaaaucaaaaaauaauaaccauuggaucaaucaguauagcaauagggauaauuagucuaauguugcaaauaggaaauauuauuucaauaugggcuagucacucaauccaaacuggaagucaaaaccacacuggaauaugcaaccaaagaaucaucacauaugaaaacagcaccugggugaaucacacauauguuaguauuaacaacacuaauguuguugcuggaaaggacaaaacuucagugacauuggccggcaauucaucucuuuguucuaucaguggaugggcuauauacacaaaagacaacagcauaagaauuggcuccaaaggagauguuuuugucauaagagaaccuuucauaucauguucucauuuggaaugcaggaccuuuuuucugacccaaggugcucuauuaaaugacaaacauucaaauggaaccguuaaggaccgaaguccuuauagggccuuaaugagcuguccucuaggugaagcuccguccccauacaauucaaaguuugaaucaguugcauggucagcaagcgcaugccaugauggcaugggcugguuaacaaucggaauuucugguccagacaauggagcuguggcuguacuaaaauacaacggaauaauaacugaaaccauaaaaaguuggaaaaagcgaauauugagaacacaagagucugaaugugucugugugaacgggucauguuucaccauaaugaccgauggcccgaguaauggggccgccucguacaaaaucuucaagaucgaaaaggggaagguuacuaaaucaauagaguuaaaugcacccaauuuucauuaugaggaauguuccuguuacccagacacuggcacagugauguguguaugcagggacaacuggcaugguucaaaucgaccuugggugucuuuuaaucaaaacuuggauuaucaaauaggauacaucugcaguggaguguucggugacaauccgcgucccaaagauggaaagggcagcuguaauccagugacuguugauggagcagacgggguuaagggguuuucauacaaauaugguaaugguguuuggauaggaagaacuaaaaguaacagacuuagaaagggguuugagaugauuugggaucccaauggauggacagauaccgacagugauuucucagugaaacaggauguuguggcaauaacugauuggucaggguacaguggaaguuucguucaacauccugaguuaacaggauuggacuguauaagaccuugcuucuggguugaguuagucagaggacugccuagagaaaauacaacaaucuggacuagugggagcagcauuucuuuuuguggcguugauagugauacugcaaacuggucuuggccagacggugcugaguugccguucaccauugacaaguag

SEQ ID NO: 48325 - RNA, 1413 nt, Artificial Sequence; identical to SEQ ID NO: 48147
  derived and/or modified CDS sequence (wt) from neuraminidase__InfluenzaA__ABW91639

SEQ ID NO: 48326 - RNA, 1410 nt, Artificial Sequence
  derived and/or modified CDS sequence (wt) from neuraminidase__InfluenzaA__ABW91650
augaauccaaaucaaaagauaauaacgauuggcucuguuucucucaccauuuccacaauaugcuucuucaugcaaauugccaucuugauaacuacuguaacacugcauuucaagcaauaugaauucaacucccccccaaacaaccaagugaugcugugugaaccaacaauaauagaaagaaacauaacagagauaguguaucugaccaacaccaccauagagaaggaaauaugccccaaacuagcagaauacagaaauuggucaaagccgcaaugugacauuacaggauuugcaccuuuuucuaaggacaauucgauuaggcuuuccgcugguggggacaucugggugacaagagaaccuuaugugucaugcgauccugacaaguguuaucaauuugcccuuggacagggaacaacacuaaacaacgugcauucaaaugacacaguacgugauaggaccccuuaucggacccuauugaugaaugaguuagguguuccuuuucaucuggggaccaagcaagugugcauagcaugguccagcucaaguugucacgauggaaaagcauggcugcauguuuguauaacgggggaugauaaaaaugcaacugcuagcuucauuuacaaugggaggcuuguagauaguauuguuucaugguccaaagaaauccucaggacccaggagucagaaugcguuuguaucaauggaacuuguacaguaguaaugacugaugggagugcuucaggaaaagcugauacuaaaauacuauucauugaggaggggaaaaucguucauacuagcacauugucaggaagugcucagcaugucgaggagugcuccugcuauccucgauauccuggugucagaugugucugcagagacaacuggaaaggcuccaauaggcccaucguagauauaaacauaaaggaucauagcauuguuuccaguuauguguguucaggacuuguuggagacacacccagaaaaaacgacagcuccagcaguagccauuguuuggauccuaacaaugaagaagguggucauggagugaaaggcugggccuuugaugauggaaaugacguguggaugggaagaacgaucagcgagaagucacgcuuaggguaugaaaccuucaaagucauugaaggcugguccaacccuaaguccaaauugcagauaaauaggcaagucauaguugacagagguaauagguccgguuauucugguauuuucucuguugaaggcaaaagcugcaucaaucggugcuuuuauguggaguugauaaggggaagaaaagaggaaacugaagucuuguggaccucaaacaguauuguuguguuuuguggcaccucagguacauauggaacaggcucauggccugauggggcggacaucaaucucaugccuauauaa

SEQ ID NO: 48327 - RNA, 1350 nt, Artificial Sequence
  derived and/or modified CDS sequence (wt) from neuraminidase__InfluenzaA__ABX10517
augaauccaaauaagaagauaauaaccaucggaucaaucuguaugguaacuggaaugguuagcuuaauguuacaaauugggaacuugaucucaauaugggucagucauucaauucacacagggaaucaacacaaagcugaaccaaucagcaauacuaauuuucuuacugagaaagcuguggcuucaguaaaauuagcgggcaauucaucucuuugccccauuaauggaugggcuguacacaguaaggacaacaguauaaggaucgguuccaagggggauguguuuguuauaagagagccauucaucucaugcucccacuuggaaugcagaacuuucuuuuugacucagggagccuugcugaaugacaagcacuccaaugggacugucaaagacagaagcccucacagaacauuaaugaguuguccugugggugaggcucccuccccauauaacucaagguuugagucuguugcuuggucagcaagugcuugccaugauggcaccaguugguugacaauuggaauuucuggcccagacaauggggcuguggcuguauugaaauacaauggcauaauaacagacacuaucaagaguuggaggaauaacauacugagaacucaagagucugaaugugcauguguaaauggcucuugcuuuacuguaaugacugacggaccaaguaauggucaggcaucacauaagaucuucaaaauggaaaaagggaaagugguuaaaucagucgaauuggaugcuccuaauuaucacuaugaggaaugcuccuguuauccugaugccggcgaaaucacaugugugugcagggauaauuggcauggcucaaaucggccauggguaucuuucaaucaaaauuuggaguaucaaauaggauauauaugcaguggaguuuucggagacaauccacgccccaaugauggaacagguaguugugguccgguguccucuaacggggcauaugggguaaaaggguuuucauuuaaauacggcaauggugucuggaucgggagaacaaaaagcacuaauuccaggagcggcuuugaaaugauuugggauccaaauggguggacugaaacggacaguagcuuuucagugaaacaagauaucguagcaauaacugauuggucaggauauagcgggaguuuuguccagcauccagaacugacaggacuagauugcauaagaccuuguuucuggguugaguugaucagagggcggcccaaagagagcacaauuugggcuagugggagcagcauaucuuuuugugguguaaauagugacacuguggguuggucuuggccagacggugcugaguugccauucaccauugacaaguag

SEQ ID NO: 48328 - RNA, 1410 nt, Artificial Sequence
  derived and/or modified CDS sequence (wt) from neuraminidase__InfluenzaA__ABX10527
augaauccaaaucaaaagauaauaacgauuggcucuguuucccucaccauuuccacaauaugcuucuucaugcaaauugccauccugauaacuacuguaacauugcauuucaagcaauaugaauucaacucccccccaaacaaccaagugaugcugugugaaccaacaauaauagaaagaaacauaacagagauaguguaucugaccaacaccaccauagagaaggaaauaugccccaaacuagcagaauacagaaauuggucaaagccgcaauguaacauuacaggauuugcaccuuuuucuaaggacaauucgauucggcuuuccgcugguggggacaucugggugacaagagaaccuuaugugucaugcgauccugacaaguguuaucaauuugcccuuggacagggaacaacacuaaacaacgugcauucaaaugacacaguacaugauaggaccccuuaucggacccuauugaugaaugaguuggguguuccauuucaucuggggaccaagcaagugugcauagcaugguccagcucaaguugucacgauggaaaagcauggcugcauguuuguguaacgggggaugaugaaaaugcaacugcuagcuucauuuacaaugggagacuuguagauaguauuguuucaugguccaaaaaaauccucaggacccaggagucagaaugcguuuguaucaauggaacuuguacaguaguaaugacugaugggagugcuucaggaaaagcugauacuaaaauacuauucauugaggaggggaaaauuguucauacuagcacauuaucaggaagugcucagcaugucgaggagugcuccuguuauccucgauauccuggugucagaugugucugcagagacaacuggaaaggcuccaauaggcccaucguagauauaaacauaaaggauuauagcauuguuuccaguuaugugugcucaggacuuguuggagacacacccagaaaaaacgacagcuccagcaguagccauugcuuggauccaaacaaugaggaagguggucauggagugaaaggcugggccuuugaugauggaaaugacguguggaugggaagaacgaucagcgagaaguuacgcucaggauaugaaaccuucaaagucauugaaggcugguccaacccuaacuccaaauugcagauaaauaggcaagucauaguugacagagguaacagguccgguuauucugguauuuucucuguugaaggcaaaagcugcaucaaucggugcuuuuauguggaguugauaaggggaagaaaacaggaaacugaagucuuguggaccucaaacaguauuguuguguuuuguggcaccucagguacauauggaacaggcucauggccugauggggcggacaucaaucucaugccuauauaa

SEQ ID NO: 48329 - RNA, 1413 nt, Artificial Sequence
  derived and/or modified CDS sequence (wt) from neuraminidase__InfluenzaA__ABX58242
augaauccaaaucaaaaaauaauaaccauuggaucaaucaguauagcaaucgggauaauuagucuaauguugcaaauaggaaauauuauuucaauauggacuagucacucaauccaaacuggaagucaaaaccacacuggaauaugcaaccaaagaaucaucacauaugaaaacagcaccugggugaaucacacauauguuaguaucaacaacacuaauguuguugcuggaaaggacaaaacuucagugacauuggccggcaauucaucucuuuguucuaucaguggaugggcuauauacacaaaagacaacagcauaagaauuggcuccaaaggagauguuuuugucauaagagaaccuuucauaucauguucucauuuggaaugcaggaccuuuuuucugacccaaggugcucuauuaaaugacaaacauucaaauggaaccguuaaggaccgaaguccuuauagggccuuaaugagcuguccucuaggugaagcuccguccccauacaauucaaaguuugaaucaguugcauggucagcaagcgcaugccaugauggcaugggcugguuaacaaucggaauuucugguccagacaauggagcuguggcuguacuaaaauacaacggaauaauaacugaaaccauaaaaaguuggaaaaagcgaauauugagaacacaagagucugaaugugucugugugaacgggucauguuucaccauaaugaccgauggcccgaguaauggggccgccucguacaaaaucuucaaaaucgaaaaggggaagguuacuaaaucaauagaguuaaaugcacccaauuuucauuaugaggaauguuccuguuacccagacacuggcacagugauguguguaugcagagacaacuggcaugguucaaaucgaccuugggugucuuuuaaucaaaacuuggauuaucaaauaggauacaucugcaguggaguguucggugacaauccgcgucccaaagauggaaagggcagcuguaauccagugacuguugauggagcagacgggguuaagggguuuucauacaaauaugguaaugguguuuggauaggaagaacuaaaaguaacagacuuagaaagggguuugagaugauuugggauccuaauggauggacagauaccgacagugauuucucagugaaacaggauguuguggcaauaacugauuggucaggguacaguggaaguuucguucaacauccugaguuaacaggauuggacuguauaagaccuugcuucuggguugaguuagucagaggacugccuagagaaaauacaacaaucuggacuagugggagcagcauuucuuuuuguggcguugauagugauacugcaaacuggucuuggccagacggugcugaguugccguucaccauugacaaguag

SEQ ID NO: 48330 - RNA, 1413 nt, Artificial Sequence; identical to SEQ ID NO: 48141
  derived and/or modified CDS sequence (wt) from neuraminidase__InfluenzaA__ABX58253

SEQ ID NO: 48331 - RNA, 1413 nt, Artificial Sequence
  derived and/or modified CDS sequence (wt) from neuraminidase__InfluenzaA__ABX58264
augaauccaaaucaaaaaauaauaaccauuggaucaaucaguauagcaaucgggauaauuagucuaauguugcaaauaggaaauauuauuucaauaugggcuagucacucaauccaaacuggaagucaaaaccacacuggaauaugcaaccaaagaaucaucacauaugaaaacagcaccugggugaaucacacauauguuaguauuaacaacacuaauguuguugcuggaaaggacaaaacuucagugacauuggccggcaauucaucucuuuguucuaucaguggaugggcuauauacacaaaagacaacagcauaagaauuggcuccaaaggagauguuuuugucauaagagaaccuuucauaucauguucucauuuggaaugcaggaccuuuuuucugacccaaggugcucuauuaaaugacaaacauucaaauggaaccguuaaggaccgaaguccuuauagggccuuaaugagcuguccucuaggugaagcuccguccccauacaauucaaaguuugaaucaguugcauggucagcaagcgcaugccaugauggcaugggcugguuaacaaucggaauuucugguccagacaauggagcuguggcuguacuaaaauacaacggaauaauaacugaaaccauaaaaaguuggaaaaagcgaauauugagaacacaagagucugaaugugucugugugaacgggucauguuucaccauaaugaccgauggcccgaguaauggggccgccucguacaaaaucuucaagaucgaaaaggggaagguuacuaaaucaauagaguuaaaugcacccaauuuucauuaugaggaauguuccuguuacccagacacuggcacagugauguguguaugcagggacaacuggcaugguucaaaucgaccuugggugucuuuuaaucaaaacuuggauuaucaaauaggauacaucugcaguggaguguucggugacaauccgcgucccaaagauggaaagggcagcuguaauccagugacuguugauggagcugacgggguuaagggguuuucauacaaauaugguaaugguguuuggauaggaagaacuaaaaguaacagacuuagaaagggguuugagaugauuugggauccuaauggauggacagauaccgacagugauuucucagugaaacaggauguuguggcaauaacugauuggucaggguacaguggaaguuucguucaacauccugaguuaacaggauuggacuguauaagaccuugcuucuggguugaguuagucagaggacugccuagagaaaauacaacaaucuggacuagugggagcagcauuucuuuuuguggcguugauagugauacugcaaacuggucuuggccagacggugcugaguugccguucaccauugacaaguag

SEQ ID NO: 48332 - RNA, 1413 nt, Artificial Sequence
  derived and/or modified CDS sequence (wt) from neuraminidase__InfluenzaA__ABX58275
augaauccaaaucaaaaaauaauaaccauuggaucaaucaguauagcaaucgggauaauuagucuaauguugcaaauaggaaauauuauuucaauaugggcuagucacucaauccaaacuggaagucaaaaccacacuggaauaugcaaccaaagaaucaucacauaugaaaacagcaccugggugaaucacacauauguuaguauuaacaacacuaauguuguugcuggaaaggacaaaacuucagugacauuggccggcaauucaucucuuuguucuaucaguggaugggcuauauacacaaaagacaacagcauaagaauuggcuccaaaggagauguuuuugucauaagagaaccuuucauaucauguucucauuuggaaugcaggaccuuuuuucugacccaaggugcucuauuaaaugacaaacauucaaauggaaccguuaaggaccgaaguccuuauagggccuuaaugagcuguccucuaggugaagcuccguccccauacaauucaaaguuugaaucaguugcauggucagcaagcgcaugccaugauggcaugggcugguuaacaaucggaauuucugguccagacaauggagcuguggcuguacuaaaauacaacggaauaauaacugaaaccauaaaaaguuggaaaaagcgaauauugagaacacaagagucugaaugugucugugugaacgggucauguuucaccauaaugaccgauggcccgaguaauggggccgccucguacaaaaucuucaagaucgaaaaggggaagguuacuaaaucaauagaguuaaaugcacccaauuuucauuaugaggaauguuccuguuacccagacacuggcacagugauguguguaugcagggacaacuggcaugguucaaaucgaccuugggugucuuuuaaucaaaacuuggauuaucaaauaggauacaucugcaguggaguguucggugacaauccgcgucccaaagauggaaagggcagcuguaauccagugacuguugauggagcagacgggguuaagggguuuucauacaaauaugguaaugguguuuggauaggaagaacuaaaaguaacagacuuagaaagggguuugagaugauuugggauccuaauggauggacagauaccgacagugauuucucagugaaacaggauguuguggcaauaacugauuggucaggguacaguggaaguuucguccaacauccugaguuaacaggauuggacuguauaagaccuugcuucuggguugaguuagucagaggacugccuagagaaaauacaacaaucuggacuagugggagcagcauuucuuuuuguggcguugauagugauacugcaaacuggucuuggccagacggugcugaguugccguucaccauugacaaguag

SEQ ID NO: 48333 - RNA, 1413 nt, Artificial Sequence
  derived and/or modified CDS sequence (wt) from neuraminidase__InfluenzaA__ABX58286
augaauccaaaucaaaaaauaauaaccauuggaucaaucaguauagcaaucgggauaauuagucuaauguugcaaauaggaaauauuauuucaauaugggcuagucacucaauccaaacuggaagucaaaaccacacuggaauaugcaaccaaagaaucaucacauaugaaaacagcaccugggugaaucacacauauguuaguauuaacaacacuaauguuguugcuggaaaggacaaaacuucagugacauuggccggcaauucaucucuuuguucuaucaguggaugggcuauauacacaaaagacaacagcauaagaaucggcuccaaaggagauguuuuugucauaagagaaccuuucauaucauguucucauuuggaaugcaggaccuuuuuucugacccaaggugcucuauuaaaugacaaacauucaaauggaaccguuaaggaccgaaguccuuauagggccuuaaugagcuguccucuaggugaagcuccguccccauacaauucaaaguuugaaucaguugcauggucagcaagcgcaugccaugauggcaugggcugguuaacaaucggaauuucugguccagacaauggagcuguggcuguacuaaaauacaacggaauaauaacugaaaccauaaaaaguuggaaaaagcgaauauugagaacacaagagucugaaugugucugugugaacgggucauguuucaccauaaugaccgauggcccgaguaauggggccgccucguacaaaaucuucaagaucgaaaaggggaagguuacuaaaucaauagaguuaaaugcacccaauuuucauuaugaggaauguuccuguuacccagacacuggcacagugauguguguaugcagggacaacuggcaugguucaaaucgaccuugggugucuuuuaaucaaaacuuggauuaucaaauaggauacaucugcaguggaguguuuggugacaauccgcgucccaaagauggaaagggcagcuguaauccagugacuguugauggagcagacgggguuaagggguuuucauacaaauaugguaaugguguuuggauaggaagaacuaaaaguaacagacuuagaaagggguuugagaugauuugggauccuaauggauggacagauaccgacagugauuucucagugaaacaggauguuguggcaauaacugauuggucaggguacaguggaaguuucguucaacauccugaguuaacaggauuggacuguauaagaccuugcuucuggguugaguuagucagaggacugccuagagaaaauacaacaaucuggacuagugggagcagcauuucuuuuuguggcguugauagugauacugcaaacuggucuuggccagacggugcugaguugccguucacuauugacaaguag

SEQ ID NO: 48334 - RNA, 1413 nt, Artificial Sequence
  derived and/or modified CDS sequence (wt) from neuraminidase__InfluenzaA__ABX58297
augaauccaaaucaaaaaauaauaaccauuggaucaaucaguauagcaaucggaauaauuagucuaauguugcaaauaggaaauauuauuucaauaugggcuagucacucaauccaaacuggaagucaaaaccacacuggaauaugcaaccaaaaaaucaucacauaugaaaacagcaccugggugaaucacacauauguuaguauuaacaacacuaauguuguugcuggaaaggacaaaacuucagugacauuggccggcaauucaucucuuuguucuaucaguggaugggcuauauacacaaaagacaacagcauaagaauuggcuccaaaggagauguuuuugucauaagagaaccuuucauaucauguucucauuuggaaugcaggaccuuuuuccugacccaaggugcucuauuaaaugacaaacauucaaauggaaccguuaaggaccgaaguccuuauagggccuuaaugagcuguccucuaggugaagcuccguccccauacaauucaaaguuugaaucaguugcauggucagcaagcgcaugccaugauggcaugggcugguuaacaaucggaauuucugguccagacaauggagcuguggcuguacuaaaauacaacggaauaauaacugaaaccauaaaaaguuggaaaaagcgaauauugagaacacaagagucugaaugugucugugugaacgggucauguuucaccauaaugaccgauggcccgaguaauggggccgccucguacaaaaucuucaagaucgaaaaggggaagguuacuaaaucaauagaguuaaaugcacccaauuuucauuaugaggaauguuccuguuacccagacacuggcacagugauguguguaugcagggacaacuggcaugguucaaaucgaccuugggugucuuuuaaucaaaacuuggauuaucaaauaggauacaucugcaguggaguguucggugacaauccgcgucccaaagauggaaagggcagcuguaauccagugacuguugauggagcagacgggguuaagggguuuucauacaaauaugguaaugguguuuggauaggaagaacuaaaaguaacagacuuagaaagggguuugagaugauuugggauccuaauggauggacagauaccgacagugauuucucagugaaacaggauguuguggcaauaacugauuggucagguuacaguggaaguuucguucaacauccugaguuaacaggauuggacuguauaagaccuugcuucuggguugaguuagucagaggacugccuagagaaaauacaacaaucuggacuagugggagcagcauuucuuuuuguggcguugauagugauacugcaaacuggucuuggccagacggugcugaguugccguucaccauugacaaguag

SEQ ID NO: 48335 - RNA, 1413 nt, Artificial Sequence; identical to SEQ ID NO: 48305
  derived and/or modified CDS sequence (wt) from neuraminidase__InfluenzaA__ABX58308

SEQ ID NO: 48336 - RNA, 1413 nt, Artificial Sequence
  derived and/or modified CDS sequence (wt) from neuraminidase__InfluenzaA__ABX58319
augaauccaaaucaaaaaauaauaaccauuggaucaaucaguauagcaaucgggauaauuagucuaauguugcaaauaggaaauauuauuucaauaugggcuagucacucaauccaaacuggaagucaaaaccacacuggaauaugcaaccaaagaaucaucacauaugaaaacagcaccugggugaaucacacauauguuaguauuaacaacacuaauguuguugcuggaaaggacaaaacuucagugacauuggccggcaauucaucucuuuguucuaucaguggaugggcuauauacacaaaagacaacagcauaagaauuggcuccaaaggagauguuuuugucauaagagaaccuuucauaucauguucucauuuggaaugcaggaccuuuuuucugacccaaggugcucuauuaaaugacaaacauucaaauggaaccauuaaggaccgaaguccuuauagggccuuaaugagcuguccucuaggugaagcuccguccccauacaauucaaaguuugaaucaguugcauggucagcaagcgcaugccaugauggcaugggcugguuaacaaucggaauuucugguccagacaauggagcuguggcuguacuaaaauacaacggaauaauaacugaaaccauaaaaaguuggaaaaagcgaauauugagaacacaagagucugaaugugucugugugaacgggucauguuucaccauaaugaccgauggcccgaguaauggggccgccucauacaaaaucuucaagaucgaaaaggggaagguuacuaaaucaauagaguuaaaugcacccaauuuucauuaugaggaauguuccuguuacccagacacuggcacagugauguguguaugcagggacaacuggcaugguucaaaucgaccuugggugucuuuuaaucaaaacuuggauuaucaaauaggauacaucugcaguggaguguucggugacaauccgcgucccaaagauggaaagggcagcuguaauccagugacuguugauggagcagacgggguuaagggguuuucauacaaauaugguaaugguguuuggauaggaagaacuaaaaguaacagacuuagaaagggguuugagaugauuugggauccuaauggauggacagauaccgacagugauuucucagugaaacaggauguuguggcaauaacugauuggucaggguacaguggaaguuucguucaacauccugaguuaacaggauuggacuguauaagaccuugcuucuggguugaguuagucagaggacugccuagagaaaauacaacaaucuggacuagugggagcagcauuucuuuuuguggcguugauagugauacugcaaacuggucuuggccagacggugcugaguugccguucaccauugacaaguag

SEQ ID NO: 48337 - RNA, 1413 nt, Artificial Sequence; identical to SEQ ID NO: 48213
  derived and/or modified CDS sequence (wt) from neuraminidase__InfluenzaA__ABX58352

SEQ ID NO: 48338 - RNA, 1413 nt, Artificial Sequence; identical to SEQ ID NO: 48045
  derived and/or modified CDS sequence (wt) from neuraminidase__InfluenzaA__ABX58363

SEQ ID NO: 48339 - RNA, 1413 nt, Artificial Sequence; identical to SEQ ID NO: 48043
  derived and/or modified CDS sequence (wt) from neuraminidase__InfluenzaA__ABX58385

SEQ ID NO: 48340 - RNA, 1413 nt, Artificial Sequence
  derived and/or modified CDS sequence (wt) from neuraminidase__InfluenzaA__ABX58396
augaauccaaaucaaaaaauaauaaccauuggaucaaucaguauagcaaucggaauaauuagucuaauguugcaaauaggaaauauuauuucaauaugggcuagucacucaauccaaacuggaagucaaaaccacacuggaauaugcaaccaaagaaucaucacauaugaaaacagcaccugggugaaucacacauauguuaguauuaacaacacuaauguuguugcuggaaaggacaaaacuucagugacauuggccggcaauucaucucuuuguucuaucaguggaugggcuauauacacaaaagacaacagcauaagaauuggcuccaaaggagauguuuuugucauaagagaaccuuucauaucauguucucauuuggaaugcaggaccuuuuuucugacccaaggugcucuauuaaaugacaaacauucaaauggaaccguuaaggaccgaaguccuuauagggccuuaaugagcuguccucuaggugaagcuccguccccauacaauucaaaguuugaaucaguugcauggucagcaagcgcaugccaugauggcaugggcugguuaacaaucggaauuucugguccagacaauggagcuguggcuguacuaaaauacaacggaauaauaacugaaaccauaaaaaguuggaaaaagcgaauauugagaacacaagagucugaaugugucugugugaacgggucauguuucaccauaaugaccgauggcccgaguaauggggccgccucguacaaaaucuucaagaucgaaaaggggaagguuacuaaaucaauagaguuaaaugcacccaauuuucauuaugaggaauguuccuguuacccagacacuggcacagugauguguguaugcagggacaacuggcaugguucaaaucgaccuugggugucuuuuaaucaaaacuuggauuaucaaauaggauacaucugcaguggaguguucggugacaauccgcgucccaaagauggaaagggcagcuguaauccagugacuguugauggagcagacgggguuaagggguuuucauacaaauaugguaaugguguuuggauaggaagaacuaaaaguaacagacuuagaaagggguuugagaugauuugggauccuaauggauggacagauaccgacagugauuucucagugaaacaggauguuguggcaauaacugauuggucagguuacaguggaaguuucguucaacauccugaguuaacaggauuggacuguauaagaccuugcuucuggguugaguuagucagaggacugccuagagaaaauacaacaaucuggacuagugggagcagcauuucuuuuuguggcguugauagugauacugcaaacuggucuuggccagacggugcugaguugccguucaccauugacaaguag

SEQ ID NO: 48341 - RNA, 1413 nt, Artificial Sequence
  derived and/or modified CDS sequence (wt) from neuraminidase__InfluenzaA__ABX58407
augaauccaaaucaaaaaauaauaaccauuggaucaaucaguauagcaaucgggauaauuagucuaauguugcaaauaggaaauauuauuucaauaugggcuagucacucaauccaaacuggaagucaaaaccacacuggaauaugcaaccaaagaaucaucacauaugaaaacagcaccugggugaaucacacauauguuaguauuaacaacacuaauguuguugcuggaaaggacaaaacuucagugacauuggccggcaauucaucucuuuguccuaucaguggaugggcuauauacacaaaagacaacagcauaagaauuggcuccaaaggagauguuuuugucauaagagaaccuuucauaucauguucucauuuggaaugcaggaccuuuuuucugacccaaggugcucuauuaaaugacaaacauucaaauggaaccguuaaggaccgaaguccuuauagggccuuaaugagcuguccucuaggugaagcuccguccccauacaauucaaaguuugaaucaguugcauggucagcaagcgcaugccaugauggcaugggcugguuaacaaucggaauuucugguccagacaauggagcuguggcuguacuaaaauacaacggaauaauaacugaaaccauaaaaaguuggaaaaagcgaauauugagaacacaagagucugaaugugucugugugaacgggucauguuucaccauaaugaccgauggcccgaguaauggggccgccucguacaaaaucuucaaaaucgaaaaggggaagguuacuaaaucaauagaguuaaaugcacccaauuuucauuaugaggaauguuccuguuacccagacacuggcacagugauguguguaugcagggacaacuggcaugguucaaaucgaccuugggugucuuuuaaucaaaacuuggauuaucaaauaggauacaucugcaguggaguguucggugacaauccgcgucccaaagauggaaagggcagcuguaauccagugacuguugauggagcagacgggguuaagggguuuucauacaaauaugguaaugguguuuggauaggaagaacuaaaaguaacagacuuagaaagggguuugagaugauuugggauccuaauggauggacagauaccgacagugauuucucagugaaacaggauguuguggcaauaacugauuggucaggguacaguggaaguuucguucaacauccugaguuaacaggauuggacuguauaagaccuugcuucuggguugaguuagucagaggacugccuagagaaaauacaacaaucuggacuagugggagcagcauuucuuuuuguggcguugauagugauacugcaaacuggucuuggccagacggugcugaguugccguucaccauugacaaguag

SEQ ID NO: 48342 - RNA, 1413 nt, Artificial Sequence
  derived and/or modified CDS sequence (wt) from neuraminidase__InfluenzaA__ABX58418
augaauccaaaucaaaaaauaauaaccauuggaucaaucaguauagcaaucggaauaauuagucuaauguugcaaauaggaaauauuauuucaauaugggcuagucacucaauccaaacuggaagucaaaaccacacuggaauaugcaaccaaagaaucaucacauaugaaaacagcaccugggugaaucacacauauguuaauauuaacaacacuaauguuguugcuggaaaggacaaaacuucagugacauuggccggcaauucaucucuuuguucuaucaguggaugggcuauauacacaaaagacaacagcauaagaauuggcuccaagggagauguuuuugucauaagagaaccuuucauaucauguucucauuuggaaugcaggaccuuuuuucugacccaaggugcucuauuaaaugacaaacauucaaauggaaccguuaaggacagaaguccuuauagggccuuaaugagcuguccucuaggugaagcuccguccccauacaauucaaaguuugaaucaguugcauggucagcaagcgcaugccaugauggcaugggcugguuaacaaucggaauuucugguccagacaauggagcuguggcuguacuaaaauacaacggaauaauaacugaaaccauaaaaaguuggaaaaaacgaauauugagaacacaagagucugaaugugucugugugaacgggucuuguuucaccauaaugaccgauggcccgaguaauggggccgccucguacaaaaucuucaagaucgaaaagggaaaggucacuaaaucaauagaguuaaaugcacccaauuuucauuaugaggaauguuccuguuacccagacacuggcacagugauguguguaugcagagacaacuggcaugguucaaaucgaccuugggugucuuuuaaucaaaacuuggauuaucaaauaggauacaucugcaguggaguguucggugacaauccgcgucccaaagauggaaagggcagcuguaauccagugacuguugauggagcagacggaguuaagggguuuucauacaaauaugguaaugguguuuggauaggaagaacuaaaaguaacagacuuagaaagggguuugagaugauuugggauccuaauggauggacaaauaccgacagugauuucucagugaaacaggauguuguggcaauaacugauuggucaggguacaguggaaguuucguucaacauccugaguuaacaggauuggacuguauaagaccuugcuucuggguugaauuagucagaggacugccuagagaaaauacaacaaucuggacuagugggagcagcauuucuuuuuguggcguugauagugauacugcaaacuggucuuggccagacggugcugaguugccguucaccauugacaaauag

SEQ ID NO: 48343 - RNA, 1413 nt, Artificial Sequence; identical to SEQ ID NO: 48043
  derived and/or modified CDS sequence (wt) from neuraminidase__InfluenzaA__ABX58429

SEQ ID NO: 48344 - RNA, 1413 nt, Artificial Sequence
  derived and/or modified CDS sequence (wt) from neuraminidase__InfluenzaA__ABX58440
augaauccaaaucaaaaaauaauaaccauuggaucaaucaguauagcaaucgggauaauuagucuaauguugcaaauaggaaauauuauuucaauaugggcuagucacucaauccaaacuggaagucaaaaccacacuggaauaugcaaccaaagaaucaucacauaugaaaacagcaccugggugaaucacacauauguuaguauuaacaacacuaauguuguugcuggaaaggacaaaacuucagugacauuggccggcaauucaucucuuuguucuaucaguggaugggcuauauacacaaaagacaacagcauaagaauuggcuccaaaggagauguuuuugucauaagagaaccuuucauaucauguucucauuuggaaugcaggaccuuuuuucugacccaaggugcucuauuaaaugacaaacauucaaauggaaccguuaaggaccgaaguccuuauagggccuuaaugagcuguccucuaggugaagcuccguccccauacaauucaaaguuugaaucaguugcauggucagcaagcgcaugccaugauggcaugggcugguuaacaaucggaauuucugguccugacaauggagcuguggcuguacuaaaauacaacggaauaauaacugaaaccauaaaaaguuggaaaaagcgaauauugagaacacaagagucugaaugugucugugugaacgggucauguuucaccauaaugaccgauggcccgaguaauggggccgccucguacaaaaucuucaagaucgaaaaggggaagguuacuaaaucaauagaguuaaaugcacccaauuuucauuaugaggaauguuccuguuacccagacacuggcacagugauguguguaugcagggacaacuggcaugguucaaaucgaccuugggugucuuuuaaucaaaacuuggauuaucaaauaggauacaucugcaguggaguguuuggugacaauccgcgucccaaagauggaaagggcagcuguaauccagugacuguugauggagcagacgggguuaagggguuuucauacaaauaugguaaugguguuuggauaggaagaacuaaaaguaacagacuuagaaagggguuugagaugauuugggauccuaauggauggacagauaccgacagugauuucucagugaaacaggauguuguggcaauaacugauuggucaggguacaguggaaguuucguucaacauccugaguuaacaggauuggacuguauaagaccuugcuucuggguugagcuagucagaggacugccuagagaaaauacaacaaucuggacuagugggagcagcauuucuuuuuguggcguugauagugauacugcaaacuggucuuggccagacggugcugaguugccguucacuauugacaaguag

SEQ ID NO: 48345 - RNA, 1413 nt, Artificial Sequence
  derived and/or modified CDS sequence (wt) from neuraminidase__InfluenzaA__ABX58451
augaauccaaaucaaaaaauaauaaccauuggaucaaucaguauagcaaucgggacaauuagucuaauguugcaaauaggaaauauuauuucaauaugggcuagucacucaauccaaacuggaagucaaaaccacacuggaauaugcaaccaaagaaucaucacauaugaaaacagcaccugggugaaucacacauauguuaguauuaacaacacuaauguuguugcuggaaaggacaaaacuucagugacauuggccggcaauucaucucuuuguucuaucaguggaugggcuauauacacaaaagacaacagcauaagaauuggcuccaaaggagauguuuuugucauaagagaaccuuucauaucauguucucauuuggaaugcaggaccuuuuuucugacccaaggugcucuauuaaaugacaaacauucaaauggaaccguuaaggaccgaaguccuuauagggccuuaaugagcuguccucuaggugaagcuccguccccauacaauucaaaguuugaaucaguugcauggucagcaagcgcaugccaugauggcaugggcugguuaacaaucggaauuucugguccagacaauggagcuguggcuguacuaaaauacaacggaauaauaacugaaaccauaaaaaguuggaaaaagcgaauauugagaacacaagagucugaaugugucugugugaacgggucauguuucaccauaaugaccgauggcccgaguaauggggccgccucguacaaaaucuucaagaucgaaaaggggaagguuacuaaaucaauagaguuaaaugcacccaauuuucauuaugaggaauguuccuguuacccagacacuggcacagugauguguguaugcagggacaacuggcaugguucaaaucgaccuugggugucuuuuaaucaaaacuuggauuaucaaauaggauacaucugcaguggaguguucggugacaauccgcgucccaaagauggaaagggcagcuguaauccagugacuguugauggagcagacgggguuaagggguuuucauacaaauaugguaaugguguuuggauaggaagaacuaaaaguaacagacuuagaaagggguuugagaugauuugggauccuaauggauggacagauaccgacagugauuucucagugaaacaggauguuguggcaauaacugauuggucaggguacaguggaaguuucguucaacauccugaguuaacaggauuggacuguauaagaccuugcuucuggguugaguuagucagaggacugccuagagaaaauacaacaaucuggacuagugggagcagcauuucuuucuguggcguugauagugauacugcaaacuggucuuggccagacggugcugaguugccguucaccauugacaaguag

SEQ ID NO: 48346 - RNA, 1413 nt, Artificial Sequence; identical to SEQ ID NO: 48207
  derived and/or modified CDS sequence (wt) from neuraminidase__InfluenzaA__ABX58462

SEQ ID NO: 48347 - RNA, 1413 nt, Artificial Sequence; identical to SEQ ID NO: 48192
  derived and/or modified CDS sequence (wt) from neuraminidase__InfluenzaA__ABX58473

SEQ ID NO: 48348 - RNA, 1413 nt, Artificial Sequence; identical to SEQ ID NO: 48207
  derived and/or modified CDS sequence (wt) from neuraminidase__InfluenzaA__ABX58484

SEQ ID NO: 48349 - RNA, 1413 nt, Artificial Sequence
  derived and/or modified CDS sequence (wt) from neuraminidase__InfluenzaA__ABX58495
augaauccaaaucaaaaaauaauaaccauuggaucuaucaguauagcaaucgggauaauuagucuaauguugcaaauaggaaauauuauuucaauaugggcuagucacucaauccaaacuggaagucaaaaccacacuggaauaugcaaccaaagaaucaucacauaugaaaacagcaccugggugaaucacacauauguuaguauuaacaacacuaauguuguugcuggaaaggacaaaacuucagugacauuggccggcaauucaucucuuuguucuaucaguggaugggcuauauacacaaaagacaacagcauaagaauuggcuccaaaggagauguuuuugucauaagagaaccuuucauaucauguucucauuuggaaugcaggaccuuuuuucugacccaaggugcucuauuaaaugacaaacauucaaauagaaccguuaaggaccgaaguccuuauagggccuuaaugagcuguccucuaggugaagccccguccccauacaauucaaaguuugaaucaguugcauggucagcaagcgcaugccaugauggcaugggcugguuaacaaucggaauuucugguccagacaauggagcuguggcuguacuaaaauacaacggaauaauaacugaaaccauaaaaaguuggaaaaagcgaauauugagaacacaagagucugaaugugucugugugaacgggucauguuucaccauaaugaccgauggcccgaguaauggggccgccucguacaaaaucuucaaaaucgaaaaggggaagguuacuaaaucaauagaguuaaaugcacccaauuuucauuaugaggaauguuccuguuacccagacacuggcacagugauguguguaugcagggacaacuggcaugguucaaaucgaccuugggugucuuuuaaucaaaacuuggauuaucaaauaggauacaucugcaguggaguguucggugacaauccgcgucccaaagauggaaagggcagcuguaauccagugacuguugauggagcagacgggguuaagggguuuucauacaaauaugguaaugguguuuggauaggaagaacuaaaaguaacagacuuagaaagggguuugagaugauuugggauccuaauggauggacagauaccgacagugauuucucagugaaacaggauguuguggcaauaacugauuggucaggguacaguggaaguuucguucaacauccugaguuaacaggauuggacuguauaagaccuugcuucuggguugaguuagucagaggacugccuagagaaaauacaacaaucuggacuagugggagcagcauuucuuuuuguggcguugauagugauacugcaaacuggucuuggccagacggugcugaguugccguucaccauugacaaguag

SEQ ID NO: 48350 - RNA, 1413 nt, Artificial Sequence
  derived and/or modified CDS sequence (wt) from neuraminidase__InfluenzaA__ABX58506
augaauccaaaucaaaaaauaauaaccauuggaucaaucaguauagcaauuggaauaauuagucuaauguugcaaauaggaaauauuauuucaauaugggcuagucacucaauccaaacuggaagucaaaaccacacuggaauaugcaaccaaagaaucaucacauaugaaaacagcaccugggugaaucacacauauguuaauauuaacaacacuaauguuguugcuggaaaggacaaaacuucagugacauuggccggcaauucaucucuuuguucuaucaguggaugggcuauauacacaaaagacaacagcauaagaauuggcuccaaaggagauguuuuugucauaagagaaccuuucauaucauguucucauuuggaaugcaggaccuuuuuucugacccaaggugcucuauuaaaugacaaacauucaaauggaaccguuaaggacagaaguccuuauagggccuuaaugagcuguccucuaggugaagcuccguccccauacaauucaaaguuugaaucaguugcauggucagcaagcgcaugccaugauggcaugggcugguuaacaaucgggauuucugguccagacaauggagcuguggcuguacuaaaauacaacggaauaauaacugaaaccauaaaaaguuggaaaaagcgaauauugagaacacaagagucugaaugugucugugugaacgggucauguuucaccauaaugaccgauggcccgaguaauggggccgccucguacaaaaucuucaagaucgaaaaggggaagguuacuaaaucaauagaguuaaaugcacccaauuuucauuaugaggaauguuccuguuacccagacacuggcacagugauguguguaugcagggauaacuggcaugguucaaaucgaccuugggugucuuuuaaucaaaacuuggauuaucaaguaggauacaucugcaguggaguguucggugacaauccgcgucccaaagauggaaagggcagcuguaauccaaugacuguugauggagcagacggaguuaagggguuuucauacaaauaugguaaugguguuuggauaggaaggacuaaaaguaacaaacuuagaaagggguuugagaugauuugggauccuaauggauggacagauaccgacagugauuucucagugaaacaggauguuguggcaauaacugauuggucaggguacaguggaaguuucguucaacauccugaguuaacaggauuggacuguauaagaccuugcuucuggguugaguuagucagaggacugccuagagaaaauacaacaaucuggacuagugggagcagcauuucuuuuuguggcguugauagugauacugcaaacuggucuuggccagacggugcugaguugccguucaccauugacaaauag

SEQ ID NO: 48351 - RNA, 1413 nt, Artificial Sequence; identical to SEQ ID NO: 48207
  derived and/or modified CDS sequence (wt) from neuraminidase__InfluenzaA__ABX58528

SEQ ID NO: 48352 - RNA, 1413 nt, Artificial Sequence
  derived and/or modified CDS sequence (wt) from neuraminidase__InfluenzaA__ABX58539
augaauccaaaucaaaaaauaauaaccauuggaucaaucaguauagcaaucggaauaauuagucuaauguugcaaauaggaaauauuauuucaauaugggcuagucacucaauccaaacuggaagucaaaaccacacuggaauaugcaaccaaagaaucaucacauaugaaaacagcaccugggugaaucacacauauguuaauauuaacaacacuaauguuguugcuggaaaggacaaaacuucagugacauuggccggcaauucaucucuuuguucuaucaguggaugggcuauauacacaaaagacaacagcauaagaauuggcuccaagggagauguuuuugucauaagagaaccuuucauaucauguucucauuuggaaugcaggaccuuuuuucugacccaaggugcacuauuaaaugacaaacauucaaauggaaccguuaaggacagaaguccuuauagggccuuaaugagcuguccucuaggugaagcuccguccccauacaauucaaaguuugaaucaguugcauggucagcaagcgcaugccaugauggcaugggcugguuaacaaucggaauuucugguccagacaauggagcuguggcuguacuaaaauacaacggaauaauaacugaaaccauaaaaaguuggaaaaaacgaauauugagaacacaagagucugaaugugucugugugaacgggucuuguuucaccauaaugaccgauggcccgaguaauggggccgccucguacaaaaucuucaagaucgaaaagggaaagguuaccaaaucaauagaguuaaaugcacccaauuuucauuaugaggaauguuccuguuacccagacacuggcacagugauguguguaugcagagacaacuggcaugguucaaaucgaccuugggugucuuuuaaucaaaacuuggauuaucaaauaggauacaucugcaguggaguguucggugacaauccgcgucccaaagauggaaagggcagcuguaauccagugacuguugauggagcagacggaguuaagggguuuucauacaaauaugguaaugguguuuggauaggaagaacuaaaaguaacagacuuagaaagggguuugagaugauuugggauccuaauggauggacaaauaccgacagugauuucucagugaaacaggauguuguggcaauaacugauuggucaggguacaguggaaguuucguucaacauccugaguuaacaggauuggacuguauaagaccuugcuucuggguugaauuagucagaggacugccuagagaaaauacaacaaucuggacuagugggagcagcauuucuuuuuguggcguugauagugauacugcaaacuggucuuggccagacggugcugaguugccguucaccauugacaaauag

SEQ ID NO: 48353 - RNA, 1413 nt, Artificial Sequence
  derived and/or modified CDS sequence (wt) from neuraminidase__InfluenzaA__ABX58550
augaauccaaaucaaaaaauaauaaccauuggaucaaucaguauagcaaucgggauaauuagucuaauguugcaaauaggaaauauuauuucaauaugggcuagucacucaauccaaacuggaagucaaaaccacacuggaauaugcaaccaaagaaucaucacauaugaaaacagcaccugggugaaucacacauauguuaguauuaacaacacuaauguuguugcuggaaaggacaaaacuucagugacauuggccggcaauucaucucuuuguucuaucaguggaugggcuauauacacaaaagacaacagcauaagaauuggcuccaaaggagauguuuuugucauaagagaaccuuucauaucauguucucauuuggaaugcaggaccuuuuuucugacccaaggugcucuauuaaaugacaaacauucaaauggaaccguuaaggaccgaaguccuuauagggccuuaaugagcuguccucuaggugaagcuccguccccauacaauucaaaguuugaaucaguugcauggucagcaagcgcaugccaugauggcaugggcugguuaacaaucggaauuucugguccagacaauggagcuguggcuguacuaaaauacaacggaauaauaacugaaaccauaaaaaguuggaaaaagcgaauauugagaacacaagagucugaaugugucugugugaacgggucauguuucaccauaaugaccgauggcccgaguaauggggccgccucguacaaaaucuucaagaucgaaaaggggaagguuacuaaaucaauagaguuaaaugcacccaauuuucauuaugaggaauguuccuguuacccagacacuggcacagugauguguguaugcagggacaacuggcaugguucaaaucgaccuugggugucuuuuaaucaaaacuuggauuaucaaauaggauacaucugcaguggaguguucggugacaauccgcgucccaaagauggaaagggcagcuguaauccagugacuguugauggagcagacgggguuaagggguuuucauacaaauaugguaaugguguuuggauaggaagaacuaaaaguaacagacuuagaaagggguuugagaugauuugggauccuaauggauggacagauaccgacagugauuucucagugaaacaggauguuguggcaauaacugauuggucaggguacaguggaaguuucguucaacauccugaguuaacaggauuggacuguauaagaccuugcuucuggguugaguuagucagaggacugccuagagaaaauacaacaaucuggacuagugggagcagcauuucuuuuuguggcguugauagugauacugcaaacuggucuuggccagacggugcugaguugccguucaccguugacaaguag

SEQ ID NO: 48354 - RNA, 1413 nt, Artificial Sequence
  derived and/or modified CDS sequence (wt) from neuraminidase__InfluenzaA__ABX58561
augaauccaaaucaaaaaauaauaaccauuggaucaaucaguauagcaaucggaauaauuagucuaauguugcaaauaggaaauauuauuucaauaugggcuagucacucaauccaaacuggaagucaaaaccacacuggaauaugcaaccaaagaaucaucacauaugaaaacagcaccugggugaaucacacauauguuaguauuaacaacacuaauguuguugcuggaaaggacaaaacuucagugacauuggccggcaauucaucucuuuguucuaucaguggaugggcuauauacacaaaagacaacagcauaagaauuggcuccaaaggagauguuuuugucauaagagaaccuuucauaucauguucucauuuggaaugcaggaccuuuuuucugacccaaggugcucuauuaaaugacaaacauucaaauggaaccguuaaggaccgaaguccuuauagggccuuaaugagcuguccucuaggugaagcuccguccccauacaauucaaaguuugaaucaguugcauggucagcaagcgcaugccaugauggcaugggcugguuaacaaucggaauuucugguccagacaauggagcuguggcuguacuaaaauacaacggaauaauaacugaaaccauaaaaaguuggaaaaagcgaauauugagaacacaagagucugaaugugucugugugaacgggucauguuucaccauaaugaccgauggcccgaguaauggggccgccucguacaaaaucuucaagaucgaaaaggggaagguuacuaaaucaauagaguuaaaugcacccaauuuucauuaugaggaauguuccuguuacccagacacuggcacagugauguguguaugcagggacaacuggcaugguucaaaucgaccuuggguguccuuuaaucaaaacuuggauuaucaaauaggauacaucugcaguggaguguucggugacaauccgcgucccaaagauggaaagggcagcuguaauccagugacuguugauggagcagacgggguuaagggguuuucauacaaauaugguaaugguguuuggauaggaagaacuaaaaguaacagacuuagaaagggguuugagaugauuugggauccuaauggauggacagauaccgacagugauuucucagugaaacaggauguuguggcaauaacugauuggucagguuacaguggaaguuucguucaacauccugaguuaacaggauuggacuguauaagaccuugcuucuggguugaguuagucagaggacugccuagagaaaauacaacaaucuggacuagugggagcagcauuucuuuuuguggcguugauagugauacugcaaacuggucuuggccagacggugcugaguugccguucaccauugacaaguag

SEQ ID NO: 48355 - RNA, 1413 nt, Artificial Sequence
  derived and/or modified CDS sequence (wt) from neuraminidase__InfluenzaA__ABX58572
augaauccaaaucaaaaaauaauaaccauuggaucaaucaguauagcaaucgggauaauuagucuaauguugcaaauaggaaauauuauuucaauaugggcuagucacucaauccaaacuggaagucaaaaccacacuggaauaugcaaccaaagaaucaucacauaugaaaacagcaccugggugaaucacacauauguuaguauuaacaacacuaauguuguugcuggaaaggacaaaacuucagugacauuggccggcaauucaucucuuuguucuaucaguggaugggcuauauacacaaaagacaacagcauaagaauuggcuccaaaggagauguuuuugucauaagagaaccuuucauaucauguucucauuuggaaugcaggaccuuuuuucugacccaaggugcucuauuaaaugacaaacauucaaauggaaccguuaaggaccgaaguccuuauagggccuuaaugagcuguccucuaggugaagcuccguccccauacaauucaaaguuugaaucaguugcauggucagcaagcgcaugccaugauggcaugggcugguuaacaaucggaauuucugguccagacaauggagcuguggcuguacuaaaauacaacggaauaauaacugaaaccauaaaaaguuggaaaaagcgaauauugagaacacaagagucugaaugugucugugugaacgggucauguuucaccauaaugaccgauggcccgaguaauggggccgccucauacaaaaucuucaagaucgaaaaggggaagguuacuaaaucaauagaguuaaaugcacccaauuuucauuaugaggaauguuccuguuacccagacacuggcacagugauguguguaugcagggacaacuggcaugguucaaaucgaccuugggugucuuuuaaucaaaacuuggauuaucaaauaggauacaucugcaguggaguguucggugacaauccgcgucccaaagauggaaagggcagcuguaauccaaugacuguugauggagcagacgggguuaagggguuuucauacaaauaugguaaugguguuuggauaggaagaacuaaaaguaacaggcuuagaaagggguuugagaugauuugggauccuaauggauggacagauaccgacagugauuucucagugaaacaggauguuguggcaauaacugauuggucaggguacaguggaaguuucguucaacauccugaguuaacaggauuggacuguauaagaccuugcuucuggguugaguuagucagaggacugccuagagaaaauacaacaaucuggacuagugggagcagcauuucuuuuuguggcguugauagugauacugcaaacuggucuuggccagacggugcugaguugccguucaccauugacaaguag

SEQ ID NO: 48356 - RNA, 1413 nt, Artificial Sequence; identical to SEQ ID NO: 48116
  derived and/or modified CDS sequence (wt) from neuraminidase__InfluenzaA__ABX58583

SEQ ID NO: 48357 - RNA, 1413 nt, Artificial Sequence
  derived and/or modified CDS sequence (wt) from neuraminidase__InfluenzaA__ABX58594
augaauccaaaucaaaaaauaauaaccauuggaucaaucaguauagcaaucgggauaauuagucuaauguugcaaauaggaaauauuauuucaauaugggcuagucacucaauccaaacuggaagucaaaaccacacuggaauaugcaaccaaagaaucaucacauaugaaaacagcaccugggugaaucacacauauguuaguauuaacaacacuaauguuguugcuggaaaggacaaaacuucagugacauuggccgguaauucaucucuuuguucuaucaguggaugggcuauauacacaaaagacaacagcauaagaauuggcuccaaaggagauguuuuugucauaagagaaccuuucauaucauguucucauuuggaaugcaggaccuuuuuucugacccaaggugcucuauuaaaugacaaacauucaaauggaaccguuaaggaccgaaguccuuauagggccuuaaugagcuguccucuaggugaagcuccguccccauacaauucaaaguuugaaucaguugcauggucagcaagcgcaugccaugauggcaugggcugguuaacaaucggaauuucugguccagacaauggagcuguggcuguacuaaaauacaacggaauaauaacugaaaccauaaaaaguuggaaaaagcgaauauugagaacacaagagucugaaugugucugugugaacgggucauguuucaccauaaugaccgauggcccgaguaauggggccgccucguacaaaaucuucaagaucgaaaaggggaagguuacuaaaucaauagaguuaaaugcacccaauuuucauuaugaggaauguuccuguuacccagacacuggcacagugauguguguaugcagggacaacuggcaugguucaaaucgaccuugggugucuuuuaaucaaaacuuggauuaucaaauaggauacaucugcaguggaguguuuggugacaauccgcgucccaaagauggaaagggcagcuguaauccagugacuguugauggagcagacgggguuaagggguuuucauacaaauaugguaaugguguuuggauaggaagaacuaaaaguaacagacuuagaaagggguuugagaugauuugggauccuaauggauggacagauaccgacagugauuucucagugaaacaggauguuguggcaauaacugauuggucaggguacaguggaaguuucguucaacauccugaguuaacaggauuggacuguauaagaccuugcuucuggguugaguuagucagaggacugccuagagaaaauacaacaaucuggacuagugggagcagcauuucuuuuuguggcguugauagugauacugcaaacuggucuuggccagacggugcugaguugccguucacuauugacaaguag

SEQ ID NO: 48358 - RNA, 1413 nt, Artificial Sequence; identical to SEQ ID NO: 48228
  derived and/or modified CDS sequence (wt) from neuraminidase__InfluenzaA__ABX58605

SEQ ID NO: 48359 - RNA, 1413 nt, Artificial Sequence; identical to SEQ ID NO: 48132
  derived and/or modified CDS sequence (wt) from neuraminidase__InfluenzaA__ABX58616

SEQ ID NO: 48360 - RNA, 1413 nt, Artificial Sequence; identical to SEQ ID NO: 48147
  derived and/or modified CDS sequence (wt) from neuraminidase__InfluenzaA__ABX58627

SEQ ID NO: 48361 - RNA, 1413 nt, Artificial Sequence; identical to SEQ ID NO: 48192
  derived and/or modified CDS sequence (wt) from neuraminidase__InfluenzaA__ABX58638

SEQ ID NO: 48362 - RNA, 1413 nt, Artificial Sequence
  derived and/or modified CDS sequence (wt) from neuraminidase__InfluenzaA__ABX58682
augaauccaaaucaaaaaauaauaaccauuggaucaaucaguauagcaaucgggauaauuagucuaauguugcaaauaggaaauauuauuucaauaugggcuagucacucaauccaaacuggaagucaaaaccacacuggaauaugcaaccaaagaaucaucacauaugaaaacagcaccugggugaaucacacauauguuaguauuaacaacacuaauguuguugcuggaaaggacaaaacuucagugacauuggccggcaauucaucucuuuguucuaucaguggaugggcuauauacacaaaagacaacagcauaagaauuggcuccaaaggagauguuuuugucauaagagaaccuuucauaucauguucucauuuggaaugcaggaccuuuuuucugacccaaggugcucuauuaaaugacaaacauucaaauggaaccguuaaggaccgaaguccuuauagggccuuaaugagcuguccucuaggugaagcuccguccccauacaauucaaaguuugaaucaguugcauggucagcaagcgcaugccaugauggcaugggcugguuaacaaucggaauuucugguccagacaauggagcuguggcuguacuaaaauacaacggaauaauaacugaaaccauaaaaaguuggaaaaagcgaauauugagaacacaagagucugaaugugucugugugaacgggucauguuucaccauaaugaccgauggcccgaguaauggggccgccucguacaaaaucuucaagaucgaaaaggggaagguuacuaaaucaauagaguuaaaugcacccaauuuucauuaugaggaauguuccuguuacccagacacuggcacaaugauguguguaugcagggacaacuggcaugguucaaaucgaccuugggugucuuuuaaucaaaacuuggauuaucaaauaggauacaucugcaguggaguguucggugacaauccgcgucccaaagauggaaagggcagcuguaauccagugacuguugauggagcagacgggguuaagggguuuucauacaaauaugguaaugguguuuggauaggaagaacuaaaaguaacagacuuagaaagggguuugagaugauuugggauccuaauggauggacagauaccgacagugauuucucagugaaacaggauguuguggcaauaacugauuggucaggguacaguggaaguuucguucaacauccugaguuaacaggauuggacuguauaagaccuugcuucuggguugaguuagucagaggacugccuagagaaaauacaacaaucuggacuagugggagcagcauuucuuuuuguggcguugauagugauacugcaaacuggucuuggccagacggugcugaguugccguucaccauugacaaguag

SEQ ID NO: 48363 - RNA, 1413 nt, Artificial Sequence
  derived and/or modified CDS sequence (wt) from neuraminidase__InfluenzaA__ABX58693
augaacccaaaucaaaagauaauaaccauuggaucaaucaguauagcaaucggaauaauuagucuaauguugcaaauaggaaauauuauuucaauaugggcuagucacucaauccaaacuggaagucaaaacaacacuggaauaugcaaccaaagaaucaucacauaugaaaacagcaccugggugaaucacacauauguuaauauuaacaacacuaauguuguugcuggaaaggacaaaacuucagugacauuggccggcaauucaucucuuuguucuaucaguggaugggcuauauacacaaaagacaacagcauaagaauuggcuccaaaggagauguuuuugucauaagagaaccuuucauaucauguucucacuuggaaugcagaaccuuuuuucugacccaaggcgcucuauuaaaugacaaacauucaaaugggaccguaaaggacagaaguccuuauagggccuuaaugagcuguccucuaggugaagcuccguccccauacaauucaaaguucgaaucaguugcauggucagcaagcgcaugccaugauggcaugggcugguuaacaaucggaauuucugguccagacaauggagcuguggcuguacuaaaauacaacggaauaauaacuggaaccauaaaaaguuggaaaaagcaaauauuaagaacacaagagucugaaugugucuguaugaacgggucauguuucaccauaaugaccgauggcccgaguaauagggccgccucguacaaaauuuucaagaucgaaaaggggaagguuacuaaaucaauagaguugaaugcacccaauuuucauuaugaggaauguuccuguuacccagacacuggcauagugauguguguaugcagggacaacuggcacgguucaaaucgaccuugggugucuuuuaaucaaaacuuggauuaucaaauaggauacaucugcaguggagugcucggugacaauccgcgucccgaagauggagagggcagcugcaauccagugacuguugauggagcagacggaguaaaaggguuuucauacaaauaugauaaugguguuuggauaggaaggaccaaaaguaacagacuuagaaagggguuugagaugauuugggauccuaauggauggacaaauaccgacagugauuucucagugaaacaggauguuguagcaauaacugauuggucaggguacagcggaaguuucguccaacauccugaguuaacaggauuggacuguauaagaccuugcuucuggguugaguuagucagagggcugccuagagaaaauacaacaaucuggacuagugggagcagcauuucuuuuuguggcguuaauagugauacugcaaacuggucuuggccagacggugcugaguugccguucaccauugacaaguag

SEQ ID NO: 48364 - RNA, 1413 nt, Artificial Sequence; identical to SEQ ID NO: 48213
  derived and/or modified CDS sequence (wt) from neuraminidase__InfluenzaA__ABX58704

SEQ ID NO: 48365 - RNA, 1413 nt, Artificial Sequence; identical to SEQ ID NO: 48141
  derived and/or modified CDS sequence (wt) from neuraminidase__InfluenzaA__ABX58715

SEQ ID NO: 48366 - RNA, 1350 nt, Artificial Sequence
  derived and/or modified CDS sequence (wt) from neuraminidase__InfluenzaA__ABY19420
augaauccaaaucagaaaguaauaaccauugggucaaucuguaugguaauuggaauaguuagcuuaauguugcaaauugggaacaugaucucaauaugggucagucauucaauucagacagggaaucaaaaccaaguugagccaaucaucaauacuaauuuucuuacugggaaagcuguggcuucaauaacauuagcgggcaauucaucucuuugcccuauuagaggaugggcuauacacaguaaggacaacaguauaaggauugguuccaagggggauguguuuguuauuagagagccauucaucucaugcucccacuuggaaugcagaacuuucuuuuugacucagggagccuugcugaaugacaagcacuccaacgggacugucaaagacagaagcccucacagaacauuaaugaguuguccugugggugaggcucccuccccauauaacucaagguuugagucuguugcuuggucagcaagugcuugccaugauggcaccaguugguugacaauuggaauuucuggcccggacaauggggcuguggcuguauugaaauacaauggcauaauaacagacaccaucaagagcuggaggaacaacauacugagaacucaagaauccgaaugugcaugcguaaauggcucuugcuuuacuguaaugacugacggaccaaguaaugggcaggcaucauauaagaucuucaaaauggaaaaggggaaaguaaucaaaucagucgaauuggaugcuccuaauuaccacuaugaggaaugcuccuguuauccugaugccggcgaaaucacaugugugugcagagauaauuggcauggcucaaaucggccauggguguccuucaaucaaaaucuggaguaucaaauaggauauauaugcaguggaguuuucggagacaauccacgccccaaugauggaacagguaguugcgguccggugucccauaauggggcauaugggguaaaaggguuuucauuuaaauacggcaaugguguuuggaucgggagaaccaaaagcccuaauuccaggagcggcuuugagaugauuugggauccaaauggguggagugaaacggacaguagcuucucggugaaacaagauauaguagcaauaacugauuggucaggauauagcgggaguuuuguccagcauccagaacugacagguuuagauugcauaagaccuuguuucuggguugaauuaaucagagggcggcccaaagagaguacaguuuggacuagugggagcagcauauccuuuugugguguaaauagugacacugugaguuggucuuggccagacggugcugaguugccauucagcauugacaaguag

SEQ ID NO: 48367 - RNA, 1350 nt, Artificial Sequence
  derived and/or modified CDS sequence (wt) from neuraminidase__InfluenzaA__ABY19421
augaauccaaaucagaagauaauaaccauugggucaaucuguaugguaauuggaauaguuagcuuaauguugcaaauugggaacaugaucucaauaugggucagucauucaauucagacagggaaucaaaaccaaguugagccaaucaucaauacuaauuuucuuacugggaaagcuguggcuucaauaacauuagcgggcaauucaucucuuugcccuauuagaggaugggcuauacacaguaaggacaacaguauaaggauugguuccaagggggauguguuuguuauuagagagccauucaucucaugcucccacuuggaaugcagaacuuucuuuuugacucagggagccuugcugaaugacaagcacuccaacgggacugucaaagacagaagcccucacagaacauuaaugaguuguccugugggugaggcucccuccccauauaacucaagguuugagucuguugcuuggucagcaagugcuugccaugauggcaccaguugguugacaauuggaauuucuggcccggacaauggggcuguggcuguauugaaauacaauggcauaauaacagacaccaucaagagcuggaggaacaacauacugagaacucaagaguccgaaugugcaugcguaaauggcucuugcuuuacuguaaugacugacggaccaaguaaugggcaggcaucauauaagaucuucaaaauggaaaaggggaaaguaauuaaaucagucgaauuggaugcuccuaauuaccacuaugaggaaugcuccuguuauccugaugccggcgaaaucacaugugugugcagagauaauuggcauggcucaaaucggccauggguguccuucaaucaaaaucuggaguaucaaauaggauauauaugcaguggaguuuucggagacaauccacgccccaaugauggaacagguaguugcgguccggugucccauaauggggcauaugggguaaaaggguuuucauuuaaauacggcaaugguguuuggaucgggagaaccaaaagcccuaauuccaggagcggcuuugagaugauuugggauccaaauggguggagugaaacggacaguagcuucucggugaaacaagauauaguagcaauaacugauuggucaggauauagcgggaguuuuguccagcauccagaacugacagguuuagauugcauaagaccuuguuucuggguugaauuaaucagagggcggcccaaagagaguacaguuuggacuagugggagcagcauauccuuuugugguguaaauagugacacugugaguuggucuuggccagacggugcugaguugccauucagcauugacaaguag

SEQ ID NO: 48368 - RNA, 1413 nt, Artificial Sequence
  derived and/or modified CDS sequence (wt) from neuraminidase__InfluenzaA__ABY51020
augaauccaaaucaaaaaauaauaaccauuggaucaaucaguauagcaaucggaauaauuagucuaauguugcaaauaggaaauauuauuucaauaugggcuagucacucaauccaaacuggaagucaaaaccacacuggaauaugcaaccaaagaaucaucacauaugaaaacagcaccugggugaaucacacauauguuaguauuaacaacacuaauguuguugcuggaaaggacaaaacuucagugacauuggccggcaauucaucucuuuguucuaucaguggaugggcuauauacacaaaagacaacagcauaagaauuggcuccaaaggagauguuuuugucauaagagaaccuuucauaucauguucucauuuggaaugcaggaccuuuuuucugacccaaggugcucuauuaaaugacaaacauucaaauggaaccguuaaggaccgaaguccuuauagggccuuaaugagcuguccucuaggugaagcuccguccccauacaauucaaaguuugaaucaguugcauggucagcaagcgcaugccaugauggcaugggcugguuaacaaucggaauuucugguccagacaauggagcuguggcuguacuaaaauacaacggaauaauaacugaaaccauaaaaaguuggaaaaagcgaauauugagaacacaagagucugaaugugucugugugaacgggucauguuucaccauaaugaccgauggcccgaguaauggggccgccucguacaaaaucuucaagaucgaaaaggggaagguuacuaaaucaauagaguuaaaugcacccaauuuucauuaugaggaauguuccuguuacccagacacuggcacagugauguguguaugcagggacaacuggcaugguucaaaucgaccuugggugucuuuuaaucaaaacuuggauuaucaaauaggauacaucugcaguggaguguucggugacaauccgcgucccaaagauggaaagggcagcuguaauccauugacuguugauggagcagacgggguuaagggguuuucauacaaauaugguaaugguguuuggauaggaagaacuaaaaguaacagacuuagaaagggguuugagaugauuugggauccuaauggauggacagauaccgacagugauuucucagugaaacaggauguuguggcaauaacugauuggucagguuacaguggaaguuucguucaacauccugaguuaacaggauuggacuguauaagaccuugcuucuggguugaguuagucagaggacugccuagagaaaauacaacaaucuggacuagugggagcagcauuucuuuuuguggcguugauagugauacugcaaacuggucuuggccagacggugcugaguugccguucaccauugacaaguag

SEQ ID NO: 48369 - RNA, 1410 nt, Artificial Sequence
  derived and/or modified CDS sequence (wt) from neuraminidase__InfluenzaA__ABY51031
augaauccaaaucaaaagauaauaacaauuggcucuguuucucucaccauuuccacaauaugcuucuucaugcaaacugccaucuugauaacuacuguaacauugcauuucaagcaauaugaauucaacucccccccaaacaaccaagugaugcugugugaaccaacaauaauagaaagaaacauaacagagauaguguaucugaccaacaccaccauagagaaggaaauaugccccaaacuagcagaauacagaaauuggucaaagccgcaaugugacauuacaggauuugcaccuuuuucuaaggacaauucgauuaggcuuuccgcugguggggacaucugggugacaagagaaccuuaugugucaugcgauccugacaaguguuaucaauuugcccuuggacagggaacaacacuaaacaacgugcauucaaaugacacaguacgugauaggaccccuuaucggacccuauugaugaaugaguuagguguuccuuuucaucuggggaccaagcaagugugcauagcaugguccagcucaaguugucacgauggaaaagcauggcugcauguuuguauaacgggggaugauaaaaaugcaacugcuagcuucauuuacaaugggaggcuuguagauaguauuguuucaugguccaaagaaauccucaggacccaggagucagaaugcguuuguaucaauggaacuuguacaguaguaaugacugaugggagugcuucaggaaaagcugauacuaaaauacuauucauugaggaggggaaaaucguucauacuagcacauugucaggaagugcucagcaugucgaggagugcuccugcuauccucgauauccuggugucagaugugucugcagagacaacuggaaaggcuccaauaggcccaucguagauauaaacauaaaggaucauagcauuguuuccaguuauguguguucaggacuuguuggagacacacccagaaaaaacgacagcuccagcaguagccauuguuuggauccuaacaaugaagaagguggucauggagugaaaggcugggccuuugaugauggaaaugacguguggaugggaagaacgaucagcgagaagucacgcuuaggguaugaaaccuucaaagucauugaaggcugguccaacccuaaguccaaauugcagauaaauaggcaagucauaguugacagagguaauagguccgguuauucugguauuuucucuguugaaggcaaaagcugcaucaaucggugcuuuuauguggaguugauaaggggaagaaaagaggaaacugaagucuuguggaccucaaacaguauuguuguguuuuguggcaccucagguacauauggaacaggcucauggccugauggggcggacaucaaucucaugccuauauaa

SEQ ID NO: 48370 - RNA, 1413 nt, Artificial Sequence
  derived and/or modified CDS sequence (wt) from neuraminidase__InfluenzaA__ABY51042
augaacccaaaucaaaagauaauaaccauuggaucaaucaguauagcaaucggaauaauuagucuaauguugcaaauaggaaauauuauuucaauaugggcuagucacucaauccaaacuggaagucaaaaccacacugggauaugcaaccaaagaaucaucacauaugaaaacagcaccugggugaaucacacauauguuaauauuaacaacacuaauguuguugcuggaaaggacaaaacuucagugacauuggccggcaauucaucucuuuguucuaucaguggaugggcuauauacacaaaagacaacagcauaagaauuggcuccaaaggagauguuuuugucauaagagaaccuuucauaucauguucucacuuggaaugcagaaccuuuuuucugacccaaggcgcucuauuaaaugacaaacauucaaaugggaccguaaaggacagaaguccuuauagggccuuaaugagcuguccucuaggugaagcuccguccccauacaauucaaaguucgaaucaguugcauggucagcaagcgcaugccaugauggcaugggcugguuaacaaucggaauuucugguccagacaauggagcuguggcuguacuaaaauacaacggaauaauaacuggaaccauaaaaaguuggaaaaagcaaauauuaagaacacaagagucugaaugugucuguaugaacgggucauguuucaccauaaugaccgauggcccgaguaauagggccgccucguacaaaauuuucaagaucgaaaaggggaagguuacuaaaucaauagaguugaaugcacccaauuuucauuaugaggaauguuccuguuacccagacacuggcauagugauguguguaugcagggacaacuggcaugguucaaaucgaccuugggugucuuuuaaucaaaacuuggauuaucaaauaggauacaucugcaguggaguguucggugacaauccgcgucccaaagauggagagggcagcugcaauccagugacuguugauggagcagacggaguaaaaggguuuucauacaaauaugauaaugguguuuggauaggaaggaccaaaaguaacagacuuagaaagggguuugagaugauuugggauccuaauggauggacaaauaccgacagugauuucucagugaaacaggauguugucgcaauaacugauuggucaggguacagcggaaguuucguccaacauccugaguuaacaggauuggacuguauaagaccuugcuucuggguugaguuagucagagggcugccuagagaaaauacaacaaucuggacuagugggagcagcauuucuuuuuguggcguuaauagugauacugcaaacuggucuuggccagacggugcugaguugccguucaccauugacaaguag

SEQ ID NO: 48371 - RNA, 1413 nt, Artificial Sequence
  derived and/or modified CDS sequence (wt) from neuraminidase__InfluenzaA__ABY51053
augaacccaaaucaaaagauaauaaccauuggaucaaucaguauagcaaucggaauaauuagucuaauguugcaaauaggaaauauuauuucaauaugggcuagucacucaauccaaacuggaagucaaaacaacacuggaauaugcaaccaaagaaucaucacauaugaaaacagcaccugggugaaucacacauauguuaauauuaacaacacuaauguuguugcuggaaaggacaaaacuucagugacauuggccggcaauucaucucuuuguucuaucaguggaugggcuauauacacaaaagacaacagcauaagaauuggcuccaaaggagauguuuuugucauaagagaaccuuucauaucauguucucacuuggaaugcagaaccuuuuuucugacccaaggcgcucuauuaaaugacaaacauucaaaugggaccguaaaggacagaaguccuuauagggccuuaaugagcuguccucuaggugaagcuccguccccauacaauucaaaguucgaaucaguugcauggucagcaagcgcaugccaugauggcaugggcugguuaacaaucggaauuucugguccagacaauggagcuguggcuguacuaaaauacaacggaauaauaacuggaaccauaaaaaguuggaaaaagcaaauauuaagaacacaagagucugaaugugucuguaugaacggaucauguuucaccauaaugaccgauggcccgaguaauagggccgccucguacaaaauuuucaagaucgaaaaggggaagguuacuaaaucaauagaguugaaugcacccaauuuucauuaugaggaauguuccuguuacccagacacuggcauagugauguguguaugcagggacaacuggcaugguucaaaucgaccuugggugucuuuuaaucaaaacuuggauuaucaaauaggauacaucugcaguggaguguucggugacaauccgcgucccgaagauggagagggcagcugcaauccagugacuguugauggaacagacggaguaaaaggguuuucauacaaauaugauaaugguguuuggauaggaaggaccaaaaguaacagacuuagaaagggguuugagaugauuugggauccuaauggauggacaaauaccgacagugauuucucagugaaacaggauguuguagcaauaacugauuggucaggguacagcggaaguuucguccaacauccugaguuaacaggauuggacuguauaagaccuugcuucuggguugaguuagucagagggcugccuagagaaaauacaacaaucuggacuagugggagcagcauuucuuuuuguggcguuaauagugauacugcaaacuggucuuggccagacggugcugaguugccguucaccauugacaaguag

SEQ ID NO: 48372 - RNA, 1413 nt, Artificial Sequence
  derived and/or modified CDS sequence (wt) from neuraminidase__InfluenzaA__ABY51064
augaauccaaaucaaaaaauaauaaccauuggaucaaucaguauagcaaucggaauaauuagucuaauguugcaaauaggaaauauuauuucaauaugggcuagucacucaauccaaacuggaagucaaaaccacacuggaauaugcaaccaaaggaucaucacauaugaaaacagcaccugggugaaucacacauauguuaauauuaacaacacuaauguuguugcuggaaaggacaaaacuucagugacacuggccggcaauucaucucuuuguucuauuaguggaugggcuauauacacaaaagacaacagcauaagaauuggcuccaaaggagauguuuuugucauaagagaaccuuucauaucauguucucacuuggaaugcagaaccuuuuuucugacccaaggugcucuauuaaaugacaaacauucaaauggaaccguuaaggacagaaguccuuauagggccuuaaugagcuguccucuaggugaagccccguccccauacaauucaaaguuugaaucaguugcauggucagcaagcgcaugccaugauggcaagggcugguuaacaaucggaauuucugguccagacaauggagcuguggcuguacuaaaauacaacggaauaauaacugaaaccauaaaaaguuggaacaagcaaauauugagaacacaagagucugaauguguuugugugaacgggucauguuucaccauaaugaccgauggcccgaguaauggggccgccucguacaaaaucuucaagaucgaaaaggggaagguuacuaaaucaauagaguugaaugcacccaauuuucauuaugaggaauguuccuguuacccagacacuggcacagugauguguguaugcagggacaacuggcaugguucaaaucgaccuugggugucuuuuaaucaaaacuuggauuaucaaauuggauacaucugcaguggaguuuucggugacaauccgcgucccaaagauggaaggggcagcuguaauccagugacuguugauggagcagacggaguuaagggguuuucauacaaauaugguaaugguguuuggauaggaaggacuaaaaguaacagacuuagaaagggguuugagaugauuugggauccuaauggauggacagauaccgacagucauuucucagugaaacaggauguuguggcaauaacugauuggucaggguacagcggaaguuucguccaacauccugaguuaacaggauuggacuguauaaaaccuugcuucuggguugaguuagucagaggacugccuagagaaaauacaacaaucuggacuagugggagcagcauuucuuuuuguggcguugauagugauacugcaaacuggucuuggccagacggugcugaguugccguucaucauugacaaguag

SEQ ID NO: 48373 - RNA, 1413 nt, Artificial Sequence; identical to SEQ ID NO: 48045
  derived and/or modified CDS sequence (wt) from neuraminidase__InfluenzaA__ABY51075

SEQ ID NO: 48374 - RNA, 1413 nt, Artificial Sequence
  derived and/or modified CDS sequence (wt) from neuraminidase__InfluenzaA__ABY51086
augaauccaaaucaaaaaauaauaaccauuggaucaaucaguauagcaaucggaauaauuaguauaauguugcaaauaggaaauauuauuucaauaugggcuagucacucaauccaaacuggaagucaaaaccacacuggaauaugcaaccaaagaaucaucacauaugaaaacagcaccugggugaaucacacauauguuaauauuaacaacacuaauguuguugcugaaaaggacaaaacuucagugacauuggccggcaauucaucucuuuguucuaucaguggaugggcuauauacacaaaagacaacagcauaagaauuggcuccaagggagauguuuuugucauaagagaaccuuucauaucauguucucauuuggaaugcaggaccuuuuuucugacccaaggugcucuauuaaaugacaaacauucaaauggaaccguuaaggacagaaguccuuauagggccuuaaugagcuguccucuaggugaagcuccguccccauacaauucaaaguuugaaucaguugcauggucagcaagcgcaugccaugauggcaugggcugguuaacaaucggaauuucugguccagacaauggagcuguggcuguacuaaaauacaacggaauaauaacugaaaccauaaaaaguuggaaaaagcgaauauugagaacacaagagucugaaugugucugugugaacgggucuuguuucaccauaaugaccgauggcccuaguaauggggccgccucguacaaaaucuucaagaucgaaaagggaaagguuacuaaaucaauagaguuaaaugcacccaauuuucauuaugaggaauguuccuguuacccagacacuggcacagugauguguguaugcagagacaacuggcaugguucaaaucgaccuugggugucuuuuaaucaaaacuuggauuaucaaauaggauacaucugcaguggaguguucggugacaauccgcgucccaaagauggaaagggcagcuguaauccagugacuguugauggagcagacggaauuaagggguuuucauacaaauaugguaaugguguuuggauaggaagaacuaaaaguaacagacuuagaaagggguuugagaugauuugggauccuaauggauggacaaauaccgacagugauuucucagugaaacaggauguuguggcaauaacugauuggucaggguacaguggaaguuucguucaacauccugaguuaacaggauuggacuguauaagaccuugcuucuggguugaauuagucagaggacugccuagagaaaauacaacaaucuggacuagugggagcagcauuucuuuuuguggcguugauggugauacugcaaacuggucuuggccagacggugcugaguugccguucaccauugacaaauag

SEQ ID NO: 48375 - RNA, 1413 nt, Artificial Sequence
  derived and/or modified CDS sequence (wt) from neuraminidase__InfluenzaA__ABY51097
augaauccaaaucaaaaaauaauaaccauuggaucaaucaguauagcaaucgggauaauuagucuaauguugcaaauaggaaauauuauuucaauaugggcuagucacucaauccaaacuggaagucaaaaccacacuggaauaugcaaccaaagaaucaucacauaugaaaacagcaccugggugaaucacacauauguuaguauuaacaacacuaauguuguugcuggaaaggacaaaacuucagugacauuggccggcaauucaucucuuuguucuaucaguggaugggcuauauacacaaaagacaacagcauaagaauuggcuccaaaggagauguuuuugucauaagagaaccuuucauaucauguucucauuuggaaugcaggaccuuuuuucugacccaaggugcucuauuaaaugacaaacauucaaauggaaccguuaaggaccgaaguccuuauagggccuuaaugagcuguccucuaggugaagcuccguccccauacaauucaaaguuugaaucaguugcauggucagcaagcgcaugccaugauggcaugggcugguuaacaaucggaauuucugguccagacaauggagcuguggcuguacuaaaauacaacggaauaauaacugaaaccauaaaaaguuggaaaaagcgaauauugagaacacaagagucugaaugugucugugugaacgggucauguuucaccauaaugaccgauggcccgaguaauggggccgccucguacaaaaucuucaagaucgaaaaggggaagguuacuaaaucaguagaguuaaaugcacccaauuuucauuaugaggaauguuccuguuacccagacacuggcacagugauguguguaugcagggacaacuggcaugguucaaaucgaccuugggugucuuuuaaucaaaacuuggauuaucaaauaggauacaucugcaguggaguguuuggugacaauccgcgucccaaagauggaaagggcagcuguaauccagugacuguugauggagcagacgggguuaagggguuuucauacaaauaugguaaugguguuuggauaggaagaacuaaaaguaacagacuuagaaagggguuugagaugauuugggauccuaauggauggacagauaccgacagugauuucucagugaaacaggauguuguggcaauaacugauuggucaggguacaguggaaguuucguucaacauccugaguuaacaggauuggacuguauaagaccuugcuucuggguugaguuagucagaggacugccuagagaaaauacaacaaucuggacuagugggagcagcauuucuuuuuguggcguugauagugauacugcaaacuggucuuggccagacggugcugaguugccguucacuauugacaaguag

SEQ ID NO: 48376 - RNA, 1413 nt, Artificial Sequence
  derived and/or modified CDS sequence (wt) from neuraminidase__InfluenzaA__ABY51108
augaauccaaaucaaaaaauaauaaccauuggaucaaucaguauagcaaucggaauaauuagucuaauguugcaaauaggaaauauuauuucaauaugggcuagucacucaauccaaacuggaagucaaaaccacacuggaauaugcaaccaaagaaucaucacauaugaaaacagcaccugggugaaucacacauauguuaguauuaacaacacuaauguuguugcuggaaaggacaaaacuucagugacauuggccggcaauucaucucuuuguucuaucaguggaugggcuauauacacaaaagacaacagcauaagaauuggcuccaaaggagauguuuuugucauaagagaaccuuucauaucauguucucauuuggaaugcaggaccuuuuuccugacccaaggugcucuauuaaaugacaaacauucaaauggaaccguuaaggaccgaaguccuuauagggccuuaaugagcuguccucuaggugaagcuccguccccauacaauucaaaguuugaaucaguugcauggucagcaagcgcaugccaugauggcaugggcugguuaacaaucggaauuucugguccagacaauggagcuguggcuguacuaaaauacaacggaauaauaacugaaaccauaaaaaguuggaaaaagcgaauauugagaacacaagagucugaaugugucugugugaacgggucauguuucaccauaaugaccgauggcccgaguaauggggccgccucguacaaaaucuucaagaucgaaaaggggaagguuacuaaaucaauagaguuaaaugcacccaauuuucauuaugaggaauguuccuguuacccagacacuggcacagugauguguguaugcagggacaacuggcaugguucaaaucgaccuugggugucuuuuaaucaaaacuuggauuaucaaauaggauacaucugcaguggaguguucggugacaauccgcgucccaaagauggaaagggcagcuguaauccagugacuguugauggagcagacgggguuaagggguuuucauacaaauaugguaaugguguuuggauaggaagaacuaaaaguaacagacuuagaaagggguuugagaugauuugggauccuaauggauggacagauaccgacagugauuucucagugaaacaggauauuguggcaauaacugauuggucagguuacaguggaaguuucguucaacauccugaguuaacaggauuggacuguauaagaccuugcuucuggguugaguuagucagaggacugccuagagaaaauacaacaaucuggacuagugggagcagcauuucuuuuuguggcguugauagugauacugcaaacuggucuuggccagacggugcugaguugccguucaccauugacaaguag

SEQ ID NO: 48377 - RNA, 1413 nt, Artificial Sequence; identical to SEQ ID NO: 48043
  derived and/or modified CDS sequence (wt) from neuraminidase__InfluenzaA__ABY51119

SEQ ID NO: 48378 - RNA, 1410 nt, Artificial Sequence; identical to SEQ ID NO: 48216
  derived and/or modified CDS sequence (wt) from neuraminidase__InfluenzaA__ABY51130

SEQ ID NO: 48379 - RNA, 1413 nt, Artificial Sequence; identical to SEQ ID NO: 48093
  derived and/or modified CDS sequence (wt) from neuraminidase__InfluenzaA__ABY51141

SEQ ID NO: 48380 - RNA, 1413 nt, Artificial Sequence
  derived and/or modified CDS sequence (wt) from neuraminidase__InfluenzaA__ABY51152
augaauccaaaucaaaaaauaauaaccauuggaucaaucaguauagcaaucgggauaauuagucuaauguugcaaauaggaaauauuauuucaauaugggcuagucacucaauccaaacuggaagucaaaaccacacuggaauaugcaaccaaagaaucaucacauaugaaaacagcaccugggugaaucacacauauguuaguauuaacaacacuaauguuguugcuggaaaggacaaaacuucagugacauuggccggcaauucaucucuuuguucuaucaguggaugggcuauauacacaaaagacaacagcauaagaauuggcuccaaaggagauguuuuugucauaagagaaccuuucauaucauguucucauuuggaaugcaggaccuuuuuucugacccaaggugcucuauuaaaugacaaacauucaaauggaaccguuaaggaccgaaguccuuauagggccuuaaugagcuguccucuaggugaagcuccguccccauacaauucaaaguuugaaucaguugcauggucagcaagcgcaugccaugauggcaugggcugguuaacaaucggaauuucugguccagacaauggagcuguggcuguacuaaaauacaacggaauaauaacugaaaccauaaaaaguuggaaaaagcgaauauugagaacacaagagucugaaugugucugugugaacgggucauguuucaccauaaugaccgauggcccgaguaauggggccgccucguacaaaaucuucaaaaucgaaaaggggaagguuacuaaaucaauagaguuaaacgcacccaauuuucauuaugaggaauguuccuguuacccagacacuggcacagugauguguguaugcagggacaacuggcaugguucaaaucgaccuugggugucuuuuaaucaaaacuuggauuaucaaauaggauacaucugcaguggaguguucggugacaauccgcgucccaaagauggaaagggcagcuguaauccagugacuguugauggagcagacgggguuaagggguuuucauacaaauaugguaaugguguuuggauaggaagaacuaaaaguaacagacuuagaaagggguuugagaugauuugggauccuaauggauggacagauaccgacagugauuucucagugaaacaggauguuguggcaauaacugauuggucaggguacaguggaaguuucguucaacauccugaguugacaggauuggacuguauaagaccuugcuucuggguugaguuagucagaggacugccuagagaaaauacaacaaucuggacuagugggagcagcauuucuuuuuguggcguuaauagugauacugcaaacuggucuuggccagacggugcugaguugccguucaccauugacaaguag

SEQ ID NO: 48381 - RNA, 1413 nt, Artificial Sequence
  derived and/or modified CDS sequence (wt) from neuraminidase__InfluenzaA__ABY51163
augaauccaaaucaaaaaauaauaaccauuggaucaaucaguauagcaaucggaauaauuagucuaauguugcaaauaggaaauauuauuucaauaugggcuagucacucaauccaaacuggaagucaaaaccacacuggaauaugcaaccaaagaaucaucacauaugaaaacagcaccugggugaaucacacauauguuaauauuaacaacacuaauguuguugcuggaaaggacaaaacuucagugauauuggccggcaauucaucucuuuguucuaucaguggaugggcuauauacacaaaagacaacagcauaagaauuggcuccaaaggagauguuuuugucauaagagaaccuuucauaucauguucucauuuggaauguaggaccuuuuuucugacccaaggugcucuauuaaaugacaaacauucaaauggaaccguuaaggacagaaguccuuauagggccuuaaugagcuguccucuaggugaagcuccguccccauauaauucaaaguuugaaucaguugcauggucagcaagcgcaugccaugauggcaugggcugguuaacaaucggaauuucugguccagacaauggagcuguggcuguacuaaaauacaauggaauaauaacugaaaccauaaaaaguuggaaaaagcgaauauugagaacacaagagucugaaugugucugugugaacgggucauguuucaccauaaugaccgauggcccgaguaauggggccgccucguacaaaaucuucaagaucgaaaagggaaagguuacuaaaucaauagaguuaaaugcacccaauuuucauuaugaggaauguuccuguuacccagacacuggcacagugauguguguaugcagggacaacuggcaugguucaaaucgaccuugggugucuuuuaaucaaaacuuggauuaccaaauaggauacaucugcaguggaguguucggugacaauccgcgucccaaagauggaaagggcagcuguaauccagugacuguugauggagcagacggaguuaaaggauuuucauacaaauaugguaaugguguuuggauaggaagaacuaaaaguaacagacuuagaaagggguuugagaugauuugggauccuaauggauggacagauaccgacagugauuucucagugaaacaggauguuguggcaauaacugauuggucaggguacaguggaaguuucguucaacauccugaguuaacaggauuggacuguauaagaccuugcuucuggguugaauuagucagaggacugccuagagaaaauacaacaaucuggacuagugggagcagcauuucuuuuuguggcguugauagugauacugcaaacuggucuuggccagacggugcugaguugccguucaccauugacaaauag

SEQ ID NO: 48382 - RNA, 1413 nt, Artificial Sequence
  derived and/or modified CDS sequence (wt) from neuraminidase__InfluenzaA__ABY51174
augaauccaaaucaaaaaaugauaaccauuggaucaaucaguauagcaauuggaauaauuagucuaauguugcaaauaggaaauauuauuucaauaugggcuagucacucaauccaaacuggaagucaaaaccacacuggaauaugcaaccaaagaaucaucacauaugaaaacagcaccugggugaaucacacauauguuaauauuaacaacacuaauguuguugcuggaaaggacaaaacuucagugacauuggccggcaauucaucucuuuguucuaucaguggaugggcuauauacacaaaagacaacagcauaagaauuggcuccaaaggagauguuuuugucauaagagaaccuuucauaucauguucucauuuggaaugcaggaccuuuuuucugacccaaggugcucuauuaaaugacaaacauucaaauggaaccguuaaggacagaaguccuuauagggccuuaaugagcuguccucuaggugaagcuccguccccauacaauucaaaguuugaaucaguugcauggucagcaagcgcaugccaugauggcaugggcugguuaacaaucgggauuucugguccagacaauggagcuguggcuguacuaaaauacaacggaauaauaacugaaaccauaaaaaguuggaaaaagcgaauauugagaacacaggagucugaaugugucugugugaacgggucauguuucaccauaaugaccgauggcccgaguaauggggccgccucguacaaaaucuucaagaucgaaaaggggaagguuacuaaaucaauagaguuaaaugcacccaauuuucauuaugaggaauguuccuguuacccagacacuggcacagugauguguguaugcagggauaacuggcaugguucaaaucgaccuugggugucuuuuaaucaaaacuuggauuaucaaguaggauacaucugcaguggaguguucggugacaauccgcgucccaaagauggaaagggcagcuguaauccaaugacuguugauggagcagacggaguuaagggguuuucauacaaauaugguaaugguguuuggauaggaaggacuaaaaguaacaaacuuagaaagggguuugagaugauuugggauccuaauggauggacagauaccgacagugauuucucagugaaacaggauguuguggcaauaacugauuggucaggguacaguggaaguuucguucaacauccugaguuaacaggauuggacuguauaagaccuugcuucuggguugaguuagucagaggacugccuagagaaaauacaacaaucuggacuagugggagcagcauuucuuuuuguggcguugauagugauacugcaaacuggucuuggccagacggugcugaguugccguucaccauugacaaauag

SEQ ID NO: 48383 - RNA, 1413 nt, Artificial Sequence; identical to SEQ ID NO: 48118
  derived and/or modified CDS sequence (wt) from neuraminidase__InfluenzaA__ABY51185

SEQ ID NO: 48384 - RNA, 1413 nt, Artificial Sequence
  derived and/or modified CDS sequence (wt) from neuraminidase__InfluenzaA__ABY51196
augaauccaaaucaaaaaauaauaaccauuggaucaaucaguauagcaauuggaauaauuagucuaauguugcaaauaggaaauauuauuucaauaugggcuagucacucaauccaaacuggaagucaaaaccacacuggaauaugcaaccaaagaaucaucacauaugaaaacagcaccugggugaaucacacauauguuaauauuaacaacacuaauguuguugcuggaaaggacaaaacuucagugacauuggccggcaauucaucucuuuguucuaucaguggaugggcuauauacacaaaagacaacagcauaagaauuggcuccaaaggagauguuuuugucauaagagaaccuuucauaucauguucucauuuggaaugcaggaccuuuuuucugacccaaggugcucuauuaaaugacaaacauucaaauggaaccguuaaggacagaaguccuuauagggccuuaaugagcuguccucuaggugaagcuccguccccauacaauucaaaguuugaaucaguugcauggucagcaagcgcaugccaugauggcaugggcugguuaacaaucgggauuucugguccagacaauggagcuguggcuguacuaaaauacaacggaauaauaacugaaaccauaaaaaguuggaaaaagcgaauauugagaacacaggagucugaaugugucugugugaaugggucauguuucaccauaaugaccgauggcccgaguaauggggccgccucguacaaaaucuucaagaucgaaaaggggaagguuacuaaaucaauagaguuaaaugcacccaauuuucauuaugaggaauguuccuguuacccagacacuggcacagugauguguguaugcagggauaacuggcaugguucaaaucgaccuugggugucuuuuaaucaaaacuuggauuaucaaguaggauacaucugcaguggaguguucggugacaauccgcgucccaaagauggaaagggcagcuguaauccaaugacuguugauggagcagacggaguuaagggguuuucauacaaauaugguaaugguguuuggauaggaaggacuaaaaguaacaaacuuagaaagggguuugagaugauuugggauccuaauggauggacagauaccgacagugauuucucagugaaacaggauguuguggcaauaacugauuggucaggguacaguggaaguuucguucaacauccugaguuaacaggauuggacuguauaagaccuugcuucuggguugaguuagucagaggacugccuagagaaaauacaacaaucuggacuagugggagcagcauuucuuuuuguggcguugauagugauacugcaaacuggucuuggccagacggugcugaguugccguucaccauugacaaauag

SEQ ID NO: 48385 - RNA, 1410 nt, Artificial Sequence; identical to SEQ ID NO: 48090
  derived and/or modified CDS sequence (wt) from neuraminidase__InfluenzaA__ABY51229

SEQ ID NO: 48386 - RNA, 1413 nt, Artificial Sequence
  derived and/or modified CDS sequence (wt) from neuraminidase__InfluenzaA__ABY51240
augaauccaaaucaaaaaauaauaaccauuggaucaaucaguauagcaaucgggauaauuagucuaauguugcaaauaggaaauauuauuucaguaugggcuagucacucaauccaaacuggaagucaaaaccacacuggaauaugcaaccaaagaaucaucacauaugaaaacagcaccugggugaaucacacauauguuaguauuaacaacacuaauguuguugcuggaaaggacaaaacuucagugacauuggccggcaauucaucucuuuguucuaucaguggauggucuauauacacaaaagacaacagcauaagaauuggcuccaaaggagauguuuuugucauaagagaaccuuucauaucauguucucauuuggaaugcaggaccuuuuuucugacccaaggugcucuauuaaaugacaaacauucaaauggaaccguuaaggaccgaaguccuuauagggccuuaaugagcuguccucuaggugaagcuccguccccauacaauucaaaguuugaaucaguugcauggucagcaagcgcaugccaugauggcaugggcugguuaacaaucggaauuucugguccagacaauggagcuguggcuguacuaaaauacaacggaauaauaacugaaaccauaaaaaguuggaaaaagcgaauauugagaacacaagagucugaaugugucugugugaacgggucauguuucaccauaaugaccgauggcccgaguaauggggccgccucguacaaaaucuucaagaucgaaaaggggaagguuacuaaaucaauagaguuaaaugcacccaauuuucauuaugaggaauguuccuguuacccagacacuggcacagugauguguguaugcagggacaacuggcaugguucaaaucgaccuugggugucuuuuaaucaaaacuuggauuaucaaauaggauacaucugcaguggaguguuuggugacaauccgcgucccaaagauggaaagggcagcuguaauccagugacuguugauggagcagacgggguuaagggguuuucauacaaauaugguaaugguguuuggauaggaagaacuaaaaguaacagacuuagaaagggguuugagaugauuugggauccuaauggauggacagauaccgacagugauuucucagugaaacaggauguuguggcaauaacugauuggucaggguacaguggaaguuucguucaacauccugaguuaacaggauuggacuguauaagaccuugcuucuggguugaguuagucagaggacugccuagagaaaauacaacaaucuggacuagugggagcagcauuucuuuuuguggcguugauagugauacugcaaacuggucuuggccagacggugcugaguugccguucacuauugacaaguag

SEQ ID NO: 48387 - RNA, 1413 nt, Artificial Sequence
  derived and/or modified CDS sequence (wt) from neuraminidase__InfluenzaA__ABY51251
augaauccaaaucaaaaaauaauaaccauuggaucaaucaguauagcaauuggaauaauuagucuaauguugcaaauaggaaauauuauuucaauaugggcuagucacucaauccaaacuggaagucaaaaccacacuggaauaugcaaccaaagaaucaucacauaugaaaacagcaccugggugaaucacacauauguuaauauuaacaacacuaauguuguugcuggaaaggacaaaacuucagugacauuggccggcaauucaucucuuuguucuaucaguggaugggcuauauacacaaaagacaacagcauaagaauuggcuccaaaggagauguuuuugucauaagagaaccuuucauaucauguucucauuuggaaugcaggaccuuuuuucugacccaaggugcucuauuaaaugacaaacauucaaauggaaccguuaaggacagaaguccuuauagggccuuaaugagcuguccucuaggugaagcuccguccccauacaauucaaaguuugaaucaguugcauggucagcaagcgcaugccaugauggcaugggcugguuaacaaucgggauuucugguccagacaauggagcuguggcuguacuaaaauacaacggaauaauaacugaaaccauaaaaaguuggaaaaagcgaauauugagaacacaggagucugaaugugucugugugaacgggucauguuucaccauaaugaccgauggcccgaguaauggggccgccucguacaaaaucuucaagaucgaaaaggggaagguuacuaaaucaauagaguuaaaugcacccaauuuucauuaugaggaauguuccuguuacccagacacuggcacagugauguguguaugcagggauaacuggcaugguucaaaucgaccuugggugucuuuuaaucaaaacuuggauuaucaaguaggauacaucugcaguggaguguucggugacaauccgcgucccaaagauggaaagggcagcuguaauccaaugacuguugauggagcagacggaguuaagggguuuucauacaaauaugguaaugguguuuggauaggaaggacuaaaaguaacaaacuuagaaagggguuugagaugauuugggauccuaauggauggacagauaccgacagugauuucucagugaaacaggauguuguggcaauaaccgauuggucaggguacaguggaaguuucguucaacauccugaguuaacaggauuggacuguauaagaccuugcuucuggguugaguuaguuagaggacugccuagagaaaaugcaacaaucuggacuagugggagcagcauuucuuuuuguggcguugauagugauacugcaaacuggucuuggccagacggugcugaguugccguucaccauugacaaauag

SEQ ID NO: 48388 - RNA, 1413 nt, Artificial Sequence
  derived and/or modified CDS sequence (wt) from neuraminidase__InfluenzaA__ABY51262
augaauccaaaucaaaaaauaauaaccauuggaucaaucaguauagcaaucgggauaauuagucuaauguugcaaauaggaaauauuauuucaauaugggcuagucacucaauccaaacuggaagucaaaaccacacuggaauaugcaaccaaagaaucaucacauaugaaaacagcaccugggugaaucacacauauguuaguauuaacaacacuaauguuguugcuggaaaggacaaaacuucagugacauuggccggcaauucaucucuuuguucuaucaguggaugggcuauauacacaaaagacaacagcauaagaauuggcuccaaaggagauguuuuugucauaagagaaccuuucauaucauguucucauuuggaaugcaggaccuuuuuucugacccaaggugcucuauuaaaugacaaacauucaaauggaaccguuaaggaccgaaguccuuauagggccuuaaugagcuguccucuaggugaagcuccguccccauacaauucaaaguuugaaucaguugcauggucagcaagcgcaugccaugauggcaugggcugguuaacaaucggaauuucugguccagacaauggagcuguggcuguacuaaaauacaacggaauaauaacugaaaccauaaaaaguuggaaaaagcgaauauugagaacacaagagucugaaugugucugugugaacgggucauguuucaccauaaugaccgauggcccgaguaauggggccgccucguacaaaaucuucaagaucgaaaaggggaagguuacuaaaucaauagaguuaaaugcacccaauuuucauuaugaggaauguuccuguuacccagacacuggcacagugauguguguaugcagggacaacuggcaugguucaaaucgaccuugggugucuuuuaaucaaaacuuggauuaucaaauaggauacaucugcaguggaguguucggugacaauccgcgucccaaagauggaaagggcagcuguaauccagugacuguugauggagcagacgggguuaaaggguuuucauacaaauaugguaaugguguuuggauaggaagaacuaaaaguaacagacuuagaaagggguuugagaugauuugggauccuaauggauggacagauaccgacagugauuucucagugaaacaggauguuguggcaauaacugauuggucaggguacaguggaaguuucguucaacauccugaguuaacaggauuggacuguauaagaccuugcuucuggguugaguuagucagaggacugccuagagaaaaugcaacaaucuggacuagugggagcagcauuucuuuuuguggcguugauagugauacugcaaacuggucuuggccagacggugcugaguugccguucaccauugacaaguag

SEQ ID NO: 48389 - RNA, 1410 nt, Artificial Sequence; identical to SEQ ID NO: 48061
  derived and/or modified CDS sequence (wt) from neuraminidase__InfluenzaA__ABY51273

SEQ ID NO: 48390 - RNA, 1350 nt, Artificial Sequence
  derived and/or modified CDS sequence (wt) from neuraminidase__InfluenzaA__ABY76285
augaauccaaaucagaagauaauaaccaucggaucaaucuguaugguaauuggaauaguuagcuuaauguuacaaauugggaacaugaucucaauaugggucagucauucaauucagacagggaaucaacgccaagcugaaccaaucagcaauacuaaauuucuuacugagaaagcuguggcuucaguaacauuagcgggcaauucaucucuuugccccauuagcggaugggcuguauacaguaaggacaacaguauaaggaucgguuccaagggggauguguuuguuauaagagagccguucaucucaugcucccacuuggaaugcagaacuuucuuuuugacucagggagccuugcugaaugacaagcacuccaaugggacugucaaagacagaagcccucacagaacauuaaugaguuguccugugggugaggcucccuccccauauaacucaagguuugagucuguugcuuggucagcaagugcuugccaugauggcaccaguugguugaccauuggaauuucugguccagacaauggggcuguggcuguauugaaauacaauggcauaauaacagacaccaucaagaguuggaggaacaacauacugagaacccaagagucugaaugugcauguguaaauggcucuugcuuuacuguaaugacugauggaccaaguaaugggcaggcaucauauaagaucuucaaaauggaaaaagggaaagugguuaaaucagucgaauuggaugcuccuaauuaucacuaugaggagugcuccuguuauccugaugccggcgaaaucacaugugugugcagggauaauuggcauggcucaaauaggccauggguaucuuucaaucaaaauuuggaguaucaaauaggauauauaugcaguggaguuuucggagacaauccacgccccaaugauggaacagguaguugugguccgguguccccuaacggggcauaugggguaaaaggguuuucauuuaaauacggcaaugguguuuggauugggagaaccaaaagcacuaauuccaggagcggcuuugaaaugauuugggauccaaauggguggacuggaacggacaguagcuuuucggugaagcaagauauuguagcaauaacugauuggucaggauauagcgggaguuuuguccagcauccagaacugacaggauuagauugcauaagaccuuguuucuggguugaguuaaucagagggcggccuaaagagagcacaauuuggaccaguggaagcagcauaucuuuuugugguguaaauagugacacuguuaguuggucuuggccagacggugcugaguugccauucaccauugacaaguag

SEQ ID NO: 48391 - RNA, 1413 nt, Artificial Sequence
  derived and/or modified CDS sequence (wt) from neuraminidase__InfluenzaA__ABY81352
augaauccaaaucagaaaauaauaaccauuggaucaaucuguauggcaaucggaauaauuagucuaauauugcaaauagggaguauuaucucaauauggguuagccacucaauucaaacuggaagucaaaaccauacuggaauaugcaaccaaagaaucauuaccuaugaaaauagcaccuggguaaaucaaacauauguuaauauuagcaacacuaacguuguugcuggaaaggacacaacuucaaugacauuagccggcaauucaucucuuuguccuauccgugggugggcuauauacagcaaagacaacagcauaagaauugguuccaaaggagauguuuuugucauaagagaaccuuuuauaucauguucucacuuggaaugcagaaccuuuuuucugacccaaggcgcucuauuaaaugacaagcauucaaaugggaccguuaaggacagaagcccuuauagggccuuaaugagcuguccuauaggugaagcuccgucuccauacaauucaagauuugaaucgguugcuuggucagcaagugcaugucaugauggcaugggcuggcuaacaaucggaauuucugguccagaugauggagcaguggcuguacuaaaauacaacggcauaauaacugagaccauaaaaaguuggaggaagcaaauauuaagaacacaagagucugaaugugucuguguaaacgguucauguuuuaccauaaugaccgauggcccgagugaugggcaggccucguacagaaucuucaaaaucgagaaggggaagauuacuaaaucaauagaguuggaugcacccaauucucauuacgaggaauguuccuguuacccagacaccggcacagugaugugugugugcagagacaauuggcaugguucgaaucgaccuugggugucuuuuaaucaaaaccuggauuaucaaauaggauacaucugcagugggguuuucggugacaauccgcgucccaaagauggaaaaggcagcugugauccaguaaauguugauggagcagacggaguaaagggguuuucauacagguaugguaaugguguuuggauaggaaggacuaaaaguaacagcuccagaaagggauuugagaugauuugggauccuaauggauggacagauaccgauaguaauuucuuagugaaacaggauguaguggcaaugacugauuggucaggguacagcggaaguuucguucaacauccugagcuaacaggauuggacuguaugaggccuugcuucuggguugaauuaaucagaggacgacccagagaaaaaacaacaaucuggacuagugggagcagcauuucuuuuuguggcgugaauagugauacuguaaauuggucuuggccagacggugcugaguugccauucaccauugacaaguag

SEQ ID NO: 48392 - RNA, 1413 nt, Artificial Sequence
  derived and/or modified CDS sequence (wt) from neuraminidase__InfluenzaA__ABY81363
augaauccaaaucaaaaaauaauaaccauuggaucaaucaguauagcaaucgggauaauuagucuaauguugcaaauaggaaauauuauuucaauaugggcuagucacucaauccaaauuggaagucaaaaccacacuggaauaugcaaccaaagaaucaucacauaugaaaacagcaccugggugaaucacacauauguuaguauuaacaacacuaauguuguugcuggaaaggacaaaacuucagugacauuggccggcaauucaucucuuuguucuaucaguggaugggcuauauacacaaaagacaacagcauaagaauuggcuccaaaggagauguuuuugucauaagagaaccuuucauaucauguucucauuuggaaugcaggaccuuuuuucugacccaaggugcucuauuaaaugacaaacauucaaauggaaccguuaaggaccgaaguccuuauagggccuuaaugagcuguccucuaggugaagcuccguccccauacaauucaaaguuugaaucaguugcauggucagcaagcgcaugccaugauggcaugggcugguuaacaaucggaauuucugguccagacaauggagcuguggcuguacuaaaauacaacggaauaauaacugaaaccauaaaaaguuggaaaaagcgaauauugagaacacaagagucugaaugugucugugugaacgggucauguuucaccauaaugaccgauggcccgaguaauggggccgccucguacaaaaucuucaaaaucgaaaaggggaagguuacuaaaucaauagaguuaaaugcacccaauuuucauuaugaggaauguuccuguuacccagacacuggcacagugauguguguaugcagggacaacuggcaugguucaaaucgaccuugggugucuuuuaaucaaaacuuggauuaucaaauaggauacaucugcaguggaguguucggugacaauccgcgucccaaagauggaaagggcagcuguaauccagugacuguugauggagcagacgggguuaagggguuuucauacaaauaugguaaugguguuuggauaggaagaacuaaaaguaacagacuuagaaagggguuugagaugauuugggauccuaauggauggacagauaccgacagugauuucucagugaaacaggauguuguggcaauaacugauuggucaggguacaguggaaguuucguucaacauccugaguuaacaggauuggacuguauaagaccuugcuucuggguugaguuagucagaggacugccuagagaaaauacaacaaucuggacuagugggagcagcauuucuuuuuguggcguugauagugauacugcaaacuggucuuggccagacggugcugaguugccguucaccauugacaaguag

SEQ ID NO: 48393 - RNA, 1410 nt, Artificial Sequence
  derived and/or modified CDS sequence (wt) from neuraminidase__InfluenzaA__ABY81374
augaauccaaaucaaaagauaauaacgauuggcucuguuucucucaccauuuccacaauaugcuucuucaugcaaacugccaucuugauaacuacuguaacauugcauuucaagcaauaugaauucaacucccccccaaacaaccaagugaugcugugugaaccaacaauaauagaaagaaacauaacagagauaguguaucugaccaacaccaccauagagaaggaaauaugcccuaaacuagcagaauacagaaauuggucaaagccgcaaugugacauuacaggauuugcaccuuuuucuaaggacaauucgauuaggcuuuccgcugguggggacaucugggugacaagagaaccuuaugugucaugcgauccugacaaguguuaucaauuugcccuuggacagggaacaacacuaaacaacgugcauucaaaugacacaguacgugauaggaccccuuaucggacccuauugaugaaugaguuagguguuccuuuucaucuggggaccaagcaagugugcauagcaugguccagcucaaguugucacgauggaaaagcauggcugcauguuuguauaacgggggaugauaaaaaugcaacugcuagcuucauuuacaaugggaggcuuguagauaguauuguuucaugguccaaagaaauccucaggacccaggagucagaaugcguuuguaucaauggaacuuguacaguaguaaugacugaugggagugcuucaggaaaagcugauacuaaaauacuauucauugaggaggggaaaaucguucauacuagcacauugucaggaagugcucagcaugucgaggagugcuccugcuauccucgauauccuggugucagaugugucugcagagacaacuggaaaggcuccaauaggcccaucguagauauaaacauaaaggaucauagcauuguuuccaguuauguguguucaggacuugucggagacacacccagaaaaaacgacagcuccagcaguagccauuguuuggauccuaacaaugaagaagguggucauggagugaaaggcugggccuuugaugauggaaaugacguguggaugggaagaacgaucagcgagaagucacgcuuaggguaugaaaccuucaaagucauugaaggcugguccaacccuaaguccaaauugcagauaaauaggcaagucauaguugacagagguaauagguccgguuauucugguauuuucucuguugaaggcaaaagcugcaucaaucggugcuuuuauguggaguugauaaggggaagaaaagaggaaacugaagucuuguggaccucaaacaguauuguuguguuuuguggcaccucagguacauauggaacaggcucauggccugauggggcggacaucaaucucaugccuauauaa

SEQ ID NO: 48394 - RNA, 1413 nt, Artificial Sequence; identical to SEQ ID NO: 48043
  derived and/or modified CDS sequence (wt) from neuraminidase__InfluenzaA__ABY81385

SEQ ID NO: 48395 - RNA, 1413 nt, Artificial Sequence
  derived and/or modified CDS sequence (wt) from neuraminidase__InfluenzaA__ABY81407
augaauccaaaucaaaaaauaauaaccauuggaucaaucaguauagcaaucgggacaauuagucuaauguugcaaauaggaaauauuauuucaauaugggcuagucacucaauccaaacuggaagucaaaaccacacuggaauaugcaaccaaagaaucaucacauaugaaaacagcaccugggugaaucacacauauguuaguauuaacaacacuaauguuguugcuggaaaggacaaaacuucagugacauuggccggcaauucaucucuuuguucuaucaguggaugggcuauauacacaaaagacaacagcauaagaauuggcuccaaaggagauguuuuugucauaagagaaccuuucauaucauguucucauuuggaaugcaggaccuuuuuucugacccaaggugcucuauuaaaugacaaacauucaaauggaaccguuaaggaccgaaguccuuauagggccuuaaugagcuguccucuaggugaagcuccguccccauacaauucaaaguuugaaucaguugcauggucagcaagcgcaugccaugauggcaugggcugguuaacaaucggaauuucugguccagacaauggagcuguggcuguacuaaaauacaacggaauaauaacugaaaccauaaaaaguuggaaaaagcgaauauugagaacacaagagucugaaugugucugugugaacgggucauguuucaccauaaugaccgauggcccgaguaauggggccgccucguacaaaaucuucaagaucgaaaaggggaagguuacuaaaucaauagaguuaaaugcacccaauuuucauuaugaggaauguuccuguuacccagacacuggcacagugauguguguaugcagggacaacuggcaugguucaaaucgaccuugggugucuuuuaaucaaaacuuggauuaucaaauaggauacaucugcaguggaguguucggugacaauccgcgucccaaagauggaaagggcagcuguaauccagugacuguugauggagcagacgggguuaagggguuuucauacaaauaugguaaugguguuuggauaggaagaacuaaaaguaacagacuuagaaagggguuugagaugauuugggauccuaauggauggacagauaccgacagugauuucuuagugaaacaggauguuguggcaauaacugauuggucaggguacaguggaaguuucguucaacauccugaguuaacaggauuggacuguauaagaccuugcuucuggguugaguuagucagaggacugccuagagaaaauacaacaaucuggacuagugggagcagcauuucuuuuuguggcguugauagugauacugcaaacuggucuuggccagacggugcugaguugccguucaccauugacaaguag

SEQ ID NO: 48396 - RNA, 1410 nt, Artificial Sequence; identical to SEQ ID NO: 48090
  derived and/or modified CDS sequence (wt) from neuraminidase__InfluenzaA__ACA24505

SEQ ID NO: 48397 - RNA, 1413 nt, Artificial Sequence
  derived and/or modified CDS sequence (wt) from neuraminidase__InfluenzaA__ACA24516
augaauccaaaucaaaaaauaauaaccauuggaucaaucaguauagcaaucgggauaauuagucuaauguugcaaauaggaaauauuauuucaauaugggcuagucacucaauccaaacuggaagucaaaaccacacuggaauaugcaaccaaagaaucaucacauaugaaaacagcaccugggugaaucacacauauguuaguauuaacaacacuaauguuguugcuggaaaggacaaaacuucagugacauuggccggcaauucaucucuuuguucuaucaguggaugggcuauauacacaaaagacaacagcauaagaauuggcuccaaaggagauguuuuugucauaagagaaccuuucauaucauguucucauuuggaaugcaggaccuuuuuucugacccaaggugcucuauuaaaugacaaacauucaaauggaaccguuaaggaccgaaguccuuauagggccuuaaugagcuguccucuaggugaagcuccguccccauacaauucaaaguuugaaucaguugcauggucagcaagcgcaugccaugauggcaugggcugguuaacaaucggaauuucugguccagacaauggagcuguggcuguacuaaaauacaacggaauaauaacugaaaccauaaaaaguuggaaaaagcgaauauugagaacacaagagucugaaugugucugugugaacgggucauguuucaccauaaugaccgauggcccgaguaauggggccgccucguacaaaaucuucaagaucgaaaaagggaagguuacuaaaucaauagaguuaaaugcacccaauuuucauuaugaggaauguuccuguuacccagacacuggcacagugauguguguaugcagggacaacuggcaugguucaaaucgaccuugggugucuuuuaaucaaaacuuggauuaucaaauaggauacaucugcaguggaguguucggugacaauccgcgucccaaagauggaaagggcagcuguaauccagugacuguugauggagcagacgggguuaagggguuuucauacaaauaugguaaugguguuuggauaggaagaacuaaaaguaacagacuuagaaagggguuugagaugauuugggauccuaauggauggacagauaccgacagugauuucucagugaagcaggauguuguggcaauaacugauuggucaggguacaguggaaguuucguucaacauccugaguuaacaggauuggacuguauaagaccuugcuucuggguugaguuagucagaggacugccuagagaaaauacaacaaucuggacuagugggagcagcauuucuuuuuguggcguugauagugauacugcaaacuggucuuggccagacggugcugaguugccguucaccauugacaaguag

SEQ ID NO: 48398 - RNA, 1413 nt, Artificial Sequence
  derived and/or modified CDS sequence (wt) from neuraminidase__InfluenzaA__ACA24527
augaauccaaaucaaaaaauaauaaccauuggaucaaucaguauagcaaucgggauaauuagucuaauguugcaaauaggaaauauuauuucaauaugggcuagucacucaauccaaacuggaagucaaaaccacacuggaauaugcaaccaaagaaucaucacauaugaaaacagcaccugggugaaucacacauauguuaguauuaacaacacuaauguuguugcuggaaaggacaaaacuucagugacauuggccggcaauucaucucuuuguucuaucaguggaugggcuauauacacaaaagacaacagcauaagaauuggcuccaaaggagauguuuuugucauaagagaaccuuucauaucauguucucauuuggaaugcaggaccuuuuuucugacccaaggugcucuauuaaaugacaaacauucaaauggaaccguuaaggaccgaaguccuuauagggccuuaaugagcuguccucuaggugaagcuccguccccauacaauucaaaguuugaaucaguugcauggucagcaagcgcaugccaugauggcaugggcugguuaacaaucggaauuucugguccagacaauggagcuguggcuguacuaaaauacaacggaauaauaacugaaaccauaaaaaguuggaaaaagcgaauauugagaacacaagagucugaaugugucugugugaacgggucauguuucaccauaaugaccgauggcccgaguaauggggccgccucguacaaaaucuucaagaucgaaaaggggaagguuacuaaaucaauagaguugaaugcacccaauuuucauuaugaggaauguuccuguuacccagacacuggcacagugauguguguaugcagggacaacuggcaugguucaaaucgaccuugggugucuuuuaaucaaaacuuggauuaucaaauaggauacaucugcaguggaguguuuggugacaauccgcgucccaaagauggaaagggcagcuguaauccagugacuguugauggagcagacgggguuaagggguuuucauacaaauaugguaaugguguuuggauaggaagaacuaaaaguaacagacuuagaaagggguuugagaugauuugggauccuaauggauggacagauaccgacagugauuucucagugaaacaggauguuguggcaauaacugauuggucaggguacaguggaaguuucguucaacauccugaguuaacaggauuggacuguauaagaccuugcuucuggguugaguuagucagaggacugccuagagaaaauacaacaaucuggacuagugggagcagcauuucuuuuuguggcguugauagugauacugcaaacuggucuuggccagacggugcugaguugccguucacuauugacaaguag

SEQ ID NO: 48399 - RNA, 1410 nt, Artificial Sequence
  derived and/or modified CDS sequence (wt) from neuraminidase__InfluenzaA__ACA24692
augaauccaaaucaaaagauaauaacgauuggcucuguuucucucaccauuuccacaauaugcuucuucaugcaaauugccaucuugauaacuacuguaacauugcauuucaagcaauaugaauucagcccccccccaaacaaccaagugaugcugugugaaccaacaauaauagaaagaaacauaacagagauaguguaucugaccaacaccaccauagagaaggaaauaugccccaaacuagcagaauacagaaauuggucaaagccgcaaugugacauuacaggauuugcaccuuuuucuaaggacaauucgauuaggcuuuccgcugguggggacaucugggugacaagagaaccuuaugugucaugcgauccugacaaguguuaucaauuugcccuuggacagggaacaacacuaaacaacgugcauucaaaugacacaguacaugauaggaccccuuaucggacccuauugaugaaugagcuagguguuccauuucaucuggggaccaagcaagugugcauagcaugguccagcucaaguugucacgauggaaaagcauggcugcauguuuguguaacgggggaugacaaaaaugcaacugcuagcuucauuuacaaugggaggcuuguagauaguauuguuucaugguccaaagaaauccucaggacccaggagucagaaugcguuuguaucaaugggacuuguacaguaguaaugacugaugggagugcuucaggaaaagcugauacuaaaauacuauucauugaggaggggaaaaucguucauacuagcacauugucaggaagugcucagcaugucgaggagugcuccugcuauccucgauauccuggugucagaugugucugcagagacaauuggaaaggcuccaauaggcccaucguagauauaaacauaaaggauuauagcauuguuuccaaauaugugugcucaggacuuguuggagacacacccagaaaaaacgacagcuccagcaguagccauugcuuggauccuaacaaugaagaagguggucauggagugaaaggcugggccuuugaugauggaaaugacguguggaugggaagaacgaucagcgagaagucacgcucaggauaugaaaccuucaaagucauugaaggcugguccaacccuaauuccaaauugcagauaaauaggcaagucauaguugacagagguaauagguccgguuauucugguauuuucucuguugaaggcaaaagcugcaucaaucggugcuuuuauguggaguugauaaggggaagaaaugaggaaaccgaaguuuuguggaccucaaacaguauuguuguguuuuguggcaccucagguacauauggaacaggcucauggccugauggggcggacaucaaucucaugccuauauaa

SEQ ID NO: 48400 - RNA, 1410 nt, Artificial Sequence
  derived and/or modified CDS sequence (wt) from neuraminidase__InfluenzaA__ACA24703
augaauccaaaccaaaagauaauaacgauuggcucuguuucucucaccauuuccacaauaugcuucuucaugcaaauugccaucuugauaacuacuguaacauugcauuucaagcaauaugaauucagcucccccccaaacaaccaagugaugcugugugaaccaacaauaauagaaagaaacauaacagagauaguguaucugaccaacaucaccauagagaaggaaacaugccccaaacuagcagaauacagaaauuggucaaagccgcaaugugacauuacaggauuugcaccuuuuucuaaggacaauucgauuaggcuuuccgcugguggggacaucugggugacaagagaaccuuaugugucaugcgauccugacaaguguuaucaauuugcccuuggacagggaacaacacuaaacaacgugcauucaaaugacacaguacaugauaggaccccuuaucggacccuauugaugaaugagcuagguguuccauuucaucuggggaccaagcaagugugcauagcaugguccagcucaaguugucacgauggaaaagcauggcugcauguuuguguaacgggggaugacaaaaaugcaacugcuagcuucauuuacaaugggaggcuuguagauaguauuguuucaugguccaaagaaauccucaggacccaggagucagaaugcguuuguaucaauggaacuugcacaguaguaaugacugaugggagugcuucaggaaacgcugauacuaaaauacuauucauugaggaggggaaaaucguucauacuagcacauugucaggaagugcucagcaugucgaggagugcuccugcuauccucgauauccuggugucagaugugucugcagagacaauuggaaaggcuccaauaggcccaucguagauauaaacauaaaggauuauagcauuguuuccagauaugugugcucaggacuuguuggagacacacccagaaaaaacgacagcuccagcaguagccauugcuuggauccuaacaaugaagaagguggucauggagugaaaggcugggccuuugaugauggaaaugacguguggaugggaagaacgaucagcgagaagucacgcucaggauaugaaaccuucaaagucauugaaggcugguccaacccuaauuccaaauugcagauaaauaggcaagucauaguugacagagguaauagguccgguuauucugguauuuucucuguugaaggcaaaagcugcaucaaucggugcuuuuauguggaguugauaaggggaagaaaagaggaaaccgaaguuuuguggaccucaaacaguauuguuguguuuuguggcaccucagguacauauggaacaggcucauggccugauggggcggacaucaaucucaugccuauauaa

SEQ ID NO: 48401 - RNA, 1413 nt, Artificial Sequence
  derived and/or modified CDS sequence (wt) from neuraminidase__InfluenzaA__ACA33539
augaauccauaucaaaaaauaauaaccauuggaucaaucaguauagcaaucgggauaauuagucuaauguugcaaauaggaaauauuauuucaauaugggcuagucacucaauccaaacuggaagucaaaaccacacuggaauaugcaaccaaagaaucaucacauaugaaaacagcaccugggugaaucacacauauguuaguauuaacaacacuaauguuguugcuggaaaggacaaaacuucagugacauuggccggcaauucaucucuuuguucuaucaguggaugggcuauauacacaaaagacaacagcauaagaauuggcuccaaaggagauguuuuugucauaagagaaccuuucauaucauguucucauuuggaaugcaggaccuuuuuucugacccaaggugcucuauuaaaugacaaacauucaaauggaaccguuaaggaccgaaguccuuauagggccuuaaugagcuguccucuaggugaagcuccguccccauacaauucaaaguuugaaucaguugcauggucagcaagcgcaugccaugauggcaugggcugguuaacaaucggaauuucugguccagacaauggagcuguggcuguacuaaaauacaacggaauaauaacugaaaccauaaaaaguuggaaaaagcgaauauugagaacacaagagucugaaugugucugugugaacgggucauguuucaccauaaugaccgauggcccgaguaauggggccgccucguacaaaaucuucaaaaucgaaaaggggaagguuacuaaaucaauagaguuaaaugcacccaauuuuuauuaugaggaauguuccuguuacccagacacuggcacagugauguguguaugcagggacaacuggcaugguucaaaucgaccuugggugucuuuuaaucaaaacuuggauuaucaaauaggauacaucugcaguggaguguucggugacaauccgcgucccaaagauggaaagggcagcuguaauccagugacuguugauggagcagacgggguuaagggguuuucauacaaauaugguaaugguguuuggauaggaagaacuaaaaguaacagacuuagaaagggguuugagaugauuugggauccuaauggauggacagauaccgacagugauuucucagugaaacaggauguuguggcaauaacugauuggucaggguacaguggaaguuucguucaacauccugaguuaacaggauuggacuguauaagaccuugcuucuggguugaguuagucagaggacugccuagagaaaauacaacaaucuggacuagugggagcagcauuucuuuuuguggcguugauagugauacugcaaacuggucuuggccagacggugcugaguugccguucaccauugacaaguag

SEQ ID NO: 48402 - RNA, 1413 nt, Artificial Sequence
  derived and/or modified CDS sequence (wt) from neuraminidase__InfluenzaA__ACA33540
augaauccaaaucaaaaaauaauaaccauuggaucaaucaguauagcaauagggauaauuagucuaauguugcaaauaggaaauauuauuucaauaugggcuagucacucaauccaaacuggaagucaaaaccacacuggaauaugcaaccaaagaaucaucacauaugaaaacagcaccugggugaaucacacauauguuaguauuaacaacacuaauguuguugcuggaaaggacaaaacuucagugacauuggccggcaauucaucucuuuguucuaucaguggaugggcuauauacacaaaagacaacagcauaagaauuggcuccaaaggagauguuuuugucauaagagaaccuuucauaucauguucucauuuggaaugcaggaccuuuuuucugacccaaggugcucuauuaaaugacaaacauucgaauggaaccguuaaggaccgaaguccuuauagggccuuaaugagcuguccucuaggugaagcuccguccccauacaauucaaaguuugaaucaguugcauggucagcaagcgcaugccaugauggcaugggcugguuaacaaucggaauuucugguccagacaauggagcuguggcuguacuaaaauacaacggaauaauaacugaaaccauaaaaaguuggaaaaagcgaauauugagaacacaagagucugaaugugucugugugaacgggucauguuucaccauaaugaccgauggcccgaguaauggggccgccucguacaaaaucuucaagaucgaaaaggggaagguuacuaaaucaauagaguuaaaugcacccaauuuuuauuaugaggaauguuccuguuacccagacacuggcacagugauguguguaugcagggacaacuggcaugguucaaaucgaccuugggugucuuuuaaucaaaacuuggauuaucaaauaggauacaucugcaguggaguguucggugacaauccgcgucccaaagauggaaagggcagcuguaauccagugacuguugauggagcagacgggguuaagggguuuucauacaaauaugguaaugguguuuggauaggaagaacuaaaaguaacagacuuagaaagggguuugagaugauuugggauccuaauggauggacagauaccgacagugauuucucagugaaacaggauguuguggcaauaacugauuggucaggguacaguggaaguuucguucaacauccugaguuaacaggauuggacuguauaagaccuugcuucuggguugaguuagucagaggacugccuagagaaaauacaacaaucuggacuagugggagcagcauuucuuuuuguggcguugauagugauacugcaaacuggucuuggccagacggugcugaguugccguucaccauugacaaguag

SEQ ID NO: 48403 - RNA, 1413 nt, Artificial Sequence
  derived and/or modified CDS sequence (wt) from neuraminidase__InfluenzaA__ACA33582
augaauccaaaucaaaaaauaauaaccauuggaucaaucaguauagcaaucggaauaauuagucuaauguugcaaauaggaaauauuauuucaauaugggcuagucacucaauccaaacuggaagucaaaaccacacuggaauaugcaaccaaagaaucaucacauaugaaaacagcaccugggugaaucacacauauguuaguauuaacaacacuaauguuguugcuggaaaggacaaaacuucagugacauuggccggcaauucaucucuuuguucuaucaguggaugggcuauauacacaaaagacaacagcauaagaauuggcuccaaaggagauguuuuugucauaagagaaccuuucauaucauguucucauuuggaaugcaggaccuuuuuucugacccaaggugcucuauuaaaugacaaacauucaaauggaaccguuaaggaccgaaguccuuauagggccuuaaugagcuguccucuaggugaagcuccguccccauacaauucaaaguuugaaucaguugcauggucagcaagcgcaugccaugauggcaugggcugguuaacaaucggaauuucugguccagacaauggagcuguggcuguacuaaaauacaacggaauaauaacugaaaccauaaaaaguuggaaaaagcgaauauugagaacacaagagucugaaugugucugugugaacgggucauguuucaccauaaugaccgauggcccgaguaauggggccgccucguacaaaaucuucaagaucgaaaaggggaagguuacuaaaucaauagaguuaaaugcacccaauuuuuauuaugaggaauguuccuguuacccagacacuggcacagugauguguguaugcagggacaacuggcaugguucaaaucgaccuugggugucuuuuaaucaaaacuuggauuaucaaauaggauacaucugcaguggaguguucggugacaauccgcgucccaaagauggaaagggcagcuguaauccaaugacuguugauggagcagacgggguuaagggguuuucauacaaauaugguaaugguguuuggauaggaagaacuaaaaguaacagacuuagaaagggguuugagaugauuugggauccuaauggauggacagauaccgacagugauuucucagugaaacaggauguuguggcaauaacugauuggucagguuacaguggaaguuucguucaacauccugaguuaacaggauuggacuguauaagaccuugcuucuggguugaguuagucagaggacugccuagagaaaauacaacaaucuggacuagugggagcagcauuucuuuuuguggcguugauagugauacugcaaacuggucuuggccagacggugcugaguugccguucaccauugacaaguag

SEQ ID NO: 48404 - RNA, 1413 nt, Artificial Sequence
  derived and/or modified CDS sequence (wt) from neuraminidase__InfluenzaA__ACA33622
augaauccaaaucaaaaaauaauaaccauuggaucaaucaguauagcaaucggaauaauuagucuaauguugcaaauaggaaauauuauuucaauaugggcuagucacucaauccaaacuggaagucaaaaccacacuggaauaugcaaccaaagaaucaucacauaugaaaacagcaccugggugaaucacacauauguuaauauuaacaacacuaauguuguugcuggaaaggacaaaacuucagugacauuggccggcaauucaucucuuuguucuaucaguggaugggcuauauacacaaaagacaacagcauaagaauuggcuccaagggagauguuuuugucauaagagaaccuuucauaucauguucucauuuggaaugcaggaccuuuuuucugacccaaggugcucuauuaaaugacaaacauucaaauggaaccguuaaggacagaaguccuuauagggccuuaaugagcuguccucuaggugaagcuccguccccauacaauucaaaguuugaaucaguugcauggucagcaagcgcaugccaugauggcaugggcugguuaacaaucggaauuucugguccagacaauggagcuguggcuguacuaaaauacaacggaauaauaacugaaaccauaaaaaguuggaaaaagcgaauauugagaacacaagagucugaaugugucugugugaacgggucuuguuucaccauaaugaccgauggcccgaguaauggggccgccucguacaaaaucuucaagaucgaaaagggaaagguuacuaaaucaauagaguuaaaugcacccaauuuuuauuaugaggaauguuccuguuacccagacacuggcacagugauguguguaugcagagacaacuggcaugguucaaaucgaccuugggugucuuuuaaucaaaacuuggauuaucaaauaggauacaucugcaguggaguguucggugacaauccgcgucccaaagauggaaagggcagcuguaauccagugacuguugauggagcagacggaguuaagggguuuucauacaaauaugguaaugguguuuggauaggaagaacuaaaaguaacagacuuagaaagggguuugagaugauuugggauccuaauggauggacaaauaccgacagugauuucucagugaaacaggauguuguggcaauaacugauuggucaggguacaguggaaguuucguucaacauccugaguuaacaggauuggacuguauaaggccuugcuucuggguugaauuagucagaggacugccuagagaaaauacaacaaucuggacuagugggagcagcauuucuuuuuguggcguugauagugauacugcaaacuggucuuggccagacggugcugaguugccguucaccauugacaaauag

SEQ ID NO: 48405 - RNA, 1413 nt, Artificial Sequence; identical to SEQ ID NO: 48081
  derived and/or modified CDS sequence (wt) from neuraminidase__InfluenzaA__ACA96522

SEQ ID NO: 48406 - RNA, 1362 nt, Artificial Sequence
  derived and/or modified CDS sequence (wt) from neuraminidase__InfluenzaA__ACC55274
augaauccaaaucagaagauaauaacaauuggcuccgucucucuaaccauugcaacaguauguuuccucaugcagauugccauccuagcaaugacuguaacacugcauuucaggcaaaaugaaugcagcauuucagcgaacagucagguagugccaugugaaccaacuacagagaaagaggucuguucgaaaguaguagacuauagaagcuggucaaagccgcagugucaaauuacaggauuugcuccuuuuuccaaggacaacucaauucgacuuucugcugguggagacauuuggauaacaagagagccuuaugugucgugugacaccagcaaauguuaucaauuugcacuuggacaggggaccacacuggauaacgaacauucaaacggaacaauacaugauagaaucccccaucggacccuuuugaugaaugaacuggguguuccauuucacuugggaaccagacaaguuugcauagcaugguccagcucaaguugccaugauggaaaagcaugguugcacguuugugucacuggggaugauagaaaugcaacugcuaguuucauuuacaaugggaugcuuguugacaguauugguucauggucucaaaauauccucaggacccaggagucagaaugcguuugcaucaaugggucuuguacaguaguaaugacugauggaagugccucagggaaggccgacacuagaauauuauucgucaaagagggaaagauuguucacauuagcccauugucaggaagugcucagcauauagaggaauguuccuguuauccucgauacccaaacgucagaugugucugcagggacaacuggaagggcucuaauaggccuguuauagacauaaacaugacagauuauagcaucgacuccaguuaugugugcucaggacuuguuggggacacaccaaggaaugaggauaguucuaguagcagcaacugcagggauccuaaugaagagaggggaaacccaggagugaaaggaugggccuuugacaguggagaugauguuuggauggguagaacaaucaguagggauucgcggucaggcuaugagacauuuagggucauuggugguuggaccacugccaauuccaaaucacagaccaacagacaagucauaguugauaauaacaauuggucugguuauucugguauuuucucuguugaacacaaaagcuguaucaauagguguuuuuauguggaguuaauaagaggaaggccgaaagaaacuagaguaugguggaccucaaacaguauugucguguuuugcggcacuucaggcacuuauggaacaggcucauggccugauggggcgaacaucaauuucaugccuauauaa

SEQ ID NO: 48407 - RNA, 1413 nt, Artificial Sequence; identical to SEQ ID NO: 48341
  derived and/or modified CDS sequence (wt) from neuraminidase__InfluenzaA__ACC61967

SEQ ID NO: 48408 - RNA, 1413 nt, Artificial Sequence
  derived and/or modified CDS sequence (wt) from neuraminidase__InfluenzaA__ACD11077
augaauccaaaucagaaaauaauaaccauuggaucaaucuguauggcaaucggaauaauuagucuaauauugcaaauagggaauauuaucucaauauggguuagccacucaauucaaacuggaagucaaaaccauacaggaauaugcaaccaaagaaucauuaccuaugaaaauagcaccuggguaaaucaaacauauguuaauauuagcaacacuaacguuguugcuggaaaggucacaacuucaaugacauuagccggcaauucaucucuuuguccuauccgugggugggcuauauacagcaaagacaacagcauaagaauugguuccaaaggagauguuuuugucauaagagaaccuuuuauaucauguucucacuuggaaugcagaaccuuuuuucugacccaaggcgcucuauuaaaugacaagcauucaaaugggaccguuaaggacagaagcccuuauagggccuuaaugagcuguccuauaggugaagcuccgucuccauacaauucaagguuugaaucgguugcuuggucagcaagugcaugucacgauggcaugggcuggcuaacaaucggaauuucugguccagaugauggagcaguggcuguacuaaaauacaacggcauaauaacugaaaccauaaaaaguuggaggaagcaaauauuaagaacacaagagucugaaugugucuguguaaacgguucauguuuuaccauaaugaccgauggcccgagugaugggccggccucguacagaaucuucaaaaucgagaaggggaagauuacuaaaucaauagaguuggaugcacccaauucucauuacgaggaauguuccuguuacccagacaccggcacagugaugugugugugcagagacaauuggcaugguucgaaucgaccuugggugucuuuuaaucaaaaccuggauuaucaaauaggauacaucugcagugggguuuucggugacaauccgcgucccaaagauggaaaaggcaguugugauccaguaaauguugauggagcagacggaguaaagggguuuucauacagauaugguaaugguguuuggauaggaaggacuaaaaguaacaacuccagaaagggauuugagaugauuugggauccuaauggauggacagauaccgauaguaauuucuuagugaaacaggauguaguggcaaugacugauuggucaggguacagcggaaguuucguucaacauccugagcuaacaggauuggacuguaugaggccuugcuucuggguugaauuaaucagaggacgacccagagaaaaaacaacaaucuggacuagugggagcagcauuucuuuuuguggcgugaauagugauacuguaaauuggucuuggccagacggugccgaguugccauugaccauugacaaguag

SEQ ID NO: 48409 - RNA, 1413 nt, Artificial Sequence
  derived and/or modified CDS sequence (wt) from neuraminidase__InfluenzaA__ACD11078
augaauccaaaucagaaaauaauaaccauuggaucaaucuguauggcaaucggaauaauuagucuaauauugcaaauagggaauauuaucucaauauggguuagccacucaauucaaacuggaagucaaaaccauacaggaauaugcaaccaaagaaucauuaccuaugaaaauagcaccuggguaaaucaaacauauguuaauauuagcaacacuaacguuguugcuggaaaggacacaacuucaaugacauuagccggcaauucaucucuuuguccuauccgugggugggcuauauacagcaaagacaacagcauaagaauugguuccaaaggagauguuuuugucauaagagaaccuuuuauaucauguucucacuuggaaugcagaaccuuuuuucugacccaaggcgcucuauuaaaugacaagcauucaaaugggaccguuaaggacagaagcccuuauagggccuuaaugagcuguccuauaggugaagcuccgucuccauacaauucaagguuugaaucgguugcuuggucagcaagugcaugucacgauggcaugggcuggcuaacaaucggaauuucugguccagaugauggagcaguggcuguacuaaaauacaacggcauaauaacugaaaccauaaaaaguuggaggaagcaaauauuaagaacacaagagucugaaugugucuguguaaacgguucauguuuuaccauaaugaccgauggcccgagugaugggccggccucguacagaaucuucaaaaucgagaaggggaagauuacuaaaucaauagaguuggaugcacccaauucucauuacgaggaauguuccuguuacccagacaccggcacagugaugugugugugcagagacaauuggcaugguucgaaucgaccuugggugucuuuuaaucaaaaccuggauuaucaaauaggauacaucugcagugggguuuucggugacaauccgcgucccaaagauggaaaaggcaguugugauccaguaaauguugauggagcagacggaguaaagggguuuucauacagauaugguaaugguguuuggauaggaaggacuaaaaguaacagcuccagaaagggauuugagaugauuugggauccuaauggauggacagauaccgauaguaauuucuuagugaaacaggauguaguggcaaugacugauuggucaggguacagcggaaguuucguucaacauccugagcuaacaggauuggacuguaugaggccuugcuucuggguugaauuaaucagaggacgacccagagaaaaaacaacaaucuggacuagugggagcagcauuucuuuuuguggcgugaauagugauacuguaaauuggucuuggccagacggugccgaguugccauugaccauugacaaguag

SEQ ID NO: 48410 - RNA, 1413 nt, Artificial Sequence
  derived and/or modified CDS sequence (wt) from neuraminidase__InfluenzaA__ACD11079
augaauccaaaucagaaaauaauaaccauuggaucaaucuguauggcaaucggaauaauuagucuaauauugcaaauagggaauauuaucucaauauggguuagccacucaauucaaacuggaagucaaaaccauacaggaauaugcaaccaaagaaucauuaccuaugaaaauagcaccuggguaaaucaaacauauguuaauauuagcaacacuaacguuguugcuggaaaggacacaacuucaaugacauuagccggcaauucaucucuuuguccuauccgugggugggcuauauacagcaaagacaacagcauaagaauugguuccaaaggagauguuuuugucauaagagaaccuuuuauaucauguucucacuuggaaugcagaaccuuuuuucugacccaaggcgcucuauuaaaugacaagcauucaaaugggaccguuaaggacagaagcccuuauagggccuuaaugagcuguccuauaggugaagcuccgucuccauacaauucaagguuugaaucgguugcuuggucagcaagugcaugucacgauggcaugggcuggcuaacaaucggaauuucugguccagaugauggagcaguggcuguaauaaaauacaacggcauaauaacugaaaccauaaaaaguuggaggaagcaaauauuaagaacacaagagucugaaugugucuguguaaacgguucauguuuuaccauaaugaccgauggcccgagugaugggccggccucguacagaaucuucaaaaucgagaaggggaagauuacuaaaucaauagaguuggaugcacccaauucucauuacgaggaauguuccuguuacccagacaccggcacagugaugugugugugcagagacaauuggcaugguucgaaucgaccuugggugucuuuuaaucaaaaccuggauuaucaaauaggauacaucugcagugggguuuucggugacaauccgcgucccaaagauggaaaaggcaguugugauccaguaaauguugauggagcagacggaguaaagggguuuucauacagauaugguaaugguguuuggauaggaaggacuaaaaguaacagcuccagaaagggauuugagaugauuugggauccuaauggauggacagauaccgauaguaauuucuuagugaaacaggauguaguggcaaugacugauuggucaggguacagcggaaguuucguucaacauccugagcuaacaggauuggacuguaugaggccuugcuucuggguugaauuaaucagaggacgacccagagaaaaaacaacaaucuggacuagugggagcagcauuucuuuuuguggcgugaauagugauacuguaaauuggucuuggccagacggugccgaguugccauugaccauugacaaguag

SEQ ID NO: 48411 - RNA, 1413 nt, Artificial Sequence; identical to SEQ ID NO: 48340
  derived and/or modified CDS sequence (wt) from neuraminidase__InfluenzaA__ACD56116

SEQ ID NO: 48412 - RNA, 1413 nt, Artificial Sequence
  derived and/or modified CDS sequence (wt) from neuraminidase__InfluenzaA__ACD56127
augaauccaaaucaaaaaauaauaaccauuggaucaaucaguauagcaaucgggauaauuagucuaauguugcaaauaggaaauauuauuucaauaugggcuagucacucaauccaaacuggaagucaaaaccacacuggaauaugcaaccaaagaaucaucacauaugaaaacagcaccugggugaaucacacauauguuaguauuaacaacacuaauguuguugcuggaaaggacaaaacuucagugacauuggccggcaauucaucucuuuguucuaucaguggaugggcuauauacacaaaagacaacagcauaagaauuggcuccaaaggagauguuuuugucauaagagaaccuuucauaucauguucucauuuggaaugcaggaccuuuuuucugacccaaggugcucuauuaaaugacaaacauucaaauggaaccguuaaggaccgaaguccuuauagggccuuaaugagcuguccucuaggugaagcuccguccccauacaauucaaaguuugaaucaguugcauggucagcaagcgcaugccaugauggcaugggcugguuaacaaucggaauuucugguccagacaauggagcuguggcuguacuaaaauacaacggaauaauaacugaaaccauaaaaaguuggaaaaagcgaauauugagaacacaagagucugaaugugucugugugaacgggucauguuucaccauaaugaccgauggcccgaguaauggggccgccucguacaaaaucuucaagaucgaaaaggggaagguuacuaaaucaauagaguuaaaugcacccaauuuucauuaugaggaauguuccuguuacccagacacuggcacagugauguguguaugcagggacaacuggcaugguucaaaucgaccuugggugucuuuuaaucaaaacuuggauuaucaaauaggauacaucugcaguggaguguuuggugacaauccgcgucccaaagauggaaagggcagcuguaauccagugacuguugauggagcagacgggguuaagggguuuucauacaaauaugguaaugguguuuggauaggaagaacuaaaaguaacagacuuagaaagggguuugagaugauuugggauccuaauggauggacagauaccgacagugauuucucaguuaaacaggauguuguggcaauaacugauuggucaggguacaguggaaguuucguucaacauccugaguuaacaggauuggacuguauaagaccuugcuucuggguugaguuagucagaggacugccuagagaaaauacaacaaucuggacuagugggagcagcauuucuuuuuguggcguugauagugauacugcaaacuggucuuggccagacggugcugaguugccguucacuauugacaaguag

SEQ ID NO: 48413 - RNA, 1410 nt, Artificial Sequence; identical to SEQ ID NO: 48061
  derived and/or modified CDS sequence (wt) from neuraminidase__InfluenzaA__ACD56261

SEQ ID NO: 48414 - RNA, 1410 nt, Artificial Sequence
  derived and/or modified CDS sequence (wt) from neuraminidase__InfluenzaA__ACD56272
augaauccaaaucaaaagauaauaacgauuggcucuguuucucucaccauuuccacaauaugcuucuucaugcaaauugccaucuugauaacuacuguaacauugcauuucaagcaauaugaauucagcucccccccaaacaaccaagugaugcugugugaaccaacaauaauagaaagaaacauaacagagauaguguaucugaccaacaccaccauagagaaggaaauaugccccaaacuagcagaauacagaaauuggucaaagccgcaaugugacauuacaggauuugcaccuuuuucuaaggacaauucgauuaggcuuuccgcugguggggacaucugggugacaagagaaccuuaugugucaugcgauccugacaaguguuaucaauuugcccuuggacagggaacaacacuaaacaacgugcauucaaaugacacaguacaugauaggaccccuuaucggacccuauugaugaaugagcuagguguuccauuucaucuggggaccaagcaagugugcauagcaugguccagcucaaguugucacgauggaaaagcauggcugcauguuugugugacgggggaugacaaaaaugcaacugcuagcuucauuuacaaugggaggcuuguagauaguauuguuucaugguccaaagaaauucucaggacccaggagucagaaugcguuuguaucaauggaacuuguacaguaguaaugacugaugggagugcuucaggaaaagcugauacuaaaauacuauucauugaggaggggaaaaucguucauacuagcacauugucaggaagugcucagcaugucgaggagugcuccugcuauccucgauauccuggugucagaugugucugcagagacaauuggaaaggcuccaauaggcccaucguagauauaaacauaaaggacuauagcauuguuuccagauauguuugcucaggacuuguuggagacacacccagaaaaaacgacagcuccagcaguagccauugcuuggauccuaacaaugaagaagguggucauggagugaaaggcugggccuuugaugauggaaaugacguguggaugggaagaacgaucagcgagaagucacgcucaggauaugaaaccuucaaagucauugaaggcugguccaacccuaauuccaaauugcagauaaauaggcaagucauaguugacagagguaauagguccgguuauucugguauuuucucuguugaaggcaaaagcugcaucaaucggugcuuuuauguggaguugauaaggggaagaaaagaggaaaccgaaguuuuguggaccucaaacaguauuguuguguuuuguggcaccucagguacauauggaacaggcucauggccugauggggcggacaucaaucucaugccuauauaa

SEQ ID NO: 48415 - RNA, 1413 nt, Artificial Sequence
  derived and/or modified CDS sequence (wt) from neuraminidase__InfluenzaA__ACD56283
augaauccaaaucaaaaaauaauaaccauuggaucaaucaguauggcaaucgggauaauuagucuaauguugcaaauaggaaauauuauuucaauaugggcuagucacucaauccaaacuggaagucaaaaccacacuggaauaugcaaccaaagaaucaucacauaugaaaacagcaccugggugaaucacacauauguuaguauuaacaacacuaauguuguugcuggaaaggacaaaacuucagugacauuggccggcaauucaucucuuuguucuaucaguggaugggcuauauacacaaaagacaacagcauaagaauuggcuccaaaggagauguuuuugucauaagagaaccuuucauaucauguucucauuuggaaugcaggaccuuuuuucugacccaaggugcucuauuaaaugauaaacauucaaauggaaccguuaaggaccgaaguccuuauagggccuuaaugagcuguccucuaggugaagcuccguccccauacaauucaaaguuugaaucaguugcauggucagcaagcgcaugccaugauggcaugggcugguuaacaaucggaauuucugguccagacaauggagcuguggcuguacuaaaauacaacggaauaauaacugaaaccauaaaaaguuggaaaaagcgaauauugagaacacaagagucugaaugugucugugugaacgggucauguuucaccauaaugaccgauggcccgaguaauggggccgccucguacaaaaucuucaagaucgaaaaggggaagguuacuaaaucaauagaguuaaaugcacccaauuuucauuaugaggaauguuccuguuacccagacacuggcacagugauguguguaugcagggacaacuggcaugguucaaaucgaccuugggugucuuuuaaucaaaacuuggauuaucaaauaggauacaucugcaguggaguguucggugacaauccgcgucccaaagauggaaagggcagcuguaauccagugacuguugauggagcagacgggguuaagggguuuucauacaaauaugguaaugguguuuggauaggaagaacuaaaaguaacagacuuagaaagggguuugagaugauuugggauccuaauggauggacagauaccgacagugauuucucagugaaacaggauguuguggcaauaacugauuggucaggguacaguggaaguuucguucaacauccugaguuaacaggauuggacuguauaagaccuugcuucuggguugaguuagucagaggacugccuagagaaaauacaacaaucuggacuagugggagcagcauuucuuuuuguggcguugauagugauacugcaaacuggucuuggccagacggugcugaguugccguucaccauugacaaguag

SEQ ID NO: 48416 - RNA, 1410 nt, Artificial Sequence
  derived and/or modified CDS sequence (wt) from neuraminidase__InfluenzaA__ACD56305
augaauccaaaucaaaagauaauaacaauuggcucugucucucucaccauugcaacaguaugcuuccucaugcagauugccauccugguaacuacuguaacauugcauuuuaagcaacaugagugcgacucccccgcgagcaaccaaguaaugccaugugaaccaauaauaauagaaaggaacauaacagagauaguguauuugaauaacaccaccauagagaaagagaucugccccgaaguaguggaauacagaaauuggucaaagccgcaaugucaaauuacaggauuugcaccuuuuucuaaggacaauucaauccggcuuucugcugguggggacauuugggugacgagagaaccuuaugugucaugcgauccuggcaaguguuaucaauuugcacucgggcaggggaccacacuagacaacaaacauucaaaugacacaauacaugauagaaucccucaucgaacccuauuaaugaaugaguuggguguuccauuucauuuaggaaccaggcaaguguguguagcaugguccagcucaaguugucacgauggaaaagcaugguugcauguuugugucacuggggaugauaaaaaugcaacugcuagcuucauuuaugacgggaggcuuguggacaguauugguucauggucucaaaauauccucaggacccaggagucggaaugcguuuguaucaauggaacuugcacaguaguaaugacugauggaagugcuucaggaagagccgauacuaggauacuauucauugaagaggggaaaauuguccauauuagcccauugucaggaagugcucagcauguagaggaguguuccuguuauccucgauauccugacgucagauguaucugcagagacaacuggaaaggcucuaauaggcccgucauagacauaaauauggaagauuauagcauugauuccaguuaugugugcucagggcuaguuggcgacacacccagaaacgacgacagaucuagcaauagcaauugcagggauccuaacaaugagagagggaauccaggagugaaaggcugggccuuugacaauggagaugacguguggaugggaagaacgaucagcaaggauuuacgcucagguuaugaaacuuucaaagucauuggugguugguccacaccuaauuccaaaucgcagaucaauagacaggucauaguugacagcaauaauuggucagguuacucugguauuuucucuguugagggcaaaagcugcaucaauaggugcuuuuauguggaguugauaaggggaaggcaacaggagacuagaguaugguggaccucaaacaguauuguuguguuuuguggcacuucagguacuuauggaacaggcucauggccugauggggcgaacaucaauuucaugccuauauaa

SEQ ID NO: 48417 - RNA, 1410 nt, Artificial Sequence
  derived and/or modified CDS sequence (wt) from neuraminidase__InfluenzaA__ACD56316
augaauccaaaucaaaagauaauaacaauuggcucugucucucucaccauugcaacaguaugcuuccucaugcagauugccauccugguaacuacugugacauugcauuuuaagcaacaugagugcgacucccccgcgagcaaccaaguaaugccgugugaaccaauaauaauagaaaggaacauaacagagauaguguauuugaauaacaccaccauagagaaagagaucugccccgaaguaguggaauacagaaauuggucaaagccgcaaugucaaauuacaggauuugcaccuuuuucuaaggacaauucaauccggcuuucugcugguggggacauuugggugacgagagaaccuuaugugucaugcgauccuggcaaguguuaucaauuugcacucgggcaggggaccacacuagacaacaaacauucaaaugacacaauacaugauagaaucccucaucgaacccuauuaaugaaugaguuggguguuccauuucauuuaggaaccaggcaaguguguguagcaugguccagcucaaguugucacgauggaaaagcaugguugcauguuugugucacuggggaugauaaaaaugcaacugcuagcuucauuuaugacgggaggcuuauggacaguauugguucauggucucaaaauauccucaggacccaggagucggaaugcguuuguaucaaugggacuugcacaguaguaaugacugauggaagugcuucaggaagagccgauacuagaauacuauucauugaagaggggaaaauuguccauauuagcccauugucaggaagugcucagcauguagaggaguguuccuguuauccucgauauccugacgucagauguaucugcagagacaacuggaaaggcucuaauaggcccgucauagacauaaauauggaagauuauagcauugauuccaguuaugugugcucagggcuuguuggcgacacacccagaaacgacgacagaucuagcaauaguaauugcaggaauccuaacaaugagagagggaauccaggagugaaaggcugggccuuugacaauggagaugacguguggaugggaagaacgaucagcaaggauuuacgcucagguuaugaaacuuucaaagucauuggugguugguccacaccuaauuccaaaucgcagaucaauagacaggucauaguugacagcaauaauuggucagguuacucugguauuuucucuguugagggcaaaagaugcaucaauaggugcuuuuauguggaguugauaaggggaaggcaacaggagacuagaguaugguggaccucaaacaguauuguuguguuuuguggcacuucagguacuuauggaacaggcucauggccugauggggcgaacaucaauuucaugccuauauaa

SEQ ID NO: 48418 - RNA, 1410 nt, Artificial Sequence
  derived and/or modified CDS sequence (wt) from neuraminidase__InfluenzaA__ACD56327
augaauccaaaucaaaagauaauaacaauugguucugucucucucacuauugcaacaguaugcuuccucaugcagauugccauccuggcaacuacugugacauugcauuuuaagcaacaugagugcgacucccccgcgagcaaccaaguaaugccaugugaaccaauaauaauagaaaggaacauaacagagauaguguauuugaauaacaccaccauagagaaagagauuugccccgaaguaguggaauacagaaauuggucaaagccgcaaugucaaaucacaggauuugcaccuuuuucuaaggacaauucaauccggcuuucugcugguggggacauuugggugacgagagaaccuuaugugucaugcgauccuagcaagugucaucaauuugcacucgggcaggggaccacacuagaaaacaaacauucaaauggcacaaaacaugauagaaucccucaucgaacccuauuaaugaaugaguuggguguuccauuucauuuaggaaccaaacaaguguguguagcaugguccagcucaaguugucacgauggaaaagcaugguugcauguuugugucacuggggaugauagaaaugcaacugcuagcuucauuuauggcgggaggcuuguggacaguauuguuucauggucucaaaauauccucaggacccaggagucggaaugcguuuguaucaaugggacuugcacagugguaaugacugauggaagugcaucaggaagagccgauacuagaauacuauucauuaaagaggggaaaauuguccauauuagcccauugucaggaagugcucagcauauagaggaguguuccuguuacccucgauauccugacgucagauguaucugcagagacaacuggaagggcucuaauaggcccguuauagacauaaauauggaagauuauagcauugauuccagcuaugugugcucagggcuuguuggcgacacacccaggaacgacgacagcucuagcaauagcaauugcagggauccuaacaaugagagagggaauccaggagugaaaggcugggccuuugacaauggagaugauguauggaugggaagaacaaucagcaaagauucacgcucagguuaugaaacuuucaaagucauuggugguugguccacaccuaauuccaaaucgcaggucaauagacaggucauaguugacagcaauaauuggucugguuacucugguauuuucucuguugagggcaaaagcugcaucaauaggugcuuuuauguggaguugauaaggggaaggccacaggagacuagaguaugguggacaucaaacaguauuguuguguuuuguggcacuucagguacuuauggaacaggcucauggccugauggggcgaacaucaauuucaugccuauauaa

SEQ ID NO: 48419 - RNA, 1410 nt, Artificial Sequence
  derived and/or modified CDS sequence (wt) from neuraminidase__InfluenzaA__ACD85190
augaauccaaaucaaaagauaauaacaauuggcucugucucucucaccauugcaacaguaugcuuccucaugcagauugccauccugguaacuacuguaacauugcauuuuaagcaacaugagugcgacucccccgcgagcaaccaaguaaugccgugugaaccaauaauaauagaaaggaacauaacagagauaguguauuugaauaacaccaccauagagaaagagaucugccccaaaguaguggaauacagaaauuggucaaagccgcaaugucaaauuacaggauuugcaccuuuuucuaaggacaauucaauccggcuuucugcugguggggacauuugggugacgagagaaccuuaugugucaugcgauccuggcaaguguuaucaauuugcacucgggcaggggaccacacuagacaacaaacauucaaaugacacaauacaugauagaaucccucaucgaacccuauuaaugaaugaguuggguguuccauuucauuuaggaaccaggcaaguguguauagcaugguccagcucaaguugucacgauggaaaagcauggcugcauguuugugucacuggggaugauaaaaaugcaacugcuagcuucauuuaugacgggaggcuuguggacaguauugguucauggucucaaaauauccucaggacccaggagucggaaugcguuuguaucaaugggacuugcacaguaguaaugacugauggaagugcuucaggaagagccgauacuagaauacuauucauugaagaggggaaaauuguccauauuagcccauugucaggaagugcucagcauguagaggaguguuccuguuauccucgauauccugacgucagauguaucugcagagacaacuggaaaggcucuaauaggcccaucauagacauaaauauggaagauuauagcauugauuccaguuaugugugcucagggcuuguuggcgacacacccagaaacgacgacagaucuagcaauagcaauugcaggaauccuaacaaugagagagggaauccaggagugaaaggcugggccuuugacaauggagaugacguguggaugggaagaacgaucagcaaggauuuacgcucagguuaugaaacuuucaaagucauuggugguugguccacaccuaauuccaaaucgcagaucaauagacaagucauaguugacagcaauaauuggucagguuacucugguauuuucucuguugagggcaaaagcugcaucaauaggugcuuuuauguggaguugauaaggggaaggcaacaggagacuagaguaugguggaccucaaacaguauuguuguguuuuguggcacuucagguacuuauggaacaggcucauggccugauggggcgaacaucaauuucaugccuauauaa

SEQ ID NO: 48420 - RNA, 1410 nt, Artificial Sequence
  derived and/or modified CDS sequence (wt) from neuraminidase__InfluenzaA__ACD85201
augaauccaaaucaaaagauaauaacaauuggcucugucucucucaccauugcaacaguaugcuuccucaugcagauugccauccugguaacuacuguaacauugcauuuuaagcaacaugagugcgacucccccgcgagcaaccaaguaaugccgugugaaccaauaauaauagaaaggaacauaacagagauaguguauuugaauaacaccaccauagagaaggagauaugccccaaaguaguggaauacagaaauuggucaaagccgcaaugucaaauuacaggauuugcaccuuuuucuaaggacaacucaauccggcuuucugcugguggggacauuugggugacgagagaaccuuaugugucaugcgauccuggcaaguguuaucaauuugcacucgggcaagggaccacacuagacaacaaacauucaaaugacacaauacaugauagaaucccucaucgaacccuauuaaugaaugaguuggguguuccauuucauuuaggaaccaggcaaguguguauagcaugguccagcucaaguugucacgauggaaaagcauggcugcauguuugugucacuggggaugauaaaaaugcaacugcuagcuucauuuaugacgggaggcuuguggacaguauuaguucauggucucaaaauauccucaggacccaggagucggaaugcguuuguaucaaugggacuugcacaguaguaaugacugauggaagugcuucaggaagagccgauacuagaauacuauucauugaagaggggaaaauuguccauauuagcccauugucuggaagugcucagcauguagaggaguguuccuguuauccucgauauccugacgucagauguaucugcagagacaacuggaaagguucuaauaggcccgucauagacauaaauauggaagauuauagcauugauuccaguuaugugugcucagggcuuguuggcgacacacccagaaacgacgacagaucuagcaauagcaauugcaggaauccuaacaaugagagagggaauccaggagugaaaggcugggccuuugacaauggagaugacguguggaugggaagaacgaucagcaaggauuuacgcucagguuaugaaacuuucaaagucauuggugguugguccacaccuaauuccaaaucgcagaucaauagacaggucauaguugacagcaauaauuggucagguuacucugguauuuucucuguugagggcaaaagcugcaucaauaggugcuuuuauguggaguugauaaggggaaggcaacaggagacuagaguaugguggaccucaaacaguauuguuguguuuuguggcacuucagguacuuauggaacaggcucauggccugauggggcgaacaucaauuucaugccuauauaa

SEQ ID NO: 48421 - RNA, 1410 nt, Artificial Sequence
  derived and/or modified CDS sequence (wt) from neuraminidase__InfluenzaA__ACD85212
augaauccaaaucaaaagauaauaacaauuggcucugucucucucaccauugcaacaguaugcuuccucaugcagauugccauccuggcaacuacugugacauugcauuuuaaacaacaugagugcgacucccccgcgagcaaccaaguaaugccaugugaaccaauaauaauagaaaggaacauaaaagagauaguguauuugaauaacaccaccauagagaaagagauuugccccgaaguaguggaauacagaaauuggucaaagccgcaaugucaaauuacaggauuugcaccuuuuucuaaggacaauucaauccggcuuucugcugguggggacauuugggugacgagagaaccuuaugugucaugcgauccuggcaaguguuaucaauuugcacucgggcaggggaccacacuagacaacaaacauucaaauggcacaauacaugauagaaucccucaucgaacccuauuaaugaaugaguuggguguuccauuucauuuaggaaccaaacaaguguguguagcaugguccagcucaaguugucacgauggaaaagcaugguugcauguuugugucacuggggaugauagaaaugcgacugcuagcuucauuuaugacgggaggcuuguggacaguauugguucauggucucaaaauauccucaggacccaggagucggaaugcguuuguaucaaugggacuugcacaguaguaaugacugauggaagugcaucaggaagagccgauacuagaauacuauucauuaaagaggggaaaauuguccauauuagcccauugucaggaagugcucagcauauagaggaguguuccuguuacccucgauauccugacgucagauguaucugcagagacaacuggaaaggcucuaauaggcccguuauagacauaaauauggaagauuauagcauugauuccaguuaugugugcucagggcuuguuggcgacacacccaggaacgacgacagcucuagcaauagcaauugcagggauccuaacaaugagagagggaauccaggagugaaaggcugggccuuugacaauggagaugauguauggaugggaagaacaaucaacaaagauucacgcucagguuaugaaacuuucaaagucauuggugguugguccacaccuaauuccaaaucgcaggucaauagacaggucauaguugacaacaauaauuggucugguuacucugguauuuucucuguugagggcaaaagcugcaucaauaggugcuuuuauguggaguugauaaggggaaggccacaggagacuagaguaugguggaccucaaacaguauuguuguguuuuguggcacuucagguacuuauggaacaggcucauggccugauggggcgaacaucaauuucaugccuauauaa

SEQ ID NO: 48422 - RNA, 1410 nt, Artificial Sequence
  derived and/or modified CDS sequence (wt) from neuraminidase__InfluenzaA__ACD85223
augaauccaaaucaaaagauaauaacaauuggcucugucucucucaccauugcaacagcaugcuuccucaugcagauugccauccugguaacuacuguaacauugcauuuuaagcaacaugagugcgacucccccgcgagcaaccaaguaaugccgugugaaccaauaauaauagaaaggaacauaacagagauaguguauuugaauaacaccaccauagagaaagagaucugccccaaaguaguggaauacagaaauuggucaaagccgcaaugucaaauuacaggauuugcaccuuuuucuaaggacaauucaauccggcuuucugcugguggggacauuugggugacgagagaaccuuaugugucaugcgauccuggcaaguguuaucaauuugcacucgggcaggggaccacacuagacaacaaacauucaaaugacacaauacaugauagaaucccucaucgaacccuauuaaugaaugaguuggguguuccauuucauuuaggaaccaggcaaguguguauagcaugguccagcucaaguugucacgauggaaaagcauggcugcauguuugugucacuggggaugauaaaaaugcaacugcuagcuucauuuaugacgggaggcuuguggacaguauugguucauggucucaaaauauccucaggacccaggagucggaaugcguuuguaucaaugggacuugcacaguaguaaugacugauggaagugcuucaggaagagccgauacuagaauacucuucauugaagaggggaaaauuguccauauuagcccauugucaggaagugcucagcauguagaggaguguuccuguuauccucgauauccugacgucagauguaucugcagagacaacuggaaaggcucuaauaggcccaucauagacauaaauauggaagauuauagcauugauuccaguuaugugugcucagggcuuguuggcgacacacccagaaacgacgacagaucuagcaauagcaauugcaggaauccuaacaaugagagagggaauccaggagugaaaggcugggccuuugacaauggagaugacguguggaugggaagaacgaucagcaaggauuuacgcucagguuaugaaacuuucaaagucauuggugguugguccacaccuaauuccaaaucgcagaucaauagacaagucauaguugacagcaauaauuggucagguuacucugguauuuucucuguugagggcaaaagcugcaucaauaggugcuuuuauguggaguugauaaggggaaggcaacaggagacuagaguaugguggaccucaaacaguauuguuguguuuuguggcacuucagguacuuauggaacaggcucauggccugauggggcgaacaucaauuucaugccuauauaa

SEQ ID NO: 48423 - RNA, 1410 nt, Artificial Sequence
  derived and/or modified CDS sequence (wt) from neuraminidase__InfluenzaA__ACD85234
augaauccaaaucaaaagauaauaacaauuggcucugucucucucaccauugcaacaguaugcuuccucaugcagauugccauccuggcaacuacugugacauugcauuuuaagcaacaugagugcgacucccccgcgagcaaccaaguaaugccaugugaaccaauaauaauagaaaggaacauaacagagauaguguauuugaauaacaccaccauagagaaagagauuugccccgaaguaguggaauacagaaauuggucaaagccgcaaugucaaauuacaggauuugcaccuuuuucuaaggacaauucaauccggcuuucugcugauggggacauuugggugacgagagaaccuuaugugucaugcgauccuggcaaguguuaucaauuugcacucgggcaggggaccacacuagacaacaaacauucaaauggcacaauacaugauagaaucccucaucgaacccuauuaaugaaugaguuggguguuccauuucauuuaggaaccaaacaaguguguguagcaugguccagcucaaguugucacgauggaaaagcaugguugcauguuugugucacuggggaugauagaaaugcgacugcuagcuucauuuaugacgggaggcuuguggacaguauugguucauggucucaaaauauccucaggacccaggagucggaaugcguuuguaucaaugggacuugcacaguaguaaugacugauggaagugcaucaggaagagccgauacuagaauacuauucauuaaagaggggaaaauuguccauauuagcccauugucaggaagugcucagcauauagaggaguguuccuguuacccucgauauccugacgucagauguaucugcagagacaacuggaaaggcucuaauaggcccguuauagacauaaauauggaagauuauagcauugauuccaguuaugugugcucagggcuuguuggcgacacacccaggaacgacgacagcucuagcaauagcaauugcagggauccuaacaaugagagagggaauccaggagugaaaggcugggccuuugacaauggagaugauguauggaugggaagaacaaucagcaaagauuuacgcucagguuaugaaacuuucaaagucauuggugguugguccacaccuaauuccaaaucgcaggucaauagacaggucauaguugacaacaauaauuggucugguuacucugguauuuucucuguugagggcaaaagcugcaucaauaggugcuuuuauguggaguugauaaggggaaggccacaggagacuagaguaugguggaccucaaacaguauuguuguguuuuguggcacuucagguacuuauggaacaggcucauggccugauggggcgaacaucaauuucaugccuauauaa

SEQ ID NO: 48424 - RNA, 1410 nt, Artificial Sequence
  derived and/or modified CDS sequence (wt) from neuraminidase__InfluenzaA__ACD85245
augaauccaaaucaaaagauaauaacaauuggcucugucucucucaucauugcaacaguaugcuuccucaugcagauugccauccugguaacuacuguaacauugcauuuuaagcaacaugagugcgacucccccgcgagcaaccaaguaaugccgugugaaccaauaauaauagaaaggaacauaacagagauaguguauuugaauaacaccaccauagagaaagagauaugccccagaguaguggaauacagaaauuggucaaagccgcaaugucaaauuacaggauuugcaccuuuuucuaaggacaauucaauccggcuuucugcugguggggacauuugggugacgagagaaccuuaugugucaugcgauccuggcaaguguuaucaauuugcacucgggcaggggaccacacuagacaacaaacauucaaaugacacaauacaugauagaaucccucaucgaacccuauuaaugaaugaguuggguguuccauuucauuuaggaaccaggcaaguguguauagcaugguccagcucaaguugucacgauggaaaagcauggcugcauguuuguaucacuggagaugauaaaaaugcaacugcuagcuucauuuaugacgggaggcuuguggacaguauugguucauggucucaaaauauccucagaacccaggagucggaaugcguuuguaucaaugggacuugcacaguaguaaugacugauggaagugcuucaggaagagccgauacuagaauacuauucauugaagaggggaaaauuguccauauuagcccauugucaggaagugcucagcauguagaggaguguuccuguuauccucgauauccuggcgucagauguaucugcagagacaacuggaaaggcucuaauaggcccgucguagacauaaauauggaagauuauagcauugauuccaguuaugugugcucagggcuuguuggcgacacaccuagaaacgacgacagaucuagcaauagcaauugcaggaauccuaacaaugagagagggaaucaaggagugaaaggcugggcuuuugacaauggagaugacguguggaugggaagaacgaucagcaaggauuuacgcucagguuaugaaacuuucaaagucauuggugguugguccacaccuaauuccaaaucgcagaucaauagacaagucauaguugacagcgaugaucggucagguuacucugguauuuucucuguugagggcaaaagcugcaucaauaggugcuuuuauguggaguugauaaggggaaggaaacaggagacuagaguaugguggaccucaaacaguauuguuguguuuuguggcacuucagguaccuauggaacaggcucauggccugauggggcgaacaucaauuucaugccuauauaa

SEQ ID NO: 48425 - RNA, 1410 nt, Artificial Sequence
  derived and/or modified CDS sequence (wt) from neuraminidase__InfluenzaA__ACD85454
augaauccaaaucaaaagauaauaacgauuggcucuguuucucucaccauuuccacaauaggcuucuucaugcaaacugccaucuugauaacuacuguaacauugcauuucaagcaauaugaauucaacucccccccaaacaaccaagugaugcugugugaaccaacaauaauagaaagaaacauaacagagauaguguaucugaccaacaccaccauagagaaggaaauaugccccaaacuagcagaauacagaaauuggucaaagccgcaaugugacauuacaggauuugcaccuuuuucuaaggacaauucgauuaggcuuuccgcugguggggacaucugggugacaagagaaccuuaugugucaugcgauccugacaaguguuaucaauuugcccuuggacagggaacaacacuaaacaacgugcauucaaaugacacaguacguaauaggaccccuuaucggacccuauugaugaaugaguuagguguuccuuuucaucuggggaccaagcaagugugcauagcaugguccagcucaaguugucacgauggaaaagcauggcugcauguuuguauaacgggggaugauaaaaaugcaacugcuagcuucauuuacaaugggaggcuuguagauaguauuguuucaugguccaaagaaauccucaggacccaggagucagaaugcguuuguaucaauggaacuuguacaguaguaaugacugaugggagugcuucaggaaaagcugauacuaaaauacuauucauugaggaggggaaaaucguucauacuagcacauugucaggaagugcucagcaugucgaggagugcuccugcuauccucgauauccuggugucagaugugucugcagagacaacuggaaaggcuccaauaggcccaucguagauauaaacauaaaggaucauagcauuguuuccaguuauguguguucaggacuuguuggagacacacccagaaaaaacgacagcuccagcaguagccauuguuuggauccuaacaaugaagaagguggucauggagugaaaggcugggccuuugaugauggaaaugacguguggaugggaagaacgaucagcgagaagucacgcuuaggguaugaaaccuucaaagucauugaaggcugguccaacccuaaguccaaauugcagauaaauaggcaagucauaguugacagagguaauagguccgguuauucugguauuuucucuguugaaggcaaaagcugcaucaaucggugcuuuuauguggaguugauaaggggaagaaaagaggaaacugaagucuuguggaccucaaacaguauuguuguguuuuguggcaccucagguacauauggaacaggcucauggccugauggggcggacaucaaucucaugccuauauaa

SEQ ID NO: 48426 - RNA, 1410 nt, Artificial Sequence
  derived and/or modified CDS sequence (wt) from neuraminidase__InfluenzaA__ACD85465
augaauccaaaucaaaagauaauaacgauuggcucuguuucucucaccauuuccacaauaggcuucuucaugcaaacugccaucuugauaacuacuguaacauugcauuucaagcaauaugaauucaacucccccccaaacaaccaagugaugcugugugaaccaacaauaauagaaagaaacauaacagagauaguguaucugaccaacaccaccauagagaaggaaauaugccccaaacuagcagaauacagaaauuggucaaaaccgcaaugugacauuacaggauuugcaccuuuuucuaaggacaauucgauuaggcuuuccgcugguggggacaucugggugacaagagaaccuuaugugucaugcgauccugacaaguguuaucaauuugcccuuggacagggaacaacacuaaacaacgugcauucaaaugacacaguacgugauaggaccccuuaucggacccuauugaugaaugaguuagguguuccuuuucaucuggggaccaagcaagugugcauagcaugguccagcucaaguugucacgauggaaaagcauggcugcauguuuguauaacgggggaugauaaaaaugcaacugcuagcuucauuuacaaugggaggcuuguagauaguauuguuucaugguccaaagaaauccucaggacccaggagucagaaugcguuuguaucaauggaacuuguacaguaguaaugacugaugggagugcuucaggaaaagcugauacuaaaauacuauucauugaggaggggaaaaucguucauacuagcacauugucaggaagugcucagcaugucgaggagugcuccugcuauccucgauauccuggugucagaugugucugcagagacaacuggaaaggcuccaauaggcccaucguagauauaaacauaaaggaucauagcauuguuuccaguuauguguguucaggacuuguuggagacacacccagaaaaaacgacagcuccagcaguagccauuguuuggauccuaacaaugaagaagguggucauggagugaaaggcugggccuuugaugauggaaaugacguguggaugggaagaacgaucagcgagaagucacgcuuaggguaugaaaccuucaaagucauugaaggcugguccaacccuaaguccaaauugcagauaaauaggcaagucauaguugacagagguaauagguccgguuauucugguauuuucucuguugaaggcaaaagcugcaucaaucggugcuuuuauguggaguugauaaggggaagaaaagaggaaacugaagucuuguggaccucaaacaguauuguuguguuuuguggcaccucagguacauauggaacaggcucauggccugauggggcggacaucaaucucaugccuauauaa

SEQ ID NO: 48427 - RNA, 1410 nt, Artificial Sequence
  derived and/or modified CDS sequence (wt) from neuraminidase__InfluenzaA__ACD85487
augaauccaaaucaaaagauaauaacgauuggcucuguuucucucaucauuuccacaauaugcuucuucaugcaaacugccaucuugauaacuacuguaacauugcauuucaagcaauaugaauucaacucccccccaaacaaccaagugaugcugugugaaccaacaauaauagaaagaaacauaacagagauaguguaucugaccaacaccaccauagagaaggaaauaugccccaaacuagcagaauacagaaauuggucaaagccgcaaugugacauuacaggauuugcaccuuuuucuaaggacaauucgauuaggcuuuccgcugguggggacaucugggugacaagagaaccuuaugugucaugcgauccugacaaguguuaucaauuugcccuuggacagggaacaacacuaaacaacgugcauucaaaugacacaguacguaauaggaccccuuaucggacccuauugaugaaugaguuagguguuccuuuucaucuggggaccaagcaagugugcauagcaugguccagcucaaguugucacgauggaaaagcauggcugcauguuuguauaacgggggaugauaaaaaugcaacugcuagcuucauuuacaaugggaggcuuguagauaguauuguuucaugguccaaagaaauccucaggacccaggagucagaaugcguuuguaucaauggaacuuguacaguaguaaugacugaugggagugcuucaggaaaagcugauacuaaaauacuauucauugaggaggggaaaaucguucauacuagcacauugucaggaagugcucagcaugucgaggagugcuccugcuauccucgauauccuggugucagaugugucugcagagacaacuggaaaggcuccaauaggcccaucguagauauaaacauaaaggaucauagcauuguuuccaguuauguguguucaggacuuguuggagacacacccagaaaaaacgacagcuccagcaguagccauuguuuggauccuaacaaugaagaagguggucauggagugaaaggcugggccuuugaugauggaaaugacguguggaugggaagaacgaucagcgagaagucacgcuuaggguaugaaaccuucaaagucauugaaggcugguccaacccuaauuccaaauugcagauaaauaggcaagucauaguugacagagguaauagguccgguuauucugguauuuucucuguugaaggcaaaagcugcaucaaucggugcuuuuauguggaguugauaaggggaagaaaagaggaaacugaagucuuguggaccucaaacaguauuguuguguuuuguggcaccucagguacauauggaacaggcucauggccugauggggcggacaucaaucucaugccuauauaa

SEQ ID NO: 48428 - RNA, 1410 nt, Artificial Sequence
  derived and/or modified CDS sequence (wt) from neuraminidase__InfluenzaA__ACD85498
augaauccaaaucaaaagauaauaacgauuggcucuguuucucucaucaucuccacaauaugcuucuucaugcaaacugccaucuugauaacuacuguaacauugcauuucaagcaauaugaauucaacucccccccaaacaaccaagugaugcugugugaaccaacaauaauagaaagaaacauaacagagauaguguaucugaccaacaccaccauagagaaggaaauaugccccaaacuagcagaauacagaaauuggucaaagccgcaaugugacauuacaggauuugcaccuuuuucuaaggacaauucgauuaggcuuuccgcugguggggacaucugggugacaagagaaccuuaugugucaugcgauccugacaaguguuaucaauuugcccuuggacagggaacaacacuaaacaacgugcauucaaaugacacaguacgugauaggaccccuuaucggacccuauugaugaaugaguuagguguuccuuuucaucuggggaccaagcaagugugcauagcaugguccagcucaaguugucacgauggaaaagcauggcugcauguuuguauaacgggggaugauaaaaaugcaacugcuagcuucauuuacaaugggaggcuuguagauaguauuguuucaugguccaaagaaauccucaggacccaggagucagaaugcguuuguaucaauggaacuuguacaguaguaaugacugaugggagugcuucaggaaaagcugauacuaaaauacuauucauugaggaggggaaaaucguucauacuagcacauugucaggaagugcucagcaugucgaggagugcuccugcuauccucgauauccuggugucagaugugucugcagagacaacuggaaaggcuccaauaggcccaucguagauauaaacauaaaggaucauagcauuguuuccaguuauguguguucaggacuuguuggagacacacccagaaaaaacgacagcuccagcaguagccauuguuuggauccuaacaaugaagaagguggucauggagugaaaggcugggccuuugaugauggaaaugacguguggaugggaagaacgaucagcgagaagucacgcuuaggguaugaaaccuucaaagucauugaaggcugguccaacccuaaguccaaauugcagauaaauaggcaagucauaguugacagagguaauagguccgguuauucugguauuuucucuguugaaggcaaaagcugcaucaaucggugcuuuuauguggaguugauaaggggaagaaaagaggaaacugaagucuuguggaccucaaacaguauuguuguguuuuguggcaccucagguacauauggaacaggcucauggccugauggggcggacaucaaucucaugccuauauaa

SEQ ID NO: 48429 - RNA, 1410 nt, Artificial Sequence
  derived and/or modified CDS sequence (wt) from neuraminidase__InfluenzaA__ACD85509
augaauccaaaucaaaagauaauaacgauuggcucuguuucucucaccauuuccacaauaugcuucuucaugcaaacugccaucuugauaacuacuguaacauugcauuucaagcaauaugaauucaacucccccccaaacaaccaagugaugcugugugaaccaacaauaauagaaagaaacauaacagagauaguguaucugaccaacaccaccauagagaaggaaauaugccccaaacuagcagaauacagaaauuggucaaagccgcaaugugacauuacaggauuugcaccuuuuucuaaggacaauucgauuaggcuuuccgcugguggggacaucugggugacaagagaaccuuaugugucaugcgauccugacaaguguuaucaauuugcccuuggacagggaacaacacuaaacaacgugcauucaaaugacacaguacguaauaggaccccuuaucggacccuauugaugaaugaguuagguguuccuuuucaucuggggaccaagcaagugugcauagcaugguccagcucaaguugucacgauggaaaagcauggcugcauguuuguauaacgggggaugauaaaaaugcaacugcuagcuucauuuacaaugggaggcuuguagauaguauuguuucaugguccaaagaaauccucaggacccaggagucagaaugcguuuguaucaauggaacuuguacaguaguaaugacugaugggagugcuucaggaaaagcugauacuaaaauacuauucauugaggaggggaaaaucguucauacuagcacauugucaggaagugcucagcaugucgaggagugcuccugcuauccucgauauccuggugucagaugugucugcagagacaacuggaaaggcuccaauaggcccaucguagauauaaacauaaaggaucauagcauuguuuccaguuauguguguucaggacuuguuggagacacacccagaaaaaacgacagcuccagcaguagccauuguuuggauccuaacaaugaagaagguagucguggagugaaaggcugggccuuugaugauggaaaugacguguggaugggaagaacgaucagcgagaagucacgcuuaggguaugaaaccuucaaagucauugaaggcugguccaacccuaaguccaaauugcagauaaauaggcaagucauaguugacagagguaauagguccgguuauucugguauuuucucuguugaaggcaaaagcugcaucaaucggugcuuuuauguggaguugauaaggggaagaaaagaggaaacugaagucuuguggaccucaaacaguauuguuguguuuuguggcaccucagguacauauggaacaggcucauggccugauggggcggacaucaaucucaugccuauauaa

SEQ ID NO: 48430 - RNA, 1410 nt, Artificial Sequence
  derived and/or modified CDS sequence (wt) from neuraminidase__InfluenzaA__ACD85520
augaauccaaaucaaaagauaauaacgauuggcucuguuucucucaucauuuccacaauaggcuucuucaugcaaacugccaucuugauaacuacuguaacauugcauuucaagcaauaugaauucaacucccccccaaacaaccaagugaugcugugugaaccaacaauaauagaaagaaacauaacagagauaguguaucugaccaacaccaccauagagaaggaaauaugccccaaacuagcagaauacagaaauuggucaaagccgcaaugugacauuacaggauuugcaccuuuuucuaaggacaauucgauuaggcuuuccgcugguggggacaucugggugacaagagaaccuuaugugucaugcgauccugacaaguguuaucaauuugcccuuggacagggaacaacacuaaacaacgugcauucaaaugacacaguacgugauaggaccccuuaucggacccuauugaugaaugaguuagguguuccuuuucaucuggggaccaagcaagugugcauagcaugguccagcucaaguugucacgauggaaaagcauggcugcauguuuguauaacgggggaugauaaaaaugcaacugcuagcuucauuuacaaugggaggcuuguagauaguauuguuucaugguccaaagaaauccucaggacccaggagucagaaugcguuuguaucaauggaacuuguacaguaguaaugacugaugggagugcuucaggaaaagcugauacuaaaauacuauucauugaggaggggaaaaucguucauacuagcacauugucaggaagugcucagcaugucgaggagugcuccugcuauccucgauauccuggugucagaugugucugcagagacaacuggaaaggcuccaauaggcccauuguagauauaaacauaaaggaucauagcauuguuuccaguuauguguguucaggacuuguuggagacacacccagaaaaaacgacagcuccagcaguagccauuguuuggauccuaacaaugaagaagguggucauggagugaaaggcugggccuuugaugauggaaaugacguguggaugggaagaacgaucagcgagaagucacgcuuaggguaugaaaccuucaaagucauugaaggcugguccaacccuaaguccaaauugcagauaaauaggcaagucauaguugacagagguaauagguccgguuauucugguauuuucucuguugaaggcaaaagcugcaucaaucggugcuuuuauguggaguugauaaggggaagaaaagaggaaacugaagucuuguggaccucaaacaguauuguuguguuuuguggcaccucagguacauauggaacaggcucauggccugauggggcggacaucaaucucaugccuauauaa

SEQ ID NO: 48431 - RNA, 1410 nt, Artificial Sequence
  derived and/or modified CDS sequence (wt) from neuraminidase__InfluenzaA__ACD85553
augaauccaaaucaaaagauaauaacgauuggcucuguuucucucaccauuuccacaauaggcuucuucaugcaaacugccaucuugauaacuacuguaacauugcauuucaagcaauaugaauucaacucccccccaaacaaccaagugaugcugugugaaccaacaauaauagaaagaaacauaacagagauaguguaucugaccaacaccaccauagagaaggaaauaugccccaaacuagcagaauacagaaauuggucaaagccgcaaugugacauuacaggauuugcaccuuuuucuaaggacaauucgauuaggcuuuccgcugguggggacaucugggugacaagagaaccuuaugugucaugcgauccugacaaguguuaucaauuugcccuuggacagggaacaacacuaaacaacgugcauucaaaugacacaguacgugauaggaccccuuaucggacccuauugaugaaugaguuagguguuccuuuucaucuggggaccaagcaagugugcauagcaugguccagcucaaguugucacgauggaaaagcauggcugcauguuuguauaacgggggaugauaaaaaugcaacugcuagcuucauuuacaaugggaggcuuguagauaguauuguuucaugguccaaagaaauccucaggacccaggagucagaaugcguuuguaucaauggaacuuguacaguaguaaugacugaugggagugcuucaggaaaagcugauacuaaaauacuauucauugaggaggggaaaaucguucauacuagcacauugucaggaagugcucagcaugucgaggagugcuccugcuauccucgauauccuggugucagaugugucugcagagacaacuggaaaggcuccaauaggcccaucguagauauaaacauaaaggaucauagcauuguuuccaguuauguguguucaggacuuguuggagacacacccagaaaaaacgacagcuccagcaguagccauuguuuggauccuaacaaugaagaagguggucauggagugaaaggcugggccuuugaugauggaaaugacguguggaugggaagaacgaucagcgagaagucacgcuuaggguaugaaaccuucaaagucauugaaggcugguccaacccuaaguccaaauugcagauaaauaggcaagucauaguugacagagguaauagguccgguuauucugguauuuucucuguugaaggcaaaagcugcaucaaucggugcuuuuauguggaguugauaaggggaagaaaagaggaaacugaagucuuguggaccucaaacaguauuguuguguuuuguggcaccucagguacauauggaacaggcucauggccugauggggcggacaucaaucucaugccuauauaa

SEQ ID NO: 48432 - RNA, 1410 nt, Artificial Sequence
  derived and/or modified CDS sequence (wt) from neuraminidase__InfluenzaA__ACD85564
augaauccaaaucaaaagauaauaacgauuggcucuguuucucucaucauuuccacaauaugcuucuucaugcaaacugccaucuugauaacuacuguaacauugcauuucaagcaauaugaauucaacucccccccaaacaaccaagugaugcugugugaaccaacaauaauagaaagaaacauaacagagacagcgcaucugaccaacaccaccauagagaaggaaauaugccccaaacuagcagaauacagaaauuggucaaagccgcaaugugacauuacaggauuugcaccuuuuucuaaggacaauucgauuaggcuuuccgcugguggggacaucugggugacaagagaaccuuaugugucaugcgauccugacaaguguuaucaauuugcccuuggacagggaacaacacuaaacaacgugcauucaaaugacacaguacgugauaggaccccuuaucggacccuauugaugaaugaguuagguguuccuuuucaucuggggaccaagcaagugugcauagcaugguccagcucaaguugucacgauggaaaagcauggcugcauguuuguauaacgggggaugauaaaaaugcaacugcuagcuucauuuacaaugggaggcuuguagauaguauuguuucaugguccaaagaaauccucaggacccaggagucagaaugcguuuguaucaauggaacuuguacaguaguaaugacugaugggagugcuucaggaaaagcugauacuaaaauacuauucauugaggaggggaaaaucguucauacuagcacauugucaggaagugcucagcaugucgaggagugcuccugcuauccucgauauccuggugucagaugugucugcagagacaacuggaaaggcuccaauaggcccaucguagauauaaacauaaaggaucauagcauuguuuccaguuauguguguucaggacuuguuggagacacacccagaaaaaacgacagcuccagcaguagccauuguuuggauccuaacaaugaagaagguggucauggagugaaaggcugggccuuugaugauggaaaugacguguggaugggaagaacgaucagcgagaagucacgcuuaggguaugaaaccuucaaagucauugaaggcugguccaacccuaaguccaaauugcagauaaauaggcaagucauaguugacagagguaauagguccgguuauucugguauuuucucuguugaaggcaaaagcugcaucaaucggugcuuuuauguggaguugauaaggggaagaaaagaggaaacugaagucuuguggaccucaaacaguauuguuguguuuuguggcaccucagguacauauggaacaggcucauggccugauggggcggacaucaaucucaugccuauauaa

SEQ ID NO: 48433 - RNA, 1410 nt, Artificial Sequence
  derived and/or modified CDS sequence (wt) from neuraminidase__InfluenzaA__ACD85575
augaauccaaaucaaaagauaauaacgauuggcucuguuucucucaucauuuccacaauaugcuucuucaugcaaacugccaucuugauaacuacuguaacauugcauuucaagcaauaugaauucaacucccccccaaacaaccaagugaugcugugugaaccaacaauaauagaaagaaacauaacagagauaguguaucugaccaacaccaccauagagaaggaaauaugccccaaacuagcagaauacagaaauuggucaaagccgcaaugugacauuacaggauuugcaccuuuuucuaaggacaauucgauuaggcuuuccgcugguggggacaucugggugacaagagaaccuuaugugucaugcgauccugacaaguguuaucaauuugcccuuggacagggaacaacacuaaacaacgugcauucaaaugacacaguacgugauaggaccccuuaucggacccuauugaugaaugaguuagguguuccuuuucaucuggggaccaagcaagugugcauagcaugguccagcucaaguugucacgauggaaaagcauggcugcauguuuguauaacgggggaugauaaaaaugcaacugcuagcuucauuuacaaugggaggcuuguagauaguauuguuucaugguccaaagaaauccucaggacccaggagucagaaugcguuuguaucaauggaacuuguacaguaguaaugacugaugggagugcuucaggaaaagcugauacuaaaauacuauucauugaggaggggaaaaucguucauacuagcacauugucaggaagugcucagcaugucgaggagugcuccugcuauccucgauauccuggugucagaugugucugcagagacaacuggaaaggcuccaauaggcccaucguagauauaaacauaaaggaucauagcauuguuuccaguuauguguguucaggacuuguuggagacacacccagaaaaaacgacagcuccagcaguagccauuguuuggauccuaacaaugaagaagguggucauggagugaaaggcugggccuuugaugauggaaaugacguguggaugggaagaacgaucagcgagaagucacgcuuaggguaugaaaccuucaaagucauugaaggcugguccaaccauaaguccaaauugcagauaaauaggcaagucauaguugacagagguaauagguccgguuauucugguauuuucucuguugaaggcaaaagcugcaucaaucggugcuuuuauguggaguugauaaggggaagaaaagaggaaacugaagucuuguggaccucaaacaguauuguuguguuuuguggcaccucagguacauauggaacaggcucauggccugauggggcggacaucaaucucaugccuauauaa

SEQ ID NO: 48434 - RNA, 1410 nt, Artificial Sequence
  derived and/or modified CDS sequence (wt) from neuraminidase__InfluenzaA__ACD85586
augaauccaaaucaaaagauaauaacgauuggcucuguuucucucaccauuuccacaauaugcuucuucaugcaaacugccaucuugauaacuacuguaacauugcauuucaagcaauaugaauucaacucccccccaaacaaccaagugaugcugugugaaccaacaauaauagaaagaaacauaacagagauaguguaucugaccaacaccaccauagagaaggaaauaugccccaaacuagcagaauacagaaauuggucaaagccgcaaugugacauuacaggauuugcaccuuuuucuaaggacaauucgauuaggcuuuccgcugguggggacaucugggugacaagagaaccuuaugugucaugcgauccugacaaguguuaucaauuugcccuuggacagggaacaacacuaaacaacgugcauucaaaugacacaguacgugauaggaccccuuaucggacccuauugaugaaugaguuagguguuccuuuucaucuggggaccaagcaagugugcauagcaugguccagcucaaguugucacgaugggaaagcauggcugcauguuuguauaacgggggaugauaaaaaugcaacugcuagcuucauuuacaaugggaggcuuguagauaguauuguuucaugguccaaagaaauccucaggacccaggagucagaaugcguuuguaucaauggaacuuguacaguaguaaugacugaugggagugcuucaggaaaagcugauacuaaaauacuauucauugaggaggggaaaaucguucauacuagcacauugucaggaagugcucagcaugucgaggagugcuccugcuauccucgauauccuggugucagaugugucugcagagacaacuggaaaggcuccaauaggcccaucguagauauaaacauaaaggaucauagcauuguuuccaguuauguguguucaggacuuguuggagacacacccagaaaaaacgacagcuccagcaguagccauuguuuggauccuaacaaugaagaagguggucguggagugaaaggcugggccuuugaugauggaaaugacguguggaugggaagaacgaucagcgagaagucacgcuuaggguaugaaaccuucaaagucauugaaggcugguccaacccuaaguccaaauugcagacaaauaggcaagucauaguugacagagguaauagguccgguuauucugguauuuucucuguugaaggcaaaagcugcaucaaucggugcuuuuauguggaguugauaaggggaagaaaagaggaaacugaagucuuguggaccucaaacaguauuguuguguuuuguggcaccucagguacauauggaacaggcucauggccugauggggcggacaucaaucucaugccuauauaa

SEQ ID NO: 48435 - RNA, 1410 nt, Artificial Sequence
  derived and/or modified CDS sequence (wt) from neuraminidase__InfluenzaA__ACD93582
augaauccaaaucaaaagauaauaacgauuggcucuguuucucucaccauuuccacaauaugcuucuucaugcaaauugccaucuuggcaacuacuguaacauugcauuucaagcaauaugaauucaacucccccccaaacaaccaagugaugcugugugaaccaacaauaauagaaagaaacauaacagagauaguguaucugaccaacaccaccauagagaaggaaauaugccccaaacuagcagaauacagaaauuggucaaagccgcaaugugacauuacaggauuugcaccuuuuucuaaggacaauucgauuaggcuuuccgcugguggggacaucugggugacaagagaaccuuaugugucaugcgauccugacaaguguuaucaauuugcccuuggacagggaacaacacuaaacaacgugcauucaaaugacacaguacgugguaggaccccuuaucggacccuauugaugaaugaguuagguguuccuuuucaucuggggaccaagcaagugugcauagcaugguccagcucaaguugucacgauggaaaagcauggcugcauguuuguauaacgggggaugauaaaaaugcaacugcuagcuucauuuacaaugggaggcuuguagauaguauuguuucaugguccaaagaaauccucaggacccaggagucagaaugcguuuguaucaauggaacuuguacaguaguaaugacugaugggagugcuucaggaaaagcugauacuaaaauacuauucauugaggaggggaaaaucguucauacuagcacauugucaggaagugcucagcaugucgaggagugcuccugcuauccucgauauccuggugucagaugugucugcagagacaacuggaaaggcuccaauaggcccaucguagauauaaacauaaaggaucauagcauuguuuccaguuauguguguucaggacuuguuggagacacacccagaaaaaacgacagcuccagcaguagccauuguuuggauccuaacaaugaagaagguggucauggagugaaaggcugggccuuugaugauggaaaugacguguggaugggaagaacgaucagcgagaagucacgcuuaggguaugaaaccuucaaagucauugaaggcugguccaacccuaaguccaaauugcagauaaauaggcaagucauaguugacaaagguaauagguccgguuauucugguauuuucucuguugaaggcaaaagcugcaucaaucggugcuuuuauguagaguugauaaggggaagaaaagaggaaacugaagucuuguggaccucaaacaguauuguuguguuuuguggcaccucagguacauauggaacaggcucauggccugauggggcggacaucaaucucaugccuauauaa

SEQ ID NO: 48436 - RNA, 1410 nt, Artificial Sequence
  derived and/or modified CDS sequence (wt) from neuraminidase__InfluenzaA__ACF09403
augaauccaaaucaaaagauaauaacgauuggcucuguuucucucaccauuuccacaauaugcuucuucaugcaaauugccaucuugauaacuacuguaacauugcauuucaagcaauaugaauucaacucccccccaaacaaccaagugaugcugugugaaccaacaauaauagaaagaaacauaacagagauaguguaucugaccaacaccaccauagagaaggaaauaugccccaaacuagcagaauacagaaauuggucaaagccgcaauguaacauuacaggauuugcaccuuucucuaaggacaauucgauuaggcuuuccgcugguggggacaucugggugacaagagaaccuuaugugucaugcgauccugacaaguguuaucaauuugcccuuggacagggaacaacacuaaacaacgugcauucaaaugacacaguacaugauaggaccccuuaucggacccuauugaugaaugaguuagguguuccauuucaucuggggaccaagcaagugugcauagcaugguccagcucaaguugucacgauggaaaagcauggcugcauguuuguguaacgggggaugauaaaaaugcaacugcuagcuucauuuacaaugggaggcuuguagauaguauuguuucaugguccaaagaaauccucaggacccaggagucagaaugcguuuguaucaauggaacuuguacaguaguaaugacugaugggagugcuucaggaaaagcugauacuaaaauacuauucauugaggaggggaaaaucguucauacuagcacauugucaggaagugcucagcaugucgaggagugcuccugcuauccucgauauccuggugucagaugugucugcagagacaacuggaaaggcuccaauaggcccauaguagauauaaacauaaaggauuauagcauuguuuccaguuaugugugcucaggacuuguuggagacacacccagaaaaaacgacagcuccagcaguagccauugcuuggauccuaacaaugaagaagguggucauggagugaaaggcugggccuuugaugauggaaaugacguguggaugggaagaacgaucagcgagaaguuacgcucaggauaugaaaccuucaaagucauugaaggcugguccaacccuaauuccaaauugcagauaaauaggcaagucauaguugacagagguaauagguccgguuauucugguauuuucucuguugaaggcaaaagcugcaucaaucggugcuuuuauguggaguugauaaggggaagaaaagaggaaacugaagucuuguggaccucaaacaguauuguuguguuuuguggcaccucagguacauauggaacaggcucauggccugauggggcggacaucaaucucaugccuauauaa

SEQ ID NO: 48437 - RNA, 1410 nt, Artificial Sequence
  derived and/or modified CDS sequence (wt) from neuraminidase__InfluenzaA__ACF22151
augaauccaaaucaaaagauaauaacgauuggcucuguuucccucaccauuuccacaauaugcuucuucaugcaaauugccauccugauaacuacuguaacauugcauuucaagcaauaugaauucaacucucccccaaacaaccaagugaugcugugugaaccaacaauaauagaaagaaacauaacagagauaguguaucugaccaacaccaccauagagaaggaaauaugccccaaacuagcagaauacagaaauuggucaaagccgcaauguaacauuacaggauuugcaccuuuuucuaaggacaauucgauucggcuuuccgcugguggggacaucugggugacaagagaaccuuaugugucaugcgauccugacaaguguuaucaauuugcccuuggacagggaacaacacuaaacaacgugcauucaaaugacacaguacaugauaggaccccuuaucggacccuauugaugaaugaguuggguguuccauuucaucuggggaccaagcaggugugcauagcaugguccagcucaaguugucacgauggaaaagcauggcugcauguuuguguaacgggggaugaugaaaaugcaacugcuagcuucauuuacaaugggaggcuuguagauaguauuguuucaugguccaaaaaaauccucaggacccaggagucagaaugcguuuguaucaauggaacuuguacaguaguaaugacugaugggagugcuucaggaaaagcugauacuaaaauacuauucauugaggaggggaaaaucguucauacuagcacauugucaggaagugcucagcaugucgaggagugcuccuguuauccucgauacccuggugucagaugugucugcagagacaacuggaaaggcuccaauaggcccaucguagauauaaacauaaaggauuauagcauuguuuccaguuaugugugcucaggacuuguuggagacacacccagaaaaaacgacagcuccagcaguagccauugcuuggauccaaacaaugaggaagguggucauggagugaaaggcugggccuuugaugauggaaaugacguguggaugggaagaacgaucagcgagaaguuacgcucaggauaugaaaccuucaaagucauugaaggcugguccaacccuaacuccaaauugcagauaaauaggcaagucauaguugacagagguaauagguccgguuauucugguauuuucucuguugaaggcaaaagcugcaucaaucggugcuuuuauguggaguugauaaggggaagaaaacaggaaacugaagucuuguggaccucaaacaguauuguuguguuuuguggcaccucagguacauauggaacaggcucauggccugauggggcggacaucaaucucaugccuauauaa

SEQ ID NO: 48438 - RNA, 1410 nt, Artificial Sequence; identical to SEQ ID NO: 46107
  derived and/or modified CDS sequence (wt) from neuraminidase__InfluenzaA__ACF22246

SEQ ID NO: 48439 - RNA, 1410 nt, Artificial Sequence; identical to SEQ ID NO: 46107
  derived and/or modified CDS sequence (wt) from neuraminidase__InfluenzaA__ACF22257

SEQ ID NO: 48440 - RNA, 1410 nt, Artificial Sequence; identical to SEQ ID NO: 46107
  derived and/or modified CDS sequence (wt) from neuraminidase__InfluenzaA__ACF22279

SEQ ID NO: 48441 - RNA, 1410 nt, Artificial Sequence; identical to SEQ ID NO: 46107
  derived and/or modified CDS sequence (wt) from neuraminidase__InfluenzaA__ACF22290

SEQ ID NO: 48442 - RNA, 1410 nt, Artificial Sequence; identical to SEQ ID NO: 46107
  derived and/or modified CDS sequence (wt) from neuraminidase__InfluenzaA__ACF22301

SEQ ID NO: 48443 - RNA, 1410 nt, Artificial Sequence; identical to SEQ ID NO: 46107
  derived and/or modified CDS sequence (wt) from neuraminidase__InfluenzaA__ACF22312

SEQ ID NO: 48444 - RNA, 1410 nt, Artificial Sequence
  derived and/or modified CDS sequence (wt) from neuraminidase__InfluenzaA__ACF22323
augaauccaaaucaaaagauaauaacaauuggcucugucucucucaccauugcaacaguaugcuuccucaugcagauugccauccugguaacuacuguaacauugcauuuuaagcaauaugagugcgacucccccgcgagcaaccaaguaaugccguaugaaccaauaauaauagaaaggaacauaacagagauaguguauuugaauaacaccaccauagagaaagagauaugccccaaaguaguggaauacagaaauuggucaaagccgcaaugucaaauuacaggauuugcaccuuuuucuaaggacaauucaauccggcuuucugcugguggggacauuugggugacgagagaaccuuaugugucaugcgaucauggcaaguguuaucaauuugcacucgggcaggggaccacacuagacaacaaacauucaaaugacacaauacaugauagaaucccucaucgaacccuauuaaugaaugaguuggguguuccauuucauuuaggaaccaggcaaguguguauagcaugguccagcucaaguugucacgauggaaaagcauggcugcauguuuguaucacuggggaugacaaaaaugcaacugcuagcuucauuuaugacgggaggcuuguggacaguauugguucauggucucaaaauauccucagaacccaggagucggaaugcguuuguaucaaugggacuugcacaguaguaaugacugauggaagugcuucaggaagagccgauacuagaauacuauucauugaagaggggaaaauuguccauauuagcccauugucaggaagugcucagcauguagaagaguguuccuguuauccuagauauccuggcgucagauguaucugcagagacaacuggaaaggcucuaauaggcccgucguagacauaaauauggaagauuauagcauugauuccaguuaugugugcucagggcuuguuggcgacacaccuagaaacgacgacagaucuagcaauagcaauugccggaauccuaacaaugagagagggaaucaaggagugaaaggcugggccuuugacaauggagaugacguguggaugggaagaacgaucagcaaggauuuacgcucagguuaugaaacuuucaaagucauuggugguugguccacaccuaauuccaaaucgcagaucaauagacaagucauaguugacagcgauaaucggucagguuacucugguauuuucucuguugagggcaaaagcugcaucaauaggugcuuuuauguggaguugauaaggggaaggaaacaggagacuagagugugguggaccucaaacaguauuguuguguuuuguggcacuucagguaccuauggaacaggcucauggccugauggggcgaacaucaauuucaugccuauauaa

SEQ ID NO: 48445 - RNA, 1410 nt, Artificial Sequence
  derived and/or modified CDS sequence (wt) from neuraminidase__InfluenzaA__ACF22334
augaauccaaaucaaaagauaauaacaauuggcucugucucucucaccauugcaacaguaugcuuccucaugcagauugccauccugguaacuacuguaacauugcauuuuaagcaauaugagugcgacucccccgcgagcaaccaaguaaugccgugugaaccaauaauaauagaaaggaacauaacagagauaguguauuugaauaacaccaccauagagaaagagauaugccccaaaguaguggaauacagaaauuggucaaagccgcaaugucaaauuacaggauuugcaccuuuuucuaaggacaauucaauccggcuuucugcugguggggacauuugggugacgagagaaccuuaugugucaugcgaucauggcaaguguuaucaauuugcacucgggcaggggaccacacuagacaacaaacauucaaaugacacaauacaugauagaaucccucaucgaacccuauuaaugaaugaguuggguguuccauuucauuuaggaaccaggcaaguguguauagcaugguccagcucaaguugucacgauggaaaagcauggcugcauguuuguaucacuggggaugacaaaaaugcaacugcuagcuucauuuaugacgggaggcuuguggacaguauugguucauggucucaaaauauccucagaacccaggagucggaaugcguuuguaucaaugggacuugcacaguaguaaugacugauggaagugcuucaggaagagccgauacuagaauacuauucauugaagaggggaaaauuguccauauuagcccauugucaggaagugcucagcauguagaagaguguuccuguuauccuagauauccuggcgucagauguaucugcagagacaacuggaaaggcucuaauaggcccgucguagacauaaauauggaagauuauagcauugauuccaguuaugugugcucagggcuuguuggcgacacaccuagaaacgacgacagaucuagcaauagcaauugccggaauccuaacaaugagagagggaaucaaggagugaaaggcugggccuuugacaauggagaugacguguggaugggaagaacgaucagcaaggauuuacgcucagguuaugaaacuuucaaagucauuggugguugguccacaccuaauuccaaaucgcagaucaauagacaagucauaguugacagcgauaaucggucagguuacucugguauuuucucuguugagggcaaaagcugcaucaauaggugcuuuuauguggaguugauaaggggaaggaaacaggagacuagagugugguggaccucaaacaguauuguuguguuuuguggcacuucagguaccuauggaacaggcucauggccugauggggcgaacaucaauuucaugccuauauaa

SEQ ID NO: 48446 - RNA, 1410 nt, Artificial Sequence; identical to SEQ ID NO: 46107
  derived and/or modified CDS sequence (wt) from neuraminidase__InfluenzaA__ACF22367

SEQ ID NO: 48447 - RNA, 1410 nt, Artificial Sequence
  derived and/or modified CDS sequence (wt) from neuraminidase__InfluenzaA__ACF22378
augaauccaaaucaaaagauaauaacaauuggcucugucucucucaccauugcaacaguaugcuuccucaugcagauugccauccugguaacuacuguaacauugcauuuuaagcaauaugagugcgacucccccgcgagcaaccaaguaaugccgugugaaccaauaauaauagaaaggaacauaacagagauaguguauuugaauaacaccaccauagagaaagagauaugccccaaaguaguggaauacagaaauuggucaaagccgcaaugucaaauuacaggauuugcaccuuuuucuaaggacaauucaauccggcuuucugcugguggggacauuugggugacgagagaaccuuaugugucaugcgaucauggcaaguguuaucaauuugcacucgggcaggggaccacacuagacaacaaacauucaaaugacacaauacaugauagaaucccucaucgaacccuauuaaugaaugaguuggguguuccauuucauuuaggaaccaggcaaguguguauagcaugguccagcucaaguugucacgauggaaaagcauggcugcauguuuguaucacuggggaugacaaaaaugcaacugcuagcuucauuuaugacgggaggcuuguggacaguauugguucauggucucaaaauauccucagaacccaggagucggaaugcguuuguaucaaugggacuugcacaguaguaaugacugauggaagugcuucaggaagagccgauacuagaauacuauucauugaagaggggaaaauuguccauauuagcccauugucaggaagugcucagcauguagaagaguguuccuguuauccuagauauccuggcgucagauguaucugcagagacaacuggaaaggcucuaauaggcccgucguagacauaaauauggaagauuauagcauugauuccaguuaugugugcucagggcuuguuggcgacacaccuagaaacgacgacagaucuagcaauagcaauugcaagaauccuaacaaugagagagggaaucaaggagugaaaggcugggccuuugacaauggagaugacguguggaugggaagaacgaucagcaaggauuuacgcucagguuaugaaacuuucaaagucauuggugguugguccacaccuaauuccaaaucgcagaucaauagacaagucauaguugacagcgauaaucggucagguuacucugguauuuucucuguugagggcaaaagcugcaucaauaggugcuuuuauguggaguugauaaggggaaggaaacaggagacuagagugugguggaccucaaacaguauuguuguguuuuguggcacuucagguaccuauggaacaggcucauggccugauggggcgaacaucaauuucaugccuauauaa

SEQ ID NO: 48448 - RNA, 1410 nt, Artificial Sequence
  derived and/or modified CDS sequence (wt) from neuraminidase__InfluenzaA__ACF22389
augaauccaaaucaaaagauaauaacaauuggcucugucucucucaccauugcaacaguaugcuuccucaugcagauugccauccugguaacuacuguaacauugcauuuuaagcaauaugagugcgacucccccgcgagcaaccaaguaaugccgugugaaccaauaauaauagaaaggaacauaacagagauaguguauuugaauaacaccaccauagagaaagagauaugccccaaaguaguggaauacagaaauuggucaaagccgcaaugucaaauuacaggauuuguaccuuuuucuaaggacaauucaauccggcuuucugcugguggggacauuugggugacgagagaaccuuaugugucaugcgaucauggcaaguguuaucaauuugcacucgggcaggggaccacacuagacaacaaacauucaaaugacacaauacaugauagaaucccucaucgaacccuauuaaugaaugaguuggguguuccauuucauuuaggaaccaggcaaguguguauagcaugguccagcucaaguugucacgauggaaaagcauggcugcauguuuguaucacuggggaugacaaaaaugcaacugcuagcuucauuuaugacgggaggcuuguggacaguauugguucauggucucaaaauauccucagaacccaggagucggaaugcguuuguaucaaugggacuugcacaguaguaaugacugauggaagugcuucaggaagagccgauacuagaauacuauucauugaagaggggaaaauuguccauauuagcccauugucaggaagugcucagcauguagaagaguguuccuguuauccuagauauccuggcgucagauguaucugcagagacaacuggaaaggcucuaauaggcccgucguagacauaaauauggaagauuauagcauugauuccaguuaugugugcucagggcuuguuggcgacacaccuagaaacgacgacagaucuagcaauagcaauugcaggaauccuaacaaugagagagggaaucaaggagugaaaggcugggccuuugacaauggagaugacguguggaugggaagaacgaucagcaaggauuuacgcucagguuaugaaacuuucaaagucauuggugguugguccacaccuaauuccaaaucgcagaucaauagacaagucauaguugacagcgauaaucggucagguuacucugguauuuucucuguugagggcaaaagcugcaucaauaggugcuuuuauguggaguugauaaggggaaggaaacaggagacuagagugugguggaccucaaacaguauuguuguguuuuguggcacuucagguaccuauggaacaggcucauggccugauggggcgaacaucaauuucaugccuauauaa

SEQ ID NO: 48449 - RNA, 1410 nt, Artificial Sequence
  derived and/or modified CDS sequence (wt) from neuraminidase__InfluenzaA__ACF22400
augaauccaaaucaaaagauaauaacaauuggcucugucucucucacuauugcaacaguaugcuuccucaugcagauugccauccugguaacuacuguaacauugcauuuuaaacaauaugagugcgacucccccgcgagcaaccaaguaaugccgugugaaccaauaauaauagaaaggaacauaacagagauaguguauuugaauaacaccaccauagagaaagagauaugccccaaaguaguggaauacagaaauuggucaaagccgcaaugucaaauuacaggauuugcaccuuuuucuaaggacaauucaauccggcuuucugcugguggggacauuugggugacgagagaaccuuaugugucaugcgaucauggcaaguguuaucaauuugcacucgggcaggggaccacacuagacaacaaacauucaaaugacacaauacaugauagaaucccucaucgaacccuauuaaugaaugaguuggguguuccauuucauuuaggaaccaggcaaguguguauagcaugguccagcucaaguugucacgauggaaaagcauggcugcauguuuguaucacuggggaugacaaaaaugcaacugcuagcuucauuuaugacgggaggcuuauggacaguauugguucauggucucaaaauauccucagaacccaggagucggaaugcguuuguaucaaugggacuugcacaguaguaaugacugauggaagugcuucaggaagagccgauacuagaauacuauucauugaagaggggaaaauuguccauauuagcccauugucaggaagugcucagcauguagaagaguguuccuguuauccuagguauccuggcgucagauguaucugcagagacaacuggaaaggcucuaauaggcccgucguagacauaaauauggaagauuauagcauugauuccaguuaugugugcucagggcuuguuggcgacacaccuagaaacgacgacagaucuagcaauagcaauugcaggaauccuaacaaugagagagggaaucaaggagugaaaggcugggccuuugacaauggagaugacguguggaugggaagaacgaucagcaaggauuuacgcucagguuaugaaacuuucaaagucauuggugguugguccacaccuaauuccaaaucgcagaucaauagacaagucauaguugacagcgauaaucggucagguuacucugguauuuucucuguugagggcaaaagcugcaucaauaggugcuuuuauguggaguugauaaggggaaggaaacaggagacuagagugugguggaccucaaacaguauuguuguguuuuguggcacuucagguaccuauggaacaggcucauggccugauggggcgaacaucaauuucaugccuauauaa

SEQ ID NO: 48450 - RNA, 1410 nt, Artificial Sequence; identical to SEQ ID NO: 48090
  derived and/or modified CDS sequence (wt) from neuraminidase__InfluenzaA__ACF22411

SEQ ID NO: 48451 - RNA, 1413 nt, Artificial Sequence
  derived and/or modified CDS sequence (wt) from neuraminidase__InfluenzaA__ACF33772
augaacccaaaucaaaaaauaauaaccauuggaucaaucaguauagcaaucggaauaauuagucuaauguugcaaauaggaaauauuauuucaauaugggcuagucacucaauccaaacuggaagucaaaaccacacuggaauaugcaaccaaagaaucaucacauaugaaaacagcaccugggugaaucacacauauguuaauauuaacaacacuaauguuguugcuggaaaggacaaaacuccagugacauuggccggcaacucaucucuuuguucuaucaguggaugggcuauauacacaaaagacaacagcauaagaauuggcuccaaaggagauguuuuugucauaagagaaccuuucauaucauguucucacuuggaaugcaaaaccuuuuuucugacccaaggcgcucuauuaaaugacaaacauucaaaugggaccguaaaggacagaaguccuuauagggccuuaaugagcuguccucuaggugaagcuccguccccauacaauucaaaguucgaaucaguugcauggucagcaagcgcaugccaugauggcauaggcugguuaacaaucggaauuucugguccagacaauggagcuguggcuguacuaaaauacaacggaauaauaacuggaaccauaaaaaguuggaaaaagcaaauauuaagaacacaagagucugaaugugucuguaugaacgggucauguuucaccauaaugaccgaugguccgaguaauggggccgccucguacaaaauuuucaagaucgaaaaggggaagguuacuaaaucaauggaguugaaugcacccaauuuuuauuaugaggaauguucuuguuacccagacacuggcacagugauguguguaugcagggacaacuggcaugguucaaaucgaccuugggugucuuuuaaucaaaacuuggauuaucaaauaggauacaucugcaguggaguguucggugacaauccgcgucccaaagauggagagggcagcugcaauccagugacuguugauggagcaaacggaguaaaaggguuuucauacaaauaugguaaugguguuuggauaggaaggaccaaaaguaacagaauuagaaagggguuugagaugauuugggauccuaauggauggacaaauaccgacagugauuucucagugaaacaggauauuguagcaauaacugauuggucaggguacagcggaaguuucguccaacauccugaguuaacaggauuggacuguauaagaccuugcuucuggguugaguuagucagagggcugccuagagaaaauacaacaaucuggacuagugggagcagcauuucuuuuuguggcguuaauagugauauugcaaacuggucuuggccagacggugcugaguugccguucaccauugacaaguag

SEQ ID NO: 48452 - RNA, 1410 nt, Artificial Sequence
  derived and/or modified CDS sequence (wt) from neuraminidase__InfluenzaA__ACF33778
augaauccaaaucaaaagauaauaacgauuggcucuguuucucucaccauuuccacaauaugcuucuucaugcaaauugccaucuugauaacuacuguaacauugcauuucaagcaauaugaauucagcucccccccaaacaaccaagugaugcugugugaaccaacaauaauagaaagaaacauaacagagauaguguaucugaccaacaccaccauagagaaggaaauaugccccaaacuagcagaauacagaaauuggucaaagccgcaaugugacauuacaggauuugcaccuuuuucuaaggacaauucgauuaggcuuuccgcugguggggacaucugggugacaagagaaccuuaugugucaugcgauccugacaaguguuaucaauuugcucuuggacagggaacaacacuaaacaacgugcauucaaaugacacaguacaugauaggaccccuuaucggacccuauugaugaaugagcuagguauuccauuucaucuggggaccaagcaagugugcauagcaugguccagcucaaguugucacgauggaaaagcauggcugcauguuuguguaacgggggaugacaaaaaugcaacugcuagcuucauuuacaaugggaggcuuguagauaguauuguuucaugguccaaagaaauccucaggacccaggagucagaaugcguuuguaucaauggaacuuguacaguaguaaugacugaugggagugcuucaggaaaagcugauacuaaaauacuauucauugaggaggggaaaaucguucauacuagcacauugucaggaagugcucagaaugucgaggagugcuccugcuauccucgauauccuggugucagaugugucugcagagacaauuggaaaggcuccaauaggcccaucguagauauaaacauaaaggauuauagcauuguuuccagauaugugugcucaggacuuguuggagacacacccagaaaaaacgacagcuccagcaguagccauugcuugaauccuaacaaugaagaagguggucauggagugaaaggcugggccuuugaugauggaaaugacguguggaugggaagaacgaucagcgagaagucacgcucaggauaugaaaccuucaaagucauugaaggcugguccaacccuaauuccaaauugcagauaaacaggcaagucauaguugacagagguaauagguccgguuauucugguauuuucucuguugaaggcaaaagcugcaucaaucggugcuuuuauguggaguugauaaggggaagaaaagaggaaacugaaguuuuguggaccucaaacaguauuguuguguuuuguggcaccucagguacauauggaacaggcucauggccugauggggcggacaucaaucucaugccuauauaa

SEQ ID NO: 48453 - RNA, 1410 nt, Artificial Sequence
  derived and/or modified CDS sequence (wt) from neuraminidase__InfluenzaA__ACF33785
augaauccaaaucaaaagauaauaacgauuggcucuguuucucucaccauuuccacaauaugcuucuucaugcaaauugccaucuugauaacuacuguaacauugcauuucaagcaauaugaauucaacucccccccaaacaaccaagugaugcugugugaaccaacaauaauagaaagaaacauaacagagauaguguaucugaccaacaccaccauagagaaggaaaugugccccaaacuagcagaauacagaaauuggucaaagccgcaaugugacauuacaggauuugcaccuuuuucuaaggacaauucgauuaggcuuuccgcugguggggacaucugggugacaagagaaccuuaugugucaugcgauccugacaaguguuaucaauuugcccuuggacagggaacaacacuaaacaacgugcauucaaaugacacaguacauguuaggaccccuuaucggacccuauugaugaaugaguuagguguuccauuucaucuggggaccaagcaagugugcauagcaugguccagcucaaguugucacgauggaaaagcauggcugcauguuuguguaacgggggaugauaaaaaugcaacugcuagcuucauuuacaaugggaggcuuguagauaguauuguuucaugguccaaagauauccucaggacccaggagucagaaugcguuuguaucaauggaacuugcacaguaguaaugacugaugggagugcuucaggaaaagcugauacuaaaauacuauucauugaggaggggaaaaucguucauacuagcacauugucaggaagugcucagcauguugaggagugcuccugcuauccucgauauccuggugucagaugugucugcagagacaacuggaaaggcuccaauaggcccauuguagauauaaacauaaaggauuauagcauuguuuccaguuaugugugcucaggacuuguuggagacacacccagaaaaaccgacagcuccagcaguagccauugcuuggauccuaacaaugaagaagguggucauggagugaaaggcugggccuuugaugauggaaaugacguguggaugggaagaacgaucagcgagaaguuacgcuuaggauaugaaaccuucaaagucauugaaggcugguccaacccuaauuccaaauugcagauaaauaggcaagucauaguugacagagguaauagguccgguuauucugguauuuucucuguugaaggcaaaagcugcaucaaucggugcuuuuauguggaguugauaaggggaagaaaagaggaaacugaagucuuguggaccucaaacaguauuguuguauuuuguggaaccucagguacauauggaacaggcucauggccugauggggcggacaucaaucucaugccuauauaa

SEQ ID NO: 48454 - RNA, 1413 nt, Artificial Sequence
  derived and/or modified CDS sequence (wt) from neuraminidase__InfluenzaA__ACF33787
augaauccaaaucaaaaaauaauaaccauuggaucaaucaguauagcaaucggaauaauuagucuaauguugcaaauaggaaauauuauuucaauaugggcuagucacucaauccaaacuggaagucaaaaccacacuggaauaugcaaccaaagaaucaucacauaugaaaacagcaccugggugaaucacacauauguuaauauuaacaacacuaauguuguugcuggaaaggacaaaacuccagugacauuggccggcaacucaucucuuuguucuaucaguggaugggcuauauacacaaaagacaacagcauaagaauuggcuccaaaggagauguuuuugucauaagagaaccuuucauaucauguucucacuuggaaugcaaaaccuuuuuucugacccaaggcgcucuauuaaaugacaaacauucaaaugggaccguaaaggacagaaguccuuauagggccuuaaugagcuguccucuaggugaagcuccguccccauacaauucaaaguucgaaucaguugcauggucagcaagcgcaugccaugauggcauaggcugguuaacaaucggaauuucugguccagacaauggagcuguggcuguacuaaaauacaacggaauaauaacuggaaccauaaaaaguuggaaaaagcaaauauuaagaacacaagagucugaaugugucuguaugaacgggucauguuucaccauaaugaccgaugguccggguaauggggccgccucguacaaaauuuucaagaucgaaaaggggaagguuacuaaaucaauggaguugaaugcacccaauuuucauuaugaggaauguucuuguuacccagacacuggcacagugauguguguaugcagggacaacuggcaugguucaaaucgaccuugggugucuuuuaaucaaaacuuggauuaucaaauaggauacaucugcaguggaguguucggugacaauccgcgucccaaagauggagagggcagcugcaauccagugacuguugauggagcaaacggaguaaaaggguuuucauacaaauaugguaaugguguuuggauaggaaggaccaaaaguaacagaauuagaaagggguuugagaugauuugggauccuaauggauggacaaauaccgacagugauuucucagugaaacaggauauuguagcaauaacugauuggucaggguacagcggaaguuucguccaacauccugaguuaacaggauuggacuguauaagaccuugcuucuggguugaguuagucagagggcugccuaaagaaaauacaacaaucuggacuagugggagcagcauuucuuuuuguggcguuaauagugguauugcaaacuggucuuggccagacggugcugaguugccguucaccauugacaaguag

SEQ ID NO: 48455 - RNA, 1410 nt, Artificial Sequence
  derived and/or modified CDS sequence (wt) from neuraminidase__InfluenzaA__ACF33798
augaauccaaaucaaaagauaauaacgauuggcucuguuucucucaccauuuccacaauaugcuucuucaugcaaauugccaucuugauaacuacuguaacauugcauuucaagcaauaugaauucaacucccccccaaacaaccaagugaugcugugugaaccaacaauaauagaaagaaacauaacagagauaguguaucugaccaacaccaccauagagaaggaaauaugccccaaacuagcagaauacagaaauuggucaaagccgcaaugugacaucacaggauuugcaccuuuuucuaaggacaauucgauuaggcuuuccgcugguggggacaucugggugacaagagaaccuuaugugucaugcgauccugacaaguguuaucaauuugcccuuggacagggaacaacacuaaacaacgugcauucaaaugacacaguacgugauaggaccccuuaucggacccuauugaugaaugaguuagguguuccuuuucaucuggggaccaagcaagugugcauagcaugguccagcucaaguugucacgauggaaaagcauggcugcauguuuguauaacgggggaugauaaaaaugcaacugcuagcuucauuuacaaugggaggcuuguagauaguauuguuucaugguccaaagaaauccucaggacccaggagucagaaugcguuuguaucaauggaacuuguacaguaguaaugacugaugggagugcuucaggaaaagcugauacuaaaauacuauucauugaggaggggaaaaucguucauacuagcacauugucaggaagugcucagcaugucgaggagugcuccugcuauccucgauauccuggugucagaugugucugcagagacaacuggaaaggcuccaauaggcccaucguagauauaaacauaaaggaucauagcauuguuuccaguuauguguguucaggacuuguuggagacacacccagaaaaaacgacagcuccagcaguagccauuguuuggauccuaacaaugaagaagguggucauggagugaaaggcugggccuuugaugauggaaaugacguguggaugggaagaacgaucagcgagaagucacgcuuaggguaugaaaccuucaaagucauugaaggcugguccaacccuaaguccaaauugcagauaaauaggcaagucauaguugacagagguaauagguccgguuauucugguauuuucucuguugaaggcaaaagcugcaucaaucggugcuuuuauguggaguugauaaggggaagaaaagaggaaacugaagucuuguggaccucaaacaguauuguuguguuuuguggcaccucagguacauauggaacaggcucauggccugauggggcggacaucaaucucaugccuauauaa

SEQ ID NO: 48456 - RNA, 1410 nt, Artificial Sequence; identical to SEQ ID NO: 48069
  derived and/or modified CDS sequence (wt) from neuraminidase__InfluenzaA__ACF41672

SEQ ID NO: 48457 - RNA, 1413 nt, Artificial Sequence; identical to SEQ ID NO: 48043
  derived and/or modified CDS sequence (wt) from neuraminidase__InfluenzaA__ACF41683

SEQ ID NO: 48458 - RNA, 1410 nt, Artificial Sequence
  derived and/or modified CDS sequence (wt) from neuraminidase__InfluenzaA__ACF41749
augaauccaaaucaaaagauaauaacaauuggcucugucucucucaccauugcaacaguaugcuuccucaugcagauugccauccugguaacuacuguaacauugcauuuuaagcaauaugagugcgacucccccgcgagcaaccaaguaaugccgugugaaccaauaauaauagaaaggaacauaacagggauaguguauuugaauaacaccaccauagagaaagagauaugccccaaaguaguggaauacagaaauuggucaaagccgcaaugucaaauuacaggauuugcaccuuuuucuaaggacaauucaauccggcuuucugcugguggggacauuugggugacgagagaaccuuaugugucaugcgaucauggcaaguguuaucaauucgcacucgggcaggggaccacacuagacaacaaacauucaaaugacacaauacaugauagaaucccucaucgaacccuauuaaugaaugaguuggguguuccauuucauuuaggaaccaggcaaguguguauagcaugguccagcucaaguugucacgauggaaaagcauggcugcauguuuguaucacuggggaugacaaaaaugcaacugcuagcuucauuuaugacgggaggcuuguggacaguauugguucauggucucaaaauauccucagaacccaggagucggaaugcguuuguaucaaugggacuugcacaguaguaaugacugauggaagugcuucaggaagagccgauacuagaauacuauucauugaagaggggaaaauuguccauauuagcccauugucaggaagugcucagcauguagaagaguguuccuguuauccuagauauccuggcgucagauguaucugcagagacaacuggaaaggcucuaauaggcccgucguagacauaaauauggaagauuauagcauugauuccaguuaugugugcucagggcuuguuggcgacacaccuagaaacgacgacagaucuagcaauagcaauugcaggaauccuaacaaugagagagggaaucaaggagugaaaggcugggccuuugacaauggagaugacguguggaugggaagaacgaucagcaaggauuuacgcucagguuaugaaacuuucaaagucauuggugguugguccacaccuaauuccaaaucgcagaucaauagacaagucauaguugacagcgauaaucggucagguuacucugguauuuucucuguugagggcaaaagcugcaucaauaggugcuuuuauguggaguugauaaggggaaggaaacaggagacuagagugugguggaccucaaacaguauuguuguguuuuguggcacuucagguaccuauggaacaggcucauggccugauggggcgaacaucaauuucaugccuauauaa

SEQ ID NO: 48459 - RNA, 1410 nt, Artificial Sequence
  derived and/or modified CDS sequence (wt) from neuraminidase__InfluenzaA__ACF41760
augaauccaaaucaaaagauaauaacaauuggcucugucucucucaccauugcaacaguaugcuuccucaugcagauugccauccugguaacuacuguaacauugcauuuuaagcaauaugagugcgacucccccgcgagcaaccaaguaaugccgugugaaccaauaauaauagaaaggaacauaacagagauaguguauuugaauaacaccaccauagagaaagagauaugccccaaaguaguggaauacagaaauuggucaaagccgcaaugucaaauuacaggauuugcaccuuuuucuaaggacaauucaauccggcuuucugcugguggggacauuugggugacgagagaaccuuaugugucaugcgaucguggcaaguguuaucaauuugcacucgggcaggggaccacacuagacaacaaacauucaaaugacacaauacaugauagaaucccucaucgaacccuauuaaugaaugaguuggguguuccauuucauuuaggaaccaggcaaguguguauagcaugguccagcucaaguugucacgauggaaaagcauggcugcauguuuguaucacuggggaugacaaaaaugcaacugcuagcuucauuuaugacgggaggcuuguggacaguauugguucauggucucaaaauauccucagaacccaggagucggaaugcguuuguaucaaugggacuugcacaguaguaaugacugauggaagugcuucaggaagagccgauacuagaauacuauucauugaagaggggaaaauuguccauauuagcccauugucaggaagugcucagcauguagaagaguguuccuguuauccuagauauccuggcgucagauguaucugcagagacaacuggaaaggcucuaauaggcccgucguagacauaaauauggaagauuauagcauugauuccaguuaugugugcucagggcuuguuggcgacacaccuagaaacgacgacagaucuagcaauagcaauugcaggaauccuaacaaugagagagggaaucaaggagugaaaggcugggccuuugacaauggagaugacguguggaugggaagaacgaucagcaaggauuuacgcucagguuaugaaacuuucaaagucauuggugguugguccacaccuaauuccaaaucgcagaucaauagacaagucauaguugacagcgauaaucggucagguuacucugguauuuucucuguugagggcaaaagcugcaucaauaggugcuuuuauguggaguugauaaggggaaggaaacaggagacuagagugugguggaccucaaacaguauuguuguguuuuguggcacuucagguaccuauggaacaggcucauggccugauggggcgaacaucaauuucaugccuauauaa

SEQ ID NO: 48460 - RNA, 1410 nt, Artificial Sequence
  derived and/or modified CDS sequence (wt) from neuraminidase__InfluenzaA__ACF41771
augaauccaaaucaaaagauaauaacaauuggcucugucucucucaccauugcaacaguaugcuuccucaugcagauugccauccugguaacuacuguaacauugcauuuuaagcaauaugagugcgacucccccgcgagcaaccaaguaaugccgugugaaccaauaauaauagaaaggaacauaacagagauaguguauuugaauaacaccaccauagagaaagagauaugccccaaaguaguggaauacagaaauuggucaaagccgcaaugucaaauuacaggauuugcaccuuuuucuaaggacaauucaauccggcuuucugcugguggggacauuugggugacgagagaaccuuaugugucaugcgaucauggcaaguguuaucaauuugcacucgggcaggggaccacacuagacaacaaacauucaaaugacacaauacaugauagaaucccucaucgaacccuauuaaugaaugaguuggguguuccauuucauuuaggaaccaggcaaguguguauagcaugguccagcucaaguugucacgauggaaaagcauggcugcauguuuguaucacuggggaugacaaaaaugcaacugcuagcuucauuuaugacgggaggcuuguggacaguauugguucauggucucaaaauauccucagaacccaggagucggaaugcguuuguaucaaugggacuugcacaguaguaauaacugauggaagugcuucaggaagagccgauacuagaauacuauucauugaagaggggaaaauuguccauauuagcccauugucaggaagugcucagcauguagaagaguguuccuguuauccuagauauccuggcgucagauguaucugcagagacaacuggaaaggcucuaauaggcccgucguagacauaaauauggaagauuauagcauugauuccaguuaugugugcucagggcuuguuggcgacacaccuagaaacgacgacagaucuagcaauagcaauugcaggaauccuaacaaugagagagggaaucaaggagugaaaggcugggccuuugacaauggagaugacguguggaugggaagaacgaucagcaaggauuuacgcucagguuaugaaacuuucaaagucauuggugguugguccacaccuaauuccaaaucgcagaucaauagacaagucauaguugacagcgauaaucggucagguuacucugguauuuucucuguugagggcaaaagcugcaucaauaggugcuuuuauguggaguugauaaggggaaggaaacaggagacuagagugugguggaccucaaacaguauuguuguguuuuguggcacuucagguaccuauggaacaggcucauggccugauggggcgaacaucaauuucaugccuauauaa

SEQ ID NO: 48461 - RNA, 1410 nt, Artificial Sequence; identical to SEQ ID NO: 46107
  derived and/or modified CDS sequence (wt) from neuraminidase__InfluenzaA__ACF41793

SEQ ID NO: 48462 - RNA, 1410 nt, Artificial Sequence; identical to SEQ ID NO: 46107
  derived and/or modified CDS sequence (wt) from neuraminidase__InfluenzaA__ACF41804

SEQ ID NO: 48463 - RNA, 1410 nt, Artificial Sequence; identical to SEQ ID NO: 46107
  derived and/or modified CDS sequence (wt) from neuraminidase__InfluenzaA__ACF41826

SEQ ID NO: 48464 - RNA, 1365 nt, Artificial Sequence; identical to SEQ ID NO: 47731
  derived and/or modified CDS sequence (wt) from neuraminidase__InfluenzaA__ACF41837

SEQ ID NO: 48465 - RNA, 1413 nt, Artificial Sequence
  derived and/or modified CDS sequence (wt) from neuraminidase__InfluenzaA__ACF41881
augaauccaaaucaaaaaauaauaaccauuggaucaaucaguauagcaaucggaauaauuagucuaauguugcaaauaggaaauauuauuucaauaugggcuagucacucaauccaaacuggaagucaaaaccacacuggaguaugcaaccaaagaaucaucacauaugaaaacagcaccugggugaaucacacauauguuaauauuaacaacacuaauguuguugcuggaaaggacaaaacuucagugacauuggccggcaauucaucucuuuguucuaucaguggaugggcuauauacacaaaagacaacagcauaagaauuggcuccaaaggagauguuuuugucauaagagaaccuuucauaucauguucucacuuggaaugcagaaccuuuuuucugacccaaggugcucuauuaaaugacaaacauucaaaugggaccguuaaggacagaaguccuuauagggccuuaaugagcuguccucuaggugaagcuccguccccauacaauucaaaguuugaaucaguugcauggucagcaagcgcaugccaugauggcaugggcugguuaacaaucggaauuucugguccagacaauggagcuguggcuguacuaaaauacaacggcauaauaacugaaaccauaaaaaguuggaaaaagcgaauauuaagaacacaagagucugaaugugucugugugaacgggucauguuucaccauaaugaccgauggcccgaguaauggggccgccucguacaaaaucuucaagaucgaaaaggggaagguuacuaaaucaauagaguugaaugcacccaauuuucauuaugaggaauguuccuguuacccagacacuggcacagugauguguguaugcagggacaacuggcaugguucaaaucgaccuugggugucuuuuaaucaaaaccuggauuaucaaauaggauacaucugcagugggguguucggugacaauccgcgucccaaagauggagagggcagcuguaauccagugacuguugauggagcagacggaguaaagggguuuucauacaaauaugguaaugguguuuggauaggaaggacuaaaaguaacagacuuagaaagggguuugagaugauuugggauccuaauggauggacagauaccgacagugauuucucagugaaacaggauguuguggcaauaacugauuggucaggguacagcggaaguuucguucaacauccugaguuaacaggauuggacuguauaagaccuugcuucuggguugaguuagucagaggacugccuagagaaaauacaacaaucuggacuagugggagcagcauuucuuuuuguggcguaaauagugauacugcaaacuggucuuggccagacggugcugaguugccguucaccauugacaaguag

SEQ ID NO: 48466 - RNA, 1410 nt, Artificial Sequence
  derived and/or modified CDS sequence (wt) from neuraminidase__InfluenzaA__ACF41892
augaauccaaaucaaaagauaauaacgauuggcucuguuucccucaccauuuccacaauaugcuucuucaugcaaauugccauccugauaacuacuguaacauugcauuucaagcaauaugaauucaacucccccccaaacaaccaagugaugcugugugaaccaacaauaauagaaagaaacauaacagagauaguguaucugaccaacaccaccauagagaaggaaauaugccccaaacuagcagaauacagaaauuggucaaagccgcaauguaacauuacaggauuugcaccuuuuucuaaggacaauucgauucggcuuuccgcugguggggacaucugggugacaagagaaccuuaugugucaugcgauccugacaaguguuaucaauuugcccuuggacagggaacaacacuaaacaacgugcauucaaaugacacaguacaugauaggaccccuuaucggacccuauugaugaaugaguuggguguuccauuucaucuggggaccaagcaagugugcauagcaugguccagcucaaguugucacgauggaaaagcauggcugcauguuuguguaacgggggaugaugaaaaugcaacugcuagcuucauuuacaaugggaggcuuguagauaguauuguuucaugguccaaaaaaauccucaggacccaggagucagaaugcguuuguaucaauggaacuuguacaguaguaaugacugaugggagugcuucaggaaaagcugauacuaaaauacuauucauugaggaggggaaaauuguucauacuagcacauuaucaggaagugcucagcaugucgaggagugcuccuguuauccucgauauccuggugucagaugugucugcagagacaacuggaaaggcuccaauaggcccaucguagauauaaacauaaaggauuauagcauuguuuccaguuaugugugcucaggacuuguuggagacacacccagaaaaaacgacagcuccagcaguagccauugcuuggauccaaacaaugaggaagguggucauggagugaaaggcugggcauuugaugauggaaaugacguguggaugggaagaacgaucagcgagaaguuacgcucaggauaugaaaccuucaaagucauugaaggcugguccaacccuaacuccaaauugcagauaaauaggcaagucauaguugacagagguaacagguccgguuauucugguauuuucucuguugaaggcaaaagcugcaucaaucggugcuuuuauguggaguugauaaggggaagaaaacaggaaacugaagucuuguggaccucaaacaguauuguuguguuuuguggcaccucagguacauauggaacaggcucauggccugauggggcggacaucaaucucaugccuauauaa

SEQ ID NO: 48467 - RNA, 1410 nt, Artificial Sequence
  derived and/or modified CDS sequence (wt) from neuraminidase__InfluenzaA__ACF41903
augaauccaaaucaaaagauaauaacgauuggcucuguuucucucaccauuuccacaauaugcuucuucaugcaaauugccaucuugauaacuacuguaacauugcauuucaagcaauaugaauucaacucccccccaaacaaccaagugaugcugugugaaccaacaauaauagaaagaaacauaacagagauaguguaucugaccaacaccaccauagagaaggaaauaugccccaaacuagcagaauacagaaauuggucaaagccgcaaugugacauuacaggauuugcaccuuuuucuaaggacaauucgauuaggcuuuccgcugguggggacaucugggugacaagagaaccuuaugugucaugcgauccugacaaguguuaucaauuugcccuuggacagggaacaacacuaaacaacgugcauucaaaugacacaguacaugauaggaccccuuaucggacccuauugaugaaugaguuagguguuccauuucaucuggggaccaagcaagugugcauagcaugguccagcucaaguugucacgauggaaaagcauggcugcauguuuguguaacgggggaugauaaaaaugcaacugcuagcuucauuuacaaugggaggcuuguagauaguauuguuucaugguccaaagaaauccucaggacccaggagucagaaugcguuuguaucaauggaacuuguacaguaguaaugacugaugggagugcuucaggaaaagcugauacuaaaauacuauucauugaggaggggaaaaucguucauacuagcacauugucaggaagugcucagcaugucgaggagugcuccugcuauccucgauauccuggugucagaugugucugcagagacaacuggaaaggcuccaauaggcccaucguagauauaaacauaaaggauuauagcauuguuuccaguuaugugugcucaggacuuguuggagacacacccagaaaaaacgacagcuccagcaguagccauugcuuggauccuaacaaugaagaagguggucauggagugaaaggcugggccuuugaugauggaaaugacguguggaugggaagaacgaucagcgagaaguuacgcucaggauaugaaaccuucaaagucauugaaggcugguccaacccuaauuccaaauugcagauaaauaggcaagucauaguugacagagguaauagguccgguuauucugguauuuucucuguugaaggcaaaagcugcaucaaucggugcuuuuauguggaguugauaaggggaagaaaagaggaaacugaagucuuguggaccucaaacaguauuguuguguuuuguggcaccucagguacauauggaacaggcucauggccugauggggcggacaucaaucucaugccuauauaa

SEQ ID NO: 48468 - RNA, 1410 nt, Artificial Sequence
  derived and/or modified CDS sequence (wt) from neuraminidase__InfluenzaA__ACF41914
augaauccaaaucaaaagauaauaacgauuggcucuguuucucucaccauuuccacaauaugcuucuucaugcaaauugccaucuugauaacuacuguaacauugcauuucaagcaauaugaauucaacucccccccaaacaaccaagugaugcugugugaaccaacaauaauagaaagaaacauaacagagauaguguaucugaccaacaccaccauagagaaggaaauaugccccaaacuagcagaauacagaaauuggucaaagccgcaauguaacauuacaggauuugcaccuuuuucuaaggacaauucgauuaggcuuuccgcugguggggacaucugggugacaagagaaccuuaugugucaugcgauccugacaaguguuaucaauuugcccuugggcagggaacaacacuaaacaacgugcauucaaaugacacaguacaugauaggaccccuuaucggacccuauugaugaaugaguuagguguuccauuucaucuggggaccaagcaagugugcauagcaugguccagcucaaguugucacgauggaaaagcauggcugcauguuuguguaacgggggaugauaaaaaugcaacugcuagcuucauuuacaaugggaggcuuguagauaguauuguuucaugguccaaagaaauccucaggacccaggagucagaaugcguuuguaucaauggaacuuguacaguaguaaugacugaugggagugcuucaggaaaagcugauacuaaaauacuauucauugaggaggggaaaaucguucauacuagcacauugucaggaagugcucagcaugucgaggagugcuccugcuauccucgauaucuuggugucagaugugucugcagagacaacuggaaaggcuccaauaggcccauaguagauauaaacauaaaggauuauagcauuguuuccaguuaugugugcucaggacuuguuggagacacacccagaaaaaacgacagcuccagcaguagccauugcuuggauccuaacaaugaagaagguggucauggagugaaaggcugggccuuugaugauggaaaugacguguggaugggaagaacgaucagcgagaaguuacgcucaggauaugaaaccuucaaagucauugaaggcugguccaacccuaauuccaaauugcagauaaauaggcaagucauaguugacagagguaauagguccgguuauucugguauuuucucuguugaaggcaaaagcugcaucaaucggugcuuuuauguggaguugauaaggggaagaaaagaggaaacugaagucuuguggaccucaaacaguauuguuguguuuuguggcaccucagguacauauggaacaggcucauggccugauggggcggacaucaaucucaugccuauauaa

SEQ ID NO: 48469 - RNA, 1413 nt, Artificial Sequence
  derived and/or modified CDS sequence (wt) from neuraminidase__InfluenzaA__ACF41925
augaauccaaaucaaaaaauaauaaccauuggaucaaucaguauggcaaucggaauaauuagucuaauauugcaaauaggaaauauuauuucaauaugggcuagccacucaauccaaacuggaagucaaaaccacacuggaauaugcaaccaaagaaucauuacauaugaaaauagcaccugggugaaucaaacauauguuaauauuaacaacacuaauguuguugcuggaaaggacaaaacuucagugacauuggccggcaauucaucucuuugcccuauccgugggugggcuauauacacaaaagacaacagcauaagaauugguuccaaaggagauguuuuugucauaagagagccuuuuauaucauguucucacuuggaaugcagaaccuuuuuucugacccaaggugcucuauuaaaugacaagcauucaaaugggaccguuaaggacagaagcccuuauagggccuuaaugagcuguccucuaggugaagcuccgucuccauacaauucaagauuugaaucaguugcuuggucagcaagcgcaugccaugauggcaugggcuggcuaacaaucggaauuucugguccagauaauggagcaguggcuguacuaaaauacaacggcauaauaacugaaaccauaaaaaguuggaagaagcgaauauuaagaacacaagagucugaaugugucugugugaacgguucauguuuuaccauaaugaccgauggcccgaguaauggggccgccucguacagaaucuucaaaaucgagaaggggaagguuacuaaaucaauagaguuggaugcacccaauuaucauuacgaggaauguuccuguuacccagacaccggcacagugaugugugugugcagggacaauuggcacgguucaaaucgaccuugggugucuuuuaaucaaaaccuggauuaucaaauaggauacaucugcagugggguguucggugacaauccgcgucccaaagauggagaaggcagcuguaauccagugacuguugauggagcagacggaguaaagggguuuucauacagauaugguaaugguguuuggauaggaaggacuaaaaguaacagacucagaaagggauuugagaugauuugggauccuaauggauggacagauaccgacagugauuucucugugaaacaggaugucguggcaaugacugauuggucaggguacagcggaaguuucguucaacauccugagcuaacaggauuggacuguaugagaccuugcuucuggguugaauuaaucagagggcgaccuagagaaaauacaacaaucuggacuagugggagcagcauuucuuuuuguggcguaaauagcgauacugcaaacuggucuuggccagacggugccgaguugccauucaccauugacaaguag

SEQ ID NO: 48470 - RNA, 1413 nt, Artificial Sequence; identical to SEQ ID NO: 48469
  derived and/or modified CDS sequence (wt) from neuraminidase__InfluenzaA__ACF41936

SEQ ID NO: 48471 - RNA, 1410 nt, Artificial Sequence
  derived and/or modified CDS sequence (wt) from neuraminidase__InfluenzaA__ACF54392
augaauccaaaucaaaagauaauaacaauuggcucuguaucucucaccaccgcaacagcaugcuuccucacgcagaucgccauccugguaacuacuguaacauugcauuuuaagcaacaugagugcgacucccccgcgagcaaccaaguaaugccgugugaaccaauaauaauagaaaggaacauaacagagauaguguauuugaauaacaccaccauagagaaagagauaugccccaaaguaguggaauacagaaauuggucaaagccgcaaugucaaauuacaggauuugcaccuuuuucuaaggacaauucaauccggcuuucugcugguggggacauuugggugacgagagaaccuuaugugucaugcgauucuggcaaguguuaucaauuugcacucgggcaggggaccacacuagacaacaaacauucaaaugacacaauacaugauagaaucccucaucgaacccuauuaaugaaugaguuggguguuccauuucauuuaggaaccaggcaaguguguauagcaugguccagcucaaguugucacgauggaaaagcauggcugcauguuuguaucacuggggaugauaaaaaugcaacugcuagcuucauuuaugacgggaggcuuguggacaguauugguucauggucucaaaauauccucagaacccaggagucggaaugcguuuguaucaaugggacuugcacaguaguaaugacugauggaagugcuucaggaagagccgauacuagaauacuauucauugaagaggggaaaauuguccauauuagcccauugucaggaagugcucagcauguagaggaguguuccuguuauccucgauauccuggcgucagauguaucugcagagacaacuggaaaggcucuaauaggcccgucguagacauaaauauggaagauuauagcauugauuccaguuaugugugcucagggcuuguuggcgacacaccuagaaacgacgacagauuuagcaauagcaauugcaggaauccuaacaaugagagagggaaucaaggagugaaaggcugggccuuugacaauggagaugacguguggaugggaagaacgaucagcaaggauuuacgcucagguuaugaaacuuucaaagucauuggugguugguccacaccuaauuccaaaucgcagaucaauagacaagucauaguugacagcgauaaucggucagguuacuccgguauuuucucuguugagggcaaaagcugcaucaauaggugcuuuuauguggaguugauaaggggaaggaaacaggagacuagaguaugguggaccucaaacaguauuguuguguuuuguggcacuucagguaccuauggaacaggcucauggccugauggggcgaacaucaauuucaugccuauauaa

SEQ ID NO: 48472 - RNA, 1410 nt, Artificial Sequence; identical to SEQ ID NO: 46107
  derived and/or modified CDS sequence (wt) from neuraminidase__InfluenzaA__ACF54403

SEQ ID NO: 48473 - RNA, 1410 nt, Artificial Sequence; identical to SEQ ID NO: 46107
  derived and/or modified CDS sequence (wt) from neuraminidase__InfluenzaA__ACF54414

SEQ ID NO: 48474 - RNA, 1410 nt, Artificial Sequence; identical to SEQ ID NO: 46107
  derived and/or modified CDS sequence (wt) from neuraminidase__InfluenzaA__ACF54425

SEQ ID NO: 48475 - RNA, 1410 nt, Artificial Sequence
  derived and/or modified CDS sequence (wt) from neuraminidase__InfluenzaA__ACF54436
augaauccaaaucaaaagauaauaacaauuggcucugucucucucaccauugcaacaguaugcuuccucaugcagauugccauccugguaacuacuguaacauugcauuuuaagcaauaugagugcgacucccccgcgagcaaccaaguaaugccgugugaaccaauaauaauagaaaggaacauaacagagauaguguauuugaauaacaccaccauagagaaagagauaugccccaaaguaguggaauacagaaauuggucaaagccgcaaugucaaauuacaggauuugcaccuuuuucuaaggacaauucaauccggcuuucugcugguggggacauuugggugacgagagaaccuuaugugucaugcgaucauggcaaguguuaucaauuugcacucgggcaggggaccacacuagacaacaaacauucaaaugacacaauacaugauagaaucccucaucgaacccuauuaaugaaugaguuggguguuccauuucauuuaggaaccaggcaaguguguauagcaugguccagcucaaguugucacgauggaaaagcauggcugcauguuuguaucacuggggaugacaaaaaugcaacugcuagcuucauuuaugacgggaggcuuguggacaguauugguucauggucucaaaauauccucagaacccaggagucggaaugcguuuguaucaaugggacuugcacaguaguaaugacugauggaagugcuucaggaagagccgauacuagaauacuauucauugaagaggggaaaauuguccauauuagcccauugucaggaagugcucaacauguagaagaguguuccuguuauccuagauauccuggcgucagauguaucugcagagacaacuggaaaggcucuaauaggcccgucguagacauaaauauggaagauuauagcauugauuccaguuaugugugcucagggcuuguuggcgacacaccuagaaacgacgacagaucuagcaauagcaauugcaggaauccuaacaaugagagagggaaucaaggagugaaaggcugggccuuugacaauggagaugacguguggaugggaagaacgaucagcaaggauuuacgcucagguuaugaaacuuucaaagucauuggugguugguccacaccuaauuccaaaucgcagaucaauagacaagucauaguugacagcgauaaucggucagguuacucugguauuuucucuguugagggcaaaagcugcaucaauaggugcuuuuauguggaguugauaaggggaaggaaacaggagacuagagugugguggaccucaaacaguauuguuguguuuuguggcacuucagguaccuauggaacaggcucauggccugauggggcgaacaucaauuucaugccuauauaa

SEQ ID NO: 48476 - RNA, 1410 nt, Artificial Sequence
  derived and/or modified CDS sequence (wt) from neuraminidase__InfluenzaA__ACF54447
augaauccaaaucaaaagauaauaacaauuggcucugucucucucaccauugcaacaguaugcuuccucaugcagauugccauccugguaacuacuguaacauugcauuuuaagcaauaugagugcgacucccccgcgagcaaccaaguaaugccgugugaaccaauaauaauagaaaggaacauaacagagauaguguauuugaauaacaccaccauagagaaagagauaugccccaaaguaguggaauacagaaauuggucaaagccgcaaugucaaauuacaggauuugcaccuuuuucuaaggacaauucaauccggcuuucugcugguggggacauuugggugacgagagaaccuuaugugucaugcgaucauggcaaguguuaucaauuugcacucgggcaggggaccacacuagacaacaaacauucaaaugacacaauacaugauagaaucccucaucgaacccuauuaaugaaugaguuggguguuccauuucauuuaggaaccaagcaaguguguauagcaugguccagcucaaguugucacgauggaaaagcauggcugcauguuuguaucacuggggaugacaaaaaugcaacugcuagcuucauuuaugacgggaggcuuguggacaguauugguucauggucucaaaauauccucagaacccaggagucggaaugcguuuguaucaaugggacuugcacaguaguaaugacugauggaagugcuucaggaagagccgauacuagaauacuauucauugaagaggggaaaauuguccauauuagcccauugucaggaagugcucagcauguagaagaguguuccuguuauccuagauauccuggcgucagauguaucugcagagacaacuggaaaggcucuaauaggcccgucguagacauaaauauggaagauuauagcauugauuccaguuaugugugcucagggcuuguuggcgacacaccuagaaacgacgacagaucuagcaauagcaauugcaggaauccuaacaaugagagagggaaucaaggagugaaaggcugggccuuugacaauggagaugacguguggaugggaagaacgaucagcaaggauuuacgcucagguuaugaaacuuucaaagucauuggugguugguccacaccuaauuccaaaucgcagaucaauagacaagucauaguugacagcgauaaucggucagguuacucugguauuuucucuguugagggcaaaagcugcaucaauaggugcuuuuauguggaguugauaaggggaaggaaacaggagacuagagugugguggaccucaaacaguauuguuguguuuuguggcacuucagguaccuauggaacaggcucauggccugauggggcgaacaucaauuucaugccuauauaa

SEQ ID NO: 48477 - RNA, 1410 nt, Artificial Sequence
  derived and/or modified CDS sequence (wt) from neuraminidase__InfluenzaA__ACF54469
augaauccaaaucaaaagauaauaacaauuggcucugucucucucaccauugcaacaguaugcuuccucaugcagauugccauccugguaacuacuguaacauugcauuuuaagcaauaugagugcgacucccccgcgagcaaccaaguaaugccgugugaaccaauaauaauagaaaggaacauaacagagauaguguauuugaauaacaccaccauagagaaagagauaugccccaaaguaguggaauacagaaauuggucaaagccgcaaugucaaauuacaggauuugcaccuuuuucuaaggacaauucaauccggcuuucugcugguggggacauuugggugacgagagaaccuuaugugucaugcgaucauggcaaguguuaucaauuugcacucgggcaggggaccacacuagacaacaaacauucaaaugacacaauacaugauagaaucccucaucgaacccuauuaaugaaugaguuggguguuccauuucauuuaggaacuaggcaaguguguauggcaugguccagcucaaguugucacgauggaaaagcauggcugcauguuuguaucacuggggaugacaaaaaugcaacugcuagcuucauuuaugacgggaggcuuguggacaguauugguucauggucucaaaauauccucagaacccaggagucggaaugcguuuguaucaaugggacuugcacaguaguaaugacugauggaagugcuucaggaagagccgauacuagaauacuauucauugaagaggggaaaauuguccauauuagcccauugucaggaagugcucagcauguagaagaguguuccuguuauccuagauauccuggcgucagauguaucugcagagacaacuggaaaggcucuaauaggcccgucguagacauaaauauggaagauuauagcauugauuccaguuaugugugcucagggcuuguuggcgacacaccuagaaacgacgacagaucuagcaauagcaauugcaggaauccuaacaaugagagagggaaucaaggagugaaaggcugggccuuugacaauggagaugacguguggaugggaagaacgaucagcaaggauuuacgcucagguuaugaaacuuucaaagucauuggugguugguccacaccuaauuccaaaucgcagaucaauagacaagucauaguugacagcgauaaucggucagguuacucugguauuuucucuguugagggcaaaagcugcaucaauaggugcuuuuauguggaguugauaaggggaaggaaacaggagacuagagugugguggaccucaaacaguauuguuguguuuuguggcacuucagguaccuauggaacaggcucauggccugauggggcgaacaucaauuucaugccuauauaa

SEQ ID NO: 48478 - RNA, 1410 nt, Artificial Sequence
  derived and/or modified CDS sequence (wt) from neuraminidase__InfluenzaA__ACF54480
augaauccaaaucaaaagauaauaacaauuggcucugucucucucaccauugcaacaguaugcuuccucaugcagauugccauccuggcaacuacugugacauugcauuuuaaacaacaugagugcgacucccccgcgagcaaccaaguaaugccaugugaaccaauaauaauagaaaggaacauaacagagauaguguauuugaauaacaccaccauagagaaagagauuugccccgaaguaguggaauacagaaauuggucaaagccgcaaugucaaauuacaggauuugcaccuuuuucuaaggacaauucaauccggcuuucugcugguggggacauuugggugacgagagaaccuuaugugucaugcgauccuggcaaguguuaucaauuugcacucgggcaggggaccacacuagacaacaaacauucaaauggcacaauacaugauagaaucccucaucgaacccuauuaaugaaugaguuggguguuccauuucauuuaggaaccaaacaaguguguguagcaugguccagcucaaguugucacgauggaaaagcaugguugcauguuugugucacuggggaugauagaaaugcgacugcuagcuucauuuaugacgggaggcuuguggacaguauugguucauggucucaaaauauccucaggacccaggagucggaaugcguuuguaucaaugggacuugcacaguaguaaugacugauggaagugcaucaggaagagccgauacuagaauacuauucauuaaagaggggaaaauuguccauauuagcccauugucaggaagugcucagcauauagaggaguguuccuguuacccucgauauccugacgucagauguaucugcagagacaacuggaaaggcucuaauaggcccguuauagacauaaauauggaagauuauagcauugauuccaguuaugugugcucagggcuuguuggcgacacacccaggaacgacgacagcucuagcaauagcaauugcagggauccuaacaaugagagagggaauccaggagugaaaggcugggccuuugacaauggagaugauguauggaugggaagaacaaucaacaaagauucacgcucagguuaugaaacuuucaaagucauuggugguugguccacaccuaauuccaaaucgcaggucaauagacaggucauaguugacaacaauaauuggucugguuacucugguauuuucucuguugagggcaaaagcugcaucaauaggugcuuuuauguggaguugauaaggggaaggccacaggagacuagaguaugguggaccucaaacaguauuguuguguuuuguggcacuucagguacuuauggaacaggcucauggccugauggggcgaacaucaauuucaugccuauauaa

SEQ ID NO: 48479 - RNA, 1410 nt, Artificial Sequence
  derived and/or modified CDS sequence (wt) from neuraminidase__InfluenzaA__ACF54502
augaauccaaaucaaaagauaauaacaauuggcucugucucucucaccauugcaacaguaugcuuccucaugcagauugccauccuggcaacuacugugacauugcauuuuaaacaacaugagugcgacucccccgcgagcaaccaaguaaugccaugugaaccaauaauaauagaaaggaacauaacagagauaguguauuugaauaacaccaccauagagaaagagauuugccccgaaguaguggaauacagaaauuggucaaagccgcaaugucaaauuacaggauuugcaccuuuuucuaaggacaauucaauccggcuuucugcugguggggacauuugggugacgagagaaccuuaugugucaugcgauccuggcaaguguuaucaauuugcacucgggcaggggaccacacuagacaacaaacauucaaauggcacaauacaugauagaaucccucaucgaacccuauuaaugaaugaguuggguguuucauuucauuuaggaaccaaacaaguguguguagcaugguccagcucaaguugucacgauggaaaagcaugguugcauguuugugucacuggggaugauagaaaugcgacugcuagcuucauuuaugacgggaggcuuguggacaguauugguucauggucucaaaauauccucaggacccaggagucggaaugcguuuguaucaaugggacuugcacaguaguaaugacugauggaagugcaucaggaagagccgauacuagaauacuauucauuaaagaggggaaaauuguccauauuagcccauugucaggaagugcucagcauauagaggaguguuccuguuacccucgauauccugacgucagauguaucugcagagacaacuggaaaggcucuaauaggcccguuauagacauaaauauggaagauuauagcauugauuccaguuaugugugcucagggcuuguuggcgacacacccaggaacgacgacagcucuagcaauagcaauugcagggauccuaacaaugagagagggaauccaggagugaaaggcugggccuuugacaauggagaugauguauggaugggaagaacaaucaacaaagauucacgcucagguuaugaaacuuucaaagucauuggugguugguccacaccuaauuccaaaucgcaggucaauagacaggucauaguugacaacaauaauuggucugguuacucugguauuuucucuguugagggcaaaagcugcaucaauaggugcuuuuauguggaguugauaaggggaaggccacaggagacuagaguaugguggaccucaaacaguauuguuguguuuuguggcacuucagguacuuauggaacaggcucauggccugauggggcgaacaucaauuucaugccuauauaa

SEQ ID NO: 48480 - RNA, 1410 nt, Artificial Sequence; identical to SEQ ID NO: 48479
  derived and/or modified CDS sequence (wt) from neuraminidase__InfluenzaA__ACF54513

SEQ ID NO: 48481 - RNA, 1410 nt, Artificial Sequence
  derived and/or modified CDS sequence (wt) from neuraminidase__InfluenzaA__ACF54524
augaauccaaaucaaaagauaauaacaauuggcucugucucucucaccauugcaacaguaugcuucuucaugcagauugccauccuggcaacuacugugacauugcauuuuaaacaacaugagugcgacucccccgcgagcaaccaaguaaugccaugugaaccaauaauaauagaaaggaacauaacagagauaguguauuugaauaacaccaccauagagaaagagauuugccccgaaguaguggaauacagaaauuggucaaagccgcaaugucaaauuacaggauuugcaccuuuuucuaaggacaauucaauccggcuuucugcugguggggacauuugggugacgagagaaccuuaugugucaugcgauccuggcaaguguuaucaauuugcacucgggcaggggaccacacuagacaacaaacauucaaauggcacaauacaugauagaaucccucaucgaacccuauuaaugaaugaguuggguguuucauuucauuuaggaaccaaacaaguguguguagcaugguccagcucaaguugucacgauggaaaagcaugguugcauguuugugucacuggggaugauagaaaugcgacugcuagcuucauuuaugacgggaggcuuguggacaguauugguucauggucucaaaauauccucaggacccaggagucggaaugcguuuguaucaaugggacuugcacaguaguaaugacugauggaagugcaucaggaagagccgauacuagaauacuauucauuaaagaggggaaaauuguccauauuagcccauugucaggaagugcucagcauauagaggaguguuccuguuacccucgauauccugacgucagauguaucugcagagacaacuggaaaggcucuaauaggcccguuauagacauaaauauggaagauuauagcauugauuccaguuaugugugcucagggcuuguuggcgacacacccaggaacgacgacagcucuagcaauagcaauugcagggauccuaacaaugagagagggaauccaggagugaaaggcugggccuuugacaauggagaugauguauggaugggaagaacaaucaacaaagauucacgcucagguuaugaaacuuucaaagucauuggugguugguccacaccuaauuccaaaucgcaggucaauagacaggucauaguugacaacaauaauuggucugguuacucugguauuuucucuguugagggcaaaagcugcaucaauaggugcuuuuauguggaguugauaaggggaaggccacaggagacuagaguaugguggaccucaaacaguauuguuguguuuuguggcacuucagguacuuauggaacaggcucauggccugauggggcgaacaucaauuucaugccuauauaa

SEQ ID NO: 48482 - RNA, 1410 nt, Artificial Sequence
  derived and/or modified CDS sequence (wt) from neuraminidase__InfluenzaA__ACF54535
augaauccaaaucaaaagauaauaacgauuggcucuguuucucucaucaucuccacaauaugcuucuucaugcaaacugccaucuugauaacuacuguaacauugcauuucaagcaauaugaauucaacucccccccaaacaaccaagugaugcugugugaaccaacaauaauagaaagaaacauaacaaagauaguguaucugaccaacaccaccauagagaaggaaauaugccccaaacuagcagaauacagaaauuggucaaagccgcaaugugacauuacaggauuugcaccuuuuucuaaggacaauucgauuaggcuuuccgcugguggggacaucugggugacaagagaaccuuaugugucaugcgauccugacaaguguuaucaauuugcccuuggacagggaacaacacuaaacaacgugcauucaaaugacacaguacgugauaggaccccuuaucggacccuauugaugaaugaguuagguguuccuuuucaucuggggaccaagcaagugugcauagcaugguccagcucaaguugucacgauggaaaagcauggcugcauguuuguauaacgggggaugauaaaaaugcaacugcuagcuucauuuacaaugggaggcuuguagauaguauuguuucaugguccaaagaaauccucaggacccaggagucagaaugcguuuguaucaauggaacuuguacaguaguaaugacugaugggagugcuucaggaaaagcugauacuaaaauacuauucauugaggaggggaaaaucguucauacuagcacauugucaggaagugcucagcaugucgaggagugcuccugcuauccucgauauccuggugucagaugugucugcagagacaacuggaaaggcuccaauaggcccaucguagauauaaacauaaaggaucauagcauuguuuccaguuauguguguucaggacuuguuggagacacacccagaaaaaacgacagcuccagcaguagccauuguuuggauccuaacaaugaagaagguggucauggagugaaaggcugggccuuugaugauggaaaugacguguggaugggaagaacgaucagcgagaagucacgcuuaggguaugaaaccuucaaagucauugaaggcugguccaacccuaaguccaaauugcagauaaauaggcaagucauaguugacagagguaauagguccgguuauucugguauuuucucuguugaaggcaaaagcugcaucaaucggugcuuuuauguggaguugauaaggggaagaaaagaggaaacugaagucuuguggaccucaaacaguauuguuguguuuuguggcaccucagguacauauggaacaggcucauggccugauggggcggacaucaaucucaugccuauauaa

SEQ ID NO: 48483 - RNA, 1410 nt, Artificial Sequence
  derived and/or modified CDS sequence (wt) from neuraminidase__InfluenzaA__ACF54557
augaauccaaaucaaaagauaauaacgauuggcucuguuucucucacuauugccacaauaugcuuccuuaugcaaauagccauccugguaacuacuguaacauugcauuucaagcaauaugaaugcaacucccccccaaacaaccaaguaaugcugugugaaccaacaauaauagaaagaaacauaacagagauaguguaucugaccaacaccaccauagagaaggaaauaugccccaaacuagcagaauacagaaauuggucaaagccgcaauguaaaauuacaggauuugcaccuuuuucuaaggauaauucaauucggcuuuccgcugguggggacauuugggugacaagagaaccuuaugugucaugcgauccugacaaguguuaucaauuugcccuuggacagggaacaacacuaaacaacaggcauucaaaugacacaguacaugauaggaccccuuaucgaacccuauugaugaaugaguuggguguuccauuucauuugggaaccaagcaaguguguauagcaugguccagcucaaguugucacgauggaaaagcauggcugcauguuuguguaacugggcaugaugaaaaugcaacugcuagcuucauuuacgaugggagacuuguagauaguauugguucaugguccaaaaaaauccucaggacccaggagucggaaugcguuuguaucaauggaacuuguacaguaguaaugacugaugggagugcuucaggaagagcugauacuaaaauacuuuucauugaggaggggaaaaucguucauacuagcaaauugucaggaagugcucagcaugucgaggagugcuccuguuauccucgauauccuggugucagaugugucugcagagacaacuggaaaggcuccaauaggcccaucguagauauaaauguaaaggauuauagcauuguuuccaguuaugugugcucaggacuuguuggagacacacccagaaaaaacgacagcuccagcaguagccauugccuggauccuaacaaugaagaagggggucauggagugaaaggcugggccuuugaugauggaaaugacguguggaugggaagaacgaucagcgagaagucacgcucagguuaugaaaccuucaaggucauugaaggcugguccaaaccuaacuccaaauugcagauaaauaggcaagucauaguugaaagagguaauauguccgguuauucugguauuuucucuguugaaggcaaaagcugcaucaaucggugcuuuuauguggaguugauaaggggaaggaaacaggaaacugaagucugguggaccucaaacaguauuguuguguuuuguggcaccucagguacauauggaacaggcucauggccugauggggcggacaucaaucucaugccuauauaa

SEQ ID NO: 48484 - RNA, 1410 nt, Artificial Sequence; identical to SEQ ID NO: 48466
  derived and/or modified CDS sequence (wt) from neuraminidase__InfluenzaA__ACF54568

SEQ ID NO: 48485 - RNA, 1410 nt, Artificial Sequence
  derived and/or modified CDS sequence (wt) from neuraminidase__InfluenzaA__ACF54579
augaauccaaaucaaaagauaauaacgauuggcucuguuucucucaccauuuccacaauaugcuucuucaugcaaauugccaucuugauaacuacuguaacauugcauuucaagcaauaugaauucaacucccccccaaacaaccaagugaugcugugugaaccaacaauaauagaaagaaacauaacagagauaguguaucugaccaacaccaccauagagaaggaaauaugccccaaacuagcagaauacagaaauuggucaaagccgcaauguaacauuacaggauuugcaccuuuuucuaaggacaauucgauuaggcuuuccgcugguggggacaucugggugacaagagaaccuuaugugucaugcgauccugacaaguguuaucaauuugcccuugggcagggaacaacacuaaacaacgugcauucaaaugacacaguacaugauaggaccccuuaucggacccuauugaugaaugaguuagguguuccauuucaucuggggaccaagcaagugugcauagcaugguccagcucaaguugucacgauggaaaagcauggcugcauguuuguguaacgggggaugauaaaaaugcaacugcuagcuucauuuacaaugggaggcuuguagauaguauuguuucaugguccaaagaaauccucaggacccaggagucagaaugcguuuguaucaauggaacuuguacaguaguaauaacugaugggagugcuucaggaaaagcugauacuaaaauacuauucauugaggaggggaaaaucguucauacuagcacauugucaggaagugcucagcaugucgaggagugcuccugcuauccucgauauccuggugucagaugugucugcagagacaacuggaaaggcuccaauaggcccauaguagauauaaacauaaaggauuauagcauuguuuccaguuaugugugcucaggacuuguuggagacacacccagaaaaaacgacagcuccagcaguagccauugcuuggauccuaacaaugaagaagguggucauggagugaaaggcugggccuuugaugauggaaaugacguguggaugggaagaacgaucagcgagaaguuacgcucaggauaugaaaccuucaaagucauugaaggcugguccaacccuaauuccaaauugcagauaaauaggcaagucauaguugacagagguaauagguccgguuauucugguauuuucucuguugaaggcaaaagcugcaucaaucggugcuuuuauguggaguugauaaggggaagaaaagaggaaacugaagucuuguggaccucaaacaguauuguuguguuuuguggcaccucagguacauauggaacaggcucauggccugauggggcggauaucaaucucaugccuauauaa

SEQ ID NO: 48486 - RNA, 1362 nt, Artificial Sequence
  derived and/or modified CDS sequence (wt) from neuraminidase__InfluenzaA__ACF54601
augaauccaaaccagaaaauaauaaccauugggucaaucuguaugguagucggaauaauuagccuaauauugcaaauaggaaauauaaucucaauauggauuagccauucaauucaaaccggaaaucaaaaccauacuggaauaugcaaccaaggcagcauuaccuauaaaguuguugcugggcaggacucaacuucagugauauuaaccggcaauucaucucuuugucccauccgugggugggcuauacacagcaaagacaauggcauaagaauugguuccaaaggagacguuuuugucauaagagagccuuuuauuucauguucucacuuggaaugcaggaccuuuuuucugacucaaggcgccuuacugaaugacaagcauucaagggggaccuuuaaggacagaagcccuuauagggccuuaaugagcugcccugucggugaagcuccguccccguacaauucaagguuugaaucgguugcuuggucagcaagugcaugucaugauggaaugggcuggcuaacaaucggaauuucugguccagaugauggagcaguggcuguauuaaaauacaacggcauaauaacugaaaccauaaaaaguuggaggaagaauauauugagaacacaagagucugaauguaccuguguaaaugguucauguuuuaccauaaugaccgauggcccaagugaugggcuggccucguacaaaauuuucaagaucgagaaggggaagguuacuaaaucaauagaguugaaugcaccuaauucucacuacgaggaauguuccuguuacccugauaccggcaaagugaugugugugugcagagacaauuggcacgguucgaaccgaccauggguguccuucgaccaaaaccuagauuauaaaauaggauacaucugcagugggguuuucggugacaacccgcgucccaaagauggaacaggcagcuguggcccagugucugcugauggagcaaacggaguaaagggauuuucauauaaguaugguaaugguguuuggauaggaaggacuaaaagugacaguuccagacauggguuugagaugauuugggauccuaauggauggacagagacugauaguagguucucuaugagacaagauguuguggcaaugacugaucggucaggguacagcggaaguuucguucaacauccugagcuaacagggcuagacuguaugaggccuugcuucuggguugaauuaaucagggggcuaccugaggagaacgcaaucuggacuagugggagcaucauuucuuuuuguggugugaauagugauacuguagauuggucuuggccagacggugcugaguugccguucaccauugacaaguag

SEQ ID NO: 48487 - RNA, 1350 nt, Artificial Sequence
  derived and/or modified CDS sequence (wt) from neuraminidase__InfluenzaA__ACG50700
augaauccaaaucagaagauaauaacuaucggaucaaucuguaugguaauuggaauaguuagcuuaauguuacaaauugggaacaugaucucaauaugggucagucauucaauucagacagggaaucaacaccaagcugagccaaucagcaauacuaauuuucuuaccgagaaagcuguggcuucaguaacauuagcgggcaauucaccucuuugccccauuagugguugggccguacacaguaaggacaauaguauaaggaucgguucuaagggggauguguuuguuauaagagaaccguucaucucgugcucccacuuggaaugcagaacuuucuuuuugacucagggagccuugcugaaugacaagcacuccaaugggacuguuaaagacaggagcccucacagaacacuaaugaguuguccugugggugaggcucccuccccauauaacucaagguuugagucuguugcuuggucagcaagugccugccaugauggcaccaguugguugacaauuggaauuucuggcccagacaauggggcuguggcuguauugaaguacaauggcauaauaacagacacuaucaagaguuggaggaacaacauacugagaacucaagagucugaaugugcauguguaaauggcucuugcuuuacuguaaugacugauggaccaaguaaugggcaggcaucauauaaaaucuucaaaauggaaaaagggaaggugguuaaaucagucgaauuggaugcuccuaauuaucacuaugaggagugcuccuguuauccugaugccagcgaagucacaugugugugcagagauaauuggcauggcucaaauaggccauggguaucuuucaaucaaaauuuggaguaucaaauaggguauauaugcaguggaguuuucggagacaauccacgccccaaugauggaacagguaguugugguccgguguccacuaacggggcauaugggguaaaaggguuuucauuuaaauacggcaaugguguuuggaucgggagaaccaaaagcacuaauuccaggaguggcuuugaaaugauuugggauucaaauggguggacuggaacggacaguagcuuuucggugaaacaagauaucguagcaauaacugauuggucaggauauagcgggaguuuuguccagcauccagaacugacaggauuagauugcauaagaccuuguuucuggguugaguuaaucagagggcggcccaaagagagcacaauuuggacuagugggagcagcauaucuuuuugugguguaaauagugacacuguggguuggucuuggccagacggugcugaguugccauucaccauugacaaguag

SEQ ID NO: 48488 - RNA, 1410 nt, Artificial Sequence; identical to SEQ ID NO: 48069
  derived and/or modified CDS sequence (wt) from neuraminidase__InfluenzaA__ACG70145

SEQ ID NO: 48489 - RNA, 1410 nt, Artificial Sequence; identical to SEQ ID NO: 48061
  derived and/or modified CDS sequence (wt) from neuraminidase__InfluenzaA__ACG70156

SEQ ID NO: 48490 - RNA, 1410 nt, Artificial Sequence
  derived and/or modified CDS sequence (wt) from neuraminidase__InfluenzaA__ACG80407
augaauccaaaucaaaagauaauaacgauuggcucuguuucucucaccauuuccacaauaugcuucuucaugcaaauugccaucuugauaacuacuguaacauugcauuucaagcaauaugaauucaacucccccccaaacaaccaaaugaugcugugugaaccaacaauaauagaaagaaacauaacagagauaguguaucugaccaacaccaccauagagaaggaaauaugccccaaacuagcaaaauacagaaauuggucaaagccgcaaugugacauuacaggauuugcaccuuuuucuaaggacaauucgauuaggcuuuccgcugguggggacaucugggugacaagagaaccuuaugugucaugcgauccugacaaguguuaucaauuugcccuuggacagggaacaacacuaaacaacgugcauucaaaugacacagcacgugguaggaccccuuaucggacccuauugaugaaugaguuagguguuccuuuucaucuggggaccaagcaagugugcauagcauggucaagcucaaguugucacgauggaaaagcauggcugcauguuuguauaacgggggaugauaaaaaugcaacugcuagcuucauuuacaaugggaggcuuguagauaguguuguuucaugguccaaagaaauccucaggacccaggagucagaaugcguuuguaucaauggaacuuguacaguagugaugacugaugggagugcuucaggagaagcugauacuaaaauacuauucauugaggaggggaaaaucguucauacuagcacauugucaggaagugcucagcaugucgaggagugcuccugcuauccucgauauccuggugucagaugugucugcagagacaacuggaaaggcuccaauaggcccaucguagauauaaacauaaaggaucauagcauuguuuccaguuauguguguucaggacuuguuggagacacacccagaaaaaacgacagcuccagcaguagccauuguuuggauccuaacaaugaagaggguggucauggagugaaaggcugggccuuugaugauggaaaugacguguggaugggaagaacgaucagcgagaagucacgcuuaggguaugaaaccuucaaagucauugaaggcugguccaacccuaaguccaaauugcagauaaauaggcaagucauaguugacagagguaauagguccgguuauucugguauuuucucuguugaaggcaaaagcugcaucaaucggugcuuuuauguggaguugauaaggggaagaaaagaggaaacugaagucuuguggaccucaaacaguauuguuguguuuuguggcaccucagguacauauggaacaggcucauggccugauggggcggacaucaaucucaugccuauauaa

SEQ ID NO: 48491 - RNA, 1410 nt, Artificial Sequence
  derived and/or modified CDS sequence (wt) from neuraminidase__InfluenzaA__ACG80411
auggauucaaauucaaagauaauaacgauuggcucuguuucucucaccauuuccacaauaugcuucuucaugcaaauugccaucuugauaacuacuguaacauugcauuucaagcaauaugaauucaacucccccccaaacaaccaaaugaugcugugugaaccaacaauaauagaaagaaacauaacagagauaguguaucugaccaacaccaccauagagaaggaaauaugccccaaacuagcagaauacagaaauuggucaaagccgcaaugugacauuacaggauuugcaccuuuuucuaaggacaauucgauuaggcuuuccgcugguggggacaucugggugacaagagaaccuuaugugucaugcgauccugacaaguguuaucaauuugcccuuggacagggaacaacacuaaacaacgugcauucaaaugacacagcaggugguaggaccccuuaucggacccuauugaugaaugaguuagguguuccuuuucaucuggggaccaagcaagugugcauagcauggucaagcucaaguugucacgauggaaaagcauggcugcauguuuguauaacgggggaugauaaaaaugcaacugcuagcuucauuuacgaugggaggcuuguagaugguguuguuucaugguccaaagaaauccucaggacccaggagucagaaugcguuuguaucaauggaacuuguacaguagugaugacugaugggagugcuucaggagaagcugauacuaaaauacuauucauugaggaggggaaaaucguucauacuagcacauugucaggaagugcucagcaugucgaggagugcuccugcuauccucgauauccuggugucagaugugucugcagagacaacuggaaaggcuccaauaggcccaucguagauauaaacauaaaggaucauagcauuguuuccaguuauguguguucaggacuuguuggagacacacccagaaaaaacgacagcuccagcaguagccauuguuuggauccuaacaaugaagaggguggucauggagugaaaggcugggccuuugaugauggaaaugacguguggaugggaagaacgaucagcgagaagucacgcuuaggguaugaaaccuucaaagucauugaaggcugguccaacccuaaguccaaauugcagauaaauaggcaagucauaguugacagagguaauagguccgguuauucugguauuuucucuguugaaggcaaaagcugcaucaaucggugcuuuuauguggaguugauaaggggaagaaaagaggaaacugaagucuuguggaccucaaacaguauuguuguguuuuguggcaccucagguacauauggaacaggcucauggccugauggggcggacaucaaucucaugccuauauaa

SEQ ID NO: 48492 - RNA, 1407 nt, Artificial Sequence
  derived and/or modified CDS sequence (wt) from neuraminidase__InfluenzaA__ACG80421
augaauccaauucaaaagauaauaacgauuggcucuguuucucucaccauuuccacaauaugcuucuucaugcaaauugccaucuugauaacuacuguaacauugcauuucaagcaauaugaauucaacucccccccaaacaaccaaaugaugcugugugaaccaacaauaauagaaagaaacauaacagagauaguguaucugaccaacaccaccauagagaaggaaauaugccccaaacuagcagaauacagaaauuggucaaagccgcaaugugacauuacaggauuugcaccuuuuucuaaggacaauucgauuaggcuuuccgcugguggggacaucugggugacaagagaaccuuaugugucaugcgauccugacaaguguuaucaauuugcccuuggacagggaacaacacuaaacaacgugcauucugacacagcacgugauaggaccccuuaucggacccuauugaugaaugaguuagguguuccuuuucaucuggggaccaagcaagugugcauagcaugguccagcucaaguugucacgauggaaaagcauggcugcauguuuguauaacgggggaugauaaaaaugcaacugcuagcuucauuuacaaugggaggcuuguagauaguguuguuucaugguccaaagaaauccucaggacccaggagucagaaugcguuuguaucaauggaacuuguacaguagugaugacugaugggagugcuucaggagaagcugauacuaaaauacuauucauugaggaggggaaaaucguucauacuagcacauugucaggaagugcucagcaugucgaggagugcuccugcuauccucgauauccuggugucagaugugucugcagagacaacuggaaaggcuccaauaggcccaucguagauauaaacauaaaggaucauagcauuguuuccaguuauguguguucaggacuuguuggagacacacccagaaaaaacgacagcuccagcaguagccauuguuuggauccuaacaaugaagaggguggucauggagugaaaggcugggccuuugaugauggaaaugacguguggaugggaagaacgaucagcgagaagucacgcuuaggguaugaaaccuucaaagucauugaaggcugguccaacccuaaguccaaauugcagauaaauaggcaagucauaguugacagagguaauagguccgguuauucugguauuuucucuguugaaggcaaaagcugcaucaaucggugcuuuuauguggaguugauaaggggaagaaaagaggaaacugaagucuuguggaccucaaacaguauuguuguguuuuguggcaccucagguacauauggaacaggcucauggccugauggggcggacaucaaucucaugccuauauaa

SEQ ID NO: 48493 - RNA, 1407 nt, Artificial Sequence
  derived and/or modified CDS sequence (wt) from neuraminidase__InfluenzaA__ACG80427
auggaucccaauucaaagauaauaacgauuggcucuguuucucucaccauuuccacaauaugcuucuucaugcaaauugccaucuugauaacuacuguaacauugcauuucaagcaauaugaauucaacucccccccaaacaaccaaaugaugcugugugaaccaacaauaauagaaagaaacauaacagagauaguguaucugaccaacaccaccauagagaaggaaauaugccccaaacuagcagaauacagaaauuggucaaagccgcaaugugacauuacaggauuugcaccuuuuucuaaggacaauucgauuaggcuuuccgcugguggggacaucugggugacaagagaaccuuaugugucaugcgauccugacaaguguuaucaauuugcccuuggacagggaacaacacuaaacaacgugcauucugacacagcacgugauaggaccccuuaucggacccuauugaugaaugaguuagguguuccuuuucaucuggggaccaagcaagugugcauagcaugguccagcucaaguugucacgauggaaaagcauggcugcauguuuguauaacgggggaugauaaaaaugcaacugcuagcuucauuuacaaugggaggcuuguagauaguguuguuucaugguccaaagaaauccucaggacccaggagucagaaugcguuuguaucaauggaacuuguacaguagugaugacugaugggagugcuucaggagaagcugauacuaaaauacuauucauugaggaggggaaaaucguucauacuagcacauugucaggaagugcucagcaugucgaggagugcuccugcuauccucgauauccuggugucagaugugucugcagagacaacuggaaaggcuccaauaggcccaucguagauauaaacauaaaggaucauagcauuguuuccaguuauguguguucaggacuuguuggagacacacccagaaaaaacgacagcuccagcaguagccauuguuuggauccuaacaaugaagaggguggucauggagugaaaggcugggccuuugaugauggaaaugacguguggaugggaagaacgaucagcgagaagucacgcuuaggguaugaaaccuucaaagucauugaaggcugguccaacccuaaguccaaauugcagauaaauaggcaagucauaguugacagagguaauagguccgguuauucugguauuuucucuguugaaggcaaaagcugcaucaaucggugcuuuuauguggaguugauaaggggaagaaaagaggaaacugaagucuuguggaccucaaacaguauuguuguguuuuguggcaccucagguacauauggaacaggcucauggccugauggggcggacaucaaucucaugccuauauaa

SEQ ID NO: 48494 - RNA, 1410 nt, Artificial Sequence
  derived and/or modified CDS sequence (wt) from neuraminidase__InfluenzaA__ACG80437
augaauccaaaucaaaagauaauaacgauuggcucuguuucucucaccauuuccacaauaugcuucuucaugcaaauugccaucuugauaacuacuguaacauugcauuucaagcaauaugaauucaacuccuccccaaacaaccaagugaugcugugugaaccaacaauaauagaaagaaacauaacagagauaguguaucugaccaacaccaccauagagaaggaaauaugccccaaacuagcagaauacagaaauuggucaaagccgcaaugugacauuacaggauuugcaccuuuuucuaaggacaauucgauuaggcuuuccgcugguggggacaucugggugacaagagaaccuuaugugucaugcgauccugacaaguguuaucaauuugcccuuggacagggaacaacacuaaacaacgugcauucaaauaacacaguacgugauaggaccccuuaucggacccuauugaugaaugaguuagguguuccuuuucaucuggggaccaagcaagugugcauagcaugguccagcucaaguugucacgauggaaaagcauggcugcauguuuguauaacgggggaugauaaaaaugcaacugcuaacuucauuuacaaugggaggcuuguagauaguauuguuucaugguccaaagaaaucuuuaggacccaggagucagaaugcguuuguaucaauggaacuuguacaguaguaaugacugaugggagugcuucaggaaaagcugauacuaaaauacuauucauugaggaggggaaaaucguucauacuagcacauugucaggaagugcucagcaugucgaggaguguuccugcuauccucgauauccuggugucagaugugucugcagagacaacuggaaaggcuccaauaggcccaucguagauauaaacauaaaggaucauagcauuguuuccaguuauguguguucaggacuuguuggagacacacccagaaaaaacgacagcuccagcaguagccauuguuuggauccuaacaaugaagaagguggucauggagugaaaggcugggccuuugaugauggaaaugacguguggauggggagaacgaucagcgagaagucacgcucaggguaugaaaccuucaaagucauugaaggcugguccaauccuaaguccaaauugcagauaaauaggcaagucauaguugacagagguaauagguccgguuauucugguauuuucucuguugaaggcaaaagcugcaucaaucggugcuuuuauguggaguugauaaggggaagaaaagaggaaacugaagucuuguggaccucaaacaguauuguuguguuuuguggcaccucagguacauauggaacaggcucauggccugauggggcggacaucaaucucaugccuauauaa

SEQ ID NO: 48495 - RNA, 1407 nt, Artificial Sequence
  derived and/or modified CDS sequence (wt) from neuraminidase__InfluenzaA__ACG80446
augaauccaaaucaaaagauaauaacgauuggcucuguuucucucaccauuuccacaauaugcuucuucaugcaaauugccaucuugauaacuacuguaacauugcauuucaagcaauaugaauucaacucccccccaaacaaccaaaugaugcugugugaaccaacaauaauagaaagaaacauaacagagauaguguaucugaccaacaccaccauagagaaggaaauaugccccaaacuagcagaauacagaaauuggucaaagccgcaaugugacauuacaggauuugcaccuuuuucuaaggacaauucgauuaggcuuuccgcugguggggacaucugggugacaagagaaccuuaugugucaugcgauccugacaaguguuaucaauuugcccuuggacagggaacaacacuaaacaacgugcauucugacacagcacgugauaggaccccuuaucggacccuauugaugaaugaguuagguguuccuuuucaucuggggaccaagcaagugugcauagcaugguccagcucaaguugucacgauggaaaagcauggcugcauguuuguauaacgggggaugauaaaaaugcaacugcuagcuucauuuacaaugggaggcuuguagauaguguuguuucaugguccaaagaaauccucaggacccaggagucagaaugcguuuguaucaauggaacuuguacaguagugaugacugaugggagugcuucaggagaagcugauacuaaaauacuauucauugaggaggggaaaaucguucauacuagcacauugucaggaagugcucagcaugucgaggagugcuccugcuauccucgauauccuggugucagaugugucugcagagacaacuggaaaggcuccaauaggcccaucguagauauaaacauaaaggaucauagcauuguuuccaguuauguguguucaggacuuguuggagacacacccagaaaaaacgacagcuccagcaguagccauuguuuggauccuaacaaugaagaggguggucauggagugaaaggcugggccuuugaugauggaaaugacguguggaugggaagaacgaucagcgagaagucacgcuuaggguaugaaaccuucaaagucauugaaggcugguccaacccuaaguccaaauugcagauaaauaggcaagucauaguugacagagguaauagguccgguuauucugguauuuucucuguugaaggcaaaagcugcaucaaucggugcuuuuauguggaguugauaaggggaagaaaagaggaaacugaagucuuguggaccucaaacaguauuguuguguuuuguggcaccucagguacauauggaacaggcucauggccugauggggcggacaucaaucucaugccuauauaa

SEQ ID NO: 48496 - RNA, 1410 nt, Artificial Sequence
  derived and/or modified CDS sequence (wt) from neuraminidase__InfluenzaA__ACG80455
augaauccuaaucaaaagauaauaacgauuggcucuguuucuuucaucaucuccucaauaugcuucuucaugcaaauugccaucuugauaacuacuguaacauugcauuucaagcaauaugaauucaacucccccccaaacaaccaaaugaugcugugugaaccaacaauaauagaaagaaacauaacagagauaguguaucugaccaacaccaccauagagaaggaaauaugccccaaacuagcagaauacagaaauuggucaaagccgcaaugugacauuacaggauuugcaccuuuuucuaaggacaauucgauuaggcuuuccgcugguggggacaucugggugacaagagaaccuuaugugucaugcgauccugacaaguguuaucaauuugcccuuggacagggaacaacacuaaacaacgugcauucaaaugacacagcacgugguaggaccccuuaucggacccuauugaugaaugaguuagguguuccuuuucaucuggggaccaagcaagugugcauagcauggucaagcucaaguugucacgauggaaaagcauggcugcauguuuguauaacgggggaugauaaaaaugcaacugcuagcuucauuuacgaugggaggcuuguagauaguguuguuucaugguccaaagaaauccucaggacccaggagucagaaugcguuuguaucaauggaacuuguacaguagugaugacugaugggagugcuucaggagaagcugauacuaaaauacuauucauugaggaggggaaaaucguucauacuagcacauugucaggaagugcucagcaugucgaggagugcuccugcuauccucgauauccuggugucagaugugucugcagagacaacuggaaaggcuccaauaggcccaucguagauauaaacauaaaggaucauagcauuguuuccaguuauguguguucaggacuuguuggagacacacccagaaaaaacgacagcuccagcaguagccauuguuuggauccuaacaaugaagaggguggucauggagugaaaggcugggccuuugaugauggaaaugacguguggaugggaagaacgaucagcgagaagucacgcuuaggguaugaaaccuucaaagucauugaaggcugguccaacccuaaguccaaauugcagauaaauaggcaagucauaguugacagagguaauagguccgguuauucugguauuuucucuguugaaggcaaaagcugcaucaaucggugcuuuuauguggaguugauaaggggaagaaaagaggaaacugaagucuuguggaccucaaacaguauuguuguguuuuguggcaccucagguacauauggaacaggcucauggccugauggggcggacaucaaucucaugccuauauaa

SEQ ID NO: 48497 - RNA, 1407 nt, Artificial Sequence; identical to SEQ ID NO: 48495
  derived and/or modified CDS sequence (wt) from neuraminidase__InfluenzaA__ACG80464

SEQ ID NO: 48498 - RNA, 1410 nt, Artificial Sequence
  derived and/or modified CDS sequence (wt) from neuraminidase__InfluenzaA__ACG80473
auggauccaauucaaaagauaauaacgauuggcucuguuucucucaccauuuccacaauaugcuucuucaugcaaauugccaucuugauaacuacuguaacauugcauuucaagcaauaugaauucaacucccccccaaacaaccaaaugaugcugugugaaccaacaauaauagaaagaaacauaacagagauaguguaucugaccaacaccaccauagagaaggaaauaugccccaaacuagcagaauacagaaauuggucaaagccgcaaugugacauuacaggauuugcaccuuuuucuaaggacaauucgauuaggcuuuccgcugguggggacaucugggugacaagagaaccuuaugugucaugcgauccugacaaguguuaucaauuugcccuuggacagggaacaacacuaaacaacgugcauucaaaugacacagcacgugguaggaccccuuaucggacccuauugaugaaugaguuagguguuccuuuucaucuggggaccaagcaagugugcauagcauggucaagcucaaguugucacgauggaaaagcauggcugcauguuuguauaacgggggaugauaaaaaugcuacugcuagcuucauuuacgaugggaggcuuguagauaguguuguuucaugguccaaagaaauccucaggacccaggagucagaaugcguuuguaucaauggaacuuguacaguagugaugacugaugggagugcuucaggagaagcugauacuaaaauacuauucauugaggaggggaaaaucguucauacuagcacauugucaggaagugcucagcaugucgaggagugcuccugcuauccucgauauccuggugucagaugugucugcagagacaacuggaaaggcuccaauaggcccaucguagauauaaacauaaaggaucauagcauuguuuccaguuauguguguucaggacuuguuggagacacacccagaaaaaacgacagcuccagcaguagccauuguuuggauccuaacaaugaagaggguggucauggagugaaaggcugggccuuugaugauggaaaugacguguggaugggaagaacgaucagcgagaagucacgcuuaggguaugaaaccuucaaagucauugaaggcugguccaacccuaaguccaaauugcagauaaauaggcaagucauaguugacagagguaauagguccgguuauucugguauuuucucuguugaaggcaaaagcugcaucaaucggugcuuuuauguggaguugauaaggggaagaaaagaggaaacugaagucuuguggaccucaaacaguauuguuguguuuuguggcaccucagguacauauggaacaggcucauggccugauggggcggacaucaaucucaugccuauauaa

SEQ ID NO: 48499 - RNA, 1410 nt, Artificial Sequence; identical to SEQ ID NO: 46740
  derived and/or modified CDS sequence (wt) from neuraminidase__InfluenzaA__ACH69559

SEQ ID NO: 48500 - RNA, 1410 nt, Artificial Sequence
  derived and/or modified CDS sequence (wt) from neuraminidase__InfluenzaA__ACH69570
augaauccaaaucaaaagauaauaacgauuggcucuguuucucucaccauuuccacaauaugcuucuucaugcaaauugccaucuugauaacuacuguaacauugcauuucaagcaauaugaauucaacucccccccaaacaaccaagugaugcugugugaaccaacaauaauagaaagaaacauaacagagauaguguaucugaccaacaccaccauagagaaggaaauaugccccaaacuagcagaauacagaaauuggucaaagccgcaauguaacauuacaggauuugcaccuuuuucuaaggacaauucgauuaggcuuuccgcugguggggacaucugggugacaagagaaccuuaugugucaugcgauccugacaaguguuaucaauuugcccuuggacagggaacaacacuaaacaacgugcauucaaaugacacaguacaugauaggaccccuuaucggacccuauugaugaaugaguuagguguuccauuucaucuggggaccaagcaagugugcauagcaugguccagcucaaguugucacgauggaaaagcauggcugcauguuuguguaacgggggaugauaaaaaugcaacugcuagcuucauuuacaaugggaggcuuguagauaguauuguuucaugguccaaagaaauccucaggacccaggagucagaaugcguuuguaucaauggaacuuguacaguaguaaugacugaugggagugcuucaggaaaagcugauacuaaaauacuauucauugaggaggggaaaaucguucauacuagcacauugucaggaagugcucagcaugucgaggagugcuccugcuauccucgauauccuggugucagaugugucugcagagacaacuggaaaggcuccaauaggcccauaguagauauaaacauaaaggauuauagcauuguuuccaguuaugugugcucaggacuuguuggagacacacccagaaauaacgacagcuccagcaguagccauugcuuggauccuaacaaugaagaagguggucauggagugaaaggcugggccuuugaugauggaaaugacguguggaugggaagaacgaucagcgagaaguuacgcucaggauaugaaaccuucaaagucauugaaggcugguccaacccuaauuccaaauugcagauaaauaggcaagucauaguugacagagguaauagguccgguuauucugguauuuucucuguugaaggcaaaagcugcaucaaucggugcuuuuauguggaguugauaaggggaagaaaagaggaaacugaagucuuguggaccucaaacaguauuguuguguuuuguggcaccucagguacauauggaacaggcucauggccugauggggcggacaucaaucucaugccuauauaa

SEQ ID NO: 48501 - RNA, 1410 nt, Artificial Sequence
  derived and/or modified CDS sequence (wt) from neuraminidase__InfluenzaA__ACH69581
augaauccaaaucaaaagauaauaacgauuggcucuguuucucucaccauuuccacaauaugcuucuucaugcaaauugccaucuugauaacuacuguaacauugcauuucaagcaauaugaauucaacucccccccaaacaaccaagugaugcugugugaaccaacaauaauagaaagaaacauaacagagauaguguaucugaccaacaccaccauagagaaggaaauaugccccaaacuagcagaauacagaaauuggucaaagccgcaauguaacauuacaggauuugcaccuuuuucuaaggacaauucgauuaggcuuuccgcugguggggacaucugggugacaagagaaccuuaugugucaugcgauccugacaaguguuaucaauuugcccuuggacagggaacaacacuaaacaacgugcauucaaaugacacaguacaugauaggaccccuuaucggacccuauugaugaaugaguuagguguuccauuucaucuggggaccaagcaagugugcauagcaugguccagcucaaguugucacgauggaaaagcauggcugcauguuuguguaacgggggaugauaaaaaugcaacugcuagcuucauuuacaaugggaggcuuguagauaguauuguuucaugguccaaagaaauccucaggacccaggagucagaaugcguuuguaucaauggaacuuguacaguaguaaugacugaugggagugcuucaggaaaagcugauacuaaaauacuauucauugaggaggggaaaaucguucauacuagcacauugucaggaagugcucagcaugucgaggagugcuccugcuauccucgauauccuggugucagaugugucugcagagacaacuggaaaggcuccaauaggcccauaguagauauaaacauaaaggauuauagcauuguuuccaguuaugugugcucaggacuuguuggagacacacccagaaaaaacgacagcuccagcaguagccauugcuuggauccuaacaaugaagaagguggucauggagugaaaggcugggccuuugaugauggaaaugacguguggaugggaagaacgaucagcgagaaguuacgcucaggauaugaaaccuucaaagucauugaaggcugguccaacccuaauuccaaauugcagauaaauaggcaagucauaguugacagagggaauagguccgguuauucugguauuuucucuguugaaggcaaaagcugcaucaaucggugcuuuuauguggaguugauaaggggaagaaaagaggaaacugaagucuuguggaccucaaacaguauuguuguguuuuguggcacuucagguacauauggaacaggcucauggccugauggggcggacaucaaucucaugccuauauaa

SEQ ID NO: 48502 - RNA, 1410 nt, Artificial Sequence
  derived and/or modified CDS sequence (wt) from neuraminidase__InfluenzaA__ACH69592
augaauccaaaucaaaagauaauaacgauuggcucuguuucucucaccauugccacaauaugcuuccuuaugcaaauugccauccugguaacuacuguaacauugcauuucaagcaauaugaaugcaacucccccccaaacaaccaagugaugcugugugaaccaacaauaauagaaagaaacauaacagagauaguguaucugaccaacaccaccauagagaaggaaauaugccccaaacuagcagaauacagaaauuggucaaagccgcaauguaacauuacaggauuugcaccuuuuucuaaggacaauucgauucggcuuuccgcugguggggacaucugggugacaagagaaccuuacgugucaugcgauccugacaaguguuaucaauuugcccuuggacagggaacaacacuaaacaacgggcauucaaaugacacaguacaugauaggaccccuuaucggacccuauugaugaaugaguuggguguuccauuucauuugggaaccaagcaagugugcauagcaugguccagcucaaguugucacgauggaaaagcauggcugcauguuuguguaacgggggaugaugaaaaugcaacugcuagcuucauuuacaaugggaggcuuguagauaguauugguucaugguccaaaaaaauccucaggacccaggagucggaaugcguuuguaucaauggaacuuguacaguaguaaugacugaugggagugcuucaggaaaagcugauacuaaaauacuauucauugaggaggggaaaaucguucauacuagcccauugucaggaagugcucagcaugucgaggagugcuccuguuauccucgauauccuggugucagaugugucugcagagacaacuggaaaggcuccaauaggcccaucguagauauaaauguaaaggauuauagcauuguuuccaguuaugugugcucaggacuuguuggagacacacccagaaaaaacgacagcuccagcaguagccauugcuuggauccuaacaaugaggaagguggucauggagugaaaggcugggccuuugaugauggaaaugacguguggaugggaagaacgaucagcgagaagucacgcucaggauaugaaaccuucaaagucauugaaggcugguccaaaccuaacuccaaauugcagauaaauaggcaagucauaguugacagagguaauagguccgguuauucugguauuuucucuguugaaggcaaaagcugcaucaaucagugcuuuuauguggaguugauaaggggaaggaaacaggaaacugaagucuuguggaccucaaacaguauuguuguguuuuguggcaccucagguacauauggaacaggcucauggccugauggggcggaccucaaucucaugccuauauaa

SEQ ID NO: 48503 - RNA, 1410 nt, Artificial Sequence
  derived and/or modified CDS sequence (wt) from neuraminidase__InfluenzaA__ACH69603
augaauccaaaucaaaagauaauaacgauuggcucuguuucucucaccauugccacaauaugcuuccuuaugcaaauugucauccugguaacuacuguaacauugcauuucaagcaauaugaaugcaacucccccccaaacaaccaagugaugcugugugaaccaacaauaauagaaagaaacauaacagagauaguguaucugaccaacaccaccauagagaaggaaauaugccccaaacuagcagaauacagaaauuggucaaagccgcaauguaacauuacaggauuugcaccuuuuucuaaggacaauucgauucggcuuuccgcugguggggacaucugggugacaagagaaccuuacgugucaugcgauccugacaaguguuaucaauuugcccuuggacagggaacaacacuaaacaacgggcauucaaaugacacaguacaugauaggaccccuuaucggacccuauugaugaaugaguuggguguuccauuucauuugggaaccaagcaagugugcauagcaugguccagcucaaguugucacgauggaaaagcauggcugcauguuuguguaacgggggaugaugaaaaugcaacugcuagcuucauuuacaaugggaggcuuguagauaguauugguucaugguccaaaaaaauccucaggacccaggagucggaaugcguuuguaucaauggaacuuguacaguaguaaugacugaugggagugcuucaggaaaagcugauacuaaaauacuauucauugaggaggggaaaaucguucauacuagcccauugucaggaagugcucagcaugucgaggagugcuccuguuauccucgauauccuggugucagaugugucugcagagacaacuggaaaggcuccaauaggcccaucguagauauaaauguaaaggauuauagcauuguuuccaguuaugugugcucaggacuuguuggagacacacccagaaaaaacgacagcuccagcaguagccauugcuuggauccuaacaaugaggaagguggucauggagugaaaggcugggccuuugaugauggaaaugacguguggaugggaagaacgaucagcgagaagucacgcucaggauaugaaaccuucaaagucauugaaggcugguccaaaccuaacuccaaauugcagauaaauaggcaagucauaguugacagaggcaauagguccgguuauucugguauuuucucuguugaaggcaaaagcugcaucaaucggugcuuuuauguggaguugauaaggggaaggaaacaggaaacugaagucuuguggaccucaaacaguauuguuguguuuuguggcaccucagguacauauggaacaggcucauggccugauggggcggaccucaaucucaugccuauauaa

SEQ ID NO: 48504 - RNA, 1410 nt, Artificial Sequence
  derived and/or modified CDS sequence (wt) from neuraminidase__InfluenzaA__ACH69614
augaauccaaaucaaaagauaauaacgauuggcucuguuucucucaccauugccacaauaugcuuccuuaugcaaauugccauccugguaacuacuguaacauugcauuucaagcaauaugaaugcaacucccccccaaacaaccaagugaugcugugugaaccaacaauaauagaaagaaacauaacagagauaguguaucugaccaacaccaccauagagaaggaaauaugccccaaacuagcagaauacagaaauuggucaaagccgcaauguaacauuacaggauuugcaccuuuuucuaaggacaauucgauucggcuuuccgcugguggggacaucugggugacaagagaaccuuacgugucaugcgauccugacaaguguuaucaauuugcccuuggacagggaacaacacuaaacaacgggcauucaaaugacacaguacaugauaggaccccuuaucggacccuauugaugaaugaguuggguguuccauuucauuugggaaccaagcaagugugcauagcaugguccagcucaaguugucacgauggaaaagcauggcugcauguuuguguaacgggggaugaugaaaaugcaacugcuagcuucauuuacaaugggaggcuuguagauaguauugguucaugguccaaaaaaauccucaggacccaggagucggaaugcguuuguaucaauggaacuuguacaguaguaaugacugaugggagugcuucaggaaaagcugauacuaaaauacuauucauugaggaggggaaaaucguucauacuagcccauugucaggaagugcucagcaugucgaggagugcuccuguuauccucgauauccuggugucagaugugucugcagagacaacuggaaaggcuccaauaggcccaucguagauauaaauguaaaggauuauagcauuguuuccaguuaugugugcucaggacuuguuggagacacacccagaaaaaacgacagcuccagcaguagccauugcuuggauccuaacaaugaggaagguggucauggagugaaaggcugggccuuugaugauggaaaugacguguggaugggaagaacgaucagcgagaagucacgcucaggauaugaaaccuucaaagucauugaaggcugguccaaaccuaacuccaaauugcagauaaauaggcaagucauaguugacagagguaauagguccgguuauucugguauuuucucuguugaaggcaaaagcugcaucaaucggugcuuuuauguggaguugauaaggggaaggaaacaggaaacugaagucuuguggaccucaaacaguauuguuguguuuuguggcaccucagguacauauggaacaggcucauggccugauggggcggaccucaaucucaugccuauauaa

SEQ ID NO: 48505 - RNA, 1413 nt, Artificial Sequence
  derived and/or modified CDS sequence (wt) from neuraminidase__InfluenzaA__ACI22525
augaauccaaaucaaaaaauaauaaccauuggaucaaucaguauagcaaucggaauaauuagucuaauguugcaaauaggaaauauuauuucaauaugggcuagucacucaauccaaacuggaagucaaaaccacacuggaauaugcaaccaaagaaucaucacauaugaaaacagcaccugggugaauaacacauauguuaauauuaacaacacuaauguuguugcugaaaaggacaaaacuucagugacauuggccggcaauucaucucuuuguucuaucaguggaugggcuauauacacaaaagacaacagcauaagaauuggcuccaaaggagauguuuuugucauaagagaaccuuucauaucauguucucacuuggaaugcagaaccuuuuuucugacccaaggugcucuauuaaaugacaaacauucaaaugggaccguaaaggacagaaguccuuauagggccuuaaugagcuguccucuaggugaagcuccguccccauacaauucaaaguucgaaucaguugcauggucagcaagcgcaugccaugauggcaugggcugguuaacaaucggaauuucugguccagacaauggagcuguggcuguacuaaaauacaacggaauaauaacugaaaccauaaaaaguuggaaaaagcgaauauuaagaacacaagagucugaaugugucuguaugaacgggucauguuucaccauaaugaccgauggcccgaguaauggggccgccucguacaaaauuuucaagaucgaaaaggggaagguuacuaaaucaauagaguugaaugcacccaauuuucauuaugaggaauguuccuguuacccagacacuggcacagugauguguguaugcagagacaacuggcaugguucaaaucgaccuugggugucuuuuaaucaaaacuuggauuaucaaauaggauacaucugcaguggaguguucggugacaauccgcgucccaaagauggggagggcagcugcaauccagugacuguugauggagcagacggaguaaaaggguuuucauacaaauaugguaaugguguuuggauaggaaggaccaaaaguaacagacuuagaaagggguuugagaugauuugggauccuaauggauggacaaauaccgacagugauuucucagugaaacaggauguuguagcaauaacugauuggucaggguacagcggaaguuuuguucaacauccugaguuaacaggauuggacuguauaagaccuugcuucuggguugaguuagucagagggcugccuagggaaaauacaacaaucuggacuagugggagcagcauuucuuuuuguggcguuaauagugauacugcaaacuggucuuggccagacggugcugaguugccguucaccauugacaaguag

SEQ ID NO: 48506 - RNA, 1413 nt, Artificial Sequence; identical to SEQ ID NO: 48505
  derived and/or modified CDS sequence (wt) from neuraminidase__InfluenzaA__ACI22526

SEQ ID NO: 48507 - RNA, 1413 nt, Artificial Sequence; identical to SEQ ID NO: 48505
  derived and/or modified CDS sequence (wt) from neuraminidase__InfluenzaA__ACI22527

SEQ ID NO: 48508 - RNA, 1413 nt, Artificial Sequence; identical to SEQ ID NO: 48505
  derived and/or modified CDS sequence (wt) from neuraminidase__InfluenzaA__ACI22528

SEQ ID NO: 48509 - RNA, 1413 nt, Artificial Sequence; identical to SEQ ID NO: 48505
  derived and/or modified CDS sequence (wt) from neuraminidase__InfluenzaA__ACI22529

SEQ ID NO: 48510 - RNA, 1413 nt, Artificial Sequence; identical to SEQ ID NO: 48505
  derived and/or modified CDS sequence (wt) from neuraminidase__InfluenzaA__ACI22530

SEQ ID NO: 48511 - RNA, 1413 nt, Artificial Sequence
  derived and/or modified CDS sequence (wt) from neuraminidase__InfluenzaA__ACI22532
augaauccaaaucaaaaaauaauaaccauuggaucaaucaguauagcaaucggaauaauuagucuaauguugcaaauaggaaauauuauuucaauaugggcuagucacucaauccaaacuggaagucaaaaccacacuggaauaugcaaccaaagaaucaucacauaugaaaacagcaccugggugaauaacacauauguuaauauuaacaacacuaauguuguugcuggaaaggacaaaacuucagugacauuggccggcaauucaucucuuuguucuaucaguggaugggcuauauacacaaaagacaacagcauaagaauuggcuccaaaggagauguuuuugucauaagagaaccuuucauaucauguucucacuuggaaugcagaaccuuuuuucugacccaaggugcucuauuaaaugacaaacauucaaaugggaccguaaaggacagaaguccuuauagggccuuaaugagcuguccucuaggugaagcuccguccccauacaauucaaaguucgaaucaguugcauggucagcaagcgcaugccaugauggcaugggcugguuaacaaucggaauuucugguccagacaauggagcuguggcuguacuaaaauacaacggaauaauaacugaaaccauaaaaaguuggaaaaagcgaauauuaagaacacaagagucugaaugugucuguaugaacgggucauguuucaccauaaugaccgauggcccgaguaauggggccgccucguacaaaauuuucaagaucgaaaaggggaagguuacuaaaucaauagaguugaaugcacccaauuuucauuaugaggaauguuccuguuacccagacacuggcacagugauguguguaugcagagacaacuggcaugguucaaaucgaccuugggugucuuuuaaucaaaacuuggauuaucaaauaggauacaucugcaguggaguguucggugacaauccgcgucccaaagauggggagggcagcugcaauccagugacuguugauggagcagacggaguaaaaggguuuucauacaaauaugguaaugguguuuggauaggaaggaccaaaaguaacagacuuagaaagggguuugagaugauuugggauccuaauggauggacaaauaccgacagugauuucucagugaaacaggauguuguagcaauaacugauuggucaggguacagcggaaguuuuguucaacauccugaguuaacaggauuggacuguauaagaccuugcuucuggguugaguuagucagagggcugccuagggaaaauacaacaaucuggacuagugggagcagcauuucuuuuuguggcguuaauagugauacugcaaacuggucuuggccagacggugcugaguugccguucaccauugacaaguag

SEQ ID NO: 48512 - RNA, 1413 nt, Artificial Sequence; identical to SEQ ID NO: 48511
  derived and/or modified CDS sequence (wt) from neuraminidase__InfluenzaA__ACI22533

SEQ ID NO: 48513 - RNA, 1413 nt, Artificial Sequence; identical to SEQ ID NO: 48505
  derived and/or modified CDS sequence (wt) from neuraminidase__InfluenzaA__ACI22534

SEQ ID NO: 48514 - RNA, 1410 nt, Artificial Sequence
  derived and/or modified CDS sequence (wt) from neuraminidase__InfluenzaA__ACI25727
augaauccaaaucaaaagauaauaacaauuggcucugucucucucaccauugcaacaguaugcuuccucaugcagauugccauccugguaacuacuguaacauugcauuuuaagcaacaugagugcaacucccccgcgagcaaccaaguaaugccgugugaaccaauaauaauagaaaggaacauaacagagauaguguauuugaauaacaccaccauagagaaagagauaugccccaaaguaguggaauacagaaauuggucaaagccgcaaugucaaauuacaggauuugcaccuuuuucuaaggacaauucaauccggcuuucugcugguggggacauuugggugacgagagaaccuuaugugucaugcgauccuggcaaguguuaucaauuugcacucgggcaggggaccacacuagacaacaaacauucaaaugacacaauacaugauagaaucccucaucgaacccuauuaaugaaugaguuggguguuccauuucauuuaggaaccaggcaaguguguauagcaugguccagcucaaguugucacgauggaaaagcauggcugcauguuuguaucacuggggaugauaaaaaugcaacugcuagcuucauuuaugacgggaggcuuguggacaguauugguucauggucucaaaauauccucagaacccaggagucggaaugcguuuguaucaaugggacuugcacaguaguaaugacugauggaagugcuucaggaagagccgauacuagaauacuauucauuaaagagggaaaaauuguccauauuagcccauugucaggaagugcucagcauguagaggaguguuccuguuauccucgauauccuggcgucagauguaucugcagagacaacuggaaaggcucuaauaggcccgucguagacauaaauauggaagauuauagcauugauuccaguuaugugugcucagggcuuguuggcgacacaccuagaaacgacgacagaucuagcaauagcaauugcaggaauccuaacaaugagagagggaaucaaggagugaaaggcugggccuuugacaauggagaugacguguggaugggaagaacgaucagcaaggauuuacgcucagguuaugaaacuuucaaagucauuggugguugguccacaccuaauuccaaaucgcagaucaauagacaagucauaguugacagcgauaaucggucagguuacuccgguauuuucucuguugagggcaaaagcugcaucaauaggugcuuuuauguggaguugauaaggggaaggaaacaggagacuagaguaugguggaccucaaacaguauuguuguguuuuguggcacuucagguaccuauggaacaggcucauggccugauggggcgaacaucaauuucaugccuauauaa

SEQ ID NO: 48515 - RNA, 1410 nt, Artificial Sequence
  derived and/or modified CDS sequence (wt) from neuraminidase__InfluenzaA__ACI25749
augaauccaaaucaaaagauaauaacaauuggcucugucucucucaccauugcaacaguaugcuuccucaugcagauugccauccugguaacuacuguaacauugcauuuuaagcaauaugagugcgacucccccgcaagcaaccaaguaaugccgugugaaccaauaauaauagaaaggaacauaacagagauaguguauuugaauaacaccaccauagagaaagagauaugccccaaaguaguggaauacagaaauuggucaaagccgcaaugucaaauuacaggauuugcaccuuuuucuaaggacaauucaauccggcuuucugcugguggggacauuugggugacgagagaaccuuaugugucaugcgaucauggcaaguguuaucaauuugcacucgggcaggggaccacacuagacaacaaacauucaaaugacacaauacaugauagaaucccucaucgaacccuauuaaugaaugaguuggguguuccauuucauuuaggaaccaggcaaguguguauagcaugguccagcucaaguugucacgauggaaaagcauggcugcauguuuguaucacuggggaugacaaaaaugcaacugcuagcuucauuuaugacgggaggcuuguggacaguauugguucauggucucaaaauauccucagaacccaggagucggaaugcguuuguaucaaugggacuugcacaguaguaaugacugauggaagugcuucaggaagagccgauacuagaauacuauucauugaagaggggaaaauuguccauauuagcccauugucaggaagugcucagcauguagaagaguguuccuguuauccuagauauccuggcgucagauguaucugcagagacaacuggaaaggcucuaauaggcccgucguagacauaaauauggaagauuauagcauugauuccaguuaugugugcucagggcuuguuggcgacacaccuagaaacgacgacagaucuagcaauagcaauugcaggaauccuaacaaugagagagggaaucaaggagugaaaggcugggccuuugacaauggagaugacguguggaugggaagaacgaucagcaaggauuuacgcucagguuaugaaacuuucaaagucauuggugguugguccacaccuaauuccaaaucgcagaucaauagacaagucauaguugacagcgauaaucggucagguuacucugguauuuucucuguugagggcaaaagcugcaucaauaggugcuuuuauguggaguugauaaggggaaggaaacaggagacuagagugugguggaccucaaacaguauuguuguguuuuguggcacuucagguaccuauggaacaggcucauggccugauggggcgaacaucaauuucaugcauauauaa

SEQ ID NO: 48516 - RNA, 1410 nt, Artificial Sequence
  derived and/or modified CDS sequence (wt) from neuraminidase__InfluenzaA__ACI25760
augaauccaaaucaaaagauaauaacaauuggcucugucucucucaccauugcaacaguaugcuuccucaugcagauugccauccugguaacuacuguaacauugcauuuuaagcaauaugagugcgacucccccgcgagcaaccaaguaaugccgugugaaccaauaauaauagaaaggaacauaacagagauaguguauuugaauaacaccaccauagagaaagagauaugccccaaaguaguggaauacagaaauuggucaaagccgcaaugucaaauuacaggauuugcaccuuuuucuaaggacaauucaauccggcuuucugcugguggggacauuugggugacgagagaaccuuaugugucaugcgaucauggcaaguguuaucaauuugcacucgggcaggggaccacacuagacaacaaacauucaaaugacacaauacaugauagaaucccucaucgaacccuauuaaugaaugaguuggguguuccauuucauuuaggaaccaggcaaguguguauagcaugguccagcucaaguugucacgauggaaaagcauggcugcauguuuguaucacuggggaugacaaaaaugcaacugcuagcuucauuuaugacgggaggcuuguggacaguauugguucauggucucaaaauauccucagaacccaggagucggaaugcguuuguaucaaugggacuugcacaguaguaaugacugauggaagugcuucaggaagagccgauacuagaauacuauucauugaagaggggaaaauuguccauauuagcccauugucaggaagugcucagcauguagaagaguguuccuguuauccuagauauccuggcgucagauguaucugcagagacaacuggaaaggcucuaauaggcccgucguagacauaaauauggaagauuauagcauugauuccaguuaugugugcucagggcuuguuggcgacacaccuagaaacgacgacagaucuagcaauagcaauugcaggaauccuaacaaugagagagggaaucaaggagugaaaggcugggccuuugacaauggagaugacguguggaugggaagaacgaucagcaaggauuuacgcucagguuaugaaacuuucaaagucauuggugguugguccacaccuaauuccaaaucgcagaucaauagacaagucauaguugacagcgauaaucggucagguuacucugguauuuucucuguugagggcaaaagcugcaucaauaggugcuuuuauguggaguugauaaggggaaggaaacaggagacuagagugugguggaccucaaacaguauuguuguguuuuguggcacuucagguaccuauggaacaggcucauggccugauggggcgaacaucaauuucaugcauauauaa

SEQ ID NO: 48517 - RNA, 1410 nt, Artificial Sequence; identical to SEQ ID NO: 48516
  derived and/or modified CDS sequence (wt) from neuraminidase__InfluenzaA__ACI25771

SEQ ID NO: 48518 - RNA, 1410 nt, Artificial Sequence; identical to SEQ ID NO: 46107
  derived and/or modified CDS sequence (wt) from neuraminidase__InfluenzaA__ACI25782

SEQ ID NO: 48519 - RNA, 1410 nt, Artificial Sequence
  derived and/or modified CDS sequence (wt) from neuraminidase__InfluenzaA__ACI25793
augaauccaaaucaaaagauaauaacaauuggcucugucucucucaccauugcaacaguaugcuuccucaugcagauugccauccugguaacuacuguaacauugcauuuuaagcaauaugagugcgacucccccgcgagcaaccaaguaaugccgugugaaccaauaauaauagaaaggaacauaacagagauaguguauuugaauaacaccaccauagagaaagagauaugccccaaaguaguggaauacagaaauuggucaaagccgcaaugucaaauuacaggauuugcaccuuuuucuaaggacaauucaauccggcuuucuguugguggggacauuugggugacgagagaaccuuaugugucaugcgaucauggcaaguguuaucaauuugcacucgggcaggggaccacacuagacaacaaacauucaaaugacacaauacaugauagaaucccucaucgaacccuauuaaugaaugaguuggguguuccauuucauuuaggaaccaggcaaguguguauagcaugguccagcucaaguugucacgauggaaaagcauggcugcauguuuguaucacuggggaugacaaaaaugcaacugcuagcuucauuuaugacgggaggcuuguggacaguauugguucauggucucaaaauauccucagaacccaggagucggaaugcguuuguaucaaugggacuugcacaguaguaaugacugauggaagugcuucaggaagagccgauacuagaauacuauucauugaagaggggaaaauuguccauauuagcccauugucaggaagugcucagcauguagaagaguguuccuguuauccuagauauccuggcgucagauguaucugcagagacaacuggaaaggcucuaauaggcccgucguagacauaaauauggaagauuauagcauugauuccaguuaugugugcucagggcuuguuggcgacacaccuagaaacgacgacagaucuagcaauagcaauugcaggaauccuaacaaugagagagggaaucaaggagugaaaggcugggccuuugacaauggagaugacguguggaugggaagaacgaucagcaaggauuuacgcucagguuaugaaacuuucaaagucauuggugguugguccacaccuaauuccaaaucgcagaucaauagacaagucauaguugacagcgauaaucggucagguuacucugguauuuucucuguugagggcaaaagcugcaucaauaggugcuuuuauguggaguugauaaggggaaggaaacaggagacuagagugugguggaccucaaacaguauuguuguguuuuguggcacuucagguaccuauggaacaggcucauggccugauggggcgaacaucaauuucaugccuauauaa

SEQ ID NO: 48520 - RNA, 1410 nt, Artificial Sequence
  derived and/or modified CDS sequence (wt) from neuraminidase__InfluenzaA__ACI25804
augaauccaaaucaaaagauaauaacaauuggcucugucucucucaccauugcaacaguaugcuuccucaugcagauugccauccugguaacuacuguaacauugcauuuuaagcaauaugagugcgacucccccgcgagcaaccaaguaaugccgugugaaccaauaauaauagaaaggaacauaacagagauaguguauuugaauaacaccaccauagagaaagagauaugccccaaaguaguggaauacagaaauuggucaaagccgcaaugucaaauuacaggauuugcaccuuuuucuaaggacaauucaauccggcuuucugcugguggggacauuugggugacgagagaaccuuaugugucaugcgaucauggcaaguguuaucaauuugcacucgggcaggggaccacacuagacaacaaacauucaaaugacacaauacaugauagaaucccucaucgaacccuauuaaugaaugaguuggguguuccauuucauuuaggaaccaggcaaguguguauagcaugguccagcucaaguugucacgauggaaaagcauggcugcauguuuguaucacuggggaugacaaaaaugcaacugcuagcuucauuuaugacgggaggcuuguggacaguauugguucauggucucaaaauauccucagaacccaggagucggaaugcguuuguaucaaugggacuugcacaguaguaaugacugauggaagugcuucaggaagagccgauacuagaauacuauucauugaagaggggaaaauuguccauauuagcccauugucaggaagugcucagcauguagaagaguguuccuguuauccuagauauccuggcgucagauguaucugcagagacaacuggaaaggcucuaauaggcccgucguagacauaaauauggaagauuauagcauugauuccaguuaugugugcucagggcuuguuggcgacacaccuagaaacgacgacagaucuagcaauagcaauugcaggaauccuaacaaugagagagggaaucaaggagugaaaggcugggccuuugacaauggagaugacguguggaugggaagaacgaucagcaaggauuuacgcucagguuaugaaacuuucaaagucauuggugguugguccacaccuaauuccaaaucgcagaucaauagacaagucauaguugacagcgaucaucggucagguuacucugguauuuucucuguugagggcaaaagcugcaucaauaggugcuuuuauguggaguugauaaggggaaggaaacaggagacuagagugugguggaccucaaacaguauuguuguguuuuguggcacuucagguaccuauggaacaggcucauggccugauggggcgaacaucaauuucaugccuauauaa

SEQ ID NO: 48521 - RNA, 1410 nt, Artificial Sequence
  derived and/or modified CDS sequence (wt) from neuraminidase__InfluenzaA__ACI26277
augaauccaaaucaaaagauaauaacaauuggcucugucucucucaccauugcaacaguaugcuuccucaugcagauugccauccuggcaacuacugugacauugcauuuuaaacaacaugagugcgacucccccgcgagcaaccaaguaaugccaugugaaccaauaauaauagaaaggaacauaacagagauaguguauuugaauaacaccaccauagagaaagagauuugccccgaaguaguggaauacagaaauuggucaaagccgcaaugucaaauuacaggauuugcaccuuuuucuaaggacaauucaauccggcuuucugcugguggggacauuugggugacgagagaaccuuaugugucaugcgauccuggcaaguguuaucaauuugcacucgggcaggggaccacacuagacaacaaacauucaaauggcacaauacaugauagaaucccucaucgaacccuauuaaugaaugaguuggguguuucauuucauuuaggaaccaaacaaguguguguagcaugguccagcucaaguugucacgauggaaaagcaugguugcauguuugugucacuggggaugauagaaaugcgacugcuagcuucauuuaugacgggaggcuuguggacaguauugguucauggucucaaaauauccucaggacccaggagucggaaugcguuuguaucaaugggacuugcacaguaguaaugacugauggaagugcaucaggaagagccgauacuagaauacuauucauuaaagaggggaaaauuguccauauuagcccauugucaggaagugcucagcauauagaggaguguuccuguuacccucgauauccugacgucagauguaucugcagagacaacuggaaaggcucuaauaggcccguuauagacauaaauauggaagauuauagcauugauuccaguuaugugugcucagggcuuguuggcgacacacccaggaacgacgacagcucuagcaauagcaauugcagggauccuaacaaugagagagggaauccaggagugaaaggcugggccuuugacaauggagaugauguauggaugggaagaacaaucaacaaagauucacgcucagguuaugaaacuuucaaagucauuggugguugguccacaccuaauuccaaaucgcaggucaauagacaggucauaguugacaacaauaauuggucggguuacucugguauuuucucuguugagggcaaaagcugcaucaauaggugcuuuuauguggaguugauaaggggaaggccacaggagacuagaguaugguggaccucaaacaguauuguuguguuuuguggcacuucagguacuuauggaacaggcucauggccugauggggcgaacaucaauuucaugccuauauaa

SEQ ID NO: 48522 - RNA, 1410 nt, Artificial Sequence; identical to SEQ ID NO: 48467
  derived and/or modified CDS sequence (wt) from neuraminidase__InfluenzaA__ACI26299

SEQ ID NO: 48523 - RNA, 1410 nt, Artificial Sequence
  derived and/or modified CDS sequence (wt) from neuraminidase__InfluenzaA__ACI26321
augaauccaaaucaaaagauaauaacgauuggcucuguuucucucaccauuuccacaauaugcuucuucaugcaaauugccaucuugauaacuacuguaacauugcauuucaagcaauaugaauucaacucccccccaaacaaccaagugaugcugugugaaccaacaauaauagaaagaaacauaacagagauaguguaucugaccaacaccaccauagagaaggaaauaugccccaaacuagcagaauacagaaauuggucaaagccgcaaugugacauuacaggauuugcaccuuuuucuaaggacaauucgauuaggcuuuccgcugguggggacaucugggugacaagagaaccuuaugugucaugcgauccugacaaguguuaucaauuugcccuuggacagggaacaacacuaaacaacgugcauucaaaugacacaguacgugauaggaccccuuaucggacccuauugaugaaugaguuagguguuccuuuucaucuggggaccaagcaagugugcauagcaugguccagcucaaguugucacgauggaaaagcauggcugcauguuuguauaacgggggaugauaaaaaugcaacugcuagcuucauuuacaaugggaggcuuguagauaguauuguuucaugguccaaagaaauccucaggacccaggagucagaaugcguuuguaucaauggaacuuguacaguaguaaugacugaugggagugcuucaggaaaagcugauacuaaaauacuauucauugaggaggggaaaaucguucauacuagcacauugucaggaagugcucagcaugucgaggagugcuccugcuauccucgauauccuggugucagaugugucugcagagacaacuggaaaggcuccaauaggcccaucguagauauaaacauaaaggaucauagcacuguuuccaguuauguguguucaggacuuguuggagacacacccagaaaaaacgacagcuccagcaguagccauuguuuggauccuaacaaugaagaagguggucauggagugaaaggcugggccuuugaugauggaaaugacguguggaugggaagaacgaucagcgagaagucgcgcuuaggguaugaaaccuucaaagucauugaaggcugguccaacccuaaguccaaauugcagauaaauaggcaagucauaguugacagagguaauagguccgguuauucugguauuuucucuguugaaggcaaaagcugcaucaaucggugcuuuuauguggaguugauaaggggaagaaaagaggaaacugaagucuuguggaccucaaacaguauuguuguguuuuguggcaccucagguacauauggaacaggcucauggccugauggggcggacaucaaucucaugccuauauaa

SEQ ID NO: 48524 - RNA, 1410 nt, Artificial Sequence
  derived and/or modified CDS sequence (wt) from neuraminidase__InfluenzaA__ACI26354
augaauccaaaucaaaagauaauaacgauuggcucuguuucucucaccauuuccacaauaugcuucuucaugcaaauugccaucuugauaacuacuguaacauugcauuucaagcaauaugaauucaacucccccccaaacaaccaagugaugcugugugaaccaacaauaauagaaagaaacauaacagagauaguguaucugaccaacaccaccauagagaaggaaauaugccccaaacuagcagaauacagaaauuggucaaagccgcaaugugacauuacaggauuugcaccuuuuucuaaggacaauucgauuaggcuuuccgcugguggggacaucugggugacaagagaaccuuaugugucaugcgauccugacaaguguuaucaauuugcccuuggacagggaacaacacuaaacaacgugcauucaaaugacacaguacgugauaggaccccuuaucggacccuauugaugaaugaguuagguguuccuuuucaucuggggaccaagcaagugugcauagcaugguccagcucaaguugucacgauggaaaagcauggcugcauguuuguauaacgggggaugauaaaaaugcaacugcuagcuucauuuacaaugggaggcuuguagauaguguuguuucaugguccaaagaaauccucaggacccaggagucagaaugcguuuguaucaauggaacuuguacaguaguaaugacugaugggagugcuucaggaaaagcugauacuaaaauacuauucauugaagaggggaaaaucguucauacuagcacauugucaggaagugcucagcaugucgaggagugcuccugcuauccucgauauccuggugucagaugugucugcagagacaacuggaaaggcuccaauaggcccaucguagauauaaacauaaaggaucauagcauuguuuccaguuauguguguucaggacuuguuggagacacacccagaaaaaacgacagcuccagcaguagccauuguuuggauccuaacaaugaagaagguggucauggagugaaaggcugggccuuugaugauggaaaugacguguggaugggaagaacgaucagcgagaagucacgcuuaggguaugaaaccuucaaagucauugaaggcugguccaacccuaaguccaaauugcagauaaauaggcaagucauaguugacagagguaauagguccgguuauucugguauuuucucuguugaaggcaaaagcugcaucaaucggugcuuuuauguggaguugauaaggggaagaaaagaggaaacugaagucuuguggaccucaaacaguauuguuguguuuuguggcaccucagguacauauggaacaggcucauggccugauggggcggacaucaaucucaugccuauauaa

SEQ ID NO: 48525 - RNA, 1410 nt, Artificial Sequence
  derived and/or modified CDS sequence (wt) from neuraminidase__InfluenzaA__ACI26365
augaauccaaaucaaaagauaauaacgauuggcucuguuucucucaccauuuccacaauaugcuucuucaugcaaauugccaucuugauaacuacuguaacauugcauuucaagcaauaugaauucaacucccccccaaacaaccaagugaugcugugugaaccaacaauaauagaaagaaacauaacagagauaguguaucugaccaacaccaccauagagaaggaaauaugccccaaacuagcagaauacagaaauuggucaaagccgcaaugugacauuacaggauuugcaccuuuuucuaaggacaauucgauuaggcuuuccgcugguggggacaucugggugacaagagaaccuuaugugucaugcgauccugacaaguguuaucaauuugcccuuggacagggaacaacacuaaacaacgugcauucaaaugacacaguacgugauaggaccccuuaucggacccuauugaugaaugaguuagguguuccuuuucaucuggggaccaagcaagugugcauagcaugguccagcucaaguugucacgauggaaaagcauggcugcauguuuguauaacgggggaugauaaaaaugcaacugcuagcuucauuuacaaugggaggcuuguagauaguguuguuucaugguccaaagaaauccucaggacccaggagucagaaugcguuuguaucaauggaacuuguacaguaguaaugacugaugggagugcuucaggaaaagcugauacuaaaauacuauucauugaggaggggaaaaucguucauacuagcacauugacaggaagugcucagcaugucgaggagugcuccugcuauccucgauauccuggugucagaugugucugcagagacaacuggaaaggcuccaauaggcccaucguagauauaaacauaaaggaucauagcauuguuuccaguuauguguguucaggacuuguuggagacacacccagaaaaaacgacagcuccagcaguagccauuguuuggauccuaacaaugaagaagguguucauggagugaaaggcugggccuuugaugauggaaaugacguguggaugggaagaacgaucagcgagaagucacgcuuaggauaugaaaccuucaaagucauugaaggcugguccaacccuaaguccaaauugcagauaaauaggcaagucauaguugacagagguaauagguccgguuauucugguauuuucucuguugaaggcaaaagcugcaucaaucggugcuuuuauguggaguugauaaggggaagaaaagaggaaacugaagucuuguggaccucaaacaguauuguuguguuuuguggcaccucagguacauauggaacaggcucauggccugauggggcggacaucaaucucaugccuauauaa

SEQ ID NO: 48526 - RNA, 1410 nt, Artificial Sequence
  derived and/or modified CDS sequence (wt) from neuraminidase__InfluenzaA__ACI26376
augaauccaaaucaaaagauaauaacgauuggcucuguuucucucaccauuuccacaauaugcuucuucaugcaaauugccaucuugauaacuacuguaacauugcauuucaagcaauaugaauucaacucccccccaaacaaccaagugaugcugugugaaccaacaauaauagaaagaaacauaacagagauaguguaucugaccaacaccaccauagagaaggaaauaugccccaaacuagcagaauacagaaauuggucaaagccgcaaugugacauuacaggauuugcaccuuuuucuaaggacaauucgauuaggcuuuccgcugguggggacaucugggugacaagagaaccuuaugugucaugcgauccugacaaguguuaucaauuugcccuuggacagggaacaacacuaaacaacgugcauucaaaugacacaguacgugauaggaccccuuaucggacccuauugaugaaugaguuagguguuccuuuucaucuggggaccaagcaagugugcauagcaugguccagcucaaguugucacgauggaaaagcauggcugcauguuuguauaacgggggaugauaaaaaugcaacugcuagcuucauuuacaaugggaggcuuguagauaguguuguuucaugguccaaagaaauccucaggacccaggagucagaaugcguuuguaucaauggaacuuguacaguaguaaugacugaugggagugcuucaggaaaagcugauacuaaaauacuauucauugaggaggggaaaaucguucauacuagcacauugucaggaagugcucagcaugucgaggagugcuccugcuauccucgauauccuggugucagaugugucugcagagacaacuggaaaggcuccaauaggcccaucguagauauaaacauaaaggaucauagcauuguuuccaguuauguguguucaggacuuguuggagacacacccagaaaaaacgacagcuccagcaguagccauuguuuggauccuaacaaugaagaagguggucauggagugaaaggcugggccuuugaugauggaaaugacguguggaugggaagaacgaucagcgagaagucacgcuuaggguaugaaaccuucaaagucauugaaggcugguccaacccuaaguccaaauugcagauaaauaggcaagucauaguugacagagguaauagguccgguuauucugguauuuucucuguugaaggcaaaagcugcaucaaucggugcuuuuauguggaguugauaaggggaagaaaagaggaaacugaagucuuguggaccucaaacaguauuguuguguuuuguggcaccucagguacauauggaacaggcucauggccugauggggcggacaucaaucucaugccuauauaa

SEQ ID NO: 48527 - RNA, 1410 nt, Artificial Sequence
  derived and/or modified CDS sequence (wt) from neuraminidase__InfluenzaA__ACI26387
augaauccaaaucaaaagauaauaacaauuggcucugucucucucaccauugcaacaguaugcuuccucaugcagauugccauccugguaacuacuguaacauugcauuuuaagcaacaugagugcgacucccccgcgagcaaccaaguaaugccaugugaaccaauaauaauagaaaggaacauaacagagauaguguauuugaauaacaccaccauagagaaagagaucugccccgaaguaguggaauacagaaauuggucaaagccgcaaugucaaauuacaggauuugcaccuuuuucuaaggacaauucaauccggcuuucugcugguggggacauuugggugacgagagaaccuuaugugucaugcgauccuggcaaguguuaucaauuugcacucgggcaggggaccacacuagacaacaaacauucaaaugacacaauacaugauagaaucccucaucgaacccuauuaaugaaugaguuggguguuccauuucauuuaggaaccaggcaaguguguguagcaugguccagcucaaguugucacgauggaaaagcaugguugcauguuugugucacuggggaugauaaaaaugcaacugcuagcuucauuuaugacgggaggcuuguggacaguauugguucauggucucaaaauauccucaggacccaggagucggaaugcguuuguaucaaugggacuugcacaguaguaaugacugauggaagugcuucaggaagagccgauacuagaauacuauucauugaagaggggaaaauuguccauauuagcccauugucaggaagugcucagcauguagaggaguguuccuguuauccucgauauccugacgucagauguaucugcagagauaacuggaaaggcucuaauaggcccgucauagacauaaauauggaagauuauagcauugauuccaguuaugugugcucagggcuuguuggcgacacacccagaaacgacgauagaucuagcaauagcaauugcagggauccuaacaaugagagagggaauccaggagugaaaggcugggccuuugacaauggagaugacguguggaugggaagaacgaucagcaaggauuuacgcucagguuaugaaacuuucaaagucauuggugguugguccacaccuaauuccaaaucgcagaucaauagacaggucauaguugacagcaauaauuggucagguuacucugguauuuucucuguugagggcaaaagcugcaucaauaggugcuuuuauguggaguugauaaggggaaggcaacaggagacuagaguaugguggaccucaaacaguauuguuguguuuuguggcacuucagguacuuauggaacaggcucauggccugauggggcgaacaucaauuucaugccuauauaa

SEQ ID NO: 48528 - RNA, 1410 nt, Artificial Sequence
  derived and/or modified CDS sequence (wt) from neuraminidase__InfluenzaA__ACI26420
augaauccaaaucaaaagauaauaacgauuggcucuguuucucucaucaucuccacaauaugcuucuucaugcaaacugccaucuugauaacuacuguaacauugcauuucaagcaauaugaauucaacucccccccaaacaaccaagugaugcugugugaaccaacaauaauagaaagaaacauaacagagauaguguaucugaccaacaccaccauagagaaggaaauaugccccaaacuagcagaauacagaaauuggucaaagccgcaaugugacauuacaggauuugcaccuuuuucuaaggacaauucgauuaggcuuuccgcugguggggacaucugggugacaagagaaccuuaugugucaugcgauccugacaaguguuaucaauuugcccuuggacagggaacaacacuaaacaacgugcauucaaaugacacaguacgugauaggaccccuuaucggacccuauugaugaaugaguuagguguuccuuuucaucuggggaccaagcaagugugcauagcaugguccagcucaaguugucacgauggaaaagcauggcugcauguuuguauaacgggggaugauaaaaaugcaacugcuagcuucauuuacaaugggaggcuuguagauaguauuguuucaugguccaaagaaauccucaggacccaggagucagaaugcguuuguaucaauggaacuuguacaguaguaaugacugaugggagugcuucaggaaaagcugauacuaaaauacuauucauugaggaggggaaaaucguucauacuagcacauugucaggaagugcucagcaugucgaggagugcuccugcuauccucgauauccuggugucagaugugucugcagagacaacuggaaaggcuccaauaggcccaucguagauauaaacauaaaggaucauagcauuguuuccaguuauguguguucaggacuuguuggagacacacccagaaaaaacgacaguuccagcaguagccauuguuuggauccuaacaaugaagaagguggucauggagugaaaggcugggccuuugaugauggaaaugacguguggaugggaagaacgaucagcgagaagucacgcuuaggguaugaaaccuucaaagucauugaaggcugguccaacccuaaguccaaauugcagauaaauaggcaagucauaguugacagagguaauagguccgguuauucugguauuuucucuguugaaggcaaaagcugcaucaaucggugcuuuuauguggaguugauaaggggaagaaaagaggaaacugaagucuuguggaccucaaacaguauuguuguguuuuguggcaccucagguacauauggaacaggcucauggccugauggggcggacaucaaucucaugccuauauaa

SEQ ID NO: 48529 - RNA, 1410 nt, Artificial Sequence; identical to SEQ ID NO: 48467
  derived and/or modified CDS sequence (wt) from neuraminidase__InfluenzaA__ACI26431

SEQ ID NO: 48530 - RNA, 1413 nt, Artificial Sequence
  derived and/or modified CDS sequence (wt) from neuraminidase__InfluenzaA__ACI26442
augaacccaaaucaaaaaauaauaaccauuggaucaaucaguauagcaaucggaauaauuagucuaauguugcaaauaggaaauauuauuucaauaugggcuagucacucaauccaaacuggaagucaaaaccacacuggaauaugcaaccaaagaaucaucacauaugaaaacagcaccugggugaaucacacauauguuaauauuaacaacacuaauguuguugcuggaaaggacaaaacuucagugacauuggccggcaacucaucucuuuguucuaucaguggaugggcuauauacacaaaagacaacagcauaagaauuggcuccaaaggagauguuuuugucauaagagaaccuuucauaucauguucucacuuggaaugcaaaaccuuuuuucugacccaaggcgcucuauuaaaugacaaacauucaaaugggaccguaaaggacagaaguccuuauagggccuuaaugagcuguccucuaggugaagcuccguccccauacaauucaaaguucgaaucaguugcauggucagcaagcgcaugccaugauggcaugggcugguuaacaaucggaauuucugguccagacaauggagcuguggcuguacuaaaauacaacggaauaauaacuggaaccauaaaaaguuggaaaaagcaaauauuaagaacacaagagucugaaugugucuguaugaacgggucauguuucaccauaaugaccgaugguccgaguaauggggccgccucguacaaaauuuucaagaucgaaaaggggaagguuacuaaaucaauagaguugaaugcacccaauuuucauuaugaggaauguuccuguuacccagacacuggcacagugauguguguaugcagggacaacuggcaugguucaaaucgaccuugggugucuuuuaaucaaaacuuggauuaucaaauaggauacaucugcaguggaguguucggugacaauccgcgucccaaagauagagagggcagcugcaauccagugacuauugauggagcagacggaguaaaaggguuuucauacaaauaugguaaugguguuuggauaggaaggaccaaaaguaacagacuuagaaagggguuugaaaugauuugggauccuaauggauggacaaauaccgacagugauuucucagugaaacaggauguuguagcaauaacugauuggucaggguacagcggaaguuucguccaacauccugaguuaacaggauuggacuguauaagaccuugcuucuggguugaguuagucagagggcugccuagagaaaauacaacaaucuggacuagugggagcagcauuucuuuuuguggcguuaauagugauacugcaaacuggucuuggccagacggugcugaguugccguucaccauugacaaguag

SEQ ID NO: 48531 - RNA, 1413 nt, Artificial Sequence; identical to SEQ ID NO: 48530
  derived and/or modified CDS sequence (wt) from neuraminidase__InfluenzaA__ACI26453

SEQ ID NO: 48532 - RNA, 1410 nt, Artificial Sequence
  derived and/or modified CDS sequence (wt) from neuraminidase__InfluenzaA__ACI26464
augaauccaaaucaaaagauaauaacgauuggcucuguuucucucaccauuuccacaauaugcuucuucaugcaaauugccaucuugauagcuacuguaacauugcauuucaagcaauaugaauucaacucccccccaaacaaccaagugaugcugugugaaccaacaauaauagaaagaaacauaacagagauaguguaucugaccaacaccaccauagagaaggaaauaugccccaaacuagcagaauacagaaauuggucaaagccgcaaugugacauuacaggauuugcaccuuuuucuaaggacaauucgauuaggcuuuccgcugguggggacaucugggugacaagagaaccuuaugugucaugcgauccugacaaguguuaucaauuugcccuuggacagggaacaacacuaaacaacgugcauucaaaugacacaguacgugauaggaccccuuaucggacccuauugaugaaugaguuagguguuccuuuucaucuggggaccaagcaagugugcauagcaugguccagcucaaguugucacgauggaaaagcauggcugcauguuuguauaacgggggaugauaaaaaugcaacugcuagcuucauuuacaaugggaggcuuguagauaguauuguuucaugguccaaagaaauccucaggacccaggagucagaaugcguuuguaucaauggaacuuguacaguaguaaugacugaugggagugcuucaggaaaagcugauacuaaaauacuauucauugaggaggggaaaaucguucauacuagcacauugucaggaagugcucagcaugucgaggagugcuccugcuauccucgauauccuggugucagaugugucugcagagacaacuggaaaggcuccaauaggcccaucguagauauaaacauaaaggaucauagcacuguuuccaguuauguguguucaggacuuguuggagacacacccagaaaaaacgacagcuccagcaguagccauuguuuggauccuaacaaugaagaagguggucauggagugaaaggcugggccuuugaugauggaaaugacguguggaugggaagaacgaucagcgagaagucgcgcuuaggguaugaaaccuucaaagucauugaaggcugguccaacccuaaguccaaauugcagauaaauaggcaagucauaguugacagagguaauagguccgguuauucugguauuuucucuguugaaggcaaaagcugcaucaaucggugcuuuuauguggaguugauaaggggaagaaaagaggaaacugaagucuuguggaccucaaacaguauuguuguguuuuguggcaccucagguacauauggaacaggcucauggccugauggggcggacaucaaucucaugccuauauaa

SEQ ID NO: 48533 - RNA, 1410 nt, Artificial Sequence; identical to SEQ ID NO: 48523
  derived and/or modified CDS sequence (wt) from neuraminidase__InfluenzaA__ACI26475

SEQ ID NO: 48534 - RNA, 1410 nt, Artificial Sequence; identical to SEQ ID NO: 48524
  derived and/or modified CDS sequence (wt) from neuraminidase__InfluenzaA__ACI26486

SEQ ID NO: 48535 - RNA, 1410 nt, Artificial Sequence; identical to SEQ ID NO: 48526
  derived and/or modified CDS sequence (wt) from neuraminidase__InfluenzaA__ACI26497

SEQ ID NO: 48536 - RNA, 1410 nt, Artificial Sequence; identical to SEQ ID NO: 48526
  derived and/or modified CDS sequence (wt) from neuraminidase__InfluenzaA__ACI26508

SEQ ID NO: 48537 - RNA, 1410 nt, Artificial Sequence
  derived and/or modified CDS sequence (wt) from neuraminidase__InfluenzaA__ACI26519
augaauccaaaucaaaagauaauaacgauuggcucuguuucucucaccauuuccacaauaugcuucuucaugcaaauugccaucuugauaacuacuguaacauugcauuucaagcaauaugaauucaacucccccccaaacaaccaagugaugcugugugaaccaacaauaauagaaagaaacauaacagagauaguguaucugaccaacaccaccauagagaaggaaauaugccccaaacuagcagaauacagaaauuggucaaagccgcaaugugacauuacaggauuugcaccuuuuucuaaggacaauucgauuaggcuuuccgcugguggggacaucugggugacaagagaaccuuaugugucaugcgauccugacaaguguuaucaauuugcccuuggacagggaacaacacuaaacaacgugcauucaaaugacacaguacgugauaggaccccuuaucggacccuauugaugaaugaguuagguguuccuuuucaucuggggaccaagcaagugugcauagcaugguccagcucaaguugucacgauggaaaagcauggcugcauguuuguauaacgggggaugauaaaaaugcaacugcuagcuucauuuacaaugggaggcuuguagauaguguuguuucaugguccaaagaaauccucaggacccaggagucagaaugcguuuguaucaauggaacuuguacaguaguaaugacugaugggagugcuucaggaaaagcugauacuaaaauacuauucauugaggaggggaaaaucguucauacuagcacauugucaggaagugcucagcaugucgaggagugcuccugcuauccucgauauccugguguaagaugugucugcagagacaacuggaaaggcuccaauaggcccaucguagauauaaacauaaaggaucauagcauuguuuccaguuauguguguucaggacuuguuggagacacacccagaaaaaacgacagcuccagcaguagccauuguuuggauccuaacaaugaagaagguggucauggagugaaaggcugggccuuugaugauggaaaugacguguggaugggaagaacgaucagcgagaagucacgcuuaggguaugaaaccuucaaagucauugaaggcugguccaacccuaaguccaaauugcagauaaauaggcaagucauaguugacagagguaauagguccgguuauucugguauuuucucuguugaaggcaaaagcugcaucaaucggugcuuuuauguggaguugauaaggggaagaaaagaggaaacugaagucuuguggaccucaaacaguauuguuguguuuuguggcaccucagguacauauggaacaggcucauggccugauggggcgaacaucaaucucaugccuauauaa

SEQ ID NO: 48538 - RNA, 1410 nt, Artificial Sequence; identical to SEQ ID NO: 48526
  derived and/or modified CDS sequence (wt) from neuraminidase__InfluenzaA__ACI26530

SEQ ID NO: 48539 - RNA, 1410 nt, Artificial Sequence; identical to SEQ ID NO: 48526
  derived and/or modified CDS sequence (wt) from neuraminidase__InfluenzaA__ACI26541

SEQ ID NO: 48540 - RNA, 1410 nt, Artificial Sequence
  derived and/or modified CDS sequence (wt) from neuraminidase__InfluenzaA__ACI26552
augaauccaaaucaaaagauaauaacaauuggcucuguuucucucaccauugccacaaugugcuuccuuaugcaaauugccauccugguaacuacuguaacauugcauuucaagcaauaugagugcagcucccccccaaacaaccaaguaaugccgugugaaccaacaauaauagaaagaaacauaacagagauaguguauuugacuaacaccaccauagagaaagagauaugccccaaacuaguagaauacagaaauuggucaaagccgcaauguaaaauuacaggauuugcaccuuuuucuaaggacaauucaauucggcuuuccgcugguggagacauuugggugacaagagaaccuuaugugucaugcgauccuggcaaguguuaucaauuugcacuugggcagggaaccacacuaaacaacaggcauucaaaugacacaguacaugauaggaccccuuaucgaacccuccugaugaaugaguuggguguuccauuucauuugggaaccaagcaagugugcauagcaugguccagcucaaguugucacgauggaaaagcauggcugcauguuugugucacugggcaugauaaaaaugcaacugcaagcuucauuuacgaugggaggcuuguagacaguauugguucaugguccaaaaauauccucaggacccaggagucggaaugcguuuguaucaaugggacuuguacaguaguaaugacugauggaagugcuucagaaagagcugauacuaaaauacuauucauugaagaggggaaaaucguucauauuagcccauugucaggaagugcucagcauguagaggagugcuccuguuauccucgauauccuggugucagaugugucugcagagacaacuggaaaggcuccaauaggcccaucguagauauaaaugugaaagauuauagcauuguuuccaguuaugugugcucagggcuuguuggagacacacccagaaaaaacgacagauccagcaguagcuauugccggaauccuaacaaugagaaagggagucauggagugaaaggcugggccuuugacgauggaaaugacguguggaugggaagaacaaucagcgaggaguuacgcucagguuaugaaaccuucaaagucauuggagguugguccacaccuaacuccaaauugcagauaaauaggcaagucauaguugacagcgguaauagguccgguuauucugguauuuucucuguugagggcaaaagcugcaucaaucggugcuuuuauguggaguugauaaggggaagggaacaggaaacuagagucugguggaccucaaacaguauuguuguguuuuguggcaccucagguacauauggaacaggcucauggccugauggggcagacaucaaucucaugccuauauaa

SEQ ID NO: 48541 - RNA, 1410 nt, Artificial Sequence
  derived and/or modified CDS sequence (wt) from neuraminidase__InfluenzaA__ACI26574
augaauccaaaucaaaagauaauaacaauuggcucuguuucucucacccuugccacaauaugcuuccuuaugcaaauugccauccugguaacuacuguaacauugcauuucaagcaauaugagugcagcucccccccaaacaaccaaguaaugccgugcgaaccaacaauaauagaaagaaacauaacagagauaguguauuugacuaacaucaccauagagaaagagauaugccccaaacuaguagaauacagaaauuggucaaagccgcaauguaaaauuacaggauuugcaccuuuuucuaaggacaauucaauucggcuuuccgcugguggagacauuuggguaacaagagaaccuuaugugucaugcgauccuagcaaguguuaucaauuugcacuugggcagggaaccacacuaaacaacaggcauucaaaugacacaguacaugauaggaccccuuaucgaacucucuugaugaacgaguuggguguuccauuucauuugggaaccaggcaagugugcauggcaugguccagcucaagcugccacgauggaaaagcauggcugcauguuugugucacugggcaugaugaaaaugcaacugcuagcuucauuuacgaugggaggcuuguagacaguauugguucaugguccaaaaauauacucaggacccaggagucggaaugcguuuguaucaaugggacuuguacaguaguaaugacugauggaagugcuucagaaagagcugauacuaaaauacuauucauugaagaggggaaaaucguucauauuagcccauugucaggaagugcucagcauguggaggagugcuccuguuauccucgauacccuggugucagaugugucugcagagacaacuggaaaggcuccaauaggcccaucguagauauaaaugugaaagauuauagcauuguuuccaguuaugugugcucagggcuuguuggagacacacccagaaaaaacgacagauccagcaguagcuauugccggaauccuaauaaugagaaagggagucauggagugaaaggcugggccuuugacgauggaaaugacguguggaugggaagaacgaucggcgaggaguuacgcucagguuaugaaaccuucaaagucauuggagguugguccacaccuaacuccaaauugcagauaaauaggcaagucauaguugacagcgguaauagguccgguuauucugguauuuucucuguugagggcaaaagcugcaucaaucggugcuuuuauguggaguugauaaggggaaggaaacaggaaacuagagucugguggaccucaaacaguauuguuguguuuugcggcaccucagguacauauggaacaggcucauggccugauggggcggacaucaaucucaugccuauauaa

SEQ ID NO: 48542 - RNA, 1410 nt, Artificial Sequence
  derived and/or modified CDS sequence (wt) from neuraminidase__InfluenzaA__ACI26585
augaauccaaaucaaaagauaauaacaauuggcucuguuucucucaccauugccacaauaugcuuccuuaugcaaauugccauccugguaacuacuguaacauugcauuucaagcaacaugagugcaacucccccccaaacaaccaaguaaugccgugugaaccaacaauaauagaaagaaacauaacagagauaguguauuugacuaacaccaccauagagaaagagauaugccccaaacuaguagaauacagaaauuggucaaagccgcaauguaaaauuacaggauuugcaccuuuuucuaaggacaauucaauucggcuuuccgcugguggagacauuugggugacaagagaaccuuaugugucaugcgauccuggcaaguguuaucaauuugcacuaggacagggaaccacacuaaacaacaggcauucaaaugacacaguacaugauaggaccccuuaucgaacccucuugaugaaugaguuggguguuccauuucauuugggaaccaagcaagugugcauagcaugguccagcucaaguugucacgauggaaaagcauggcugcauguuugugucacugggcaugaugaaaaugcaacugcuagcuucauuuacgaugggaggcuuguagauaguauuguuucaugguccaaaaauguccucaggacccaggagucggaaugcguuuguauaaauggaacuuguacaguaguaaugacugauggaagugcuucagaaagagcugauacuaaaauacuauucauugaagaggggaaaaucguucauauuagcccguugucaggaagugcucagcauguagaggagugcuccuguuauccucgauauccuggugucagaugugucugcagagacaacuggaaaggcuccaauaggcccaucguagauauaaaugugaaagauuauagcauuguuuccaguuaugugugcucagggcuuguuggagacacacccagaaaaaacgacagcuccagcaguagcuauugccggaauccuaacaaugagaaagggagccauggagugaaaggcugggccuuugacgauggaaaugacguguggaugggaagaacgaucggcgaggaguuacgcucagguuaugaaaccuucaaagucauuggaggcugguccacaccuaacuccaaauugcagacaaauaggcaagucauaguugacagagguaauagguccgguuauucugguauuuucucuguugaaggcaaaagcugcaucaaucggugcuuuuauguagaauugauaaggggaaggaaacaggaaacuaaagucugguggaccucaaacaguauuguuguguuuuguggcaccucagguacauauggaacaggcucauggccugauggggcggacaucaaucucaugccuauauaa

SEQ ID NO: 48543 - RNA, 1413 nt, Artificial Sequence
  derived and/or modified CDS sequence (wt) from neuraminidase__InfluenzaA__ACI32764
augaauccaaaucaaaaaauaauaaccauuggaucaaucaguauggcaaucggaauaauuagucuaauguugcaaauaggaaauauuauuucaauaugggcuagucacucaauccaaacuggaagucaaaaccacacuggaauaugcaaccaaagaaucaucacauaugaaaacagcaccugggugaaucacacauauguuaauauuaacaacacuaauguuguugcuggaaaggacaaaacuucagugacauuggccggcaauucaucucuuuguucuaucaguggaugggcuauauacacaaaagacaacagcauaagaauuggcuccaaaggagauguuuuugucauaagagaaccuuucauaucauguucucacuuggaaugcagaaccuuuuuucugacccaaggugcucuauuaaaugacaaacauucaaauggaaccguuaaggacagaaguccuuauagggccuuaaugagcuguccucuaggugaagcuccguccccauacaauucaaaguuugaaucaguugcauggucagcaagcgcaugccaugauggcaugggcugguuaacaaucggaauuucugguccagacaauggagcuguggcuguacuaaaauacaacggaauaauaacugaaaccauaaaaaguuggaaaaagcgaauauugagaacacaagagucugaaugugucugugugaacgggucauguuucaccauaaugaccgauggcccgaguaauggggccgccucguacaaaaucuucaagaucgaaaagggaaagguuacuaaaucaauagaguuaaaugcacccaauuuucauuaugaggaauguuccuguuacccagacacuggcacagugauguguguaugcagggacaacuggcaugguucaaaucgaccuugggugucuuuuaaucaaaacuuggauuaucaaauaggauacaucugcaguggaguguucggugacaauccgcgucccaaagauggaaagggcagcuguaauccaguuacuguugauggagcagacggaguuaagggguuuucauacaaauaugguaaugguguuuggauaggaaggacuaaaaguaacagacuuagaaaggguuuugagaugauuugggauccuaauggauggacagauaccgacagugauuucucagugaaacaggauguuguggcaauaacugauuggucaggguacagcggaaguuucguucaacauccugaguuaacaggauuggacuguauaagaccuugcuucuggguugaguuagucagaggacugccuagagaaaauacaacaaucuggacuagugggagcagcauuucuuuuuguggcguugauagugauacugcaaacuggucuuggccagacggugcugaguugccguucaccauugacaaguag

SEQ ID NO: 48544 - RNA, 1413 nt, Artificial Sequence
  derived and/or modified CDS sequence (wt) from neuraminidase__InfluenzaA__ACI32765
augaauccaaaucaaaaaauaauaaccauuggaucaaucaguauagcaaucggaauaauuagucuaauguugcaaauaggaaauauuauuucaauaugggcuagucacucaauccaaacuggaagucaaaaccacacuggaauaugcaaccaaagaaucaucacauaugaaaacaacaccugggugaaucacacauauguuaauauuaacaacacuaauguaguugcuagaaaggacaaaacuucagugacauuggccggcaauucaucucuuuguucuaucaguggaugggcuauauacacaaaagacaacagcauaagaauuggcuccaaaggagauguuuuugucauaagagaaccuuucauaucauguucucacuuggaaugcagaaccuuuuuuaugacccaaggugcucuauuaaaugacaaacauucaaauggaaccguuaaggacagaaguccuuauagggccuuaaugagcuguccucuaggugaagcuccguccccauacaauucaaaguuugaaucaguugcauggucagcaagcgcaugccaugauggcaugggcugguuaacaaucggaauuucugguccagacaauggagcuguggcuguacuaaaauacaacggaauaauaacugaaaccauaaaaaguuggaaaaagcgaauauugagaacacaagagucugaaugugucugugugaacgggucauguuucaccauaaugaccgauggcccgaguaauggggccgccucguacaaaaucuucaagaucgaaaagggaaagguuacuaaaucaguagaguuaaaugcacccaauuuucauuaugaggaauguuccuguuacccagacacuggcacagugauguguguaugcagggacaacuggcaugguucaaaucgaccuugggugucuuuuaaucaaaacuuggauuaucaaauaggauacaucugcaguggaguguucggugacaauccgcgucccaaagauggaaagggcagcuguaauccagugacuguugauggagcagacggaguuaagggguuuucauacaaauaugguaaugguguuuggauaggaaggacuaaaaguaacagacuuagaaaggguuuugagaugauuugggauccuaauggauggacagauaccgacagugauuucucagugaaacaggauguuguggcaauaacugauuggucaggguacagcggaaguuucguucaacauccugaguuaacaggauuggacuguauaagaccuugcuucuggguugaguuagucagaggacugccuagagaaaauacaacaaucuggacuagugggagcagcauuucuuuuuguggcguugauagugauacugcaaacuggucuuggccagacggugcugaguugccguucaccauugacaaguag

SEQ ID NO: 48545 - RNA, 1413 nt, Artificial Sequence
  derived and/or modified CDS sequence (wt) from neuraminidase__InfluenzaA__ACI32766
augaauccaaaucaaaaaauaauaaccauuggaucaaucaguauagcaaucggaauaauuagucuaauguugcaaauaggaaauauuauuucaauaugggcuagucacucaauccaaacuggaagucaaaaccacacuggaauaugcaaccaaagaaucaucacauaugaaaacagcaccugggugaaucacacauauguuaauauuaacaacacuaauguuguugcuggaaaggacaaaacuucagugacauuggccggcaauucaucucuuuguucuaucaguggaugggcuauauacacaaaagacaacagcauaagaauuggcuccaaaggagauguuuuugucauaagagaaccuuucauaucauguucucacuuggaaugcagaaccuuuuuucugacccaaggugcucuauuaaaugacaagcauucaaauggaaccguuaaggacagaaguccuuauagggccuuaaugagcuguccucuaggugaagcuccguccccauacaauucaaaguuugaaucaguugcauggucagcaagcgcaugccaugauggcaugggcugguuaacaaucggaauuucugguccagacaauggagcuguggcuguacuaaaauacaacggaauaauaacugaaaccauaaaaaguuggaaaaagcgaauauugagaacacaagagucugaaugugucugugugaacgggucauguuucaccauaaugaccgauggcccgaguaauggggccgccucguacaaaaucuucaagaucgaaaagggaaagguuacuaaaucaauagaguuaaaugcacccaauuuucauuaugaggaauguuccugcuacccagacacuggcacagugauguguguaugcagggacaacuggcaugguucaaaucgaccuugggugucuuuuaaucaaaacuuggauuaucaaauaggauacaucugcaguggaguguucggugacaauccgcgucccaaagauggaaagggcagcuguaauccagugacuguugauggagcagacggaguuaagggguuuucauacaaauaugguaaugguguuuggauaggaaggacuaaaaguaacagacuuagaaaggguuuugagaugauuugggauccuaauggauggacagauaccgacagugauuucucagugaaacaggauguuguggcaauaacugauuggucaggguacagcggaaguuucguucaacauccugaguuaacaggauuggacuguauaagaccuugcuucuggguugaguuagucagaggacugccuagagaaaauacaacaaucuggacuagugggagcagcauuucuuuuuguggcguugauagugauacugcaaacuggucuuggccagacggugcugaguugccguucaccauugacaaguag

SEQ ID NO: 48546 - RNA, 1413 nt, Artificial Sequence
  derived and/or modified CDS sequence (wt) from neuraminidase__InfluenzaA__ACI32767
augaauccaaaucaaaaaauaauaaccauuggaucaaucaguauagcaaucggaauaauuagucuaauguugcaaauaggaaauauuauuucaauaugggcuagucacucaacccaaacuggaagucaaaaccacacuggaauaugcaaccaaagaaucaucacauaugaaaacagcaccugggugaaucacacauauguuaauauuaacaacacuaauguuguugcuggaaaggacaaaacuucagugacauuggccggcaauucaucucuuuguucuaucaguggaugggcuauauacacaaaagacaacagcguaagaauuggcuccaaaggagauguuuuugucauaagagaaccuuucauaucauguucucacuuggaaugcagaaccuuuuuucugacccaaggugcucuauuaaaugacaaacauucaaauggaaccguuaaggacagaaguccuuauagggccuuaaugagcuguccucuaggugaagcuccguccccauacaauucaaaguuugaaucaguugcauggucagcaagcgcaugccaugauggcaugggcugguuaacaaucggaauuucugguccagacaauggagcuguggcuguacuaaaauacaacggaauaauaacugaaaccauaaaaaguuggaaaaagcgaauauugagaacacaagagucugaaugugucugugugaacgggucauguuucaccauaaugaccgauggcccgaguaauggggccgccucguacaaaaucuucaagaucgaaaagggaaagguuacuaaaucaauagaguuaaaugcacccaauuuucauuaugaggaauguuccugcuacccagacacuggcacagugauguguguaugcagggacaacuggcaugguucaaaucgaccuugggugucuuuuaaucaaaacuuggauuaucaaauaggauacaucugcaguggaguguucggugacaauccgcgucccaaagauggaaagggcagcuguaauccagugacuguugauggagcagacggaguuaagggguuuucauacaaauaugguaaugguguuuggauaggaaggacuaaaaguaacagacuuagaaaggguuuugagaugauuugggauccuaauggauggacagauaccgacagugauuucucagugaaacaggauguuguggcaauaacugauuggucaggguacagcggaaguuucguucaacauccugaguuaacaggauuggacuguauaagaccuugcuucuggguugaguuagucagaggacugccuagagaaaauacaacaaucuggacuagugggagcagcauuucuuuuuguggcguugauagugauacugcaaacuggucuuggccagacggugcugaguugccguucaccauugacaaguag

SEQ ID NO: 48547 - RNA, 1413 nt, Artificial Sequence
  derived and/or modified CDS sequence (wt) from neuraminidase__InfluenzaA__ACI32768
augaauccaaaucaaaaaauaauaaccauuggaucaaucaguauagcaaucggaauaauuagucuaaugucgcaaauaggaaauauuauuucaauaugggcuagucacucaauccaaacuggaagucaaaaccacacuggaauaugcaaccaaagaaucaucacauaugaaaacagcaccugggugaaucacacauauguuaauaucaacaacacuaauguuguugcuggaaaggacaaaacuucagugacauuggccggcaauucaucucuuuguucuaucaguggaugggcuauauacacaaaagacaacagcauaagaauuggcuccaaaggagauguuuuugucauaagagaaccuuucauaucauguucucacuuggaaugcagaaccuuuuuucugacccaaggugcucuauuaaaugacaaacauucaaauggaaccguuaaggacagaaguccuuauagggccuuaaugagcuguccucuaggugaagcuccguccccauacaauucaaaguuugaaucaguugcauggucagcaagcgcaugccaugauggcaugggcugguuaacaaucggaauuucugguccagacaauggagcuguggcuguacuaaaauacaacggaauaauaacugaaaccauaaaaaguuggaaaaagcgaauauugagaacacaagagucugaaugugucugugugaacgggucauguuucaccauaaugaccgauggcccgaguaauggggccgccucguacaaaaucuucaagaucgaaaagggaaagguuacuaaaucaauagaguuaaaugcacccaauuuucauuaugaggaauguuccuguuacccagacacuggcacagugauguguguaugcagggacaacuggcaugguucaaaucgaccuugggugucuuuuaaucaaaacuuggauuaucaaauaggauacaucugcaguggaguguucggugacaauccgcgucccaaagauggaaagggcagcuguaauccagugacuguugauggagcagacggaguuaagggguuuucauacaaauaugguaaugguguuuggauaggaaggacuaaaaguaacagacuuagaaaggguuuugagaugauuugggauccuaauggauggacagauaccgacagugauuucucagugaaacaggauguuguggcaauaacugauuggucaggguacagcggaaguuucguucaacauccugaguuaacaggauuggacuguauaagaccuugcuucuggguugaguuagucagaggacugccuagagaaaauacaacaaucuggacuagugggagcagcauuucuuuuuguggcguugauagugauacugcaaacuggucuuggccagacggugcugaguugccguucaccauugacaaguag

SEQ ID NO: 48548 - RNA, 1413 nt, Artificial Sequence
  derived and/or modified CDS sequence (wt) from neuraminidase__InfluenzaA__ACI32769
augaauccaaaucaaaaaauaauaaccauuggaucaaucaguauagcaaucggaauaauuagucuaauguugcaaauaggaaauauuauuucaauaugggcuagucacucaauccaaacuggaagucaaaaccacacuggaauaugcaaccaaagaaucaucaccuaugaaaacagcaccugggugaaucacacauauguuaauauuaacaacacuaauguuguugcuggaaaggacaaaauuucagugacauuggccggcaauucaucucuuuguucuaucaguggaugggcuauauacacaaaagacaacagcauaagaauuggcuccaaaggagauguuuuugucauaagagaaccuuucauaucauguucucacuuggaaugcagaaccuuuuuucugacccaaggugcucuauuaaaugacaaacauucaaauggaaccguuaaggacagaaguccuuauagggccuuaaugagcuguccucuaggugaagcuccguccccauacaauucaaaguuugaaucaguugcauggucagcaagcgcaugccaugauggcaugggcugguuaacaaucggaauuucugguccagacaauggagcuguggcuguacuaaaauacaacggaauaauaacugaaaccauaaaaaguuggaaaaagcgaauauugagaacacaagagucugaaugugucugugugaacgggucauguuucaccauaaugaccgauggcccaaguaauggggccgccucguacaaaaucuucaagaucgaaaagggaaagguuacuaaaucaauagaguuaaaugcacccaauuuucauuaugaggaauguuccuguuacccagacacuggcacagugauguguguaugcagggacaacuggcaugguucaaaucgaccuugggugucuuuuaaucaaaacuuggauuaucaaauaggauacaucugcaguggaguguucggugacaauccgcgucccaaagauggaaagggcagcuguaauccagugacuguugauggagcagacggaguuaagggguuuucauacaaauaugguaaugguguuuggauaggaaggacuaaaaguaacagacuuagaaaggguuuugagaugauuugggauccuaauggauggacagauaccgacagugauuucucagugaaacaggauguuguggcaauaacugauuggucaggguacagcggaaguuuuguucaacauccugaguuaacaggauuggacuguauaagaccuugcuucuggguugaguuagucagaggacugccuagagaaaauacaacaaucuggacuagugggagcagcauuucuuuuuguggcguugauagugauacugcaaacuggucuuggccagacggugcugaguugccguucaccauugacaaguag

SEQ ID NO: 48549 - RNA, 1413 nt, Artificial Sequence
  derived and/or modified CDS sequence (wt) from neuraminidase__InfluenzaA__ACI32770
augaauccaaaucaaaaaauaauaaccauuggaucaaucaguauagcaaucggaauaauuagucuaauguugcaaauaggaaauauuauuucaauaugggcuagucacucaauccaaacuggaagucaaaaccacacuggaauaugcaaccaaagaaucaucacauaugaaaacagcaccugggugaaucacacauauguuaauauuaacaacacuaauguuguugcuggaaaggacaaaacuucagugacauuggccggcaauucaucucuuuguucuaucaguggaugggcuauauacacaaaagacaacagcauaagaauuggcuccaaaggagauguuuuugucauaagagaaccuuucauaucauguucucacuuggaaugcagaaccuuuuuucugacccaaggugcucuauuaaaugacaaacauucaaauggaaccguuaaggacagaaguccuuauagggccuuaaugagcuguccucuaggugaagcuccguccccauacaauucaaaguuugaaucaguugcauggucagcaagcgcaugccaugauggcaugggcugguuaacaaucggaauuucugguccagacaauggagcuguggcuguacuaaaauacaacggaauaauaacugaaaccauaaaaaguuggaaaaagcgaauauugagaacacaagagucugaaugugucugugugaacgggucauguuucaccauaaugaccgauggcccgaguaauggggccgccucguacaaaaucuucaagaucgaaaagggaaagguuacuaaaucaauagaguuaaaugcacccaauuuucauuaugaggaauguuccuguuacccagacacuggcacagugauguguguaugcagggacaacuggcaugguucaaaucgaccuugggugucuuuuaaucaaaacuuggauuaucaaauaggauacaucugcaguggaguguucggugacaauccgcgucccaaagauggaaagggcagcuguaauccagugacuguugauggggcagacggaguuaagggguuuucauacaaauaugguaaugguguuuggauaggaaggacuaaaaguaacagacuuagaaaggguuuugagaugauuugggauccuaauggguggacagauaccgacagugauuucucagugaaacaggauguuguggcaauaacugauuggucaggguacagcggaaguuucguucaacauccugaguuaacaggauuggacuguauaagaccuugcuucuggguugaguuagucagaggacugccuagagaaaauacaacaaucuggacuagugggagcagcauuucuuuuuguggcguugauagugauacugcaaacuggucuuggccagacggugcugaguugccguucaccauugacaaguag

SEQ ID NO: 48550 - RNA, 1413 nt, Artificial Sequence
  derived and/or modified CDS sequence (wt) from neuraminidase__InfluenzaA__ACI32771
augaauccaaaucaaaaaauaauaaccauuggaucaaucaguauagcaaucggaauaauuagucuaauguugcaaauaggaaauauuauuucaauaugggcuagucacucaauccaaacuggaagucaaaaccacacuggaauaugcaaccaaagaaucaucacauauaaaaacagcaccugggugaaucacacauauguuaauauuaacaacacuaauguuguugcuggaaagggcaaaacuucagugacauuggccggcaauucaucucuuuguucuaucaguggaugggcuauauacacaaaagacaacagcauaagaauuggcuccaaaggagauguuuuugucauaagagaaccuuucauaucauguucucacuuggaaugcagaaccuuuuuucugacccaaggugcucuauuaaaugacaaacauucaaauggaaccguuaaggacagaaguccuuauagggccuuaaugagcuguccucuaggugaagcuccguccccauacaauucaaaguuugaaucaguugcauggucagcaagcgcaugccaugauggcaugggcugguuaacaaucggaauuucugguccagacaauggagcuguggcuguacuaaaauacaacggaauaauaacugaaaccauaaaaaguuggaaaaagcgaauauugagaacacaagagucugaaugugucugugugaacgggucauguuucaccauaaugaccgauggcccgaguaauggggccgccucguacaaaaucuucaagaucgaaaagggaaagguuacuaaaucaauagaguuaaaugcacccaauuuucauuaugaggaauguuccuguuacccagacacuggcacagugauguguguaugcagggacaacuggcaugguucaaaucgaccuugggugucuuuuaaucaaaacuuggauuaucaaauaggauacaucugcaguggaguguucggugacaauccgcgucccaaagauggaaagggcagcuguaauccagugacuguugauggagcagacggaguuaagggguuuucauacaaauaugguaaugguguuuggauaggaaggacuaaaaguaacagacuuagaaaggguuuugagaugauuugggauccuaauggauggacagauaccgacagugauuucucagugaaacaggauguuguggcaauaacugauuggucaggguacagcggaaguuucguucaacauccugaguuaacaggauuggacuguauaagaccuugcuucuggguugaguuagucagaggacugccuagagaaaauacaacaaucuggacuagugggagcagcauuucuuuuuguggcguugauagugauacugcaaacuggucuuggccagacggugcugaguugccguucaccauugacaaguag

SEQ ID NO: 48551 - RNA, 1413 nt, Artificial Sequence
  derived and/or modified CDS sequence (wt) from neuraminidase__InfluenzaA__ACI32772
augaauccaaaucaaaaaauaauaaccauuggaucaaucaguauagcaaucggaauaauuagucuaaugcugcaaauaggaaauauuauuucaauaugggcuagucacucaauccaaacuggaagucaaaaccacacuggaauaugcaaccaaagaaucaucacauaugaaaacagcaccugggugaaucacacauauguuaauauuaacaacacuaauguuguugcuggaaaggacaaaacuucagugacauuggccggcaauucaucucuuuguucuaucaguggaugggcuauauacacaaaagacaacagcauaagaauuggcuccaaaggagauguuuuugucauaagagaaccuuucauaucauguucucacuuggaaugcagaaccuuuuuucugacccaaggugcucuauuaaaugacaaacauucaaauggaaccguuaaggacagaaguccuuauagggccuuaaugagcuguccucuaggugaagcuccguccccauacaauucaaaguuugaaucaguugcauggucagcaagcgcaugccaugauggcaugggcugguuaacaaucggaauuucugguccagacaauggagcuguggcuguacuaaaauacaacggaauaauaacugaaaccauaaaaaguuggaaaaagcgaauauugagaacacaagagucugaaugugucugugugaacgggucauguuucaccauaaugaccgauggcccgaguaauggggccgccucguacaaaaucuucaagaucgaaaagggaaagguuacuaaaucaauagaguuaaaugcacccaauuuucauuaugaggaauguuccuguuacccagacacuggcacagugauguguguaugcagggacaacuggcaugguucaaaucgaccuugggugucuuuuaaucaaaacuuggauuaucaaauaggauacaucugcaguggaguguucggugacaauccgcgucccaaagauggaaagggcagcuguaauccagugacuguugauggagcagacggaguuaagggguuuucauacaaauaugguaaugguguuuggauaggaaggacuaaaaguaacagacuuagaaaggguuuugagaugauuugggauccuaauggauggacagauaccgacagugauuucucagugaaacaggauguuguggcaauaacugauuggucaggguacagcggaaguuucguucaacauccugaguuaacaggauuggacuguauaagaccuugcuucuggguugaguuagucagaggacugccuagagaaaauacaacaaucuggacuagugggagcagcauuucuuuuuguggcguugauagugauacugcaaacuggucuuggccagacggugcugaguugccguucaccauugacaaguag

SEQ ID NO: 48552 - RNA, 1413 nt, Artificial Sequence; identical to SEQ ID NO: 48249
  derived and/or modified CDS sequence (wt) from neuraminidase__InfluenzaA__ACI32773

SEQ ID NO: 48553 - RNA, 1413 nt, Artificial Sequence
  derived and/or modified CDS sequence (wt) from neuraminidase__InfluenzaA__ACI32774
augaauccaaaucaaaaaauaauaaccauuggaucaaucaguauagcaaucggaauaauuagucuaauguugcaaauaggaaauauuauuucaauaugggcuagucacucaauccaaacuggaagucaaaaccacacuggaauaugcaaccaaagaaucaucacauaugaaaacagcaccugggugaaucacacauauguuaauauuaacaacacuaauguuguugcuggaaaggacaaaacuucagugacauuggccggcaauucaucucuuuguucuaucaguggaugggcuauauacacaaaagacaacagcauaagaauuggcuccaaaggagauguuuuugucauaagagaaccuuucauaucauguucucacuuggaaugcagaaccuuuuuucugacccaaggugcucuauuaaaugacaaacauucaaauggaaccguuaaggacagaaguccuuauagggccuuaaugagcuguccucuaggugaagcuccguccccauacaauucaaaguuugaaucaguugcauggucagcaagcgcaugccaugauggcaugggcugguuaacaaucggaauuucugguccagacaauggagcuguggcuguacuaaaauacaacggaauaauaacugaaaccauaaaaaguuggaaaaagcgaauauugagaacacaagagucugaaugugucugugugaacgggucauguuucaccauaaugaccgauggcccgaguaauggggccgccucguacaaaaucuucaagaucgaaaagggaaagguuacuaaaucaauagaguuaaaugcacccaauuuucauuaugaggaauguuccuguuacccagacacuggcacagugauguguguaugcagggacaacuggcaugguucaaaucgaccuugggugucuuuuaaucaaaacuuggauuaucaaauaggauacaucugcaguggaguguucggugacaauccgcgucccaaagauggaaagggcagcuguaauccagugacuguugauggagcagacggaguuaagggguuuucauacaaauaugguaaugguguuuggauaggaaggacuaaaaguaacagacuuagaaaggguuuugagaugauuugggauccuaauggauggacagauaccgacagugauuucucagugaaacaggauguuguggcaauaacugauuggucaggguacagcggaaguuucguucaacauccugaguuaacaggauuggacuguauaagaccuugcuucuggguugaguuagucagaggacugccuagagaaaauacaacaaucuggacuagugggagcagcauuuccuuuuguggcguugauagugauacugcaaacuggucuuggccagacggugcugaguugccguucaccauugacaaguag

SEQ ID NO: 48554 - RNA, 1413 nt, Artificial Sequence; identical to SEQ ID NO: 48249
  derived and/or modified CDS sequence (wt) from neuraminidase__InfluenzaA__ACI32775

SEQ ID NO: 48555 - RNA, 1413 nt, Artificial Sequence
  derived and/or modified CDS sequence (wt) from neuraminidase__InfluenzaA__ACI32776
augaauccaaaucaaaaaauaauaaccauuggaucaaucaguauagcaaucggaauaauuagucuaauguugcaaauaggaaauauuauuucaauaugggcuagucacucaauccaaacuggaagucaaaaccacacuggaauaugcaaccaaagaaucaucacauauaaaaacagcaccugggugaaucacacauauguuaauauuaacaacacuaauguuguugcuggaaaggacaaaacuucagugacauuggccggcaauucaucucuuuguucuaucaguggaugggcuauauacacaaaagacaacagcauaagaauuggcuccaaaggagauguuuuugucauaagagaaccuuucauaucauguucucacuuggaaugcagaaccuuuuuucugacccaaggugcucuauuaaaugacaaacauucaaauggaaccguuaaggacagaaguccuuauagggccuuaaugagcuguccucuaggugaagcuccguccccauacaauucaaaguuugaaucaguugcauggucagcaagcgcaugccaugauggcaugggcugguuaacaaucggaauuucugguccagacaauggagcuguggcuguacuaaaauacaacggaauaauaacugaaaccauaaaaaguuggaaaaagcgaauauugagaacacaagagucugaaugugucugugugaacgggucauguuucaccauaaugaccgauggcccgaguaauggggccgccucguacaaaaucuucaagaucgaaaagggaaagguuacuaaaucaauagaguuaaaugcacccaauuuucauuaugaggaauguuccuguuacccagacacuggcacagugauguguguaugcagggacaacuggcaugguucaaaucgaccuugggugucuuuuaaucaaaacuuggauuaucaaauaggauacaucugcaguggaguguucggugacaauccgcgucccaaagauggaaagggcagcuguaauccagugacuguugauggagcagacggaguuaagggguuuucauacaaauaugguaaugguguuuggauaggaaggacuaaaaguaacagacuuagaaaggguuuugagaugauuugggauccuaauggauggacagauaccgacagugauuucucagugaaacaggauguuguggcaauaacugauuggucaggguacagcggaaguuucguucaacauccugaguuaacaggauuggacuguauaagaccuugcuucuggguugaguuagucagaggacugccuagagaaaauacaacaaucuggacuagugggagcagcauuucuuuuuguggcguugauagugauacugcaaacuggucuuggccagacggugcugaguugccguucaccauugacaaguag

SEQ ID NO: 48556 - RNA, 1413 nt, Artificial Sequence
  derived and/or modified CDS sequence (wt) from neuraminidase__InfluenzaA__ACI32777
augaauccaaaucaaaaaauaauaaccauuggaucaaucaguauagcaaucggaauaauuagucuaauguugcaaauaggaaauauuauuucaauaugggcuagucacucaauccaaacuggaagucaaaaccacacuggaauaugcaaccaaagaaucaucacauauaaaaacagcaccugggugaaucacacauauguuaauauuaacaacacuaauguuguugcuggaaaggacaaaacuucagugacauuggccggcaauucaucucuuuguucuaucaguggaugggcuauauacacaaaagacaacagcauaagaauuggcuccaaaggagauguuuuugucauaagagaaccuuucauaucauguucucacuuggaaugcagaaccuuuuuucugacccaaggugcucuauuaaaugacaaacauucaaauggaaccguuaaggacagaaguccuuauagggccuuaaugagcuguccucuaggugaagcuccguccccauacaauucaaaguuugaaucaguugcauggucagcaagcgcaugccaugauggcaugggcugguuaacaaucggaauuucugguccagacaauggagcuguggcuguacuaaaauacaacggaauaauaacugaaaccauaaaaaguuggaaaaagcgaauauugagaacacaagagucugaaugugucugugugaacgggucauguuucaccauaaugaccgauggcccgaguaauggggccgccucguacaaaaucuucaagaucgaaaagggaaagguuacuaaaucaauagaguuaaaugcacccaauuuucauuaugaggaauguuccuguuacccagacacuggcacagugauguguguaugcagggacaacuggcaugguucaaaucgaccuugggugucuuuuaaucaaaacuuggauuaucaaauaggauacaucugcaguggaguguucggugacaauccgcgucccaaagauggaaagggcagcuguaauccagugacuguugauggagcagacggaguuaagggguuuucauacaaauaugguaaugguguuuggauaggaaggacuaaaaguaacagacuuagaaaggguuuugagaugauuugggauccuaauggauggacagauaccgacagugauuucucagugaaacaggauguuguggcaauaacugauuggucaggguacagcggaaguuucguucaacauccugaguuaacaggauuggacuguauaagaccuugcuucuggguugaguuagucagaggacugccuagagaaaauacaacaaucuggacuagugggagcagcauuucuuuuuguggcguugauagugauacugcaaacuggucuuggccagacggugcugaguugccguucgccauugacaaguag

SEQ ID NO: 48557 - RNA, 1413 nt, Artificial Sequence; identical to SEQ ID NO: 48249
  derived and/or modified CDS sequence (wt) from neuraminidase__InfluenzaA__ACI32778

SEQ ID NO: 48558 - RNA, 1413 nt, Artificial Sequence
  derived and/or modified CDS sequence (wt) from neuraminidase__InfluenzaA__ACI32779
augaauccaaaucaaaaaauaauaaccauuggaucaaucaguauagcaaucggaauaauuagucuaauguugcaaauaggaaauauuauuucaauaugggcuagucacucaauccaaacuggaagucaaaaccacacuggaauaugcaaccaaagaaucaucacauaugaaaacagcaccugggugaaucacacauauguuaauauuaacaacacuaacguuguugcuggaaaggacaaaacuucagugacauuggccggcaauucaucucuuugcucuaucaguggaugggcuauauacacaaaagacaacagcauaagaauuggcuccaaaggagauguuuuugucauaagagaaccuuucauaucauguucucauuuggaaugcaggaccuuuuuucugacccaaggugcucuauuaaaugacaaacauucaaauggaaccguuaaggacagaaguccuuauagggccuuaaugagcuguccucuaggugaagccccguccccauacaauucaaaguuugaaucaguugcauggucagcaagcgcaugccaugauggcaugggcugguuaacaaucggaauuucugguccagacaauggagcuguggcuguacuaaaauacaacggaauaauaacugaaaccauaaaaaguuggaaaaagcgaauauugagaacacaagagucugaaugugucugugugaacgggucauguuucaccauaaugaccgauggcccgaguaauggggccgccucguacaaaaucuucaagaucgaaaaggggaagguuacuaaaucaauagaguuaaaugcacccaauuuucauuaugaggaauguuccuguuacccagacacuggcacagugauguguguaugcagggacaacuggcaugguucaaaucgaccuugggugucuuuuaaucaaaacuuggauuaucaaauaggauacaucugcaguggaguguucggugacaauccgcgucccaaagauggaaagggcagcuguaauccagugacuguugauggagcagacggaguuaagggguuuucauacaaauaugguaaugguguuuggauaggaaggacuaaaaguaacagacuuagaaagggguuugagaugauuugggauccuaauggauggacagauaccgacagugauuucucagugaaacaggauguuguggcaauaacugauuggucaggguacaguggaaguuucguucaacauccugaguuaacaggauuggacuguauaagaccuugcuucuggguugaguuagucagaggacugccuagagaaaauacaacaaucuggacuagugggagcagcauuuccuuuuguggcguugauagugauacugcaaacuggucuuggccagacggugcugaguugccguucaccauugacaaauag

SEQ ID NO: 48559 - RNA, 1413 nt, Artificial Sequence; identical to SEQ ID NO: 48558
  derived and/or modified CDS sequence (wt) from neuraminidase__InfluenzaA__ACI32780

SEQ ID NO: 48560 - RNA, 1413 nt, Artificial Sequence; identical to SEQ ID NO: 48558
  derived and/or modified CDS sequence (wt) from neuraminidase__InfluenzaA__ACI32781

SEQ ID NO: 48561 - RNA, 1413 nt, Artificial Sequence
  derived and/or modified CDS sequence (wt) from neuraminidase__InfluenzaA__ACI32782
augaacccaaaucaaaagauaauaaccauuggaucaaucaguauagcaaucggaauaauuagucuaauguugcaaauaggaaauauuauuucaauaugggcuagucacucaauccaaacuggaagucaaaaccacacuggaauaugcaaccaaagaaucaucacauaugaaaacagcaccugggugaaucacacauauguuaauauuaacaacacuaauguuguugcuggaaaggacaaaacuucagugacauuggccggcaauucaucucuuuguucuaucaguggaugggcuauauacacaaaagacaacagcauaagaauuggcuccaaaggagauguuuuugucauaagagaaccuuucauaucauguucucacuuggaaugcagaaccuuuuuucugacccaaggcgcucuauuaaaugacaaacauucaaaugggaccguaaaggacagaaguccuuauagggccuuaaugagcuguccucuaggugaagcuccguccccauacaauucaaaguucgaaucaguugcauggucagcaagcgcaugccaugauggcaugggcugguuaacaaucggaauuucugguccagacaauggagcuguggcuguacuaaaauacaacggaauaauaacuggaaccauaaaaaguuggaaaaagcaaauauuaagaacacaagagucugaaugugucuguaugaacgggucauguuucaccauaaugaccgauggcccgaguaauggggccgccucguacaaaaucuucaagauugaaaaggggaaggcuacuaaaucaauagaguugaaugcacccaauuuucauuaugaggaauguuccuguuacccagacacuggcacagugauguguguaugcagggacaacuggcaugguucaaaucgaccuugggugucuuuuaaucaaaacuuggauuaucaaauaggauacaucugcaguggaguguucggugacaauccgcgucccaaagauagaaagggcagcugcaauccagugacuguugauggagcagacggaguaaaaggguuuucauacaaauaugguaaugguguuuggauaggaaggaccaaaaguaacagacuuagaaagggguuugagaugauuugggauccuaauggauggacaaauaccgacagugauuucucagugaaacaggauguuguagcaauaacugauuggucaggguacagcggaaguuucguccaacauccugaguuaacaggauuggacuguauaagaccuugcuucuggguugaguuagucagagggcugccuagagaaaauacaacaaucuggacuagugggagcagcauuucuuuuuguggcguuaauagugauacugcaaacuggucuuggccagacggugcugaguugccguucaccauugacaaguag

SEQ ID NO: 48562 - RNA, 1413 nt, Artificial Sequence
  derived and/or modified CDS sequence (wt) from neuraminidase__InfluenzaA__ACI32783
augaauccaaaucaaaaaauaauaaccauuggaucaaucaguauagcaaucggaauaauuagucuaauguugcaaauaggaaauauuauuucaauaugggcuagucacucaauccaaacuggaagucaaaaccacacuggaauaugcaaccaaagaaucaucacauaugaaaacagcaccugggugaaucacacauauguuaauauuaacaacacuaauguuguugcuggaaaggacaaaacuucagugacauuggccggcaauucaucucuuuguucuaucaguggaugggcuauauacacaaaagacaacagcauaagaauuggcuccaaaggagauguuuuugucauaagagaaccuuucauaucauguucucauuuggaaugcaggaccuuuuuucugacccaaggugcucuauuaaaugacaaacauucaaauggaaccguuaaggacagaaguccuuauagggccuuaaugagcuguccucuaggugaagcuccguccccauacaauucaaaguuugaaucaguugcauggucagcaagcgcaugccaugauggcaugggcugguuaacaaucggaauuucugguccagacaauggagcuguggcuguacuaaaauacaacggaauaauaacugaaaccauaaaaaguuggaaaaagcaaauauugagaacacaagagucugaaugugucugugugaacgggucauguuucaccauaaugaccgauggcccgaguaauggggccgccucguacaaaaucuucaagaucgaaaaggggaagguuacuaaaucaauagaguuaaaugcacccaauuuucauuaugaggaauguuccuguuacccagacacuggcacagugauguguguaugcagggacaacuggcaugguucaaaucgaccuugguugucuuuuaaucaaaacuuggauuaucaaauaggauauaucugcaguggagugaucggugacaauccgcgucccaaagauggaaagggcagcuguaauccagugacuguugauggagcugacggaguuaagggguuuucauacaaauaugguaaugguguuuggauaggaaggacuaaaaguaacagacuuagaaagggguuugagaugauuugggauccuaauggauggacagauaccgacagcgauuucucagugaaacaggauguuguggcaauaacugauuggucaggguacaguggaaguuucguucaacauccugaguuaacaggauuggacuguauaagaccuugcuucuggguugaguuagucagaggacugccuagagaaaauacaacaaucuggacuagugggagcagcauuucuuuuuguggcguugauggugauacugcaaacuggucuuggccagacggugcugaguugccguucaccauugacaaauag

SEQ ID NO: 48563 - RNA, 1413 nt, Artificial Sequence
  derived and/or modified CDS sequence (wt) from neuraminidase__InfluenzaA__ACI32784
augaacccaaaucaaaagauaauaaccauuggaucaaucaguauagcaaucggaauaauuagucuaauguugcaaauaggaaauauuauuucaauaugggcuagucacucaauccaaacuggaagucaaaaccacacuggaauaugcaaccaaagaaucaucacauaugaaaacagcaccugggugaaucacacauauguuaauauuaacaacacuaauguuguugcuggaaaggacaaaacuucagugacauuggccggcaauucaucucuuuguucuaucaguggaugggcuauauacacaaaagacaacagcauaagaauuggcuccaaaggagauguuuuugucauaagagaaccuuucauaucauguucucacuuggaaugcagaaccuuuuuucugacccaaggcgcucuauuaaaugacaaacauucaaaugggaccguaaaggacagaaguccuuauagggccuuaaugagcuguccucuaggugaagcuccguccccauacaauucaaaguucgaaucaguugcauggucagcaagcgcaugccaugauggcaugggcugguuaacaaucggaauuucugguccagacaauggagcuguggcuguacuaaaauacaacggaauaauaacuggaaccauaaaaaguuggaaaaagcaaauauuaagaacacaagagucugaaugugucuguaugaacgggucauguuucaccauaaugaccgauggcccgaguaauggggccgccucguacaaaaucuucaagauugaaaaggggaaggcuacuaaaucaauagaguugaaugcacccaauuuucauuaugaggaauguuccuguuacccagacacuggcacagugauguguguaugcagggacaacuggcaugguucaaaucgaccuugggugucuuuuaaucaaaacuuggauuaucaaauaggauacaucugcaguggaguguucggugacaauccgcgucccaaagauagagagggcagcugcaauccagugacuguugauggagcagacggaguaaaaggguuuucauacaaauaugguaaugguguuuggauaggaaggaccaaaaguaacagacuuagaaagggguuugagaugauuugggauccuaauggauggacaaauaccgacagugauuucucagugaaacaggauguuguagcaauaacugauuggucaggguacagcggaaguuucguccaacauccugaguuaacaggauuggacuguauaagaccuugcuucuggguugaguuagucagagggcugccuagagaaaauacaacaaucuggacuagugggagcagcauuucuuuuuguggcguuaauagugauacugcaaacuggucuuggccagacggugcugaguugccguucaccauugacaaguag

SEQ ID NO: 48564 - RNA, 1413 nt, Artificial Sequence
  derived and/or modified CDS sequence (wt) from neuraminidase__InfluenzaA__ACI32785
augaauccaaaucaaaaaauaauaaccauuggaucaaucaguauagcaaucggaauaauuagucuaauguugcaaauaggaaauauuauuucaauaugggcuagucauucaauccaaacuggaagucaaaaccacacuggaaugugcaaccaaagaaucaucacauaugaaaacagcaccugggugaaucacacauauguuaauauuaacaacacuaauguuguugcugaaaaggacaaaacuucagugacauuggccggcaauucaucucuuuguucuaucaguggaugggcuauauacacaaaagacaacagcauaagaauuggcuccaaaggagauguuuuugucauaagagaaccuuucauaucauguucucauuuggaaugcaggaccuuuuuucugacccaaggugcucuauuaaaugacaaacauucaaauggaaccguuaaggacagaaguccuuauagggccuuaaugagcuguccucuaggugaagcuccguccccauacaauucaaaguuugaaucaguugcauggucagcaagcgcaugccaugauggcaugggcugguuaacaaucggaauuucugguccagacaauggagcuguggcuguacuaaaauacaacggaauaauaacugaaaccauaaaaaguuggaaaaagcgaauauugagaacacaagagucugaaugugucugugugaacgggucauguuucaccauaaugaccgauggcccgaguaauggagccgccucguacaaaaucuucaagaucgaaaaggggaagguuacuaaaucaauagaguugaaugcacccaauuuucauuaugaggaauguuccuguuacccagacacuggcacagugauguguguaugcagagacaacuggcaugguucaaaucgaccuugggugucuuuuaaucaaaacuuggauuaucaaauaggauacaucugcaguggaguguucggugacaauccgcgucccaaagauggaaagggcagcuguaauccagugacuguugauggagcagacggaguuaagggguuuucauacaaauaugguaaugguguuuggauaggaaggacuaaaaguaacagacuuagaaagggguuugagaugauuugggauccuaauggaugggcagauaccgacagugauuucucagugaaacaggauguuguggcaauaacugauuggucaggguacaguggaaguuucguucaacauccugaguuaacaggauuaaacuguauaagaccuugcuucuggguugaguuagucagaggacugccuagagaaaauacaacaaucuggacuagugggagcagcauuucuuuuuguggcguugauagugauacugcaaacuggucuuggccagacggugcugaguugccguucaccauugacaaauag

SEQ ID NO: 48565 - RNA, 1413 nt, Artificial Sequence
  derived and/or modified CDS sequence (wt) from neuraminidase__InfluenzaA__ACI32787
augaacccaaaucaaaaaauaauaaccauuggaucaaucaguauagcaaucggaauaauuagucuaauauugcaaauaggaaauauuauuucaauaugggcuagucacucaauccaaacuggaagucaaaaccacacuggaauaugcaaccaaagaaucaucacauaugaaaacagcaccugggugaauaacacauauguuaauauuaacaacacuaauguuguugcugaaaaggacaaaacuucagugacauuggccggcaauucaucucuuuguucuaucaguggaugggcuauauacacaaaagacaacagcauaagaauuggcuccaaaggagauguuuuugucauaagagaaccuuucauaucauguucucacuuggaaugcagaaccuuuuuucugacccaaggugcucuauuaaaugacaaacauucaaaugggaccguaaaggacagaaguccuuauagggccuuaaugagcuguccucuaggugaagcuccguccccauacaauucaagguucgaaucaguugcauggucagcaagcgcaugccaugauggcaugggcugguuaacaaucggaauuucugguccagacaauggagcuguggcuguacuaaaauacaacggaauaauaacugaaaccauaaaaaguuggaaaaagcgaauauuaagaacacaagagucugaaugugucuguaugaacgggucauguuucaccauaaugaccgauggcccgaguaauggggccgccucguacaaaauuuucaagaucgaaaaggggaagguuaccaaaacaauagaguugaaugcacccaauuuucauuaugaggaauguuccuguuacccagacacuggcacagugauguguguaugcagagacaacuggcaugguucaaaucgaccuugggugucuuuuaaucaaaacuuggauuaucaaauaggauacaucugcaguggaguguucggugacaauccgcgucccaaagauggggagggcagcugcaauccagugacuguugauggagcagacggaguaaagggguuuucauacaaauaugguaaugguguuuggauaggaaggaccaaaaguaacagacuuagaaagggguuugagaugauuugggauccuaauggauggacaaauaccgacagugauuucucagugaaacaggauguuguagcaauaacugauuggucaggguacagcggaaguuuuguucaacauccugaguuaacaggauuggacuguauaagacccugcuucuggguugaguuagucagagggcugccuagggaaaauacaacaaucuggacuagugggagcagcauuucuuuuuguggcguuaauggugguacugcagacuggucuuggccagacggugcugaguugccguucaccauugacaaguag

SEQ ID NO: 48566 - RNA, 1413 nt, Artificial Sequence
  derived and/or modified CDS sequence (wt) from neuraminidase__InfluenzaA__ACI32788
augaauccaaaucaaaaaauaauaaccauuggaucaaucaguauagcaaucggaauaauuagucuaauguugcaaauaggaaauauuauuucaauaugggcuagucacucaauccaaacuggaagucaaaaccacacuggaacaugcaaccaaagaaucaucacauaugaaaacaacaccugggugaaucacacauguguuaauauuaacaacacuaauguuguugcuggaaaggacaaaacuucagugacacuggucggcaauucaucucuuuguucuaucaguggaugggcuauauacacaaaagacaacagcauaagaauuggcuccaaaggagauguuuuugucauaagagaaccuuucauaucauguucucacuuggaaugcagaaccuuuuuucugacccaaggugcucuauuaaaugacaaacauucaaauggaaccguuaaggacagaaguccuuauagggccuuaaugagcuguccucuaggugaagccccguccccauacaauucaaaguuugaaucaguugcauggucagcaagcgcaugccaugauggcaagggcugguuaacaaucggaauuucugguccagacaauggagcuguggcuguacuaaaauacaacggaauaauaacugaaaccauaaaaaguuggaaaaagcgaauauugagaacacaagaaucugaauguguuugugugaacgggucauguuucaccauaaugaccgauggcccgaguaauggggccgccucguacaaaaucuucaagaucgaaaaggggaagguuacuaaaucaauagaguugaaugcaccuaauuuucauuaugaggaauguuccuguuacccagacacuggcacagugauguguguaugcagggacaacuggcaugguucaaaucgaccuugggugucuuuuaaucaaaacuuggauuaucaaauaggauacaucugcaguggaguguucggugacaauccgcgucccaaagauggaaagggcagcuguaauccaaugacuguugauggagcagacggaguuaagggguuuucauacaaauaugguaaugguguuuggauaggaaggacuaaaaguaacagacuuagaaagggguuugagaugauuugggauccuaauggauggacagauaccgacagugauuucucagugaaacaggauguuguggcaauaacugauuggucaggguacagcggaaguuucguccaacauccugaguuaacaggauuggacuguauaagaccuugcuucuggguugaguuagucagaggacugccuagagaaaauacaacaaucuggacuagugggagcagcauuucuuuuuguggcguugauagugauacugcaaacuggucuuggccagacggugcugaguugccguucaccauugacaaguag

SEQ ID NO: 48567 - RNA, 1410 nt, Artificial Sequence
  derived and/or modified CDS sequence (wt) from neuraminidase__InfluenzaA__ACI32790
augaauccaaaucaaaaaauaauaacgauuggcucuguuucucucaccauugccacaauaugcuuccuuacgcaaauugccauccugguaacuacuguaacauugcauuucaagcaauaugaaugcaacucccccccaaacaaccaagugaugcugugugaaccaacaauaauagaaagaaacauaacagagauaguguaucugaccaacaccaccauagagaaggaaauaugccccaaacuagcagaauacagaaauuggucaaagccgcaauguaacauuacuggauuugcaccuuuuucuaaggacaauucgauucggcuuuccgcugguggggacaucuggguuacacgagaaccuuaugugucaugcgauccugacaaguguuaucaauuugcccuuggacagggaacaacacuaaacaacgggcauucaaaugacacaguacaugauaggaccccuuaucggacccuauugaugaaugaguuggguguuccauuucauuugggaaccaagcaagugugcauagcaugguccagcucaaguugucacgauggaaaagcauggcugcauguuuguguaacgggggaugauaaaaaugcaacugcuagcuucauuuacaaugggaggcuuguagauaguauagguucaugguccaaaaaaauccucaggacccaggagucggaaugcguuuguaucaauggaacuuguacaguaguaaugacugaugggagugcuucaggaaaagcugauacuaaaauacuauucauugaggaggggaaaaucguucauacuagccuauugucagggagugcucagcaugucgaggagugcuccuguuauccucgauauccuggugucagaugugucugcagagacaacuggaaaggcuccaauaggcccaucguagauauaaauguaaaggauuauagcauuguuuccaguuaugugugcucaggacuuguuggagacacacccagaaaaaacgacagcuccagcaguagccauugcuuggauccuaacaaugaggaagguggucauggagugaaaggcugggccuuugaugauggaaaugacguguggaugggaagaacgaucagcgagaaguuacgcucaggauaugaaaccuucaaagucauugaaggcugguccaaaccuaacuccaaacugcagauaaauaggcaagucauaguugacagagguaauagguccgguuauucugguauuuucucuguugaaggcaaaagcugcaucaaucggugcuuuuauguggagcugauaaggggaaggaaccaggaaacugaagucuuguggaccucaaacaguauuguuguguuuuguggcaccucagguacauauggaacaggcucauggccugauggggcggacaucaaucucaugccuauauaa

SEQ ID NO: 48568 - RNA, 1410 nt, Artificial Sequence
  derived and/or modified CDS sequence (wt) from neuraminidase__InfluenzaA__ACI32791
augaauccaaaucaaaaaauaauaacgauuggcucuguuucucucaccauugccacaauaugcuuccuuacgcaaauugccauccugguaacuacuguaacauugcauuucaagcaauaugaaugcaacucccccccaaacaaccaagugaugcugugugaaccaacaauaauagaaagaaacauaacagagauaguguaucugaccaacaccaccauagagaaggaaauaugccccaaacuagcagaauacagaaauuggucaaagccgcaaugcaacauuacuggauuugcaccuuuuucuaaggacaauucgauucggcuuuccgcugguggggacaucuggguuacaagagaaccuuaugugucaugcgauccugacaaguguuaucaauuugcccuuggacagggaacaacacuaaacaacgggcauucaaaugacacaguacaugauaggaccccuuauaggacccuauugaugaaugaguuggguguuccauuucauuugggaaccaagcaagugugcauagcaugguccagcucaaguugucacgauggaaaagcauggcugcauguuuguguaacgggggaugauaaaaaugcaacugcuagcuucauuuacaaugggaggcuuguagauaguauagguucaugguccaaaaaaauccucaggacccaggagucagaaugcguuuguaucaauggaacuuguacaguaguaaugacugaugggagugcuucaggaaaagcugauacuaaaauacuauucauugaggaggggaaaaucguucauacuagccuauugucagggagugcucagcaugucgaggagugcuccuguuauccucgauauccuggugucagaugugucugcagagacaacuggaaaggcuccaauaggcccaucguagauauaaauguaaaggauuauagcauuguuuccaguuaugugugcucaggacuuguuggagacacacccagaaaaaacgacagcuccagcaguagccauugcuuggauccuaacaaugaggaagguggucauggagugaaaggcugggccuuugaugauggaaaugacguguggaugggaagaacgaucagcgagaaguuacgcucaggauaugaaaccuucaaagucauugaaggcugguccaaaccuaacuccaaacugcagauaaauaggcaagucauaguugacagagauaauagguccgguuauucugguauuuucucuguugaaggcaaaagcugcaucaaucggugcuuuuauguggaguugauaaggggaaggaaccaggaaacugaagucuuguggaccucaaacaguauuguuguguuuuguggcaccucagguacauauggaacaggcucauggccugauggggcggacaucaaucucaugccuauauaa

SEQ ID NO: 48569 - RNA, 1410 nt, Artificial Sequence
  derived and/or modified CDS sequence (wt) from neuraminidase__InfluenzaA__ACI32793
augaauccaaaucaaaaaauaauaacgauuggcucuguuucucucaccauugccacaauaugcuuccuuacgcaaauugccauccugguaacuacuguaacauugcauuucaagcaauaugaaugcaacucccccccaaacaaccaagugaugcugugugaaccaacaauaauagaaagaaacauaacagagauaguguaucugaccaacaccaccauagagaaggaaauaugccccaaacuagcagaauacagaaauuggucaaagccgcaaugcaacauuacuggauuugcaccuuuuucuaaggacaauucgauucggcuuuccgcugguggggacaucuggguuacaagagaaccuuaugugucaugcgauccugacaaguguuaucaauuugcccuuggacagggaacaacacuaaacaacgggcauucaaaugacacaguacaugauaggaccccuuauaggacccuauugaugaaugaguuggguguuccauuucauuugggaaccaagcaagugugcauagcaugguccagcucaaguugucacgauggaaaagcauggcugcauguuuguguaacgggggaugauaaaaaugcaacugcuagcuucauuuacaaugggaggcuuguagauaguauagguucaugguccaaaaaaauccucaggacccaggagucagaaugcguuuguaucaauggaacuuguacaguaguaaugacugaugggagugcuucaggaaaagcugauacuaaaauacuauucauugaggaggggaaaaucguucauacuagccuauugucagggagugcucagcaugucgaggagugcuccuguuauccucgauauccuggugucagaugugucugcagagacaacuggaaaggcuccaauaggcccaucguagauauaaauguaaaggauuauagcauuguuuccaguuaugugugcucaggacuuguuggagacacacccagaaaaaacgacagcuccagcaguagccauugcuuggauccuaacaaugaggaagguggucauggagugaaaggcugggccuuugaugauggaaaugacguguggaugggaagaacgaucagcgagaaguuacgcucaggauaugaaaccuucaaagucauugaaggcugguccaaaccuaacuccaaacugcagauaaauaggcaagucauaguugacagagauaauagguccgguuauucugguauuuucucuguugaaggcaaaagcugcaucaaucggugcuuuuauguggaguugauaaggggaaggaaccaggaaacugaagucuuguggaccucaaacaguauuguaguguuuuguggcaccucagguacauauggaacaggcucauggccugauggggcggacaucaaucucaugccuauauaa

SEQ ID NO: 48570 - RNA, 1410 nt, Artificial Sequence; identical to SEQ ID NO: 46394
  derived and/or modified CDS sequence (wt) from neuraminidase__InfluenzaA__ACI32794

SEQ ID NO: 48571 - RNA, 1410 nt, Artificial Sequence; identical to SEQ ID NO: 47744
  derived and/or modified CDS sequence (wt) from neuraminidase__InfluenzaA__ACI32795

SEQ ID NO: 48572 - RNA, 1410 nt, Artificial Sequence
  derived and/or modified CDS sequence (wt) from neuraminidase__InfluenzaA__ACI32796
augaauccaaaucaaaagauaauaacgauuggcucuguuucucucaccauuuccacaauaugcuucuucaugcaaauugccaucuugauaacuacuguaacauugcauuucaagcaauaugaauucaacucccccccaaacaaccaagugaugcugugugaaccaacaauaauagaaagaaacauaacagagauaguguaucugaccaacaccaccauagagaaggaaauaugccccaaacuagcagaauacagaaauuggucaaagccgcaauguagcauuacaggauuugcaccuuuuucuaaggacaauucgauuaggcuuuccgcugguggggacaucugggugacaagagaaccuuaugugucaugcgauccugacaaguguuaucaauuugcccuuggacagggaacaacacuaaacaacgugcauucaaaugacacaguacaugauagaaccccuuaucggacccuauugaugaaugaguuagguguuccauuucaucuggggaccaagcaagugugcauagcaugguccagcucaaguugucacgauggaaaagcauggcugcauguuuguguaacgggggaugauaaaaaugcaacugcuagcuucauuuacaaugggaggcuuguagauaguauuguuucaugguccaaagaaauccucaggacccaggagucagaaugcguuuguaucaauggaacuuguacaguaguaaugacugauggaagugcuucaggaaaagcugauacuaaaauacuauucauugaggaggggaaaaucguucauacuagcacauugucaggaagugcucagcaugucgaggagugcuccugcuauccucgauauccuggugucagaugugucugcagagacaacuggaaaggcuccaauaggcccauaguagacauaaacauaaaggauuauagcauuguuuccaguuaugugugcucaggacuuguuggagacacacccagaaaaaacgacagcuccagcaguagccauugcuuggauccuaacaaugaagaagguggucauggagugaaaggcugggccuuugaugauggaaaugacguguggaugggaagaacgaucagcgagaagucacgcucaggauaugaaaccuucaaagucauugaaggcugguccaacccuaauuccaaauugcagauaaauaggcaagucauaguugacagagguaauagguccgguuauucugguauuuucucuguugaaggcaaaagcugcaucaaucggugcuuuuauguggaguugauaaggggaagaaaagaggaaacugaagucuuguggaccucaaacaguauuguuguguuuuguggcaccucagguacauauggaacaggcucauggccugauggggcggacaucaaucucaugccuauauaa

SEQ ID NO: 48573 - RNA, 1410 nt, Artificial Sequence
  derived and/or modified CDS sequence (wt) from neuraminidase__InfluenzaA__ACI32797
augaauccaaaucaaaugauaauaacgauuggcucuguuucucucaccauuuccacaauaugcuucuucaugcaaauugccaucuugauaacuacuguaacauugcauuucaagcaauaugaauucaacucccccccaaacaaccaagugaugcugugugaaccaacaauaauagaaagaaacauaacagagauaguguaucugaccaacaccaccauagagaaggaaauaugccccaaacuagcagaauacagaaauuggucaaagccgcaauguagcauuacaggauuugcaccuuuuucuaaggacaauucgauuaggcuuuccgcugguggggacaucugggugacaagagaaccuuaugugucaugcgauccugacaaguguuaucaauuugcccuuggacagggaacaacacuaaacaacgugcauucaaaugacacaguacaugauagaaccccuuaucggacccuauugaugaaugaguuagguguuccauuucaucuggggaccaagcaagugugcauagcaugguccagcucaaguugucacgauggaaaagcauggcugcauguuuguguaacgggggaugauaaaaaugcaacugcuagcuucauuuacaaugggaggcuuguagauaguauuguuucaugguccaaagaaauccucaggacccaggagucagaaugcguuuguaucaauggaacuuguacaguaguaaugacugauggaagugcuucaggaaaagcugauacuaaaauacuauucauugaggaggggaaaaucguucauacuagcacauugucaggaagugcucagcaugucgaggagugcuccugcuauccucgauauccuggagucagaugugucugcagagacaacuggaaaggcuccaauaggcccauaguagacauaaacauaaaggauuauagcauuguuuccaguuaugugugcucaggacuuguuggagacacacccagaaaaaacgacagcuccagcaguagccauugcuuggauccuaacaaugaagaagguggucauggagugaaaggcugggccuuugaugauggaaaugacguguggaugggaagaacgaucagcgagaagucacgcucaggauaugaaaccuucaaagucauugaaggcugguccaacccuaauuccaaauugcagauaaauaggcaagucauaguugacagagguaauagguccgguuauucugguauuuucucuguugaaggcaaaagcugcaucaaucggugcuuuuauguggaguugauaaggggaagaaaagaggaaacugaagucuuguggaccucaaacaguauuguuguguuuuguggcaccucagguacauauggaacaggcucauggccugauggggcggacaucaaucucaugccuauauaa

SEQ ID NO: 48574 - RNA, 1410 nt, Artificial Sequence
  derived and/or modified CDS sequence (wt) from neuraminidase__InfluenzaA__ACI32798
augaauccaaaucaaaagauaauaacgauuggcucuguuucucucaccauuuccacaauaugcuucuucaugcaaauugccaucuugauaacuacuguaacauugcauuucaagcaauaugaauucaacucccccccaaacaaccaagugaugcugugugaaccaacaauaauagaaagaaacauaacagagauaguguaucugaccaacaccaccauagagaaggaaauaugccccaaacuagcagaauacagaaauuggucaaagccgcaauguaacauuacaggauuugcaccuuuuucuaaggacaauucgauuaggcuuuccgcugguggggacaucugggugacaagagaaccuuaugugucaugcgauccugacaaauguuaucaauuugcccuuggacagggaacaacacuaaacaacgugcauucaaaugacacaguacaugauaggaccccuuaucggacccuauugaugaaugaguuagguguuccauuucaucuggggaccaagcaagugugcauagcaugguccagcucaaguugucacgauggaaaagcauggcugcauguuuguguaacgggggaugauaaaaaugcaacugcuagcuucauuuacaaugggaggcuuguagauaguauuguuucaugguccaacgaaauccucaggacccaggagucagaaugcguuuguaucaauggaacuuguacaguaguaaugacugaugggagugcuucaggaaaagcugauacuaaaauacuauucauugaggaggggaaaaucguccauacuagcacauugucaggaagugcucagcaugucgaggagugcuccugcuauccucgauauccuggugucagaugugucugcagagacaacuggaaaggcuccaauaggcccauaguagauauaaacauaaaggauuauagcauuguuuccaguuaugugugcucaggacuuguuggagacacacccagaaaaaacgacagcuccagcaguagccauugcuuggauccuaacaaugaagaagguggucacggagugaaaggcugggccuuugaugauggaaaugacguguggaugggaagaacgaucagcgagaaguuacgcucaggauaugaaaccuucaaagucauugaaggcugguccaaccccaauuccaaauugcagauaaauaggcaagucauaguugacagagguaauagguccgguuauucugguauuuucucuguugaaggcaaaagcugcaucaaucggugcuuuuauguggaguugauaaggggaagaaaagaggaaacugaagucuuguggaccucaaacaguauuguuguguuuuguggcaccucagguacauauggaacaggcucauggccugauggggcggacaucaaucucaugccuauauaa

SEQ ID NO: 48575 - RNA, 1410 nt, Artificial Sequence
  derived and/or modified CDS sequence (wt) from neuraminidase__InfluenzaA__ACI32799
augaauccaaaucaaaggauaauaacgauuggcucuguuucucucaccauuuccacaauaugcuucuucaugcaaauugccaucuugauaacuacuguaacauugcauuucaagcaauaugaauucaacucccccccaaacaaccaagugaugcugugugaaccaacaauaauagaaagaaacauaacagagauaguguaucugaccaacaccaccauagagaaggaaauaugccccaaacuagcagaauacagaaauuggucaaagccgcaaugugacauuacaggauuugcaccuuuuucuaaggacaauucgauuaggcuuuccgcugguggggacaucugggugacaagagaaccuuaugugucaugcgauccugacaaguguuaucaauuugcccuuggacagggaacaacacuaaacaacgugcauucaaacgacacaguacaugauaggaccccuuaucggacccuauugaugaaugaguuagguguuccauuucaucuggggaccaagcaagugugcauagcaugguccagcucaaguugucacgauggaaaagcauggcugcauguuuguguaacaggggaugauaaaaaugcaacugcuagcuucauuuacaaugggaggcuuguagauaguguuguuucaugguccaaagauauccucaggacccaggagucagaaugcguuuguaucaauggaacuuguacaguaguaaugacugaugggagugcuucaggaaaagcuaauacuaaaauacuauucauugaggaggggaaaaucguucauacuagcacauugucaggaagugcucagcaugucgaggagugcuccugcuauccucgauauccuggugucagaugugucugcagagacaacuggaaaggcuccaauaggcccauuguagauauaaacauaaagaauuauagcauuguuuccaguuaugugugcucaggacuuguuggagacacacccagaaaaaccgacagcuccagcaguagccauugcuuggauccuaacaaugaagaagguggucauggagugaaaggcugggccuuugaugauggaaaugacguguggaugggaagaacgaucagcgagaaguuacgcuuaggauaugaaaccuucaaagucauugaaggcugguccaacccuaauuccaaauugcagauaaauaggcaagucauaguugacagagguaauagguccgguuauucugguauuuucucuguugaaggcaaaagcugcaucaaucggugcuuuuauguggaguugauaaggggaagaaaagaagaaacugaagucuuguggaccucaaacaguauuguuguauuuuguggaaccucagguacauauggaacaggcucauggccugauggggcggacaucaaucucaugccuauauaa

SEQ ID NO: 48576 - RNA, 1410 nt, Artificial Sequence
  derived and/or modified CDS sequence (wt) from neuraminidase__InfluenzaA__ACI32800
augaauccaaaucaaaagauaauaacgauuggcucuguuucucucaccauuuccacaauaugcuucuucaugcaaauugccaucuugauaacuacuguaacauugcauuucaaacaauaugaauucaacucccccccaaacaaccaagugaugcugugugaaccaacaauaauagaaagaaacauaacagagauaguguaucugaccaacaccaccauagagaaggaaauaugccccaaacuagcagaauacagaaauuggucaaagccgcaauguaacauuacaggauuugcaccuuuuucuaaggacaauucgauuaggcuuuccgcugguggggacaucugggugacaagagaaccuuaugugucaugcgauccugacaaguguuaucaauuugcccuuggacagggaacaacacuaaacaacgugcauucaaaugacacaguacaugauaggaccccuuaucggacccuauugaugaaugaguuagguguuccauuucaucuggggaccaagcaagugugcauagcaugguccagcucaaguugucacgauggaaaagcauggcugcauguuuguguaacgggggaugauaaaaaugcaacugcuagcuucauuuacaaugggaggcuuguagauaguauuguuucaugguccaaagaaauccucaggacccaggagucagaaugcguuuguaucaauggaacuuguacaguaguaaugacugaugggagugcuucaggaaaagcugauacuaaaauacuauucauugaggaggggaaaaucguucauacuagcacauugucaggaagugcucagcaugucgaggagugcuccugcuauccucgauauccuggugucagaugugucugcagagacaacuggaaaggcuccaauaggcccauaguagauauaaacauaaaggauuauagcauuguuuccaguuaugugugcucaggacuuguuggagacacacccagaaaaaacgacagcuccagcaguagccauugcuuggauccuaacaaugaagaagguggucauggagugaaaggcugggccuuugaugauggaaaugacguguggaugggaagaacgaucagcgagaaguuacgcucaggauaugaaaccuucaaagucauugaaggcugguccaacccuaauuccaaauugcagacaaauaggcaagucauaguugacagagguaauagguccgguuauucugguauuuucucuguugaaggcaaaagcugcaucaaucggugcuuuuauguggaguugauaaggggaagaaaagaggaaacugaagucuuguggaccucaaacaguauuguuguguuuuguggcaccucagguacauauggaacaggcucauggccugauggggcggacaucaaucucaugccuauauaa

SEQ ID NO: 48577 - RNA, 1410 nt, Artificial Sequence
  derived and/or modified CDS sequence (wt) from neuraminidase__InfluenzaA__ACI32802
augaauccaaaucaaaagauaauaacgauuggcucuguuucucucaccauuuccacaauaugcuucuucaugcaaauugccaucuugauaacuacuguaacauugcauuucaagcaauaugaauucaacucccccccaaacaaccaagugaugcugugugaaccaacaauaauagaaagaaacauaacagagauaguguaucugaccaacaccaccauagagaaggaaauaugccccaaacuagcagaauacagaaauuggucaaagccgcaauguaacauuacaggauuugcaccuuuuucuaaggacaauucgauuaggcuuuccgcugguggggacaucugggugacaagagaaccuuaugugucaugcgauccugacaaguguuaucaauuugcccuuggacagggaacaacacuaaacaacgugcauucaaaugacacaguacaugauaggaccccuuaucggacccuauugaugaaugaguuagguguuccauuucaucuggggaccaagcaagugugcauagcaugguccagcucaaguugucacgauggaaaagcauggcugcauguuuguguaacgggggaugauaaaaaugcaacugcuagcuucauuuacaaugggaggcuuguagauaguauuguuucaugguccaaagaaauccucaggacccaggagucagaaugcguuuguaucaauggaacuuguacaguaguaaugacugaugggagugcuucaggaaaagcugauacuaaaauacuauucauugaggaggggaaaaucguucauacuagcacauugucaggaagugcucagcaugucgaggagugcuccugcuauccucgauauccuggugucagaugugucugcagagacaacuggaaaggcuccaauaggcccauaguagauauaaacauaaaggauuauagcauuguuuccaguuaugugugcucaggacuuguuggagacacacccagaaaaaacgacagcuccagcaguagccauugcuuggauccuaacaaugaagaagguggucauggagugaaaggcugggccuuugaugauggaaaugacguguggaugggaagaacgaucagcgagaaguuacgcucaggauaugaaaccuucaaagucauugaaggcugguccaacccuaauuccaaauugcagacaaauaggcaagucauaguugacagagguaauagguccgguuauucugguauuuucucuguugaaggcaaaagcugcaucaaucggugcuuuuauguggaguugauaaggggaagaaaagaggaaacugaagucuuguggaccucaaacaguauuguuguguuuuguggcaccucagguacauauggaacaggcucauggccugauggggcggacaucaaucucaugccuauauaa

SEQ ID NO: 48578 - RNA, 1410 nt, Artificial Sequence; identical to SEQ ID NO: 48577
  derived and/or modified CDS sequence (wt) from neuraminidase__InfluenzaA__ACI32803

SEQ ID NO: 48579 - RNA, 1410 nt, Artificial Sequence
  derived and/or modified CDS sequence (wt) from neuraminidase__InfluenzaA__ACI32804
augaauccaaaucaaaagauaauaacgauuggcucuguuucucucaccauuuccacaauaugcuucuucaugcaaauugccaucuugauaacuacuguaacauugcauuucaagcaauaugaauucaacucccccccaaacaaucaagugaugcugugugaaccaacaauaauagaaagaaacauaacagagauaguguaucugaccaacaccaccauagagaaggaaauaugccccaaacuagcagaauacagaaauuggucaaagccgcaaugugacauuacaggauuugcaccuuuuucuaaggacaauucgauuaggcuuuccgcugguggggacaucugggugacaagagaaccuuaugugucaugcgauccugacaaguguuaucaauuugcccuuggacagggaacaacacuaaacaacgugcauucaaacgacacaguacaugauaggaccccuuaucggacccuauugaugaaugaguuagguguuccauuucaucuggggaccaagcaagugugcauagcaugguccagcucaaguugucacgauggaaaagcauggcugcauguuuguguaacaggggaugauaaaaaugcaacugcuagcuucauuuacaaugggaggcuuguagauaguguuguuucaugguccaaagauauccucaggacccaggagucagaaugcguuuguaucaauggaacuuguacaguaguaaugacugaugggagugcuucaggaaaagcugauacuaaaauacuauucauugaggaggggaaaaucguucauacuagcacauugucaggaagugcucagcaugucgaggagugcuccugcuauccucgauauccuggugucagaugugucugcagagacaacuggaaaggcuccaauaggcccauuguagauauaaacauaaagaauuauagcauuguuuccaguuaugugugcucaggacuuguuggagacacacccagaaaaaccgacagcuccagcaguagccauugcuuggauccuaacaaugaagaagguggucauggagugaaaggcugggccuuugaugauggaaaugacguguggaugggaagaacgaucagcgagaaguuacgcuuaggauaugaaaccuucaaagucauugaaggcugguccaacccuaauuccaaauugcagauaaauaggcaagucauaguugacagagguaauagguccgguuauucugguauuuucucuguugaaggcaaaagcugcaucaaucggugcuuuuauguggaguugauaaggggaagaaaagaggaaacugaagucuuguggaccucaaacaguauuguuguauuuuguggaaccucagguacauauggaacaggcucauggccugauggggcggacaucaaucucaugccuauauaa

SEQ ID NO: 48580 - RNA, 1410 nt, Artificial Sequence
  derived and/or modified CDS sequence (wt) from neuraminidase__InfluenzaA__ACI32805
augaauccaaaucaaaagauaauaacgauuggcucuguuucucucaccauuuccacaauaugcuucuucaugcaaauugccaucuugauaacuacuguaacauugcauuucaagcaauaugaauucaacucccccccaaacaaccaagugaugcugugugaaccaacaauaauagaaagaaacauaacagagauaguguaucugaccaacaccaccauagagaaggaaauaugccccaaacuagcagaauacagaaauuggucaaagccgcaauguaacauuacaggauuugcaccuuuuucuaaggacaauucgauuaggcuuuccgcugguggggacaucugggugacaagagaaccuuaugucucaugcgauccugacaaguguuaucaauuugcccuuggacagggaacaacacuaaacaacgugcauucaaaugacacaguacaugauaggaccccuuaucggacccuauugaugaaugaguuagguguuccauuucaucuggggaccaagcaagugugcauagcaugguccagcucaaguugccacgauggaaaagcauggcugcauguuuguguaacgggggaugauaaaaaugcaacugcuagcuucauuuacaaugggaggcuuguagauaguauuguuucaugguccaaagaaauccucaggacccaggagucagaaugcguuuguaucaauggaacuuguacaguaguaaugacugaugggagugcuucaggaaaagcuguuacuaaaauacuauucauugaggaggggaaaaucguucauacuagcacauugucaggaagugcucagcaugucgaggagugcuccugcuauccucgauauccuggugucagaugugucugcagagacaacuggaaaggcuccaauaggcccauaguagauauaaacauaaaggauuauagcauuguuuccaguuaugugugcucaggacuuguuggagacacacccagaaaaaacgaccgcuccagcaguagccauugcuuggauccuaacaaugaagaagguggucauggagugaaaggcugggccuucgaugauggaaaugacguguggaugggaagaacgaucagcgagaagucacgcucaggauaugaaaccuucaaagucauugaaggcugguccaacccuaauuccaaauugcagacaaauaggcaagucauaguugacagagguaauagguccgguuauucugguauuuucucuguugaaggcaaaagcugcaucaaucggugcuuuuauguggaguugauaaggggaagaaaagaggaaacugaagucuuguggaccucaaacaguauuguuguguuuuguggcaccucagguacauauggaacaggcucauggccugauggggcggacaucaaucucaugccuauauaa

SEQ ID NO: 48581 - RNA, 1410 nt, Artificial Sequence
  derived and/or modified CDS sequence (wt) from neuraminidase__InfluenzaA__ACI32806
augaauccaaaucaaaagauaauaacgauuggcucuguuucucucaccauuuccacaauaugcuucuucaugcaaauugccaucuugauaacuacuguaacauugcauuucaagcaauaugaauucaacucccccccaaacaaccaagugaugcugugugaaccaacaauaauagaaagaaacauaacagagauaguguaucugaccaacaccaccauagagaaggaaauaugccccaaacuagcagaauacagaaauuggucaaaaccgcaauguaacauuacaggauuugcaccuuuuucuaaggacaauucgauuaggcuuuccgcugguggggacaucugggugacaagagaaccuuaugugucaugcgauccugacaaguguuaucaauuugcccuuggacagggaacaacacuaaacaacgugcauucaaaugacacaguacaugauaggaccccuuaucggacccuauugaugaaugaguuagguguuccauuucaucuggggaccaagcaagugugcauagcaugguccagcucaaguugucacgauggaaaagcauggcugcauguuuguguaacgggggaugauaaaaaugcaacugcuagcuucauuuacaaugggaggcuuguagauaguauuguuucaugguccaaagaaauccucaggacccaggagucagaaugcguuuguaucaauggaacuuguacgguaguaaugacugaugggagugcuucaggaaaagcugauacuaaaauacuauucauugaggaggggaaaaucguucauacuagcacauugucaggaagugcucagcaugucgaggaguguuccugcuauccucgauauccuggugucagaugugucugcagagacaacuggaaaggcuccaauaggcccauaguagauauaaacauaaaggauuauagcauuguuuccaguuaugugugcucaggacuuguuggagacacacccagaaaaaacgacagcuccagcaguagccauugcuuggauccuaacaaugaagaagguggucauggagugaaaggcugggccuuugaugauggaaaugacguguggaugggaagaacgaucagcgagaaguuacgcucaggauaugaaaccuucaaagucauugaaggcugguccaacccuaauuccaaauugcagauaaauaggcaagucauaguugacagagguaauagguccgguuauucugguauuuucucuguugaaggcaaaagcugcaucaaucggugcuuuuauguggaguugauaaggggaagaaaagaggaaacugaagucuuguggaccucaaacaguauuguuguguuuuguggcaccucagguacauauggaacaggcucauggccugauggggcggauaucaaucucaugccuauauaa

SEQ ID NO: 48582 - RNA, 1410 nt, Artificial Sequence
  derived and/or modified CDS sequence (wt) from neuraminidase__InfluenzaA__ACI32807
augaauccaaaucaaaagauaauaacgauuggcucuguuucucucaccauuuccacaauaugcuucuucaugcaaauugccaucuugauaacuacuguaacauugcauuucaagcaauaugaauucaacucccccccaaacaaccaagugaugcugugugaaccaacaauaauagaaagaaacauaacagagauaguguaucugaccaacaccaccauagagaaggaaguaugccccaaacuagcagaauacagaaauuggucaaagccgcaaugugacauuacaggauuugcaccuuuuucuaaggacaauucgauuaggcuuuccgcugguggggacaucugggugacaagagaaccuuaugugucaugcgauccugacaaguguuaucaauuugcccuuggacagggaacaacacuaaacaacgugcauucaaaugacacaguacgugauaggaccccuuaucggacccuauugaugaaugaguuagguguuccuuuucaucuggggaccaagcaagugugcauagcauggucaagcucaaguugucacgauggaaaagcauggcugcauguuuguauaacgggggaugauaaaaaugcaacugcuagcuucauuuacaaugggaggcuuguagauaguauuguuucaugguccaaagaaauccucaggacccaggagucagaaugcguuuguaucaauggaacuuguacaguaguaaugacugaugggagugcuucaggaaaagcugauacuaaaauacuauucauugaggaggggaaaaucguucauacuagcacauugucaggaagugcucagcaugucgaggagugcuccugcuauccucgauauccuggugucagaugugucugcagagacaacuggaaaggcuccaauaggcccaucguagauauaaacauaaaggaucauagcauuguuuccaguuauguguguucaggacuuguuggagacacacccagaaaaaacgacagcuccagcaguagccauuguuuggauccuaacaaugaagaagguggucauggagugaaaggcugggccuuugaugauggaaaugacguguggaugggaagaacgaucagcgagaagucacgcuuaggauaugaaaccuucaaagucauugaaggcugguccaacccuaauuccaaauugcagauaaauaggcaagucauaguugacagagguaauaggucagguuauucugguauuuucucuguugaaggcaaaagcugcaucaaucggugcuuuuauguggaguugauaaggggaagaaaagaagaaacugaagucuuguggaccucaaacaguauuguuguguuuuguggcaccucagguacauauggaacaggcucauggccugauggggcggacaucaaucucaugccuauauaa

SEQ ID NO: 48583 - RNA, 1410 nt, Artificial Sequence
  derived and/or modified CDS sequence (wt) from neuraminidase__InfluenzaA__ACI32808
augaauccaaaucaaaagauaauaacgauuggcucuguuucucucaccauuuccacaauaugcuucuucaugcaaauugccaucuugauaacuacuguaacauugcauuucaagcaauaugaauucaacucccccccaaacaaccaagugaugcugugugaaccaacaauaauagaaagaaacauaacagagauaguguaucugaccaacaccaccauagagaaggaaauaugccccaaacuagcagaauacagaaauuggucaaagccgcaaugugacauuacaggauuugcaccuuuuucuaaggacaauucgauuaggcuuuccgcugguggggacaucugggugacaagagaaccuuaugugucaugcgauccugacaaguguuaucaauuugcccuuggacagggaacaacacuaaacaacgugcauucaaacgacacaguacaugauaggaccccuuaucggacccuauugaugaaugaguuagguguuccauuucaucuggggaccaagcaagugugcauagcaugguccagcucaaguugucacgauggaaaagcauggcugcauguuuguguaacaggggaugauaaaaaugcaacugcuagcuucauuuacaaugggaggcuuguagauaguguuguuucaugguccaaagauauccucaggacccaggagucagaaugcguuuguaucaauggaacuuguacaguaguaaugacugaugggagugcuucaggaaaagcugauacuaaaauacuauucauugaggaggggaaaaucguucauacuagcacauugucaggaagugcucagcaugucgaggagugcuccugcuauccucgauauccuggugucagaugugucugcagagacaacuggaaaggcuccaauaggcccauuguagauauaaacauaaagaauuauagcauuguuuccaguuaugugugcucaggacuuguuggagacacacccagaaaaaccgacagcuccagcaguagccauugcuuggauccuaacaaugaagaagguggucauggagugaaaggcugggccuuugaugauggaaaugacguguggaugggaagaacgaucagcgagaaguuacgcuuaggauaugaaaccuucaaagucauugaaggcugguccaacccuaauuccaaauugcagauaaauaggcaagucauaguugacagagguaauagguccgguuauucugguauuuucucuguugaaggcaaaagcugcaucaaucggugcuuuuauguggaguugauaaggggaagaaaagagaaaacugaagucuuguggaccucaaacaguauuguuguauuuuguggaaccucagguacauauggaacaggcucauggccugauggggcggacaucaaucucaugccuauauaa

SEQ ID NO: 48584 - RNA, 1410 nt, Artificial Sequence
  derived and/or modified CDS sequence (wt) from neuraminidase__InfluenzaA__ACI32809
augaauccaaaucaaaagauaauaacgauuggcucuguuucucucaccauuuccacaauaugcuucuucaugcaaauugccaucuugauaacuacuguaacauugcauuucaagcaauaugaauucaacucccccccaaacaaccaagugaugcugugugaaccaacaauaauagaaagaaacauaacagagauaguguaucugaccaacaccaccauagagaaggaaauaugccccaaacuagcagaauacagaaauuggucaaagccgcaaugugacauuacaggauuugcaccuuuuucuaaggacaauucgauuaggcuuuccgcugguggggacaucugggugacaagagaaccuuaugugucaugcgauccugacaaguguuaucaauuugcccuuggacagggaacaacacuaaacaacgugcauucaaacgacacaguacaugauaggaccccuuaucggacccuauugaugaaugaguuagguguuccauuucaucuggggaccaagcaagugugcauagcaugguccagcucaaguugucacgauggaaaagcauggcugcauguuuguguaacaggggaugauaaaaaugcaacugcuagcuucauuuacaaugggaggcuuguagauaguguuguuucaugguccaaagauauccucaggacccaggagucagaaugcguuuguaucaauggaacuuguacaguaguaaugacugaugggagugcuucaggaaaagcugauacuaaaauacuauucauugaggaggggaaaaucguucauacuagcacauugucaggaagugcucagcaugucgaggagugcuccugcuauccucgauauccuggugucagaugugucugcagagacaacuggaaaggcuccaauaggcccauuguagauauaaacauaaagaauuauagcauuguuuccaguuaugugugcucaggacuuguuggagacacacccagaaaaaccgacagcuccagcaguagccauugcuuggauccuaacaaugaagaagguggucauggagugaaaggcugggccuuugaugauggaaaugacguguggaugggaagaacgaucagcgagaaguuacgcuuaggauaugaaaccuucaaagucauugaaggcugguccaacccuaauuccaaauugcagauaaauaggcaagucauaguugacagagguaauagguccgguuauucugguauuuucucuguugaaggcaaaagcugcaucaaucggugcuuuuauguggaguugauaaggggaagaaaagaggaaacugaagucuuguggaccucaaacaguauuguuguauuuuguggaaccucagguacauauggaacaggcucauggccugauggggcggacaucaaucucaugccuauauaa

SEQ ID NO: 48585 - RNA, 1410 nt, Artificial Sequence
  derived and/or modified CDS sequence (wt) from neuraminidase__InfluenzaA__ACI32810
augaauccaaaucaaaagauaauaacgauuggcucuguuucucucaccauuuccacaauaugcuucuucaugcaaauugccaucuugauaacuacuguaacauugcauuucaagcaauaugaauucaacucccccccaaacaaccaagugaugcugugugaaccaacaauaauagaaagaaacauaacagagauaguguaucugaccaacaccaccauagagaaggaaauaugccccaaacuagcagaauacagaaauuggucaaagccgcaaugugacauuacaggauuugcaccuuuuucuaaggacaauucaauuaggcuuuccgcugguggggacaucugggugacaagagaaccuuaugugucaugcgauccugacaaguguuaucaauuugcccuuggacagggaacaacacuaaacaacgugcauucaaacgacacaguacaugauaggaccccucaucggacccuauugaugaaugaguuagguguuccauuucaucuggggaccaagcaagugugcauagcaugguccagcucaaguugucacgauggaaaagcauggcugcauguuuguguaacaggggaugauaaaaaugcaacugcuagcuucauuuacaauggaaggcuuguagauaguguuguuucaugguccaaagauauccucaggacccaggagucagaaugcguuuguaucaauggaacuuguacaguaguaaugacugaugggagugcuucaggaaaagcugauacuaaaauacuauucauugaggaggggaaaaucguucauacuagcacauugucaggaagugcucagcaugucgaggagugcuccugcuauccucgauauccuggugucagaugugucugcagagacaacuggaaaggcuccaauaggcccauuguagauauaaacauaaagaauuauagcauuguuuccaguuaugugugcucaggacuuguuggagacacacccagaaaaaccgacagcuccagcaguagccauugcuuggauccuaacaaugaagaagguggucauggagugaaaggcugggccuuugaugauggaaaugacguguggaugggaagaacgaucagcgagaaguuacgcuuaggauaugaaaccuucaaagucauugaaggcugguccaacccuaauuccaaauugcagauaaauaggcaagucauaguugacagagguaauagguccgguuauucugguauuuucucuguugaaggcaaaagcugcaucaaucggugcuuuuauguggaguugauaaggggaagaaaagaggaaacugaagucuuguggaccucaaacaguauuguuguauuuuguggaaccucagguacauauggaacaggcucauggccugauggggcggacaucaaucucaugccuauauaa

SEQ ID NO: 48586 - RNA, 1410 nt, Artificial Sequence
  derived and/or modified CDS sequence (wt) from neuraminidase__InfluenzaA__ACI32811
augaauccaaaucaaaagauaauaacgauuggcucuguuucucucaccauuuccacaauaugcuucuucaugcaaauugccaucuugauaacuacuguaacauugcauuucaagcaauaugaauucaacucccccccaaacaaccaagugaugcugugugaaccaacaauaauagaaagaaacauaacagagauaguguaucugaccaacaccaccauagagaaggaaauaugccccaaacuagcagaauacagaaauuggucaaaaccgcaauguaacauuacaggauuugcaccuuuuucuaaggacaauucgauuaggcuuuccgcugguggggacaucugggugacaagagaaccuuaugugucaugcgauccugacaaguguuaucaauuugcccuuggacagggaacaacacuaaacaacgugcauucaaaugacacaguacaugauaggaccccuuaucggacccuauugaugaaugaguuagguguuccauuucaucuggggaccaagcaagugugcauagcaugguccagcucaaguugucacgauggaaaagcauggcugcauguuuguguaacgggggaugauaaaaaugcaacugcuagcuucauuuacaaugggaggcuuguagauaguauuguuucaugguccaaagaaauccucaggacccaggagucagaaugcguuuguaucaauggaacuuguacaguaguaaugacugaugggagugcuucaggaaaagcugauacuaaaauacuauucauugaggaggggaaaaucguucauacuagcacauugucaggaagugcucagcaugucgaggaguguuccugcuauccucgauauccuggugucagaugugucugcagagacaacuggaaaggcuccaauaggcccauaguagauauaaacauaaaggauuauagcauuguuuccaguuaugugugcucaggacuuguuggagacacacccagaaaaaacgacagcuccagcaguagccauugcuuggauccuaacaaugaagaagguggucauggagugaaaggcugggccuuugaugauggaaaugacguguggaugggaagaacaaucagcgagaaguuacgcucaggauaugaaaccuucaaagucauugaaggcugguccaacccuaaguccaaauugcagauaaauaggcaagucauaguugacagagguaauagguccgguuauucugguauuuucucuguugaaggcaaaagcugcaucaaucggugcuuuuauguggaguugauaaggggaagaaaagaggaaacugaagucuuguggaccucaaacaguauuguuguguuuuguggcaccucagguacauauggaacaggcucauggccugauggggcugauaucaaucucaugccuauauaa

SEQ ID NO: 48587 - RNA, 1410 nt, Artificial Sequence
  derived and/or modified CDS sequence (wt) from neuraminidase__InfluenzaA__ACI32812
augaauccaaaucaaaagauaauaacgauuggcucuguuucucucaccauuuccacaauaugcuucuucaugcaaauugccaucuugauaacuacuguaacauugcauuucaagcaauaugaauucaacucccccccaaacaaccaagugaugcugugugaaccaacaauaauagaaagaaacauaacagagauaguguaucugaccaacaccaccauagagaaggaaauaugccccaaacuagcagaauacagaaauuggucaaagccgcaaugugacauuacaggauuugcaccuuuuucuaaggacaauucgauuaggcuuuccgcugguggggacaucugggugacaagagaaccuuaugugucaugcgauccugacaaguguuaucaauuugcccuuggacagggaacaacacuaaacaacgugcauucaaacgacacaguacaugauaggaccccuuaucggacccuauugaugaaugaguuagguguuccauuucaucuggggaccaagcaagugugcauagcaugguccagcucaaguugucacgauggaaaagcauggcugcauguuuguguaacaggggaugauaaaaaugcaacugcuagcuucauuuacaaugggaggcuuguagauaguguuguuucaugguccaaagauauccucaggacccaggagucagaaugcguuuguaucaauggaacuuguacaguaguaaugacugaugggagugcuucaggaaaagcuaauacuaaaauacuauucauugaggaggggaaaaucguucauacuagcacauugucaggaagugcucagcaugucgaggagugcuccugcuauccucgauauccuggugucagaugugucugcagagacaacuggaaaggcuccaauaggcccauuguagauauaaacauaaagaauuauagcauuguuuccaguuaugugugcucaggacuuguuggagacacacccagaaaaaccgacagcuccagcaguagccauugcuuggauccuaacaaugaagaagguggucauggagugaaaggcugggccuuugaugauggaaaugacguguggaugggaagaacgaucagcgagaaguuacgcuuaggauaugaaaccuucaaagucauugaaggcugguccaacccuaauuccaaauugcagauaaauaggcaagucauaguugacagagguaauagguccgguuauucugguauuuucucuguugaaggcaaaagcugcaucaaucggugcuuuuauguggaguugauaaggggaagaaaagaagaaacugaagucuuguggaccucaaacaguauuguuguauuuuguggaaccucagguacauauggaacaggcucauggccugauggggcggacaucaaucucaugccuauauaa

SEQ ID NO: 48588 - RNA, 1410 nt, Artificial Sequence
  derived and/or modified CDS sequence (wt) from neuraminidase__InfluenzaA__ACI32814
augaauccaaaucaaaagauaauaacgauuggcucuguuucucucaccauuuccacaauaugcuucuucaugcaaauugccaucuugauaacuacuguaacauugcauuucaagcaauaugaauucaacucccccccaaacaaccaagugaugcugugugaaccaacaauaauagaaagaaacauaacagagauaguguaucugaccaacaccaccauagagaaggaaauaugccccaaacuagcagaauacagaaauuggucaaagccgcaauguaacauuacaggauuugcaccuuuuuccaaggacaauucgauuaggcuuuccgcugguggggacaucugggugacaagagaaccuuaugugucaugcgauccugacaaguguuaucaauuugcccuuggacagggaacaacacuaaacaacgugcauucaaaugacacaguacgugauaggaccccuuaucggacccuauugaugaaugaguuagguguuccauuucaucuggggaccaagcaagugugcauagcaugguccagcucaaguugucacgauggaaaagcauggcugcauguuuguguaacgggggaugauaaaaaugcaacugcuagcuucauuuacaaugggaggcuuguagauaguauuguuucaugguccaaagaaauccucaggacccaggagucagaaugcguuuguaucaauggaacuuguacaguaguaaugacugaugggagugcuucaggaaaagcugauacuaaaauacuauucauugaggaggggaaaaucguucauacuagcacauugucaggaagugcucagcaugucgaggagugcuccugcuauccucgauauccuggugucagaugugucugcagagacaacuggaaaggcuccaauaggcccauaguagauauaaacauaaaggauuauagcauuguuuccaguuaugugugcucaggacuuguuggagacacacccagaaaaaacgacagcuccagcaguagccauuguuuggauccuaacaaugaagaagguggucauggagugaaaggcugggccuuugaugauggaaaugacguguggaugggaagaacgaucagcgagaaguuacgcucaggauaugaaaccuucaaagucauugaaggcugguccaacccuaauuccaaauugcagauaaauaggcaagucauaguugacagagguaauagguccgguuauucugguauuuucucuguugaaggcaaaagcugcaucaaucggugcuuuuauguggaguugauaaggggaagaaaagaggaaacugaagucuuguggaccucaaacagcauuguuguguuuuguggcaccucagguacauauggaacaggcucauggccugauggggcggacaucaaucucaugccuauauaa

SEQ ID NO: 48589 - RNA, 1350 nt, Artificial Sequence
  derived and/or modified CDS sequence (wt) from neuraminidase__InfluenzaA__ACJ53848
augaauccaaaucagaagauaauaaccaucggaucaaucuguaugguaauuggaauaguuagcuuaauguuacaaauugggaacaugaucucaauaugggucagucauucaauucagacagggaaucaaugccaagcugaaccaaucagcaauacuaaauuucuuacugagaaagcuguggcuucagugacauuagcgggcaauucaucucuuugucccauuagcggaugggcuguauacaguaaggacaacaguauaaggaucggcuccaggggggauguauuuguuauaagagagccguucaucucaugcucccacuuggaaugcagaacuuucuuuuugacucagggagccuugcugaaugacaagcacuccaaugggacugucaaagacagaagcccucacagaacauuaaugaguuguccugugggugaggcucccuccccauauaacucaagguuugagucuguugcuuggucagcaagugcuugccaugauggcaccaguugguugacaauuggaauuucugguccagacaauggggcuguggcuguauugaaguacaauggcauaauaacagacaccaucaagaguuggaggaacaacauacugagaacucaagagucugaaugugcauguguaaauggcucuugcuuuacuguaaugacugauggaccaaguaguggccaggcaucauauaagaucuucaaaauggaaaaggggaaagugguuaaaucagucgaauuggaugcuccuaauuaucacuaugaggagugcuccuguuauccugaugccggcgaaaucacaugugugugcagggauaauuggcauggcucaaauaggccauggguaucuuucaaucaaaauuuggaguaucaaauaggauauauaugcaguggaguuuucggagacaauccacgccccaaugauggaacagguaguugugguccgguguccccuaacggggcauaugggguaaaaggguuuucauuuaaauacggcaaugguguuuggaucgggagaaccaaaagcacuaauuccaggagcggcuuugagaugauuugggacccaaauggguggacuggaacggacaguagcuuuucggugaagcaagauaucguagcaauaacugauuggucaggauauagcgggaguuuuguccagcauccagaacugacaggauuagauugcauaagaccuuguuucuggguugaguuaaucagagggcggccuaaagagagcacaauuuggaccaguggaagcagcauaucuuuuugugguguaaauagugacacuguuaguuggucuuggccagacggugcugaguugccauucaccauugacaaguag

SEQ ID NO: 48590 - RNA, 1350 nt, Artificial Sequence
  derived and/or modified CDS sequence (wt) from neuraminidase__InfluenzaA__ACJ53849
augaauccaaaucagaagauaauaaccaucggaucaaucuguaugguaauuggaauaguuagcuuaauguuacaaauugggaacaugaucucaauaugggucagucauucaauucagacagggaaucaaugccaagcugaaccaaucagcaauacuaaauuucuuacugagaaagcuguggcuucaguaacauuagcgggcaauucaucucuuugucccauuagcggaugggcuguauacaguaaggacaacaguauaaggaucgguuccaggggggauguguuuguuauaagagagccguucaucucaugcucccacuuggaaugcagaacuuucuuuuugacucagggagccuugcugaaugacaagcacuccaaugggacugucaaagacagaagcccucacagaacauuaaugaguuguccugugggugaggcucccuccccauauaacucaagguuugagucuguugcuuggucagcaagugcuugccaugauggcaccaguugguugacaauuggaauuucugguccagacaauggggcuguggcuguauugaaauacaauggcauaauaacagacaccaucaagaguuggaggaacaacauacugagaacucaagagucugaaugugcauguguaaauggcucuugcuuuacuguaaugacugauggaccaaguagugggcaggcaucauauaagaucuucaaaauggaaaaggggaaagugguuaaaucagucgaauuggaugcuccuaauuaucacuacgaggagugcuccuguuauccugaugccggcgaaaucacaugugugugcagggauaauuggcauggcucaaauaggccauggguaucuuucaaucaaaauuuggaguaucaaauaggauauauaugcaguggaguuuucggagacaauccacgccccaaugauggaacagguaguuguaguccgguguccccuaacggggcauaugggguaaaaggguuuucauuuaaauacggcaaugguguuuggaucgggagaaccaaaagcacuaauuccaggagcggcuuugaaaugauuugggacccaaauggguggacuggaacggacaguagcuuuucggugaagcaagauaucguagcaauaacugauuggucaggauauagcgggaguuuuguccagcauccagaacugacaggauuagauugcauaagaccuuguuucuggguugaguuaaucagagggcggccuaaagagagcacaauuuggaccaguggaagcagcauaucuuuuugugguguaaauagugacacuguuaguuggucuuggccagacggugcugaguugccauucaccauugacaaguag

SEQ ID NO: 48591 - RNA, 1350 nt, Artificial Sequence
  derived and/or modified CDS sequence (wt) from neuraminidase__InfluenzaA__ACJ53853
augaauccaaaucagaagauaauaaccaucggaucaaucuguaugguaauuggaauaguuagcuuaauguuacaaauugggaacaugaucucaauaugggucagucauucaauucagacagggaaucaaugccaagaugaaccaaucagcaacacuaaauuucuuacugagaaagcuguggcuucaguaacauuagcgggcaauucaucucuuugucccauuagcggaugggcuguauacaguaaggacaacaguauaaggaucgguuccaggggggauguguuuguuauaagagagccguucaucucaugcucccacuuggaaugcagaacuuucuuuuugacucagggagccuuacugaaugacaagcacuccaaugggacugucaaagacagaagcccucacagaacauuaaugaguuguccugugggugaggcucccuccccauauaacucaagguuugagucuguugcuuggucagcaagugcuugccaugauggcaccaguugguugacaauuggaauuucugguccagacaauggggcuguggcuguauugaaauauaauggcauaauaacagacaccaucaagaguuggaggaacaacauacugagaacucaagagucugaaugugcauguguaaauggcucuugcuuuacuguaaugacugauggaccaaguagugggcaggcaucauauaagaucuucaaaauggaaaaggggaaagugguuaaaucagucgaauuggaugcuccuaauuaucacuaugaggagugcuccuguuauccugaugccggcgaaaucacaugugugugcagggauaauuggcauggaucaaauaggccauggguaucuuucaaucaaaauuuggaguaucaaauaggauauauaugcaguggaguuuuuggagacaauccacgccccaaugauggaacagguaguugugguccgguguucccuaacggggcauaugggguaaaaggguuuucauuuaaauacggcaaugguguuuggaucgggagaaccaaaagcacuaauuccaggagcggcuuugaaaugauuugggacccaaauggguggacuggaacggacaguagcuuuucggugaagcaagauaucguagcaauaacugauuggucaggauauagcgggaguuuuguccagcauccagaacugacaggauuagauugcauaagaccuuguuucuggguugaguuaaucagagggcggccuaaagagagcacaauuuggaccaguggaagcagcauaucuuuuugugguguaaauagugacacuguuaguuggucuuggccagacggugcugaguugccauucaccauugacaaguag

SEQ ID NO: 48592 - RNA, 1350 nt, Artificial Sequence
  derived and/or modified CDS sequence (wt) from neuraminidase__InfluenzaA__ACJ53866
augaauccaaaucagaagauaauaaccaucggaucaaucuguaugguaauuggaauaguuagcuuaauguuacaaauugggaacaugaucucaauaugggucagccauucaauucagacaggaaaucaaugccaagaugaaccaaucagcaacacuaaauuucuuacugagaaagcuguggcuucaguaacauuagcgggcaauucaucucuuugucccauuagcggaugggcuguauacaguaaggacaacaguauaaggaucgguuccaggggagauguguuuguuauaagagagccguucaucucaugcucccacuuggaaugcagaacuuucuuuuugacucagggagccuuacugaaugacaagcacuccaaugggacugucaaagacagaagcccucacagaacauuaaugaguuguccugugggugaggcucccuccccauauaacucaagguuugagucuguugcuuggucagcaagugcuugccaugauggcaccaguugguugacaauuggaauuucugguccagacaauggggcuguggcuguauugaaauacaauggcauaauaacagacaccaucaagaguuggaggaacaacauacugagaacucaagagucugaaugugcauguguaaauggcucuugcuuuacuguaaugacugauggaccaaguagugggcaggcaucauauaagaucuucaaaauggaaaaggggaaaguggucaaaucagucgaauuggaugcuccuaauuaucacuaugaggagugcuccuguuauccugaugccggcgaaaucacaugugugugcagggauaauuggcauggaucaaauaggccauggguaucuuucaaucaaaauuuggaauaucaaauaggauauauaugcaguggaguuuucggagacaauccacgccccaaugauggaacagguaguugugguccgguguucccuaacggggcauaugggguaaaaggguuuucguuuaaauacggcaaugguguuuggaucgggagaaccaaaagcacuaauuccaggagcggcuuugaaaugauuugggaccccaauggguggacuggaacggacaguagcuuuucggugaagcaagauaucguagcaauaacugauuggucaggauauagcgggaguuucguccagcauccagaacugacaggauuagauugcauaagaccuuguuucuggguugaguuaaucagagggcggccuaaagagagcacaauuuggaccaguggaagcagcauaucuuuuugugguguaaauagugacacuguuaguuggucuuggccagacggugcugaguugccauucaccauugacaaguag

SEQ ID NO: 48593 - RNA, 1350 nt, Artificial Sequence
  derived and/or modified CDS sequence (wt) from neuraminidase__InfluenzaA__ACJ53867
augaauccaaaucagaagauaauaaccaucggaucaaucuguauggcaauuggaauaguuagcuuaauguuacaaauugggaacaugaucucacuaugggucagucauucaauucagacagggaaucaaugccaagcugaaccaauuagcaauacuaaauuucuuacugagaaagcuguggcuucaguaacauuagcgggcaauucaucucuuugucccauuagcggaugggcuguauacaguaaagacaacaguauaaggaucgguuccaggggggauguguuuguuauaagagagccguucaucucaugcucccacuuggaaugcagaacuuucuuuuugacucagggagccuugcugaaugacaagcacuccaaugggacugucaaagacagaagcccucacagaacauuaaugaguuguccugugggugaggcucccuccccauauaacucaagguuugagucuguugcuuggucagcaagugcuugccaugauggcaccaguugguugacaauuggaauuucugguccagacaauggggcuguggcuguauugaaauacaauggcauaauaacagacaccaucaagaguuggaggaacaacauacugagaacacaagagucugaaugugcauguguaaaugguucuugcuucacuguaaugacugauggaccaaguagugggcaggcaucauauaagaucuucaaaauggaaaaggggaaagugguuaaaucagucgaauuggaugcuccuaauuaucacuaugaggagugcuccuguuauccugaugccggcgaaaucacaugugugugcagggauaauuggcauggcucaaauaggccauggguaucuuucaaucaaaauuuggaguaucaaauaggauauauaugcaguggaguuuucggagacaauccacgccccaaugauggaacagguaguugcgguccgguguccccuaacggggcauaugggguaaaaggguuuucauuuaaauacggcaaugguguuuggaucgggagaaccaaaagcacuaauucuaggagcggcuuugaaaugauuugggacccaaauggguggacuggaacggacaguagcuuuucggugaagcaagauaucguagcaauaacugauuggucaggauauagcgggaguuuuguccagcauccagaacugacaggauuagauugcauaagaccuuguuucuggguugaguuaaucagagggcggccuaaagagagcacaauuuggacuaguggaagcagcauaucuuuuugugguguaaauagugacacuguuaguuggucuuggccagacggugcugaguugccauucaccauugacaaguag

SEQ ID NO: 48594 - RNA, 1350 nt, Artificial Sequence
  derived and/or modified CDS sequence (wt) from neuraminidase__InfluenzaA__ACJ53875
augaauccaaaucagaagauaauaaccaucggaucaaucuguaugguaauuggaauaguuagcuuaauguuacagauugggaacaugaucucaauaugggucagucauucaauucagacagggaaucaaugccaagcugaaccgaucagcaauacuaaauuucuuacugagaaagcuguggcuucaguaacauuagcgggcaauucaucucuuugucccauuagcggaugggcuguauacaguaaggacaacaguauaaggaucgguuccaggggggauguguuuguuauaagagagccguucaucucaugcucccacuuggaaugcagaacuuucuuuuugacucagggagccuugcugaaugacaagcacuccaaugggacugucaaagacagaagcccucacagaacauuaaugaguuguccugugggugaggcucccuccccauauaacucaagguuugagucuguugcuuggucagcuagugcuugccaugauggcaucaguugguugacaauuggaauuucugguccagacaauggggcuguagcuguauugaaauacaauggcauaauaacagacaccaucaagaguuggaggaacaacauacuaagaacucaagaaucugaaugugcauguguaaauggcucuugcuuuacuguaaugacugauggaccaaguagugggcaggcaucauauaagaucuucaaaauggaaaaaggaaaagugguuaaaucagucgaauuggaagcuccuaauuaucacuaugaggagugcuccuguuauccugaugccggcgaaaucacauguguguguagggauaauuggcauggcucaaauaggccauggguaucuuucaaucaaaaucuggaguaucaaauaggauauauaugcaguggaguuuucggagacaauccacgccccaaugauggaacagguaguugugguccaguguccccuaacggggcauaugggguaaaaggguuuucauuuaaauacggcaaugguguuuggaucgggagaaccaaaagcacuaauuccaggagcggcuuugaaaugauuugggacccaaauggguggacuggaacggacaguagcuuuucggugaagcaagauaucguagcaauaacugauuggucaggauauagugggaguuuuguccagcauccagaacugacaggauuagauugcauaagaccuuguuucuggguugaguuaaucagagggcggccuaaagagagcacaauuuggaccaguggaagcagcauauccuuuugugguguaaauagugacacuguuaguuggucuuggccagacggugcugaguugccauucaccauugacaaguag

SEQ ID NO: 48595 - RNA, 1350 nt, Artificial Sequence
  derived and/or modified CDS sequence (wt) from neuraminidase__InfluenzaA__ACJ53876
augaauccaaaucagaagauaauaaccaucggaucaaucuguaugguaauuggaauaguuagcuuaauguuacaaauugggaacauaaucucaauaugggucagucauucaauucagacagggaaucaaugccaagcugaaccaaucagcaauacuaaauuucuuacugagaaagcuguggcuucaguaacauuagcgggcaauucaucucuuugucccauuagcggaugggcuguauacaguaaggacaacaguauaaggaucgguuccaggggggauguguuuguuauaagagagccguucaucucaugcucccacuuggaaugcagaacuuucuuuuugacucagggagccuugcugaaugacaagcacuccaauggaacugucaaagacagaagcccucacagaacauuaaugaguuguccugugggugaggcucccuccccauauaacucaagguuugagucuguugcuuggucagcaagugcuugccaugauggcaccaguugguugacaauuggaauuucugguccagacaauggggcuguggcuguauugaaauacaauggcauaauaacagacaccaucaagaguuggaggaacaacauacugagaacucaagagucugaaugugcauguguaaauggcucuugcuuuacuguaaugacugauggaccaaguagugggcaggcaucauauaagaucuucaaaauggaaaaggggaaagugguuaaaucagucgaauuggaugcuccuaauuaucacuaugaggagugcuccuguuauccugaugccggcgaaaucacaugugugugcagggauaauuggcauggcucaaauaggccauggguaucuuucaaucaaaauuuggaguaucaaauaggauauauaugcaguggaguuuucggagacaauccacgccccaaugauggaacagguaguugugguccgguguccccuaacggggcauauggaguaaaaggguuuucauuuaaauacggcaaugguguuuggaucgggagaaccaaaagcacuaauuccaggagcggcuuugaaaugauuugggacccaaauggguggacuggaacggacaguagcuuuucggugaagcaagauaucguagcaauaacugauuggucaggauauagcgggaguuuuguccagcauccagaacugacaggauuagauugcauaagaccuugcuucuggguugaguuaaucagagggcggccuaaagagagcacaauuuggaccaguggaagcagcauaucuuuuugugguguaaauagcgacacuguugguuggucuuggccagacggugcugaguugccauucaccauugacaaguag

SEQ ID NO: 48596 - RNA, 1404 nt, Artificial Sequence
  derived and/or modified CDS sequence (wt) from neuraminidase__InfluenzaA__ACJ67535
augaauccaaaucaaaagauaauagcacuuggcucuguuucuauaacuauugcgacaauauguuuaaucaugcagauugccgucuuagcaacgacuaugacacuacauuucaacgaaugcaccaacccaucgaacaaucaagcaaugccaugugaaccaaucauaauagaaaggaacaugacagagauagugcauuugaauaauacuaccauagagaaggaaaguuguccuaaaguagcagaauacaagaauuggucaaaaccgcaaugucaaauuacaggguucgccccuuucuccaaggacaacucaauuaggcuuucugcaggcggggauauuugggugacaagagaaccuuauguaucgugcggucuugguaacuguuaccaauuugcacuugggcagggaaccacuuugaacaacaaacacucaaaugacacaauacaugauaggaguccccauagaacccuuuuaaugaacgaguuagguguuccauuucauuugggaaccaaacaagugugcauagcaugguccagcucaagcugccaugaugggaaagcaugguuacauguuugugucacuggggaugauagaaaugcgacugcuagcaucauuuaugaugggaugcuuaccgacaguauugguucauggucuaagaacauccucagaacucaggagucagaaugcguuugcaucaauggaacuuguacaguaguaaugacugauggaagugcaucaggaagggcugauacuaaaauacuauucauuagagaagggaaaauuguccacauuaguccacugucaggaagugcucaacauguggaggaaugcuccuguuacccccgguauccagaaguuagauguguuugcagagacaauuggaagggcuccaauagacccgugcuauauauaaauguggcagauuauaguguugauucuaguuaugugugcucaggacuuguuggcgacacaccaagaaaugacgauagcuccagcagcaguaacugcagggaucccaauaacgagagagggggcccaggagugaaagggugggccuuugacaauggaaaugauguuuggaugggacgaacaaucaagaaagauucgcgcucugguuaugagacuuucagggucguuggugguuggacuacggcuaauuccaagucacaaauaaauaggcaagucauaguugacagugauaacuggucuggguauucugguauauucucuguugaaggaaaaaccugcaucaacagguguuuuuauguggaguugauaagagggagaccacaggagaccagaguaugguggacuucaaauagcaucauuguauuuuguggaacuucagguaccuauggaacaggcucauggccugauggagcgaauaucaauuucaugucuauauaa

SEQ ID NO: 48597 - RNA, 1410 nt, Artificial Sequence
  derived and/or modified CDS sequence (wt) from neuraminidase__InfluenzaA__ACK99424
augaauccaaaucaaaagauaauaacaauuggcucuguuucucucacuauugccacaauaugcuuccuuaugcaaauugccauccugguaacuacuguaacauugcauuucaagcaauaugagugcagcucccccccaaacaaccaaguaauuccaugucaaccaacaauaauagaaagaaacauaacagagauaguguauuugacuaacaccaccauagagaaagagauaugccccaaacuaguagaauacagaaauuggucaaagccgcaauguaaaauuacaggauuugcaccuuuuucuaaggacaauucaauucggcuuuccgcugguggagacauuugggugacaagagaaccuuaugugucaugcgauccuagcaaauguuaucaauuugcacuuggacagggaaccacacuaaacaacaggcauucaaaugacacaguacaugauaggaccccuuaucgaacccucuugaugaaugaguuggguguuccauuucauuugggaaccaagcaagugugcauagcaugguccagcucaaguugucacgauggaaaagcauggcugcauguuugugucacugggcaugaugaaaaugcaacugcuagcuucauuuacgaugggaggcuuguagauaguauugguucaugguccaaaaauauccucaggacccaggagucggaaugcguuuguaucaaugggacuuguacaguaguaaugacugauggaagugcuucagaaagagcugauacuaaaauacuauucauugaagaggggaaagucguucauauuagcccauugucaggaagugcucagcauguagaggagugcuccuguuauccucgauauccuggugucagaugugucugcagagacaacuggaaaggcuccaauaggcccaucguagauauaaaugugaaagauuauagcauuguuuccaguuaugugugcucagggcuuguuggagacacacccagaaaaaacgacagcuccagcaguagcuauugccggaauccuaacaaugagaaagggagucauggagugaaaggcugggccuuugacgauggaaaugacguguggaugggaagaacgaucagcgaggaguuacgcucagguuaugaaaccuucaaagucauuggagguugguccacaccuaauuccaaauugcagauaaauaggcaagucauaguugacagcgguaauagguccgguuauucugguauuuucucuguugaaggcaaaagcugcaucaaucggugcuuuuauguggaguugauaaggggaaggaaacaggaaacuaaagucugguggaccucaaacaguauuguuguguuuuguggcaccucagguacauauggaacaggcucauggccugauggggcggacaucaaucucaugccuauauaa

SEQ ID NO: 48598 - RNA, 1410 nt, Artificial Sequence
  derived and/or modified CDS sequence (wt) from neuraminidase__InfluenzaA__ACK99435
augaauccaaaucaaaagauaauaacaauuggcucugucucucucaccauugcaacaguaugcuuccucaugcagauugccauccugguaacuacuguaacauugcauuuuaagcaacaugagugcgacucccccgcgagcaaccaaguaaugccgugugaaccaauaauaauagaaaggaacauaacagagauaguguauuugaauaacaccaccauagagaaagagaucugccccgaaguaguggaauacagaaauuggucaaagccgcaaugucaaauuacaggauuugcaccuuuuucuaaggacaauucaauccggcuuucugcugguggggacauuugggugacgagagaaccuuaugugucaugcgauccuggcaaguguuaucaauuugcacucgggcaggggaccacacuagacaacaaacauucaaaugacacaauacaugauagaaucccucaucgaacccuauuaaugaaugaguuggguguuccauuucauuuaggaaccaggcaaguguguguagcaugguccagcucaaguugucacgauggaaaagcaugguugcauguuugugucacuggggaugauaaaaaugcaacugcuagcuucauuuaugacgggaggcuuauggacaguauugguucauggucucaaaauauccucaggacccaggagucggaaugcguuuguaucaaugggacuugcacaguaguaaugacugauggaagugcuucaggaagagccgauacuagaauacuauucauugaagaggggaaaauuguccauauuagcccauugucaggaagugcucagcauguagaggaguguuccuguuauccucgauauccugacgucagauguaucugcagagacaacuggaaaggcucuaauaggcccgucauagacauaaauauggaagauuauagcauugauuccaguuaugugugcucagggcuuguuggcgacacacccagaaacgacgacagaucuagcaauaguaauugcaggaauccuaacaaugagagaggaaauccaggagugaaaggcugggccuuugacaauggagaugacguguggaugggaagaacgaucagcaaggauuuacgcucagguuaugaaacuuucaaagucauuggugguugguccacaccuaauuccaaaucgcagaucaauagacaggucauaguugacagcaauaauuggucagguuacucugguauuuucucuguugagggcaaaagaugcaucaauaggugcuuuuauguggaguugauaaggggaaggcaacaggagacuagaguaugguggaccucaaacaguauuguuguguuuuguggcacuucagguacuuauggaacaggcucauggccugauggggcgaacaucaauuucaugccuauauaa

SEQ ID NO: 48599 - RNA, 1413 nt, Artificial Sequence
  derived and/or modified CDS sequence (wt) from neuraminidase__InfluenzaA__ACK99446
augaauccaaaucaaaaaauaauaaccauuggaucaaucaguauggcaaucggaauaauuagucuaacauugcaaauaggaaauauuauuucaauauggguuagccacucaauccaaacuggaagucaaaaccacacuggaauaugcaaccaaagaaucauuacauaugaaaauagcaccugggugaaucaaacauauguuaauauuaacaacacuaauguuguugcuggaaaggacaaaacuucagugacauuggccggcaauucaucucuuuguccuauccgugggugggcuauauacacaaaagacaacagcauaagaauugguuccaaaggagauguuuuugucauaagagaaccuuuuauaucauguucucacuuggaaugcagaaccuuuuuucugacccaaggugcucuauuaaaugacaagcauucaaaugggacuguuaaggacagaagcccucauagggccuuaaugagcuguccucuaggugaagcuccgucuccauacaauucaagguuugaaucaguugcuuggucagcaagcgcaugccaugauggcaugggcuggcuaacaaucggaauuucugguccagaugauggagcaguggcuguacuaaaauacaacggcauaauaacugaaaccauaaaaaguuggaagaagcgaauauuaagaacacaagagucugaaugugucuguguaaacgguucauguuuuaccauaaugaccgauggcccgaguaauggggccgccucguacagaaucuucaaaaucgagaaggggaagguuacuaaaucaauagaguuggaugcacccaauucucauuacgaggaauguuccuguuacccagacaccggcacagugaugugugugugcagggacaauuggcacgguucaaaucgaccuugggugucuuuuaaucaaaaccuggauuaucaaauaggauacaucugcagugggguguucggugacaauccgcgucccaaagauggaaaaggcagcuguaauccagugacuguugauggagcagacggaguaaagggguuuucauacagauaugguaaugguguuuggauaggaaggacuaaaaguaacagauucagaaagggauuugagaugauuugggauccuaauggauggacagauaccgacagugauuucucagugaaacaggauguaguggcaaugacugauuggucaggguacagcggaaguuucguucaacauccugagcuaacaggauuggacuguaugagaccuugcuucuggguugaauuagucagagggcggccuagagaaaauacaacaaucuggacuagugggagcagcauuucuuuuuguggcgugaauagcgauacugcaaacuggucuuggccagacggugccgaguugccguucaccauugacaaguag

SEQ ID NO: 48600 - RNA, 1410 nt, Artificial Sequence
  derived and/or modified CDS sequence (wt) from neuraminidase__InfluenzaA__ACK99457
augaauccaaaucaaaagauaauaacaauuggcucuguuucucucaccauugccacaauaugcuuccuuaugcaaauugccauccugguaacuacuguaacauugcauuucaagcaacaugagugcaacucccccccaaacaaccaaguaaugccgugugaaccaacaauaauagaaagaaacauaacagagauaguguauuugacuaacaccaccauagagaaagagauaugccccaaacuaguagaauacagaaauuggucaaagccgcaauguaaaauuacaggauuugcaccuuuuucuaaggacaauucaauucggcuuuccgcugguggagacauuugggugacaagagaaccuuaugugucaugcgauccuggcaaguguuaucaauuugcacuaggacagggaaccacacuaaacaacaggcauucaaaugacacaguacaugauaggaccccuuaucgaacccucuugaugaaugaguuggguguuccauuucauuugggaaccaagcaagugugcauagcaugguccagcucaaguugucacgauggaaaagcauggcugcauguuugugucacugggcaugaugaaaaugcaacugcuagcuucauuuacgaugggaggcuuguagauaguauuguuucaugguccaaaaauauccucaggacccaggagucggaaugcguuuguauaaauggaacuuguacaguaguaaugacugauggaagugcuucagaaagagcugauacuaaaauacuauucauugaagaggggaaaaucguucauauuagcccguugucaggaagugcucagcauguagaggagugcuccuguuauccucgauauccuggugucagaugugucugcagagacaacuggaaaggcuccaauaggcccaucguagauauaaaugugaaagauuauagcauuguuuccaguuaugugugcucagggcuuguuggagacacacccagaaaaaacgacagcuccagcaguagcuauugccggaauccuaacaaugagaaagggagccauggagugaaaggcugggccuuugacgauggaaaugacguguggaugggaagaacgaucggcgaggaguuacgcucagguuaugaaaccuucaaagucauuggaggcugguccacaccuaacuccaaauugcagacaaauaggcaagucauaguugacagagguaauagguccgguuauucugguauuuucucuguugaaggcaaaagcugcaucaaucggugcuuuuauguagaauugauaaggggaaggaaacaggaaacuaaagucugguggaccucaaacaguauuguuguguuuuguggcaccucagguacauauggaacaggcucauggccugauggggcggacaucaaucucaugccuauauaa

SEQ ID NO: 48601 - RNA, 1413 nt, Artificial Sequence
  derived and/or modified CDS sequence (wt) from neuraminidase__InfluenzaA__ACK99468
augaauccaaaucaaaaaauaauaaccauuggaucaaucaguauugcaauuggaauaauuagucugauauugcaaauaggaaauauuauuucaauaugggcuagccacucaauccaaacuggaagucaaaaccacacuggaauaugcaaccaaagaaucauuacauaugaaaauagcaccuggguaaaucaaacauauguuaauauuaacaacacuaauguuguugcuggaaaggacaaaaccucaaugacauuggccggcaauucaucucuuugcccuauccguggaugggcuauauacacaaaagacaacagcauaagaauugguuccaaaggagauguuuuugucauaagagagccuuuuauaucauguucucacuuggaaugcagaaccuuuuuucugacccaaggugcucuauuaaaugacaagcauucaaaugggaccguuaaggacagaagcccuuauagggccuuaaugagcuguccucuaggugaagcuccgucuccauacaauucaagauuugaaucaguugcuuggucagcaagcgcaugccaugauggcuugggcuggcuaacaaucggaauuucugguccagauaauggggcaguggcuguacuaaaauacaacggcauaauaacugaaaccauuaaaaguuggaagaagcgaauauuaagaacacaagagucugaaugugucuguaugaacaguucauguuuuaccauaaugaccgauggcccgaguaauggggccgcaucguacagaaucuucaaaaucgagaaggggagaguuacuaaaucaauagaguuggaugcacccaauuaucauuacgaagaauguucauguuacccagacaccggcacagugaugugugugugcagggacaauuggcacgguucaaaucgaccuugggugucuuuuaaucaaaaccuggauuaucaaauaggauacaucugcagugggguguucggugacaauccgcgucccaaagauggagaaggcagcuguaauccagugacuguugauggagcagacggaguaaagggguuuucauacagauaugguaaugguguuuggauaggaaggacuaaaaguaacagacucagaaagggauuugagaugauuugggauccuaauggauggacagauaccgacagugauuucucaaugaaacaggauaucguggcaaugacugauuggucaggguacagcggaaguuuuguucaacauccugagcuaacaggauuggacuguaugagaccuugcuucuggguugaauuagucagagggcuaccuagagaaaauacaacaaucuggacuagugggagcagcauuucuuuuuguggcguaaauagcgauacugcaaacuggucuuggccagacggugccgaguugccauucaccauugacaaguag

SEQ ID NO: 48602 - RNA, 1410 nt, Artificial Sequence
  derived and/or modified CDS sequence (wt) from neuraminidase__InfluenzaA__ACK99479
augaauccaaaucaaaagauaauaacgauuggcucuguuucucucacuauugccacaauaugcuuccuuaugcaaauugcaauccugguaacuacuguaacauugcauuucaagcaauaugaaugcaacucccccccaaacaaccaaguaaugcugugugaaccaacaauaauagaaagaaacauaacagagauaguguaucugaccaacaccaccauagagaaggaaauaugccccaaacuagcagaauacagaaauuggucaaagccgcaauguaaaauuacaggauuugcaccuuuuucuaaggacaauucaauucggcuuuccgcugguggggacauuugggugacaagagaaccuuaugugucaugcgauccugacaaguguuaucaauuugcccuuggacagggaacaacacuaaacaacaggcauucaaaugacacaguacaugauaggaccccuuaucgaacccuauugaugaaugaguuggguguuccauuucauuugggaaccaagcaagugugcauagcaugguccagcucaaguugucacgauggaaaagcauggcugcauguuuguguaacugggcaugaugaaaaugcaacugcuagcuucauuuacgaugggaggcuuguagauaguauugguucaugguccaaaaaaauccucaggacccaggagucggaaugcguuuguaucaauggaacuuguacaguaguaaugacugaugggagugcuucaggaagagcugauacuaaaauacuauucauugaggaggggaaaaucguucauauuagcccauuguuaggaagugcucagcaugucgaggagugcuccuguuauccucgauauccuggugucagaugugucugcagagacaacuggaaaggcuccaauaggcccaucguagauauaaauguaaaggauuauaguauuguuuccaguuaugugugcucaggacuuguuggagacacacccagaaaaaacgacagcuccagcaguagccauugccugaauccuaacaaugaggaagggggucauggagugaaaggcugggccuuugaugauggaaaugacguguggaugggaagaacgaucagcgagaaguuacgcucagguuaugaaaccuucaaagucauugaaggcugguccaaaccuaacuccaaauugcagauaaauaggcaagucauaguugacagagguaauagguccgguuauucugguauuuucucuguugaaggcaaaagcugcaucaaucggugcuuuuauguggaguugauaaggggaaggaaacaggaaacugaagucugguggaccucaaacaguauuguuguguuuuguggcaccucagguacauauggaacaggcucauggccugauggggcgaacaucaaucucaugccuauauaa

SEQ ID NO: 48603 - RNA, 1413 nt, Artificial Sequence; identical to SEQ ID NO: 48296
  derived and/or modified CDS sequence (wt) from neuraminidase__InfluenzaA__ACL12066

SEQ ID NO: 48604 - RNA, 1410 nt, Artificial Sequence
  derived and/or modified CDS sequence (wt) from neuraminidase__InfluenzaA__ACL12132
augaauccaaaucaaaagauaauaacaauuggcucuguuucucucacuauugccacaauaugcuuccuuaugcaaauugccauccugguaacuacuguaacauugcacuucaagcaauaugagugcaacucccccccaaacaaccaaguaaugcugugugaaccaacaauaauagaaagaaacauaacagagauaguguaucugaccaacaccaccauagagaaagaaauaugccccaaacuagcagaauacagaaauuggucaaagccgcaauguaaaauuacaggauuugcaccuuuuucuaaggacaauucaauucggcuuucagcugguggagacauuugggugacaagagaaccuuaugugucaugcgauccuggcaaguguuaucaauuugcccuuggacagggaacaacacuaaacaacaggcacucaaaugacacaguacaugauaggaccccuuaucgaacccuauugaugaaugaguuggguguuccauuucauuugggaaccaagcaagugugcauagcaugguccagcucaaguugucacgauggaaaagcauggcugcauguuuguguaacugggcaugaugaaaaugcaacugcuagcuucauuuacgaugggaggcuuguagauaguauugguucaugguccaaaaauauccucaggacccaggagucggaaugcguuuguaucaauggaacuuguacaguaguaaugacugauggaagugcuucagaaagagcugauacuaaaauacuauucauugaagaggggaaaaucguucauauuagcccauugucaggaagugcucagcaugucgaggagugcuccuguuauccucgauauccuggugucagaugugucugcagagacaacuggaaaggcuccaauaggcccaucguagauauaaaugugaaagauuauagcauuguuuccaguuaugugugcucaggacuuguuggagacacacccagaaaaaacgacagcuccagcaguagcuauugccggaauccuaacaaugagaaagggagucauggagugaaaggcugggccuuugaugauggaaaugacguguggaugggaagaacgaucagcgaggaguuacgcucagguuaugaaaccuucaaagucauuggaggcugguccaaaccuaacuccaaauugcagauaaauaggcaagucauaguugacagagguaauagguccgguuauucugguauuuucucuguugaaggcaaaagcugcaucaaucggugcuuuuauguggaguugauaaggggaaggaaacaggaaacugaagucugguggaccucaaacaguauuguuguguuuuguggcaccucagguacauauggaacaggcucauggccugauggggcggacaucaaucucaugccuauauaa

SEQ ID NO: 48605 - RNA, 1413 nt, Artificial Sequence; identical to SEQ ID NO: 48530
  derived and/or modified CDS sequence (wt) from neuraminidase__InfluenzaA__ACL12154

SEQ ID NO: 48606 - RNA, 1410 nt, Artificial Sequence
  derived and/or modified CDS sequence (wt) from neuraminidase__InfluenzaA__ACL12165
augaauccaaaucaaaagauaauaacgauuggcucuguuucucucaccauuuccacaauaugcuucuucaugcaaauugccaucuugauaacuaccguaacauugcauuucaagcaauaugaauucaacucccccccaaacaaccaagugaugcugugugaaccaacaauaauagaaagaaacauaacagagauaguguaucugaccaacaccaccauagagaaggaaauaugccccaaacuagcagaauacagaaauuggucaaagccgcaaugugacauuacaggauuugcaccuuuuucuaaggacaauucgauuaggcuuuccgcugguggggacaucugggugacaagagaaccuuaugugucaugcgauccugacaaguguuaucaauuugcccuuggacagggaacaacacuaaacaacgugcauucaaaugacacaguacgugauaggaccccuuaucggacccuauugaugaaugaguuagguguuccuuuucaucuggggaccaagcaagugugcauagcaugguccagcucaaguugucacgauggaaaagcauggcugcauguuuguauaacgggggaugauaaaaaugcaacugcuagcuucauuuacaaugggaggcuuguagauaguguuguuucaugguccaaagaaauccucaggacccaggagucagaaugcguuuguaucaauggaacuuguacaguaguaaugacugaugggagugcuucaggaaaagcugauacuaaaauacuauucauugaggaggggaaaaucguucauacuagcacauugucaggaagugcucagcaugucgaggagugcuccugcuauccucgauauccuggugucagaugugucugcagagacaacuggaaaggcuccaauaggcccaucguagauauaaacauaaaggaucauagcauuguuuccaguuauguguguucaggacuuguuggagacacacccagaaaaaacgacagcuccagcaguagccauuguuuggauccuaacaaugaagaagguggucauggagugaaaggcugggccuuugaugauggaaaugacguguggaugggaagaacgaucagcgagaagucacgcuuaggguaugaaaccuucaaagucauugaaggcugguccaacccuaaguccaaauugcagauaaauaggcaagucauaguugacagagguaauagguccgguuauucugguauuuucucuguugaaggcaaaagcugcaucaaucggugcuuuuauguggaguugauaaggggaagaaaagaggaaacugaagucuuguggaccucaaacaguauuguuguguuuuguggcaccucagguacauauggaacaggcucauggccugauggggcggacaucaaucucaugccuauauaa

SEQ ID NO: 48607 - RNA, 1410 nt, Artificial Sequence; identical to SEQ ID NO: 48606
  derived and/or modified CDS sequence (wt) from neuraminidase__InfluenzaA__ACL12176

SEQ ID NO: 48608 - RNA, 1410 nt, Artificial Sequence
  derived and/or modified CDS sequence (wt) from neuraminidase__InfluenzaA__ACL12198
augaauccaaaucaaaagauaauaacgauuggcucuguuucucucaccauuuccacaauaugcuucuucaugcaaauugccaucuugauaacuacuguaacauugcauuucaagcaauaugaauucaacuccaccccaaacaaccaagugaugcugugugaaccaacaauaauagaaagaaacauaacagagauaguguaucugaccaacaccaccauagagaaggaaauaugccccaaacuagcagaauacagaaauuggucaaagccgcaaugugacauuacaggauuugcaccuuuuucuaaggacaauucgauuaggcuuuccgcugguggggacaucugggugacaagagaaccuuaugugucaugcgauccugacaaguguuaucaauuugcccuuggacagggaacaacacuaaacaacgugcauucaaaugacacaguacgugauaggaccccuuaucggacccuauugaugaaugaguuagguguuccuuuucaucuggggaccaagcaagugugcauagcaugguccagcucaaguugucacgauggaaaagcauggcugcauguuuguauaacgggggaugauaaaaaugcaacugcuagcuucauuuacaaugggaggcuuguagauaguguuguuucaugguccaaagaaauccucaggacccaggagucagaaugcguuuguaucaauggaacuuguacaguaguaaugacugaugggagugcuucaggaaaagcugauacuaaaauacuauucauugaggaggggaaaaucguucauacuagcacauugucaggaagugcucagcaugucgaggagugcuccugcuauccucgauauccuggugucagaugugucugcagagacaacuggaaaggcuccaauaggcccaucguagauauaaacauaaaggaucauagcauuguuuccaguuauguguguucaggacuuguuggagacacacccagaaaaaacgacagcuccagcaguagccauuguuuggauccuaacaaugaagaagguggucauggagugaaaggcugggccuuugaugauggaaaugacguguggaugggaagaacgaucagcgagaagucacgcuuaggguaugaaaccuucaaagucauugaaggcugguccaacccuaaguccaaauugcagauaaauaggcaagucauaguugacagagguaauagguccgguuauucugguauuuucucuguugaaggcaaaagcugcaucaaucggugcuuuuauguggaguugauaaggggaagaaaagaggaaacugaagucuuguggaccucaaacaguauuguuguguuuuguggcaccucagguacauauggaacaggcucauggccugauggggcggacaucaaucucaugccuauauaa

SEQ ID NO: 48609 - RNA, 1410 nt, Artificial Sequence
  derived and/or modified CDS sequence (wt) from neuraminidase__InfluenzaA__ACL12209
augaauccaaaucaaaagauaauaacgauuggcucuguuucucucaccauuuccacaauaugcuucuucaugcaaauugccaucuugauaacuacuguaacauugcauuucaagcaauaugaauucaacucccccccaaacaaccaagugaugcugugugaaccaacaauaauagaaagaaacauaacagagauaguguaucugaccaacaccaccauagagaaggaaauaugccccaaacuagcagaauacagaaauuggucaaagccgcaaugugacauuacaggauuugcaccuuuuucuaaggacaauucgauuaggcuuuccgcugguggggacaucugggugacaagagaaccuuaugugucaugcgauccugacaaguguuaucaauuugcccuuggacagggaacaacacuaaacaacgugcauucaaaugacacaguucgugauaggaccccuuaucggacccuauugaugaaugaguuagguguuccuuuucaucuggggaccaagcaagugugcauagcaugguccagcucaaguugucacgauggaaaagcauggcugcauguuuguauaacgggggaugauaaaaaugcaacugcuagcuucauuuacaaugggaggcuuguagauaguauuguuucaugguccaaagaaauccucaggacccaggagucagaaugcguuuguaucaauggaacuuguacaguaguaaugacugaugggagugcuucaggaaaagcugauacuaaaauacuauucauugaggaggggaaaaucguucauacuagcacauugucaggaagugcucagcaugucgaggaaugcuccugcuauccucgauauccuggugucagaugugucugcagagacaacuggaaaggcuccaauaggcccaucguagauauaaacauaaaggaucauagcauuguuuccaguuacguguguucaggacuuguuggagacacacccagaaaaaacgacagcuccagcaguggccauuguuuggauccuaacaaugaagaagguggucauggagugaaaggcugggccuuugaugauggaaaugacguguggaugggaagaacgaucagcgagaagucacgcuuaggguaugaaaccuucaaagucauugaaggcugguccaacccuaaguccaaauugcagauaaauaggcaagucauaguugacagagguaauagguccgguuauucugguauuuucucuguugaaggcaaaagcugcaucaaucggugcuuuuauguggaguugauaaggggaagaaaagaggaaacugaagucuuguggaccucaaacaguauuguuguguuuuguggcaccucagguacauauggaacaggcucauggccugauggggcggacaucaaucucaugccuauauaa

SEQ ID NO: 48610 - RNA, 1410 nt, Artificial Sequence; identical to SEQ ID NO: 48526
  derived and/or modified CDS sequence (wt) from neuraminidase__InfluenzaA__ACL12220

SEQ ID NO: 48611 - RNA, 1410 nt, Artificial Sequence
  derived and/or modified CDS sequence (wt) from neuraminidase__InfluenzaA__ACL12242
augaauccaaaucaaaagauaauaacgauuggcucuguuucucucaccauuuccacaauaugcuucuucaugcaaauugccaucuugauaacuacuguaacauugcauuucaagcaauaugaauucaacucccccccaaacaaccaagugaugcugugugaaccaacaauaauagaaagaaacauaacagagauaguguaucugaccaacaccaccauagagaaggaaauaugccccaaacuagcagaauacagaaauuggucaaagccgcaaugugacauuacaggauuugcaccuuuuucuaaggacaauucgauuaggcuuuccgcugguggggacaucugggugacaagagaaccuuaugugucaugcgauccugacaaguguuaucaauuugcccuuggacagggaacaacacuaaacaacgugcauucaaauaacacaguacgugauaggaccccuuaucggacccuauugaugaaugaguuagguguuccuuuucaucuggggaccaagcaagugugcauagcaugguccagcucaaguugucacgauggaaaagcauggcugcauguuuguauaacgggggaugauaaaaaugcaacugcuagcuucauuuacaaugggaggcuuguagauaguguuguuucaugguccaaagaaauccucaggacccaggagucagaaugcguuuguaucaauggaacuuguacaguaguaaugacugaugggagugcuucaggaaaagcugauacuaaaauacuauucauugaggaggggaaaaucguucauacuagcacauugucaggaagugcucagcaugucgaggagugcuccugcuauccucgauauccuggugucagaugugucugcagagacaacuggaaaggcuccaauaggcccaucguagauauaaacauaaaggaucauagcauuguuuccaguuauguguguucaggacuuguuggagacacacccagaaaaaacgacagcuccagcaguagccauuguuuggauccuaacaaugaagaagguggucauggagugaaaggcugggccuuugaugauggaaaugacguguggaugggaagaacgaucagcgagaagucacgcuuaggguaugaaaccuucaaagucauugaaggcugguccaacccuaaguccaaauugcagauaaauaggcaagucauaguugacagagguaauagguccgguuauucugguauuuucucuguugaaggcaaaagcugcaucaaucggugcuuuuauguggaguugauaaggggaagaaaagaggaaacugaagucuuguggaccucaaacaguauuguuguguuuuguggcaccucagguacauauggaacaggcucauggccugauggggcggacaucaaucucaugccuauauaa

SEQ ID NO: 48612 - RNA, 1413 nt, Artificial Sequence
  derived and/or modified CDS sequence (wt) from neuraminidase__InfluenzaA__ACL12264
augaauccaaaucagaaaauaauaaccauuggaucaaucaguauggcaaucggaauaauuagccuaauauugcaaauaguaaauauuauuucaauauggguuagccacucaauccaaacuggaagucaaaaccacacuggaauaugcaaccaaagaaucauuacauaugaaaauagcaccuggguaaaucaaacauauguuaauauuaacaacacuaauguuguugcuggaaaggacaaaacuucagugacauuggccggcaauucaucucuuuguccuauccgugggugggcuauauacacaaaagacaacagcauaagaauugguuccaaaggagauguuuuugucauaagagaaccuuuuauaucauguucccacuuggaaugcagaaccuuuuuucugacccaaggugcucuauuaaaugacaagcauucaaaugggaccguuaaggacagaagcccuuauagggccuuaaugagcuguccucuaggugaagcuccgucuccauacaauucaagguuugaaucaguugcuuggucagcaagcgcaugccaugauggcaugggcuggcuaacaaucggaauuucugguccagaugauggagcaguggcuguacuaaaauacaacggcauaauaacugaaaccauaaaaaguuggaagaagcgaauauuaagaacacaagagucugaaugugucuguguaaacgguucauguuuuaccauaaugaccgauggcccgaguaauggggccgccucguacagaaucuucaaaaucgagaaggggaagguuacuaaaucaauagaguuggaugcacccaauucucauuacgaggaauguuccuguuacccagacaccggcacagugaugugugugugcagagacaauuggcaugguucaaaucgaccuugggugucuuuuaaucaaaaccuggauuaucaaauaggauacaucugcagugggguguucggugacaauccgcgucccaaagauggaaaaggcagcugugauccagugacuguugauggagcagacggaguaaagggguuuucauacagauaugguaaugguguuuggauaggaaggaccaaaaguaacagauucagaaagggauuugagaugauuugggauccuaauggauggacagauaccgacagugauuucucagugaaacaggauguaguggcaaugacugauuggucaggguauagcggaaguuucguucaacauccugagcuaacaggauuggacuguaugagaccuugcuucuggguugaauuagucagagggcggccuagagaaaauacaacaaucuggacuagugggagcagcauuucuuuuuguggcgugaauagugauacugcaaacuggucuuggccagacggugccgaguugccauucaccaucgacaaguag

SEQ ID NO: 48613 - RNA, 1410 nt, Artificial Sequence; identical to SEQ ID NO: 48598
  derived and/or modified CDS sequence (wt) from neuraminidase__InfluenzaA__ACN32275

SEQ ID NO: 48614 - RNA, 1410 nt, Artificial Sequence
  derived and/or modified CDS sequence (wt) from neuraminidase__InfluenzaA__ACN32286
augaauccaaauaaaaagauaauaacgauuggcucuguuucucucaccauuuccacaauaugcuucuucaugcaaauugccaucuugauaacuacuguaacauugcauuucaagcaauaugaauucaacucccccccaaacaaccaagugaugcugugugaaccaacaauaauagaaagaaacauaacggagauaguguaucugaccaacaccaccauagagaaggaaauaugccccaaacuagcagaauacagaaauuggucaaagccgcaaugugacauuacaggauuugcaccuuuuucuaaggacaauucgauuaggcuuuccgcugguggggacaucugggugacaagagaaccuuaugugucaugcgauccugacaaguguuaucaauuugcccuuggacagggaacaacacuaaacaacgugcauucaaaugacacaguacgugauaggaccccuuaucggacccuauugaugaaugaguuagguguuccuuuucaucuggggaccaagcaagugugcauagcaugguccagcucaaguugucacgauggaaaagcauggcugcauguuuguauaacgggggaugauaaaaaugcaacugcuagcuucauuuacaaugggaggcuuguagauaguauuguuucaugguccaaagaaauccucaggacccaggagucagaaugcguuuguaucaauggaacuuguacaguaguaaugacugaugggagugcuucaggaaaagcugauacuaaaauacuauucauugaggaggggaaaaucguucauacuagcacauuguuaggaagugcucagcaugucgaggaaugcuccugcuauccucgauauccuggugucagaugugucugcagagacaacuggaaaggcuccaauaggcccaucguagauauaaacauaaaggaucauagcauuguguccaguuauguguguucaggacuuguuggagacacacccagaaaaaacgacagcuccagcaguggccauuguuuggauccuaacaaugaagaagguggucauggagugaaaggcugggccuuugaugauggaaaugacguguggaugggaagaacgaucagcgagaagucacgcuuaggguaugaaaccuucaaagucauugaaggcugguccaacccuaaguccaaauugcagauaaauaggcaagucauaguugacagagguaauagguccgguuauucugguauuuucucuguugaaggcaaaagcugcaucaaucggugcuuuuauguggaguugauaaggggaagaaaagaggaaacugaagucuuguggaccucaaacaguauuguuguguuuuguggcaccucagguacauauggaacaggcucauggccugauggggcggacaucaaucucaugccuauauaa

SEQ ID NO: 48615 - RNA, 1410 nt, Artificial Sequence
  derived and/or modified CDS sequence (wt) from neuraminidase__InfluenzaA__ACN32493
augaauccaaaucaaaagauaauaacgauuggcucuguuucucucaccauuuccacaauaugcuucuucaugcaaauugccaucuugauaacuacuguaacauugcauuucaagcaauaugaauucaacuccuccccaaacaaccaagugaugcugugugaaccaacaauaauagaaagaaacauaacagagauaguguaucugaccaacaccaccauagagaaggaaauaugccccaaacuagcagaauacagaaauuggucaaagccgcaaugugacauuacaggauuugcaccuuuuucuaaggacaauucgauuaggcuuuccgcugguggggacaucugggugacaagagaaccuuaugugucaugcgauccugacaaguguuaucaauuugcccuuggacagggaacaacacuaaacaacgugcauucaaauaacacaguacgugauaggaccccuuaucggacccuauugaugaaugaguuagguguuccuuuucaucuggggaccaagcaagucugcauagcaugguccagcucaaguugucacgauggaaaagcauggcugcauguuuguauaacgggggaugauaaaaaugcaacugcuagcuucauuuacaaugggaggcuuguagauaguauuguuucaugguccaaagaaauccucaggacccaggagucagaaugcguuuguaucaauggaacuuguacaguaguaaugacugaugggagugcuucaggaaaagcugauacuaaaauacuauucauugaggaggggaaaaucguucauacuagcacauugucaggaagugcucagcaugucgaggagugcuccugcuauccucgauauccuggugucagaugugucugcagagacaacuggaaaggcuccaauaggcccaucguagauauaaacauaaaggaucauagcauuguuuccaguuauguguguucaggacuuguuggagacacacccagaaaaaacgacagcuccagcaguagccauuguuuggauccuaacaaugaagaagguggucauggagugaaaggcugggccuuugaugauggaaaugacguguggaugggaagaacgaucagcgagaagucacgcuuaggguaugaaaccuucaaagucauugaaggcugguccaacccuaaguccaaauugcagauaaauaggcaagucauaguugacagagguaauagguccgguuauucugguauuuucucuguugaaggcaaaagcugcaucaaucggugcuuuuauguggaguugauaaggggaagaaaagaggaaacugaagucuuguggaccucaaacaguauuguuguguuuuguggcaccucagguacauauggaacaggcucauggccugauggggcggacaucaaucucaugccuauauaa

SEQ ID NO: 48616 - RNA, 1410 nt, Artificial Sequence
  derived and/or modified CDS sequence (wt) from neuraminidase__InfluenzaA__ACN32526
augaauccaaaucaaaagauaauaacaauuggcucuguuucucucaccauugccacaauaugcuuccuuaugcaaauugccauccugguaacuacuguaacauugcauuucaagcaguaugaaugcaacucccccccaaacaaccaaguaaugcugugugaaccaacaauaauagaaagaaacauaacagagauaguguaucugaccaauaccaccauagagaaggaaauaugccccaaauuagcagaauacagaaauuggucaaagccacaauguaacauuacaggauuugcaccuuuuucuaaggacaauucgauucggcuuuccgcugguggggacaucugggugacaagagaaccuuaugugucaugcgauccugacaaguguuaucaauuugcccuugggcagggaacaacacuaaacaacgggcauucaaaugacacaguacaugauaggaccccuuaccggacccuauugaugaaugaauuggguguuccauuucauuugggaaccaggcaagugugcauagcaugguccagcucaaguugucacgauggaaaagcauggcugcauguuuguguaacuggggaugaugaaaaugcaacugcuagcuucauuuacaaugggaggcuuguagauaguauugguucaugguccaaaaaaauacucagaacccaggagucggaaugcguuuguaucaauggaacuuguacaguaguaaugacugaugggagcgcuucaggaaaagcugauacuaaaauacuauucauugaggaggggaaaaucguucauauuagcacauugucaggaagugcucagcaugucgaggagugcuccuguuauccucgauaucccggugucagaugugucugcagagacaacuggaaaggcuccaauaggcccaucguagauauaaauguaaaggauuauagcauuguuuccaguuaugugugcucaggacuuguuggagacacacccagaaaaaacgacagcuucagcaguagccauugccuagauccuaacaaugaggaagguggucauggagugaaaggcugggccuuugaugauggaaaugacguguggaugggaagaacgaucagcgagaaguuacgcucagguuaugaaaccuucaaagucaucgaaggcugguccaaaccuaacuccaaauuacagauaaauaggcaagucauaguugaaagagguaacagguccgguuauucugguauuuucuccguugaaggcaaaagcugcaucaaucggugcuuuuauguggaguugauaaggggaaggaaagaggaaacugaagucugguggaccucaaacaguauuguuguguuuuguggcaccucagguacauauggaacaggcucauggccugauggggcggauaucaaucucaugccuauauaa

SEQ ID NO: 48617 - RNA, 1410 nt, Artificial Sequence
  derived and/or modified CDS sequence (wt) from neuraminidase__InfluenzaA__ACN32537
augaauccaaaucaaaagauaauaacaauuggcucuguuucucucaccauugccacaauaugcuuccuuaugcaaauugccauccugguaacuacuguaacauugcauuucaagcaguaugaaugcaacucccccccaaacaaccaaguaaugcugugugaaccaacaauaauagaaagaaacauaacagagauaguguaucugaccaauaccaccauagagaaggaaauaugccccaaauuagcagaauacagaaauuggucaaagccgcaauguaacauuacaggauuugcaccuuuuucuaaggacaauucgauucggcuuuccgcugguggggacaucugggugacaagagaaccuuaugugucaugcgauccugacaaguguuaucaauuugcccuugggcagggaacaacacuaaacaacgggcauucaaaugacacaguacaugauaggaccccuuaccggacccuauugaugaaugaauuggguguuccauuucauuugggaaccaggcaagugugcauagcaugguccagcucaaguugucacgauggaaaagcauggcugcauguuuguguaacuggggaugaugaaaaugcaacugcuagcuucauuuacaaugggaggcuuguagauaguauugguucaugguccaaaaaaauacucagaacccaggagucggaaugcguuuguaucaauggaacuuguacaguaguaaugacugaugggagcgcuucaggaaaagcugauacuaaaauacuauucauugaggaggggaaaaucguucauauuagcacauugucaggaagugcucagcaugucgaggagugcuccuguuauccucgauauccugaugucagaugugucugcagagacaacuggaaaggcuccaauaggcccaucguagauauaaauguaaaggauuauaguauuguuuccaguuaugugugcucaggacuuguuggagacacacccagaaaaaacgacagcuucagcaguagccauugccuagauccuaacaaugaggaagguggucauggagugaaaggcugggccuuugaugauggaaaugacguguggaugggaagaacgaucagcgagaaguuacgcucagguuaugaaaccuucaaagucaucgauggcugguccaaaccuaacuccaaauuacagauaaauaggcaagucauaguugaaagagguaacagguccgguuauucugguauuuucuccguugaaggcaaaagcugcaucaaucggugcuuuuauguggaguugauaaggggaaggaaagaggaaacugaagucugguggaccucaaacaguauuguuguguuuuguggcaccucagguacauauggaacaggcucauggccugauggggcggauaucaaucucaugccuauauaa

SEQ ID NO: 48618 - RNA, 1413 nt, Artificial Sequence; identical to SEQ ID NO: 48094
  derived and/or modified CDS sequence (wt) from neuraminidase__InfluenzaA__ACN32807

SEQ ID NO: 48619 - RNA, 1413 nt, Artificial Sequence; identical to SEQ ID NO: 48048
  derived and/or modified CDS sequence (wt) from neuraminidase__InfluenzaA__ACN32818

SEQ ID NO: 48620 - RNA, 1413 nt, Artificial Sequence; identical to SEQ ID NO: 48065
  derived and/or modified CDS sequence (wt) from neuraminidase__InfluenzaA__ACN32829

SEQ ID NO: 48621 - RNA, 1413 nt, Artificial Sequence
  derived and/or modified CDS sequence (wt) from neuraminidase__InfluenzaA__ACN32840
augaauccaaaucaaaaaauaauaaccauuggaucaaucaguauagcaaucgggauaauuagucuaauguugcaaauaggaaauauuauuucaauaugggcuagucacucaauccaaacuggaagucaaaaccacacuggaauaugcaaccaaagaaucaucacauaugaaaacagcaccugggugaaucacacauauguuaguauuaacaacacuaauguuguugcuggaaaggacaaaacuucagugacauuggccggcaauucaucucuuuguucuaucaguggaugggcuauauacacaaaagacaacagcauaagaauuggcuccaaaggagauguuuuugucauaagagaaccuuucauaucauguucucauuuggaaugcaggaccuuuuuucugacccaaggugcucuauuaaaugacaaacauucaaauggaaccguuaaggaccgaaguccuuauagggccuuaaugagcuguccucuaggugaagcuccguccccauacaauucaaaguuugaaucaguugcauggucagcaagcgcaugccaugauggcaugggcugguuaacaaucggaauuucugguccagacaauggagcuguggcuguacuaaaauacaacggaauaauaacugaaaccauaaaaaguuggaaaaagcgaauauugagaacacaagagucugaaugugucugugugaacgggucauguuucaccauaaugaccgauggcccgaguaauggggccgccucguacaaaaucuucaagaucgaaaaggggaagguuacuaaaucaauagaguuaaaugcacccaauuuucauuaugaggaauguuccuguuacccagacacuggcacagugauguguguaugcagggacaacuggcaugguucaaaucgaccuugggugucuuuuaaucaaaacuuggauuaucaaauaggauacaucugcaguggaguguucggugacaauccgcgucccaaagauggaaagggcagcuguaauccagugacuguugauggagcagacgggguuaagggguuuucauacaaauaugguaaugguguuuggauaggaagaacuaaaaguaacagacuuagaaagggguuugagaugauuugggauccuaauggauggacagauaccgacagugauuucucagugaaacaggauguuguggcaauaacugauuggucaggguacaguggaaguuucguucaacauccugaguuaacaggauuggacuguauaagaccuugcuucuggguugaguuagucagaggacugccuagagaaaauacaacaaucuggacuagugggagcagcauuucuuuuuguggcguugauagugauacuguaaacuggucuuggccagacggugcugaguugccguucaccauugacaaguag

SEQ ID NO: 48622 - RNA, 1410 nt, Artificial Sequence
  derived and/or modified CDS sequence (wt) from neuraminidase__InfluenzaA__ACN32851
augaauccaaaucaaaagauaauaacgauuggcucuguuucucucaccauuuccacaauaugcuucuucaugcaaauugccaucuugauaacuacuguaacauugcauuucaagcaauaugaauucaacucccccccaaacaaccaagugaugcugugugaaccaacaauaauagaaagaaacauaacagagauaguguaucugaccaacaccaccauagagaaggaaauaugccccaaacuagcagaauacagaaauuggucaaagccgcaaugugacauuacaggauuugcaccuuuuucuaaggacaauucgauuaggcuuuccgcugguggggacaucugggugacaagagaaccuuaugugucaugcgauccugacaaguguuaucaauuugcccuuggacagggaacaacacuaaacaacgugcauucaaaugacacaguacgugauaggaccccuuaucggacccuauugaugaaugaguuagguguuccuuuucaucuggggaccaagcaagugugcauagcaugguccagcucaaguugucacgauggaaaagcauggcugcauguuuguauaacgggggaugacaaaaaugcaacugcuagcuucauuuacaaugggaggcuuguagauaguguuguuucaugguccaaagaaauccucaggacccaggagucagaaugcguuuguaucaauggaacuuguacaguaguaaugacugaugggagugcuucaggaaaagcugauacuaaaauacuauucauugaggaggggaaaaucguucauacuagcacauugucaggaagugcucagcaugucgaggagugcuccugcuauccucgauauccuggugucagaugugucugcagagacaacuggaaaggcuccaauaggcccaucguagauauaaacauaaaggaucauagcauuguuuccaguuauguguguucaggacuuguuggagacacacccagaaaaaacgacagcuccagcaguagccauuguuuggauccuaacaaugaagaagguggucauggagugaaaggcugggccuuugaugauggaaaugacguguggaugggaagaacgaucagcgagaagucacgcuuaggguaugaaaccuucaaagucauugaaggcugguccaacccuaaguccaaauugcagauaaauaggcaagucauaguugacagagguaauagguccgguuauucugguauuuucucuguugaaggcaaaagcugcaucaaucggugcuuuuauguggaguugauaaggggaagaaaagaggaaacugaagucuuguggaccucaaacaguauuguuguguuuuguggcacaucagguacauauggaacaggcucauggccugauggggcggacaucaaucucaugccuauauaa

SEQ ID NO: 48623 - RNA, 1410 nt, Artificial Sequence; identical to SEQ ID NO: 48611
  derived and/or modified CDS sequence (wt) from neuraminidase__InfluenzaA__ACN32862

SEQ ID NO: 48624 - RNA, 1410 nt, Artificial Sequence
  derived and/or modified CDS sequence (wt) from neuraminidase__InfluenzaA__ACN32873
augaauccaaaucaaaagauaauaacgauuggcucuguuucucucaccauuuccacaauaugcuucuucaugcaaauugccaucuugauaacuacuguaacauugcauuucaagcaauaugaauucaacuccuccccaaacaaccaagugaugcugugugaaccaacaauaauagaaagaaacauaacagagauaguguaucugaccaacaccaccauagagaaggagauaugccccaaacuagcagaauacagaaauuggucaaagccgcaaugugacauuacaggauuugcaccuuuuucuaaggacaauucgauuaggcuuuccgcugguggggacaucugggugacgagagaaccuuaugugucaugcgauccugacaaguguuaucaauuugcccuuggacagggaacaacacuaaacaacgugcauucaaauaacacaguacgugauaggaccccuuaucggacccuauugaugaaugaguuagguguuccuuuucaucuggggaccaagcaagucugcauagcaugguccagcucaaguugucacgauggaaaagcauggcugcauguuuguauaacgggggaugauaaaaaugcaacugcuagcuucauuuacaaugggaggcuuguagauaguauuguuucaugguccaaagaaauccucaggacccaggagucagaaugcguuuguaucaauggaacuuguacaguaguaaugacugaugggagugcuucaggaaaagcugauacuaaaauacuauucauugaggaggggaaaaucguucauacuagcacauugucaggaagugcucagcaugucgaggagugcuccugcuauccucgauauccuggugucagaugugucugcagagacaacuggaaaggcuccaauaggcccaucguagauauaaacauaaaggaucauagcauuguuuccaguuauguguguucaggacuuguuggagacacacccagaaaaaacgacagcuccagcaguagccauuguuuggauccuaacaaugaagaagguggucauggagugaaaggcugggccuuugaugauggaaaugacguguggaugggaagaacgaucagcgagaagucacgcuuaggguaugaaaccuucaaagucauugaaggcugguccaacccuaaguccaaauugcagauaaauaggcaagucauaguugacagagguaauagguccgguuauucugguauuuucucuguugaaggcaaaagcugcaucaaucggugcuuuuauguggaguugauaaggggaagaaaagaggaaacugaagucuuguggaccucaaacaguauuguuguguuuuguggcaccucagguacauauggaacaggcucauggccugauggggcggacaucaaucucaugccuauauaa

SEQ ID NO: 48625 - RNA, 1410 nt, Artificial Sequence; identical to SEQ ID NO: 48611
  derived and/or modified CDS sequence (wt) from neuraminidase__InfluenzaA__ACN32884

SEQ ID NO: 48626 - RNA, 1410 nt, Artificial Sequence
  derived and/or modified CDS sequence (wt) from neuraminidase__InfluenzaA__ACN32895
augaauccaaaucaaaagauaauaacgauuggcucuguuucucucaccauuuccacaauaugcuucuucaugcaaauugccaucuugauaacuacuguaacauugcauuucaagcaauaugaauucaacuccuccccaaacaaccaagugaugcugugugaaccaacaauaauagaaagaaacauaacagagauaguguaucugaccaacaccaccauagagaaggaaauaugccccaaacuagcagaauacagaaauuggucaaagccgcaaugugacauuacaggauuugcaccuuuuucuaaggacaauucgauuaggcuuuccgcugguggggacaucugggugacaagagaaccuuaugugucaugcgauccugacaaguguuaucaauuugcccuuggacagggaacaacacuaaacaacgugcauucaaauaacacaguacgugauaggaccccuuaucggacccuauugaugaaugaguuagguguuccuuuucaucuggggaccaagcaagucugcauagcaugguccagcucaaguugucacgauggaaaagcauggcugcauguuuguauaacgggggaugauaaaaaugcaacugcuagcuucauuuacaaugggaggcuuguagauaguauuguuucaugguccaaagaaauccucaggacccaggagucggaaugcguuuguaucaauggaacuuguacaguaguaaugacugaugggagugcuucaggaaaagcugauacuaaaauacuauucauugaggaggggaaaaucguucauacuagcacauugucaggaagugcucagcaugucgaggaaugcuccugcuauccucgauauccuggugucagaugugucugcagagacaacuggaaaggcuccaauaggcccaucguagauauaaacauaaaggaucauagcauuguuuccaguuauguguguucaggacuuguuggagacacacccagaaaaaacgacagcuccagcaguagccauuguuuggauccuaacaaugaagaagguggucauggaguaaaaggcugggccuuugaugauggaaaugacguguggaugggaagaacgaucagcgagaagucacgcuuaggguaugaaaccuucaaagucauugaaggcugguccaacccuaaguccaaauugcagauaaauaggcaagucauaguugacagagguaauagguccgguuauucugguauuuucucuguugaaggcaaaagcugcaucaaucggugcuuuuacguggaguugauaaggggaagaaaagaggaaacugaagucuuguggaccucaaacaguauuguuguguuuuguggcaccucagguacauauggaacaggcucauggccugauggggcggacaucaaucucaugccuauauaa

SEQ ID NO: 48627 - RNA, 1410 nt, Artificial Sequence
  derived and/or modified CDS sequence (wt) from neuraminidase__InfluenzaA__ACN32906
augaauccaaaucaaaagauaauaacgauuggcucuguuucucucaccauuuccacaauaugcuucuucaugcaaauugccaucuugauaacuacuguaacauugcauuucaagcaauaugaauucaacucccccccaaacaaccaagugaugcugugugaaccaacaauaauagaaagaaacauaacagagauaguguaucugaccaacaccaccauagagaaggaaauaugccccaaacuagcagaauacagaaauuggucaaagccgcaaugugacauuacaggauuugcaccuuuuucuaaggacaauucgauuaggcuuucagcugguggggacaucugggugacaagagaaccuuaugugucaugcgauccugacaaguguuaucaauuugcccuuggacagggaacaacacuaaacaacgugcauucaaaugacacaguacgugauaggaccccuuaucggacccuauugaugaaugaguuagguguuccuuuucaucuggggaccaagcaagugugcauagcaugguccagcucaaguugucacgauggaaaagcauggcugcauguuuguauaacgggggaugauaaaaaugcaacugcuagcuucauuuacaaugggaggcuuguagauaguguuguuucaugguccaaagaaauccucaggacccaggagucagaaugcguuuguaucaauggaacuuguacaguaguaaugacugaugggagugcuucaggaaaagcugauacuaaaauacuauucauugaggaggggaaaaucguucauacuagcacauugucaggaagugcucagcaugucgaggagugcuccugcuauccucgauauccuggugucagaugugucugcagagacaacuggaaaggcuccaauaggcccaucguagauauaaacauaaaggaucauagcauuguuuccaguuauguguguucaggacuuguuggagacacacccagaaaaaacgacagcuccagcaguagccauuguuuggauccuaacaaugaagaagguggucauggagugaaaggcugggccuuugaugauggaaaugacguguggaugggaagaacgaucagcgagaagucacgcuuaggguaugaaaccuucaaagucauugaaggcugguccaacccuaaguccaaauugcagauaaauaggcaagucauaguugacagagguaauagguccgguuauucugguauuuucucuguugaaggcaaaagcugcaucaaucggugcuuuuauguggaguugauaaggggaagaaaagaggaaacugaagucuuguggaccucaaacaguauuguuguguuuuguggcaccucagguacauauggaacaggcucauggccugauggggcggacaucaaucucaugccuauauaa

SEQ ID NO: 48628 - RNA, 1410 nt, Artificial Sequence
  derived and/or modified CDS sequence (wt) from neuraminidase__InfluenzaA__ACN32917
augaauccaaaucaaaagauaauaacgauuggcucuguuucucucaccauuuccacaauaugcuucuucaugcaaauugccaucuugauaacuacuguaacauugcauuucaagcaauaugaauucaacucccccccaaacaaccaagugaugcuguguaaaccaacaauaauagaaagaaacauaacagagauaguguaucugaccaacaccaccauagagaaggaaauaugccccaaacuagcagaauacagaaauuggucaaagccgcaaugugacauuacaggauuugcaccuuuuucuaaggacaauucgauuaggcuuuccgcugguggggacaucugggugacaagagaaccuuaugugucaugcgauccugacaaguguuaucaauuugcccuuggacagggaacaacacuaaacaacgugcauucaaauaacacaguacgugauaggaccccuuaucggacccuauugaugaaugaguuagguguuccuuuucaucuggggaccaagcaagugugcauagcaugguccagcucaaguugucacgauggaaaagcauggcugcauguuuguauaacgggggaugauaaaaaugcaacugcuagcuucauuuacaaugggaggcuuguagauaguguuguuucaugguccaaagaaauccucaggacccaggagucagaaugcguuuguaucaauggaacuuguacaguaguaaugacugaugggagugcuucaggaaaagcugauacuaaaauacuauucauugaggaggggaaaaucguucauacuagcacauugucaggaagugcucagcaugucgaggagugcuccugcuauccucgauauccuggugucagaugugucugcagagacaacuggaaaggcuccaauaggcccaucguagauauaaacauaacggaucauagcauuguuuccaguuauguguguucaggacuuguuggagacacacccagaaaaaacgacagcuccagcaguagccauuguuuggauccuaacaaugaagaagguggucauggagugaaaggcugggccuuugaugauggaaaugacguguggaugggaagaacgaucagcgagaagucacgcuuaggguaugaaaccuucaaagucauugaaggcugguccaacccuaaguccaaauugcagauaaauaggcaagucauaguugacagagguaauagguccgguuauucugguauuuucucuguugaaggcaaaagcugcaucaaucggugcuuuuauguggaguugauaaggggaagaaaagaggaaacugaagucuuguggaccucaaacaguauuguuguguuuuguggcaccucagguacauauggaacaggcucauggccugauggggcggacaucaaucucaugccuauauaa

SEQ ID NO: 48629 - RNA, 1410 nt, Artificial Sequence
  derived and/or modified CDS sequence (wt) from neuraminidase__InfluenzaA__ACN32928
augaauccaaaucaaaagauaauaacgauuggcucuguuucucucaccauuuccacaauaugcuucuucaugcaaauugccaucuugauaacuacuguaacauugcauuucaagcaauaugaauucaacucccccccaaacaaccaagugaugcugugugaaccaacaauaauagaaagaaacauaacagagauaguguaucugaccaacaccaccauagagaaggaaauaugccccaaacuagcagaauacagaaauuggucaaagccgcaaugugacauuacaggauuugcaccuuuuucuaaggacaauucgauuaggcuuuccgcugguggggacaucugggugacaagagaaccuuaugugucaugcgauccugacaaguguuaucaauuugcccuuggacagggaacaacacuaaacaacgugcauucaaauaacacaguacgugauaggaccccuuaucggacccuauugaugaaugaguuagguguuccuuuucaucuggggaccaagcaagugugcauagcaugguccagcucaaguugucacgauggaaaagcauggcugcauguuuguauaacgggggaugauaaaaaugcaacugcuagcuucauuuacaaugggaggcuuguagauaguguuguuucaugguccaaagaaauccucaggacccaggagucagaaugcguuuguaucaauggaacuuguacaguaguaaugacugaugggagugcuucaggaaaagcugauacuaaaauacuauucauugaggaggggaaaaucguucauacuagcacauugucaggaagugcucagcaugucgaggagugcuccugcuauccucgauauccuggugucagaugugucugcagagacaacuggaaaggcuccaauaggcccaucguagauauaaacauaacggaucauagcauuguuuccaguuauguguguucaggacuuguuggagacacacccagaaaaaacgacagcuccagcaguagccauuguuuggauccuaacaaugaagaagguggucauggagugaaaggcugggccuuugaugauggaaaugacguguggaugggaagaacgaucagcgagaagucacgcuuaggguaugaaaccuucaaagucauugaaggcugguccaacccuaaguccaaauugcagauaaauaggcaagucauaguugacagagguaauagguccgguuauucugguauuuucucuguugaaggcaaaagcugcaucaaucggugcuuuuauguggaguugauaaggggaagaaaagaggaaacugaagucuuguggaccucaaacaguauuguuguguuuuguggcaccucagguacauauggaacaggcucauggccugauggggcggacaucaaucucaugccuauauaa

SEQ ID NO: 48630 - RNA, 1410 nt, Artificial Sequence; identical to SEQ ID NO: 48615
  derived and/or modified CDS sequence (wt) from neuraminidase__InfluenzaA__ACN32939

SEQ ID NO: 48631 - RNA, 1410 nt, Artificial Sequence; identical to SEQ ID NO: 48526
  derived and/or modified CDS sequence (wt) from neuraminidase__InfluenzaA__ACN32950

SEQ ID NO: 48632 - RNA, 1410 nt, Artificial Sequence
  derived and/or modified CDS sequence (wt) from neuraminidase__InfluenzaA__ACN32961
augaauccaaaucaaaagauaauaacgauuggcucuguuucucucaccauuuccacaauaugcuucuucaugcaaauugccaucuugauaacuacuguaacauugcauuucaagcaauaugaauucaacucccccccaaacaaccaagugaugcugugugaaccaacaauaauagaaagaaacauaacagagauaguguaucugaccaacaccaccauagagaaggaaauaugccccaaacuagcagaauacagaaauuggucaaagccgcaaugugacauuacaggauuugcaccuuuuucuaaggacaauucgauuaggcuuuccgcugguggggacaucugggugacaagagaaccuuaugugucaugcgauccugacaaguguuaucaauuugcccuuggacagggaacaacacuaaacaacgugcauucaaauaacacaguacgugauaggaccccuuaucggacccuauugaugaaugaguuagguguuccuuuucaucuggggaccaagcaagugugcauagcaugguccagcucaaguugucacgauggaaaagcauggcugcauguuuguauaacgggggaugauaaaaaugcaacugcuagcuucauuuacaaugggaggcuuguagauaguguuguuucaugguccaaagaaauccucaggacccaggagucagaaugcguuuguaucaauggaacuuguacaguaguaaugacugaugggagugcuucaggaaaagcugauacuaaaauacuauucauugaggaggggaaaaucguucauacuagcacauugucaggaagugcucagcaugucgaggagugcuccugcuauccucgauauccuggugucagaugugucugcagagacaacuggaaaggcuccaauaggcccaucguagauauaaacauaacggaucauagcauuguuuccaguuauguguguucaggacuuguuggagacacacccagaaaaaacgacagcuccagcaguagccauuguuuggauccuaacaaugaagaagguggucauggagugaaaggcugggccuuugaugauggaaaugacguguggaugggaagaacgaucagcgagaagucacgcuuaggguaugaaaccuucaaagucauugaaggcugguccaacccuaaguccaaauugcagauaaauaggcaagucauaguugacagagguaauagguccgguuauucugguauuuucucuguugaaggcaaaagcugcaucaaucggugcuuuuauguggaguugauaaggggaagaaaagaggaaacugaagucuuguggaccucaaacaguauuguuguguuuuguggcaccucagguacauauggaacaggcucauggccugauggggcggacaucaauaucaugccuauauaa

SEQ ID NO: 48633 - RNA, 1410 nt, Artificial Sequence
  derived and/or modified CDS sequence (wt) from neuraminidase__InfluenzaA__ACN32972
augaauccaaaucaaaagauaauaacgauuggcucuguuucucucaccauuuccacaauaugcuucuucaugcaaauugccaucuugauaacuacuguaacauugcauuucaagcaauaugaauucaacucccccccaaacaaccaagugaugcugugugaaccaacaauaauagaaagaaacauaacagagauaguguaucugaccaacaccaccauagagaaggaaauaugccccaaacuagcagaauacagaaauuggucaaagccgcaaugugacauuacaggauuugcaccuuuuucuaaggacaauucgauuaggcuuuccgcugguggggacaucugggugacaagagaaccuuaugugucaugcgauccugacaaguguuaucaauuugcccuuggacagggaacaacacuaaacaacgugcauucaaauaacacaguacgugauaggaccccuuaucggacccuauugaugaaugaguuagguguuccuuuucaucuggggaccaagcaagugugcauagcaugguccagcucaaguugucacgauggaaaagcauggcugcauguuuguauaacgggagaugauaaaaaugcaacugcuagcuucauuuacaaugggaggcuuguagauaguguuguuucaugguccaaagaaauccucaggacccaggagucagaaugcguuuguaucaauggaacuuguacaguaguaaugacugaugggagugcuucaggaaaagcugauacuaaaauacuauucauugaggaggggaaaaucguucauacuagcacauugucaggaagugcucagcaugucgaggagugcuccugcuauccucgauauccuggugucagaugugucugcagagacaacuggaaaggcuccaauaggcccaucguagauauaaacauaaaggaucauagcauuguuuccaguuauguguguucaggacuuguuggagacacacccagaaaaaacgacagcuccagcaguagccauuguuuggauccuaacaaugaagaagguggucauggagugaaaggcugggccuuugaugauggaaaugacguguggaugggaagaacgaucagcgagaagucacgcuuaggguaugaaaccuucaaagucauugaaggcugguccaacccuaaguccaaauugcagauaaauaggcaagucauaguugacagagguaauagguccgguuauucugguauuuucucuguugaaggcaaaagcugcaucaaucggugcuuuuauguggaguugauaaggggaagaaaagaggaaacugaagucuuguggaccucaaacaguauuguuguguuuuguggcaccucagguacauauggaacaggcucauggccugauggggcggacaucaaucucaugccuauauaa

SEQ ID NO: 48634 - RNA, 1410 nt, Artificial Sequence; identical to SEQ ID NO: 48611
  derived and/or modified CDS sequence (wt) from neuraminidase__InfluenzaA__ACN32994

SEQ ID NO: 48635 - RNA, 1410 nt, Artificial Sequence
  derived and/or modified CDS sequence (wt) from neuraminidase__InfluenzaA__ACN33005
augaauccaaaucaaaagauaauaacgauuggcucuguuucucucaccauuuccacaauaugcuucuucaugcaaauugccaucuugauaacuacuguaacauugcauuucaagcaauaugaauucaacucccccccaaacaaccaagugaugcugugugaaccaacaauaauagaaagaaacauaacagagauaguguaucugaccaacaccaccauagagaaggaaauaugccccaaacuagcagaauacagaaauuggucaaagccgcaaugugacauuacaggauuugcaccuuuuucuaaggacaauucgauuaggcuuuccgcugguggggacaucugggugacaagagaaccuuaugugucaugcgauccugacaaguguuaucaauuugcccuuggacagggaacaacacuaaacaacgugcauucaaaugacacaguacgugauaggaccccuuaucggacccuauugaugaaugaguuagguguuccuuuucaucuggggaccaagcaagugugcauagcaugguccagcucaaguugucacgauggaaaagcauggcugcauguuuguauaacgggggaugauaaaaaugcaacugcuagcuucauuuacaaugggaggcuuguagauaguguuguuucaugguccaaagaaauccucaggacccaggagucagaaugcguuuguaucaauggaacuuguacaguaguaaugacugaugggagugcuucaggaaaagcugauacuaaaauacuauucauugaggaggggaaaaucguucauacuagcacauugucaggaagugcucagcaugucgaggagugcuccugcuauccucgauauccuggugucagaugugucugcagagacaacuggaaaggcuccaauaggcccaucguagauauaaacauaaaggaucauagcauuguuuccaguuauguguguucaggacuuguuggagacacacccagaaaaaacgacagcuccagcaguagccauuguuuggauccuaacaaugaagaagguggucauggagugaaaggcugggccuuugaugauggaaaugacguguggaugggaagaacgaucagcgagaagucacgcuuaggguaugaaaccuucaaagucauugaaggcugguccaacccuaaguccaaauugcagauaaauaggcaagucauaguugacagagguaauagguccgguuauucugguauuuucucuguugaaggcgaaagcugcaucaaucggugcuuuuauguggaguugauaaggggaagaaaagaggaaacugaagucuuguggaccucaaacaguauuguuguguuuuguggcaccucagguacauauggaacaggcucauggccugauggggcggacaucaaucucaugccuauauaa

SEQ ID NO: 48636 - RNA, 1410 nt, Artificial Sequence
  derived and/or modified CDS sequence (wt) from neuraminidase__InfluenzaA__ACN33016
augaauccaaaucaaaagauaauaacgauuggcucuguuucucucaccauuuccacaauaugcuucuucaugcaaauugccaucuugauaacuacuguaacauugcauuucaagcaauaugaauucaacucccccccaaacaaccaagugaugcugugugaaccaacaauaauagaaagaaacauaacagagauaguguaucugaccaacaccaccauagagaaggaaauaugccccaaacuagcagaauacagaaauuggucaaagccgcaaugugacauuacaggauuugcaccuuuuucuaaggacaauucgauuaggcuuuccgcugguggggacaucugggugacaagagaaccuuaugugucaugcgauccugacaaguguuaucaauuugcccuuggacagggaacaacacuaaacaacgugcauucaaauaacacaguacgugauaggaccccuuaucggacccuauugaugaaugaguuagguguuccuuuucaucuggggaccaagcaagugugcauagcaugguccagcucaaguugucacgauggaaaagcauggcugcauguuuguauaacgggggaugauaaaaaugcaacugcuagcuucauuuacaaugggaggcuuguagauaguguuguuucaugguccaaagaaauccucaggacccaggagucagaaugcguuuguaucaauggaacuuguacaguaguaaugacugaugggagugcuucaggaaaagcugauacuaaaauacuauucauugaggaggggaaaaucguucauacuagcacauugucaggaagugcucagcaugucgaggagugcuccugcuauccucgauauccuggugucagaugugucugcagagacaacuggaaaggcuccaauaggcccaucguagauauaaacauaaaggaucauagcauuguuuccaguuauguguguucaggacuuguuggagacacacccagaaaaaacgacagcuccagcaguagccauuguuuggauccuaacaaugaagaagguggucauggagugaaaggcugggccuuugaugauggaaaugacguguggaugggaaggacgaucagcgagaagucacgcuuaggguaugaaaccuucaaagucauugaaggcugguccaacccuaaguccaaauugcagauaaauaggcaagucauaguugacagagguaauagguccgguuauucugguauuuucucuguugaaggcaaaagcugcaucaaucggugcuuuuauguggaguugauaaggggaagaaaagaggaaacugaagucuuguggaccucaaacaguauuguuguguuuuguggcaccucagguacauauggaacaggcucauggccugauggggcggacaucaaucucaugccuauauaa

SEQ ID NO: 48637 - RNA, 1410 nt, Artificial Sequence; identical to SEQ ID NO: 48611
  derived and/or modified CDS sequence (wt) from neuraminidase__InfluenzaA__ACN33049

SEQ ID NO: 48638 - RNA, 1410 nt, Artificial Sequence; identical to SEQ ID NO: 48611
  derived and/or modified CDS sequence (wt) from neuraminidase__InfluenzaA__ACN33060

SEQ ID NO: 48639 - RNA, 1410 nt, Artificial Sequence
  derived and/or modified CDS sequence (wt) from neuraminidase__InfluenzaA__ACN33082
augaauccaaaucaaaagauaauaacgauuggcucuguuucucucaccauuuccacaauaugcuucuucaugcaaauugccaucuugauaacuacuguaacauugcauuucaagcaauaugaauucaacuccuccccaaacaaccaagugaugcugugugaaccaacaauaauagaaagaaacauaacagagauaguguaucugaccaacaccaccauagagaaggaaauaugccccaaacuagcagaauacagaaauuggucaaagccgcaaugugauauuacaggauuugcaccuuuuucuaaggacaauucgauuaggcuuuccgcugguggggacaucugggugacaagagaaccuuaugugucaugcgauccugacaaguguuaucaauuugcccuuggacagggaacaacacuaaacaacgugcauucaaauaacacaguacgugauaggaccccuuaucggacccuauugaugaaugaguuagguguuccuuuucaucuggggaccaagcaagucugcauagcaugguccagcucaaguugucacgauggaaaagcauggcugcauguuuguauaacuggggaugauaaaaaugcaacugcuagcuucauuuacaaugggaggcuuguagauaguauuguuucaugguccaaagaaauccucaggacccaggagucagaaugcguuuguaucaauggaacuuguacaguaguaaugacugaugggagugcuucaggaaaagcugauacuaaaauacuauucauugaggaggggaaaaucguucauacuagcacauugucaggaagugcucagcaugucgaggagugcuccugcuauccucgauauccuggugucagaugugucugcagagacaacuggaaaggcuccaauaggcccaucguagauauaaacauaaaggaucauagcauuguuuccaguuauguguguucaggacuuguuggagacacacccagaaaaaacgacagcuccagcaguagccauuguuuggauccuaacaaugaagaagguggucauggagugaaaggcugggccuuugaugauggaaaugacguguggaugggaagaacgaucagcgagaagucacgcuuaggguaugaaaccuucaaagucauugaaggcugguccaacccuaaguccaaauugcagauaaauaggcaagucauaguugacagagguaauagguccgguuauucugguauuuucucuguugaaggcaaaagcugcaucaaucggugcuuuuauguggaguugauaaggggaagaaaagaggaaacugaagucuuguggaccucaaacaguauuguuguguuuuguggcaccucagguacauauggaacaggcucauggccugauggggcggacaucaaucucaugccuauauaa

SEQ ID NO: 48640 - RNA, 1413 nt, Artificial Sequence; identical to SEQ ID NO: 48081
  derived and/or modified CDS sequence (wt) from neuraminidase__InfluenzaA__ACN33093

SEQ ID NO: 48641 - RNA, 1413 nt, Artificial Sequence
  derived and/or modified CDS sequence (wt) from neuraminidase__InfluenzaA__ACN33104
augaauccaaaucaaaaaauaauaaccauuggaucaaucaguauagcaaucgggauaauuagucuaaugcugcaaauaggaaauauuauuucaauaugggcuagucacucaauccaaacuggaagucaaaaccacacuggaauaugcaaccaaagaaucaucacauaugaaaacagcaccugggugaaucacacauauguuaguauuaacaacacuaauguuguugcuggaaaggacaaaacuucagugacauuggccggcaauucaucucuuuguucuaucaguggaugggcuauauacacaaaagacaacagcauaagaauuggcuccaaaggagauguuuuugucauaagagaaccuuucauaucauguucucauuuggaaugcaggaccuuuuuucugacccaaggugcucuauuaaaugacaaacauucaaauggaaccguuaaggaccgaaguccuuauagggccuuaaugagcuguccucuaggugaagcuccgucuccauacaauucaaaguuugaaucaguugcauggucagcaagcgcaugccaugauggcaugggcugguuaacaaucggaauuucugguccagacaauggagcuguggcuguacuaaaauacaacggaauaauaacugaaaccauaaaaaguuggaaaaagcgaauauugagaacacaagagucugaaugugucugugugaacgggucauguuucaccauaaugaccgauggcccgaguaauggggccgccucguacaaaaucuucaaaaucgaaaaggggaagguuacuaaaucaauagaguuaaaugcacccaauuuucauuaugaggaauguuccuguuacccagacacuggcacagugauguguguaugcagggacaacuggcaugguucaaaucgaccuugggugucuuuuaaucaaaacuuggauuaucaaauaggauacaucugcaguggaguguucggugacaauccgcgucccaaagauggaaagggcagcuguaauccagugacuguugauggagcagacgggguuaagggguuuucauacaaauaugguaaugguguuuggauaggaagaacuaaaaguaacagacuuagaaagggguuugagaugauuugggauccuaauggauggacagauaccgacagugauuucucagugaaacaggauguuguggcaauaacugauuggucaggguacaguggaaguuucguucaacauccugaguuaacaggauuggacuguauaagaccuugcuucuggguugaguuagucagaggacugccuagagaaaauacaacaaucuggacuagugggagcagcauuucuuuuuguggcguugauagugauacugcaaacuggucuuggccagacggugcugaguugccguucaccauugacaaguag

SEQ ID NO: 48642 - RNA, 1410 nt, Artificial Sequence
  derived and/or modified CDS sequence (wt) from neuraminidase__InfluenzaA__ACN33115
augaauccaaaucaaaagauaauaacgauuggcucuguuucucucaccauuuccacaauaugcuucuucaugcaaauugccaucuugauaacuacuguaacauugcauuucaagcaauaugaauucaacuccuccccaaacaaccaagugaugcugugugaaccaacaauaauagaaagaaacauaacagagauaguguaucugaccaacaccaccauagagaaggaaauaugccccaaacuagcagaauacagaaauuggucaaagccgcaaugugacauuacaggauuugcaccuuuuucuaaggacaauucgauuaggcuuuccgcugguggggacaucugggugacaagagaaccuuaugugucaugcgauccugacaaguguuaucaauuugcccuuggacagggaacaacacuaaacaacgugcauucaaauaacacaguacgugauaggaccccuuaucggacccuauugaugaaugaguuagguguuccuuuucaucuggggaccaagcaagucugcauagcaugguccagcucaaguugucacgauggaaaagcauggcugcauguuuguauaacuggggaugauaaaaaugcaacugcuagcuucauuuacaaugggaggcuuguagauaguauuguuucaugguccaaagaaauccucaggacccaggagucagaaugcguuuguaucaauggaacuuguacaguaguaaugacugaugggagugcuucaggaaaagcugauacuaaaauacuauucauugaggaggggaaaaucguucauacuagcacauugucaggaagugcucagcaugucgaggagugcuccugcuauccucgauauccuggugucagaugugucugcagagacaacuggaaaggcuccaauaggcccaucguagauauaaacauaaaggaucauagcauuguuuccaguuauguguguucagggcuuguuggagacacacccagaaaaaacgacagcuccagcaguagccauuguuuggauccuaacaaugaagaagguggucauggagugaaaggcugggccuuugaugauggaaaugacguguggaugggaagaacgaucagcgagaagucacgcuuaggguaugaaaccuucaaagucauugaaggcugguccaacccuaaguccaaauugcagauaaauaggcaagucauaguugacagagguaauagguccgguuauucugguauuuucucuguugaaggcaaaagcugcaucaaucggugcuuuuauguggaguugauaaggggaagaaaagaggaaacugaagucuuguggaccucaaacaguauuguuguguuuuguggcaccucagguacauauggaacaggcucauggccugauggggcggacaucaaucucaugccuauauaa

SEQ ID NO: 48643 - RNA, 1413 nt, Artificial Sequence
  derived and/or modified CDS sequence (wt) from neuraminidase__InfluenzaA__ACN33126
augaacccaaaucaaaagauaauaaccauuggaucaaucaguauagcaaucggaauaauuagucuaauguugcaaauaggaaauauuauuucaauaugggcuagucacucaauccaaacuggaagucaaaacaacacuggaauaugcaaccaaagaaucaucacauaugaaaacagcaccugggugaaucacacauauguuaauauuaacaacacuaauguuguugcuggagaggacaaaacuucagugacauuggccggcaguucaucucuuuguucuaucaguggaugggcuauauacacaaaagacaacagcauaagaauuggcuccaaaggagauguuuuugucauaagagaaccuuucauaucauguucucacuuggaaugcagaaccuuuuuucugacccaaggugcccuauuaaaugacaaacauucaaaugggaccguaaaggacagaaguccuuauagggccuuaaugagcuguccucuaggugaagcuccguccccauacaauucaaaguucgaaucaguugcauggucagcaagcgcaugccaugauggcaugggcugguuaacaaucggaauuucugguccagacaauggagcuguggcuguacuaaaauacaacggaauaauaacuggaaccauaaaaaguuggaaaaagcaaauauuaagaacacaagagucugaaugugucuguaugaacgggucauguuucaccauaaugaccgauggcccgaguaauaaggccgccucguacaaaauuuucaagaucgaaaaggggaagguuacuaaaucaauagaguugaaugcacccaauuuucauuaugaggaauguuccuguuacccagacacuggcauagugauguguguaugcagggacaacuggcaugguucaaaucgaccuugggugucuuuuaaucaaaacuuggauuaucaaauaggauacaucugcaguggaguguuuggugacaauccgcgucccgaagauggagagggcagcugcaauccagugacuguugauggagcaaacgggguaaaaggguuuucauacaaauaugauaaugguguuuggauaggaaggaccaaaaguaacagacuuagaaagggguuugagaugauuugggauccuaauggauggacaaauaccgacagugauuucucagugaaacaggauguuguagcaauaacugauuggucaggguacagcggaaguuucguccaacauccugaguuaacaggauuggacuguauaagaccuugcuucuggguugaguuagucagagggcugccuagagaaaauacaacaaucuggacuagugggagcagcauuucuuuuuguggcguuaauagugauacugcaaacuggucuuggccagacggugcugaguugccguucaccauugacaaguag

SEQ ID NO: 48644 - RNA, 1413 nt, Artificial Sequence
  derived and/or modified CDS sequence (wt) from neuraminidase__InfluenzaA__ACN33148
augaacccaaaucaaaagauaauaaccauuggaucaaucaguauagcaaucggaauaauuagucuaauguugcaaauaggaaauauuauuucaauaugggcuagucacucaauccaaacuggaagucaaaacaacacuggaauaugcaaccaaagaaucaucacauaugaaaacagcaccugggugaaucacacauauguuaauauuaacaacacuaauguuguugcuggagaggacaaaacuucagugacauuggccggcaauucaucucuuuguucuaucaguggaugggcuauauacacaaaagacaacagcauaagaauuggcuccaaaggagauguuuuugucauaagagaaccuuucauaucauguucucacuuggaaugcagaaccuuuuuucugacccaaggcgcucuauuaaaugacaaacauucaaaugggaccguaaaggacagaaguccuuauagggccuuaaugagcuguccucuaggugaagcuccguccccauacaauucaaaguucgaaucaguugcauggucagcaagcgcaugccaugauggcaugggcugguuaacaaucggaauuucugguccagacaauggagcuguggcugugcuaaaauacaacggaauaauaacuggaaccauaaaaaguuggaaaaagcaaauauuaagaacacaagagucugaaugugucuguaugaacgggucauguuucaccauaaugaccgauggcccgaguaauaaggccgccucguacaaaauuuucaagaucgaaaaggggaagguuacuaaaucaauagaguugaaugcacccaauuuucauuaugaggaaugcuccuguuacccagacacuggcauagugauguguguaugcagggacaacuggcaugguucaaaucgaccuugggugucuuuuaaucaaaacuuggauuaucaaauaggauacaucugcaguggaguauuuggugacaauccgcgucccgaagauggagagggcagcugcaauccagugacuguugauggagcaaacggaguaaaaggguuuucauacaaauaugauaaugguguuuggauaggaaggaccaaaaguaacagacuuagaaagggguuugagaugauuugggauccuaauggauggacaaauaccgacagugauuucucagugaaacaggauguuguagcaauaacugauuggucaggguacagcggaaguuucguccaacauccugaguuaacaggauuggacuguauaagaccuugcuucuggguugaguuagucagagggcugccuagagaaaauacaacaaucuggacuagugggagcagcauuucuuuuuguggcguuaauagugauacugcaaacuggucuuggccagacggugcugaguugccguucaccauugacaaguag

SEQ ID NO: 48645 - RNA, 1410 nt, Artificial Sequence
  derived and/or modified CDS sequence (wt) from neuraminidase__InfluenzaA__ACN33159
augaauccaaaucaaaagauaauaacgauuggcucuguuucucucaccauuuccacaauaugcuucuucaugcaaauugccaucuugauaacuacuguaacauugcauuucaagcaauaugaauucaacucccccccaaacaaccaagugaugcugugugaaccaacaauaauagaaagaaacauaacagagauaguguaucugaccaacaccaccauagagaaggaaaaaugccccaaacuagcagaauacagaaauuggucaaagccgcaaugugacauuacaggauuugcaccuuuuucuaaggacaauucgauuaggcuuuccgcugguggggacaucugggugacaagagaaccuuaugugucaugcgauccugacaaguguuaucaauuugcccuuggacagggaacaacacuaaacaacgugcauucaaauaacacaguacgugauaggaccccuuaucggacccuauugaugaaugaguuagguguuccuuuucaucuggggaccaagcaagugugcauagcaugguccagcucaaguugucacgauggaaaagcauggcugcauguuuguauaacgggggaugauaaaaaugcaacugcuagcuucauuuacaaugggaggcuuguagauaguguuguuucaugguccaaagaaauccucaggacccaggagucagaaugcguuuguaucaauggaacuuguacaguaguaaugacugaugggagugcuucaggaaaagcugauacuaaaauacuauucauugaggaggggaaaaucguucauacuagcacauugucaggaagugcucagcaugucgaggagugcuccugcuauccucgauauccuggugucagaugugucugcagagacaacuggaaaggcuccaauaggcccaucguagauauaaacauaaaggaucauagcauuguuuccaguuauguguguucaggacuuguuggagacacacccagaaaaaacgacagcuccagcaguagccauuguuuggauccuaacaaugaagaagguggucauggagugaaaggcugggccuuugaugauggaaaugacguguggaugggaagaacgaucagcgagaagucacgcuuaggguaugaaaccuucaaagucauugaaggcugguccaacccuaaguccaaauugcagauaaauaggcaagucauaguugacagagguaauagguccgguuauucugguauuuucucuguugaaggcaaaagcugcaucaaucggugcuuuuauguggaguugauaaggggaagaaaagaggaaacugaagucuuguggaccucaaacaguauuguuguguuuuguggcaccucagguacauauggaacaggcucauggccugauggggcggacaucaaucucaugccuauauaa

SEQ ID NO: 48646 - RNA, 1410 nt, Artificial Sequence
  derived and/or modified CDS sequence (wt) from neuraminidase__InfluenzaA__ACN33170
augaauccaaaucaaaagauaauaacgauuggcucuguuucucucaccauuuccacaauaugcuucuucaugcaaauugccaucuugauaacuacuguaacauugcauuucaagcaauaugaauucaacucccccccaaacaaccaagugaugcugugugaaccaacaauaauagaaagaaacauaacagagauaguguaucugaccaacaccaccauagagaaggaaauaugccccaaacuagcagaauacagaaauuggucaaagccgcaaugugacauuacaggauuugcaccuuuuucuaaggacaauucgauuaggcuuuccgcugguggggacaucugggugacaagagaaccuuaugugucaugcgauccugacaaguguuaucaauuugcccuuggacagggaacaacacuaaacaacgugcauucaaaugacacaguacgugauaggaccccuuaucggacccuauugaugaaugaguuagguguuccuuuucaucuggggaccaagcaagugugcauagcauggucaagcucaaguugucacgauggaaaagcauggcugcauguuuguauaacgggggaugauaaaaaugcaacugcuagcuucauuuacaaugggaggcuuguagauaguguuguuucaugguccaaagaaauccucaggacccaggagucagaaugcguuuguaucaauggaacuuguacaguaguaaugacugaugggagugcuucaggaaaagcugauacuaaaauacuauucauugaggaggggaaaaucguucauacuagcacauugucaggaagugcucagcaugucgaggagugcuccugcuauccucgauauccuggugucagaugugucugcagagacaacuggaaaggcuccaauaggcccaucguagauauaaacauaaaggaucauagcauuguuuccaguuauguguguucaggacuuguuggagacacacccagaaaaaacgacagcuccagcaguagccauuguuuggauccuaacaaugaagaagguggucauggagugaaaggcugggccuuugaugauggaaaugacguguggaugggaagaacgaucagcgagaagucacgcuuaggguaugaaaccuucaaagucauugaaggcugguccaacccuaaguccaaauugcagauaaauaggcaagucauaguugacagagguaauagguccgguuauucugguauuuucucuguugaaggcaaaagcugcaucaaucggugcuuuuauguggaguugauaaggggaagaaaagaggaaacugaagucuuguggaccucaaacaguauuguuguguuuuguggcaccucagguacauauggaacaggcucauggccugauggggcggacaucaaucucaugccuauauaa

SEQ ID NO: 48647 - RNA, 1410 nt, Artificial Sequence
  derived and/or modified CDS sequence (wt) from neuraminidase__InfluenzaA__ACN33181
augaauccaaaucaaaagauaauaacgauuggcucuguuucucucaccauuuccacaauaugcuucuucaugcaaauugccaucuugauaacuacuguaacauugcauuucaagcaauaugaauucaacuccuccccaaacaaccaagugaugcugugugaaccaacaauaauagaaagaaacauaacagagauaguguaucugaccaacaccaccauagagaaggaaauaugccccaaacuagcagaauacagaaauuggucaaagccgcaaugugacauuacaggauuugcaccuuuuucuaaggacaauucgauuaggcuuuccgcugguggggacaucugggugacaagagaaccuuaugugucaugcgauccugacaaguguuaucaauuugcccuuggacagggaacaacacuaaacaacgugcauucaaauaacacaguacgugauaggaccccuuaucggacccuauugaugaaugaguuagguguuccuuuucaucuggggaccaagcaagucugcauagcaugguccagcucaaguugucacgauggaaaagcauggcugcauguuuguauaacgggggaugauaaaaaugcaacugcuagcuucauuuacaaugggaggcuuguagauaguauuguuucaugguccaaagaaauccucaggacccaggagucggaaugcguuuguaucaauggaacuuguacaguaguaaugacugaugggagugcuucaggaaaagcugauacuaaaauauuauucauugaggaggggaaaaucguucauacuagcacauugucaggaagugcucagcaugucgaggagugcuccugcuauccucgauauccuggugucagaugugucugcagagacaacuggaaaggcuccaauaggcccaucguagauauaaacauaaaggaucauagcauuguuuccaguuauguguguucaggacuuguuggagacacacccagaaaaaacgacagcuccagcaguagccauuguuuggauccuaacaaugaagaagguggucauggaguaaaaggcugggccuuugaugauggaaaugacguguggaugggaagaacgaucagcgagaagucacgcuuaggguaugaaaccuucaaagucauugaaggcugguccaacccuaaguccaaauugcagauaaauaggcaagucauaguugacagagguaauagguccgguuauucugguauuuucucuguugaaggcaaaagcugcaucaaucggugcuuuuacguggaguugauaaggggaagaaaagaggaaacugaagucuuguggaccucaaacaguauuguuguguuuuguggcaccucagguacauauggaacaggcucauggccugauggggcggacaucaaucucaugccuauauaa

SEQ ID NO: 48648 - RNA, 1410 nt, Artificial Sequence
  derived and/or modified CDS sequence (wt) from neuraminidase__InfluenzaA__ACN33203
augaauccaaaucaaaagauaauaacgauuggcucuguuucucucaccauuuccacaauaugcuucuucaugcaaauugccaucuugauaacuacuguaacauugcauuucaagcaauaugaauucaacuccuccccaaacaaccaagugaugcugugugaaccaacaauaauagaaagaaacauaacagagauaguguaucugaccaacaccaccauagagaaggaaauaugccccaaacuagcagaauacagaaauuggucaaagccgcaaugugacauuacaggauuugcaccuuuuucuaaggacaauucgauuaggcuuuccgcugguggggacaucugggugacaagagaaccuuaugugucaugcgauccugacaaguguuaucaauuugcccuuggacagggaacaacacuaaacaacgugcauucaaauaacacaguacgugauaggaccccuuaucggacccuauugaugaaugaguuagguguuccuuuucaucuggggaccaagcaagucugcauagcaugguccagcucaaguugucacgauggaaaagcauggcugcauguuuguauaacuggggaugauaaaaaugcaacugcuagcuucauuuacaaugggaggcuuguagauaguauuguuucaugguccaaagaaauccucaggacccaggagucagaaugcguuuguaucaauggaacuuguacaguaguaaugacugaugggagugcuucaggaaaagcugauacuaaaauacuauucauugaggaggggaaaaucguucauacuagcacauugucaggaagugcucagcaugucgaggagugcuccugcuauccucgauauccuggugucagaugugucugcagagacaacuggaaaggcuccaauaggcccaucguagauauaaacauaaaggaucauagcauuguuuccaguuauguguguucaggacuuguuggagacacacccagaaaaaacgacagcuccagcaguagccauuguuuggauccuaacaaugaagaagguggucauggagugaaaggcugggccuuugaugauggaaaugacguguggaugggaagaacgaucagcgagaagucacgcuuaggguaugaaaccuucaaagucauugaaggcugguccaacccuaaguccaaauugcagauaaauaggcaagucauaguugacagagguaauagguccgguuauucugguauuuucucuguugaaggcaaaagcugcaucaaucggugcuuuuauguggaguugauaaggggaagaaaagaggaaacugaagucuuguggaccucaaacaguauuguuguguuuuguggcaccucagguacauauggaacaggcucauggccugauggggcggacaucaaucucaugccuauauaa

SEQ ID NO: 48649 - RNA, 1410 nt, Artificial Sequence
  derived and/or modified CDS sequence (wt) from neuraminidase__InfluenzaA__ACN33214
augaauccaaaucaaaagauaauaacgauuggcucuguuucucucaccauuuccacaauaugcuucuucaugcaaauugccaucuugauaacuacuguaacauugcauuucaagcaauaugaauucaacucccccccaaacaaccaagugaugcugugugaaccaacaauaauagaaagaaacauaacagagacaguguaucugaccaacaccaccauagagaaggaaauaugccccaaacuagcagaauacagaaauuggucaaagccgcaaugugacauuacaggauuugcaccuuuuucuaaggacaauucgauuaggcuuuccgcugguggggacaucugggugacaagagaaccuuaugugucaugcgauccugacaaguguuaucaauuugcccuuggacagggaacaacacuaaacaacgugcauucaaauaacacaguacgugauaggaccccuuaucggacccuauugaugaaugaguuagguguuccuuuucaucuggggaccaagcaagugugcauagcaugguccagcucaaguugucacgauggaaaagcauggcugcauguuuguauaacgggggaugauaaaaaugcaacugcuagcuucauuuacaaugggaggcuuguagauaguguuguuucaugguccaaagaaauccucaggacccaggagucagaaugcguuuguaucaauggaacuuguacaguaguaaugacugaugggagugcuucaggaaaagcugauacuaaaauacuauucauugaggaggggaaaaucguucauacuagcacauugucaggaagugcucagcaugucgaggagugcuccugcuauccucgauauccuggugucagaugugucugcagagacaacuggaaaggcuccaauaggcccaucguagauauaaacauaaaggaucauagcauuguuuccaguuauguguguucaggacuuguuggagacacacccagaaaaaacgacagcuccagcaguagccauuguuuggauccuaacaaugaagaagguggucauggagugaaaggcugggccuuugaugauggaaaugacguguggaugggaagaacgaucagcgagaagucacgcuuaggguaugaaaccuucaaagucauugaaggcugguccaacccuaaguccaaauugcagauaaauaggcaagucauaguugacagagguaauagguccgguuauucugguauuuucucuguugaaggcaaaagcugcaucaaucggugcuuuuauguggaguugauaaggggaagaaaagaggaaacugaagucuuguggaccucaaacaguauuguuguguuuuguggcaccucagguacauauggaacaggcucauggccugauggggcggacaucaaucucaugccuauauaa

SEQ ID NO: 48650 - RNA, 1413 nt, Artificial Sequence
  derived and/or modified CDS sequence (wt) from neuraminidase__InfluenzaA__ACN42984
augaauccaaaucaaaaaauaauaaccauuggaucaaucaguauagcaaucggaauaauuagucuaauguugcaaauaggaaauauuauuucaauaugggcuagucacucaauccaaacuggaagucaaaaccacacuggaauaugcaaccaaagaaucaucacauaugaaaacagcaccugggugaaucacacauauguuaauauuaacaacacuaauguuguugcuggaaaggacaaaacuucagugacauuggccggcaauucaucucuuuguucuaucaguggaugggcuauauacacaaaagacaacagcauaagaauuggcuccaagggagauguuuuugucauaagagaaccuuucauaucauguucucauuuggaaugcaggaccuuuuuucugacccaaggugcucuauuaaaugacaaacauucaaauggaaccguuaaggacagaaguccuuauagagccuuaaugagcuguccucuaggugaagcuccguccccauacaauucaaaguuugaaucaguugcauggucagcaagcgcaugccaugauggcaugggcugguuaacaaucggaauuucugguccagacaauggagcuguggcuguacuaaaauacaacggaauaauaacugaaaccauaaaaaguuggaaaaaacgaauauugagaacacaagagucugaaugugucugugugaacgggucuuguuucaccauaaugaccgauggcccgaguaauggggccgccucguacaaaaucuucaagauugaaaagggaaagguuacuaaaucaauagaguuaaaugcacccaauuuucauuaugaggaauguuccuguuacccagacacuggcacagugauguguguaugcagagacaacuggcaugguucaaaucgaccuugggugucuuuuaaucaaaacuuggauuaucaaauaggauacaucugcaguggaguguucggugacaauccgcgucccaaagauggaaagggcagcuguaauccagugacuguugauggagcagacggaguuaagggguuuucauacaaauaugguaaugguguuuggauaggaagaacuaaaaguaacaggcuuagaaagggguuugagaugauuugggauccuaauggauggacaaauaccgacagugauuucucagugaaacaggauguuguggcaauaacugauuggucaggguacaguggaaguuucguucaacauccugaguuaacaggauuggacuguauaagaccuugcuucuggguugaauuagucagaggacugccuagagaaaauacaacaaucuggacuagugggagcagcauuucuuuuuguggcguugauagugauacugcaaacuggucuuggccagacggugcugaguugccguucaccauugacaaauag

SEQ ID NO: 48651 - RNA, 1413 nt, Artificial Sequence; identical to SEQ ID NO: 48219
  derived and/or modified CDS sequence (wt) from neuraminidase__InfluenzaA__ACN42995

SEQ ID NO: 48652 - RNA, 1410 nt, Artificial Sequence
  derived and/or modified CDS sequence (wt) from neuraminidase__InfluenzaA__ACN43006
augaauccaaaucaaaagauaauaacgauuggcucuguuucucucaccauuuccacaauaugcuucuucaugcaaauugccaucuugauaacuacuguaacauugcauuucaagcaauaugaauucaacucccccccaaacaaccgagugaugcugugugaaccaacaauaauagaaagaaacauaacagagauaguguaucugaccaacaccaccauagagaaggaaauaugccccaaacuagcagaauacagaaauuggucaaagccgcaaugugacauuacaggauuugcaccuuuuucuaaggacaauucgauuaggcuuuccgcugguggggacaucugggugacaagagaaccuuaugugucaugcgauccugacaaguguuaucaauuugcccuuggacagggaacaacacuaaacaacgugcauucaaauaacacaguacgugauaggaccccuuaucggacccuauugaugaaugaguuagguguuccuuuucaucuggggaccaagcaagugugcauagcaugguccagcucaaguugucacgauggaaaagcauggcugcauguuuguauaacgggggaugauaaaaaugcaacugcuagcuucauuuacaaugggaggcuuguagauaguguuguuucaugguccaaagaaauccucaggacccaggagucagaaugcguuuguaucaauggaacuuguacaguaguaaugacugaugggagugcuucaggaaaagcugauacuaaaauacuauucauugaggaggggaaaaucguucauacuagcacauugucaggaagugcucagcaugucgaggagugcuccugcuauccucgauauccuggugucagaugugucugcagagacaacuggaaaggcuccaauaggcccaucguagauauaaacauaaaggaucauagcauuguuuccaguuauguguguucaggacuuguuggagacacacccagaaaaaacgacagcuccagcaguagccauuguuuggauccuaacaaugaagaagguggucauggagugaaaggcugggccuuugaugauggaaaugacguguggaugggaagaacgaucagcgagaagucacgcuuaggguaugaaaccuucaaagucauugaaggcugguccaacccuaaguccaaauugcagauaaauaggcaagucauaguugacagagguaauagguccgguuauucugguauuuucucuguugaaggcaaaagcugcaucaaucggugcuuuuauguggaguugauaaggggaagaaaagaggaaacugaagucuuguggaccucaaacaguauuguuguguuuuguggcaccucagguacauauggaacaggcucauggccugauggggcggacaucaaucucaugccuauauaa

SEQ ID NO: 48653 - RNA, 1410 nt, Artificial Sequence; identical to SEQ ID NO: 48648
  derived and/or modified CDS sequence (wt) from neuraminidase__InfluenzaA__ACN43017

SEQ ID NO: 48654 - RNA, 1410 nt, Artificial Sequence; identical to SEQ ID NO: 48611
  derived and/or modified CDS sequence (wt) from neuraminidase__InfluenzaA__ACN43028

SEQ ID NO: 48655 - RNA, 1410 nt, Artificial Sequence
  derived and/or modified CDS sequence (wt) from neuraminidase__InfluenzaA__ACN43039
augaauccaaaucaaaagauaauaacgauuggcucuguuucucucaccauuuccacaauaugcuucuucaugcaaauugccaucuugauaacuacuguaacauugcauuucaagcaauaugaauucaacucccccccaaacaaccaagugaugcugugugaaccaacaauaauagaaagaaacauaacagagauaguguaucugaccaacaccaccauagagaaggaaauaugccccaaacuagcagaauacagaaauuggucaaagccgcaaugugacauuacaggauuugcaccuuuuucuaaggacaauucgauuaggcuuuccgcugguggggacaucugggugacaagagaaccuuaugugucaugcgauccugacaaguguuaucaauuugcccuuggacagggaacaacacuaaacaacgugcauucaaaugacacaguacgugauaggaccccuuaucggacccuauugaugaaugaguuagguguuccuuuucaucuggagaccaagcaagugugcauagcaugguccagcucaaguugucacgauggaaaagcauggcugcauguuuguauaacgggggaugauaaaaaugcaacugcuagcuucauuuacaaugggaggcuuguagauaguguuguuucaugguccaaagaaauccucaggacccaggagucagaaugcguuuguaucaauggaacuuguacaguaguaaugacugaugggagugcuucaggaaaagcugauacuaaaauacuauucauugaggaggggaaaaucguucauaccagcacauugucaggaagugcucagcaugucgaggagugcuccugcuauccucgauauccuggugucagaugugucugcagagacaacuggaaaggcuccaauaggcccaucguagauauaaacauaaaggaucauagcauuguuuccaguuauguguguucaggacuuguuggagacacacccagaaaaaacgacagcuccagcaguagccauuguuuggauccuaacaaugaagaagguggucauggagugaaaggcugggccuuugaugauggaaaugacguguggaugggaagaacgaucagcgagaagucacgcuuaggguaugaaaccuucaaagucauugaaggcugguccaacccuaaguccaaauugcagauaaauaggcaagucauaguugacagagguaauagguccgguuauucugguauuuucucuguugaaggcaaaagcugcaucaaucggugcuuuuauguggaguugauaaggggaagaaaagaggaaacugaagucuuguggaccucaaacaguauuguuguguuuuguggcaccucagguacauauggaacaggcucauggccugauggggcggacaucaaucucaugccuauauaa

SEQ ID NO: 48656 - RNA, 1410 nt, Artificial Sequence; identical to SEQ ID NO: 48526
  derived and/or modified CDS sequence (wt) from neuraminidase__InfluenzaA__ACN43050

SEQ ID NO: 48657 - RNA, 1410 nt, Artificial Sequence; identical to SEQ ID NO: 48611
  derived and/or modified CDS sequence (wt) from neuraminidase__InfluenzaA__ACN43061

SEQ ID NO: 48658 - RNA, 1410 nt, Artificial Sequence
  derived and/or modified CDS sequence (wt) from neuraminidase__InfluenzaA__ACN43072
augaauccaaaucaaaagauaauaacgauuggcucuguuucucucaccauuuccacaauaugcuucuucaugcaaauugccaucuugauaacuacuguaacauugcauuucaagcaauaugaauucaacucccccccaaacaaccaagugaugcugugugaaccaacaauaauagaaagaaacauaacagagauaguguaucugaccaacaccaccauagagaaggaaauaugccccaaacuagcagaauacagaaauuggucaaagccgcaaugugacauuacaggauuugcaccuuuuucuaaggacaauucgauuaggcuuuccgcugguggggacaucugggugacaagagaaccuuaugugucaugcgauccugacaaguguuaucaauuugcccuuggacagggaacaacacuaaacaacgugcauucaaauaacacaguacgugauaggaccccuuaucggacccuauugaugaaugaguuagguguuccuuuucaucuggggaccaagcaagugugcauagcaugguccagcucaaguugucacgauggaaaagcauggcugcauguuuguauaacgggggaugauaaaaaugcaacugcuagcuucauuuacaaugggaggcuuguagauaguguuguuucaugguccaaagaaauccucaggacccaggagucagaaugcguuuguaucaauggaacuuguacaguaguaaugacugaugggagugcuucaggaaaagcugauacuaaaauacuauucauugaggaggggaaaaucguucauacuagcacauugucaggaagugcucagcaugucgaggagugcuccugcuauccucgauauccuggugucagaugugucugcagagacaacuggaaaggcuccaauaggcccaucguagauauaaacauaaaggaucauagcauuguuuccaguuauguguguucaggacuuguuggagacacacccagaaaaaacgacagcuccagcaguagccauuguuuggauccuaacaaugaagaagguggucauggagugaaaggcugggccuuugaugauggaaaugacguguggaugggaagaacgaucagcgagaagucacgcuuaggguaugaaaccuucaaagucauugaaggcugguccaacccuaaguccaaauugcagauaaauaggcaagucauaguugacagagguaauagguccgguuauucugguauuuucucuguugaaggcaaaagcugcaucaaucggugcuuuuauguggaguugauaaggggaagaaaagaggaaacugaagucuuguggaccucaaacaguguuguuguguuuuguggcaccucagguacauauggaacaggcucauggccugauggggcggacaucaaucucaugccuauauaa

SEQ ID NO: 48659 - RNA, 1410 nt, Artificial Sequence
  derived and/or modified CDS sequence (wt) from neuraminidase__InfluenzaA__ACN43083
augaauccaaaucaaaagauaauaacgauuggcucuguuucucucaccauuuccacaauaugcuucuucaugcaaauugccaucuugauaacuacuguaacauugcauuucaagcaauaugaauucaacuccuccccaaacaaccaagugaugcugugugaaccaacaauaauagaaagaaacauaacagagauaguguaucugaccaacaccaccauagagaaggaaauaugccccaaacuagcagaauacagaaauuggucaaagccgcaaugugacauuacaggauuugcaccuuuuucuaaggacaauucgauuaggcuuuccgcugguggggacaucugggugacaagagaaccuuaugugucaugcgauccugacaaguguuaucaauuugcccuuggacagggaacaacacuaaacaacgugcauucaaauaacacaguacgugauaggaccccuuaucggacccuauugaugaaugaguuagguguuccuuuucaucuggggaccaagcaagucugcauagcaugguccagcucaaguugucacgauggaaaagcauggcugcauguuuguauaacgggggaugauaaaaaugcaacugcuagcuucauuuacaaugggaggcuuguagauaguauuguuucaugguccaacgaaauccucaggacccaggagucagaaugcguuuguaucaauggaacuuguacaguaguaaugacugaugggagugcuucaggaaaagcugauacuaaaauacuauucauugaggaggggaaaaucguucauacuagcacauugucaggaagugcucagcaugucgaggagugcuccugcuauccucgauauccuggugucagaugugucugcagagacaacuggaaaggcuccaauaggcccaucguagauauaaacauaaaggaucauagcauuguuuccaguuauguguguucaggacuuguuggagacacacccagaaaaaacgacagcuccagcaguagccauuguuuggauccuaacaaugaagaagguggucauggagugaaaggcugggccuuugaugauggaaaugacguguggaugggaagaacgaucagcgagaagucacgcuuaggguaugaaaccuucaaagucauugaaggcugguccaacccuaaguccaaauugcagauaaauaggcaagucauaguugacagagguaauagguccgguuauucugguauuuucucuguugaaggcaaaagcugcaucaaucggugcuuuuauguggaguugauaaggggaagaaaagaggaaacugaagucuuguggaccucaaacaguauuguuguguuuuguggcaccucagguacauauggaacaggcucauggccugauggggcggacaucaaucucaugccuauauaa

SEQ ID NO: 48660 - RNA, 1410 nt, Artificial Sequence
  derived and/or modified CDS sequence (wt) from neuraminidase__InfluenzaA__ACN50231
augaauccaaaucaaaagauaauaacgauuggcucuguuucucucaccauuuccacaauaugcuucuucaugcaaauugccaucuugauaacuacuguaacauugcauuucaagcaauaugaauucaacucccccccaaacaaccaagugaugcugugugaaccaacaauaauagaaagaaacauaacagagauaguguaccugaccaacaccaccauagagaaggaaauaugccccaaacuagcagaauacagaaauuggucaaagccgcaaugugacauuacaggauuugcaccuuuuucuaaggacaauucgauuaggcuuuccgcugguggggacaucugggugacaagagaaccuuaugugucaugcgauccugacaaguguuaucaauuugcccuuggacagggaacaacacuaaacaacgugcauucaaaugacacaguacaugauaggaccccuuaucggacccuauugaugaaugaguuagguguuccauuucaucuggggaccaagcaagugugcauagcaugguccagcucaaguugucacgauggaaaagcauggcugcauguuuguguaacgggggaugauaaaaaugcaacugcuagcuucauuuacaaugggaggcuuguagauaguauuguuucaugguccaaagaaauccucaggacccaggagucagaaugcguuuguaucaauggaacuuguacaguaguaaugacugaugggagugcuucaggaaaagcugauacuaaaauacuauucauugaggaggggaaaaucguucauacuagcacauugucaggaagugcucaacaugucgaggagugcuccugcuauccucgauauccuggugucagaugugucugcagagacaacuggaaaggcuccaauaggcccaucguagauauaaacauaaaggauuauagcauuguuuccaguuaugugugcucaggacuuguuggagacacacccagaaaaaacgacagcuccagcaguagccauugcuuggauccuaacaaugaagaagguggucauggagugaaaggcugggccuuugaugauggaaaugacguguggaugggaagaacgaucagcgagaaguuacgcucaggauaugaaaccuucaaagucauugaaggcugguccaacccuaauuccaaauugcagauaaauaggcaagucauaguugacagagguaauagguccgguuauucugguauuuucucuguugaaggcaaaagcugcaucaaucggugcuuuuauguggaguugauaaggggaagaaaagaggaaacugaagucuuguggaccucaaacaguauuguuguguuuuguggcaccucagguacauauggaacaggcucauggccugauggggcggacaucaaucucaugccuauauaa

SEQ ID NO: 48661 - RNA, 1410 nt, Artificial Sequence
  derived and/or modified CDS sequence (wt) from neuraminidase__InfluenzaA__ACN50233
augaauccaaaucaaaagauaauaacgauuggcucuguuucucucaccauuuccacaauaugcuucuucaugcaaauugccaucuugauaacuacuguaacauugcauuucaagcaauaugaauucaacucccccccaaauaaccaagugaugcugugugaaccaacaauaauagaaagaaacauaacagagauaguguaucugaccaacaccacaauagagaaggaaauaugccccaaauuagcagaguacagaaauuggucaaagccgcaaugugacauuacaggauuugcaccuuuuucuaaggacaauucgauuaggcuuuccgcugguggggacaucugggugacaagagaaccuuaugugucaugcgauccugacaaguguuaucaauuugcccuuggacagggaacaacacuaaacaacgugcauucaaaugacacaguacaugauaggaccccuuaucggacccuauugaugaaugaguuagguguuccauuucaucuggggaccaagcaagugugcauagcaugguccagcucaaguugucacgauggaaaagcauggcugcauguuuguguaacgggggaugauaaaaaugcaacugcuagcuucauuuacaaugggaggcuuguagauaguauuguuucaugguccaaagaaauccucaggacccaggagucagaaugcguuuguaucaauggaacuuguacaguaguauugacugaugggagugcuucaggaaaagcugauacuaaaauacuauucauugaggaggggaaaaucguucauacuagcaaauugucaggaagugcucagcaugucgaggagugcuccugcuauccucgauauccuggugucagaugugucugcagagacaacuggaaaggcuccaauaggcccauuguagauauaaacauaaaggauuauagcauuguuucuaguuauguuugcucaggacuuguuggagacacacccagaaaaaacgacagcuccagcaguggccauugcuuggauccuaacaaugaagaagguggucauggagugaaaggcugggccuuugaugauggaaaugacguguggaugggaagaacgaucagcgagaaguuacgcucaggauaugaaaccuucaaagucauugaaggcugguccaacccuaauuccaaauugcagauaaauaggcaagucauaguugacagagguaauagguccgguuauucugguauuuucuccguugaaggcaaaagcugcaucaaucggugcuuuuauguggaguugauaaggggaagaaaagaggaaacugaaguccuguggaccucaaacaguauuguuguguuuuguggcaccucagguacauauggaacaggcucauggccugauggggcggacaucaaucucaugccuauauaa

SEQ ID NO: 48662 - RNA, 1410 nt, Artificial Sequence
  derived and/or modified CDS sequence (wt) from neuraminidase__InfluenzaA__ACN50245
augaauccaaaucaaaagauaauaacgauuggcucuguuucucucaccauuuccacaauaugcuucuucaugcaaauugccaucuugauaacuacuguaacauugcauuucaagcaauaugaauucaacucccccccaaacaaccaaguggugcugugugaaccaacaauaauagaaagaaacauaacagagauaguguaucugaccaacaccaccauagagaaggaaauaugccccaaacuagcagaauacagaaauuggucaaagccgcaaugugacauuacaggauuugcaccuuuuucuaaggacaauucgauuaggcuuuccgcugguggggacaucugggugacaagagaaccuuaugugucaugcgauccugacaaguguuaucaauuugcccuuggacagggaacaacacuaaacaacgugcauucaaaugacacaguacgugauaggaccccuuaucggacccuauugaugaaugaguuagguguuccuuuucaucuggggaccaagcaagugugcauagcaugguccagcucaaguugucacgauggaaaagcauggcugcauguuuguauaacgggggaugacaaaaaugcaacugcuagcuucauuuacaaugggaggcuuguagauaguauuguuucaugguccaaagaaauccucaggacccaggagucagaaugcguuuguaucaauggaacuuguacaguaguaaugacugaugggagugcuucaggaaaagcugauacuaaaauacuauucauugaggaggggaaaaucguucauacuagcacauugucaggaagugcucagcaugucgaggagugcuccugcuauccucgauauccuggugucagaugugucugcagagacaacuggaaaggcuccaauaggcccaucguagauauaaacauaaaggaucauagcauuguuuccaguuauguguguucaggacuuguuggagacacacccagaaaaaacgacagcuccagcaguagccauuguuuggauccuaacaaugaagaagguggucauggagugaaaggcugggccuuugaugauggaaaugacguguggaugggaagaacgaucagcgagaagucacgcuuaggguaugaaaccuucaaagucauugaaggcugguccaacccuaaguccaaauugcagauaaauaggcaagucauaguugacagaggugauagguccgguuauucugguauuuucucuguugaaggcaaaagcugcaucaaucggugcuuuuauguggaguugauaaggggaagaaaagaggaaacugaagucuuguggaccucaaacaguauuguuguguuuuguggcaccucagguacauauggaacaggcucauggccugauggggcggacaucaaucucaugccuauauaa

SEQ ID NO: 48663 - RNA, 1413 nt, Artificial Sequence
  derived and/or modified CDS sequence (wt) from neuraminidase__InfluenzaA__ACN72609
augaacccaaaucaaaagauaauaaccauuggaucaaucaguauagcaaucggaauaauuagucuaauguugcaaauaggaaauauuauuucaauaugggcuagucacucaauccaaacuggaagucaaaacaacacuggaauaugcaaccaaagaaucaucacauaugaaaacagcaccugggugaaucacacauauguuaauauuaacaacacuaauguuguugcuggagaggacaaaacuucagugacauuggccggcaauucaucucuuuguucuaucaguggaugggcuauauacacaaaagacaacagcauaagaauuggcuccaaaggagauguuuuugucauaagagaaccuuucauaucauguucucacuuggaaugcagaaccuuuuuucugacccaaggcgcucuauuaaaugacaaacauucaaaugggaccguaaaggacagaaguccuuauagggccuuaaugagcuguccucuaggugaagcuccguccccauacaauucaaaguucgaaucaguugcauggucagcaagcgcaugccaugauggcaugggcugguuaacaaucggaauuucugguccagacaauggagcuguggcugugcuaaaauacaacggaauaauaacuggaaccauaaaaaguuggaaaaagcaaauauuaagaacacaagagucugaauguguuuguaugaacgggucauguuucaccauaaugaccgauggcccgaguaauaaggccgccucguacaaaauuuucaagaucgaaaaggggaagguuacuaaaucaauagaguugaaugcacccaauuuucauuaugaggaaugcuccuguuacccagacacuggcauagugauguguguaugcagggacaacuggcaugguucaaaucgaccuugggugucuuuuaaucaaaacuuggauuauaaaauaggauacaucugcaguggaguguuuggugacaauccgcgucccgaagauggagagggcagcugcaauccagugacuguugauggagcaaacggaguaaaaggguuuucauacaaauaugauaaugguguuuggauaggaaggaccaaaaguaacagacuuagaaagggguuugagaugauuugggauccuaauggauggacaaauaccgacagugauuucucagugaaacaggauguuguagcaauaacugauuggucaggguacagcggaaguuucguccaacauccugaguuaacaggauuggacuguauaagaccuugcuucuggguugaguuagucagagggcugccuagagaaaauacaacaaucuggacuagugggagcagcauuucuuuuuguggcguuaauagugauacugcaaacuggucuuggccagacggugcugaguugccguucaccauugacaaguag

SEQ ID NO: 48664 - RNA, 1410 nt, Artificial Sequence
  derived and/or modified CDS sequence (wt) from neuraminidase__InfluenzaA__ACN72621
augaauccaaaucagaagauaauaaucauuagcucaaucuguaugacaaauggaauugcuagcuugauauuacaaauugggaacauaaucucaauauggauuagccauucaauucaaacugggaaccaaaaccagaccgaaacaugcaaucaaagcguuauuauuuacgaaaacaacacuuggguaaaucagacauaugucaacaucaguaacaacaauuuuguugcugaacagacaguaguuccagugaaauuagugggcaguucuccucucugcccuguuagugggugggcuauauacaguaaagauaacaguguaagaaucgguuccaaaggggauguguuugucauaagagagccauucaucucaugcucccacuuggaauguagaaccuucuucuuaacucaaggggcccugcugaaugacaaacacuccaauggaaccguuaaagacagaagccccuaucgaacccugaugagcuguccuauuggugaaguccccucuccauacaacucaagauuugagucaguugcuuggucagcaagugcuugccaugauggcuccaguugguugacaauuggaauuucuggcccggacaauggggcaguggcugugcugaaauacaaugacauaauaacagacacuaucaagaguuggaaaaacaacauauugagaacacaagagucugaaugugcaugcuugaauggcucuugcuuuacuguaaugaccgauggaccaaguaaugggcaggccucauacaaaaucuucaaaauagaaaaggggaaaguagucaaaucagucgaguugaaugcuccuaauuaucacuaugaagaguguuccuguuauccugauucuggugaaaucauaugugugugcagggacaauuggcauggcucgaaucgaccaugggugucuuucaaucagaaucuggaauaucaaauaggauacauaugcagugggguucucggagacaauccgcgcccuaaugauagaacaggcaauugugguccaguaucaucucauggagcaaaugggguaaaaggguuuucguuuaaauacggcgaugguauuuggauagggagaacuaaaagcacuaguucaaggagcgguuuugagaugauuugggacccaaacggauggacuggaacagacaauaauuucucaguaaagcaagauauuguaggaauaacugacuggacaggauacagcgggaguuuuguccagcauccagaauuaaccggauuggauuguauuagaccuugcuucuggguugaacuaaucagagggagacccaaagagaacacaaucuggacuagcgggagcagcauauccuuuugugguguaaauagugacacuguggguuggucuuggccagacggugcugaguugccauuuaccauugacaaguaa

SEQ ID NO: 48665 - RNA, 1410 nt, Artificial Sequence; identical to SEQ ID NO: 48526
  derived and/or modified CDS sequence (wt) from neuraminidase__InfluenzaA__ACN76503

SEQ ID NO: 48666 - RNA, 1410 nt, Artificial Sequence
  derived and/or modified CDS sequence (wt) from neuraminidase__InfluenzaA__ACO36345
augaauccaaaucaaaagauaauaacgauuggcucuguuucucucaccauuuccacaauaugcuucuucaugcaaauugccaucuugauaacuacuguaacauugcauuucaagcaauaugaauucaacuccuccccaaacaaccaagugaugcagugugaaccaacaauaauagaaagaaacauaacagagauaguguaucugaccaacaccaccauagagaaggaaauaugccccaaacuagcagaauacagaaauuggucaaagccgcaaugugacauuacaggauuugcaccuuuuucuaaggacaauucgauuaggcuuuccgcugguggggacaucugggugacaagagaaccuuaugugucaugcgauccugacaaguguuaucaauuugcccuuggacagggaacaacacuaaacaacgugcauucaaauaacacaguacgugauaggaccccuuaucggacccuauugaugaaugaguuagguguuccuuuucaucuggggaccaagcaagucugcauagcaugguccagcucaaguugucacgauggaaaagcauggcugcauguuuguauaacgggggaugauaaaaaugcaacugcuagcuucauuuacaaugggaggcuuguagauaguauuguuucaugguccaaagaaauccucaggacccaggagucagaaugcguuuguaucaauggaacuuguacaguaguaaugacugacgggagugcuucaggaaaagcugauacuaaaauacuauucauugaggaggggaaaaucguucauacuagcacauugucaggaagugcucagcaugucgaggagugcuccugcuauccucgauauccuggugucagaugugucugcagagacaacuggaaaggcuccaauaggcccaucguagauauaaacauaaaggaucauagcauuguuuccaguuauguguguucaggacuuguuggagacacacccagaaaaaacgacagcuccagcaguagccauuguuuggauccuaacaaugaagaagguggucauggagugaaaggcugggccuuugaugauggaaaugacguguggaugggaagaacgaucagcgagaagucacgcuuaggguaugaaaccuucaaagucauugaaggcugguccaacccuaaguccaaauugcagauaaauaggcaagucauaguugacagagguaauagguccgguuauucugguauuuucucuguugaaggcaaaagcugcaucaaucggugcuuuuauguggaguugauaaggggaagaaaagaggaaacugaagucuuguggaccucaaacaguauuguuguguuuuguggcaccucagguacauauggaacaggcucauggccugauggggcggacaucaaucucaugccuauauaa

SEQ ID NO: 48667 - RNA, 1410 nt, Artificial Sequence; identical to SEQ ID NO: 46992
  derived and/or modified CDS sequence (wt) from neuraminidase__InfluenzaA__ACO36356

SEQ ID NO: 48668 - RNA, 1410 nt, Artificial Sequence
  derived and/or modified CDS sequence (wt) from neuraminidase__InfluenzaA__ACO36367
augaauccaaaucaaaagauaauaacgauuggcucuguuucucucaucaucuccacaauaugcuucuucaugcaaacugccaucuugauaacuacuguaacauugcauuucaagcaauaugaauucaacucccccccaaacaaccaagugaugcugugugaaccaacaauaauagaaagaaacauaacagagauaguguaucugaccaacaccaccauagagaaggaaauaugccccaaacuagcagaauacagaaauuggucaaagccgcaaugugacauuacaggauuugcaccuuuuucuaaggacaauucgauuaggcuuuccgcugguggggacaucugggugacaagagaaccuuaugugucaugcgauccugacaaguguuaucaauuugcccuuggacagggaacaacacuaaacaacgugcauucaaaugacacaguacguaauaggaccccuuaucggacccuauugaugaaugaguuagguguuccuuuucaucuggggaccaagcaagugugcauagcaugguccagcucaaguugucacgauggaaaagcauggcugcauguuuguauaacgggggaugauaaaaaugcaacugcuagcuucauuuacaaugggaggcuuguagauaguauuguuucaugguccaaagaaauccucaggacccaggagucagaaugcguuuguaucaauggaacuuguacaguaguaaugacugaugggagugcuucaggaaaagcugauacuaaaauacuauucauugaggaggggaaaaucguucauacuagcacauugucaggaagugcucagcaugucgaggagugcuccugcuauccucgauauccuggugucagaugugucugcagagacaacuggaaaggcuccaauaggcccaucguagauauaaacauaaaggaucauagcauuguuuccaguuauguguguucaggacuuguuggagacacacccagaaaaaacgacagcuccagcaguagccauuguuuggauccuaacaaugaagaagguggucauggagugaaaggcugggccuuugaugauggaaaugacguguggaugggaagaacgaucagcgagaagucacgcuuaggguaugaaaccuucaaagucauugaaggcugguccaacccuaaguccaaauugcagauaaauaggcaagucauaguugacagagguaauagguccgguuauucugguauuuucucuguugaaggcaaaagcugcaucaaucggugcuuuuauguggaguugauaaggggaagaaaagaggaaacugaagucuuguggaccucaaacaguauuguuguguuuuguggcaccucagguacauuuggaacaggcucauggccugauggggcggacaucaaucucaugccuauauaa

SEQ ID NO: 48669 - RNA, 1413 nt, Artificial Sequence
  derived and/or modified CDS sequence (wt) from neuraminidase__InfluenzaA__ACO36400
augaacccaaaucaaaagauaauaaccauuggaucaaucaguauagcaaucggaauaauuagucuaauguugcaaauaggaaauauuauuucaauaugggcuagucacucaauccaaacuggaagucaaaacaacacuggaauaugcaaccaaagaaucaucacauaugaaaacagcaccugggugaaucacacauauguuaauauuaacaacacuaauguuguugcuggagaggacaaaacuucagugacauuggccggcaauucaucucuuuguucuaucaguggaugggcuauauacacaaaagacaacagcauaagaauuggcuccaaaggagauguuuuugucauaagagaaccuuucauaucauguucucacuuggaaugcagaaccuuuuuucugacccaaggcgcucuauuaaaugacaaacauucaaaugggaccguaaaggacagaaguccuuauagggccuuaaugagcuguccucuaggugaagcuccguccccauacaauucaaaguucgaaucaguugcauggucagcaagcgcaugccaugauggcaugggcugguuaacaaucggaauuucugguccagacaauggagcuguggcugugcuaaaauacaacggaauaauaacuggaaccauaaaaaguuggaaaaagcaaauauuaagaacacaagagucugaaugugucuguaugaacgggucauguuucaccauaaugaccgauggcccgaguaauaaggccgccucguacaaaauuuucaagaucgaaaaggggaagguuacuaaaucaauagaguugaaugcacccaauuuucauuaugaggaaugcuccuguuacccagacacuggcauagugauguguguaugcagggacaacuggcaugguucaaaucgaccuugggugucuuuuaaucaaaacuuggauuaucaaauaggauacaucugcaguggaguguuuggugacaauccgcgucccgaagauggagagggcagcugcaauccagugacuguugauggagcaaacggaguaaaaggguuuucauacaaauaugauaaugguguuuggauaggaagaaccaaaaguaacagacuuagaaagggguuugagaugauuugggauccuaauggauggacaaauaccgauagugauuucucagugaaacaggauguuguagcaauaacugauuggucaggguacagcggaaguuucguccaacauccugaguuaacaggauuggacuguauaagaccuugcuucuggguugaguuagucagagggcugccuagagaaaauacaacaaucuggacuagugggagcagcauuuccuuuuguggcguuaauagugauacugcaaacuggucuuggccagacggugcugaguugccguucaccauugacaaguag

SEQ ID NO: 48670 - RNA, 1410 nt, Artificial Sequence
  derived and/or modified CDS sequence (wt) from neuraminidase__InfluenzaA__ACO36411
augaauccaaaucaaaagauaauaacgauuggcucuguuucucucaccauuuccacaauaggcuucuucaugcaaacugccaucuugauaacuacuguaacauugcauuucaagcaauaugaauucaacucccccccaaacaaccaagugaugcugugugaaccaacaauaauagaaagaaacauaacagagauaguguaucugaccaacaccaccauagagaaggaaauaugccccaaacuagcagaauacagaaauuggucaaagccgcaaugugacauuacaggauuugcaccuuuuucuaaggacaauucgauuaggcuuuccgcugguggggacaucugggugacaagagaaccuuaugugucaugcgauccugacaaguguuaucaauuugcccuuggacagggaacaacacuaaacaacgugcauucaaaugacacaguacgugguaggaccccuuaucggacccuauugaugaaugaguuagguguuccuuuucaucuggggaccaagcaagugugcauagcaugguccagcucaaguugucacgauggaaaagcauggcugcauguuuguauaacgggggaugauaaaaaugcaacugcuagcuucauuuacaaugggaggcuuguagauaguauuguuucaugguccaaagaaauccucaggacccaggagucagaaugcguuuguaucaauggaacuuguacaguaguaaugacugaugggagugcuucaggaaaagcugauacuaaaauacuauucauugaggaggggaaaaucguucauacuagcacauugucaggaagugcucagcaugucgaggagugcuccugcuauccucgauauccuggugucagaugugucugcagagacaacuggaaaggcuccaauaggcccaucguagauauaaacauaaaggaucauagcauuguuuccaguuauguguguucaggacuuguuggagacacacccagaaaaaacgacagcuccagcaguagccauuguuuggauccuaacaaugaagaagguggucauggagugaaaggcugggccuuugaugauggaaaugacguguggaugggaagaacgaucagcgagaagucacgcuuaggguaugaaaccuucaaagucauugaaggcugguccaacccuaaguccaaauugcagauaaauaggcaagucauaguugacagagguaauagguccgguuauucugguauuuucucuguugaaggcaaaagcugcaucaaucggugcuuuuauguggaguugauaaggggaagaaaagaggaaacugaagucuuguggaccucaaacaguauuguuguguuuuguggcaccucagguacauauggaacaggcucauggccugauggggcggacaucaaucucaugccuauauaa

SEQ ID NO: 48671 - RNA, 1410 nt, Artificial Sequence
  derived and/or modified CDS sequence (wt) from neuraminidase__InfluenzaA__ACO36422
augaauccaaaucaaaagauaauaacgauuggcucuguuucucucaucauuuccacaauaugcuucuucaugcaaacugccaucuugauaacuacuguaacauugcauuucaagcaauaugaauucaacucccccccaaacaaccaagugaugcugugugaaccaacaauaauagaaagaaacauaacagagauaguguaucugaccaacaccaccauagagaaggaaauaugccccaaacuagcagaauacagaaauuggucaaagccgcaaugugacauuacaggauuugcaccuuuuucuaaggacaauucgauuaggcuuuccgcugguggggacaucugggugacaagagaaccuuaugugucaugcgauccugacaaguguuaucaauuugcccuuggacagggaacaacacuaaacaacgugcauucaaaugacacaguacgugguaggaccccuuaucggacccuauugaugaaugaguuagguguuccuuuucaucuggggaccaagcaagugugcauagcaugguccagcucaaguugucacgauggaaaagcauggcugcauguuuguauaacgggggaugauaaaaaugcaacugcuagcuucauuuacaaugggaggcuuguagauaguauuguuucaugguccaaagaaauccucaggacccaggagucagaaugcguuuguaucaauggaacuuguacaguaguaaugacugaugggagugcuucaggaaaagcugauacuaaaauacuauucauugaggaggggaaaaucguucauacuagcacauugucaggaagugcucagcaugucgaggagugcuccugcuauccucgauauccuggugucagaugugucugcagagacaacuggaaaggcuccaauaggcccaucguagauauaaacauaaaggaucauagcauuguuuccaguuauguguguucaggacuuguuggagacacacccagaaaaaacgacagcuccagcaguagccauuguuuggauccuaacaaugaagaagguggucauggagugaaaggcugggccuuugaugauggaaaugacguguggaugggaagaacgaucagcgagaagucacgcuuaggguaugaaaccuucaaagucauugaaggcugguccaacccuaaguccaaauugcagauaaauaggcaagucauaguugacagagguaauagguccgguuauucugguauuuucucuguugaaggcaaaagcugcaucaaucggugcuuuuauguggaguugauaaggggaagaaaagaggaaacugaagucuuguggaccucaaacaguauuguuguguuuuguggcaccucagguacauauggaacaggcucauggccugauggggcggacaucaaucucaugccuauauaa

SEQ ID NO: 48672 - RNA, 1410 nt, Artificial Sequence
  derived and/or modified CDS sequence (wt) from neuraminidase__InfluenzaA__ACO36433
augaauccaaaucaaaagauaauaacgauuggcucuguuucucucaucauuuccacaauaugcuucuucaugcaaacugccaucuugauaacuacuguaacauugcauuucaagcaauaugaauucaacucccccccaaacaaccaagugaugcugugugaaccaacaauaauagaaagaaacauaacagagauaguguaucugaccaacaccaccauagagaaggaaauaugccccaaacuagcagaauacagaaauuggucaaagccgcaaugugacauuacaggauuugcaccuuuuucuaaggacaauucgauuaggcuuuccgcugguggggacaucugggugacaagagaaccuuaugugucaugcgauccugacaaguguuaucaauuugcccuuggacagggaacaacacuaaacaacgugcauucaaaugacacaguacgugauaggaccccuuaucggacccuauugaugaaugaguuagguguuccuuuucaucuggggaccaagcaagugugcauagcaugguccagcucaaguugucacgauggaaaagcauggcugcauguuuguauaacgggggaugauaaaaaugcaacugcuagcuucauuuacaaugggaggcuuguagauaguauuguuucaugguccaaagaaauccucaggacccaggagucagaaugcguuuguaucaauggaacuuguacaguaguaaugacugaugggagugcuucaggaaaagcugauacuaaaauacuauucauugaggaggggaaaaucguucauacuagcacauugucaggaagugcucagcaugucgaggagugcuccugcuauccucgauauccuggugucagaugugucugcagagacaacuggaaaggcuccaauaggcccaucguagauauaaacauaaaggaucauagcauuguuuccaguuauguguguucaggacuuguuggagacacacccagaaaaaacgacagcuccagcaguagccauuguuuggauccuaacaaugaagaagguggucauggagugaaaggcugggccuuugaugauggaaaugacguguggaugggaagaacgaucagcgagaagucacgcuuaggguaugaaaccuucaaagucauugaaggcugguccaacccuaaguccaaauugcagauaaauaggcaagucauaguugacagagguaauagguccgguuauucugguauuuucucuguugaaggcaaaagcugcaucaaucggugcuuuuauguggaguugauaaggggaagaaaagaggaaacugaagucuuguggaccucaaacaguauuguuguguuuuguggcaccucagguacauauggaacaggcucauggccugauggggcggacaucaaucucaugccuauauaa

SEQ ID NO: 48673 - RNA, 1410 nt, Artificial Sequence
  derived and/or modified CDS sequence (wt) from neuraminidase__InfluenzaA__ACO36444
augaauccaaaucaaaagauaauaacaauuggcucuguuucucucaccauugccacaauaugcuuccuuaugcaaauugccauccugguaacuacuguaacauugcauuucaagcagcaugaaugcaacucccccccaaacaaccaaguaaugcugugugaaccaacaauaauagaaagaaacauaacagagauaguguaucugaccaacaccaccauagagaaggaaaaaugccccaaacuagcagaauacagaaauuggucaaagccgcaauguaacauuacaggauuugcaccuuuuucuaaggacaauucgauucgacuuuccgcugguggggacaucugggugacaagagaaccuuaugugucaugcgauccugacaaguguuaucaauuugcccuugggcagggaacaacacuaaacaacgggcauucaaauaacacaguacaugauaggaccccuuaccggacccuauugaugaaugaauuggguguuccauuucauuugggaaccaggcaagugugcauagcaugguccagcucaaguugucacgauggaaaagcauggcugcauguuuguguaacuggggaugauaaaaaugcaacugcuagcuucauuuacaaugggaggcuuguagauaguauugguucaugguccaaaaaaauacucagaacccaggagucggaaugcguuuguaucaauggaacuuguacaguaguaaugacugaugggagcgcuucagaaaaagcugauacuaaaauacuauucauugaggaggggaaaaucguucauauuagcacauugucaggaagugcucagcaugucgaggagugcuccuguuauccucgauauccuggugucagaugugucugcagagacaacuggaaaggcuccaauaggcccauuguagauauaaauguaaaggauuauagcauuguuuccaguuaugugugcucaggacuuguuggagacacacccagaaaaaacgacagcuucagcaguagccauugccuagauccuaacaaugaggaagguggucauggagugaaaggcugggccuuugaugauggaaaugacguguggaugggaagaacgaucagcgagaaguuacgcucagguuaugaaaccuucaaagucaucgaaggcugguccaaaccuaacuccaaauuacagauaaauaggcaaguuauaguugaaagagguaacagguccgguuauucugguauuuucuccguugaaggcaaaagcugcaucaaucggugcuuuuauguggaguugauaaggggaaggaaagaggaaacugaagucugguggaccucaaacaguauuguuguguuuuguggcaccucagguacauauggaacaggcucauggccugauggggcggauaucaaucucaugccuauauaa

SEQ ID NO: 48674 - RNA, 1410 nt, Artificial Sequence
  derived and/or modified CDS sequence (wt) from neuraminidase__InfluenzaA__ACO36466
augaauccaaaucaaaagauaauaacgauuggcucuguuucucucaccauuuccacaauaugcuucuucaugcaaauugcuauucugauaacuacuguaacauugcauuucaagcaauaugaauucaacucccccccaaacaaccaagugaugcugugugaaccaacaauaauagaaagaaacauaacagagauagcguaucugaccaacaccaccauagagaaggaaauaugccccaaacuagcagaauauagaaauuggucaaagccgcaauguaacauuacaggauuugcaccuuuuucuaaggacaauucgauucggcuuuccgcugguggggacaucugggugacaagagaaccuuaugugucaugcgauccugacaaguguuaucaauuugcccuuggacagggaacaacacuaaacaacgugcauucaaaugacacaguacaugauaggaccccuuaucggacccuauugaugaaugaguuggguguuccauuucaucuggggaccaagcaagugugcauagcaugguccagcucaaguugucacgauggaaaagcauggcugcauguuuguguaacgggggaugaugaaaaugcaacugcuagcuucauuuacaaugggaggcuuguagauaguguuguuucaugguccaaaaaaauccucaggacccaggagucagaaugcguuuguaucaauggaacuuguacaguaguaaugacugaugggagugcuucaggaaaagcugauacuaaaauacuauucauugaggaggggaaaaucguucauacuagcacauugucaggaagugcucagcaugucgaggagugcuccuguuauccucgauauccuggugucagaugugucugcagagacaacuggaaaggauccaauaggcccaucguagauauaaacauaaaggauuauagcauuguuuccagcuaugugugcucaggacuuguuggagacacacccagaaaaaacgacagcuccagcaguagccauugcuuggauccaaacaaugaagaagguggucauggagugaaaggcugggccuuugaugaugggaaugacguguggaugggaagaacgaucagcgagaaguuacgcucaggauaugaaaccuucaaagucauugaaggcugguccaauccuaacuccaaauugcagauaaauaggcaagucauaguugacagagguaauagguccgguuauucugguauuuucucuguugaaggcaaaagcugcaucaaucggugcuuuuauguggaguugauaaggggaagaaaccaggaaacugaagucuuguggaccucaaacaguauuguuguguuuuguggcaccucagguacauauggaacaggcucauggccugauggggcggacaucaaucucaugccuauauaa

SEQ ID NO: 48675 - RNA, 1410 nt, Artificial Sequence
  derived and/or modified CDS sequence (wt) from neuraminidase__InfluenzaA__ACO36477
augaauccaaaucaaaagauaauaacaauuggcucuguuucucucaccauugccacaauaugcuuccuuaugcaaauugccauccugguaacuacuguaacauugcauuucaagcagcaugaaugcaacucccccccaaacaaccaaguaaugcugugugaaccaacaauaauagaaagaaacauaacagagauaguguaucugaccaacaccaccauagagaaggaaauaugccccaaacuagcagaauacagaaauuggucaaagccgcaauguaacauuacaggauuugcaccuuuuucuaaggacaauucgauucggcuuuccgcugguggggacaucugggugacaagagaaccuuaugugucaugcgauccugacaaguguuaucaauuugcccuugggcagggaacaacacuaaacaacgggcauucaaaugacacaguacaugauaggaccccuuaccggacccuauugaugaaugaauuggguguuccauuucauuugggaaccaggcaagugugcauagcaugguccagcucaaguugucacgauggaaaagcguggcugcauguuuguguaacuggggaugauaaaaaugcaacugcuagcuucauuuacaaugggaggcuuguagauaguauugguucaugguccaaaaauauacucagaacccaggagucggaaugcguuuguaucaauggaacuuguacaguaguaaugacugaugggagcgcuucaggaaaagcugauacuaaaauacuauucauugaggaggggaaaaucguucauauuagcacauugucgggaagugcucagcaugucgaggagugcuccuguuauccucgauauccuggugucagaugugucugcagagacaacuggaaaggcuccaauaggcccauuguagauauaaauguaaaggauuauagcauuguuuccaguuaugugugcucaggacuuguuggagacacacccagaaaaaacgacagcuucagcaguagccauugccuagauccuaacaaugaggaagguggucauggagugaaaggcugggcuuuugaugauggaaaugacguguggaugggaagaacgaucagcgagaaguuacgcucagguuaugaaaccuucaaagucaucgaaggcugguccaaaccuaacuccaaauuacagauaaauaggcaaguuauaguugaaagagguaacagguccgguuauucugguauuuucuccguugaaggcaaaagcugcaucaaucggugcuuuuauguggaguugauaaggggaaggaaagaggaaacugaagucugguggaccucaaacaguauuguuguguuuuguggcaccucagguacauauggaacaggcucauggccugauggggcggauaucaaucucaugccuauauaa

SEQ ID NO: 48676 - RNA, 1410 nt, Artificial Sequence
  derived and/or modified CDS sequence (wt) from neuraminidase__InfluenzaA__ACO36499
augaauccaaaucaaaagauaauaacgauuggcucuguuucucucaccauuuccacaauaugcuucuucaugcaaauugccauucugauaacuacuguaacauugcauuucaagcaauaugaauucaacucccccccaaacaaccaagugaugcugugugaaccaacaauaauagaaagaaacauaacagagauaguguaucugaccaacaccaccauagagaaggaaauaugccccaaacuagcagaauacagaaauuggucaaagccgcaauguaacauuacaggauuugcaccuuuuucuaaggacaauucgauucggcuuuccgcugguggggacaucugggugacaagagaaccuuaugugucaugcgauccugacaaguguuaucaauuugcccuuggacagggaacaacacuaaacaacgugcauucaaaugacacaguacaugauaggaccccuuaucggacccuauugaugaaugaauuggguguuccauuucaucuggggaccaagcaagugugcauagcaugguccagcucaaguugucacgauggaaaagcauggcugcauguuuguguaacgggggaugauaaaaaugcaacugcuagcuucauuuacaaugggaggcuuguagauaguguuguuucaugguccaaaaaaauccucaggacccaggagucagaaugcguuuguaucaauggaacuuguacaguaguaaugacugaugggagugcuucaggaaaagcugauacuaaaauacuauucauugaggaggggaaaaucguucauacuagcacauugucaggaagugcucagcaugucgaggagugcuccuguuauccucgauauccuggugucagaugugucugcagagacaacuggaaaggcuccaauaggcccaucguagauauaaacauaaaggauuauagcauuguuuccagcuaugugugcucaggacuuguuggagacacacccagaaaaaacgacagcuccagcaguagccauugcuuggauccaaacaaugaagaagguggucauggagugaaaggcugggccuuugaugauggaaaugacguauggaugggaagaacgaucagcgagaaguuacgcucaggauaugaaaccuucaaagucauugaaggcugguccaacccuaacuccaaauugcagauaaauaggcaagucauaguugacagagguaauagguccgguuauucugguauuuucucuguugaaggcaaaagcugcaucaaucgaugcuuuuauguggaguugauaaggggaagaaaccaggaaacugaagucuuguggaccucaaacaguauuguuguguuuuguggcaccucagguacauauggaacaggcucauggccugauggggcggacaucaaucucaugccuauauaa

SEQ ID NO: 48677 - RNA, 1410 nt, Artificial Sequence
  derived and/or modified CDS sequence (wt) from neuraminidase__InfluenzaA__ACO36510
augaauccaaaucaaaagauaauaacgauuggcucuguuucucucaccauuuccacaauaugcuucuucaugcaaauugccaucuugauaacuacuguaacauugcauuucaagcaauaugaauucaacucccccccaaacaaccaagugaugcugugugaaccaacaauaauagaaagaaacauaacagagauaguguaucugaccaacaccaccauagagaaggaaauaugccccaaacuagcagaauacagaaauuggucaaagccgcaaugugacauuacaggauuugcaccuuuuucuaaggacaauucgauuaggcuuuccgcugguggggacaucugggugacaagagaaccuuaugugucaugcgauccugacaaguguuaucaauuugcccuuggacagggaacaacacuaaacaacgugcauucaaaugacacaguacaugauaggaccccuuaucggacccuauugaugaaugaguuagguguuccauuucaucuggggaccaagcaagugugcauagcaugguccagcucaaguugucacgauggaaaagcauggcugcauguuuguguaacgggggaugauaaaaaugcaacugcuagcuucauuuacaaugggaggcuuguagauaguauuguuucaugguccaaagaaauccucaggacccaggagucagaaugcguuuguaucaauggaacuuguacaguaguaaugacugaugggagugcuucaggaaaagcugauacuaaaauacuauucauugaggaggggaaaaucguucauacuagcacauugucaggaagugcucagcaugucgaggagugcuccugcuauccucgauauccuggugucagaugugucugcagagacaacuggaaaggcuccaauaggcccauaguagauauaaacauaaaggauuauagcauuguuuccaguuaugugugcucaggacuuguuggagacacacccagaaaaaacgacagcuccagcaguagccauugcuuggauccuaacaaugaagaagguggucauggagugaaaggcugggccuuugaugauggaaaugacguguggaugggaagaacgaucagcgagaaguuacgcucaggauaugaaaccuucaaagucauugaaggcugguccaacccuaauuccaaauugcagauaaauaggcaagucauaguugacagagguaauagguccgguuauucugguauuuucucuguugaaggcaaaagcugcaucaaucggugcuuuuauguggaguugauaaggggaagaaaagaggaaacugaagucuuguggaccucaaacaguauuguuguguuuuguggcaccucagguacauauggaacaggcucauggccugauggggcggacaucaaucucaugccuauauaa

SEQ ID NO: 48678 - RNA, 1410 nt, Artificial Sequence
  derived and/or modified CDS sequence (wt) from neuraminidase__InfluenzaA__ACO36543
augaauccaaaucaaaagauaauaacgauuggcucuguuucucucaccauuuccacaauaugcuucuucaugcaaauugccaucuugauaacuacuguaacauugcauuucaagcaauaugaauucaacucccccccaaacaaccaagugaugcugugugaaccaacaauaauagaaagaaacauaacagagauaguguaucugaccaacaccaccauagagaaggaaauaugccccaaacuagcagaauacagaaauuggucaaagccgcaaugugacauuacaggauuugcaccuuuuucuaaggacaauucgauuaggcuuuccgcugguggggacaucugggugacaagagaaccuuaugugucaugcgauccugacaaguguuaucaauuugcccuuggacagggaacaacacuaaacaacgugcauucaaaugacacaguacaugauaggaccccuuaucggacccuauugaugaaugaguuagguguuccauuucaucuggggaccaagcaagugugcauagcaugguccagcucaaguugucacgauggaaaagcauggcugcauguuuguguaacgggggaugauaaaaaugcaacugcuagcuucauuuacaaugggaggcuuguagauaguauuguuucaugguccaaagaaauccucaggacccaggagucagaaugcguuuguaucaauggaacuuguacaguaguaaugacugaugggagugcuucaggaaaagcugauacuaaaauacuauucauugaggaggggaaaaucguucauacuagcacauugucaggaagugcucagcaugucgaggagugcuccugcuauccucgauauccuggugucagaugugucugcagagacaauuggaaaggcuccaauaggcccauaguagauauaaacauaaaggauuauagcauuguuuccaguuaugugugcucaggacuuguuggagacacacccagaaaaaacgacagcuccagcaguagccauugcuuggauccuaacaaugaagaagguggucauggagugaaaggcugggccuuugaugauggaaaugacguguggaugggaagaacgaucagcgagaaguuacgcucaggauaugaaaccuucaaagucauugaaggcugguccaacccuaauuccaaauuacagauaaauaggcaagucauaguugacagagguaauagguccgguuauucugguauuuucucuguugaaggcaaaagcugcaucaaucggugcuuuuauguggaguugauaaggggaagaaaagaggaaacugaagucuuguggaccucaaacaguauuguuguguuuuguggcaccucagguacauauggaacaggcucauggccugauggggcggacaucaaucucaugccuauauaa

SEQ ID NO: 48679 - RNA, 1410 nt, Artificial Sequence
  derived and/or modified CDS sequence (wt) from neuraminidase__InfluenzaA__ACO36554
augaauccaaaucaaaagauaauaacgauuggcucuguuucucucaccauuuccacaauaugcuucuucaugcaaauugccaucuugauaacuacuguaacauugcauuucaagcaauaugaauucaacucccccccaaacaaccaagugaugcugugugaaccaacaauaauagaaagaaacauaacagagauaguguaucugaccaacaccaccauagagaaggaaauaugccccaaacuagcagaauacagaaauuggucaaagccgcaaugugacauuacaggauuugcaccuuuuucuaaggacaauucgauuaggcuuuccgcugguggggacaucugggugacaagagaaccuuaugugucaugcgauccugacaaguguuaucaauuugcccuuggacagggaacaacacuaaacaacgugcauucaaaugacacaguacaugauaggaccccuuaucggacccuauugaugaaugaguuagguguuccauuucaucuggggaccaagcaagugugcauagcaugguccagcucaaguugucacgauggaaaagcauggcugcauguuuguguaacgggggaugauaaaaaugcaacugcuagcuucauuuacaaugggaggcuuguagauaguauuguuucaugguccaaagaaauccucaggacccaggagucagaaugcguuuguaucaauggaacuuguacaguaguaaugacugaugggagugcuucaggaaaagcugauacuaaaauacuauucauugaggaggggaaaaucguucauacuagcacauugucaggaagugcucagcaugucgaggagugcuccugcuauccucgauauccuggugucagaugugucugcagagacaacuggaaaggcuccaauaggcccauaguagauauaaacauaaaggauuauagcauuguuuccaguuaugugugcucaggacuuguuggagacacacccagaaaaaacgacagcuccagcaguagccauugcuuggauccuaacaaugaagaagguggucauggagugaaaggcugggccuuugaugauggaaaugacguguggaugggaagaacgaucagcgagaaguuacgcucaggauaugaaaccuucaaagucauugaaggcugguccaacccuaauuccaaauugcagauaaauaggcaagucauaguugacagagguaauagguccgguuauucugguauuuucucuguugaaggcaaaagcugcaucaaucggugcuuuuauguggaguugauaagggggagaaaagaggaaacugaagucuuguggaccucaaacaguauuguuguguuuuguggcaccucagguacauauggaacaggcucauggccugauggggcggacaucaaucucaugccuauauaa

SEQ ID NO: 48680 - RNA, 1410 nt, Artificial Sequence
  derived and/or modified CDS sequence (wt) from neuraminidase__InfluenzaA__ACO36565
augaauccaaaucaaaagauaauaacgauuggcucuguuucucucaccauuuccacaauaugcuucuucaugcaaauugccaucuugauaacuacuguaacauugcauuucaagcaauaugaauucaacucccccccaaacaaccaagugaugcugugugaaccaacaauaauagaaagaaacauaacagagauaguguaucugaccaacaccaccauagagaaggaaauaugccccaaacuagcagaauacagaaauuggucaaagccgcaaugugacauuacaggauuugcaccuuuuucuaaggacaauucgauuaggcuuuccgcugguggggacaucugggugacaagagaaccuuaugugucaugcgauccugacaaguguuaucaauuugcccuuggacagggaacaacacuaaacaacgugcauucaaaugacacaguacaugauaggaccccuuaucggacccuauugaugaaugaguuagguguuccauuucaucuggggaccaagcaagugugcauagcaugguccagcucaaguugucacgauggaaaagcauggcugcauguuuguguaacgggggaugauaaaaaugcaacugcuagcuucauuuacaaugggaggcuuguagauaguauuguuucaugguccaaagaaauccucaggacccaggagucagaaugcguuuguaucaauggaacuuguacaguaguaaugacugaugggagugcuucaggaaaagcugauacuaaaauacuauucauugaggaggggaaaaucguucauacuagcacauugucaggaagugcucagcaugucgaggagugcuccugcuauccucgauauccuggugucagaugugucugcagagacaauuggaaaggcuccaauaggcccauaguagauauaaacauaaaggauuauagcauuguuuccaguuaugugugcucaggacuuguuggagacacacccagaaaaaacgacagcuccagcaguagccauugcuuggauccuaacaaugaagaagguggucauggagugaaaggcugggccuuugaugauggaaaugacguguggaugggaagaacgaucagcgagaaguuacgcucaggauaugaaaccuucaaagucauugaaggcugguccaacccuaauuccaaauugcagauaaauaggcaagucauaguugacagagguaauagguccgguuauucugguauuuucucuguugaaggcaaaagcugcaucaaucggugcuuuuauguggaguugauaaggggaagaaaagaggaaacugaagucuuguggaccucaaacaguauuguuguguuuuguggcaccucagguacauauggaacaggcucauggccugauggggcggacaucaaucucaugccuauauaa

SEQ ID NO: 48681 - RNA, 1410 nt, Artificial Sequence
  derived and/or modified CDS sequence (wt) from neuraminidase__InfluenzaA__ACO36576
augaauccaaaucaaaagauaauaacgauuggcucuguuucucucaccauuuccacaauaugcuucuucaugcaaauugccaucuugauaacuacuguaacauugcauuucaagcaauaugaauucaacucccccccaaacaaccaagugaugcugugugaaccaacaauaauagaaagaaacauaacagagauaguguaucugaccaacaccaccauagagaaggaaauaugccccaaacuagcagaauacagaaauuggucaaagccgcaaugugacauuacaggauuugcaccuuuuucuaaggacaauucgauuaggcuuuccgcugguggggacaucugggugacaagagaaccuuaugugucaugcgauccugacaaguguuaucaauuugcccuuggacagggaacaacacuaaacaacgugcauucaaaugacacaguacaugauaggaccccuuaucggacccuauugaugaaugaguuagguguuccauuucaucuggggaccaagcaagugugcauagcaugguccagcucaaguugucacgauggaaaagcauggcugcauguuuguguaacgggagaugauaaaaaugcaacugcuagcuucauuuacaaugggaggcuuguagauaguauuguuucaugguccaaagaaauccucaggacccaggagucagaaugcguuuguaucaauggaacuuguacaguaguaaugacugaugggagugcuucaggaaaagcugauacuaaaauacuauucauugaggaggggaaaaucguucauacuagcacauugucaggaagugcucagcaugucgaggagugcuccugcuauccucgauauccuggugucagaugugucugcagagacaacuggaaaggcuccaauaggcccauaguagauauaaacauaaaggauuauagcauuguuuccaguuaugugugcucaggacuuguuggagacacacccagaaaaaacgacagcuccagcaguagccauugcuuggauccuaacaaugaagaagguggucauggagugaaaggcugggccuuugaugauggaaaugacguguggaugggaagaacgaucagcgagaaguuacgcucaggauaugaaaccuucaaagucauugaaggcugguccaacccuaauuccaaauugcagauaaauaggcaagucauaguuggcagagguaauagguccgguuauucugguauuuucucuguugaaggcaaaagcugcaucaaucggugcuuuuauguggaguugauaaggggaagaaaagaggaaacugaagucuuguggaccucaaacaguauuguuguguuuuguggcaccucagguacauauggaacaggcucauggccugauggggcggacaucaaucucaugccuauauaa

SEQ ID NO: 48682 - RNA, 1410 nt, Artificial Sequence
  derived and/or modified CDS sequence (wt) from neuraminidase__InfluenzaA__ACO36587
augaauccaaaucaaaagauaauaacgauuggcucuguuucucucaccauuuccacaauaugcuucuucaugcaaauugccaucuugauaacuacuguaacauugcauuucaagcaauaugaauucaacucccccccaaacaaccaagugaugcugugugaaccaacaauaauagaaagaaacauaacagagauaguguaucugaccaacaccaccauagagaaggaaauaugccccaaacuagcagaauacagaaauuggucaaagccgcaaugugacauuacaggauuugcaccuuuuucuaaggacaauucgauuaggcuuuccgcugguggggacaucugggugacaagagaaccuuaugugucaugcgauccugacaaguguuaucaauuugcccuuggacagggaacaacacuaaacaacgugcauucaaaugacacaguacaugauaggaccccuuaucggacccuauugaugaaugaguuagguguuccauuucaucuggggaccaagcaagugugcauagcaugguccagcucaaguugucacgauggaaaagcauggcugcauguuuguguaacgggggaugauaaaaaugcaacugcuagcuucauuuacaaugggaggcuuguagauaguauuguuucaugguccaaagaaauccucaggacccaggagucagaaugcguuuguaucaauggaacuuguacaguaguaaugacugaugggagugcuucaggaaaagcugauacuaaaauacuauucauugaggaggggaaaaucguucauacuagcacauugucaggaagugcucagcaugucgaggagugcuccugcuauccucgauauccuggugucagaugugucugcagagacaacuggaaaggcuccaauaggcccauaguagauauaaacauaaaggauuauagcauuguuuccaguuaugugugcucaggacuuguuggagacacacccagaaaaaacgacagcuccagcaguagccauugcuuggauccuaacaaugaagaagguggucauggagugaaaggcugggccuuugaugauggaaaugacguguggaugggaagaacgaucagcgagaaguuacgcucaggauaugaaaccuucaaagucauugaaggcugguccaacccuaauuccaaauugcagauaaauaggcaggucauaguugacagagguaauagguccgguuauucugguauuuucucuguugaaggcaaaagcugcaucaaucggugcuuuuauguggaguugauaaggggaagaaaagaggaaacugaagucuuguggaccucaaacaguauuguuguguuuuguggcaccucagguacauauggaacaggcucauggccugauggggcggacaucaaucucaugccuauauaa

SEQ ID NO: 48683 - RNA, 1410 nt, Artificial Sequence
  derived and/or modified CDS sequence (wt) from neuraminidase__InfluenzaA__ACO36609
augaauccaaaucaaaagauaauaacgauuggcucuguuucucucaccauuuccacaauaugcuucuucaugcaaauugccaucuugauaacuacuguaacauugcauuucaagcaauaugaauucaacucccccccaaacaaccaagugaugcugugugaaccaacaauaauagaaagaaacauaacagagauaguguaucugaccaacaccaccauagagaaggaaauaugccccaaacuagcagaauacagaaauuggucaaagccgcaauguaacauuacaggauuugcgccuuuuucuaaggacaauucgauuaggcuuuccgcugguggggacaucugggugacaagagaaccuuaugugucaugcgauccugacaaguguuaucaauuugcccuaggacagggaacaacacuaaacaacgugcauucaaaugacacaguacaugauaggaccccuuaucggacccuauugaugaaugaguuagguguuccauuucaucuggggaccaagcaagugugcauagcaugguccagcucaaguugucacgauggaaaagcauggcugcauguuuguguaacgggggaugauaaaaaugcaacugcuagcuucauuuacaaugggaggcuuguagauaguauuguuucaugguccaaagaaauccucaggacccaggagucagaaugcguuuguaucaauggaacuuguacaguaguaaugacugaugggagugcuucaggaaaagcugauacuaaaauacuauucauugaggaggggaaaaucguucauacuagcacauugucaggaagugcucagcaugucgaggagugcuccugcuauccucgauauccuggugucagaugugucugcagagacaacuggaaaggcuccaauaggcccauaguagauauaaacauaaaggauuauagcauuguuuccaguuaugugugcucaggacuuguuggagacacacccagaaaaaacgacagcuccagcaguagccauugcuuggauccuaacaaugaagaagguggucauggagugaaaggcugggccuuugaugauggaaaugacguguggaugggaagaacgaucagcgagaaguuacgcucaggauaugaaaccuucaaagucauugaaggcugguccaacccuaauuccaaauugcagauaaauaggcaagucauaguugacagagguaauagguccgguuauucugguauuuucucuguugaaggcaaaagcugcaucaaucggugcuuuuauguggaguugauaaggggaagaaaagaggaaacugaagucuuguggaccucaaacaguauuguuguguuuuguggcaccucagguacauauggaacaggcucauggccugauggggcggauaucaaucucaugccuauauaa

SEQ ID NO: 48684 - RNA, 1410 nt, Artificial Sequence
  derived and/or modified CDS sequence (wt) from neuraminidase__InfluenzaA__ACO36620
augaauccaaaucaaaagauaauaacgauuggcucuguuucucucaccauuuccacaauaugcuucuucaugcaaauugccaucuugauaacuacuguaacauugcauuucaagcaauaugaauucaacucccccccaaacaaccaagugaugcugugugaaccaacaauaauagaaagaaacauaacagagauaguguaucugaccaacaccaccauagagaaggaaauaugccccaaacuagcagaauacagaaauuggucaaagccgcaauguaacauuacaggauuugcaccuuuuucuaaggacaauucgauuaggcuuuccgcugguggggacaucugggugacaagagaaccuuaugugucaugcgauccugacaaguguuaucaauuugcccuuggacagggaacaacacuaaacaacgugcauucaaaugacacaguacaugauaggaccccuuaucggacccuauugaugaaugaguuagguguuccauuucaucuggggaccaagcaagugugcauagcaugguccagcucaaguugucacgauggaaaagcauggcugcauguuuguguaacgggggaugauaaaaaugcaacugcuagcuucauuuacaaugggaggcuuguagauaguauuguuucaugguccaaagaaauccucaggacccaggagucagaaugcguuuguaucaauggaacuuguacaguaguaaugacugaugggagugcuucaggaaaagcugauacuaaaauacuauucauugaggaggggaaaaucguucauacuagcacauugucaggaagugcucagcaugucgaggagugcuccugcuauccucgauauccuggugucagaugugucugcagagacaacuggaaaggcuccaauaggcccauaguagauauaaacauaaaggauuauagcauuguuuccaguuaugugugcucaggacuuguuggagacacacccagaaaaaacgacagcuccagcaguagccauugcuuggauccuaacaaugaagaagguggucauggagugaaaggcugggccuuugaugauggaaaugacguguggaugggaagaacgaucagcgagaaguuacgcucaggauaugaaaccuucaaagucauugaaggcugguccaacccuaauuccaaauugcagguaaauaggcaagucauaguugacagagguaauagguccgguuauucugguauuuucucuguugaaggcaaaagcugcaucaaucggugcuuuuauguggaguugauaaggggaagaaaagaggaaacugaagucuuguggaccucaaacaguauuguuguguuuuguggcaccucagguacauauggaacaggcucauggccugauggggcggacaucaaucucaugccuauauaa

SEQ ID NO: 48685 - RNA, 1410 nt, Artificial Sequence
  derived and/or modified CDS sequence (wt) from neuraminidase__InfluenzaA__ACO36631
augaauccaaaucaaaagauaauaacgauuggcucuguuucucucaccauuuccacaauaugcuucuucaugcaaauugccaucuugauaacuacuguaacauugcauuucaagcaauaugaauucaacucccccccaaacaaccaagugaugcugugugaaccaacaauaauagaaagaaacauaacagagauaguguaucugaccaacaccaccauagagaaggaaauaugccccaaacuagcagaauacagaaauuggucaaagccgcaauguaacauuacaggauuugcaccuuuuucuaaggacaauucgauuaggcuuuccgcugguggggacaucugggugacaagagaaccuuaugugucaugcgauccugacaaguguuaucaauuugcccuuggacagggaacaacacuaaacaacgugcauucaaaugacacaguacaugauaggaccccuuaucggacccuauugaugaaugaguuagguguuccauuucaucuggggaccaagcaagugugcauagcaugguccagcucaaguugucacgauggaaaagcauggcugcauguuuguguaacgggggaugauaaaaaugcaacugcuagcuucauuuacaaugggaggcuuguagauaguauuguuucaugguccaaagaaauccucaggacccaggagucagaaugcguuuguaucaauggaacuuguacaguaguaaugacugaugggagugcuucaggaaaagcugauacuaaaauacuauucauugaggaggggaaaaucguucauacuagcacauugucaggaagugcucagcaugucgaggagugcuccugcuauccucgauauccuggugucagaugugucugcagagacaacuggaaaggcuccaauaggcccauaguagauauaaacauaaaggauuauagcauuguuuccaguuaugugugcucaggacuuguuggagacacacccagaaaaaacgacagcuccagcaguagccauugcuuggauccuaacaaugaagaagguggucauggagugaaaggcugggccuuugaugauggaaaugacguguggaugggaagaacgaucagcgagaaguuacgcucaggauaugaaaccuucaaagucauugaaggcugguccaacccuaauuccaaauugcagauaaauaggcaagucauaguugacagagguaauagguccgguuauucugguauuuucucuguugaagguaaaagcugcaucaaucggugcuuuuauguggaguugauaaggggaagaaaagaggaaacugaagucuuguggaccucaaacaguauuguuguguuuuguggcaccucagguacauauggaacaggcucauggccugauggggcggacaucaaucucaugccuauauaa

SEQ ID NO: 48686 - RNA, 1410 nt, Artificial Sequence; identical to SEQ ID NO: 46740
  derived and/or modified CDS sequence (wt) from neuraminidase__InfluenzaA__ACO36653

SEQ ID NO: 48687 - RNA, 1410 nt, Artificial Sequence
  derived and/or modified CDS sequence (wt) from neuraminidase__InfluenzaA__ACO36675
augaauccaaaucaaaagauaauaacgauuggcucuguuucucucaccauuuccacaauaugccucuucaugcaaauugccaucuugauaacuacuguaacauugcauuucaagcaauaugaauucaacucccccccaaacaaccaagugaugcugugugaaccaacaauaauagaaagaaacauaacagagauaguguaucugaccaacaccaccauagagaaggaaauaugccccaaacuagcagaauacagaaauuggucaaagccgcaauguaacauuacaggauuugcaccuuuuucuaaggacaauucgauuaggcuuuccgcugguggggacaucugggugacaagagaaccuuaugugucaugcgauccugacaaguguuaucaauuugcccuuggacagggaacaacacuaaacaacgugcauucaaaugacacaguacaugauaggaccccuuaucggacccuauugaugaaugaguuagguguuccauuucaucuggggaccaagcaagugugcauagcaugguccagcucaaguugucacgauggaaaagcauggcugcauguuuguguaacgggggaugauaaaaaugcaacugcuagcuucauuuacaaugggaggcuuguagauaguauuguuucaugguccaaagaaauccucaggacccaggagucagaaugcguuuguaucaauggaacuuguacaguaguaaugacugaugggagugcuucaggaaaagcugauacuaaaauacuauucauugaggaggggaaaaucguucauacuagcacauugucaggaagugcucagcaugucgaggagugcuccugcuauccucgauauccuggugucagaugugucugcagagacaacuggaaaggcuccaauaggcccauaguagauauaaacauaaaggauuauagcauuguuucuaguuaugugugcucaggacuuguuggagacacacccagaaaaaacgacagcuccagcaguagccauugcuuggauccuaacaaugaagaagguggucauggagugaaaggcugggccuuugaugauggaaaugacguguggaugggaagaacgaucagcgagaaguuacgcucaggauaugaaaccuucaaagucauugaaggcugguccaacccuaauuccaaauugcagauaaauaggcaagucauaguugacagagguaauagguccgguuauucugguauuuucucuguugaaggcaaaagcugcaucaaucggugcuuuuauguggaguugauaaggggaagaaaagaggaaacugaagucuuguggaccucaaacaguauuguuguguuuuguggcaccucagguacauauggaacaggcucauggccugauggggcggacaucaaucucaugccuauauaa

SEQ ID NO: 48688 - RNA, 1410 nt, Artificial Sequence
  derived and/or modified CDS sequence (wt) from neuraminidase__InfluenzaA__ACO36686
augaauccaaaucaaaagauaauaacgauuggcucuguuucucucaccauuuccacaauaugcuucuucaugcaaauugccaucuugauaacuacugugacauugcauuucaagcaauaugaauucaacucccccccaaacaaccaagugaugcugugugaaccaacaauaauagaaagaaacauaacagagauaguguaucugaccaacaccaccauagagaaggaaauaugccccaaacuagcagaauacagaaauuggucaaagccgcaauguaacauuacaggauuugcaccuuuuucuaaggacaauucgauuaggcuuuccgcugguggggacaucugggugacaagagaaccuuaugugucaugcgaucaugacaaguguuaucaauuugcccuuggacagggaacaacacuaaacaacgugcauucaaaugacacaguacaugauaggaccccuuaucggacccuauugaugaaugaguuagguguuccauuucaucuggggaccaagcaagugugcauagcaugguccagcucaaguugucacgauggaaaagcauggcugcauguuuguguaacgggggaugauaaaaaugcaacugcuagcuucauuuacaaugggaggcuuguagauaguauuguuucaugguccaaagaaauccucaggacccaggagucagaaugcguuuguaucaauggaacuuguacaguaguaaugacugaugggagugcuucaggaaaagcugauacuaaaauacuauucauugaggaggggaaaaucguucauacuagcacauugucaggaagugcucagcaugucgaggagugcuccugcuauccucgauauccuggugucagaugugucugcagagacaacuggaaaggcuccaauaggcccauaguagauauaaacauaaaggauuauagcauuguuuccaguuaugugugcucaggacuuguuggagacacacccagaaaaaacgacagcuccagcaguagccauugcuuggauccuaacaaugaagaagguggucauggagugaaaggcugggccuuugaugauggaaaugacguguggaugggaagaacgaucagcgagaaguuacgcucaggauaugaaaccuucaaagucauugaaggcugguccaacccuaauuccaaauugcagauaaauaggcaagucauaguugacagagguaauagguccgguuauucugguauuuucucuguugaaggcaaaagcugcaucaaucggugcuuuuauguggaguugauaaggggaagaaaagaggaaacugaagucuuguggaccucaaacaguauuguuguguuuuguggcaccucagguacauauggaacaggcucauggccugauggggcggacaucaaucucaugccuauauaa

SEQ ID NO: 48689 - RNA, 1410 nt, Artificial Sequence
  derived and/or modified CDS sequence (wt) from neuraminidase__InfluenzaA__ACO37125
augaauccaaaucaaaagauaauaacgauuggcucuguuucucucaccauuuccacaauaugcuucuucaugcaaauugccaucuugauaacuacuguaacauugcauuucaagcaauaugaauucaacucccccccaaacaaccaagugaugcugugugaaccaacaauaauagaaagaaacauaacagagauaguguaucugaccaacaccaccauagagaaggaaauaugccccaaacuagcagaauacagaaauuggucaaagccgcaaugugacauuacaggauuugcaccuuuuucuaaggacaauucgauuaggcuuuccgcugguggggacaucugggugacaagagaaccuuaugugucaugcgauccugacaaguguuaucaauuugcccuuggacagggaacaacacuaaacaacgugcauucaaaugacacaguacaugauaggaccccuuaucggacccuauugaugaaugaguuagguguuccauuucaucuggggaccaagcaagugugcauagcaugguccagcucaaguugucacgauggaaaagcauggcugcauguuuguguaacgggggaugauaaaaaugcaacugcuagcuucauuuacaaugggaugcuuguagauaguauuguuucaugguccaaagaaauccucaggacccaggagucagaaugcguuuguaucaauggaacuuguacaguaguaaugacugaugggagugcuucaggaaaagcugauacuaaaauacuauucauugaggaggggaaaaucguucauacuagcacauugucaggaagugcucagcaugucgaggagugcuccugcuauccucgauauccuggugucagaugugucugcagagacaauuggaaaggcuccaauaggcccauaguagauauaaacauaaaggauuauagcauuguuuccaguuaugugugcucaggacuuguuggagacacacccagaaaaaacgacagcuccagcaguagccauugcuuggauccuaacaaugaagaagguggucauggagugaaaggcugggccuuugaugauggaaaugacguguggaugggaagaacgaucagcgagaaguuacgcucaggauaugaaaccuucaaagucauugaaggcugguccaacccuaauuccaaauugcagauaaauaggcaagucauaguugacagagguaauagguccgguuauucugguauuuucucuguugaaggcaaaagcugcaucaaucggugcuuuuauguggaguugauaaggggaagaaaagaggaaacugaagucuuguggaccucaaacaguauuguuguguuuuguggcaccucagguacauauggaacaggcucauggccugauggggcggacaucaaucucaugccuauauaa

SEQ ID NO: 48690 - RNA, 1410 nt, Artificial Sequence
  derived and/or modified CDS sequence (wt) from neuraminidase__InfluenzaA__ACO94511
augaauccaaaucaaaagauaauaacgauuggcucuguuucucucaccauuuccacaauaugcuucuucaugcaaauugccaucuugauaacuacuguaacauugcauuucaagcaauaugaauucaacucccccccaaacaaccaagugaugcugugugaaccaacaauaauagaaagaaacauaacagagauaguguaucugaccaacaccaccauagagaaggaaauaugccccaaacuagcagaauacagaaauuggucaaagccgcaaugugacauuacaggauuugcaccuuuuucuaaggacaauucgauuaggcuuuccgcugguggggacaucugggugacaagagaaccuuaugugucaugcgauccugacaaguguuaucaauuugcccuuggacagggaacaacacuaaacaacgugcauucaaaugacacaguacgugauaggaccccuuaucggacccuauugaugaaugaguuagguguuccuuuucaucuggggaccaagcaagugugcauagcaugguccagcucaaguugucacgauggaaaagcauggcugcauguuuguauaacgggggaugauaaaaaugcaacugcuagcuucauuuacaaugggaggcuuguagauaguguuguuucaugguccaaagaaauccucaggacccaggagucagaaugcguuuguaucaauggaacuuguacaguaguaaugacugaugggagugcuucaggaaaagcugauacuaaaauacuauucauugaggaggggaaaaucguucauacuagcacauugucaggaagugcucagcaugucgaggagugcuccugcuauccucgauauccuggugucagaugugucugcagagacaacuggaaaggcuccaauaggcccaucguagauauaaacauaaaggaucauagcauuguuuccaguuauguguguucaggacuuguuggagacacacccagaaaaaacgacagcuccagcaguagcaauuguuuggauccuaacaaugaagaagguggucauggagugaaaggcugggccuuugaugauggaaaugacguguggaugggaagaacgaucagcgagaagucacgcuuaggguaugaaaccuucaaagucauugaaggcugguccaacccuaagucaaaauugcagauaaauaggcaagucauaguugacagagguaauagguccgguuauucugguauuuucucuguugaaggcaaaagcugcaucaaucggugcuuuuauguggaguugauaaggggaagaaaagaggaaacugaagucuuguggaccucaaacaguauuguuguguuuuguggcaccucagguacauauggaacaggcucauggccugauggggcggacaucaaucucaugccuauauaa

SEQ ID NO: 48691 - RNA, 1410 nt, Artificial Sequence
  derived and/or modified CDS sequence (wt) from neuraminidase__InfluenzaA__ACO94512
augaauccaaaucaaaagauaauaacgauuggcucuguuucucucaccauuuccacaauaugcuucuucaugcaaauugccaucuugauaacuacuguaacauugcauuucaagcaauaugaauucaacucccccccaaacaaccaagugaugcugugugaaccaacaauaauagaaagaaacauaacagagauaguguaucugaccaacaccaccauagagaaggaaauaugccccaaacuagcagaauacagaaauuggucaaagccgcaaugugacauuacaggauuugcaccuuuuucuaaggacaauucgauuaggcuuuccgcugguggggacaucugggugacaagagaaccuuaugugucaugcgauccugacaaguguuaucaauuugcccuuggacagggaacaacacuaaacaacgugcauucaaaugacacaguacgugauaggaccccuuaucggacccuauugaugaaugaguuagguguuccuuuucaucuggggaccaagcaagugugcauagcaugguccagcucaaguugucacgauggaaaagcauggcugcauguuuguauaacgggggaugauaaaaaugcaacugcuagcuucauuuacaaugggaggcuuguagauaguguuguuucaugguccaaagaaauccucaggacccaggagucagaaugcguuuguaucaauggaacuuguacaguaguaaugacugaugggagugcuucaggaaaagcugauacuaaaauacuauucauugaggaggggaaaaucguucauacuagcacauugucaggaagugcucagcaugucgaggagugcuccugcuauccucgauauccuggugucagaugugucugcagagacaacuggaaaggcuccaauaggcccaucguagauauaaacauaaaggaucauagcauuguuuccaguuauguguguucaggacuuguuggagacacacccagaaaaaacgacagcuccagcaguagccauuguuuggauccuaauaaugaagaagguggucauggagugaaaggcugggccuuugaugauggaaaugacguguggaugggaagaacgaucagcgagaagucacgcuuaggguaugaaaccuucaaagucauugaaggcugguccaacccuaaguccaaauugcagauaaauaggcaagucauaguugacagagguaauagguccgguuauucugguauuuucucuguugaaggcaaaagcugcaucaaucggugcuuuuauguggaguugauaaggggaagaaaagaggaaacugaagucuuguggaccucaaacaguauuguuguguuuuguggcaccucagguacauauggaacaggcucauggccugauggggcggacaucaaucucaugccuauauaa

SEQ ID NO: 48692 - RNA, 1410 nt, Artificial Sequence
  derived and/or modified CDS sequence (wt) from neuraminidase__InfluenzaA__ACO94513
augaauccaaaucaaaagauaauaacgauuggcucuguuucucucaccauuuccacaauaugcuucuucaugcaaauugccauuuugauaacuacuguaacauugcauuucaagcaauaugaauucaacucccccccaaacaaccaagugaugcugugugaaccaacaauaauagaaagaaacauaacagagauaguguaucugaccaacaccaccauagagaaggaaauaugccccaaacuagcagaauacagaaauuggucaaagccgcaaugugacauuacaggauuugcaccuuuuucuaaggacaauucgauuaggcuuuccgcugguggggacaucugggugacaagagaaccuuaugugucaugcgauccugacaaguguuaucaauuugcccuuggacagggaacaacacuaaacaacgugcauucaaauaacacaguacgugauaggaccccuuaucggacccuauugaugaaugaguuagguguuccuuuucaucuggggaccaagcaagugugcauagcaugguccagcucaaguugucacgauggaaaagcauggcugcauguuuguauaacgggggaugauaaaaaugcaacugcuagcuucauuuacaaugggaggcuuguagauaguguuguuucaugguccaaagaaauccucaggacccaggagucagaaugcguuuguaucaauggaacuuguacaguaguaaugacugaugggagugcuucaggaaaagcugauacuaaaauacuauucauugaggaggggaaaaucguucauaccagcacauugucaggaagugcucagcaugucgaggagugcuccugcuauccucgauauccuggugucagaugugucugcagagacaacuggaaaggcuccaauaggcccaucguagauauaaacauaaaggaucauagcauuguuuccaguuauguguguucaggacuuguuggagacacacccagaaaaaacgacagcuccagcaguagccauuguuuggauccuaacaaugaagaagguggucauggagugaaaggcugggccuuugaugauggaaaugacguguggaugggaagaacgaucagcgagaagucacgcuuaggguaugaaaccuucaaagucauugaaggcugguccaacccuaaguccaaauugcagauaaauaggcaagucauaguugacagagguaauagguccgguuauucugguauuuucucuguugaaggcaaaagcugcaucaaucggugcuuuuauguggaguugauaaggggaagaaaagaggaaacugaagucuuguggaccucaaacaguauuguuguguuuuguggcaccucagguacauauggaacaggcucauggccugauggggcggacaucaaucucaugccuauauaa

SEQ ID NO: 48693 - RNA, 1410 nt, Artificial Sequence
  derived and/or modified CDS sequence (wt) from neuraminidase__InfluenzaA__ACO94675
augaauccaaaucaaaagauaauaacgauuggcucuguuucucucaccauuuccacaauaugcuucuucaugcaaauugccaucuugauaacuacuguaacauugcauuucaagcaauaugaauucaacucccccccaaacaaccaagugaugcugugugaaccaacaauaauagaaagaaacauaacagagauaguguaucugaccaacaccaccauagagaaggaaauaugccccaaacuagcagaauacagaaauuggucaaagccgcaaugugacauuacaggauuugcaccuuuuucuaaggacaauucgauuaggcuuuccgcugguggggacaucugggugacaagagaaccuuaugugucaugcgauccugacaaguguuaucaauuugcccuuggacagggaacaacacuaaacaacgugcauucaaaugacacaguacgugauaggaccccuuaucggacccuauugaugaaugaguuagguguuccuuuucaucuggggaccaagcaagugugcauagcaugguccagcucaaguugucacgauggaaaagcauggcugcauguuuguauaacgggggaugauaaaaaugcaacugcuagcuucauuuacaaugggaggcuuguagauaguguuguuucaugguccaaagaaauccucaggacccaggagucagaaugcguuuguaucaauggaacuuguacaguaguaaugacugaugggagugcuucaggaaaagcugauacuaaaauacuauucauugaggaggggaaaaucguucauacuagcacauugucaggaagugcucagcaugucgaggagugcuccugcuauccucgauauccuggugucagaugugucugcagagacaacuggaaaggcuccaauaggcccaucguagauauaaacauaaagaaucauagcauuguuuccaguuauguguguucaggacuuguuggagacacacccagaaaaaacgacagcuccagcaguagccauuguuuggauccuaacaaugaagaagguggucauggagugaaaggcugggccuuugaugauggaaaugacguguggaugggaagaacgaucagcgagaagucacgcuuaggguaugaaaccuucaaagucauugaaggcugguccaacccuaaguccaaauugcagauaaauaggcaagucauaguugacagagguaauagguccgguuauucugguauuuucucuguugaaggcaaaagcugcaucaaucggugcuuuuauguggaguugauaaggggaagaaaagaggaaacugaagucuuguggaccucaaacaguauuguuguguuuuguggcaccucagguacauauggaacaggcucauggccugauggggcggacaucaaucucaugccuauauaa

SEQ ID NO: 48694 - RNA, 1410 nt, Artificial Sequence
  derived and/or modified CDS sequence (wt) from neuraminidase__InfluenzaA__ACO94686
augaauccaaaucaaaagauaauaacgauuggcucuguuucucucaccauuuccacaauaugcuucuucaugcaaauugccaucuugauaacuacuguaacauugcauuucaagcaauaugaauucaacucccccccaaacaaccaagugaugcugugugaaccaacaacaauagaaagaaacauaacagagauaguguaucugaccaacaccaccauagagaaggaaauaugccccaaacuagcagaauacagaaauuggucaaagccgcaaugugacauuacaggauuugcaccuuuuucuaaggacaauucgauuaggcuuucugcugguggggacaucugggugacaagagaaccuuaugugucaugcgauccugacaaguguuaucaauuugcccuuggacagggaacaacacuaaacaacgugcauucaaaugacacaguacgugauaggaccccuuaucggacccuauugaugaaugaguuagguguuccuuuucaucuggggaccaagcaagugugcauagcaugguccagcucaaguugucacgauggaaaagcauggcugcauguuuguauaacgggggaugauaaaaaugcaacugcuagcuucauuuacaaugggaggcuuguagauaguauuguuucaugguccaaagacauccucaggacccaggagucagaaugcguuuguaucaauggaacuuguacaguaguaaugacugaugggagugcuucaggaaaagcugauacuaaaauauuauucauugaggaggggaaaaucguucauacuagcacauugucaggaagugcucagcaugucgaggagugcuccugcuauccucgauauccuggugucagaugugucugcagagacaacuggaaaggcuccaauaggcccaucguagauauaaacauaaaggaucauagcauuguuuccaguuauguguguucaggacuuguuggagacacacccagaaaaaacgacagcuccagcaguggccauuguuuggauccuaacaaugaagaagguggucauggagugaaaggcugggccuuugaugauggaaaugacguguggaugggaagaacgaucagcgagaagucacgcuuaggguaugaaaccuucaaagucauugaaggcugguccaacccuaaguccaaauugcagauaaauaggcaagucauaguugacagagguaauagguccgguuauucugguauuuucucuguugaaggcaaaagcugcaucaaucggugcuuuuauguggaguugauaaggggaagaaaagaggaaacugaagucuuguggaccucaaacaguauuguuguguuuuguggcaccucagguacauauggaacaggcucauggccugauggggcggaaaucaaucucaugccuauauaa

SEQ ID NO: 48695 - RNA, 1410 nt, Artificial Sequence
  derived and/or modified CDS sequence (wt) from neuraminidase__InfluenzaA__ACO94697
augaauccaaaucaaaagauaauaacgauuggcucuguuucucucaccauuuccacaauaugcuucuucaugcaaauugccaucuugauaacuacuguaacauugcauuucaagcaauaugaauucaacucccccccaaacaaccaagugaugcugugugaaccaacaauaauagaaagaaacauaacagagauaguguaucugaccaacaccaccauagagaaggaaauaugccccaaacuagcagaauacagaaauuggucaaagccgcaaugugacauuacaggauuugcaccuuuuucuaaggacaauucgauuaggcuuuccgcugguggggacaucugggugacaagagaaccuuaugugucaugcgauccugacaaguguuaucaauuugcccuuggacagggaacaacacuaaacaacgugcauucaaauaacacaguacgugauaggaccccuuaucggacccuauugaugaaugaguuagguguuccuuuucaucuggggaccaagcaagugugcauagcaugguccagcucaaguugucacgauggaaaagcauggcugcauguuuguauaacgggggaugauaaaaaugcaacugcuagcuucauuuacaauggaaggcuuguagauaguguuguuucaugguccaaagaaauccucaggacccaggagucagaaugcguuuguaucaauggaacuuguacaguaguaaugacugaugggagugcuucaggaaaagcugauacuaaaauacuauucauugaggaggggaaaaucguucauacuagcacauugucaggaagugcucagcaugucgaggagugcuccugcuauccucgauauccuggugucagaugugucugcagagacaacuggaaaggcuccaauaggcccaucguagauauaaacauaaaggaucauagcauuguuuccaguuauguguguucaggacuuguuggagacacacccagaaaaaacgacagcuccagcaguagccauuguuuggauccuaacaaugaagaagguggucauggagugaaaggcugggccuuugaugauggaaaugacguguggaugggaagaacgaucagcgagaagucacgcuuaggguaugaaaccuucaaagucauugaaggcugguccaacccuaaguccaaauugcagauaaauaggcaagucauaguugacagagguaauagguccgguuauucugguauuuucucuguugaaggcaaaagcugcaucaaucggugcuuuuauguggaguugauaaggggaagaaaagaggaaacugaagucuuguggaccucaaacaguauuguuguguuuuguggcaccucagggacauauggaacaggcucauggccugauggggcggacaucaaucucaugccuauauaa

SEQ ID NO: 48696 - RNA, 1413 nt, Artificial Sequence
  derived and/or modified CDS sequence (wt) from neuraminidase__InfluenzaA__ACO94708
augaacccaaaucaaaagauaauaaccauuggaucaaucaguauagcaaucggaauaauuagucuaauguugcaaauaggaaauauuauuucaauaugggcuagucacucaauccaaacuggaagucaaaacaacacuggaauaugcaaccaaagaaucaucacauaugaaaacagcaccugggugaaucacacauauguuaauauuaacaacacuaauguuguugcuggagaggacaaaacuucagugacauuggccggcaauucaucucuuuguucuaucaguggaugggcuauauacacaaaagacaacagcauaagaauuggcuccaaaggagauguuuuugucauaagagaaccuuucauaucauguucucauuuggaaugcagaaccuuuuuucugacccaaggugcucuauuaaaugacaaacauucaaaugggaccguaaaggacagaaguccuuauagggccuuaaugagcuguccucuaggugaagcuccguccccauacaauucaaaguucgaaucaguugcauggucagcaagcgcaugccaugauggcaugggcugguuaacaaucggaauuucugguccagacaauggagcuguggcuguacuaaaauacaacggaauaauaacuggaaccauaaaaaguuggaaaaagcaaauauuaagaacacaagagucugaaugugucuguaugaacgggucauguuucaccauaaugaccgauggcccgaguaauaaggccgccucguacaaaauuuucaagaucgaaaaggggaagguuacuaaaucaauagaguugaaugcacccaauuuucauuaugaggaauguuccuguuacccagacacuggcauagugauguguguaugcagggacaacuggcaugguucaaaucgaccuugggugucuuuuaaucaaaacuuggauuaucaaauaggauacaucugcaguggaguguuuggugacaauccgcgucccgaagauggagagggcagcugcaauccagugacuguugauggagcaaacgggguaaaaggguuuucauacaaauaugauaaugguguuuggauaggaaggaccaaaaguaacagacuuagaaagggguuugaaaugauuugggauccuaauggauggacaaauaccgacagugauuucucagugaaacaggauguuguagcaauaacugauuggucaggguacagcggaaguuucguccaacauccugaguuaacaggauuggacuguauaagaccuugcuucuggguugaguuagucagagggcugccuagggaaaauacaacaaucuggacuagugggagcagcauuucuuuuuguggcguuaauagugauacugcaaacuggucuuggccagacggugcugaguugccguucaccauugacaaguag

SEQ ID NO: 48697 - RNA, 1410 nt, Artificial Sequence
  derived and/or modified CDS sequence (wt) from neuraminidase__InfluenzaA__ACO94719
augaauccaaaucaaaagauaauaacgauuggcucuguuucucucaccauuuccacaauaugcuucuucaugcaaauugccaucuugauaacuacuguaacauugcauuucaagcaauaugaauucaacucccccccaaacaaccaagugaugcugugugaaccaacaauaauagaaagaaacauaacagagauaguguaucugaccaacaccaccauagagaaggaaauaugccccaaacuagcagaauacagaaauuggucaaagccgcaaugugacauuacaggauuugcaccuuuuucuaaggacaauucgauuaggcuuucugcugguggggacaucugggugacaagagaaccuuaugugucaugcgauccugacaaguguuaucaauuugcccuuggacagggaacaacacuaaacaacgugcauucaaaugacacaguacgugauaggaccccuuaucggacccuauugaugaaugaguuagguguuccuuuucaucuggggaccaagcaagugugcauagcaugguccagcucaaguugucacgauggaaaagcauggcugcauguuuguauaacgggggaugauaaaaaugcaacugcuagcuucauuuacaaugggaggcuuguagauaguauuguuucaugguccaaagacauccucaggacccaggagucagaaugcguuuguaucaauggaacuuguacaguaguaaugacugaugggagugcuucaggaaaagcugauacuaaaauacuauucauugaggaggggaaaaucguucauacuagcacauugucaggaagugcucagcaugucgaggagugcuccugcuauccucgauauccuggugucagaugugucugcagagacaacuggaaaggcuccaauaggcccaucguagauauaaacauaaaggaucauagcauuguuuccaguuauguguguucaggacuuguuggagacacacccagaaaaaacgacagcuccagcaguggccauuguuuggauccuaacaaugaagaagguggucauggagugaaaggcugggccuuugaugauggaaaugacguguggaugggaagaacgaucagcgagaagucacgcuuaggguaugaaaccuucaaagucauugaaggcugguccaacccuaaguccaaauugcagauaaauaggcaagucauaguugacagagguaauagguccgguuauucugguauuuucucuguugaaggcaaaagcugcaucaaucggugcuuuuauguggaguugauaaggggaagaaaagaggaaacugaagucuuguggaccucaaacaguauuguuguguuuuguggcaccucagguacauauggaacaggcucauggccugauggggcggaaaucaaucucaugccuauauaa

SEQ ID NO: 48698 - RNA, 1410 nt, Artificial Sequence
  derived and/or modified CDS sequence (wt) from neuraminidase__InfluenzaA__ACO94741
augaauccaaaucaaaagauaauaacgauuggcucuguuucucucaccauuuccacaauaugcuucuucaugcaaauugccaucuugauaacuacuguaacauugcauuucaagcaauaugaauucaacuccuccccaaacaaccaagugaugcugugugaaccaacaauaauagaaagaaacauaacagagauaguguaucugaccaacaccaccauagagaaggaaauaugccccaaacuagcagaauacagaaauuggucaaagccgcaaugugacauuacaggauuugcaccuuuuucuaaggacaauucgauuaggcuuuccgcugguggggacaucugggugacaagagaaccuuaugugucaugcgauccugacaaguguuaucaauuugcccuuggacagggaacaacacuaaacaacgugcauucaaauaacacaguacgugauaggaccccuuaucggacccuauugaugaaugaguuagguguuccuuuucaucuggggaccaagcaagucugcauagcaugguccagcucaaguugucacgauggaaaagcauggcugcauguuuguauaacgggggaugauaaaaaugcaacugcuagcuucauuuacaaugggaggcuuguagauaguauuguuucaugguccaaagaaauccucaggacccaggagucagaaugcguuuguaucaauggaacuuguacaguaguaaugacugaugggagugcuucaggaaaagcugauacuaaaauacuauucauugaggaggggaaaaucguucauacuagcacauugucaggaagugcucagcaugucgaggagugcuccugcuauccucgauauccuggugucagaugugucugcagagacaacuggaaaggcuccaauaggcccaucguagauauaaacauaaaggaucauagcauuguuuccaguuauguguguucaggacuuguuggagacacacccagaaaaaacgacagcuccagcaguagccauuguuuggauccuaacaaugaagaagguggucauggagugaaaggcugggccuuugaugauggaaaugacguguggaugggaagaacgaucagcgagaagucacgcuuaggguaugaaaccuucaaagucauugaaggcugguccaacccuaaguccaaauugcagauaaauaggcaagucauaguugacagagguaauagguccgguuauucugguauuuucucuguugaaagcaaaagcugcaucaaucggugcuuuuauguggaguugauaaggggaagaaaagaggaaacugaagucuuguggaccucaaacaguauuguuguguuuuguggcaccucagguacauauggaacaggcucauggccugauggggcggacaucaaucucaugccuauauaa

SEQ ID NO: 48699 - RNA, 1410 nt, Artificial Sequence
  derived and/or modified CDS sequence (wt) from neuraminidase__InfluenzaA__ACO94763
augaauccaaaucaaaagauaauaacgauuggcucuguuucucucaccauuuccacaauaugcuucuucaugcaaauugccaucuugauaacuacuguaacauugcauuucaagcaauaugaauucaacuccuccccaaacaaccaagugaugcugugugaaccaacaauaauagaaagaaacauaacagagauaguguaucugaccaacaccaccauagagaaggagauaugccccaaacuagcagaauacagaaauuggucaaagccgcaaugugacauuacaggauuugcaccuuuuucuaaggacaauucaauuaggcuuuccgcugguggggacaucugggugacaagagaaccuuaugugucaugcgauccugacaaguguuaucaauuugcccuuggacagggaacaacacuaaacaacgugcauucaaauaacacaguacgugauaggaccccuuaucggacccuauugaugaaugaguuagguguuccuuuucaucuggggaccaagcaagucugcauagcaugguccagcucaaguugucacgauggaaaagcauggcugcauguuuguauaacgggggaugauaaaaaugcaacugcuagcuucauuuacaaugggaggcuuguagauaguauuguuucaugguccaaagaaauccucaggacccaggagucagaaugcguuuguaucaauggaacuuguacaguaguaaugacugaugggagugcuucaggaaaagcugauacuaaaauacuauucauugaggaggggaaaaucguucauacuagcacauugucaggaagugcucagcaugucgaggagugcuccugcuauccucgauauccuggugucagaugugucugcagagacaacuggaaaggcuccaauaggcccaucguagauauaaacauaaaggaucauagcauuguuuccaguuauguguguucaggacuuguuggagacacacccagaaaaaacgacagcuccagcaguagccauuguuuggauccuaacaaugaagaagguggucauggagugaaaggcugggccuuugaugauggaaaugacguguggaugggaagaacgaucagcgagaagucacgcuuaggguaugaaaccuucaaagucauugaaggcugguccaacccuaaguccaaauugcagauaaauaggcaagucauaguugacagagguaauagguccgguuauucugguauuuucucuguugaaggcaaaagcugcaucaaucggugcuuuuauguggaguugauaaggggaagaaaagaggaaacugaagucuuguggaccucaaacaguauuguuguguuuuguggcaccucagguacauauggaacaggcucauggccugauggggcggacaucaaucucaugccuauauaa

SEQ ID NO: 48700 - RNA, 1410 nt, Artificial Sequence
  derived and/or modified CDS sequence (wt) from neuraminidase__InfluenzaA__ACO94774
augaauccaaaucaaaagauaauaacgauuggcucuguuucucucaccauuuccacaauaugcuucuucaugcaaauugccaucuugauaacuacuguaacauugcauuucaagcaauaugaauucaacucccccccaaacaaccaagugaugcugugugaaccaacaauaauagaaagaaacauaacagaaauaguguaucugaccaacaccaccauagagaaggaaauaugccccaaacuagcagaauacagaaauuggucaaagccgcaaugugacauuacaggauuugcaccuuuuucuaaggacaauucgauuaggcuuuccgcugguggggacaucugggugacaagagaaccuuaugugucaugcgauccugacaaguguuaucaauuugcccuuggacagggaacaacacuaaacaacgugcauucaaauaacacaguacgugauaggaccccuuaucggacccuauugaugaaugaguuagguguuccuuuucaucuggggaccaagcaagugugcauggcaugguccagcucaaguugucacgauggaagagcauggcugcauguuuguauaacgggggaugauaaaaaugcaacugcuagcuucauuuacaaugggaggcuuguagauaguguuguuucaugguccaaagaaauccucaggacccaggagucagaaugcguuuguaucaauggaacuuguacaguaguaaugacugaugggagugcuucaggaaaagcugauacuaaaauacuauucauugaggaggggaaaaucguucauacuagcacauugucaggaagugcucagcaugucgaggagugcuccugcuauccucgauauccuggugucagaugugucugcagagacaacuggaaaggcuccaauaggcccaucguagauauaaacauaaaggaucauagcauuguuuccaguuauguguguucaggacuuguuggagacacacccagaaaaaacgacagcuccagcaguagccauuguuuggauccuaacaaugaagaagguggucauggagugaaaggcugggccuuugaugauggaaaugacguguggaugggaagaacgaucagcgagaagucacgcuuaggguaugaaaccuucaaagucauugaaggcugguccaacccuaaguccaaauugcagauaaauaggcaagucauaguugacagagguaauagguccgguuauucugguauuuucucuguugaaggcaaaagcugcaucaaucggugcuuuuauguggaguugauaaggggaagaaaagaggaaacugaagucuuguggaccucaaacaguauuguuguguuuuguggcaccucagguacauauggaacaggcucauggccugauggggcggacaucaaucucaugccuauauaa

SEQ ID NO: 48701 - RNA, 1410 nt, Artificial Sequence
  derived and/or modified CDS sequence (wt) from neuraminidase__InfluenzaA__ACO94785
augaauccaaaucaaaagauaauaacgauuggcucuguuucucucaccauuuccacaauaugcuucuucaugcaaauugccaucuugauaacuacuguaacauugcauuucaagcaauaugaauucaacucccccccaaacaaccaagugaugcuguguaaaccaacaauaauagaaagaaacauaacagagauaguguaucugaccaacaccaccauagagaaggaaauaugccccaaacuagcagaauacagaaauuggucaaagccgcaaugugacauuacaggauuugcaccuuuuucuaaggacaauucgauuaggcuuuccgcugguggggacaucugggugacaagagaaccuuaugugucaugcgauccugacaaguguuaucaauuugcccuuggacagggaacaacacuaaacaacgugcauucaaauaacacaguacgugauaggaccccuuaucggacccuauugaugaaugaguuagguguuccuuuucaucuggggaccaagcaagugugcauagcaugguccagcucaaguugucacgauggaaaagcauggcugcauguuuguauaacgggggaugauaaaaaugcaacugcuagcuucauuuacaaugggaggcuuguagauaguguuguuucaugguccaaagaaauccucaggacccaggagucagaaugcguuuguaucaauggaacuuguacaguaguaaugacugaugggagugcuucaggaaaagcugauacuaaaauacuauucauugaggaggggaaaaucguucauacuagcacauugucaggaagugcucagcaugucgaggagugcuccugcuauccucgauauccuggugucagaugugucugcagagacaacuggaaaggcuccaauaggcccaucguagauauaaacauaaaggaucauagcauuguuuccaguuauguguguucaggacuuguuggagacacacccagaaaaaacgacagcuccagcaguagccauuguuuggauccuaacaaugaagaagguggucauggagugaaaggcugggccuuugaugauggaaaugacguguggaugggaagaacgaucagcgagaagucacgcuuaggguaugaaaccuucaaagucauugaaggcugguccaacccuaaguccaaauugcagauaaauaggcaagucauaguugacagagguaauagguccgguuauucugguauuuucucuguugaaggcaaaagcugcaucaaucggugcuuuuauguggaguugauaaggggaagaaaagaggaaacugaagucuuguggaccucaaacaguauuguuguguuuuguggcaccucagguacauauggaacaggcucauggccugauggggcggacaucaaucucaugccuauauaa

SEQ ID NO: 48702 - RNA, 1410 nt, Artificial Sequence; identical to SEQ ID NO: 48611
  derived and/or modified CDS sequence (wt) from neuraminidase__InfluenzaA__ACO94796

SEQ ID NO: 48703 - RNA, 1413 nt, Artificial Sequence
  derived and/or modified CDS sequence (wt) from neuraminidase__InfluenzaA__ACO94807
augaacccaaaucaaaaaauaauaaccauuggaucaaucaguauagcaaucggaauaauuagucuaauauugcaaauaggaaauauuauuucaauaugggcuagucacucaauccaaacuggaagucaaaaccacacuggaauaugcaaccaaagaaucauuacauaugaaaacagcaccugggugaauaacacauauguuaauauuaacaacaccaauguuguugcugaaaaggacaaaacuucagugacauuggccggcaauucaucucuuuguucuaucaguggaugggcuauauacacaaaagacaacagcauaagaauuggcuccaaaggagauguuuuugucauaagagaaccuuucauaucauguucucacuuggaaugcagaaccuuuuuucugacccaaggugcucuauuaaaugacaaacauucaaaugggaccguaaaggacagaaguccuuauagggccuuaaugagcuguccucuaggugaagcuccguccccauacaauucaagguucgaaucaguugcauggucagcaagcgcaugccaugauggcaugggcugguuaacaaucggaauuucugguccagacaauggagcuguggcuguacuaaaauacaacggaauaauaacugaaaccauaaaaaguuggaaaaagcgaauauuaagaacacaagagucugaaugugucuguaugaacgggucauguuucaccauaaugaccgauggcccgaguaaugggaccgccucguacaaaauuuucaagaucgaaaaggggaagguuaccaaaacaauagaguugaaugcacccaauuuucauuaugaggaauguuccuguuacccagacacuggcacagugauguguguaugcagagacaacuggcaugguucaaaucgaccuugggugucuuuuaaucaaaacuuggauuaucaaauaggauacaucugcaguggaguguucggugacaauccgcgucccaaagauggggagggcagcugcaauccagugacuguugauggagcagacggaguaaaaggguuuucauacaaauaugguaaugguguuuggauaggaaggaccaaaaguaacagacuuagaaagggguuugagaugauuugggauccuaauggauggacaaauaccgacagugauuucucaguuaaacaggauguuguagcaauaacugauuggucaggguacagcggaaguuuuguucaacauccugaguuaacaggauuggacuguauaagaccuugcuucuggguugaguuagucagagggcugccuagggaaaauacaacaaucuggacuagugggagcagcauuucuuuuuguggcguuaauagugguacugcaaacuggucuuggccagacggugcugaguugccguucaccauugacaaguag

SEQ ID NO: 48704 - RNA, 1410 nt, Artificial Sequence; identical to SEQ ID NO: 48431
  derived and/or modified CDS sequence (wt) from neuraminidase__InfluenzaA__ACO94818

SEQ ID NO: 48705 - RNA, 1365 nt, Artificial Sequence; identical to SEQ ID NO: 47731
  derived and/or modified CDS sequence (wt) from neuraminidase__InfluenzaA__ACO94829

SEQ ID NO: 48706 - RNA, 1365 nt, Artificial Sequence
  derived and/or modified CDS sequence (wt) from neuraminidase__InfluenzaA__ACO94840
augaauccaaaucagaaaauaauaaccauuggaucaaucugucugguagucggacuaauuagccuaauauuacaaauagggaauauaaucucaauauggauuagccauucaauucaaacuggaagucaaaaccauacuggaauaugcaaccaaaacaucauuaccuauaaaaauagcaccuggguaaaggacacaacuucagugauauuaaccggcaauucaucucuuugucccauccgugggugggcuauauacagcaaagacaauagcauaagaauugguuccaaaggagacguuuuugucauaagagagcccuuuauuucauguucucacuuggaaugcaggaccuuuuuucugacccaaggugccuuacugaaugacaagcauucaagugggacuguuaaggacagaagcccuuauagggccuuaaugagcugcccugucggugaagcuccguccccguacaauucaagauuugaaucgguugcuuggucagcaagugcaugucaugauggcaugggcuggcuaacaaucggaauuucagguccagauaauggagcaguggcuguauuaaaauacaacggcauaauaacugaaaccauaaaaaguuggaggaagaaaauauugaggacacaagagucugaaugugccuguguaaaugguucauguuuuacuauaaugacugauggcccgagugaugggcuggccucguacaaaauuuucaagaucgaaaaggggaagguuacuaaaucaauagaguugaaugcaccuaauucucacuaugaggaauguuccuguuacccugauaccggcaaagugaugugugugugcagagacaauuggcaugguucgaaccggccaugggugucuuucgaucaaaaccuggauuaucaaauaggauacaucugcagugggguuuucggugacaacccgcgucccgaagauggaacaggcagcugugguccaguguauguugauggagcaaacggaguaaagggauuuucauauagguaugguaaugguguuuggauaggaaggaccaaaagucacaguuccagacauggguuugagaugauuugggauccuaauggauggacagagacugauaguaaguucucugugaggcaagauguuguggcaaugacugauuggucaggguauagcggaaguuucguucaacauccugagcugacagggcuagacuguaugaggccgugcuucuggguugaauuaaucaggggacgaccuaaagaaaaaacaaucuggacuagugcgagcagcauuucuuuuuguggcgugaauagugauacuguagauuggucuuggccagacggugcugaguugccauucagcauugacaaguag

SEQ ID NO: 48707 - RNA, 1410 nt, Artificial Sequence
  derived and/or modified CDS sequence (wt) from neuraminidase__InfluenzaA__ACO94851
augaauccaaaucaaaagauaauaacgauuggcucuguuucucucaccauuuccacaauaugcuucuucaugcaaacugccaucuugauaacuacuguaacauugcauuucaagcaauaugaauucaacucccccccaaacaaccaagugaugcugugugaaccaacaauaauagaaagaaacauaacagagauaguguaucugaccaacaccaccauagagaaggaaauaugccccaaacuagcagaauacagaaauuggucaaagccgcaaugugacauuacaggauuugcaccuuuuucuaaggacaauucgauuaggcuuuccgcugguggggacaucugggugacaagagaaccuuaugugucaugcgauccugacaaguguuaucaauuugcccuuggacagggaacaacacuaaacaacgugcauucaaaugacauaguacgugauaggaccccuuaucggacccuauugaugaaugaguuagguguuccuuuucaucuggggaccaagcaagugugcauagcaugguccagcucaaguugucacgauggaaaagcauggcugcauguuuguauaacgggggaugauaaaaaugcaacugcuagcuucauuuacaaugggaggcuuguagauaguauuguuucaugguccaaagaaauccucaggacccaggagucagaaugcguuuguaucaauggaacuuguacaguaguaaugacugaugggagugcuucaggaaaagcugauacuaaaauacuauucauugaggaggggaaaaucguucauacuagcacauugucaggaagugcucagcaugucgaggagugcuccugcuauccucgauauccuggugucagaugugucugcagagacaacuggaaaggcuccaauaggcccaucguagauauaaacauaaaggaucauagcauuguuuccaguuauguguguucaggacuuguuggagacacacccagaaaaaacgacagcuccagcaguagccauuguuuggauccuaacaaugaagaagguggucauggagugaaaggcugggccuuugaugauggaaaugacguguggaugggaagaacgaucagcgagaagucacgcuuaggguaugaaaccuucaaagucauugaaggcugguccaacccuaaguccaaauugcagauaaauaggcaagucauaguugacagagguaauagguccgguuauucugguauuuucucuguugaaggcaaaagcugcaucaaucggugcuuuuauguggaguugauaaggggaagaaaagaggaaacugaagucuuguggaccucaaacaguauuguuguguuuuguggcaccucagguacauauggaacaggcucauggccugauggggcggacaucaaucucaugccuauauaa

SEQ ID NO: 48708 - RNA, 1413 nt, Artificial Sequence
  derived and/or modified CDS sequence (wt) from neuraminidase__InfluenzaA__ACO94873
augaacccaaaucaaaagauaauaaccauuggaucaaucaguauagcaaucggaauaauuagucuaauguugcaaauaggaaauauuauuucaauaugggcuagucacucaauccaaacuggaagucaaaacaacacuggaauaugcaaucaaagaaucaucacauaugaaaacagcaccugggugaaucacacauauguuaauauuaacaacaccaauguuguugcuggagaggacaaaacuucagugacauuggccggcaauucaucucuuuguucuaucaguggaugggcuauauacacaaaagacaacagcauaagaauuggcuccaaaggagauguuuuugucauaagagaaccuuucauaucauguucucacuuggaaugcagaaccuuuuuucugacccaaggcgcucuauuaaaugacaaacauucaaaugggaccguaaaggacagaaguccuuauagggccuuaaugagcuguccucuaggugaagcuccuuccccauacaauucaaaguucgaaucaguugcauggucagcaagcgcaugccaugauggcaugggcugguuaacaaucggaauuucugguccagacaauggagcuguggcuguacuaaaauacaacggaauaauaacuggaaccauaaaaaguuggaaaaagcaaauauuaagaacacaagagucugaaugugucuguaugaacgggucauguuucaccauaaugaccgauggcccgaguaauaaggccgccucguacaaaauuuucaagaucgaaaaggggaagguuacuaaaucaauagaguugaaugcacccaauuuucauuaugaggaauguuccuguuacccagacacuggcauagugauguguguaugcagggacaacuggcaugguucaaaucgaccuugggugucuuuuaaucaaaacuuggauuaucaaauaggauacaucugcaguggaguguuuggugacaauccgcgucccgaagauggagagggcagcugcaauccagugacuguugauggagcaaacggaguaaaaggguuuucauacaaauaugauaaugguguuuggauaggaaggaccaaaaguaacagacuuagaaagggguuugagaugauuugggauccuaauggauggacaaauaccgacagugauuucucagugaaacaggauguuguagcaauaacugauuggucaggguacaguggaaguuucguccaacauccugaguuaacaggauuggacuguauaagaccuugcuucuggguugaguuagucagagggcugcccagagaaaauacaacaaucuggacuagugggagcagcauuucuuuuuguggcguuaauagugauacugcaaacugguccuggccagacggugcugaguugccguucaccauugacaaguag

SEQ ID NO: 48709 - RNA, 1410 nt, Artificial Sequence
  derived and/or modified CDS sequence (wt) from neuraminidase__InfluenzaA__ACO94884
augaauccaaaucaaaagauaauaacaauuggcucuguuucucucaccauugccacaauaugcuuccuuaugcaaauugccauccugguaacuacuguaacauugcauuucaagcagcaugaaugcaacucccccccaaacaaccaaguaaugcugugugaaccaacaauaauagaaagaaacauaacagagauaguguaucugaccaacaccaccauagagaaggaaaugugccccaaacuagcagaauacagaaauuggucaaagccgcaauguaacauuacaggauuugcaccuuuuucuaaggacaauucgauucggcuuuccgcugguggggacaucugggugacaagagaaccuuaugugucaugcgauccugacaaguguuaucaauuugcccuugggcagggaacaacacuaaacaacgggcauucaaaugacacaguacaugauaggaccccuuaccggacccuauugaugaaugaauuggguguuccauuucauuugggaaccaggcaagugugcauagcaugguccagcucaaguugucacgauggaaaagcguggcugcauguuuguguaacuggggaugauaaaaaugcaacugcuagcuucauuuacaaugggaggcuuguagauaguauugguucaugguccaaaaaaauacucagaacccaggagucggaaugcguuuguaucaauggaacuuguacaguaguaaugacugaugggagcgcuucaggaaaagcugauacuaaaauacuauucauugaggaggggaaaaucguucauauuagcacauugucgggaagugcucagcaugucgaggagugcuccuguuauccucgauauccuggugucagaugugucugcagagacaacuggaaaggcuccaauaggcccauuguagauauaaauguaaaggauuauagcauuguuuccaguuaugugugcucaggacuuguuggagacacacccagaaaaaacgacagcuucagcaguagccauugccuagauccuaacaaugaggaagguggucauggagugaaaggcugggcuuuugaugauggaaaugacguguggaugggaagaacgaucagcgagaaguuacgcucagguuaugaaaccuucaaagucaucgaaggcugguccaaaccuaacuccaaauuacagauaaauaggcaaguuauaguugaaagagguaacagguccgguuauucugguauuuucuccguugaaggcaaaagcugcaucaaucggugcuuuuauguggaguugauaaggggaaggaaagaggaaacugaagucugguggaccucaaacaguauuguuguguuuuguggcaccucagguacauauggaacaggcucauggccugauggggcggauaucaaucucaugccuauauaa

SEQ ID NO: 48710 - RNA, 1410 nt, Artificial Sequence
  derived and/or modified CDS sequence (wt) from neuraminidase__InfluenzaA__ACO94906
augaauccaaaucaaaagauaauaacgauuggcucuguuucucucaccauuuccacaauaugcuucuucaugcaaauugccaucuugauaacuacuguaacauugcauuucaagcaauaugaauucaacucccccccaaacaaccaagugaugcugugugaaccaacaauaauagaaagaaacauaacagagauaguguaucugaccaacaccaccauagaaaaggaaauaugccccaaacuagcagaauacagaaauuggucaaagccgcaaugugacauuacaggauuugcaccuuuuucuaaggacaauucgauuaggcuuuccgcugguggggacaucugggugacaagagaaccuuaugugucaugcgauccugacaaguguuaucaauuugcccuuggacagggaacaacacuaaacaacgugcauucaaaugacacaguacaugauaggaccccuuaucggacccuauugaugaaugaguuagguguuccauuucaucuggggaccaagcaagugugcauagcaugguccagcucaaguugucacgauggaaaagcauggcugcauguuuguguaacgggggaugauaaaaaugcaacugcuagcuucauuuacaaugggaggcuuguagauaguauuguuucaugguccaaaaaaauccucaggacccaggagucagaaugcguuuguaucaauggaacuuguacaguaguaaugacugaugggagugcuucaggaaaagcugauacuaaaauacuauucauugaggaggggaaaaucguucauacuagcacauugucaggaagugcucagcaugucgaggagugcuccugcuauccucgauauccuggugucagaugugucugcagagacaacuggaaaggcuccaauaggcccaucguagauauaaacauaaaggauuauagcauuguuuccaguuaugugugcucaggacuuguuggagacacacccagaaaaaacgacagcuccagcaguagccauugcuuggauccuaacaaugaagaagguggucauggagugaaaggcugggccuuugaugauggaaaugacguguggaugggaagaacgaucagcgagaaguuacgcucaggauaugaaaccuucaaagucauugaaggcugguccaacccuaauuccaaauugcagauaaauaggcaagucauaguugacagagguaauagguccgguuauucugguauuuucucuguugaaggcaaaagcugcaucaaucggugcuuuuauguggaguugauaaggggaagaaaagaggaaacugaagucuuguggaccucaaacaguauuguuguguuuuguggcaccucagguacauauggaacaggcucauggccugauggggcggacaucaaucucaugccuauauaa

SEQ ID NO: 48711 - RNA, 1410 nt, Artificial Sequence
  derived and/or modified CDS sequence (wt) from neuraminidase__InfluenzaA__ACO94917
augaauccaaaucaaaagauaauaacaauuggcucuguuucucucaccauugccacaauaugcuuccuuaugcaaauugccauccugguaacuacuguaacauugcauuucaagcagcaugaaugcaacucccccccaaacaaccaaguaaugcugugugaaccaacaauaauagaaagaaacauaacagagauaguguaucugaccaacaccaccauagagaaggaaauaugccccaaacuagcagaauacagaaauuggucaaagccgcaauguaacauuacaggauuugcaccuuuuucuaaggacaauucgauucggcuuuccgcugguggggacaucugggugacaagagaaccuuaugugucaugcgauccugacaaguguuaucaauuugcccuugggcagggaacaacacuaaacaacgggcauucaaaugacacaguacaugauaggaccccuuaccggacccuauugaugaaugaauuggguguuccauuucauuugggaaccaggcaagugugcauagcaugguccagcucaaguugucacgauggaaaagcguggcugcauguuuguguaacuggggaugauaaaaaugcaacugcuagcuucauuuacaaugggaggcuuguagauaguauugguucaugguccaaaaaaauacucagaacccaggagucggaaugcguuuguaucaauggaacuuguacaguaguaaugacugaugggagcgcuucaggaaaagcugauacuaaaauacuauucauugaggaggggaaaaucguucauauuagcacauugucgggaagugcucagcaugucgaggagugcuccuguuauccucgauauccuggugucagaugugucugcagagacaacuggaaaggcuccaauaggcccauuguagauauaaauguaaaggauuauagcauuguuuccaguuaugugugcucaggacuuguuggagacacacccagaaaaaacgacagcuucagcaguagccauugccuagauccuaacaaugaggaagguggucauggagugaaaggcugggcuuuugaugauggaaaugacguguggaugggaagaacgaucagcgagaaguuacgcucagguuaugaaaccuucaaagucaucgaaggcugguccaaaccuaacuccaaauuacagauaaauaggcaaguuauaguugaaagagguaacagguccgguuauucugguauuuucuccguugaaggcaaaagcugcaucaaucggugcuuuuauguggaguugauaaggggaaggaaagaggaaacugaagucugguggaccucaaacaguauuguuguguuuuguggcaccucagguacauauggaacaggcucauggccugauggggcggauaucaaucucaugccuauauaa

SEQ ID NO: 48712 - RNA, 1410 nt, Artificial Sequence
  derived and/or modified CDS sequence (wt) from neuraminidase__InfluenzaA__ACO94928
augaauccaaaucaaaagauaauaacgauuggcucuguuucucucaccauuuccacaauaugcuucuucaugcaaauugccaucuugauaacuacuguaacauugcauuucaagcaauaugaauucaacucccccccaaacaaccaagugaugcugugugaaccaacaauaauagaaagaaacauaacagagauaguguaucugaccaacaccaccauagagaaggaaauaugccccaaacuagcagaauacagaaauuggucaaagccgcaaugugacauuacaggauuugcaccuuuuucuaaggacaauucgauuaggcuuucagcugguggggacaucugggugacaagagaaccuuaugugucaugcgauccugacaaguguuaucaauuugcccuuggacagggaacaacacuaaacaacgugcauucaaaugacacaguacaugauaggaccccuuaucggacccuauugaugaaugaguuagguguuccauuucaucuggggaccaagcaagugugcauagcaugguccagcucaaguugucacgauggaaaagcauggcugcauguuuguguaacgggggaugauaaaaaugcaacugcuagcuucauuuacaaugggaggcuuguagauaguauuguuucaugguccaaaaaaauccucaggacccaggagucagaaugcguuuguaucaauggaacuuguacaguaguaaugacugaugggagugcuucaggaaaagcugauaccaaaauacuauucauugaggaggggaaaaucguucauacuagcacauugucaggaagugcucagcaugucgaggagugcuccugcuauccucgauauccuggugucagaugugucugcagagacaacuggaaaggcuccaauaggcccaucguagauauaaacauaaaggauuauagcauuguuuccaguuaugugugcucaggacuuguuggagacacacccagaaaaaacgacagcuccagcaguagucauugcuuggauccuaacaaugaagaagguggucauggagugaaaggcugggccuuugaugauggaaaugacguguggaugggaagaacgaucagcgagaaguuacgcucaggauaugaaaccuucaaagucauugaaggcugguccaacccuaauuccaaauugcagauaaauaggcaagucauaguugacagagguaauagguccgguuauucugguauuuucucuguugaaggcaaaagcugcaucaaucggugcuuuuauguggaguugauaaggggaagaaaagaggaaacugaagucuuguggaccucaaacaguauuguuguguuuuguggcaccucagguacauauggaacaggcucauggccugauggggcggacaucaaucucaugccuauauaa

SEQ ID NO: 48713 - RNA, 1410 nt, Artificial Sequence; identical to SEQ ID NO: 48711
  derived and/or modified CDS sequence (wt) from neuraminidase__InfluenzaA__ACO94939

SEQ ID NO: 48714 - RNA, 1410 nt, Artificial Sequence
  derived and/or modified CDS sequence (wt) from neuraminidase__InfluenzaA__ACO94950
augaauccaaaucaaaagauaauaacgauuggcucuguuucucucaccauuuccacaauaugcuuccucaugcaaauugccaucuugauaacuacuguaacauugcauuucaagcaauaugaauucaacucccccccaaacaaccaagugaugcugugugaaccaacaauaauagaaagaaacauaacagagauaguguaucugaccaacaccaccauagagaaggaaauaugccccaaacuagcagaauacagaaauuggucaaagccgcaaugugacauuacaggauuugcaccuuuuucuaaggacaauucgauuaggcuuuccgcugguggggacaucugggugacaagagaaccuuaugugucaugcgauccugacaaguguuaucaauuugcccuuggacagggaacaacacuaaacaacgugcauucaaaugacacaguacaugauaggaccccuuaucggacccuauugaugaaugaguuagguguuccauuucaucuggggaccaagcaagugugcauagcaugguccagcucaaguugucacgauggaaaagcauggcugcauguuuguguaacgggggaugauaaaaaugcaacugcuagcuucauuuacaaugggaggcuuguagauaguauuguuucaugguccaaaaaaauccucaggacccaggagucagaaugcguuuguaucaauggaacuuguacaguaguaaugacugaugggagugcuucaggaaaagcugauacuaaaauacuauucauugaggaggggaaaaucguucauacuagcacauugucaggaagugcucagcaugucgaggagugcuccugcuauccucgauauccuggugucagaugugucugcagagacaacuggaaaggcuccaauaggcccaucguagauauaaacauaaaggauuauagcauuguuuccaguuaugugugcucaggacuuguuggagacacacccagaaaaaacgacagcuccagcaguagccauugcuuggauccuaacaaugaagaagguggucauggagugaaaggcugggccuuugaugauggaaaugacguguggaugggaagaacgaucagcgagaaguuacgcucaggauaugaaaccuucaaagucauugaaggcugguccaacccuaauuccaaauugcagauaaauaggcaagucauaguugacagagguaauagguccgguuauucugguauuuucucuguugaaggcaagagcugcaucaaucggugcuuuuauguggaguugauaaggggaagaaaagaggaaacugaagucuuguggaccucaaacaguauuguuguguuuuguggcaccucagguacauauggaacaggcucauggccugauggggcggacaucaaucucaugccuauauaa

SEQ ID NO: 48715 - RNA, 1410 nt, Artificial Sequence
  derived and/or modified CDS sequence (wt) from neuraminidase__InfluenzaA__ACO94961
augaauccaaaucaaaagauaauaacgauuggcucuguuucucucaccauuuccacaauaugcuucuucaugcaaauugccaucuugauaacuacuguaacauugcauuucaaacaauaugaauucaacucccccccaaacaaccaagugaugcugugugaaccaacaauaauagaaagaaacauaacagagauaguguaucugaccaacaccaccauagagaaggaauuaugccccaaacuagcagaauacagaaauuggucaaagccgcaaugugacauuacaggauuugcaccuuuuucuaaggacaauucgauuaggcuuuccgcugguggggacaucugggugacaagagaaccuuaugugucaugcgauccugacaaguguuaucaauuugcccuuggacagggaacaacacuaaacaacgugcauucaaaugacacaguacaugauaggaccccuuaucggacccuauugaugaaugaguuagguguuccauuucaucuggggaccaagcaagugugcauagcaugguccagcucaaguugucacgauggaaaagcauggcugcauguuuguguaacgggggaugauaaaaaugcaacugcuagcuucauuuacaaugggaggcuuguagauaguauuguuucaugguccaaaaaaauccucaggacccaggagucagaaugcguuuguaucaauggaacuuguacaguaguaaugacugaugggagugcuucaggaaaagcugauacuaaaauacuauucauugaggaggggaaaaucguucauacuagcacauugucaggaagugcucagcaugucgaggagugcuccugcuauccucgauauccuggugucagaugugucugcagagacaacuggaaaggcuccaauaggcccaucguagauauaaacauaaaggauuauagcauuguuuccaguuaugugugcucaggacuuguuggagacacacccagaaaaaacgacagcuccagcaguagccauugcuuggauccuaacaaugaagaagguggucauggagugaaaggcugggccuuugaugauggaaaugacguguggauggggagaacgaucagcgagaaguuacgcucaggauaugaaaccuucaaagucauugaaggcugguccaacccuaauuccaaauugcagauaaauaggcaagucauaguugacagagguaauagguccgguuauucugguauuuucucuguugaaggcaaaagcugcaucaaucggugcuuuuauguggaguugauaaggggaagaaaagaggaaacugaagucuuguggaccucaaacaguauuguuguguuuuguggcaccucagguacauauggaacaggcucauggccugauggggcggacaucaaucucaugccuauauaa

SEQ ID NO: 48716 - RNA, 1410 nt, Artificial Sequence
  derived and/or modified CDS sequence (wt) from neuraminidase__InfluenzaA__ACO94972
augaauccaaaucaaaagauaauaacgauuggcucuguuucucucaccauuuccacaauaugcuucuucaugcaaauugcuauucugauaacuacuguaacauugcauuucaagcaauaugaauucaacucccccccaaacaaccaagugaugcugugugaaccaacaauaauagaaagaaacauaacagagauaguguaucugaccaacaccaccauagagaaggaaauaugccccaaacuagcagaauacagaaauuggucaaagccgcaauguaacauuacaggauuugcaccuuuuucuaaggacaauucgauucggcuuuccgcugguggggacaucugggugacaagagaaccuuaugugucaugcgauccugacaaguguuaucaauuugcccuuggacagggaacaacacuaaacaacgugcauucaaaugacacaguacaugauaggaccccuuaucggacccuauugaugaaugaguuggguguuccauuucaucuggggaccaagcaagugugcauagcaugguccagcucaaguugucacgauggaaaagcauggcugcauguuuguguaacgggggaugaugaaaaugcaacugcuagcuucauuuacaaugggaggcuuguagauaguguuguuucaugguccaaaaaaauccucaggacccaggagucagaaugcguuuguaucaauggaacuuguacaguaguaaugacugaugggagugcuucaggaaaagcugauacuaaaauacuauucauugaggaggggaaaaucguucauacuagcacauugucaggaagugcucagcaugucgaggagugcuccuguuauccucgauauccuggugucagaugugucugcagagacaacuggaaaggauccaauaggcccaucguagauauaaacauaaaggauuauagcauuguuuccagcuaugugugcucaggacuuguuggagacacacccagaaaaaacgacagcuccagcaguagccauugcuuggauccaaacaaugaagaagguggucauggagugaaaggcugggccuuugaugaugggaaugacguguggaugggaagaacgaucagcgagaaguuacgcucaggauaugaaaccuucaaagucauugaaggcugguccaauccuaacuccaaauugcagauaaauaggcaagucauaguugacagagguaauagguccgguuauucugguauuuucucuguugaaggcaaaagcugcaucaaucggugcuuuuauguggaguugauaaggggaagaaaccaggaaacugaagucuuguggaccucaaacaguauuguuguguuuuguggcaccucagguacauauggaacaggcucauggccugauggggcggacaucaaucucaugccuauauaa

SEQ ID NO: 48717 - RNA, 1410 nt, Artificial Sequence
  derived and/or modified CDS sequence (wt) from neuraminidase__InfluenzaA__ACO95156
augaauccaaaucaaaagauaauaacgauuggcucuguuucucucaccauuuccacaauaugcuucuucaugcaaauugccauucugauaacuacuguaacauugcauuucaagcaauaugaauucaacucccccccaaacaaccaagugaugcugugugaaccaacaauaauagaaagaaacauaacagagauaguguaucugaccaacaccaccauagagaaggaaacaugccccaaacuagcagaauacagaaauuggucaaagccgcaauguaacauuacaggauuugcaccuuuuucuaaggacaauucgauucggcuuuccgcugguggggacaucugggugacaagagaaccuuaugugucaugcgauccugacaaguguuaucaauuugcccuuggacagggaacaacacuaaacaacgugcauucaaaugacacaguacaugauaggaccccuuaucggacccuauugaugaaugaauuggguguuccauuucaucuggggaccaagcaagugugcauagcaugguccagcucaaguugucacgauggaaaagcauggcugcauguuuguauaacgggggaugauaaaaaugcaacugcuagcuucauuuacaaugggaggcuuguagauaguguuguuucaugguccaaaaaaauccucaggacccaggagucagaaugcguuuguaucaauggaacuuguaccguaguaaugacugaugggagugcuucaggaaaagcugauacuaaaauacuauucauugaggaggggaaaaucguucauacuagcacauugucuggaagugcucagcaugucgaggagugcuccuguuauccucgauauccuggugucagaugugucugcagagacaacuggaaaggcuccaauaggcccaucguagauauaaacauaaaggauuauagcauuguuuccagcuaugugugcucaggacuuguuggagacacacccagaaaaaacgacagcuccagcaguagccauugcuuggauccaaacaaugaagaagguggucauggagugaagggcugggccuuugaugauggaaaugacguauggaugggaagaacgaucagcgagaaguuacgcucaggauaugaaaccuucaaagucauugaaggcugguccaauccuaacuccaaauugcagauaaauaggcaagucauaguugacagagguaauagguccgguuauucugguauuuucucuguugaaggcaaaagcugcaucaaucggugcuuuuauguggaguugauaaggggaagaaaccaggaaacugaagucuuguggaccucaaacaguauuguuguguuuuguggcaccucagguacauauggaacaggcucauggccugauggggcggacaucaaucucaugccuauauaa

SEQ ID NO: 48718 - RNA, 1410 nt, Artificial Sequence
  derived and/or modified CDS sequence (wt) from neuraminidase__InfluenzaA__ACO95174
augaauccaaaucaaaagauaauaacgauuggcucuguuucucucaccauuuccacaauaugcuucuucaugcaaauugccaucuugauaacuacuguaacauugcauuucaagcaauaugaauucaacucccccccaaacaaccaagugaugcugugugaaccaacaauaauagaaagaaacauaacagagauaguguaucugaccaacaccaccauagagaaggaaauaugccccaaacuagcagaauacagaaauuggucaaagccgcaaugugacauuacaggauuugcaccuuuuucuaaggacaauucgauuaggcuuuccgcugguggggacaucugggugacaagagaaccuuaugugucaugcgauccugacaaguguuaucaauuugcccuuggacagggaacaacacuaaacaacgugcauucaaaugacacaguacaugauaggaccccuuaucggacccuauugaugaaugaguuagguguuccauuucaucuggggaccaagcaagugugcauagcaugguccagcucaaguugucacgauggaaaagcauggcugcauguuuguguaacgggggaugauaaaaaugcaacugcuagcuucauuuacaaugggaggcuuguagauaguauuguuucaugguccaaagaaauccucaggacccaggagucagaaugcguuuguaucaauggaacuuguacaguaguaaugacugaugggagugcuucaggaaaagcugauaccaaaauacuauucauugaggaggggaaaaucguucauacuagcacauugucaggaagugcucagcaugucgaggagugcuccugcuauccucgauauccuggugucagaugugucugcagagacaauuggaaaggcuccaauaggcccauaguagauauaaacauaaaggauuauagcauuguuuccaguuaugugugcucaggacuuguuggagacacacccagaaaaaacgacagcuccagcaguagccauugcuuggauccuaacaaugaagaagguggucauggagugaaaggcugggccuuugaugauggaaaugacguguggaugggaagaacgaucagcgagaaguuacgcucaggauaugaaaccuucaaagucauugaaggcugguccaauccuaauuccaaauugcagauaaauaggcaagucauaguugacagagguaauagguccgguuauucugguauuuucucuguugaaggcaaaagcugcaucaaucggugcuuuuauguggaguugauaaggggaagaaaagaggaaacugaagucuuguggaccucaaacaguauuguuguguuuuguggcaccucagguacauauggaacaggcucauggccugauggggcggacaucaaucucaugccuauauaa

SEQ ID NO: 48719 - RNA, 1410 nt, Artificial Sequence; identical to SEQ ID NO: 48680
  derived and/or modified CDS sequence (wt) from neuraminidase__InfluenzaA__ACO95185

SEQ ID NO: 48720 - RNA, 1410 nt, Artificial Sequence
  derived and/or modified CDS sequence (wt) from neuraminidase__InfluenzaA__ACO95196
augaauccaaaucaaaagauaauaacgauuggcucuguuucucucaccauuuccacaauaugcuucuucaugcaaauugccauucugauaacuacuguaacauugcauuucaagcaauaugaauucaacucccccccaaacaaccaagugaugcugugugaaccaacaauaauagaaagaaacauaacagagauaguguaucugaccaacaccaccauagaaaaggaaauaugccccaaacuagcagaauacagaaauuggucaaagccgcaauguaacauuacaggauuugcaccuuuuucuaaggacaauucgauucggcuuuccgcugguggggacaucugggugacaagagaaccuuaugugucaugcgauccugacaaguguuaucaauuugcccuuggacagggaacgacacuaaacaacgugcauucaaaugacacaauacaugauaggaccccuuaucggacccuauugaugaaugaauuggguguuccauuucaucuggggaccaagcaagugugcauagcaugguccagcucaaguugucacgauggaaaagcauggcugcauguuuguguaacgggggaugauaaaaaugcaacugcuagcuucauuuacaaugggaggcuuguagauaguguuguuucaugguccaaaaaaauccucaggacccaggagucagaaugcguuuguaucaauggaacuuguacaguaguaaugacugaugggagugcuucaggaaaagcugauacuaaaauacuauucauugaggaggggaaaaucguucauacuagcacauugucaggaagugcucagcaugucgaggagugcuccuguuauccucgauauccuggugucagaugugucugcagagacaacuggaaaggcuccaauaggcccaucguagauauaaacauaaaggauuauagcauuguuuccagcuaugugugcucaggacuuguuggagacacacccagaaaaaacgacagcuccagcaguagccauugcuuggauccaaacaaugaagaagguggucauggagugaaaggcugggccuuugaugauggaaaugacguauggaugggaagaacgaucagcgagaaguuacgcucaggauaugaaaccuucaaagucauugaaggcugguccaauccuaacuccaaauugcagauaaauaggcaagucauaguugacagagguaauagguccgguuauucugguauuuucucuguugaaggcaaaagcugcaucaaucggugcuuuuauguggaguugauaaggggaagaaaccaggaaacugaagucuuguggaccucaaacaguauuguuguguuuuguggcaccucagguacauauggaacaggcucauggccugauggggcggacaucaaucucaugccuauauaa

SEQ ID NO: 48721 - RNA, 1410 nt, Artificial Sequence
  derived and/or modified CDS sequence (wt) from neuraminidase__InfluenzaA__ACO95207
augaauccaaaucaaaagauaauaacgauuggcucuguuucucucaccauuuccacaauaugcuucuucaugcaaauugccaucuugauaacuacuguaacauugcauuucaagcaauaugaauucaacucccccccaaacaaccaagugaugcugugugaaccaacaauaauagaaagaaacauaacagagauaguguaucugaccaacaccaccauagagaaggaaauaugccccaaacuagcagaauacagaaauuggucaaagccgcaaugugacauuacaggauuugcaccuuuuucuaaggacaauucgauuaggcuuuccgcugguggggacaucugggugacaagagaaccuuaugugucaugcgauccugacaaguguuaucaauuugcccuuggacagggaacaacacuaaacaacgugcauucaaaugacacaguacaugauaggaccccuuaucggacccuauugaugaaugaguuagguguuccauuucaucuggggaccaagcaagugugcauagcaugguccagcucaaguugucacgauggaaaagcauggcugcauguuuguguaacgggggaugauaaaaaugcaacugcuagcuucauuuacaaugggaggcuuguagauaguauuguuucaugguccaaagaaauccucaggacccaggagucagaaugcguuuguaucaauggaacuuguacaguaguaaugacugaugggagugcuucaggaaaagcugauacuaaaauacuauucauugaggaggggaaaaucguucauacuagcacauugucaggaagugcucagcaugucgaggagugcuccugcuauccucgauauccuggugucagaugugucugcagagacaauuggaaaggcuccaauaggcccauaguagauauaaacauaaaggauuauagcauuguuuccaguuaugugugcucaggacuuguuggagacacacccagaaaaaacgacagcuccagcagcagccauugcuuggauccuaacaaugaagaagguggucauggagugaaaggcugggccuuugaugauggaaaugacguguggaugggaagaacgaucagcgagaaguuacgcucaggauaugaaaccuucaaagucauugaaggcugguccaacccuaauuccaaauugcagauaaauaggcaagucauaguugacagagguaauagguccgguuauucugguauuuucucuguugaaggcaaaagcugcaucaaucggugcuuuuauguggaguugauaaggggaagaaaagaggaaacugaagucuuguggaccucaaacaguauuguuguguuuuguggcaccucagguacauaugggacaggcucauggccugauggggcggacaucaaucucaugccuauauaa

SEQ ID NO: 48722 - RNA, 1410 nt, Artificial Sequence
  derived and/or modified CDS sequence (wt) from neuraminidase__InfluenzaA__ACO95218
augaauccaaaucaaaagauaauaacgauuggcucuguuucucucaccauuuccacaauaugcuucuucaugcaaauugccaucuugauaacuacuguaacauugcauuucaagcaauaugaauucaacucccccccaaacaaccaagugaugcugugugaaccaacaauaauagaaagaaacauaacagagauaguguaucugaccaacaccaccauagagaaggaaauaugccccaaacuagcagaauacagaaauuggucaaagccgcaaugugacauuacaggauuugcaccuuuuucuaaggacaauucgauuaggcuuuccgcugguggggacaucugggugacaagagaaccuuaugugucaugcgauccugacaaguguuaucaauuugcccuuggacagggaacaacacuaaacaacgugcauucaaaugacacaguacaugauaggaccccuuaucggacccuauugaugaaugaguuagguguuccauuucaucuggggaccaagcaagugugcauagcaugguccagcucaaguugucacgauggaaaagcauggcugcauguuuguguaacgggggaugauaaaaaugcaacugcuagcuucauuuacaaugggaggcuuguagauaguauuguuucaugguccaaagaaauccucaggacccaggagucagaaugcguuuguaucaauggaacuuguacaguaguaaugacugaugggagugcuucaggaaaagcugauacuaaaauacuauucauugaggaggggaaaaucguucauacuagcacauugucaggaagugcucagcaugucgaggagugcuccugcuauccucgauauccuggugucagaugugucugcagagacaacuggaaaggcuccaauaggcccauaguagauauaaacauaaaggauuauagcauuguuuccaguuaugugugcucaggacuuguuggagacacacccagaaaaaacgacagcuccagcaguagccauugcuuggauccuaacaaugaagaagguggucauggagugaaaggcugggccuuugaugauggaaaugacguguggaugggaagaacgaucagcgagaaguuacgcucaggauaugaaaccuucaaagucauugaaggcugguccaacccuaauuccaaauugcagauaaauaggcaagucauaguugacagagguaauagguccgguuauucugguauuuucucuguugaaggcaaaagcugcaucaaucggugcuuuuauguggaguugauaagaggaagaaaagaggaaaccgaagucuuguggaccucaaacaguauuguuguguuuuguggcaccucagguacauauggaacaggcucauggccugauggggcggacaucaaucucaugccuauauaa

SEQ ID NO: 48723 - RNA, 1410 nt, Artificial Sequence
  derived and/or modified CDS sequence (wt) from neuraminidase__InfluenzaA__ACO95229
augaauccaaaucaaaagauaauaacgauuggcucuguuucucucaccauuuccacaauaugcuuuuucaugcaaauugccaucuugauaacuacuguaacauugcauuucaagcaauaugaauucaacucccccccaaacaaccaagugaugcugugugaaccaacaauaauagaaagaaacauaacagagauaguguaucugaccaacaccaccauagagaaggaaaugugccccaaacuagcagaauacagaaauuggucaaagccgcaaugugacauuacaggauuugcaccuuuuucuaaggacaauucgauuaggcuuuccgcugguggggacaucugggugacaagagaaccuuaugugucaugcgauccugacaaguguuaccaauuugcucuuggacagggaacaacacuaaacaacgugcauucaaaugacacaguacaugauaggaccccuuaucggacccuauugaugaaugaguuagguguuccauuucaucuggggaccaagcaagugugcauagcaugguccagcucaaguugucacgauggaaaagcauggcugcauguuuguguaacgggggaugauaaaaaugcaacugcuagcuucauuuacaaugggaggcuuguagauaguauuguuucaugguccaaaaaaauccucaggacccaggagucagaaugcguuuguaucaauggaacuuguacaguaguaaugacugaugggagugcuucaggaaaagcugauacuaaaauacuauucauugaggaggggaaaaucauucauacuagcacauugucaggaagugcucagcaugucgaggagugcuccugcuauccucgauauccuggugucagaugugucugcagagacaacuggaaaggcuccaauaggcccaucguagauauaaacauaaaggauuauagcauuguuuccaguuaugugugcucaggacuuguuggagacacacccagaaaaaacgacagcuccagcaguagccauugcuuggauccuaacaaugaagaagguggucauggagugaaaggcugggccuuugaugauggaaaugacguguggaugggaagaacgaucagcgagaaguuacgcucaggauaugaaaccuucaaagucauugaaggcugguccaaaccuaauuccaaauugcagauaaauaggcaagucauaguugacagagguaauagguccgguuauucugguauuuucucuguugaaggcaaaagcugcaucaaucggugcuuuuauguggaguugauaaggggaagaaaagaggaaacugaagucuuguggaccucaaacaguauuguuguguuuuguggcaccucagguacauauggaacaggcucauggccugauggggcggacaucaaucucaugccuauauaa

SEQ ID NO: 48724 - RNA, 1410 nt, Artificial Sequence
  derived and/or modified CDS sequence (wt) from neuraminidase__InfluenzaA__ACO95240
augaauccaaaucaaaagauaauaacgauuggcucuguuucucucaccauuuccacaauaugcuucuucaugcaaauugccaucuugauaacuacuguaacauugcauuucaagcaauaugaguucaacucccccccaaacaaccaagugaugcugugugaaccaacaauaauagaaagaaacauaacagagauaguguaucugaccaacaccaccauagagaaggaaauaugccccaaacuagcagaauacagaaauuggucaaagccgcaauguaacauuacaggauuugcaccuuuuucuaaggacaauucgauuaggcuuuccgcugguggggacaucugggugacaagagaaccuuaugugucaugcgauccugacaaguguuaucaauuugcccuuggacagggaacaacacuaaacaacgugcauucaaaugacacaguacaugauaggaccccuuaucggacccuauugaugaaugaguuagguguuccauuucaucuggggaccaagcaagugugcauagcaugguccagcucaaguugucacgauggaaaagcauggcugcauguuuguguaacgggggaugauaaaaaugcaacugcuagcuucauuuacaaugggaggcuuguagauaguauuguuucaugguccaaagaaauccucaggacccaggagucagaaugcguuuguaucaauggaacuuguacaguaguaaugacugaugggagugcuucaggaaaagcugauacuaaaauacuauucauugaggaggggaaaaucguucauacuagcacauugucaggaagugcucagcaugucgaggagugcuccugcuauccucgauauccuggugucagaugugucugcagagacaacuggaaaggcuccaauaggcccauaguagauauaaacauaaaggauuauagcauuguuuccaguuaugugugcucaggacuuguuggagacacacccagaaaaaacgacagcuccagcaguagccauugcuuggauccuaacaaugaagaagguggucauggagugaaaggcugggccuuugaugauggaaaugacguguggaugggaagaacgaucagcgagaaguuacgcucaggauaugaaaccuucaaagucauugaaggcugguccaacccuaauuccaaauugcagauaaauaggcaagucauaguugacagagguaauagguccgguuauucugguauuuucucuguugaaggcaaaagcugcaucaaucggugcuuuuauguggaguugauaaggggaagaaaagaggaaacugaagucuuguggaccucaaacaguauuguuguguuuuguggcaccucagguacauauggaacaggcucauggccugauggggcggacaucaaucucaugccuauauaa

SEQ ID NO: 48725 - RNA, 1410 nt, Artificial Sequence
  derived and/or modified CDS sequence (wt) from neuraminidase__InfluenzaA__ACO95262
augaauccaaaucaaaagauaauaacgauuggcucuguuucucucacuauugccacaauaugcuuccuuaugcaaauugccauccugguaacuacuguaacauugcauuucaagcaauaugaaugcagcucucccccaaacaaccaaguaaugcugugugaaccaacaauaauagaaagaaacauaacagagauaguguaucugaccaacaccaccauagagaaggaaauaugccccaaacuagcagaauacagaaauuggucaaagccacaauguaaaauuacaggauuugcaccuuuuucuaaggacaauucaauucggcuuuccgcugguggggacauuugggugacaagggaaccuuaugugucgugcgauccugacaaguguuaucaauuugcccuuggacagggaacaacacuaaacaacaggcauucaaaugacacaguacaugauaggaccccuuaucgaacccuauugaugaaugaguuggguguuccauuucauuugggaaccaagcaagugugcauagcaugguccagcucaaguugucacgauggaaaagcauggcugcauguuuguguaacugggcaugaugaaaaugcaacugcuagcuucauuuacgaugggaggcuuguagauaguauugguucaugguccaaaaaaauccucaggacccaggagucggaaugcguuuguaucaauggaacuuguacaguaguaaugacugaugggagugcuucaggaagagcugauacuaaaauacuauucauugaggaggggaaaaucguucauaucagcccacugucaggaagugcucagcaugucgaggagugcuccuguuauccucgauauccuggugucagaugugucugcagagacaacuggaaaggcuccaauaggcccaucguagauauaaauguaaaggauuauagcauuguuuccaguuaugugugcucaggacuuguuggagacacacccagaaaaaacgacagcuccagcaguagucauugccugaauccuaacaaugaggaagggggucauggagugaaaggcugggccuuugaugauggaaaugacguguggaugggaagaacgaucagcgagaaguuccgcucagguuaugaaaccuucaaagucauugaaggcugguccaaaccuaacuccaaauugcagauaaauaggcaagucauaguugacagagguaauagguccgguuauucugguauuuucucuguugaaggcaaaagcugcaucaaucggugcuuuuauguggaguugauaaggggaaggaaacaggaaacugaagucugguggaccucaaacaguauuguuguguuuuguggcaccucagguacauauggaacaggcucauggccugauggggcggacaucaaucucaugccuauauaa

SEQ ID NO: 48726 - RNA, 1410 nt, Artificial Sequence; identical to SEQ ID NO: 48523
  derived and/or modified CDS sequence (wt) from neuraminidase__InfluenzaA__ACO95273

SEQ ID NO: 48727 - RNA, 1410 nt, Artificial Sequence
  derived and/or modified CDS sequence (wt) from neuraminidase__InfluenzaA__ACO95306
augaauccaaaucaaaagauaauaacgauuggcucuguuucucucaccauuuccacaauaugcuucuucaugcaaauugccaucuugauaacuacuguaacauugcauuucaagcaauaugaauucaacuccuccccaaacaaccaagugaugcugugugaaccaacaauaauagaaagaaacauaacagagauaguguaucugaccaacaccaccauagagaaggaaauaugccccaaacuagcagaauacagaaauuggucaaagccgcaaugugacauuacaggauuugcaccuuuuucuaaggacaauucgauuaggcuuuccgcugguggggacaucugggugacaagagaaccuuaugugucaugcgauccugacaaguguuaucaauuugcccuuggacagggaacaacacuaaacaacgugcauucaaauaacacaguacgugauaggaccccuuaucggacccuauugaugaaugaguuagguguuccuuuucaucuggggaccaagcaagucugcauagcaugguccagcucaaguugucacgauggaaaagcauggcugcauguuuguauaacgggggaugauaaaaaugcaacugcuagcuucauuuacaaugggaggcuuguagauaguauuguuucaugguccaaagaaauccucaggacccaggagucagaaugcguuuguaucaauggaacuuguacaguaguaaugacugaugggagugcuucaggaaaagcugauacuaaaauacuauucauugaggaggggaaaaucguucauacuagcacauugucaggaagugcucagcaugucgaggagugcuccugcuauccucgauauccuggugucagaugugucugcagagacaacuggaaaggcuccaauaggcccaucguagauauaaacauaaaggaucauagcauuguuuccaguuauguguguucaggacuuguuggagacacacccagaaaaaacgacagcuccagcaguagccauuguuuggauccuaacaaugaagaagguggucauggagugaaaggcugggccuuugaugauggaaaugacguguggaugggaagaacgaucagcgagaagucacgcuuaggguaugaaaccuucaaagucauugaaggcugguccaauccuaaguccaaauugcagauaaauaggcaagucauaguugacagagguaauagguccgguuauucugguauuuucucuguugaaggcaaaagcugcaucaaucggugcuuuuauguggaguugauaaggggaagaaaagaggaaacugaagucuuguggaccucaaacaguauuguuguguuuuguggcaccucagguacauauggaacaggcucauggccugauggggcggacaucaaucucaugccuauauaa

SEQ ID NO: 48728 - RNA, 1413 nt, Artificial Sequence
  derived and/or modified CDS sequence (wt) from neuraminidase__InfluenzaA__ACO95385
augaacccaaaucaaaagauaauaaccauuggaucaaucaguauagcaaucggaauaauuagucuaauguugcaaauaggaaauauuauuucaauaugggcuagucacucaauccaaacuggaagucaaaacaacacuggaauaugcaaccaaagaaucaucacauaugaaaacagcaccugggugaaucacacauauguuaauauuaacaacacuaauguuguugcuggagaggacaaaacuucagugacauuggccggcaauucaucucuuuguucuaucaguggaugggcuauauacacaaaagacaacagcauaagaauuggcuccaaaggagauguuuuugucauaagagaaccuuucauaucauguucucacuuggaaugcagaaccuuuuuucugacccaaggcgcucuauuaaaugacaaacauucaaaugggaccguaaaggacagaaguccuuauagggccuuaaugagcuguccucuaggugaagcuccguccccauacaauucaaaguucgaaucaguugcauggucagcaagcgcaugccaugauggcaugggcugguuaacaaucggaauuucugguccagacaauggagcuguggcuguacuaaaauacaacggaauaauaacuggaaccauaaaaaguuggaaaaagcaaauauuaagaacacaagagucugaaugugucuguaugaacgggucauguuucaccauaaugaccgauggcccgagugauaaggccgccucguacaaaauuuucaagaucgaaaaggggaagguuacuaaaucaauagaguugaaugcacccaauuuucauuaugaggaauguuccuguuacccagacacuggcauagugauguguguaugcagggacaacuggcaugguucaaaucgaccuugggugucuuuuaaucaaaacuuggauuaucaaauaggauacaucugcaguggaguguucggugacaauccgcgucccgaagauggagagggcagcugcaauccagugacuguugauggagcaaacggaguaaaaggguuuucauacaaauaugauaaugguguuuggauaggaaggaccaaaaguaacagacuuagaaagggguuugagaugaucugggauccuaauggauggacaaauaccgacagugauuucucagugaaacaggauguuguagcaauaacugauuggucaggauacagcggaaguuucguccaacauccugaguuaacaggauuggacuguauaagaccuugcuucuggguugaguuagucagagggcugccuagagaaaauacaacaaucuggacuagugggagcagcauuucuuuuuguggcguuaauagugauacugcaaacuggucuuggccagacggugcugaguugccguucaccauugacaaguag

SEQ ID NO: 48729 - RNA, 1413 nt, Artificial Sequence; identical to SEQ ID NO: 48708
  derived and/or modified CDS sequence (wt) from neuraminidase__InfluenzaA__ACO95407

SEQ ID NO: 48730 - RNA, 1413 nt, Artificial Sequence; identical to SEQ ID NO: 48708
  derived and/or modified CDS sequence (wt) from neuraminidase__InfluenzaA__ACO95418

SEQ ID NO: 48731 - RNA, 1410 nt, Artificial Sequence; identical to SEQ ID NO: 48711
  derived and/or modified CDS sequence (wt) from neuraminidase__InfluenzaA__ACO95429

SEQ ID NO: 48732 - RNA, 1410 nt, Artificial Sequence
  derived and/or modified CDS sequence (wt) from neuraminidase__InfluenzaA__ACO95440
augaauccaaaucaaaagauaauaacgauuggcucuguuucucucaccauuuccacaauaugcuucuucaugcaaauugccaucuugauaacuacuguaacauugcacuucaagcaauaugaauucaacucccccccaaacaaccaagugaugcugugugaaccaacaauaauagaaagaaacauaacagagauaguguaucugaccaacaccaccauagagaaggaaauaugccccaaacuagcagaauacagaaauuggucaaagccgcaaugugacauuacaggauuugcaccuuuuucuaaggacaauucgauuaggcuuuccgccgguggggacaucugggugacaagagaaccuuaugugucaugcgauccugacaaguguuaucaauuugcccuuggacagggaacaacacuaaacaacgugcauucaaaugacacaguacaugauaggaccccuuaucggacccuauugaugaaugaguuagguguuccauuucaucuggggaccaagcaagugugcauagcaugguccagcucaaguugucacgauggaaaagcauggcugcauguuuguguaacgggggaugauaaaaaugcaacugcuagcuucauuuacaaugggaggcuuguagauaguauuguuucaugguccaaaaaaauccucaggacccaggagucagagugcguuuguaucaauggaacuuguacaguaguaaugacugaugggagugcuucaggaaaagcugauacuaaaauacuauucauugaggaggggaaaaucguucauacuagcacauugucaggaagugcucagcaugucgaggagugcuccugcuauccucgguauccuggugucagaugugucugcagagacaacuggaaaggcuccaauaggcccaucguagauauaaacauaaaggauuauagcauuguuuccaguuaugugugcucaggacuuguuggagacacacccagaaaaaacgauagcuccaguaguagccauugcuuggauccuaacaaugaagaagguggucauggagugaaaggcugggccuuugaugauggaaaugacguguggaugggaagaacgaucagcgagaaguuacgcucaggauaugaaaccuucaaagucauugaaggcugguccaacccuaauuccaaauugcagauaaauaggcaagucauaguugacagagguaauagguccgguuauucugguauuuucucuguugaaggcaaaagcugcaucaaucggugcuuuuauguggaguugauaaggggaagaaaagaggaaacugaagucuuguggaccucaaacaguauuguuguguuuuguggcaccucagguacauauggaacaggcucauggccugauggggcggacaucaaucucaugccuauauaa

SEQ ID NO: 48733 - RNA, 1410 nt, Artificial Sequence
  derived and/or modified CDS sequence (wt) from neuraminidase__InfluenzaA__ACO95462
augaauccaaaucaaaagauaauaacgauuggcucuguuucucucaccauuuccacaauaugcuucuucaugcaaauugccaucuugauaacuacuguaacauugcauuucaagcaauaugaauucaacucccccccaaacaaccaagugaugcugugugaaccaacaauaauagaaagaaacauaacagagauaguguaucugaccaacaccaccauagagaaggaaauaugccccaaacuagcagaauacagaaauuggucaaagccgcaauguaacauuacaggguuugcaccuuuuucuaaggacaauucgauuaggcuuuccgcugguggggacaucugggugacaagagaaccuuaugugucaugcgauccugacaaguguuaucaauuugcccuuggacagggaacaacacuaaacaacgugcauucaaaugacacaguacaugauaggaccccuuaucggacccuauugaugaaugaguuagguguuccauuucaucuggggaccaagcaagugugcauagcaugguccagcucaaguugucacgauggaaaagcauggcugcauguuuguguaacgggggaugauaaaaaugcaacugcuagcuucauuuacaaugggaggcuuguagauaguauuguuucaugguccaaagaaauccucaggacccaggagucagaaugcguuuguaucaauggaacuuguacaguaguaaugacugaugggagugcuucaggaaaagcugauacuaaaauacuauucauugaggaggggaaaaucguucauacuagcacauugucaggaagugcucagcaugucgaggagugcuccugcuauccucgauauccuggugucagaugugucugcagagacaacuggaaaggcuccaauaggcccauaguagauauaaacauaaaggauuauagcauuguuuccaguuaugugugcucaggacuuguuggagacacacccagaaaaaacgacagcuccagcaguagccauugcuuggauccuaacaaugaagaagguggucauggagugaaaggcugggccuuugaugauggaaaugacguguggaugggaagaacgaucagcgagaaguuacgcucaggauaugaaaccuucaaagucauugaaggcugguccaacccuaauuccaaauugcagauaaauaggcaagucauaguugacagagguaauagguccgguuauucugguauuuucucuguugaaggcaaaagcugcaucaaucggugcuuuuauguggaguugauaaggggaagaaaagaggaaacugaagucuuguggaccucaaacaguauuguuguguuuuguggcaccucagguacauauggaacaggcucauggccugauggggcggacaucaaucucaugcuuauauaa

SEQ ID NO: 48734 - RNA, 1410 nt, Artificial Sequence; identical to SEQ ID NO: 46740
  derived and/or modified CDS sequence (wt) from neuraminidase__InfluenzaA__ACO95484

SEQ ID NO: 48735 - RNA, 1410 nt, Artificial Sequence; identical to SEQ ID NO: 46740
  derived and/or modified CDS sequence (wt) from neuraminidase__InfluenzaA__ACO95495

SEQ ID NO: 48736 - RNA, 1410 nt, Artificial Sequence; identical to SEQ ID NO: 46740
  derived and/or modified CDS sequence (wt) from neuraminidase__InfluenzaA__ACO95506

SEQ ID NO: 48737 - RNA, 1410 nt, Artificial Sequence
  derived and/or modified CDS sequence (wt) from neuraminidase__InfluenzaA__ACO95517
augaauccaaaucaaaagauaauaacgauuggcucuguuucucucaccauuuccacaauaugcuucuucaugcaaauugccaucuugauaacuacuguaacauugcauuucaagcaauaugaauucaacucccccccaaacaaccaagugaugcugugugaaccaacaauaauagaaagaaacauaacagagauaguguaucugaccaacaccaccauagagaaggaaauaugccccaaacuagcagaauacagaaauuggucaaagccgcaauguaacauuacaggauuugcaccuuuuucuaaggacaauucgauuaggcuuuccgcugguggggacaucugggugacaagagaaccuuaugugucaugcgauccugacaaguguuaucaauuugcccuuggacagggaacaacacuaaacaacgugcauucaaaugacacaguacaugauaggaccccuuaucggacccuauugaugaaugaguuagguguuccauuucaucuggggaccaagcaagugugcauagcaugguccagcucaaguugucacgauggaaaagcauggcugcauguuuguguaacgggggaugauaaaaaugcaacugcuagcuucauuuacaaugggaggcuuguagauaguauuguuucaugguccaaagaaauccucaggacccaggagucagaaugcguuuguaucaauggaacuuguacaguaguaaugacugaugggagugcuucaggaaaagcugauacuaaaauacuauucauugaggaggggaaaaucguucauacuagcacauugucaggaagugcucagcaugucgaggagugcuccugcuauccucgauauccuggugucagaugugucugcagagacaacuggaaaggcuccaauaggcccauaguagauauaaacauaaaggauuauagcauuguuuccaguuaugugugcucaggacuuguuggagacacacccagaaaaaacgacagcuccagcaguagccauugcuuggauccuaacaaugaagaagguggucauggagugaaaggcugggccuuugaugauggaaaugacguguggaugggaagaacgaucagcgagaaguuacgcuuaggauaugaaaccuucaaagucauugaaggcugguccaacccuaauuccaaauugcagauaaauaggcaagucauaguugacagagguaauagguccgguuauucugguauuuucucuguugaaggcaaaagcugcaucaaucggugcuuuuauguggaguugauaaggggaagaaaagaggaaacugaagucuuguggaccucaaacaguauuguuguguuuuguggcaccucagguacauauggaacaggcucauggccugauggagcggacaucaaucucaugccuauauaa

SEQ ID NO: 48738 - RNA, 1410 nt, Artificial Sequence
  derived and/or modified CDS sequence (wt) from neuraminidase__InfluenzaA__ACO95539
augaauccaaaucaaaagauaauaacgauuggcucuguuucucucaccauuuccacaauaugcuucuucaugcaaauugccaucuugauaacuacuguaacauugcauuucaagcaauaugaauucaacucccccccaaacaaccaagugaugcugugugaaccaacaauaauagaaagaaacauaacagagauaguguaucugaccaacaccaccauagagaaggaaauaugccccaaacuagcagaauacagaaauuggucaaagccgcaguguaacauuacaggauuugcaccuuuuucuaaggacaauucgauuaggcuuuccgcugguggggacaucugggugacaagagaaccuuaugugucaugcgauccugacaaguguuaucaauuugcccuuggacagggaacaacacuaaacaacgugcauucaaaugacacaguacaugauaggaccccuuaucggacccuauugaugaaugaguuagguguuccauuucaucuggggaccaagcaagugugcauagcaugguccagcucaaguugucacgauggaaaagcauggcugcauguuuguguaacgggggaugauaaaaaugcaacugcuagcuucauuuacaaugggaggcuuguagauaguauuguuucaugguccaaagaaauccucaggacccaggagucagaaugcguuuguaucaauggaacuuguacaguaguaaugacugaugggagugcuucaggaaaagcuaauacuaaaauacuauucauugaggaggggaaaaucguucauacuagcacauugucaggaagugcucagcaugucgaggagugcuccugcuauccucgauauccuggugucagaugugucugcagagacaacuggaaaggcuccaauaggcccauaguagauauaaacauaaaggauuauagcauuguuuccaguuaugugugcucaggacuuguuggagacacacccagaaaaaacgacagcuccagcaguagccauugcuuggauccuaacaaugaagaagguggucauggagugaaaggcugggccuuugaugauggaaaugacguguggaugggaagaacgaucagcgagaaguuacgcucaggauaugaaaccuucaaagucauugaaggcugguccaacccuaauuccaaauugcagauaaauaggcaagucauaguugacagagguaauagguccgguuauucugguauuuucucuguugaaggcaaaagcugcaucaaucggugcuuuuauguggaguugauaagaggaagaaaagaggaaacugaaguccuguggaccucaaacaguauuguuguguuuuguggcaccucagguacauauggaacaggcucauggccugauggggcggacaucaaucucaugccuauauaa

SEQ ID NO: 48739 - RNA, 1413 nt, Artificial Sequence
  derived and/or modified CDS sequence (wt) from neuraminidase__InfluenzaA__ACP20223
augaacccaaaucaaaagauaauaaccauuggaucaaucaguauagcaaucggaauaauuagucuaauguugcaaauaggaaauauuauuucaauaugggcuagucacucaauccaaacuggaagucaaaacaacacuggaauaugcaaccaaagaaucaucacauaugaaaacagcaccugggugaaucacacauauguuaauauuaacaacacuaauguuguugcuggagaggauaaaacuucagugacauuggcuggcaauucaucucuuuguucuaucaguggaugggcuauauacacaaaagacaacagcauaagaauuggcuccaaaggagauguuuuugucauaagagaaccuuucauaucauguucucacuuggaaugcagaaccuuuuuucugacccaaggcgcucuauuaaaugacaaacauucaaaugggaccguaaaggacagaaguccuuauagggccuuaaugagcuguccucuaggugaagcuccguccccauacaauucaaaguucgaaucaguugcauggucagcaagcgcaugccaugauggcaugggcugguuaacaaucggaauuucugguccagacaauggagcuguggcuguacuaaaauacaacggaauaauaacuggaaccauaaaaaguuggaaaaagcaaauauuaagaacacaagagucugaaugugucuguaugaacgggucauguuucaccauaaugaccgauggcccgaguaauaaggccgccucguacaaaauuuucaagaucgaaaaggggaagguuacuaaaucaauagaguugaaugcacccaauuuucauuaugaggaauguuccuguuacccagacacuggcauagugauguguguaugcagggacaacuggcaugguucaaaucgaccuugggugucuuuuaaucaaaacuuggauuaucaaauaggauacaucugcaguggaguguucggugacaauccgcgucccgaagauggagagggcagcugcaauccagugacuguugauggagcaaacggaguaaaaggguuuucauacaaauaugauaaugguguuuggauaggaaggaccaaaaguaacagacuuagaaagggguuugagaugauuugggauccuaauggauggacaaauaccgacagugauuucucagugaaacaggauguuguagcaguaacugauuggucaggguacagcggaaguuucguccaacauccugaguuaacaggauuggacuguauaagaccuugcuucuggguugaguuagucagagggcugccuagagaaaauacaacaaucuggacuagugggagcagcauuucuuuuuguggcguuaauagugauacugcaaacuggucuuggccagacggugcugaguugccguucaccauugacaaguag

SEQ ID NO: 48740 - RNA, 1410 nt, Artificial Sequence
  derived and/or modified CDS sequence (wt) from neuraminidase__InfluenzaA__ACP41952
augaauccaaaccaaaagauaauaaccauugguucggucuguaugacaauuggaauggcuaacuuaauauuacaaauuggaaacauaaucucaauauggauuagccacucaauucaacuugggaaucaaaaucagauugaaacaugcaaucaaagcgucauuacuuaugaaaacaacacuuggguaaaucagacauauguuaacaucagcaacaccaacuuugcugcuggacagucagugguuuccgugaaauuagcgggcaauuccucucucugcccuguuaguggaugggcuauauacaguaaagacaacaguguaagaaucgguuccaagggggauguguuugucauaagggaaccauucauaucaugcucccccuuggaaugcagaaccuucuucuugacucaaggggccuugcuaaaugacaaacauuccaauggaaccauuaaagacaggagcccauaucgaacccuaaugagcuguccuauuggugaaguucccucuccauacaacucaagauuugagucagucgcuuggucagcaagugcuugucaugauggcaucaauuggcuaacaauuggaauuucuggcccagacaauggggcaguggcuguguuaaaguacaacggcauaauaacagacacuaucaagaguuggagaaacaauauauugagaacacaagagucugaaugugcauguguaaaugguucuugcuuuacuguaaugaccgauggaccaaguaauggacaggccucauacaagaucuucagaauagaaaagggaaagauagucaaaucagucgaaaugaaugccccuaauuaucacuaugaggaaugcuccuguuauccugauucuagugaaaucacaugugugugcagggauaacuggcauggcucgaaucgaccgugggugucuuucaaccagaaucuggaauaucagauaggauacauaugcagugggauuuucggagacaauccacgcccuaaugauaagacaggcaguugugguccaguaucgucuaauggagcaaauggaguaaaaggguuuucauucaaauacggcaaugguguuuggauagggagaacuaaaagcauuaguucaagaaacgguuuugagaugauuugggauccgaacggauggacugggacagacaauaacuucucaauaaagcaagauaucguaggaauaaaugaguggucaggauauagcgggaguuuuguucagcauccagaacuaacagggcuggauuguauaagaccuugcuucuggguugaacuaaucagagggcgacccaaagagaacacaaucuggacuagcgggagcagcauauccuuuugugguguaaacagugacacuguggguuggucuuggccagacggugcugaguugccauuuaccauugacaaguaa

SEQ ID NO: 48741 - RNA, 1410 nt, Artificial Sequence; identical to SEQ ID NO: 48740
  derived and/or modified CDS sequence (wt) from neuraminidase__InfluenzaA__ACP44158

SEQ ID NO: 48742 - RNA, 1413 nt, Artificial Sequence
  derived and/or modified CDS sequence (wt) from neuraminidase__InfluenzaA__ACP44195
augaacccaaaucaaaagauaauaaccauuggaucaaucaguauagcaaucggaauaauuagucuaauguugcaaauaggaaauauuauuucaauaugggcuagucacucaauccaaacuggaagucaaaacaacacuggaauaugcaaccaaagaaucaucacauaugaaaacagcaccugggugaaucacacauauguuaauauuaacaacacuaauguuguugcuggagaggacaaaacuucagugacauuggccggcaauucaucucuuuguucuaucaguggaugggcuauauacacaaaagacaacagcauaagaauuggcuccaaaggagauguuuuugucauaagagaaccuuucauaucauguucucacuuggaaugcagaaccuuuuuucugacccaaggcgcucuauuaaaugacaaacauucaaaugggaccguaaaggacagaaguccuuauagggccuuaaugagcuguccucuaggugaagcuccguccccauacaauucaaaguucgaaucaguugcauggucagcaagcgcaugccaugauggcaugggcugguuaacaaucggaauuucugguccagacaauggagcuguggcuguacuaaaauacaacggaauaauaacuggaaccauaaaaaguuggaaaaagcaaauauuaagaacacaagagucugaaugugucuguaugaacgggucauguuucaccauaaugaccgauggcccgagugauaaggccgccucguacaaaauuuucaagaucgaaaaggggaagguuacuaaaucaauagaguugaaugcacccaauuuucauuaugaggaauguuccuguuacccagacacuggcauagugauguguguaugcagggacaacuggcaugguucaaaucgaccuugggugucuuuuaaucaaaacuuggauuaucaaauaggauacaucugcaguggaguguucggugacaauccgcgucccgaagauggagagggcagcugcaauccagugacuguugauggagcaaacggaguaaaaggguuuucauacaaauaugauaaugguguuuggauaggaaggaccaaaaguaacagacuuagaaagggguuugagaugaucugggauccuaauggauggacaaauaccgacagugauuucucagugaaacaggauguuguagcaauaacugauuggucaggauacagcggaaguuucguccaacauccugaguuaacaggauugaacuguauaagaccuugcuucuggguugaguuagucagagggcugccuagagaaaauacaacaaucuggacuagugggagcagcauuucuuuuuguggcguuaauagugauacugcaaacuggucuuggccagacggugcugaguugccguucaccauugacaaguag

SEQ ID NO: 48743 - RNA, 1413 nt, Artificial Sequence
  derived and/or modified CDS sequence (wt) from neuraminidase__InfluenzaA__ACP44217
augaacccaaaucaaaagauaauaaccauuggaucaaucaguauagcaaucggaauaauuagucuaauguugcaaauaggaaauauuauuucaauaugggcuagucacucaauccaaacuggaagucaaaacaacacuggaauaugcaaccaaagaaucaucacauaugaaaacagcaccugggugaaucacacauauguuaauauuaacaacacuaauguuguugcuggagaggacaaaacuucagugacauuggccggcaauucaucucuuuguucuaucaguggaugggcuauauacacaaaagacaacagcauaagaauuggcuccaaaggagauguuuuugucauaagagaaccuuucauaucauguucucacuuggaaugcagaaccuuuuuucugacccaaggcgcucuauuaaaugacaaacauucaaaugggaccguaaaggacagaaguccuuauagggccuuaaugagcuguccucuaggugaagccccguccccauacaauucaaaguucgaaucaguugcauggucagcaagcgcaugccaugauggcaugggcugguuaacaaucggaauuucugguccagacaauggagcuguggcuguacuaaaauacaacggaauaauaacuggaaccauaaaaaguuggaaaaagcaaauauuaagaacacaagagucugaaugugucuguaugaacgggucauguuucaccauaaugaccgauggcccgaguaauaaggccgccucguacaaaauuuucaagaucgaaaaggggaagguuacuaaaucaauagaguugaaugcacccaauuuucauuaugaggaauguuccuguuacccagacacuggcauagugauguguguaugcagggacaacuggcaugguucaaaucgaccuugggugucuuuuaaucaaaacuuggauuaucaaauaggauacaucugcaguggaguguuuggugacaauccgcgucccgaagauggagagggcagcugcaauccagugacuguugauggagcaaacggaguaaaaggguuuucauacaaauaugauaaugguguuuggauaggaaggaccaaaaguaacagacuuagaaagggguuugagaugauuugggauccuaauggauggacgaauaccgacagugauuucucagugaaacaggauguuguagcaauaacugauuggucaggguacagcggaaguuucguccaacauccugaguuaacaggauuggacuguauaagaccuugcuucuggguugaguuagucagagggcugccuagagaaaauacaacaaucuggacuagugggagcagcauuucuuuuuguggcguuaauagugauacugcaaacuggucuuggccagacggugcugaguugccguucaccauugacaaguag

SEQ ID NO: 48744 - RNA, 1413 nt, Artificial Sequence
  derived and/or modified CDS sequence (wt) from neuraminidase__InfluenzaA__ACP44228
augaacccaaaucaaaagauaauaaccauuggaucaaucaguauagcaaucggaauaauuagucuaauguugcaaauaggaaauauuauuucaauaugggcuagucacucaauccaaacuggaagucaaaacaacacuggaauaugcaaccaaagaaucaucacauaugaaaacagcaccugggugaaucacacauauguuaauauuaacaacacuaauguuguugcuggagaggacaaaacuucagugacauuggccggcaauucaucucuuuguucuaucaguggaugggcuauauacacaaaagacaacagcauaagaauuggcuccaaaggagauguuuuugucauaagagaaccuuucauaucauguucucacuuggaaugcagaaccuuuuuucugacccaaggcgcucuauuaaaugacaaacauucaaaugggaccguaaaggacagaaguccuuauagggccuuaaugagcuguccucuaggugaagcuccguccccauacaauucaaaguucgaaucaguugcauggucagcaagcgcaugccaugauggcaugggcugguuaacaaucggaauuucugguccagacaauggagcuguggcuguacuaaaauacaacggaauaauaacuggaaccauaaaaaguuggaaaaagcaaauauuaagaacacaagagucugaaugugucuguaugaacgggucauguuucaccauaaugaccgauggcccgaguaauaaggccgccucguacaaaauuuucaagaucgaaaaggggaagguuacuaaaucaauagaguugaaugcacccaauuuucauuaugaggaauguuccuguuacccagacacuggcauagugauguguguaugcagggacaacuggcaugguucaaaucgaccuugggugucuuuuaaucaaaacuuggauuaucaaauaggauacaucugcaguggaguguuuggugacaauccgcgucccgaagauggagagggcagcugcaauccagugacuguugauggagcaaacggaguaaaaggguuuucauacaaauaugauaaugguguuuggauaggaaggaccaaaaguaacagacuuagaaagggguuugagaugauuugggauccuaauggauggacgaauaccgacagugauuucucagugaaacaggauguuguagcaauaacugauuggucaggguacagcggaaguuucguccaacauccugaguuaacaggauuggacuguauaagaccuugcuucuggguugaguuagucagagggcugccuagagaaaauacaacaaucuggacuagugggagcagcauuucuuuuuguggcguuaauagugauacugcaaacuggucuuggccagacggugcugaguugccguucaccauugacaaguag

SEQ ID NO: 48745 - RNA, 1410 nt, Artificial Sequence
  derived and/or modified CDS sequence (wt) from neuraminidase__InfluenzaA__ACP44239
augaauccaaaucaaaagauaauaacgauuggcucuguuucucucaccauuuccacaauaugcuucuucaugcaaauugccaucuugauaacuacuguaacauugcauuucaagcaauaugaauucaacucccccccaaacaaccaagugaugcugugugaaccaacaauaauagaaagaaacauaacagagauaguguaucugaccaacaccaccauagagaaggaaauaugccccaaacuagcagaauacagaaauuggucaaagccgcaaugugacauuacaggauuugcaccuuuuucuaaggacaauucgauuaggcuuuccgcugguggggacaucugggugacaagagaaccuuaugugucaugcgauccugacaaguguuaucaauuugcccuuggacagggaacaacacuaaacaacgugcauucaaaugacacaguacaugauaggaccccuuaucggacccuauugaugaaugaguuagguguuccauuucaucuugggaccaagcaagugugcauagcaugguccagcucaaguugucacgauggaaaagcauggcugcauguuuguguaacgggggaugauaaaaaugcaacugcuagcuucauuuacaaugggaggcuuguagauaguauuguuucaugguccaaaaaaauccucaggacccaggagucagaaugcguuuguaucaauggaacuuguacaguaguaaugacugaugggagugcuucaggaaaagcugauacuaaaauacuauucauugaggaggggaaaaucguucauacuagcacauugucaggaagugcucagcaugucgaggagugcuccugcuauccucgauauccuggugucagaugugucugcagagacaacuggaaaggcuccaauaggcccaucguagauauaaacauaaaggauuauagcauuguuuccaguuaugugugcucaggacuuguuggagacacacccagaaaaaacgacagcuccagcaguagccauugcuuggauccuaacaaugaagaagguggucauggagugaaaggcugggccuuugacgauggaaaugacguguggaugggaagaacgaucagcgagaaguugcgcucaggauaugaaaccuucaaagucauugaaggcugguccaacccuaauuccaaauugcagauaaauaggcaagucauaguugacagagguaauagguccgguuauucugguauuuucucuguugaaggcaaaagcugcaucaaucggugcuuuuauguggaguugauaaggggaagaaaagaggaaacugaagucuuguggaccucaaacaguauuguuguguuuuguggcaccucagguacauauggaacaggcucauggccugauggggcggacaucaaucucaugccuauauaa

SEQ ID NO: 48746 - RNA, 1410 nt, Artificial Sequence
  derived and/or modified CDS sequence (wt) from neuraminidase__InfluenzaA__ACP44250
augaauccaaaucaaaagauaauaacgauuggcucuguuucucucaccauuuccacaauaugcuucuucaugcaaauugccaucuugaugacuacuguaacauugcauuucaagcaauaugaauucaacucccccccaaacaaccaagugaugcugugugaaccaacaauaauagaaagaaacauaacagagauaguguaucugaccaacaccaccauagagaaggaaauaugccccaaacuagcagaauacagaaauuggucaaagccgcaaugugacauuacaggauuugcaccuuuuucuaaggacaauucgauuaggcuuuccgcugguggggacaucugggugacaagagaaccuuaugugucaugcgauccugacaaguguuaucaauuugcccuuggacagggaacaacacuaaacaacgugcauucaaaugacacaguacaugauaggaccccuuaucggacccuauugaugaaugaguuagguguuccauuucaucuggggaccaagcaagugugcauagcaugguccagcucaaguugucacgauggaaaagcauggcugcauguuuguguaacgggggaugauaaaaaugcaacugcuagcuucauuuacaaugggaggcuuguagauaguauuguuucaugguccaaagaaauccucaggacccaggagucagaaugcguuuguaucaauggaacuuguacaguaguaaugacugaugggagugcuucaggaaaagcugauacuaaaauacuauucauugaggaggggaaaaucguucauacuagcacauugucaggaagugcucagcaugucgaggagugcuccugcuauccucgauauccuggugucagaugugucugcagagacaauuggaaaggcuccaauaggcccauaguagauauaaacauaaaggauuauagcauuguuuccaguuaugugugcucaggacuuguuggagacacacccagaaaaaacgacagcuccagcaguagccauugcuuggauccuaacaaugaagaagguggucauggagugaaaggcugggccuuugaugauggaaaugacguguggaugggaagaacgaucagcgagaaguuacgcucaggauaugaaaccuucaaagucauugaaggcugguccaacccuaauuccaaauuacagauaaauaggcaagucauaguugacagagguaauagguccgguuauucugguauuuucucuguugaaggcaaaagcugcaucaaucggugcuuuuauguggaguugauaaggggaagaaaagaggaaacugaagucuuguggaccucaaacaguauuguuguguuuuguggcaccucagguacauauggaacaggcucauggccugauggggcggacaucaaucucaugccuauauaa

SEQ ID NO: 48747 - RNA, 1410 nt, Artificial Sequence
  derived and/or modified CDS sequence (wt) from neuraminidase__InfluenzaA__ACP44261
augaauccaaaucaaaagauaauaacgauuggcucuguuucucucaccauuuccacaauaugcuucuucaugcaaauugccaucuugauaacuacuguaacauugcauuucaagcaauaugaauucaacucccccccaaacaaccaagugaugcugugugaaccaacaauaauagaaagaaacauaacagagauaguguaucugaccaacaccaccauagagaaggaaauaugccccaaacuagcagaauacagaaauuggucaaagccgcaauguaacauuacaggauuugcaccuuuuucuaaggacaauucgauuaggcuuuccgcugguggggacaucugggugacaagagaaccuuaugugucaugcgauccugacaaguguuaucaauuugcccuuggacagggaacaacacuaaacaacaugcauucaaaugacacaguacaugauaggaccccuuaucggacccuauugaugaaugaguuagguguuccauuucaucuggggaccaagcaagugugcauagcaugguccagcucaaguugucacgauggaaaagcauggcugcauguuuguguaacgggggaugauaaaaaugcaacugcuagcuucauuuacaaugggaggcuuguagauaguauuguuucaugguccaaagaaauccucaggacccaggagucagaaugcguuuguaucaauggaacuuguacaguaguaaugacugaugggagugcuucaggaaaagcugauacuaaaauacuauucauugaggaggggaaaaucguucauacuagcacauugucaggaagugcucagcaugucgaggagugcuccugcuauccucgauauccuggugucagaugugucugcagagacaacuggaaaggcuccaauaggcccauaguagauauaaacauaaaggauuauagcauuguuuccaguuaugugugcucaggacuuguuggagacacacccagaaaaaacgacagcuccagcaguagccauugcuuggauccuaacaaugaagaagguggucauggagugaaaggcugggccuuugaugauggaaaugacguguggaugggaagaacgaucagcgagaaguuacgcucaggauaugaaaccuucaaagucauugaaggcugguccaacccuaauuccaaauugcagauaaauaggcaagucauaguugacagagguaauagguccgguuauucugguauuuucucuguugaaggcaaaagcugcaucaaucggugcuuuuauguggaguugauaaggggaagaaaagaggaaacugaagucuuguggaccucaaacaguauuguuguguuuuguggcaccucagguacauauggaacaggcucauggccugauggggcggacaucaaucucaugccuauauaa

SEQ ID NO: 48748 - RNA, 1410 nt, Artificial Sequence
  derived and/or modified CDS sequence (wt) from neuraminidase__InfluenzaA__ACP44272
augaauccaaaucaaaagauaauaacgauuggcucuguuucucucaccauuuccacaauaugcuucuucaugcaaauugccaucuugauaacuacuguaacauugcauuucaagcaauaugaauucaacucccccccaaacaaccaagugaugcugugugaaccaacaauaauagaaagaaacauaacagagauaguguaucugaccaacaccaccauagagaaggaaauaugccccaaacuagcagaauacagaaauuggucaaagccgcaauguaacauuacaggauuugcaccuuuuucuaaggacaauucgauuaggcuuuccgcugguggggacaucugggugacaagagaaccuuaugugucaugcgauccugacaaguguuaucaauuugcccuuggacagggaacaacacuaaacaacgugcauucaaaugacacaguacaugauaggaccccuuaucggacccuauugaugaaugaguuagguguuccauuucaucuggggaccaagcaagugugcauagcaugguccagcucaaguugucacgauggaaaagcauggcugcauguuuguguaacgggggaugauaaaaaugcaacugcuagcuucauuuacaaugggaggcuuguagauaguauuguuucaugguccaaagaaauccucaggacccaggagucagaaugcguuuguaucaauggaacuuguacaguaauaaugacugaugggagugcuucaggaaaagcugauacuaaaauacuauucauugaggaggggaaaaucguucauacuagcacauugucaggaagugcucagcaugucgaggagugcuccugcuauccucgauauccuggugucagaugugucugcagagacaacuggaaaggcuccaauaggcccauaguagauauaaacauaaaggauuauagcauuguuuccaguuaugugugcucaggacuuguuggagacacacccagaaaaaacgacagcuccagcaguagccauugcuuggauccuaacaaugaagaagguggucauggagugaaaggcugggccuuugaugauggaaaugacguguggaugggaagaacgaucagcgagaaguuacgcucaggauaugaaaccuucaaagucauugaaggcugguccaacccuaauuccaaauugcagauaaauaggcaagucauaguugacagagguaauagguccgguuauucugguauuuucucuguugaaggcaaaagcugcaucaaucggugcuuuuauguggaguugauaaggggaagaaaagaggaaacugaagucuuguggaccucaaacaguauuguuguguuuuguggcaccucagguacauauggaacaggcucauggccugauggggcggacaucaaucucaugccuauauaa

SEQ ID NO: 48749 - RNA, 1410 nt, Artificial Sequence
  derived and/or modified CDS sequence (wt) from neuraminidase__InfluenzaA__ACQ55360
augaauccaaaccaaaagauaauaaccauugguucggucuguaugacaauuggaauggcuaacuuaauauuacaaauuggaaacauaaucucaauauggauuagccacucaauucaacuugggaaucaaaaucagauugaaacaugcaaucaaagcgucauuacuuaugaaaacaacacuuggguaaaucagacauauguuaacaucagcaacaccaacuuugcugcuggacagucagugguuuccgugaaauuagcgggcaauuccucucucugcccuguuaguggaugggcuauauacaguaaagacaacaguguaagaaucgguuccaagggggauguguuugucauaagggaaccauucauaucaugcucccccuuggaaugcagaaccuucuucuugacucaaggggccuugcuaaaugacaaacauuccaauggaaccauuaaagacaggagcccauaucgaacccuaaugagcuguccuauuggugaaguucccucuccauacaacucaagauuugagucagucgcuuggucagcaagugcuugucaugauggcaucaauuggcuaacaauuggaauuucuggcccagacaauggggcaguggcuguguuaaaguacaacggcauaauaacagacacuaucaagaguuggagaaacaauauauugagaacacaagagucugaaugugcauguguaaaugguucuugcuuuacuguaaugaccgauggaccaaguaauggacaggccucauacaagaucuucagaauagaaaagggaaagauagucaaaucagucgaaaugaaugccccuaauuaucacuaugaggaaugcuccuguuauccugauucuagugaaaucacaugugugugcagggauaacuggcauggcucgaaucgaccgugggugucuuucaaccagaaucuggaauaucagauaggauacauaugcagugggauuuucggagacaauccacgcccuaaugauaagacaggcaguugugguccaguaucgucuaauggagcaaauggaguaaaaggauuuucauucaaauacggcaaugguguuuggauagggagaacuaaaagcauuaguucaagaaacgguuuugagaugauuugggauccgaacggauggacugggacagacaauaacuucucaauaaagcaagauaucguaggaauaaaugaguggucaggauauagcgggaguuuuguucagcauccagaacuaacagggcuggauuguauaagaccuugcuucuggguugaacuaaucagagggcgacccaaagagaacacaaucuggacuagcgggagcagcauauccuuuugugguguaaacagugacacuguggguuggucuuggccagacggugcugaguugccauuuaccauugacaaguaa

SEQ ID NO: 48750 - RNA, 1410 nt, Artificial Sequence
  derived and/or modified CDS sequence (wt) from neuraminidase__InfluenzaA__ACQ63236
augaauccaaaccaaaagauaauaaccauugguucggucuguaugacaauuggaauggcuaacuuaauauuacaaauuggaaacauaaucucaauauggauuagccacucaauucaacuugggaaucaaaaucagauugaaacaugcaaucaaagcgucauuacuuaugaaaacaacacuuggguaaaucagacauauguuaacaucagcaacaccaacuuugcugcuggacagucagugguuuccgugaaauuagcgggcaauuccucucucugcccuguuaguggaugggcuauauacaguaaagacaacaguauaagaaucgguuccaagggggauguguuugucauaagggaaccauucauaucaugcucccccuuggaaugcagaaccuucuucuugacucaaggggccuugcuaaaugacaaacauuccaauggaaccauuaaagacaggagcccauaucgaacccuaaugagcuguccuauuggugaaguucccucuccauacaacucaagauuugagucagucgcuuggucagcaagugcuugucaugauggcaucaauuggcuaacaauuggaauuucuggcccagacaauggggcaguggcuguguuaaaguacaacggcauaauaacagacacuaucaagaguuggagaaacaauauauugagaacacaagagucugaaugugcauguguaaaugguucuugcuuuacuguaaugaccgauggaccaagugauggacaggccucauacaagaucuucagaauagaaaagggaaagauagucaaaucagucgaaaugaaugccccuaauuaucacuaugaggaaugcuccuguuauccugauucuagugaaaucacaugugugugcagggauaacuggcauggcucgaaucgaccgugggugucuuucaaccagaaucuggaauaucagauaggauacauaugcagugggauuuucggagacaauccacgcccuaaugauaagacaggcaguugugguccaguaucgucuaauggagcaaauggaguaaaaggauuuucauucaaauacggcaaugguguuuggauagggagaacuaaaagcauuaguucaagaaacgguuuugagaugauuugggauccgaacggauggacugggacagacaauaacuucucaauaaagcaagauaucguaggaauaaaugaguggucaggauauagcgggaguuuuguucagcauccagaacuaacagggcuggauuguauaagaccuugcuucuggguugaacuaaucagagggcgacccaaagagaacacaaucuggacuagcgggagcagcauauccuuuugugguguaaacagugacacuguggguuggucuuggccagacggugcugaguugccauuuaccauugacaaguaa

SEQ ID NO: 48751 - RNA, 1410 nt, Artificial Sequence; identical to SEQ ID NO: 48750
  derived and/or modified CDS sequence (wt) from neuraminidase__InfluenzaA__ACQ63242

SEQ ID NO: 48752 - RNA, 1410 nt, Artificial Sequence; identical to SEQ ID NO: 48750
  derived and/or modified CDS sequence (wt) from neuraminidase__InfluenzaA__ACQ63253

SEQ ID NO: 48753 - RNA, 1410 nt, Artificial Sequence; identical to SEQ ID NO: 48750
  derived and/or modified CDS sequence (wt) from neuraminidase__InfluenzaA__ACQ63262

SEQ ID NO: 48754 - RNA, 1410 nt, Artificial Sequence
  derived and/or modified CDS sequence (wt) from neuraminidase__InfluenzaA__ACQ65694
augaauccaaaucaaaagauaauaacgauuggcucuguuucucucaccauuuccacaauaugcuucuucaugcaaauugccaucuuaauaacuacuguaacauugcauuucaagcaauaugaauucaacucccccccaaacaaccaagugaugcugugugaaccaacaauaauagaaagaaacauaacagagauaguguaucugaccaacaccaccauagagaaggaaauaugccccaaacuagcagaauacagaaaguggucaaagccgcaauguaauauuacaggauuugcaccuuuuucuaaggacaauucgauuaggcuuuccgcugguggggacaucugggugacaagagaaccuuaugugucaugcgauccugacaaguguuaucaauuugcccuuggacagggaacaacacuaaacaacgugcauucaaaugacacaguacgugauaggaccccuuaucggacccuauugaugaaugaguuagguguuccauuucaucuggggaccaagcaagugugcauagcaugguccagcucaaguugucacgauggaaaagcauggcugcauguuuguguaacgggggaugauaaaaaugcaacugcuagcuucauuuacaaugggaggcuuguagauaguauuguuucaugguccaaagacauucucaggacccaggagucagaaugcguuuguaucaauggaacuuguacaguaguaaugacugaugggagugcuucaggaaaagcugauacuaaaauacuauucauugaggaggggaaaaucguucauacuagcacauugucaggaagugcucagcaugucgaggagugcuccugcuauccucgauauccuggugucagaugugucugcagagacaacuggagaggcuccaauaggcccauaguagauauaaacaugaaggauuauagcauuguuuccaguuaugugugcucaggacuuguuggagacacacccagaaaaaacgacagcuccagcaguggccauugcuuggauccuaacaaugaagaagguggucauggagugaaaggcugggccuuugaugauggaaaugacguguggaugggaagaacgaucagcgagaaguuacgcucaggauaugaaaccuucaaagucauugaaggcugguccaacccuaauuccaaauugcagauaaauaggcaagucauaguugacagagguaauagguccgguuauucugguauuuucucuguugaaggcaaaagcugcaucaaucggugcuuuuauguggaguugauaaggggaagaaaagaggaaacugaagucuuguggaccucaaacaguauuguuguguuuuguggcaccucagguacauauggaacaggcucauggccugauggggcggacaucaaucucaugccuauauaa

SEQ ID NO: 48755 - RNA, 1410 nt, Artificial Sequence
  derived and/or modified CDS sequence (wt) from neuraminidase__InfluenzaA__ACQ65705
augaauccaaaucaaaagauaauaacgauuggcucuguuucucucaccauuuccacaauaugcuucuucaugcaaauugccaucuuaauaacuacuguaacauugcauuucaagcaauaugaauucaacucccccccaaacaaccaagugaugcugugugaaccaacaauaauagaaagaaacauaacagagauaguguaucugaccaacaccaccauagagaaggaaauaugccccaaacuagcagaauacagaaaguggucaaagccgcaauguaauauuacaggauuugcaccuuuuucuaaggacaauucgauuaggcuuuccgcugguggggacaucugggugacaagagaaccuuaugugucaugcgauccugacaaguguuaucaauuugcccuuggacagggaacaacacuaaacaacgugcauucaaaugacacaguacgugauaggaccccuuaucggacccuauugaugaaugaguuagguguuccauuucaucuggggaccaagcaagugugcauagcaugguccagcucaaguugucacgauggaaaagcauggcugcauguuuguguaacgggggaugauaaaaaugcaacugcuagcuucauuuacaaugggaggcuuguagauaguauuguuucaugguccaaagaaauccucaggacccaggagucagaaugcguuuguaucaauggaacuuguacaguaguaaugacugaugggagugcuucaggaaaagcugauacuaaaauacuauucauugaggaggggaaaaucguucauacuagcacauugucaggaagugcucagcaugucgaggagugcuccugcuauccucgauauccuggugucagaugugucugcagagacaacuggagaggcuccaauaggcccauaguagauauaaacaugaaggauuauagcauuguuuccaguuaugugugcucaggacuuguuggagacacacccagaaaaaacgacagcuccagcaguggccauugcuuggauccuaacaaugaagaagguggucauggagugaaaggcugggccuuugaugauggaaaugacguguggaugggaagaacgaucagcgagaaguuacgcucaggauaugaaaccuucaaagucauugaaggcugguccaacccuaauuccaaauugcagauaaauaggcaagucauaguugacagagguaauagguccgguuauucugguauuuucucuguugaaggcaaaagcugcaucaaucggugcuuuuauguggaguugauaaggggaagaaaagaggaaacugaagucuuguggaccucaaacaguauuguuguguuuuguggcaccucagguacauauggaacaggcucauggccugauggggcggacaucaaucucaugccuauauaa

SEQ ID NO: 48756 - RNA, 1410 nt, Artificial Sequence
  derived and/or modified CDS sequence (wt) from neuraminidase__InfluenzaA__ACQ65716
augaauccaaaucaaaagauaauaacgauuggcucuguuucucucaccauuuccacaauaugcuucuucaugcaaauugccaucuugauaacuacuguaacauugcauuucaagcaauaugaauucaacucccccccaaacaaccaagugaugcugugugaaccaacaauaauagaaagaaacauaacagagauaguguaucugaccaacaccaccauagagaaggaaauaugccccaaacuagcagaauacagaaauuggucaaagccgcaaugugacauuacaggauuugcaccuuuuucuaaggacaauucgauuaggcuuuccgcugguggggacaucugggugacaagagaaccuuaugugucaugcgauccugacaaguguuaucaauuugcccuuggacagggaacaacacuaaacaacgugcauucaaaugacacaguacgugauaggaccccuuaucggacccuauugaugaaugaguuagguguuccuuuucaucuggggaccaagcaagugugcauagcaugguccagcucaaguugucacgauggaaaagcauggcugcauguuuguauaacgggggaugauaaaaaugcaacugcuagcuucauuuacaaugggaggcuuguagauaguguuguuucaugguccaaagaaauccucaggacccaggagucagaaugcguuuguaucaauggaacuuguacaguaguaaugacugaugggagugcuucaggaaaagcugauacuaaaauacuauucauugaggaggggaaaaucguucauacuagcacauugucaggaagugcucagcaugucgaggagugcuccugcuauccucgauauccuggugucagaugugucugcagagacaacuggaaaggcuccaauaggcccaucguagauauaaacauaaaggaucauagcauuguuuccaguuauguguguucaggacuuguuggagacacacccagaaaaaacgacagcuccagcaguagccauuguuuggauccuaacaaugaagaagguggucauggagugaaaggcugggccuuugaugauggaaaugacguguggaugggaagaacgaucagcgagaagucacgcuuaggguaugaaaccuucaaagucauugaaggcugguccaacccuaaguccaaauugcagauaaauaggcaagucauaguugacagagguaauagguccgguuauucugguauuuucucuguugaaggcaaaagcugcaucaaucggugcuuuuauguugaguugauaaggggaagaaaagaggaaacugaagucuuguggaccucaaacaguauuguuguguuuuguggcaccucagguacauauggaacaggcucauggccugauggggcggacaucaaucucaugccuauauaa

SEQ ID NO: 48757 - RNA, 1410 nt, Artificial Sequence
  derived and/or modified CDS sequence (wt) from neuraminidase__InfluenzaA__ACQ65727
augaauccaaaucaaaagauaauaacgauuggcucuguuucucucaccauuuccacaauaugcuucuucaugcaaauugccaucuugauaacuacuguaacauugcauuucaagcaauaugaauucaacucccccccaaacaaccaagugaugcugugugaaccaacaauaauagaaagaaacauaacagagauaguguaucugaccaacaccaccauagagaaggaaauaugccccaaacuagcagaauacagaaauuggucaaagccgcaaugugacauuacaggauuugcaccuuuuucuaaggacaauucgauuaggcuuuccgcugguggggacaucugggugacaagagaaccuuaugugucaugcgauccugacaaguguuaucaauuugcccuuggacagggaacaacacuaaacaacgugcauucaaaugacacaguacgugauaggaccccuuaucggacccuauugaugaaugaguuagguguuccuuuucaucuggggaccaagcaagugugcauagcaugguccagcucaaguugucacgauggaaaagcauggcugcauguuuguauaacgggggaugauaaaaaugcaacugcuagcuucauuuacaaugggaggcuuguagauaguguuguuucaugguccaaagaaauccucaggacccaggagucagaaugcguuuguaucaauggaacuuguacaguaguaaugacugaugggagugcuucaggaaaagcugauacuaaaauacuauucauugaggaggggaaaaucguucauacuagcacauugucaggaagugcucagcaugucgaggagugcuccugcuauccucgauauccuggugucagaugugucugcagagacaacuggaaaggcuccaauaggcccaucguagauauaaacauaaaggaucauagcauuguuuccaguuauguguguucaggacuuguuggagacacacccagaaaaaacgacagcuccagcaguagccauuguuuggauccuaacaaugaagaagguggucauggagugaaaggcugggccuuugaugauggaaaugacguguggaugggaaggacgaucagcgagaagucacgcuuaggguaugaaaccuucaaagucauugaaggcugguccaacccuaaguccaaauugcagauaaauaggcaagucauaguugacagagguaauagguccgguuauucugguauuuucucuguugaaggcaaaagcugcaucaaucggugcuuuuauguggaguugauaaggggaagaaaagaggaaacugaagucuuguggaccucaaacaguauuguuguguuuuguggcaccucagguacauauggaacaggcucauggccugauggggcggacaucaaucucaugccuauauaa

SEQ ID NO: 48758 - RNA, 1410 nt, Artificial Sequence; identical to SEQ ID NO: 48611
  derived and/or modified CDS sequence (wt) from neuraminidase__InfluenzaA__ACQ65739

SEQ ID NO: 48759 - RNA, 1410 nt, Artificial Sequence
  derived and/or modified CDS sequence (wt) from neuraminidase__InfluenzaA__ACQ65750
augaauccaaaucaaaagauaauaacgauuggcucuguuucucucaccauuuccacaauaugcuucuucaugcaaacugccaucuugauaacuacuguaacauugcauuucaagcaauaugaauucaacucccccccaaacaaccaagugaugcugugugaaccaacaauaauagaaagaaacauaacagagauaguguaucugaccaacaccaccauagagaaggaaauaugccccaaacuagcagaauacagaaauuggucaaagccgcaaugugacauuacaggauuugcaccuuuuucuaaggacaauucgauuaggcuuuccgcugguggggacaucugggugacaagagaaccuuaugugucaugcgauccugacaaguguuaucaauuugcccuuggacagggaacaacacuaaacaacgugcauucaaaugacacaguacguaauaggaccccuuaucggacccuauugaugaaugaguuagguguuccuuuucaucuggggaccaagcaagugugcauagcaugguccagcucaaguugucacgauggaaaagcauggcugcauguuuguauaacgggggaugauaaaaaugcaacugcuagcuucauuuacaaugggaggcuuguagauaguauuguuucaugguccaaagaaauccucaggacccaggagucagaaugcguuuguaucaauggaacuuguacaguaguaaugacugaugggagugcuucaggaaaagcugauacuaaaauacuauucauugaggaggggaaaaucguucauacuagcacauugucaggaagugcucagcaugucgaggagugcuccugcuauccucgauauccuggugucagaugugucugcagagacaacuggaaaggcuccaauaggcccaucguagauauaaacauaaaggaucauagcauuguuuccaguuauguguguucaggacuuguuggagacacacccagaaaaaacgacagcuccagcaguagccauuguuuggauccuaacaaugaagaagguggucauggagugaaaggcugggccuuugaugauggaaaugacguguggaugggaagaacgaucagcgagaagucacgcuuaggguaugaaaccuucaaagucauugaaggcugguccaacccuaaguccaaauugcagauaaauaggcaagucauaguugacagagguaauagguccgguuauucugguauuuucucuguugaaggcaaaagcugcaucaaucggugcuuuuauguggaguugauaaggggaagaaaagaggaaacugaagucuuguggaccucaaacaguauuguuguguuuuguggcaccucagguacauauggaacaggcucauggccugauggggcggacaucaaucucaugccuauauaa

SEQ ID NO: 48760 - RNA, 1413 nt, Artificial Sequence
  derived and/or modified CDS sequence (wt) from neuraminidase__InfluenzaA__ACQ65761
augaacccaaaucaaaagauaauaaccauuggaucaaucaguauagcaaucggaauaauuagucuaauguugcaaauaggaaauauuauuucaauaugggcuagucacucaauccaaacuggaagucaaaacaacacuggaauaugcaaucaaagaaucaucacauaugaaaacagcaccugggugaaucacacauauguuaauauuaacaacaccaauguuguugcuggagaggacaaaacuucagugacauuggccggcaauucaucucuuuguucuaucaguggaugggcuauauacacaaaagacaacagcauaagaauuggcuccaaaggagauguuuuugucauaagagaaccuuucauaucauguucucacuuggaaugcagaaccuuuuuucugacccaaggcgcucuauuaaaugacaaacauucaaaugggaccguaaaggacagaaguccuuauagggccuuaaugagcuguccucuaggugaagcuccuuccccauacaauucaaaguucgaaucaguugcauggucagcaagcgcaugccaugauggcaugggcugguuaacaaucggaauuucugguccagacaauggagcuguggcuguacuaaaauacaacggaauaauaacuggaaccauaaaaaguuggaaaaagcaaauauuaagaacacaagagucugaaugugucuguaugaacgggucauguuucaccauaaugaccgauggcccgaguaauaaggccgccucguacaaaauuuucaagaucgaaaaggggaagguuacuaaaucaauagaguugaaugcacccaauuuucauuaugaggaauguuccuguuacccagacacuggcauagugauguguguaugcagggacaacuggcaugguucaaaucgaccuugggugucuuuuaaucaaaacuuggauuaucaaauaggauacaucugcaguggaguguuuggugacaauccgcgucccgaagauggagagggcagcugcaauccagugacuguugauggagcaaacggaguaaaaggguuuucauacaaauaugauaaugguguuuggauaggaaggaccaaaaguaacagacuuagaaagggguuugagaugauuugggauccuaauggauggacaaauacagacagugauuucucagugaaacaggauguuguagcaauaacugauuggucaggguacaguggaaguuucguccaacauccugaguuaacaggauuggacuguauaagaccuugcuucuggguugaguuagucagagggcugcccagagaaaauacaacaaucuggacuagugggagcagcauuucuuuuuguggcguuaauagugauacugcaaacugguccuggccagacggugcugaguugccguucaccauugacaaguag

SEQ ID NO: 48761 - RNA, 1410 nt, Artificial Sequence
  derived and/or modified CDS sequence (wt) from neuraminidase__InfluenzaA__ACQ73394
augaauccaaaccaaaagauaauaaccauugguucggucuguaugacaauuggaauggcuaacuuaauauuacaaauuggaaacauaaucucaauauggauuagccacucaauucaacuugggaaucaaaaucagauugaaacaugcaaucaaagcgucauuacuuaugaaaacaacacuuggguaaaucagacauauguuaacaucagcaacaccaacuuugcugcuggacagucagugguuuccgugaaauuagcgggcaauuccucucucugcccuguuaguggaugggcuauauacaguaaagacaacaguguaagaaucgguuccaagggggauguguuugucauaagggaaccauucauaucaugcucccccuuggaaugcagaaccuucuucuugacucaaggggccuugcuaaaugacaaacauuccaauggaaccauuaaagacaggagcccauaucgaacccuaaugagcuguccuauuggugaaguucccucuccauacaacucaagauuugagucagucgcuuggucagcaagugcuugucaugauggcaucaauuggcuaacaauuggaauuucuggcccagacaauggggcaguggcuguguuaaaguacaacggcauaauaacagacacuaucaagaguuggagaaacaauauauugagaacacaagagucugaaugugcauguguaaaugguucuugcuuuacuguaaugaccgauggaccaaguaauggacaggccucauacaagaucuucagaauagaaaagggaaagauagucaaaucagucgaaaugaaugccccuaauuaucacuaugaggaaugcuccuguuauccugauucuagugaaaucacaugugugugcagggauaacuggcauggcucgaaucgaccgugggugucuuucaaccagaaucuggaauaucagauaggauacauaugcagugggauuuucggagacaauccacgcccuaaugauaagacaggcaguugugguccaguaucgucuaauggagcaaauggaguaaaaggauuuucauucaaauacggcaaugguguuuggauagggagaacuaaaagcauuaguucaagaaacgguuuugagaugauuugggauccgaacggauggacugggacagacaauaacuucucaauaaagcaagauaucguaggaauaaaugaguggucaggauauagcgggaguuuuguucagcauccggaacuaacagggcuggauuguauaagaccuugcuucuggguugaacuaaucagagggcgacccaaagagaacacaaucuggacuagcgggagcagcauauccuuuugugguguaaacagugacacuguggguuggucuuggccagacggugcugaguugccauuuaccauugacaaguaa

SEQ ID NO: 48762 - RNA, 1410 nt, Artificial Sequence; identical to SEQ ID NO: 48749
  derived and/or modified CDS sequence (wt) from neuraminidase__InfluenzaA__ACQ73395

SEQ ID NO: 48763 - RNA, 1410 nt, Artificial Sequence; identical to SEQ ID NO: 48750
  derived and/or modified CDS sequence (wt) from neuraminidase__InfluenzaA__ACQ73396

SEQ ID NO: 48764 - RNA, 1410 nt, Artificial Sequence; identical to SEQ ID NO: 48750
  derived and/or modified CDS sequence (wt) from neuraminidase__InfluenzaA__ACQ76291

SEQ ID NO: 48765 - RNA, 1410 nt, Artificial Sequence
  derived and/or modified CDS sequence (wt) from neuraminidase__InfluenzaA__ACQ76298
augaauccaaaccaaaagauaauaaccauugguucggucuguaugacaauuggaauggcuaacuuaauauuacaaauuggaaacauaaucucaauauggauuagccacucaauucaacuugggaaucaaaaucagauugaaacaugcaaucaaagcgucauuacuuaugaaaacaacacuuggguaaaucagacauauguuaacaucagcaacaccaacuuugcugcuggacagucaguaguuuccgugaaauuagcgggcaauuccucucucugcccuguuaguggaugggcuauauacaguaaagacaacaguguaagaaucgguuccaagggggauguguuugucauaagggaaccauucauaucaugcucccccuuggaaugcagaaccuucuucuugacucaaggggccuugcuaaaugacaaacauuccaauggaaccauuaaagacaggagcccauaucgaacccuaaugagcuguccuauuggugaaguucccucuccauacaacucaagauuugagucagucgcuuggucagcaagugcuugucaugauggcaucaauuggcuaacaauuggaauuucuggcccagacaauggggcaguggcuguguuaaaguacaacggcauaauaacagacacuaucaagaguuggagaaacaauauauugagaacacaagagucugaaugugcauguguaaaugguucuugcuuuaccauaaugaccgauggacccaguaauggacaggccucauacaagaucuucagaauagaaaagggaaagauagucaaaucagucgaaaugaaugccccuaauuaucacuaugaggaaugcuccuguuauccugauucuagugaaaucacaugugugugcagggauaacuggcauggcucgaaucgaccgugggugucuuucaaccagaaucuggaauaucagauaggauacauaugcagugggauuuucggagacaauccacgcccuaaugauaagacaggcaguugugguccaguaucgucuaauggagcaaauggaguaaaaggauuuucauucaaauacggcaaugguguuuggauagggagaacuaaaagcauuaguucaagaaacgguuuugagaugauuugggauccgaacggauggacugggacagacaauaacuucucaauaaagcaagauaucguaggaauaaaugaguggucaggauauagcgggaguuuuguucagcauccagaacuaacagggcuggauuguauaagaccuugcuucuggguugaacuaaucagagggcgacccaaagagaacacaaucuggacuagcgggagcagcauauccuuuugugguguaaacagugacacuguggguuggucuuggccagacggugcugaguugccauuuaccauugacaaguaa

SEQ ID NO: 48766 - RNA, 1410 nt, Artificial Sequence; identical to SEQ ID NO: 48750
  derived and/or modified CDS sequence (wt) from neuraminidase__InfluenzaA__ACQ76308

SEQ ID NO: 48767 - RNA, 1410 nt, Artificial Sequence; identical to SEQ ID NO: 48750
  derived and/or modified CDS sequence (wt) from neuraminidase__InfluenzaA__ACQ76316

SEQ ID NO: 48768 - RNA, 1410 nt, Artificial Sequence; identical to SEQ ID NO: 48749
  derived and/or modified CDS sequence (wt) from neuraminidase__InfluenzaA__ACQ76322

SEQ ID NO: 48769 - RNA, 1410 nt, Artificial Sequence; identical to SEQ ID NO: 48749
  derived and/or modified CDS sequence (wt) from neuraminidase__InfluenzaA__ACQ76328

SEQ ID NO: 48770 - RNA, 1410 nt, Artificial Sequence
  derived and/or modified CDS sequence (wt) from neuraminidase__InfluenzaA__ACQ76335
augaauccaaaccaaaagauaauaaccauugguucggucuguaugacaauuggaauggcuaacuuaauauuacaaauuggaaacauaaucucaauauggauuagccacucaauucaacuugggaaucaaaaucagauugaaacaugcaaucaaagcgucauuacuuaugaaaacaacacuuggguaaaucagacauauguuaacaucagcaacaccaacuuugcugcuggacagucaguaguuuccgugaaauuagcgggcaauuccucucucugcccuguuaguggaugggcuauauacaguaaagacaacaguguaagaaucgguuccaagggggauguguuugucauaagggaaccauucauaucaugcucccccuuggaaugcagaaccuucuucuugacucaaggggccuugcuaaaugacaaacauuccaauggaaccauuaaagacaggagcccauaucgaacccuaaugagcuguccuauuggugaaguucccucuccauacaacucaagauuugagucagucgcuuggucagcaagugcuugucaugauggcaucaauuggcuaacaauuggaauuucuggcccagacaauggggcaguggcuguguuaaaguacaacggcauaauaacagacacuaucaagaguuggagaaacaauauauugagaacacaagagucugaaugugcauguguaaaugguucuugcuuuacuguaaugaccgauggaccaaguaauggacaggccucauacaagaucuucagaauagaaaagggaaagauagucaaaucagucgaaaugaaugccccuaauuaucacuaugaggaaugcuccuguuauccugauucuagugaaaucacaugugugugcagggauaacuggcauggcucgaaucgaccgugggugucuuucaaccagaaucuggaauaucagauaggauacauaugcagugggauuuucggagacaauccacgcccuaaugauaagacaggcaguugugguccaguaucgucuaauggagcaaauggaguaaaaggauuuucauucaaauacggcaaugguguuuggauagggagaacuaaaagcauuaguucaagaaacgguuuugagaugauuugggauccgaacggauggacugggacagacaauaacuucucaauaaagcaagauaucguaggaauaaaugaguggucaggauauagcgggaguuuuguucagcauccagaacuaacagggcuggauuguauaagaccuugcuucuggguugaacuaaucagagggcgacccaaagagaacacaaucuggacuagcgggagcagcauauccuuuugugguguaaacagugacacuguggguuggucuuggccagacggugcugaguugccauuuaccauugacaaguaa

SEQ ID NO: 48771 - RNA, 1410 nt, Artificial Sequence
  derived and/or modified CDS sequence (wt) from neuraminidase__InfluenzaA__ACQ76342
augaauccaaaccaaaagauaauaaccauugguucggucuguaugacaauuggaauggcuaacuuaauauuacaaauuggaaacauaaucucaauauggauuagccacucaauucaacuugggaaucaaaaucagauugaaacaugcaaucaaagcgucauuacuuaugaaaacaacacuuggguaaaucagacauauguuaacaucagcaacaccaacuuugcugcuggacagucagugguuuccgugaaauuagcgggcaauuccucucucugcccuguuaguggaugggcuauauacaguaaagacaacaguguaagaaucgguuccaagggggauguguuugucauaagggaaccauucauaucaugcucccccuuggaaugcagaacuuucuucuugacucaaggggccuugcuaaaugacaaacauuccaauggaaccauuaaagacaggagcccauaucgaacccuaaugagcuguccuauuggugaaguucccucuccauacaacucaagauuugagucagucgcuuggucagcaagugcuugucaugauggcaucaauuggcuaacaauuggaauuucuggcccagacaauggggcaguggcuguguuaaaguacaacggcauaauaacagacacuaucaagaguuggagaaacaauauauugagaacacaagagucugaaugugcauguguaaaugguucuugcuuuacuguaaugaccgauggaccaaguaauggacaggccucauacaagaucuucagaauagaaaagggaaagauagucaaaucagucgaaaugaaugccccuaauuaucacuaugaggaaugcuccuguuauccugauucuagugaaaucacaugugugugcagggauaacuggcauggcucgaaucgaccgugggugucuuucaaccagaaucuggaauaucagauaggauacauaugcagugggauuuucggagacaauccacgcccuaaugauaagacaggcaguugugguccaguaucgucuaauggagcaaauggaguaaaaggauuuucauucaaauacggcaaugguguuuggauagggagaacuaaaagcauuaguucaagaaacgguuuugagaugauuugggauccgaacggauggacugggacagacaauaacuucucaauaaagcaagauaucguaggaauaaaugaguggucaggauauagcgggaguuuuguucagcauccagaacuaacagggcuggauuguauaagaccuugcuucuggguugaacuaaucagagggcgacccaaagagaacacaaucuggacuagcgggagcagcauauccuuuugugguguaaacagugacacuguggguuggucuuggccagacggugcugaguugccauuuaccauugacaaguaa

SEQ ID NO: 48772 - RNA, 1410 nt, Artificial Sequence
  derived and/or modified CDS sequence (wt) from neuraminidase__InfluenzaA__ACQ76351
augaauccaaaccaaaagauaauaaccauugguucggucuguaugacaauuggaauggcuaacuuaauauuacaaauuggaaacauaaucucaauauggauuagccacucaauucaacuugggaaucaaaaucagauugaaacaugcaaucaaagcgucauuacuuaugaaaacaacacuuggguaaaucagacauauguuaacaucagcaacaccaacuuugcugcuggacagucagugguuuccgugaaauuagcgggcaauuccucucucugcccuguuaguggaugggcuauauacaguaaagacaacaguguaagaaucgguuccaagggggauguguuugucauaagggaaccauucauaucaugcucccccuuggaaugcagaaccuucuucuugacucaaggggccuugcuaaaugacaaacauuccaauggaaccauuaaagacaggagcccauaucgaacccuaaugagcuguccuauuggugaaguucccucuccauacaacucaagauuugagucagucgcuuggucagcaagugcuugucaugauggcaucaauuggcuaacaauuggaauuucuggcccagacaauggggcaguggcuguguuaaaguacaacggcauaauaacagacacuaucaagaguuggagaaacaauauauugagaacacaagagucugaaugugcauguguaaaugguucuugcuuuacuguaaugaccgauggaccaaguaauggacaggccucauacaagaucuucagaauagaaaagggaaagauagucaaaucagucgaaaugaaugccccuaauuaucacuaugaggaaugcuccuguuauccugauucuagugaaaucacaugugugugcagggauaacuggcauggcucgaaucgaccgugggugucuuucaaccagaaucuggaauaucagauaggauacauaugcagugggauuuucggagacaauccacgcccuaaugauaagacaggcaguugugguccaguaucgucuaauggagcaaauggaguaaaaggauuuucauucaaauacggcaaugguguuuggauagggagaacuaaaagcauuaguucaagaaacgguuuugagaugauuugggauccgaacggauggacugggacagacaacaacuucucaauaaagcaagauaucguaggaauaaaugaguggucaggauauagcgggaguuuuguucagcauccagaacuaacagggcuggauuguauaagaccuugcuucuggguugaacuaaucagagggcgacccaaagagaacacaaucuggacuagcgggagcagcauauccuuuugugguguaaacagugacacuguggguuggucuuggccagacggugcugaguugccauuuaccauugacaaguaa

SEQ ID NO: 48773 - RNA, 1410 nt, Artificial Sequence
  derived and/or modified CDS sequence (wt) from neuraminidase__InfluenzaA__ACQ76359
augaauccaaaccaaaagauaauaaccauugguucggucuguaugacaauuggaauggcuaacuuaauauuacaaauuggaaacauaaucucaauauggauuagccacucaauucaacuugggaaucaaaaucagauugaaacaugcaaucaaagcgucauuacuuaugaaaacaacacuuggguaaaucagacauauguuaacaucagcaacaccaacuuugcugcuggacagucagugguuuccgugaaauuagcgggcaauuccucucucugcccuguuaguggaugggcuauauacaguaaagacaacaguguaagaaucgguuccaagggggauguguuugucauaagggaaccauucauaucaugcucccccuuggaaugcagaaccuucuucuugacucaaggggccuugcuaaaugacaaacauuccaauggaaccauuaaagacaggagcccauaucgaacccuaaugagcuguccuauuggugaaguucccucuccauacaacucaagauuugagucagucgcuuggucagcaagugcuugucaugauggcaucaauuggcuaacaauuggaauuucuggcccagacaauggggcaguggcuguguuaaaguacaacggcauaauaacagacacuaucaagaguuggagaaacaauauauugagaacacaagagucugaaugugcauguguaaaugguucuugcuuuacugugaugaccgauggaccaaguaauggacaggccucauacaagaucuucagaauagaaaagggaaagauagucaaaucagucgaaaugaaugccccuaauuaucacuaugaggaaugcuccuguuauccugauucuagugaaaucacaugugugugcagggauaacuggcauggcucgaaucgaccgugggugucuuucaaccagaaucuggaauaucagauaggauacauaugcagugggauuuucggagacaauccacgcccuaaugauaagacaggcaguugugguccaguaucgucuaauggagcaaauggaguaaaaggauuuucauucaaauacggcaaugguguuuggauagggagaacuaaaagcauuaguucaagaaacgguuuugagaugauuugggauccgaacggauggacugggacagacaauaacuucucaauaaagcaagauaucguaggaauaaaugaguggucaggauauagcgggaguuuuguucagcauccagaacuaacagggcuggauuguauaagaccuugcuucuggguugaacuaaucagagggcgacccaaagagaacacaaucuggacuagcgggagcagcauauccuuuugugguguaaacagugacacuguggguuggucuuggccagacggugcugaguugccauuuaccauugacaaguaa

SEQ ID NO: 48774 - RNA, 1410 nt, Artificial Sequence; identical to SEQ ID NO: 48750
  derived and/or modified CDS sequence (wt) from neuraminidase__InfluenzaA__ACQ76364

SEQ ID NO: 48775 - RNA, 1410 nt, Artificial Sequence; identical to SEQ ID NO: 48750
  derived and/or modified CDS sequence (wt) from neuraminidase__InfluenzaA__ACQ76367

SEQ ID NO: 48776 - RNA, 1410 nt, Artificial Sequence
  derived and/or modified CDS sequence (wt) from neuraminidase__InfluenzaA__ACQ76379
augaauccaaaccaaaagauaauaaccauugguucggucuguaugacaauuggaauggcuaacuuaauauuacaaauuggaaacauaaucucaauauggauuagccacucaauucaacuugggaaucaaaaucagauugaaacaugcaaucaaagcgucauuacuuauaaaaacaacacuuggguaaaucagacauauguuaacaucagcaacaccaacuuugcugcuggacagucagugguuuccgugaaauuagcgggcaauuccucucucugcccuguuaguggaugggcuauauacaguaaagacaacaguguaagaaucgguuccaagggggauguguuugucauaagggaaccauucauaucaugcucccccuuggaaugcagaaccuucuucuugacucaaggagccuugcuaaaugacaaacauuccaauggaaccauuaaagacaggagcccauaucgaacccuaaugagcuguccuauuggugaaguucccucuccauacaacucaagauuugagucagucgcuuggucagcaagugcuugucaugauggcaucaauuggcuaacaauuggaauuucuggcccagacaauggggcaguggcuguguuaaaguacaacggcauaauaacagacacuaucaagaguuggagaaacaauauauugagaacacaagagucugaaugugcauguguaaaugguucuugcuuuacuguaaugaccgauggaccaaguaauggacaggccucauacaagaucuucagaauagaaaagggaaagauagucaaaucagucgaaaugaaugccccuaauuaucacuaugaggaaugcuccuguuauccugauucuagugaaaucacaugugugugcagggauaacuggcauggcucgaaucgaccgugggugucuuucaaccagaaucuggaauaucagauaggauacauaugcagugggauuuucggagacaauccacgcccuaaugauaagacaggcaguugugguccaguaucgucuaauggagcaaauggaguaaaaggauuuucauucaaauacggcaaugguguuuggauagggagaacuaaaagcauuaguucaagaaacgguuuugagaugauuugggauccgaacggauggacugggacagacaauaacuucucaauaaagcaagauaucguaggaauaaaugaguggucaggauauagcgggaguuuuguucagcauccagaacuaacagggcuggauuguauaagaccuugcuucuggguugaacuaaucagagggcgacccaaagagaacacaaucuggacuagcgggagcagcauauccuuuugugguguaaacagugacacuguggguuggucuuggccagacggugcugaguugccauuuaccauugacaaguaa

SEQ ID NO: 48777 - RNA, 1410 nt, Artificial Sequence; identical to SEQ ID NO: 48750
  derived and/or modified CDS sequence (wt) from neuraminidase__InfluenzaA__ACQ76385

SEQ ID NO: 48778 - RNA, 1410 nt, Artificial Sequence; identical to SEQ ID NO: 48750
  derived and/or modified CDS sequence (wt) from neuraminidase__InfluenzaA__ACQ76388

SEQ ID NO: 48779 - RNA, 1410 nt, Artificial Sequence; identical to SEQ ID NO: 48750
  derived and/or modified CDS sequence (wt) from neuraminidase__InfluenzaA__ACQ76403

SEQ ID NO: 48780 - RNA, 1410 nt, Artificial Sequence
  derived and/or modified CDS sequence (wt) from neuraminidase__InfluenzaA__ACQ76407
augaauccaaaccaaaagauaauaaccauugguucggucuguaugacaauuggaauggcuaacuuaauauuacaaauuggaaacauaaucucaauauggauuagccacucaauucaacuugggaaucaaaaucagauugaaacaugcaaucaaagcgucauuacuuaugaaaacaacacuuggguaaaucagacauauguuaacaucagcaacaccaacuuugcugcuggacagucagugguuuccgugaaauuagcgggcaauuccucucucugcccuguugguggaugggcuauauacaguaaagacaacaguguaagaaucgguuccaagggggauguguuugucauaagggaaccauucauaucaugcucccccuuggaaugcagaaccuucuucuugacucaaggggccuugcuaaaugacaaacauuccaauggaaccauuaaagacaggagcccauaucgaacccuaaugagcuguccuauuggugaaguucccucuccauacaacucaagauuugagucagucgcuuggucagcaagugcuugucaugauggcaucaauuggcuaacaauuggaauuucuggcccagacaauggggcaguggcuguguuaaaguacaacggcauaauaacagacacuaucaagaguuggagaaacaauauauugagaacacaagagucugaaugugcauguguaaaugguucuugcuuuacuguaaugaccgauggaccaaguaauggacaggccucauacaagaucuucagaauagaaaagggaaagauagucaaaucagucgaaaugaaugccccuaauuaucacuaugaggaaugcuccuguuauccugauucuagugaaaucacaugugugugcagggauaacuggcauggcucgaaucgaccgugggugucuuucaaccagaaucuggaauaucagauaggauacauaugcagugggauuuucggagacaauccacgcccuaaugauaagacaggcaguugugguccaguaucgucuaauggagcaaauggaguaaaaggauuuucauucaaauacggcaaugguguuuggauagggagaacuaaaagcauuaguucaagaaacgguuuugagaugauuugggauccgaacggauggacugggacagacaauaacuucucaauaaagcaagauaucguaggaauaaaugaguggucaggauauagcgggaguuuuguucagcauccagaacuaacagggcuggauuguauaagaccuugcuucuggguugaacuaaucagagggcgacccaaagagaacacaaucuggacuagcgggagcagcauauccuuuugugguguaaacagugacacuguggguuggucuuggccagacggugcugaguugccauuuaccauugacaaguaa

SEQ ID NO: 48781 - RNA, 1410 nt, Artificial Sequence
  derived and/or modified CDS sequence (wt) from neuraminidase__InfluenzaA__ACQ77603
augaauccaaaucaaaagauaauaacgauuggcucuguuucucucaccauugccacaauaugcuuccuuaugcaaauugccauccugguaacuacuguaacauugcauuucaagcaauaugaaugcaacucccccccaaacaaccaagugaugcugugugaaccaacaauaauagaaagaaacauaacagagauaguguaucugaccaacaccaccauagagaaggaaauaugccccaaacuagcagaauacagaaauuggucaaagccgcaauguaacauuacaggauuugcaccuuuuucuaaggacaauucgauucggcuuuccgcugguggggacaucugggugacaagagaaccuuacgugucaugcgauccugacaaguguuaucaauuugcccuuggacagggaacaacacuaaacaacgggcauucaaaugacacaguacaugauaggaccccuuaucggacccuauugaugaaugaguuggguguuccauuucauuugggaaccaagcaagugugcauagcaugguccagcucaaguugucacgauggaaaagcauggcugcauguuuguguaacgggggaugaugaaaaugcaacugcuagcuucauuuacaaugggaggcuuguagauaguauugguucaugguccaaaaaaauccucaggacccaggagucggaaugcguuuguaucaauggaacuuguacaguaguaaugacugaugggagugcuucaggaaaagcugauacuaaaauacuauucauugaggaggggaaaaucguucauacuagcccauugucaggaagugcucagcaugucgaggagugcuccuguuauccucgauauccuggugucagaugugucugcagagacaacuggaaaggcuccaauaggcccaucguagauauaaauguaaaggauuauagcauuguuuccaguuaugugugcucaggacuuguuggagacacacccagaaaaaacgacagcuccagcaguagccauugcuuggauccuaacaaugaggaagguggucauggagugaaaggcugggccuuugaugauggaaaugacguguggaugggaagaacgaucagcgagaagucacgcucaggauaugaaaccuucaaagucauugaaggcugguccaaaccuaacuccaaauugcagauaaauaggcaagucauaguugacagagguaauagguccgguuauucugguauuuucucuguugaaggcaaaagcugcaucaaucggugcuuuuauguggaguugauaaggggaaggaaacaggaaacugaagucuuguggaccucaaacaguauuguuguguuuuguggcaccucagguacauauggaacaggcucauggccugauggggcggacaucaaucucaugccuauauaa

SEQ ID NO: 48782 - RNA, 1410 nt, Artificial Sequence
  derived and/or modified CDS sequence (wt) from neuraminidase__InfluenzaA__ACQ83309
augaauccaaaccaaaagauaauaaccauugguucggucuguaugacaauuggaauggcuaacuuaauauuacaaauuggaaacauaaucucaauauggauuagccacucaauucaacuugggaaucaaaaucagauugaaacaugcaaucaaagcgucauuacuuaugaaaacaacacuuggguaaaucagacauauguuaacaucagcaacaccaacuuugcugcuggacagucagugguuuccgugaaauuagcgggcaauuccucucucugcccuguuaguggaugggcuauauacaguaaagacaacaguguaagaaucgguuccaagggggauguguuugucauaagggaaccauucauaucaugcucccccuuggaaugcagaaccuucuucuugacucaaggggccuugcuaaaugacaaacauuccaauggaaccauuaaagacaggagcccauaucgaacccuaaugagcuguccuauuggugaaguucccucuccauacaacucaagauuugagucagucgcuuggucagcaagugcuugucaugauggcaucaauuggcuaacaauuggaauuucuggcccagacaauggggcaguggcuguguuaaaguacaacggcauaauaacagacacuaucaagaguuggagaaacaauauauugagaacacaagagucugaaugugcauguguaaaugguucuugcuuuacuguaaugaccgauggaccaaguaauggacaggccucauacaagaucuucagaauagaaaagggaaagauagucaaaucagucgaaaugaaugccccuaauuaucacuaugaggaaugcuccuguuauccugauucuagugaaaucacaugugugugcagggauaacuggcauggcucgaaucgaccgugggugucuuucaaccagaaucuggaauaucagauaggauacauaugcagugggauuuucggagacaauccacgcccuaaugauaagacaggcaguugugguccaguaucgucuaauggagcaaauggaguaaaaggguucucauucaaauacggcaaugguguuuggauagggagaacuaaaagcauuaguucaagaaacgguuuugagaugauuugggauccgaacggauggacugggacagacaauaacuucucaauaaagcaagauaucguaggaauaaaugaguggucaggauauagcgggaguuuuguucagcauccagaacuaacagggcuggauuguauaagaccuugcuucuggguugaacuaaucagagggcgacccaaagagaacacaaucuggacuagcgggagcagcauauccuuuugugguguaaacagugacacuguggguuggucuuggccagacggugcugaguugccauuuaccauugacaaguaa

SEQ ID NO: 48783 - RNA, 1410 nt, Artificial Sequence
  derived and/or modified CDS sequence (wt) from neuraminidase__InfluenzaA__ACQ84460
augaauccaaaccaaaagauaauaaccauugguucggucuguaugacaauuggaauggcuaacuuaauauuacaaauuggaaacauaaucucaauauggauuagccacucaauucaacuugggaaucaaaaucagauugaaacaugcaaucaaagcgucauuacuuaugaaaacaacacuuggguaaaucagacauauguuaacaucagcaacaccaacuuugcugcuggacagucagugguuuccgugaaauuagcgggcaauuccucucucugcccuguuaguggaugggcuauauacaguaaagacaacaguguaagaaucgguuccaagggggauguguuugucauaagggaaccauucauaucaugcucccccuuggaaugcagaaccuucuucuugacucaaggggccuugcuaaaugacaaacauuccaauggaaccauuaaagacaggagcccauaucgaacccuaaugagcuguccuauuggugaaguucccucuccauacaacucaagauuugagucagucgcuuggucagcaagugcuugucaugauggcaucaauuggcuaacaauuggaauuucuggcccagacaauggggcaguggcuguguuaaaguacaacggcauaauaacagacacuaucaagaguuggagaaacaauauauugagaacacaagagucugaaugugcauguguaaaugguucuugcuuuacuguaaugaccgauggaccaaguaauggacaggccucauacaagaucuucagaauagaaaagggaaaaauagucaaaucagucgaaaugaaugccccuaauuaucacuaugaggaaugcuccuguuauccugauucuagugaaaucacaugugugugcagggauaacuggcauggcucgaaucgaccgugggugucuuucaaccagaaucuggaauaucagauaggauacauaugcagugggauuuucggagacaauccacgcccuaaugauaagacaggcaguugugguccaguaucgucuaauggagcaaauggaguaaaaggauuuucauucaaauacggcaaugguguuuggauagggagaacuaaaagcauuaguucaagaaacgguuuugagaugauuugggauccgaacggauggacugggacagacaauaacuucucaauaaagcaagauaucguaggaauaaaugaguggucaggauauagcgggaguuuuguucagcauccagaacuaacagggcuggauuguauaagaccuugcuucuggguugaacuaaucagagggcgacccaaagagaacacaaucuggacuagcgggagcagcauauccuuuugugguguaaacagugacacuguggguuggucuuggccagacggugcugaguugccauuuaccauugacaaguaa

SEQ ID NO: 48784 - RNA, 1410 nt, Artificial Sequence
  derived and/or modified CDS sequence (wt) from neuraminidase__InfluenzaA__ACQ84470
augaauccaaaccaaaagauaauaaccauugguucggucuguaugacaauuggaauggcuaacuuaauauuacaaauuggaaacauaaucucaauauggauuagccacucaauucaacuugggaaucaaaaucagauugaaacaugcaaucaaagcgucauuacuuaugaaaacaacacuuggguaaaucagacauauguuaacaucagcaacaccaacuuugcugcuggacagucagugguuuccgugaaauuagcgggcaauuccucucucugcccuguuaguggaugggcuauauacaguaaagacaacaguguaagaaucgguuccaagggggauguguuugucauaagggaaccauucauaucaugcucccccuuggaaugcagaaccuucuucuugacucaaggggccuugcuaaaugacaaacauuccaauggaaccauuaaagacaggagcccauaucgaacccuaaugagcuguccuauuggugaaguucccucuccauacaacucaagauuugagucagucgcuuggucagcaagugcuugucaugauggcaucaauuggcuaacaauuggaauuucuggcccagacaauggggcaguggcuguguuaaaguacaacggcauaauaacagacacuaucaagaguuggagaaacaauauauugagaacacaagagucugaaugugcauguguaaaugguucuugcuuuacuguaaugaccgauggaccaaguaauggacaggccucauacaagaucuuuagaauagaaaagggaaagauagucaaaucagucgaaaugaaugccccuaauuaucacuaugaggaaugcuccuguuauccugauucuagugaaaucacaugugugugcagggauaacuggcauggcucgaaucgaccgugggugucuuucaaccagaaucuggaauaucagauaggauacauaugcagugggauuuucggagacaauccacgcccuaaugauaagacaggcaguugugguccaguaucgucuaauggagcaaauggaguaaaaggauuuucauucaaauacggcaaugguguuuggauagggagaacuaaaagcauuaguucaagaaacgguuuugagaugauuugggauccgaacggauggacugggacagacaauaacuucucaauaaagcaagauaucguaggaauaaaugaguggucaggauauagcgggaguuuuguucagcauccagaacuaacagggcuggauuguauaagaccuugcuucuggguugaacuaaucagagggcgacccaaagagaacacaaucuggacuagcgggagcagcauauccuuuugugguguaaacagugacacuguggguuggucuuggccagacggugcugaguugccauuuaccauugacaaguaa

SEQ ID NO: 48785 - RNA, 1410 nt, Artificial Sequence
  derived and/or modified CDS sequence (wt) from neuraminidase__InfluenzaA__ACQ84480
augaauacaaaccaaagaauaauaaccaucgggacagucugucugauaguuggaauaguuagucuauuauugcagauaggaaauauagucucguuauggauaagccauucaauuaagacuggagaaaaaaaccacucugagauaugcaaccaaaauaucauuacauaugaaaacaaaacaugggugaaccaaacuuauguaaacauuagcaauaccaacauugcugauggacagggcgugacuucaauaauacuagccggcaauuccucucuuugcccaauaagugggugggcuauauacagcaaagacaauagcauaaggauugguuccaaaggagacauuuuugucauaagagaaccauucauuucaugcucucacuuggagugcagaaccuuuuuucugacccaaggugcuuugcuaaaugacaggcauucuaauggaaccgucaaggacaggagcccuuaccgaaccuuaaugagcugcccgaccggugaagcuccaucuccguauaauucaagauuugaaucaguugcuuggucagcaagugcaugccaugauggaaugggauggcuaacaaucgggauuuccgguccagauaauggagcaguggcuguuuugaaauacaaugguauaauaacagauacaauaaaaaguuggagaaacaaaauacuaagaacacaagagucagaauguguuuguauaaacgguucauguuuuacuauaaugacugauggcccaagcaaugggcaagccucguacaaaauauucaaaauggagaaagggaagauuauuaagucaguugagcuggaugcaccuaauuaccacuaugaggaaugcuccuguuacccugauacaggcaaaguggugugugugugcagagacaauuggcaugcuucaaaucgaccgugggucucuuucgaucagaaucuugauuaucagauaggguacauaugcagugggguuuucggugauaacccgcguucuaaugaugggaaaggcaauuguggcccaguacuuucuaauggagcaaauggagugaaaggauucucauuuagauauggcaaugguguuuggauaggaagaacuaaaaguaucagcucuagaaguggauuugagaugauuugggauccaaauggauggacggaaacugauaguaguuucucuauaaagcaggauauuauagcauuaacugauuggucaggauacaguggaaguuuuguccaacauccugaauuaacaggaaugaacugcauaaggccuuguuuuuggguagaguuaaucagaggacaacccaaggagagcacaaucuggacuaguggaagcagcauuucuuucuguggcguggacagugaaaccgcaagcuggucauggccagacggagcugaucugccauucaccauugacaaguag

SEQ ID NO: 48786 - RNA, 1410 nt, Artificial Sequence
  derived and/or modified CDS sequence (wt) from neuraminidase__InfluenzaA__ACQ89891
augaauccaaaccaaaagauaauaaccauugguucggucuguaugacaauuggaauggcuaacuuaauauuacaaauuggaaacauaaucucaauauggauuagccacucaauucaacuugggaaucaaaaucagauugaaacaugcaaucaaagcgucauuacuuaugaaaacaacacuuggguaaaucagacauauguuaacaucagcaacaccaacuuugcugcuggacagucagugguuuccgugaaauuagcgggcaauuccucucucugcccuguuaguggaugggcuauauacaguaaagacaacaguauaagaaucgguuccaagggggauguguuugucauaagggaaccauucauaucaugcucccccuuggaaugcagaaccuucuucuugacucaaggggccuugcuaaaugacaaacauuccaauggaaccauuaaagacaggagcccauaucgaacccuaaugagcuguccuauuggugaaguucccucuccauacaacucaagauuugagucagucgcuuggucagcaagugcuugucaugauggcaucaauuggcuaacaauuggaauuucuggcccagacaauggggcaguggcuguguuaaaguacaacggaauaauaacagacacuaucaagaguuggagaaacaauauauugagaacacaagagucugaaugugcauguguaaaugguucuugcuuuacuguaaugaccgauggaccaaguaauggacaggccucauacaagaucuucagaauagaaaagggaaagauagucaaaucagucgaaaugaaugccccuaauuaucacuaugaggaaugcuccuguuauccugauucuagugaaaucacaugugugugcagggauaacuggcauggcucgaaucgaccgugggugucuuucaaccagaaucuggaauaucagauaggauacauaugccgugggauuuucggagacaauccacgcccuaaugauaagacaggcaguugugguccaguaucgucuaauggagcaaauggaguaaaaggauuuucauucaaauacggcaaugguguuuggauagggagaacuaaaagcauuaguucaagaaacgguuuugagaugauuugggauccgaacggauggacugggacagacaauaacuucucaauaaagcaagauaucguaggaauaaaugaguggucaggauauagcgggaguuuuguucagcauccagaacuaacagggcuggauuguauaagaccuugcuucuggguugaacuaaucagagggcgacccaaagagaacacaaucuggacuagcgggagcagcauauccuuuugugguguaaacagugacacuguggguuggucuuggccagacggugcugaguugccauuuaccauugacaaguaa

SEQ ID NO: 48787 - RNA, 1410 nt, Artificial Sequence; identical to SEQ ID NO: 48761
  derived and/or modified CDS sequence (wt) from neuraminidase__InfluenzaA__ACQ89918

SEQ ID NO: 48788 - RNA, 1410 nt, Artificial Sequence
  derived and/or modified CDS sequence (wt) from neuraminidase__InfluenzaA__ACQ89919
augaauccaaaccaaaagauaauaaccauugguucggucuguaugacaauuggaauggcuaacuuaauauuacaaauuggaaacauaaucucaauauggauuagccgcucaauucaacuugggaaucaaaaucagauugaaacaugcaaucaaagcgucauuacuuaugaaaacaacacuuggguaaaucagacauauguuaacaucagcaacaccaacuuugcugcuggacagucagugguuuccgugaaauuagcgggcaauuccucucucugcccuguuaguggaugggcuauauacaguaaagacaacaguguaagaaucgguuccaagggggauguguuugucauaagggaaccauucauaucaugcucccccuuggaaugcagaaccuucuucuugacucaaggggccuugcuaaaugacaaacauuccaauggaaccauuaaagacaggagcccauaucgaacccuaaugagcuguccuauuggugaaguucccucuccauacaacucaagauuugagucagucgcuuggucagcaagugcuugucaugauggcaucaauuggcuaacaauuggaauuucuggcccagacaauggggcaguggcuguguuaaaguacaacggcauaauaacagacacuaucaagaguuggagaaacaauauauugagaacacaagagucugaaugugcauguguaaaugguucuugcuuuacuguaaugaccgauggaccaaguaauggacaggccucauacaagaucuucagaauagaaaagggaaagauagucaaaucagucgaaaugaaugccccuaauuaucacuaugaggaaugcuccuguuauccugauucuagugaaaucacaugugugugcagggauaacuggcauggcucgaaucgaccgugggugucuuucaaccagaaucuggaauaucagauaggauacauaugcagugggauuuucggagacaauccacgcccuaaugauaagacaggcaguugugguccaguaucgucuaauggagcaaauggaguaaaaggauuuucauucaaauacggcaaugguguuuggauagggagaacuaaaagcauuaguucaagaaacgguuuugagaugauuugggauccgaacggauggacugggacagacaauaacuucucaauaaagcaagauaucguaggaauaaaugaguggucaggauauagcgggaguuuuguucagcauccagaacuaacagggcuggauuguauaagaccuugcuucuggguugaacuaaucagagggcgacccaaagagaacacaaucuggacuagcgggagcagcauauccuuuugugguguaaacagugacacuguggguuggucuuggccagacggugcugaguugccauuuaccauugacaaguaa

SEQ ID NO: 48789 - RNA, 1410 nt, Artificial Sequence; identical to SEQ ID NO: 48750
  derived and/or modified CDS sequence (wt) from neuraminidase__InfluenzaA__ACQ89920

SEQ ID NO: 48790 - RNA, 1410 nt, Artificial Sequence; identical to SEQ ID NO: 48750
  derived and/or modified CDS sequence (wt) from neuraminidase__InfluenzaA__ACQ89921

SEQ ID NO: 48791 - RNA, 1410 nt, Artificial Sequence; identical to SEQ ID NO: 48761
  derived and/or modified CDS sequence (wt) from neuraminidase__InfluenzaA__ACQ89922

SEQ ID NO: 48792 - RNA, 1410 nt, Artificial Sequence; identical to SEQ ID NO: 48750
  derived and/or modified CDS sequence (wt) from neuraminidase__InfluenzaA__ACQ89923

SEQ ID NO: 48793 - RNA, 1410 nt, Artificial Sequence; identical to SEQ ID NO: 48749
  derived and/or modified CDS sequence (wt) from neuraminidase__InfluenzaA__ACQ99623

SEQ ID NO: 48794 - RNA, 1410 nt, Artificial Sequence
  derived and/or modified CDS sequence (wt) from neuraminidase__InfluenzaA__ACQ99624
augaauccaaaccaaaagauaauaaccauugguucggucuguaugacaauuggaauggcuaacuuaauauuacaaauuggaaacauaaucucaauauggauuagccacucaauucaacuugggaaucaaaaucagauugaaacaugcaaucaaagcgucauuacuuaugaaaacaacacuuggguaaaucagacauauguuaacaucagcaacaccaacuuugcugcuggacagucagugguuuccgugaaauuagcgggcaauuccucucucugcccuguuaguggaugggcuauauacaguaaagacaacaguauaagaaucgguuccaagggggauguguuugucauaagggaaccauucauaucaugcucccccuuagaaugcagaaccuucuucuugacucaaggggccuugcuaaaugacaaacauuccaauggaaccauuaaagacaggagcccauaucgaacccuaaugagcuguccuauuggugaaguucccucuccauacaacucaagauuugagucagucgcuuggucagcaagugcuugucaugauggcaucaauuggcuaacaauuggaauuucuggcccagacaauggggcaguggcuguguuaaaguacaacggcauaauaacagacacuaucaagaguuggagaaacaauauauugagaacacaagagucugaaugugcauguguaaaugguucuugcuuuacuguaaugaccgauggaccaagugauggacaggccucauacaagaucuucagaauagaaaagggaaagauagucaaaucagucgaaaugaaugccccuaauuaucacuaugaggaaugcuccuguuauccugauucuagugaaaucacaugugugugcagggauaacuggcauggcucgaaucgaccgugggugucuuucaaccagaaucuggaauaucagauaggauacauaugcagugggauuuucggagacaauccacgcccuaaugauaagacaggcaguugugguccaguaucgucuaauggagcaaauggaguaaaaggauuuucauucaaauacggcaaugguguuuggauagggagaacuaaaagcauuaguucaagaaacgguuuugagaugauuugggauccgaacggauggacugggacagacaauaacuucucaauaaagcaagauaucguaggaauaaaugaguggucaggauauagcgggaguuuuguucagcauccagaacuaacagggcuggauuguauaagaccuugcuucuggguugaacuaaucagagggcgacccaaagagaacacaaucuggacuagcgggagcagcauauccuuuugugguguaaacagugacacuguggguuggucuuggccagacggugcugaguugccauuuaccauugacaaguaa

SEQ ID NO: 48795 - RNA, 1410 nt, Artificial Sequence; identical to SEQ ID NO: 48749
  derived and/or modified CDS sequence (wt) from neuraminidase__InfluenzaA__ACQ99626

SEQ ID NO: 48796 - RNA, 1410 nt, Artificial Sequence; identical to SEQ ID NO: 48749
  derived and/or modified CDS sequence (wt) from neuraminidase__InfluenzaA__ACQ99627

SEQ ID NO: 48797 - RNA, 1410 nt, Artificial Sequence; identical to SEQ ID NO: 48749
  derived and/or modified CDS sequence (wt) from neuraminidase__InfluenzaA__ACQ99628

SEQ ID NO: 48798 - RNA, 1410 nt, Artificial Sequence; identical to SEQ ID NO: 48749
  derived and/or modified CDS sequence (wt) from neuraminidase__InfluenzaA__ACQ99629

SEQ ID NO: 48799 - RNA, 1410 nt, Artificial Sequence; identical to SEQ ID NO: 48749
  derived and/or modified CDS sequence (wt) from neuraminidase__InfluenzaA__ACQ99630

SEQ ID NO: 48800 - RNA, 1410 nt, Artificial Sequence
  derived and/or modified CDS sequence (wt) from neuraminidase__InfluenzaA__ACQ99632
augaauccaaaccaaaagauaauaaccauugguucggucuguaugacaauuggaauggcuaacuuaauauuacaaauuggaaacauaaucucaauauggauuagccacucaauucaacuugggaaucaaaaucagauugaaacaugcaaucaaagcgucauuacuuaugaaaacaacacuuggguaaaucagacauauguuaacaucagcaacaccaacuuugcugcuggacagucagugguuuccgugaaauuagcgggcaauuccucucucugcccuguuaguggaugggcuauauacaguaaagacaacaguauaagaaucgguuccaagggggauguguuugucauaagggaaccauucauaucaugcucccccuuggaaugcagaaccuucuucuugacucaaggggccuugcuaaaugacaaacauuccaauggaaccauuaaagauaggagcccauaucgaacccuaaugagcuguccuauuggugaaguucccucuccauacaacucaagauuugagucagucgcuuggucagcaagugcuugucaugauggcaucaauuggcuaacaauuggaauuucuggcccagacaauggggcaguggcuguguuaaaguacaacggcauaauaacagacacuaucaagaguuggagaaacaauauauugagaacacaagagucugaaugugcauguguaaaugguucuugcuuuacuguaaugaccgauggaccaagugauggacaggccucauacaagaucuucagaauagaaaagggaaagauagucaaaucagucgaaaugaaugccccuaauuaucacuaugaggaaugcuccuguuauccugauucuagugaaaucacaugugugugcagggauaacuggcauggcucgaaucgaccgugggugucuuucaaccagaaucuggaauaucagauaggauacauaugcagugggauuuucggagacaauccacgcccuaaugauaagacaggcaguugugguccaguaucgucuaauggagcaaauggaguaaaaggauuuucauucaaauacggcaaugguguuuggauagggagaacuaaaagcauuaguucaagaaacgguuuugagaugauuugggauccgaacggauggacugggacagacaauaacuucucaauaaagcaagauaucguaggaauaaaugaguggucaggauauagcgggaguuuuguucagcauccagaacuaacagggcuggauuguauaagaccuugcuucuggguugaacuaaucagagggcgacccaaagagaacacaaucuggacuagcgggagcagcauauccuuuugugguguaaacagugacacuguggguuggucuuggccagacggugcugaguugccauuuaccauugacaaguaa

SEQ ID NO: 48801 - RNA, 1410 nt, Artificial Sequence; identical to SEQ ID NO: 48800
  derived and/or modified CDS sequence (wt) from neuraminidase__InfluenzaA__ACQ99633

SEQ ID NO: 48802 - RNA, 1410 nt, Artificial Sequence; identical to SEQ ID NO: 48749
  derived and/or modified CDS sequence (wt) from neuraminidase__InfluenzaA__ACQ99635

SEQ ID NO: 48803 - RNA, 1410 nt, Artificial Sequence; identical to SEQ ID NO: 48749
  derived and/or modified CDS sequence (wt) from neuraminidase__InfluenzaA__ACQ99636

SEQ ID NO: 48804 - RNA, 1410 nt, Artificial Sequence
  derived and/or modified CDS sequence (wt) from neuraminidase__InfluenzaA__ACQ99684
augaauccaaaccaaaagauaauaaccauugguucggucuguaugacaauuggaauggcuaacuuaauauuacaaauuggaaacauaaucucaauauggauuagccacucaauucaacuugggaaucaaaaucagauugaaacaugcaaucaaagcgucauuacuuaugaaaacaacacuuggguaaaucagacauauguuaacaucagcaacaccaacuuugcugcuggacagucagugguuuccgugaaauuagcgggcaauuccucucucugcccuguuaguggaugggcuauauacaguaaagacaacaguauaagaaucgguuccaagggggauguguuugucauaagggaaccauucauaucaugcucccccuuggaaugcagaaccuucuucuugacucaaggggcccugcuaaaugacaaacauuccaauggaaccauuaaagacaggagcccauaucgaacccuaaugagcuguccuauuggugaaguucccucuccauacaacucaagauuugagucagucgcuuggucagcaagugcuugucaugauggcaucaauuggcuaacaauuggaauuucuggcccagacaauggggcaguggcuguguuaaaguacaacggcauaauaacagacacuaucaagaguuggagaaacaauauauugagaacacaagagucugaaugugcauguguaaaugguucuugcuuuacuguaaugaccgauggaccaagugaugaacaggccucauacaagaucuucagaauagaaaagggaaagauagucaaaucagucgaaaugaaugccccuaauuaucacuaugaggaaugcuccuguuauccugauucuagugaaaucacaugugugugcagggauaacuggcauggcucgaaucgaccgugggugucuuucaaccagaaucuggaauaucagauaggauacauaugcagugggauuuucggagacaauccacgcccuaaugauaagacaggcaguugugguccaguaucgucuaauggagcaaauggaguaaaaggauuuucauucaaauacggcaaugguguuuggauagggagaacuaaaagcauuaguucaagaaacgguuuugagaugauuugggauccgaacggauggacugggacagacaauaacuucucaauaaagcaagauaucguaggaauaaaugaguggucaggauauagcgggaguuuuguucagcauccagaacuaacagggcuggauuguauaagaccuugcuucuggguugaacuaaucagagggcgacccaaagagaacacaaucuggacuagcgggagcagcauauccuuuugugguguaaacagugacacuguggguuggucuuggccagacggugcugaguugccauuuaccauugacaaguaa

SEQ ID NO: 48805 - RNA, 1410 nt, Artificial Sequence
  derived and/or modified CDS sequence (wt) from neuraminidase__InfluenzaA__ACQ99824
augaauacaaaucaaagaauaauaaccauugggacaaucugucuaauaguuggaauaauuagucuauuauugcagauaggaaauauaaucuuguuauggaugagccauucaauucagacuggagaaaaaagccauccuaagguaugcaaccaaagugucauuaccuaugaaaacaacacaugggugaaccagacuuauguaaacauuagcaauaccaauauugcugcuggacagggugugacuccaauaauacuagccggcaauuccucucuuugcccaaucagugggugggcuauauacagcaaagacaauagcauaaggauugguuccaaaggagacauuuuugucaugagagagccauucauuucaugcucucacuuggaaugcagaaccuuuuuucugacccaaggcgcuuugcugaaugacaggcauucuaauggaaccgucaaggacaggaguccuuauagaaccuuaaugagcugccccaucggugaagcuccaucuccguacaauucaagguucgaaucaguugcuuggucagcaagugcaugccaugauggaaugggauggcuaacaaucgggauuuccgguccagauaauggagcaguggcuguuuuaaaauacaaugguauaauaacagauacaauaaaaaguuggagaaacaaaauauuaagaacacaagagucugaauguguuuguauaaacgguucguguuuuacuauaaugacugacggcccaagcaaugggcaagccucguacaaauuauucaaaauggagaaagggaagauuauuaagucaauugagcuggaugcaccuaauuaccacuaugaggaaugcuccuguuacccugauacaggcaaaguggugugugugugcagagacaauuggcaugcuucgaaucgaccaugggucucuuucgaucagaaucuugauuaucaaauaggguacauaugcagugggguuuucggugauaauccgcguucuaaugaugggaaaggcaauuguggcccaguacuuucuaauggagcaaauggagugaagggguuuucauuuagauauggcaaugguguuuggauaggaagaacuaaaaguaucagcucuagaaguggauuugagaugauuugggauccuaauggauggacagaaacugauaguaguuucucuaugaagcaagauauuauagcauuaacugauuggucgggauacaguggaaguuuuguccaacauccugaauuaacaggaaugaacugcauaaggccuuguuucuggguagaguuaaucagagggcaacccaaggagagcacaaucuggacuaguggaagcagcauuucuuucuguggcgugaacaguggcacugcaagcuggucauggccagacggagcugaucugccauucaccauugacaaguag

SEQ ID NO: 48806 - RNA, 1410 nt, Artificial Sequence
  derived and/or modified CDS sequence (wt) from neuraminidase__InfluenzaA__ACR01015
augaauccaaaccaaaagauaauaaccauugguucggucuguaugacaauuggaauggcuaacuuaauauuacaaauuggaaacauaaucucaauauggauuagccacucaauucaacuugggaaucaaaaucagauugaaacaugcaaucaaagcgucauuacuuaugaaaacaacacuuggguaaaucagacauauguuaacaucagcaacaccaacuuugcugcuggacagucagugguuuccgugaaauuagcgggcaauuccucucucugcccuguuaguggaugggcuauauacaguaaagacaacaguauaagaaucgguuccaagggggauguguuugucauaagggaaccauucauaucaugcucccccuuggaaugcagaaccuucuucuugacucaaggggcccugcuaaaugacaaacauuccaauggaaccauuaaagacaggagcccauaucgaacccuaaugagcuguccuauuggugaaguucccucuccauacaacucaagauuugagucagucgcuuggucagcaagugcuugucaugauggcaucaauuggcuaacaauuggaauuucuggcccagacaauggggcaguggcuguguuaaaguacaacggcauaauaacagacacuaucaagaguuggagaaacaauauauugagaacacaagagucugaaugugcauguguaaaugguucuugcuuuacuguaaugaccgauggaccaagugauggacaggccucauacaagaucuucagaauagaaaagggaaagauagucaaaucagucgaaaugaaugccccuaauuaucacuaugaggaaugcuccuguuauccugauucuagugaaaucacaugugugugcagggauaacuggcauggcucgaaucgaccgugggugucuuucaaccagaaucuggaauaucagauaggauacauaugcagugggauuuucggagacaauccacgcccuaaugauaagacaggcaguugugguccaguaucgucuaauggagcaaauggaguaaaaggauuuucauucaaauacggcaaugguguuuggauagggagaacuaaaagcauuaguucaagaaacgguuuugagaugauuugggauccgaacggauggacugggacagacaauaacuucucaauaaagcaagauaucguaggaauaaaugaguggucaggauauagcgggaguuuuguucagcauccagaacuaacagggcuggauuguauaagaccuugcuucuggguugaacuaaucagagggcgacccaaagagaacacaaucuggacuagcgggagcagcauauccuuuugugguguaaacagugacacuguggguuggucuuggccagacggugcugaguugccauuuaccauugacaaguaa

SEQ ID NO: 48807 - RNA, 1410 nt, Artificial Sequence; identical to SEQ ID NO: 48750
  derived and/or modified CDS sequence (wt) from neuraminidase__InfluenzaA__ACR08422

SEQ ID NO: 48808 - RNA, 1410 nt, Artificial Sequence; identical to SEQ ID NO: 48750
  derived and/or modified CDS sequence (wt) from neuraminidase__InfluenzaA__ACR08432

SEQ ID NO: 48809 - RNA, 1410 nt, Artificial Sequence; identical to SEQ ID NO: 48750
  derived and/or modified CDS sequence (wt) from neuraminidase__InfluenzaA__ACR08442

SEQ ID NO: 48810 - RNA, 1410 nt, Artificial Sequence; identical to SEQ ID NO: 48750
  derived and/or modified CDS sequence (wt) from neuraminidase__InfluenzaA__ACR08452

SEQ ID NO: 48811 - RNA, 1410 nt, Artificial Sequence
  derived and/or modified CDS sequence (wt) from neuraminidase__InfluenzaA__ACR08462
augaguccaaaccaaaagauaauaaccauugguucggucuguaugacaauuggaauggcuaacuuaauauuacaaauuggaaacauaaucucaauauggauuagccacucaauucaacuugggaaucaaaaucagauugaaacaugcaaucaaagcgucauuacuuaugaaaacaacacuuggguaaaucagacauauguuaacaucagcaacaccaacuuugcugcuggacagucagugguuuccgugaaauuagcgggcaauuccucucucugcccuguuaguggaugggcuauauacaguaaagacaacaguguaagaaucgguuccaagggggauguguuugucauaagggaaccauucauaucaugcucccccuuggaaugcagaaccuucuucuugacucaaggggccuugcuaaaugacaaacauuccaauggaaccauuaaagacaggagcccauaucgaacccuaaugagcuguccuauuggugaaguucccucuccauacaacucaagauuugagucagucgcuuggucagcaagugcuugucaugauggcaucaauuggcuaacaauuggaauuucuggcccagacaauggggcaguggcuguguuaaaguacaacggcauaauaacagacacuaucaagaguuggagaaacaauauauugagaacacaagagucugaaugugcauguguaaaugguucuugcuuuacuguaaugaccgauggaccaaguaauggacaggccucauacaagaucuucagaauagaaaagggaaagauagucaaaucagucgaaaugaaugccccuaauuaucacuaugaggaaugcuccuguuauccugauucuagugaaaucacaugugugugcagggauaacuggcauggcucgaaucgaccgugggugucuuucaaccagaaucuggaauaucagauaggauacauaugcagugggauuuucggagacaauccacgcccuaaugauaagacaggcaguugugguccaguaucgucuaauggagcaaauggaguaaaaggauuuucauucaaauacggcaaugguguuuggauagggagaacuaaaagcauuaguucaagaaacgguuuugagaugauuugggauccgaacggauggacugggacagacaauaacuucucaauaaagcaagauaucguaggaauaaaugaguggucaggauauagcgggaguuuuguucagcauccagaacuaacagggcuggauuguauaagaccuugcuucuggguugaacuaaucagagggcgacccaaagagaacacaaucuggacuagcgggagcagcauauccuuuugugguguaaacagugacacuguggguuggucuuggccagacggugcugaguugccauuuaccauugacaaguaa

SEQ ID NO: 48812 - RNA, 1410 nt, Artificial Sequence
  derived and/or modified CDS sequence (wt) from neuraminidase__InfluenzaA__ACR08565
augaauccaaaccaaaagauaauaaccauugguucggucuguaugacaauuggaauggcuaacuuaauauuacaaauuggaaacauaaucucaauauggauuagccacucaauucaacuugggaaucaaaaucagauugaaacaugcaaucaaagcgucauuacuuaugaaaacaacacuuggguaaaucagacauauguuaacaucagcaacaccaacuuugcugcuggacagucagugguucccgugaaauuagcgggcaauuccucucucugcccuguuaguggaugggcuauauacaguaaagacaacaguguaagaaucgguuccaagggggauguguuugucauaagggaaccauucauaucaugcucccccuuggaaugcagaaccuucuucuugacucaaggggccuugcuaaaugacaaacauuccaauggaaccauuaaagacaggagcccauaucgaacccuaaugagcuguccuauuggugaaguucccucuccauacaacucaagauuugagucagucgcuuggucagcaagugcuugucaugauggcaucaauuggcuaacaauuggaauuucuggcccagacaauggggcaguggcuguguuaaaguacaacggcauaauaacagacacuaucaagaguuggagaaacaauauauugagaacacaagagucugaaugugcauguguaaaugguucuugcuuuacuguaaugaccgauggaccaaguaauggacaggccucauacaagaucuucagaauagaaaagggaaagauagucaaaucagucgaaaugaaugccccuaauuaucacuaugaggaaugcuccuguuauccugauucuagugaaaucacaugugugugcagggauaacuggcauggcucgaaucgaccgugggugucuuucaaccagaaucuggaauaucagauaggauacauaugcagugggauuuucggagacaauccacgcccuaaugauaagacaggcaguugugguccaguaucgucuaauggagcaaauggaguaaaaggauuuucauucaaauacggcaaugguguuuggauagggagaacuaaaagcauuaguucaagaaacgguuuugagaugauuugggauccgaacggauggacugggacagacaauaacuucucaauaaagcaagauaucguaggaauaaaugaguggucaggauauagcgggaguuuuguucagcauccagaacuaacagggcuggauuguauaagaccuugcuucuggguugaacuaaucagagggcgacccaaagagaacacaaucuggacuagcgggagcagcauauccuuuugugguguaaacagugacacuguggguuggucuuggccagacggugcugaguugccauuuaccauugacaaguaa

SEQ ID NO: 48813 - RNA, 1410 nt, Artificial Sequence
  derived and/or modified CDS sequence (wt) from neuraminidase__InfluenzaA__ACR08566
augaauccaaaccaaaagauaauaaccauugguucggucuguaugacaauuggaauggcuaacuuaauauuacaaauuggaaacauaaucucaauauggauuagccacucaauucaacuugggaaucaaaaucagauugaaacaugcaaucaaagcgucauuacuuaugaaaacaacacuuggguaaaucagacauauguuaacaucagcaacaccaacuuugcugcuggacagucagugguuuccgugaaauuagcgggcaauuccucucucugcccuguuaguggaugggcuauauacaguaaagacaacaguguaagaaucgguuccaagggggauguguuugucauaagagaaccauucauaucaugcucccccuuggaaugcagaaccuucuucuugacucaaggggccuugcuaaaugacaaacauuccaauggaaccauuaaagacaggagcccauaucgaacccuaaugagcuguccuauuggugaaguucccucuccauacaacucaagauuugagucagucgcuuggucagcaagugcuugucaugauggcaucaauuggcuaacaauuggaauuucuggcccagacaauggggcaguggcuguguuaaaguacaacggcauaauaacagacacuaucaagaguuggagaaacaauauauugagaacacaagagucugaaugugcauguguaaaugguucuugcuuuacuguaaugaccgauggaccaaguaauggacaggccucauacaagaucuucagaauagaaaagggaaagauagucaaaucagucgaaaugaaugccccuaauuaucacuaugaggaaugcuccuguuauccugauucuagugaaaucacaugugugugcagggauaacuggcauggcucgaaucgaccgugggugucuuucaaccagaaucuggaauaucagauaggauacauaugcagugggauuuucggagacaauccacgcccuaaugauaagacaggcaguugugguccaguaucgucuaauggagcaaauggaguaaaaggauuuucauucaaauacggcaaugguguuuggauagggagaacuaaaagcauuaguucaagaaacgguuuugagaugauuugggauccgaacggauggacugggacagacaauaacuucucaauaaagcaagauaucguaggaauaaaugaguggucaggauauagcgggaguuuuguucagcauccagaacuaacagggcuggauuguauaagaccuugcuucuggguugaacuaaucagagggcgacccaaagagaacacaaucuggacuagcgggagcagcauauccuuuugugguguaaacagugacacuguggguuggucuuggccagacggugcugaguugccauuuaccauugacaaguaa

SEQ ID NO: 48814 - RNA, 1410 nt, Artificial Sequence
  derived and/or modified CDS sequence (wt) from neuraminidase__InfluenzaA__ACR08567
augaauccaaaccaaaagauaauaaccauugguucggucuguaugacaauuggaauggcuaacuuaauauuacaaauuggaaacauaaucucaauauggauuagccacucaauucaacuugggaaucaaaaucagauugaaacaugcaaucaaagcgucauuacuuaugaaaacaacacuuggguaaaucagacauauguuaacaucagcaacaccaacuuugcugcuggacagucagugguuuccgugaaauuagcgggcaauuccucucucugcccuguuaguggaugggcuauauacaguaaagacaacaguauaagaaucgguuccaagggggauguguuugucauaagggaaccauucauaucaugcucccccuuggaaugcagaaccuucuucuugacucaaggggccuugcuaaaugacaaacauuccaauggaaccauuaaagacaggagcccauaucgaacccuaaugagcuguccuauuggugaaguucccucuccauacaacucaagauuugagucagucgcuuggucagcaagugcuugucaugauggcaucaauuggcuaacaauuggaauuucuggcccagacaauggggcaguggcuguguuaaaguacaacggcauaauaacagacacuaucaagaguuggagaaacaauauauugagaacacaagagucugaaugugcauguguaaaugguucuugcuuuacuguaaugaccgauggaccaagugauggacaggccucauacaagaucuucagaauagaaaagggaaagauagucaaaucagucgaaaugaaugccccuaauuaucacuaugaggaaugcuccuguuauccugauucuagugaaaucacauguguaugcagggauaacuggcauggcucgaaucgaccgugggugucuuucaaccagaaucuggaauaucagauaggauacauaugcagugggauuuucggagacaauccacgcccuaaugauaagacaggcaguugugguccaguaucgucuaauggagcaaauggaguaaaaggauuuucauucaaauacggcaaugguguuuggauagggagaacuaaaagcauuaguucaagaaacgguuuugagaugauuugggauccgaacggauggacugggacagacaauaacuucucaauaaagcaagauaucguaggaauaaaugaguggucaggauauagcgggaguuuuguucagcauccagaacuaacagggcuggauuguauaagaccuugcuucuggguugaacuaaucagagggcgacccaaagagaacacaaucuggacuagcgggagcagcauauccuuuugugguguaaacagugacacuguggguuggucuuggccagacggugcugaguugccauuuaccauugacaaguaa

SEQ ID NO: 48815 - RNA, 1410 nt, Artificial Sequence
  derived and/or modified CDS sequence (wt) from neuraminidase__InfluenzaA__ACR08568
augaauccaaaccaaaagauaauaaccauugguucggucuguaugacaauuggaauggcuaacuuaauauuacaaauuggaaacauaaucucaauauggauuagccacucaauucaacuugggaaucaaaaucagauugaaacaugcaaucaaagcgucauuacuuaugaaaacaacacuuggguaaaucagacauauguuaacaucagcaacaccaacuuugcugcuggacagucagugguuuccgugaaauuagcgggcaauuccucucucugcccuguuaguggaugggcuauauacaguaaagacaacaguguaagaaucgguuccaagggggauguguuugucauaagggaaccauucauaucaugcucccccuuggaaugcagaaccuucuucuugacucaaggggccuugcuaaaugacaaacauuccaauggaaccauuaaagacaggagcccauaucgaacccuaaugagcuguccuauuggugaaguucccucuccauacaacucaagauuugagucagucgcuuggucagcaagugcuugucaugauggcaucaauuggcuaacaauuggaauuucuggcccagacaauggggcaguggcuguguuaaaguacaacggcauaauaacagacacuaucaagaguuggagaaacaauauauugagaacacaagagucugaaugugcauguguaaaugguucuugcuuuacuguaaugaccgauggaccaaguaauggacaggccucauacaagaucuucagaauagaaaagggaaagauagucaaaucagucgaaaugaaugccccuaauuaucacuaugaggaaugcuccuguuauccugauucuagugaaaucacaugugugugcagggauaacuggcauggcucgaaucgaccgugggugucuuucaaccagaaucuggaauaucagauaggcuacauaugcagugggauuuucggagacaauccacgcccuaaugauaagacaggcaguugugguccaguaucgucuaauggagcaaauggaguaaaaggauuuucauucaaauacggcaaugguguuuggauagggagaacuaaaagcauuaguucaagaaacgguuuugagaugauuugggauccgaacggauggacugggacagacaauaacuucucaauaaagcaagauaucguaggaauaaaugaguggucaggauauagcgggaguuuuguucagcauccagaacuaacagggcuggauuguauaagaccuugcuucuggguugaacuaaucagagggcgacccaaagagaacacaaucuggacuagcgggagcagcauauccuuuugugguguaaacagugacacuguggguuggucuuggccagacggugcugaguugccauuuaccauugacaaguaa

SEQ ID NO: 48816 - RNA, 1410 nt, Artificial Sequence; identical to SEQ ID NO: 48749
  derived and/or modified CDS sequence (wt) from neuraminidase__InfluenzaA__ACR08569

SEQ ID NO: 48817 - RNA, 1410 nt, Artificial Sequence; identical to SEQ ID NO: 48750
  derived and/or modified CDS sequence (wt) from neuraminidase__InfluenzaA__ACR08570

SEQ ID NO: 48818 - RNA, 1410 nt, Artificial Sequence; identical to SEQ ID NO: 48749
  derived and/or modified CDS sequence (wt) from neuraminidase__InfluenzaA__ACR08571

SEQ ID NO: 48819 - RNA, 1410 nt, Artificial Sequence; identical to SEQ ID NO: 48749
  derived and/or modified CDS sequence (wt) from neuraminidase__InfluenzaA__ACR08572

SEQ ID NO: 48820 - RNA, 1410 nt, Artificial Sequence; identical to SEQ ID NO: 48770
  derived and/or modified CDS sequence (wt) from neuraminidase__InfluenzaA__ACR08573

SEQ ID NO: 48821 - RNA, 1410 nt, Artificial Sequence; identical to SEQ ID NO: 48749
  derived and/or modified CDS sequence (wt) from neuraminidase__InfluenzaA__ACR08574

SEQ ID NO: 48822 - RNA, 1410 nt, Artificial Sequence; identical to SEQ ID NO: 48750
  derived and/or modified CDS sequence (wt) from neuraminidase__InfluenzaA__ACR08576

SEQ ID NO: 48823 - RNA, 1410 nt, Artificial Sequence; identical to SEQ ID NO: 48749
  derived and/or modified CDS sequence (wt) from neuraminidase__InfluenzaA__ACR08577

SEQ ID NO: 48824 - RNA, 1410 nt, Artificial Sequence; identical to SEQ ID NO: 48749
  derived and/or modified CDS sequence (wt) from neuraminidase__InfluenzaA__ACR09378

SEQ ID NO: 48825 - RNA, 1410 nt, Artificial Sequence; identical to SEQ ID NO: 48749
  derived and/or modified CDS sequence (wt) from neuraminidase__InfluenzaA__ACR09379

SEQ ID NO: 48826 - RNA, 1410 nt, Artificial Sequence
  derived and/or modified CDS sequence (wt) from neuraminidase__InfluenzaA__ACR09380
augaauccaaaccaaaagauaauaaccauugguucggucuguaugacaauuggaauggcuaacuuaauauuacaaauuggaaacauaaucucaauauggauuagccacucaauucaacuugggaaucaaaaucagauugaaacaugcaaucaaagcgucauuacuuaugaaaacaacacuuggguaaaucagacauauguuaacaucagcaacaccaacuuugcugcuggacagucagugguuuccgugaaauuagcgggcaauuccucucucugcccuguuaguggaugggcuauauacaguaaagacaacaguauaagaaucgguuccaagggggauguguuugucauaagggaaccauucauaucaugcucccccuuggaaugcagaaccuucuucuugacucaaggggccuugcuaaaugacaaacauuccaauggaaccauuaaagacaggagcccauaucgaacccuaaugagcuguccuauuggugaaguucccucuccauacaacucaagauuugagucagucgcuuggucagcaagugcuugucaugauggcaucaauuggcuaacaauuggaauuucuggcccagacaauggggcaguggcuguguuaaaguacaacggcauaauaacagacacuaucaagaguuggagaaacaauauauugagaacacaagagucugaaugugcauguguaaaugguucuugcuuuacuguaaugaccgauggaccaagugauggacaggccucguacaagaucuucagaauagaaaagggaaagauagucaaaucagucgaaaugaaugccccuaauuaucacuaugaggaaugcuccuguuauccugauucuagugaaaucacaugugugugcagggauaacuggcauggcucgaaucgaccgugggugucuuucaaccagaaucuggaauaucagauaggauacauaugcagugggauuuucggagacaauccacgcccuaaugauaagacaggcaguugugguccaguaucgucuaauggagcaaauggaguaaaaggauuuucauucaaauacggcaaugguguuuggauagggagaacuaaaagcauuaguucaagaaacgguuuugagaugauuugggauccgaacggauggacugggacagacaauaacuucucaauaaagcaagauaucguaggaauaaaugaguggucaggauauagcgggaguuuuguucagcauccagaacuaacagggcuggauuguauaagaccuugcuucuggguugaacuaaucagagggcgacccaaagagaacacaaucuggacuagcgggagcagcauauccuuuugugguguaaacagugacacuguggguuggucuuggccagacggugcugaguugccauuuaccauugacaaguaa

SEQ ID NO: 48827 - RNA, 1410 nt, Artificial Sequence; identical to SEQ ID NO: 48783
  derived and/or modified CDS sequence (wt) from neuraminidase__InfluenzaA__ACR09381

SEQ ID NO: 48828 - RNA, 1410 nt, Artificial Sequence; identical to SEQ ID NO: 48749
  derived and/or modified CDS sequence (wt) from neuraminidase__InfluenzaA__ACR09382

SEQ ID NO: 48829 - RNA, 1410 nt, Artificial Sequence; identical to SEQ ID NO: 48800
  derived and/or modified CDS sequence (wt) from neuraminidase__InfluenzaA__ACR09383

SEQ ID NO: 48830 - RNA, 1410 nt, Artificial Sequence; identical to SEQ ID NO: 48749
  derived and/or modified CDS sequence (wt) from neuraminidase__InfluenzaA__ACR09384

SEQ ID NO: 48831 - RNA, 1410 nt, Artificial Sequence; identical to SEQ ID NO: 48750
  derived and/or modified CDS sequence (wt) from neuraminidase__InfluenzaA__ACR09385

SEQ ID NO: 48832 - RNA, 1410 nt, Artificial Sequence
  derived and/or modified CDS sequence (wt) from neuraminidase__InfluenzaA__ACR09386
augaauccaaaccaaaagauaauaaccauugguucggucuguaugacaauuggaauggcuaacuuaauauuacaaauuggaaacauaaucucaauauggauuagccacucaauucaacuugggaaucaaaaucagauugaaacaugcaaucaaagcgucauuacuuaugaaaacaacacuuggguaaaucagacauauguuaacaucagcaacaccaacuuugcugcuggacagucagugguuuccgugaaauuagcgggcaauuccucucucugcccuguuaguggaugggcuauauacaguaaagacaacaguguaagaaucgguuccaagggggauguguuugucauaagggaaccauucauaucaugcucccccuuggaaugcagaaccuuuuucuugacucaaggggccuugcuaaaugacaaacauuccaauggaaccauuaaagacaggagcccauaucgaacccuaaugagcuguccuauuggugaaguucccucuccauacaacucaagauuugagucagucgcuuggucagcaagugcuugucaugauggcaucaauuggcuaacaauuggaauuucuggcccagacaauggggcaguggcuguguuaaaguacaacggcauaauaacagacacuaucaagaguuggagaaacaauauauugagaacacaagagucugaaugugcauguguaaaugguucuugcuuuacuguaaugaccgauggaccaaguaauggacaggccucauacaagaucuucagaauagaaaagggaaagauagucaaaucagucgaaaugaaugccccuaauuaucacuaugaggaaugcuccuguuauccugauucuagugaaaucacaugugugugcagggauaacuggcauggcucgaaucgaccgugggugucuuucaaccagaaucuggaauaucagauaggauacauaugcagugggauuuucggagacaauccacgcccuaaugauaagacaggcaguugugguccaguaucgucuaauggagcaaauggaguaaaaggauuuucauucaaauacggcaaugguguuuggauagggagaacuaaaagcauuaguucaagaaacgguuuugagaugauuugggauccgaacggauggacugggacagacaauaacuucucaauaaagcaagauaucguaggaauaaaugaguggucaggauauagcgggaguuuuguucagcauccagaacuaacagggcuggauuguauaagaccuugcuucuggguugaacuaaucagagggcgacccaaagagaacacaaucuggacuagcgggagcagcauauccuuuugugguguaaacagugacacuguggguuggucuuggccagacggugcugaguugccauuuaccauugacaaguaa

SEQ ID NO: 48833 - RNA, 1410 nt, Artificial Sequence; identical to SEQ ID NO: 48750
  derived and/or modified CDS sequence (wt) from neuraminidase__InfluenzaA__ACR10189

SEQ ID NO: 48834 - RNA, 1410 nt, Artificial Sequence; identical to SEQ ID NO: 48750
  derived and/or modified CDS sequence (wt) from neuraminidase__InfluenzaA__ACR10226

SEQ ID NO: 48835 - RNA, 1410 nt, Artificial Sequence
  derived and/or modified CDS sequence (wt) from neuraminidase__InfluenzaA__ACR10236
augaauccaaaccaaaagauaauaaccauugguucggucuguaugacaauuggaauggcuaacuuaauauuacaaauuggaaacauaaucucaauauggauuagccacucaauucaacuugggaaucaaaaucagauugaaacaugcaaucaaagcgucauuacuuaugaaaacaacacuuggguaaaucagacauauguuaacaucagcaacaccaacuuugcugcuggacagucagugguuuccgugaaauuagcgggcaauuccucucucugcccuguuaguggaugggcuauauacaguaaagacaacaguguaagaaucgguuccaagggggauguguuugucauaagagaaccauucauaucaugcucccccuuggaaugcagaaccuucuucuugacucaaggggccuugcuaaaugacaaacauuccaauggaaccauuaaagacaggagcccauaucgaacccuaaugagcuguccuauuggugaaguucccucuccauacaacucaagauuugagucagucgcuuggucagcaagugcuugucaugauggcaucaauuggcuaacaauuggaauuucuggcccagacaauggggcaguggcuguguuaaaguacaacggcauaauaacagacacuaucaagaguuggagaaacaauauauugagaacacaagagucugaaugugcauguguaaaugguucuugcuuuacuguaaugaccgauggaccaaguaauggacaggccucauacaagaucuucagaauagaaaagggaaagauagucaaaucagucgaaaugaaugccccuaauuaucacuaugaggaaugcuccuguuauccugauucuagugaaaucacaugugugugcagggauaacuggcauggcucgaaucgaccgugggugucuuucaaccagaaucuggaauaucagauaggauacauaugcagugggauuuucggagacaauccacgcccuaaugauaagacaggcaguugugguccaguaucgucuaauggagcaaauggaguaaaaggauuuucauucaaauacggcaaugguguuuggauagggagaacuaaaagcauuaguucaagaaacgguuuugagaugauuugggauccgaacggauggacugggacagacaauaacuucucaauaaagcaagacaucguaggaauaaaugaguggucaggauauagcgggaguuuuguucagcauccagaacuaacagggcuggauuguauaagaccuugcuucuggguugaacuaaucagagggcgacccaaagagaacacaaucuggacuagcgggagcagcauauccuuuugugguguaaacagugacacuguggguuggucuuggccagacggugcugaguugccauuuaccauugacaaguaa

SEQ ID NO: 48836 - RNA, 1410 nt, Artificial Sequence; identical to SEQ ID NO: 48835
  derived and/or modified CDS sequence (wt) from neuraminidase__InfluenzaA__ACR10237

SEQ ID NO: 48837 - RNA, 1410 nt, Artificial Sequence
  derived and/or modified CDS sequence (wt) from neuraminidase__InfluenzaA__ACR15186
augaauccaaaucaaaagauaauaacgauuggcucuguuucucucaccauuuccacaauaugcuucuucaugcaaauugccaucuuaauaacuacuguaacauugcauuucaagcaauaugaauucaacucccccccaaacaaccaagugaugcugugugaaccaacaauaauagaaagaaacauaacagagauaguguaucugaccaacaccaccauagagaaggaaauaugccccaaacuagcagaauacagaaaguggucaaagccgcaauguaauauuacaggauuugcaccuuuuucuaaggacaauucgauuaggcuuuccgcugguggggacaucugggugacaagagaaccuuaugugucaugcgauccugacaaguguuaucaauuugcccuuggacagggaacaacacuaaacaacgugcauucaaaugacacaguacgugauaggaccccuuaucggacccuauugaugaaugaguuagguguuccauuucaucuggggaccaagcaagugugcauagcaugguccagcucaaguugucacgauggaaaagcauggcugcauguuuguguaacgggggaugauaaaaaugcaacugcuagcuucauuuacaaugggaggcuuguagauaguauuguuucaugguccaaagaaauccucaggacccaggagucagaaugcguuuguaucaauggaacuuguacaguaguaaugacugaugggagugcuucaggaaaagcugauacuaaaauacuauucauugaggaggggaaaaucguucauacuagcacauugucaggaagugcucagcaugucgaggagugcuccugcuauccucgacauccuggugucagaugugucugcagagacaacuggagaggcuccaauaggcccauaguagauauaaacaugaaggauuauagcauuguuuccaguuaugugugcucaggacuuguuggagacacacccagaaaaaacgacagcuccagcaguggccauugcuuggauccuaacaaugaagaagguggucauggagugaaaggcugggccuuugaugauggaaaugacguguggaugggaagaacgaucagcgagaaguuacgcucaggauaugaaaccuucaaagucauugaaggcugguccaacccuaauuccaaauugcagauaaauaggcaagucauaguugacagagguaauagguccgguuauucugguauuuucucuguugaaggcaaaagcugcaucaaucggugcuuuuauguggaguugauaaggggaagaaaagaggaaacugaagucuuguggaccucaaacaguauuguuguguuuuguggcaccucagguacauauggaacaggcucauggccugauggggcggacaucaaucucaugccuauauaa

SEQ ID NO: 48838 - RNA, 1413 nt, Artificial Sequence
  derived and/or modified CDS sequence (wt) from neuraminidase__InfluenzaA__ACR15197
augaacccaaaucaaaagauaauaaccauuggaucaaucaguauagcaaucggaauaauuaguuuaauguugcaaauaggaaauauuauuucaauaugggcuagucacucaauccaaacuggaagucaaaacaacacuggaauaugcaaccaaagaaucaucacauaugaaaacagcaccugggugaaucacacauauguuaauauuaacaacacuaauguuguugcuggagaggacaaaacuucagugacauuggccggcaauucaucucucuguucuaucaguggaugggcuauauacacaaaagacaacagcauaagaauuggcuccaaaggagauguuuuugucauaagagaaccuuucauaucauguucucacuuggaaugcagaaccuuuuuucugacccaaggcgcucuauuaaaugacaaacauucaaaugggaccguaaaggacagaaguccuuauagggccuuaaugagcuguccucuaggugaagcuccguccccauacaauucaaaguucgaaucaguugcauggucagcaagcgcaugccaugauggcaugggcugguuaacaaucggaauuucugguccagacaauggagccguggcuguacuaaaauacaacggaauaauaacuggaaccauaaaaaguuggaaaaagcaaauauuaagaacacaagagucugaaugugucuguaugaacgggucauguuucaccauaaugaccgauggcccgaguaauaaggccgccucguacaaaauuuucaaaaucgaaaaggggaagguuacuaaaucaauagaguugaaugcacccaauuuucauuaugaggaauguuccuguuacccagacacuggcauagugauguguguaugcagggacaacuggcaugguucaaaucgaccuugggugucuuuuaaucaaaacuuggauuaucaaauaggauacaucugcaguggaguguucggugacaauccgcgucccgaagauggagagggcagcugcaauccagugacuguugauggagcaaacggaguaaaaggguuuucauacaaauaugauaaugguguuuggauaggaaggaccaaaaguaacagacuuagaaagggguuugagaugauuugggauccuaauggauggacaaauaccgacagugauuucucagugaaacaggauguuguagcaauaacugauuggucaggguacagcggaaguuucguccaacauccugaguuaacaggauuggacuguauaagaccuugcuucuggguugaguuagucagagggcugccuagagaaaauacaacaaucuggacuagugggagcagcauuucuuuuuguggcguuaauagugauacugcaaacuggucuuggccagacggugcugaguugccguucaccauugacaaguag

SEQ ID NO: 48839 - RNA, 1410 nt, Artificial Sequence
  derived and/or modified CDS sequence (wt) from neuraminidase__InfluenzaA__ACR15208
augaauccaaaucaaaagauaauaacgauuggcucuguuucucucaccauuuccacaauaugcuucuucaugcaaauugccaucuugauaacuacuguaacauugcauuucaagcaauaugaauucaacucccccccaaacaaccaagugaugcugugugaaccaacaauaauagaaagaaacauaacagagauaguguaucugaccaacaccaccauagagaaggaaauaugccccaaacuagcagaauacagaaauuggucaaagccgcaaugugacauuacaggauuugcaccuuuuucuaaggacaauucgauuaggcuuuccgcugguggggacaucugggugacaagagaaccuuaugugucaugcgauccugacaaguguuaucaauuugcccuuggacagggaacaacacuaaacaacgugcauucaaaugacacaguacgugauaggaccccuuaucggacccuauugaugaaugaguuagguguuccuuuucaucuggggaccaagcaagugugcauagcaugguccagcucaaguugucacgauggaaaagcauggcugcauguuuguauaacgggggaugauaaaaaugcaacugcuagcuucauuuacaaugggaggcuuguagauaguauuguuucaugguccaaagaaauccucaggacccaggagucagaaugcguuuguaucaauggaacuuguacaguaguaaugacugaugggagugcuucaggaaaagcugauacuaaaauacuauucauugaggaggggaaaaucguucauacuagcacauugucaggaagugcucagcaugucgaggagugcuccugcuauccucgauauccuggugucagaugugucugcagagacaacuggaaaggcuccaauaggcccaucguagauauaaacauaaaggaucauagcauuguuuccaguuauguguguucaggacuuguuggagacacacccagaaaaaacgacagcuccagcaguagccauuguuuggauccuaacaaugaagaagguggucauggagugaaaggcugggccuuugaugauggaaaugacguguggaugggaagaacgaucagcgagaagucacgcuuaggguaugaaaccuucaaagucauugaaggcugguccaacccuaaguccaaauugcagauaaauaggcaagucauaguugacaaagguaauagguccgguuauucugguauuuucucuguugaaggcaaaagcugcaucaaucggugcuuuuauguggaguugauaaggggaagaaaagaggaaacugaagucuuguggaccucaaacaguauuguuguguuuuguggcaccucagguacauauggaacaggcucauggccugauggggcggacaucaaucucaugccuauauaa

SEQ ID NO: 48840 - RNA, 1410 nt, Artificial Sequence
  derived and/or modified CDS sequence (wt) from neuraminidase__InfluenzaA__ACR15230
auggauccaaaucaaaagauaauaacgauuggcucuguuucucucaccauuuccgcaauaugcuucuucaugcaaauugcuauucugauaacuacuguaacauugcauuucaagcaauaugaauucaacucccccccaaacaaccaagugaugcugugugaaccaacaauaauagaaagaaacauaacagagauaguguaucugaccaacaccaccauagagaaggaaauaugccccaaacuagcagaauacagaaauuggucaaagccgcaauguaacauuacaggauuugcaccuuuuucuaaggacaauucgauucggcuuuccgcugguggagacaucugggugacaagagaaccuuaugugucaugcgauccugacaaguguuaucaauuugcccuuggacagggaacaacacuaaacaacgugcauucaaaugacacaguacaugauaggaccccuuaucggacccuauugaugaaugaguuggguguuccauuucaucuggggaccaagcaagugugcauagcaugguccagcucaaguugucacgauggaaaagcauggcugcauguuuguguaacgggggaugaugaaaaugcaacugcuagcuucauuuacaaugggaggcuuguagauaguguuguuucaugguccaaaaaaauccucaggacccaggagucagaaugcguuuguaucaauggaacuuguacaguaguaaugacugaugggagugcuucaggaaaagcugauacuaaaauacuauucauugaggaggggaaaaucguucauacuagcacauugucaggaagugcucagcaugucgaggagugcuccuguuauccucgauauccuggugucagaugugucugcagagacaacuggaaaggauccaauaggcccaucguagauauaaacauaaaggauuauagcauuguuuccagcuaugugugcucaggacuuguuggagacacacccagaaaaaacgacagcuccagcaauagccauugcuuggauccaaacaaugaagaagguggucauggagugaaaggcugggccuuugaugaugggaaugacguguggaugggaagaacgaucagcgagaaguuacgcucaggauaugaaaccuucaaagucauugaaggcugguccaauccuaauuccaaauugcagauaaauaggcaagucauaguugacagagguaauagguccgguuauucugguauuuucucuguugaaggcaaaagcugcaucaaucggugcuuuuauguggaguugauaaggggaagaaaccaggaaacugaagucuuguggaccucaaacaguauuguuguguuuuguggcaccucagguacauauggaacaggcucauggccugauggggcggacaucaaucucaugccuauauaa

SEQ ID NO: 48841 - RNA, 1413 nt, Artificial Sequence
  derived and/or modified CDS sequence (wt) from neuraminidase__InfluenzaA__ACR15241
augaacccaaaucaaaagauaauaaccauuggaucaaucaguauagcaaucggaauaauuagucuaauguugcaaauaggaaauauuauuucaauaugggcuagucacucaauccaaacuggaagucaaaacaacacuggaauaugcaaccaaagaaucaucacauaugaaaacagcaccugggugaaucacacauauguuaauauuaacaacacuaauguuguugcuggagaggacaaaacuucagugacauuggcuggcaauucaucucuuuguucuaucaguggaugggcuauauacacaaaagacaacagcauaagaauuggcuccaaaggagauguuuuugucauaagagaaccuuucauaucauguucucacuuggaaugcagaaccuuuuuucugacccaaggcgcucuauuaaaugacaaacauucaaaugggaccguaaaggacagaaguccuuauagggccuuaaugagcuguccucuaggugaagcuccguccccauacaauucaaaguucgaaucaguugcauggucagcaagcgcaugccaugauggcaugggcugguuaacaaucggaauuucugguccagacaauggagcuguggcuguacuaaaauacaacggaauaauaacuggaaccauaaaaaguuggaaaaagcaaauauuaagaacacaagagucugaaugugucuguaugaacgggucauguuucaccauaaugaccgauggcccgaguaauaaggccgccucguacaaaauuuucaagaucgaaaaggggaagguuacuaaaucaauagaguugaaugcacccaauuuucauuaugaggaauguuccuguuacccagacacuggcauagugauguguguaugcagggacaacuggcaugguucaaaucgaccuugggugucuuuuaaucaaaacuuggauuaucaaauaggauacaucugcaguggaguguucggugacaauccgcgucccgaagauggagagggcagcugcaauccagugacuguugauggagcaaacggaguaaaaggguuuucauacaaauaugauaaugguguuuggauaggaaggaccaaaaguaacagacuuagaaagggguuugagaugauuugggauccuaauggauggacaaauaccgacagugauuucucagugaaacaggauguuguagcaauaacugauuggucaggguacagcggaaguuucguccaacauccugaguuaacaggauuggacuguauaagaccuugcuucuggguugaguuagucagagggcugccuagagaaaauacgacaaucuggacuagugggagcagcauuucuuuuuguggcguuaauagugauacugcaaacuggucuuggccagacggugcugaguugccguucaccauugacaaguag

SEQ ID NO: 48842 - RNA, 1410 nt, Artificial Sequence
  derived and/or modified CDS sequence (wt) from neuraminidase__InfluenzaA__ACR15252
augaauccaaaucaaaagauaauaacgauuggcucuguuucucucaccauuuccacaauaugcuucuucaugcaaauugccaucuugauaacuacuguaacauugcauuucaagcaauaugaauucaacucccccccaaacaaccaagugaugcugugugaaccaacaauaauagaaagaaacauaacagagauaguguaucugaccaacaccaccauagagaaggaaauaugccccaaacuagcagaauacagaaauuggucaaagccgcaaugugacauuacaggauuugcaccuuuuucuaaggacaauucgauuaggcuuuccgcugguggggacaucugggugacaagagaaccuuaugugucaugcgauccugacaaguguuaucaauuugcccuuggacagggaacaacacuaaacaacgugcauucaaaugacacaguacgugauaggaccccuuaucggacccuauugaugaaugaguuagguguuccuuuucaucuggggaccaagcaagugugcauagcaugguccagcucaaguugucacgauggaaaagcauggcugcauguuuguauaacgggggaugauaaaaaugcaacugcuagcuucauuuacaaugggaggcuuguagauaguauuguuucaugguccaaagaaauccucaggacccaggagucagaaugcguuuguaucaauggaacuuguacaguaguaaugacugaugggagugcuucaggaaaagcugauacuaaaauacuauucauugaggaagggaaaaucguucauacuagcacauugucaggaagugcucagcaugucgaggagugcuccugcuauccucgauauccuggugucagaugugucugcagagacaacuggaaaggcuccaauaggcccaucguagauauaaacauaaaggaucauagcauuguuuccaguuauguguguucaggacuuguuggagacacacccagaaaaaacgacagcuccagcaguagccauuguuuggauccuaacaaugaagaagguggucauggagugaaaggcugggccuuugaugauggaaaugacguguggaugggaagaacgaucagcgagaagucacgcuuaggguaugaaaccuucaaagucauugaaggcugguccaacccuaaguccaaauugcagauaaauaggcaagucauaguugacagaggcaauagguccgguuauucugguauuuucucuguugaaggcaaaagcugcaucaaucggugcuuuuauguggaguugauaaggggaagaaaggaggaaacugaagucuuguggaccucaaacaguauuguuguguuuuguggcaccucagguacauauggaacaggcucauggccugauggggcggacaucaaucucaugccuauauaa

SEQ ID NO: 48843 - RNA, 1413 nt, Artificial Sequence
  derived and/or modified CDS sequence (wt) from neuraminidase__InfluenzaA__ACR15263
augaacccaaaucaaaagauaauaaccauuggaucaaucaguauagcaaucggaauaauuagucuaauguugcaaauaggaaauauuauuucaauaugggcuagucacucaauccaaacuggaagucaaaacaacacuggaauaugcaaccaaagaaucaucacauaugaaaacagcaccugggugaaucacacauauguuaauauuaacaacacuaauguuguugcuggagaggacaaaacuucagugacauuggccggcaauucaucucuuuguucuaucaguggaugggcuauauacacaaaagacaacagcauaagaauuggcuccaaaggagauguuuuugucauaagagaaccuuucauaucauguucucacuuggaaugcagaaccuuuuuucugacccaaggcgcucuauuaaaugacaaacauucaaauggaaccguaaaggacagaaguccuuauagggccuuaaugagcuguccucuaggugaagcuccguccccauacaauucaaaguucgaaucaguugcauggucagcaagcgcaugccaugauggcaugggcugguuaacaaucggaauuucugguccagacaauggagcuguggcuguacuaaaauacaacggaauaauaacuggaaccauaaaaaguuggaaaaagcaaauauuaagaacacaagagucugaaugugucuguaugaacgggucauguuucaccauaaugaccgauggcccgaguaauaaggccgccucguacaaaauuuucaagaucgaaaaggggaagguuacuaaaucaauagaguugaaugcacccaauuuucauuaugaggaauguuccuguuacccagacacuggcauagugauguguguaugcagggacaacuggcaugguucaaaucgaccuugggugucuuuuaaucaaaacuuggauuaucaaauaggauacaucugcaguggaguguuuggugacaauccgcgucccgaagauggagagggcagcugcaauccagugacuguugauggagcaaacggaguaaaaggguuuucauacaaauaugauaaugguguuuggauaggaaggaccaaaaguaacagacuuagaaagggguuugagaugauuugggauccuaauggauggacaaauaccgacagugauuucucagugaaacaggauguuguagcaauaacugauuggucaggguacagcggaaguuucguccaacauccugaguuaacaggauuggacuguauaagaccuugcuucuggguugaguuagucagagggcugccuagagaaaauacaacaaucuggucuagugggagcagcauuucuuuuuguggcguuaauagugauacugcaaacuggucuuggccagacggugcugaguugccguucaccauugacaaguag

SEQ ID NO: 48844 - RNA, 1413 nt, Artificial Sequence
  derived and/or modified CDS sequence (wt) from neuraminidase__InfluenzaA__ACR15274
augaacccaaaucaaaagauaauaaccauuggaucaaucaguauagcaaucggaauaauuagucuaauguugcaaauaggaaauauuauuucaauaugggcuagucacucaauccaaacuggaagucaaaacaacacuggaauaugcaaccaaagaaucaucacauaugaaaacagcaccugggugaaucacacauauguuaauauuaacaacacuaauguuguugcuggagaggacaaaacuucagugacauuggccggcaauucaucucuuuguucuaucaguggaugggcuauauacacaaaagacaacagcauaagaauuggcuccaaaggagauguuuuugucauaagagaaccuuucauaucauguucucacuuggaaugcagaaccuuuuuucugacccaaggcgcucuauuaaaugacaaacauucaaauggaaccguaaaggacagaaguccuuauagggccuuaaugagcuguccucuaggugaagcuccguccccauacaauucaaaguucgaaucaguugcauggucagcaagcgcaugccaugauggcaugggcugguuaacaaucggaauuucugguccagacaauggagcuguggcuguacuaaaauacaacggaauaauaacuggaaccauaaaaaguuggaaaaagcaaauauuaagaacacaagagucugaaugugucuguaugaacgggucauguuucaccauaaugaccgauggcccgaguaauaaggccgccucguacaaaauuuucaagaucgaaaaggggaagguuacuaaaucaauagaguugaaugcacccaauuuucauuaugaggaauguuccuguuacccagacacuggcauagugauguguguaugcagggacaacuggcaugguucaaaucgaccuugggugucuuuuaaucaaaacuuggauuaucaaauaggauacaucugcaguggaguguuuggugacaauccgcgucccgaagauggagagggcagcugcaauccagugacuguugauggagcaaacggaguaaaaggguuuucauacaaauaugauaaugguguuuggauaggaaggaccaaaaguaacagacuuagaaagggguuugagaugauuugggauccuaauggauggacaaauaccgacagugauuucucagugaaacaggauguuguagcaauaacugauuggucaggguacagcggaaguuucguccaacauccugaguuaacaggauuggacuguauaagaccuugcuucuggguugaguuagucagagggcugccuagagaaaauacaacaaucuggacuagugggagcagcauuucuuuuuguggcguuaauagugauacugcaaacuggucuuggccagacggugcugaguugccguucaccauugacaaguag

SEQ ID NO: 48845 - RNA, 1413 nt, Artificial Sequence
  derived and/or modified CDS sequence (wt) from neuraminidase__InfluenzaA__ACR15307
augaauccaaaucaaaaaauaauaaccauuggaucaaucaguauaacaaucggaauaauuagucuaauguugcaaauaggaaauauuauuucaauaugggcuagucacucaauccaaacuggaagucaaaaccacacuggaauaugcaaccaaagaaucaucacauaugaaaacaacaccugggugaaucacacauauguuaauauuaacaacacuaauguuguugcuggaaaggacaaaacuucagugacauuggccggcaauucaucucuuuguucuaucaguggaugggcuauauacacaaaagacaacagcauaagaauuggcuccaaaggagauguuuuugucauaagagaaccuuucauaucauguucucacuuggaaugcagaaccuuuuuucugacccaaggugcucuauuaaaugacaaacauucaaaugggaccguuaaggacagaaguccuuauagggccuuaaugagcuguccucuaggugaagcuccguccccauacaauucaaaguuugaaucaguugcauggucagcaagcgcaugccaugauggcaugggcugguuaacaaucggaauuucugguccagacaauggagcuguggcuguacuaaaauacaacggcauaauaacugaaaccauaaaaaguuggaaaaagcgaauauuaagaacacaagagucugaaugugucugugugaacgggucauguuucaccauaaugaccgauggcccgaguaauggggccgccucguacaaaaucuucaagaucgaaaaggggaagguuacuaaaucaauagaguugaaugcacccaauuuucauuaugaggaauguuccuguuacccagacacuggcacagugauguguguaugcagggacaacuggcaugguucaaaucgaccuugggugucuuuuaaucaaaaccuggauuaucaaauaggauacaucugcagugggguguucggugacaauccgcgucccaaagauggagagggcagcuguaauccagugacuguugauggagcagacggaguaaagggguuuucauacaaauaugguaaugguguuuggauaggaaggacuaaaaguaacagacuuagaaagggguuugagaugauuugggauccuaauggauggacagauaccgacagugauuucucagugaaacaggauguuguggcaauaacugauuggucaggguacagcggaaguuucguucaacauccugaguuaacaggauuggacuguauaagaccuugcuucuggguugaguuagucagaggacugccuagagaaaauacaacaaucuggacuagugggagcagcauuucuuuuuguggcguaaauagugauaccgcaaacuggucuuggccagacggugcugaguugccguucaccauugacaaguag

SEQ ID NO: 48846 - RNA, 1413 nt, Artificial Sequence
  derived and/or modified CDS sequence (wt) from neuraminidase__InfluenzaA__ACR15318
augaauccaaaucaaaaaauaauaaccauuggaucaaucaguauagcaaucggaauaauuagccuaauguugcaaauaggaaacauuauuucaauaugggcuagucacucaauccaaacuggaagucaaaaccacacuggaguaugcaaccaaagaaucaucacauaugaaaacagcaccugggugaaucacacauauguuaauauuaacaacaccaauguuauugcuggaaaggacaaaacuucagugacauuggccggcaauucaucucuuuguucuaucaguggaugggcuauauacacaaaagacaacagcauaagaauugguuccaaaggagauguuuuugucauaagagagccuuucauaucauguucucacuuggaaugcagaaccuuuuuucugacucaaggugcucuauuaaaugacaaacauucaaaugggaccguuaaggacagaagccccuauagggcuuuaaugagcuguccucuaggugaagcuccguccccauacaauucaaaguuugaaucaguugcuuggucagcaagcgcaugccaugauggcaugggcugguuaacaaucggaauuucugguccagacaauggagcaguggcuguacuaaaauacaacggcauaauaacugaaaccauaaaaaguuggaaaaggcaaauauuaagaacacaagagucugaaugugucugugugaacgggucauguuucaccauaaugaccgauggcccgaguaauggggccgccucguacaaaaucuucaagaucgaaaagggaaagguuacuaaaucaauagaguugaaugcacccaauuuucauuaugaggaauguuccuguuacccagacacuggcacagugauguguguaugcagggacaacuggcaugguucaaaucgacccuggguguccuuuaaucaaaaccuggauuaucaaauaggauacaucugcagugggguguucggugacaauccgcgucccaaagauggagagggcagcuguaauccagugacuguugauggagcaaacggaguaaagggguuuucauacaaauaugguaaugguguuuggauaggaaggacuaaaaguaacagacuuagaaagggguuugagaugauuugggauccuaauggauggacagauaccgacagugauuucucagugaaacaggauguuguggcaauaacugauuggucuggguacagcggaaguuucguucaacauccugaguuaacaggauuggacuguauaagaccuugcuucuggguugaguuagucagaggacugccaaaagaaaauacaacaaucuggacuagugggagcagcauuucuuuuuguggcguaaauagugauacugcaaacuggucuuggccagacggugcugaguugccguuuaccauugacaaguaa

SEQ ID NO: 48847 - RNA, 1413 nt, Artificial Sequence
  derived and/or modified CDS sequence (wt) from neuraminidase__InfluenzaA__ACR15329
augaauccaaaucaaaaaauaauaaccaucggaucaaucaguauagcaaucggaauaauuagccuaauguugcaaauaggaaacauuauuucaauaugggcuagucacucaauccaaacuagaagucaaaaccacacuggaguaugcaaccaaagaaucaucacauaugaaaacagcaccugggugaaucacacauauguuaauauuaacaacaccaauguuauugcuggaaaggacaaaacuucagugacauuggccggcaauucaucucuuuguucuaucaguggaugggcuauauacacaaaagacaacagcauaagaauugguuccaaaggagauguuuuugucauaagagagccuuucauaucauguucucacuuggaaugcagaaccuuuuuucugacccaaggugcucuauuaaaugacaaacauucaaaugggaccguuaaggacagaagccccuauagggcuuuaaugagcuguccucuaggugaagcuccguccccauacaauucaaaguuugaaucaguugcuuggucggcaagcgcaugccaugauggcaugggcugguuaacaaucggaauuucugguccagacaauggagcaguggcuguacuaaaauacaacggcauaauaacugaaaccauaaaaaguuggaaaaagcaaauauuaagaacacaggagucugaaugugucugugugaacgggucauguuucaccauaaugaccgauggcccgaguaauggggccgccucguacaaaaucuucaagaucgaaaagggaaagguuacuaaaucaauagaguugaaugcacccaauuuucauuaugaggaauguuccuguuacccagacacuggcacagugauguguguaugcagggacaacuggcaugguucaaaucgacccugggugucuuuuaaucaaaaccuggauuaucaaauaggauacaucugcagugggguguucggugacaauccgcgucccaaagauggagagggcagcuguaauccagugacuguugauggagcgaacggaguaaagggguuuucauacaaauaugguaaugguguuuggauaggaaggacuaaaaguaacagacuuagaaagggguuugagaugauuugggauccuaauggauggacagauaccgacagugauuucucagugaaacaggauguuguggcaauaacugauuggucuggguacagcggaaguuucguucaacauccugaguuaacaggauuggacuguauaagaccuugcuucuggguugaguuagucagaggacugccaaaagaaaauacaacaaucuggacuagugggagcagcauuucuuuuugugguguaaauagugauacugcaaacuggucuuggccagacggugcugaguugccguuuaccauugacaaguaa

SEQ ID NO: 48848 - RNA, 1413 nt, Artificial Sequence
  derived and/or modified CDS sequence (wt) from neuraminidase__InfluenzaA__ACR15340
augaacccaaaucaaaagauaauaaccauuggaucaaucaguauagcaaucggaauaauuagucuaauguugcaaauaggaaauauuauuucaauaugggcuagucacucaauccaaacuggaagucaaaacaacacuggaauaugcaaccaaagaaucaucacauaugaaaacagcaccugggugaaucacacauauguuaauauuaacaacacuaauguuguugcuggagaggacaaaacuucagugacauuggccggcaauucaucucuuuguucuaucaguggaugggcuauauacacaaaagacaacagcauaagaauuggcuccaaaggagauguuuuugucauaagagaaccuuucauaucauguucucacuuggaaugcagaaccuuuuuucugacccaaggcgcucuauuaaaugacaaacauucaaaugggaccguaaaggacagaaguccuuauagggccuuaaugagcuguccucuaggugaagcuccguccccauacaauucaaaguucgaaucaguugcauggucagcaagcgcaugccaugauggcaugggcugguuaacaaucggaauuucugguccagacaauggagcuguggcuguacuaaaauacaauggaauaauaacuggaaccauaaaaaguuggaaaaagcaaauauuaagaacacaagagucugaaugugucuguaugaacgggucauguuucaccauaaugaccgauggcccgaguaacaaggccgccucguacaaaauuuucaagaucgaaaaggggaagguuacuaaaucaauagaguugaaugcacccaauuuucauuaugaggaauguuccuguuacccagacacuggcauagugauguguguaugcagggacaacuggcaugguucaaaucgaccuugggugucuuuuaaucaaaacuuggauuaucaaauaggauacaucugcaguggaguguuuggugacaauccgcgucccgaagauggagagggcagcugcaauccagugacuguugauggagcaaacggaguaaaaggguuuucauacaaauaugauaaugguguuuggauaggaaggaccaaaaguaacagacuuagaaagggguuugagaugauuugggauccuaauggauggacgaauaccgacagugauuucucagugaaacaggauguuguagcaauaacugauuggucaggguacagcggaaguuucguccaacauccugaguuaacaggauuggacuguauaagaccuugcuucuggguugaguuagucagagggcugccuagagaaaauacaacaaucuggacuagugggagcagcauuucuuuuuguggcguuaauagugauacugcaaacuggucuuggccagacggugcugaguugccguucaccauugacaaguag

SEQ ID NO: 48849 - RNA, 1413 nt, Artificial Sequence; identical to SEQ ID NO: 48848
  derived and/or modified CDS sequence (wt) from neuraminidase__InfluenzaA__ACR15362

SEQ ID NO: 48850 - RNA, 1413 nt, Artificial Sequence
  derived and/or modified CDS sequence (wt) from neuraminidase__InfluenzaA__ACR15373
augaacccaaaucaaaagauaauaaccauuggaucaaucaguauagcaaucggaauaauuagucuaauguugcaaauaggaaauauuauuucaauaugggcuagucacucaauccaaacuggaagucaaaacaacacuggaauaugcaaccaaagaaucaucacauaugaaaacagcaccugggugaaucacacauauguuaauauuaacaacacuaauguuguugcuggagaggacaaaacuucagugacauuggccggcaauucaucucuuuguucuaucaguggaugggcuauauacacaaaagacaacagcauaagaauuggcuccaaaggggauguuuuugucauaagagaaccuuucauaucauguucucacuuggaaugcagaaccuuuuuucugacccaaggcgcucuauuaaaugacaaacauucaaaugggaccguaaaggacagaaguccuuauagggccuuaaugagcuguccucuaggugaagcuccguccccauacaauucaaaguucgaaucaguugcauggucagcaagcgcaugccaugauggcaugggcugguuaacaaucggaauuucugguccagacaauggagcuguggcuguacuaaaauacaacggaauaauaacuggaaccauaaaaaguuggaaaaagcaaauauuaagaacacaagagucugaaugugucuguaugaacgggucauguuucaccauaaugaccgauggcccgaguaauaaggccgccucguacaaaauuuucaagaucgaaaaggggaaaguuacuaaaucaauagaguugaaugcacccaauuuucauuaugaggaauguuccuguuacccagacacuggcauagugauguguguaugcagggacaacuggcaugguucaaaucgaccuugggugucuuuuaaucaaaacuuggauuaucaaauaggauacaucugcaguggaguguuuggugacaauccgcgucccgaagauggagagggcagcugcaauccagugacuguugauggagcaaacggaguaaaaggguuuucauacaaauaugauaaugguguuuggauaggaaggaccaaaaguaacagacuuagaaagggguuugagaugauuugggaucccaauggauggacaaauaccgacagugauuucucagugaaacaggauguuguagcaauaacugauuggucaggguacagcggaaguuucguccaacauccugaguuaacaggauuggacuguauaagaccuugcuucuggguugaguuagucagagggcugccuagagaaaauacaacaaucuggacuagugggagcagcauuucuuuuuguggcguuaauagugauacugcaaacuggucuuggccagacggugcugaguugccguucaccauugacaaguag

SEQ ID NO: 48851 - RNA, 1413 nt, Artificial Sequence
  derived and/or modified CDS sequence (wt) from neuraminidase__InfluenzaA__ACR15428
augaacccaaaucaaaagauaauaaccauuggaucaaucaguauagcaaucggaauaauuagucuaauguugcaaauaggaaauauuauuucaauaugggcuagucacucaauccaaacuggaagucaaaacaacacuggaauaugcaaccaaagaaucaucacauaugaaaacagcaccugggugaaucacacauauguuaauauuaacaacacuaauguuguugcuggagaggacaaaacuucagugacauuggccggcaauucaucucuuuguucugucaguggaugggcuauauacacaaaagacaacagcauaagaauuggcuccaaaggagauguuuuugucauaagagaaccuuucauaucauguucucacuuggaaugcagaaccuuuuuucugaccaaaggcgcucuauuaaaugacaaacauucaaaugggaccguaaaggacagaaguccuuauagggccuuaaugagcuguccucuaggugaagcuccguccccauacaauucaaaguucgaaucaguugcauggucagcaagcgcaugccaugauggcaugggcugguuaacaaucggaauuucugguccagacaauggagcuguggcuguacuaaaauacaacggaauaauaacuggaaccauaaaaaguuggaaaaagcaaauauuaagaacacaagagucugaaugugucuguaugaacgggucauguuucaccauaaugaccgauggcccgaguaauaaggccgccucguacaaaauuuucaagaucgaaaaggggaagguuacuaaaucaauagaguugaaugcacccaauuuucauuaugaggaauguuccuguuacccagacacuggcauagugauguguguaugcagggacaacuggcaugguucaaaucgaccuugggugucuuuuaaucaaaacuuggauuaucaaauaggauacaucugcaguggaguguuuggugacaauccgcgucccgaagauggagagggcagcugcaauccagugacuguugauggagcaaacggaguaaaaggguuuucauacaaauaugauaaugguguuuggauaggaaggaccaaaaguaacagacuuagaaagggguuugagaugauuugggauccuaauggauggacgaauaccgacagugauuucucagugaaacaggauguuguagcaauaacugauuggucaggguacagcggaaguuucguccaacauccugaguuaacaggauuggacuguauaagaccuugcuucuggguugaguuagucagagggcugccuagagaaaauacaacaaucuggacuagugggagcagcauuucuuuuuguggcguuaauagugauacugcaaacuggucuuggccagacggugcugaguugccguucaccauugacaaguag

SEQ ID NO: 48852 - RNA, 1413 nt, Artificial Sequence
  derived and/or modified CDS sequence (wt) from neuraminidase__InfluenzaA__ACR15472
augaacccaaaucaaaagauaauaaccauuggaucaaucaguauagcaaucggaauaauuagucuaauguugcaaauaggaaauauuauuucaauaugggcuagucacucaauccaaacuggaagucaaaacaacacuggaauaugcaaccaaagaaucaucacauaugaaaacagcaccugggugaaucacacauauguuaauauuaacaacacuaauguuguugcuggagaggacaaaacuccagugacauuggccggcaauucaucucuuuguucuaucaguggaugggcuauauacacaaaagacaacagcauaagaauuggcuccaaaggagauguuuuugucauaagagaaccuuucauagcauguucucacuuggaaugcagaaccuuuuuucugacccaaggcgcucuauuaaaugacaaacauucaaaugggaccguaaaggacagaaguccuuauagggccuuaaugagcuguccucuaggugaagcuccguccccauacaauucaaaguucgaaucaguugcauggucagcaagcgcaugccaugauggcaugggcugguuaacaaucggaauuucugguccugacaauggagcuguggcuguacuaaaauacaacggaauaauaacuggaaccauaaaaaguuggaaaaagcaaauauuaagaacacaagagucugaaugugucuguaugaacgggucauguuucaccauaaugaccgauggcccgaguaauaaggccgccucguacaaaauuuucaagaucgaaaaggggaagguuacuaaaucaauagaguugaaugcacccaauuuucauuaugaggaauguucuuguuacccagacacuggcauagugauguguguaugcagggacaacuggcaugguucaaaucgaccuugggugucuuuuaaucaaaacuuggauuaucaaauaggauacaucugcaguggaguguuuggugacaauccgcgucccgaagauggagagggcagcugcaauccagugacuguugauggagcaaacggaguaaaaggguuuucauacaaauaugauaaugguguuuggauaggaaggaccaaaaguaacagacuuagaaagggguuugaggugauuugggauccuaauggauggacaaauaccgacagugauuucucagugaaacaggauguuguagcaauaacugauuggucaggguacaguggaaguuucguccaacauccugaguuaacaggauuggacuguauaagaccuugcuucuggguugaguuagucagagggcugccuagagaaaauacaacaaucuggacuagugggagcagcauuucuuuuuguggcguuaauagugauacugcaaacuggucuuggccagacggugcugaguugccguucaccauugacaaguag

SEQ ID NO: 48853 - RNA, 1413 nt, Artificial Sequence; identical to SEQ ID NO: 48708
  derived and/or modified CDS sequence (wt) from neuraminidase__InfluenzaA__ACR15483

SEQ ID NO: 48854 - RNA, 1413 nt, Artificial Sequence; identical to SEQ ID NO: 48708
  derived and/or modified CDS sequence (wt) from neuraminidase__InfluenzaA__ACR15505

SEQ ID NO: 48855 - RNA, 1413 nt, Artificial Sequence; identical to SEQ ID NO: 48728
  derived and/or modified CDS sequence (wt) from neuraminidase__InfluenzaA__ACR15516

SEQ ID NO: 48856 - RNA, 1410 nt, Artificial Sequence
  derived and/or modified CDS sequence (wt) from neuraminidase__InfluenzaA__ACR15527
augaauccaaaucaaaagauaauaacgauuggcucuguuucucucaccauuuccacaauaugcuucuucaugcaaauugccaucuugauaacuacuguaacauugcauuucaaacaauaugaauucaacucccccccaaacaaccaagugaugcugugugaaccaacaauaauagaaagaaacauaacagagauaguguaucugaccaacaccaccauagagaaggaaauaugccccaaacuagcagaauacagaaauuggucaaagccgcaaugugacauuacaggauuugcaccuuuuucuaaggacaauucgauuaggcuuuccgcugguggggacaucugggugacaagagaaccuuaugugucaugcgauccugacaaguguuaucaauuugcccuuggacagggaacaacacuaaacaacgugcauucaaaugacacaguacaugauaggaccccuuaucggacccuauugaugaaugaguuagguguuccauuucaucuggggaccaagcaagugugcauagcaugguccagcucaaguugucacgauggaaaagcauggcugcauguuuguguaacgggggaugauaaaaaugcaacugcuagcuucauuuacaaugggaggcuuguagauaguauuguuucaugguccaaaaaaauccucaggacccaggagucagaaugcguuuguaucaauggaacuuguacaguaguaaugacugaugggagugcuucgggaaaagcugauacuaaaauacuauucauugaggaggggaaaaucguucauacuagcacauugucaggaagugcucagcaugucgaggagugcuccugcuauccucgauauccuggugucagaugugucugcagagacaacuggaaaggcuccaauaggcccaucguagauauaaacauaaaggauuauagcauuguuuccaguuaugugugcucaggacuuguuggagacacacccagaaaaaacgacagcuccagcaguagccauugcuuggauccuaacaaugaagaagguggucauggagugaaaggcugggccuuugaugauggaaaugacguguggauggggagaacgaucagcgagaaguuacgcucaggauaugaaaccuucaaagucauugaaggcugguccaacccuaauuccaaauugcagauaaauaggcaagucauaguugacagagguaauagguccgguuauucugguauuuucucuguugaaggcaaaagcugcaucaaucggugcuuuuauguggaguugauaaggggaagaaaagaggaaacugaagucuuguggaccucaaacaguauuguuguguuuuguggcaccucagguacauauggaacaggcucauggccugauggggcggacaucaaucucaugccuauauaa

SEQ ID NO: 48857 - RNA, 1410 nt, Artificial Sequence
  derived and/or modified CDS sequence (wt) from neuraminidase__InfluenzaA__ACR15538
augauuccaauucaaaagauaauaacgauuggcucuguuucucucaccauuuccacaauaugcuucuucaugcaaauugccaucuugauaacuacuguaacauugcauuucaagcaauaugaauucaacucccccccaaacaaccaagugaugcugugugaaccaacaauaauagaaagaaacauaacagagauaguguaucugaccaacaccaccauagagaaggaaauaugccccaaacuagcagaauacagaaauuggucaaagccgcaaugugacauuacaggauuugcaccuuuuucuaaggacaauucgauuaggcuuuccgcugguggggacaucugggugacaagagaaccuuaugugucaugcgauccugacaaguguuaucaauuugcccuuggacagggaacaacacuaaacaacgugcauucaaaugacacaguacaugauaggaccccuuaucggacccuauugaugaaugaguuagguguuccauuucaucuggggaccaagcaagugugcauagcaugguccagcucaaguugucacgauggaaaagcauggcugcauguuuguguaacgggggaugauaaaaaugcaacugcuagcuucauuuacaaugggaggcuuguagauaguauuguuucaugguccaaagaaauccucaggacccaggagucggaaugcguuuguaucaauggaacuuguacaguaguaaugacugaugggagugcuucaggaaaagcugauacuaaaauacuauucauugaggaggggaaaaucguucauacuagcacauugucaggaagugcucagcaugucgaggagugcuccugcuauccucgauauccuggugucagaugugucugcagagacaauuggaaaggcuccaauaggcccauaguagauauaaacauaaaggauuauagcauuguuuccaguuaugugugcucaggacuuguuggagacacacccagaaaaaacgacagcuccagcaguagccauugcuuggauccuaacaaugaagaagguggucauggagugaaaggcugggccuuugaugauggaaaugacguguggaugggaagaacgaucagcgagaaguuacgcucaggauaugaaaccuucaaagucauugaaggcugguccaacccuaauuccaaauuacagauaaauaggcaagucauaguugacagagguaauagguccgguuauucugguauuuucucuguugaaggcaaaagcugcaucaaucggugcuuuuauguggaguugauaaggggaagaaaagaggaaacugaagucuuguggaccucaaacaguauuguuguguuuuguggcaccucagguacauauggaacaggcucauggccugauggggcggacaucaaucucaugccuauauaa

SEQ ID NO: 48858 - RNA, 1410 nt, Artificial Sequence
  derived and/or modified CDS sequence (wt) from neuraminidase__InfluenzaA__ACR15549
augaauccaaaucaaaagauaauaacgauuggcucuguuucucucaccauuuccacaauaugcuucuucaugcaaauugccaucuugauaacuacuguaacauugcauuucaagcaauaugaauucaacucccccccaaacaaccaagugaugcugugugaaccaacaauaauagaaagaaacauaacagagauaguguaucugaccaacaccaccauagagaaggaaauaugccccaaacuagcagaauacagaaauuggucaaagccgcaaugugacauuacaggauuugcaccuuuuucuaaggacaauucgauuaggcuuuccgcugguggggacaucugggugacaagagaaccuuaugugucaugcgauccugacaaguguuaucaauuugcccuuggacagggaacaacacuaaacaacgugcauucaaaugacacaguacaugauaggaccccuuaucggacccuauugaugaaugaguuagguguuccauuucaucuggggaccaagcaagugugcauagcaugguccagcucaaguugucacgauggaaaagcauggcugcauguuuguguaacgggggaugauaaaaaugcaacugcuagcuucauuuacaaugggaggcuuguagauaguauuguuucaugguccaaagaaauccucaggacccaggagucagaaugcguuuguaucaauggaacuuguacaguaguaaugacugaugggagugcuucaggaaaagcugauacuaaaauacuauucauugaggaggggaaaaucguucauacuagcacauugucaggaagugcucagcaugucgaggagugcuccugcuauccucgauauccuggugucagaugugucugcagagacaacuggaaaggcuccaauaggcccauaguagauauaaacauaaaggauuauagcauuguuuccaguuaugugugcucaggacuuguuggagacacacccagaaaaaacgacagcuccagcaguagccauugcuuggauccuaacaaugaagaagguggucauggagugaaaggcugggccuuugaugauggaaaugacguguggaugggaagaacgaucagcgagaaguuacgcucaggauaugaaaccuucaaagucauugaaggcugguccaacccuaauuccaaauugcagauaaauaggcaagucauaguugacagagguaauagguccgguuauucugguauuuucucuguugaaggcaaaagcugcaucaaucggugcuuuuauguggaguugauaaggggaagaaaagaggaaacugaagucuuguggaccucaaacaguauuguuguguuuuguggcaccucagguacauauggaacaggcucauggccugauggggcggauaucaaucucaugccuauauaa

SEQ ID NO: 48859 - RNA, 1410 nt, Artificial Sequence
  derived and/or modified CDS sequence (wt) from neuraminidase__InfluenzaA__ACR15560
augaauccaaaucaaaagauaauaacgauuggcucuguuucucucaccauuuccacaauaugcuucuucaugcaaauugccaucuugauaacuacuguaacauugcauuucaagcaauaugaauucaacucccccccaaacaaccaagugaugcugugugaaccaacaauaauagaaagaaacauaacagagauaguguaucugaccaacaccaccauagagaaggaaauaugccccaaacuagcagaauacagaaauuggucaaagccgcaauguaacauuacaggauuugcaccuuuuucuaaggacaauucgauuaggcuuuccgcugguggggacaucugggugacaagagaaccuuaugugucaugcgauccugacaaguguuaucaauuugcccuuggacagggaacaacacuaaacaacgugcauucaaaugacacaguacaugauaggaccccuuaucggacccuauugaugaaugaguuagguguuccauuucaucuggggaccaagcaagugugcauagcaugguccagcucaaguugucacgauggaaaagcauggcugcauguuuguguaacgggggaugauaaaaaugcaacugcuagcuucauuuacaaugggaggcuuguagauaguauuguuucaugguccaaagaaauccucaggacccaggagucagaaugcguuuguaucaauggaacuuguacaguaguaaugacugaugggagugcuucaggaaaagcugauacuaaaauacuauucauugaggaggggaaaaucguucauacuagcacauugucaggaagugcucagcaugucgaggagugcuccugcuauccucgauauccuggugucagaugugucugcagagacaacuggaaaggcuccaauaggcccauaguagauauaaacauaaaggauuauagcauuguuucuaguuaugugugcucaggacuuguuggagacacacccagaaaaaacgacagcuccagcaguagccauugcuuggauccuaacaaugaagaagguggucauggagugaaaggcugggccuuugaugauggaaaugacguguggaugggaagaacgaucagcgagaaguuacgcucaggauaugaaaccuucaaagucauugaaggcugguccaaccccaauuccaaauugcagauaaauaggcaagucauaguugacagagguaauagguccgguuauucugguauuuucucuguugaaggcaaaagcugcaucaaucggugcuuuuauguggaguugauaaggggaagaaaagaggaaacugaagucuuguggaccucaaacaguauuguuguguuuuguggcaccucagguacauauggaacaggcucauggccugauggggcggacaucaaucucaugccuauauaa

SEQ ID NO: 48860 - RNA, 1410 nt, Artificial Sequence
  derived and/or modified CDS sequence (wt) from neuraminidase__InfluenzaA__ACR15582
augaauccaaaucaaaagauaauaacgauuggcucuguuucucucaccauuuccacaauaugcuucuucaugcaaauugccaucuugauaacuacuguaacauugcauuucaagcaauaugaauucaacucccccccaaacaaccaagugaugcugugugaaccaacaauaauagaaagaaacauaacagagauaguguaucugaccaacaccaccauagagaaggaaauaugccccaaacuagcagaauacagaaauuggucaaagccgcaauguaacauuacaggauuugcaccuuuuucuaaggacaauucgauuaggcuuuccgcugguggggacaucugggugacaagagaaccuuaugugucaugcgauccugacaaguguuaccaauuugcccuuggacagggaacaacacuaaacaacgugcauucaaaugacacaguacaugauaggaccccuuaucggacccuauugaugaaugaguuagguguuccauuucaucuggggaccaagcaagugugcauagcaugguccagcucaaguugucacgauggaaaagcauggcugcauguuuguguaacgggggaugauaaaaaugcaacugcuagcuucauuuacaaugggaggcuuguagauaguauuguuucaugguccaaagaaauccucaggacccaggagucagaaugcguuuguaucaauggaacuuguacaguaguaaugacugaugggagugcuucaggaaaagcugauacuaaaauacuauucauugaggaggggaaaaucguucauacuagcacauugucaggaagugcucagcaugucgaggagugcuccugcuauccucgauauccuggugucagaugugucugcagagacaacuggaaaggcuccaauaggcccauaguagauauaaacauaaaggauuauagcauuguuuccaguuaugugugcucaggacuuguuggagacacacccagaaaaaacgacagcuccagcaguagccauugcuuggauccuaacaaugaagaagguggucauggagugaaaggcugggccuuugaugauggaaaugacguguggaugggaagaacgaucagcgagaaguuacgcucaggauaugaaaccuucaaagucauugaaggcugguccaacccuaauuccaaauugcagauaaauaggcaagucauaguugacagagguaauagguccgguuauucugguauuuucucuguugaaggcaaaagcugcaucaaucggugcuuuuauguggaguugauaaggggaagaaaagaggaaacugaagucuuguggaccucaaacaguauuguuguguuuuguggcaccucagguacauauggaacaggcucauggccugauggggcggacaucaaucucaugccuauauaa

SEQ ID NO: 48861 - RNA, 1410 nt, Artificial Sequence
  derived and/or modified CDS sequence (wt) from neuraminidase__InfluenzaA__ACR15593
augaauccaaaucaaaagauaauaacgauuggcucuguuucucucaccauuuccacaauaugcuucuucaugcaaauugccaucuugauaacuacuguaacauugcauuucaagcaauaugaauucaacucccccccaaacaaccaagugaugcugugugaaccaacaauaauagaaagaaacauaacagagauaguguaucugaccaacaccaccauagagaaggaaauaugccccaaacaagcagaauacagaaauuggucaaagccgcaauguaacauuacaggauuugcaccuuuuucuaaggacaauucgauuaggcuuuccgcugguggggacaucugggugacaagagaaccuuaugugucaugcgauccugacaaguguuaucaauuugcccuuggacagggaacaacacuaaacaacgugcauucaaaugacacaguacaugauaggaccccuuaucggacccuauugaugaaugaauuagguguuccauuucaucuggggaccaagcaagugugcauagcaugguccagcucaaguugucacgauggaaaagcauggcugcauguuuguguaacgggggaugauaaaaaugcaacugcuagcuucauuuacaaugggaggcuuguagauaguauuguuucaugguccaaagaaauccucaggacccaggagucagaaugcguuuguaucaauggaacuuguacaguaguaaugacugaugggagugcuucaggaaaagcugauacuaaaauacuauucauugaggaggggaaaaucguucauacuagcacauugucaggaagugcucagcaugucgaggagugcuccugcuauccucgauauccuggugucagaugugucugcagagacaacuggaaaggcuccaauaggcccauaguagauauaaacauaaaggauuauagcauuguuuccaguuaugugugcucaggacuuguuggagacacacccagaaaaaacgacagcuccagcaguagccauugcuuggauccuaacaaugaagaagguggucauggagugaaaggcugggccuuugaugauggaaaugacguguggaugggaagaacgaucagcgagaaguuacgcucaggauaugaaaccuucaaagucauugaaggcugguccaacccuaauuccaaauugcagauaaauaggcaagucauaguugacagagguaauagguccgguuauucugguauuuucucuguugaaggcaaaagcugcaucaaucggugcuuuuauguggaguugauaaggggaagaaaagaggaaacugaagucuuguggaccucaaacaguauuguuguguuuuguggcaccucagguacauauggaacaggcucauggccugauggggcggacaucaaucucaugccuauauaa

SEQ ID NO: 48862 - RNA, 1410 nt, Artificial Sequence
  derived and/or modified CDS sequence (wt) from neuraminidase__InfluenzaA__ACR15604
augaauccaaaucaaaagauaauaacgauuggcucuguuucucucacaauuuccacaauaugcuucuucaugcaaauugccaucuugauaacuacuguaacauugcauuucaagcaauaugaauucaacucccccccaaacaaccaagugaugcugugugaaccaacaauaauagaaagaaacauaacagagauaguguaucugaccaacaccaccauagagaaggaaauaugccccaaacuagcagaauacagaaauuggucaaagccgcaauguaacauuacaggauuugcaccuuuuucuaaggacaauucgauuaggcuuuccgcugguggggacaucugggugacaagagaaccuuaugugucaugcgauccugacaaguguuaucaauuugcccuuggacagggaacaacacuaaacaacgugcauucaaaugacacaguacaugauaggaccccuuaucggacccuauugaugaaugaguuagguguuccauuucaucuggggaccaagcaagugugcauagcaugguccagcucaaguugucacgauggaaaagcauggcugcauguuuguguaacgggggaugauaaaaaugcaacugcuagcuucauuuacaaugggaggcuuguagauaguauuguuucaugguccaaagaaauccucaggacccaggagucagaaugcguuuguaucaauggaacuuguacaguaguaaugacugaugggagugcuucaggaaaagcugauacuaaaauacuauucauugaggaggggaaaaucguucauacuagcacauugucaggaagugcucagcaugucgaggagugcuccugcuauccucgauauccuggugucagaugugucugcagagacaacuggaaaggcuccaauaggcccauaguagauauaaacauaaaggauuauagcauuguuuccaguuaugugugcucaggacuuguuggagacacacccagaaaaaaugacagcuccagcaguagccauugcuuggauccuaacaaugaagaagguggucauggagugaaaggcugggccuuugaugauggaaaugacguguggaugggaagaacgaucagcgagaaguuacgcucaggauaugaaaccuucaaagucauugaaggcugguccaacccuaauuccaaauugcagauaaauaggcaagucauaguugacagaggugauagguccgguuauucugguauuuucucuguugaaggcaaaagcugcaucaaucggugcuuuuauguggaguugauaaggggaagaaaagaggaaacugaaguauuguggaccucaaacaguauuguuguguuuuguggcaccucagguacauauggaacaggcucauggccugauggggcggacaucaaucucaugccuauauaa

SEQ ID NO: 48863 - RNA, 1410 nt, Artificial Sequence; identical to SEQ ID NO: 48749
  derived and/or modified CDS sequence (wt) from neuraminidase__InfluenzaA__ACR15618

SEQ ID NO: 48864 - RNA, 1410 nt, Artificial Sequence; identical to SEQ ID NO: 48749
  derived and/or modified CDS sequence (wt) from neuraminidase__InfluenzaA__ACR18924

SEQ ID NO: 48865 - RNA, 1410 nt, Artificial Sequence; identical to SEQ ID NO: 48783
  derived and/or modified CDS sequence (wt) from neuraminidase__InfluenzaA__ACR18925

SEQ ID NO: 48866 - RNA, 1410 nt, Artificial Sequence; identical to SEQ ID NO: 48750
  derived and/or modified CDS sequence (wt) from neuraminidase__InfluenzaA__ACR18926

SEQ ID NO: 48867 - RNA, 1410 nt, Artificial Sequence; identical to SEQ ID NO: 48750
  derived and/or modified CDS sequence (wt) from neuraminidase__InfluenzaA__ACR18927

SEQ ID NO: 48868 - RNA, 1410 nt, Artificial Sequence; identical to SEQ ID NO: 48750
  derived and/or modified CDS sequence (wt) from neuraminidase__InfluenzaA__ACR18928

SEQ ID NO: 48869 - RNA, 1410 nt, Artificial Sequence; identical to SEQ ID NO: 48826
  derived and/or modified CDS sequence (wt) from neuraminidase__InfluenzaA__ACR18929

SEQ ID NO: 48870 - RNA, 1410 nt, Artificial Sequence
  derived and/or modified CDS sequence (wt) from neuraminidase__InfluenzaA__ACR18930
augaauccaaaccaaaagauaauaaccauugguucggucuguaugacaauuggaauggcuaacuuaauauuacaaauuggaaacauaaucucaauauggauuagccacucaauucaacuugggaaucaaaaucagauugaaacaugcaaucaaagcgucauuacuuaugaaaacaacacuuggguaaaucagacauauguuaacaucagcaacaccaacuuugcugcuggacagucagugguuuccgugaaauuagcgggcaauuccucucucugcccuguuaguggaugggcuauauacaguaaagacaacaguauaagaaucgguuccaagggggauguguuugucauaagggaaccauucauaucaugcucccccuuggaaugcagaaccuucuucuugacucaaggggccuugcuaaaugacaaacauuccaauggaaccauuaaagacaggagcccauaucgaacccuaaugagcuguccuauuggugaaguucccucuccauacaacucaagauuugagucagucgcuuggucagcaagugcuugucaugauggcaucaauuggcuaacaauuggaauuucuggcccagacaauggggcaguggcuguguuaaaguacaacggcauaauaacagacacuaucaagaguuggagaaacaauauauugagaacacaagagucugaaugugcauguguaaaugguucuugcuuuacuguaaugaccgauggaccaagugauggacaggccucauacaagaucuucagaauagaaaagggaaagauagucaaaucagucgaaaugaaugccccuaauuaucacuaugaggaaugcuccuguuacccugauucuagugaaaucacaugugugugcagggauaacuggcauggcucgaaucgaccgugggugucuuucaaccagaaucuggaauaucagauaggauacauaugcagugggauuuucggagacaauccacgcccuaaugauaagacaggcaguugugguccaguaucgucuaauggagcaaauggaguaaaaggauuuucauucaaauacggcaaugguguuuggauagggagaacuaaaagcauuaguucaagaaacgguuuugagaugauuugggauccgaacggauggacugggacagacaauaacuucucaauaaagcaagauaucguaggaauaaaugaguggucaggauauagcgggaguuuuguucagcauccagaacuaacagggcuggauuguauaagaccuugcuucuggguugaacuaaucagagggcgacccaaagagaacacaaucuggacuagcgggagcagcauauccuuuugugguguaaacagugacacuguggguuggucuuggccagacggugcugaguugccauuuaccauugacaaguaa

SEQ ID NO: 48871 - RNA, 1410 nt, Artificial Sequence; identical to SEQ ID NO: 48750
  derived and/or modified CDS sequence (wt) from neuraminidase__InfluenzaA__ACR18931

SEQ ID NO: 48872 - RNA, 1410 nt, Artificial Sequence; identical to SEQ ID NO: 48750
  derived and/or modified CDS sequence (wt) from neuraminidase__InfluenzaA__ACR18933

SEQ ID NO: 48873 - RNA, 1410 nt, Artificial Sequence; identical to SEQ ID NO: 48770
  derived and/or modified CDS sequence (wt) from neuraminidase__InfluenzaA__ACR18934

SEQ ID NO: 48874 - RNA, 1410 nt, Artificial Sequence; identical to SEQ ID NO: 48750
  derived and/or modified CDS sequence (wt) from neuraminidase__InfluenzaA__ACR18935

SEQ ID NO: 48875 - RNA, 1410 nt, Artificial Sequence; identical to SEQ ID NO: 48806
  derived and/or modified CDS sequence (wt) from neuraminidase__InfluenzaA__ACR23301

SEQ ID NO: 48876 - RNA, 1410 nt, Artificial Sequence; identical to SEQ ID NO: 48750
  derived and/or modified CDS sequence (wt) from neuraminidase__InfluenzaA__ACR32997

SEQ ID NO: 48877 - RNA, 1410 nt, Artificial Sequence
  derived and/or modified CDS sequence (wt) from neuraminidase__InfluenzaA__ACR33740
augaauccaaaccaaaagauaauaaccauugguucggucuguaugacaauuggaauggcuaacuuaauauuacaaauuggaaacauaaucucaauauggauuagccacucaauucaacuugggaaucaaaaucagauugaaacaugcaaucaaagcgucauuacuuaugaaaacaacacuuggguaaaucagacauauguuaacaucagcaacaccaacuuugcugcuggacagucagugguuuccgugaaauuagcgggcaauuccucucucugcccuguuaguggaugggcuauauacaguaaagacaacaguauaagaaucgguuccaagggggauguguuugucauaagggaaccauucauaucaugcucccccuuggaaugcagaaccuucuucuugacucaaggggccuugcuaaaugacaaacauuccaauggaaccauuaaagacaggagcccauaucgaacccuaaugagcuguccuauuggugaaguucccucuccauacaacucaagauuugagucagucgcuuggucagcaagugcuugucaugauggcaucaauuggcuaacaauuggaauuucuggcccagacaauggggcaguggcuguguuaaaguacaacggcauaauaacagacacuaucaagaguuggagaaacaauauauugagaacacaagagucugaaugugcauguguaaaugguucuugcuuuacuguaaugaccgauggaccaagugauggacaggccucauacaagaucuucagaauagaaaagggaaagauagucaaaucagucgaaaugaaugccccuaauuaucacuaugaggaaugcuccuguuauccugauucuagugaaaucacaugugugugcagggauaacuggcauggcucgaaucgaccgugggugucuuucaaccagaaucuggaauaucagauaggauacauaugcagugggauuuucggagacaauccacgcccuaaugauaagacaggcaguugugguccaguaucgucuaauggagcaaauggaguaaaaggauuuucauucaaauacggcaaugguguuuggauagggagaacuaaaagcauuaguucaagaaacgguuuugagaugauuugggauccgaacggauggacugggacagacaauaacuucucaauaaagcaagauaucguaggaauaaaugaguggucaggauauagcgggaguuuuguucagcauccagaacuaacagggcuggauuguauaagaccuugcuucuggguugaacuaaucagagggcgacccaaagagaacacaaucuggacuagcgggagcagcauauccuuuugugguguaaacaguggcacuguggguuggucuuggccagacggugcugaguugccauuuaccauugacaaguaa

SEQ ID NO: 48878 - RNA, 1410 nt, Artificial Sequence; identical to SEQ ID NO: 48772
  derived and/or modified CDS sequence (wt) from neuraminidase__InfluenzaA__ACR38792

SEQ ID NO: 48879 - RNA, 1410 nt, Artificial Sequence; identical to SEQ ID NO: 48750
  derived and/or modified CDS sequence (wt) from neuraminidase__InfluenzaA__ACR38793

SEQ ID NO: 48880 - RNA, 1410 nt, Artificial Sequence; identical to SEQ ID NO: 48750
  derived and/or modified CDS sequence (wt) from neuraminidase__InfluenzaA__ACR38794

SEQ ID NO: 48881 - RNA, 1410 nt, Artificial Sequence; identical to SEQ ID NO: 48750
  derived and/or modified CDS sequence (wt) from neuraminidase__InfluenzaA__ACR38878

SEQ ID NO: 48882 - RNA, 1410 nt, Artificial Sequence; identical to SEQ ID NO: 48750
  derived and/or modified CDS sequence (wt) from neuraminidase__InfluenzaA__ACR39357

SEQ ID NO: 48883 - RNA, 1410 nt, Artificial Sequence; identical to SEQ ID NO: 48750
  derived and/or modified CDS sequence (wt) from neuraminidase__InfluenzaA__ACR39396

SEQ ID NO: 48884 - RNA, 1410 nt, Artificial Sequence; identical to SEQ ID NO: 48750
  derived and/or modified CDS sequence (wt) from neuraminidase__InfluenzaA__ACR39406

SEQ ID NO: 48885 - RNA, 1410 nt, Artificial Sequence; identical to SEQ ID NO: 48750
  derived and/or modified CDS sequence (wt) from neuraminidase__InfluenzaA__ACR39416

SEQ ID NO: 48886 - RNA, 1410 nt, Artificial Sequence; identical to SEQ ID NO: 48750
  derived and/or modified CDS sequence (wt) from neuraminidase__InfluenzaA__ACR39426

SEQ ID NO: 48887 - RNA, 1410 nt, Artificial Sequence
  derived and/or modified CDS sequence (wt) from neuraminidase__InfluenzaA__ACR39436
augaauccaaaccaaaagauaauaaccauugguucggucuguaugacaauuggaauggcuaacuuaauauuacaaauuggaaacauaaucucaauauggauuagccacucaauucaacuugggaaucaaaaucagauugaaacaugcaaucaaagcgucauuacuuaugaaaacaacacuuggguaaaucagacauauguuaacaucagcaacaccaacuuugcugcuggacagucagugguuuccgugaaauuagcgggcaauuccucucucugcccuguuaguggaugggcuauauacaguaaagacaacaguauaagaaucgguuccaagggggauguguuugucauaagggaaccauucauaucaugcucccccuuggaaugcagaaccuucuucuugacucaaggggccuugcuaaaugacaaacauuccaauggaaccauuaaagacaggagcccauaucgaacccuaaugagcuguccuauuggugaaguucccucuccauacaacucaagauuugagucagucgcuuggucagcaagugcuugucaugauggcaucaauuggcuaacaauuggaauuucuggcccagacaauggggcaguggcuguguuaaaguacaacggcauaauaacagacacuaucaagaguuggagaaacaauauauugagaacacaagagucugaaugugcauguguaaaugguucuugcuuuacuguaaugaccgauggaccaagugauggacaggccucauacaagaucuucagaauagaaaagggaaagauagucaaaucagucgaaaugaaugccccuaauuaucacuaugaggaaugcuccuguuauccugauucuagugaaaucacaugugugugcagggauaacuggcauggcucgaaucgaccgugggugucuuucaaccagaaucuggaauaucagauaggauacauaugcagugggauuuucggagacaauccacgcccuaaugauaagacaggcaguugugguccaguaucgucuaauggagcaaauggaguaaaaggauuuucauucaaauacggcaaugguguuuggauagggagaacuaaaagcauuaguucaagaaacgguuuugagaugauuugggauccaaacggauggacugggacagacaauaacuucucaauaaagcaagauaucguaggaauaaaugaguggucaggauauagcgggaguuuuguucagcauccagaacuaacagggcuggauuguauaagaccuugcuucuggguugaacuaaucagagggcgacccaaagagaacacaaucuggacuagcgggagcagcauauccuuuugugguguaaacagugacacuguggguuggucuuggccagacggugcugaguugccauuuaccauugacaaguaa

SEQ ID NO: 48888 - RNA, 1410 nt, Artificial Sequence; identical to SEQ ID NO: 48750
  derived and/or modified CDS sequence (wt) from neuraminidase__InfluenzaA__ACR39446

SEQ ID NO: 48889 - RNA, 1410 nt, Artificial Sequence; identical to SEQ ID NO: 48750
  derived and/or modified CDS sequence (wt) from neuraminidase__InfluenzaA__ACR39456

SEQ ID NO: 48890 - RNA, 1410 nt, Artificial Sequence; identical to SEQ ID NO: 48750
  derived and/or modified CDS sequence (wt) from neuraminidase__InfluenzaA__ACR39466

SEQ ID NO: 48891 - RNA, 1410 nt, Artificial Sequence; identical to SEQ ID NO: 48750
  derived and/or modified CDS sequence (wt) from neuraminidase__InfluenzaA__ACR39476

SEQ ID NO: 48892 - RNA, 1410 nt, Artificial Sequence
  derived and/or modified CDS sequence (wt) from neuraminidase__InfluenzaA__ACR39486
augaauccaaaccaaaagauaauaaccauugguucggucuguaugacaauuggaauggcuaacuuaauauuacaaauuggaaacauaaucucaauauggauuagccacucaauucaacuugggaaucaaaaucagauugaaacaugcaaucaaagugucauuacuuaugaaaacaacacuuggguaaaucagacauauguuaacaucagcaacaccaacuuugcugcuggacagucagugguuuccgugaaauuagcgggcaauuccucucucugcccuguuaguggaugggcuauauacaguaaagacaacaguauaagaaucgguuccaagggggauguguuugucauaagggaaccauucauaucaugcucccccuuggaaugcagaaccuucuucuugacucaaggggccuugcuaaaugacaaacauuccaauggaaccauuaaagacaggagcccauaucgaacccuaaugagcuguccuauuggugaaguucccucuccauacaacucaagauuugagucagucgcuuggucagcaagugcuugucaugauggcaucaauuggcuaacaauuggaauuucuggcccagacaauggggcaguggcuguguuaaaguacaacggcauaauaacagacacuaucaagaguuggagaaacaauauauugagaacacaagagucugaaugugcauguguaaaugguucuugcuuuacuguaaugaccgauggaccaagugauggacaggccucauacaagaucuucagaauagaaaagggaaagauagucaaaucagucgaaaugaaugccccuaauuaucacuaugaggaaugcuccuguuauccugauucuagugaaaucacaugugugugcagggauaacuggcauggcucgaaucgaccgugggugucuuucaaccagaaucuggaauaucagauaggauacauaugcagugggauuuucggagacaauccacgcccuaaugauaagacaggcaguugugguccaguaucgucuaauggagcaaauggaguaaaaggauuuucauucaaauacggcaaugguguuuggauagggagaacuaaaagcauuaguucaagaaacgguuuugagaugauuugggauccaaacggauggacugggacagacaauaacuucucaauaaagcaagauaucguaggaauaaaugaguggucaggauauagcgggaguuuuguucagcauccagaacuaacagggcuggauuguauaagaccuugcuucuggguugaacuaaucagagggcgacccaaagagaacacaaucuggacuagcgggagcagcauauccuuuugugguguaaacagugacacuguggguuggucuuggccagacggugcugaguugccauuuaccauugacaaguaa

SEQ ID NO: 48893 - RNA, 1410 nt, Artificial Sequence; identical to SEQ ID NO: 48750
  derived and/or modified CDS sequence (wt) from neuraminidase__InfluenzaA__ACR39496

SEQ ID NO: 48894 - RNA, 1410 nt, Artificial Sequence; identical to SEQ ID NO: 48750
  derived and/or modified CDS sequence (wt) from neuraminidase__InfluenzaA__ACR40291

SEQ ID NO: 48895 - RNA, 1410 nt, Artificial Sequence; identical to SEQ ID NO: 48750
  derived and/or modified CDS sequence (wt) from neuraminidase__InfluenzaA__ACR40301

SEQ ID NO: 48896 - RNA, 1410 nt, Artificial Sequence
  derived and/or modified CDS sequence (wt) from neuraminidase__InfluenzaA__ACR40311
augaauccaaaccaaaagauaauaaccauugguucggucuguaugacaauuggaauggcuaacuuaauauuacaaauuggaaacauaaucucaauauggauuagccacucaauucaacuugggaaucaaaaucagacugaaacaugcaaucaaagcgucauuacuuaugaaaacaacacuuggguaaaucagacauauguuaacaucagcaacaccaacuuugcugcuggacagucagugguuuccgugaaauuagcgggcaauuccucucucugcccuguuaguggaugggcuauauacaguaaagacaacaguguaagaaucgguuccaagggggauguguuugucauaagggaaccauucauaucaugcucccccuuggaaugcagaaccuucuucuugacucaaggggccuugcuaaaugacaaacauuccaauggaaccauuaaagacaggagcccauaucgaacccuaaugagcuguccuauuggugaaguucccucuccauacaacucaagauuugagucagucgcuuggucagcaagugcuugucaugauggcaucaauuggcuaacaauuggaauuucuggcccagacaauggggcaguggcuguguuaaaguacaacggcauaauaacagacacuaucaagaguuggagaaacaauauauugagaacacaagagucugaaugugcauguguaaaugguucuugcuuuacuguaaugaccgauggaccaaguaauggacaggccucauacaagaucuucagaauagaaaagggaaagauagucaaaucagucgaaaugaaugccccuaauuaucacuaugaggaaugcuccuguuauccugauucuagugaaaucacaugugugugcagggauaacuggcauggcucgaaucgaccgugggugucuuucaaccagaaucuggaauaucagauaggauacauaugcagugggauuuucggagacaauccacgcccuaaugauaagacaggcaguugugguccaguaucgucuaauggagcaaauggaguaaaaggauuuucauucaaauacggcaaugguguuuggauagggagaacuaaaagcauuaguucaagaaacgguuuugagaugauuugggauccgaacggauggacugggacagacaauaacuucucaauaaagcaagauaucguaggaauaaaugaguggucaggauauagcgggaguuuuguucagcauccagaacuaacagggcuggauuguauaagaccuugcuucuggguugaacuaaucagagggcgacccaaagagaacacaaucuggacuagcgggagcagcauauccuuuugugguguaaacagugacacuguggguuggucuuggccagacggugcugaguugccauuuaccauugacaaguaa

SEQ ID NO: 48897 - RNA, 1410 nt, Artificial Sequence
  derived and/or modified CDS sequence (wt) from neuraminidase__InfluenzaA__ACR40321
augaauccaaaccaaaagauaauaaccauugguucggucuguaugacaauuggaauggcuaacuuaauauuacaaauuggaaacauaaucucaauauggauuagccacucaauucaacuugggaaucaaaaucagauugaaacaugcaaucaaagcgucauuacuuaugaaaacaacacuuggguaaaucagacauauguuaacaucagcaacaccaacuuugcugcuggacagucagugguuuccgugaaauuagcgggcaauuccucucucugcccuguuaguggaugggcuauauacaguaaagacaacaguauaagaaucgguuccaagggggauguguuugucauaagggaaccauucauaucaugcucccccuuggaaugcagaaccuucuucuugacucaaggggccuugcuaaaugacaaacauuccaauggaaccauuaaagacaggagcccauaucgaacccuaaugagcuguccuauuggugaaguucccucuccauacaacucaagauuugagucagucgcuuggucagcaagugcuugucaugauggcaucaauuggcuaacaauuggaauuucuggcccagacaauggggcaguggcuguguuaaaguacaacggcauaauaacagacacuaucaagaguuggagaaacaauauauugagaacacaagagucugaaugugcauguguaaaugguucuugcuuuacuguaaugaccgauggaccaagugauggacaggccucauacaagaucuucagaauagaaaagggaaagauagucaaaucagucgaaaugaaugccccuaauuaucacuaugaggaaugcuccuguuauccugauucuagugaaaucacaugugugugcagggauaacuggcauggcucgaaucgaccgugggugucuuucaaccagaaucuggaauaucagauaggauacauaugcagugggauuuucggagacaauccacgcccuaaugauaagacaggcaguugugguccaguaucgucuaauggagcaaauggaguaaaaggauuuucauucaaauacggcaaugguguuuggauagggagaacuaaaagcauuaguucaagaaacgguuuugagaugauuugggauccgaacggauggaaugggacagacaauaacuucucaauaaagcaagauaucguaggaauaaaugaguggucaggauauagcgggaguuuuguucagcauccagaacuaacagggcuggauuguauaagaccuugcuucuggguugaacuaaucagagggcgacccaaagagaacacaaucuggacuagcgggagcagcauauccuuuugugguguaaacagugacacuguggguuggucuuggccagacggugcugaguugccauuuaccauugacaaguaa

SEQ ID NO: 48898 - RNA, 1410 nt, Artificial Sequence; identical to SEQ ID NO: 48750
  derived and/or modified CDS sequence (wt) from neuraminidase__InfluenzaA__ACR40341

SEQ ID NO: 48899 - RNA, 1410 nt, Artificial Sequence; identical to SEQ ID NO: 48750
  derived and/or modified CDS sequence (wt) from neuraminidase__InfluenzaA__ACR40351

SEQ ID NO: 48900 - RNA, 1410 nt, Artificial Sequence; identical to SEQ ID NO: 48750
  derived and/or modified CDS sequence (wt) from neuraminidase__InfluenzaA__ACR40361

SEQ ID NO: 48901 - RNA, 1410 nt, Artificial Sequence; identical to SEQ ID NO: 48750
  derived and/or modified CDS sequence (wt) from neuraminidase__InfluenzaA__ACR40371

SEQ ID NO: 48902 - RNA, 1410 nt, Artificial Sequence; identical to SEQ ID NO: 48750
  derived and/or modified CDS sequence (wt) from neuraminidase__InfluenzaA__ACR40391

SEQ ID NO: 48903 - RNA, 1410 nt, Artificial Sequence; identical to SEQ ID NO: 48749
  derived and/or modified CDS sequence (wt) from neuraminidase__InfluenzaA__ACR46663

SEQ ID NO: 48904 - RNA, 1410 nt, Artificial Sequence; identical to SEQ ID NO: 48749
  derived and/or modified CDS sequence (wt) from neuraminidase__InfluenzaA__ACR46673

SEQ ID NO: 48905 - RNA, 1410 nt, Artificial Sequence
  derived and/or modified CDS sequence (wt) from neuraminidase__InfluenzaA__ACR46996
augaauccaaaccaaaagauaauaaccauugguucggucuguaugacaauuggaauggcuaacuuaauauuacaaauuggaaacauaaucucaauauggauuagccacucaauucaacuugggaaucaaaaucagauugaaacaugcaaucaaagcgucauuacuuaugaaaacaacacuuggguaaaucagacauauguuaacaucagcaacaccaacuuugcugcuggacagucagugguuuccgugaaauuagcgggcaauuccucucucugcccuguuaguggaugggcuauauacaguaaagacaacaguauaagaaucgguuccaagggggauguguuugucauaagggaaccauucauaucaugcucccccuuggaaugcagaaccuucuucuugacucaaggggccuugcuaaaugacaaacauuccaauggaaccauuaaagacaggagcccauaucgaacccuaaugagcuguccuauuggugaaguucccucuccauacaacucaagauuugagucagucgcuuggucagcaagugcuugucaugauggcaucaauuggcuaacaauuggaauuucuggcccagacaauggggcaguggcuguguuaaaguacaacggcauaauaacagacacuaucaagaguuggagaaacaauauauugagaacacaagagucugaaugugcauguguaaaugguucuugcuuuacuguaaugaccgauggaccaaguaauggacaggccucauacaagaucuucagaauagaaaagggaaagauagucaaaucagucgaaaugaaugccccuaauuaucacuaugaggaaugcuccuguuauccugauucuagugaaaucacaugugugugcagggauaacuggcauggcucgaaucgaccgugggugucuuucaaccagaaucuggaauaucagauaggauacauaugcagugggauuuucggagacaauccacgcccuaaugauaagacaggcaguugugguccaguaucgucuaauggagcaaauggaguaaaaggauuuucauucaaauacggcaaugguguuuggauagggagaacuaaaagcauuaguucaagaaacgguuuugagaugauuugggauccgaacggauggacugggacagacaauaacuucucaauaaagcaagauaucguaggaauaaaugaguggucaggauauagcgggaguuuuguucagcauccagaacuaacagggcuggauuguauaagaccuugcuucuggguugaacuaaucagagggcgacccaaagagaacacaaucuggacuagcgggagcagcauauccuuuugugguguaaacagugacacuguggguuggucuuggccagacggugcugaguugccauuuaccauugacaaguaa

SEQ ID NO: 48906 - RNA, 1410 nt, Artificial Sequence
  derived and/or modified CDS sequence (wt) from neuraminidase__InfluenzaA__ACR46997
augaauccaaaccaaaagauaauaaccauugguucggucuguaugacaauuggaauggcuaacuuaauauuacaaauuggaaacauaaucucaauauggauuagccacucaauucaacuugggaaucaaaaucagauugaaacaugcaaucaaagcgucauuacuuaugaaaacaacacuuggguaaaucagacauauguuaacaucagcaacaccaacuuugcugcuggacagucagugguuuccgugaaauuagcgggcaauuccucucucugcccuguuaguggaugggcuauauacaguaaagacaacaguauaagaaucgguuccaagggggauguguuugucauaagggaaccauucauaucaugcucccccuuggaaugcagaaccuucuucuugacucaaggggccuugcuaaaugacaaacauuccaauggaaccauuaaagacaggagcccauaucgaacccuaaugagcuguccuauuggugaaguucccucuccauacaacucaagauuugagucagucgcuuggucagcaagugcuugucaugauggcaucaauuggcuaacaauuggaauuucuggcccagacaauggggcaguggcuguguuaaaguacaacggcauaauaacagacacuaucaaaaguuggagaaacaauauauugagaacacaagagucugaaugugcauguguaaaugguucuugcuuuacuguaaugaccgauggaccaaguaauggacaggccucauacaagaucuucagaauagaaaagggaaagauagucaaaucagucgaaaugaaugccccuaauuaucacuaugaggaaugcuccuguuauccugauucuagugaaaucacaugugugugcagggauaacuggcauggcucgaaucgaccgugggugucuuucaaccagaaucuggaauaucagauaggauacauaugcagugggauuuucggagacaauccacgcccuaaugauaagacaggcaguugugguccaguaucgucuaauggagcaaauggaguaaaaggauuuucauucaaauacggcaaugguguuuggauagggagaacuaaaagcauuaguucaagaaacgguuuugagaugauuugggauccgaacggauggacugggacagacaauaacuucucaauaaagcaagauaucguaggaauaaaugaguggucaggauauagcgggaguuuuguucagcauccagaacuaacagggcuggauuguauaagaccuugcuucuggguugaacuaaucagagggcgacccaaagagaacacaaucuggacuagcgggagcagcauauccuuuugugguguaaacagugacacuguggguuggucuuggccagacggugcugaguugccauuuaccauugacaaguaa

SEQ ID NO: 48907 - RNA, 1410 nt, Artificial Sequence; identical to SEQ ID NO: 48905
  derived and/or modified CDS sequence (wt) from neuraminidase__InfluenzaA__ACR46998

SEQ ID NO: 48908 - RNA, 1410 nt, Artificial Sequence; identical to SEQ ID NO: 48905
  derived and/or modified CDS sequence (wt) from neuraminidase__InfluenzaA__ACR46999

SEQ ID NO: 48909 - RNA, 1410 nt, Artificial Sequence; identical to SEQ ID NO: 48905
  derived and/or modified CDS sequence (wt) from neuraminidase__InfluenzaA__ACR47000

SEQ ID NO: 48910 - RNA, 1410 nt, Artificial Sequence; identical to SEQ ID NO: 48905
  derived and/or modified CDS sequence (wt) from neuraminidase__InfluenzaA__ACR47001

SEQ ID NO: 48911 - RNA, 1410 nt, Artificial Sequence; identical to SEQ ID NO: 48905
  derived and/or modified CDS sequence (wt) from neuraminidase__InfluenzaA__ACR47002

SEQ ID NO: 48912 - RNA, 1410 nt, Artificial Sequence; identical to SEQ ID NO: 48905
  derived and/or modified CDS sequence (wt) from neuraminidase__InfluenzaA__ACR47003

SEQ ID NO: 48913 - RNA, 1410 nt, Artificial Sequence
  derived and/or modified CDS sequence (wt) from neuraminidase__InfluenzaA__ACR47008
augaauccaaaccaaaagauaauaaccauugguucggucuguaugacaauuggaauggcuaacuuaauauuacaaauuggaaacauaaucucaauauggccaguccacucaauucaacuugggaaucaaaaucagauugaaacaugcaaucaaagcgucauuacuuaugaaaacaacacuuggguaaaucagacauauguuaacaucagcaacaccaacuuugcugcuggacagucagugguuuccaugaaauuagcgggcaauuccucucucugcccuguugguggaugggcuauauacaguaaagacaacaguguaagaaucgguuccaagggggauguguuugucauaagggaaccauucauaucaugcucccccuuggaaugcagaaccuucuucuugacucaaggggccuugcuaaaugacaaacauuccaauggaaccauuaaagacaggagcccauaucgaacccuaaugagcuguccuauuggugaaguucccucuccauacaacucaagauuugagucagucgcuuggucagcaagugcuugucaugauggcaucaauuggcuaacaauuggaauuucuggcccagacaauggggcaguggcuguguuaaaguacaacggcauaauaacagacacuaucaagaguuggagaaacaauauauugagaacacaagagucugaaugugcauguguaaaugguucuugcuuuacuguaaugaccgauggaccaaguaauggacaggccucauacaagaucuucagaauagaaaagggaaagauagucaaaucagucgaaaugaaugccccuaauuaucacuaugaggaaugcuccuguuauccugauucuagugaaaucacaugugugugcagggauaacuggcauggcucgaaucgaccgugggugucuuucaaccagaaucuggaauaucagauaggauacauaugcagugggauuuucggagacaauccacgcccuaaugauaagacaggcaguugugguccaguaucgucuaauggagcaaauggaguaaaaggauuuucauucaaauacggcaaugguguuuggauagggagaacuaaaagcauuaguucaagaaacgguuuugagaugauuugggauccgaacggauggacugggacagacaauaacuucucaauaaagcaagauaucguaggaauaaaugaguggucaggauauagcgggaguuuuguucagcauccggaacuaacagggcuggauuguauaagaccuugcuucuggguugaacuaaucagagggcgacccaaagagaacacaaucuggacuagcgggagcagcauauccuuuugugguguaaacagugacacuguggguuggucuuggccagacggugcugaguugccauuuaccauugacaaguaa

SEQ ID NO: 48914 - RNA, 1410 nt, Artificial Sequence; identical to SEQ ID NO: 48750
  derived and/or modified CDS sequence (wt) from neuraminidase__InfluenzaA__ACR49267

SEQ ID NO: 48915 - RNA, 1410 nt, Artificial Sequence; identical to SEQ ID NO: 48773
  derived and/or modified CDS sequence (wt) from neuraminidase__InfluenzaA__ACR49268

SEQ ID NO: 48916 - RNA, 1410 nt, Artificial Sequence; identical to SEQ ID NO: 48749
  derived and/or modified CDS sequence (wt) from neuraminidase__InfluenzaA__ACR49269

SEQ ID NO: 48917 - RNA, 1410 nt, Artificial Sequence; identical to SEQ ID NO: 48749
  derived and/or modified CDS sequence (wt) from neuraminidase__InfluenzaA__ACR49270

SEQ ID NO: 48918 - RNA, 1410 nt, Artificial Sequence; identical to SEQ ID NO: 48780
  derived and/or modified CDS sequence (wt) from neuraminidase__InfluenzaA__ACR49271

SEQ ID NO: 48919 - RNA, 1410 nt, Artificial Sequence; identical to SEQ ID NO: 48887
  derived and/or modified CDS sequence (wt) from neuraminidase__InfluenzaA__ACR49272

SEQ ID NO: 48920 - RNA, 1410 nt, Artificial Sequence; identical to SEQ ID NO: 48749
  derived and/or modified CDS sequence (wt) from neuraminidase__InfluenzaA__ACR49273

SEQ ID NO: 48921 - RNA, 1410 nt, Artificial Sequence; identical to SEQ ID NO: 48749
  derived and/or modified CDS sequence (wt) from neuraminidase__InfluenzaA__ACR49274

SEQ ID NO: 48922 - RNA, 1410 nt, Artificial Sequence; identical to SEQ ID NO: 48780
  derived and/or modified CDS sequence (wt) from neuraminidase__InfluenzaA__ACR49275

SEQ ID NO: 48923 - RNA, 1410 nt, Artificial Sequence; identical to SEQ ID NO: 48780
  derived and/or modified CDS sequence (wt) from neuraminidase__InfluenzaA__ACR49277

SEQ ID NO: 48924 - RNA, 1410 nt, Artificial Sequence; identical to SEQ ID NO: 48780
  derived and/or modified CDS sequence (wt) from neuraminidase__InfluenzaA__ACR49278

SEQ ID NO: 48925 - RNA, 1410 nt, Artificial Sequence; identical to SEQ ID NO: 48749
  derived and/or modified CDS sequence (wt) from neuraminidase__InfluenzaA__ACR49279

SEQ ID NO: 48926 - RNA, 1410 nt, Artificial Sequence; identical to SEQ ID NO: 48749
  derived and/or modified CDS sequence (wt) from neuraminidase__InfluenzaA__ACR50994

SEQ ID NO: 48927 - RNA, 1410 nt, Artificial Sequence; identical to SEQ ID NO: 48887
  derived and/or modified CDS sequence (wt) from neuraminidase__InfluenzaA__ACR50998

SEQ ID NO: 48928 - RNA, 1410 nt, Artificial Sequence; identical to SEQ ID NO: 48750
  derived and/or modified CDS sequence (wt) from neuraminidase__InfluenzaA__ACR51008

SEQ ID NO: 48929 - RNA, 1410 nt, Artificial Sequence; identical to SEQ ID NO: 48750
  derived and/or modified CDS sequence (wt) from neuraminidase__InfluenzaA__ACR51018

SEQ ID NO: 48930 - RNA, 1410 nt, Artificial Sequence; identical to SEQ ID NO: 48750
  derived and/or modified CDS sequence (wt) from neuraminidase__InfluenzaA__ACR51028

SEQ ID NO: 48931 - RNA, 1410 nt, Artificial Sequence
  derived and/or modified CDS sequence (wt) from neuraminidase__InfluenzaA__ACR51038
augaauccaaaccaaaagauaauaaccauugguucggucuguaugucaauuggaauggcuaacuuaauauuacaaauuggaaacauaaucucaauauggauuagccacucaauucaacuugggaaucaaaaucagauugaaacaugcaaucaaagcgucauuacuuaugaaaacaacacuuggguaaaucagacauauguuaacaucagcaacaccaacuuugcugcuggacagucagugguuuccgugaaauuagcgggcaauuccucucucugcccuguuaguggaugggcuauauacaguaaagacaacaguauaagaaucgguuccaagggggauguguuugucauaagggaaccauucauaucaugcucccccuuggaaugcagaaccuucuucuugacucaaggggccuugcuaaaugacaaacauuccaauggaaccauuaaagacaggagcccauaucgaacccuaaugagcuguccuauuggugaaguucccucuccauacaacucaagauuugagucagucgcuuggucagcaagugcuugucaugauggcaucaauuggcuaacaauuggaauuucuggcccagacaauggggcaguggcuguguuaaaguacaacggcauaauaacagacacuaucaagaguuggagaaacaauauauugagaacacaagagucugaaugugcauguguaaaugguucuugcuuuacuguaaugaccgauggaccaagugauggacaggccucauacaagaucuucagaauagaaaagggaaagauagucaaaucagucgaaaugaaugccccuaauuaucacuaugaggaaugcuccuguuauccugauucuagugaaaucacaugugugugcagggauaacuggcauggcucgaaucgaccgugggugucuuucaaccagaaucuggaauaucagauaggauacauaugcagugggauuuucggagacaauccacgcccuaaugauaagacaggcaguugugguccaguaucgucuaauggagcaaauggaguaaaaggauuuucauucaaauacggcaaugguguuuggauagggagaacuaaaagcauuaguucaagaaacgguuuugagaugauuugggauccgaacggauggacugggacagacaauaacuucucaauaaagcaagauaucguaggaauaaaugaguggucaggauauagcgggaguuuuguucagcauccagaacuaacagggcuggauuguauaagaccuugcuucuggguugaacuaaucagagggcgacccaaagagaacacaaucuggacuagcgggagcagcauauccuuuugugguguaaacagugacacuguggguuggucuuggccagacggugcugaguugccauuuaccauugacaaguaa

SEQ ID NO: 48932 - RNA, 1410 nt, Artificial Sequence; identical to SEQ ID NO: 48750
  derived and/or modified CDS sequence (wt) from neuraminidase__InfluenzaA__ACR51048

SEQ ID NO: 48933 - RNA, 1410 nt, Artificial Sequence; identical to SEQ ID NO: 48750
  derived and/or modified CDS sequence (wt) from neuraminidase__InfluenzaA__ACR51058

SEQ ID NO: 48934 - RNA, 1410 nt, Artificial Sequence; identical to SEQ ID NO: 48749
  derived and/or modified CDS sequence (wt) from neuraminidase__InfluenzaA__ACR51068

SEQ ID NO: 48935 - RNA, 1410 nt, Artificial Sequence; identical to SEQ ID NO: 48750
  derived and/or modified CDS sequence (wt) from neuraminidase__InfluenzaA__ACR52371

SEQ ID NO: 48936 - RNA, 1410 nt, Artificial Sequence; identical to SEQ ID NO: 48750
  derived and/or modified CDS sequence (wt) from neuraminidase__InfluenzaA__ACR52381

SEQ ID NO: 48937 - RNA, 1410 nt, Artificial Sequence; identical to SEQ ID NO: 48750
  derived and/or modified CDS sequence (wt) from neuraminidase__InfluenzaA__ACR52391

SEQ ID NO: 48938 - RNA, 1410 nt, Artificial Sequence; identical to SEQ ID NO: 48750
  derived and/or modified CDS sequence (wt) from neuraminidase__InfluenzaA__ACR52401

SEQ ID NO: 48939 - RNA, 1410 nt, Artificial Sequence; identical to SEQ ID NO: 48750
  derived and/or modified CDS sequence (wt) from neuraminidase__InfluenzaA__ACR52411

SEQ ID NO: 48940 - RNA, 1410 nt, Artificial Sequence; identical to SEQ ID NO: 48750
  derived and/or modified CDS sequence (wt) from neuraminidase__InfluenzaA__ACR52421

SEQ ID NO: 48941 - RNA, 1410 nt, Artificial Sequence; identical to SEQ ID NO: 48750
  derived and/or modified CDS sequence (wt) from neuraminidase__InfluenzaA__ACR52431

SEQ ID NO: 48942 - RNA, 1410 nt, Artificial Sequence; identical to SEQ ID NO: 48750
  derived and/or modified CDS sequence (wt) from neuraminidase__InfluenzaA__ACR52441

SEQ ID NO: 48943 - RNA, 1410 nt, Artificial Sequence; identical to SEQ ID NO: 48750
  derived and/or modified CDS sequence (wt) from neuraminidase__InfluenzaA__ACR52451

SEQ ID NO: 48944 - RNA, 1410 nt, Artificial Sequence; identical to SEQ ID NO: 48750
  derived and/or modified CDS sequence (wt) from neuraminidase__InfluenzaA__ACR52471

SEQ ID NO: 48945 - RNA, 1410 nt, Artificial Sequence; identical to SEQ ID NO: 48750
  derived and/or modified CDS sequence (wt) from neuraminidase__InfluenzaA__ACR52481

SEQ ID NO: 48946 - RNA, 1410 nt, Artificial Sequence; identical to SEQ ID NO: 48750
  derived and/or modified CDS sequence (wt) from neuraminidase__InfluenzaA__ACR52491

SEQ ID NO: 48947 - RNA, 1410 nt, Artificial Sequence
  derived and/or modified CDS sequence (wt) from neuraminidase__InfluenzaA__ACR54046
augaauccaaaccaaaagauaauaaccauugguucggucuguaugacaauuggaauggcuaacuuaauauuacaaauuggaaacauaaucucaauauggauuagccacucaauucaacuugggaaucaaaaucagauugaaacaugcaaucaaagcgucauuacuuaugaaaacaacacuuggguaaaucagacauauguuaacaucagcaacaccaacuuugcugcuggacagucagugguuuccgugaaauuagcgggcaauuccucucucugcccuguuaguggaugggcuauauacaguaaagacaacaguauaagaaucgguuccaagggggauguguuugucauaagggaaccauucauaucaugcucccccuuggaaugcagaaccuucuucuugacucaaggggccuugcuaaaugacaaacauuccaauggaaccauuaaagacaggagcccauaucgaacccuaaugagcuguccuauuggugaaguucccucuccauacaacucaagauuugagucagucgcuuggucagcaagugcuugucaugauggcaucaauuggcuaacaauuggaauuucuggcccagacaauggggcaguggcuguguuaaaguacaacggcauaauaacagacacuaucaagaguuggagaaacaauauauugagaacacaagagucugaaugugcauguguaaaugguucuugcuuuacuguaaugaccgauggaccaagugauggacaggccucauacaagaucuucagaauagaaaagggaaagauagucaaaucagucgaaaugaaugccccuaauuaucacuaugaggaaugcuccuguuauccugauucuagugaaaucacaugugugugcagggauaacuggcauggcucgaaucgaccgugggugucuuucaaccagaaucuggaauaucagauaggauacauaugcagugggauuuucggagacaauccacgcccuaaugauaagacaggcaguugugguccaguaucgucuaauggagcaaauggaguaaaaggauuuucauucaaauacggcaaugguguuuggauagggagaacuaaaagcauuaguucaagaaacgguuuugagaugauuugggauccgaacggauggacugggacagacaauaacuucucaauaaagcaagauaucguaggaauaaaugaguggucaggauauagcgggaguuuuguccagcauccagaacuaacagggcuggauuguauaagaccuugcuucuggguugaacuaaucagagggcgacccaaagagaacacaaucuggacuagcgggagcagcauauccuuuugugguguaaacagugacacuguggguuggucuuggccagacggugcugaguugccauuuaccauugacaaguaa

SEQ ID NO: 48948 - RNA, 1410 nt, Artificial Sequence; identical to SEQ ID NO: 48761
  derived and/or modified CDS sequence (wt) from neuraminidase__InfluenzaA__ACR54052

SEQ ID NO: 48949 - RNA, 1410 nt, Artificial Sequence
  derived and/or modified CDS sequence (wt) from neuraminidase__InfluenzaA__ACR54966
augaauccaaaccaaaagauaauaaccauugguucggucuguaugacaauuggaauggcuaacuuaauauuacaaauuggaaacauaaucucaauauggauuagccacucaauucaacuugggaaucaaaaucagauugaaacaugcaaucaaagcgucauuacuuaugaaaacaacacuuggguaaaucagacauauguuaacaucagcaacaccaacuuugcugcuggacagucagugguuuccgugaaauuagcgggcaauuccucucucugcccuguuaguggaugggcuauauacaguaaagacaacaguauaagaaucgguuccaagggggauguguuugucauaagggaaccauucauaucaugcucccccuuggaaugcagaaccuucuucuugacucaaggggccuugcuaaaugacaaacauuccaauggaaccauuaaagacaggagcccauaucgaacccuaaugagcuguccuauuggugaaguucccucuccauacaacucaagauuugagucagucgcuuggucagcaagugcuugucaugauggcaucaauuggcuaacaauuggaauuucuggcccagacaauggggcaguggcuguguuaaaguacaacggcauaauaacagacacuaucaagaguuggagaaacaauauauugagaacacaagagucugaaugugcauguguaaaugguucuugcuuuacuguaaugaccgauggaccaagugauggacaggccucauacaaaaucuucagaauagaaaagggaaagauagucaaaucagucgaaaugaaugccccuaauuaucacuaugaggaaugcuccuguuauccugauucuagugaaaucacaugugugugcagggauaacuggcauggcucgaaucgaccgugggugucuuucaaccagaaucuggaauaucagauaggauacauaugcagugggauuuucggagacaauccacgcccuaaugauaagacaggcaguugugguccaguaucgucuaauggagcaaauggaguaaaaggauuuucauucaaauacggcaaugguguuuggauagggagaacuaaaagcauuaguucaagaaacgguuuugagaugauuugggauccgaacggauggacugggacagacaauaacuucucaauaaagcaagauaucguaggaauaaaugaguggucaggauauagcgggaguuuuguucagcauccagaacuaacagggcuggauuguauaagaccuugcuucuggguugaacuaaucagagggcgacccaaagagaacacaaucuggacuagcgggagcagcauauccuuuugugguguaaacagugacacuguggguuggucuuggccagacggugcugaguugccauuuaccauugacaaguaa

SEQ ID NO: 48950 - RNA, 1410 nt, Artificial Sequence; identical to SEQ ID NO: 48750
  derived and/or modified CDS sequence (wt) from neuraminidase__InfluenzaA__ACR54976

SEQ ID NO: 48951 - RNA, 1410 nt, Artificial Sequence; identical to SEQ ID NO: 48870
  derived and/or modified CDS sequence (wt) from neuraminidase__InfluenzaA__ACR54986

SEQ ID NO: 48952 - RNA, 1410 nt, Artificial Sequence; identical to SEQ ID NO: 48813
  derived and/or modified CDS sequence (wt) from neuraminidase__InfluenzaA__ACR54996

SEQ ID NO: 48953 - RNA, 1410 nt, Artificial Sequence
  derived and/or modified CDS sequence (wt) from neuraminidase__InfluenzaA__ACR55006
augaauccaaaccaaaagauaauaaccauugguucggucuguaugacaauuggaauggcuaacuuaauauuacaaauuggaaacauaaucucaauauggauuagccacucaauucaacuugggaaucaaaaucagauugaaacaugcaaucaaagcgucauuacuuaugaaaacaacacuuggguaaaucagacauauguuaacaucagcaacaccaacuuugcugcuggacagucagugguuuccgugaaauuagcgggcaauuccucucucugcccuguuaguggaugggcuauauacaguaaagacaacaguauaagaaucgguuccaagggggauguguuugucauaagggaaccauucauaucaugcucccccuuggaaugcagaaccuucuucuugacucaaggggccuugcuaaaugacaaacauuccaauggaaccauuaaagacaggagcccauaucgaacccuaaugagcuguccuauuggugaaguucccucuccauacaacucaagauuugagucagucgcuuggucagcaagugcuugucaugauggcaucaauuggcuaacaauuggaauuucuggcccagacaauggggcaguggcuguguuaaaguacaacggcauaauaacagacacuaucaagaguuggagaaacaauauauugagaacacaagagucugaaugugcauguguaaaugguucuugcuuuacuguaaugaccgauggaccaagugauggacaggccucauacaagaucuucagaauagaaaagggaaagauagucaaaucagucgaaaugaaugccccuaauuaucacuaugaggaaugcuccuguuauccugauucuagugaaaucacaugugugugcagggauaacuggcauggcucgaaucgaccgugggugucuuucaaccagaaucuggaauaucagauaggauacauauguagugggauuuucggagacaauccacgcccuaaugauaagacaggcaguugugguccaguaucgucuaauggagcaaauggaguaaaaggauuuucauucaaauacggcaaugguguuuggauagggagaacuaaaagcauuaguucaagaaacgguuuugagaugauuugggauccgaacggauggacugggacagacaauaacuucucaauaaagcaagauaucguaggaauaaaugaguggucaggauauagcgggaguuuuguucagcauccagaacuaacagggcuggauuguauaagaccuugcuucuggguugaacuaaucagagggcgacccaaagagaacacaaucuggacuagcgggagcagcauauccuuuugugguguaaacagugacacuguggguuggucuuggccagacggugcugaguugccauuuaccauugacaaguaa

SEQ ID NO: 48954 - RNA, 1410 nt, Artificial Sequence; identical to SEQ ID NO: 48749
  derived and/or modified CDS sequence (wt) from neuraminidase__InfluenzaA__ACR56383

SEQ ID NO: 48955 - RNA, 1410 nt, Artificial Sequence; identical to SEQ ID NO: 48749
  derived and/or modified CDS sequence (wt) from neuraminidase__InfluenzaA__ACR56393

SEQ ID NO: 48956 - RNA, 1410 nt, Artificial Sequence; identical to SEQ ID NO: 48750
  derived and/or modified CDS sequence (wt) from neuraminidase__InfluenzaA__ACR56403

SEQ ID NO: 48957 - RNA, 1410 nt, Artificial Sequence; identical to SEQ ID NO: 48750
  derived and/or modified CDS sequence (wt) from neuraminidase__InfluenzaA__ACR56413

SEQ ID NO: 48958 - RNA, 1410 nt, Artificial Sequence; identical to SEQ ID NO: 48750
  derived and/or modified CDS sequence (wt) from neuraminidase__InfluenzaA__ACR56423

SEQ ID NO: 48959 - RNA, 1410 nt, Artificial Sequence; identical to SEQ ID NO: 48750
  derived and/or modified CDS sequence (wt) from neuraminidase__InfluenzaA__ACR56433

SEQ ID NO: 48960 - RNA, 1410 nt, Artificial Sequence; identical to SEQ ID NO: 48750
  derived and/or modified CDS sequence (wt) from neuraminidase__InfluenzaA__ACR56443

SEQ ID NO: 48961 - RNA, 1410 nt, Artificial Sequence; identical to SEQ ID NO: 48887
  derived and/or modified CDS sequence (wt) from neuraminidase__InfluenzaA__ACR56453

SEQ ID NO: 48962 - RNA, 1413 nt, Artificial Sequence; identical to SEQ ID NO: 48728
  derived and/or modified CDS sequence (wt) from neuraminidase__InfluenzaA__ACR58555

SEQ ID NO: 48963 - RNA, 1413 nt, Artificial Sequence
  derived and/or modified CDS sequence (wt) from neuraminidase__InfluenzaA__ACR61658
augaauccaaaucaaaaaauaauaaccauuggaucaaucaguauagcaaucgggauaauuagucuaauguugcaaauaggaaauauuauuucaauaugggcuagucacucaauccaaacuggaagucaaaaccacacuggaauaugcaaccaaagaaucaucacauaugaaaacagcaccugggugaaucacacauauguuaguauuaacaacacuaauguuguuacuggaaaggacaaaacuucagugacauuggccggcaauucaucucuuuguucuaucaguggaugggcuauauacacaaaagacaacagcauaagaauuggcuccaaaggagauguuuuugucauaagagaaccuuucauaucauguucucauuuggaaugcaggaccuuuuuucugacccaaggugcucuauuaaaugacaaacauucaaauggaaccguuaaggaccgaaguccuuauagggccuuaaugagcuguccucuaggugaagcuccguccccauacaauucaaaguuugaaucaguugcauggucagcaagcgcaugccaugauggcaugggcugguuaacaaucggaauuucugguccagacaauggagcuguggcuguacuaaaauacaacggaauaauaacugaaaccauaaaaaguuggaaaaagcgaauauugagaacacaagagucugaaugugucugugugaacgggucauguuucaccauaaugaccgauggcccgaguaauggggccgccucguacaaaaucuucaaaaucgaaaaggggaagguuacuaaaucaauagaguuaaaugcacccaauuuucauuaugaggaauguuccuguuacccagacacuggcacagugauguguguaugcagggacaacuggcaugguucaaaucgaccuugggugucuuuuaaucaaaacuuggauuaucaaauaggauacaucugcaguggaguguucggugacaauccgcgucccaaagauggaaagggcagcuguaauccagugacuguugauggagcagacgggguuaagggguuuucauacaaauaugguaaugguguuuggauaggaagaacuaaaaguaacagacuuagaaagggguuugagaugauuugggauccuaauggauggacagauaccgacagugauuucucagugaaacaggauguuguggcaauaacugauuggucaggguacaguggaaguuucguucaacauccugaguuaacaggauuggacuguauaagaccuugcuucuggguugaguuagucagaggacugccuagagaaaauacaacaaucuggacuagugggagcagcauuucuuuuuguggcguugauagugauacugcaaacuggucuuggccagacggugcugaguugccguucaccauugacaaguag

SEQ ID NO: 48964 - RNA, 1410 nt, Artificial Sequence
  derived and/or modified CDS sequence (wt) from neuraminidase__InfluenzaA__ACR61680
augaauccaaaucaaaagauaauaacgauuggcucuguuucucucaccauuuccacaauaugcuucuucaugcaaauugccaucuugauaacuacuguaacauugcauuucaagcaauaugaauucaacucccccccaaacaaccaagugaugcugugugaaccaacaauaauagaaagaaacauaacagagauaguguaucugaccaacaccaccauagagaaggaaauaugccccaaacuagcagaauacagaaauuggucaaagccgcaaugugacauuacaggauuugcaccuuuuucuaaggacaauucgauuaggcuuuccgcugguggggacaucugggugacaagagaaccuuaugugucaugcgauccugacaaguguuaucaauuugcccuuggacagggaacaacacuaaacaacgugcauucaaaugacacaguacgugauaggaccccuuaucggacccuauugaugaaugaguuagguguuccuuuucaucuggggaccaagcaagugugcauagcaugguccagcucaaguugucacgauggaaaagcauggcugcauguuuguauaacgggggaugauaaaaaugcaacugcuagcuucauuuacaaugggaggcuuguagauaguguuguuucaugguccaaagaaauccucaggacccaggagucagaaugcguuuguaucaauggaacuuguauaguaguaaugacugaugggagugcuucaggaaaagcugauacuaaaauacuauucauugaggaggggaaaaucguucauacuagcacauugucaggaagugcucagcaugucgaggagugcuccugcuauccucgauauccuggugucagaugugucugcagagacaacuggaaaggcuccaauaggcccaucguagauauaaacauaaaggaucauagcauuguuuccaguuauguguguucaggacuuguuggagacacacccagaaaaaacgacagcuccagcaguagccauuguuuggauccuaacaaugaagaagguggucauggagugaaaggcugggccuuugaugauggaaaugacguguggaugggaagaacgaucagcgagaagucacgcuuaggguaugaaaccuucaaagucauugaaggcugguccaacccuaaguccaaauugcagauaaauaggcaagucauaguugacagagguaauagguccgguuauucugguauuuucucuguugaaggcaaaagcugcaucaaucggugcuuuuauguggaguugauaaggggaagaaaagaggaaacugaagucuuguggaccucaaacaguauuguuguguuuuguggcaccucagguacauauggaacaggcucauggccugauggggcggacaucaaucucaugccuauauaa

SEQ ID NO: 48965 - RNA, 1410 nt, Artificial Sequence
  derived and/or modified CDS sequence (wt) from neuraminidase__InfluenzaA__ACR61691
augaauccaaaucaaaagauaauaacgauuggcucuguuucucucaccauuuccacaauaugcuucuucaugcaaauugccaucuugauaacuacuguaacauugcauuucaagcaauaugaauucaacucccccccaaacaaccaagugaugcugugugaaccaacaauaauagaaagaaacauaacagagauaguguaucugaccaacaccaccauagagaaggaaauaugccacaaacuagcagaauacagaaauuggucaaagccgcaaugugacauuacaggauuugcaccuuuuucuaaggacaauucgauuaggcuuuccgcugguggggacaucugggugacaagagaaccuuaugugucaugcgauccugacaaguguuaucaauuugcccuuggacagggaacaacacuaaacaacgugcauucaaauaacacaguacgugauaggaccccuuaucggacccuauugaugaaugaguuagguguuccuuuucaucuggggaccaagcaagugugcauagcaugguccagcucaaguugucacgauggaaaagcauggcugcauguuuguauaacgggggaugauaaaaaugcaacugcuagcuucauuuacaaugggaggcuuguagauaguguuguuucaugguccaaagaaauccucaggacccaggagucagaaugcguuuguaucaauggaacuuguacaguaguaaugacugaugggagugcuucaggaaaagcugauacuaaaauacuauucauugaggaggggaaaaucguucauacuagcacauugucaggaagugcucagcaugucgaggagugcuccugcuauccucgauauccuggugucagaugugucugcagagacaacuggaaaggcuccaauaggcccaucguagauauaaacauaaaggaucauagcauuguuuccaguuauguguguucaggacuuguuggagacacacccagaaaaaacgacagcuccagcaguagccauuguuuggauccuaacaaugaagaagguggucauggagugaaaggcugggccuuugaugauggaaaugacguguggaugggaagaacgaucagcgagaagucacgcuuaggguaugaaaccuucaaagucauugaaggcugguccaacccuaaguccaaauugcagauaaauaggcaagucauaguugacagagguaauagguccgguuauucugguauuuucucuguugaaggcaaaagcugcaucaaucggugcuuuuauguggaguugauaaggggaagaaaagaggaaacugaagucuuguggaccucaaacaguauuguuguguuuuguggcaccucagguacauauggaacaggcucauggccugauggggcggacaucaaucucaugccuauauaa

SEQ ID NO: 48966 - RNA, 1410 nt, Artificial Sequence
  derived and/or modified CDS sequence (wt) from neuraminidase__InfluenzaA__ACR61702
augaauccaaaucaaaagauaauaacgauuggcucuguuucucucaccauuuccacaauaugcuucuucaugcaaauugccaucuugauaacuacuguaacauugcauuucaagcaauaugaauucaacucccccccaaacaaccaagugaugcugugugaaccaacaauaauagaaagaaacauaacagagauaguguaucugaccaacaccaccauagagaaggaaauaugccccaaacuagcagaauacagaaauuggucaaagccgcaaugugacauuacaggauuugcaccuuuuucuaaggacaauucgauuaggcuuuccgcugguggggacaucugggugacaagagaaccuuaugugucaugcgauccugacaaguguuaucaauuugcccuuggacagggaacaacacuaaacaacgugcauucaaauaacacaguacgugauaggaccccuuaucggacccuauugaugaaugaguuagguguuccuuuucaucuggggaccaagcaagugugcauagcaugguccagcucaaguugucacgauggaaaagcauggcugcauguuuguauaacgggggaugauaaaaaugcaacugcuagcuucauuuacaaugggaggcuuguagauaguguuguuucaugguccaaagaaauccucaggacccaggagucagaaugcguuuguaucaauggaacuuguacaguaguaaugacugaugggagugcuucaggaaaagcugauacuaaaauacuauucauugaggaggggaaaaucguucauacuagcacauugucaggaagugcucagcaugucgaggagugcuccugcuauccucgauauccuggugucagaugugucugcagagacaacuggaaaggcuccaauaggcccaucguagauauaaacauaaaggaucauagcauuguuuccaguuauguguguucaggacuuguuggagacacacccagaaaaaacgacaguuccagcaguagcaauuguuuggauccuaacaaugaagaagguggucauggagugaaaggcugggccuuugaugauggaaaugacguguggaugggaagaacgaucagcgagaagucacgcuuaggguaugaaaccuucaaagucauugaaggcugguccaacccuaaguccaaauugcagauaaauaggcaagucauaguugacagagguaauagguccgguuauucugguauuuucucuguugaaggcaaaagcugcaucaaucggugcuuuuauguggaguugauaaggggaagaaaagaggaaacugaagucuuguggaccucaaacaguauuguuguguuuuguggcaccucagguacauauggaacaggcucauggccugauggggcggacaucaaucucaugccuauauaa

SEQ ID NO: 48967 - RNA, 1410 nt, Artificial Sequence
  derived and/or modified CDS sequence (wt) from neuraminidase__InfluenzaA__ACR67201
augaauccaaaccaaaagauaauaaccauugguucggucuguaugacaauuggaauggcuaacuuaauauuacaaauuggaaacauaaucucaauauggauuagccacucaauucaacuugggaaucaaaaucagauugaaacaugcaaucaaagcgucauuacuuaugaaaacaacacuuggguaaaucagacauauguuaacaucagcaacaccaacuuugcugcuggacagucagugguuuccgugaaauuagcgggcaauuccucucucugcccuguuaguggaugggccauauacagcaaagacaacaguguaagaaucgguuccaagggggauguguuugucauaagggaaccauucauaucaugcucccccuuggaaugcagaaccuucuucuugacucaaggggccuugcuaaaugacaaacauuccaauggaaccauuaaagacaggagcccauaucgaacccuaaugagcuguccuauuggugaaguucccucuccauacaacucaagauuugagucagucgcuuggucagcaagugcuugucaugauggcaucaauuggcuaacaauuggaauuucuggcccagacaauggggcaguggcuguguuaaaguacaacggcauaauaacagacacuaucaagaguuggagaaacaauauauugagaacacaagagucugaaugugcauguguaaaugguucuugcuuuacuguaaugaccgauggaccaaguaauggacaggccucauacaagaucuucagaauagaaaagggaaagauagucaaaucagucgaaaugaaugccccuaauuaucacuaugaggaaugcuccuguuauccugauucuagugaaaucacaugugugugcagggauaacuggcauggcucgaaucgaccgugggugucuuucaaccagaaucuggaauaucagauaggauacauaugcagugggauuuucggagacaauccacgcccuaaugauaagacaggcaguugugguccaguaucgucuaauggagcaaauggaguaaaaggauuuucauucaaauacggcaaugguguuuggauagggagaacuaaaagcauuaguucaagaaacgguuuugagaugauuugggauccgaacggauggacugggacagacaauaacuucucaauaaagcaagauaucguaggaauaaaugaguggucaggauauagcgggaguuuuguucagcauccagaacuaacagggcuggauuguauaagaccuugcuucuggguugaacuaaucagagggcgacccaaagagaacacaaucuggacuagcgggagcagcauauccuuuugugguguaaacagugacacuguggguuggucuuggccagacggugcugaguugccauuuaccauugacaaguaa

SEQ ID NO: 48968 - RNA, 1410 nt, Artificial Sequence; identical to SEQ ID NO: 48750
  derived and/or modified CDS sequence (wt) from neuraminidase__InfluenzaA__ACR67202

SEQ ID NO: 48969 - RNA, 1410 nt, Artificial Sequence; identical to SEQ ID NO: 48783
  derived and/or modified CDS sequence (wt) from neuraminidase__InfluenzaA__ACR67203

SEQ ID NO: 48970 - RNA, 1410 nt, Artificial Sequence; identical to SEQ ID NO: 48750
  derived and/or modified CDS sequence (wt) from neuraminidase__InfluenzaA__ACR67204

SEQ ID NO: 48971 - RNA, 1410 nt, Artificial Sequence; identical to SEQ ID NO: 48947
  derived and/or modified CDS sequence (wt) from neuraminidase__InfluenzaA__ACR67246

SEQ ID NO: 48972 - RNA, 1410 nt, Artificial Sequence; identical to SEQ ID NO: 48813
  derived and/or modified CDS sequence (wt) from neuraminidase__InfluenzaA__ACR67256

SEQ ID NO: 48973 - RNA, 1410 nt, Artificial Sequence; identical to SEQ ID NO: 48750
  derived and/or modified CDS sequence (wt) from neuraminidase__InfluenzaA__ACR77451

SEQ ID NO: 48974 - RNA, 1410 nt, Artificial Sequence; identical to SEQ ID NO: 48887
  derived and/or modified CDS sequence (wt) from neuraminidase__InfluenzaA__ACR77461

SEQ ID NO: 48975 - RNA, 1410 nt, Artificial Sequence; identical to SEQ ID NO: 48750
  derived and/or modified CDS sequence (wt) from neuraminidase__InfluenzaA__ACR77471

SEQ ID NO: 48976 - RNA, 1410 nt, Artificial Sequence; identical to SEQ ID NO: 48750
  derived and/or modified CDS sequence (wt) from neuraminidase__InfluenzaA__ACR77481

SEQ ID NO: 48977 - RNA, 1410 nt, Artificial Sequence; identical to SEQ ID NO: 48750
  derived and/or modified CDS sequence (wt) from neuraminidase__InfluenzaA__ACR77491

SEQ ID NO: 48978 - RNA, 1410 nt, Artificial Sequence; identical to SEQ ID NO: 48750
  derived and/or modified CDS sequence (wt) from neuraminidase__InfluenzaA__ACR77501

SEQ ID NO: 48979 - RNA, 1410 nt, Artificial Sequence; identical to SEQ ID NO: 48750
  derived and/or modified CDS sequence (wt) from neuraminidase__InfluenzaA__ACR83527

SEQ ID NO: 48980 - RNA, 1410 nt, Artificial Sequence; identical to SEQ ID NO: 48947
  derived and/or modified CDS sequence (wt) from neuraminidase__InfluenzaA__ACR83539

SEQ ID NO: 48981 - RNA, 1410 nt, Artificial Sequence; identical to SEQ ID NO: 48750
  derived and/or modified CDS sequence (wt) from neuraminidase__InfluenzaA__ACS14669

SEQ ID NO: 48982 - RNA, 1410 nt, Artificial Sequence; identical to SEQ ID NO: 48750
  derived and/or modified CDS sequence (wt) from neuraminidase__InfluenzaA__ACS14679

SEQ ID NO: 48983 - RNA, 1410 nt, Artificial Sequence; identical to SEQ ID NO: 48750
  derived and/or modified CDS sequence (wt) from neuraminidase__InfluenzaA__ACS14689

SEQ ID NO: 48984 - RNA, 1410 nt, Artificial Sequence; identical to SEQ ID NO: 48750
  derived and/or modified CDS sequence (wt) from neuraminidase__InfluenzaA__ACS14699

SEQ ID NO: 48985 - RNA, 1410 nt, Artificial Sequence; identical to SEQ ID NO: 48750
  derived and/or modified CDS sequence (wt) from neuraminidase__InfluenzaA__ACS14709

SEQ ID NO: 48986 - RNA, 1410 nt, Artificial Sequence; identical to SEQ ID NO: 48750
  derived and/or modified CDS sequence (wt) from neuraminidase__InfluenzaA__ACS14719

SEQ ID NO: 48987 - RNA, 1410 nt, Artificial Sequence; identical to SEQ ID NO: 48750
  derived and/or modified CDS sequence (wt) from neuraminidase__InfluenzaA__ACS14729

SEQ ID NO: 48988 - RNA, 1410 nt, Artificial Sequence; identical to SEQ ID NO: 48750
  derived and/or modified CDS sequence (wt) from neuraminidase__InfluenzaA__ACS14739

SEQ ID NO: 48989 - RNA, 1410 nt, Artificial Sequence
  derived and/or modified CDS sequence (wt) from neuraminidase__InfluenzaA__ACS27192
augaauccaaaccaaaagauaauaaccauugguucggucuguaugacaauuggaauggcuaacuuaauauuacaaauuggaaacauaaucucaauauggauuagccacucaauucaacuugggaaccaaaaucagauugaaacaugcaaucaaagcgucauuacuuaugaaaacaacacuuggguaaaucagacauauguuaacaucagcaacaccaacuuugcugcuggacagucagugguuuccgugaaauuagcgggcaauuccucucucugcccuguuaguggaugggcuauauacaguaaagacaacaguguaagaaucgguuccaagggggauguguuugucauaagggaaccauucauaucaugcucccccuuggaaugcagaaccuucuucuugacucaaggggccuugcuaaaugacaaacauuccaauggaaccauuaaagacaggagcccauaucgaacccuaaugagcuguccuauuggugaaguucccucuccauacaacucaagauuugagucagucgcuuggucagcaagugcuugucaugauggcaucaauuggcuaacaauuggaauuucuggcccagacaauggggcaguggcuguguuaaaguacaacggcauaauaacagacacuaucaagaguuggagaaacaauauauugagaacacaagagucugaaugugcauguguaaaugguucuugcuuuacuguaaugaccgauggaccaaguaauggacaggccucauacaagaucuucagaauagaaaagggaaagauagucaaaucagucgaaaugaaugccccuaauuaucacuaugaggaaugcuccuguuauccugauucuagugaaaucacaugugugugcagggauaacuggcauggcucgaaucgaccgugggugucuuucaaccagaaucuggaauaucagauaggauacauaugcagugggauuuucggagacaauccacgcccuaaugauaagacaggcaguugugguccaguaucgucuaauggagcaaauggaguaaaaggauuuucauucaaauacggcaaugguguuuggauagggagaacuaaaagcauuaguucaagaaacgguuuugagaugauuugggauccgaacggauggacugggacagacaauaacuucucaauaaagcaagauaucguaggaauaaaugaguggucaggauauagcgggaguuuuguucagcauccagaacuaacagggcuggauuguauaagaccuugcuucuggguugaacuaaucagagggcgacccaaagagaacacaaucuggacuagcgggagcagcauauccuuuugugguguaaacagugacacuguggguuggucuuggccagacggugcugaguugccauuuaccauugacaaguaa

SEQ ID NO: 48990 - RNA, 1410 nt, Artificial Sequence; identical to SEQ ID NO: 48750
  derived and/or modified CDS sequence (wt) from neuraminidase__InfluenzaA__ACS27202

SEQ ID NO: 48991 - RNA, 1410 nt, Artificial Sequence; identical to SEQ ID NO: 48887
  derived and/or modified CDS sequence (wt) from neuraminidase__InfluenzaA__ACS27212

SEQ ID NO: 48992 - RNA, 1410 nt, Artificial Sequence; identical to SEQ ID NO: 48784
  derived and/or modified CDS sequence (wt) from neuraminidase__InfluenzaA__ACS27222

SEQ ID NO: 48993 - RNA, 1410 nt, Artificial Sequence; identical to SEQ ID NO: 48750
  derived and/or modified CDS sequence (wt) from neuraminidase__InfluenzaA__ACS27232

SEQ ID NO: 48994 - RNA, 1410 nt, Artificial Sequence; identical to SEQ ID NO: 48740
  derived and/or modified CDS sequence (wt) from neuraminidase__InfluenzaA__ACS27242

SEQ ID NO: 48995 - RNA, 1410 nt, Artificial Sequence; identical to SEQ ID NO: 48750
  derived and/or modified CDS sequence (wt) from neuraminidase__InfluenzaA__ACS27252

SEQ ID NO: 48996 - RNA, 1410 nt, Artificial Sequence
  derived and/or modified CDS sequence (wt) from neuraminidase__InfluenzaA__ACS27771
augaauccaaaucagaagauaauaaccauugguucggucuguaugacaauuggaauggccaacuuaauauuacaaauuggaaacauaaucucaauauggauuagccacucaauucaacuugggaaucaaaaucagauugaaacaugcaaucaaagcgucauuacuuaugaaaacaacacuuggguaaaucagacauauguuaacaucagcaacaccaacuuugcugcuggacagucagugguuuccgugaaauuagcgggcaauuccucucucugcccuguuaguggaugggcuauauacaguaaagacaacaguguaagaaucgguuccaagggggauguguuugucauaagggaaccauucauaucaugcucccccuuggaaugcagaaccuucuucuugacucaaggggccuugcuaaaugacaaacauuccaauggaaccauuaaagacaggagcccauaucgaacccuaaugagcuguccuauuggugaaguucccucuccauacaacucaagauuugagucagucgcuuggucagcaagugcuugucaugauggcaucaauuggcuaacaauuggaauuucuggcccagacaauggggcaguggcuguguuaaaguacaacggcauaauaacagacacuaucaagaguuggagaaacaauauauugagaacacaagagucugaaugugcauguguaaaugguucuugcuuuacuguaaugaccgauggaccaaguaauggacaggccucauacaagaucuucagaauagaaaagggaaagauagucaaaucagucgaaaugaaugccccuaauuaucacuaugaggaaugcuccuguuauccugauucuagugaaaucacaugugugugcagggauaacuggcauggcucgaaucgaccaugggugucuuucaaccagaaucuggaauaucagauaggauacauaugcagugggauuuucggagacaauccacgcccuaaugauaagacaggcaguugugguccaguaucgucuaauggagcaaauggaguaaaaggauuuucauucaaauacggcaaugguguuuggauagggagaacuaaaagcauuaguucaagaaacgguuuugagaugauuugggauccgaacggauggacugggacagacaauaacuucucaauaaagcaagauaucguaggaauaaaugaguggucaggauauagcgggaguuuuguucagcauccagaacuaacagggcuagauuguauaagaccuugcuucuggguugaacuaaucagagggcgacccaaagagaacacaaucuggacuagcgggagcagcauauccuuuugugguguaaacagugacacuguggguuggucuuggccagacggugcugaguugccauuuaccauugacaaguaa

SEQ ID NO: 48997 - RNA, 1410 nt, Artificial Sequence; identical to SEQ ID NO: 48905
  derived and/or modified CDS sequence (wt) from neuraminidase__InfluenzaA__ACS34969

SEQ ID NO: 48998 - RNA, 1410 nt, Artificial Sequence; identical to SEQ ID NO: 48905
  derived and/or modified CDS sequence (wt) from neuraminidase__InfluenzaA__ACS34970

SEQ ID NO: 48999 - RNA, 1410 nt, Artificial Sequence; identical to SEQ ID NO: 48905
  derived and/or modified CDS sequence (wt) from neuraminidase__InfluenzaA__ACS34971

SEQ ID NO: 49000 - RNA, 1410 nt, Artificial Sequence
  derived and/or modified CDS sequence (wt) from neuraminidase__InfluenzaA__ACS34972
augaauccaaaccaaaagauaauaaccauugguucggucuguaugacaauuggaauggcuaacuuaauauuacaaauuggaaacauaaucucaauauggauuagccacucaauucaacuugggaaucaaaaucagauugaaacaugcaaucaaagcgucauuacuuaugaaaacaacacuuggguaaaucagacauauguuaacaucagcaacaccaacuuugcugcuggacagucagugguuuccgugaaauuagcgggcaauuccucucucugcccuguuaguggaugggcuauauacaguaaagacaacaguauaagaaucgguuccaagggggauguguuugucauaagggaaccauucauaucaugcucccccuuggaaugcagaaccuucuucuugacucaaggggccuugcuaaaugacaaacauuccaauggaaccauuaaagacaggagcccauaucgaacccuaaugagcuguccuauuggugaaguucccucuccauacaacucaagauuugagucagucgcuuggucagcaagugcuugucaugauggcaucaauuggcuaacaauuggaauuucuggcccagacaauggggcaguggcuguguuaaaguacaacggcauaauaacagacacuaucaagaguuggagaaacaauauauugagaacacaagagucugaaugugcauguguaaaugguucuugcuuuacuguaaugaccgauggaccaagugauggacaggccucauacaagaucuucagaauagaaaagggaaagauagucaaaucagucgaaaugaaugccccuaauuaucacuaugaggaaugcuccuguuauccugauucuagugaaaucacaugugugugcagggauaacuggcauggcucgaaucgaccgugggugucuuucaaccagaaucuggaauaucagauaggauacauaugcagugggauuuucggagacaauccacgcccuaaugauaagacaggcaguugugguccaguaucgucuaauggagcaaauggaguaaaaggauuuucauucaaauacggcaaugguguuuggauagggagaacuaaaaguauuaguucaagaaacgguuuugagaugauuugggauccgaacggauggacugggacagacaauaacuucucaauaaagcaagauaucguaggaauaaaugaguggucaggauauagcgggaguuuuguucagcauccagaacuaacagggcuggauuguauaagaccuugcuucuggguugaacuaaucagagggcgacccaaagagaacacaaucuggacuagcgggagcagcaucuccuuuugugguguaaacagugacacuguggguuggucuuggccagacggugcugaguugccauuuaccauugacaaguaa

SEQ ID NO: 49001 - RNA, 1410 nt, Artificial Sequence; identical to SEQ ID NO: 48750
  derived and/or modified CDS sequence (wt) from neuraminidase__InfluenzaA__ACS50081

SEQ ID NO: 49002 - RNA, 1410 nt, Artificial Sequence; identical to SEQ ID NO: 48953
  derived and/or modified CDS sequence (wt) from neuraminidase__InfluenzaA__ACS50087

SEQ ID NO: 49003 - RNA, 1410 nt, Artificial Sequence; identical to SEQ ID NO: 48750
  derived and/or modified CDS sequence (wt) from neuraminidase__InfluenzaA__ACS50094

SEQ ID NO: 49004 - RNA, 1410 nt, Artificial Sequence
  derived and/or modified CDS sequence (wt) from neuraminidase__InfluenzaA__ACS54264
augaauccaaaccaaaagauaauaaccauugguucggucuguaugacaauuggaauggcuaacuuaauauuacaaauuggaaacauaaucucaauauggauuagccacucaauucaacuugggaaucaaaaucagauugaaacaugcaaucaaagcgucauuacuuaugaaaacaacacuuggguaaaucagacauauguuaacaucagcaacaccaacuuugcugcuggacagucagugguuuccgugaaauuagcgggcaauuccucucucugcccuguuaguggaugggcuauauacaguaaagacaacaguguaagaaucgguuccaagggggauguguuugucauaagggagccauucauaucaugcucccccuuggaaugcagaaccuucuucuugacucaaggggccuugcuaaaugacaaacauuccaauggaaccauuaaagacaggagcccauaucgaacccuaaugagcuguccuauuggugaaguucccucuccauacaacucaagauuugagucagucgcuuggucagcaagugcuugucaugauggcaucaauuggcuaacaauuggaauuucuggcccagacaauggggcaguggcuguguuaaaguacaacggcauaauaacagacacuaucaagaguuggagaaacaauauauugagaacacaagagucugaaugugcauguguaaaugguucuugcuuuacuguaaugaccgauggaccaaguaauggacaggccucauacaagaucuucagaauagaaaagggaaagauagucaaaucagucgaaaugaaugccccuaauuaucacuaugaggaaugcuccuguuauccugauucuagugaaaucacaugugugugcagggauaacuggcauggcucgaaucgaccgugggugucuuucaaccagaaucuggaauaucagauaggauacauaugcagugggauuuucggagacaauccacgcccuaaugauaagacaggcaguugugguccaguaucgucuaauggagcaaauggaguaaaaggguuuucauucaaauacggcaaugguguuuggauagggagaacuaaaagcauuaguucaagaaacgguuuugagaugauuugggauccgaacggauggacugggacagacaauaacuucucaauaaagcaagauaucguaggaauaaaugaguggucaggauauagcgggaguuuuguucagcauccagaacuaacagggcuggauuguauaagaccuugcuucuggguugaacuaaucagagggcgacccaaagagaacacaaucuggacuagcgggagcagcauauccuuuugugguguaaacagugacacuguggguuggucuuggccagacggugcugaguugccauuuaccauugacaaguaa

SEQ ID NO: 49005 - RNA, 1410 nt, Artificial Sequence; identical to SEQ ID NO: 48905
  derived and/or modified CDS sequence (wt) from neuraminidase__InfluenzaA__ACS54265

SEQ ID NO: 49006 - RNA, 1410 nt, Artificial Sequence; identical to SEQ ID NO: 48949
  derived and/or modified CDS sequence (wt) from neuraminidase__InfluenzaA__ACS54266

SEQ ID NO: 49007 - RNA, 1410 nt, Artificial Sequence; identical to SEQ ID NO: 48750
  derived and/or modified CDS sequence (wt) from neuraminidase__InfluenzaA__ACS54267

SEQ ID NO: 49008 - RNA, 1410 nt, Artificial Sequence; identical to SEQ ID NO: 48949
  derived and/or modified CDS sequence (wt) from neuraminidase__InfluenzaA__ACS54268

SEQ ID NO: 49009 - RNA, 1410 nt, Artificial Sequence; identical to SEQ ID NO: 48870
  derived and/or modified CDS sequence (wt) from neuraminidase__InfluenzaA__ACS54303

SEQ ID NO: 49010 - RNA, 1410 nt, Artificial Sequence; identical to SEQ ID NO: 48750
  derived and/or modified CDS sequence (wt) from neuraminidase__InfluenzaA__ACS68823

SEQ ID NO: 49011 - RNA, 1410 nt, Artificial Sequence; identical to SEQ ID NO: 48750
  derived and/or modified CDS sequence (wt) from neuraminidase__InfluenzaA__ACS75824

SEQ ID NO: 49012 - RNA, 1410 nt, Artificial Sequence; identical to SEQ ID NO: 48750
  derived and/or modified CDS sequence (wt) from neuraminidase__InfluenzaA__ACS77929

SEQ ID NO: 49013 - RNA, 1410 nt, Artificial Sequence; identical to SEQ ID NO: 48750
  derived and/or modified CDS sequence (wt) from neuraminidase__InfluenzaA__ACS77939

SEQ ID NO: 49014 - RNA, 1410 nt, Artificial Sequence; identical to SEQ ID NO: 48783
  derived and/or modified CDS sequence (wt) from neuraminidase__InfluenzaA__ACS77949

SEQ ID NO: 49015 - RNA, 1410 nt, Artificial Sequence; identical to SEQ ID NO: 48949
  derived and/or modified CDS sequence (wt) from neuraminidase__InfluenzaA__ACS77959

SEQ ID NO: 49016 - RNA, 1410 nt, Artificial Sequence; identical to SEQ ID NO: 48750
  derived and/or modified CDS sequence (wt) from neuraminidase__InfluenzaA__ACS77969

SEQ ID NO: 49017 - RNA, 1410 nt, Artificial Sequence; identical to SEQ ID NO: 48750
  derived and/or modified CDS sequence (wt) from neuraminidase__InfluenzaA__ACS77979

SEQ ID NO: 49018 - RNA, 1410 nt, Artificial Sequence; identical to SEQ ID NO: 48750
  derived and/or modified CDS sequence (wt) from neuraminidase__InfluenzaA__ACS77989

SEQ ID NO: 49019 - RNA, 1410 nt, Artificial Sequence; identical to SEQ ID NO: 48750
  derived and/or modified CDS sequence (wt) from neuraminidase__InfluenzaA__ACS77999

SEQ ID NO: 49020 - RNA, 1410 nt, Artificial Sequence
  derived and/or modified CDS sequence (wt) from neuraminidase__InfluenzaA__ACS78009
augaauccaaaccaaaagauaauaaccauugguucggucuguaugacaauuggaauggcuaacuuaauauuacaaauuggaaacauaaucucaauauggauuagccacucaauucaacuugggaaucaaaaucagauugaaacaugcaaucaaagcgucauuacuuaugaaaacaacacuuggguaaaucagacauauguuaacaucagcaacaccaacuuugcugcuggacagucagugguuuccgugaaauuagcgggcaauuccucucucugcccuguuaguggaugggcuauauacaguaaagacaacaguauaagaaucgguuccaagggggauguguuugucauaagggaaccauucauaucaugcucccccuuggaaugcagaaccuucuucuugacucaaggggccuugcuaaaugacaaacauuccaauggaaccauuaaagacaggagcccauaucgaacccuaaugagcuguccuauuggugaaguucccucuccauacaacucaagauuugagucagucgcuuggucagcaagugcuugucaugauggcaucaauuggcuaacaauuggaauuucuggcccagacaauggggcaguggcuguguuaaaguacaacggcauaauaacagacacuaucaagaguuggagaaacaauauauugagaacacaagagucugaaugugcauguguaaaugguucuugcuuuacuguaaugaccgauggaccaagugauggacaggccucauacaagaucuucagaauagaaaagggaaagauagucaaaucagucgaaaugaaugccccuaauuaucacuaugaggaaugcuccuguuauccugauucuagugaaaucacaugugugugcagggauaacuggcauggcucgaaucgaccgugggugucuuucaaccagaaucuggaauaucagauuggauacauaugcagugggauuuucggagacaauccacgcccuaaugauaagacaggcaguugugguccaguaucgucuaauggagcaaauggaguaaaaggauuuucauucaaauacggcaaugguguuuggauagggagaacuaaaagcauuaguucaagaaacgguuuugagaugauuugggauccgaacggauggacugggacagacaauaacuucucaauaaagcaagauaucguaggaauaaaugaguggucaggauauagcgggaguuuuguucagcauccagaacuaacagggcuggauuguauaagaccuugcuucuggguugaacuaaucagagggcgacccaaagagaacacaaucuggacuagcgggagcagcauauccuuuugugguguaaacagugacacuguggguuggucuuggccagacggugcugaguugccauuuaccauugacaaguaa

SEQ ID NO: 49021 - RNA, 1410 nt, Artificial Sequence; identical to SEQ ID NO: 48750
  derived and/or modified CDS sequence (wt) from neuraminidase__InfluenzaA__ACS78019

SEQ ID NO: 49022 - RNA, 1410 nt, Artificial Sequence; identical to SEQ ID NO: 48750
  derived and/or modified CDS sequence (wt) from neuraminidase__InfluenzaA__ACS78039

SEQ ID NO: 49023 - RNA, 1410 nt, Artificial Sequence; identical to SEQ ID NO: 48750
  derived and/or modified CDS sequence (wt) from neuraminidase__InfluenzaA__ACS78049

SEQ ID NO: 49024 - RNA, 1410 nt, Artificial Sequence
  derived and/or modified CDS sequence (wt) from neuraminidase__InfluenzaA__ACS88274
augaauccaaaccaaaagauaauaaccauugguucggucuguaugacaauuggaauggcuaacuuaauauuacaaauuggaaacauaaucucaauauggauuagccacucaauucaacuugggaaucaaaaucagauugaaacaugcaaucaaagcgucauuacuuaugaaaacaacacuuggguaaaucagacauauguuaacaucagcaacaccaacuuugcugcuggacagucagugguuuccgugaaauuagcgggcaauuccucucucugcccuguuaguggaugggcuauauacaguaaagacaacaguauaagaaucgguuccaagggggauguguuugucauaagggaaccauucauaucaugcucccccuuggaaugcagaaccuucuucuugacucaaggggccuugcuaaaugacaaacauuccaauggaaccauuaaagacaggagcccauaucgaacccuaaugagcuguccuauuggugaaguucccucuccauacaacucaagauuugagucagucgcuuggucagcaagugcuugucaugauggcaucaauuggcuaacaauuggaauuucuggcccagacaauggggcaguggcuguguuaaaguacaacggcauaauaacagacacuaucaagaguuggagaaacaauauauugagaacacaagagucugaaugugcauguguaaaugguucuugcuuuacuguaaugaccgauggaccaagugauggacaggccucauacaagaucuucagaauagaaaagggaaagauagucaaaucagucgaaaugaaugccccuaauuaucacuaugaggaaugcuccuguuauccugauucuagugaaaucacaugugugugcagggauaacuggcauggcucgaaucgaccgugggugucuuucaaccagaaucuggaauaucagauaggauacauaugcagugggauuuucggagacaauccacgcccuaaugauaagacaggcaguugugguccaguaucgucuaauggagcaaauggaguaaaaggguuuucauucaaauacggcaaugguguuuggauagggagaacuaaaagcauuaguucaagaaacgguuuugagaugauuugggauccgaacggauggacugggacagacaauaacuucucaauaaagcaagauaucguaggaauaaaugaguggucaggauauagcgggaguuuuguucagcauccagaacuaacagggcuggauuguauaagaccuugcuucuggguugaacuaaucagagggcgacccaaagagaacacaaucuggacuagcgggagcagcauauccuuuugugguguaaacagugacacuguggguuggucuuggccagacggugcugaguugccauuuaccauugacaaguaa

SEQ ID NO: 49025 - RNA, 1410 nt, Artificial Sequence; identical to SEQ ID NO: 48750
  derived and/or modified CDS sequence (wt) from neuraminidase__InfluenzaA__ACS88275

SEQ ID NO: 49026 - RNA, 1410 nt, Artificial Sequence; identical to SEQ ID NO: 48740
  derived and/or modified CDS sequence (wt) from neuraminidase__InfluenzaA__ACS92572

SEQ ID NO: 49027 - RNA, 1410 nt, Artificial Sequence; identical to SEQ ID NO: 48740
  derived and/or modified CDS sequence (wt) from neuraminidase__InfluenzaA__ACS92582

SEQ ID NO: 49028 - RNA, 1410 nt, Artificial Sequence; identical to SEQ ID NO: 48949
  derived and/or modified CDS sequence (wt) from neuraminidase__InfluenzaA__ACS92592

SEQ ID NO: 49029 - RNA, 1410 nt, Artificial Sequence; identical to SEQ ID NO: 48953
  derived and/or modified CDS sequence (wt) from neuraminidase__InfluenzaA__ACS92603

SEQ ID NO: 49030 - RNA, 1410 nt, Artificial Sequence; identical to SEQ ID NO: 48784
  derived and/or modified CDS sequence (wt) from neuraminidase__InfluenzaA__ACS92614

SEQ ID NO: 49031 - RNA, 1410 nt, Artificial Sequence; identical to SEQ ID NO: 48750
  derived and/or modified CDS sequence (wt) from neuraminidase__InfluenzaA__ACT09115

SEQ ID NO: 49032 - RNA, 1410 nt, Artificial Sequence; identical to SEQ ID NO: 48750
  derived and/or modified CDS sequence (wt) from neuraminidase__InfluenzaA__ACT10309

SEQ ID NO: 49033 - RNA, 1410 nt, Artificial Sequence; identical to SEQ ID NO: 48750
  derived and/or modified CDS sequence (wt) from neuraminidase__InfluenzaA__ACT10315

SEQ ID NO: 49034 - RNA, 1410 nt, Artificial Sequence; identical to SEQ ID NO: 48749
  derived and/or modified CDS sequence (wt) from neuraminidase__InfluenzaA__ACT11059

SEQ ID NO: 49035 - RNA, 1350 nt, Artificial Sequence
  derived and/or modified CDS sequence (wt) from neuraminidase__InfluenzaA__ACT15313
augaauccaaaucagaagauaauaaccaucggaucaaucuguaugguaauugggauaguuagcuuaauguuacaaauugggaacaugaucucaauaugggucagucauucaauucagacagggaaucaaugccaagaugaaccaaucagcaacacuaaauuucuuacugagaaagcuguggcuucaguaacauuagcgggcaauucaucucuuugucccauuagcggaugggcuguguacaguaaggauaacagcauaaggaucgguuccaggggggauguguuuguuauaagagagccguucaucucaugcucccacuuggaaugcagaacuuucuuuuuaacccagggagccuuacugaaugacaagcacuccaaugggacugucaaagacagaagcccucacagaacauuaaugaguuguccugugggugaggcucccuccccauauaacucaagguuugagucuguugcuuggucagcaagugcuugccaugauggcaccaguugguuaacaauuggaauuucugguccagacaauggggcuguggcuguauugaaauacaauggcauaauaacagacaccaucaagaguuggaggaacaacauaaugagaacucaagagucugaaugugcauguguaaauggcucuugcuuuacuguaaugacugauggaccaaguagugggcaggcaucauauaagaucuucaaaauggaaaagggaaaagugguuaaaucagucgaauuggaugcuccuaauuaucacuaugaggagugcuccuguuauccugaugccggcgaaaucacaugugugugcagggauaauuggcauggaucaaauaggccauggguaucuuucaaucaaaauuuggaguaucaaauaggauauauaugcaguggaguuuucggagacaauccacgccccaaugauggaacagguaguugugguccgguguucccuaacggggcauaugggguaaaaggguuuucauuuaaauacggcaaugguguuuggaucgggagaaccaaaagcacuaauuccaggagcggcuuugaaaugauuugggacccaaauggguggacuggaacggacaguagcuuuucagugaagcaagauaucguagcaauaacugauuggucaggauauagcgggaguuuuguccagcauccagaacugacaggauuagauugcauaagaccuuguuucuggguugaguuaaucagagggcggccuaaagagagcacaauuuggaccaguggaagcagcauaucuuuuugugguguaaauggugacacuguuaguuggucuuggccagacggugcugaguugccauucaccauugacaaguag

SEQ ID NO: 49036 - RNA, 1350 nt, Artificial Sequence
  derived and/or modified CDS sequence (wt) from neuraminidase__InfluenzaA__ACT15315
augaauccaaaucagaagauaauaaccaucggaucaaucuguaugguaauugggauaguuagcuuaauguuacaaauugggaacaugaucucaauaugggucagucauucaauucagacagggaaucaaugccaagaugaaccaaucagcaacacuaaauuucuuacugagaaagcuguggcuucaguaacauuagcgggcaauucaucucuuugucccauuagcggaugggcuguguacaguaaggacaacagcauaaggaucgguuccaggggggauguguuuguuaugagagagccguucaucucaugcucccacuuggaaugcagaacuuucuuuuuaacccagggagccuuacugaaugacaagcacuccaaugggacugucaaagacagaagcccucacagaacauuaaugaguuguccugugggugaggcucccuccccauauaacucaagguuugagucuguugcuuggucagcaagugcuugccaugauggcaccaguugguugacaauuggaauuucugguccagacaauggggcuguggcuguauugaaauacaauggcauaauaacagacaccaucaagaguuggaggaacaacauaaugagaacucaagagucugaaugugcauguguaaauggcucuugcuuuacuguaaugacugauggaccaaguagugggcaggcaucauauaagaucuucaaaauggaaaagggaaaagugguuaaaucagucgaauuggaugcuccuaauuaucacuaugaggagugcuccuguuauccugaugccggcgaaaucacaugugugugcagggauaauuggcauggaucaaauaggccaugggugucuuucaaucaaaauuuggaguaucaaauaggauauauaugcaguggaguuuucggagacaauccacgccccaaugauggaacagguaguugugguccgguguucccuaacggggcauaugggguaaaaggguuuucauuuaaauacggcaaugguguuuggaucgggagaaccaaaagcacuaauuccaggagcggcuuugaaaugauuugggacccaaauggguggacuggaacggacaguagcuuuucagugaagcaagauaucguagcaauaacugauuggucaggauauagcgggaguuuuguccagcauccagaacugacaggauuagauuguauaagaccuuguuucuggguugaguuaaucagagggcggccuaaagagagcacaauuuggaccaguggaagcagcauaucuuuuugugguguaaauggugacacuguuaguuggucuuggccagacggugcugaguugccauucaccauugacaaguag

SEQ ID NO: 49037 - RNA, 1350 nt, Artificial Sequence
  derived and/or modified CDS sequence (wt) from neuraminidase__InfluenzaA__ACT15319
augaauccaaaucagaagauaauaaccaucggaucaaucuguaugguaauugggauaguuagcuuaauguuacaaauugggaacaugaucucaauaugggucagucauucaauucagacagggaaucaaugccaagaugaaccaaucagcaacacuaaauuucuuacugagaaagcuguggcuucaguaacauuagcgggcaauucaucucuuugucccauuagcggaugggcuguguacaguaaggacaacagcauaaggaucgguuccaggggggauguguuuguuauaagagagccguucaucucaugcucccacuuggaaugcagaacuuucuuuuuaacccagggagccuuacugaaugacaagcacuccaaugggacugucaaagacagaagcccucacagaacauuaaugaguuguccugugggugaggcucccuccccauauaacucaagguuugagucuguugcuuggucagcaagugcuugccaugauggcaccaguugguugacaauuggaauuucugguccagacaauggggcuguggcuguauugaaauacaauggcauaauaacagacaccaucaagaguuggaggaacaacauaaugagaacucaagagucugaaugugcauguguaaauggcucuugcuuuacuguaaugacugauggaccaaguagugggcaggcaucauauaagaucuucaagauggaaaagggaaaagugguuaaaucagucgaauuggaugcuccuaauuaucacuaugaggagugcuccuguuauccugaugccggcgaaaucacaugugugugcagggauaauuggcauggaucaaauaggccauggguaucuuucaaucaaaauuuggaguaucaaauaggauauauaugcaguggaguuuucggagacaauccacgccccaaugauggaacagguaguugugguccgguguucccuaacggggcauaugggguaaaaggguuuucauuuaaauacggcaaugguguuuggaucgggagaaccaaaagcacuaauuccaggagcggcuuugaaaugauuugggacccaaauggguggacuggaacggacaguagcuuuucagugaagcaagauaucguagcaauaacugauuggucaggauauagcgggaguuuuguccagcauccagaacugacaggauuagauugcauaagaccuuguuucuggguugaguuaaucagagggcggccuaaggagagcacaauuuggacuaguggaagcagcauaucuuuuugugguguaaauggugacacuguuaguuggucuuggccagacggugcugaguugccauucaccauugacaaguag

SEQ ID NO: 49038 - RNA, 1350 nt, Artificial Sequence
  derived and/or modified CDS sequence (wt) from neuraminidase__InfluenzaA__ACT15321
augaauccaaaucagaagauaauaaccaucggaucaaucuguaugguaauugggauaguuagcuuaauguuacaaauugggaacaugaucucaauaugggucagucauucaauucagacagggaaucaaugccaagaugaaccaaucagcaacacuaaauuucuuacugagagagcuguggcuucaguaacauuagcgggcaauucaucucuuugucccauuagcggaugggcuguguacaguaaggacaacagcauaaggaucgguuccaggggggauguguuuguuauaagagagccguucaucucaugcucccacuuggaaugcagaacuuucuuuuuaacucagggagccuuacugaaugacaagcacuccaaugggacugucaaagacagaagcccucacagaacauuaaugagcuguccugugggugaggcucccuccccauauaacucaagguuugagucuguugcuuggucagcaagugcuugccaugauggcaccaguugguugacaauuggaauuucugguccagacaauggggcuguggcuguauugaaauacaauggcauaauaacagacaccaucaagaguuggaggaacaacauaaugagaacucaagagucugaaugugcauguguaaauggcucuugcuuuacuguaaugacugauggaccaaguagugggcaggcaucauauaagaucuucaaaauggaaaagggaaaagugguuaaaucagucgaauuggaugcuccuaauuaucacuaugaggagugcuccuguuauccugaugccggcgagaucacaugugugugcagggauaauuggcauggaucaaauaggccauggguaucuuucaaucaaaauuuggaguaucaaauaggauauauaugcaguggaguuuucggagacaauccacgccccaaugauggaacagguaguugugguccgguguucccuaacggggcauaugggguaaaaggguuuucauuuaaauacggcaaugguguuuggaucgggagaaccaaaagcacuaauuccaggagcggcuuugaaaugauuugggacccaaauggguggacuggaacggacaguagcuuuucagugaagcaagauaucguagcaauaacugauuggucaggauauagcgggaguuuuguccagcauccagaacugacaggauuagauugcauaagaccuuguuucuggguugaguuaaucagagggcggccuaaagagagcacaauuuggaccaguggaagcagcauaucuuuuugugguguaaauggugacacuguuaguuggucuuggccagacggugcugaguugccauucaccauugacaaguag

SEQ ID NO: 49039 - RNA, 1350 nt, Artificial Sequence
  derived and/or modified CDS sequence (wt) from neuraminidase__InfluenzaA__ACT15323
augaauccaaaucagaagauaauaaccaucggaucaaucuguaugguaauugggauaguuagcuuaauguuacaaauugggaacaugaucucaauaugggucagucauucaauucagacagggaaucaaugccaagaugaaccaaucagcaacacuaaauuucuuacugagaaagcuguggcuucaguaacauuagcgggcaauucaucucuuugucccauuagcggaugggcuguguacaguaaggacaacagcauaaggaucgguuccaggggggauguguuuguuauaagagagccguucaucucaugcucccacuuggaaugcagaacuuucuuuuuaacccagggagccuuacugaaugacaagcacuccaaugggacugucaaagacagaagcccucacagaacauuaaugaguuguccugugggugaggcucccuccccauauaacucaagguuugagucuguugcuuggucagcaagugcuugccaugauggcaccaguugguugacaauuggaauuucugguccagacaauggggcuguggcuguauugaaauacaauggcauaauaacagacaccaucaagaguuggaggaacaacauaaugagaacucaagagucugaaugugcauguguaaauggcucuugcuuuacuguaaugacugauggaccaaguagugggcaggcaucauauaagaucuucaaaauggaaaagggaaaagugguuaaaucagucgaauuggaugcuccuaauuaucacuaugaggagugcuccuguuauccugaugccggcgagaucacaugugugugcagggauaauuggcauggaucaaauaggccauggguaucuuucaaucaaaauuuggaguaucaaauaggauauauaugcaguggaguuuucggagacaauccacgccccaaugauggaacagguaguugugguccgguguucccuaacggggcauaugggguaaaaggguuuucauuuaaauacggcaaugguguuuggaucgggagaaccaaaagcacuaauuccaggagcggcuuugaaaugauuugggacccaaauggguggacuggaacggacaguagcuuuucagugaagcaagauaucguagcaauaacugauuggucaggauauagcgggaguuuuguccagcauccagaacugacaggauuagauugcauaagaccuuguuucuggguugaguuaaucagagggcggccuaaagagagcacaauuuggaccaguggaagcagcauaucuuuuugugguguaaauggugacacuguuaguuggucuuggccagacggugcugaguugccauucaccauugacaaguag

SEQ ID NO: 49040 - RNA, 1350 nt, Artificial Sequence
  derived and/or modified CDS sequence (wt) from neuraminidase__InfluenzaA__ACT15325
augaauccaaaucagaagauaauaaccaucggaucaaucuguaugguaauugggauaguuagcuuaauguuacaaauugggaacaugaucucaauaugggucagucauucaauucagacagggaaucaaugccaagaugaaccaaucagcaacacuaaauuucuuacugagaaagcuguggcuucaguaacauuagcgggcaauucaucucuuugucccauuagcggaugggcuguguacaguaaggacaacagcauaaggaucgguuccaggggggacguguuuguuauaagagagccguucaucucaugcucccacuuggaaugcagaacuuucuuuuuaacccagggagccuuacugaaugacaagcacuccaaugggacugucaaagacagaagcccucacagaacauuaaugaguuguccugugggugaggcucccuccccauauaacucaagguuugagucuguugcuuggucagcaagugcuugccaugauggcaccaguugguugacaauuggaauuucugguccagacaauggggcuguggcuguauugaaauacaauggcauaauaacagacaccaucaagaguuggaggaacaacauaaugagaacucaagagucugaaugugcauguguaaauggcucuugcuuuacuguaaugacugauggaccaaguagugggcaggcaucauauaagaucuucaaaauggaaaagggaaaagugguuaaaucagucgaauuggaugcuccuaauuaucacuaugaggagugcuccuguuauccugaugccggcgaaaucacaugugugugcagggauaauuggcauggaucaaauaggccauggguaucuuucaaucaaaauuuggaguaucaaauaggauauauaugcaguggaguuuucggagacaauccacgccccaaugauggaacagguaguugugguccgguguucccuaacggggcauaugggguaaaaggguuuucauuuaaauacggcaaugguguuuggaucgggagaaccaaaagcacuaauuccaggagcggcuuugaaaugauuugggacccaaauggguggacuggaacggacaguagcuuuucagugaagcaagauaucguagcaauaacugauuggucaggauauagcgggaguuuuguccagcauccagaacugacaggauuagauugcauaagaccuuguuucuggguugaguuaaucagagggcggccuaaagagagcacaauuuggaccaguggaagcagcauaucuuuuugugguguaaauggugacacuguuaguuggucuuggccagacggugcugaguugccauucaccauugacaaguag

SEQ ID NO: 49041 - RNA, 1350 nt, Artificial Sequence
  derived and/or modified CDS sequence (wt) from neuraminidase__InfluenzaA__ACT15327
augaauccaaaucagaagauaauaaccaucggaucaaucuguaugguaauugguauaguuagcuuaauguuacaaauugggaacaugaucucaauaugggucagucauucaauucagacagggaaucgaugccaagaugaaccaaucagcaacacuaaauuucuuacugagaaagcuguggcuucaguaacauuagcgggcaauucaucucuuugucccauuagcggaugggcuguguacaguaaggacaacagcauaaggaucgguuccaggggggauguguuuguuauaagagagccguucaucucaugcucccacuuggaaugcagaacuuucuuuuugacccagggagccuuacugaaugacaagcacuccaaugggacugucaaagacagaagcccucacagaacauuaaugaguuguccugugggugaggcucccuccccauauaacucaagguuugagucuguugcuuggucagcaagugcuugccaugauggcaccaguugguugacaauuggaauuuccgguccagacaauggggcuguggcuguauugaaauacaauggcauaauaacagacaccaucaagaguuggaggaacaacauaaugagaacucaagagucugaaugugcauguguaaauggcucuugcuuuacuguaaugacugauggaccaaguagugggcaggcaucauauaagaucuucaaaauggaaaagggaaaagugguuaaaucagucgaauuggaugcuccuaauuaucacuaugaggagugcuccuguuauccugaugccggcgaaaucacaugugugugcagggauaauuggcauggaucaaauaggccauggguaucuuucaaucaaaauuuggaguauaaaauaggauauauaugcaguggaauuuucggagacaauccacgccccaaugauggaacagguaguugugguccgguguucccuaacggggcauaugggguaaaaggguuuucauuuaaauacggcaaugguguuuggaucgggagaaccaaaagcacuaauuccaggagcggcuuugaaaugauuugggacccaaauggguggacuggaacggacaguagcuuuucggugaagcaagauaucguagcaauaacugauuggucaggauauagcgggaguuuuguccagcauccagaacugacaggauuagauugcauaagaccuuguuucuggguugaguuaaucagagggcggccuaaagagagcacaauuuggaccaguggaagcagcauaucuuuuugugguguaaauggugacacuguuaguuggucuuggccagacggugcugaguugccauucaccauugacaaguag

SEQ ID NO: 49042 - RNA, 1350 nt, Artificial Sequence
  derived and/or modified CDS sequence (wt) from neuraminidase__InfluenzaA__ACT15331
augaauccaaaucagaagauaauaaccaucggaucaaucuguaugguaauugggauaguuagcuuaauguuacaaauugggaacaugaucucaauaugggucagucauucaauucagacagggaaucaaugccaagaugaaccaaucagcaacacuaaauuucuuacugagaaagcuguggcuucaguaacauuagcgggcaauucaucucuuugucccauuagcggaugggcuguguacaguaaggacaacagcauaaggaucgguuccaggggggauguguuuguuauaagagagccguucaucucaugcucccacuuggaaugcagaacuuucuuuuuaacccagggagccuuacugaaugacaagcacuccaaugggacugucaaagacagaagcccucacagaacauuaaugaguuguccugugggugaggcucccuccccauauaacucaagguuugagucuguugcuuggucagcaagugcuugccaugauggcaccaguugguugacaauuggaauuucugguccagacaauggggcuguggcuguauugaaauacaauggcauaauaacagacaccaucaagaguuggaggaacaacauaaugagaacucaagagucugaaugugcauguguaaauggcucuugcuuuacuguaaugacugauggaccaaguagugggcaggcaucauauaagaucuucaaaauggaaaagggaaaagugguuaaaucagucgaauuggaugcuccuaauuaucacuaugaggagugcuccuguuauccugaugccggcgagaucacaugugugugcagggauaauuggcauggaucaaauaggccauggguaucuuucaaucaaaauuuggaguaucaaauaggauauauaugcaguggaguuuucggagacaauccacgccccaaugauggaacagguaguugugguccgguguucccuaacggggcauaugggguaaaaggguuuucauuuaaauacggcaaugguguuuggaucgggagaaccaaaagcacuaauuccaggagcggcuuugaaaugauuugggacccaaauggguggacuggaacggacaguagcuuuucagugaagcaagauaucguagcaauaacugauuggucaggauauagcgggaguuuuguccagcauccagaacugacaggauuagauugcauaagaccuuguuucuggguugaguuaaucagagggcggccuaaagagagcacaauuuggaccaguggaagcagcauaucuuuuugugguguaaauagugacacuguuaguuggucuuggccagacggugcugaguugccauucaccauugacaaguag

SEQ ID NO: 49043 - RNA, 1350 nt, Artificial Sequence
  derived and/or modified CDS sequence (wt) from neuraminidase__InfluenzaA__ACT15333
augaauccaaaucagaagauaauaaccaucggaucaaucuguaugguaauuggaauaguuagcuuaauguuacaaauugggaacaugaucucaauaugggucagccauucaauucagacaggaaaucaaugccaaggugaaccaaucagcaacacuaaauuucuuacugagaaagcuguggcuucaguaacauuagcgggcaauucaucucuuuguccuauuagcgggugggcuguauacaguaaggacaacaguauaaggaucggcuccaggggagauguguuuguuauaagagagccguucaucucaugcucccacuuggaaugcagaaccuucuuuuugacucagggagccuuacugaaugacaagcacuccaaugggacugucaaagacagaagcccucacagaacauuaaugaguuguccugugggugaggcucccuccccauauaacucaagguuugagucuguugcuuggucagcaagugcuugccaugauggcaccaguugguugacaauuggaaucucugguccagacaauggagcuguggcuguauugaaauacaauggcauaauaacagacaccaucaagaguuggaggaacaacauacugagaacucaagagucugaaugugcauguguaaauggcucuugcuuuacuguaaugacugauggaccaaguagugggcaggcaucauauaagaucuucaaaauggaaaaggggaaagugguuaaaucagucgaauuggaugcuccuaauuaucacuaugaggaaugcuccuguuauccugaugcuggcgaaaucacaugugugugcagggauaauuggcaugguucaaauaggccauggguaucuuucaaucaaaauuuggaguaucaaauaggauauauaugcaguggaguuuucggagacaauccacgccccaaugauggaacagguaguugugguccaguggucucuaauggggcauaugggguaaaaggguuuucguuuaaauacggcaaugguguuuggaucgggagaaccaaaagcacuaauucuaggagcggcuuugaaaugauuugggaccccaauggguggacuggaacggacaguagcuucucggggaagcaagauaucguagcaauaacugauuggucaggauauagcgggaguuuuguccagcauccagaacugacaggauuagauugcauaagaccuuguuucuggguugaguuaaucagagggcggccuaaagagagcacaauuuggaccaguggaagcagcauaucuuuuugugguguaaauagugacacuguuaguuggucuuggccagacggugcugaguugccauucaccauugacaaguag

SEQ ID NO: 49044 - RNA, 1350 nt, Artificial Sequence
  derived and/or modified CDS sequence (wt) from neuraminidase__InfluenzaA__ACT15335
augaauccaaaucagaagauaauaaccaucggaucaaucuguaugguaauugggauaguuagcuuaauguuacaaauugggaacaugaucucaauaugggucagucauucaauucagacagggaaucgaugccaagaugaaccaaucagcaacacuaaauuucuuacugagaaagcuguggcuucaguaacauuagcgggcaauucaucucuuugucccauuagcggaugggcuguguacaguaaggacaacagcauaaggaucgguuccaggggggauguguuuguuauaagagagccguucaucucaugcucccacuuggaaugcagaacuuucuuuuugacccagggagccuuacugaaugacaagcacuccaaugggacugucaaagacagaagcccucacagaacauuaaugaguuguccugugggugaggcucccuccccauauaacucaagguuugagucuguugcuuggucagcaagugcuugccaugauggcaccaguugguugacaauuggaauuuccgguccagacaauggggcuguggcuguauugaaauacaauggcauaauaacagacaccaucaaaaguuggaggaacaacauaaugagaacucaagagucugaaugugcauguguaaauggcucuugcuuuacuguaaugacugauggaccaaguagugggcaggcaucauauaagaucuucaaaauggaaaagggaaaagugguuaaaucagucgaauuggaugcuccuaauuaucacuaugaggaguguuccuguuauccugaugccggcgaaaucacaugugugugcagggauaauuggcauggaucaaauaggccauggguaucuuucaaucaaaauuuggaguauaaaauaggauauauaugcaguggaauuuucggagacaauccacgccccaaugauggaacaggcaguugugguccggugcuccccaacggggcauauggggugaaaggguuuucauuuaaauacggcaaugguguuuggaucgggagaaccaaaagcacuaauuccaggagcggcuuugaaaugauuugggacccaaauggguggacuggaacggacaguagcuuuucggugaagcaagauaucguagcaauaacugauuggucaggauauagcgggaguuuuguccagcauccagaacugacaggauuagauugcauaagaccuuguuucuggguugaguuaaucagagggcggccuaaagagagcacaauuuggaccaguggaagcagcauaucuuuuugugguguaaauggugacacuguuaguuggucuuggccagacggugcugaguugccauucaccauugacaaguag

SEQ ID NO: 49045 - RNA, 1350 nt, Artificial Sequence
  derived and/or modified CDS sequence (wt) from neuraminidase__InfluenzaA__ACT15337
augaauccaaaucagaagauaauaaccaucggaucaaucuguaugguaauugggauaguuagcuuaauguuacaaauugggaacaugaucucaauaugggucagucauucaauucagacagggaaucaaugccaagaugaaccaaucagcaacacuaaauuucuuacugagaaagcuguggcuucaguaacauuagcgggcaauucaucucuuugucccauuagcggaugggcuguguacaguaaggacaacagcauaaggaucgguuccaggggggauguguuuguuauaagagagccguucaucucaugcucccacuuggaaugcagaacuuucuuuuuaacccagggagccuuacugaaugacaagcacuccaaugggacugucaaagacagaagcccucacagaacauuaaugaguuguccugugggugaggcucccuccccauauaacucaagguuugagucuguugcuuggucagcaagugcuugccaugauggcaccaguugguugacaauuggaauuucugguccagacaauggggcuguggcuguauugaaauacaauggcauaauaacagacaccaucaagaguuggaggaacaacauaaugagaacucaagagucugaaugugcauguguaaauggcucuugcuuuacuguaaugacugauggaccaaguagugggcaggcaucauauaagaucuucaaaauggaaaagggaaaagugguuaaaucagucgaauuggaugcuccuaauuaucacuaugaggagugcuccuguuauccugaugccggcgagaucacaugugugugcagggauaauuggcauggaucaaauaggccauggguaucuuucaaucaaaauuuggaguaucaaauaggauauauaugcaguggaguuuucggagacaauccacgccccaaugauggaacagguaguugugguccgguguucccuaacggggcauaugggguaaaaggguuuucauuuaaauacggcaaugguguuuggaucgggagaaccaaaagcacuaauuccaggagcggcuuugaaaugauuugggacccaaauggguggacuggaacggacaguagcuuuucagugaagcaagauaucguagcaguaacugauuggucaggauauagcgggaguuuuguccagcauccagaacugacaggauuagauugcauaagaccuuguuucuggguugaguuaaucagagggcggccuaaagagagcacaauuuggaccaguggaagcagcauaucuuuuugugguguaaauggugacacuguuaguuggucuuggccagacggugcugaguugccauucaccauugacaaguag

SEQ ID NO: 49046 - RNA, 1350 nt, Artificial Sequence
  derived and/or modified CDS sequence (wt) from neuraminidase__InfluenzaA__ACT15341
augaauccaaaucagaagauaauaaccaucggaucaaucuguaugguaauugggauaguuagcuuaauguuacaaauugggaacaugaucucaauaugggucagucauucaauucagacagggaaucaaugccaagaugaaccaaucagcaacacuaaauuucuuacugagaaagcuguggcuucaguaacauuagcgggcaauucaucucuuugucccauuagcggaugggcuguguacaguaaggacaacagcauaaggaucgguuccaggggggacguguuuguuauaagagagccauucaucucaugcucccacuuggaaugcagaacuuucuuuuuaacccagggagccuuacugaaugacaagcacuccaaugggacugucaaagacagaagcccucacagaacauuaaugaguuguccuguaggugaggcucccuccccauauaacucaagguuugagucuguugcuuggucagcaagugcuugccaugauggcaccaguugguugacaauuggaauuucugguccagacaauggggcuguggcuguauugaaauacaauggcauaauaacagacaccaucaagaguuggaggaacaacauaaugagaacucaagagucugaaugugcauguguaaauggcucuugcuuuacuguaaugacugauggaccaaguagugggcaggcaucauauaagaucuucaaaauggaaaagggaaaagugguuaaaucagucgaauuggaugcuccuaauuaucacuaugaggagugcuccuguuauccugaugccggcgaaaucacaugugugugcagggauaauuggcauggaucaaauaggccauggguaucuuucaaucaaaauuuggaguaucaaauaggauauauaugcaguggagucuucggagacaauccacgccccaaugauggaacagguaguugugguccgguguucccuaacggggcauaugggguaaaaggguuuucauuuaaauacggcaaugguguuuggaucgggagaaccaaaagcacuaauuccaggagcggcuuugaaaugauuugggacccaaauggguggacuggaacggacaguagcuuuucagugaagcaagauaucguagcaauaacugauuggucaggauauagcgggaguuuuguccagcauccagaacugacaggauuagauugcauaagaccuuguuucuggguugaguuaaucagagggcggccuaaagagagcacaauuuggaccaguggaagcagcauaucuuuuugugguguaaauggugacacuguuaguuggucuuggccagacggugcugaguugccauucaccauugacaaguag

SEQ ID NO: 49047 - RNA, 1350 nt, Artificial Sequence
  derived and/or modified CDS sequence (wt) from neuraminidase__InfluenzaA__ACT15344
augaauccaaaucagaagauaauaaccaucggaucaaucuguaugguaauugggauaguuagcuuaauguuacaaauugggaacaugaucucaauaugggucagucauucaauucagacagggaaucaaugccaagaugaaccaaucagcaacacuaaauuucuuacugagaaagcuguggcuucaguaacauuagcgggcaauucaucucuuugucccauuagcggaugggcuguguacaguaaggacaacagcauaaggaucgguuccaggggggauguguuuguuauaagagagccguucaucucaugcucccacuuggaaugcagaacuuucuuuuuaacccagggagccuuacugaaugacaagcacuccaaugggacugucaaagacagaagcccucacagaacauuaaugaguuguccugugggugaggcucccuccccauauaacucaagguuugagucuguugcuuggucagcaagugcuugccaugauggcaccaguugguugacaauuggaauuucugguccagacaauggggcuguggcuguauugaaauacaauggcauaauaacagacaccaucaagaguuggaggagcaacauaaugagaacucaagagucugaaugugcauguguaaauggcucuugcuuuacuguaaugacugauggaccaaguagugggcaggcaucauauaagaucuucaaaauggaaaagggaaaagugguuaaaucagucgaauuggaugcuccuaauuaucacuaugaggagugcuccuguuauccugaugccggcgagaucacaugugugugcagggauaauuggcauggaucaaauaggccauggguaucuuucaaucaaaauuuggaguaucaaauaggauauauaugcaguggaguuuucggagacaauccacgccccaaugauggaacagguaguugugguccgguguucccuaacggggcauaugggguaaaaggguuuucauuuaaauacggcaaugguguuuggaucgggagaaccaaaagcacuaauuccaggagcggcuuugaaaugauuugggacccaaauggguggacuggaacggacaguagcuuuucaguaaagcaagauaucguagcaauaacugauuggucaggauauagcgggaguuuuguccagcauccagaacugacaggauuagauugcauaagaccuuguuucuggguugaguuaaucagagggcggccuaaagagagcacaauuuggaccaguggaagcagcauaucuuuuugugguguaaauggugacacuguuaguuggucuuggccagacggugcugaguugccauucaccauugacaaguag

SEQ ID NO: 49048 - RNA, 1350 nt, Artificial Sequence
  derived and/or modified CDS sequence (wt) from neuraminidase__InfluenzaA__ACT15346
augaauccaaaucagaagauaauaaccaucggaucaaucuguaugguaauugggauaguuagcuuaauguuacaaauugggaacaugaucucaauaugggucagucauucaauucagacagggaaucaaugccaagaugaaccaaucagcaacacuaaauuucuuacugagaaagcuguggcuucaguaacauuagcgggcaauucaucucuuugucccauuagcggaugggcuguguacaguaaggacaacaacauaaggaucgguuccaggggggauguguuuguuauaagagagccguucaucucaugcucccacuuggaaugcagaacuuucuuuuuaacccagggagccuuacugaaugacaagcacuccaaugggacugucaaagacagaagcccucacagaacauuaaugaguuguccugugggugaggcucccuccccauauaacucaagguuugagucuguugcuuggucagcaagugcuugccaugauggcaccaguugguugacaauuggaauuucugguccagacaauggggcuguggcuguauugaaauacaauggcauaauaacagacaccaucaagaguuggaggaacaacauaaugagaacucaagagucugaaugugcauguguaaauggcucuugcuuuacuguaaugacugauggaccaaguagugggcaggcaucauauaagaucuucaaaauggaaaagggaaaagugguuaaaucagucgaauuggaugcuccuaauuaucacuaugaggagugcuccuguuauccugaugccggcgagaucacaugugugugcagggauaauuggcauggaucaaauaggccauggguaucuuucaaucaaaauuuggaguaucaaauaggauauauaugcaguggaguuuucggagacaauccacgccccaaugauggaacagguaguugugguccgguguucccuaacggggcauaugggguaaaaggguuuucauuuaaauacggcaaugguguuuggaucgggagaaccaaaagcacuaauuccaggagcggcuuugaaaugauuugggacccaaauggguggacuggaacggacaguagcuuuucagugaagcaagauaucguagcaauaacugauuggucaggauauagcgggaguuuuguccagcauccagaacugacaggauuagauugcauaagaccuuguuucuggguugaguuaaucagagggcggccuaaagagagcacaauuuggaccaguggaagcagcauaucuuuuugugguguaaauggugacacuguuaguuggucuuggccagacggugcugaguugccauucaccauugacaaguag

SEQ ID NO: 49049 - RNA, 1350 nt, Artificial Sequence
  derived and/or modified CDS sequence (wt) from neuraminidase__InfluenzaA__ACT15348
augaauccaaaucagaagauaauaaccaucggaucaaucuguaugguaauuggaacaguuagcuuaauguuacaaauugggaacaugaucucaauaugggucagccauucaauucagacaggaaaucaaugccaaggugaaccaaucagcaacacuaaauuucuuacugagaaagcuguggcuucaguaacauuagcgggcaauucaucucuuuguccuauuagcggaugggcuguauacaguaaggacaacaguauaaggaucggcuccaggggagauguguuuguuauaagagagccguucaucucaugcucccacuuggaaugcagaaccuucuuuuugacucagggagccuuacugaaugacaagcacuccaaugggacugucaaagacagaagcccucacagaacauuaaugaguuguccugugggugaggcucccuccccauauaacucaagguuugagucuguugcuuggucagcaagugcuugccaugauggcaccaguugguugacaauuggaaucucugguccagacaauggagcuguggccguauugaaauacaauggcauaauaacagacaccaucaagaguuggaggaacaacauacugagaacucaagagucugaaugugcauguguaaauggcucuugcuuuacuguaaugacugauggaccaaguagugggcaggcaucauauaagaucuucaaaauggaaaaggggaaagugguuaaaucagucgaauuggaugcuccuaauuaucacuaugaggaaugcuccuguuauccugaugccggcgaaaucacaugugugugcagggauaauuggcaugguucaaauaggccauggguaucuuucaaucaaaauuuggaguaucaaauaggauauauaugcaguggaguuuucggagacaauccacgccccaaugaugggacagguaguugugguccaguggucucuaauggggcauaugggguaaaaggguuuucguuuaaauacggcaaugguguuuggaucgggagaaccaaaagcacuaauucuaggagcggcuuugaaaugauuugggaccccaauggguggacuggaacggacaguagcuucucggggaagcaagauaucguagcaauaacugauuggucaggauauagcgggaguuuuguccagcauccagaacugacaggauuagauugcauaagaccuuguuucuggguugaguuaaucagagggcggccuaaagagagcacaauuuggaccaguggaagcagcauaucuuuuugugguguaaauagugacacuguuaguuggucuuggccagacggugcugaguugccauucaccauugacaaguag

SEQ ID NO: 49050 - RNA, 1350 nt, Artificial Sequence
  derived and/or modified CDS sequence (wt) from neuraminidase__InfluenzaA__ACT15350
augaauccaaaucagaagauaauaaccaucggaucaaucuguaugguaauugggauaguuagcuuaauguuacaaauugggaacaugaucucaauaugggucagucauucaauucagacagggaaucgaugccaagaugaaccaaucagcaacacuaaauuucuuacugagaaagcuguggcuucaguaacauuagcgggcaauucaucucuuugucccauuagcggaugggcuguguacaguaaggacaacagcauaaggaucgguuccaggggggauguguuuguuauaagagagccguucaucucaugcucccacuuggaaugcagaacuuucuuuuugacccagggagccuuacugaaugacaagcacuccaaugggacugucaaagacagaagcccucacagaacauuaaugaguuguccugugggugaggcucccuccccauauaacucaagguuugagucuguugcuuggucagcaagugcuugccaugauggcaccaguugguugacaauuggaauuuccgguccagacaauggggcuguggcuguauugaaauacaauggcauaauaacagacaccaucaagaguuggaggaacaacauaaugagaacucaagagucugaaugugcauguguaaauggcucuugcuuuacuguaaugacugauggaccaaguagugggcaggcaucauauaagaucuucaaaauggaaaagggaaaagugguuaaaucagucgaauuggaugcuccuaauuaucacuaugaggagugcuccuguuauccugaugccggcgaaaucacaugugugugcagggauaauuggcauggaucaaauaggccauggguaucuuucaaucaaaauuuggaguauaaaauaggauauauaugcaguggaauuuucggagacaauccacgccccaaugauggaacagguaguugugguccgguguucccuaacggggcauaugggguaaaaggguuuucauuuaaauacggcaaugguguuuggaucgggagaaccaaaagcacuaauuccaggagcggcuuugaaaugauuugggacccaaauggguggacuggaacggacaguagcuuuucggugaagcaagauaucguagcaauaacugauuggucaggauauagcgggaguuuuguccagcauccagaacugacaggauuagauugcauaagaccuuguuucuggguugaguuaaucagagggcggccuaaagagagaacaauuuggaccaguggaagcagcauaucuuuuugugguguaaauggugacacuguuaguuggucuuggccagacggugcugaguugccauucaccauugacaaguag

SEQ ID NO: 49051 - RNA, 1350 nt, Artificial Sequence
  derived and/or modified CDS sequence (wt) from neuraminidase__InfluenzaA__ACT15352
augaauccaaaucagaagauaauaaccaucggaucaaucuguaugguaauuggaauaguuagcuuaauguuacaaauugggaacaugaucucaauaugggucagccauucaauucagacaggaaaucaaugccaagaugaaccaaucagcaacacuaaauuucuuacugagaaagcuguggcuucaguaacauuagcgggcaauucaucucuuuguccuauuagcggaugggcuguauacaguaaggacaacaguauaaggaucggcuccaggggagauguguuuguuauaagagagccguucaucucaugcucccacuuggaaugcagaaccuucuuuuugacucagggagccuuacugaaugacaagcacuccaaugggacugucaaagacagaagcccucacagaacauuaaugaguuguccugugggugaggcucccuccccauauaacucaagguuugagucuguugcuuggucagcaagugcuugccaugauggcaccaguugguugacaauuggaaucucugguccagacaauggagcuguggcuguauugaaauacaauggcauaauaacagacaccaucaagaguuggaggaacaacauacugagaacucaagagucugaaugugcauguguaaauggcucuugcuuuacuguaaugacugauggaccaaguagugggcaggcaucauauaagaucuucaaaauggaaaaggggaaagugguuaaaucagucgaauuggaugcuccuaauuaucacuaugaggaaugcuccuguuauccugaugccggcgaaaucacaugugugugcagggauaauuggcaugguucaaauaggccauggguaucuuucaaucaaaauuuggaguaucaaauaggauauauaugcaguggaguuuucggagacaauccacgucccaaugauggaacagguaguugugguccaguggucuccaauggggcauaugggguaaaaggguuuucguuuaaauacggcaaugguguuuggaucgggagaaccaaaagcacuaauucuaggagcggcuuugaaaugauuugggaccccaauggguggacuggaacggacaguagcuucucggggaagcaagauaucguagcaauaacugauuggucaggauauagcgggaguuuuguccagcauccagaacugacaggauuagauugcauaagaccuuguuucuggguugaguuaaucagagggcggccuaaagagagcacaauuuggaccaguggaagcagcauaucuuuuugugguguaaauagugacacuguuaguuggucuuggccagacggugcugaguugccauucaccauugacaaguag

SEQ ID NO: 49052 - RNA, 1350 nt, Artificial Sequence
  derived and/or modified CDS sequence (wt) from neuraminidase__InfluenzaA__ACT15354
augaauccaagucagaagauaauaaccaucggaucaauuuguaugguaauugggauaguuagcuuaauguuacaaauugggaacaugaucucaauauggaucagucauucaauucagacagggaaucaaugccaagaugaaccaaucagcaacacuaaauuucuuacugagaaagcuguggccucaguaacauuagcgggcaauucaucucuuugucccauuagcggaugggcuguguacaguaaggacaacagcauaaggaucgguuccaggggggauguguuuguuauaagagagccguucaucucaugcucccacuuggaaugcagaacuuucuuuuuaacccagggagccuuacugaaugacaagcacuccaaugggacugucaaagacagaagcccucacagaacauuaaugaguuguccugugggugaggcucccuccccauauaacucaagguuugagucuguugcuuggucagcaagugcuugccaugauggcaccaguugguugacaauuggaauuucugguccagacaauggggcuguggcuguauugaaauacaauggcauaauaacagacaccaucaagaguuggaggaauaacauaaugagaacucaagagucugaaugugcauguguaaauggcucuugcuuuacuguaaugacugauggaccaaguagugggcaggcaucauauaagaucuucaaaauggaaaagggaaaagugguuaaaucagucgaauuggaugcuccuaauuaucacuaugaggagugcuccuguuauccugaugccggcgaaaucacaugugugugcagggauaauuggcauggaucaaauaggccauggguaucuuucaaucaaaauuuggaguaucaaauaggauauauaugcaguggaguuuucggagacaauccacgccccaaugauggaacagguaguugugguccgguguucccuaacggggcauaugggguaaaaggguuuucauuuaaauacggcaaugggguuuggaucgggagaaccaaaagcacuaauuccaggagcggcuuugaaaugauuugggacccaaauggguggacuggaacggacaguagcuuuucagugaagcaagauaucguagcaauaacugauuggucaggauauagcgggaguuuuguccagcauccagaacugacaggauuagauugcauaagaccuuguuucuggguugaguuaaucagagggcggccuaaagagagcacaauuuggaccaguggaagcagcauaucuuuuugugguguaaauggugacacuguuaguuggucuuggccagacggugcugaguugccauucaccauugacaaguag

SEQ ID NO: 49053 - RNA, 1350 nt, Artificial Sequence
  derived and/or modified CDS sequence (wt) from neuraminidase__InfluenzaA__ACT15356
augaauccaaaucagaagauaauaaccaucggaucaaucuguaugguaauuggaauaguuagcuuaauguuacaaauugggaacaugaucucaauaugggucagccauucaauucagacaggaaaucaaugccaagaugaaccaaucagcaacacuaaauuucuuacugagaaagcuguggcuucaguaacauuagcgggcaauucaucucuuuguccuauuagcggaugggcuguauacaguaaggacaacaguauaaggaucggcuccaggggagauguguuuguuauaagagagccguucaucucaugcucccacuuggaaugcagaacuuucuuuuugacucagggagccuuacugaaugacaagcacuccaaugggacugucaaagacagaagcccucacagaacauuaaugaguuguccugugggugaggcucccucuccauauaacucaagguuugagucuguugcuuggucagcaagugcuugccaugauggcaccaguugguugacaauuggaaucucugguccagacaauggagcuguggcuguauugaaauacaauggcauaauaacagacaccaucaagaguuggaggaacaacauacugagaacucaagagucugaaugugcauguguaaauggcucuugcuuuacuguaaugacugauggaccaaguagugggcaggcaucauauaagaucuucaaaauggagaaggggaaagugguuaaaucagucgaauuggaugcuccuaauuaucacuaugaggaaugcuccuguuauccugaugccggcgaaaucacaugugugugcagggauaauuggcaugguucaaauaggccauggguaucuuucaaucaaaauuuggaguaucaaauaggauauauaugcaguggaguuuucggagacaauccacgccccaaugauggaacagguaguugugguccaguguucucuaauggggcauaugggguaaaaggguuuucguuuaaauacggcaaugguguuuggaucgggagaaccaaaagcacuaauucuaggagcggcuuugaaaugauuugggaccccaauggguggacuggaacggacaguagcuuuucggggaagcaagauaucguagcaauaacugauuggucaggauauagcgggaguuuuguccagcauccagaacugacaggauuagauugcauaagaccuuguuucuggguugaguuaaucagagggcggccuaaagagagcacaauuuggaccaguggaagcagcauaucuuuuugugguguaaauagugacacuguuaguuggucuuggccagacggugcugaguugccauucaccauugacaaguag

SEQ ID NO: 49054 - RNA, 1350 nt, Artificial Sequence
  derived and/or modified CDS sequence (wt) from neuraminidase__InfluenzaA__ACT15358
augaauccaaaucagaagauaauaaccaucggaucaaucuguaugguaauugggauaguuagcuuaauguuacaaauugggaacaugaucucaauaugggucagucauucaauucagacagggaaucgaugccaagaugaaccaaucagcaacacuaaauuucuuacugagaaagcuguggcuucaguaacauuagcgggcaauucaucucuuugucccauuagcggaugggcuguguacaguaaggacaacagcauaaggaucgguuccaggggggauguguuuguuauaagagagccguucaucucaugcucccacuuggaaugcagaacuuucuuuuugacccauggagccuuacugaaugacaagcacuccaaugggacugucaaagacagaagcccucacagaacauuaaugaguuguccugugggugaggcucccuccccauauaacucaagguuugagucuguugcuuggucagcaagugcuugccaugauggcaccaguugguugacaauuggaauuuccgguccagacaauggggcuguggcuguauugaaauacaauggcauaauaacagacaccaucaagaguuggaggaacaacauaaugagaacucaagagucugaaugugcauguguaaauggcucuugcuuuacuguaaugacugauggaccaaguagugggcaggcaucauauaagaucuucaaaauggaaaagggaaaagugguuaaaucagucgaauuggaugcuccuaauuaucacuaugaggagugcuccuguuauccugaugccggcgaaaucacaugugugugcagggauaauuggcauggaucaaauaggccauggauaucuuucaaucaaaauuuggaguauaaaauaggauauauaugcaguggaauuuucggagacaauccacgccccaaugauggaacaggcaguugugguccggugcuccccaacggggcauauggggugaaaggguuuucauuuaaauacggcaaugguguuuggaucgggagaaccaaaagcacuaauuccaggagcggcuuugaaaugauuugggacccaaauggguggacuggaacggacaguagcuuuucggugaagcaagauaucguagcaauaacugauuggucaggauauagcgggaguuuuguccagcauccagaacugacaggauuagauugcauaagaccuuguuucuggguugaguuaaucagagggcggccuaaagagagcacaauuuggaccaguggaagcagcauaucuuuuugugguguaaauggugacacuguuaguuggucuuggccagacggugcugaguugccauucaccauugacaaguag

SEQ ID NO: 49055 - RNA, 1410 nt, Artificial Sequence
  derived and/or modified CDS sequence (wt) from neuraminidase__InfluenzaA__ACT21515
augaauccaaaucaaaagauaauaacgauuggcucuguuucucucaccauuuccacaauaugcuucuuuaugcaaauugccaucuugauaacuacuguaacauugcauuucaagcaauaugaauucaacucccccccaaacaaccaagugaugcugugugaaccaacaauaauagaaagaaacauaacagagauaguguaucugaccaacaccaccauagagaaggaaauaugccccaaacuagcagaauacaggaauuggucaaagccgcaaugugacauuacaggauuugcaccuuuuucuaaggacaauucgauuaggcuuuccgcugguggggacaucugggugacaagagaaccuuaugugucaugcgauccugacaaauguuaucaauuugcccuuggacagggaacaacacuaaacaacgugcauucaaaugacacaguacaugauaggaccccuuaucggacccuauugaugaaugaguuagguguuccauuucaucuggggacuaagcaagugugcauagcaugguccagcucaaguugucacgauggaaaagcauggcugcauguuuguguaacgggggaugauaaaaaugcaacugcuagcuucauuuacaaugggaggcuuguagauaguauuguuucaugguccaaagaaauccucagaacccaggagucagaaugcguuuguaucaauggaacuuguacaguaguaaugacugaugggagugcuucaggaaaagcugauacuaaaauacuauucauugaggaggggaaaaucguucauacuagcacauugucagggagugcccagcaugucgaggagugcuccugcuauccucgauauccuggugucagaugugucugcagggacaacuggaaaggcuccaauaggcccaucguagauauaaacauaaaggauuauagcauuguuuccaguuaugugugcucaggacuuguuggagacacacccagaaaaaacgacagcuccagcaguagccauugcuuggauccuaacaaugaagaagguggucauggagugaaaggcugggccuuugaugauggaaaugacguguggaugggaagaacgaucagcgagaaguuacgcucaggauaugaaaccuucaaagucauugaaggcugguccaacccuaauuccaaauugcagauaaauaggcaagucauaguugacagagguaauagguccgguuauucugguauuuucucuguugaaggcaaaagcugcaucaaucggugcuuuuauguggaguugauaaggggaagaaaagaggaaacugaagucuuguggaccucaaacaguauuguuguguuuuguggcaccucagguacauauggaacaggcucauggccugauggggcggacaucaaucucaugccuauauaa

SEQ ID NO: 49056 - RNA, 1410 nt, Artificial Sequence
  derived and/or modified CDS sequence (wt) from neuraminidase__InfluenzaA__ACT21516
augaauccaaaucaaaagauaauaacgauuggcucuguuucucucaccauuuccacaauaugcuucuucaugcaaauugccaucuugauaacuacuguaacauugcauuucaagcaauaugaauucaacucccccccaaacaaccaagugaugcugugugaaccaacaauaauagaaagaaacauaacagagauagcguaucugaccaacaccaccauagagaaggaaauaugccccaaacuagcagaauacagaaauuggucaaagccgcaaugugacauuacaggauuugcaccuuuuucuaaggacaauucgauuaggcuuuccgcugguggggacaucugggugacaagagaaccuuaugugucaugcgauccugacaaguguuaucaauuugcccuuggacagggaacaacacuaaacaacgugcauucaaaugacacaguacaugauaggaccccuuaucggacccuauugaugaaugaguuagguguuccauuucaucuggggaccaagcaagugugcguagcaugguccagcucaaguugucacgauggaaaagcauggcugcauguuuguguaacgggggaugaaaaaaaugcaacugcuagcuucauuuacaaugggaggcuuguagauaguauuguuucaugguccaaagaaauccucaggacccaggagucagaaugcguuuguaucaauggaacuuguacaguaguaaugacugaugggagugcuucaggaaaagcugauacuaaaauacuauucauugaggaggggaaaaucguucauacuagcacauugucaggaagugcucagcaugucgaggagugcuccugcuauccucgauauccuggugucagaugugucugcagagacaauuggaaaggcuccaauaggcccauaguagauauaaacauaaaggauuauagcauuguuuccaguuaugugugcucaggacuuguuggagacacacccagaaaaaacgacagcuccagcaguagccauugcuuggauccuaacaaugaagaagguggucauggagugaaaggcugggccuuugaugauggaaaugacguguggaugggaagaacgaucagcgagaaguuacgcucaggauaugaaaccuucaaagucauugaaggcugguccaacccuaauuccaaauugcagauaaauaggcaagucauaguugacagagguaauagguccgguuauucugguauuuucucuguugaaggcaaaagcugcaucaaucggugcuuuuauguggaguugauaaggggaagaaaagaggaaaaugaagucuuguggaccucaaacaguauuguuguguuuuguggaaccucagguacauauggaacaggcucauggccugauggggcggacaucaaucucaugccuauauaa

SEQ ID NO: 49057 - RNA, 1410 nt, Artificial Sequence
  derived and/or modified CDS sequence (wt) from neuraminidase__InfluenzaA__ACT21517
augaauccaaaucaaaagauaauaacgauuggcuccguuucucucaccauuuccacaauaugcuucuuuaugcaaauugccaucuugauaacuacuguaacauugcauuucaagcaauaugaauucaacucccccccaaacaaccaagugaugcugugugaaccaacaauaauagaaagaaacauaacagagauaguguaucugaccaacaccaccauagagaaggaaauaugccccaaacuagcagaauacagaaauuggucagagccgcaaugugacauuacaggauuugcaccuuuuucuaaggacaauucgauuaggcuuuccgcugguggggacaucugggugacaagagaaccuuaugugucaugcgauccugacaaauguuaucaauuugcccuuggacagggaacaacacuaaacaacgugcauucaaaugacacaguacaugauaggaccccuuaucggacccuagugaugaaugaguuagguguuccauuucaucuggggacuaagcaagugugcauagcaugguccagcucaaguugucacgauggaaaagcauggcugcauguuuguguaacgggggaugauaaaaaugcaacugcuagcuucauuuacaaugggaggcuuguagauaguauuguuucaugguccaaagaaauccucagaacccaggagucagaaugcguuuguaucaauggaacuuguacaguaguaaugacugaugggagugcuucaggaaaagcugauacuaaaauacuauucauugaggaggggaaaaucguucauacuagcacauugucagggagugcccagcaugucgaggagugcuccugcuauccucgauauccuggugucagaugugucugcagagacaacuggaaaggcuccaauaggcccaucguagauauaaacauaaaggauuauagcauuguuuccaguuaugugugcucaggacuugcuggagacacacccagaaaaaacgacagcuccagcaguagccauugcuuggauccuaacaaugaagaagguggucauggagugaaaggcugggccuuugaugauggaaaugacguguggaugggaagaacgaucagcgagaaguuacgcucaggauaugaaaccuucaaagucauugaaggcugguccaacccuaauuccaaauugcagauaaauaggcaagucauaguugacagagguaauagguccgguuauucugguauuuucucuguugaaggcaaaagcugcaucaaucggugcuuuuauguggaguugauaaggggaagaaaagaggaaacugaagucuuguggaccucaaacaguauuguuguguuuuguggcaccucagguacauauggaacaggcucauggccugauggggcggacaucaaucucaugccuauauaa

SEQ ID NO: 49058 - RNA, 1410 nt, Artificial Sequence
  derived and/or modified CDS sequence (wt) from neuraminidase__InfluenzaA__ACT21574
augaauccaaaccaaaagauaauaaccauugguucggucuguaugacaauuggaauggcuaacuuaauauuacaaauuggaaacauaaucucaauauggauuagccacucaauucaacuugggaaucaaaaucagauugaaacaugcaaucaaagcgucauuacuuaugaaaacaacacuuggguaaaucagacauauguuaacaucagcaacaccaacuuugcugcuggacagucagugguuuccgugaaauuagcgggcaauuccucucucugcccuguuaguggaugggcuauauacaguaaagacaacaguauaagaaucgguuccaagggggauguguuugucauaagggaaccauucauaucaugcucccccuuggaaugcagaaccuucuucuugacucaaggggccuugcuaaaugacaaacauuccaauggaaccauuaaagacaggagcccauaucgaacccuaaugagcuguccuauuggugaaguucccucuccauacaacucaagauuugaaucagucgcuuggucagcaagugcuugucaugauggcaucaauuggcuaacaauuggaauuucuggcccagacaauggggcaguggcuguguuaaaguacaacggcauaauaacagacacuaucaagaguuggagaaacaauauauugagaacacaagagucugaaugugcauguguaaaugguucuugcuuuacuguaaugaccgauggaccaagugauggacaggccucauacaagaucuucagaauagaaaagggaaagauagucaaaucagucgaaaugaaugccccuaauuaucacuaugaggaaugcuccuguuauccugauucuagugaaaucacaugugugugcagggauaacuggcauggcucgaaucgaccgugggugucuuucaaccagaaucuggaauaucagauaggauacauaugcagugggauuuucggagacaauccacgcccuaaugauaagacaggcaguugugguccaguaucgucuaauggagcaaauggaguaaaaggauuuucauucaaauacggcaaugguguuuggauagggagaacuaaaagcauuaguucaagaaacgguuuugagaugauuugggauccgaacggauggacugggacagacaauaacuucucaauaaagcaagauaucguaggaauaaaugaguggucaggauauagcgggaguuuuguucagcauccagaacuaacagggcuggauuguauaagaccuugcuucuggguugaacuaaucagagggcgacccaaagagaacacaaucuggacuagcgggagcagcauauccuuuugugguguaaacagugacacuguggguuggucuuggccagacggugcugaguugccauuuaccauugacaaguaa

SEQ ID NO: 49059 - RNA, 1410 nt, Artificial Sequence
  derived and/or modified CDS sequence (wt) from neuraminidase__InfluenzaA__ACT21585
augaauccaaaccaaaagauaauaaccauugguucggucuguaugacaauuggaauggcuaacuuaauauuacaaauuggaaacauaaucucaauauggauuagccacucaauucaacuugggaaucaaaaucagauugaaacaugcaaucaaagcgucauuacuuaugaaaacaacacuuggguaaaucagacauauguuaacaucagcaacaccaacuuugcugcuggacagucagugguuuccgugaaauuagcgggcaauuccucucucugcccuguuaguggaugggcuauauacaguaaagacaacaguauaagaaucgguuccaagggggauguguuugucauaagggaaccauucauaucaugcucccccuuggaaugcagaaccuucuucuugacucaaggggccuugcuaaaugacaaacauuccaauggaaccauuaaagacaggagcccauaucgaacccuaaugagcuguccuauuggugaaguucccucuccauacaacucaagauuugagucagucgcuuggucagcaagugcuugucaugauggcaucaauuggcuaacaauuggaauuucuggcccagacaauggggcaguggcuguguuaaaguacaacggcauaauaacagacacuaucaagaguuggagaaacaauauauugagaacacaagagucugaaugugcauguguaaaugguucuugcuuuacuguaaugaccgauggaccaagugauggacaggccucauacaagaucuucagaauagaaaagggaaagauagucaaaucagucgaaaugaaugccccuaauuaucacuaugaggaaugcuccuguuauccugauucuagugaaaucacauguguguguagggauaacuggcauggcucgaaucgaccgugggugucuuucaaccagaaucuggaauaucagauaggauacauaugcagugggauuuucggagacaauccacgcccuaaugauaagacaggcaguugugguccaguaucgucuaauggagcaaauggaguaaaaggauuuucauucaaauacggcaaugguguuuggauagggagaacuaaaagcauuaguucaagaaacgguuuugagaugauuugggauccgaacggauggacugggacagacaauaacuucucaauaaagcaagauaucguaggaauaaaugaguggucaggauauagcgggaguuuuguucagcauccagaacuaacagggcuggauuguauaagaccuugcuucuggguugaacuaaucagagggcgacccaaagagaacacaaucuggacuagcgggagcagcaucuccuuuugugguguaaacagugacacuguggguuggucuuggccagacggugcugaguugccauuuaccauugacaaguaa

SEQ ID NO: 49060 - RNA, 1410 nt, Artificial Sequence; identical to SEQ ID NO: 48949
  derived and/or modified CDS sequence (wt) from neuraminidase__InfluenzaA__ACT22011

SEQ ID NO: 49061 - RNA, 1410 nt, Artificial Sequence; identical to SEQ ID NO: 48750
  derived and/or modified CDS sequence (wt) from neuraminidase__InfluenzaA__ACT22012

SEQ ID NO: 49062 - RNA, 1410 nt, Artificial Sequence; identical to SEQ ID NO: 48949
  derived and/or modified CDS sequence (wt) from neuraminidase__InfluenzaA__ACT22013

SEQ ID NO: 49063 - RNA, 1410 nt, Artificial Sequence; identical to SEQ ID NO: 48750
  derived and/or modified CDS sequence (wt) from neuraminidase__InfluenzaA__ACT22014

SEQ ID NO: 49064 - RNA, 1410 nt, Artificial Sequence; identical to SEQ ID NO: 48740
  derived and/or modified CDS sequence (wt) from neuraminidase__InfluenzaA__ACT22015

SEQ ID NO: 49065 - RNA, 1410 nt, Artificial Sequence
  derived and/or modified CDS sequence (wt) from neuraminidase__InfluenzaA__ACT22016
augaauccaaaccaaaagauaauaaccauugguucggucuguaugacaauuggaauggcuaacuuaauauuacaaauuggaaacauaaucucaauauggauuagccacucaauucaacuugggaaucaaaaucagauugaaacaugcaaucaaagcgucauuacuuaugaaaacaacacuuggguaaaucagacauauguuaacaucagcaacaccaacuuugcugcuggacagucagugguuuccgugaaauuagcgggcaauuccucucucugcccuguuaguggaugggcuauauacaguaaagacaacaguauaagaaucgguuccaagggggauguguuugucauaagggaaccauucauaucaugcucccccuuggaaugcagaaccuucuucuugacucaaggggccuugcuaaaugacaaacauuccaauggaaccauuaaagacaggagcccauaucgaacccuaaugagcuguccuauuggugaaguucccucuccauacaacucaagauuugagucagucgcuuggucagcaagugcuugucaugauggcaucaauuggcuaacaauuggaauuucuggcccagacaauggggcaguggcuguguuaaaguacaacggcauaauaacagacacuaucaagaguuggagaaacaauauauugagaacacaagagucugaaugugcauguguaaaugguucuugcuuuacuguaaugaccgauggaccaaguaauggacaggccucauacaagaucuucagaauagaaaagggaaagauagucaaaucagucgaaaugaaugccccuaauuauuacuaugaggaaugcuccuguuauccugauucuagugaaaucacaugugugugcagggauaacuggcauggcucgaaucgaccgugggugucuuucaaccagaaucuggaauaucagauaggauacauaugcagugggauuuucggagacaauccacgcccuaaugauaagacaggcaguugugguccaguaucgucuaauggagcaaauggaguaaaaggauuuucauucaaauacggcaaugguguuuggauagggagaacuaaaagcauuaguucaagaaacgguuuugagaugauuugggauccgaacggauggacugggacagacaauaacuucucaauaaagcaagauaucguaggaauaaaugaguggucaggauauagcgggaguuuuguucagcauccagaacuaacagggcuggauuguauaagaccuugcuucuggguugaacuaaucagagggcgacccaaagagaacacaaucuggacuagcgggagcagcauauccuuuugugguguaaacagugacacuguggguuggucuuggccagacggugcugaguugccauuuaccauugacaaguaa

SEQ ID NO: 49066 - RNA, 1410 nt, Artificial Sequence; identical to SEQ ID NO: 48814
  derived and/or modified CDS sequence (wt) from neuraminidase__InfluenzaA__ACT22017

SEQ ID NO: 49067 - RNA, 1410 nt, Artificial Sequence; identical to SEQ ID NO: 48953
  derived and/or modified CDS sequence (wt) from neuraminidase__InfluenzaA__ACT22018

SEQ ID NO: 49068 - RNA, 1410 nt, Artificial Sequence
  derived and/or modified CDS sequence (wt) from neuraminidase__InfluenzaA__ACT22506
augaauccaaaccaaaagauaauaaccauugguucggucuguaugacaauuggaauggccaacuuaauauuacaaauuggaaacauaaucucaauauggauuagccacucaauucaacuugggaaucaaaaucagauugaaacaugcaaucaaagcgucauuacuuaugaaaacaacacuuggguaaaucagacauauguuaacaucagcaacaccaacuuugcugcuggacagucagugguuuccgugaaauuagcgggcaauuccucucucugcccuguuaguggaugggcuauauacaguaaagacaacaguguaagaaucgguuccaagggggauguguuugucauaagggaaccauucauaucaugcucccccuuggaaugcagaaccuucuucuugacucaaggggccuugcuaaaugacaaacauuccaauggaaccauuaaagacaggagcccauaucgaacccuaaugagcuguccuauuggugaaguucccucuccauacaacucaagauuugagucagucgcuuggucagcaagugcuugucaugauggcaucaauuggcuaacaauuggaauuucuggcccagacaauggggcaguggcuguguuaaaguacaacggcauaauaacagacacuaucaagaguuggagaaacaauauauugagaacacaagagucugaaugugcauguguaaaugguucuugcuuuacuguaaugaccgauggaccaaguaauggacaggccucauacaagaucuucagaauagaaaagggaaagauagucaaaucagucgaaaugaaugccccuaauuaucacuaugaggaaugcuccuguuauccugauucuagugaaaucacaugugugugcagggauaacuggcauggcucgaaucgaccgugggugucuuucaaccagaaucuggaauaucagauaggauacauaugcagugggauuuucggagacaauccacgcccuaaugauaagacaggcaguugugguccaguaucgucuaauggagcaaauggaguaaaaggauuuucauucaaauacggcaaugguguuuggauagggagaacuaaaagcauuaguucaagaaacgguuuugagaugauuugggauccgaacggauggacugggacagacaauaacuucucaauaaagcaagauaucguaggaauaaaugaguggucaggauauagcgggaguuuuguucagcauccagaacuaacagggcuggauuguauaagaccuugcuucuggguugaacuaaucagagggcgacccaaagagaacacaaucuggacuagcgggagcagcauauccuuuugugguguaaacagugacacuguggguuggucuuggccagacggugcugaguugccauuuaccauugacaaguaa

SEQ ID NO: 49069 - RNA, 1410 nt, Artificial Sequence; identical to SEQ ID NO: 48953
  derived and/or modified CDS sequence (wt) from neuraminidase__InfluenzaA__ACT22511

SEQ ID NO: 49070 - RNA, 1410 nt, Artificial Sequence
  derived and/or modified CDS sequence (wt) from neuraminidase__InfluenzaA__ACT33121
augaauccaaaccaaaagauaauaaccauugguucggucuguaugacaauuggaauggcuaacuuaauauuacaaauuggaaacauaaucucaauauggauuagccacucaauucaacuugggaaucaaaaucagauugaaacaugcaaucaaagcgucauuacuuaugaaaacaacacuuggguaaaucagacauauguuaacaucagcaacaccaacuuugcugcuggacagucagugguuuccgugaaauuagcgggcaauuccucucucugcccuguuaguggaugggcuauauacaguaaagacaacaguauaagaaucgguuccaagggggauguguuugucauaagggaaccauucauaucaugcucccccuuggaaugcagaaccuucuucuugacucaaggggccuugcuaaaugacaaacauuccaauggaaccauuaaagacaggagcccauaucgaacccuaaugagcuguccuauuggugaaguucccucuccauacaacucaagauuugagucagucgcuuggucagcaagugcuugucaugauggcaucaauuggcuaacaauuggaauuucuggcccagacaauggggcaguggcuguguuaaaguacaacggcauaauaacagacacuaucaagaguuggagaaacaauauauugagaacacaagagucugaaugugcauguguaaaugguucuugcuuuacuguaaugaccgauggaccaagugauggacaggccucauacaagaucuucagaauagaaaagggaaagauagucaaaucagucgaaaugaaugccccuaauuaucacuaugaggaaugcuccuguuauccugauucuagugaaaucacaugugugugcagggauaacuggcauggcucgaaucgaccgugggugucuuucaaccagaaucuggaauaucagauaggauacauaugcagugggauuuucggagacaauccacgcccuaaugauaagacaggcaguugugguccaguaucgucuaauggagcaaauggaguaaaaggauuuucauucaaauacggcaaugguguuuggauagggagaacuaaaagcauuaguucaagaaacgguuuugagaugauuugggauccgaacggauggacugggacagacaauaacuucucaauaaagcaagauaucguaggaauaaaugaguggucaggauauagcgggaguuuuguucagcauccagaacuaacagggcuggauuguauaagaccuugcuucuggguugaacuaaucagagggcgacccaaagagaacacaaucuggacuagcgggagcagcaucuccuuuugugguguaaacagugacacuguggguuggucuuggccagacggugcugaguugccauuuaccauugacaaguaa

SEQ ID NO: 49071 - RNA, 1410 nt, Artificial Sequence; identical to SEQ ID NO: 48750
  derived and/or modified CDS sequence (wt) from neuraminidase__InfluenzaA__ACT33124

SEQ ID NO: 49072 - RNA, 1410 nt, Artificial Sequence; identical to SEQ ID NO: 48949
  derived and/or modified CDS sequence (wt) from neuraminidase__InfluenzaA__ACT33126

SEQ ID NO: 49073 - RNA, 1410 nt, Artificial Sequence
  derived and/or modified CDS sequence (wt) from neuraminidase__InfluenzaA__ACT35526
augaauccaaaccaaaagauaauaaccauugguucggucuguaugacaauuggaauggcuaacuuaauauuacaaauuggaaacauaaucucaauauggauuagccacucaauucaacuugggaaucaaaaucagauugaaacaugcaaucaaagcgucauuacuuaugaaaacaacacuuggguaaaucagacauauguuaacaucagcaacaccaacuuugcugcuggacagucagugguuuccgugaaauuagcgggcaauuccucucucugcccuguuaguggaugggcuauauacaguaaagacaacaguguaagaaucgguuccaagggggauguguuugucauaagggaaccauucauaucaugcucccccuuggaaugcagaaccuucuucuugacucaaggggccuugcuaaaugacaaacauuccaauggaaccauuaaagacaggagcccauaucgaacccuaaugagcuguccuauuggugaaguucccucuccauacaacucaagauuugagucagucgcuuggucagcaagugcuugucaugauggcaucaauuggcuaacaauuggaauuucuggcccagacaauggggcaguggcuguguuaaaguacaacggcauaauaacagacacuaucaagaguuggagaaacaauauauugagaacacaagagucugaaugugcauguguaaaugguucuugcuuuacuguaaugaccgauggaccaaguaauggacaggccucauacaagaucuucagaauagaaaagggaaaaauagucaaaucagucgaaaugaaugccccuaauuaucacuaugaggaaugcuccuguuauccugauucuagugaaaucacaugugugugcagggauaacuggcauggcucgaaucgaccgugggugucuuucaaccagaaucuggaauaucagauaggauacauaugcagugggauuuucggagacaauccacgcccuaaugauaagacaggcaguugugguccaguaucgucuaauggagcaaauggaguaaaaggauuuucauucaaauacggcaaugguguuuggauagggagaacuaaaagcauuaguucaagaaacgguuuugagaugauuugggauccgaacggauggacugggacagacaauaacuucucaauaaaacaagauaucguaggaauaaaugaguggucaggauauagugggaguuuuguucagcauccagaacuaacagggcuggauuguauaagaccuugcuucuggguugaacuaaucagagggcgacccaaagagaacacaaucuggacuagcgggagcagcauauccuuuugugguguaaacagugacacuguggguuggucuuggccagacggugcugaguugccauuuaccauugacaaguaa

SEQ ID NO: 49074 - RNA, 1410 nt, Artificial Sequence; identical to SEQ ID NO: 48947
  derived and/or modified CDS sequence (wt) from neuraminidase__InfluenzaA__ACT36507

SEQ ID NO: 49075 - RNA, 1410 nt, Artificial Sequence; identical to SEQ ID NO: 48953
  derived and/or modified CDS sequence (wt) from neuraminidase__InfluenzaA__ACT36672

SEQ ID NO: 49076 - RNA, 1410 nt, Artificial Sequence; identical to SEQ ID NO: 48953
  derived and/or modified CDS sequence (wt) from neuraminidase__InfluenzaA__ACT36673

SEQ ID NO: 49077 - RNA, 1410 nt, Artificial Sequence; identical to SEQ ID NO: 48750
  derived and/or modified CDS sequence (wt) from neuraminidase__InfluenzaA__ACT36674

SEQ ID NO: 49078 - RNA, 1410 nt, Artificial Sequence; identical to SEQ ID NO: 48750
  derived and/or modified CDS sequence (wt) from neuraminidase__InfluenzaA__ACT36675

SEQ ID NO: 49079 - RNA, 1410 nt, Artificial Sequence; identical to SEQ ID NO: 48750
  derived and/or modified CDS sequence (wt) from neuraminidase__InfluenzaA__ACT36677

SEQ ID NO: 49080 - RNA, 1410 nt, Artificial Sequence
  derived and/or modified CDS sequence (wt) from neuraminidase__InfluenzaA__ACT36678
augaauccaaaccaaaagauaauaaccauugguucggucuguaugacaauuggaauggcuaacuuaauauuacaaauuggaaacauaaucucaauauggauuagccacucaauucaacuugggaaucaaaaucagauugaaacaugcaaucaaagcgucauuacuuaugaaaacaacacuuggguaaaucagacauauguuaacaucagcaacaccaacuuugcugcuagacagucagugguuuccgugaaauuagcgggcaauuccucucucugcccuguuaguggaugggcuauauacaguaaagacaacaguguaagaaucgguuccaagggggauguguuugucauaagggaaccauucauaucaugcucccccuuggaaugcagaaccuucuucuugacucaaggggccuugcuaaaugacaaacauuccaauggaaccauuaaagacaggagcccauaucgaacccuaaugagcuguccuauuggugaaguucccucuccauacaacucaagauuugagucagucgcuuggucagcaagugcuugucaugauggcaucaauuggcuaacaauuggaauuucuggcccagacaauggggcaguggcuguguuaaaguacaacggcauaauaacagacacuaucaagaguuggagaaacaauauauugagaacacaagagucugaaugugcauguguaaaugguucuugcuuuacuguaaugaccgauggaccaaguaauggacaggccucauacaagaucuucagaauagaaaagggaaagauagucaaaucagucgaaaugaaugccccuaauuaucacuaugaggaaugcuccuguuauccugauucuagugaaaucacaugugugugcagggauaacuggcauggcucgaaucgaccgugggugucuuucaaccagaaucuggaauaucagauaggauacauaugcagugggauuuucggagacaauccacgcccuaaugauaagacaggcaguugugguccaguaucgucuaauggagcaaauggaguaaaaggauuuucauucaaauacggcaaugguguuuggauagggagaacuaaaagcauuaguucaagaaacgguuuugagaugauuugggauccgaacggauggacugggacagacaauaacuucucaauaaagcaagauaucguaggaauaaaugaguggucaggauauagcgggaguuuuguucagcauccggaacuaacagggcuggauuguauaagaccuugcuucuggguugaacuaaucagagggcgacccaaagagaacacaaucuggacuagcgggagcagcauauccuuuugugguguaaacagugacacuguggguuggucuuggccagacggugcugaguugccauuuaccauugacaaguaa

SEQ ID NO: 49081 - RNA, 1410 nt, Artificial Sequence; identical to SEQ ID NO: 48740
  derived and/or modified CDS sequence (wt) from neuraminidase__InfluenzaA__ACT36679

SEQ ID NO: 49082 - RNA, 1410 nt, Artificial Sequence; identical to SEQ ID NO: 48750
  derived and/or modified CDS sequence (wt) from neuraminidase__InfluenzaA__ACT36680

SEQ ID NO: 49083 - RNA, 1410 nt, Artificial Sequence; identical to SEQ ID NO: 48749
  derived and/or modified CDS sequence (wt) from neuraminidase__InfluenzaA__ACT36682

SEQ ID NO: 49084 - RNA, 1410 nt, Artificial Sequence
  derived and/or modified CDS sequence (wt) from neuraminidase__InfluenzaA__ACT36683
augaauccaaaccaaaagauaauaaccauugguucggucuguaugacaauuggaauggcuaacuuaauauuacaaauuggaaacauaaucucaauauggauuagccacucaauucaacuugggaaucaaaaucagauugaaacaugcaaucaaagcgucauuacuuaugaaaacaacacuuggguaaaucagacauauguuaacaucagcaacaccaacuuugcugcuggacagucagugguuuccgugaaauuagcgggcaauuccucucucugcccuguuaguggaugggcuauauacaguaaagacaacaguguaagaaucgguuccaagggggauguguuugucauaagggaaccauucauaucaugcucccccuuggaaugcagaaccuucuucuugacucaaggggccuugcuaaaugacaaacauuccaauggaaccauuaaagacaggagcccauaucgaacccuaaugagcuguccuauuggugaaguucccucuccauacaacucaagauuugagucagucgcuuggucagcaagugcuugucaugauggcaucaauuggcuaacaauuggaauuucuggcccagacaauggggcaguggcuguguuaaaguacaacggcauaauaacugacacuaucaagaguuggagaaacaauauauugagaacacaagagucugaaugugcauguguaaaugguucuugcuuuacuguaaugaccgauggaccaaguaauggacaggccucauacaagaucuucagaauagaaaagggaaagauagucaaaucagucgaaaugaaugccccuaauuaucacuaugaggaaugcuccuguuauccugauucuagugaaaucacaugugugugcagggauaacuggcauggcucgaaucgaccgugggugucuuucaaccagaaucuggaauaucagauaggauacauaugcagugggauuuucggagacaauccacgcccuaaugauaagacaggcaguugugguccaguaucgucuaauggagcaaauggaguaaaaggauuuucauucaaauacggcaaugguguuuggauagggagaacuaaaagcauuaguucaagaaacgguuuugagaugauuugggauccgaacggauggacugggacagacaauaacuucucaauaaagcaagauaucguaggaauaaaugaguggucaggauauagcgggaguuuuguucagcauccagaacuaacagggcuggauuguauaagaccuugcuucuggguugaacuaaucagagggcgacccaaagagaacacaaucuggacuagcgggagcagcauauccuuuugugguguaaacagugacacuguggguuggucuuggccagacggugcugaguugccauuuaccauugacaaguaa

SEQ ID NO: 49085 - RNA, 1410 nt, Artificial Sequence; identical to SEQ ID NO: 48750
  derived and/or modified CDS sequence (wt) from neuraminidase__InfluenzaA__ACT36684

SEQ ID NO: 49086 - RNA, 1410 nt, Artificial Sequence; identical to SEQ ID NO: 48749
  derived and/or modified CDS sequence (wt) from neuraminidase__InfluenzaA__ACT36685

SEQ ID NO: 49087 - RNA, 1410 nt, Artificial Sequence; identical to SEQ ID NO: 48761
  derived and/or modified CDS sequence (wt) from neuraminidase__InfluenzaA__ACT36686

SEQ ID NO: 49088 - RNA, 1410 nt, Artificial Sequence; identical to SEQ ID NO: 48749
  derived and/or modified CDS sequence (wt) from neuraminidase__InfluenzaA__ACT36687

SEQ ID NO: 49089 - RNA, 1410 nt, Artificial Sequence
  derived and/or modified CDS sequence (wt) from neuraminidase__InfluenzaA__ACT36688
augaauccaaaccaaaagauaauaaccauugguucggucuguaugacaauuggaauggcuaacuuaauauuacaaauuggaaacauaaucucaauauggauuagccacucaauucaacuugggaaucaaaaucagauugaaacaugcaaucaaagcgucauuacuuaugaaaacaacacuuggguaaaucagacauauguuaacaucagcaacaccaacuuugcugcuggacagucagugguuuccgugaaauuagcgggcaauuccucucucugcccuguuaguggaugggcuauauacaguaaagacaacaguguaagaaucgguuccaagggggauguguuugucauaagggaaccauucauaucaugcucccccuuggaaugcagaaccuucuucuugacucaaggggccuugcuaaaugacaaacauuccaauggaaccauuaaagacaggagcccauaucgaacccuaaugagcuguccuauuggugaaguucccucuccauacaacucaagauuugagucagucgcuuggucagcaagugcuugucaugauggcaucaauuggcuaacaauuggaauuucuggcccagacaauggggcaguggcuguguuaaaguacaacggcauaauaacagacacuaucaagaguuggagaaacaauauauugagaacacaagagucugaaugugcauguguaaaugguucuugcuuuacuguaaugaccgauggaccaaguaauggacaggccucauacaagaucuucagaauagaaaagggaaagauagucaaaucagucgaaaugaaugccccuaauuaucacuaugaggaaugcuccuguuauccugauucuagugaaaucacaugugugugcagggauaacuggcauggcucgaaucgaccgugggugucuuucaaccagaaucuggaauaucagauaggauacauaugcagugggauuuucggagacaauccacgcccuaaugauaagacaggcaguugugguccaguaucgucuaauggagcaaauggaguaaaaggguuuucauacaaauauggcaaugguguuuggauagggagaacuaaaagcauuaguucaagaaacgguuuugagaugauuugggauccgaacggauggacugggacagacaauaacuucucaauaaagcaagauaucguaggaauaaaugaguggucaggauauagcgggaguuuuguucagcauccagaacuaacagggcuggauuguauaagaccuugcuucuggguugaacuaaucagagggcgacccaaagagaacacaaucuggacuagcgggagcagcauauccuuuugugguguaaacagugacacuguggguuggucuuggccagacggugcugaguugccauuuaccauugacaaguaa

SEQ ID NO: 49090 - RNA, 1410 nt, Artificial Sequence; identical to SEQ ID NO: 48740
  derived and/or modified CDS sequence (wt) from neuraminidase__InfluenzaA__ACT36689

SEQ ID NO: 49091 - RNA, 1410 nt, Artificial Sequence; identical to SEQ ID NO: 48780
  derived and/or modified CDS sequence (wt) from neuraminidase__InfluenzaA__ACT36690

SEQ ID NO: 49092 - RNA, 1410 nt, Artificial Sequence; identical to SEQ ID NO: 48761
  derived and/or modified CDS sequence (wt) from neuraminidase__InfluenzaA__ACT36691

SEQ ID NO: 49093 - RNA, 1410 nt, Artificial Sequence; identical to SEQ ID NO: 48780
  derived and/or modified CDS sequence (wt) from neuraminidase__InfluenzaA__ACT36693

SEQ ID NO: 49094 - RNA, 1410 nt, Artificial Sequence; identical to SEQ ID NO: 48750
  derived and/or modified CDS sequence (wt) from neuraminidase__InfluenzaA__ACT36694

SEQ ID NO: 49095 - RNA, 1410 nt, Artificial Sequence; identical to SEQ ID NO: 48750
  derived and/or modified CDS sequence (wt) from neuraminidase__InfluenzaA__ACT36695

SEQ ID NO: 49096 - RNA, 1410 nt, Artificial Sequence; identical to SEQ ID NO: 48800
  derived and/or modified CDS sequence (wt) from neuraminidase__InfluenzaA__ACT52684

SEQ ID NO: 49097 - RNA, 1410 nt, Artificial Sequence; identical to SEQ ID NO: 48835
  derived and/or modified CDS sequence (wt) from neuraminidase__InfluenzaA__ACT54608

SEQ ID NO: 49098 - RNA, 1410 nt, Artificial Sequence
  derived and/or modified CDS sequence (wt) from neuraminidase__InfluenzaA__ACT66157
augaauccaaaccaaaagauaauaaccauugguucggucuguaugacaauuggaauggcuaacuuaauauuacaaauuggaaacauaaucucaauauggauuagccacucaauucaacuugggaaucaaaaucagauugaaacaugcaaucaaagcgucauuacuuaugaaaacaacacuuggguaaaucagacauauguuaacaucagcaacaccaacuuugcugcuggacagucagugguuuccgugaaauuagcgggcaauuccucucucugcccuguuaguggaugggcuauauacaguaaagacaacaguauaagaaucgguuccaagggggauguguuugucauaagggaaccauucauaucaugcucccccuuggaaugcagaaccuucuucuugacucaaggggccuugcuaaaugacaaacauuccaauggaaccauuaaagacaggagcccauaucgaacccuaaugagcuguccuauuggugaaguucccucuccauacaacucaagauuugagucagucgcuuggucagcaagugcuugucaugauggcaucaauuggcuaacaauuggaauuucuggcccagacaauggggcaguggcuguguuaaaguacaacggcauaauaacagacacuaucaagaguuggagaaacaauauauugagaacacaagagucugaaugugcauguguaaaugguucuugcuucacuguaaugaccgauggaccaaguaauggacaggccucauacaagaucuuaagaauagaaaagggaaagauagucaaaucagucgaaaugaaugccccuaauuaucacuaugaggaaugcuccuguuauccugauucuagugaaaucacaugugugugcagggauaacuggcauggcucgaaucgaccgugggugucuuucaaccagaaucuggaauaucagauaggauacauaugcagugggauuuucggagacaauccacgcccuaaugauaagacaggcaguugugguccaguaucgucuaauggagcaaauggaguaaaaggauuuucauucaaauacggcaaugguguuuggauagggagaacuaaaagcauuaguucaagaaacgguuuugagaugauuugggauccgaacggauggacugggacagacaauaacuucucaauaaagcaagauaucguaggaauaaaugaguggucaggauauagcgggaguuuuguucagcauccagaacuaacagggcuggauuguauaagaccuugcuucuggguugaacuaaucagagggcgacccaaagagaacacaaucuggacuagcgggagcagcauauccuuuugugguguaaacagugacacuguggguuggucuuggccagacggugcugaguugccauuuaccauugacaaguaa

SEQ ID NO: 49099 - RNA, 1410 nt, Artificial Sequence; identical to SEQ ID NO: 49070
  derived and/or modified CDS sequence (wt) from neuraminidase__InfluenzaA__ACT67117

SEQ ID NO: 49100 - RNA, 1410 nt, Artificial Sequence; identical to SEQ ID NO: 48749
  derived and/or modified CDS sequence (wt) from neuraminidase__InfluenzaA__ACT67121

SEQ ID NO: 49101 - RNA, 1410 nt, Artificial Sequence; identical to SEQ ID NO: 48750
  derived and/or modified CDS sequence (wt) from neuraminidase__InfluenzaA__ACT67240

SEQ ID NO: 49102 - RNA, 1410 nt, Artificial Sequence
  derived and/or modified CDS sequence (wt) from neuraminidase__InfluenzaA__ACT67241
augaauccaaaccaaaagauaauaaccauugguucggucuguaugacaauuggaauggcuaacuuaauauuacaaauuggaaacauaaucucaauauggauuagccacucaauucaacuugggaaucaaaaucagauugaaacaugcaaucaaagcgucauuacuuaugaaaacaacacuuggguaaaucagacauauguuaacaucagcaacaccaacuuugcugcuggacagucagugguuuccgugaaauuagcgggcaauuccucucucugcccuguuaguggaugggcuauauacaguaaagacaacaguauaagaaucgguuccaagggggauguguuugucauaagggaaccauucauaucaugcucccccuuggaaugcagaaccuucuucuugacucaaggggccuugcuaaaugacaaacauuccaauggaaccauuaaagacaggagcccauaucgaacccuaaugagcuguccuauuggugaaguucccucuccauacaacucaagauuugagucagucgcuuggucagcaagugcuugucaugauggcaucaauuggcuaacaauuggaauuucuggcccagacaauggggcaguggcuguguuaaaguacaacggcauaauaacagacacuaucaagaguuggagaaacaauauauugagaacacaagagucugaaugugcauguguaaaugguucuugcuuuacuguaaugaccgauggaccaagugauggacaggccucauacaagaucuucagaauagaaaagggaaagauagucaaaucagucgaaaugaaugccccuaauuaucacuaugaggaaugcuccuguuauccugauucuagugaaaucacaugugugugcagggauaacuggcauggcucgaaucgaccgugggugucuuucaaccagaaucuggaauaucagauaggauacauaugcagugggauuuucggagacaauccacgcccuaaugauaagacaggcaguugugguccaguaucgucuaauggagcaaauggaguaaaaggauuuucauucaaauacggcaaugguguuuggauagggagaacuaaaagcauuaguucaagaaacgguuuugagaugauuugggauccgaacggauggacugggacagacaauaacuucucaauaaagcaagauaucguaggaauaaaugaguggucaggauauagcgggaguuuuguucagcauccagaauuaacagggcuggauuguauaagaccuugcuucuggguugaacuaaucagagggcgacccaaagagaacacaaucuggacuagcgggagcagcauauccuuuugugguguaaacagugacacuguggguuggucuuggccagacggugcugaguugccauuuaccauugacaaguaa

SEQ ID NO: 49103 - RNA, 1410 nt, Artificial Sequence; identical to SEQ ID NO: 48750
  derived and/or modified CDS sequence (wt) from neuraminidase__InfluenzaA__ACT67243

SEQ ID NO: 49104 - RNA, 1410 nt, Artificial Sequence
  derived and/or modified CDS sequence (wt) from neuraminidase__InfluenzaA__ACT67256
augaauccaaaccaaaagauaauaaccauugguucggucuguaugacaauuggaauggcuaacuuaauauuacaaauuggaaacauaaucucaauauggauuagccacucaauucaacuugggaaucaaaaucagauugaaacaugcaaucaaagcgucauuacuuaugaaaacaacacuuggguaaaucagacauauguuaacaucagcaacaccaacuuugcugcuggacagucagugguuuccgugaaauuagcgggcaauuccucucucugcccuguuaguggaugggcuauauacaguaaagacaacaguauaagaaucgguuccaagggggauguguuugucauaagggaaccauucauaucaugcucccccuuggaaugcagaaccuucuucuugacucaaggggccuugcuaaaugacaaacauuccaauggaaccauuaaagacaggagcccauaucgaacccuaaugagcuguccuauuggugaaguucccucuccauacaacucaagauuugagucagucgcuuggucagcaagugcuugucaugauggcaucaauuggcuaacaauuggaauuucuggcccagacaauggggcaguggcuguguuaaaguacaacggcauaauaacagacacuaucaagaguuggagaaacaauauauugagaacacaagagucugaaugugcauguguaaaugguucuugcuuuacuguaaugaccgauggaccaagugauggacaggccucauacaaaaucuucagaauagaaaagggaaagauagucaaaucagucgaaaugaaugccccuaauuauuacuaugaggaaugcuccuguuauccugauucuagugaaaucacaugugugugcagggauaacuggcauggcucgaaucgaccgugggugucuuucaaccagaaucuggaauaucagauaggauacauaugcagugggauuuucggagacaauccacgcccuaaugauaagacaggcaguugugguccaguaucgucuaauggagcaaauggaguaaaaggauuuucauucaaauacggcaaugguguuuggauagggagaacuaaaagcauuaguucaagaaacgguuuugagaugauuugggauccgaacggauggacugggacagacaauaacuucucaauaaagcaagauaucguaggaauaaaugaguggucaggauauagcgggaguuuuguucagcauccagaacuaacagggcuggauuguauaagaccuugcuucuggguugaacuaaucagagggcgacccaaagagaacacaaucuggacuagcgggagcagcauauccuuuugugguguaaacagugacacuguggguuggucuuggccagacggugcugaguugccauuuaccauugacaaguaa

SEQ ID NO: 49105 - RNA, 1410 nt, Artificial Sequence
  derived and/or modified CDS sequence (wt) from neuraminidase__InfluenzaA__ACT68161
augaauccaaaccaaaagauaauaaccauugguucggucuguaugacaauuggaauggcuaacuuaauauuacaaauuggaaacauaaucucaauauggauuagccacucaauucaacuugggaaucaaaaucagauugaaacaugcaaucaaagcgucauuacuuaugaaaacaacacuuggguaaaucagacauauguuaacaucagcaacaccaacuuugcugcuggacagucagugguuuccgugaaauuagcgggcaauuccucucucugcccuguuaguggaugggcuauauacaguaaagacaacaguauaagaaucgguuccaagggggauguguuugucauaagggaaccauucauaucaugcucccccuuggaaugcagaaccuucuucuugacucaaggggccuugcuaaaugacaaacauuccaauggaaccauuaaagacaggagcccauaucgaacccuaaugagcuguccuauuggugaaguucccucuccauacaacucaagauuugagucagucgcuuggucagcaagugcuugucaugauggcaucaauuggcuaacaauuggaauuucuggcccagacaauggggcaguggcuguguuaaaguacaacggcauaauaacagacacuaucaagaguuggagaaacaauauauugagaacacaagagucugaaugugcauguguaaaugguucuugcuuuacuguaaugaccgauggaccaagugauggacaggccucauacaagaucuucagaauagaaaagggaaagauagucaaaucagucgaaaugaaugccccuaauuaucacuaugaggaaugcuccuguuauccugauucuagugaaaucacaugugugugcagggauaacuggcauggcucgaaucgaccgugggugucuuucaaccagaaucuggaauaucagauaggauacauaugcagugggauuuucggagacaauccacgcccuaaugauaaggcaggcaguugugguccaguaucgucuaauggagcaaauggaguaaaaggauuuucauucaaauacggcaaugguguuuggauagggagaacuaaaagcauuaguucaagaaacgguuuugagaugauuugggauccgaacggauggacugggacagacaauaacuucucaauaaagcaagauaucguaggaauaaaugaguggucaggauauagcgggaguuuuguucagcauccagaacuaacagggcuggauuguauaagaccuugcuucuggguugaacuaaucagagggcgacccaaagagaacacaaucuggacuagcgggagcagcauauccuuuugugguguaaacagugacacuguggguuggucuuggccagacggugcugaguugccauuuaccauugacaaguaa

SEQ ID NO: 49106 - RNA, 1410 nt, Artificial Sequence; identical to SEQ ID NO: 48749
  derived and/or modified CDS sequence (wt) from neuraminidase__InfluenzaA__ACT68162

SEQ ID NO: 49107 - RNA, 1410 nt, Artificial Sequence; identical to SEQ ID NO: 48749
  derived and/or modified CDS sequence (wt) from neuraminidase__InfluenzaA__ACT68163

SEQ ID NO: 49108 - RNA, 1410 nt, Artificial Sequence; identical to SEQ ID NO: 48749
  derived and/or modified CDS sequence (wt) from neuraminidase__InfluenzaA__ACT68164

SEQ ID NO: 49109 - RNA, 1410 nt, Artificial Sequence; identical to SEQ ID NO: 48750
  derived and/or modified CDS sequence (wt) from neuraminidase__InfluenzaA__ACT68166

SEQ ID NO: 49110 - RNA, 1410 nt, Artificial Sequence; identical to SEQ ID NO: 48750
  derived and/or modified CDS sequence (wt) from neuraminidase__InfluenzaA__ACT68167

SEQ ID NO: 49111 - RNA, 1410 nt, Artificial Sequence; identical to SEQ ID NO: 48780
  derived and/or modified CDS sequence (wt) from neuraminidase__InfluenzaA__ACT68168

SEQ ID NO: 49112 - RNA, 1410 nt, Artificial Sequence
  derived and/or modified CDS sequence (wt) from neuraminidase__InfluenzaA__ACT68169
augaauccaaaccaaaagauaauaaccauugguucggucuguaugacaauuggaauggcuaacuuaauauuacaaauuggaaacauaaucucaauauggauuagccacucaauucaacuuggggaucaaaaucagauugaaacaugcaaucaaagcgucauuacuuaugaaaacaacacuuggguaaaucagacauauguuaacaucagcaacaccaacuuugcugcuggacagucagugguuuccgugaaauuagcgggcaauuccucucucugcccuguuaguggaugggcuauauacaguaaagacaacaguauaagaaucgguuccaagggggauguguuugucauaagggaaccauucauaucaugcucccccuuggaaugcagaaccuucuucuugacucaaggggccuugcuaaaugacaaacauuccaaugaaaccauuaaagacaggagcccauaucgaacccuaaugagcuguccuauuggugaaguucccucuccauacaacucaagauuugagucagucgcuuggucagcaagugcuugucaugauggcaucaauuggcuaacaauuggaauuucuggcccagacaauggggcaguggcuguguuaaaguacaacggcauaauaacagacacuaucaagaguuggagaaacaauauauugagaacacaagagucugaaugugcauguguaaaugguucuugcuuuacuguaaugaccgauggaccaagugauggacaggccucauacaagaucuucagaauagaaaagggaaagauagucaaaucagucgaaaugaaugccccuaauuaucacuaugaggaaugcuccuguuauccugauucuagugaaaucacaugugugugcagggauaacuggcauggcucgaaucgaccgugggugucuuucaaccagaaucuggaauaucagauaggauacauaugcagugggauuuucggagacaauccacgcccuaaugauaagacaggcaguugugguccaguaucgucuaauggggcaaauggaguaaaaggauuuucauucaaauacggcaaugguguuuggauagggagaacuaaaagcauuaguucaagaaacgguuuugagaugauuugggauccgaacggauggacugggacagacaauaacuucucaauaaagcaagauaucguaggaauaagugaguggucaggauauagcgggaguuuuguucagcauccagaacuaacagggcuggauuguauaagaccuugcuucuggguugaacuaaucagagggcgacccaaagagaacacaaucuggacuagcgggagcagcauauccuuuugugguguaaacagugacacuguggguuggucuuggccagacggugcugaguugccauuuaccauugacaaguaa

SEQ ID NO: 49113 - RNA, 1410 nt, Artificial Sequence
  derived and/or modified CDS sequence (wt) from neuraminidase__InfluenzaA__ACT68171
augaauccaaaccaaaagauaauaaccauugguucggucuguaugacaauuggaauggcuaacuuaauauuacaaauuggaaacauaaucucaauauggauuagccacucaauucaacuugggaaucaaaaucagauugaaacaugcaaucaaagcgucauuacuuaugaaaacaacacuuggguaaaucagacauauguuaacaucagcaacaccaacuuugcugcuggacagucagugguuuccgugaaauuagcgggcaauuccucucucugcccuguuaguggaugggcuauauacaguaaagacaacaguguaagaaucgguuccaagggggauguguuugucauaagggaaccauucauaucaugcucccccuuggaaugcagaaccuucuucuugacucaaggggccuugcuaaaugacaaacauuccaauggaaccauuaaagacaggagcccuuaucgaacccuaaugagcuguccuauuggugaaguucccucuccauacaacucaagauuugagucagucgcuuggucagcaagugcuugucaugauggcaucaauuggcuaacaauuggaauuucuggcccagacaauggggcaguggcuguguuaaaguacaacggcauaauaacagacacuaucaagaguuggagaaacaauauauugagaacacaagagucugaaugugcauguguaaaugguuccugcuuuacuguaaugaccgauggaccaaguaauggacaggccucauacaagaucuucagaauagaaaagggaaagauagucaaaucagucgaaaugaaugccccuaauuaucacuaugaggaaugcuccuguuauccugauucuagugaaaucacaugugugugcagggauaacuggcauggcucgaaucgaccgugggugucuuucaaccagaaucuggaauaucagauaggauacauaugcagugggauuuucggagacaauccacgcccuaaugauaagacaggcaguugugguccaguaucgucuaauggagcaaauggaguaaaaggauuuucauucaaauacggcaaugguguuuggauagggagaacuaaaagcauuaguucaagaaacgguuuugagaugauuugggauccgaacggauggacugggacagacaauaacuucucaauaaagcaagauaucguaggaauaaaugaguggucaggauauagcgggaguuuuguucagcauccagaacuaacagggcuggauuguauaagaccuugcuucuggguugaacuaaucagagggcgacccaaagagaacacaaucuggacuagcgggagcagcauauccuuuugugguguaaacagugacacuguggguuggucuuggccagacggugcugaguugccauuuaccauugacaaguaa

SEQ ID NO: 49114 - RNA, 1410 nt, Artificial Sequence
  derived and/or modified CDS sequence (wt) from neuraminidase__InfluenzaA__ACT68172
augaauccaaaccaaaagauaauaaccauugguucggucuguaugacaauuggaauggcuaacuuaauauuacaaauuggaaacauaaucucaauauggauuagccacucaauucaacuugggaaucaaaaucagauugaaacaugcaaucaaagcgucauuacuuaugaaaacaacacuuggguaaaucagacauauguuaacaucagcaacaccaacuuugcugcuggacagucagugguuuccgugaaauuagcgggcaauuccucucucugcccuguuaguggaugggcuauauacaguaaagacaacaguguaagaaucgguuccaagggggauguguuugucauaagggaaccauucauaucaugcucccccuuggaaugcagaaccuucuucuugacucaaggggccuugcuaaaugacaaacauuccaauggaaccauuaaagacaggagcccauaucgaacccuaaugagcuguccuauuggugaaguucccucuccauacaacucaagauuugagucagucgcuuggucagcaagugcuugucaugauggcaucaauuggcuaacaauuggaauuucuggcccagacaauggggcaguggcuguguuaaaguacaacggcauaauaacagacacuaucaagaguuggagaaacaauauauugagaacacaagagucugaaugugcauguguaaaugguuccugcuuuacuguaaugaccgauggaccaaguaauggacaggccucauacaagaucuucagaauagaaaagggaaagauagucaaaucagucgaaaugaaugccccuaauuaucacuaugaggaaugcuccuguuauccugauucuagugaaaucacaugugugugcagggauaacuggcauggcucgaaucgaccgugggugucuuucaaccagaaucuggaauaucagauaggauacauaugcagugggauuuucggagacaauccacgcccuaaugauaagacaggcaguugugguccaguaucgucuaauggagcaaauggaguaaaaggauuuucauucaaauacggcaaugguguuuggauagggagaacuaaaagcauuaguucaagaaacgguuuugagaugauuugggauccgaacggauggacugggacagacaauaacuucucaauaaagcaagauaucguaggaauaaaugaguggucaggauauagcgggaguuuuguucagcauccagaacuaacagggcuggauuguauaagaccuugcuucuggguugaacuaaucagagggcgacccaaagagaacacaaucuggacuagcgggagcagcauauccuuuugugguguaaacagugacacuguggguuggucuuggccagacggugcugaguugccauuuaccauugacaaguaa

SEQ ID NO: 49115 - RNA, 1410 nt, Artificial Sequence
  derived and/or modified CDS sequence (wt) from neuraminidase__InfluenzaA__ACT68173
augaauccaaaccaaaagauaauaaccauugguucggucuguaugacaauuggaauggcuaacuuaauauuacaaauuggaaacauaaucucaauauggauuagccacucaauucaacuugggaaucaaaaucagauugaaacaugcaaucaaagcgucauuacuuaugaaaacaacacuuggguaaaucagacauauguuaacaucagcaacaccaacuuugcugcuggacagucagugguuuccgugaaauuagcgggcaauuccucucucugcccuguuaguggaugggcuauauacaguaaagacaacaguauaagaaucgguuccaagggggauguguuugucauaagggaaccauucauaucaugcucccccuuggaaugcagaaccuucuucuugacucaaggggccuugcuaaaugacaaacauuccaauggaaccauuaaagacaggagcccauaucgaacccuaaugagcuguccuauuggugaaguucccucuccauacaacucaagauuugagucagucgcuuggucagcaagugcuugucaugauggcaucaauuggcuaacaauuggaauuucuggcccagacaauggggcaguggcuguguuaaaguacaacggcauaauaacagacacuaucaagaguuggagaaacaauauauugagaacacaagagucugaaugugcauguguaaaugguucuugcuuuacuguaaugaccgauggaccaagugauggacaggccucauacaagaucuucagaauagaaaagggaaagauagucaaaucagucgaaaugaaugccccuaauuaucacuaugaggaaugcuccuguuauccugauucuagugaaaucacaugugugugcagggauaacuggcauggcucgaaucgaccgugggugucuuucaaccagaaucuggaauaucagauaggauacauauguagugggauuuucggagacaauccacgcccuaaugauaagacaggcaguugugguccaguaucgucuaauggagcaaauggaguaaaaggauuuucauucaaauacggcaaugguguuuggauagggagaacuaaaagcauuaguucaagaaacgguuuugagaugauuugggauccgaacggauggacugggacagacaauaacuucucaauaaagcaagauaucguaggaauaaaugaauggucaggauauagcgggaguuuuguucagcauccagaacuaacagggcuggauuguauaagaccuugcuucuggguugaacuaaucagagggcgacccaaagagaacacaaucuggacuagcgggagcagcauauccuuuugugguguaaacagugacacuguggguuggucuuggccagacggugcugaguugccauuuaccauugacaaguaa

SEQ ID NO: 49116 - RNA, 1410 nt, Artificial Sequence; identical to SEQ ID NO: 48750
  derived and/or modified CDS sequence (wt) from neuraminidase__InfluenzaA__ACT68174

SEQ ID NO: 49117 - RNA, 1410 nt, Artificial Sequence
  derived and/or modified CDS sequence (wt) from neuraminidase__InfluenzaA__ACT68175
augaauccaaaccaaaagauaauaaccauugguucggucuguaugacaauuggaauggcuaacuuaauauuacaaauuggaaacauaaucucaauauggauuagccacucaauucaacuugggaaucaaaaucagauugaaacaugcaaucaaagcgucauuacuuaugaaaacaacacuuggguaaaucagacauauguuaacaucagcaacaccaacuuugcugcuggacagucagugguuuccgugaaauuagcgggcaauuccucucucugcccuguuaguggaugggcuauauacaguaaagacaacaguguaagaaucggcuccaagggggauguguuugucauaagggaaccauucauaucaugcucccccuuggaaugcagaaccuucuucuugacucaaggggccuugcuaaaugacaaacauuccaauggaaccauuaaagacaggagcccauaucgaacccuaaugagcuguccuauuggugaaguucccucuccauacaacucaagauuugagucagucgcuuggucagcaagugcuugucaugauggcaucaauuggcuaacaauuggaauuucuggcccagacaauggggcaguggcuguguuaaaguacaacggcauaauaacagacacuaucaagaguuggagaaacaauauauugagaacacaagagucugaaugugcauguguaaaugguucuugcuuuacuguaaugaccgauggaccaaguaauggacaggccucauacaagaucuucagaauagaaaagggaaagauagucaaaucagucgaaaugaaugccccuaauuaucacuaugaggaaugcuccuguuauccugauucuggugaaaucacaugugugugcagggauaacuggcauggcucgaaucgaccgugggugucuuucaaccagaaucuggaauaucagauaggauacauaugcagugggauuuucggagacaauccacgcccuaaugauaagacaggcaguugugguccaguaucgucuaauggagcaaauggaguaaaaggauuuucauucaaauacggcaaugguguuuggauagggagaacuaaaagcauuaguucaagaaacgguuuugagaugauuugggauccgaacggauggacugggacagacaauaacuucucaauaaagcaagauaucguaggaauaaaugaguggucaggauauagcgggaguuuuguucagcauccagaacuaacagggcuggauuguauaagaccuugcuucuggguugaacuaaucagagggcgacccaaagagaacacaaucuggacuagcgggagcagcauauccuuuugugguguaaacagugacacuguggguuggucuuggccagacggugcugaguugccauuuaccauugacaaguaa

SEQ ID NO: 49118 - RNA, 1410 nt, Artificial Sequence
  derived and/or modified CDS sequence (wt) from neuraminidase__InfluenzaA__ACT68176
augaauccaaaccaaaagauaauaaccauugguucggucuguaugacaauuggaauggcuaacuuaauauuacaaauuggaaacauaaucucaauauggauuagccacucaauucaacuugggaaucaaaaucagauugaaacaugcaaucaaagcgucauuacuuaugaaaacaacacuuggguaaaucagacauauguuaacaucagcaacaccaacuuugcugcuggacagucagugguuuccgugaaauuagcgggcaauuccucucucugcccuguuaguggaugggcuauauacaguaaagacaacaguauaagaaucgguuccaagggggauguguuugucauaagggaaccauucauaucaugcucccccuuggaaugcagaaccuucuucuugacucaaggggccuugcuaaaugacaaacauuccaauggaaccauuaaagacaggagcccauaucgaacccuaaugagcuguccuauuggugaaguucccucuccauacaacucaagauuugagucagucgcuuggucagcaagugcuugucaugauggcaucaauuggcuaacaauuggaauuucuggcccagacaauggggcaguggcuguguuaaaguacaacggcauaauaacagacacuaucaagaguuggagaaacaauauauugagaacacaagagucugaaugugcauguguaaaugguucuugcuuuacuguaaugaccgauggaccaagugauggacaggccucauacaagaucuucagaauagaaaagggaaagauagucaaaucagucgaaaugaaugccccuaauuaucacuaugaggaaugcuccuguuauccugauucuagugagaucacaugugugugcagggauaacuggcauggcucgaaucgaccgugggugucuuucaaccagaaucuggaauaucagauaggauacauaugcagugggauuuucggagacaauccacgcccuaaugauaagacaggcaguugugguccaguaucgucuaauggagcaaauggaguaaaaggauuuucauucaaauacggcaaugguguuuggauagggagaacuaaaagcauuaguucaagaaacgguuuugagaugauuugggauccgaacggauggacugggacagacaauaacuucucaauaaagcaagauaucguaggaauaaaugaguggucaggauauagcgggaguuuuguucagcauccagaacuaacagggcuggauuguauaagaccuugcuucuggguugaacuaaucagagggcgacccaaagagaacacaaucuggacuagcgggagcagcauauccuuuugugguguaaacagugacacuguggguuggucuuggccagacggugcugaguugccauuuaccauugacaaguaa

SEQ ID NO: 49119 - RNA, 1410 nt, Artificial Sequence; identical to SEQ ID NO: 48750
  derived and/or modified CDS sequence (wt) from neuraminidase__InfluenzaA__ACT68177

SEQ ID NO: 49120 - RNA, 1410 nt, Artificial Sequence; identical to SEQ ID NO: 48750
  derived and/or modified CDS sequence (wt) from neuraminidase__InfluenzaA__ACT68178

SEQ ID NO: 49121 - RNA, 1410 nt, Artificial Sequence; identical to SEQ ID NO: 49117
  derived and/or modified CDS sequence (wt) from neuraminidase__InfluenzaA__ACT68179

SEQ ID NO: 49122 - RNA, 1410 nt, Artificial Sequence; identical to SEQ ID NO: 48750
  derived and/or modified CDS sequence (wt) from neuraminidase__InfluenzaA__ACT68180

SEQ ID NO: 49123 - RNA, 1410 nt, Artificial Sequence; identical to SEQ ID NO: 48780
  derived and/or modified CDS sequence (wt) from neuraminidase__InfluenzaA__ACT79145

SEQ ID NO: 49124 - RNA, 1410 nt, Artificial Sequence
  derived and/or modified CDS sequence (wt) from neuraminidase__InfluenzaA__ACT79155
augaauccaaaccaaaagauaauaaccauugguucggucuguaugacaauuggaauggcuaacuuaauauuacaaauuggaaacauaaucucaauauggauuagccacucaauucaacuugggaaucaaaaucagauugaaacaugcaaucaaagcgucauuacuuaugaaaacaacacuuggguaaaucagacauauguuaacaucagcaacaccaacuuugcugcuggacagucagugguuuccgugaaauuagcaggcaauuccucucucugcccuguugguggaugggcuauauacaguaaagacaacaguguaagaaucgguuccaagggggauguguuugucauaagggaaccauucauaucaugcucccucuuggaaugcagaaccuucuucuugacucaaggggccuugcuaaaugacaaacauuccaauggaaccauuaaagacaggagcccauaucgaacccuaaugagcuguccuauuggugaaguucccucuccauacaacucaagauuugagucagucgcuuggucagcaagugcuugucaugauggcaucaauuggcuaacaauuggaauuucuggcccagacaauggggcaguggcuguguuaaaguacaacggcauaauaacagacacuaucaagaguuggagaaacaauauauugagaacacaagagucugaaugugcauguguaaaugguucuugcuuuacuguaaugaccgauggaccaaguaauggacaggccucauacaagaucuucagaauagaaaagggaaagauagucaaaucagucgaaaugaaugccccuaauuaucacuaugaggaaugcuccuguuauccugauucuagugaaaucacaugugugugcagggauaacuggcauggcucgaaucgaccgugggugucuuucaaccagaaucuggaauaucagauaggauacauaugcagugggauuuucggagacaauccacgcccuaaugauaagacaggcaguugugguccaguaucgucuaauggagcaaauggaguaaaaggauuuucauucaaauacggcaaugguguuuggauagggagaacuaaaagcauuaguucaagaaacgguuuugagaugauuugggauccgaacggauggacugggacagacaauaacuucucaauaaagcaagauaucguaggaauaaaugaguggucaggauauagcgggaguuuuguucagcauccagaacuaacagggcuggauuguauaagaccuugcuucuggguugaacuaaucagagggcgacccaaagagaacacaaucuggacuagcgggagcagcauauccuuuugugguguaaacagugacacuguggguuggucuuggccagacggugcugaguugccauuuaccauugacaaguaa

SEQ ID NO: 49125 - RNA, 1410 nt, Artificial Sequence; identical to SEQ ID NO: 49068
  derived and/or modified CDS sequence (wt) from neuraminidase__InfluenzaA__ACT79165

SEQ ID NO: 49126 - RNA, 1410 nt, Artificial Sequence; identical to SEQ ID NO: 49068
  derived and/or modified CDS sequence (wt) from neuraminidase__InfluenzaA__ACT79175

SEQ ID NO: 49127 - RNA, 1410 nt, Artificial Sequence; identical to SEQ ID NO: 48750
  derived and/or modified CDS sequence (wt) from neuraminidase__InfluenzaA__ACT79185

SEQ ID NO: 49128 - RNA, 1410 nt, Artificial Sequence
  derived and/or modified CDS sequence (wt) from neuraminidase__InfluenzaA__ACT79622
augaauccaaaccaaaagauaauaaccauugguucggucuguaugacaauuggaauggcuaacuuaauauuacaaauuggaaacauaaucucaauauggauuagccacucaauucaacuugggaaucaaaaucagauugaaacaugcaaucaaagcgucauuacuuaugaaaacaacacuuggguaaaucagacauauguuaacaucagcaacaccaacuuugcugcuggacagucagugguuuccgugaaauuagcgggcaauuccucucucugcccuguuaguggaugggcuauauacaguaaagacaacaguauaagaaucgguuccaagggggauguguuugucauaagggaaccauucauaucaugcucccccuuggaaugcagaaccuucuucuugacucaaggggccuugcuaaaugacaaacauuccaauggaaccauuaaagacaggagcccauaucgaacccuaaugagcuguccuauuggugaaguucccucuccauacaacucaagauuugagucagucgcuuggucagcaagugcuugucaugauggcaucaauuggcuaacaauuggaauuucuggcccagacaauggggcaguggcuguguuaaaguacaacggcauaauaacagacacuaucaagaguuggagaaacaauauauugagaacacaagagucugaaugugcauguguaaaugguucuugcuuuacuguaaugaccgauggaccaagugauggacaggccucauacaagaucuucagaauagaaaagggaaagauagucaaaucagucgaaaugaaugccccuaauuaucacuaugaggaaugcuccuguuauccugauucuagugaaaucacaugugugugcagggauaacuggcauggcucgaaucgaccgugggugucuuucaaccagaaucuggaauaucagauaggauacauaugcagugggauuuucggagacaauccacguccuaaugauaagacaggcaguugugguccaguaucgucuaauggagcaaauggaguaaaaggauuuucauucaaauacggcaaugguguuuggauagggagaacuaaaagcauuaguucaagaaacgguuuugagaugauuugggauccgaacggauggacugggacagacaauaacuucucaauaaagcaagauaucguaggaauaaaugaguggucaggauauagcgggaguuuuguucagcauccagaacuaacagggcuggauuguauaagaccuugcuucuggguugaacuaaucagagggcgacccaaagagaacacaaucuggacuagcgggagcagcauauccuuuugugguguaaacagugacacuguggguuggucuuggccagacggugcugaguugccauuuaccauugacaaguaa

SEQ ID NO: 49129 - RNA, 1410 nt, Artificial Sequence
  derived and/or modified CDS sequence (wt) from neuraminidase__InfluenzaA__ACT79630
augaauccaaaccaaaagauaauaaccauugguucggucuguaugacaauuggaauggcuaacuuaauauuacaaauuggaaacauaaucucaauauggauuagccacucaauucaacuugggaaucaaaaucagauugaaacaugcaaucaaagcgucauuacuuaugaaaacaacacuuggguaaaucagacauauguuaacaucagcaacaccaacuuugcugcuggacagucagugguuuccgugaaauuagcgggcaauuccucucucugcccuguuaguggaugggcuauauacaguaaagacaacaguguaagaaucgguuccaagggggauguguuugucauaagggaaccauucauaucaugcucccccuuggaaugcagaaccuucuucuugacucaaggggccuugcuaaaugacaaacauuccaauggaaccauuaaagacaggagcccauaucgaacccuaaugagcuguccuauuggugaaguucccucuccauacaacucaagauuugagucagucgcuuggucagcaagugcuugucaugauggcaucaauuggcuaacaauuggaauuucuggcccagacaauggggcaguggcuguguuaaaguacaacggcauaauaacagacacuaucaagaguuggagaaacaauauauugagaacacaagagucugaaugugcauguguaaaugguucuugcuuuacuguaaugaccgauggaccaaguaauggacaggccucauacaagaucuucagaauagaaaagggaaagauagucaaaucagucgaaaugaaugccccuaauuaucacuaugaggaaugcuccuguuauccugauucuggugaaaucacaugugugugcagggauaacuggcauggcucgaaucgaccgugggugucuuucaaccagaaucuggaauaucagauaggauacauaugcagugggauuuucggagacaauccacgcccuaaugauaagacaggcaguugugguccaguaucgucuaauggagcaaauggaguaaaaggauuuucauucaaauacggcaaugguguuuggauagggagaacuaaaagcauuaguucaagaaacgguuuugagaugauuugggauccgaacggauggacugggacagacaauaacuucucaauaaagcaagauaucguaggaauaaaugaguggucaggauauagcgggaguuuuguucagcauccagaacuaacagggcuggauuguauaagaccuugcuucuggguugaacuaaucagagggcgacccaaagagaacacaaucuggacuagcgggagcagcauauccuuuugugguguaaacagugacacuguggguuggucuuggccagacggugcugaguugccauuuaccauugacaaguaa

SEQ ID NO: 49130 - RNA, 1410 nt, Artificial Sequence; identical to SEQ ID NO: 48750
  derived and/or modified CDS sequence (wt) from neuraminidase__InfluenzaA__ACT83798

SEQ ID NO: 49131 - RNA, 1410 nt, Artificial Sequence; identical to SEQ ID NO: 48750
  derived and/or modified CDS sequence (wt) from neuraminidase__InfluenzaA__ACT83808

SEQ ID NO: 49132 - RNA, 1410 nt, Artificial Sequence; identical to SEQ ID NO: 48750
  derived and/or modified CDS sequence (wt) from neuraminidase__InfluenzaA__ACT83818

SEQ ID NO: 49133 - RNA, 1410 nt, Artificial Sequence; identical to SEQ ID NO: 49020
  derived and/or modified CDS sequence (wt) from neuraminidase__InfluenzaA__ACT83828

SEQ ID NO: 49134 - RNA, 1410 nt, Artificial Sequence; identical to SEQ ID NO: 48750
  derived and/or modified CDS sequence (wt) from neuraminidase__InfluenzaA__ACT83838

SEQ ID NO: 49135 - RNA, 1410 nt, Artificial Sequence; identical to SEQ ID NO: 48783
  derived and/or modified CDS sequence (wt) from neuraminidase__InfluenzaA__ACT83848

SEQ ID NO: 49136 - RNA, 1410 nt, Artificial Sequence; identical to SEQ ID NO: 48749
  derived and/or modified CDS sequence (wt) from neuraminidase__InfluenzaA__ACT83858

SEQ ID NO: 49137 - RNA, 1410 nt, Artificial Sequence; identical to SEQ ID NO: 48750
  derived and/or modified CDS sequence (wt) from neuraminidase__InfluenzaA__ACT83868

SEQ ID NO: 49138 - RNA, 1410 nt, Artificial Sequence; identical to SEQ ID NO: 48750
  derived and/or modified CDS sequence (wt) from neuraminidase__InfluenzaA__ACT83878

SEQ ID NO: 49139 - RNA, 1410 nt, Artificial Sequence; identical to SEQ ID NO: 48750
  derived and/or modified CDS sequence (wt) from neuraminidase__InfluenzaA__ACT86002

SEQ ID NO: 49140 - RNA, 1410 nt, Artificial Sequence; identical to SEQ ID NO: 48750
  derived and/or modified CDS sequence (wt) from neuraminidase__InfluenzaA__ACT86012

SEQ ID NO: 49141 - RNA, 1410 nt, Artificial Sequence; identical to SEQ ID NO: 48750
  derived and/or modified CDS sequence (wt) from neuraminidase__InfluenzaA__ACT86022

SEQ ID NO: 49142 - RNA, 1410 nt, Artificial Sequence; identical to SEQ ID NO: 48783
  derived and/or modified CDS sequence (wt) from neuraminidase__InfluenzaA__ACT86032

SEQ ID NO: 49143 - RNA, 1410 nt, Artificial Sequence; identical to SEQ ID NO: 48750
  derived and/or modified CDS sequence (wt) from neuraminidase__InfluenzaA__ACT86042

SEQ ID NO: 49144 - RNA, 1410 nt, Artificial Sequence; identical to SEQ ID NO: 48750
  derived and/or modified CDS sequence (wt) from neuraminidase__InfluenzaA__ACT86052

SEQ ID NO: 49145 - RNA, 1410 nt, Artificial Sequence; identical to SEQ ID NO: 48750
  derived and/or modified CDS sequence (wt) from neuraminidase__InfluenzaA__ACT86062

SEQ ID NO: 49146 - RNA, 1410 nt, Artificial Sequence; identical to SEQ ID NO: 48750
  derived and/or modified CDS sequence (wt) from neuraminidase__InfluenzaA__ACT86072

SEQ ID NO: 49147 - RNA, 1410 nt, Artificial Sequence; identical to SEQ ID NO: 48750
  derived and/or modified CDS sequence (wt) from neuraminidase__InfluenzaA__ACT86082

SEQ ID NO: 49148 - RNA, 1410 nt, Artificial Sequence; identical to SEQ ID NO: 48750
  derived and/or modified CDS sequence (wt) from neuraminidase__InfluenzaA__ACT86092

SEQ ID NO: 49149 - RNA, 1410 nt, Artificial Sequence
  derived and/or modified CDS sequence (wt) from neuraminidase__InfluenzaA__ACT86102
augaauccaaaccaaaagauaauaaccauugguucggucuguaugacaauuggaauggcuaacuuaauauuacaaauuggaaacauaaucucaauauggauuagccacucaauucaacuugggaaucaaaaucagauugaaacaugcaaucaaagcgucauuacuuaugaaaacaacacuuggguaaaucagacauauguuaacaucagcaacaccaacuuugcugcuggacagucagugguuuccgugaaauuagcgggcaauuccucucucugcccuguuaguggaugggcuauauacaguaaagacaacaguauaagaaucgguuccaagggggauguguuugucauaagggaaccauucauaucaugcucccccuuggaaugcagaaccuucuucuugacucaaggggccuugcuaaaugacaaacauuccaauggaaccauuaaagacaggagcccauaucgaacccuaaugagcuguccuauuggugaaguucccucuccauacaacucaagauuugagucagucgcuuggucagcaagugcuugucaugauggcaucaauuggcuaacaauuggaauuucuggcccagacaauggggcaguggcuguguuaaaguacaacggcauaauaacagacacuaucaagaguuggagaaacaauauauugagaacacaagagucugaaugugcauguguaaaugguucuugcuuuacuguaaugaccgauggaccaagugauggacaggccucauacaagaucuucagaauagaaaagggaaagauagucaaaucagucgaaaugaaugccccuaauuaucacuaugaggaaugcuccuguuauccugauucuagugaaaucacaugugugugcagggauaacuggcauggcucgaaucgaccguggguguccuucaaccagaaucuggaauaucagauaggauacauaugcagugggauuuucggagacaauccacgcccuaaugauaagacaggcaguugugguccaguaucgucuaauggagcaaauggaguaaaaggauuuucauucaaauacggcaaugguguuuggauagggagaacuaaaagcauuaguucaagaaacgguuuugagaugauuugggauccgaacggauggacugggacagacaauaacuucucaauaaagcaagauaucguaggaauaaaugaguggucaggauauagcgggaguuuuguucagcauccagaacuaacagggcuggauuguaucagaccuugcuucuggguugaacuaaucagagggcgacccaaagagaacacaaucuggacuagcgggagcagcauauccuuuugugguguaaacagugacacuguggguuggucuuggccagacggugcugaguugccauuuaccauugacaaguaa

SEQ ID NO: 49150 - RNA, 1410 nt, Artificial Sequence; identical to SEQ ID NO: 48750
  derived and/or modified CDS sequence (wt) from neuraminidase__InfluenzaA__ACT86112

SEQ ID NO: 49151 - RNA, 1410 nt, Artificial Sequence; identical to SEQ ID NO: 49020
  derived and/or modified CDS sequence (wt) from neuraminidase__InfluenzaA__ACT86122

SEQ ID NO: 49152 - RNA, 1410 nt, Artificial Sequence; identical to SEQ ID NO: 48750
  derived and/or modified CDS sequence (wt) from neuraminidase__InfluenzaA__ACT86132

SEQ ID NO: 49153 - RNA, 1410 nt, Artificial Sequence; identical to SEQ ID NO: 48750
  derived and/or modified CDS sequence (wt) from neuraminidase__InfluenzaA__ACT86142

SEQ ID NO: 49154 - RNA, 1410 nt, Artificial Sequence
  derived and/or modified CDS sequence (wt) from neuraminidase__InfluenzaA__ACT97323
augaauccaaaccaaaagauaauaaccauugguucggucuguaugacaauuggaauggcuaacuuaauauuacaaauuggaaacauaaucucaauauggauuagccacucaauucaacuugggaaucaaaaucagauugaaacaugcaaucaaagcgucauuacuuaugaaaacaacacuuggguaaaucagacauauguuaacaucagcaacaccaacuuugcugcuggacagucagugguuuccgugaaauuagcgggcaauuccucucucugcccuguuaguggaugggcuauauacaguaaagacaacaguguaagaaucgguuccaagggggauguguuugucauaagggaaccauucauaucaugcucccccuuggaaugcagaaccuucuucuugacucaaggggccuugcuaaaugacaaacauuccaauggaaccauuaaagacaggagcccauaucgaacccuaaugagcuguccuauuggugaaguucccucuccauacaacucaagauuugagucagucgcuuggucagcaagugcuugucaugauggcaucaauuggcuaacaauuggaauuucuggcccagacaauggggcaguggcuguguuaaaguacaacggcauaauaacagacacuaucaagaguuggagaaacaauauauugagaacacaagagucugaaugugcauguguaaaugguucuugcuuuacuguaaugaccgauggaccaaguaauggacaggccucauacaagaucuucagaauagaaaagggaaagauagucaaaucagucgaaaugaaugccccuaauuaucacuaugaggaaugcuccuguuauccugauucuagugaaaucacauguguaugcagggauaacuggcauggcucgaaucgaccgugggugucuuucaaccagaaucuggaauaucagauaggauacauaugcagugggauuuucggagacaauccacgcccuaaugauaagacaggcaguugugguccaguaucgucuaauggagcaaauggaguaaaaggauuuucauucaaauacggcaaugguguuuggauagggagaacuaaaagcauuaguucaagaaacgguuuugagaugauuugggauccgaacggauggacugggacagacaauaacuucucaauaaagcaagauaucguaggaauaaaugaguggucaggauauagcgggaguuuuguucagcauccagaacuaacagggcuggauuguauaagaccuugcuucuggguugaacuaaucagagggcgacccaaagagaacacaaucuggacuagcgggagcagcauauccuuuugugguguaaacagugacacuguggguuggucuuggccagacggugcugaguugccauuuaccauugacaaguaa

SEQ ID NO: 49155 - RNA, 1410 nt, Artificial Sequence; identical to SEQ ID NO: 48750
  derived and/or modified CDS sequence (wt) from neuraminidase__InfluenzaA__ACU00934

SEQ ID NO: 49156 - RNA, 1410 nt, Artificial Sequence; identical to SEQ ID NO: 48750
  derived and/or modified CDS sequence (wt) from neuraminidase__InfluenzaA__ACU00944

SEQ ID NO: 49157 - RNA, 1410 nt, Artificial Sequence
  derived and/or modified CDS sequence (wt) from neuraminidase__InfluenzaA__ACU00954
augaauccaaaccaaaagauaauaaccauugguucggucuguaugacaauuggaauggcuaacuuaauauuacaaauuggaaacauaaucucaauauggauuagccacucaauucaacuugggaaucaaaaucagauugaaacaugcaaucaaagcgucauuacuuaugaaaacaacacuuggguaaaucagacauauguuaacaucagcaacaccaacuuugcugcuggacagucagugguuuccgugaaauuagcgggcaauuccucucucugcccuguuaguggaugggcuauauacaguaaagacaacaguauaagaaucgguuccaagggggauguguuugucauaagggaaccauucauaucaugcucccccuuggaaugcagaaccuucuucuugacucaaggggccuugcuaaaugacaaacauuccaauggaaccauuaaagacaggagcccauaucgaacccuaaugagcuguccuauuggugaaguucccucuccauacaacucaagauuugagucagucgcuuggucagcaagugcuugucaugauggcaucaauuggcuaacaauuggaauuucuggcccagacaauggggcaguggcuguguuaaaguacaacggcauaauaacagacacuaucaagaguuggagaaacaauauauugagaacacaagagucugaaugugcauguguaaaugguucuugcuuuacuguaaugaccgauggaccaagugauggacaggccucauacaagaucuucagaauagaaaagggaaagauagucaaaucagucgaaaugaaugccccuaauuauuacuaugaggaaugcuccuguuauccugauucuagugaaaucacaugugugugcagggauaacuggcauggcucgaaucgaccgugggugucuuucaaccagaaucuggaauaucagauaggauacauaugcagugggauuuucggagacaauccacgcccuaaugauaagacaggcaguugugguccaguaucgucuaauggagcaaauggaguaaaaggauuuucauucaaauacggcaaugguguuuggauagggagaacuaaaagcauuaguucaagaaacgguuuugagaugauuugggauccgaacggauggacugggacagacaauaacuucucaauaaagcaagauaucguaggaauaaaugaguggucaggauauagcgggaguuuuguucagcauccagaacuaacagggcuggauuguauaagaccuugcuucuggguugaacuaaucagagggcgacccaaagagaacacaaucuggacuagcgggagcagcauauccuuuugugguguaaacagugacacuguggguuggucuuggccagacggugcugaguugccauuuaccauugacaaguaa

SEQ ID NO: 49158 - RNA, 1410 nt, Artificial Sequence
  derived and/or modified CDS sequence (wt) from neuraminidase__InfluenzaA__ACU12497
augaauccaaaucaaaagauaauaacaauuggcucuguuucucucaccauugccacaauauguuuccuuaugcaaauugccauccugguaacuacuguaacauugcauuucaagcaauaugagugcaacucccccccaaacaaccaaguaaugccaugugaaccaacaauaauagaaagaaacauaacagagauaguguauuugacuaacaccaccauagagagggagauaugccccaaacuaguagaauacagaaauuggucaaagccgcaauguaggguuacaggauuugcaccuuuuucuaaggacaauucaauucggcuuuccgcugguggagacauuugggugacaagagaaccuuaugugucaugcgauccuggcaaguguuaucaauuugcacuaggacagggaaccacacuaaacaacaggcauucaaaugacacaguacaugauaggaccccuuaucgaacccucuugaugaaugaguuggguguuccauuucauuugggaaccaagcaagugugcauagcaugguccagcucaaguugucacgauggaaaagcauggcugcauguuugugucacugggcaugaugaaaaugcaacugcuagcuucauuuacgaugggaggcuuguagauaguauuguuucaugguccaaaaauauccucaggacccaggagucggaaugcguuuguaucaauggaacuuguacaguaguaaugacugauggaagugcuucagaaagagcugauacuaaaauacuauucauugaagaggggaaaaucguucauauuagcccauugucaggaagugcucagcauguagaggagugcuccuguuauccucgauauccuggugucagaugugucugcagagacaacuggaaaggcuccaauaggcccaucguagauauaaaugugaaagauuauagcauuguuuccaguuaugugugcucagggcuuguuggagacacacccagaaaaaacgacagcuccagcaguagcuauugccggaauccuaacaaugagaaagggagucauggagugaaaggcugggccuuugacgauggaaaugacguguggaugggaagaacgaucggcgaggaguuacgcucagguuaugaaaccuucaaagucauuggaggcugguccacaccuaacuccaaauugcagacaaauaggcaagucauaguugacagagguaauagguccgguuauucugguauuuucucuguugaaggcaaaagcugcaucaaucggugcuuuuauguagaauugauaaggggaaggaaacaggaaacuaaagucugguggaccucaaacaguauuguuguguuuuguggcaccucagguacauauggaacaggcucauggccugauggggcggacaucaaucucaugccuauauaa

SEQ ID NO: 49159 - RNA, 1413 nt, Artificial Sequence
  derived and/or modified CDS sequence (wt) from neuraminidase__InfluenzaA__ACU12508
augaacccaaaucaaaagauaauaaccauuggaucaaucaguauagcaaucggaauaauuagucuaauguugcaaauaggaaauauuauuucaauaugggcuagucacucaauccaaacuggaagucaaaacaacacuggaauaugcaaucaaagaaucaucacauaugaaaacagcaccugggugaaucacacauauguuaauauuaacaacaccaauguuguugcuggagaggacaaaacuucagugacauuggccggcaauucaucucuuuguucuaucaguggaugggcuauauacacaaaagacaacagcauaagaauuggcuccaaaggagauguuuuugucauaagagaaccuuucauaucauguucucacuuggaaugcagaaccuuuuuucugacccaaggugcucuauuaaaugacaaacauucaaaugggaccguaaaggacagaaguccuuauagggccuuaaugagcuguccucuaggugaagcuccuuccccauacaauucaaaguucgaaucaguugcauggucagcaagcgcaugccaugauggcaugggcugguuaacaaucggaauuucugguccagacaauggagcuguggcuguacuaaaauacaacggaauaauaacuggaaccauaaaaaguuggaaaaagcaaauauuaagaacacaagagucugaaugugucuguaugaacgggucauguuucaccauaaugaccgauggcccgaguaauaaggccgccucguacaaaauuuucaagaucgaaaaggggaagguuacuaaaucaauagaguugaaugcacccaauuuucauuaugaggaauguuccuguuacccagacacuggcauagugauguguguaugcagggacaacuggcaugguucaaaucgaccuugggugucuuuuaaucaaaacuuggauuaucaaauaggauacaucugcaguggaguguuuggugacaauccgcgucccgaagauggagagggcagcugcaauccagugacuguugauggagcaaacggaguaaaaggguuuucauacaaauaugauaaugguguuuggauaggaaggaccaaaaguaacagacuuagaaagggguuugagaugauuugggauccuaauggauggacaaauaccgacagugauuucucagugaaacaggauguuguagcaauaacugauuggucaggguacaguggaaguuucguccaacauccugaguuaacaggauuggacuguauaagaccuugcuucuggguugaguuagucagagggcugcccagagaaaauacaacaaucuggacuagugggagcagcauuucuuuuuguggcguuaauagugauacugcaaacugguccuggccagacggugcugaguugccguucaccauugacaaguag

SEQ ID NO: 49160 - RNA, 1410 nt, Artificial Sequence
  derived and/or modified CDS sequence (wt) from neuraminidase__InfluenzaA__ACU12519
augaauccaaaucaaaagauaauaacgauuggcucuguuucucucaccauuuccacaauaugcuucuucaugcaaauugccauucugauaacuacuguaacauugcauuucaagcaauaugaauucaacucccccccaaacaaccaagugaugcugugugaaccaacaauaauagaaagaaacauaacagagauaguguaucugaccaacaccaccauagagaaggaaauaugccccaaauuagcagaauacagaaauuggucaaagccgcaauguaacauuacaggauuugcaccuuuuucuaaggacaauucgauucggcuuuccgcugguggggacaucugggugacaagagaaccuuaugugucaugcgauccugacaaguguuaucaauuugcccuuggacagggaacaacacuaaacaacgugcauucaaaugacacaguacaugauaggaccccuuaucggacccuauugaugaaugaauuggguguuccauuucaucuggggaccaagcaagugugcauagcaugguccagcucaaguugucacgauggaaaagcauggcugcauguuuguauaacgggggaugaugaaaaugcaacugcuagcuucauuuacaaugggaggcuuguagauaguguuguuucaugguccaaaaaaauccucaggacccaggagucagaaugcguuuguaucaauggaacuuguacaguaguaaugacugaugggagugcuucaggaaaagcugauacuaaaauacuauucauugaggaggggaaaaucguucauacuagcacauugucaggaagugcucagcaugucgaggagugcuccuguuauccucgauauccuggugucagaugugucugcagagacaacuggaaaggcuccaauaggcccaucguagauauaaacauaaaggauuauagcauuguuuccagcuaugugugcucaggacuuguuggagacacacccagaaaaaacgacagcuccagcaguggccauugcuuggauccaaacaaugaagaagguggucauggagugaaaggcugggccuuugaugauggaaaugacguauggaugggaagaacgaucagcgagaaguuacgcucaggauaugaaaccuucaaagucauugaaggcugguccaauccuaacuccaaauugcagauaaauaggcaagucauaguugacagagguaauagguccgguuauucugguauuuucucuguugaaggcaaaagcugcaucaaucggugcuuuuauguggaguugauaaggggaagaaaccaggaaacugaagucuuguggaccucaaacaguauuguuguguuuuguggcaccucagguacauauggaacaggcucauggccugauggggcggacaucaaucucaugccuauauaa

SEQ ID NO: 49161 - RNA, 1410 nt, Artificial Sequence
  derived and/or modified CDS sequence (wt) from neuraminidase__InfluenzaA__ACU12530
augaauccaaaucaaaagauaauaacgauuggcucuguuucucucaccauuuccacaauaugcuucuucaugcaaauugccaucuugauaacuacuguaacauugcauuucaagcaauaugaauucaacucccccccaaacaaccaagugaugcugugugaaccaacaauaauagaaagaaacauaacagagauaguguaucugaccaacaccaccauagagaaggaaauaugccccaaacuagcagaauacagaaauuggucaaagccgcaauguaacauuacaggauuugcaccuuuuucuaaggacaauucgauuaggcuuuccgcugguggggacaucugggugacaagagaaccuuaugugucaugcgauccugacaaguguuaucaauuugcccuuggacagggaacaacacuaaacaacgugcauucaaaugacacaguacaugauaggaccccuuaucggacccuauugaugaaugaguuagguguuccauuucaucuggggaccaagcaagugugcauagcaugguccagcucaaguugucacgauggaaaagcauggcugcauguuuguguaacggggaaugauaaaaaugcaacugcuagcuucauuuacaaugggaggcuuguagauaguauuguuucaugguccaaagaaauccucaggacccaggagucagaaugcguuuguaucaauggaacuuguacaguaguaaugacugaugggagugcuucaggaaaagcugauacuaaaauacuauucauugaggaggggaaaaucguucauacuagcacauugucaggaagugcucagcaugucgaggagugcuccugcuauccucgauauccuggugucagaugugucugcagagacaacuggaaaggcuccaauaggcccauaguagauauaaacauaaaggauuauagcauuguuuccaguuaugugugcucaggacuuguuggagacacacccagaaaaaacgacagcuccagcaguagccauugcuuggauccuaacaaugaagaagguggucauggagugaaaggcugggccuuugaugauggaaaugacguguggaugggaagaacgaucagcgagaaguuacgcucaggauaugaaaccuucaaagucauugaaggcugguccaacccuaauuccaaauugcagauaaauaggcaagucauaguugacagagguaauagguccgguuauucugguauuuucucuguugaaggcaaaagcugcaucaaucggugcuuuuauguggaguugauaaggggaagaaaagaggaaacugaagucuuguggaccucaaacaguauuguuguguuuuguggcaccucagguacauauggaacaggcucauggccugauggggcggacaucaaucucaugccuauauaa

SEQ ID NO: 49162 - RNA, 1410 nt, Artificial Sequence
  derived and/or modified CDS sequence (wt) from neuraminidase__InfluenzaA__ACU12541
augaauccaaaucaaaagauaauaacgauuggcucuguuucucucaccauuuccacaauaugcuucuucaugcaaauugccaucuugauaacuacuguaacauugcauuucaagcaauaugaauucaacucccccccaaacaaccaagugaugcugugugaaccaacaauaauagaaagaaacauaacagagauaguguaucugaccaacaccaccauagagaaggaaauaugccccaaacuagcagaauacagaaauuggucaaagccgcaauguaacauuacaggauuugcaccuuuuucuaaggacaauucgauuaggcuuuccgcugguggggacaucugggugacaagagaaccuuaugugucaugcgauccugacaaguguuaucaauuugcccuuggacagggaacaacacuaaacaacgugcauucaaaugacacaguacaugauaggaccccuuaucggacccuauugaugaaugaguuagguguuccauuucaucuggggaccaagcaagugugcauagcaugguccagcucaaguugucacgauggaaaagcauggcugcauguuuguguaacgggggaugauaaaaaugcaacugcuagcuucauuuacaaugggaggcuuguagauaguauuguuucaugguccaaagaaauccucaggacccaggagucagaaugcguuuguaucaauggaacuuguacaguaguaaugacugaugggagugcuucaggaaaagcugauacuaaaauacuauucauugaggaggggaaaaucguucauacuagcacauugucaggaagugcucagcaugucgaggagugcuccugcuauccucgauauccuggugucagaugugucugcagagacaacuggaaaggcuccaauaggcccauaguagauauaaacauaaaggauuauagcauuguuucuaguuaugugugcucaggacuuguuggagacacacccagaaaaaacgacaguuccagcaguagccauugcuuggauccuaacaaugaagaagguggucauggagugaaaggcugggccuuugaugauggaaaugacguguggaugggaagaacgaucagcgagaaguuacgcucaggauaugaaaccuucaaagucauugaaggcugguccaacccuaauuccaaauggcagauaaauaggcaagucauaguugacagagguaauagauccgguuauucugguauuuucucuguugaaggcaaaagcugcaucaaucggugcuuuuauguggaguugauaaggggaagaaaagaggaaacugaagucuuguggaccucaaacaguauuguuguguuuuguggcaccucagguacauauggaacaggcucauggccugauggggcggacaucaaucucaugccuauauaa

SEQ ID NO: 49163 - RNA, 1410 nt, Artificial Sequence
  derived and/or modified CDS sequence (wt) from neuraminidase__InfluenzaA__ACU12552
augaauccaaaucaaaagauaauaacgauuggcucuguuucucucaccauuuccacaauaugcuucuucaugcaaauugccaucuugauaacuacuguaacauugcauuucaagcaauaugaauucaacucccccccaaacaaccaagugaugcugugugaaccaacaauaauagaaagaaacauaacagagauaguguaucugaccaacaccaccauagagaaggaaauaugccccaaacuagcagaauacagaaauuggucaaagccgcaauguaacauuacaggauuugcaccuuuuucuaaggacaauucgauuaggcuuuccgcugguggggacaucugggugacaagagaaccuuaugugucaugcgauccugacaaguguuaucaauuugcccuuggacagggaacaacacuaaacaacgugcauucaaaugacacaguacaugauaggaccccuuaucggacccuauugaugaaugaguuagguguuccauuucaucuggggaccaagcaagugugcauagcaugguccagcucaaguugucacgauggaaaagcauggcugcauguuuguguaacgggggaugauaaaaaugcaacugcuagcuucauuuacaaugggaggcuuguagauaguauuguuucaugguccaaagaaauccucaggacccaggagucagaaugcguuuguaucaauggaacuuguacaguaguaaugacugaugggagugcuucaggaaaagcugauacuaaaauacuauucauugaggaggggaaaaucguucauacuagcacauugucaggaagugcucagcaugucgaggagugcuccugcuauccucgauauccuggugucagaugugucugcagagacaacuggaaaggcuccaauaggcccauaguagauauaaacauaaaggauuauagcauuguuuccgguuaugugugcucaggacuuguuggagacacacccagaaaaaacgacagcuccagcaguagccauugcucggauccuaacaaugaagaagguggucauggagugaaaggcugggccuuugaugaugggaaugacguguggaugggaagaacgaucagcgagaaguuacgcucaggauaugaaaccuucaaagucauugaaggcugguccaacccuaauuccaaauugcagauaaauaggcaagucauaguugacagagguaauagguccgguuauucugguauuuucucuguugaaggcaaaagcugcaucaaucggugcuuuuauguggaguugauaaggggaagaaaagaggaaacugaagucuuguggaccucaaacaguauuguuguguuuuguggcaccucagguacauauggaacaggcucauggccugauggggcggacaucaaucucaugccuauauaa

SEQ ID NO: 49164 - RNA, 1413 nt, Artificial Sequence
  derived and/or modified CDS sequence (wt) from neuraminidase__InfluenzaA__ACU12574
augaacccaaaucaaaagauaauaaccauuggaucaaucaguauagcaaucggaauaauuaaucuaauguugcaaauaggaaauauuauuucaauaugggcuagucacucaauccaaacuggaagucaaaacaacacuggaauaugcaaccaaagaaucaucacauaugaaaacagcaccugggugaaucacacauauguuaauauuaacaacacuaauguuguugcuggagaggacaaaacuucagugacauuggccggcaauucaucucuuuguucuaucaguggaugggcuauauacacaaaagacaacagcauaagaauuggcuccaaaggagauguuuuugucauaagagaaccuuuuauaucauguucucacuuggaaugcagaaccuuuuuucugacccaaggugcucuauuaaaugacaaacauucaaaugggaccguaaaagacagaaguccuuauagggccuuaaugagcuguccucuaggugaagcuccguccccauacaauucaaaguucgaaucaguugcauggucagcaagcgcaugccaugauggcaugggcugguuaacaaucggaauuucugguccagacaauggagcuguggcuguacuaaaauacaacggaauaauaacuggaaccauaaaaaguuggaaaaagcaaauauuaagaacacaagagucugaaugugucuguaugaacgggucauguuucaccauaaugaccgauggcccgaguaauaaggccgccucguacaaaauuuucaagaucgaaaaggggaagguuacuaaaucaauagaguugaaugcacccaauuuuuauuaugaggaauguuccuguuacccagacacuggcauagugauguguguaugcagggacaacuggcaugguucaaaucgaccuugggugucuuuuaaucaaaacuuggauuaucaaauaggauacaucugcaguggaguguuuggugacaauccgcgucccgaagauggagagggcagcugcaauccagugacuguugauggagcaaacgggguaaaaggguuuucauacaaauaugauaaugguguuuggauaggaaggaccaaaaguaacagacuuagaaagggguuugagaugauuugggauccuaauggauggacaaauaccgacagugauuucucagugaaacaggauguuguagcaauaacugauuggucaggguacagcggaaguuucguccaacauccugaguuaacaggauuggacuguauaagaccuugcuucuggguugaguuagucagagggcugccuagggaaaauacaacaaucuggacuagugggagcagcauuuccuuuuguggcguuaauagugauacugcaaacuggucuuggccagacggugcugaguugccguucaccauugacaaguag

SEQ ID NO: 49165 - RNA, 1413 nt, Artificial Sequence
  derived and/or modified CDS sequence (wt) from neuraminidase__InfluenzaA__ACU12585
augaacccaaaucaaaagauaauaaccauuggaucaaucaguauagcaaucggaauaauuagucuaauguugcaaauaggaaauauuauuucaauaugggcuagucacucaauccaaacuggaagucaaaacaacacuggaauaugcaaucaaagaaucaucacauaugaaaacagcaccugggugaaucacacauauguuaauauuaacaacaccaauguuguugcuggagaggacaaaacuucagugacauuggccggcaauucaucucuuuguucuaucaguggaugggcuauauacacaaaagacaacagcauaagaauuggcuccaaaggagauguuuuugucauaagagaaccuuucauaucauguucucacuuggaaugcagaaccuuuuuucugacccaaggcgcucuauuaaaugacaaacauucaaaugggaccguaaaggacagaaguccuuauagggccuuaaugagcuguccucuaggugaagcuccuuccccauacaauucaaaguucgaaucaguugcauggucagcaagcgcaugccaugauggcaugggcugguuaacaaucggaauuucugguccagacaauggagcuguggcuguacuaaaauacaacggaauaauaacuggaaccauaaaaaguuggaaaaagcaaauauuaagaacacaagagucugaaugugucuguaugaacgggucauguuucaccauaaugaccgauggcccgaguaauaaggccgccucguacaaaauuuucaagaucgaaaaggggaagguuacuaaaucaauagaguugaaugcacccaauuuucauuaugaggaauguuccuguuacccagacacuggcauagugauguguguaugcagggacaacuggcaugguucaaaucgaccuugggugucuuuuaaucaaaacuuggauuaucaaauaggauacaucugcaguggaguguuuggugacaauccgcgucccgaagauggagagggcagcugcaauccagugacuguugauggagcaaacggaguaaaaggguuuucauacaaauaugauaaugguguuuggauaggaaggaccaaaaguaacagacuuagaaagggguuugagaugauuugggauccuaauggauggacaaauaccgacagugauuucucagugaaacaggauguuguagcaauaacugauuggucaggguacaguggaaguuucguccaacauccugaguuaacaggauuggacuguauaagaccuugcuucuggguugaguuagucagagggcugcccagagaaaauacaacaaucuggacuagugggagcagcauuucuuuuugugguguuaauagugauacugcaaacugguccuggccagacggugcugaguugccguucaccauugacaaguag

SEQ ID NO: 49166 - RNA, 1413 nt, Artificial Sequence
  derived and/or modified CDS sequence (wt) from neuraminidase__InfluenzaA__ACU12596
augaacccaaaucaaaagauaauaaccauuggaucaaucaguauagcaaucggaauaauuagucuaauguugcaaauaggaaguauuauuucaauaugggcuagucacucaauccgaacuggaagucaaaacaacacuggaauaugcaaccaaagaaucaucacauaugaaaacagcaccugggugaaucacacauauguuaauauuaacaacacuaauguuguugcuggagaggacaaaaagucagugacauuggccggcaauucaucucuuuguucuaucaguggaugggcuauauacacaaaagacaacagcauaagaauuggcuccaaaggagauguuuuugucauaagagaaccuuucauaucauguucucacuuggaaugcagaaccuuuuuucugacccaaggcgcucuauuaaaugacaaacauucaaaugggaccguaaaggacagaaguccuuauagggccuuaaugagcuguccucuaggugaagcuccguccccauacaauucaaaguucgaaucaguugcauggucagcaagcgcaugccaugauggcaugggcugguuaacaaucggaauuucugguccagacaauggagcuguggcuguacuaaaauacaacggaauaauaacuggaaccauaaaaaguuggaaaaagcaaauauuaagaacacaagagucugaaugugucuguaugaacgggucauguuucaccauaaugaccgauggcccgaguaauaaagccgccucguacaaaauuuucaagaucgaaaaggggaagguuacuaaaucaauagaguugaaugcacccaauuuuuauuaugaggaaugcuccuguuacccagacacuggcauagugauguguguaugcagggacaacuggcaugguucaaaucgaccuugggugucuuuuaaucaaaauuuggauuaucaaauaggauacaucugcaguggaguguuuggugacaauccgcguccugaagauggagagggcagcugcaauccagugacuguugauggagcaaacggaguaaaaggguuuucauacaaauaugguaaugguguuuggauaggaaggaccaaaaguaacagacuuagaaagggguuugagaugauuugggauccuaauggauggacaaauaccgacagugauuucucagugaaacaggauguuguagcaauaacugauuggucaggguacagcggaaguuucguccaacauccugaguugacaggauuggacuguauaagaccuugcuucuggguugaguuagucagagggcugccuagagaaaauacaacaaucuggacuagugggagcagcauuucuuuuuguggcguuaauagugauacugcaaacuggucuuggccagacggugcugaguugccguucaccauugacaaguag

SEQ ID NO: 49167 - RNA, 1410 nt, Artificial Sequence
  derived and/or modified CDS sequence (wt) from neuraminidase__InfluenzaA__ACU13077
augaauccaaaccaaaagauaauaaccauugguucggucuguaugacaauuggaauggcuaacuuaauauuacaaauuggaaacauaaucucaauauggauuagccacucaauucaacuugggaaucaaaaucagauugaaacaugcaaucaaagcgucauuacuuaugaaaacaacacuuggguaaaucagacauauguuaacaucagcaacaccaacuuugcugcuggacagucagugguuuccgugaaauuagcgggcaauuccucucucugcccuguuaguggaugggcuauauacaguaaagacaacaguauaagaaucgguuccaagggggauguguuugucauaagggaaccauucauaucaugcucccccuuggaaugcagaaccuucuucuugacucaaggggccuugcuaaaugacaaacauuccaauggaaccauuaaagacaggagcccauaucgaacccuaaugagcuguccuauuggugaaguucccucuccauacaacucaagauuugagucagucgcuuggucagcaagugcuugucaugauggcaucaauuggcuaacaauuggaauuucuggcccagacaauggggcaguggcuguguuaaaguacaacggcauaauaacagacacuaucaagaguuggagaaacaauauauugagaacacaagagucugaaugugcauguguaaaugguucuugcuuuacuguaaugaccgauggaccaagugauggacaggccucauacaagaucuucagaauagaaaagggaaagauagucaaaucagucgaaaugaaugccccuaauuaucacuaugaggaaugcuccuguuauccugauucuagugaaaucacaugugugugcagggauaacuggcauggcucgaaucgaccgugggugucuuucaaccagaaucuggaauaucagauaggauacauaugcagugggauuuucggagacaauccacgcccuaaugauaagacaggcaguugugguccaguaucgucuaauggagcaaauggaguaaaaggauuuucauucaaauacggcaaugguguuuggauagggagaacuaaaagcauuaguucaagaaacgguuuugagaugauuugggauccgaacggauggacugggacagacaauaacuucucaauaaaacaagauaucguaggaauaaaugaguggucaggauauagcgggaguuuuguucagcauccagaacuaacagggcuggauuguauaagaccuugcuucuggguugaacuaaucagagggcgacccaaagagaacacaaucuggacuagcgggagcagcauauccuuuugugguguaaacagugacacuguggguuggucuuggccagacggugcugaguugccauuuaccauugacaaguaa

SEQ ID NO: 49168 - RNA, 1410 nt, Artificial Sequence; identical to SEQ ID NO: 48750
  derived and/or modified CDS sequence (wt) from neuraminidase__InfluenzaA__ACU13078

SEQ ID NO: 49169 - RNA, 1410 nt, Artificial Sequence; identical to SEQ ID NO: 48750
  derived and/or modified CDS sequence (wt) from neuraminidase__InfluenzaA__ACU13079

SEQ ID NO: 49170 - RNA, 1410 nt, Artificial Sequence; identical to SEQ ID NO: 48750
  derived and/or modified CDS sequence (wt) from neuraminidase__InfluenzaA__ACU13080

SEQ ID NO: 49171 - RNA, 1410 nt, Artificial Sequence; identical to SEQ ID NO: 48749
  derived and/or modified CDS sequence (wt) from neuraminidase__InfluenzaA__ACU13081

SEQ ID NO: 49172 - RNA, 1410 nt, Artificial Sequence; identical to SEQ ID NO: 48750
  derived and/or modified CDS sequence (wt) from neuraminidase__InfluenzaA__ACU13082

SEQ ID NO: 49173 - RNA, 1410 nt, Artificial Sequence; identical to SEQ ID NO: 48750
  derived and/or modified CDS sequence (wt) from neuraminidase__InfluenzaA__ACU13083

SEQ ID NO: 49174 - RNA, 1410 nt, Artificial Sequence
  derived and/or modified CDS sequence (wt) from neuraminidase__InfluenzaA__ACU13084
augaauccaaaccaaaagauaauaaccauugguucggucuguaugacaauuggaauggcuaacuuaauauuacaaauuggaaacauaaucucaauauggauuagccacucaauucaacuugggaaucaaaaucagauugaaacaugcaaucaaagcgucauuacuuaugaaaacaacacuuggguaaaucagacauauguuaacaucagcaacaccaacuuugcugcuggacagucagugguuuccaugaaauuagcgggcaauuccucucucugcccuguugguggaugggcuauauacaguaaagacaacaguguaagaaucgguuccaagggggauguguuugucauaagggaaccauucauaucaugcucccccuuggaaugcagaaccuucuucuugacucaaggggccuugcuaaaugacaaacauuccaauggaaccauuaaagacaggagcccauaucgaacccuaaugagcuguccuauuggugaaguucccucuccauacaacucaagauuugagucagucgcuuggucagcaagugcuugucaugauggcaucaauuggcuaacaauuggaauuucuggcccagacaauggggcaguggcuguguuaaaguacaacggcauaauaacagacacuaucaagaguuggagaaacaauauauugagaacacaagagucugaaugugcauguguaaaugguucuugcuuuacuguaaugaccgauggaccaaguaauggacaggccucauacaagaucuucagaauagaaaagggaaagauagucaaaucagucgaaaugaaugccccuaauuaucacuaugaggaaugcuccuguuauccugauucuagugaaaucacaugugugugcagggauaacuggcauggcucgaaucgaccgugggugucuuucaaccagaaucuggaauaucagauaggauacauaugcagugggauuuucggagacaauccacgcccuaaugauaagacaggcaguugugguccaguaucgucuaauggagcaaauggaguaaaaggauuuucauucaaauacggcaaugguguuuggauagggagaacuaaaagcauuaguucaagaaacgguuuugagaugauuugggauccgaacggauggacugggacagacaauaacuucucaauaaagcaagauaucguaggaauaaaugaguggucaggauauagcgggaguuuuguucagcauccagaacuaacagggcuggacuguauaagaccuugcuucuggguugaacuaaucagagggcgacccaaagagaacacaaucuggacuagcgggagcagcauauccuuuugugguguaaacagugacacuguggguuggucuuggccagacggugcugaguugccauuuaccauugacaaguaa

SEQ ID NO: 49175 - RNA, 1410 nt, Artificial Sequence; identical to SEQ ID NO: 48750
  derived and/or modified CDS sequence (wt) from neuraminidase__InfluenzaA__ACU16799

SEQ ID NO: 49176 - RNA, 1410 nt, Artificial Sequence
  derived and/or modified CDS sequence (wt) from neuraminidase__InfluenzaA__ACU16861
augaauccaaaccaaaagauaauaaccauugguucggucuguaugacaauuggaauggcuaacuuaauauuacaaauuggaaacauaaucucaauauggauuagccacucaauucaacuugggaaucaaaaucagauugaaacaugcaaucaaagcgucauuacuuaugaaaacaacacuuggguaaaucagacauauguuaacaucagcaacaccaacuuugcugcuggacagucagugguuuccgugaaauuagcgggcaauuccucucucugcccuguuaguggaugggcuauauacaguaaagacaacaguauaagaaucgguuccaagggggauguguuugucauaagggaaccauucauaucaugcucccccuuggaaugcagaaccuucuucuugacucaaggggccuugcuaaaugacaaacauuccaauggaaccauuaaagacaggagcccauaucgaacccuaaugagcuguccuauuggugaaguucccucuccauacaacucaagauuugagucagucgcuuggucagcaagugcuugucaugauggcaucaauuggcuaacaauuggaauuucuggcccagacaauggggcaguggcuguguuaaaguacaacggcauaauaacagacacuaucaagaguuggagaaacaauauauugagaacacaagagucugaaugugcauguguaaaugguucuugcuuuacuguaaugaccgauggaccaagugauggacaggccucauacaagaucuucagaauagaaaagggaaagauagucaaaucagucgaaaugaaugccccuaauuaucacuaugaggaaugcuccuguuauccugauucuagugaaaucacaugugugugcagggauaacuggcauggcucgaaucgaccgugggugucuuucaaccagaaucuggaauaucagauaggauacauaugcagugggauuuucggagacaauccacgcccuaaugauaagacaggcaguugugguccaguaucgucuaauggagcaaauggaguaaaaggauuuucauucaaauacggcaaugguguuuggauagggagaacuaaaagcauuaguucaagaaacgguuuugagaugauuugggauccgaacggauggacugggacagacaauaacuucucaauaaagcaagauaucguaggaauaaaugaguggucaggauauagcgggaguuuuguucagcauccagaacuaacagggcuggauuguauaagaccuugcuucuggguugaacugaucagagggcgacccaaagagaacacaaucuggacuagcgggagcagcauauccuuuugugguguaaacagugacacuguggguuggucuuggccagacggugcugaguugccauuuaccauugacaaguaa

SEQ ID NO: 49177 - RNA, 1410 nt, Artificial Sequence; identical to SEQ ID NO: 48750
  derived and/or modified CDS sequence (wt) from neuraminidase__InfluenzaA__ACU16934

SEQ ID NO: 49178 - RNA, 1410 nt, Artificial Sequence; identical to SEQ ID NO: 48947
  derived and/or modified CDS sequence (wt) from neuraminidase__InfluenzaA__ACU16997

SEQ ID NO: 49179 - RNA, 1410 nt, Artificial Sequence; identical to SEQ ID NO: 48750
  derived and/or modified CDS sequence (wt) from neuraminidase__InfluenzaA__ACU17130

SEQ ID NO: 49180 - RNA, 1410 nt, Artificial Sequence; identical to SEQ ID NO: 48750
  derived and/or modified CDS sequence (wt) from neuraminidase__InfluenzaA__ACU17191

SEQ ID NO: 49181 - RNA, 1410 nt, Artificial Sequence
  derived and/or modified CDS sequence (wt) from neuraminidase__InfluenzaA__ACU17262
augaauccaaaccaaaagauaauaaccauugguucggucuguaugacaauuggaauggcuaacuuaauauuacaaauuggaaacauaaucucaauauggauuagccacucaauucaacuugggaaucaaagucagauugaaacaugcaaucaaagcgucauuacuuaugaaaacaacacuuggguaaaucagacauauguuaacaucagcaacaccaacuuugcugcuggacagucagugguuuccgugaaauuagcgggcaauuccucucucugcccuguuaguggaugggcuauauacaguaaagacaacaguauaagaaucgguuccaagggggauguguuugucauaagggaaccauucauaucaugcucccccuuggaaugcagaaccuucuucuugacucaaggggccuugcuaaaugacaaacauuccaauggaaccauuaaagacaggagcccauaucgaacccuaaugagcuguccuauuggugaaguucccucuccauacaacucaagauuugagucagucgcuuggucagcaagugcuugucaugauggcaucaauuggcuaacaauuggaauuucuggcccagacaauggggcaguggcuguguuaaaguacaacggcauaauaacagacacuaucaagaguuggagaaacaauauauugagaacacaagagucugaaugugcauguguaaaugguucuugcuuuacuguaaugaccgauggaccaagugauggacaggccucauacaagaucuucagaauagaaaagggaaagauagucaaaucagucgaaaugaaugccccuaauuaucacuaugaggaaugcuccuguuauccugauucuagugaaaucacaugugugugcagggauaacuggcauggcucgaaucgaccgugggugucuuucaaccagaaucuggaauaucagauaggauacauaugcagugggauuuucggagacaauccacgcccuaaugauaagacaggcaguugugguccaguaucgucuaauggagcaaauggaguaaaaggauuuucauucaaauacggcaaugguguuuggauagggagaacuaaaagcauuaguucaagaaacgguuuugagaugauuugggauccgaacggauggacugggacagacaauaacuucucaauaaagcaagauaucguaggaauaaaugaguggucaggauauagcgggaguuuuguucagcauccagaacuaacagggcuggauuguauaagaccuugcuucuggguugaacuaaucagagggcgacccaaagagaacacaaucuggacuagcgggagcagcauauccuuuugugguguaaacagugacacuguggguuggucuuggccagacggugcugaguugccauuuaccauugacaaguaa

SEQ ID NO: 49182 - RNA, 1410 nt, Artificial Sequence; identical to SEQ ID NO: 48750
  derived and/or modified CDS sequence (wt) from neuraminidase__InfluenzaA__ACU17325

SEQ ID NO: 49183 - RNA, 1410 nt, Artificial Sequence; identical to SEQ ID NO: 48750
  derived and/or modified CDS sequence (wt) from neuraminidase__InfluenzaA__ACU17393

SEQ ID NO: 49184 - RNA, 1410 nt, Artificial Sequence; identical to SEQ ID NO: 48750
  derived and/or modified CDS sequence (wt) from neuraminidase__InfluenzaA__ACU17454

SEQ ID NO: 49185 - RNA, 1410 nt, Artificial Sequence; identical to SEQ ID NO: 48750
  derived and/or modified CDS sequence (wt) from neuraminidase__InfluenzaA__ACU17524

SEQ ID NO: 49186 - RNA, 1410 nt, Artificial Sequence
  derived and/or modified CDS sequence (wt) from neuraminidase__InfluenzaA__ACU27043
augaauccaaaccaaaagauaauaaccauugguucggucuguaugacaauuggaauggcuaacuuaauauuacaaauuggaaacauaaucucaauauggauuagccacucaauucaacuugggaaucaaaaucagauugaaacaugcaaucaaagcgucauuacuuaugaaaacaacacuuggguaaaucagacauauguuaacaucagcaacaccaacuuugcugcuggacagucagugguuuccgugaaauuagcgggcaauuccucucucugcccuguuaguggaugggcuauauacaguaaagacaacaguauaagaaucgguuccaagggggauguguuugucauaagggaaccauucauaucaugcucccccuuggaaugcagaaccuucuucuugacucaaggggccuugcuaaaugacaaacauuccaauggaaccauuaaagacaggagcccauaucgaacccuaaugagcuguccuauuggugaaguucccucuccauacaacucaagauuugagucagucgcuuggucagcaagugcuugucaugauggcaucaauuggcuaacaauuggaauuucuggcccagacaauggggcaguggcuguguuaaaguacaacggcauaauaacagacacuaucaagaguuggagaaacaauauauugagaacacaagagucugaaugugcauguguaaaugguucuugcuuuacuguaaugaccgauggaccaagugauggacaggccucauacaagaucuucagaauagaaaagggaaagauagucaaaucagucgaaaugaaugccccuaauuauuacuaugaggaaugcuccuguuauccugauucuagugaaaucacaugugugugcagggauaacuggcauggcucgaaucgaccgugggugucuuucaaccagaaucuggaauaucagauaggauacauauguagugggauuuucggagacaauccacgcccuaaugauaagacaggcaguugugguccaguaucgucuaauggagcaaauggaguaaaaggauuuucauucaaauacggcaaugguguuuggauagggagaacuaaaagcauuaguucaagaaacgguuuugagaugauuugggauccgaacggauggacugggacagacaauaacuucucaauaaagcaagauaucguaggaauaaaugaguggucaggauauagcgggaguuuuguucagcauccagaacuaacagggcuggauuguauaagaccuugcuucuggguugaacuaaucagagggcgacccaaagagaacacaaucuggacuagcgggagcagcauauccuuuugugguguaaacagugacacuguggguuggucuuggccagacggugcugaguugccauuuaccauugacaaguaa

SEQ ID NO: 49187 - RNA, 1413 nt, Artificial Sequence
  derived and/or modified CDS sequence (wt) from neuraminidase__InfluenzaA__ACU27415
augaacccaaaucaaaagauuauaaccauuggaucaaucaguauagcaaucggaauaauuagucuaauguugcaaauaggaaauauuauuucaauaugggcuagucacucaauccaaacuggaagucaaaacaacacuggaauaugcaaccaaagaaucaucacauaugaaaacagcaccugggugaaucacacauauguuaauauuaacaacacuaauguuguugcuggagaggacaaaacgucagugacauuugccggcaauucaucucuuuguucuaucaguggaugggcuauauacacaaaagacaacagcauaagaauuggcuccaaaggagauguuuuugucauaagagaaccuuucauaucauguucucacuuggaaugcagaaccuuuuuucugacccaaggcgcucuauuaaaugacaaacauucaaaugggaccguaaaggacagaaguccuuauagggccuuaaugagcuguccucuaggugaagcuccauccccauacaauucaaaguucgaaucaguugcauggucagcaagcgcaugccaugauggcaugggcugguuaacaaucggaauuucugguccagacaauggagcuguggcuguacuaaaauacaacggaauaauaacuggaaccauaaaaaguuggaaaaagcaaauauuaagaacacaagagucugaaugugucuguaugaacgggucauguuucaccauaaugaccgauggcccgaguaauaaagcugccucguacaaaauuuucaagaucgaaaaggggaagguuacuaaaucaauagaguugaaugcacccaauuuuuauuaugaggaaugcuccuguuacccagacacuggcauagugauguguguaugcagggacaacuggcaugguucaaaucgaccuugggugucuuuuaaucaaaauuuggauuaucaaauaggauacaucugcaguggaguguuuggugacaauccgcgucccgaagauggagagggcagcugcaauccagugacuguugauggagcaaacggaguaaaaggguuuucauacaaauaugguaaugguguuuggauaggaaggaccaaaaguaacagacuuagaaagggguuugagaugauuugggauccuaauggauggacaaauaccgacagugauuucucagugaaacaggauguuguagcaauaacugauuggucaggguacagcggaaguuucguccaacauccugaguugacaggauuggacuguauaagaccuugcuucuggguugaguuagucagagggcugccuagagaaaauacaacaaucuggacuagugggagcagcauuucuuuuuguggcguuaauagugauacugcaaacuggucuuggccagacggugcugaguugccguucaccauugacaaguag

SEQ ID NO: 49188 - RNA, 1413 nt, Artificial Sequence
  derived and/or modified CDS sequence (wt) from neuraminidase__InfluenzaA__ACU27416
augaacccaaaucaaaagauaauaaccauuggaucaaucaguauagcaaucggaauaauuagucuaauguugcaaauaggaaauauuauuucaauaugggcuagucacucaauccaaacuggaagucaaaacaacacuggaauaugcaaccaaagaaucaucacauaugaaaacagcaccugggugaaucacacauauguuaauauuaacaacacuaauguuguugcuggagaggacaaaacgucagugacauuugccggcaauucaucucuuuguucuaucaguggaugggcuauauacacaaaagacaacagcauaagaauuggcuccaaaggagauguuuuugucauaagagaaccuuucauaucauguucucacuuggaaugcagaaccuuuuuucugacccaaggcgcucuauuaaaugacaaacauucaaaugggaccguaaaggacagaaguccuuauagggccuuaaugagcuguccucuaggugaagcuccauccccauacaauucaaaguucgaaucaguugcauggucagcaagcgcaugccaugauggcaugggcugguuaacaaucggaauuucugguccagacaauggagcuguggcuguacuaaaauacaacggaauaauaacuggaaccauaaaaaguuggaaaaagcaaauauuaagaacacaagagucugaaugugucuguaugaacgggucauguuucaccauaaugaccgauggcccgaguaauaaagcugccucguacaaaauuuucaagaucgaaaaggggaagguuacuaaaucaauagaguugaaugcacccaauuuuuauuaugaggaaugcuccuguuacccagacacuggcauagugauguguguaugcagggacaacuggcaugguucaaaucgaccuugggugucuuuuaaucaaaauuuggauuaucaaauaggauacaucugcaguggaguguuuggugacaauccgcgucccgaagauggagagggcagcugcaauccagugacuguugauggagcaaacggaguaaaaggguuuucauacaaauaugguaaugguguuuggauaggaaggaccaaaaguaacagacuuagaaagggguuugagaugauuugggauccuaauggauggacaaauaccgacagugauuucucagugaaacaggauguuguagcaauaacugauuggucaggguacagcggaaguuucguccaacauccugaguugacaggauuggacuguauaagaccuugcuucuggguugaguuagucagagggcugccuagagaaaauacaacaaucuggacuagugggagcagcauuucuuuuuguggcguuaauagugauacugcaaacuggucuuggccagacggugcugaguugccguucaccauugacaaguag

SEQ ID NO: 49189 - RNA, 1410 nt, Artificial Sequence; identical to SEQ ID NO: 48749
  derived and/or modified CDS sequence (wt) from neuraminidase__InfluenzaA__ACU29961

SEQ ID NO: 49190 - RNA, 1410 nt, Artificial Sequence
  derived and/or modified CDS sequence (wt) from neuraminidase__InfluenzaA__ACU29971
augaauccaaaccaaaagauaauaaccauugguucggucuguaugacaauuggaauggcuaacuuaauauuacaaauuggaaacauaaucucaauauggauuagccacucaauucaacuugggaaucaaaaucagauugaaacaugcaaucaaagcgucauuacuuaugaaaacaacacuuggguaaaucagacauauguuaacaucagcaacaccaacuuugcugcuggacagucagugguuuccgugaaauuagcgggcaauuccucucucugcccuguuaguggaugggcuauauacaguaaagacaacaguguaagaaucgguuccaagggggauguguuugucauaagggaaccauucauaucaugcucccccuuggaaugcagaaccuucuucuugacucaaggggccuugcuaaaugacaaacauuccaauggaaccauuaaagacaggagcccauaucgaacccuaaugagcuguccuauuggugaaguucccucuccauacaacucaagauuugagucagucgcuuggucagcaagugcuugucaugauggcaucaauuggcuaacaauuggaauuucuggcccagacaauggggcaguggcuguguuaaaguacaacggcauaauaacagacacuaucaagaguuggagaaacaauauauugagaacacaagagucugaaugugcauguguaaaugguucuugcuuuacuguaaugaccgauggaccaaguaauggacaggccucauacaagaucuucagaauagaaaagggaaagauagucaaaucagucgaaaugaaugccccuaauuaucacuaugaggaaugcuccuguuauccugauucuagugaaaucacaugugugugcagggauaacuggcauggcucgaaucgaccgugggugucuuucaaccagaaucuggaauaucagauaggauacauaugcagugggauuuucggagacaauccacgcccuaaugauaagacaggcaguugugguccaguaucgucuaauggagcaaauggaguaaaaggauuuucauucaaauacggcaaugguguuuggauagggagaacuaaaagcauuaguucaagaaacgguuuugagaugauuugggauccgaacggauggacugggacagacaauaacuucucaauaaagcaagauaucguaggaauaaaugaguggucaggauauagcgggaguuuuguucagcauccagaacuaacagggcuggauuguauaagaccuugcuucuggguugaacuaaucagagggcgacccaaagagaacacaaucuggacuagcgggagcagcauauccuuuugugguguaaacagugacacuguggguuggucuuggucagacggugcugaguugccauuuaccauugacaaguaa

SEQ ID NO: 49191 - RNA, 1410 nt, Artificial Sequence; identical to SEQ ID NO: 48750
  derived and/or modified CDS sequence (wt) from neuraminidase__InfluenzaA__ACU29981

SEQ ID NO: 49192 - RNA, 1410 nt, Artificial Sequence; identical to SEQ ID NO: 48750
  derived and/or modified CDS sequence (wt) from neuraminidase__InfluenzaA__ACU29991

SEQ ID NO: 49193 - RNA, 1410 nt, Artificial Sequence; identical to SEQ ID NO: 48750
  derived and/or modified CDS sequence (wt) from neuraminidase__InfluenzaA__ACU30001

SEQ ID NO: 49194 - RNA, 1410 nt, Artificial Sequence
  derived and/or modified CDS sequence (wt) from neuraminidase__InfluenzaA__ACU30021
augaauccaaaccaaaagauaauaaccauugguucggucuguaugacaauuggaauggcuaacuuaauauuacaaauuggaaacauaaucucaauauggauuagccacucaauucaacuugggaaucaaaaucagauugaaacaugcaaucaaagcgucauuacuuaugaaaacaacacuuggguaaaucagacauauguuaacaucagcaacaccaacuuugcugcuggacagucagugguuuccgugaaauuagcgggcaauuccucucucugcccuguuaguggaugggcuauauacaguaaagacaacaguauaagaaucgguuccaagggggauguguuugucauaagggaaccauucauaucaugcucccccuuggaaugcagaaccuucuucuugacucaaggggccuugcuaaaugacaaacauuccaauggaaccauuaaagacaggagcccauaucgaacccuaaugagcuguccuauuggugaaguucccucuccauacaacucaagauuugagucagucgcuuggucagcaagugcuugucaugauggcaucaauuggcuaacaauuggaauuucuggcccagacaauggggcaguggcuguguuaaaguacaacggcauaauaacagacacuaucaagaguuggagaaacaacauauugagaacacaagagucugaaugugcauguguaaaugguucuugcuuuacuguaaugaccgauggaccaagugauggacaggccucauacaagaucuucagaauagaaaagggaaagauagucaaaucagucgaaaugaaugccccuaauuaucacuaugaggaaugcuccuguuauccugauucuagugaaaucacaugugugugcagggauaacuggcauggcucgaaucgaccgugggugucuuucaaccagaaucuggaauaucagauaggauacauaugcagugggauuuucggagacaauccacgcccuaaugauaagacaggcaguugugguccaguaucgucuaauggagcaaauggaguaaaaggauuuucauucaaauacggcaaugguguuuggauagggagaacuaaaagcauuaguucaagaaacgguuuugagaugauuugggauccgaacggauggacugggacagacaauaacuucucaauaaagcaagauaucguaggaauaaaugaguggucaggauauagcgggaguuuuguucagcauccagaacuaacagggcuggauuguauaagaccuugcuucuggguugaacuaaucagagggcgacccaaagagaacacaaucuggacuagcgggagcagcauauccuuuugugguguaaacagugacacuguggguuggucuuggccagacggugcugaguugccauuuaccauugacaaguaa

SEQ ID NO: 49195 - RNA, 1410 nt, Artificial Sequence
  derived and/or modified CDS sequence (wt) from neuraminidase__InfluenzaA__ACU30085
augaauccaaaccaaaagauaauaaccauugguucggucuguaugacaauuggaauggcuaacuuaauauuacaaauuggaaacauaaucucaauauggauuagccacucaauucaacuugggaaucaaaaucagauugaaacaugcaaucaaagcgucauuacuuaugaaaacaacacuuggguaaaucagacauauguuaacaucagcaacaccaacuuugcugcuggacagucagugguuuccgugaaauuaaugggcaauuccucucucugcccuguuaguggaugggcuauauacaguaaagacaacaguguaagaaucgguuccaagggggauguguuugucauaagggaaccauucauaucaugcucccccuuggaaugcagaaccuucuucuugacucaaggggccuugcuaaaugacaaacauuccaauggaaccauuaaagacaggagcccauaucgaacccuaaugagcuguccuauuggugaaguucccucuccauacaacucaagauuugagucagucgcuuggucagcaagugcuugucaugauggcaucaauuggcuaacaauuggaauuucuggcccagacaauggggcaguggcuguguuaaaguacaacggcauaauaacagacacuaucaagaguuggagaaacaauauauugagaacacaagagucugaaugugcauguguaaaugguucuugcuuuacuguaaugaccgauggaccaaguaauggacaggccucauacaagaucuucagaauagaaaagggaaagauagucaaaucagucgaaaugaaugccccuaauuaucacuaugaggaaugcuccuguuauccugauucuagugaaaucacaugugugugcagggauaacuggcauggcucgaaucgaccgugggugucuuucaaccagaaucuggaauaucagauaggauacauaugcagugggauuuucggagacaauccacgcccuaaugauaagacaggcaguugugguccaguaucgucuaauggagcaaauggaguaaaaggauuuucauucaaauacggcaaugguguuuggauagggagaacuaaaagcauuaguucaagaaacgguuuugagaugauuugggauccgaacggauggacugggacagacaauaacuucucaauaaagcaagauaucguaggaauaaaugaguggucaggauauagcgggaguuuuguucagcauccagaacuaacagggcuggauuguauaagaccuugcuucuggguugaacuaaucagagggcgacccaaagagaacacaaucuggacuagcgggagcagcauauccuuuugugguguaaacagugacacuguggguuggucuuggccagacggugcugaguugccauuuaccauugacaaguaa

SEQ ID NO: 49196 - RNA, 1410 nt, Artificial Sequence
  derived and/or modified CDS sequence (wt) from neuraminidase__InfluenzaA__ACU30095
augaauccaaaccaaaagauaauaaccauugguucggucuguaugacaauuggaauggcuaacuuaauauuacaaauuggaaacauaaucucaauauggauuagccacucaauucaacuugggaaucaaaaucagauugaaacaugcaaucaaagcgucauuacuuaugaaaacaacacuuggguaaaucagacauauguuaacaucagcaacaccaacuuugcugcuggacagucagugguuuccaugaaauuagcgggcaauuccucucucugcccuguugguggaugggcuauauacaguaaagacaacaguguaagaaucgguuccaagggggauguguuugucauaagggaaccauucauaucaugcucccccuuggaaugcagaaccuucuucuugacucaaggggccuugcuaaaugacaaacauuccaauggaaccauuaaagacaggagcccauaucgaacccuaaugagcuguccuauuggugaaguucccucuccauacaacucaagauuugagucagucgcuuggucagcaagugcuugucaugauggcaucaauuggcuaacaauuggaauuucuggcccagacaauggggcaguggcuguguuaaaguacaacggcauaauaacagacacuaucaagaguuggagaaacaauauauugagaacacaagagucugaaugugcauguguaaaugguucuugcuuuacuguaaugaccgauggaccaaguaauggacaggccucauacaagaucuucagaauagaaaagggaaagauagucaaaucagucgaaaugaaugccccuaauuaucacuaugaggaaugcuccuguuauccugauucuagugaaaucacaugugugugcagggauaacuggcauggcucgaaucgaccgugggugucuuucaaccagaaucuggaauaucagauaggauacauaugcagugggauuuucggagacaauccacgcccuaaugauaagacaggcaguugugguccaguaucgucuaauggagcaaauggaguaaaaggauuuucauucaaauacggcaaugguguuuggauagggagaacuaaaagcauuaguucaagaaacgguuuugagaugauuugggauccgaacggauggacugggacagacaauaacuucucaauaaagcaagauaucguaggaauaaaugaguggucaggauauagcgggaguuuuguucagcauccggaacuaacagggcuggauuguauaagaccuugcuucuggguugaacuaaucagagggcgacccaaagagaacacaaucuggacuagcgggagcagcauauccuuuugugguguaaacagugacacuguggguuggucuuggccagacggugcugaguugccauuuaccauugacaaguaa

SEQ ID NO: 49197 - RNA, 1410 nt, Artificial Sequence
  derived and/or modified CDS sequence (wt) from neuraminidase__InfluenzaA__ACU30105
augaauccaaaccaaaagauaauaaccauugguucggucuguaugacaauuggaauggcuaacuuaauauuacaaauuggaaacauaaucucaauauggauuagccacucaauucaacuugggaaucaaaaucagauugaaacaugcaaucaaagcgucauuacuuaugaaaacaacacuuggguaaaucagacauauguuaacaucagcaacaccaacuuugcugcuggacagucagugguuuccgugaaauuagcgggcaauuccucucucugcccuguuaguggaugggcuauauacaguaaagacaacaguauaagaaucgguuccaagggggauguguuugucauaagggaaccauucauaucaugcucccccuuggaaugcagaaccuucuucuugacucaaggggccuugcuaaaugacaaacauuccaauggaaccauuaaagacaggagcccauaucgaacccuaaugagcuguccuauuggugaaguucccucuccauacaacucaagauuugagucagucgcuuggucagcaagugcuugucaugauggcaucaauuggcuaacaauuggaauuucuggcccagacaauggggcaguggcuguguuaaaguacaacggcauaauaacagacacuaucaagaguuggagaaacaauauauugagaacacaagagucugaaugugcauguguaaaugguucuugcuuuacuguaaugaccgauggaccaagugauggacaggccucauacaagaucuucagaauagaaaagggaaagauagucaaaucagucgaaaugaaugccccuaauuaucacuaugaggaaugcuccuguuauccugauucuagugaaaucacaugugugugcagggauaacuggcauggcucgaaucgaccgugggugucuuucaaccagaaucuggaauaucagauaggauacauaugcagugggauuuucggagacaauccacgcccuaaugauaagacaggcaguugugguccaguaucgucuaauggagcaaauggaguaaaaggauuuucauucaaauacggcaaugguguuuggauagggagaacuaaaagcauuaguucaagaaacgguuuugagaugauuugggauccgaacggauggacugggacagacaauaacuucucaauaaagcaagauaucguaggaauaaaugaguggucaggauauagcgggaguuuuguucagcauccagaacuaacagggcuggauuguauaagaccuugcuucuggguugaacuaaucagaggacgacccaaagagaacacaaucuggacuagcgggagcagcauauccuuuugugguguaaacagugacacuguggguuggucuuggccagacggugcugaguugccauuuaccauugacaaguaa

SEQ ID NO: 49198 - RNA, 1410 nt, Artificial Sequence; identical to SEQ ID NO: 48750
  derived and/or modified CDS sequence (wt) from neuraminidase__InfluenzaA__ACU30114

SEQ ID NO: 49199 - RNA, 1410 nt, Artificial Sequence; identical to SEQ ID NO: 48750
  derived and/or modified CDS sequence (wt) from neuraminidase__InfluenzaA__ACU30123

SEQ ID NO: 49200 - RNA, 1410 nt, Artificial Sequence
  derived and/or modified CDS sequence (wt) from neuraminidase__InfluenzaA__ACU31177
augaauccaaaccaaaagauaauaaccauugguucggucuguaugacaauuggaauggcuaacuuaauauuacaaauuggaaacauaaucucaauauggauuagccacuuaauucaacuugggaaucaaaaucagauugaaacaugcaaucaaagcgucauuacuuaugaaaacaacacuuggguaaaucagacauauguuaacaucagcaacaccaacuuugcugcuggacagucagugguuuccgugaaauuagcgggcaauuccucucucugcccuguuaguggaugggcuauauacaguaaagacaacaguauaagaaucgguuccaagggggauguguuugucauaagggaaccauucauaucaugcucccccuuggaaugcagaaccuucuucuugacucaaggggccuugcuaaaugacaaacauuccaauggaaccauuaaagacaggagcccauaucgaacccuaaugagcuguccuauuggugaaguucccucuccauacaacucaagauuugagucagucgcuuggucagcaagugcuugucaugauggcaucaguuggcuaacaauuggaauuucuggcccagacaauggggcaguggcuguguuaaaguacaacggcauaauaacagacacuaucaagaguuggagaaacaauauauugagaacacaagagucugaaugugcauguguaaaugguucuugcuuuacuguaaugaccgauggaccaagugauggacaggccucauacaagaucuucagaauagaaaagggaaagauagucaaaucagucgaaaugaaugccccuaauuaucacuaugaggaaugcuccuguuauccugauucuagugaaaucacaugugugugcagggauaacuggcauggcucgaaucgaccgugggugucuuucaaccagaaucuggaauaucagauaggauacauaugcagugggauuuucggagacaauccacgcccuaaugauaagacaggcaguugugguccaguaucgucuaauggagcaaauggaguaaaaggauuuucauucaaauacggcaaugguguuuggauagggagaacuaaaagcauuaguucaagaaacgguuuugagaugauuugggauccgaacggauggacugggacagacaauaacuucucaauaaagcaagauaucguaggaauaaaugaguggucaggauauagcgggaguuuuguucagcauccagaacuaacagggcuggauuguauaagaccuugcuucuggguugaacuaaucagagggcgacccaaagagaacacaaucuggacuagcgggagcagcauauccuuuugugguguaaacagugacacuguggguuggucuuggccagacggugcugaguugccauuuaccauugacaaguaa

SEQ ID NO: 49201 - RNA, 1410 nt, Artificial Sequence; identical to SEQ ID NO: 48750
  derived and/or modified CDS sequence (wt) from neuraminidase__InfluenzaA__ACU31178

SEQ ID NO: 49202 - RNA, 1410 nt, Artificial Sequence; identical to SEQ ID NO: 48761
  derived and/or modified CDS sequence (wt) from neuraminidase__InfluenzaA__ACU31179

SEQ ID NO: 49203 - RNA, 1410 nt, Artificial Sequence; identical to SEQ ID NO: 48761
  derived and/or modified CDS sequence (wt) from neuraminidase__InfluenzaA__ACU31180

SEQ ID NO: 49204 - RNA, 1410 nt, Artificial Sequence; identical to SEQ ID NO: 48749
  derived and/or modified CDS sequence (wt) from neuraminidase__InfluenzaA__ACU31181

SEQ ID NO: 49205 - RNA, 1410 nt, Artificial Sequence; identical to SEQ ID NO: 48750
  derived and/or modified CDS sequence (wt) from neuraminidase__InfluenzaA__ACU31182

SEQ ID NO: 49206 - RNA, 1410 nt, Artificial Sequence; identical to SEQ ID NO: 48780
  derived and/or modified CDS sequence (wt) from neuraminidase__InfluenzaA__ACU31183

SEQ ID NO: 49207 - RNA, 1410 nt, Artificial Sequence; identical to SEQ ID NO: 48953
  derived and/or modified CDS sequence (wt) from neuraminidase__InfluenzaA__ACU31184

SEQ ID NO: 49208 - RNA, 1410 nt, Artificial Sequence; identical to SEQ ID NO: 49114
  derived and/or modified CDS sequence (wt) from neuraminidase__InfluenzaA__ACU31185

SEQ ID NO: 49209 - RNA, 1410 nt, Artificial Sequence; identical to SEQ ID NO: 49114
  derived and/or modified CDS sequence (wt) from neuraminidase__InfluenzaA__ACU31186

SEQ ID NO: 49210 - RNA, 1410 nt, Artificial Sequence; identical to SEQ ID NO: 49114
  derived and/or modified CDS sequence (wt) from neuraminidase__InfluenzaA__ACU31187

SEQ ID NO: 49211 - RNA, 1410 nt, Artificial Sequence; identical to SEQ ID NO: 48761
  derived and/or modified CDS sequence (wt) from neuraminidase__InfluenzaA__ACU31188

SEQ ID NO: 49212 - RNA, 1350 nt, Artificial Sequence
  derived and/or modified CDS sequence (wt) from neuraminidase__InfluenzaA__ACU46645
augaauccaaauaagaagauaauaaccaucggaucaaucuguaugguaacuggaaugguuagcuuaauguuacaaauugggaacuugaucucaauaugggucagucauucaauucacacagggaaucaacacaaagcugaaccaaucagcaauacuaaucuucuuacugagaaaacuguggcuucaguaaaauuagcgggcaauucaucucuuugccccauuaauggaugggcuguauacaguaaggacaacaguauaaggaucgguuccaagggggauguguuuguuauaagagagccauucaucucaugcucccacuuggaaugcagaacuuucuuuuugacucagggagccuugcugaaugacaagcacuccaaugggacugucaaagacagaaguccucacagaacauuaaugagugguccugugggugaggcucccuccccauacaacucaagguuugaguauguugcuuggucagcaagugcuugccaugaucgcaccaguagauugacaauuggaauuucuggcccagacaauggggcuguggcuguauugaaauacaauggcauaauaacagacacuaucaagaguuggaggaauaacauacugagaacucaagagucugaaugugcauguguaaauggcucuugcuuuacuguaaugacugacggaccaaguaauggucaggcaucacauaagaucuucaaaauggaaaaaggaaaagugguuaaaucagucgaauuggaugcucccaauuaucacuaugaggaaugcuccuguuauccugaugccggcgaaaucacaugugugugcagggauaauuggcauggcucaaaucggccauggguaucuuucaaucaaaauuuggaguaucaaauaggauauauaugcaguggaguuuucggagacaauccacgccccaaugauggagcagguaguugugguccgguguccucuaacggggcauaugggguaaaaggguuuucauuuaaauacggcaauggugucuggaucgggagaacaaaaagcacuaauuccaggagcggcuuugaaaugauuugggauccaaauggguggacugaaacggacaguagcuuuucagugaaacaagauaucguagcaauaacugauuggucaggauauagcgggaguuuuguccagcauccagaacugacaggacuagauugcauaagaccuuguuucuggguugaguugaucagagggcggcccaaagagagcacaauuuggacuagugggagcagcauaucuuuuugugguguaaauagugacacuguggguuggucuuggccagacggugcugaguugccauucaccauugacaaguag

SEQ ID NO: 49213 - RNA, 1410 nt, Artificial Sequence
  derived and/or modified CDS sequence (wt) from neuraminidase__InfluenzaA__ACU56927
augaauccaaaccaaaagauaauaaccauugguucggucuguaugacaauuggaauggcuaacuuaauauuacaaauuggaaacauaaucucaauauggauuagccacucaauucaacuugggaaucaaaaucagauugaaacaugcaaucaaagcgucauuacuuaugaaaacaacacuuggguaaaucagacauauguuaacaucagcaacaccaacuuugcugcuggacagucagugguuuccgugaaauuagcgggcaauuccucucucugcccuguuaguggaugggcuauauacaguaaagacaacaguauaagaaucgguuccaagggggauguguuugucauaagggaaccauucauaucaugcucccccuuggaaugcagaaccuucuucuugacucaaggggccuugcuaaaugacaaacauuccaauggaaccauuaaagacaggagcccauaucgaacccuaaugagcuguccuauuggugaaguucccucuccauacaacucaagauuugagucagucgcuuggucagcaagugcuugucaugauggcaucaauuggcuaacaauuggaauuucuggcccagacaauggggcaguggcuguguuaaaguacaacggcauaauaacagacacuaucaagaguuggagaaacaauauauugagaacacaagagucugaaugugcauguguaaaugguucuugcuuuacuguaaugaccgauggaccaaguaauggacaggccucauacaagaucuucagaauagauaagggaaagauagucaaaucagucgaaaugaaugccccuaauuaucacuaugaggaaugcuccuguuauccugauucuagugaaaucacaugugugugcagggauaacuggcauggcucgaaucgaccgugggugucuuucaaccagaaucuggaauaucagauaggauauauaugcagugggauuuucggagacaauccacgcccuaaugauaagacaggcaguugugguccaguaucgucuaauggagcaaauggaguaaaaggauuuucauucaaauacggcaaugguguuuggauagggagaacuaaaagcauuaguucaagaaacgguuuugagaugauuugggauccgaacggauggacugggacagacaauaacuucucaauaaagcaagauaucguaggaauaaaugaguggucaggauauagcgggaguuuuguccagcauccagaacuaacagggcuggauuguauaagaccuugcuucuggguugaacuaaucagagggcgacccaaagagaacacaaucuggacuagcgggagcagcauauccuuuugugguguaaacagugacacuguggguuggucuuggccagacggugcugaguugccauuuaccauugacaaguaa

SEQ ID NO: 49214 - RNA, 1410 nt, Artificial Sequence
  derived and/or modified CDS sequence (wt) from neuraminidase__InfluenzaA__ACU56934
augaauccaaaccaaaagauaauaaccauugguucggucuguaugacaauuggaauggcuaacuuaauauuacaaauuggaaacauaaucucaauauggauuagccacucaauucaacuugggaaucaaaaucagauugaaacaugcaaucaaagcgucauuacuuaugaaaacaacacuuggguaaaucagacauauguuaacaucagcaacaccaacuuugcugcuggacagucagugguuuccgugaaauuagcgggcaauuccucucucugcccuguuaguggaugggcuauauacaguaaagacaacaguauaagaaucgguuccaagggggauguguuugucauaagggaaccauucauaucaugcucccccuuggaaugcagaaccuucuucuugacucaaggggccuugcuaaaugacaaacauuccaauggaaccauuaaagacaggagcccauaucgaacccuaaugagcuguccuauuggugaaguucccucuccauacaacucaagauuugagucagucgcuuggucagcaagugcuugucaugauggcaucaauuggcuaacaauuggaauuucuggcccagacaauggggcaguggcuguguuaaaguacaacggcauaauaacagacacuaucaagaguuggagaaacaauauauugagaacacaagagucugaaugugcauguguaaaugguucuugcuuuacuguaaugaccgauggaccaaguaauggacaggccucauacaagaucuucagaauagaaaagggaaagauagucaaaucagucgaaaugaaugccccuaauuaucacuaugaggaaugcuccuguuauccugauucuagugaaaucacauguguaugcagggauaacuggcauggcucgaaucgaccgugggugucuuucaaccagaaucuggaauaucagauaggauacauaugcagugggauuuucggagacaauccacgcccuaaugauaagacaggcaguugugguccaguaucgucuaauggagcaaauggaguaaaaggauuuucauucaaauacggcaaugguguuuggauagggagaacuaaaagcauuaguucaagaaacgguuuugagaugauuugggauccgaacggauggacugggacagacaauaacuucucaauaaagcaagauaucguaggaauaaaugaguggucaggauauagcgggaguuuuguucagcauccagaacuaacagggcuggauuguauaagaccuugcuucuggguugaacuaaucagagggcgacccaaagagaacacaaucuggacuagcgggagcagcauauccuuuugugguguaaacagugacacuguggguuggucuuggccagacggugcugaguugccauuuaccauugacaaguaa

SEQ ID NO: 49215 - RNA, 1410 nt, Artificial Sequence
  derived and/or modified CDS sequence (wt) from neuraminidase__InfluenzaA__ACU64791
augaauccaaaccaaaagauaauaaccauugguucggucuguaugacaauuggaauggcuaacuuaauauuacaaauuggaaacauaaucucaauauggauuagccacucaauucaacuugggaaucaaaaucagauugaaacaugcaaucaaagcgucauuacuuaugaaaacaacacuuggguaaaucagacauauguuaacaucagcaacaccaacuuugcugcuggacagucagugguuuccgugaaauuagcgggcaauuccucucucugcccuguuaguggaugggcuauauacaguaaagacaacaguauaagaaucgguuccaagggggauguguuugucauaagggaaccauucauaucaugcucccccuuggaaugcagaaccuucuucuugacucaaggggccuugcuaaaugacaaacauuccaauggaaccauuaaagacaggagcccauaucgaacccuaaugagcuguccuauuggugaaguucccucuccauacaacucaagauuugagucagucgcuuggucagcaagugcuugucaugauggcaucaauuggcuaacaauuggaauuucuggcccagacaauggggcaguggcuguguuaaaguacaacggcauaauaacagacacuaucaagaguuggagaaacaauauauugagaacacaagagucugaaugugcauguguaaaugguucuugcuuuacuguaaugaccgauggaccaagugauggacaggccucauacaagaucuucagaauagaaaagggaaagauagucaaaucagucgaaaugaaugccccuaauuaucacuaugaggaaugcuccuguuauccugauucuagugaaaucacaugugugugcagggauaacuggcauggcucgaaucgaccguggguaucuuucaaccagaaucuggaauaucagauaggauacauaugcagugggauuuucggagacaauccacgcccuaaugauaagacaggcaguugugguccaguaucgucuaauggagcaaauggaguaaaaggauuuucauucaaauacggcaaugguguuuggauagggagaacuaaaagcauuaguucaagaaacgguuuugagaugauuugggauccgaacggauggacugggacagacaauaacuucucaauaaagcaagauaucguaggaauaaaugaguggucaggauauagcgggaguuuuguucagcauccagaacuaacagggcuggauuguauaagaccuugcuucuggguugaacuaaucagagggcgacccaaagagaacacaaucuggacuagcgggagcagcauauccuuuugugguguaaacagugacacuguggguuggucuuggccggacggugcugaguugccauuuaccauugacaaguaa

SEQ ID NO: 49216 - RNA, 1410 nt, Artificial Sequence
  derived and/or modified CDS sequence (wt) from neuraminidase__InfluenzaA__ACU64811
augaauccaaaccaaaagauaauaaccauugguucggucuguaugacaauuggaauggcuaacuuaauauuacaaauuggaaacauaaucucaauauggauuagccacucaauucaacuugggaaucaaaaucagauugaaacaugcaaucaaagcgucauuacuuaugaaaacaacacuuggguaaaucagacauauguuaacaucagcaacaccaacuuugcugcuggacagucaaugguuuccgugaaauuagcgggcaauuccucucucugcccuguuaguggaugggcuauauacaguaaagacaacaguguaagaaucgguuccaagggggauguguuuaucauaagggaaccauucauaucaugcucccccuuggaaugcagaaccuucuucuugacucaaggggccuugcuaaaugacaaacauuccaauggaaccauuaaagacaggagcccauaucgaacccuaaugagcuguccuauuggugaaguucccucuccauacaacucaagauuugagucagucgcuuggucagcaagugcuugucaugauggcaucaauuggcuaacaauuggaauuucuggcccagacaauggggcaguggcuguguuaaaguacaacggcauaauaacagacacuaucaagaguuggagaaacaauauauugagaacacaagagucugaaugugcauguguaaaugguucuugcuuuacuguaaugaccgauggaccaaguaauggacaggccucauacaagaucuucagaauagaaaagggaaagauagucaaaucagucgaaaugaaugcuccuaauuaucacuaugaggaaugcuccuguuauccugauucuagugaaaucacaugugugugcagggauaacuggcauggcucgaaucgaccgugggugucuuucaaccagaaucuggaauaucagauaggauacauaugcagugggauuuucggagacaauccacgcccuaaugauaagacaggcaguugugguccaguaucgucuaauggagcaaauggaguaaaaggauuuucauucaaauacggcaaugguguuuggauagggagaacuaaaagcauuaguucaagaaacgguuuugagaugauuugggauccgaacggauggacugggacagacaauaacuucucaauaaagcaagauaucguaggaauaaaugaguggucaggauauagcgggaguuuuguucagcauccagaacuaacagggcuggauuguauaagaccuugcuucuggguugaacuaaucagagggcgacccaaagagaacacaaucuggacuagcgggagcagcauaucuuuuugugguguaaacagugacacuguggguuggucuuggccagacggugcugaguugccauuuaccauugacaaguaa

SEQ ID NO: 49217 - RNA, 1410 nt, Artificial Sequence; identical to SEQ ID NO: 48516
  derived and/or modified CDS sequence (wt) from neuraminidase__InfluenzaA__ACU79885

SEQ ID NO: 49218 - RNA, 1410 nt, Artificial Sequence
  derived and/or modified CDS sequence (wt) from neuraminidase__InfluenzaA__ACU79896
augaauccaaaucaaaagauaauaacaauuggcucugucucucucaccauugcaacaguaugcuuccucaugcagauugccauccugguaacuacuguaacauugcauuuuaagcaauaugagugcgacucccccgcgagcaaccaaguaaugccgugugaaccaauaauaauagaaaggaacauaacagagauaguguauuugaauaacaccaccauagagaaagagauaugccccaaaguaguggaauacagaaauuggucaaagccgcaaugucaaauuacaggauuugcaccuuuuucuaaggacaauucaauccggcuuucugcugguggggacauuugggugacgagagaaccuuaugugucaugcgaucauggcaaguguuaucaauuugcacucgggcaggggaccacacuagacaacaaacauucaaaugacacaauacaugauagaaucccucaucgaacccuauuaaugaaugaguuggguguuccauuucauuuaggaaccaggcaaguguguauagcaugguccagcucaaguugucacgauggaaaagcauggcugcauguuuguaucacuggggaugacaaaaaugcaacugcuagcuucauuuaugacgggaggcuuguggacaguauugguucauggucccaaaauauccucagaacccaggagucggaaugcguuuguaucaaugggacuugcacaguaguaaugacugauggaagugcuucaggaagagccgauacuagaauacuauucauugaagaggggaaaauuguccauauuagcccauugucaggaagugcucagcauguagaagaguguuccuguuauccuagauauccuggcgucagauguaucugcagagacaacuggaaaggcucuaauaggcccgucguagacauaaauauggaagauuauagcauugauuccaguuaugugugcucagggcuuguuggcgacacaccuagaaacgacgacagaucuagcaauagcaauugcaggaauccuaacaaugagagagggaaucaaggagugaaaggcugggccuuugacaauggagaugacguguggaugggaagaacgaucagcaaggauuuacgcucagguuaugaaacuuucaaagucauuggugguugguccacaccuaauuccaaaucgcagaucaauagacaagucauaguugacagcgauaaucggucagguuacucugguauuuucucuguugagggcaaaagcugcaucaauaggugcuuuuauguggaguugauaaggggaaggaaacaggagacuagagugugguggaccucaaacaguauuguuguguuuuguggcacuucagguaccuauggaacaggcucauggccugauggggcgaacaucaauuucaugccuauauaa

SEQ ID NO: 49219 - RNA, 1410 nt, Artificial Sequence; identical to SEQ ID NO: 46107
  derived and/or modified CDS sequence (wt) from neuraminidase__InfluenzaA__ACU79918

SEQ ID NO: 49220 - RNA, 1410 nt, Artificial Sequence; identical to SEQ ID NO: 46119
  derived and/or modified CDS sequence (wt) from neuraminidase__InfluenzaA__ACU79929

SEQ ID NO: 49221 - RNA, 1413 nt, Artificial Sequence
  derived and/or modified CDS sequence (wt) from neuraminidase__InfluenzaA__ACU79940
augaauccaaaucaaaaaauaauaaccauuggaucaaucaguauaguaaucgggauaauuagucuaauguugcaaauaggaaauauuauuucaauaugggcuagucacucaauccaaacuggaagucaaaaccacacuggaauaugcaaccaaagaaucaucacauaugaaaauagcaccugggugaaucacacauauguuaauauuaacaacacuaauguuguugcuggaaaggacaaaacuucagugacauuggccggcaauucaucacuuuguucuaucaguggaugggcuauauacacaaaagacaacagcauaagaauugguuccaaaggagauguuuuugucauaagagagccuuuuauaucauguucucacuuggaaugcagaaccuuuuuucugacccaaggugcucuauuaaaugacaaacauucaaaugggaccguuaaggacagaaguccuuauagggccuuaaugagcuguccucuaggcgaagcuccgucuccauauaauucaaaguuugaaucaguugcuuggucagcaagcgcaugucaugauggcaugggcugguuaacaaucggaauuucugguccagauaauggagcaguggcuguacuaaaauacaacggcauaauaacugaaaccauaaaaaguuggaaaaagcgaauauuaagaacacaagagucugaaugugucugugugaacgggucauguuuuaccauaaugaccgauggcccgaguaauggggccgccucguacaaaaucuucaagauugagaaggggaagguuacuaaaucaauagaguugaaugcacccaauucucauuaugaggaauguuccuguuacccagacacuggcacagugauguguguaugcagggacaauuggcacgguucaaaucgaccuugggugucuuuuaaucaaaaccuggauuaucaaauaggauacaucugcagugggguguucggugacaauccgcgucccaaagauggagagggcagcuguaauccagugacuguugauggagcagacggaguaaagggguuuucauacagauaugguaaugguguuuggauaggaaggacuaaaaguaacagacucagaaagggauuugagaugauuugggauccuaauggauggacagauaccgacagugauuucucagugaaacaggauguuguggcaaugacugauuggucaggguacagcggaaguuucguucaacauccugagcuaacaggauuggacuguauaagaccuugcuucuggguugaauuagucagaggacggccuagagaaaauacaacaaucuggacuagugggagcagcauuucuuuuuguggcguaaauagugauacugcaaacuggucuuggccagacggugcugaguugccauucaccauugacaaguag

SEQ ID NO: 49222 - RNA, 1410 nt, Artificial Sequence
  derived and/or modified CDS sequence (wt) from neuraminidase__InfluenzaA__ACU79951
augaauccaaaucaaaagauaauaacaauuggcucugucucucucaccauugaaacaguaugcuuccucaugcagauugccauccuggcaacuacugugacauugcauuuuaagcaacaugagugcgacucccccgcgagcaaccaaguaaugccaugugaaccaauaauaauagaaaggaacauaacagagauaguguauuugaauaacaccaccauagagaaagagauuugccccgaaguaguggaauacagaaauuggucaaagccgcaaugucaaauuacaggauuugcaccuuuuucuaaggacaauucaauccggcuuucugcugguggggacauuugggugacgagagaaccuuaugugucaugcgauccuggcaaguguuaucaauuugcacucgggcaggggaccacacuagacaacaaacauucaaauggcacaauacaugauagaaucccucaucgaacccuauuaaugaaugaguuggguguuccauuucauuuaggaaccaaacaaguguguguagcaugguccagcucaaguugucacgauggaaaagcaugguugcauguuugugucacuggggaugauagaaaugcaacugcuagcuucauuuaugacgggaggcuuguggacaguauugguucauggucucaaaauauccucaggacccaggagucggaaugcguuuguaucaaugggacuugcacaguaguaaugacugauggaagugcaucaggaagagccgauacuagaauacuauucauuaaagaggggaaaauuguccauauuagcccauugucaggaagugcucagcauauagaggaguguuccuguuacccucgauauccugacgucagauguaucugcagagacaacuggaaaggcucuaauaggcccguuauagacauaaauauggaagauuauagcauugauuccaguuaugugugcucagggcuuguuggcgacacacccaggaacgacgacagcucuagcaauagcaauugcagggauccuaacaaugagagagggaauccaggagugaaaggcugggccuuugacaauggagaugauguauggaugggaagaacaaucagcaaagauucacgcucagguuaugaaacuuucaaagucauuggugguugguccacaccuaauuccaaaucgcaggucaauagacaggucauaguuggcaacaauaauuggucugguuacucugguauuuucucuguugagggcaaaagcugcaucaauaggugcuuuuauguggaguugauaaggggaaggccacaggagacuagaguaugguggaccucaaacaguauuguuguguuuuguggcacuucagguacuuauggaacaggcucauggccugauggggcgaacaucaauuucaugccuauauaa

SEQ ID NO: 49223 - RNA, 1410 nt, Artificial Sequence; identical to SEQ ID NO: 48615
  derived and/or modified CDS sequence (wt) from neuraminidase__InfluenzaA__ACU79973

SEQ ID NO: 49224 - RNA, 1413 nt, Artificial Sequence
  derived and/or modified CDS sequence (wt) from neuraminidase__InfluenzaA__ACU79984
augaacccaaaucaaaagauaauaaccauuggaucaaucaguauagcaaucggaauaauuagucuaauguugcaaauaggaaauauuauuucaauaugggcuagucacucaauccaaacuggaagucaaaacaacacuggaauaugcaaccaaagaaucaucacauaugaaaacagcaccugggugaaucacacauauguuaauauuaacaacacuaauguuguugcuggagaggacaaaacuucagugacauuggccggcaauucaucucuuuguucuaucaguggaugggcuauauacacaaaagacaacagcauaagaauuggcuccaaaggagauguuuuugucauaagagaaccuuucauaucauguucucacuuggaaugcagaaccuuuuuucugacccaaggcgcucuauuaaaugacaaacauucaaaugggaccguaaaggacagaaguccuuauagggccuuaaugagcuguccucuaggugaagcuccguccccauacaauucaaaguucgaaucaguugcauggucagcaagcgcaugccaugauggcaugggcugguuaacaaucggaauuucugguccagacaauggagcuguggcuguacuaaaauacaacggaauaauaacuggaaccauaaaaaguuggaaaaagcaaauauuaagaacacaagagucugaaugugucuguaugaacgggucauguuucaccauaaugaccgauggcccgaguaauaaggccgccucguacaaaauuuucaagaucgaaaaggggaagguuacuaaaucaauagaguugaaugcacccaauuuucauuaugaggaauguuccuguuacccagacacuggcauagugauguguguaugcagggacaacuggcaugguucaaaucgaccuugggugucuuuuaaucaaaacuuggauuaucaaauaggauacaucugcaguggaguguuuggugacaauccgcgucccgaagauggagagggcagcugcaauccagugacuguugauggagcaaacggaguaaaaggguuuucauacaaauaugauaaugguguuuggauaggaaggaccaaaaguaacagacuuagaaagggguuugagaugauuugggauccuaauggauggacaaauaccgacagugauuucucagugaaacaggauguuguagcaauaacugauuggucaggguacagcggaaguuucguccaacauccugaguuaacaggauuggacuguauaagaccuugcuucuggguugaguuagucagagggcugccuagagaaaauacaacaaucuggacuagugggagcagcauuucuuuuuguggcguuaauagugauacugcaaacuggucuuggccagacggugcugaguugccguucaccauugacaaguag

SEQ ID NO: 49225 - RNA, 1410 nt, Artificial Sequence
  derived and/or modified CDS sequence (wt) from neuraminidase__InfluenzaA__ACU80006
augaauccaaaucaaaagauaauaacgauuggcucuguuucucucaccauuuccacaauaugcuucuucaugcaaauugccaucuugauaacuacuguaacauugcauuucaagcaauaugaauucaacucccccccaaacaaccaagugaugcugugugaaccaacaauaauagaaagaaacauaacagagauaguguaucugaccaacaccaccauagagaaggaaauaugccccaaacuagcagaauacagaaauuggucaaagccgcaaugugacauuacaggauuugcaccuuuuucuaaggacaauucgauuaggcuuuccgcugguggggacaucugggugacaagagaaccuuaugugucaugcgauccugacaaguguuaucaauuugcccuuggacagggaacaacacuaaacaacgugcauucaaauaacacaguacgugauaggaccccuuaucggacccuauugaugaaugaguuagguguuccuuuucaucuggggaccaagcaagugugcauagcaugguccagcucaaguugucacgauggaaaagcauggcugcauguuuguauaacgggggaugauaaaaaugcaacugcuagcuucauuuacaaugggaggcuuguagauaguguuguuucaugguccaaagaaauccucaggacccaggagucagaaugcguuuguaucaauggaacuuguacaguaguaaugacugaugggagugcuucaggaaaagcugauacuaaaauacuauucauugaggaggggaaaaucguucauacuagcacauugucaggaagugcucagcaugucgaggagugcuccugcuauccucgauauccuggugucagaugugucugcagagacaacuggaaaggcuccaauaggcccaucguagauauaaacauaaaagaucauagcauuguuuccaguuauguguguucaggacuuguuggagacacacccagaaaaaacgacagcuccagcaguagccauuguuuggauccuaacaaugaagaagguggucauggagugaaaggcugggccuuugaugauggaaaugacguguggaugggaagaacgaucagcgagaagucacgcuuaggguaugaaaccuucaaagucauugaaggcugguccaacccuaaguccaaauugcagauaaauaggcaagucauaguugacagagguaauagguccgguuauucugguauuuucucuguugaaggcaaaagcugcaucaaucggugcuuuuauguggaguugauaaggggaagaaaagaggaaacugaagucuuguggaccucaaacaguauuguuguguuuuguggcaccucagguacauauggaacaggcucauggccugauggggcggacaucaaucucaugccuauauaa

SEQ ID NO: 49226 - RNA, 1410 nt, Artificial Sequence
  derived and/or modified CDS sequence (wt) from neuraminidase__InfluenzaA__ACU80017
augaauacaaaucaaagaauaauaaccauugggacaaucugucuaauaguuggaauaauuagucuauuauugcagauaggaaauauaaucuuguuauggaugagccauucaauucagacuggagaaaaaagccauccuaagguaugcaaccaaagugucauuaccuaugaaaacaacacaugggugaaccagacuuauguaaacauuagcaauaccaauauugcugcuggacagggugugacuccaauaauacuagccggcaauuccucucuuugcccaaucagugggugggcuauauacagcaaagacaauagcauaaggauugguuccaaaggagacauuuuugucaugagagagccauucauuucaugcucucacuuggaaugcagaaccuuuuuucugacccaaggcgcuuugcugaaugacaggcauucuaauggaaccgucaaggacaggaguccuuauagaaccuuaaugagcugccccaucggugaagcuccaucuccguacaauucaagguucgaaucaguugcuuggucagcaagugcaugccaugauggaaugggauggcuaacaaucgggauuuccgguccagauaauggagcaguggcuguuuuaaaauacaaugguauaauaacagauacaauaaaaaguuggagaaacaaaauauuaagaacacaagagucugaauguguuuguauaaacgguucguguuuuacuauaaugacugacggcccaagcaaugggcaagccucguacaaauuauucaaaauggagaaagggaagauuauuaggucaauugagcuggaugcaccuaauuaccacuaugaggaaugcuccuguuacccugauacaggcaaaguggugugugugugcagagacaauuggcaugcuucgaaucgaccaugggucucuuucgaucagaaucuugauuaucaaauaggguacauaugcagugggguuuucggugauaauccgcguucuaaugaugggaaaggcaauuguggcccaguacuuucuaauggagcaaauggagugaagggguuuucauuuagauauggcaaugguguuuggauaggaagaacuaaaaguaucagcucuagaaguggauuugagaugauuugggauccuaauggauggacagaaacugauaguaguuucucuaugaagcaagauauuauagcauuaacugauuggucgggauacaguggaaguuuuguccaacauccugaauuaacaggaaugaacugcauaaggccuuguuucuggguagaguuaaucagagggcaacccaaggagagcacaaucuggacuaguggaagcagcauuucuuucuguggcgugaacaguggcacugcaagcuggucauggccagacggagcugaucugccauucaccauugacaaguag

SEQ ID NO: 49227 - RNA, 1413 nt, Artificial Sequence
  derived and/or modified CDS sequence (wt) from neuraminidase__InfluenzaA__ACU80028
augaacccaaaucaaaagauaauaaccauuggaucaaucaguauagcaaucggaauaauuagucuaauguugcaaauaggaaauauuauuucaauaugggcuagucacucaauccaaacuggaagucaaaacaacacuggaauaugcaaccaaagaaucaucacauaugaaaacagcaccugggugaaucacacauauguuaauauuaacaacacuaauguuguugcuggagaggacaaaacuucagugacauuggcuggcaauucaucucuuuguucuaucaguggaugggcuauauacacaaaagacaacagcauaagaauuggcuccaaaggagauguuuuugucauaagagaaccuuucauaucauguucucacuuggaaugcagaaccuuuuuucugacccaaggcgcucuauuaaaugacaaacauucaaaugggaccguaaaggacagaaguccuuauagggccuuaaugagcuguccucuaggugaagcuccguccccauacaauucaaaguucgaaucaguugcauggucagcaagcgcaugccaugauggcaugggcugguuaacaaucggaauuucugguccagacaauggagcuguggcuguacuaaaauacaacggaauaauaacuggaaccauaaaaaguuggaaaaagcaaauauuaagaacacaagagucugaaugugucuguaugaacgggucauguuucaccauaaugaccgauggcccgaguaauaaggccgccucguacaaaauuuucaagaucgaaaaggggaagguuacuaaaucaauagaguugaaugcacccaauuuucauuaugaggaauguuccuguuacccagacacuggcauagugauguguguaugcagggacaacuggcaugguucaaaucgaccuugggugucuuuuaaucaaaacuuggauuaucaaauaggauacaucugcaguggaguguucggugacaauccgcgucccgaagauggagagggcagcugcaauccagugacuguugauggagcaaacggaguaaaaggguuuucauacaaauaugauaaugguguuuggauaggaaggaccaaaaguaacagacuuagaaagggguuugagaugauuugggauccuaauggauggacaaauaccgacagugauuucucagugaaacaggauguuguagcaauaacugauuggucaggguacagcggaaguuucguccaacauccugaguuaacaggauuggacuguauaagaccuugcuucuggguugaguuagucagagggcugccuagagaaaauacaacaaucuggacuagugggagcagcauuucuuuuuguggcguuaauagugauacugcaaacuggucuuggccagacggugcugaguugccguucaccauugacaaguag

SEQ ID NO: 49228 - RNA, 1410 nt, Artificial Sequence; identical to SEQ ID NO: 48611
  derived and/or modified CDS sequence (wt) from neuraminidase__InfluenzaA__ACU80039

SEQ ID NO: 49229 - RNA, 1413 nt, Artificial Sequence; identical to SEQ ID NO: 48728
  derived and/or modified CDS sequence (wt) from neuraminidase__InfluenzaA__ACU80050

SEQ ID NO: 49230 - RNA, 1410 nt, Artificial Sequence; identical to SEQ ID NO: 49161
  derived and/or modified CDS sequence (wt) from neuraminidase__InfluenzaA__ACU80061

SEQ ID NO: 49231 - RNA, 1413 nt, Artificial Sequence; identical to SEQ ID NO: 48669
  derived and/or modified CDS sequence (wt) from neuraminidase__InfluenzaA__ACU80072

SEQ ID NO: 49232 - RNA, 1413 nt, Artificial Sequence; identical to SEQ ID NO: 48744
  derived and/or modified CDS sequence (wt) from neuraminidase__InfluenzaA__ACU80094

SEQ ID NO: 49233 - RNA, 1410 nt, Artificial Sequence
  derived and/or modified CDS sequence (wt) from neuraminidase__InfluenzaA__ACU80105
augaauccaaaucaaaagauaauaacgauuggcucuguuucucucaccauuuccacaauaugcuucuucaugcaaauugccaucuugauaacuacuguaacauugcauuucaagcaauaugaauucaacuccuccccaaacaaccaagugaugcugugugaaccaacaauaauagaaagaaacauaacagagauaguguaucugaccaacaccaccauagagaaggaaauaugccccaaacuagcagaauacagaaauuggucaaagccgcaaugugacauuacaggauuugcaccuuuuucuaaggacaauucgauuaggcuuuccgcugguggggacaucugggugacaagagaaccuuaugugucaugcgauccugacaaguguuaucaauuugcccuuggacagggaacaacacuaaacaacgugcauucaaauaacacaguacgugauaggaccccuuaucggacccuauugaugaaugaguuagguguuccuuuucaucuggggaccaagcaagucugcauagcaugguccagcucaaguugucacgauggaaaagcauggcugcauguuuguauaacaggggaugauaaaaaugcaacugcuagcuucauuuacaaugggaggcuuguagauaguauuguuucaugguccaaagaaauccucaggacccaggagucagaaugcguuuguaucaauggaacuuguacaguaguaaugacugaugggagugcuucaggaaaagcugauacuaaaauacuauucauugaggaggggaaaaucguucauacuagcacauugucaggaagugcucagcaugucgaggagugcuccugcuauccucgauauccuggugucagaugugucugcagagacaacuggaaaggcuccaauaggcccaucguagauauaaacauaaaggaucauagcauuguuuccaguuauguguguucaggacuuguuggagacacacccagaaaaaacgacagcuccagcaguagccauuguuuggauccuaacaaugaagaagguggucauggagugaaaggcugggccuuugaugauggaaaugacguguggaugggaagaacgaucagcgagaagucacgcuuaggguaugaaaccuucaaagucauugaaggcugguccaauccuaaguccaaauugcagauaaauaggcaagucauaguugacagagguaauagguccgguuauucugguauuuucucuguugaaggcaaaagcugcaucaaucggugcuuuuauguggaguugauaaggggaagaaaagaggaaacugaagucuuguggaccucaaacaguauuguuguguuuuguggcaccucagguacauauggaacaggcucauggccugauggggcggacaucaaucucaugccuauauaa

SEQ ID NO: 49234 - RNA, 1410 nt, Artificial Sequence; identical to SEQ ID NO: 48727
  derived and/or modified CDS sequence (wt) from neuraminidase__InfluenzaA__ACU80127

SEQ ID NO: 49235 - RNA, 1410 nt, Artificial Sequence; identical to SEQ ID NO: 48727
  derived and/or modified CDS sequence (wt) from neuraminidase__InfluenzaA__ACU80138

SEQ ID NO: 49236 - RNA, 1410 nt, Artificial Sequence; identical to SEQ ID NO: 48611
  derived and/or modified CDS sequence (wt) from neuraminidase__InfluenzaA__ACU80160

SEQ ID NO: 49237 - RNA, 1413 nt, Artificial Sequence; identical to SEQ ID NO: 49227
  derived and/or modified CDS sequence (wt) from neuraminidase__InfluenzaA__ACU80171

SEQ ID NO: 49238 - RNA, 1410 nt, Artificial Sequence
  derived and/or modified CDS sequence (wt) from neuraminidase__InfluenzaA__ACU80182
augaauccaaaucaaaagauaauaacgauuggcucuguuucucucaccauuuccacaauaugcuucuucaugcaaauugccaucuugauaacuacuguaacauugcauuucaagcaauaugaauucaacucccccccaaacaaccaagugaugcugugugaaccaacaauaauagaaagaaacauaacagagauaguguaucugaccaacaccaccauagagaaggaaauaugccccaaacuagcagaauacagaaauuggucaaagccgcaaugugacauuacaggauuugcaccuuuuucuaaggacaauucgauuaggcuuuccgcugguggggauaucugggugacaagagaaccuuaugugucaugcgauccugacaaguguuaucaauuugcccuuggacagggaacaacacuaaacaacgugcauucaaaugacacaguacgugauaggaccccuuaucggacccuauugaugaaugaguuagguguuccuuuucaucuggggaccaagcaagugugcauagcaugguccagcucaaguugucacgauggaaaagcauggcugcauguuuguauaacgggggaugauaaaaaugcaacugcuagcuucauuuacaaugggaggcuuguagauaguguuguuucaugguccaaagaaauccucaggacccaggagucagaaugcguuuguaucaauggaacuuguacaguaguaaugacugaugggagugcuucaggaaaagcugauacuaaaauacuauucauugaggaggggaaaaucguucauacuagcacauugucaggaagugcucagcaugucgaggagugcuccugcuauccucgauauccuggugucagaugugucugcagagacaacuggaaaggcuccaauaggcccaucguagauauaaacauaaaggaucauagcauuguuuccaguuauguguguucaggacuuguuggagacacacccagaaaaaacgacagcuccagcaguagccauuguuuggauccuaacaaugaagaagguggucauggagugaaaggcugggccuuugaugauggaaaugacguguggaugggaagaacgaucagcgagaagucacgcuuaggguaugaaaccuucaaagucauugaaggcugguccaacccuaaguccaaauugcagauaaauaggcaagucauaguugacagagguaauagguccgguuauucugguauuuucucuguugaaggcaaaagcugcaucaaucggugcuuuuauguggaguugauaaggggaagaaaagaggaaacugaagucuuguggaccucaaacaguauuguuguguuuuguggcaccucagguacauauggaacaggcucauggccugauggggcggacaucaaucucaugccuauauaa

SEQ ID NO: 49239 - RNA, 1410 nt, Artificial Sequence
  derived and/or modified CDS sequence (wt) from neuraminidase__InfluenzaA__ACU80193
augaauccaaaucaaaagauaauaacgauuggcucuguuucucucaccauuuccacaauaugcuucuucaugcaaacugccaucuugauaacuacuguaacauugcauuucaagcaauaugaauucaacucccccccaaacaaccaagugaugcugugugaaccaacaauaauagaaagaaacauaacagagauaguguaucugaccaacaccaccauagagaaggaaauaugccccaaacuagcagaauacagaaauuggucaaagccgcaaugugacauuacaggauuugcaccuuuuucuaaggacaauucgauuaggcuuuccgcugguggggacaucugggugacaagagaaccuuaugugucaugcgauccugacaaguguuaucaauuugcccucggacagggaacaacacuaaacaacgugcauucaaaugacacaguacgugauaggaccccuuaucggacccuauugaugaaugaguuagguguuccuuuucaucuggggaccaagcaagugugcauagcaugguccagcucaaguugucacgauggaaaagcauggcugcauguuuguauaacgggggaugauaaaaaugcaacugcuagcuucauuuacaaugggaggcuuguagauaguauuguuucaugguccaaagaaauucucaggacccaggagucagagugcgucuguaucaauggaacuuguacaguaguaaugacugaugggagugcuucaggaaaagcugauacuaaaauacuauucauugaggaggggaaaaucguucauacuagcacauugucaggaagugcucagcaugucgaggagugcuccugcuauccucgauauccuggugucagaugugucugcagagacaacuggaaaggcuccaauaggcccaucguagauauaaacauaaaggaucauagcauuguuuccaguuauguguguucaggacuuguuggagacacacccagaaaaaacgacagcuccagcaguagccauuguuuggauccuaacaaugaagaagguggucauggagugaaaggcugggccuuugaugauggaaaugacguguggaugggaagaacgaucagcgagaagucacgcuuaggguaugaaaccuucaaagucauugaaggcugguccaacccuaaguccaaauugcagauaaauaggcaagucauaguugacagaggugauagguccgguuauucugguauuuucucuguugaaggcaaaagcugcaucaaucggugcuuuuauguggaguugauaaggggaagaaaagaggaaacugaagucuuguggaccucaaacaguauuguuguguuuuguggcaccucagguacauauggaacaggcucauggccugauggggcggacaucaaucucaugccuauauaa

SEQ ID NO: 49240 - RNA, 1410 nt, Artificial Sequence; identical to SEQ ID NO: 48526
  derived and/or modified CDS sequence (wt) from neuraminidase__InfluenzaA__ACU80204

SEQ ID NO: 49241 - RNA, 1413 nt, Artificial Sequence
  derived and/or modified CDS sequence (wt) from neuraminidase__InfluenzaA__ACU80237
augaacccaaaucaaaagauaauaaccauuggaucaaucaguauagcaaucggaauaauuagucuaauguugcaaauaggaaauauuauuucaauaugggcuagucacucaauccaaacuggaaaucaaaacaacacuggaauaugcaaccaaagaaucaucacauaugaaaacagcaccugggugaaucacacauauguuaauauuaacaacacuaauguuguugcuggagaggacaaaacuucagugacauuggcuggcaauucaucucuuuguucuaucaguggaugggcuauauacacaaaagacaacagcauaagaauuggcuccaaaggagauguuuuugucauaagagaaccuuucauaucauguucucacuuggaaugcagaaccuuuuuucugacccaaggcgcucuauuaaaugacaaacauucaaaugggaccguaaaggacagaaguccuuauagggccuuaaugagcuguccucuaggugaagcuccguccccauacaauucgaaguucgaaucaguugcauggucagcaagcgcaugccaugauggcaugggcugguuaacaaucggaauuucugguccagacaauggagcuguggcuguacuaaaauacaacggaauaauaacuggaaccauaaaaaguuggaaaaagcaaauauuaagaacacaagagucugaaugugucuguaugaacgggucauguuucaccauaaugaccgauggcccgaguaauaaggccgccucguacaaaauuuucaagaucgaaaaggggaagguuacuaaaucaauagaguugaaugcacccaauuuucauuaugaggaauguuccuguuacccagacacuggcauagugauguguguaugcagggacaacuggcaugguucaaaucgaccuugggugucuuuuaaucaaaacuuggauuaucaaauaggauacaucugcaguggaguguucggugacaauccgcgucccgaagauggagagggcagcugcaauccagugacuguugauggagcaaacggaguaaaaggguuuucauacaaauaugauaaugguguuuggauaggaaggaccaaaaguaacagacuuagaaagggguuugagaugauuugggauccuaauggauggacaaauaccgacagugauuucucagugaaacaggauguuguagcaauaacugauuggucaggguacagcggaaguuucguccaacauccugaguuaacaggauuggacuguauaagaccuugcuucuggguugaguuagucagagggcugccuagagaaaauacaacaaucuggacuagugggagcagcauuucuuuuuguggcguuaauagugauacugcaaacuggucuuggccagacggugcugaguugccguucaccauugacaaguag

SEQ ID NO: 49242 - RNA, 1410 nt, Artificial Sequence; identical to SEQ ID NO: 48615
  derived and/or modified CDS sequence (wt) from neuraminidase__InfluenzaA__ACU80248

SEQ ID NO: 49243 - RNA, 1410 nt, Artificial Sequence; identical to SEQ ID NO: 48727
  derived and/or modified CDS sequence (wt) from neuraminidase__InfluenzaA__ACU80259

SEQ ID NO: 49244 - RNA, 1413 nt, Artificial Sequence
  derived and/or modified CDS sequence (wt) from neuraminidase__InfluenzaA__ACU80270
augaacccaaaucaaaagauaauaaccauuggaucaaucaguauagcaaucggaauaauuagucuaauguugcaaauaggaaauauuauuucaauaugggcuagucacucaauccaaacuggaagucaaaacaacacuggaauaugcaaccaaagaaucaucacauaugaaaacagcaccugggugaaucacacauauguuaauauuaacaacacuaauguuguugcuggagaggacaaaacuucagugacauuggccggcaauucaucucuuuguucuaucaguggaugggcuauauacacaaaagacaacagcauaagaauuggcuccaaaggagauguuuuugucauaagagaaccuuucauaucauguucucacuuggaaugcagaaccuuuuuucugacccaaggcgcucuauuaaaugacaaacauucaaaugggaccguaaaggacagaaguccuuauagggccuuaaugagcuguccucuaggugaagcuccguccccauacaauucaaaguucgaaucaguugcauggucagcaagcgcaugccaugauggcaugggcugguuaacaaucggaauuucugguccagacaauggagcuguggcuguacuaaaauacaacggaauaauaacuggaaccauaaaaaguuggaaaaagcaaauauuaagaacacaagagucugaaugugucuguaugaacgggucauguuucaccauaaugaccgauggcccgaguaauaaggccgccucguacaaaauuuucaagaucgaaaaggggaagguuacuaaaucaauagaguugaaugcacccaauuuucauuaugaggaauguuccuguuacccagacacuagcauagugauguguguaugcagggacaacuggcaugguucaaaucgaccuugggugucuuuuaaucaaaacuuggauuaucaaauaggauacaucugcaguggaguguuuggugacaauccgcgucccgaagauggagagggcagcugcaauccagugacuguugauggagcaaacggaguaaaaggauuuucauacaaauaugauaaugguguuuggauaggaaggaccaaaaguaacagacuuagaaagggguuugagaugauuugggauccuaauggauggacaaauaccgacagugauuucucagugaaacaggauguuguagcaauaacugauuggucaggguacaguggaaguuucguccaacauccugaguuaacaggauuggacuguauaagaccuugcuucuggguugaguuagucagagggcugccuagagaaaauacaacaaucuggacuagugggagcagcauuucuuuuuguggcguuaauagugauacugcaaacuggucuuggccagacggugcugaguugccguucaccauugacaaguag

SEQ ID NO: 49245 - RNA, 1413 nt, Artificial Sequence
  derived and/or modified CDS sequence (wt) from neuraminidase__InfluenzaA__ACU80281
augaaccaaaaucaaaagauaauaaccauuggaucaaucaguauagcaaucggaauaauuagucuaauguugcaaauaggaaauauuauuucaauaugggcuagucacucaauccaaacuggaagucaaaacaacacuggaauaugcaaccaaagaaucaucacauaugaaaacagcaccugggugaaucacacauauguuaauauuaacaacacuaauguuguugcuggagaggacaaaacuucagugacauuggcuggcaauucaucucuuuguucuaucaguggaugggcuauauacacaaaagacaacagcauaagaauuggcuccaaaggagauguuuuugucauaagagaaccuuucauaucauguucucacuuggaaugcagaaccuuuuuucugacccaaggcgcucuauuaaaugacaaacauucaaaugggaccguaaaggacagaaguccuuauagggccuuaaugagcuguccucuaggugaagcuccguccccauacaauucaaaguucgaaucaguugcauggucagcaagcgcaugccaugauggcaugggcugguuaacaaucggaauuucugguccagacaauggagcuguggcuguacuaaaauacaacggaauaauaacuggaaccauaaaaaguuggaaaaagcaaauauuaagaacacaagagucugaaugugucuguaugaacgggucauguuucaccauaaugaccgauggcccgaguaauaaggccgccucguacaaaauuuucaagaucgaaaaggggaagguuacuaaaucaauagaguugaaugcacccaauuuucauuaugaggaauguuccuguuacccagacacuggcauagugauguguguaugcagggacaacuggcaugguucaaaucgaccuugggugucuuuuaaucaaaacuuggauuaucaaauaggauacaucugcaguggaguguucggugacaauccgcgucccgaagauggagagggcagcugcaauccagugacuguugauggagcaaacggaguaaaaggguuuucauacaaauaugauaaugguguuuggauaggaaggaccaaaaguaacagacuuagaaagggguuugagaugauuugggauccuaauggauggacaaauaccgacagugauuucucagugaaacaggauguuguagcaauaacugauuggucaggguacagcggaaguuucguccaacauccugaguuaacaggauuggacuguauaagaccuugcuucuggguugaguuagucagagggcugccuagagaaaauacaacaaucuggacuagugggagcagcauuucuuuuuguggcguuaauagugauacugcaaacuggucuuggccagacggugcugaguugccguucaccauugacaaguag

SEQ ID NO: 49246 - RNA, 1410 nt, Artificial Sequence
  derived and/or modified CDS sequence (wt) from neuraminidase__InfluenzaA__ACU80303
augaauccaaaucaaaagauaauaacgauuggcucuguuucucucaccauuuccacaauaugcuucuucaugcaaauugccaucuugauaacuacuguaacauugcauuucaagcaauaugaauucaacuccuccccaaacaaccaagugaugcugugugaaccaacaauaauagaaagaaacauaacagagauaguguaucugaccaacaccaccauagagaaggaaauaugccccaaacuagcagaauacagaaauuggucaaagccgcaaugugacauuacaggauuugcaccuuuuucuaaggacaauucgauuaggcuuuccgcugguggggacaucugggugacaagagaaccuuaugugucaugcgauccugacaaguguuaucaauuugcccuuggacagggaacaacacuaaacaacgugcauucaaauaacacaguacgugauaggaccccuuaucggacccuauugaugaaugaguuagguguuccuuuucaucuggggaccaagcaagucugcauagcaugguccagcucaaguugucacgauggaaaagcauggcugcauguuuguauaacgggggaugauaaaaaugcaacugcuagcuucauuuacaaugggaggcuuguagauaguauuguuucaugguccaaagaaauccucaggacccaggagucagaaugcguuuguaucaauggaacuuguacaguaguaaugacugaugggagugcuucaggaaaagcugauacuaaaauacuauucauugaggaggggaaaaucguucauacuagcacauugucaggaagugcucagcaugucgaggagugcuccugcuauccucgauauccuggugucagaugugucugcagagacaacuggaaaggcuccaauaggcccaucguagauauaaacauaaaggaucauagcauuguuuccaguuauguguguucaggacuuguuggagacacacccagaaaaaacgacagcuccagcaguagccauuguuuggauccuaacaaugaagaaggugguaauggagugaaaggcugggccuuugaugauggaaaugacguguggaugggaagaacgaucagcgagaagucacgcuuaggguaugaaaccuucaaagucauugaaggcugguccaacccuaaguccaaauugcagauaaauaggcaagucauaguugacagagguaauagguccgguuauucugguauuuucucuguugaaggcaaaagcugcaucaaucggugcuuuuauguggaguugauaaggggaagaaaagaggaaacugaagucuuguggaccucaaacaguauuguuguguuuuguggcaccucagguacauauggaacaggcucauggccugauggggcggacaucaaucucaugccuauauaa

SEQ ID NO: 49247 - RNA, 1410 nt, Artificial Sequence
  derived and/or modified CDS sequence (wt) from neuraminidase__InfluenzaA__ACU80314
augaauccaaaucaaaagauaauaacgauuggcucuguuucucucaccauuuccacaauaugcuucuucaugcaaauugccaucuugauaacuacuguaacauugcauuucaagcaauaugaauucaacuccuccccaaacaaccaagugaugcugugugaaccaacaauaauagaaagaaacauaacagagauaguguaucugaccaacaccaccauagagaaggaaauaugccccaaacuagcagaauacagaaauuggucaaagccgcaaugugacauuacaggauuugcaccuuuuucuaaggacaauucgauuaggcuuuccgcugguggggacaucugggugacaagagaaccuuaugugucaugcgauccugacaaguguuaucaauuugcccuuggacaggggacaacacuaaacaacgugcauucaaauaacacaguacgugauaggaccccuuaucggacccuauugaugaaugaguuagguguuccuuuucaucuggggaccaagcaagucugcauagcaugguccagcucaaguugucacgauggaaaagcauggcugcauguuuguauaacgggggaugauaaaaaugcaacugcuagcuucauuuacaaugggaggcuuguagauaguauuguuucaugguccaaagaaauccucaggacccaggagucagaaugcguuuguaucaauggaacuuguacaguaguaaugacugaugggagugcuucaggaaaagcugauacuaaaauacuauucauugaggaggggaaaaucguucauacuagcacauugucaggaagugcucagcaugucgaggagugcuccugcuauccucgauauccuggugucagaugugucugcagagacaacuggaaaggcuccaauaggcccaucguagauauaaacauaaaggaucauagcauuguuuccaguuauguguguucaggacuuguuggagacacacccagaaaaaacgacagcuccagcaguagccauuguuuggauccuaacaaugaagaagguggucauggagugaaaggcugggccuuugaugauggaaaugacguguggaugggaagaacgaucagcgagaagucacgcuuaggguaugaaaccuucaaagucauugaaggcugguccaauccuaaguccaaauugcagauaaauaggcaagucauaguugacagagguaauagguccgguuauucugguauuuucucuguugaaggcaaaagcugcaucaaucggugcuuuuauguggaguugauaaggggaagaaaagaggaaacugaagucuuguggaccucaaacaguauuguuguguuuuguggcaccucagguacauauggaacaggcucauggccugauggggcggacaucaaucucaugccuauauaa

SEQ ID NO: 49248 - RNA, 1410 nt, Artificial Sequence; identical to SEQ ID NO: 49233
  derived and/or modified CDS sequence (wt) from neuraminidase__InfluenzaA__ACU80325

SEQ ID NO: 49249 - RNA, 1410 nt, Artificial Sequence
  derived and/or modified CDS sequence (wt) from neuraminidase__InfluenzaA__ACU80336
augaauccaaaucaaaagauaauaacgauuggcucuguuucucucaccauuuccacaauaugcuucuucaugcaaauugccaucuugauaacuacuguaacauugcauuucaagcaauaugaauucaacucccccccaaacaaccaagugaugcugugugaaccaacaauaauagaaagaaacauaacagagauaguguaucugaccaacaccaccauagagaaggaaauaugccccaaacuagcagaauacagaaauuggucaaagccgcaaugugacauuacaggauuugcaccuuuuucuaaggacaauucgauuaggcuuuccgcugguggggacaucugggugacaagagaaccuuaugugucaugcgauccugacaaguguuaucaauuugcccuuggacagggaacaacacuaaacaacgugcauucaaauaacacaguacgugauaggaccccuuaucggacccuauugaugaaugaguuagguguuccuuuucaucuggggaccaagcaagugugcauagcaugguccagcucaaguugucacgauggaaaagcauggcugcauguuuguauaacgggggaugauaaaaaugcaacugcuagcuucauuuacaaugggaggcuuguagauaguguuguuucaugguccaaagaaauccucaggacccaggagucagaaugcguuuguaucaauggaacuuguacaguaguaaugacugaugggagugcuucaggaaaagcugauacuaaaauacuauucauugaggaggggaaaaucguucauacuagcacauugucaggaagugcucagcaugucgaggagugcuccugcuauccucgauauccuggugucagaugugucugcagagacaacuggaaaggcuccaauaggcccaucguagauauaaacauaaaggaucauagcauuguuuccaguuauguguguucaggacuuguuggagacacacccagaaaaaacgacagcuccagcaguagccauuguuuggauccuaacaaugaagaagguggucauggagugaaaggcugggccuuugaugauggaaaugacguguggaugggaagaacgaucagcgagaagucacgcuuaggguaugaaaccuucaaagucauugaaggcugguccaacccuaaguccaaauugcagauaaauaggcaagucauaguugacagagguaauagguccgguuauucugguauuuucucuguugaaggcaaaagcugcaucaaccggugcuuuuauguggaguugauaaggggaagaaaagaggaaacugaagucuuguggaccucaaacaguauuguuguguuuuguggcaccucagguacauauggaacaggcucauggccugauggggcggacaucaaucucaugccuauauaa

SEQ ID NO: 49250 - RNA, 1410 nt, Artificial Sequence
  derived and/or modified CDS sequence (wt) from neuraminidase__InfluenzaA__ACU80347
augaauccaaaucaaaagauaauaacgauuggcucuguuucucucaccauuuccacaauaugcuucuucaugcaaauugccaucuugauaacuacuguaacauugcauuucaagcaauaugaauucaacuccuccccaaacaaccaagugaugcugugugaaccaacaauaauagaaagaaacauaacagagauaguguaucugaccaacaccaccauagagaaggaaauaugccccaaacuagcagaauacagaaauuggucaaagccgcaaugugacauuacaggauuugcaccuuuuucuaaggacaauucgauuaggcuuuccgcugguggggacaucugggugacaagagaaccuuaugugucaugcgauccugacaaguguuaucaauuugcccuuggacagggaacaacacuaaacaacgugcauucaaauaacacaguacgugauaggaccccuuaucggacccuauugaugaaugaguuagguguuccuuuucaucuggggaccaagcaagucugcauagcaugguccagcucaaguugucacgauggaaaagcauggcugcauguuuguauaacgggggaugauaaaaaugcaacugcuagcuucauuuacaaugggaggcuuguagauaguauuguuucaugguccaaagaaauccucaggacccaggagucagaaugcguuuguaucaauggaacuuguacaguaguaaugacugaugggagugcuucaggaaaagcugauacuaaaauacuauucauugaggaggggaaaaucguucauacuagcacauugucaggaagugcucagcaugucgaggagugcuccugcuauccucgauauccuggugucagaugugucugcagagacaacuggaaaggcuccaauaggcccaucguagauauaaacauaaaggaucauagcauuguuuccaguuauguguguucaggacuuguuggagacacacccagaaaaaacgacagcuccagcaguagccauuguuuggauccuaacaaugaagaagguggucauggagugaaaggcugggccuuugaugauggaaaugacguguggaugggaagaacgaucagcgagaagucacgcuuaggguaugaaaccuucaaagucauugaaggcugguccaauccuaaguccaaauugcagauaaauaggcaagucauaguugacagggguaauagguccgguuauucugguauuuucucuguugaaggcaaaagcugcaucaaucggugcuuuuauguggaguugauaaggggaagaaaagaggaaacugaagucuuguggaccucaaacaguauuguuguguuuuguggcaccucagguacauauggaacaggcucauggccugauggggcggacaucaaucucaugccuauauaa

SEQ ID NO: 49251 - RNA, 1410 nt, Artificial Sequence; identical to SEQ ID NO: 48727
  derived and/or modified CDS sequence (wt) from neuraminidase__InfluenzaA__ACU80358

SEQ ID NO: 49252 - RNA, 1410 nt, Artificial Sequence; identical to SEQ ID NO: 48727
  derived and/or modified CDS sequence (wt) from neuraminidase__InfluenzaA__ACU80369

SEQ ID NO: 49253 - RNA, 1410 nt, Artificial Sequence; identical to SEQ ID NO: 48615
  derived and/or modified CDS sequence (wt) from neuraminidase__InfluenzaA__ACU80380

SEQ ID NO: 49254 - RNA, 1410 nt, Artificial Sequence
  derived and/or modified CDS sequence (wt) from neuraminidase__InfluenzaA__ACU80391
augaauccaaaucaaaagauaauaacgauuggcucuguuucucucaccauuuccacaauaugcuucuucaugcaaauugccaucuugauaacuacuguaacauugcauuucaagcaauaugaauucaacuccuccccaaacaaccaagugaugcugugugaaccaacaauaauagaaagaaacauaacagagauaguguaucugaccaacaccaucauagagaaggaaauaugccccaaacuagcagaauacagaaauuggucaaagccucaaugugacauuacaggauuugcaccuuuuucuaaggacaauucgauuaggcuuuccgcugguggggacaucugggugacaagagaaccuuaugugucaugcgauccugacaaguguuaucaauuugcccuuggacagggaacaacacuaaacaacgugcauucaaauaacacaguacgugauaggaccccuuaucggacccuauugaugaaugaguuagguguuccuuuucaucuggggaccaagcaagucugcauagcaugguccagcucaaguugucacgauggaaaagcauggcugcauguuuguauaacgggggaugauaaaaaugcaacugcuagcuucauuuacaaugggaggcuuguagauaguauuguuucaugguccaaagaaauccucaggacccaggagucagaaugcguuuguaucaauggaacuuguacaguaguaaugacugaugggagugcuucaggaaaagcugauacuaaaauacuauucauugaggaggggaaaaucguucauacuagcacauugucaggaagugcucagcaugucgaggagugcuccugcuauccucgauauccuggugucagaugugucugcagagacaacuggaaaggcuccaauaggcccaucguagauauaaacauaaaggaucauagcauuguuuccaguuauguguguucaggacuuguuggagacacacccagaaaaaacgacagcuccagcaguagccauuguuuggauccuaacaaugaagaagguggucauggagugaaaggcugggccuuugaugauggaaaugacguguggaugggaagaacgaucagcgagaagucacgcuuaggguaugaaaccuucaaagucauugaaggcugguccaacccuaaguccaaauugcagauaaauaggcaagucauaguugacagagguaauagguccgguuauucugguauuuucucuguugaaggcaaaagcugcaucaaucggugcuuuuauguggaguugauaaggggaagaaaagaggaaacugaagucuuguggaccucaaacaguauuguuguguuuuguggcaccucagguacauauggaacaggcucauggccugauggggcggacaucaaucucaugccuauauaa

SEQ ID NO: 49255 - RNA, 1410 nt, Artificial Sequence; identical to SEQ ID NO: 49249
  derived and/or modified CDS sequence (wt) from neuraminidase__InfluenzaA__ACU80402

SEQ ID NO: 49256 - RNA, 1413 nt, Artificial Sequence
  derived and/or modified CDS sequence (wt) from neuraminidase__InfluenzaA__ACU80413
augaacccaaaucaaaagauaauaaccauuggaucaaucaguauagcaaucggaauaauuagucuaauguugcaaauaggaaauauuauuucaauaugggcuagucacucaauccaaacuggaagucaaaacaacacuggaauaugcaaccaaagaaucaucacauaugaaaacagcaccugggugaaucacacauauguuaauauuaacaacacuaauguuguugcuggagaggacaaaacuucagugacauuggccggcaauucaucucuuuguucuaucaguggaugggcuauauacacaaaagacaacagcauaagaauuggcuccaaaggagauguuuuugucauaagagaaccuuuuauaucauguucucacuuggaaugcagaaccuuuuuucugacccaaggcgcucuauuaaaugacaaacauucaaaugggaccguaaaggacagaaguccuuauagggccuuaaugagcuguccucuaggugaagcuccguccccauacaauucaaaguucgaaucgguugcauggucagcaagcgcaugccaugauggcaugggcugguuaacaaucggaauuucugguccagacaauggagcuguggcuguacuaaaauacaacggaauaauaacuggaaccauaaaaaguuggaaaaagcaaauauuaagaacacaagagucugaaugugucuguaugaacgggucauguuucaccauaaugaccgauggcccgaguaauaaggccgccucguacaaaauuuucaagaucgaaaaggggaagguuacuaaaucaauagaguugaaugcacccaauuuucauuaugaggaauguuccuguuacccagacacuggcauagugauguguguaugcagggacaacuggcaugguucaaaucgaccuugggugucuuuuaaucaaaacuuggauuaucaaauaggauacaucugcaguggaguguucggugacaauccgcgucccgaagauggagagggcagcugcaauccagugacuguugauggagcaaacggaguaaaaggguuuucauacaaauaugauaaugguguuuggauaggaaggaccaaaaguaacagacuuagaaagggguuugagaugauuugggauccuaauggauggacaaauaccgacagugauuucucagugaaacaggauguuguagcaauaacugauuggucaggguacagcggaaguuucguccaacauccugaguuaacaggauuggacuguauaagaccuugcuucuggguugaauuagucagagggcugccuagagaaaauacaacaaucuggacuagugggagcagcauuucuuuuuguggcguuaauagugauacugcaaacuggucuuggccagacggugcugaguugccguucaccauugacaaguag

SEQ ID NO: 49257 - RNA, 1410 nt, Artificial Sequence; identical to SEQ ID NO: 48615
  derived and/or modified CDS sequence (wt) from neuraminidase__InfluenzaA__ACU80427

SEQ ID NO: 49258 - RNA, 1410 nt, Artificial Sequence; identical to SEQ ID NO: 48615
  derived and/or modified CDS sequence (wt) from neuraminidase__InfluenzaA__ACU80438

SEQ ID NO: 49259 - RNA, 1410 nt, Artificial Sequence
  derived and/or modified CDS sequence (wt) from neuraminidase__InfluenzaA__ACU80461
augaauccaaaucaaaagauaauaacgauuggcucuguuucucucaccauuuccacaauaugcuucuucaugcaaauugccaucuugauaacuacuguaacauugcauuucaagcaauaugaauucaacucccccccaaacaaccaagugaugcugugugaaccaacaauaauagaaagaaacauaacagagauaguguaucugaccaacaccaccauagagaaggaaauaugccccaaacuagcagaauacagaaauuggucaaagccgcaaugugacauuacaggauuugcaccuuuuucuaaggacaauucgauuaggcuuuccgcugguggggacaucugggugacaagagaaccuuaugugucaugcgauccugacaaguguuaucaauuugcccuuggacagggaacaacacuaaacaacgugcauucaaauaacacaguacgugauaggaccccuuaucggacccuauugaugaaugaguuagguguuccuuuucaucuggggaccaagcaagugugcauagcaugguccagcucaaguugucacgauggaaaagcauggcugcauguuuguauaacgggggaugauaaaaaugcaacugcuagcuucauuuacaaugggaggcuuguagauaguguuguuucaugguccaaagaaauccucaggacccaggagucagaaugcguuuguaucaauggaacuuguacaguaguaaugacugaugggagugcuucaggaaaagcugauacuaaaauacuauucauugaggaggggaaaaucguucauacuagcacauugucaggaagugcucagcaugucgaggagugcuccugcuauccucgauauccuggugucagaugugucugcagagacaacuggaaaggcuccaauaggcccaucguagauauaaacauaaaggaucauagcauuguuuccaguuauguguguucaggacuuguuggagacacacccagaaaaaacgacagcuccagcaguagccauuguuuggauccuaacaaugaagaagguggucauggagugaaaggcugggccuuugaugauggaaaugacguguggaugggaagaacgaucagcgagaagucacgcuuaggguaugagaccuucaaagucauugaaggcugguccaacccuaaguccaaauugcagauaaauaggcaagucauaguugacagagguaauagguccgguuauucugguauuuucucuguugaaggcaaaagcugcaucaaucggugcuuuuauguggaguugauaaggggaagaaaagaggaaacugaagucuuguggaccucaaacaguauuguuguguuuuguggcaccucagguacauauggaacaggcucauggccugauggggcggacaucaaucucaugccuauauaa

SEQ ID NO: 49260 - RNA, 1410 nt, Artificial Sequence
  derived and/or modified CDS sequence (wt) from neuraminidase__InfluenzaA__ACU80603
augaauccaaaucaaaagauaauaacgauuggcucuguuucucucaccauuuccacaauaugcuucuucaugcaaauugccaucuugauaacuacuguaacauugcauuucaagcaauaugaauucaacuccuccccaaacaaccaagugaugcugugugaaccaacaauaauagaaagaaacauaacagagauaguguaucugaccaacaccaccauagagaaggaaauaugccccaaacuagcagaauacagaaauuggucaaagccgcaaugugacauuacaggauuugcaccuuuuucuaaggacaauucgauuaggcuuuccgcugguggggacaucugggugacaagagaaccuuaugugucaugcgauccugacaaguguuaucaauuugcccuuggacagggaacaacacuaaacaacgugcauucaaauaacacaguacgugauaggaccccuuaucggacccuauugaugaaugaguuagguguuccuuuucaucuggggaccaagcaagucugcauagcaugguccagcucaaguugucacgauggaaaagcauggcugcauguuuguauaacgggggaugauaaaaaugcaacugcuagcuucauuuacaaugggaggcuuguagauaguauuguuucaugguccaaagaaauccucaggacccaggagucagaaugcguuuguaucaauggaacuuguacaguaguaaugacugaugggagugcuucaggaaaagcugauacuaaaauacuauucauugaggaggggaaaaucguucauacuagcacauugucaggaagugcucagcaugucgaggagugcuccugcuauccucgauauccuggugucagaugugucugcagagacaacuggaaaggcuccaauaggcccaucguagauauaaacauaaaggaucauagcauuguuuccaguuauguguguucaggacuuguuggagacacacccagaaaaaacgacagcuccagcaguagccauuguuuggauccuaacaaugaagaagguggucauggagugaaaggcugggccuuugaugauggaaaugacguguggaugggaagaacgaucagcgagaagucacgcuuaggguaugaaaccuucaaagucauugaaggcugguccaauccuaaguccaaauugcagauaaauaggcaagucauaguugacagagguaauagguccgguuauucugguauuuucucuguugaaggcaaaagcugcaucaaucggugcuuuuauguggaguugauaaggggaagaaaagaggaaacugaagucuuguggaccucaaacaguauuguuguguuuuguggcaccucagguacauauggaacaggcucauggccugauggggcggacaucaaucucaugccuauauga

SEQ ID NO: 49261 - RNA, 1410 nt, Artificial Sequence; identical to SEQ ID NO: 48615
  derived and/or modified CDS sequence (wt) from neuraminidase__InfluenzaA__ACU80614

SEQ ID NO: 49262 - RNA, 1410 nt, Artificial Sequence; identical to SEQ ID NO: 49233
  derived and/or modified CDS sequence (wt) from neuraminidase__InfluenzaA__ACU80625

SEQ ID NO: 49263 - RNA, 1410 nt, Artificial Sequence
  derived and/or modified CDS sequence (wt) from neuraminidase__InfluenzaA__ACU80636
augaauccaaaucaaaagauaauaacgauuggcucuguuucucucaccauuuccacaauaugcuucuucaugcaaauugccaucuugauaacuacuguaacauugcauuucaagcaauaugaauucaacucccccccaaacaaccaagugaugcugugugaaccaacaauaauagaaagaaacauaacagagauaguguaucugaccaacaccaccauagagaaggaaauaugccccaaacuagcagaauacagaaauuggucaaagccgcaaugugacauuacaggauuugcaccuuuuucuaaggacaauucgauuaggcuuuccgcugguggggacaucugggugacaagagaaccuuaugugucaugcgauccugacaaguguuaucaauuugcccuuggacagggaacaacacuaaacaacgugcauucaaauaacacaguacgugauaggaccccuuaucggacccuauugaugaaugaguuagguguuccuuuucaucuggggaccaagcaagugugcauagcaugguccagcucaaguugucacgauggaaaagcauggcugcauguuuguauaacgggggaugauaaaaaugcaacugcuagcuucauuuacaaugggaggcuuguagauaguguuguuucaugguccaaagaaauccucaggacccaggagucagaaugcguuuguaucaauggaacuuguacaguaguaaugacugaugggagugcuucaggaaaagcugauacuaaaauacuauucauugaggaggggaaaaucguucauacuagcacauugucaggaagugcucaacaugucgaggagugcuccugcuauccucgauauccuggugucagaugugucugcagagacaacuggaaaggcuccaauaggcccaucguagauauaaacauaaaggaucauagcauuguuuccaguuauguguguucaggacuuguuggagacacacccagaaaaaacgacagcuccagcaguagccauuguuuggauccuaacaaugaagaagguggucauggagugaaaggcugggccuuugaugauggaaaugacguguggaugggaagaacgaucagcgagaagucacgcuuaggguaugaaaccuucaaagucauugaaggcugguccaacccuaaguccaaauugcagauaaauaggcaagucauaguugacagagguaauagguccgguuauucugguauuuucucuguugaaggcaaaagcugcaucaaucggugcuuuuauguggaguugauaaggggaagaaaagaggaaacugaagucuuguggaccucaaacaguauuguuguguuuuguggcaccucagguacauauggaacaggcucauggccugauggggcggacaucaaucucaugccuauauaa

SEQ ID NO: 49264 - RNA, 1410 nt, Artificial Sequence
  derived and/or modified CDS sequence (wt) from neuraminidase__InfluenzaA__ACU80647
augaauccaaaucaaaagauaauaacgauuggcucuguuucucucaccauuuccacaauaugcuucuucaugcaaacugccaucuugauaacuacuguaacauugcauuucaagcaauaugaauucaacucccccccaaacaaccaagugaugcugugugaaccaacaauaauagaaagaaacauaacagagauaguguaucugaccaacaccaccauagagaaggaaauaugccccaaacuagcagaauacagaaauuggucaaagccgcaaugugacauuacaggauuugcaccuuuuucuaaggacaauucgauuaggcuuuccgcugguggggacaucugggugacaagagaaccuuaugugucaugcgauccugacaaguguuaucaauuugcccucggacagggaacaacacuaaacaacgugcauucaaaugacacaguacgugauaggaccccuuaucggacccuauugaugaaugaguuagguguuccuuuucaucuggggaccaagcaagugugcauagcaugguccagcucaaguugucacgauggaaaagcauggcugcauguuuguauaacgggggaugauaaaaaugcaacugcuagcuucauuuacaaugggaggcuuguagauaguguuguuucaugguccaaagaaauucucaggacccaggagucagaaugcguuuguaucaauggaacuuguacaguaguaaugacugaugggagugcuucaggaaaagcugauacuaaaauacuauucauugaggaggggaaaaucguucauacuagcacauugucaggaagugcucagcaugucgaggagugcuccugcuauccucgauauccuggugucagaugugucugcagagacaacuggaaaggcuccaauaggcccaucguagauauaaacauaaaggaucauagcauuguuuccaguuauguguguucaggacuuguuggagacacacccagaaaaaacgacagcuccagcaguagccauuguuuggauccuaacaaugaagaagguggucauggagugaaaggcugggccuuugaugauggaaaugacguguggaugggaagaacgaucagcgagaagucacgcuuaggguaugaaaccuucaaagucauugaaggcugguccaacccuaaguccaaauugcagauaaauaggcaagucauaguugacagaggugauagguccgguuauucugguauuuucucuguugaaggcaaaagcugcaucaaucggugcuuuuauguggaguugauaaggggaagaaaagaggaaacugaagucuuguggaccucaaacaguauuguuguguuuuguggcaccucagguacauauggaacaggcucauggccugauggggcggacaucaaucucaugccuauauaa

SEQ ID NO: 49265 - RNA, 1410 nt, Artificial Sequence
  derived and/or modified CDS sequence (wt) from neuraminidase__InfluenzaA__ACU80658
augaauccaaaucaaaagauaauaacgauuggcucuguuucucucaccauuuccacaauaugcuucuucaugcaaauugccaucuugauaacuacuguaacauugcauuucaagcaauaugaauucaacucccccccaaacaaccaagugaugcugugugaaccaaaaauaauagaaagaaacauaacagagauaguguaucugaccaacaccaccauagagaaggaaauaugccccaaacuagcagaauacagaaauuggucaaagccgcaaugugacauuacaggauuugcaccuuuuucuaaggacaauucgauuaggcuuuccgcugguggggacaucugggugacaagagaaccuuaugugucaugcgauccugacaaguguuaucaauuugcccuuggacagggaacaacacuaaacaacgugcauucaaaugacacaguacgugauaggaccccuuaucggacccuauugaugaaugaguuagguguuccuuuucaucuggggaccaagcaagugugcauagcaugguccagcucaaguugucacgauggaaaagcauggcugcauguuuguauaacgggggaugauaaaaaugcaacugcuagcuucauuuacaaugggaggcuuguagauaguguuguuucaugguccaaagaaauccucaggacccaggagucagaaugcguuuguaucaauggaacuuguacaguaguaaugacugaugggagugcuucaggaaaagcugauacuaaaauacuauucauugaggaggggaaaaucguucauacuagcacauugucaggaagugcucagcaugucgaggagugcuccugcuauccucgauauccuggugucagaugugucugcagagacaacuggaaaggcuccaauaggcccaucguagauauaaacauaaaggaucauagcauuguuuccaguuauguguguucaggacuuguuggagacacacccagaaaaaacgacagcuccagcaguagccauuguuuggauccuaacaaugaagaagguggucauggagugaaaggcugggccuuugaugauggaaaugacguguggaugggaagaacgaucagcgagaagucacgcuuaggguaugaaaccuucaaagucauugaaggcugguccaacccuaaguccaaauugcagauaaauaggcaagucauaguugacagagguaauagguccgguuauucugguauuuucucuguugaaggcaaaagcugcaucaaucggugcuuuuauguggaguugauaaggggaagaaaagaggaaacugaagucuuguggaccucaaacaguauuguuguguuuuguggcaccucagguacauauggaacaggcucauggccugauggggcggacaucaaucucaugccuauauaa

SEQ ID NO: 49266 - RNA, 1410 nt, Artificial Sequence; identical to SEQ ID NO: 48526
  derived and/or modified CDS sequence (wt) from neuraminidase__InfluenzaA__ACU80669

SEQ ID NO: 49267 - RNA, 1410 nt, Artificial Sequence; identical to SEQ ID NO: 48611
  derived and/or modified CDS sequence (wt) from neuraminidase__InfluenzaA__ACU80691

SEQ ID NO: 49268 - RNA, 1410 nt, Artificial Sequence; identical to SEQ ID NO: 48727
  derived and/or modified CDS sequence (wt) from neuraminidase__InfluenzaA__ACU80702

SEQ ID NO: 49269 - RNA, 1410 nt, Artificial Sequence
  derived and/or modified CDS sequence (wt) from neuraminidase__InfluenzaA__ACU80713
augaauccaaaucaaaagauaauaacgauuggcucuguuucucucaccauuuccacaauaugcuucuucaugcaaauugccaucuugauaacuacuguaacauugcauuucaagcaauaugaauucaacuccuccccaaacaaccaagugaugcugugugaaccaacaauaauagaaagaaacauaacagagauaguguaucugaccaacaccaccauagagaaggaaauaugccccaaacuagcagaauacagaaauuggucaaagccgcaaugugacauuacaggauuugcaccuuuuucuaaggacaauucgauuaggcuuuccgcugguggggacaucugggugacaagagaaccuuaugugucaugcgauccugacaaguguuaucaauuugcccuuggacagggaacaacacuaaacaacgugcauucaaauaacacaguacgugauaggaccccuuaucggacccuauugaugaaugaguuagguguuccuuuucaucuggggaccaagcaagucugcauagcaugguccagcucaaguugucacgauggaaaagcauggcugcauguuuguauaacgggggaugauaaaaaugcaacugcuagcuucauuuacaaugggaggcuuguagauaguauuguuucaugguccaaagaaauccucaggacccaggagucagaaugcguuuguaucaauggaacuuguacaguaguaaugacugaugggagugcuucaggaaaagcugauacuaaaauacuauucauugaggaggggaaaaucguucauacuagcacauugucaggaagugcucagcaugucgaggagugcuccugcuauccucgauauccuggugucagaugugucugcagagacaacuggaaaggcuccaauaggcccaucguagauauaaacauaaaggaccauagcauuguuuccaguuauguguguucaggacuuguuggagacacacccagaaaaaacgacagcuccagcaguagccauuguuuggauccuaacaaugaagaagguggucauggagugaaaggcugggccuuugaugauggaaaugacguguggaugggaagaacgaucagcgagaagucacgcuuaggguaugaaaccuucaaagucauugaaggcugguccaauccuaaguccaaauugcagauaaauaggcaagucauaguugacagagguaauagguccgguuauucugguauuuucucuguugaaggcaaaagcugcaucaaucggugcuuuuauguggaguugauaaggggaagaaaagaggaaacugaagucuuguggaccucaaacaguauuguuguguuuuguggcaccucagguacauauggaacaggcucauggccugauggggcggacaucaaucucaugccuauauaa

SEQ ID NO: 49270 - RNA, 1410 nt, Artificial Sequence
  derived and/or modified CDS sequence (wt) from neuraminidase__InfluenzaA__ACU80724
augaauccaaaucaaaagauaauaacgauuggcucuguuucucucaccauuuccacaauaugcuucuucaugcaaauugccaucuugauaacuacuguaacauugcauuucaagcaauaugaauucaacucccccccaaacaaccaagugaugcugugugaaccaacaauaauagaaaggaacauaacagagauaguguaucugaccaacaccaccauagagaaggaaauaugccccaaacuagcagaauacagaaauuggucaaagccgcaaugugacauuacaggauuugcaccuuuuucuaaggacaauucgauuaggcuuuccgcugguggggacaucugggugacaagagaaccuuaugugucaugcgauccugacaaguguuaucaauuugcccuuggacagggaacaacacuaaacaacgugcauucaaauaacacaguacgugauaggaccccuuaucggacccuauugaugaaugaguuagguguuccuuuucaucuggggaccaagcaagugugcauagcaugguccagcucaaguugucacgauggaaaagcauggcugcauguuuguauaacgggggaugauaaaaaugcaacugcuagcuucauuuacaaugggaggcuuguagauaguguuguuucaugguccaaagaaauccucaggacccaggagucagaaugcguuuguaucaauggaacuuguacaguaguaaugacugaugggagugcuucaggaaaagcugauacuaaaauacuauucauugaggaggggaaaaucguucauacuagcacauugucaggaagugcucagcaugucgaggagugcuccugcuauccucgauauccuggugucagaugugucugcagagacaacuggaaaggcuccaauaggcccaucguagauauaaacauaaaggaucauagcauuguuuccaguuauguguguucaggacuuguuggagacacacccagaaaaaacgacagcuccagcaguagccauuguuuggauccuaacaaugaagaagguggucauggagugaaaggcugggccuuugaugauggaaaugacguguggaugggaagaacgaucagcgagaagucacgcuuaggguaugaaaccuucaaagucauugaaggcugguccaacccuaaguccaaauugcagauaaauaggcaagucauaguugacagagguaauagguccgguuauucugguauuuucucuguugaaggcaaaagcugcaucaaucggugcuuuuauguggaguugauaaggggaagaaaagaggaaacugaagucuuguggaccucaaacaguauuguuguguuuuguggcaccucagguacauauggaacaggcucauggccugauggggcggacaucaaucucaugccuauauaa

SEQ ID NO: 49271 - RNA, 1410 nt, Artificial Sequence
  derived and/or modified CDS sequence (wt) from neuraminidase__InfluenzaA__ACU80735
augaauccaaaucaaaagauaauaacgauuggcucuguuucucucaccauuuccacaauaugcuucuucaugcaaauugccaucuugauaacuacuguaacauugcauuucaagcaauaugaauucaacucccccccaaacaaccaagugaugcugugugaaccaacaauaauagaaagaaacauaacagagauaguguaucugaccaacaccaccauagagaaggaaauaugccccaaacuagcagaauacagaaauuggucaaagccgcaaugugacauuacaggauuugcaccuuuuucuaaggacaauucgauuaggcuuuccgcugguggggacaucugggugacaagagaaccuuaugugucaugcgauccugacaaguguuaucaauuugcccuuggacagggaacaacacuaaacaacgugcauucaaaugacacaguacgugauaggaccccuuaucggacccuauugaugaaugaguuagguguuccuuuucaucuggggaccaagcaagugugcauagcaugguccagcucaaguugucacgauggaaaagcauggcugcauguuuguauaacgggggaugauaaaaaugcaacugcuagcuucauuuacaaugggaggcuuguagauaguguuguuucaugguccaaagaaauccucaggacccaggagucagaaugcguuuguaucaauggaacuuguacaguaguaaugacugaugggagugcuucaggaaaagcugauacuaaaauacuauucauugaggaggggaaaaucguucauacuagcacauugucaggaagugcucagcaugucgaggagugcuccugcuauccucgauauccuggugucagaugugucugcagagacaacuggaaaggcuccaauaggcccaucguagauauaaacauaaaggaucauagcauuguuuccaguuauguguguucaggacuuguuggagacacacccagaaaaaacgacagcuccagcaguagccauuguuuggauccuaacaaugaagaagguggucauggagugaaaggcugggccuuugaugauggaaaugacguguggaugggaagaacgaucagcgagaagucacgcuuaggguaugaaaccuucaaagucauugaaggcugguccaacccuaaguccaaauugcagauaaauaggcaagucauaguugacagagguaauagguccgguuauucugguauuuucucuguugaaggcaaaagcugcaucaaucggugcuuuuauguggaguugauaaggggaagaaaagaggaaacugaagucuuguggaccucaaacaguauuguuguguuuuguggcacaucagguacauauggaacaggcucauggccugauggggcggacaucaaucucaugccuauauaa

SEQ ID NO: 49272 - RNA, 1410 nt, Artificial Sequence; identical to SEQ ID NO: 49259
  derived and/or modified CDS sequence (wt) from neuraminidase__InfluenzaA__ACU80746

SEQ ID NO: 49273 - RNA, 1410 nt, Artificial Sequence
  derived and/or modified CDS sequence (wt) from neuraminidase__InfluenzaA__ACU80757
augaauccaaaucaaaagauaauaacgauuggcucuguuucucucaccauuuccacaauaugcuucuucaugcaaauugccaucuugauaacuacuguaacauugcauuucaagcaauaugaauucaacucccccccaaacaaccaagugaugcugugugaaccaacaauaauagaaagaaacauaacagagguaguguaucugaccaacaccaccauagagaaggaaauaugccccaaacuagcagaauacagaaauuggucaaagccgcaaugugacauuacaggauuugcaccuuuuucuaaggacaauucgauuaggcuuuccgcugguggggacaucugggugacaagagaaccuuaugugucaugcgauccugacaaguguuaucaauuugcccuuggacagggaacaacacuaaacaacgugcauucaaaugacacaguacgugauaggaccccuuaucggacccuauugaugaaugaguuagguguuccuuuucaucuggggaccaagcaagugugcauagcauggucaagcucaaguugucacgauggaaaagcauggcugcauguuuguauaacgggggaugauaaaaaugcaacugcuagcuucauuuacaaugggaggcuuguagauaguguuguuucaugguccaaagaaauccucaggacccaggagucagaaugcguuuguaucaauggaacuuguacaguaguaaugacugaugggagugcuucaggaaaagcugauacuaaaauacuauucauugaggaggggaaaaucguucauacuagcacauugucaggaagugcucagcaugucgaggagugcuccugcuauccucgauauccuggugucagaugugucugcagagacaacuggaaaggcuccaauaggcccaucguagauauaaacauaaaggaucauagcauuguuuccaguuauguguguucaggacuuguuggagacacacccagaaaaaacgacagcuccagcaguagccauuguuuggauccuaacaaugaagaagguggucauggagugaaaggcugggccuuugaugauggaaaugacguguggaugggaagaacgaucagcgagaagucacgcuuaggguaugaaaccuucaaagucauugaaggcugguccaacccuaaguccaaauugcagauaaauaggcaagucauaguugacagagguaauagguccgguuauucugguauuuucucuguugaaggcaaaagcugcaucaaucggugcuuuuauguggaguugauaaggggaagaaaagaggaaacugaagucuuguggaccucaaacaguauuguuguguuuuguggcaccucagguacauauggaacaggcucauggccugauggggcggacaucaaucucaugccuauauaa

SEQ ID NO: 49274 - RNA, 1410 nt, Artificial Sequence
  derived and/or modified CDS sequence (wt) from neuraminidase__InfluenzaA__ACU80768
augaauccaaaucaaaagauaauaacgauuggcucuguuucucucaccauuuccacaauaugcuucuucaugcaaacugccaucuugauaacuacuguaacauugcauuucaagcaauaugaauucaacucccccccaaacaaccaagugaugcugugugaaccaacaauaauagaaagaaacauaacagagauaguguaucugaccaacaccaccauagagaaggaaauaugccccaaacuagcagaauacagaaauuggucaaagccgcaaugugacauuacaggauuugcaccuuuuucuaaggacaauucgauuaggcuuuccgcugguggggacaucugggugacaagagaaccuuaugugucaugcgauccugacaaguguuaucaauuugcccucggacagggaacaacacuaaacaacgugcauucaaaugacacaguacgugauaggaccccuuaucggacccuauugaugaaugaguuagguguuccuuuucaucuggggaccaagcaagugugcauagcaugguccagcucaaguugucacgauggaaaagcauggcugcauguuuguauaacgggggaugauaaaaaugcaacugcuagcuucauuuacaaugggaggcuuguagauaguauuguuucaugguccaaagaaauucucaggacccaggagucagaaugcguuuguaucaauggaacuuguacaguaguaaugacugaugggagugcuucaggaaaagcugauacuaaaauacuauucauugaggaggggaaaaucguucauacuagcacauugucaggaagugcucagcaugucgaggagugcuccugcuauccucgauauccuggugucagaugugucugcagagacaacuggaaaggcuccaauaggcccaucguagauauaaacauaaaggaucauagcauuguuuccaguuauguguguucaggacuuguuggagacacacccagaaaaaacgacagcuccagcaguagccauuguuuggauccuaacaaugaagaagguggucauggagugaaaggcugggccuuugaugauggaaaugacguguggaugggaagaacaaucagcgagaagucacgcuuaggguaugaaaccuucaaagucauugaaggcugguccaacccuaaguccaaauugcagauaaauaggcaagucauaguugacagaggugauagguccgguuauucugguauuuucucuguugaaggcaaaagcugcaucaaucggugcuuuuauguggaguugauaaggggaagaaaagaggaaacugaagucuuguggaccucaaacaguauuguuguguuuuguggcaccucagguacauauggaacaggcucauggccugauggggcggacaucaaucucaugccuauauaa

SEQ ID NO: 49275 - RNA, 1410 nt, Artificial Sequence; identical to SEQ ID NO: 48611
  derived and/or modified CDS sequence (wt) from neuraminidase__InfluenzaA__ACU80779

SEQ ID NO: 49276 - RNA, 1410 nt, Artificial Sequence; identical to SEQ ID NO: 48526
  derived and/or modified CDS sequence (wt) from neuraminidase__InfluenzaA__ACU80790

SEQ ID NO: 49277 - RNA, 1410 nt, Artificial Sequence; identical to SEQ ID NO: 48611
  derived and/or modified CDS sequence (wt) from neuraminidase__InfluenzaA__ACU80801

SEQ ID NO: 49278 - RNA, 1410 nt, Artificial Sequence
  derived and/or modified CDS sequence (wt) from neuraminidase__InfluenzaA__ACU81106
augaauccaaaucaaaagauaauaacgauuggcucuguuucucucaccauuuccacaauaugcuucuucaugcaaauugccaucuugauaacuacuguaacauugcauuucaagcaauaugaauucaacucccccccaaacaaccaagugaugcugugugaaccaacaauaauagaaagaaacauaacagagauaguguaucugaccaacaccaccauagagaaggaaauaugccccaaacuagcagaauacagaaauuggucaaagccgcaaugugacauuacaggguuugcaccuuuuucuaaggacaauucgauuaggcuuuccgcugguggggacaucugggugacaagagaaccuuaugugucaugcgauccugacaaguguuaucaauuugcccuuggacagggaacaacacuaaacaacgugcauucaaauaacacaguacgugauaggaccccuuaucggacccuauugaugaaugaguuagguguuccuuuucaucuggggaccaagcaagugugcauagcaugguccagcucaaguugucacgauggaaaagcauggcugcauguuuguauaacgggggaugauaaaaaugcaacugcuagcuucauuuacaaugggaggcuuguagauaguguuguuucaugguccaaagaaauccucaggacccaggagucagaaugcguuuguaucaauggaacuuguacaguaguaaugacugaugggagugcuucaggaaaagcugauacuaaaauacuauucauugaggaggggaaaaucguucauacuagcacauugucaggaagugcucagcaugucgaggagugcuccugcuauccucgauauccuggugucagaugugucugcagagacaacuggaaaggcuccaauaggcccaucguagauauaaacauaaaggaucauagcauuguuuccaguuauguguguucaggacuuguuggagacacacccagaaaaaacgacagcuccagcaguagccauuguuuggauccuaacaaugaagaagguggucauggagugaaaggcugggccuuugaugauggaaaugacguguggaugggaagaacgaucagcgagaagucacgcuuaggguaugaaaccuucaaagucauugaaggcugguccaacccuaaguccaaauugcagauaaauaggcaagucauaguugacagagguaauaguuccgguuauucugguauuuucucuguugaaggcaaaagcugcaucaaucggugcuuuuauguggaguugauaaggggaagaaaagaggaaacugaagucuuguggaccucaaacaguauuguuguguuuuguggcaccucagguacauauggaacaggcucauggccugauggggcggacaucaaucucaugccuauauaa

SEQ ID NO: 49279 - RNA, 1410 nt, Artificial Sequence; identical to SEQ ID NO: 48905
  derived and/or modified CDS sequence (wt) from neuraminidase__InfluenzaA__ACU87265

SEQ ID NO: 49280 - RNA, 1410 nt, Artificial Sequence; identical to SEQ ID NO: 48947
  derived and/or modified CDS sequence (wt) from neuraminidase__InfluenzaA__ACU87273

SEQ ID NO: 49281 - RNA, 1410 nt, Artificial Sequence; identical to SEQ ID NO: 48750
  derived and/or modified CDS sequence (wt) from neuraminidase__InfluenzaA__ACV04231

SEQ ID NO: 49282 - RNA, 1410 nt, Artificial Sequence; identical to SEQ ID NO: 48750
  derived and/or modified CDS sequence (wt) from neuraminidase__InfluenzaA__ACV04241

SEQ ID NO: 49283 - RNA, 1410 nt, Artificial Sequence; identical to SEQ ID NO: 48750
  derived and/or modified CDS sequence (wt) from neuraminidase__InfluenzaA__ACV04251

SEQ ID NO: 49284 - RNA, 1410 nt, Artificial Sequence; identical to SEQ ID NO: 48750
  derived and/or modified CDS sequence (wt) from neuraminidase__InfluenzaA__ACV04261

SEQ ID NO: 49285 - RNA, 1410 nt, Artificial Sequence; identical to SEQ ID NO: 49020
  derived and/or modified CDS sequence (wt) from neuraminidase__InfluenzaA__ACV04271

SEQ ID NO: 49286 - RNA, 1410 nt, Artificial Sequence
  derived and/or modified CDS sequence (wt) from neuraminidase__InfluenzaA__ACV04281
augaauccaaaccaaaagauaauaaccauugguucggucuguaugacaauuggaauggcuaacuuaauauuacaaauuggaaacauaaucucaauauggauuagccacucaauucaacuugggaaucaaaaucagauugaaacaugcaaucaaagcgucauuacuuaugaaaacaacacuuggguaaaucagacauauguuaacaucggcaacaccaacuuugcugcuggacagucagugguuuccgugaaauuagcgggcaauuccucucucugcccuguuaguggaugggcuauauacaguaaagacaacaguauaagaaucgguuccaagggggauguguuugucauaagggaaccauucauaucaugcucccccuuggaaugcagaaccuucuucuugacucaaggggccuugcuaaaugacaaacauuccaauggaaccauuaaagacaggagcccauaucgaacucuaaugagcuguccuauuggugaaguucccucuccauacaacucaagauuugagucagucgcuuggucagcaagugcuugucaugauggcaucaauuggcuaacaauuggaauuucuggcccagacaauggggcaguggcuguguuaaaguacaacggcauaauaacagacacuaucaagaguuggagaaacaauauauugagaacacaagagucugaaugugcauguguaaaugguucuugcuuuacuguaaugaccgauggaccaagugauggacaggccucauacaagaucuucagaauagaaaagggaaagauagucaaaucagucgaaaugaaugccccuaauuaucacuaugaggaaugcuccuguuauccugauucuagugaaaucacaugugugugcagggauaacuggcauggcucgaaucgaccgugggugucuuucaaccagaaucuggaauaucagauaggauacauaugcagugggauuuucggagacaauccacgcccuaaugauaagacaggcaguugugguccaguaucgucuaauggagcaaauggaguaaaaggauuuucauucaaauacggcaaugguguuuggauagggagaacuaaaagcauuaguucaagaaacgguuuugagaugauuugggauccgaacggauggacugggacagacaauaacuucucaauaaagcaagauaucguaggaauaaaugaguggucaggauauagcgggaguuuuguucagcauccagaacuaacagggcuggauuguauaagaccuugcuucuggguugaacuaaucagagggcgacccaaagagaacacaaucuggacuagcgggagcagcauauccuuuugugguguaaacagugacacuguggguuggucuuggccagacggugcugaguugccauuuaccauugacaaguaa

SEQ ID NO: 49287 - RNA, 1410 nt, Artificial Sequence; identical to SEQ ID NO: 48750
  derived and/or modified CDS sequence (wt) from neuraminidase__InfluenzaA__ACV04291

SEQ ID NO: 49288 - RNA, 1410 nt, Artificial Sequence; identical to SEQ ID NO: 48750
  derived and/or modified CDS sequence (wt) from neuraminidase__InfluenzaA__ACV04301

SEQ ID NO: 49289 - RNA, 1410 nt, Artificial Sequence; identical to SEQ ID NO: 48750
  derived and/or modified CDS sequence (wt) from neuraminidase__InfluenzaA__ACV04321

SEQ ID NO: 49290 - RNA, 1410 nt, Artificial Sequence; identical to SEQ ID NO: 48750
  derived and/or modified CDS sequence (wt) from neuraminidase__InfluenzaA__ACV04331

SEQ ID NO: 49291 - RNA, 1410 nt, Artificial Sequence; identical to SEQ ID NO: 48750
  derived and/or modified CDS sequence (wt) from neuraminidase__InfluenzaA__ACV04341

SEQ ID NO: 49292 - RNA, 1410 nt, Artificial Sequence; identical to SEQ ID NO: 48750
  derived and/or modified CDS sequence (wt) from neuraminidase__InfluenzaA__ACV04351

SEQ ID NO: 49293 - RNA, 1410 nt, Artificial Sequence; identical to SEQ ID NO: 48750
  derived and/or modified CDS sequence (wt) from neuraminidase__InfluenzaA__ACV04361

SEQ ID NO: 49294 - RNA, 1410 nt, Artificial Sequence; identical to SEQ ID NO: 48750
  derived and/or modified CDS sequence (wt) from neuraminidase__InfluenzaA__ACV04371

SEQ ID NO: 49295 - RNA, 1410 nt, Artificial Sequence; identical to SEQ ID NO: 48750
  derived and/or modified CDS sequence (wt) from neuraminidase__InfluenzaA__ACV04381

SEQ ID NO: 49296 - RNA, 1410 nt, Artificial Sequence; identical to SEQ ID NO: 48750
  derived and/or modified CDS sequence (wt) from neuraminidase__InfluenzaA__ACV04391

SEQ ID NO: 49297 - RNA, 1410 nt, Artificial Sequence; identical to SEQ ID NO: 48947
  derived and/or modified CDS sequence (wt) from neuraminidase__InfluenzaA__ACV04401

SEQ ID NO: 49298 - RNA, 1410 nt, Artificial Sequence; identical to SEQ ID NO: 48749
  derived and/or modified CDS sequence (wt) from neuraminidase__InfluenzaA__ACV04411

SEQ ID NO: 49299 - RNA, 1410 nt, Artificial Sequence; identical to SEQ ID NO: 48750
  derived and/or modified CDS sequence (wt) from neuraminidase__InfluenzaA__ACV04492

SEQ ID NO: 49300 - RNA, 1410 nt, Artificial Sequence; identical to SEQ ID NO: 48750
  derived and/or modified CDS sequence (wt) from neuraminidase__InfluenzaA__ACV04502

SEQ ID NO: 49301 - RNA, 1410 nt, Artificial Sequence; identical to SEQ ID NO: 48749
  derived and/or modified CDS sequence (wt) from neuraminidase__InfluenzaA__ACV04512

SEQ ID NO: 49302 - RNA, 1410 nt, Artificial Sequence
  derived and/or modified CDS sequence (wt) from neuraminidase__InfluenzaA__ACV04522
augaauccaaaccaaaagauaauaaccauugguucggucuguaugacaauuggaauggcuaacuuaauauuacaaauuggaaacauaaucucaauauggauuagccacucaauucaacuugggaaucaaaaucagauugaaacaugcaaucaaagcgucauuacuuaugaaaacaacacuuggguaaaucagacauauguuaacaucagcaacaccaacuuugcugcuggaaagucagugguuuccgugaaauuagcgggcaauuccucucucugcccuguuaguggaugggcuauauacaguaaagacaacaguauaagaaucgguuccaagggggauguguuugucauaagggaaccauucauaucaugcucccccuuggaaugcagaaccuucuucuugacucaaggggccuugcuaaaugacaaacauuccaauggaaccauuaaagacaggagcccauaucgaacccuaaugagcuguccuauuggugaaguucccucuccauacaacucaagauuugagucagucgcuuggucagcaagugcuugucaugauggcaucaauuggcuaacaauuggaauuucuggcccagacaauggggcaguggcuguguuaaaguacaacggcauaauaacagacacuaucaagaguuggagaaacaauauauugagaacacaagagucugaaugugcaugcguaaaugguucuugcuuuacuguaaugaccgauggaccaagugauggacaggccucauacaagaucuucagaauagaaaagggaaagauagucaaaucagucgaaaugaaugccccuaauuaucacuaugaggaaugcuccuguuauccugauucuagugaaaucacaugugugugcagggauaacuggcauggcucgaaucgaccgugggugucuuucaaccagaaucuggaauaucagauaggauacauaugcagugggauuuucggagacaauccacgcccuaaugauaagacaggcaguugugguccaguaucgucuaauggagcaaauggaguaaaaggauuuucauucaaauacggcaaugguguuuggauagggagaacuaaaagcauuaguucaagaaacgguuuugagaugauuugggauccgaacggauggacugggacagacaauaacuucucaauaaagcaagauaucguaggaauaaaugaguggucaggauauagcgggaguuuuguucagcauccagaacuaacagggcuggauuguauaagaccuugcuucuggguugaacuaaucagagggcgacccaaagagaacacaaucuggacuagcgggagcagcauauccuuuugugguguaaacagugacacuguggguuggucuuggccagacggugcugaguugccauuuaccauugacaaguaa

SEQ ID NO: 49303 - RNA, 1410 nt, Artificial Sequence; identical to SEQ ID NO: 48750
  derived and/or modified CDS sequence (wt) from neuraminidase__InfluenzaA__ACV04532

SEQ ID NO: 49304 - RNA, 1410 nt, Artificial Sequence
  derived and/or modified CDS sequence (wt) from neuraminidase__InfluenzaA__ACV04542
augaauccaaaccaaaagauaauaaccauugguucggucuguaugacaauuggaauggcuaacuuaauauuacaaauuggaaacauaaucucaauauggauuagccacucaauucaacuugggaaucaaaaucagauugaaacaugcaaucaaagcgucauuacuuaugaaaacaacacuuggguaaaucagacauauguuaacaucagcaacaccaacuuugcugcuggacagucagugguuuccgugaaauuagcgggcaauuccucucucugcccuguuaguggaugggcuauauacaguaaagacaacaguauaagaaucgguuccaagggggauguguuugucauaagggaaccauucauaucaugcucccccuuggaaugcagaaccuucuucuugacucaaggggccuugcuaaaugacaaacauuccaauggaaccauuaaagacaggagcccauaucgaacccuaaugagcuguccuauuggugaaguucccucuccauacaacucaagauuugagucagucgcuuggucagcaagugcuugucaugauggcaucaauuggcuaacaauuggaauuucuggcccagacaauggggcaguggcuguguuaaaguacaacggcauaauaacagacacuaucaagaguuggagaaacaauauauugagaacacaagagucugaaugugcauguguaaaugguucuugcuuuacuguaaugaccgauggaccaagugauggccaggccucauacaagaucuucagaauagaaaagggaaagauagucaaaucagucgaaaugaaugccccuaauuaucacuaugaggaaugcuccuguuauccugauucuagugaaaucacaugugugugcagggauaacuggcauggcucgaaucgaccgugggugucuuucaaccagaaucuggaauaucagauaggauacauaugcagugggauuuucggagacaauccacgcccuaaugauaagacaggcaguugugguccaguaucgucuaauggagcaaauggaguaaaaggauuuucauucaaauacggcaaugguguuuggauagggagaacuaaaagcauuaguucaagaaacgguuuugagaugauuugggauccgaacggauggacugggacagacaauaacuucucaauaaagcaagauaucguaggaauaaaugaguggucaggauauagcgggaguuuuguucagcauccagaacuaacagggcuggauuguauaagaccuugcuucuggguugaacuaaucagagggcgacccaaagagaacacaaucuggacuagcgggagcagcauauccuuuugugguguaaacagugacacuguggguuggucuuggccagacggugcugaguugccauuuaccauugacaaguaa

SEQ ID NO: 49305 - RNA, 1410 nt, Artificial Sequence
  derived and/or modified CDS sequence (wt) from neuraminidase__InfluenzaA__ACV04552
augaauccaaaccaaaagauaauaaccauugguucggucuguaugacaauuggaauggcuaacuuaauauuacaaauuggaaacauaaucucaauauggauuagccacucaauucaacuugggaaucaaaaucagauugaaacaugcaaucaaagcgucauuacuuaugaaaacaacacuuggguaaaucagacauauguuaacaucagcaacaccaacuuugcugcuggacagucagugguuuccgugaaauuagcgggcaauuccucucucugcccuguuaguggaugggcuauauacaguaaagacaacaguauaagaaucgguuccaagggggauguguuugucauaagggaaccauucauaucaugcucccccuuggaaugcagaaccuucuucuugacucaaggggccuugcuaaaugacaaacauuccaauggaaccauuaaagacaggagcccauaucgaacccuaaugagcuguccuauuggugaaguucccucuccauacaacucaagauuugagucagucgcuuggucagcaagugcuugucaugauggcaucaauuggcuaacaauuggaauuucuggcccagacaauggggcaguggcuguguuaaaguacaacggcauaauaacagacacuaucaagaguuggagaaacaauauauugagaacacaagagucugaaugugcauguguaaaugguucuugcuuuacuguaaugaccgauggaccaagugauggacaggccucauacaagaucuucagaauagaaaagggaaagauagucaaaucagucgaaaugaaugccccuaauuaucacuaugaggaaugcuccuguuauccugauucuagugaaauuacaugugugugcagggauaacuggcauggcucgaaucgaccgugggugucuuucaaccagaaucuggaauaucagauaggauacauaugcagugggauuuucggagacaauccacgcccuaaugauaagacaggcaguugugguccaguaucgucuaauggagcaaauggaguaaaaggauuuucauucaaauacggcaaugguguuuggauagggagaacuaaaagcauuaguucaagaaacgguuuugagaugauuugggauccgaacggauggacugggacagacaauaacuucucaauaaagcaagauaucguaggaauaaaugaguggucaggauauagcgggaguuuuguucagcauccagaacuaacagggcuggauuguauaagaccuugcuucuggguugaacuaaucagagggcgacccaaagagaacacaaucuggacuagcgggagcagcauauccuuuugugguguaaacagugacacuguggguuggucuuggccagacggugcugaguugccauuuaccauugacaaguaa

SEQ ID NO: 49306 - RNA, 1410 nt, Artificial Sequence; identical to SEQ ID NO: 48750
  derived and/or modified CDS sequence (wt) from neuraminidase__InfluenzaA__ACV04562

SEQ ID NO: 49307 - RNA, 1410 nt, Artificial Sequence; identical to SEQ ID NO: 48783
  derived and/or modified CDS sequence (wt) from neuraminidase__InfluenzaA__ACV04572

SEQ ID NO: 49308 - RNA, 1410 nt, Artificial Sequence; identical to SEQ ID NO: 48750
  derived and/or modified CDS sequence (wt) from neuraminidase__InfluenzaA__ACV04582

SEQ ID NO: 49309 - RNA, 1410 nt, Artificial Sequence
  derived and/or modified CDS sequence (wt) from neuraminidase__InfluenzaA__ACV04758
augaauccaaaccaaaagauaauaaccauugguucggucuguaugacaauuggaauggcuaacuuaauauuacaaauuggaaacauaaucucaauauggauuagccacucaauucaacuugggaaucaaaaucagauugaaacaugcaaucaaagcgucauuacuuaugaaaacaacacuuggguaaaucagacauauguuaacaucagcaacaccaacuuugcugcuggacagucagugguuuccgugaaauuagcgggcaauuccucucucugcccuguuaguggaugggcuauauacaguaaagacaacaguauaagaaucgguuccaagggggauguguuugucauaagggaaccauucauaucaugcucccccucggaaugcagaaccuucuucuugacucaaggggccuugcuaaaugacaaacauuccaauggaaccauuaaagacaggagcccauaucgaacccuaaugagcuguccuauuggugaaguucccucuccauacaacucaagauuugagucagucgcuuggucagcaagugcuugucaugauggcaucaauuggcuaacaauuggaauuucuggcccagacaauggggcaguggcuguguuaaaguacaacggcauaauaacagacacuaucaagaguuggagaaacaauauauugagaacacaagagucugaaugugcauguguaaaugguucuugcuuuacuguaaugaccgauggaccaaguaauggacaggccucauacaagaucuucagaauagaaaagggaaagauagucaaaucagucgaaaugaaugccccuaauuaucacuaugaggaaugcuccuguuauccugauucuagugaaaucacaugugugugcagggauaacuggcauggcucgaaucgaccgugggugucuuucaaccagaaucuggaauaucagauaggauacauaugcagugggauuuucggagacaauccacgcccuaaugauaagacaggcaguugugguccaguaucgucuaauggagcaaauggaguaaaaggauuuucauucaaauacggcaaugguguuuggauagggagaacuaaaagcauuaguucaagaaacgguuuugagaugauuugggauccgaacggauggacugggacagacaauaacuucucaauaaagcaagauaucguaggaauaaaugaguggucaggauauagcgggaguuuuguccagcauccagaacuaacagggcuggauuguauaagaccuugcuucuggguugaacuaaucagagggcgacccaaagagaacacaaucuggacuagcgggagcagcauauccuuuugugguguaaacagugacacuguggguuggucuuggccagacggugcugaguugccauuuaccauugacaaguaa

SEQ ID NO: 49310 - RNA, 1410 nt, Artificial Sequence
  derived and/or modified CDS sequence (wt) from neuraminidase__InfluenzaA__ACV33087
augaauccaaaccaaaagauaauaaccauugguucggucuguaugacaauuggaauggcuaacuuaauauuacaaauuggaaacauaaucucaauauggauuagccacucaauucaacuugggaaucaaaaucagauugaaacaugcaaucaaagcgucauuacuuaugaaaacaacacuuggguaaaucagacauauguuaacaucagcaacaccaacuuugcugcuggacagucagugguuuccgugaaauuagcgggcaauuccucucucugcccuguuaguggaugggcuauauacaguaaagacaacaguguaagaaucgguuccaagggggauguguuugucauaagggaaccauucauaucaugcucccccuuggaaugcagaaccuucuucuugacucaaggggccuugcuaaaugacaaacauuccaauggaaccauuaaagacaggagcccauaucgaacccuaaugagcuguccuauuggugaaguucccucuccauacaacucaagauuugagucagucgcuuggucagcaagugcuugucaugauggcaucaauuggcuaacaauuggaauuucuggcccagacaauggggcaguggcuguguuaaaguacaacggcauaauaacagacacuaucaagaguuggagaaacaauauauugagaacacaagagucugaaugugcauguguaaaugguucuugcuuuacuguaaugaccgauggaccaaguaauggacaggccucauacaagaucuucagaauagaaaagggaaagauagucaaaucagucgaaaugaaugccccuaauuaucacuaugaggaaugcuccuguuauccugauucuagugaaaucacaugugugugcagggauaacuggcauggcucgaaucgaccgugggugucuuucaaccagaaucuggaauaucagauaggauacauaugcagugggauuuucggagacaauccacgcccuaaugauaagacaggcaguugugguccaguaucgucuaauggagcaaauggaguaaaaggauuuucauucaaauacggcaaugguguuuggauagggagaacuaaaagcauuaguucaagaaacgguuuugagaugauuugggauccgaacggauggacugggacagacaauaacuucucaauaaagcaagauaucguaggaauaaaugaguggucaggauauagcgggaguuuuguucagcauccagaacuaacagggcuggauuguauaagaccuugcuucuggguugaacuaaucagagggagacccaaagagaacacaaucuggacuagcgggagcagcauauccuuuugugguguaaacagugacacuguggguuggucuuggccagacggugcugaguugccauuuaccauugacaaguaa

SEQ ID NO: 49311 - RNA, 1410 nt, Artificial Sequence; identical to SEQ ID NO: 48750
  derived and/or modified CDS sequence (wt) from neuraminidase__InfluenzaA__ACV33107

SEQ ID NO: 49312 - RNA, 1410 nt, Artificial Sequence; identical to SEQ ID NO: 48750
  derived and/or modified CDS sequence (wt) from neuraminidase__InfluenzaA__ACV33117

SEQ ID NO: 49313 - RNA, 1410 nt, Artificial Sequence; identical to SEQ ID NO: 48750
  derived and/or modified CDS sequence (wt) from neuraminidase__InfluenzaA__ACV33127

SEQ ID NO: 49314 - RNA, 1410 nt, Artificial Sequence; identical to SEQ ID NO: 48750
  derived and/or modified CDS sequence (wt) from neuraminidase__InfluenzaA__ACV33137

SEQ ID NO: 49315 - RNA, 1410 nt, Artificial Sequence; identical to SEQ ID NO: 48750
  derived and/or modified CDS sequence (wt) from neuraminidase__InfluenzaA__ACV33147

SEQ ID NO: 49316 - RNA, 1410 nt, Artificial Sequence
  derived and/or modified CDS sequence (wt) from neuraminidase__InfluenzaA__ACV33157
augaauccaaaccaaaagauaauaaccauugguucggucuguaugacaauuggaauggcuaacuuaauauuacaaauuggaaacauaaucucaauauggauuagccacucaauucaacuugggaaucaaaaucagauugaaacaugcaaucaaagcgucauuacuuaugaaaacaacacuuggguaaaucagacauauguuaacaucagcaacaccaacuuugcugcuggacagucagugguuuccgugaaauuagcgggcaauuccucucucugcccuguuaguggaugggcuauauacaguaaagacaacaguauaagaaucgguuccaagggggauguguuugucauaagggaaccauucauaucaugcucccccuuggaaugcagaaccuucuucuugacucaaggggccuugcuaaaugacaaacauuccaauggaaccauuaaagacaggagcccauaucgaacccuaaugagcuguccuguuggugaaguucccucuccauacaacucaagauuugagucagucgcuuggucagcaagugcuugucaugauggcaucaauuggcuaacaauuggaauuucuggcccagacaauggggcaguggcuguguuaaaguacaacggcauaauaacagacacuaucaagaguuggagaaacaauauauugagaacacaagagucugaaugugcauguguaaaugguucuugcuuuacuguaaugaccgauggaccaagugauggacaggccucauacaagaucuucagaauagaaaagggaaagauagucaaaucagucgaaaugaaugccccuaauuaucacuaugaggaaugcuccuguuauccugauucuagugaaaucacaugugugugcagggauaacuggcauggcucgaaucgaccgugggugucuuucaaccagaaucuggaauaucagauaggauacauaugcagugggauuuucggagacaauccacgcccuaaugauaagacaggcaguugugguccaguaucgucuaauggagcaaauggaguaaaaggauuuucauucaaauacggcaaugguguuuggauagggagaacuaaaagcauuaguucaagaaacgguuuugagaugauuugggauccgaacggauggacugggacagacaauaacuucucaauaaagcaagauaucguaggaauaaaugaguggucaggauauagcgggaguuuuguucagcauccagaacuaacagggcuggauuguauaagaccuugcuucuggguugaacuaaucagagggcgacccaaagagaacacaaucuggacuagcgggagcagcauauccuuuugugguguaaacagugacacuguggguuggucuuggccagacggugcugaguugccauuuaccauugacaaguaa

SEQ ID NO: 49317 - RNA, 1410 nt, Artificial Sequence
  derived and/or modified CDS sequence (wt) from neuraminidase__InfluenzaA__ACV33167
augaauccaaaccaaaagauaauaaccauugguucggucuguaugacaauuggaauggcuaacuuaauauuacaaauuggaaacauaaucucaauauggauuagccacucaauucaacuugggaaucaaaaucagauugaaacaugcaaucaaagcgucauuacuuaugaaaacaacacuuggguaaaucagacauauguuaacaucagcaacaccaacuuugcugcuggacagucagugguuuccgugaaauuagcgggcaauuccucucucugcccuguuaguggaugggcuauauacaguaaagacaacaguauaagaaucgguuccaagggggauguguuugucauaagggaaccauucauaucaugcucccccuuggaaugcagaaccuucuucuugacucaaggggccuugcuaaaugacaaacauuccaauggaaccauuaaagacaggagcccauaucgaacccuaaugagcuguccuauuggugaaguucccucuccauacaacucaagauuugagucagucgcuuggucagcaagugcuugucaugauggcaucaauuggcuaacaauuggaauuucuggcccagacaauggggcaguggcuguguuaaaguacaacggcauaauaacagacacuaucaagaguuggagaaacaauauauugagaacacaagagucugaaugugcauguguaaaugguucuugcuuuacuguaaugaccgauggaccaagugauggacaggccucauacaagaucuucagaauagaaaagggaaagauagucaaaucagucgaaaugaaugccccuaauuaucacuaugaggaaugcuccuguuauccugauucuagugaaaucacaugugugugcagggauaacuggcauggcucgaaucgaccgugggugucuuucaaccagaaucuggaauaucagauaggauacauaugcagugggauuuucggagacaauccacgcccuaaugauaagacaggcaguugugguccaguaucgucuaauggagcaaauggaguaaaaggauuuucauucaaauacggcaaugguguuuggauagggagaacuaaaagcauuaguucaagaaacgguuuugagaugauuugggauccgaacggauggacugggacagacaauaacuucucaauaaagcaagauaucguaggaauaaaugaguggucaggauauagcgggaguuuuguucagcauccagaacuaacagggcuggauuguauaagaccuugcuucuggguugaacuaaucagagggcgacccaaagagaacacaaucuggacuagcgggagcagcauauccuuuugugguguaaacagugacacuguggauuggucuuggccagacggugcugaguugccauuuaccauugacaaguaa

SEQ ID NO: 49318 - RNA, 1410 nt, Artificial Sequence; identical to SEQ ID NO: 48750
  derived and/or modified CDS sequence (wt) from neuraminidase__InfluenzaA__ACV33177

SEQ ID NO: 49319 - RNA, 1410 nt, Artificial Sequence
  derived and/or modified CDS sequence (wt) from neuraminidase__InfluenzaA__ACV41993
augaauccaaaccaaaagauaauaaccauugguucggucuguaugacaauuggaauggcuaacuuaauauuacaaauuggaaacauaaucucaauauggauuagccacucaauucaacuugggaaucaaaaucagauugaaauaugcaaucaaagcgucauuacuuaugaaaacaacacuuggguaaaucagacauauguuaacaucagcaacaccaacuuugcugcuggacagucagugguuuccgugaaauuagcgggcaauuccucucucugcccuguugguggaugggcuauauacaguaaagacaacaguguaagaaucgguuccaagggggauguguuugucauaagggaaccauucauaucaugcucccccuuggaaugcagaaccuucuucuugacucaaggggccuugcuaaaugacaaacauuccaauggaaccauuaaagacaggagcccauaucgaacccuaaugagcuguccuauuggugaaguucccucuccauacaacucaagauuugagucagucgcuuggucagcaagugcuugucaugauggcaucaauuggcuaacaauuggaauuucuggcccagacaauggggcaguggcuguguuaaaguacaacggcauaauaacagacacuaucaagaguuggagaaacaauauauugagaacacaagagucugaaugugcauguguaaaugguucuugcuuuacuguaaugaccgauggaccaaguaauggacaggccucauacaagaucuucagaauagaaaagggaaagauagucaaaucagucgaaaugaaugccccuaauuaucacuaugaggaaugcuccuguuauccugauucuagugaaaucacaugugugugcagggauaacuggcauggcucgaaucgaccgugggugucuuucaaccagaaucuggaauaucagauaggauacauaugcagugggauuuucggagacaauccacgcccuaaugauaagacaggcaguugugguccaguaucgucuaauggagcaaauggaguaaaaggauuuucauucaaauacggcaaugguguuuggauagggagaacuaaaagcauuaguucaagaaacgguuuugagaugauuugggauccgaacggauggacugggacagacaauaacuucucaauaaagcaagauaucguaggaauaaaugaguggucaggauauagcgggaguuuuguucagcauccagaacuaacagggcuggauuguauaagaccuugcuucuggguugaacuaaucagagggcgacccaaagagaacacaaucuggacuagcgggagcagcauauccuuuugugguguaaacagugacacuguggguuggucuuggccagacggugcugaguugccauuuaccauugacaaguaa

SEQ ID NO: 49320 - RNA, 1410 nt, Artificial Sequence; identical to SEQ ID NO: 48750
  derived and/or modified CDS sequence (wt) from neuraminidase__InfluenzaA__ACV42010

SEQ ID NO: 49321 - RNA, 1410 nt, Artificial Sequence; identical to SEQ ID NO: 48750
  derived and/or modified CDS sequence (wt) from neuraminidase__InfluenzaA__ACV42020

SEQ ID NO: 49322 - RNA, 1410 nt, Artificial Sequence; identical to SEQ ID NO: 48516
  derived and/or modified CDS sequence (wt) from neuraminidase__InfluenzaA__ACV49504

SEQ ID NO: 49323 - RNA, 1362 nt, Artificial Sequence
  derived and/or modified CDS sequence (wt) from neuraminidase__InfluenzaA__ACV49537
augaauccaaaccagaaaauaauaaccauugggucaaucuguaugguagucggaauaauuagccuaauauugcaaauagggaauauaaucucaauauggauuagccauucaauucaaaccggaaaucaaaaccauacuggaauaugcaaccaaggcaucauuaccuauaacguuguugcugggcaggacucaacuucagugauauuaaccggcaauucaucucuuugucccauccgugggugggcuauacacagcaaagacaauggcauaagaauugguuccaaaggagacguuuuugucauaagagagccuuuuauuucauguucucacuuggaaugcaggaccuuuuuucugacucaaggcgccuuacugaaugacaagcauucaaauggggccguuaaggacagaagcccuuauagggccuuaaugagcugcccugucggugaagcuccguccccguacaauucaagguuugaaucgguugcuuggucagcaagugcaugucaugauggcaugggcuggcuaacaaucggaauuucugguccagauaauggagcaguggcuguauuaaaauacaacggcauaauaacugaaaccauaaaaaguuggaggaagaaaauauugagaacacaagagucugaauguaccuguguaaaugguucauguuuuaccauaaugaccgauggcccaagugaugggcuggccucguacaaaauuuucaagaucgagaaggggaagguuacuaaaucaauagaguugaaugcaccuaauucucacuacgaggaauguuccuguuacccugauaccggcaaagugaugugugugugcagagacaauuggcacgguucgaaccgaccauggguguccuucgaccaaaaccuagauuaucaaauaggauacaucugcagugggguuuucggugacaacccgcgucccaaagauggaacaggcagcuguggcccagugucugcugauggagcaaacggaguaaagggauuuucauauagguaugguaaugguguuuggauaggaaggacuaaaagugacaguuccagacauggguuugagaugauuugggauccuaauggauggacagagacugauaguagguucucugugagacaagauguuguggcaaugacugaucggucaggguacagcggaaguuucguucaacauccugagcuaacagggcuagacuguaugaggccuugcuucuggguugaauuaaucaggggacgaccugaggagaaaacaaucuggacuagugggagcaucauuucuuuuuguggcgugaauagugauacuguagauuggucuuggccagacggugcugaguugccguucaccauugacaaguag

SEQ ID NO: 49324 - RNA, 1362 nt, Artificial Sequence
  derived and/or modified CDS sequence (wt) from neuraminidase__InfluenzaA__ACV49559
augaauccaaaucagaaaauaauaaccauugggucaaucuguaugguagucggaauaauuagccuaauauugcaaauagggaauauaaucucaauauggauuagccauucaauucaagcugggaguagcaccugggugaaucaaacauauguuaauauuagcaacacuaacguugucgcuggacaggacgcaacuucagugauauuaaccggcaauucaucucuuugucccauccgugggugggcuauauacagcaaagacaauggcauaagaauugguuccaaaggagacauuuuugucauaagagagccuuuuauuucauguucucacuuggaaugcagggccuuuuuucugacucaaggcgccuuacugaaugacaagcauucaaaugggaccguuaaggacagaagcccuuauagggccuuaaugagcugcccugucggugaagcuccguccccguacaauucaagguuugaaucgguugcuuggucagcaagugcaugucaugauggcaugggcuggcuaacaaucggaauuucugguccagauaauggggcaguggcuguauuaaaauacaacggcauaauaacugaaaccauaaaaaguuggaggaagaaaauauugagaacacaagagucugaaugugccuguguaaaugguucauguuuuacuauaaugaccgauggcccaagugaugggccggccucguacaaaauuuucaagaucgagaaggggaagguuacuaaaucaauagaguuggaugcaccuaacucucacuacgaggaguguuccuguuacccugauaccggcaaagugaugugugugugcagagacaauuggcacgguucgaaccgaccaugggugucuuucgaucaaaaccuggauuaucaaauaggauacaucugcagugggguuuucggugacacuccgcgucccaaagauggaacaggcagcugugguccagugucuguugauggagcaaacggagugaagggauuuucauauagguauggugaugguguuuggauaggaaggacuaaaagucaaaguuccagacauggguuugagaugauuugggauccuaauggauggacagagacugauaguagguucucugugagacaagauguuguggcaauaacugauuggucaggguacagcggaaguuucguucaacauccugagcuaacagggcuagacuguaugaggccuugcuucuggguugaauuaaucagggggcaaccuaaagagaaaacaaucuggacuagugggagcagcauuucuuuuuguggcgugaauagugauacuguagacuggucuuggccagacggugcugaguugccauucaccauugacaaguag

SEQ ID NO: 49325 - RNA, 1395 nt, Artificial Sequence
  derived and/or modified CDS sequence (wt) from neuraminidase__InfluenzaA__ACV49570
augaauccaaaucagaaaauaauaaccauuggaucaaucuguaugguagucggaauaauuagccuaauauugcaaauagggaauauugucucaauauggauuagccauucaauucaaacuggaaaucaaaaccauacuggaacuugcgaccaaagcaucauuaccuauaaaaauagcaccuggguaaaucaaacauaugucaacguuguugcugggaaggauacaacuucagugauauuagccggcaauucaucucuuugcccuauccgugggugggcuauauacagcaaagauaauggcguaagaauugguuccaaaggagauguuuuugucauaagagaacccuuuauuucauguucucacuuggaaugcaggaccuuuuuucugacccaaggcgcccuguugaaugacaagcauucaaaugggaccguuaaggacagaagcccuuauagggccuuaaugagcugcccuguuggugaagcuccguccccguacaacucaagguuugaaucgguugcuuggucagcaagugcaugucaugauggcaugggcuggcuaacaaucggaauuucugguccagaugauggagcaguggcuguguuaaaauacaacggcauaauaacugaaaccauaaaaaguuggaggaaggaaauauugagaacacaagagucugaaugugucugcguaaaugguucauguuucacuauaaugaccgacggcccgaguggugggccggccucguacaaaauuuucaagaucgagaaggggaagguuacuaaaucaauagaguuggaugcaccuaauucucacuacgaggaauguuccuguuacccugauaccagcaaagugaugugugugugcagagacaauuggcacgguucgaaccgaccaugggugucuuucgaucaaaaucuggauuaucaaaugggauacaucugcagugggguuuucggugacaauccgcgucccaaagauggaaaaggcagcugugguccaguguauguugauggagcaaacggaguaaagggauuuucauacaaguaugguaaugguguuuggauagggaggacuaaaaguaacaguuccagacagggguucgagaugauuugggauccuaauggguggacagagacugauaguaauuucuuuacgaaacaagauguaguggcaguaaccgauuggucaggguacagcggaaguuucguucaacauccugagcuaacagggcuggacuguaugaggccuugcuucuggguugaauuaaucaggggacgaccuaaagaaaauacaaucuggaccagugggagcagcauuucuuuuuguggugugaauagugauacuguagauuggucuuggccagacggugccgaguugccauucaccauugacaaguag

SEQ ID NO: 49326 - RNA, 1410 nt, Artificial Sequence; identical to SEQ ID NO: 48416
  derived and/or modified CDS sequence (wt) from neuraminidase__InfluenzaA__ACV49581

SEQ ID NO: 49327 - RNA, 1410 nt, Artificial Sequence; identical to SEQ ID NO: 48416
  derived and/or modified CDS sequence (wt) from neuraminidase__InfluenzaA__ACV49592

SEQ ID NO: 49328 - RNA, 1410 nt, Artificial Sequence
  derived and/or modified CDS sequence (wt) from neuraminidase__InfluenzaA__ACV49603
augaauccaaaucaaaagauaauaacaauuggcucugucucucucaccauugaaacaguaugcuuccucaugcagauugccauccuggcaacuacugugacauugcauuuuaagcaacaugagugcgacucccccgcgagcaaccaaguaaugccaugugaaccaauaauaauagaaaggaacauaacagagauaguguauuugaauaacaccaccauagagaaagagauuugccccgaaguaguggaauacagaaauuggucaaagccgcaaugucaaauuacaggauuugcaccuuuuucuaaggacaauucaauccggcuuucugcugguggggacauuugggugacgagagaaccuuaugugucaugcgauccuggcaaguguuaucaauuugcacucgggcaggggaccacacuagacaacaaacauucaaauggcacaauacaugauagaaucccucaucgaacccuauuaaugaaugaguuggguguuccauuucauuuaggaaccaaacaaguguguguagcaugguccagcucaaguugucacgauggaaaagcaugguugcauguuugugucacuggggaugauagaaaugcaacugcuagcuucauuuaugacgggaggcuuguggacaguauugguucauggucucaaaauauccucaggacccaggagucggaaugcguuuguaucaaugggacuugcacaguaguaaugacugauggaagugcaucaggaagagccgauacuagaauacuauucauuaaagaggggaaaauuguccauauuagcccauugucaggaagugcucagcauauagaggaguguuccuguuacccucgauauccugacgucagauguaucugcagagacaacuggaaaggcucuaauaggcccguuauagacauaaauauggaagauuauagcauugauuccaguuaugugugcucagggcuuguuggcgacacacccaggaacgacgacagcucuagcaauagcaauugcagggauccuaacaaugagagagggaauccaggagugaaaggcugggccuuugacaauggagaugauguauggaugggaagaacaaucagcaaagauucacgcucagguuaugaaacuuucaaagucauuggugguugguccacaccuaauuccaaaucgcaggucaauagacaggucauaguugacaacaauaauuggucugguuacucugguauuuucucuguugagggcaaaagcugcaucaauaggugcuuuuauguggaguugauaaggggaaggccacaggagacuagaguaugguggaccucaaacaguauuguuguguuuuguggcacuucagguacuuauggaacaggcucauggccugauggggcgaacaucaauuucaugccuauauaa

SEQ ID NO: 49329 - RNA, 1410 nt, Artificial Sequence
  derived and/or modified CDS sequence (wt) from neuraminidase__InfluenzaA__ACV49625
augaauccaaaucaaaagacaauaacaauuggcucugucucucucaccauugaaacaguaugcuuccucaugcagauugccauccuggcaacuacugugacauugcauuuuaagcaacaugagugcgacucccccgcgagcaaccaaguaaugccaugugaaccaauaauaauagaaaggaacauaacagagauaguguauuugaauaacaccaccauagagaaagagauuugccccgaaguaguggaauacagaaauuggucaaagccgcaaugucaaauuacaggauuugcaccuuuuucuaaggacaauucaauccggcuuucugcugguggggacauuugggugacgagaggaccuuaugugucaugcgauccuggcaaguguuaucaauuugcacucgggcaggggaccacacuagacaacaaacauucaaauggcacaauacaugauagaaucccucaucgaacccuauuaaugaaugaguuggguguuccauuucauuuaggaaccaaacaaguguguguagcaugguccagcucaaguugucacgauggaaaagcaugguugcauguuugugucacuggggaugauagaaaugcaacugcuagcuucauuuaugacgggaggcuuguggacaguauugguucauggucucaaaauauccucaggacccaggagucggaaugcguuuguaucaaugggacuugcacaguaguaaugacugauggaagugcaucaggaagagccgauacuagaauacuauucauuaaagaggggaaaauuguccauauuagcccauugucaggaagugcucagcauauagaggaguguuccuguuacccucgauauccugacgucagauguaucugcagagacaacuggaaaggcucuaauaggcccguuauagacauaaauauggaagauuauagcauugauuccaguuaugugugcucagggcuuguuggcgacacacccaggaacgacgacagcucuagcaauagcaauugcagggauccuaacaaugagagagggaauccaggagugaaaggcugggccuuugacaauggagaugauguauggaugggaagaacaaucagcaaagauucacgcucagguuaugaaacuuucaaagucauuggugguugguccacaccuaauuccaaaucgcaggucaauagacaggucauaguugacaacaauaauuggucugguuacucugguauuuucucuguugagggcaaaagcugcaucaauaggugcuuuuauguggaguugauaaggggaaggccacaggagacuagaguaugguggaccucaaacaguauuguuguguuuuguggcacuucagguacuuauggaacaggcucauggccugauggggcgaacaucaauuucaugccuauauaa

SEQ ID NO: 49330 - RNA, 1410 nt, Artificial Sequence; identical to SEQ ID NO: 48468
  derived and/or modified CDS sequence (wt) from neuraminidase__InfluenzaA__ACV49647

SEQ ID NO: 49331 - RNA, 1413 nt, Artificial Sequence
  derived and/or modified CDS sequence (wt) from neuraminidase__InfluenzaA__ACV49669
augaauccaaaucagaaaauaauaaccauaggaucaaucuguauggcaauaggaauaauuagucuaauauugcaaauaggaaauauuguuucaauauggaucagccacucaauccaaacgggaagucaaaacuacacuggaauaugcaaccaaagaaucauuaccuaugaaaauagcaccuggguaaaucaaacauauguuaauaucaacaacacuaauguuguugcuggacaggacacaacuucagugacauuagccggcaauucaucucuuuguccuaucagugggugggcuauauacagcaaagacaacagcauaagaauugguuccaaaggagauguuuuugucauaagagaaccuuuuauaucauguucucacuuggaaugcagaaccuuuuuucugacccaaggugcucuauuaaaugacaagcauucaaauggaaccguuaaggacagaagcccuuauagggccuuaaugagcuguccuauaggugaagcuccgucucccuacaauucaagauuugaaucaguugcuuggucagcaagcgcaugucaugauggcaugggcuggcuaacaaucggaauuucugguccagaugauggagcaguggcuguacuaaaauacaacgguauaauaacugaaaccauaaaaaguuggaggaagcgaauauuaagaacacaagagucugaaugugucuguguaaacgguucauguuuuaccauaaugaccgauggcccgaauaaugggccugccucguacaaaaucuucaaaaucgagaaggggaagauuacuaaaucaauagaguuggaugcacccaauucucauuacgaggaauguuccuguuacccagacgccggcacagugaugugugugugcagagacaauuggcaugguucgaaucgacccugggugucuuuuaaucaaaaccuggauuaucaaauaggauacaucugcagugguguuuuuggugacaauccgcgucccaaagauggaaaaggcagcugugguccaguaacuguugauggagcagacggaguaaagggguuuucauacagguaugguaaugguguuuggauaggaaggacuaaaaguaacagcuccagaagaggauuugagaugauuugggacccuaauggauggacagauaccgauaguaaauucuuagugaaacaggauguaguggcaaugacugauuggucaggguacagcggaagcuucguucaacauccugaacuaacaggauuggauuguaugaggccuugcuucuggguugaauugaucagaggacgaccuagagaaaauacaacaaucuggacuagugggagcagcauuucuuuuuguggcgugaauggugauacugcaaauuggucuuggccagacggugccgaguugccauucaccauugacaaguag

SEQ ID NO: 49332 - RNA, 1413 nt, Artificial Sequence
  derived and/or modified CDS sequence (wt) from neuraminidase__InfluenzaA__ACV49679
augaacccaaaucaaaagauaauaaccauuggaucaaucaguauagcaaucggaauaauuagucuaauguugcaaauaggaaguauuauuucaauaugggcuagucacucaauccgaacuggaagucaaaacaacacuggaauaugcaaccaaagaaucauaacauaugaaaacagcaccugggugaaucacacauauguuaauauuaacaacacuaauguuguugcuggagaggacaaaacgucagugacauuggccggcaauucaucucuuuguucuaucaguggaugggcuauauacacaaaagacaacagcauaagaauuggcuccaaaggagauguuuuugucauaagagaaccuuucauaucauguucucacuuggaaugcagaaccuuuuuucugacccaaggcgcucuauuaaaugacaaacauucaaaugggaccguaaaggacagaaguccuuauagggccuuaaugagcuguccucuaggugaagcuccguccccauacaauucaaaguucgaaucaguugcauggucagcaagcgcaugccaugauggcaugggcugguuaacaaucggaauuucugguccagacaauggagcuguggcuguacuaaaauacaacggaauaauaacuggaaccauaaaaaguuggaaaaagcaaauauuaagaacacaagagucugaaugugucuguaugaacgggucauguuucaccauaaugaccgauggcccgaguaauaaagccgccucguacaaaauuuucaagaucgaaaaggggaagguuacuaaaucaauagaguugaaugcacccaauuuuuauuaugaggaaugcuccuguuacccagacacuggcauagugauguguguaugcagggacaacuggcaugguucaaaucgaccuugggugucuuuuaaucaaaauuuggauuaucaaauaggauacaucugcaguggaguguuuggugacaauccgcgucccgaagauggagagggcagcugcaauccagugacuguugauggagcaaacggaguaaaaggguuuucauacaaauaugguaaugguguuuggauaggaaggaccaaaaguaacagacuuagaaagggguuugagaugauuugggauccuaauggauggacaaauaccgacagugauuucucagugaaacaggauguuguagcaauaacugauuggucaggguacagcggaaguuucguccaacauccugaguugacaggauuggacuguauaagaccuugcuucuggguugaguuagucagagggcugccuagagaaaauacaacaaucuggacuagugggagcagcauuucuuuuuguggcguuaauagugauacugcaaacuggucuuggccagacggugcugaguugccguucaccauugacaaguag

SEQ ID NO: 49333 - RNA, 1410 nt, Artificial Sequence
  derived and/or modified CDS sequence (wt) from neuraminidase__InfluenzaA__ACV53442
augaauccaaaccaaaagauaauaaccauugguucggucuguaugacaauuggaauggcuaacuuaauauuacaaauuggaaacauaaucucaauauggauuagccacucaauucaacuugggaaucaaaaucagauugaaacaugcaaucaaagcgucauuacuuaugaaaacaacacuuggguaaaucagacauauguuaacaucagcaacaccaacuuugcugcuggacagucagugguuuccgugaaauuagcgggcaauuccucucucugcccuguuaguggaugggcuauauacaguaaagacaacaguguaagaaucgguuccaagggggauguguuugucauaagggaaccauucauaucaugcucccccuuggaaugcagaaccuucuucuugacucaaggggccuugcuaaaugacaaacauuccaauggaaccauuaaagacaggagcccauaucgaacccuaaugagcuguccuauuggugaaguucccucuccauacaacucaagauuugagucagucgcuuggucagcaagugcuugucaugauggcaucaauuggcuaacaauuggaauuucuggcccagacaauggggcaguggcuguguuaaaguacaacggcauaauaacagacacuaucaagaguuggagaaacaauauauugagaacacaagagucugaaugugcauguguaaaugguucuugcuuuacuguaaugaccgauggaccaagugauggacaggccucauacaagaucuucagaauagaaaagggaaagauagucaaaucagucgaaaugaaugccccuaauuaucacuaugaggaaugcuccuguuauccugauucuagugaaaucacaugugugugcagggauaacuggcauggcucgaaucgaccgugggugucuuucaaccagaaucuggaauaucagauaggauacauaugcagugggauuuucggagacaauccacgcccuaaugauaagacaggcaguugugguccaguaucgucuaauggagcaaauggaguaaaaggauuuucauucaaauacggcaaugguguuuggauagggagaacuaaaagcauuaguucaagaaacgguuuugagaugauuugggauccgaacggauggacugggacagacaauaacuucucaauaaagcaagauaucguaggaauaaaugaguggucaggauauagcgggaguuuuguucagcauccagaacuaacagggcuggauuguauaagaccuugcuucuggguugaacuaaucagagggcgacccaaagagaacacaaucuggacuagcgggagcagcauauccuuuugugguguaaacagugacacuguggguuggucuuggccagacggugcugaguugccauuuaccauugacaaguaa

SEQ ID NO: 49334 - RNA, 1410 nt, Artificial Sequence; identical to SEQ ID NO: 49129
  derived and/or modified CDS sequence (wt) from neuraminidase__InfluenzaA__ACV53452

SEQ ID NO: 49335 - RNA, 1410 nt, Artificial Sequence; identical to SEQ ID NO: 48813
  derived and/or modified CDS sequence (wt) from neuraminidase__InfluenzaA__ACV53462

SEQ ID NO: 49336 - RNA, 1410 nt, Artificial Sequence; identical to SEQ ID NO: 48750
  derived and/or modified CDS sequence (wt) from neuraminidase__InfluenzaA__ACV53472

SEQ ID NO: 49337 - RNA, 1410 nt, Artificial Sequence
  derived and/or modified CDS sequence (wt) from neuraminidase__InfluenzaA__ACV53482
augaauccaaaccaaaagauaauuaccauugguucggucuguaugacaauuggaauggcuaacuuaauauuacaaauuggaaacauaaucucaauauggauuagccacucaauucaacuugggaaucaaaaucagauugaaacaugcaaucaaagcgucauuacuuaugaaaacaacacuuggguaaaucagacauauguuaacaucagcaacaccaacuuugcugcuggacagucagugguuuccgugaaauuagcgggcaauuccucucucugcccuguuaguggaugggcuauauacaguaaagacaacaguguaagaaucgguuccaagggggauguguuugucauaagggaaccauucauaucaugcucccccuuggaaugcagaaccuucuucuugacucaaggggccuugcuaaaugacaaacauuccaauggaaccauuaaagacaggagcccauaucgaacccuaaugagcuguccuauuggugaaguucccucuccauacaacucaagauuugagucagucgcuuggucagcaagugcuugucaugauggcaucaauuggcuaacaauuggaauuucuggcccagacaauggggcaguggcuguguuaaaguacaacggcauaauaacagacacuaucaagaguuggagaaacaauauauugagaacacaagagucugaaugugcauguguaaaugguucuugcuuuacuguaaugaccgauggaccaaguaauggacaggccucauacaagaucuucagaauagaaaagggaaagauagucaaaucagucgaaaugaaugccccuaauuaucacuaugaggaaugcuccuguuauccugauucuggugaaaucacaugugugugcagggauaacuggcauggcucgaaucgaccgugggugucuuucaaccagaaucuggaauaucagauaggauacauaugcagugggauuuucggagacaauccacgcccuaaugauaagacaggcaguugugguccaguaucgucuaauggagcaaauggaguaaaaggauuuucauucaaauacggcaaugguguuuggauagggagaacuaaaagcauuaguucaagaaacgguuuugagaugauuugggauccgaacggauggacugcgacagacaauaacuucucaauaaagcaagauaucguaggaauaaaugaguggucaggauauagcgggaguuuuguucagcauccagaacuaacagggcuggauuguauaagaccuugcuucuggguugaacuaaucagagggcgacccaaagagaacacaaucuggacuagcgggagcagcauauccuuuugugguguaaacagugacacuguggguuggucuuggccagacggugcugaguugccauuuaccauugacaaguaa

SEQ ID NO: 49338 - RNA, 1410 nt, Artificial Sequence
  derived and/or modified CDS sequence (wt) from neuraminidase__InfluenzaA__ACV53492
augaauccaaaccaaaagauaauaaccauugguucggucuguaugacaauuggaauggcuaacuuaauauuacaaauuggaaacauaaucucaauauggauuagccacucaauucaacuugggaaucaaaaucagauugaaacaugcaaucaaagcgucauuacuuaugaaaacaacacuuggguaaaucagacauauguuaacaucagcaacaccaacuuugcugcuggacagucagugguuuccgugaaauuagcgggcaauuccucucucugcccuguuaguggaugggcuauauacaguaaagacaacaguauaagaaucgguuccaagggggauguguuugucauaagggaaccauucauaucaugcucccccuuggaaugcagaaccuucuucuugacucaaggggccuugcuaaaugacaaacauuccaauggaaccauuaaagacaggagcccauaucgaacccuaaugagcuguccuauuggugaaguucccucuccauacaacucaagauuugagucagucgcuuggucagcaagugcuugucaugauggcaucaauuggcuaacaauuggaauuucuggcccagacaauggggcaguggcuguguuaaaguacaacggcauaauaacagacacuaucaagaguuggagaaacaauauauugagaacacaagagucugaaugugcauguguaaaugguucuugcuuuacuguaaugaccgauggaccaagugauggacaggccucauacaagaucuucagaauagaaaagggaaagauagucaaaucagucgaaaugaaugccccuaauuaucacuaugaggaaugcuccuguuauccugauucuagugaaaucacaugugugugcagggauaacuggcauggcucgaaucgaccgugggugucuuucaaccagaaucuggaauaucagauaggauacauaugcagugggauuuucggagacaauccacgcccuaaugauaaggcaggcaguugugguccaguaucgucuaauggagcaaauggaguaaaaggauuuucauucaaauacggcaaugguguuuggauagggagaacuaaaagcauuaguucaagaaacgguuuugagaugauuugggauccgaacggauggacugagacagacaauaacuucuuaauaaagcaagauaucguaggaauaaaugaguggucaggauauagcgggaguuuuguucagcauccagaacuaacagggcuggauuguauaagaccuugcuucuggguugaacuaaucagagggcgacccaaagagaacacaaucuggacuagcgggagcagcauauccuuuugugguguaaacagugacacuguggguuggucuuggccagacggugcugaguugccauuuaccauugacaaguaa

SEQ ID NO: 49339 - RNA, 1410 nt, Artificial Sequence
  derived and/or modified CDS sequence (wt) from neuraminidase__InfluenzaA__ACV53502
augaauccaaaccaaaagauaauaaccauugguucggucuguaugacaauuggaauggcuaacuuaauauuacaaauuggaaacauaaucucaauauggauuagccacucaauucaacuugggaaucaaaaucagauugaaacaugcaaucaaagcgucauuacuuaugaaaacaacacuuggguaaaucagacauauguuaacaucagcaacaccaacuuugcugcuggacagucagugguuuccgugaaauuagcgggcaauuccucucucugcccuguuaguggaugggcuauauacaguaaagacaacaguauaagaaucgguuccaagggggauguguuugucauaagggaaccauucauaucaugcucccccuuggaaugcagaaccuucuucuugacucaaggggccuugcuaaaugacaaacauuccaauggaaccauuaaagacaggagcccauaucgaacccuaaugagcuguccuauuggugaaguucccucuccauacaacucaagauuugagucagucgcuuggucagcaagugcuugucaugauggcaucaauuggcuaacaauuggaauuucuggcccagacaauggggcaguggcuguguuaaaguacaacggcauaauaacagacacuaucaagaguuggagaaacaauauauugagaacacaagagucugaaugugcauguguaaaugguucuugcuuuacuguaaugaccgauggaccaagugauggacaggccucauacaagaucuucagaauagaaaagggaaagauagucaaaucagucgaaaugaaugccccuaauuaucacuaugaggaaugcuccuguuauccugauucuagugaaaucacaugugugugcagggauaacuggcauggcucgaaucgaccgugggugucuuucaaccagaaucuggaauaucagauaggauacauaugcagugggauuuucggagacaauccacgcccuaaugauaaggcaggcaguugugguccaguaucgucuaauggagcaaauggaguaaaaggauuuucauucaaauacggcaaugguguuuggauagggagaacuaaaagcauuaguucaagaaacgguuuugagaugauuugggauccgaacggauggacugggacagacaauaacuucuuaauaaagcaagauaucguaggaauaaaugaguggucaggauauagcgggaguuuuguucagcauccagaacuaacagggcuggauuguauaagaccuugcuucuggguugaacuaaucagagggcgacccaaagagaacacaaucuggacuagcgggagcagcauauccuuuugugguguaaacagugacacuguggguuggucuuggccagacggugcugaguugccauuuaccauugacaaguaa

SEQ ID NO: 49340 - RNA, 1410 nt, Artificial Sequence
  derived and/or modified CDS sequence (wt) from neuraminidase__InfluenzaA__ACV53891
augaauccaaaccaaaagauaauaaccauugguucggucuguaugacaauuggaauggcuaacuuaauauuacaaauuggaaacauaaucucaauauggauuagccacucaauucaacuugggaaucaaaaucagauugaaacaugcaaucaaagcgucauuacuuaugaaaacaacacuuggguaaaucagacauauguuaacaucagcaacaccaacuuugcugcuggacagucagugguuuccgugaaauuagcgggcaauuccucucucugcccuguuaguggaugggcuauauacaguaaagacaacaguauaagaaucgguuccaagggggauguguuugucauaagggaaccauucauaucaugcucccccuuggaaugcagaaccuucuucuugacucaaggggccuugcuaaaugacaaacauuccaauggaaccauuaaagacaggagcccauaucgaacccuaaugagcuguccuauuggugaaguucccucuccauacaacucaagauuugagucagucgcuuggucagcaagugcuugucaugauggcaucaauuggcuaacaauuggaauuucuggcccagacaauggggcaguggcuguguuaaaguacaacggcauaauaacagacacuaucaagaguuggagaaacaaaauauugagaacacaagagucugaaugugcauguguaaaugguucuugcuuuacuguaaugaccgauggaccaagugauggacaggccucauacaagaucuucagaauagaaaagggaaagauagucaaaucagucgaaaugaaugccccuaauuaucacuaugaggaaugcuccuguuauccugauucuagugaaaucacaugugugugcagggauaacuggcauggcucgaaucgaccgugggugucuuucaaccagaaucuggaauaucagauaggauacauaugcagugggauuuucggagacaauccacgcccuaaugauaagacaggcaguugugguccaguaucgucuaauggagcaaauggaguaaaaggauuuucauucaaauacggcaaugguguuuggauagggagaacuaaaagcauuaguucaagaaacgguuuugagaugauuugugauccgaacggauggacugggacagacaauaacuucucaauaaagcaagauaucguaggaauaaaugaguggucaggauauagcgggaguuuuguucagcauccagaacuaacagggcuggauuguauaagaccuugcuucuggguugaacuaaucagagggcgacccaaagagaacacaaucuggacuagcgggagcagcauauccuuuugugguguaaacagugacacuguggguuggucuuggccagacggugcugaguugccauuuaccauugacaaguaa

SEQ ID NO: 49341 - RNA, 1410 nt, Artificial Sequence
  derived and/or modified CDS sequence (wt) from neuraminidase__InfluenzaA__ACV53901
augaauccaaaccaaaagauaauaaccauugguucggucuguaugacaauuggaauggcuaacuuaauauuacaaauuggaaacauaaucucaauauggauuagccacucaauucaacuugggaaucaaaaucagauugaaacaugcaaucaaagcgucauuacuuaugaaaacaacacuuggguaaaucagacauauguuaacaucagcaacaccaacuuugcugcuggacagucagugguuuccgugaaauuagcgggcaauuccucucucugcccuguuaguggaugggcuauauacaguaaagacaacaguauaagaaucgguuccaagggggauguguuugucauaagggaaccauucauaucaugcucccccuuggaaugcagaaccuucuucuugacucaaggggccuugcuaaaugacaaacauuccaauggaaccauuaaagacaggagcccauaucgaacccuaaugagcuguccuauuggugaaguucccucuccauacaacucaagauuugagucagucgcuuggucagcaagugcuugucaugauggcaucaauuggcuaacaauuggaauuucuggcccagacaauggggcaguggcuguguuaaaguacaacggcauaauaacagacacuaucaagaguuggagaaacaauauauugagaacacaagagucugaaugugcauguguaaaugguucuugcuuuacuguaaugaccgauggaccaagugauggacaggccucauacaagaucuucagaauagaaaagggaaagauagucaaaucagucgaaaugaaugccccuaauuaucacuaugaggaaugcuccuguuauccugauucuagugaaaucacaugugugugcagggauaacuggcauggcucgaaucgaccgugggugucuuucaaccagaaucuggaauaucagauaggauacauaugcagugggauuuucggagacaauccacgcccuaaugauaagacaggcaguugugguccaguaucgucuaauggagcaaauggaguaaaaggauuuucauucaaauacggcaaugguguuuggauagggagaacuaaaagcauuaguucaagaaacgguuuugagaugauuugggauccgaacggauggacugggacagacaauaacuucucaauaaagcaagauaucguaggaauaaaugaguggucaggauauagcaggaguuuuguucagcauccagaacuaacagggcuggauuguauaagaccuugcuucuggguugaacuaaucagagggcgacccaaagagaacacaaucuggacuagcgggagcagcauauccuuuugugguguaaacagugacacuguggguuggucuuggccagacggugcugaguugccauuuaccauugacaaguaa

SEQ ID NO: 49342 - RNA, 1410 nt, Artificial Sequence; identical to SEQ ID NO: 48750
  derived and/or modified CDS sequence (wt) from neuraminidase__InfluenzaA__ACV53911

SEQ ID NO: 49343 - RNA, 1410 nt, Artificial Sequence
  derived and/or modified CDS sequence (wt) from neuraminidase__InfluenzaA__ACV67088
augaauccaaaccaaaagauaauaaccauugguucggucuguaugacaauuggaauggcuaacuuaauauuacaaauuggaaacauaaucucaauauggauuagccacucaauucaacuugggaaucaaaaucagauugaaacaugcaaucaaagcgucauuacuuaugaaaacaacacuuggguaaaucagacauauguuaacaucagcaacaccaacuuugcugcuggacagucagugguuuccgugaaauuagcgggcaauuccucucucugcccuguuaguggaugggcuauauacaguaaagacaacaguguaagaaucgguuccaagggggauguguuugucauaagggaaccauucauaucaugcucccccuuggaaugcagaaccuucuucuugacucaaggggccuugcuaaaugacaaacauuccaauggaaccauuaaagacaggagcccauaucgaacccuaaugagcuguccuauuggugaaguucccucuccauacaacucaagauuugagucagucgcuuggucagcaagugcuugucaugauggcaucaauuggcuaacaauuggaauuucuggcccagacaauggggcaguggcuguguuaaaguacaacggcauaauaacagacacuaucaagaguuggagaaacaauauauugagaacacaagagucugaaugugcauguguaaaugguucuugcuuuacuguaaugaccgauggaccaaguaauggacaggccucauacaagaucuucagaauagaaaagggaaagauagucaaaucagucgaaaugaaugccccuaauuaucacuaugaggaaugcuccuguuauccugauucuagugaaaucacaugugugugcagggauaacuggcauggcucgaaucgaccgugggugucuuucaaccagaaucuggaauaucagauaggauacauaugcagugggauuuucggagacaauccacgcccuaaugauaagacaggcaguugugguccaguaucgucuaauggagcaaauggaguaaaaggauuuucuuucaaauacggcaaugguguuuggauagggagaacuaaaagcauuaguucaagaaacgguuuugagaugauuugggauccgaacggauggacugggacagacaauaacuucucaauaaagcaagauaucguaggaauaaaugaguggucaggauauagcgggaguuuuguucagcauccagaacuaacagggcuggauuguauaagaccuugcuucuggguugaacuaaucagagggcgacccaaagagaacacaaucuggacuagcgggagcagcauauccuuuugugguguaaacagugacacuguggguuggucuuggccagacggugcugaguugccauuuaccauugacaaguaa

SEQ ID NO: 49344 - RNA, 1410 nt, Artificial Sequence
  derived and/or modified CDS sequence (wt) from neuraminidase__InfluenzaA__ACV67168
augaauccaaaccaaaagauaauaaccauugguucggucuguaugacaauuggaauggcuaacuuaauauuacaaauuggaaacauaaucucaauauggauuagccacucaauucaacuugggaaucaaaaucagauugaaacaugcaaucaaagcgucauuacuuaugaaaacaacacuuggguaaaucagacauauguuaacaucagcaacaccaacuuugcugcuggacagucagugguuuccgugaaauuagcgggcaauuccucucucugcccuguuaguggaugggcuauauacaguaaagacaacaguauaagaaucgguuccaagggggauguguuugucauaagggaaccauucauaucaugcucccccuuggaaugcagaaccuucuucuugacucaaggggccuugcuaaaugacaaacauuccaauggaaccauuaaagacaggagcccauaucgaacccuaaugagcuguccuauuggugaaguucccucuccauacaacucaagauuugagucagucgcuuggucagcaagugcuugucaugauggcaucaauuggcuaacaauuggaauuucuggcccagacaauggggcaguggcuguguuaaaguacaacggcauaauaacagacacuaucaagaguuggagaaacaauauauugagaacacaagagucugaaugugcauguguaaaugguucuugcuuuacuguaaugaccgauggaccaagugauggacaggccucauacaagaucuucagaauagaaaaggggaagauagucaaaucagucgaaaugaaugccccuaauuaucacuaugaggaaugcuccuguuauccugauucuagugaaaucacaugugugugcagggauaacuggcauggcucgaaucgaccgugggugucuuucaaccagaaucuggaauaucagauaggauacauaugcagugggauuuucggagacaauccacgcccuaaugauaagacaggcaguugugguccaguaucgucuaauggagcaaauggaguaaaaggauuuucauucaaauacggcaaugguguuuggauagggagaacuaaaagcauuaguucaagaaacgguuuugagaugauuugggauccgaacggauggacugggacagacaauaacuucucaauaaagcaagauaucguaggaauaaaugaguggucaggauauagcgggaguuuuguucagcauccagaacuaacagggcuggauuguauaagaccuugcuucuggguugaacuaaucagagggcgacccaaagagaacacaaucuggacuagcgggagcagcauauccuuuugugguguaaacagugacacuguggguuggucuuggccagacggugcugaguugccauuuaccauugacaaguaa

SEQ ID NO: 49345 - RNA, 1410 nt, Artificial Sequence; identical to SEQ ID NO: 48749
  derived and/or modified CDS sequence (wt) from neuraminidase__InfluenzaA__ACV67169

SEQ ID NO: 49346 - RNA, 1410 nt, Artificial Sequence
  derived and/or modified CDS sequence (wt) from neuraminidase__InfluenzaA__ACV67171
augaauccaaaccaaaagauaauaaccauugguucggucuguaugacaauuggaauggcuaacuuaauauuacaaauuggaaacauaaucucaauauggauuagccacucaauucaacuugggaaucaaaaucagauugaaacaugcaaucaaagcgucauuacuuaugaaaacaacacuuggguaaaucagacauauguuaacaucagcaacaccaacuuugcugcuggacagucagugguuuccgugaaauuagcgggcaauuccucucucugcccuguuaguggaugggcuauauacaguaaagacaacaguauaagaaucgguuccaaaggggauguguuugucauaagggaaccauucauaucaugcucucccuuggaaugcagaaccuucuucuugacucaaggggccuugcuaaaugacaaacauuccaauggaaccauuaaagacaggagcccauaucgaacccuaaugagcuguccuauuggugaaguucccucuccauacaacucaagauuugagucagucgcuuggucagcaagugcuugucaugauggcaucaauuggcuaacaauuggaauuucuggcccagacaauggggcaguggcuguguuaaaguacaacggcauaauaacagacacuaucaagaguuggagaaacaauauauugagaacacaagagucugaaugugcauguguaaaugguucuugcuuuacuguaaugaccgauggaccaagugauggacaggccucauacaagaucuucagaauagaaaagggaaagauagucaaaucagucgaaaugaaugccccuaauuaucacuaugaggaaugcuccuguuauccugauucuagugaaaucacaugugugugcagggauaacuggcauggcucgaaucgaccgugggugucuuucaaccagaaucuggaauaucagauaggauacauauguagugggauuuucggagacaauccacgcccuaaugauaagacaggcaguugugguccaguaucgucuaauggagcaaauggaguaaaaggauuuucauucaaauacggcaaugguguuuggauagggaggacuaaaagcauuaguucaagaaacgguuuugagaugauuugggauccgaacggauggacugggacagacaauaacuucucaauaaagcaagauaucguaggaauaaaugaguggucaggauauagcgggaguuuuguucagcauccagaacuaacagggcuggauuguauaagaccuugcuucuggguugaacuaaucagagggcgacccaaagagaacacaaucuggacuagcgggagcagcauauccuuuugugguguaaacagugacacuguggguuggucuuggccagacggugcugaguugccauuuaccauugacaaguaa

SEQ ID NO: 49347 - RNA, 1410 nt, Artificial Sequence; identical to SEQ ID NO: 48750
  derived and/or modified CDS sequence (wt) from neuraminidase__InfluenzaA__ACV67172

SEQ ID NO: 49348 - RNA, 1410 nt, Artificial Sequence; identical to SEQ ID NO: 48780
  derived and/or modified CDS sequence (wt) from neuraminidase__InfluenzaA__ACV67173

SEQ ID NO: 49349 - RNA, 1410 nt, Artificial Sequence; identical to SEQ ID NO: 48783
  derived and/or modified CDS sequence (wt) from neuraminidase__InfluenzaA__ACV67174

SEQ ID NO: 49350 - RNA, 1410 nt, Artificial Sequence
  derived and/or modified CDS sequence (wt) from neuraminidase__InfluenzaA__ACV67175
augaauccaaaccaaaagauaauaaccauugguucggucuguaugacaauuggaauggcuaacuuaauauuacaaauuggaaacauaaucucaauauggauuagccacucaauucaacuugggaaucaaaaucagauugaaacaugcaaucaaagcgucauuacuuaugaaaacaacacuuggguaaaucagacauauguuaacaucagcaacaccaacuuugcugcuggacagucagugguuuccgugaaauuagcgggcaauuccucucucugcccuguuaguggaugggcuauauacaguaaagacaacaguauaagaaucgguuccaagggggauguguuugucauaagggaaccauucauaucaugcucccccuuggaaugcagaaccuucuucuugacucaaggggccuugcuaaaugacaaacauuccaauggaaccauuaaagacaggagcccauaucgaacccuaaugagcuguccuauuggugaaguucccucuccauacaacucaagauuugagucagucgcuuggucagcaagugcuugucaugauggcaucaauuggcuaacaauuggaauuucuggcccagacaauggggcaguggcuguguuaaaguacaacggcauaauaacagacacuaucaagaguuggagaaacaauauauugagaacacaagagucugaaugugcauguguaaaugguucuugcuuuacuguaaugaccgauggaccaagugauggacaggccucauacaagaucuucagaauagaaaagggaaagauagucaaaucagucgaaaugaaugccccuaauuaucacuaugaggaaugcuccuguuauccugauucuagugaaaucacaugugugugcagggauaacuggcauggcucgaaucgaccgugggugucuuucaaccagaaucuggaauaucagauaggauacauaugcagugggauuuucggagacaauccacgcccuaaugauaagacaggcaguugugguccaguaucgucuaauggaucaaauggaguaaaaggauuuucauucaaauacggcaaugguguuuggauagggagaacuaaaagcauuaguucaagaaacgguuuugagaugauuugggauccgaacggauggacugggacagacaauaacuucucaauaaagcaagauaucguaggaauaaaugaguggucaggauauagcgggaguuuuguucagcauccagaacuaacagggcuggauuguauaagaccuugcuucuggguugaacuaaucagagggcgacccaaagagaacacaaucuggacuagcgggagcagcauauccuuuugugguguaaacagugacacuguggguuggucuuggccagacggugcugaguugccauuuaccauugacaaguaa

SEQ ID NO: 49351 - RNA, 1410 nt, Artificial Sequence; identical to SEQ ID NO: 48947
  derived and/or modified CDS sequence (wt) from neuraminidase__InfluenzaA__ACV67176

SEQ ID NO: 49352 - RNA, 1410 nt, Artificial Sequence; identical to SEQ ID NO: 48761
  derived and/or modified CDS sequence (wt) from neuraminidase__InfluenzaA__ACV67177

SEQ ID NO: 49353 - RNA, 1410 nt, Artificial Sequence; identical to SEQ ID NO: 48750
  derived and/or modified CDS sequence (wt) from neuraminidase__InfluenzaA__ACV67178

SEQ ID NO: 49354 - RNA, 1410 nt, Artificial Sequence; identical to SEQ ID NO: 48750
  derived and/or modified CDS sequence (wt) from neuraminidase__InfluenzaA__ACV67179

SEQ ID NO: 49355 - RNA, 1410 nt, Artificial Sequence
  derived and/or modified CDS sequence (wt) from neuraminidase__InfluenzaA__ACV67180
augaauccaaaccaaaagauaauaaccauugguucggucuguaugacaauuggaauggcuaacuuaauauuacaaauuggaaacauaaucucaauauggauuagccacucaauucaacuugggaaucaaaaucagauugaaacaugcaaucaaagcgucauuacuuaugaaaacaacacuuggguaaaucagacauauguuaacaucagcaacaccaacuuugcugcuggacagccagugguuuccgugaaauuagcgggcaauuccucucucugcccuguuaguggaugggcuauauacaguaaagacaacaguauaagaaucgguuccaagggggauguguuugucauaagggaaccauucauaucaugcucccccuuggaaugcagaaccuucuucuugacucaaggggccuugcuaaaugacaaacauuccaauggaaccauuaaagacaggagcccauaucgaacccuaaugagcuguccuauuggugaaguucccucuccauacaacucaagauuugagucagucgcuuggucagcaagugcuugucaugauggcaucaauuggcuaacaauuggaauuucuggcccagacaauggggcaguggcuguguuaaaguacaacggcauaauaacagacacuaucaagaguuggagaaacaauauauugagaacacaagagucugaaugugcauguguaaaugguucuugcuuuacuguaaugaccgauggaccaagugauggacaggccucauacaagaucuucagaauagaaaagggaaagauagucaaaucagucgaaaugaaugccccuaauuaucacuaugaggaaugcuccuguuauccugauucuagugaaaucacaugugugugcagggauaacuggcauggcucgaaucgaccgugggugucuuucaaccagaaucuggaauaucagauaggauacauaugcagugggauuuucggagacaauccacgcccuaaugauaagacaggcaguugugguccaguaucgucuaauggagcaaauggaguaaaaggauuuucauucaaauacggcaaugguguuuggauagggagaacuaaaagcauuaguucaagaaacgguuuugagaugauuugggauccgaacggauggacugggacagacaauaacuucucaauaaagcaagauaucguaggaauaaaugaguggucaggauauagcgggaguuuuguucagcauccagaacuaacagggcuggauuguauaagaccuugcuucuggguugaacuaaucagagggcgacccaaagagaacacaaucuggacuagcgggagcagcauauccuuuugugguguaaacagugacacuguggguuggucuuggccagacggugcugaguugccauuuaccauugacaaguaa

SEQ ID NO: 49356 - RNA, 1410 nt, Artificial Sequence
  derived and/or modified CDS sequence (wt) from neuraminidase__InfluenzaA__ACV67181
augaauccaaaccaaaagauaauaaccauugguucggucuguaugacaauuggaauggcuaacuuaauauuacaaauuggaaacauaaucucaauauggauuagccacucaauucaacuugggaaucaaaaucagauugaaacaugcaaucaaagcgucauuacuuaugaaaacaacacuuggguaaaucagacauauguuaacaucagcaacaccaacuuugcugcuggacagucagugguuuccgugaaauuagcgggcaauuccucucucugcccuguuaguggaugggcuauauacaguaaagacaacaguauaagaaucgguuccaagggggauguguuuaucauaagggaaccauucauaucaugcucccccuuggaaugcagaaccuucuucuugacucaaggggccuugcuaaaugacaaacauuccaauggaaccauuaaagacaggagcccauaucgaacccuaaugagcuguccuauuggugaaguucccucuccauacaacucaagauuugagucagucgcuuggucagcaagugcuugucaugauggcaucaauuggcuaacaauuggaauuucuggcccagacaauggggcaguggcuguguuaaaguacaacggcauaauaacagacacuaucaagaguuggagaaacaauauauugagaacacaagagucugaaugugcauguguaaaugguucuugcuuuacuguaaugaccgauggaccaagugauggacaggccucauacaagaucuucagaauagaaaagggaaagauaaucaaaucagucgaaaugaaugccccuaauuaucacuaugaggaaugcuccuguuauccugauucuagugaaaucacaugugugugcagggauaacuggcauggcucgaaucgaccgugggugucuuucaaccagaaucuggaauaucagauaggauacauaugcagugggauuuucggagacaauccacgcccuaaugauaagacaggcaguugugguccaguaucgucuaauggagcaaauggaguaaaaggauuuucauucaaauacggcaaugguguuuggauagggagaacuaaaagcauuaguucaagaaacgguuuugagaugauuugggauccgaacggauggacugggacagacaauaacuucucaauaaagcaagauaucguaggaauaaaugaguggucaggauauagcgggaguuuuguucagcauccagaacuaacagggcuggauuguauaagaccuugcuucuggguugaacuaaucagagggcgacccaaagagaacacaaucuggacuagcgggagcagcauauccuuuugugguguaaacagugacacuguggguuggucuuggccagacggugcugaguugccauuuaccauugacaaguaa

SEQ ID NO: 49357 - RNA, 1410 nt, Artificial Sequence; identical to SEQ ID NO: 49174
  derived and/or modified CDS sequence (wt) from neuraminidase__InfluenzaA__ACV67182

SEQ ID NO: 49358 - RNA, 1410 nt, Artificial Sequence
  derived and/or modified CDS sequence (wt) from neuraminidase__InfluenzaA__ACV67183
augaauccaaaccaaaagauaauaaccauugguucggucuguaugacaauuggaauggcuaacuuaauauuacaaauuggaaacauaaucucaauauggauuagccacucaauucaacuugggaaucaaaaucagauugaaacaugcaaucaaagcgucauuacuuaugaaaacaacacuuggguaaaucagacauauguuaacaucagcaacaccaacuuugcugcuggacagucagugguuuccgugaaauuagcgggcaauuccucucucugcccuguuaguggaugggcuauauacaguaaagacaacaguguaagaaucgguuccaagggggauguguuugucauaagggaaccauucauaucaugcucccccuuggaaugcagaaccuucuucuugacucaaggggccuugcuaaaugacaaacauuccaauggaaccauuaaagacaggagcccauaucgaacccuaaugagcuguccuauuggugaaguucccucuccauacaacucaagauuugagucagucgcuuggucagcaagugcuugucaugauggcaucaauuggcuaacaauuggaauuucuggcccagacaauggggcaguggcuguguuaaaguacaacggcauaauaacagacacuaucaagaguuggagaaacaauauauugagaacacaagagucugaaugugcauguguaaaugguucuugcuuuacuguaaugaccgauggaccaaguaauggacaggccucauacaagaucuucagaauagaaaagggaaagauagucaaaucagucgaaaugaaugccccuaauuaucacuaugaggaaugcuccuguuauccugauucuaaugaaaucacaugugugugcagggauaacuggcauggcucgaaucgaccgugggugucuuucaaccagaaucuggaauaucagauaggauacauaugcagugggauuuucggagacaauccacgcccuaaugauaagacaggcaguugugguccaguaucgucuaauggagcaaauggaguaaaaggauuuucauucaaauacggcaaugguguuuggauagggagaacuaaaagcauuaauucaagaaacgguuuugagaugauuugggauccgaacggauggacugggacagacaauaacuucucaauaaagcaagauaucguaggaauaaaugaguggucaggauauagcgggaguuuuguucagcauccagaacuaacagggcuggauuguauaagaccuugcuucuggguugaacuaaucagagggcgacccaaagagaacacaaucuggacuagcgggagcagcauauccuuuugugguguaaacagugacacuguggguuggucuuggccagacggugcugaguugccauuuaccauugacaaguaa

SEQ ID NO: 49359 - RNA, 1410 nt, Artificial Sequence; identical to SEQ ID NO: 48750
  derived and/or modified CDS sequence (wt) from neuraminidase__InfluenzaA__ACV67184

SEQ ID NO: 49360 - RNA, 1410 nt, Artificial Sequence
  derived and/or modified CDS sequence (wt) from neuraminidase__InfluenzaA__ACV67186
augaauccaaaccaaaagauaauaaccauugguucggucuguaugacaauuggaauggcuaacuuaauauuacaaauuggaaacauaaucucaauauggauuagccacucaauucaacuugggaaucaaaaucagauugaaacaugcaaucaaagcgucauuacuuaugaaaacaacacuuggguaaaucagacauauguuaacaucagcaacaccaacuuugcugcuggacagucagugguuuccgugaaauuagcgggcaauuccucucucugcccuguuaguggaugggcuauauacaguaaagacaacaguguaagaaucgguuccaagggggauguguuugucauaagggaaccauucauaucaugcucccccuuggaaugcagaaccuucuucuugacucaaggggccuugcuaaaugacaaacauuccaauggaaccauuaaagacaggagcccauaucgaacccuaaugagcuguccuauuggugaaguucccucuccauacaacucaagauuugagucagucgcuuggucagcaagugcuugucaugauggcaucaauuggcuaacaauuggaauuucuggcccagacaauggggcaguagcuguguuaaaguacaacggcauaauaacagacacuaucaagaguuggagaaacaauauauugagaacacaagagucugaaugugcauguguaaaugguucuugcuuuacuguaaugaccgauggaccaaguaauggacaggccucauacaagaucuucagaauagaaaagggaaagauagucaaaucagucgaaaugaaugccccuaauuaucacuaugaggaaugcuccuguuauccugauucuagugaaaucacaugugugugcagggauaacuggcauggcucgaaucgaccgugggugucuuucaaccagaaucuggaauaucagauaggauacauaugcagugggauuuucggagacaauccacgcccuaaugauaagacaggcaguugugguccaguaucgucuaauggagcaaauggaguaaaaggauuuucauucaaauacggcaaugguguuuggauagggagaacuaaaagcauuaguucaagaaacgguuuugagaugauuugggauccgaacggauggacugggacagacaauaacuucucaauaaagcaagauaucguaggaauaaaugaguggucaggauauagcgggaguuuuguucagcauccagaacuaacagggcuggauuguauaagaccuugcuucuggguugaacuaaucagagggcgacccaaagagaacacaaucuggacuagcgggagcagcauauccuuuugugguguaaacagugacacuguggguuggucuuggccagacggugcugaguugccauuuaccauugacaaguaa

SEQ ID NO: 49361 - RNA, 1410 nt, Artificial Sequence; identical to SEQ ID NO: 48750
  derived and/or modified CDS sequence (wt) from neuraminidase__InfluenzaA__ACV67187

SEQ ID NO: 49362 - RNA, 1410 nt, Artificial Sequence; identical to SEQ ID NO: 48953
  derived and/or modified CDS sequence (wt) from neuraminidase__InfluenzaA__ACV67188

SEQ ID NO: 49363 - RNA, 1410 nt, Artificial Sequence; identical to SEQ ID NO: 48780
  derived and/or modified CDS sequence (wt) from neuraminidase__InfluenzaA__ACV67189

SEQ ID NO: 49364 - RNA, 1410 nt, Artificial Sequence
  derived and/or modified CDS sequence (wt) from neuraminidase__InfluenzaA__ACV67190
augaauccaaaccaaaagauaauaaccauugguucggucuguaugacaauuggaauggcuaacuuaauauuacaaauuggaaacauaaucucaauauggauuagccacucaauucaacuugggaaucaaaaucagauugaaacaugcaaucaaagcgucauuacuuaugaaaacaacacuuggguaaaucagacauauguuaacaucagcaacaccaacuuugcugcuggacagucagugguuuccgugaaauuagcaggcaauuccucucucugcccuguugguggaugggcuauauacaguaaagacaacaguguaagaaucgguuccaagggggauguguuugucauaagggaaccauucauaucaugcucccccuuggaaugcagaaccuucuucuugacucaaggggccuugcuaaaugacaaacauuccaauggaaccauuaaagacaggagcccauaucgaacccuaaugagcuguccuauuggugaaguucccucuccauacaacucaagauuugagucagucgcuuggucagcaagugcuugucaugauggcaucaauuggcuaacaauuggaauuucuggcccagacaauggggcaguggcuguguuaaaguacaacggcauaauaacagacacuaucaagaguuggagaaacaauauauugagaacacaagagucugaaugugcauguguaaaugguucuugcuuuacuguaaugaccgauggaccaaguaauggacaggccucauacaagaucuucagaauagaaaagggaaagauagucaaaucagucgaaaugaaugccccuaauuaucacuaugaggaaugcuccuguuauccugauucuagugaaaucacaugugugugcagggauaacuggcauggcucgaaucgaccgugggugucuuucaaccagaaucuggaauaucagauaggauacauaugcagugggauuuucggagacaauccacgcccuaaugauaagacaggcaguugugguccaguaucgucuaauggagcaaauggaguaaaaggauuuucauucaaauacggcaaugguguuuggauagggagaacuaaaagcauuaguucaagaaacgguuuugagaugauuugggauccgaacggauggacugggacagacaauaacuucucaauaaagcaagauaucguaggaauaaaugaguggucaggauauagcgggaguuuuguucagcauccagaacuaacagggcuggauuguauaagaccuugcuucuggguugaacuaaucagagggcgacccaaagagaacacaaucuggacuagcgggagcagcauauccuuuugugguguaaacagugacacuguggguuggucuuggccagacggugcugaguugccauuuaccauugacaaguaa

SEQ ID NO: 49365 - RNA, 1410 nt, Artificial Sequence; identical to SEQ ID NO: 48749
  derived and/or modified CDS sequence (wt) from neuraminidase__InfluenzaA__ACV67191

SEQ ID NO: 49366 - RNA, 1410 nt, Artificial Sequence; identical to SEQ ID NO: 48780
  derived and/or modified CDS sequence (wt) from neuraminidase__InfluenzaA__ACV67192

SEQ ID NO: 49367 - RNA, 1410 nt, Artificial Sequence; identical to SEQ ID NO: 48780
  derived and/or modified CDS sequence (wt) from neuraminidase__InfluenzaA__ACV67193

SEQ ID NO: 49368 - RNA, 1410 nt, Artificial Sequence; identical to SEQ ID NO: 48750
  derived and/or modified CDS sequence (wt) from neuraminidase__InfluenzaA__ACV67194

SEQ ID NO: 49369 - RNA, 1410 nt, Artificial Sequence; identical to SEQ ID NO: 48750
  derived and/or modified CDS sequence (wt) from neuraminidase__InfluenzaA__ACV67195

SEQ ID NO: 49370 - RNA, 1410 nt, Artificial Sequence; identical to SEQ ID NO: 49070
  derived and/or modified CDS sequence (wt) from neuraminidase__InfluenzaA__ACV67196

SEQ ID NO: 49371 - RNA, 1410 nt, Artificial Sequence; identical to SEQ ID NO: 48749
  derived and/or modified CDS sequence (wt) from neuraminidase__InfluenzaA__ACV67197

SEQ ID NO: 49372 - RNA, 1410 nt, Artificial Sequence; identical to SEQ ID NO: 48761
  derived and/or modified CDS sequence (wt) from neuraminidase__InfluenzaA__ACV67199

SEQ ID NO: 49373 - RNA, 1410 nt, Artificial Sequence
  derived and/or modified CDS sequence (wt) from neuraminidase__InfluenzaA__ACV67200
augaauccaaaccaaaagauaauaaccauugguucggucuguaugacaauuggaauggcuaacuuaauauuacaaauuggaaacauaaucucaauauggauuagccacucaauucaacuugggaaucaaaaucagauugaaacaugcaaucaaagcgucauuacuuaugaaaacaacacuuggguaaaucagacauauguuaacaucagcaacaccaacuuugcugcuggacagucagugguuuccgugaaauuagcgggcaauuccucucucugcccuguuaguggaugggcuauauacaguaaagacaacaguguaagaaucgguuccaagggggauguguuugucauaagggaaccauucauaucaugcucccccuuggaaugcagaaccuucuucuugacucaaggggccuugcuaaaugacaaacauuccaauggaaccauuaaagacaggagcccauaucgaacccuaaugagcuguccuauuggugaaguucccucuccauacaacucaagauuugagucagucgcuuggucagcaagugcuugucaugauggcaucaauuggcuaacaauuggaauuucuggcccagacaauggggcaguggcuguguuaaaguacaacggcauaauaacagacacuaucaagaguuggagaaacaauauauugagaacacaagagucugaaugugcauguguaaaugguucuugcuuuacuguaaugaccgauggaccaaguaauggacaggccucauacaagaucuucagaauagaaaagggaaagauagucaaaucagucgaaaugaaugccccuaauuaucacuaugaggaaugcuccuguuauccugauucuagugaaaucacaugugugugcagggauaacuggcauggcucgaaucgaccgugggugucuuucaaccagaaucuggaauaucagauaggauacauaugcagugggauuuucggagacaauccacgcccuaaugauaagacaggcaguugugguccaguaucgucuaacggagcaaauggaguaaaaggauuuucauucaaauacggcaaugguguuuggauagggagaacuaaaagcauuaguucaagaaacgguuuugagaugauuugggauccgaacggauggacugggacagacaauaacuucucaauaaagcaagauaucguaggaauaaaugaguggucaggauauagcgggaguuuuguucagcauccagaacuaacagggcuggauuguauaagaccuugcuucuggguugaacuaaucagagggcgacccaaagagaacacaaucuggacuagcgggagcagcauauccuuuugugguguaaacagugacacuguggguuggucuuggccagacggugcugaguugccauuuaccauugacaaguaa

SEQ ID NO: 49374 - RNA, 1410 nt, Artificial Sequence; identical to SEQ ID NO: 48749
  derived and/or modified CDS sequence (wt) from neuraminidase__InfluenzaA__ACV67201

SEQ ID NO: 49375 - RNA, 1410 nt, Artificial Sequence; identical to SEQ ID NO: 48749
  derived and/or modified CDS sequence (wt) from neuraminidase__InfluenzaA__ACV67202

SEQ ID NO: 49376 - RNA, 1410 nt, Artificial Sequence; identical to SEQ ID NO: 48953
  derived and/or modified CDS sequence (wt) from neuraminidase__InfluenzaA__ACV67203

SEQ ID NO: 49377 - RNA, 1410 nt, Artificial Sequence; identical to SEQ ID NO: 48750
  derived and/or modified CDS sequence (wt) from neuraminidase__InfluenzaA__ACV67204

SEQ ID NO: 49378 - RNA, 1410 nt, Artificial Sequence; identical to SEQ ID NO: 48750
  derived and/or modified CDS sequence (wt) from neuraminidase__InfluenzaA__ACV67205

SEQ ID NO: 49379 - RNA, 1410 nt, Artificial Sequence
  derived and/or modified CDS sequence (wt) from neuraminidase__InfluenzaA__ACV67206
augaauccaaaccaaaagauaauaaccauugguucggucuguaugacaauuggaauggcuaacuuaauauuacaaauuggaaacauaaucucaauauggauuagccacucaauucaacuugggaaucaaaaucagauugaaacaugcaaucaaagcgucauuacuuaugaaaacaacacuuggguaaaucagacauauguuaacaucagcaacaccaacuuugcugcuggacagucaaugguuuccgugaaauuagcgggcaauuccucucucugcccuguuaguggaugggcuauauacaguaaagacaacaguguaagaaucgguuccaagggggauguguuugucauaagggaaccauucauaucaugcucccccuuggaaugcagaaccuucuucuugacucaaggggccuugcuaaaugacaaacauuccaauggaaccauuaaagacaggagcccauaucgaacccuaaugagcuguccuauuggugaaguucccucuccauacaacucaagauuugagucagucgcuuggucagcaagugcuugucaugauggcaucaauuggcuaacaauuggaauuucuggcccagacaauggggcaguggcuguguuaaaguacaacggcauaauaacagacacuaucaagaguuggagaaacaauauauugagaacacaagagucugaaugugcauguguaaaugguucuugcuuuacuguaaugaccgauggaccaaguaauggacaggccucauacaagaucuucagaauagaaaagggaaagauagucaaaucagucgaaaugaaugccccuaauuauuacuaugaggaaugcuccuguuauccugauucuagugaaaucacaugugugugcagggauaacuggcauggcucgaaucgaccgugggugucuuucaaccagaaucuggaauaucagauaggauacauaugcagugggauuuucggagacaauccacgcccuaaugauaagacaggcaguugugguccaguaucgucuaauggagcaaauggaguaaaaggauuuucauucaaauacggcaaugguguuuggauagggagaacuaaaagcauuaguucaagaaacgguuuugagaugauuugggauccgaacggauggacugggacagacaauaacuucucaauaaagcaagauaucguaggaauaaaugaguggucaggauauagcgggaguuuuguucagcauccagaacuaacagggcuggauuguauaagaccuugcuucuggguugaacuaaucagagggcgacccaaagagaacacaaucuggacuagcgggagcagcauaucuuuuugugguguaaacagugacacuguggguuggucuuggccagacggugcugaguugccauuuaccauugacaaguaa

SEQ ID NO: 49380 - RNA, 1410 nt, Artificial Sequence
  derived and/or modified CDS sequence (wt) from neuraminidase__InfluenzaA__ACV67207
augaauccaaaccaaaagauaauaaccauugguucggucuguaugacaauuggaauggcuaacuuaauauuacaaauuggaaacauaaucucaauauggauuagccacucaauucaacuugggaaucaaaaucagauugaaacaugcaaucaaagcgucauuacuuaugaaaacaacacuuggguaaaucagacauauguuaacaucagcaacaccaacuuugcugcuggacagucagugguuuccgugaaauuagcgggcaauuccucucucugcccuguuaguggaugggcuauauacaguaaagacaacaguguaagaaucgguuccaagggggauguguuugucauaagggaaccauucauaucaugcucccccuuggaaugcagaaccuucuucuugacucaaggggccuugcuaaaugacaaacauuccaauggaaccauuaaagacaggagcccauaucgaacccuaaugagcuguccuauuggugaaguucccucuccauacaacucaagauuugagucagucgcuuggucagcaagugcuugucaugauggcaucaauuggcuaacaauuggaauuucuggcccagacaauggggcaguggcuguguuaaaguacaacggcauaauaacagacacuaucaagaguuggagaaacaauauauugagaacacaagagucugaaugugcauguguaaaugguucuugcuuuacuguaaugaccgauggaccaaguaauggacaggccucauacaagaucuucagaauagaaaagggaaagauagucaaaucagucgaaaugaaugccccuaauuaucacuaugaggaaugcuccuguuauccugauucuagugaaaucacaugugugugcagggauaacuggcauggcucgaaucgaccgugggugucuuucaaccagaaucuggaauaucaaauaggauacauaugcagugggauuuucggagacaauccacgcccuaaugauaagacaggcaguugugguccaguaucgucuaauggagcaaauggaguaaaaggauuuucauucaaauacggcaaugguguuuggauagggagaacuaaaagcauuaguucaagaaacgguuuugagaugauuugggauccgaacggauggacugggacagacaauaacuucucaauaaagcaagauaucguaggaauaaaugaguggucaggauauagcgggaguuuuguucagcauccagaacuaacagggcuggauuguauaagaccuugcuucuggguugaacuaaucagagggcgacccaaagagaacacaaucuggacuagcgggagcagcauauccuuuugugguguaaacagugacacuguggguuggucuuggccagacggugcugaguugccauuuaccauugacaaguaa

SEQ ID NO: 49381 - RNA, 1410 nt, Artificial Sequence
  derived and/or modified CDS sequence (wt) from neuraminidase__InfluenzaA__ACV67208
augaauccaaaccaaaagauaauaaccauugguucggucuguaugacaauuggaauggcuaacuuaauauuacaaauuggaaacauaaucucaauauggauuagccacucaauucaacuugggaaucaaaaucagauugaaacaugcaaucaaagcgucauuacuuaugaaaacaacacuuggguaaaucagacauauguuaacaucagcaacaccaacuuugcugcuggacagucagugguuuccgugaaauuagcgggcaauuccucucucugcccuguuaguggaugggcuauauacaguaaagacaacaguauaagaaucgguuccaagggggauguguuugucauaagggaaccauucauaucaugcucccccuuggaaugcagaaccuucuucuugacucaaggggccuugcuaaaugacaaacauuccaauggaaccauuaaagacaggagcccauaucgcacccuaaugagcuguccuauuggugaaguucccucuccauacaacucaagauuugagucagucgcuuggucagcaagugcuugucaugauggcaucaauuggcuaacaauuggaauuucuggcccagacaauggggcaguggcuguguuaaaguacaacggcauaauaacagacacuaucaagaguuggagaaacaauauauugagaacacaagagucugaaugugcauguguaaaugguucuugcuuuacuguaaugaccgauggaccaagugauggacaggccucauacaagaucuucagaauagaaaagggaaagauagucaaaucagucgaaaugaaugccccuaauuaucacuaugaggaaugcuccuguuauccugauucuagugaaaucacaugugugugcagggauaacuggcauggcucgaaucgaccgugggugucuuucaaccagaaucuggaauaucagauaggauacauaugcagugggauuuucggagacaauccacgcccuaaugauaagacaggcaguugugguccaguaucgucuaauggagcaaauggaguaaaaggauuuucauucaaauacggcaaugguguuuggauagggagaacuaaaagcauuaguucaagaaacgguuuugagaugauuugggauccgaacggauggacugggacagacaauaacuucucaauaaagcaagauaucguaggaauaaaugaguggucaggauauagcgggaguuuuguucagcauccagaacuaacagggcuggauuguauaagaccuugcuucuggguugaacuaaucagagggcgacccaaagagaacacaaucuggacuagcgggagcagcauauccuuuugugguguaaacagugacacuguggguuggucuuggccagacggugcugaguugccauuuaccauugacaaguaa

SEQ ID NO: 49382 - RNA, 1410 nt, Artificial Sequence; identical to SEQ ID NO: 48813
  derived and/or modified CDS sequence (wt) from neuraminidase__InfluenzaA__ACV67210

SEQ ID NO: 49383 - RNA, 1410 nt, Artificial Sequence; identical to SEQ ID NO: 48750
  derived and/or modified CDS sequence (wt) from neuraminidase__InfluenzaA__ACV67211

SEQ ID NO: 49384 - RNA, 1410 nt, Artificial Sequence; identical to SEQ ID NO: 48953
  derived and/or modified CDS sequence (wt) from neuraminidase__InfluenzaA__ACV70076

SEQ ID NO: 49385 - RNA, 1410 nt, Artificial Sequence
  derived and/or modified CDS sequence (wt) from neuraminidase__InfluenzaA__ACV70086
augaauccaaaccaaaagauaauaaccauugguucggucuguaugacaauuggaauggcuaacuuaauauuacaaauuggaaacauaaucucaauauggauuagccacucaauucaacuugggaaucaaaaucagauugaaacaugcaaucaaagcaucauuacuuaugaaaacaacacuuggguaaaucagacauauguuaacaucagcaacaccaacuuugcugcuggacagucagugguuuccgugaaauuagcgggcaauuccucucucugcccuguuaguggaugggcuauauacaguaaagacaacaguguaagaaucgguuccaagggggauguguuugucauaagggaaccauucauaucaugcucccccuuggaaugcagaaccuucuucuugacucaaggggccuugcuaaaugacaaacauuccaauggaaccauuaaagacaggagcccauaucgaacccuaaugagcuguccuauuggugaaguucccucuccauacaacucaagauuugagucagucgcuuggucagcaagugcuugucaugauggcaucaauuggcuaacaauuggaauuucuggcccagacaauggggcaguggcuguguuaaaguacaacggcauaauaacagacacuaucaagaguuggagaaacaauauauugagaacacaagagucugaaugugcauguguaaaugguucuugcuuuacuguaaugaccgauggaccaaguaauggacaggccucauacaagaucuucagaauagaaaagggaaagauagucaaaucagucgaaaugaaugccccuaauuaucacuaugaggaaugcuccuguuauccugauucuagugaaaucacaugugugugcagggauaacuggcauggcucgaaucgaccgugggugucuuucaaccagaaucuggaauaucagauaggauacauaugcagugggauuuucggagacaauccacgcccuaaugauaagacaggcaguugugguccaguaucgucuaauggagcaaauggaguaaaaggauuuucauucaaauacggcaaugguguuuggauagggagaacuaaaagcauuaguucaagaaacgguuuugagaugauuugggauccgaacggauggacugggacagacaauaacuucucaauaaagcaagauaucguaggaauaaaugaguggucaggauauagcgggaguuuuguucagcauccagaacuaacagggcuggauuguauaagaccuugcuucuggguugaacuaaucagagggcgacccaaagagaacacaaucuggacuagcgggagcagcauauccuuuugugguguaaacagugacacuguggguuggucuuggccagacggugcugaguugccauuuaccauugacaaguaa

SEQ ID NO: 49386 - RNA, 1410 nt, Artificial Sequence
  derived and/or modified CDS sequence (wt) from neuraminidase__InfluenzaA__ACV70096
augaauccaaaccaaaagauaauaaccauugguucggucuguaugacaauuggaauggcuaacuuaauauuacaaauuggaaacauaaucucaauauggauuagccacucaauucaacuugggaaucaaaaucagauugaaacaugcaaucaaagcgucauuacuuaugaaaacaacacuuggguaaaucagacauauguuaacaucagcaacaccaacuuuacugcuggacagucagugguuuccgugaaauuagcgggcaauuccucucucugcccuguuaguggaugggcuauauacaguaaagacaacaguauaagaaucgguuccaagggggauguguuugucauaagggaaccauucauaucaugcucccccuuggaaugcagaaccuucuucuugacucaaggggccuugcuaaaugacaaacauuccaauggaaccauuaaagacaggagcccauaucgaacccuaaugagcuguccuauuggugaaguucccucuccauacaacucaagauuugagucagucgcuuggucagcaagugcuugucaugauggcaucaauuggcuaacaauuggaauuucuggcccagacaauggggcaguggcuguguuaaaguacaacggcauaauaacagacacuaucaagaguuggagaaacaauauauugagaacacaagagucugaaugugcauguguaaaugguucuugcuuuacuguaaugaccgauggaccaagugauggacaggccucauacaagaucuucagaauagaaaagggaaagauagucaaaucagucgaaaugaaugccccuaauuaucacuaugaggaaugcuccuguuauccugauucuagugaaaucacaugugugugcagggauaacuggcauggcucgaaucgaccgugggugucuuucaaccagaaucuggaauaucagauaggauacauauguagugggauuuucggagacaauccacgcccuaaugauaagacaggcaguugugguccaguaucgucuaauggagcaaauggaguaaaaggauuuucauucaaauacggcaaugguguuuggauagggagaacuaaaagcauuaguucaagaaacgguuuugagaugauuugggauccgaacggauggacugggacagacaauaacuucucaauaaagcaagauaucguaggaauaaaugaguggucaggauauagcgggaguuuuguucagcauccagaacuaacagggcuggauuguauaagaccuugcuucuggguugaacuaaucagagggcgacccaaagagaacacaaucuggacuagcgggagcagcauauccuuuugugguguaaacagugacacuguggguuggucuuggccagacggugcugaguugccauuuaccauugacaaguaa

SEQ ID NO: 49387 - RNA, 1410 nt, Artificial Sequence; identical to SEQ ID NO: 48953
  derived and/or modified CDS sequence (wt) from neuraminidase__InfluenzaA__ACV70106

SEQ ID NO: 49388 - RNA, 1410 nt, Artificial Sequence; identical to SEQ ID NO: 48953
  derived and/or modified CDS sequence (wt) from neuraminidase__InfluenzaA__ACV70116

SEQ ID NO: 49389 - RNA, 1410 nt, Artificial Sequence; identical to SEQ ID NO: 48953
  derived and/or modified CDS sequence (wt) from neuraminidase__InfluenzaA__ACV70126

SEQ ID NO: 49390 - RNA, 1410 nt, Artificial Sequence; identical to SEQ ID NO: 48953
  derived and/or modified CDS sequence (wt) from neuraminidase__InfluenzaA__ACV70157

SEQ ID NO: 49391 - RNA, 1410 nt, Artificial Sequence; identical to SEQ ID NO: 48749
  derived and/or modified CDS sequence (wt) from neuraminidase__InfluenzaA__ACV70167

SEQ ID NO: 49392 - RNA, 1410 nt, Artificial Sequence; identical to SEQ ID NO: 48953
  derived and/or modified CDS sequence (wt) from neuraminidase__InfluenzaA__ACV70177

SEQ ID NO: 49393 - RNA, 1410 nt, Artificial Sequence; identical to SEQ ID NO: 48953
  derived and/or modified CDS sequence (wt) from neuraminidase__InfluenzaA__ACV70187

SEQ ID NO: 49394 - RNA, 1410 nt, Artificial Sequence; identical to SEQ ID NO: 48953
  derived and/or modified CDS sequence (wt) from neuraminidase__InfluenzaA__ACV70197

SEQ ID NO: 49395 - RNA, 1410 nt, Artificial Sequence; identical to SEQ ID NO: 48953
  derived and/or modified CDS sequence (wt) from neuraminidase__InfluenzaA__ACV70207

SEQ ID NO: 49396 - RNA, 1410 nt, Artificial Sequence
  derived and/or modified CDS sequence (wt) from neuraminidase__InfluenzaA__ACV70217
augaauccaaaccaaaagauaauaaccauugguucggucuguaugacaauuggaauggcuaacuuaauauuacaaauuggaaacauaaucucaauauggauuagccacucaauucaacuugggaaucaaaaucagauugaaacaugcaaucaaagcgucauuacuuaugaaaacaacacuuggguaaaucagacauaugucaacaucagcaacaccaacuuugcugcuggacagucagugguuuccgugaaauuagcgggcaauuccucucucugcccuguuaguggaugggcuauauacaguaaagacaacaguguaagaaucgguuccaagggggauguguuugucauaagggaaccauucauaucaugcucccacuuggaaugcagaaccuucuucuugacucaaggggccuugcuaaaugacaaacauuccaauggaaccauuaaagacaggagcccauaucgaacccuaaugagcuguccuauuggugaaguucccucuccauacaacucaagauuugagucagucgcuuggucagcaagugcuugucaugauggcaucaauuggcuaacaauuggaauuucuggcccagacaauggggcaguggcuguguuaaaguacaacggcauaauaacagacacuaucaagaguuggagaaacaauauauugagaacacaagagucugaaugugcauguguaaaugguucuugcuuuacuguaaugaccgauggaccaaguaauggacaggccucauacaagaucuucagaauagaaaagggaaaaauagucaaaucagucgaaaugaaugccccuaauuaucacuaugaggaaugcuccuguuauccugauucuagugaaaucacaugugugugcagggauaacuggcauggcucgaaucgaccgugggugucuuucaaccagaaucuggaauaucagauaggauacauaugcagugggauuuucggagacaauccacgcccuaaugauaagacaggcaguugugguccaguaucgucuaauggagcaaauggaguaaaaggauuuucauucaaauacggcaaugguguuuggauagggagaacuaaaagcauuaguucaagaaacgguuuugagaugauuugggauccgaacggauggacugggacagacaauaacuucucaauaaagcaagauaucguaggaauaaaugaguggucaggauauagcgggaguuuuguucagcauccagaacuaacagggcuggauuguauaagaccuugcuucuggguugaacuaaucagagggcgacccaaagagaacacaaucuggacuagcgggagcagcauauccuuuugugguguaaacagugacacuguggguuggucuuggccagacggugcugaguugccauuuaccauugacaaguaa

SEQ ID NO: 49397 - RNA, 1410 nt, Artificial Sequence; identical to SEQ ID NO: 48953
  derived and/or modified CDS sequence (wt) from neuraminidase__InfluenzaA__ACV70227

SEQ ID NO: 49398 - RNA, 1410 nt, Artificial Sequence; identical to SEQ ID NO: 48953
  derived and/or modified CDS sequence (wt) from neuraminidase__InfluenzaA__ACV70237

SEQ ID NO: 49399 - RNA, 1410 nt, Artificial Sequence; identical to SEQ ID NO: 48953
  derived and/or modified CDS sequence (wt) from neuraminidase__InfluenzaA__ACV70247

SEQ ID NO: 49400 - RNA, 1410 nt, Artificial Sequence; identical to SEQ ID NO: 48953
  derived and/or modified CDS sequence (wt) from neuraminidase__InfluenzaA__ACV70257

SEQ ID NO: 49401 - RNA, 1410 nt, Artificial Sequence; identical to SEQ ID NO: 48953
  derived and/or modified CDS sequence (wt) from neuraminidase__InfluenzaA__ACV70267

SEQ ID NO: 49402 - RNA, 1410 nt, Artificial Sequence; identical to SEQ ID NO: 48953
  derived and/or modified CDS sequence (wt) from neuraminidase__InfluenzaA__ACV70277

SEQ ID NO: 49403 - RNA, 1410 nt, Artificial Sequence; identical to SEQ ID NO: 48953
  derived and/or modified CDS sequence (wt) from neuraminidase__InfluenzaA__ACV70287

SEQ ID NO: 49404 - RNA, 1410 nt, Artificial Sequence; identical to SEQ ID NO: 48953
  derived and/or modified CDS sequence (wt) from neuraminidase__InfluenzaA__ACV70297

SEQ ID NO: 49405 - RNA, 1410 nt, Artificial Sequence; identical to SEQ ID NO: 48953
  derived and/or modified CDS sequence (wt) from neuraminidase__InfluenzaA__ACV70307

SEQ ID NO: 49406 - RNA, 1410 nt, Artificial Sequence; identical to SEQ ID NO: 48749
  derived and/or modified CDS sequence (wt) from neuraminidase__InfluenzaA__ACV70317

SEQ ID NO: 49407 - RNA, 1410 nt, Artificial Sequence; identical to SEQ ID NO: 48953
  derived and/or modified CDS sequence (wt) from neuraminidase__InfluenzaA__ACV70327

SEQ ID NO: 49408 - RNA, 1410 nt, Artificial Sequence; identical to SEQ ID NO: 48953
  derived and/or modified CDS sequence (wt) from neuraminidase__InfluenzaA__ACV70337

SEQ ID NO: 49409 - RNA, 1410 nt, Artificial Sequence; identical to SEQ ID NO: 48953
  derived and/or modified CDS sequence (wt) from neuraminidase__InfluenzaA__ACV70347

SEQ ID NO: 49410 - RNA, 1410 nt, Artificial Sequence; identical to SEQ ID NO: 48953
  derived and/or modified CDS sequence (wt) from neuraminidase__InfluenzaA__ACV70357

SEQ ID NO: 49411 - RNA, 1410 nt, Artificial Sequence; identical to SEQ ID NO: 48953
  derived and/or modified CDS sequence (wt) from neuraminidase__InfluenzaA__ACV70367

SEQ ID NO: 49412 - RNA, 1410 nt, Artificial Sequence; identical to SEQ ID NO: 48953
  derived and/or modified CDS sequence (wt) from neuraminidase__InfluenzaA__ACV70377

SEQ ID NO: 49413 - RNA, 1410 nt, Artificial Sequence; identical to SEQ ID NO: 48953
  derived and/or modified CDS sequence (wt) from neuraminidase__InfluenzaA__ACV70387

SEQ ID NO: 49414 - RNA, 1410 nt, Artificial Sequence; identical to SEQ ID NO: 48953
  derived and/or modified CDS sequence (wt) from neuraminidase__InfluenzaA__ACV70397

SEQ ID NO: 49415 - RNA, 1410 nt, Artificial Sequence; identical to SEQ ID NO: 48953
  derived and/or modified CDS sequence (wt) from neuraminidase__InfluenzaA__ACV70407

SEQ ID NO: 49416 - RNA, 1410 nt, Artificial Sequence
  derived and/or modified CDS sequence (wt) from neuraminidase__InfluenzaA__ACV70417
augaauccaaaccaaaagauaauaaccauugguucggucuguaugacaauuggaauggcuaacuuaauauuacaaauuggaaacauaaucucaauauggauuagccacucaauucaacuugggaaucaaaaucagauugaaacaugcaaucaaagcgucauuacuuaugaaaacaacacuuggguaaaucagacauauguuaacaucagcaacaccaacuuugcugcuggacagucagugguuuccgugaaauuagcgggcaauuccucucucugcccuguuaguggaugggcuauauacaguaaagacaacaguguaagaaucgguuccaagggggauguguuugucauaagggaaccauucauaucaugcucccccuuggaaugcagaaccuucuucuugacucaaggggccuugcuaaaugacaaacauuccaauggaaccauuaaagacaggagcccauaucgaacccuaaugagcuguccuauuggugaaguucccucuccauacaacucaagauuugagucagucgcuuggucagcaagugcuugucaugauggcaucaauuggcuaacaauuggaauuucuggcccagacaauggggcaguggcuguguuaaaguacaacggcauaauaacagacacuaucaagaguuggagaaacaauauauugagaacacaagagucugaaugugcauguguaaaugguucuugcuuuacuguaaugaccgauggaccaaguaauggacaggccucauacaagaucuucagaauagaaaagggaaagauagucaaaucagucgaaaugaaugccccuaauuaucacuaugaggaaugcuccuguuauccugauucuagugaaaucacaugugugugcagggauaacuggcauggcucgaaucgaccgugggugucuuucaaccagaaucuggaauaucagauaggauacauaugcagugggauuuuuggagacaauccacgcccuaaugauaagacaggcaguugugguccaguaucgucuaauggagcaaauggaguaaaaggauuuucauucaaauacggcaaugguguuuggauagggagaacuaaaagcauuaguucaagaaacgguuuugagaugauuugggauccgaacggauggacugggacagacaauaacuucucaauaaagcaagauaucguaggaauaaaugaguggucaggauauagcgggaguuuuguucagcauccagaacuaacagggcuggauuguauaagaccuugcuucuggguugaacuaaucagagggcgacccaaagagaacacaaucuggacuagcgggagcagcauauccuuuugugguguaaacagugacacuguggguuggucuuggccagacggugcugaguugccauuuaccauugacaaguaa

SEQ ID NO: 49417 - RNA, 1410 nt, Artificial Sequence; identical to SEQ ID NO: 48953
  derived and/or modified CDS sequence (wt) from neuraminidase__InfluenzaA__ACV70427

SEQ ID NO: 49418 - RNA, 1410 nt, Artificial Sequence; identical to SEQ ID NO: 48953
  derived and/or modified CDS sequence (wt) from neuraminidase__InfluenzaA__ACV70437

SEQ ID NO: 49419 - RNA, 1410 nt, Artificial Sequence; identical to SEQ ID NO: 48953
  derived and/or modified CDS sequence (wt) from neuraminidase__InfluenzaA__ACV70447

SEQ ID NO: 49420 - RNA, 1410 nt, Artificial Sequence; identical to SEQ ID NO: 48953
  derived and/or modified CDS sequence (wt) from neuraminidase__InfluenzaA__ACV70457

SEQ ID NO: 49421 - RNA, 1410 nt, Artificial Sequence; identical to SEQ ID NO: 48953
  derived and/or modified CDS sequence (wt) from neuraminidase__InfluenzaA__ACV70467

SEQ ID NO: 49422 - RNA, 1410 nt, Artificial Sequence; identical to SEQ ID NO: 48953
  derived and/or modified CDS sequence (wt) from neuraminidase__InfluenzaA__ACV70477

SEQ ID NO: 49423 - RNA, 1410 nt, Artificial Sequence; identical to SEQ ID NO: 48953
  derived and/or modified CDS sequence (wt) from neuraminidase__InfluenzaA__ACV70487

SEQ ID NO: 49424 - RNA, 1410 nt, Artificial Sequence; identical to SEQ ID NO: 48953
  derived and/or modified CDS sequence (wt) from neuraminidase__InfluenzaA__ACV70497

SEQ ID NO: 49425 - RNA, 1410 nt, Artificial Sequence; identical to SEQ ID NO: 48953
  derived and/or modified CDS sequence (wt) from neuraminidase__InfluenzaA__ACV70507

SEQ ID NO: 49426 - RNA, 1410 nt, Artificial Sequence; identical to SEQ ID NO: 48953
  derived and/or modified CDS sequence (wt) from neuraminidase__InfluenzaA__ACV70517

SEQ ID NO: 49427 - RNA, 1410 nt, Artificial Sequence; identical to SEQ ID NO: 48953
  derived and/or modified CDS sequence (wt) from neuraminidase__InfluenzaA__ACV70527

SEQ ID NO: 49428 - RNA, 1410 nt, Artificial Sequence; identical to SEQ ID NO: 48953
  derived and/or modified CDS sequence (wt) from neuraminidase__InfluenzaA__ACV70547

SEQ ID NO: 49429 - RNA, 1410 nt, Artificial Sequence; identical to SEQ ID NO: 48953
  derived and/or modified CDS sequence (wt) from neuraminidase__InfluenzaA__ACV70557

SEQ ID NO: 49430 - RNA, 1410 nt, Artificial Sequence; identical to SEQ ID NO: 48953
  derived and/or modified CDS sequence (wt) from neuraminidase__InfluenzaA__ACV70567

SEQ ID NO: 49431 - RNA, 1410 nt, Artificial Sequence; identical to SEQ ID NO: 48953
  derived and/or modified CDS sequence (wt) from neuraminidase__InfluenzaA__ACV70577

SEQ ID NO: 49432 - RNA, 1410 nt, Artificial Sequence; identical to SEQ ID NO: 48953
  derived and/or modified CDS sequence (wt) from neuraminidase__InfluenzaA__ACV70587

SEQ ID NO: 49433 - RNA, 1410 nt, Artificial Sequence
  derived and/or modified CDS sequence (wt) from neuraminidase__InfluenzaA__ACV70597
augaauccaaaccaaaagauaauaaccauugguucggucuguaugacaauuggaauggcuaacuuaauauuacaaauuggaaacauaaucucaauauggauuagccacucaauucaacuugggaaucaaaaucagauugaaacaugcaaucaaagcgucauuacuuaugaaaacaacacuuggguaaaucagacauauguuaacaucagcaacaccaacuuugcugcuggacagucagugguuuccgugaaauuagcgggcaauuccucucucugcccuguuaguggaugggcuauauacaguaaagacaacaguguaagaaucgguuccaagggggauguguuugucauaagggaaccauucauaucaugcucccccuuggaaugcagaaccuucuucuugacucaaggggccuugcuaaaugacaaacauuccaauggaaccauuaaagacaggagcccauaucgaacccuaaugagcuguccuauuggugaaguucccucuccauacaacucaagauuugagucagucgcuuggucagcaagugcuugucaugauggcaucaauuggcuaacaauuggaauuucuggcccagacaauggggcaguggcuguguuaaaguacaacggcauaauaacagacacuaucaagaguuggagaaacaauauauugagaacacaagagucugaaugugcauguguaaaugguucuugcuuuacuguaaugaccgauggaccaaguaauggacaggccucauacaaaaucuucagaauagaaaagggaaagauagucaaaucagucgaaaugaaugccccuaauuaucacuaugaggaaugcuccuguuauccugauucuagugaaaucacaugugugugcagggauaacuggcauggcucgaaucgaccgugggugucuuucaaccagaaucuggaauaucagauaggauacauaugcagugggauuuucggagacaauccacgcccuaaugauaagacaggcaguugugguccaguaucgucuaauggagcaaauggaguaaaaggauuuucauucaaauacggcaaugguguuuggauagggagaacuaaaagcauuaguucaagaaacgguuuugagaugauuugggauccgaacggauggacugggacagacaauaacuucucaauaaagcaagauaucguaggaauaaaugaguggucaggauauagcgggaguuuuguucagcauccagaacuaacagggcuggauuguauaagaccuugcuucuggguugaacuaaucagagggcgacccaaagagaacacaaucuggacuagcgggagcagcauauccuuuugugguguaaacagugacacuguggguuggucuuggccagacggugcugaguugccauuuaccauugacaaguaa

SEQ ID NO: 49434 - RNA, 1410 nt, Artificial Sequence; identical to SEQ ID NO: 48953
  derived and/or modified CDS sequence (wt) from neuraminidase__InfluenzaA__ACV70607

SEQ ID NO: 49435 - RNA, 1410 nt, Artificial Sequence
  derived and/or modified CDS sequence (wt) from neuraminidase__InfluenzaA__ACV70617
augaauccaaaccaaaagauaauaaccauugguucggucuguaugacaauuggaauggcuaacuuaauauuacaaauuggaaacauaaucucaauauggauuagccacucaauucaacuugggaaucaaaaucagauugaaacaugcaaucaaagcgucauuacuuaugaaaacaacacuuggguaaaucagacauauguuaacaucagcaacaccaacuuugcugcuggacagucagugguuuccgugaaauuagcgggcaauuccucucucugcccuguuaguggaugggcuauauacaguaaagacaacaguguaagaaucgguuccaagggggauguguuugucauaagggaaccauucauaucaugcucccccuuggaaugcagaaccuucuucuugacucaaggggccuugcuaaaugacaaacauuccaauggaaccauuaaagacaggagcccauaucgaacccuaaugagcuguccuauuggugaaguucccucuccauacaacucaagauuugagucagucgcuuggucagcaagugcuugucaugauggcaucaauuggcuaacaauuggaauuucuggcccagacaauggggcaguggcuguguuaaaguacaacggcauaauaacagacacuaucaagaguuggagaaacaauauauugagaacacaagagucugaaugugcauguguaaaugguucuugcuuuacuguaaugaccgauggaccaagugauggacaggccucauacaagaucuucagaauagaaaagggaaagauagucaaaucagucgaaaugaaugccccuaauuaucacuaugaggaaugcuccuguuauccugauucuagugaaaucacaugugugugcagggauaacuggcauggcucgaaucgaccgugggugucuuucaaccagaaucuggaauaucagauaggauacauauguagugggauuuucggagacaauccacgcccuaaugauaagacaggcaguugugguccaguaucgucuaauggagcaaauggaguaaaaggauuuucauucaaauacggcaaugguguuuggauagggagaacuaaaagcauuaguucaagaaacgguuuugagaugauuugggauccgaacggauggacugggacagacaauaacuucucaauaaagcaagauaucguaggaauaaaugaguggucaggauauagcgggaguuuuguucagcauccagaacuaacagggcuggauuguauaagaccuugcuucuggguugaacuaaucagagggcgacccaaagagaacacaaucuggacuagcgggagcagcauauccuuuugugguguaaacagugacacuguggguuggucuuggccagacggugcugaguugccauuuaccauugacaaguaa

SEQ ID NO: 49436 - RNA, 1410 nt, Artificial Sequence; identical to SEQ ID NO: 48953
  derived and/or modified CDS sequence (wt) from neuraminidase__InfluenzaA__ACV70647

SEQ ID NO: 49437 - RNA, 1410 nt, Artificial Sequence; identical to SEQ ID NO: 48953
  derived and/or modified CDS sequence (wt) from neuraminidase__InfluenzaA__ACV70657

SEQ ID NO: 49438 - RNA, 1410 nt, Artificial Sequence; identical to SEQ ID NO: 48953
  derived and/or modified CDS sequence (wt) from neuraminidase__InfluenzaA__ACV70667

SEQ ID NO: 49439 - RNA, 1410 nt, Artificial Sequence; identical to SEQ ID NO: 48953
  derived and/or modified CDS sequence (wt) from neuraminidase__InfluenzaA__ACV70677

SEQ ID NO: 49440 - RNA, 1410 nt, Artificial Sequence; identical to SEQ ID NO: 48953
  derived and/or modified CDS sequence (wt) from neuraminidase__InfluenzaA__ACV70687

SEQ ID NO: 49441 - RNA, 1410 nt, Artificial Sequence; identical to SEQ ID NO: 48953
  derived and/or modified CDS sequence (wt) from neuraminidase__InfluenzaA__ACV70697

SEQ ID NO: 49442 - RNA, 1410 nt, Artificial Sequence
  derived and/or modified CDS sequence (wt) from neuraminidase__InfluenzaA__ACV70707
augaauccaaaccaaaagauaauaaccauugguucggucuguaugacaauuggaauggcuaacuuaauauuacaaauuggaaacauaaucucaauauggauuagccacucaauucaacuugggaaucaaaaucagauugaaacaugcaaucaaagcgucauuacuuaugaaaacaacacuuggguaaaucagacauauguuaacaucagcaacaccaacuuugcugcuggacagucagugguuuccgugaaauuagcgggcaauuccucucucugcccuguuaguggaugggcuauauacaguaaagacaacaguauaagaaucgguuccaagggggauguguuugucauaagggaaccauucauaucaugcucccccuuggaaugcagaaccuucuucuugacucaaggggccuugcuaaaugacaaacauuccaauggaaccauuaaagacaggagcccauaucgaacccuaaugagcuguccuauuggugaaguucccucuccauacaacucaagauuugagucagucgcuuggucagcaagugcuugucaugauggcaucaauuggcuaacaauuggaauuucuggcccagacaauggggcaguggcuguguuaaaguacaacgguauaauaacagacacuaucaagaguuggagaaacaauauauugagaacacaagagucugaaugugcauguguaaaugguucuugcuuuacuguaaugaccgauggaccaagugauggacaggccucauacaagaucuucagaauagaaaagggaaagauagucaaaucagucgaaaugaaugccccuaauuaucacuaugaggaaugcuccuguuauccugauucuagugaaaucacaugugugugcagggauaacuggcauggcucgaaucgaccgugggugucuuucaaccagaaucuggaauaucagauaggauacauauguagugggauuuucggagacaauccacgcccuaaugauaagacaggcaguugugguccaguaucgucuaauggagcaaauggaguaaaaggauuuucauucaaauacggcaaugguguuuggauagggagaacuaaaagcauuaguucaagaaacgguuuugagaugauuugggauccgaacggauggacugggacagacaauaacuucucaauaaagcaagauaucguaggaauaaaugaguggucaggauauagcgggaguuuuguucagcauccagaacuaacagggcuggauuguauaagaccuugcuucuggguugaacuaaucagagggcgacccaaagagaacacaaucuggacuagcgggagcagcauauccuuuugugguguaaacagugacacuguggguuggucuuggccagacggugcugaguugccauuuaccauugacaaguaa

SEQ ID NO: 49443 - RNA, 1410 nt, Artificial Sequence; identical to SEQ ID NO: 48953
  derived and/or modified CDS sequence (wt) from neuraminidase__InfluenzaA__ACV70717

SEQ ID NO: 49444 - RNA, 1410 nt, Artificial Sequence; identical to SEQ ID NO: 48953
  derived and/or modified CDS sequence (wt) from neuraminidase__InfluenzaA__ACV70727

SEQ ID NO: 49445 - RNA, 1410 nt, Artificial Sequence; identical to SEQ ID NO: 48750
  derived and/or modified CDS sequence (wt) from neuraminidase__InfluenzaA__ACV70737

SEQ ID NO: 49446 - RNA, 1410 nt, Artificial Sequence; identical to SEQ ID NO: 48953
  derived and/or modified CDS sequence (wt) from neuraminidase__InfluenzaA__ACV70757

SEQ ID NO: 49447 - RNA, 1410 nt, Artificial Sequence; identical to SEQ ID NO: 48953
  derived and/or modified CDS sequence (wt) from neuraminidase__InfluenzaA__ACV70767

SEQ ID NO: 49448 - RNA, 1410 nt, Artificial Sequence
  derived and/or modified CDS sequence (wt) from neuraminidase__InfluenzaA__ACV70777
augaauccaaaccaaaagauaauaaccauugguucggucuguaugacaauuggaauggcuaacuuaauauuacaaauuggaaacauaaucucaauauggauuagccacucaauucaacuugggaaucaaaaucagauugaaacaugcaaucaaagcgucauuacuuaugaaaacaacacuuggguaaaucagacauauguuaauaucagcaacaccaacuuugcugcuggacagucagugguuuccgugaaauuagcgggcaauuccucucucugcccuguuaguggaugggcuauauacaguaaagacaacaguauaagaaucgguuccaagggggauguguuugucauaagggaaccauucauaucaugcucccccuuggaaugcagaaccuucuucuugacucaaggggccuugcuaaaugacaaacauuccaauggaaccauuaaagacaggagcccauaucgaacccuaaugagcuguccuauuggugaaguucccucuccauacaacucaagauuugagucagucgcuuggucagcaagugcuugucaugauggcaucaauuggcuaacaauuggaauuucuggcccagacaauggggcaguggcuguguuaaaguacaacggcauaauaacagacacuaucaagaguuggagaaacaauauauugagaacacaagagucugaaugugcauguguaaaugguucuugcuuuacuguaaugaccgauggaccaagugauggacaggccucauacaagaucuucagaauagaaaagggaaagauagucaaaucagucgaaaugaaugccccuaauuaucacuaugaggaaugcuccuguuauccugauucuagugaaaucacaugugugugcagggauaacuggcauggcucgaaucgaccgugggugucuuucaaccagaaucuggaauaucagauaggauacauauguagugggauuuucggagacaauccacgcccuaaugauaagacaggcaguugugguccaguaucgucuaauggagcaaauggaguaaaaggauuuucauucaaauacggcaaugguguuuggauagggagaacuaaaagcauuaguucaagaaacgguuuugagaugauuugggauccgaacggauggacugggacagacaauaacuucucaauaaagcaagauaucguaggaauaaaugaguggucaggauauagcgggaguuuuguucagcauccagaacuaacagggcuggauuguauaagaccuugcuucuggguugaacuaaucagagggcgacccaaagagaacacaaucuggacuagcgggagcagcauauccuuuugugguguaaacagugacacuguggguuggucuuggccagacggugcugaguugccauuuaccauugacaaguaa

SEQ ID NO: 49449 - RNA, 1410 nt, Artificial Sequence
  derived and/or modified CDS sequence (wt) from neuraminidase__InfluenzaA__ACV70787
augaauccaaaccaaaagauaauaaccauugguucggucuguaugacaauuggaauggcuaacuuaauauuacaaauuggaaacauaaucucaauauggauuagccacucaauucaacuugggaaucaaaaucagauugaaacaugcaaucaaagcgucauuacuuaugaaaacaacacuuggguaaaucagacauauguuaacaucagcaacaccaacuuugcugcuggacagucagugguuuccgugaaauuagcgggcaauuccucucucugcccuguuaguggaugggcuauauacaguaaagacaacaguauaagaaucgguuccaagggggauguguuugucauaagggaaccauucauaucaugcucccccuuggaaugcagaaccuucuucuugacucaaggggccuugcuaaaugacaaacauuccaauggaaccauuaaagacaggagcccauaucgaacccuaaugagcuguccuauuggugaaguucccucuccauacaacucaagauuugagucagucgcuuggucagcaagugcuugucaugauggcaucaauuggcuaacaauuggaauuucuggcccagacaauggggcaguggcuguguuaaaguacaacggcauaauaacagacacuaucaagaguuggagaaacaauauauugagaacacaagagucugaaugugcauguguaaaugguucuugcuuuacuguaaugaccgauggaccaagugauggacaggccucauacaagaucuucagaauagaaaagggaaagauagucaaaucagucgaaaugaaugccccuaauuaucacuaugaggaaugcuccuguuauccugauucuagugaaaucacaugugugugcagggauaacuggcauggcucgaaucgaccgugggugucuuucaaccagaaucuggaauaucagauaggauacauauguagugggauuuucggagacaauccacgcccuaaugauaagacaggcaguugugguccaguaucgucuaauggagcaaauggaguaaaaggauuuucauucaaauacggcaaugguguuuggauagggagaacuaaaagcauuaguucaagaaacgguuuugagaugauuugggauccgaacggauggacugggacagacaauaacuucucaauaaagcaagauaucguaggaauaaaugaguggucaggauauagugggaguuuuguucagcauccagaacuaacagggcuggauuguauaagaccuugcuucuggguugaacuaaucagagggcgacccaaagagaacacaaucuggacuagcgggagcagcauauccuuuugugguguaaacagugacacuguggguuggucuuggccagacggugcugaguugccauuuaccauugacaaguaa

SEQ ID NO: 49450 - RNA, 1410 nt, Artificial Sequence; identical to SEQ ID NO: 48953
  derived and/or modified CDS sequence (wt) from neuraminidase__InfluenzaA__ACV70797

SEQ ID NO: 49451 - RNA, 1410 nt, Artificial Sequence; identical to SEQ ID NO: 48953
  derived and/or modified CDS sequence (wt) from neuraminidase__InfluenzaA__ACV70807

SEQ ID NO: 49452 - RNA, 1410 nt, Artificial Sequence; identical to SEQ ID NO: 48953
  derived and/or modified CDS sequence (wt) from neuraminidase__InfluenzaA__ACV70817

SEQ ID NO: 49453 - RNA, 1410 nt, Artificial Sequence; identical to SEQ ID NO: 48749
  derived and/or modified CDS sequence (wt) from neuraminidase__InfluenzaA__ACV70827

SEQ ID NO: 49454 - RNA, 1410 nt, Artificial Sequence; identical to SEQ ID NO: 48953
  derived and/or modified CDS sequence (wt) from neuraminidase__InfluenzaA__ACV70837

SEQ ID NO: 49455 - RNA, 1410 nt, Artificial Sequence
  derived and/or modified CDS sequence (wt) from neuraminidase__InfluenzaA__ACV70847
augaauccaaaccaaaagauaauaaccauugguucggucuguaugacaauuggaauggcuaacuuaauauuacaaauuggaaacauaaucucaauauggauuagccacucaauucaacuugggaaucaaaaucagauugaaacaugcaaucaaagcgucauuacuuaugaaaacaacacuuggguaaaucagacauauguuaacaucagcaacaccaacuuugcugcuggacagucagugguuuccgugaaauuagcgggcaauuccucucucugcccuguuaguggaugggcuauauacaguaaagacaacaguauaagaaucgguuccaagggggauguguuugucauaagggaaccauucaugucaugcucccccuuggaaugcagaaccuucuucuugacucaaggggccuugcuaaaugacaaacauuccaauggaaccauuaaagacaggagcccauaucgaacccuaaugagcuguccuauuggugaaguucccucuccauacaacucaagauuugagucagucgcuuggucagcaagugcuugucaugauggcaucaauuggcuaacaauuggaauuucuggcccagacaauggggcaguggcuguguuaaaguacaacggcauaauaacagacacuaucaagaguuggagaaacaauauauugagaacacaagagucugaaugugcauguguaaaugguucuugcuuuacuguaaugaccgauggaccaagugauggacaggccucauacaagaucuucagaauagaaaagggaaagauagucaaaucagucgaaaugaaugccccuaauuaucacuaugaggaaugcuccuguuauccugauucuagugaaaucacaugugugugcagggauaacuggcauggcucgaaucgaccgugggugucuuucaaccagaaucuggaauaucagauaggauacauauguagugggauuuucggagacaauccacgcccuaaugauaagacaggcaguugugguccaguaucgucuaauggagcaaauggaguaaaaggauuuucauucaaauacggcaaugguguuuggauagggagaacuaaaagcauuaguucaagaaacgguuuugagaugauuugggauccgaacggauggacugggacagacaauaacuucucaauaaagcaagauaucguaggaauaaaugaguggucaggauauagcgggagcuuuguucagcauccagaacuaacagggcuggauuguauaagaccuugcuucuggguugaacuaaucagagggcgacccaaagagaacacaaucuggacuagcgggagcagcauauccuuuugugguguaaacagugacacuguggguuggucuuggccagacggugcugaguugccauuuaccauugacaaguaa

SEQ ID NO: 49456 - RNA, 1410 nt, Artificial Sequence
  derived and/or modified CDS sequence (wt) from neuraminidase__InfluenzaA__ACV70867
augaauccaaaccaaaagauaauaaccauugguucggucuguaugacaauuggaauggcuaacuuaauauuacaaauuggaaacauaaucucaauauggauuagccacucaauucaacuugggaaucaaaaucagauugaaacaugcaaucaaagcgucauuacuuaugaaaacaacacuuggguaaaucagacauauguuaacaucagcaacaccaacuuugcugcuggacagucagugguuuccgugaaauuagcgggcaauuccucucucugcccuguuaguggaugggcuauauacaguaaagacaacaguauaaggaucgguuccaagggggauguguuugucauaagggaaccauucauaucaugcucccccuuggaaugcagaaccuucuucuugacucaaggggccuugcuaaaugacaaacauuccaauggaaccauuaaagacaggagcccauaucgaacccuaaugagcuguccuauuggugaaguucccucuccauacaacucaagauuugagucagucgcuuggucagcaagugcuugucaugauggcaucaauuggcuaacaauuggaauuucuggcccagacaauggggcaguggcuguguuaaaguacaacggcauaauaacagacacuaucaagaguuggagaaacaauauauugagaacacaagagucugaaugugcauguguaaaugguucuugcuuuacuguaaugaccgauggaccaagugauggacaggccucauacaagaucuucagaauagaaaagggaaagauagucaaaucagucgaaaugaaugccccuaauuaucacuaugaggaaugcuccuguuauccugauucuagugaaaucacaugugugugcagggauaacuggcauggcucgaaucgaccgugggugucuuucaaccagaaucuggaauaucagauaggauacauauguagugggauuuucggagacaauccacgcccuaaugauaagacaggcaguugugguccaguaucgucuaauggagcaaauggaguaaaaggauuuucauucaaauacggcaaugguguuuggauagggagaacuaaaagcauuaguucaagaaacgguuuugagaugauuugggauccgaacggauggacugggacagacaauaacuucucaauaaagcaagauaucguaggaauaaaugaguggucaggauauagcgggaguuuuguucagcauccagaacuaacagggcuggauuguauaagaccuugcuucuggguugaacuaaucagagggcgacccaaagagaacacaaucuggacuagcgggagcagcauauccuuuugugguguaaacagugacacuguggguuggucuuggccagacggugcugaguugccauuuaccauugacaaguaa

SEQ ID NO: 49457 - RNA, 1410 nt, Artificial Sequence; identical to SEQ ID NO: 48953
  derived and/or modified CDS sequence (wt) from neuraminidase__InfluenzaA__ACV70877

SEQ ID NO: 49458 - RNA, 1410 nt, Artificial Sequence
  derived and/or modified CDS sequence (wt) from neuraminidase__InfluenzaA__ACV70887
augaauccaaaccaaaagauaauaaccauugguucggucuguaugacaauuggaauggcuaacuuaauauuacaaauuggaaacauaaucucaauauggauuagccacucaauucaacuugggaaucaaaaucagauugaaacaugcaaucaaagcgucauuacuuaugaaaacaacacuuggguaaaucagacauauguuaacaucagcaacaccaacuuugcugcuggacagucaaugguuuccgugaaauuagcgggcaauuccucucucugcccuguuaguggaugggcuauauacaguaaagacaacaguguaagaaucgguuccaagggggauguguuugucauaagggaaccauucauaucaugcucccccuuggaaugcagaaccuucuucuugacucaaggggccuugcuaaaugacaaacauuccaauggaaccauuaaagacaggagcccauaucgaacccuaaugagcuguccuauuggugaaguucccucuccauacaacucaagauuugagucagucgcuuggucagcaagugcuugucaugaugguaucaauuggcuaacaauuggaauuucuggcccagacaauggggcaguggcuguguuaaaguacaacggcauaauaacagacacuaucaagaguuggagaaacaauauauugagaacacaagagucugaaugugcauguguaaaugguucuugcuuuacuguaaugaccgauggaccaaguaauggacaggccucauacaagaucuucagaauagaaaagggaaagauagucaaaucagucgaaaugaaugccccuaauuaucacuaugaggaaugcuccuguuauccugauucuagugaaaucacaugugugugcagggauaacuggcauggcucgaaucgaccgugggugucuuucaaccagaaucuggaauaucagauaggauacauaugcagugggauuuucggagacaauccacgcccuaaugauaagacaggcaguugugguccaguaucgucuaauggagcaaauggaguaaaaggauuuucauucaaauacggcaaugguguuuggauagggagaacuaaaagcauuaguucaagaaacgguuuugagaugauuugggauccgaacggauggacugggacagacaauaacuucucaauaaagcaagauaucguaggaauaaaugaguggucaggauauagcgggaguuuuguucagcauccagaacuaacagggcuggauuguauaagaccuugcuucuggguugaacuaaucagagggcgacccaaagagaacacaaucuggacuagcgggagcagcauaucuuuuugugguguaaacagugacacuguggguuggucuuggccagacggugcugaguugccauuuaccauugacaaguaa

SEQ ID NO: 49459 - RNA, 1410 nt, Artificial Sequence; identical to SEQ ID NO: 48953
  derived and/or modified CDS sequence (wt) from neuraminidase__InfluenzaA__ACV70897

SEQ ID NO: 49460 - RNA, 1410 nt, Artificial Sequence; identical to SEQ ID NO: 48953
  derived and/or modified CDS sequence (wt) from neuraminidase__InfluenzaA__ACV70907

SEQ ID NO: 49461 - RNA, 1410 nt, Artificial Sequence; identical to SEQ ID NO: 48953
  derived and/or modified CDS sequence (wt) from neuraminidase__InfluenzaA__ACV70917

SEQ ID NO: 49462 - RNA, 1410 nt, Artificial Sequence; identical to SEQ ID NO: 48749
  derived and/or modified CDS sequence (wt) from neuraminidase__InfluenzaA__ACV70927

SEQ ID NO: 49463 - RNA, 1410 nt, Artificial Sequence; identical to SEQ ID NO: 48953
  derived and/or modified CDS sequence (wt) from neuraminidase__InfluenzaA__ACV70937

SEQ ID NO: 49464 - RNA, 1410 nt, Artificial Sequence; identical to SEQ ID NO: 48953
  derived and/or modified CDS sequence (wt) from neuraminidase__InfluenzaA__ACV70947

SEQ ID NO: 49465 - RNA, 1410 nt, Artificial Sequence; identical to SEQ ID NO: 48953
  derived and/or modified CDS sequence (wt) from neuraminidase__InfluenzaA__ACV70957

SEQ ID NO: 49466 - RNA, 1410 nt, Artificial Sequence; identical to SEQ ID NO: 48953
  derived and/or modified CDS sequence (wt) from neuraminidase__InfluenzaA__ACV70967

SEQ ID NO: 49467 - RNA, 1410 nt, Artificial Sequence
  derived and/or modified CDS sequence (wt) from neuraminidase__InfluenzaA__ACV70977
augaauccaaaccaaaagauaauaaccauugguucggucuguaugacaauuggaauggcuaacuuaauauuacaaauuggaaacauaaucucaauauggauuagccacucaauucaacuugggaaucaaaaucagauugaaacaugcaaucaaagcgucauuacuuaugaaaacaacacuuggguaaaucagacauauguuaacaucagcaacaccaacuuugcugcuggacagucagugguuuccgugaaauuagcgggcaauuccucucucugcccuguuaguggaugggcuauauacagcaaagacaacaguauaagaaucgguuccaagggggauguguuugucauaagggaaccauucauaucaugcucccccuuggaaugcagaaccuucuucuugacucaaggggccuugcuaaaugacaaacauuccaauggaaccauuaaagacaggagcccauaucgaacccuaaugagcuguccuauuggugaaguucccucuccauacaacucaagauuugagucagucgcuuggucagcaagugcuugucaugauggcaucaauuggcuaacaauuggaauuucuggcccagacaauggggcaguggcuguguuaaaguacaacggcauaauaacagacacuaucaagaguuggagaaacaauauauugagaacacaagagucugaaugugcauguguaaaugguucuugcuuuacuguaaugaccgauggaccaagugauggacaggccucauacaagaucuucagaauagaaaagggaaagauagucaaaucagucgaaaugaaugccccuaauuaucacuaugaggaaugcuccuguuauccugauucuagugaaaucacaugugugugcagggauaacuggcauggcucgaaucgaccgugggugucuuucaaccagaaucuggaauaucagauaggauacauauguagugggauuuucggagacaauccacgcccuaaugauaagacaggcaguugugguccaguaucgucuaauggagcaaauggaguaaaaggauuuucauucaaauacggcaaugguguuuggauagggagaacuaaaagcauuaguucaagaaacgguuuugagaugauuugggauccgaacggauggacugggacagacaauaacuucucaauaaagcaagauaucguaggaauaaaugaguggucaggauauagcgggaguuuuguucagcauccagaacuaacagggcuggauuguauaagaccuugcuucuggguugaacuaaucagagggcgacccaaagagaacacaaucuggacuagcgggagcagcauauccuuuugugguguaaacagugacacuguggguuggucuuggccagacggugcugaguugccauuuaccauugacaaguaa

SEQ ID NO: 49468 - RNA, 1410 nt, Artificial Sequence; identical to SEQ ID NO: 48953
  derived and/or modified CDS sequence (wt) from neuraminidase__InfluenzaA__ACV70987

SEQ ID NO: 49469 - RNA, 1410 nt, Artificial Sequence
  derived and/or modified CDS sequence (wt) from neuraminidase__InfluenzaA__ACV71007
augaauccaaaccaaaagauaauaaccauugguucggucuguaugacaauuggaauggcuaacuuaauauuacaaauuggaaacauaaucucaauauggauuagccacucaauucaacuugggaaucaaaaucagauugaaacaugcaaucaaagcgucauuacuuaugaaaacaacacuuggguaaaucagacauauguuaacaucagcaacaccaacuuugcugcuggacagucagugguuuccgugaaauuagcgggcaauuccucucucugcccuguuaguggaugggcuauauacaguaaagacaacaguauaagaaucgguuccaagggggauguguuugucauaagggaaccauucauaucaugcucccccuuggaaugcagaaccuucuucuugacucaaggggccuugcuaaaugacaaacauuccaauggaaccauuaaagacaggagcccauaucgaacccuaaugagcuguccuauuggugaaguucccucuccauacaacucaagauuugagucagucgcuuggucagcaagugcuugucaugauggcaucaauuggcuaacaauuggaauuucuggcccagacaauggagcaguggcuguguuaaaguacaacggcauaauaacagacacuaucaagaguuggagaaacaauauauugagaacacaagagucugaaugugcauguguaaaugguucuugcuuuacuguaaugaccgauggaccaagugauggacaggccucauacaagaucuucagaauagaaaagggaaagauagucaaaucagucgaaaugaaugccccuaauuaucacuaugaggaaugcuccuguuauccugauucuagugaaaucacaugugugugcagggauaacuggcauggcucgaaucgaccgugggugucuuucaaccagaaucuggaauaucagauaggauacauauguagugggauuuucggagacaauccacgcccuaaugauaagacaggcaguugugguccaguaucgucuaauggagcaaauggaguaaaaggauuuucauucaaauacggcaaugguguuuggauagggagaacuaaaagcauuaguucaagaaacgguuuugagaugauuugggauccgaacggauggacugggacagacaauaacuucucaauaaagcaagauaucguaggaauaaaugaguggucaggauauagcgggaguuuuguucagcauccagaacuaacagggcuggauuguauaagaccuugcuucuggguugaacuaaucagagggcgacccaaagagaacacaaucuggacuagcgggagcagcauauccuuuugugguguaaacagugacacuguggguuggucuuggccagacggugcugaguugccauuuaccauugacaaguaa

SEQ ID NO: 49470 - RNA, 1410 nt, Artificial Sequence
  derived and/or modified CDS sequence (wt) from neuraminidase__InfluenzaA__ACV82218
augaauccaaaucaaaagauaauaacgauuggcucuguuucucucaccauuuccacaauaugcuucuucaugcaaauugccaucuugauaacuacuguaacauugcauuucaagcaauaugaauucaacucccccccaaacaaccaagugaugcugugugaaccaacaauaauagaaagaaacauaacagagauaguguaucugaccaacaccaccauagagaaggaaauaugccccaaacuagcagaauacagaaauuggucaaagccgcaaugugacauuacaggguuugcaccuuuuucuaaggacaauucgauuaggcuuuccgcugguggggacaucugggugacaagagaaccuuaugugucaugcgauccugacaaguguuaucaauuugcccuuggacagggaacaacacuaaacaacguacauucaaauaacacaguacgugauaggaccccuuaucggacccuauugaugaaugaguuagguguuccuuuucaucuggggaccaagcaagugugcauagcaugguccagcucaaguugucacgauggaaaagcauggcugcauguuuguauaacgggggaugauaaaaaugcaacugcuagcuucauuuacaaugggaggcuuguagauaguguuguuucaugguccaaagaaauccucaggacccaggagucagaaugcguuuguaucaauggaacuuguacaguaguaaugacugaugggagugcuucaggaaaagcugauacuaaaauacuauucauugaggaggggaaaaucguucauacuagcacauugucaggaagugcucagcaugucgaggagugcuccugcuauccucgauauccuggugucagaugugucugcagagacaacuggaaaggauccaauaggcccaucguagauauaaacauaaaggaucauagcauugucuccaguuauguguguucaggacuuguuggagacacacccagaaaaaacgacagcuccagcaguagccauuguuuggauccuaacaaugaggaagguggucauggggugaaaggcugggccuuugaugauggaaaugacguguggaugggaagaacgaucagcgagaagucacgcuuaggguaugaaaccuucaaagucauugaaggcugguccaacccuaaguccaaauugcagauaaauaggcaagucauaguugacagagguaauagguccgguuauucugguauuuucucuguugaaggcaaaagcugcaucaaucggugcuuuuauguggaguugauaaggggaagaaaagaggaaacugaagucuuguggaccucaaacaguauuguuguguuuuguggcaccucagguacauauggaacaggcucauggccugauggggcggacaucaaucucaugccuauauaa

SEQ ID NO: 49471 - RNA, 1410 nt, Artificial Sequence
  derived and/or modified CDS sequence (wt) from neuraminidase__InfluenzaA__ACV82219
augaauccaaaucaaaagauaauaacgauuggcucuguuucucucaccauuuccacaauaugcuucuucaugcaaauugccauccugauaacuacuguaacauugcauuucaagcaauaugaauucaacucccccccaaacaaccaagugaugcugugugaaccaacaauaauagaaagaaacauaacagagauaguguaucugaccaacaccaccauagagaaggaaauaugccccaaacuagcagaauacagaaauuggucaaagccgcaaugugacauuacaggguuugcaccuuuuucuaaggacaauucgauuaggcuuuccgcugguggggacaucugggugacaagagaaccuuaugugucaugcgauccugacaaguguuaucaauuugcccuuggacagggaacaacacuaaacaacguacauucaaauaacacaguacgugauaggaccccuuaucggacccuauugaugaaugaguuagguguuccuuuucaucuggggaccaagcaagugugcauagcaugguccagcucaaguugucacgauggaaaagcauggcugcauguuuguauaacgggggaugauaaaaaugcaacugcuagcuucauuuacaaugggaggcuuguagauaguguuguuucaugguccaaagaaauccucaggacccaggagucagaaugcguuuguaucaauggaacuuguacaguaguaaugacugaugggagugcuucaggaaaagcugauacuaaaauacuauucauugaggagggaaaaaucguucauacuagcacauugucaggaagugcucagcaugucgaggagugcuccugcuauccucgauauccuggugucagaugugucugcagagacaacuggaaaggauccaauaggcccaucguagauauaaacauaaaggaucauagcauugucuccaguuauguguguucaggacuuguuggagacacacccagaaaaaacgacagcuccagcaguagccauuguuuggauccuaacaaugaggaagguggucauggggugaaaggcugggccuuugaugauggaaaugacguguggaugggaagaacgaucagcgagaagucacgcuuaggguaugaaaccuucaaagucauugaaggaugguccaacccuaaguccaaauugcagauaaauaggcaagucauaguugacagagguaauagguccgguuauucugguauuuucucuguugaaggcaaaagcugcaucaaucggugcuuuuauguggaguugauaaggggaagaaaagaggaaacugaagucuuguggaccucaaacaguauuguuguguuuuguggcaccucagguacauauggaacaggcucauggccugauggggcggacaucaaucucaugccuauauaa

SEQ ID NO: 49472 - RNA, 1410 nt, Artificial Sequence
  derived and/or modified CDS sequence (wt) from neuraminidase__InfluenzaA__ACV82220
augaauccaaaucaaaagauaauaacgauuggcucuguuucucucaccauuuccacaauaugcuucuucaugcaacuugccaucuugauaacuacuguaacauugcauuucaagcaauaugaauucaacucccccccaaacaaccaagugaugcugugugaaccaacaauaauagaaagaaacauaacagagauaguguaucugaccaacaccaccauagagaaggaaauaugccccaaacuagcagaauacagaaauuggucaaagccgcaaugugacauuacaggauuugcaccuuuuucuaaggacaauucgauuaggcuuuccgcugguggggacaucugggugacaagagaaccuuaugugucaugcgauccugacaaguguuaucaauuugcccuuggacagggaacaacgcuaaacaacgugcauucaaauaacacaguacgugauaggaccccuuaucggacucuauugaugaaugaguuagguguuccuuuucaucuggggaccaagcaagugugcauagcaugguccagcuacaguugucacgauggaaaagcauggcugcauguuuguauaacgggggaugauaaaaaugcaacugcuagcuucauuuacaaugggaggcuuguagauaguguuguuucaugguccaaagaaauccucaggacccaggagucagaaugcguuuguaucaauggaacuuguacaguaguaaugacugaugggagugcuucaggaaaagcugauacuaaaauacuauucauugaggaggggaaaaucguucauacuagcacauugucaggaagugcucagcaugucgaggagugcuccugcuauccucgauauccuggugucagaugugucugcagagacaacuggaaaggcuccaauaggcccaucguagauauaaacauaaaggaucauagcauuguuuccaguuauguguguucaggacuuguuggagacacacccagaaaaaacgacagcuccagcaguagccauuguuuggauccuaacaaugaagaagguggucauggagugaaaggcugggccuuugaugauggaaaugacguguggaugggaagaacgaucagcgagaaaucacgcuuaggguaugaaaccuucaaagucauugaaggcugguccaacccuaaguccaaauugcagauaaauaggcaagucauaguugacagagguaauagguccgguuauucugguauuuucucuguugaaggcaaaagcugcaucaaucggugcuuuuauguggaguugauaaggggaaggaaagagaaaacugaagucuuguggaccucaaacaguauuguuguguuuuguggcaccucagguacauauggaacaggcucauggccugauggggcggacaucaaucucaugccuauauaa

SEQ ID NO: 49473 - RNA, 1413 nt, Artificial Sequence
  derived and/or modified CDS sequence (wt) from neuraminidase__InfluenzaA__ACV82221
augaacccaaaucaaaagauaauaaccauuggaucaaucaguauagcaaucggaauaauuagucuaauguugcaaauaggaaauauuauuucaauaugggcuagucacucaauccaaacugggagucaaaacaacacuggaauaugcaaccaaagaaucaucacauaugaaaacagcaccugggugaaucacacauauguuaauauuaacaacacuaauguuguugcuggagaggacaaaacaucagugacauuggccggcaauucaucucuuuguucuaucaguggaugggcuauauacacaaaagacaacagcauaagaauuggcuccaaaggagauguuuuugucauaagagaaccuuucauaucauguucucacuuggaaugcagaaccuuuuuucugacccaaggcgcucuauuaaaugacaaacauucaaaugggaccguaaaggacagaaguccuuauagggccuuaaugagcuguccucuaggugaagcuccguccccauacaauucaaaguucgaaucaguugcauggucagcaagcgcaugccaugauggcaugggcugguuaacaaucggaauuucugguccagacaauggagcuguggcuguacuaaaauacaacggaauaauaacuggaaccauaaaaaguuggaaaaagcaaauauuaagaacacaagagucugaaugugucuguaugaacgggucauguuucaccauaaugaccgauggcccgaguaauaaggccgccucguacaaaauuuucaagaucgaaaaggggaagguuacuaaaucaauagaguugaaugcacccaauuuuuauuaugaggaaugcuccuguuacccagauacuggcauagugauguguguaugcagggacaacuggcaugguucaaaucgaccuugggugucuuuuaaucaaaacuuggauuaucaaauaggauacaucugcaguggaguguuuggugacaauccgcgucccgaagauggagaaggcagcugcaauccagugacuguugauggagcaaacggaguaaaaggguuuucauacaaauaugguaaugguguuuggauagggaggaccaaaaguaacagacuuagaaagggguuugagaugauuugggauccuaauggauggacaaauaccgacagugauuucucagugaaacaggauguuguagcaauaacugauuggucaggguacagcggaaguuucguccaacauccugaguuaacaggauuggacuguauaagaccuugcuucuggguugaguuagucagagggcugccuagagaaaauacaacaaucuggacuagugggagcagcauuucuuuuuguggcguuaauagugauacugcaaacuggucuuggccagacggugcugaguugccguucaccauugacaaguag

SEQ ID NO: 49474 - RNA, 1410 nt, Artificial Sequence; identical to SEQ ID NO: 48750
  derived and/or modified CDS sequence (wt) from neuraminidase__InfluenzaA__ACV88402

SEQ ID NO: 49475 - RNA, 1410 nt, Artificial Sequence; identical to SEQ ID NO: 48750
  derived and/or modified CDS sequence (wt) from neuraminidase__InfluenzaA__ACV88412

SEQ ID NO: 49476 - RNA, 1410 nt, Artificial Sequence; identical to SEQ ID NO: 48749
  derived and/or modified CDS sequence (wt) from neuraminidase__InfluenzaA__ACV88422

SEQ ID NO: 49477 - RNA, 1365 nt, Artificial Sequence
  derived and/or modified CDS sequence (wt) from neuraminidase__InfluenzaA__ACV89505
augaauccaaaucagaaaauaauaaccauuggaucaaucugucugguagucggacuaauuagccuaauauugcaaauagggaauauaaucucaauauggauuagccauucaauucaaacuggaagucaaaaccauacuggaauaugcaaccaaaacaucauuaccuauaaaaauagcaccuggguaaaggacacaacuucagugauauuaaccggcaauucaucucuuugucccauccgugggugggcuauauacagcaaagacaauagcauaagaauugguuccaaaggagacguuuuugucauaagagagcccuuuauuucauguucucacuuggaaugcaggaccuuuuuucugacccaaggugccuuacugaaugacaagcauucaagugggacuguuaaggacagaagcccuuauagggccuuaaugagcugcccugucggugaagcuccguccccguacaauucaagauuugaaucgguugcuuggucagcaagugcaugucaugauggcaugggcuggcuaacaaucggaauuucagguccagauaauggagcaguggcuguauuaaaauacaacggcauaauaacugaaaccauaaaaaguuggaggaagaaaauauugaggacacaagagucugaaugugccuguguaaaugguucauguuuuacuauaaugacugauggcccgagugaugggcuggccucguacaaaauuuucaagaucgaaaaggggaagguuacuaaaucaauagaguugaaugcaccuaauucucacuaugaggaauguuccuguuacccugauaccggcaaagugaugugugugugcagagacaauuggcaugguucgaaccggccaugggugucuuucgaucaaaaccuggauuaucaaauaggauacaucugcagugggguuuucggugacaacccgcgucccgaagauggaacaggcagcugugguccaguguauguugauggagcaaacggaguaaagggauuuucauauagguaugguaaugguguuuggauaggaaggaccaaaagucacaguuccagacauggguuugagaugauuugggauccuaauggauggacagagacugauaguaaguucucugugaggcaagauguuguggcaaugacugauuggucaggguauagcggaaguuucguucaacauccugagcugacagggcuagacuguaugaggccgugcuucuggguugaauuaaucaggggacgaccuaaggagggaacaaucuggacuagugcgagcagcauuucuuuuuguggcgugaauagugauacuguagauuggucuuggccagacggugcugaguugccauucagcauugacaaguag

SEQ ID NO: 49478 - RNA, 1410 nt, Artificial Sequence; identical to SEQ ID NO: 48750
  derived and/or modified CDS sequence (wt) from neuraminidase__InfluenzaA__ACV91673

SEQ ID NO: 49479 - RNA, 1410 nt, Artificial Sequence; identical to SEQ ID NO: 48949
  derived and/or modified CDS sequence (wt) from neuraminidase__InfluenzaA__ACV91681

SEQ ID NO: 49480 - RNA, 1410 nt, Artificial Sequence
  derived and/or modified CDS sequence (wt) from neuraminidase__InfluenzaA__ACX31593
augaauccaaaucaaaagauaauaacgauuggcucuguuucucucaccauuuccacaauaugcuucuucaugcaaauugccaucuugauaacuacuguaacauugcauuucaagcaauaugaauucaacucccccccaaacaaccaagugcugcugugugaaccagcaauaauagaaagaaacauaacagagauaguauaucugaccaacaccaccauagagaaggaaauaugccccaaacuagcagaauacagaaauuggucaaagccgcaaugugacauuacaggguuugcaccuuuuucuaaggacaauucgauuaggcuuuccgcugguggggacaucugggugacaagagaaccuuaugugucaugcgauccugacaaguguuaucaauuugcccuuggacagggaacaacacuaaacaacguacauucaaauaacacaguacgugauaggaccccuuaucggacccuauugaugaaugaguuagguguuccuuuucaucuggggaccaagcaagugugcauagcaugguccagcucaaguugucacgauggaaaagcauggcugcauguuuguauaacgggggaugauaaaaaugcaacugcuagcuucauuuacaaugggaggcuuguagauaguguuguuucaugguccaaagaaauccucaggacccaggagucagaaugcguuuguaucaauggaacuuguacaguaguaaugacugaugggagugcuucaggaaaagcugauacuaaaauacuauucauugaggagggaaaaaucguucauacuagcacauugucaggaagugcucagcaugucgaggagugcuccugcuauccucgauauccuggugucagaugugucugcagagacaacuggaaaggauccaauaggcccaucguagauauaaacauaaaggaucauagcauugucuccaguuauguguguucaggacuuguuggagacacacccagaaaaaacgacagcuccagcaguagccauuguuuggauccuaacaaugaggaagguggucauggggugaaaggcugggccuuugaugauggaaaugacguguggaugggaagaacgaucagcgagaagucacgcuuaggguaugaaaccuucaaagucauugaaggcugguccaacccuaaguccaaauugcagauaaauaggcaagucauaguugacagagguaauagguccgguuauucugguauuuucucuguugaaggcaaaagcugcaucaaucggugcuuuuauguggaguugauaaggggaagaaaagaggaaacugaagucuuguggaccucaaacaguauuguuguguuuuguggcaccucagguacauauggaacaggcucauggccugauggggcggacaucaaucucaugccuauauaa

SEQ ID NO: 49481 - RNA, 1410 nt, Artificial Sequence
  derived and/or modified CDS sequence (wt) from neuraminidase__InfluenzaA__ACX31901
augaauccaaaccaaaagauaauaaccauugguucggucuguaugacaauuggaauggcuaacuuaauauuacaaauuggaaacauaaucucaauauggauuagccacucaauucaacuugggaaucaaaaucagauugaaacaugcaaucaaagcgucauuacuuaugaaaacaacacuuggguaaaucagacauauguuaacaucagcaacaccaacuuugcugcuggacagucagugguuuccgugaaauuagcgggcaauuccucucucugcccuguuaguggaugggcuauauacaguaaagacaacaguauaagaaucgguuccaagggggauguguuugucauaagggaaccauucauaucaugcucccccuuggaaugcagaaccuucuucuugacucaaggggccuugcuaaaugacaaacauuccaauggaaccauuaaagacaggagcccauaucgaacccuaaugagcuguccuauuggugaaguucccucuccauacaacucaagauuugagucagucgcuuggucagcaagugcuugucaugauggcaucaauuggcuaacaauuggaauuucuggcccagacaauggggcaguggcuguguuaaaguacaacggcauaauaacagacacuaucaagaguuggagaaacaauauauugagaacacaagagucugaaugugcauguguaaaugguucuugcuuuacuguaaugaccgauggaccaagugauggacaggccucauacaagaucuucagaauagaaaagggaaagauagucaaaucagucgaaaugaaugccccuaauuaucacuaugaggaaugcuccuguuauccugauucuagugaaaucacaugugugugcagggauaacuggcauggcucgaaucgaccgugggugucuuucaaccagaaucuggaauaucagauaggauacauaugcagugggauuuucggagacaauccacgcccuaaugacaagacaggcaguugugguccaguaucgucuaauggagcaaauggaguaaaaggauuuucauucaaauacggcaaugguguuuggauagggagaacuaaaagcauuaguucaagaaacgguuuugagaugauuugggauccgaacggauggacugggacagacaauaacuucucaauaaagcaggauaucguaggaauaaaugaguggucaggauauagcgggaguuuuguucagcauccagaacuaacagggcuggauuguauaagaccuugcuucuggguugaacuaaucagagggcgacccaaagagaacacaaucuggacuagcgggagcagcauauccuuuugugguguaaacagugacacuguggguuggucuuggccagacggugcugaguugccauuuaccauugacaaguaa

SEQ ID NO: 49482 - RNA, 1410 nt, Artificial Sequence; identical to SEQ ID NO: 48750
  derived and/or modified CDS sequence (wt) from neuraminidase__InfluenzaA__ACX31902

SEQ ID NO: 49483 - RNA, 1410 nt, Artificial Sequence
  derived and/or modified CDS sequence (wt) from neuraminidase__InfluenzaA__ACX31905
augaauccaaaccaaaagauaauaaccauugguucggucuguaugacaauuggaauggcuaacuuaauauuacaaauuggaaacauaaucucaauauggauuagccacucaauucaacuugggaaucaaaaucagauugaaacaugcaaucaaagcgucauuacuuaugaaaacaacacuuggguaaaucagacauauguuaacaucagcaacaccaacuuugcugcuggacagucagugguuuccgugaaauuagcgggcaauuccucucucugcccuguuaguggaugggcuauauacaguaaagacaacaguauaagaaucgguuccaagggggauguguuugucauaagggaaccauucauaucaugcucccccuuggaaugcagaaccuucuucuugacucaaggggccuugcuaaaugacaaacauuccaauggaaccauuaaagacaggagcccauaucgaacccuaaugagcuguccuauuggugaaguucccucuccauacaacucaagauuugagucagucgcuuggucagcaagugcuugucaugauggcaucaauuggcuaacaauuggaauuucugguccagacaauggggcaguggcuguguuaaaguacaacggcauaauaacagacacuaucaagaguuggagaaacaauauauugagaacacaagagucugaaugugcauguguaaaugguucuugcuuuacuguaaugaccgauggaccaagugauggacaggccucauacaagaucuucagaauagaaaagggaaagauagucaaaucagucgaaaugaaugccccuaauuaucacuaugaggaaugcuccuguuauccugauucuagugaaaucacaugugugugcagggauaacuggcauggcucgaaucgaccgugggugucuuucaaccagaaucuggaauaucagauaggauacauaugcagugggauuuucggagacaauccacgcccuaaugauaagacaggcaguugugguccaguaucgucuaauggagcaaauggaguaaaaggauuuucauucaaauacggcaaugguguuuggauagggagaacuaaaagcauuaguucaagaaacgguuuugagaugauuugggauccgaacggauggacugggacagacaauaacuucucaauaaagcaagauaucguaggaauaaaugaguggucaggauauagcgggaguuuuguucagcauccagaacuaacagggcuggauuguauaagaccuugcuucuggguugaacuaaucagagggcgacccaaagagaacacaaucuggacuagcgggagcagcauauccuuuugugguguaaacagugacacuguggguuggucuuggccagacggugcugaguugccauuuaccauugacaaguaa

SEQ ID NO: 49484 - RNA, 1410 nt, Artificial Sequence; identical to SEQ ID NO: 48750
  derived and/or modified CDS sequence (wt) from neuraminidase__InfluenzaA__ACX31906

SEQ ID NO: 49485 - RNA, 1410 nt, Artificial Sequence; identical to SEQ ID NO: 48750
  derived and/or modified CDS sequence (wt) from neuraminidase__InfluenzaA__ACX31907

SEQ ID NO: 49486 - RNA, 1410 nt, Artificial Sequence; identical to SEQ ID NO: 48750
  derived and/or modified CDS sequence (wt) from neuraminidase__InfluenzaA__ACX31908

SEQ ID NO: 49487 - RNA, 1410 nt, Artificial Sequence
  derived and/or modified CDS sequence (wt) from neuraminidase__InfluenzaA__ACX31909
augaauccaaaccaaaagauaauaaccauugguucggucuguaugacaauuggaauggcuaacuuaauauuacaaauuggaaacauaaucucaauauggauuagccacucaauucaacuugggaaucaaaaucagauugaaacaugcaaucaaagcgucauuacuuaugaaaacaacacuuggguaaaucagacauauguuaacaucagcaacaccaacuuugcugcuggacagucagugguuuccgugaaauuagcgggcaauuccucucucugcccuguuaguggaugggcuauauacaguaaagacaacaguauaagaaucgguuccaagggggauguguuugucauaagggaaccauucauaucaugcucccccuuggaaugcagaaccuucuucuugacucaaggggccuugcuaaaugacaaacauuccaauggaaccauuaaagacaggagcccauaucgaacccuaaugagcuguccuauuggugaaguucccucuccauacaacucaagauuugagucagucgcuuggucagcaagugcuugucaugauggcaucaauuggcuaacaauuggaauuucuggcccagacaauggggcaguggcuguguuaaaguacaacggcauaauaacagacacuaucaagaguuggagaaacaauauauugagaacacaagagucugaaugugcauguguaaaugguucuugcuuuacuguaaugaccgauggaccaaguaauggacaggccucauacaagaucuucagaauagaaaagggaaagauagucaaaucagucgaaaugaaugccccuaauuaucacuaugaggaaugcuccuguuauccugauucuagugaaaucacaugugugugcagggauaacuggcauggcucgaaucgaccgugggugucuuucaaccagaaucuggaauaucagauaggauacauauguagugggauuuucggagacaauccacgcccuaaugauaagacaggcaguugugguccaguaucgucuaauggagcaaauggaguaaaaggauuuucauucaaauacggcaaugguguuuggauagggagaacuaaaagcauuaguucaagaaacgguuuugagaugauuugggauccgaacggauggacugggacagacaauaacuucucaauaaagcaagauaucguaggaauaaaugaguggucaggauauagcgggaguuuuguucagcauccagaacuaacagggcuggauuguauaagaccuugcuucuggguugaacuaaucagagggcgacccaaagagaacacaaucuggacuagcgggagcagcauauccuuuugugguguaaacagugacacuguggguuggucuuggccagacggugcugaguugccauuuaccauugacaaguaa

SEQ ID NO: 49488 - RNA, 1410 nt, Artificial Sequence; identical to SEQ ID NO: 48750
  derived and/or modified CDS sequence (wt) from neuraminidase__InfluenzaA__ACX31911

SEQ ID NO: 49489 - RNA, 1410 nt, Artificial Sequence; identical to SEQ ID NO: 48750
  derived and/or modified CDS sequence (wt) from neuraminidase__InfluenzaA__ACX31912

SEQ ID NO: 49490 - RNA, 1410 nt, Artificial Sequence
  derived and/or modified CDS sequence (wt) from neuraminidase__InfluenzaA__ACX31913
augaauccaaaccaaaagauaauaaccauugguucggucuguaugacaauuggaauggcuaacuuaauauuacaaauuggaaacauaaucucaauauggauuagccacucaauucaacuugggaaucaaaaucagauugaaacaugcaaucaaagcgucauuacuuaugaaaacaacacuuggguaaaucagacauauguuaacaucagcaacaccaacuuugcugcuggacagucagugguuuccgugaaauuagcgggcaauuccucucucugcccuguuaguggaugggcuauauacaguaaagacaacaguauaagaaucgguuccaagggggauguguuugucauaagggaaccauucauaucaugcucccccuuggaaugcagaaccuucuucuugacucaaggggccuugcuaaaugacaaacauuccaauggaaccauuaaagacaggagcccauaucgaacccuaaugagcuguccuauuggugaaguucccucuccauacaacucaagauuugagucagucgcuuggucagcaagugcuugucaugauggcaucaauuggcuaacaauuggaauuucuggcccagacaauggggcaguggcuguguuaaaguacaacggcauaauaacagacacuaucaagaguuggagaaacaauauauugagaacacaagagucugaaugugcauguguaaaugguucuugcuuuacuguaaugaccgauggaccaagugauggacaggccucauacaagaucuucagaauagaaaagggaaagauagucaaaucagucgaaaugaaugccccuaauuaucacuaugaggaaugcuccuguuauccugauucuagugaaaucacaugugugugcagggauaacuggcauggcucgaaucgaccgugggugucuuucaaccagaaucuggaauaucagauaggauacauaugcagugggauuuucggagacaauccacgcccuaaugauaagacaggcaguugugguccaguaucgucuaauggagcaaauggaguaaaaggauuuucauucaaauacggcaaugguguuuggauagggagaacuaaaagcauuaguucaagaaacgguuuugagaugauuugggauccgaacggauggaccgggacagacaauaacuucucaauaaagcaagauaucguaggaauaaaugaguggucaggauauagcgggaguuuuguucagcauccagaacuaacagggcuggauuguauaagaccuugcuucuggguugaacuaaucagagggcgacccaaagagaacacaaucuggacuagcgggagcagcauauccuuuugugguguaaacagugacacuguggguuggucuuggccagacggugcugaguugccauuuaccauugacaaguaa

SEQ ID NO: 49491 - RNA, 1410 nt, Artificial Sequence; identical to SEQ ID NO: 48750
  derived and/or modified CDS sequence (wt) from neuraminidase__InfluenzaA__ACX31914

SEQ ID NO: 49492 - RNA, 1410 nt, Artificial Sequence; identical to SEQ ID NO: 48949
  derived and/or modified CDS sequence (wt) from neuraminidase__InfluenzaA__ACX31915

SEQ ID NO: 49493 - RNA, 1410 nt, Artificial Sequence; identical to SEQ ID NO: 48750
  derived and/or modified CDS sequence (wt) from neuraminidase__InfluenzaA__ACX31916

SEQ ID NO: 49494 - RNA, 1410 nt, Artificial Sequence
  derived and/or modified CDS sequence (wt) from neuraminidase__InfluenzaA__ACX31917
augaauccaaaccaaaagauaauaaccauugguucggucuguaugacaauuggaauggcuaacuuaauauuacaaauuggaaacauaaucucaauauggauuagccacucaauucaacuugggaaucaaaaucagauugaaacaugcaaucaaagcgucauuacuuaugaaaacaacacuuggguaaaucagacauauguuaacaucagcaacaccaacuuugcugcuggacagucagugguuuccgugaaauuagcgggcaauuccucucucugcccuguuaguggaugggcuauauacaguaaagacaacaguauaagaaucgguuccaagggggauguguuugucauaagggaaccauucauaucaugcucccccuuggaaugcagaaccuucuucuugacucaaggggccuugcuaaaugacaaacauuccaauggaaccauuacagacaggagcccauaucgaacccuaaugagcuguccuauuggugaaguucccucuccauacaacucaagauuugagucagucgcuuggucagcaagugcuugucaugauggcaucaauuggcuaacaauuggaauuucuggcccagacaauggggcaguggcuguguuaaaguacaacggcauaauaacagacacuaucaagaguuggagaaacaauauauugagaacacaagagucugaaugugcauguguaaaugguucuugcuuuacuguaaugaccgauggaccaagugauggacaggccucauacaagaucuucagaauagaaaagggaaagauagucaaaucagucgaaaugaaugccccuaauuaucacuaugaggaaugcuccuguuauccugauucuagugaaaucacaugugugugcagggauaacuggcauggcucgaaucgaccgugggugucuuucaaccagaaucuggaauaucagauaggauacauaugcagugggauuuucggagacaauccacgcccuaaugauaagacaggcaguugugguccaguaucgucuaauggagcaaauggaguaaaaggauuuucauucaaauacggcaaugguguuuggauagggagaacuaaaagcauuaguucaagaaacgguuuugagaugauuugggauccgaacggauggacugggacagacaauaacuucucaauaaagcaagauaucguaggaauaaaugaguggucaggauauagcgggaguuuuguucagcauccagaacuaacagggcuggauuguauaagaccuugcuucuggguugaacuaaucagagggcgacccaaagagaacacaaucuggacuagcgggagcagcauauccuuuugugguguaaacagugacacuguggguuggucuuggccagacggugcugaguugccauuuaccauugacaaguaa

SEQ ID NO: 49495 - RNA, 1410 nt, Artificial Sequence; identical to SEQ ID NO: 48750
  derived and/or modified CDS sequence (wt) from neuraminidase__InfluenzaA__ACX31918

SEQ ID NO: 49496 - RNA, 1410 nt, Artificial Sequence; identical to SEQ ID NO: 48750
  derived and/or modified CDS sequence (wt) from neuraminidase__InfluenzaA__ACX31919

SEQ ID NO: 49497 - RNA, 1410 nt, Artificial Sequence; identical to SEQ ID NO: 48750
  derived and/or modified CDS sequence (wt) from neuraminidase__InfluenzaA__ACX31920

SEQ ID NO: 49498 - RNA, 1410 nt, Artificial Sequence; identical to SEQ ID NO: 49157
  derived and/or modified CDS sequence (wt) from neuraminidase__InfluenzaA__ACX31922

SEQ ID NO: 49499 - RNA, 1410 nt, Artificial Sequence; identical to SEQ ID NO: 48949
  derived and/or modified CDS sequence (wt) from neuraminidase__InfluenzaA__ACX31923

SEQ ID NO: 49500 - RNA, 1410 nt, Artificial Sequence; identical to SEQ ID NO: 48813
  derived and/or modified CDS sequence (wt) from neuraminidase__InfluenzaA__ACX31924

SEQ ID NO: 49501 - RNA, 1410 nt, Artificial Sequence
  derived and/or modified CDS sequence (wt) from neuraminidase__InfluenzaA__ACX31925
augaauccaaaccaaaagauaauaaccauugguucggucuguaugacaauuggaauggcuaacuuaauauuacaaauuggaaacauaaucucaauauggauuagccacucaauucaacuugggaaucaaaaucagauugaaacaugcaaucaaagcgucauuacuuaugaaaacaacacuuggguaaaucagacauauguuaacaucagcaacaccaacuuugcugcuggacagucagugguuuccgugaaauuagcgggcaauuccucucucugcccuguuaguggaugggcuauauacaguaaagacaacaguauaagaaucgguuccaagggggauguguuugucauaagggaaccauucauaucaugcucccccuuggaaugcagaaccuucuucuugacucaaggggccuugcuaaaugacaaacauuccaauggaaccauuaaagacaggagcccauaucgaacccuaaugagcuguccuauuggugaaguucccucuccauacaacucaagauuugagucagucgcuuggucagcaagugcuugucaugauggcaucaauuggcuaacaauuggaauuucuggcccagacaauggggcaguggcuguguuaaaguacaacggcauaauaacagacacuaucaagaguuggagaaacaauauauugagaacacaagagucugaaugugcauguguaaaugguucuugcuuuacuuuaaugaccgauggaccaagugauggacaggccucauacaagaucuucagaauagaaaagggaaagauagucaaaucagucgaaaugaaugccccuaauuaucacuaugaggaaugcuccuguuauccugauucuagugaaaucacaugugugugcagggauaacuggcauggcucgaaucgaccgugggugucuuucaaccagaaucuggaauaucagauaggauacauaugcagugggauuuucggagacaauccacgcccuaaugauaagacaggcaguugugguccaguaucgucuaauggagcaaauggaguaaaaggauuuucauucaaauacggcaaugguguuuggauagggagaacuaaaagcauuaguucaagaaacgguuuugagaugauuugggauccgaacggauggacugggacagacaauaacuucucaauaaagcaagauaucguaggaauaaaugaguggucaggauauagcgggaguuuuguucagcauccagaacuaacagggcuggauuguauaagaccuugcuucuggguugaacuaaucagagggcgacccaaagagaacacaaucuggacuagcgggagcagcauauccuuuugugguguaaacagugacacuguggguuggucuuggccagacggugcugaguugccauuuaucauugacaaguaa

SEQ ID NO: 49502 - RNA, 1410 nt, Artificial Sequence; identical to SEQ ID NO: 48750
  derived and/or modified CDS sequence (wt) from neuraminidase__InfluenzaA__ACX31926

SEQ ID NO: 49503 - RNA, 1410 nt, Artificial Sequence; identical to SEQ ID NO: 48750
  derived and/or modified CDS sequence (wt) from neuraminidase__InfluenzaA__ACX31927

SEQ ID NO: 49504 - RNA, 1410 nt, Artificial Sequence
  derived and/or modified CDS sequence (wt) from neuraminidase__InfluenzaA__ACX31928
augaauccaaaccaaaagauaauaaccauugguucggucuguaugacaauuggaauggcuaacuuaauauuacaaauuggaaacauaaucucaauauggauuagccacucaauucaacuugggaaucaaaaucagauugaaacaugcaaucaaagcgucauuacuuaugaaaacaacacuuggguaaaucagacauauguuaacaucagcaacaccaacuuugcugcuggacagucagugguuuccgugaaauuagcgggcaauuccucucucugcccuguuaguggaugggcuauauacaguaaagacaacaguauaagaaucgguuccaagggggauguguuugucauaagggaaccauucauaucaugcucccccuuggaaugcagaaccuucuucuugacucaaggggccuugcuaaaugacaaacauuccaauggaaccauuaaagacaggagcccauaucgaacccuaaugagcuguccuauuggugaaguucccucuccauacaacucaagauuugagucagucgcuuggucagcaagugcuugucaugauggcaucaauuggcuaacaauuggaauuucuggcccagacaauggggcaguggcuguguuaaaguacaacggcauaauaacagacacuaucaagaguuggagaaacaauauauugagaacacaagagucugaaugugcauguguaaaugguucuugcuuuacuguaaugaccgauggaccaagugauggacaggccucauacaagaucuucagaauagaaaagggaaagauagucaaaucagucgaaaugaaugccccuaauuaucacuaugaggaaugcuccuguuauccugauucuagugaaaucacaugugugugcagggauaacuggcauggcucgaaucgaccgugggugucuuucaaccagaaucuggaauaucagauaggauacauaugcagugggauuuucggagacaauccacgcccuaaugauaagacaggcaguugugguccaguaucgucuaauggagaaaauggaguaaaaggauuuucauucaaauacggcaaugguguuuggauagggagaacuaaaagcauuaguucaagaaacgguuuugagaugauuugggauccgaacggauggacugggacagacaauaacuucucaauaaagcaagauaucguaggaauaaaugaguggucaggauauagcgggaguuuuguucagcauccagaacuaacagggcuggauuguauaagaccuugcuucuggguugaacuaaucagagggcgacccaaagagaacacaaucuggacuagcgggagcagcauauccuuuugugguguaaacggugacacuguggguuggucuuggccagacggugcugaguugccauuuaccauugacaaguaa

SEQ ID NO: 49505 - RNA, 1410 nt, Artificial Sequence; identical to SEQ ID NO: 48780
  derived and/or modified CDS sequence (wt) from neuraminidase__InfluenzaA__ACX31929

SEQ ID NO: 49506 - RNA, 1410 nt, Artificial Sequence
  derived and/or modified CDS sequence (wt) from neuraminidase__InfluenzaA__ACX31930
augaauccaaaccaaaagauaauaaccauugguucggucuguaugacaauuggaauggcuaacuuaauauuacaaauuggaaacauaaucucaauauggauuagccacucaauucaacuugggaaucaaaaucagauugaaacaugcaaucaaagcgucauuacuuaugaaaacaacacuuggguaaaucagacauauguuaacaucagcaacaccaacuuugcugcuggacagucagugguuuccgugaaauuagcgggcaauuccucucucugcccuguuaguggaugggcuauauacaguaaagacaacaguauaagaaucgguuccaagggggauguguuugucauaagggaaccauucauaucaugcucccccuuggaaugcagaaccuucuucuugacucaaggggccuugcuaaaugacaaacauucuaauggaaccauuaaagacaggagcccauaucgaacccuaaugagcuguccuauuggugaaguucccucuccauacaacucaagauuugagucagucgcuuggucagcaagugcuugucaugauggcaucaauuggcuaacaauuggaauuucuggcccagacaauggggcaguggcuguguuaaaguacaacggcauaauaacagacacuaucaagaguuggagaaacaauauauugagaacacaagagucugaaugugcauguguaaaugguucuugcuuuacuguaaugaccgauggaccaagugauggacaggccucauacaagaucuucagaauagaaaagggaaagauagucaaaucagucgaaaugaaugccccuaauuauuacuaugaggaaugcuccuguuauccugauucuagugaaaucacaugugugugcagggauaacuggcauggcucgaaucgaccgugggugucuuucaaccagaaucuggaauaucagauaggauacauaugcagugggauuuucggagacaauccacgcccuaaugauaagacaggcaguugugguccaguaucgucuaauggagcaaauggaguaaaaggauuuucauucaaauacggcaaugguguuuggauagggagaacuaaaagcauuaguucaagaaacgguuuugagaugauuugggauccgaacggauggacugggacagacaauaacuucucaauaaagcaagauaucguaggaauaaaugaguggucaggauauagcgggaguuuuguucagcauccagaacuaacagggcuggauuguauaagaccuugcuucuggguugaacuaaucagagggcgacccaaagagaacacaaucuggacuagcgggagcagcauauccuuuugugguguaaacagugacacuguggguuggucuuggccagacggugcugaguugccauuuaccauugacaaguaa

SEQ ID NO: 49507 - RNA, 1410 nt, Artificial Sequence; identical to SEQ ID NO: 48949
  derived and/or modified CDS sequence (wt) from neuraminidase__InfluenzaA__ACX31931

SEQ ID NO: 49508 - RNA, 1410 nt, Artificial Sequence; identical to SEQ ID NO: 48750
  derived and/or modified CDS sequence (wt) from neuraminidase__InfluenzaA__ACX31932

SEQ ID NO: 49509 - RNA, 1410 nt, Artificial Sequence; identical to SEQ ID NO: 48750
  derived and/or modified CDS sequence (wt) from neuraminidase__InfluenzaA__ACX35250

SEQ ID NO: 49510 - RNA, 1410 nt, Artificial Sequence; identical to SEQ ID NO: 48750
  derived and/or modified CDS sequence (wt) from neuraminidase__InfluenzaA__ACX35260

SEQ ID NO: 49511 - RNA, 1410 nt, Artificial Sequence; identical to SEQ ID NO: 48750
  derived and/or modified CDS sequence (wt) from neuraminidase__InfluenzaA__ACX35270

SEQ ID NO: 49512 - RNA, 1410 nt, Artificial Sequence
  derived and/or modified CDS sequence (wt) from neuraminidase__InfluenzaA__ACX35280
augaauccaaaccaaaagauaauaaccauugguucggucuguaugacaauuggaauggcuaacuuaauauuacaaauuggaaacauaaucucaauauggauuagccacucaauucaacuugggaaucaaaaucagauugaaacaugcaaucaaagcgucauuacuuaugaaaacaacacuuggguaaaucagacauauguuaacaucagcaacaccaacuuugcugcuggacagucagugguuuccgugaaauuagcgggcaauuccucucucugcccuguuaguggaugggcuauauacaguaaagacaacaguauaagaaucgguuccaagggggauguguuugucauaagggaaccauucauaucaugcucccccuuggaaugcagaaccuucuucuugacucaaggggccuugcuaaaugacaaacauuccaauggaaccauuaaagacaggagcccauaucgaacccuaaugagcuguccuauuggugaaguucccucuccauacaacucaagauuugagucagucgcuuggucagcaagugcuugucaugauggcaucaauuggcuaacaauuggaauuucuggcccagacaauggggcaguggcuguguuaaaguacaacggcauaauaacagacacuaucaagaguuggagaaacaauauauugagaacacaagagucugaaugugcauguguaaaugguucuugcuuuacuguaaugaccgauggaccaagugauggacaggccucauacaagaucuucagaauagaaaagggaaagauagucaaaucagucgacaugaaugccccuaauuaucacuaugaggaaugcuccuguuauccugauucuagugaaaucacaugugugugcagggauaacuggcauggcucgaaucgaccgugggugucuuucaaccagaaucuggaauaucagauaggauacauaugcagugggauuuucggagacaauccacgcccuaaugauaagacaggcaguugugguccaguaucgucuaauggagcaaauggaguaaaaggauuuucauucaaauacggcaaugguguuuggauagggagaacuaaaagcauuaguucaagaaacgguuuugagaugauuugggauccgaacggauggacugggacagacaauaacuucucaauaaagcaagauaucguaggaauaaaugaguggucaggauauagcgggaguuuuguucagcauccagaacuaacagggcuggauuguauaagaccuugcuucuggguugaacuaaucagagggcgacccaaagagaacacaaucuggacuagcgggagcagcauauccuuuugugguguaaacagugacacuguggguuggucuuggccagacggugcugaguugccauuuaccauugacaaguaa

SEQ ID NO: 49513 - RNA, 1410 nt, Artificial Sequence; identical to SEQ ID NO: 48750
  derived and/or modified CDS sequence (wt) from neuraminidase__InfluenzaA__ACX35290

SEQ ID NO: 49514 - RNA, 1410 nt, Artificial Sequence; identical to SEQ ID NO: 48870
  derived and/or modified CDS sequence (wt) from neuraminidase__InfluenzaA__ACX35300

SEQ ID NO: 49515 - RNA, 1410 nt, Artificial Sequence
  derived and/or modified CDS sequence (wt) from neuraminidase__InfluenzaA__ACX35310
augaauccaaaccaaaagauaauaaccauugguucggucuguaugacaauuggaauggcuaacuuaauauuacaaauuggaaacauaaucucaauauggauuagccacucaauucaacuugggaaucaaaaucagauuggaacaugcaaucaaagcgucauuacuuaugaaaacaacacuuggguaaaucagacauauguuaacaucagcaacaccaacuuugcugcuggacagucagugguuuccgugaaauuagcgggcaauuccucucucugcccuguuaguggaugggcuauauacaguaaagacaacaguauaagaaucgguuccaagggggauguguuugucauaagggaaccauucauaucaugcucccccuuggaaugcagaaccuucuucuugacucaaggggccuugcuaaaugacaaacauuccaauggaaccauuaaagacaggagcccauaucgaacccuaaugagcuguccuauuggugaaguucccucuccauacaacucaagauuugagucagucgcuuggucagcaagugcuugucaugauggcaucaauuggcuaacaauuggaauuucuggcccagacaauggggcaguggcuguguuaaaguacaacggcauaauaacagacacuaucaagaguuggagaaacaauauauugagaacacaagagucugaaugugcauguguaaaugguucuugcuuuacuguaaugaccgauggaccaagugauggacaggccucauacaagaucuucagaauagaaaagggaaagauagucaaaucagucgaaaugaaugccccuaauuaucacuaugaggaaugcuccuguuauccugauucuagugaaaucacaugugugugcagggauaacuggcauggcucgaaucgaccgugggugucuuucaaccagaaucuggaauaucagauaggauacauaugcagugggauuuucggagacaauccacgcccuaaugauaagacaggcaguugugguccaguaucgucuaauggagcaaauggaguaaaaggauuuucauucaaauacggcaaugguguuuggauagggagaacuaaaagcauuaguucaagaaacgguuuugagaugauuugggauccgaacggauggacugggacagacaauaacuucucaauaaagcaagauaucguaggaauaaaugaguggucaggauauagcgggaguuuuguucagcauccagaacuaacagggcuggauuguauaagaccuugcuucuggguugaacuaaucagagggcgacccaaagagaacacaaucuggacuagcgggagcagcauauccuuuugugguguaaacagugacacuguggguuggucuuggccagacggugcugaguugccauuuaccauugacaaguaa

SEQ ID NO: 49516 - RNA, 1410 nt, Artificial Sequence; identical to SEQ ID NO: 48750
  derived and/or modified CDS sequence (wt) from neuraminidase__InfluenzaA__ACX35320

SEQ ID NO: 49517 - RNA, 1410 nt, Artificial Sequence
  derived and/or modified CDS sequence (wt) from neuraminidase__InfluenzaA__ACX35330
augaauccaaaccaaaagauaauaaccauugguucggucuguauaacaauuggaauggcuaacuuaauauuacaaauuggaaacauaaucucaauauggauuagccacucaauucaacuugggaaucaaaaucagauugaaacaugcaaucaaagcgucauuacuuaugaaaacaacacuuggguaaaucagacauauguuaacaucagcaacaccaacuuugcugcuggacagucagugguuuccgugaaauuagcgggcaauuccucucucugcccuguuaguggaugggcuauauacaguaaagacaacaguauaagaaucgguuccaagggggauguguuugucauaagggaaccauucauaucaugcucccccuuggaaugcagaaccuucuucuugacucaaggggccuugcuaaaugacaaacauuccaauggaaccauuaaagacaggagcccauaucgaacccuaaugagcuguccuauuggugaaguucccucuccauacaacucaagauuugagucagucgcuuggucagcaagugcuugucaugauggcaucaauuggcuaacaauuggaauuucuggcccagacaauggggcaguggcuguguuaaaguacaacggcauaauaacagacacuaucaagaguuggagaaacaauauauugagaacacaagagucugaaugugcauguguaaaugguucuugcuuuacuguaaugaccgauggaccaagugauggacaggccucauacaagaucuucagaauagaaaagggaaagauagucaaaucagucgaaaugaaugccccuaauuaucacuaugaggaaugcuccuguuauccugauucuagugaaaucacaugugugugcagggauaacuggcauggcucgaaucgaccgugggugucuuucaaccagaaucuggaauaucagauaggauacauaugcagugggauuuucggagacaauccacgcccuaaugauaagacaggcaguugugguccaguaucgucuaauggagcaaauggaguaaaaggauuuucauucaaauacggcaaugguguuuggauagggagaacuaaaagcauuaguucaagaaacgguuuugagaugauuugggauccgaacggauggacugggacagacaauaacuucucaauaaagcaagauaucguaggaauaaaugaguggucaggauauagcgggaguuuuguucagcauccagaacuaacagggcuggauuguauaagaccuugcuucuggguugaacuaaucagagggcgacccaaagagaacacaaucuggacuagcgggagcagcauauccuuuugugguguaaacagugacacuguggguuggucuuggccagacggugcugaguugccauuuaccauugacaaguaa

SEQ ID NO: 49518 - RNA, 1410 nt, Artificial Sequence; identical to SEQ ID NO: 48750
  derived and/or modified CDS sequence (wt) from neuraminidase__InfluenzaA__ACX48479

SEQ ID NO: 49519 - RNA, 1410 nt, Artificial Sequence; identical to SEQ ID NO: 48814
  derived and/or modified CDS sequence (wt) from neuraminidase__InfluenzaA__ACX48481

SEQ ID NO: 49520 - RNA, 1410 nt, Artificial Sequence; identical to SEQ ID NO: 48750
  derived and/or modified CDS sequence (wt) from neuraminidase__InfluenzaA__ACX55836

SEQ ID NO: 49521 - RNA, 1410 nt, Artificial Sequence
  derived and/or modified CDS sequence (wt) from neuraminidase__InfluenzaA__ACX56269
augaauccaaaacaaaagauaauaaccauugguucggucuguaugacaauuggaauggcuaacuuaauauuacaaauuggaaacauaaucucaauauggauuagccacucaauucaacuugggaaucaaaaucagauugaaacaugcaaucaaagcgucauuacuuaugaaaacaacacuuggguaaaucagacauauguuaacaucagcaacaccaacuuugcugcuggacagucagugguuuccgugaaauuagcgggcaauuccucucucugcccuguuaguggaugggcuauauacaguaaagacaacaguauaagaaucgguuccaagggggauguguuugucauaagggaaccauucauaucaugcucccccuuggaaugcagaaccuucuucuugacucaaggggccuugcuaaaugacaaacauuccaauggaaccauuaaagacaggagcccauaucgaacccuaaugagcuguccuauuggugaaguucccucuccauacaacucaagauuugagucagucgcuuggucagcaagugcuugucaugauggcaucaauuggcuaacaauuggaauuucuggcccagacaauggggcaguggcuguguuaaaguacaacggcauaauaacagacacuaucaagaguuggagaaacaauauauugagaacacaagagucugaaugugcauguguaaaugguucuugcuuuacuguaaugaccgauggaccaagugauggacaggccucauacaagaucuucagaauagaaaagggaaagauagucaaaucagucgaaaugaaugccccuaauuaucacuaugaggaaugcuccuguuauccugauucuagugaaaucacaugugugugcagggauaacuggcauggcucgaaucgaccgugggugucuuucaaccagaaucuggaauaucagauaggauacauaugcagugggauuuucggagacaauccacgcccuaaugauaagacaggcaguugugguccaguaucgucuaauggagcaaauggagugaaaggauuuucauucaaauacggcaaugguguuuggauagggagaacuaaaagcauuaguucaagaaacgguuuugagaugauuugggauccgaacggauggacugggacagacaauaacuucucaauaaagcaagauaucguaggaauaaaugaguggucaggauauagcgggaguuuuguucagcauccagaacuaacagggcuggauuguauaagaccuugcuucuggguugaacuaaucagagggcgacccaaagagaacacaaucuggacuagcgggagcagcauauccuuuugugguguaaacagugacacuguggguuggucuuggccagacggugcugaguugccauuuaccauugacaaguaa

SEQ ID NO: 49522 - RNA, 1410 nt, Artificial Sequence
  derived and/or modified CDS sequence (wt) from neuraminidase__InfluenzaA__ACX56270
augaauccaaaacaaaagauaauaaccauugguucggucuguaugacaauuggaauggcuaacuuaauauuacaaauuggaaacauaaucucaauauggauuagccacucaauucaacuugggaaucaaaaucagauugaaacaugcaaucaaagcgucauuacuuaugaaaacaacacuuggguaaaucagacauauguuaacaucagcaacaccaacuuugcugcuggacagucagugguuuccgugaaauuagcgggcaauuccucucucugcccuguuaguggaugggcuauauacaguaaagacaacaguauaagaaucgguuccaagggggauguguuugucauaagggaaccauucauaucaugcucccccuuggaaugcagaaccuucuucuugacucaaggggccuugcuaaaugacaaacauuccaauggaaccauuaaagacaggagcccauaucgaacccuaaugagcuguccuauuggugaaguucccucuccauacaacucaagauuugagucagucgcuuggucagcaagugcuugucaugauggcaucaauuggcuaacaauuggaauuucuggcccagacaauggggcaguggcuguguuaaaguacaacggcauaauaacagacacuaucaagaguuggagaaacaauauauugagaacacaagagucugaaugugcauguguaaaugguucuugcuuuacuguaaugaccgauggaccaagugauggacaggccucauacaagaucuucagaauagaaaagggaaagauagucaaaucagucgaaaugaaugccccuaauuaucacuaugaggaaugcuccuguuauccugauucuagugaaaucacaugugugugcagggauaacuggcauggcucgaaucgaccgugggugucuuucaaccagaaucuggaauaucagauaggauacauaugcagugggauuuucggagacaauccacgcccuaaugauaagacaggcaguugugguccaguaucgucuaauggagcaaauggaguaaaaggauuuucauucaaauacggcaaugguguuuggauagggagaacuaaaagcauuaguucaagaaacgguuuugagaugauuugggauccgaacggauggacugggacagacaauaacuucucaauaaagcaagauaucguaggaauaaaugaguggucaggauauagcgggaguuuuguucagcauccagaacuaacagggcuggauuguauaagaccuugcuucuggguugaacuaaucagagggcgacccaaagagaacacaaucuggacuagcgggagcagcauauccuuuugugguguaaacagugacucugugaguuggucuuggccagacggugcugaguugccauuuaccauugacaaguaa

SEQ ID NO: 49523 - RNA, 1410 nt, Artificial Sequence
  derived and/or modified CDS sequence (wt) from neuraminidase__InfluenzaA__ACX56271
augaauccaaaacaaaagauaauaaccauugguucggucuguaugacaauuggaauggcuaacuuaauauuacaaauuggaaacauaaucucaauauggauuagccacucaauucaacuugggaaucaaaaucagauugaaacaugcaaccaaagcgucauuacuuaugaaaacaacacuuggguaaaucagacauauguuaacaucagcaacaccaaccuugcugcuggacagucaguggguuccgugaaauuagcgggcaauuccucucucugcccuguuaguggaugggcuauauacaguaaagacaacaguauaagaaucgguuccaagggggauguguuugucauaagggaaccauucauaucaugcucccccuuggaaugcagaaccuucuucuugacucaaggggccuugcuaaaugacaaacauuccaauggaaccauuaaagacaggagcccauaucgaacccuaaugagcuguccuauuggugaaguucccucuccauacaacucaagauuugagucagucgcuuggucagcaagugcuugucaugauggcaucaauuggcuaacaauuggaauuucuggcccagacaauggggcaguggcuguguuaaaguacaacggcauaauaacagacacuaucaagaguuggagaaacaauauauugagaacacaagagucugaaugugcauguguaaaugguucuugcuuuacuguaaugaccgauggaccaagugauggacaggccucauacaagaucuucagaauagaaaagggaaagauagucaaaucagucgaaaugaaugccccuaauuaucacuaugaggaaugcuccuguuauccugauucuagugaaaucacaugugugugcagggauaacuggcauggcucgaaucgaccgugggugucuuucaaccagaaucuggaauaucagauaggauacauaugcagugggauuuucggagacaauccacgcccuaaugauaagacaggcaguugugguccaguaucgucuaauggagcaaauggaguaaaaggauuuucauucaaauacggcaaugguguuuggauagggagaacuaaaagcauuaguucaagaaacgguuuugagaugauuugggauccgaacggauggacugggacagacaauaacuucucaauaaagcaagauaucguaggaauaaaugaguggucaggauauagcgggaguuuuguucagcauccagaacuaacagggcuggauuguauaagaccuugcuucuggguugaacuaaucagagggcgacccaaagagaacacaaucuggacuagcgggagcagcauauccuuuugugguguaaacagugacacuguggguuggucuuggccagacggugcugaguugccauuuaccauugacaaguaa

SEQ ID NO: 49524 - RNA, 1410 nt, Artificial Sequence
  derived and/or modified CDS sequence (wt) from neuraminidase__InfluenzaA__ACX83579
augaauccaaaccaaaagauaauaaccauugguucggucuguaugacaauuggaauggcuaacuuaauauuacaaauuggaaacauaaucucaauauggauuagccacucaauucaacuugggaaucaaaaucagauugaaacaugcaaucaaagcgucauuacuuaugaaaacaacacuuggguaaaucagacauauguuaacaucagcaacaccaacuuugcugcuggacagucagugguuuccgugaaauuagcgggcaauuccucucucugcccuguuaguggaugggcuauauacagcaaagacaacaguauaagaaucgguuccaagggggauguguuugucauaagggaaccauucauaucaugcucccccuuggaaugcagaaccuucuucuugacucaaggggccuugcuaaaugacaaacauuccaauggaaccauuaaagacaggagcccauaucgaacccuaaugagcuguccuauuggugaaguucccucuccauacaacucaagauuugagucagucgcuuggucagcaagugcuugucaugauggcaucaauuggcuaacaauuggaauuucuggcccagacaauggggcaguggcuguguuaaaguacaacggcauaauaacagacacuaucaagaguuggagaaacaauauauugagaacacaagagucugaaugugcauguguaaaugguucuugcuuuacuguaaugaccgauggaccaagugauggacaggccucauacaagaucuucagaauagaaaagggaaagauagucaaaucagucgaaaugaaugccccuaauuaucacuaugaggaaugcuccuguuauccugauucuagugaaaucacaugugugugcagggauaacuggcauggcucgaaucgaccgugggugucuuucaaccagaaucuggaauaucagauaggauacauaugcagugggauuuucggagacaauccacgcccuaaugauaagacaggcaguugugguccaguaucgucuaauggagcaaauggaguaaaaggauuuucauucaaauacggcaaugguguuuggauagggagaacuaaaagcauuaguucaagaaacgguuuugagaugauuugggauccgaacggauggacugggacagacaauaacuucucaauaaagcaagauaucguaggaauaaaugaguggucaggauauagcgggaguuuuguucagcauccagaacuaacagggcuggauuguauaagaccuugcuucuggguugaacuaaucagagggcgacccaaagagaacacaaucuggacuagcgggagcagcauauccuuuugugguguaaacagugacacuguggguuggucuuggccagacggugcugaguugccauuuaccauugacaaguaa

SEQ ID NO: 49525 - RNA, 1410 nt, Artificial Sequence
  derived and/or modified CDS sequence (wt) from neuraminidase__InfluenzaA__ACX85425
augaauccaaaccaaaagauaauaaccauugguucggucuguaugacaauuggaauggcuaacuuaauauuacaaauuggaaacauaaucucaauauggauuagccacucaauucaacuugggaaucaaaaucagauugaaacaugcaaucaaagcgucauuacuuaugaaaacaacacuuggguaaaucagacauauguuaacaucagcaacaccaacuuugcugcuggacagucagugguuuccgugaaauuagcgggcaauuccucucucugcccuguuaguggaugggcuauauacaguaaagacaacaguauaagaaucgguuccaagggggauguguuugucauaagggaaccauucauaucaugcucccccuuggaaugcagaaccuucuucuugacucaaggggccuugcuaaaugacaaacauuccaauggaaccauuaaagacaggagcccauaucgaacccuaaugagcuguccuauuggugaaguucccucuccauacaacucaagauuugagucagucgcuuggucagcaagugcuugucaugauggcaucaauuggcuaacaauuggaauuucuggcccagacaauggggcaguggcuguguuaaaguacaacggcauaauaacagacacuaucaagaguuggagaaacaauauauugagaacacaagagucugaaugugcauguguaaaugguucuugcuuuacuguaaugaccgauggaccaagugauggacaggccucauacaagaucuucagaauagaaaagggaaagauagucaaaucagucgaaaugaaugccccuaauuaucacuaugaggaaugcuccuguuauccugauucuagugaaaucacaugugugugcagggauaacuggcaugguucgaaucgaccgugggugucuuucaaccagaaucuggaauaucagauaggauacauaugcagugggauuuucggagacaauccacgcccuaaugauaaaacaggcaguugugguccaguaucgucuaauggagcaaauggaguaaaaggauuuucauucaaauacggcaaugguguuuggauagggagaacuaaaagcauuaguucaagaaacgguuuugagaugauuugggauccgaacggauggacugggacagacaauaacuucucaauaaagcaagauaucguaggaauaaaugaguggucaggauauagcgggaguuuuguucagcauccagaacuaacagggcuggauuguauaagaccuugcuucuggguugaacuaaucagagggcgacccaaagagaacacaaucuggacuagcgggagcagcauauccuuuugugguguaaacagugacacuguggguuggucuuggccagacggugcugaguugccauuuaccauugacaaguaa

SEQ ID NO: 49526 - RNA, 1410 nt, Artificial Sequence; identical to SEQ ID NO: 49525
  derived and/or modified CDS sequence (wt) from neuraminidase__InfluenzaA__ACX85426

SEQ ID NO: 49527 - RNA, 1410 nt, Artificial Sequence
  derived and/or modified CDS sequence (wt) from neuraminidase__InfluenzaA__ACY02998
augaauccaaaccaaaagauaauaaccauugguucggucuguaugacaauuggaauggcuaacuuaauauuacaaauuggaaacauaaucucaauauggauuagccacucaauucaacuugggaaucaaaaucagauugaaacaugcaaucaaagcgucauuacuuaugaaaacaacacuuggguaaaucagacauauguuaacaucagcaacaccaacuuugcugcuggacagucagugguuuccgugaaauuagcgggcaauuccucucucugcccuguuaguggaugggcuauauacaguaaagacaacaguauaagaaucgguuccaagggggauguguuugucauaagggaaccauucauaucaugcucccccuuagaaugcagaaccuucuucuugacucaaggggccuugcuaaaugacaaacauuccaauggaaccauuaaagacaggagcccauaucgaacccuaaugagcuguccuauuggugaaguucccucuccauacaacucaagauuugagucagucgcuuggucagcaagugcuugucaugauggcaucaauuggcuaacaauuggaauuucuggcccagacaauggggcaguggcuguguuaaaguacaacggcauaauaacagacacuaucaagaguuggagaaacaauauauugagaacacaagagucugaaugugcauguguaaaugguucuugcuuuacuguaaugaccgauggaccaaguaauggacaggccucauacaagaucuucagaauagaaaagggaaagauagucaaaucagucgaaaugaaugccccuaauuaucacuaugaggaaugcuccuguuauccugauucuggugaaaucacaugugugugcagggauaacuggcauggcucgaaucgaccgugggugucuuucaaccagaaucuggaauaucagauaggauacauaugcagugggauuuucggagacaauccacgcccuaaugacaagacaggcaguugugguccaguaucgucuaauggagcaaauggaguaaaaggauuuucauucaaauacggcaaugguguuuggauagggagaacuaaaagcauuaguucaagaaacgguuuugagaugauuugggauccgaacggauggacugggacagacaauaacuucucaauaaagcaagauaucguaggaauaaaugaguggucaggauauagcgggaguuuuguucagcauccagaacuaacagggcuggauuguauaagaccuugcuucuggguugaacuaaucagagggcgacccaaagagaacacaaucuggacuagcgggagcagcauauccuuuugugguguaaacagugacacuguggguuggucuuggccagacggugcugaguugccauuuaccauugacaaguaa

SEQ ID NO: 49528 - RNA, 1410 nt, Artificial Sequence; identical to SEQ ID NO: 48794
  derived and/or modified CDS sequence (wt) from neuraminidase__InfluenzaA__ACY03005

SEQ ID NO: 49529 - RNA, 1410 nt, Artificial Sequence; identical to SEQ ID NO: 48750
  derived and/or modified CDS sequence (wt) from neuraminidase__InfluenzaA__ACY03008

SEQ ID NO: 49530 - RNA, 1410 nt, Artificial Sequence; identical to SEQ ID NO: 48814
  derived and/or modified CDS sequence (wt) from neuraminidase__InfluenzaA__ACY03011

SEQ ID NO: 49531 - RNA, 1410 nt, Artificial Sequence; identical to SEQ ID NO: 48750
  derived and/or modified CDS sequence (wt) from neuraminidase__InfluenzaA__ACY03012

SEQ ID NO: 49532 - RNA, 1410 nt, Artificial Sequence
  derived and/or modified CDS sequence (wt) from neuraminidase__InfluenzaA__ACY03016
augaauccaaaccaaaagauaauaaccauugguucggucuguaugacaauuggaauggcuaacuuaauauuacaaauuggaaacauaaucucaauauggauuagccacucaauucaacuugggaaucaaaaucagauugaaacaugcaaucaaagcgucauuacuuaugaaaacaacacuuggguaaaucagacauauguuaacaucagcaacaccaacuuugcugcuggacagucagugguuuccgugaaauuagcgggcaauuccucucucugcccuguuaguggaugggcuauauacaguaaagacaacaguauaagaaucgguucuaagggggauguguuugucauaagggaaccauucauaucaugcucccccuuggaaugcagaaccuucuucuugacucaaggggccuugcuaaaugacaaacauuccaauggaaccauuaaagacaggagcccauaucgaacccuaaugagcuguccuauuggugaaguucccucuccauacaacucaagauuugagucagucgcuuggucagcaagugcuugucaugauggcaucaauuggcuaacaauuggaauuucuggcccagacaauggggcaguggcuguguuaaaguacaacggcauaauaacagacacuaucaagaguuggagaaacaauauauugagaacacaagagucugaaugugcauguguaaaugguucuugcuuuacuguaaugaccgauggaccaagugauggacaggccucauacaagaucuucagaauagaaaagggaaagauagucaaaucagucgaaaugaaugccccuaauuaucacuaugaggaaugcuccuguuauccugauucuagugaaaucacaugugugugcagggauaacuggcauggcucgaaucgaccguggguaucuuucaaccagaaucuggaauaucagauaggauacauaugcagugggauuuucggagacaauccacgcccuaaugauaagacaggcaguugugguccaguaucgucuaauggagcaaauggaguaaaaggauuuucauucaaauacggcaaugguguuuggauagggagaacuaaaagcauuaguucaagaaacgguuuugagaugauuugggauccgaacggauggacugggacagacaauaacuucucaauaaagcaagauaucguaggaauaaaugaguggucaggauauagcgggaguuuuguucagcauccagaacuaacagggcuggauuguauaagaccuugcuucuggguugaacuaaucagagggcgacccaaagagaacacaaucuggacuagcgggagcagcauauccuuuugugguguaaacagugacacuguggguuggucuuggccggacggugcugaguugccauuuaccauugacaaguaa

SEQ ID NO: 49533 - RNA, 1410 nt, Artificial Sequence
  derived and/or modified CDS sequence (wt) from neuraminidase__InfluenzaA__ACY26194
augaauccaaaccaaaagauaauaaccauugguucggucuguaugacaauuggaauggcuaacuuaauauuacaaauuggaaacauaaucucaauauggauuagccacucaauucaacuugggaaucaaaaucagauugaaacaugcaaucaaagcgucauuacuuaugaaaacaacacuuggguaaaucagacauauguuaacaucagcaacaccaacuuugcugcuggacagucagugguuuccgugaaauuagcgggcaauuccucucucugcccuguuaguggaugggcuauauacaguaaagacaacaguauaagaaucgguuccaagggggauguguuugucauaagggaaccauucauaucaugcucccccuuggaaugcagaaccuucuucuugacucaaggggccuugcuaaaugacaaacauuccaauggaaccauuaaagacaggagcccauaucgaacccuaaugagcuguccuauuggugaaguucccucuccauacaacucaagauuugagucagucgcuuggucagcaagugcuugucaugauggcaucaauuggcuaacaauuggaauuucuggcccagauaauggggcaguggcuguguuaaaguacaacggcauaauaacagacacuaucaagaguuggagaaacaauauauugagaacacaagagucugaaugugcauguguaaaugguucuugcuuuacuguaaugaccgauggaccaagugauggacaggccucauacaagaucuucagaauagaaaagggaaagauagucaaaucagucgaaaugaaugccccuaauuaucacuaugaggaaugcuccuguuauccugauucuagugaaaucacaugugugugcagggauaacuggcauggcucgaaucgaccgugggugucuuucaaccagaaucuggaauaucagauaggauacauaugcagugggauuuucggagacaauccacgcccuaaugauaagacaggcaguugugguccaguaucgucuaauggagcaaauggaguaaaaggauuuucauucaaauacggcaaugguguuuggauagggagaacuaaaagcauuaguucaagaaacgguuuugagaugauuugggauccgaacggauggacugggacagacaauaacuucucaauaaagcaagauaucguaggaauaaaugaguggucaggauauagcgggaguuuuguucagcauccagaacuaacagggcuggauuguauaagaccuugcuucuggguugaacuaaucagagggcgacccaaagagaacacaaucuggacuagcgggagcagcauauccuuuugugguguaaacagugacacuguggguuggucuuggccagacggugcugaguugccauuuaccauugacaaguaa

SEQ ID NO: 49534 - RNA, 1410 nt, Artificial Sequence
  derived and/or modified CDS sequence (wt) from neuraminidase__InfluenzaA__ACY26204
augaauccaaaccaaaagauaauaaccauugguucggucuguaugacaauuggaauggcuaacuuaauauuacaaauuggaaacauaaucucaauauggauuagccacucaauucaacuugggaaucaaaaucagauugaaacaugcaaucaaagcgucauuacuuaugaaaacaacacuuggguaaaucagacauauguuaacaucagcaacaccaacuuugcugcuggacagucagugguuuccgugaaauuagcgggcaauuccucucucugcccuguuaguggaugggcuauauacaguaaagacaacaguauaagaaucgguuccaagggggauguguuugucauaagggaaccauucauaucaugcucccccuuggaaugcagaaccuucuucuugacucaaggggccuugcuaaaugacaaacauuccaauggaaccauuaaagacaggagcccauaucgaacccuaaugagcuguccuauuggugaaguucccucuccauacaacucaagauuugagucagucgcuuggucagcaagugcuugucaugauggcaucaauuggcuaacaauuggaauuucuggcccagacaauggggcaguggcuguguuaaaguacaacggcauaauaacagacacuaucaagaguuggagaaacaauauauugagaacacaagagucugaaugugcauguguaaaugguucuugcuuuacuguaaugaccgauggaccaagugauggacaggccucauacaagaucuucagaauagaaaagggaaagauagucaaaucagucgaaaugaaugccccuaauuaucacuaugaggaaugcuccuguuauccugauucuagugaaaucacaugugugugcagggauaacuggcauggcucgaaucgaccgugggugucuuucaaccagaaucuggaauaucagauaggauacauaugcagugggauuuucggagacaauccacgcccuaaugauaagacaggcaguugugguccaguaucgucuaauggagcaaauggaguaaaaggauuuucauucaaauacggcaaugguguuuggauagggagaacuaaaagcauuaguucaagaaacgguuuugagaugauuugggauccgaacggauggacugggacagacaauaacuucucaauaaagcaagauaucguaggaauaaaugaguggucaggauauagcgggaguuuuguucagcauccagaacuaacagggcuggauuguauaagaccuugcuucuggguugaacuaaucagagggcgacccaaagagaacacaaucuggacuagcggaagcagcauauccuuuugugguguaaacagugacacuguggguuggucuuggccagacggugcugaguugccauuuaccauugacaaguaa

SEQ ID NO: 49535 - RNA, 1410 nt, Artificial Sequence; identical to SEQ ID NO: 48947
  derived and/or modified CDS sequence (wt) from neuraminidase__InfluenzaA__ACY30123

SEQ ID NO: 49536 - RNA, 1410 nt, Artificial Sequence; identical to SEQ ID NO: 49215
  derived and/or modified CDS sequence (wt) from neuraminidase__InfluenzaA__ACY30124

SEQ ID NO: 49537 - RNA, 1410 nt, Artificial Sequence; identical to SEQ ID NO: 48814
  derived and/or modified CDS sequence (wt) from neuraminidase__InfluenzaA__ACY30125

SEQ ID NO: 49538 - RNA, 1410 nt, Artificial Sequence; identical to SEQ ID NO: 48750
  derived and/or modified CDS sequence (wt) from neuraminidase__InfluenzaA__ACY30127

SEQ ID NO: 49539 - RNA, 1410 nt, Artificial Sequence; identical to SEQ ID NO: 48814
  derived and/or modified CDS sequence (wt) from neuraminidase__InfluenzaA__ACY30128

SEQ ID NO: 49540 - RNA, 1410 nt, Artificial Sequence; identical to SEQ ID NO: 48750
  derived and/or modified CDS sequence (wt) from neuraminidase__InfluenzaA__ACY46105

SEQ ID NO: 49541 - RNA, 1410 nt, Artificial Sequence; identical to SEQ ID NO: 48750
  derived and/or modified CDS sequence (wt) from neuraminidase__InfluenzaA__ACY46165

SEQ ID NO: 49542 - RNA, 1410 nt, Artificial Sequence; identical to SEQ ID NO: 48750
  derived and/or modified CDS sequence (wt) from neuraminidase__InfluenzaA__ACY46175

SEQ ID NO: 49543 - RNA, 1410 nt, Artificial Sequence
  derived and/or modified CDS sequence (wt) from neuraminidase__InfluenzaA__ACY46345
augaauccaaaccaaaagauaauaaccauugguucggucuguaugacaauuggaauggcuaacuuaauauuacaaauuggaaacauaaucucaauauggauuagccacucaauucaacuugggaaucaaaaucagauugaaacaugcaaucaaagcgucauuacuuaugaaaacaacacuuggguaaaucagacauauguuaacaucagcaacaccaacuuugcugcuggacagucagugguuuccgugaaauuagcgggcaauuccucucucugcccuguuaguggaugggcuauauacaguaaagacaacaguauaagaaucgguuccaagggggauguguuugucauaagggaaccauucauaucaugcucccccuuggaaugcagaaccuucuucuugacucaaggggccuugcuaaaugacaaacauuccaauggaaccauuaaagacaggagcccauaucgaacccuaaugagcuguccuauuggugaaguucccucuccauacaacucaagauuugagucagucgcuuggucagcaagugcuugucaugauggcaucaauuggcuaacaauuggaauuucuggcccagacaauggggcaguggcuguguuaaaguacaacggcauaauaacagacacuaucaagaguuggagaaacaauauauugagaacacaagagucugaaugugcauguguaaaugguucuugcuuuacuguaaugaccgauggaccaagugauggacaggccucauacaagaucuucagaauagaaaagggaaagauagucaaaucagucgaaaugaaugccccuaauuaucacuaugaggaaugcuccuguuauccugauucuagugaaaucacaugugugugcagggauaacuggcauggcucgaaucgaccgugggugucuuucaaccagaaucuggaauaucagauaggauacauaugcagugggauuuucggagacaauccacgcccuaaugauaagacaggcaguugugguccaguaucgucuaauggagcaaauggaguaaaaggauuuucauucaaauacggcaaugguguuuggauagggagaacuaaaagcauuaguucaagaaacgguuuugagaugauuugggauccgaauggauggacugggacagacaauaacuucucaauaaagcaagauaucguaggaauaaaugaguggucaggauauagcgggaguuuuguucagcauccagaacuaacagggcuggauuguauaagaccuugcuucuggguugaacuaaucagagggcgacccaaagagaacacaaucuggacuagcgggagcagcauauccuuuugugguguaaacagugacacuguggguuggucuuggccagacggugcugaguugccauuuaccauugacaaguaa

SEQ ID NO: 49544 - RNA, 1410 nt, Artificial Sequence
  derived and/or modified CDS sequence (wt) from neuraminidase__InfluenzaA__ACY46385
augaauccaaaccaaaagauaauaaccauugguucggucuguaugacaauuggaauggcuaacuuaauauuacaaauuggaaacauaaucucaauauggauuagccacucaauucaacuugggaaucaaaaucagauugaaacaugcaaucaaagcgucauuacuuaugaaaacaacacuuggguaaaucagacauaugucaacaucagcaacaccaacuuugcugcuggacagucagugguuuccgugaaauuagcgggcaauuccucucucugcccuguuaguggaugggcuauauacaguaaagacaacaguauaagaaucgguuccaagggggauguguuugucauaagggaaccauucauaucaugcucccccuuggaaugcagaaccuucuucuugacucaaggggccuugcuaaaugacaaacauuccaauggaaccauuaaagacaggagcccauaucgaacccuaaugagcuguccuauuggugaaguucccucuccauacaacucaagauuugagucagucgcuuggucagcaagugcuugucaugauggcaucaauuggcuaacaauuggaauuucuggcccagacaauggggcaguggcuguguuaaaguacaacggcauaauaacagacacuaucaagaguuggagaaacaauauauugagaacacaagagucugaaugugcauguguaaaugguucuugcuuuacuguaaugaccgauggaccaagugauggacaggccucauacaagaucuucagaauagaaaagggaaagauagucaaaucagucgaaaugaaugccccuaauuaucacuaugaggaaugcuccuguuauccugauucuagugaaaucacaugugugugcagggauaacuggcauggcucgaaucgaccgugggugucuuucaaccagaaucuggaauaucagauaggauacauaugcagugggauuuucggagacaauccacgcccuaaugauaagacaggcaguugugguccaguaucgucuaauggagcaaauggaguaaaaggauuuucauucaaauacggcaaugguguuuggauagggagaacuaaaagcauuaguucaagaaacgguuuugagaugauuugggauccgaacggauggacugggacagacaauaacuucucaauaaagcaagauaucguaggaauaaaugaguggucaggauauagcgggaguuuuguucagcauccagaacuaacagggcuggauuguauaagaccuugcuucuggguugaacuaaucagagggcgacccaaagagaacacaaucuggacuagcgggagcagcauauccuuuugugguguaaacagugacacuguggguuggucuuggccagacggugcugaguugccauuuaccauugacaaguaa

SEQ ID NO: 49545 - RNA, 1410 nt, Artificial Sequence; identical to SEQ ID NO: 48750
  derived and/or modified CDS sequence (wt) from neuraminidase__InfluenzaA__ACY46485

SEQ ID NO: 49546 - RNA, 1410 nt, Artificial Sequence; identical to SEQ ID NO: 48780
  derived and/or modified CDS sequence (wt) from neuraminidase__InfluenzaA__ACY77536

SEQ ID NO: 49547 - RNA, 1410 nt, Artificial Sequence; identical to SEQ ID NO: 48749
  derived and/or modified CDS sequence (wt) from neuraminidase__InfluenzaA__ACY77546

SEQ ID NO: 49548 - RNA, 1410 nt, Artificial Sequence; identical to SEQ ID NO: 48780
  derived and/or modified CDS sequence (wt) from neuraminidase__InfluenzaA__ACY77565

SEQ ID NO: 49549 - RNA, 1410 nt, Artificial Sequence
  derived and/or modified CDS sequence (wt) from neuraminidase__InfluenzaA__ACY77575
augaauccaaaccaaaagauaauaaccauugguucggucuguaugacaauuggaauggcuaacuuaauauuacaaauuggaaacauaaucucaauauggauuagccacucaauucaacuugggaaucaaaaucagauugaaacaugcaaucaaagcgucauuacuuaugaaaacaacacuuggguaaaucagacauauguuaacaucagcaacaccaacuuugcugcuggacagucagugguuuccgugaaauuagcgggcaauuccucucucugcccuguuaguggaugggcuauauacaguaaagacaacaguauaagaaucgguuccaagggggauguguuugucauaagggaaccauucauaucaugcucccccuuggaaugcagaaccuucuucuugacucaaggggccuugcuaaaugacaaacauuccaauggaaccauuaaagacaggagcccauaucgaacccuaaugagcuguccuauuggugaaguucccucuccauacaacucaagauuugagucagucgcuuggucagcaagugcuugucaugauggcaucaauuggcuaacaauuggaauuucuggcccagacaauggggcaguggcuguguuaaaguacaacggcauaauaacagacacuaucaagaguuggagaaacaauauauugagaacacaagagucugaaugugcauguguaaaugguucuugcuuuacuguaaugaccgauggaccaagugauggacaggccucauacaagaucuucagaauagaaaagggaaagauagucaaaucagucgaaaugaaugcccccaauuaucacuaugaggaaugcuccuguuauccugauucuagugaaaucacaugugugugcagggauaacuggcauggcucgaaucgaccgugggugucuuucaaccagaaucuggaauaucagauaggauacauaugcagugggauuuucggagacaauccacgcccuagugauaagacaggcaguugugguccaguaucgucuaauggagcaaauggaguaaaaggauuuucauucaaauacggcaaugguguuuggauagggagaacuaaaagcauuaguucaagaaacgguuuugagaugauuugggauccgaacggauggacugggacagacaauaacuucucaauaaagcaagauaucguaggaauaaaugaguggucaggauauagcgggaguuuuguucagcauccagaacuaacagggcuggauuguauaagaccuugcuucuggguugaacuaaucagagggcgacccaaagagaacacaaucuggacuagcgggagcagcauauccuuuugugguguaaacagugacacuguggguuggucuuggccagacggugcugaguugccauuuaccauugacaaguaa

SEQ ID NO: 49550 - RNA, 1410 nt, Artificial Sequence; identical to SEQ ID NO: 48750
  derived and/or modified CDS sequence (wt) from neuraminidase__InfluenzaA__ACY77585

SEQ ID NO: 49551 - RNA, 1410 nt, Artificial Sequence; identical to SEQ ID NO: 48780
  derived and/or modified CDS sequence (wt) from neuraminidase__InfluenzaA__ACY77595

SEQ ID NO: 49552 - RNA, 1410 nt, Artificial Sequence; identical to SEQ ID NO: 48780
  derived and/or modified CDS sequence (wt) from neuraminidase__InfluenzaA__ACY77605

SEQ ID NO: 49553 - RNA, 1410 nt, Artificial Sequence
  derived and/or modified CDS sequence (wt) from neuraminidase__InfluenzaA__ACY77625
augaauccaaaccaaaagauaauaaccauugguucggucuguaugacaauuggaauggcuaacuuaauauuacaaauuggaaacauaaucucaauauggauuagccacucaauucaacuugggaaucaaaaucagauugaaacaugcaaucaaagcgucauuacuuaugaaaacaacacuuggguaaaucagacauauguuaacaucagcaacaccaacuuugcugcuggacagucagugguuuccgugaaauuagcgggcaauuccucucucugcccuguuaguggaugggcuauauacaguaaagacaacaguauaagaaucgguuccaagggggauguguuugucauaagggaaccauucauaucaugcucccccuuggaaugcagaaccuucuucuugacucaaggggccuugcuaaaugacaaacauuccaauggaaccauuaaagacaggagcccauaucgaacccuaaugagcuguccuauuggugaaguucccucuccauacaacucaagauuugagucagucgcuuggucagcaagugcuugucaugauggcaucaauuggcuaacaauuggaauuucuggcccagacaauggggcaguggcuguguuaaaguacaacggcauaauaacagacacuaucaagaguuggagaaacaauauauugagaacacaagagucugaaugugcauguguaaaugguucuugcuuuacuguaaugaccgauggaccaagugauggacaggccucauacaagaucuucagaauagaaaagggaaagauagucaaaucagucgaaaugaaugccccuaauuaucacuaugaggaaugcuccuguuauccugauucuagugaaaucacaugugugugcagggauaacuggcauggcucgaaucgaccgugggugucuuucaaccagaaucuggaauaucagauaggauacauaugcagugggauuuucggagacaauccacgcccuaaugauaagacaggcaguugugguccaguaucgucuaauggagcaaauggaguaaaaggauuuucauucaaauacggcaaugguguuuggauagggagaacuaaaagcauuaguucaagaaacgguuuugagaugauuugggauccgaacggauggacugggacagacaauaacuucucaauaaagcaagauaucguaggaauaaaugaguggucaggauauagcgggaguuuuguucagcauccagaacuaacagggcuggauuguauaagaccuugcuucuggguugaacuaaucagagggcgacccaaagagaacacaaucuggacuagcgggagcagcauauccuuuugugguguaaacagugacacuguggguugguccuggccagacggugcugaguugccauuuaccauugacaaguaa

SEQ ID NO: 49554 - RNA, 1410 nt, Artificial Sequence
  derived and/or modified CDS sequence (wt) from neuraminidase__InfluenzaA__ACY77655
augaauccaaaccaaaagauaauaaccauugguucggucuguaugacaauuggaauggcuaacuuaauauuacaaauuggaaacauaaucucaauauggauuagccacucaauucaacuugggaaucaaaaucagauugaaacaugcaaucaaagcgucauuacuuaugaaaacaacacuuggguaaaucagacauauguuaacaucagcaacaccaacuuugcugcuggacagucagugguuuccgugaaauuagcgggcaauuccucucucugcccuguuaguggaugggcuauauacaguaaagacaacaguguaagaaucgguuccaagggggauguguuugucauaagggaaccauucauaucaugcucccccuuggaaugcagaaccuucuucuugacucaaggggccuugcuaaaugacaaacauuccaauggaaccauuaaagacaggagcccauaucgaacccuaaugagcuguccuauuggugaaguucccucuccauacaacucaagauuugagucagucgcuuggucagcaagugcuugucaugauggcaucaauuggcuaacaauuggaauuucuggcccagacaauggggcaguggcuguguuaaaguacaacggcauaauaacagacacuaucaagaguuggagaaacaauauauugagaacacaagagucugaaugugcauguguaaaugguucuugcuuuacuguaaugaccgauggaccaaguaauggacaggccucauacaagaucuucagaauagaaaagggaaagauagucaaaucagucgaaaugaaugccccuaauuaucacuaugaggaaugcuccuguuauccugauucuagugaaaucacaugugugugcagggauaacuggcauggcucgaaucgaccgugggugucuuucaaccagaaucuggaauaucagauaggauacauaugcagugggauuuucggagacaauccacgcccuaaugauaagacaggcaguugugguccaguaucguuuaauggagcaaauggaguaaaaggauuuucauucaaauacggcaaugguguuuggauagggagaacuaaaagcauuaguucaagaaacgguuuugagaugauuugggauccgaacggauggacugggacagacaauaacuucucaauaaagcaagauaucguaggaauaaaugaguggucaggauauagcgggaguuuuguucagcauccagaacuaacagggcuggauuguauaagaccuugcuucuggguugaacuaaucagagggcgacccaaagagaacacaaucuggacuagcgggagcagcauauccuuuugugguguaaacagugacacuguggguuggucuuggccagacggugcugaguugccauuuaccauugacaaguaa

SEQ ID NO: 49555 - RNA, 1410 nt, Artificial Sequence; identical to SEQ ID NO: 48750
  derived and/or modified CDS sequence (wt) from neuraminidase__InfluenzaA__ACY77665

SEQ ID NO: 49556 - RNA, 1410 nt, Artificial Sequence; identical to SEQ ID NO: 48750
  derived and/or modified CDS sequence (wt) from neuraminidase__InfluenzaA__ACY77675

SEQ ID NO: 49557 - RNA, 1410 nt, Artificial Sequence; identical to SEQ ID NO: 49068
  derived and/or modified CDS sequence (wt) from neuraminidase__InfluenzaA__ACY77685

SEQ ID NO: 49558 - RNA, 1410 nt, Artificial Sequence
  derived and/or modified CDS sequence (wt) from neuraminidase__InfluenzaA__ACY77695
augaauccaaaccaaaagauaauaaccauugguucggucuguaugacaauuggaauggccaacuuaauauuacaaauuggaaacauaaucucaauauggauuagccacucaauucaacuugggaaucaaaaucagauugaaacaugcaaucaaagcgucauuacuuaugaaaacaacacuuggguaaaucagacauauguuaacaucagcaacaccaacuuugcugcuggacagucagugguuuccgugaaauuagcgggcaauuccucucucugcccuguuaguggaugggcuauauacaguaaagacaacaguguaagaaucgguuccaagggggauguguuugucauaagggaaccauucauaucaugcucccccuuggaaugcagaaccuucuucuugacucaaggggccuugcuaaaugacaaacauuccaauggaaccauuaaagacaggagcccauaucgaacccuaaugagcuguccuauuggugaaguucccucuccauacaacucaagauuugagucagucgcuuggucagcaagugcuugucaugauggcaucaauuggcuaacaauuggaauuucuggcccagacaauggggcaguggcuguguuaaaguacaacggcauaauaacagacacuaucaagaguuggagaaacaauauauugagaacacaagagucugaaugugcauguguaaaugguucuugcuuuacuguaaugaccgauggaccaaguaauggacaggccucauacaagaucuucagaauagaaaagggaaagauagucaaaucagucgaaaugaaugccccuaauuaucacuaugaggaaugcuccuguuauccugauucuagugaaaucacaugugugugcagggauaacuggcauggcucgaaucgaccguggguuucuuucaaccagaaucuggaauaucagauaggauacauaugcagugggauuuucggagacaauccacgcccuaaugauaagacaggcaguugugguccaguaucgucuaauggagcaaauggaguaaaaggauuuucauucaaauacggcaaugguguuuggauagggagaacuaaaagcauuaguucaagaaacgguuuugagaugauuugggauccgaacggauggacugggacagacaauaacuucucaauaaagcaagauaucguaggaauaaaugaguggucaggauauagcgggaguuuuguucagcauccagaacuaacagggcuggauuguauaagaccuugcuucuggguugaacuaaucagagggcgacccaaagagaacacaaucuggacuagcgggagcagcauauccuuuugugguguaaacagugacacuguggguuggucuuggccagacggugcugaguugccauuuaccauugacaaguaa

SEQ ID NO: 49559 - RNA, 1410 nt, Artificial Sequence; identical to SEQ ID NO: 49558
  derived and/or modified CDS sequence (wt) from neuraminidase__InfluenzaA__ACY77705

SEQ ID NO: 49560 - RNA, 1410 nt, Artificial Sequence
  derived and/or modified CDS sequence (wt) from neuraminidase__InfluenzaA__ACY77725
augaauccaaaccaaaagauaauaaccauugguucggucuguaugacaauuggaauggccaacuuaauauuacaaauuggaaacauaaucucaauauggauuagccacucaauucaacuugggaaucaaaaucagauugaaacaugcaaucaaagcgucauuacuuaugaaaacaacacuuggguaaaucagacauauguuaacaucagcaacaccaacuuugcugcuggacagucagugguuuccgugaaauuagcgggcaauuccucucucugcccuguuaguggaugggcuauauacaguaaagacaacaguguaagaaucgguuccaagggggauguguuugucauaagggaaccauucauaucaugcucccccuuggaaugcagaaccuucuucuugacucaaggggccuugcuaaaugacaaacauuccaauggaaccauuaaagacaggagcccauaucgaacccuaaugagcuguccuauuggugaaguucccucuccauacaacucaagauuugagucagucgcuuggucagcaagugcuugucaugauggcaucaauuggcuaacaauuggaauuucuggcccagacaauggggcaguggcuguguuaaaguacaacggcauaauaacagacacuaucaagaguuggagaaacaauauauugagaacacaagagucugaaugugcauguguaaaugguucuugcuuuacuguaaugaccgauggaccaaguaauggacaggccucauacaagaucuucagaauagaaaagggaaagauagucaaaucagucgaaaugaaugccccuaauuaucacuaugaggaaugcuccuguuauccugauucuagugaaaucacaugugugugcagggauaacuggcauggcucgaaucgaccaugggugucuuucaaccagaaucuggaauaucagauaggauacauaugcagugggauuuucggagacaauccacgcccuaaugauaagacaggcaguugugguccaguaucgucuaauggagcaaauggaguaaaaggauuuucauucaaauacggcaaugguguuuggauagggagaacuaaaagcauuaguucaagaaacgguuuugagaugauuugggauccgaacggauggacugggacagacaauaacuucucaauaaagcaagauaucguaggaauaaaugaguggucaggauauagcgggaguuuuguucagcauccagaacuaacagggcuagauuguauaagaccuugcuucuggguugaacuaaucagagggcgacccaaagagaacacaaucuggacuagcgggagcagcauauccuuuugugguguaaacagugacacuguggguuggucuuggccagacggugcugaguugccauuuaccauugacaaguaa

SEQ ID NO: 49561 - RNA, 1410 nt, Artificial Sequence
  derived and/or modified CDS sequence (wt) from neuraminidase__InfluenzaA__ACY77735
augaauccaaaccaaaagauaauaaccauugguucggucuguaugacaauuggaauggcuaacuuaauauuacaaauuggaaacauaaucucaauauggauuagccacucaauucaacuugggaaucaaaaucagauugaaacaugcaaucaaagcgucauuacuuaugaaaacaacacuuggguaaaucagacauauguuaacaucagcaacaccaacuuugcugcuggacagucagugguuuccgugaaauuagcgggcaauuccucucucugcccuguuaguggaugggcuauauacaguaaagacaacaguguaagaaucgguuccaagggggauguguuugucauaagggaaccauucauaucaugcucccccuuggaaugcagaaccuucuucuugacucaaggggccuugcuaaaugacaaacauuccaauggaaccauuaaagacaggagcccauaucgaacccuaaugagcuguccuauuggugaaguucccucuccauacaacucaagauuugagucagucgcuuggucagcaagugcuugucaugauggcaucaauuggcuaacaauuggaauuucuggcccagacaauggggcaguggcuguguuaaaguacaacggcauaauaacagacacuaucaagaguuggagaaacaauauauugagaacacaagagucugaaugugcauguguaaaugguucuugcuuuacuguaaugaccgauggaccaaguaauggacaggccucauacaagaucuucagaauagaaaagggaaagauagucaaaucagucgaaaugaaugccccuaauuaucacuaugaggaaugcuccuguuauccugauucuagugaaaucacaugugugugcagggauaacuggcauggcucgaaucgaccaugggugucuuucaaccagaaucuggaauaucagauaggauacauaugcagugggauuuucggagacaauccacgcccuaaugauaagacaggcaguugugguccaguaucgucuaauggagcaaauggaguaaaaggauuuucauucaaauacggcaaugguguuuggauagggagaacuaaaagcauuaguucaagaaacgguuuugagaugauuugggauccgaacggauggacugggacagacaauaacuucucaauaaagcaagauaucguaggaauaaaugaguggucaggauauagcgggaguuuuguucagcauccagaacuaacagggcuagauuguauaagaccuugcuucuggguugaacuaaucagagggcgacccaaagagaacacaaucuggacuagcgggagcagcauauccuuuugugguguaaacagugacacuguggguuggucuuggccagacggugcugaguugccauuuaccauugacaaguaa

SEQ ID NO: 49562 - RNA, 1410 nt, Artificial Sequence; identical to SEQ ID NO: 49070
  derived and/or modified CDS sequence (wt) from neuraminidase__InfluenzaA__ACY77745

SEQ ID NO: 49563 - RNA, 1410 nt, Artificial Sequence; identical to SEQ ID NO: 48750
  derived and/or modified CDS sequence (wt) from neuraminidase__InfluenzaA__ACY77755

SEQ ID NO: 49564 - RNA, 1410 nt, Artificial Sequence
  derived and/or modified CDS sequence (wt) from neuraminidase__InfluenzaA__ACY77775
augaauccaaaccaaaagauaauaaccauugguucggucuguaugacaauuggaauggcuaacuuaauauuacaaauuggaaacauaaucucaauauggauuagccacucaauucaacuugggaaucaaaaucagauugaaacaugcaaucaaagcgucauuacuuaugaaaacaacacuuggguaaaucagacauauguuaacaucagcaacaccaacuuugcugcuggacagucagugguuuccgugaaauuagcgggcaauuccucucucugcccuguuaguggaugggcuauauacaguaaagacaacaguauaagaaucgguuccaagggggauguguuugucauaagggaaccauucauaucaugcucccccuuggaaugcagaaccuucuucuugacucaaggggcuuugcuaaaugacaaacauuccaauggaaccauuaaagacaggagcccauaucgaacccuaaugagcuguccuauuggugaaguucccucuccauacaacucaagauuugagucagucgcuuggucagcaagugcuugucaugauggcaucaauuggcuaacaauuggaauuucuggcccagacaauggggcaguggcuguguuaaaguacaacggcauaauaacagacacuaucaagaguuggagaaacaauauauugagaacacaagagucugaaugugcauguguaaaugguucuugcuuuacuguaaugaccgauggaccaagugauggacaggccucauacaagaucuucagaauagaaaagggaaagauagucaaaucagucgaaaugaaugccccuaauuaucacuaugaggaaugcuccuguuauccugauucuagugaaaucacaugugugugcagggauaacuggcauggcucgaaucgaccgugggugucuuucaaccagaaucuggaauaucagauaggauacauaugcagugggauuuucggagacaauccacgcccuaaugauaagacaggcaguugugguccaguaucgucuaauggagcaaauggaguaaaaggauuuucauucaaauacggcaaugguguuuggauagggagaacuaaaagcauuaguucaagaaacgguuuugagaugauuugggauccgaacggauggacugggacagacaauaacuucucaauaaagcaagauaucguaggaauaaaugaguggucaggauauagcgggaguuuuguucagcauccagaacuaacagggcuggauuguauaagaccuugcuucuggguugaacuaaucagagggcgacccaaagagaacacaaucuggacuagcgggaguagcauauccuuuugugguguaaacagugacacuguggguuggucuuggccagacggugcugaguugccauuuaccauugacaaguaa

SEQ ID NO: 49565 - RNA, 1410 nt, Artificial Sequence; identical to SEQ ID NO: 48750
  derived and/or modified CDS sequence (wt) from neuraminidase__InfluenzaA__ACY77785

SEQ ID NO: 49566 - RNA, 1410 nt, Artificial Sequence
  derived and/or modified CDS sequence (wt) from neuraminidase__InfluenzaA__ACY77795
augaauccaaaccaaaagauaauaaccauugguucggucuguaugacaauuggaauggcuaacuuaauauuacaaauuggaaacauaaucucaauauggauuagccacucaauucaacuugggaaucaaaaucagauugaaacaugcaaucaaagcgucauuacuuaugaaaacaacacuuggguaaaucagacauauguuaacaucagcaacaccaacuuugcugcuggacagucugugguuuccgugaaauuagcgggcaauuccucucucugcccuguuaguggaugggcuauauacaguaaagacaacaguauaagaaucgguuccaagggggauguguuugucauaagggaaccauucauaucaugcucccccuuggaaugcagaaccuucuucuugacucaaggggcuuugcuaaaugacaaacauuccaauggaaccauuaaagacaggagcccauaucgaacccuaaugagcuguccuauuggugaaguucccucuccauacaacucaagauuugagucagucgcuuggucagcaagugcuugucaugauggcaucaauuggcuaacaauuggaauuucuggcccagacaauggggcaguggcuguguuaaaguacaacggcauaauaacagacacuaucaagaguuggagaaacaauauauugagaacacaagagucugaaugugcauguguaaaugguucuugcuuuacuguaaugaccgauggaccaagugauggacaggccucauacaagaucuucagaauagaaaagggaaagauagucaaaucagucgaaaugaaugccccuaauuaucacuaugaggaaugcuccuguuauccugauucuagugaaaucacaugugugugcagggauaacuggcauggcucgaaucgaccgugggugucuuucaaccagaaucuggaauaucagauaggauacauaugcagugggauuuucggagacaauccacgcccuaaugauaagacaggcaguugugguccaguaucgucuaauggagcaaauggaguaaaaggauuuucauucaaauacggcaaugguguuuggauagggagaacuaaaagcauuaguucaagaaacgguuuugagaugauuugggauccgaacggauggacugggacagacaauaacuucucaauaaagcaagauaucguaggaauaaaugaguggucaggauauagcgggaguuuuguucagcauccagaacuaacagggcuggauuguauaagaccuugcuucuggguugaacuaaucagagggcgacccaaagagaacacaaucuggacuagcgggaguagcauauccuuuugugguguaaacagugacacuguggguuggucuuggccagacggugcugaguugccauuuaccauugacaaguaa

SEQ ID NO: 49567 - RNA, 1410 nt, Artificial Sequence
  derived and/or modified CDS sequence (wt) from neuraminidase__InfluenzaA__ACY77825
augaauccaaaccaaaagauaauaaccauugguucggucuguaugacaauuggaauggcuaacuuaauauuacaaauuggaaacauaaucucaauauggauuagccacucaauucaacuugggaaucaaaaucagauugaaacaugcaaucaaagcgucauuacuuaugaaaacaacacuuggguaaaucagacauauguuaacaucagcaacaccaacuuugcugcuggacagucagugguuuccgcgaaauuagcgggcaauuccucucucugcccuguuaguggaugggcuauauacaguaaagacaacaguauaagaaucgguuccaagggggauguguuugucauaagggaaccauucauaucaugcucccccuuggaaugcagaaccuucuucuugacucaaggggccuugcuaaaugacaaacauuccaauggaaccauuaaagacaggagcccauaucgaacccuaaugagcuguccuauuggugaaguucccucuccauacaacucaagauuugagucagucgcuuggucagcaagugcuugucaugauggcaucaauuggcuaacaauuggaauuucuggcccagacaauggggcaguggcuguguuaaaguacaacggcauaauaacagacacuaucaagaguuggagaaacaauauauugagaacacaagagucugaaugugcauguguaaaugguucuugcuuuacuguaaugaccgauggaccaagugauggacaggccucauacaagaucuucagaauagaaaagggaaagauagucaaaucagucgaaaugaaugccccuaauuaucacuaugaggaaugcuccuguuauccugauucuagugaaaucacaugugugugcagggauaacuggcauggcucgaaucgaccgugggugucuuucaaccagaaucuggaauaucagauaggauacauaugcagugggauuuucggagacaauccacgcccuaaugauaagacaggcaguugugguccaguaucgucuaauggagcaaauggaguaaaaggauuuucauucaaauacggcaaugguguuuggauagggagaacuaaaagcauuaauucaagaaacgguuuugagaugauuugggauccgaacggauggacugggacagacaauaacuucucaauaaagcaagauaucguaggaauaaaugaguggucaggauauagcgggaguuuuguucagcauccagaacuaacagggcuggauuguauaagaccuugcuucuggguugaacuaaucagagggcgacccaaagagaacacaaucuggacuagcgggagcagcauauccuuuugugguguaaacagugacacuguggguuggucuuggccagacggugcugaguugccauuuaccauugacaaguaa

SEQ ID NO: 49568 - RNA, 1410 nt, Artificial Sequence; identical to SEQ ID NO: 49567
  derived and/or modified CDS sequence (wt) from neuraminidase__InfluenzaA__ACY77835

SEQ ID NO: 49569 - RNA, 1410 nt, Artificial Sequence; identical to SEQ ID NO: 48780
  derived and/or modified CDS sequence (wt) from neuraminidase__InfluenzaA__ACY77845

SEQ ID NO: 49570 - RNA, 1410 nt, Artificial Sequence; identical to SEQ ID NO: 48750
  derived and/or modified CDS sequence (wt) from neuraminidase__InfluenzaA__ACY77865

SEQ ID NO: 49571 - RNA, 1410 nt, Artificial Sequence
  derived and/or modified CDS sequence (wt) from neuraminidase__InfluenzaA__ACY77870
augaauccaaaccaaaagauaauaaccauugguucggucuguaugacaauuggaauggcuaacuuaauauuacaaauuggaaacauaaucucaauauggauuagccacucaauucaacuugggaaucaaaaucagauugaaacaugcaaccaaagcgucauuacuuaugaaaacaacacuuggguaaaucagacauauguuaacaucagcaacaccaaccuugcugcuggacagucagugguuuccgugaaauuagcgggcaauuccucucucugcccuguuaguggaugggcuauauacaguaaagacaacaguauaagaaucgguuccaagggggauguguuugucauaagggaaccauucauaucaugcucccccuuggaaugcagaaccuucuucuugacucaaggggccuugcuaaaugacaaacauuccaauggaaccauuaaagacaggagcccauaucgaacccuaaugagcuguccuauuggugaaguucccucuccauacaacucaagauuugagucagucgcuuggucagcaagugcuugucaugauggcaucaauuggcuaacaauuggaauuucuggcccagacaauggggcaguggcuguguuaaaguacaacggcauaauaacagacacuaucaagaguuggagaaacaauauauugagaacacaagagucugaaugugcauguguaaaugguucuugcuuuacuguaaugaccgauggaccaagugauggacaggccucauacaagaucuucagaauagaaaagggaaagauagucaaaucagucgaaaugaaugccccuaauuaucacuaugaggaaugcuccuguuauccugauucuagugaaaucacaugugugugcagggauaacuggcauggcucgaaucgaccgugggugucuuucaaccagaaucuggaauaucagauaggauacauaugcagugggauuuucggagacaauccacgcccuaaugauaagacaggcaguugugguccaguaucgucuaauggagcaaauggaguaaaaggauuuucauucaaauacggcaaugguguuuggauagggagaacuaaaagcauuaguucaagaaacgguuuugagaugauuugggauccgaacggauggacugggacagacaauaacuucucaauaaagcaagauaucguaggaauaaaugaguggucaggauauagcgggaguuuuguucagcauccagaacuaacagggcuggauuguauaagaccuugcuucuggguugaacuaaucagagggcgacccaaagagaacacaaucuggacuagcgggagcagcauauccuuuugugguguaaacagugacacuguggguuggucuuggccagacggugcugaguugccauuuaccauugacaaguaa

SEQ ID NO: 49572 - RNA, 1410 nt, Artificial Sequence; identical to SEQ ID NO: 48953
  derived and/or modified CDS sequence (wt) from neuraminidase__InfluenzaA__ACY77877

SEQ ID NO: 49573 - RNA, 1410 nt, Artificial Sequence; identical to SEQ ID NO: 48953
  derived and/or modified CDS sequence (wt) from neuraminidase__InfluenzaA__ACY77887

SEQ ID NO: 49574 - RNA, 1410 nt, Artificial Sequence; identical to SEQ ID NO: 48750
  derived and/or modified CDS sequence (wt) from neuraminidase__InfluenzaA__ACY77907

SEQ ID NO: 49575 - RNA, 1410 nt, Artificial Sequence; identical to SEQ ID NO: 48780
  derived and/or modified CDS sequence (wt) from neuraminidase__InfluenzaA__ACY77917

SEQ ID NO: 49576 - RNA, 1410 nt, Artificial Sequence
  derived and/or modified CDS sequence (wt) from neuraminidase__InfluenzaA__ACY77927
augaauccaaaccaaaagauaauaaccauugguucggucuguaugacaauuggaauggcuaacuuaauauuacaaauuggaaacauaaucucaauauggauuagccacucaauucaacuugggaaucaaaaucagauugaaacaugcaaucaaagcgucauuacuuaugaaaacaacacuuggguaaaucagacauauguuaacaucagcaacaccaacuuugcugcuggacagucagugguuuccgugaaauuagcgggcaauuccucucucugcccuguuaguggaugggcuauauacaguaaagacaacaguauaagaaucgguuccaagggggauguguuugucauaagggaaccauucauaucaugcucccccuuggaaugcagaaccuucuucuugacucaaggggccuugcuaaaugacaaacauuccaauggaaccauuaaagacaggagcccauaucgaacccuaaugagcuguccuauuggugaaguucccucuccauacaacucaagauuugagucagucgcuuggucagcaagugcuugucaugauggcaucaauuggcuaacaauuggaauuucuggcccaaacaauggggcaguggcuguguuaaaguacaacggcauaauaacagacacuaucaagaguuggagaaacaauauauugagaacacaagagucugaaugugcauguguaaaugguucuugcuuuacuguaaugaccgauggaccaagugauggacaggccucauacaaaaucuucagaauagaaaagggaaagauagucaaaucagucgaaaugaaugccccuaauuaucacuaugaggaaugcuccuguuauccugauucuagugaaaucacaugugugugcagggauaacuggcauggcucgaaucgaccgugggugucuuucaaccagaaucuggaauaucagauaggauacauaugcagugggauuuucggagacaauccacgcccuaaugauaagacaggcaguugugguccaguaucgucuaauggagcaaauggaguaaaaggauuuucauucaaauacggcaaugguguuuggauagggagaacuaaaagcauuaguucaagaaacgguuuugagaugauuugggauccgaacggauggacugggacagacaauaacuucucaauaaagcaagauaucguaggaauaaaugaguggucaggauauagcgggaguuuuguucagcauccagaacuaacagggcuggauuguauaagaccuugcuucuggguugaacuaaucagagggcgacccaaagagaacacaaucuggacuagcgggagcagcauauccuuuugugguguaaacagugacacuguggguuggucuuggccagacggugcugaguugccauuuaccauugacaaguaa

SEQ ID NO: 49577 - RNA, 1410 nt, Artificial Sequence; identical to SEQ ID NO: 49304
  derived and/or modified CDS sequence (wt) from neuraminidase__InfluenzaA__ACY77937

SEQ ID NO: 49578 - RNA, 1410 nt, Artificial Sequence; identical to SEQ ID NO: 48953
  derived and/or modified CDS sequence (wt) from neuraminidase__InfluenzaA__ACY77947

SEQ ID NO: 49579 - RNA, 1410 nt, Artificial Sequence; identical to SEQ ID NO: 48953
  derived and/or modified CDS sequence (wt) from neuraminidase__InfluenzaA__ACY77967

SEQ ID NO: 49580 - RNA, 1410 nt, Artificial Sequence; identical to SEQ ID NO: 48761
  derived and/or modified CDS sequence (wt) from neuraminidase__InfluenzaA__ACY77977

SEQ ID NO: 49581 - RNA, 1410 nt, Artificial Sequence; identical to SEQ ID NO: 48953
  derived and/or modified CDS sequence (wt) from neuraminidase__InfluenzaA__ACY77987

SEQ ID NO: 49582 - RNA, 1410 nt, Artificial Sequence
  derived and/or modified CDS sequence (wt) from neuraminidase__InfluenzaA__ACY77997
augaauccaaaccaaaagauaauaaccauugguucggucuguaugacaauuggaauggcuaacuuaauauuacaaauuggaaacauaaucucaauauggauuagccacucaauucaacuugggaaucaaaaucagauugaaacaugcaaucaaagcgucauuacuuaugaaaacaacacuuggguaaaucagacauauguuaacaucagcaacaccaacuuugcugcuggacagucagugguuuccgugacauuagcgggcaauuccucucucugcccuguuaguggaugggcuauauacaguaaagacaacaguauaagaaucgguuccaagggggauguguuugucauaagggaaccauucauaucaugcucccccuuggaaugcagaaccuucuucuugacucaaggggccuugcuaaaugacaaacauuccaauggaaccauuaaagacaggagcccauaucgaacccuaaugagcuguccuauuggugaaguucccucuccauacaacucaagauuugagucagucgcuuggucagcaagugcuugucaugauggcaucaauuggcuaacaauuggaauuucuggcccagacaauggggcaguggcuguguuaaaguacaacggcauaauaacagacacuaucaagaguuggagaaacaauauauugagaacacaagagucugaaugugcauguguaaaugguucuugcuuuacuguaaugaccgauggaccaagugauggacaggccucauacaagaucuucagaauagaaaagggaaagauagucaaaucagucgaaaugaaugccccuaauuaucacuaugaggaaugcuccuguuauccugauucuagugaaaucacaugugugugcagggauaacuggcauggcucgaaucgaccgugggugucuuucaaccagaaucuggaauaucagauaggauacauaugcagugggauuuucggagacaauccacgcccuaaugauaagacaggcaguugugguccaguaucgucuaauggagcaaauggaguaaaaggauuuucauucaaauacggcaaugguguuuggauagggagaacuaaaagcauuaguucaagaaacgguuuugagaugauuugggauccgaacggauggacugggacagacaauaacuucucaauaaagcaagauaucguaggaauaaaugaguggucaggauauagcgggaguuuuguucagcauccagaacuaacagggcuggauuguauaagaccuugcuucuggguugaacuaaucagagggcgacccaaagagaacacaaucuggacuagcgggagcagcaucuccuuuugugguguaaacagugacacuguggguuggucuuggccagacggugcugaguugccauuuaccauugacaaguaa

SEQ ID NO: 49583 - RNA, 1410 nt, Artificial Sequence
  derived and/or modified CDS sequence (wt) from neuraminidase__InfluenzaA__ACY78017
augaauccaaaccaaaagauaauaaccauugguucggucuguaugacaauuggaauggcuaacuuaauauuacaaauuggaaacauaaucucaauauggauuagccacucaauucaacuugggaaucaaaaucagauugaaacaugcaaucaaagcgucauuacuuaugaaaacaacacuuggguaaaucagacauauguuaacaucagcaacaccaacuuugcugcuggacagucagugguuuccgugaaauuagcgggcaauuccucucucugcccuguuaguggaugggcuauauacaguaaagacaacaguauaagaaucgguuccaagggggauguguuugucauaagggaaccauucauaucaugcucccccuuggaaugcagaaccuucuucuugacucaaggggccuugcuaaaugacaaacauuccaauggaaccauuaaagacaggagcccauaucgaacccuaaugagcuguccuauuggugaaguucccucuccauacaacucaagauuugagucagucgcuuggucagcaagugcuugucaugauggcaucaauuggcuaacaauuggaauuucuggcccagacaauggggcaguggcuguguuaaaguacaacggcauaauaacagacacuaucaagaguuggagaaacaauauauugagaacacaagagucugaaugugcauguguaaaugguucuugcuuuaccguaaugaccgauggaccaagugauggacaggccucauacaagaucuucagaauagaaaagggaaagauagucaaaucagucgaaaugaaugccccuaauuaucacuaugaggaaugcuccuguuauccugauucuagugaaaucacaugugugugcagggauaacuggcauggcucgaaucgaccgugggugucuuucaaccagaaucuggaauaucagauaggauacauaugcagugggauuuucggagacaauccacgcccuaaugauaagacaggcaguugugguccaguaucgucuaauggagcaaauggaguaaaaggauuuucauucaaauacggcaaugguguuuggauagggagaacuaaaagcauuaguucaagaaacgguuuugagaugauuugggauccgaacggauggacugggacagacaauaacuucucaauaaagcaagauaucguaggaauaaaugaguggucaggauauagcgggaguuuuguucagcauccagaacuaacagggcuggauuguauaagaccuugcuucuggguugaacuaaucagagggcgacccaaagagaacacaaucuggacuagcgggagcagcaucuccuuuugugguguaaacagugacacuguggguuggucuuggccagacggugcugaguugccauuuaccauugacaaguaa

SEQ ID NO: 49584 - RNA, 1410 nt, Artificial Sequence
  derived and/or modified CDS sequence (wt) from neuraminidase__InfluenzaA__ACZ01955
augaauccaaaccaaaagauaaucaccauugguucggucuguaugacaauuggaauggcuaacuuaauauuacaaauuggaaacauaaucucaauauggauuagccacucaauucaacuugggaaucaaaaucagauugaaacaugcaaucaaagcgucauuacuuaugaaaacaacacuuggguaaaucagacauauguuaacaucagcaacaccaacuuugcugcuggacagucagugguuuccgugaaauuagcgggcaauuccucucucugcccuguuaguggaugggcuauauacaguaaagacaacaguauaagaaucgguuccaagggggauguguuugucauaagggaaccauucauaucaugcucccccuuggaaugcagaaccuucuucuugacucaaggggccuugcuaaaugacaaacauuccaauggaaccauuaaagacaggagcccauaucgaacccuaaugagcuguccuauuggugaaguucccucuccauacaacucaagauuugagucagucgcuuggucagcaagugcuugucaugauggcaucaauuggcuaacaauuggaauuucuggcccaggcaauggggcaguggcuguguuaaaguacaacggcauaauaacagacacuaucaagaguuggagaaacaauauauugagaacacaagagucugaaugugcauguguaaaugguucuugcuuuacuguaaugaccgauggaccaagugauggacaggccucauacaagaucuucagaauagaaaagggaaagauagucaaaucagucgaaaugaaugccccuaauuaucacuaugaggaaugcuccuguuauccugauucuagugaaaucacaugugugugcagggauaacuggcauggcucgaaucgaccgugggugucuuucaaucagaaucuggaauaucagauaggguacauaugcagugggauuuucggagacaauccacgcccuaaugauaagacaggcaguugugguccaguaucgucuaauggagcaaauggaguaaaaggauuuucauucaaauacggcaaugguguuuggauagggagaacuaaaagcauuaguucaagaaacgguuuugagaugauuugggauccgaacggauggacugggacagacaauaacuucucaauaaagcaagauaucguaggaauaaaugaguggucaggauauagcgggaguuuuguucagcauccagaacuaacagggcuggauuguauaagaccuugcuucuggguugaacuaaucagagggcgacccaaagagaacacaaucuggacuagcgggagcagcauauccuuuugugguguaaacagugacacuguggguuggucuuggccagacggugcugaguugccauuuaccauugacaaguaa

SEQ ID NO: 49585 - RNA, 1410 nt, Artificial Sequence; identical to SEQ ID NO: 48953
  derived and/or modified CDS sequence (wt) from neuraminidase__InfluenzaA__ACZ05053

SEQ ID NO: 49586 - RNA, 1410 nt, Artificial Sequence; identical to SEQ ID NO: 48749
  derived and/or modified CDS sequence (wt) from neuraminidase__InfluenzaA__ACZ05064

SEQ ID NO: 49587 - RNA, 1410 nt, Artificial Sequence; identical to SEQ ID NO: 48953
  derived and/or modified CDS sequence (wt) from neuraminidase__InfluenzaA__ACZ05074

SEQ ID NO: 49588 - RNA, 1410 nt, Artificial Sequence; identical to SEQ ID NO: 48953
  derived and/or modified CDS sequence (wt) from neuraminidase__InfluenzaA__ACZ05084

SEQ ID NO: 49589 - RNA, 1410 nt, Artificial Sequence; identical to SEQ ID NO: 48953
  derived and/or modified CDS sequence (wt) from neuraminidase__InfluenzaA__ACZ05094

SEQ ID NO: 49590 - RNA, 1410 nt, Artificial Sequence; identical to SEQ ID NO: 48953
  derived and/or modified CDS sequence (wt) from neuraminidase__InfluenzaA__ACZ05104

SEQ ID NO: 49591 - RNA, 1410 nt, Artificial Sequence; identical to SEQ ID NO: 48953
  derived and/or modified CDS sequence (wt) from neuraminidase__InfluenzaA__ACZ05114

SEQ ID NO: 49592 - RNA, 1410 nt, Artificial Sequence
  derived and/or modified CDS sequence (wt) from neuraminidase__InfluenzaA__ACZ05124
augaauccaaaccaaaagauaauaaccauugguucggucuguaugacaauuggaauggcuaacuuaauauuacaaauuggaaacauaaucucaauauggauuagccacucaauucaacuugggaaucaaaaucagauugaaacuugcaaucaaagcgucauuacuuaugaaaacaacacuuggguaaaucagacauauguuaacaucagcaacaccaacuuugcugcuggacagucagugguuuccgugaaauuagcgggcaauuccucucucugcccuguuaguggaugggcuauauacaguaaagacaacaguauaagaaucgguuccaagggggauguguuugucauaagggaaccauucauaucaugcucccccuuggaaugcagaaccuucuucuugacucaaggggccuugcuaaaugacaaacauuccaauggaaccauuaaagacaggagcccauaucgaacccuaaugagcuguccuauuggugaaguucccucuccauacaacucaagauuugagucagucgcuuggucagcaagugcuugucaugauggcaucaauuggcuaacaauuggaauuucuggcccagacaauggggcaguggcuguguuaaaguacaacggcauaauaacagacacuaucaagaguuggagaaacaauauauugagaacacaagagucugaaugugcauguguaaaugguucuugcuuuacuguaaugaccgauggaccaagugauggacaggccucauacaagaucuucagaauagaaaagggaaagauagucaaaucagucgaaaugaaugccccuaauuaucacuaugaggaaugcuccuguuauccugauucuagugaaaucacaugugugugcagggauaacuggcauggcucgaaucgaccgugggugucuuucaaccagaaucuggaauaucagauaggauacauauguagugggauuuucggagacaauccacgcccuaaugauaagacaggcaguugugguccaguaucgucuaauggagcaaauggaguaaaaggauuuucauucaaauacggcaaugguguuuggauagggagaacuaaaagcauuaguucaagaaacgguuuugagaugauuugggauccgaacggauggacugggacagacaauaacuucucaauaaagcaagauaucguaggaauaaaugaguggucaggauauagcgggaguuuuguucagcauccagaacuaacagggcuggauuguauaagaccuugcuucuggguugaacuaaucagagggcgacccaaagagaacacaaucuggacuagcgggagcagcauauccuuuugugguguaaacagugacacuguggguuggucuuggccagacggugcugaguugccauuuaccauugacaaguaa

SEQ ID NO: 49593 - RNA, 1410 nt, Artificial Sequence; identical to SEQ ID NO: 48953
  derived and/or modified CDS sequence (wt) from neuraminidase__InfluenzaA__ACZ05144

SEQ ID NO: 49594 - RNA, 1410 nt, Artificial Sequence; identical to SEQ ID NO: 48953
  derived and/or modified CDS sequence (wt) from neuraminidase__InfluenzaA__ACZ05154

SEQ ID NO: 49595 - RNA, 1410 nt, Artificial Sequence
  derived and/or modified CDS sequence (wt) from neuraminidase__InfluenzaA__ACZ05164
augaauccaaaucaaaagauaauaacgauuggcucuguuucucucaccauuuccacaauaugcuucuucaugcaaauugccaucuugauaacuacuguaacauugcauuucaagcaauaugaauucaacucccccccaaacaaccaagugaugcugugugaaccaacaauaauagaaagaaacauaacagagauaguguaucugaccaacaccaccauagagaaggaaauaugccccaaacuagcagaauacagaaauuggucaaagccgcaaugugacauuacaggguuugcaccuuuuucuaaggacaauucgauuaggcuuuccgcugguggggacaucugggugacaagagaaccuuaugugucaugcgauccugacaaguguuaucaauuugcccuuggacagggaacaacacuaaacaacguacauucaaauaacacaguacgugauaggaccccuuaucggacccuauugaugaaugaguuagguguuccuuuucaucuggggaccaagcaagugugcauagcaugguccagcucaaguugucacgauggaaaagcauggcugcauguuuguauaacgggggaugauaaaaaugcaacugcuagcuucauuuacaaugggaggcuuguagauaguguuguuucaugguccaaagaaauccucaggacccaggagucagaaugcguuuguaucaauggaacuuguacaguaguaaugacugaugggagugcuucaggaaaagcugauacuaaaauacuauucauugaggaggggaaaaucguucauacuagcacauugucaggaagugcucagcaugucgaggagugcuccugcuauccucgauauccuggugucagaugugucugcagagacaacuggaaaggauccaauaggcccaucguagauauaaacauaaaggaucauagcauugucuccaguuauguguguucaggacuuguuggagacacacccagaaaaaacgacagcuccagcaguagccauuguuuggauccuaacaaugaggaagguggucauggggugaaaggcugggccuuugaugauggaaaugacguguggaugggaagaacgaucagcgagaagucacgcuuaggguaugaaaccuucaaagucauugaaggcugguccaacccuaaguccaaauugcagauaaauaggcaagucauaguugacagagguaauagguccgguuauucugguauuuucucuguugaaggcaaaagcugcaucaaucggugcuuuuauguggaguugauaaggggaagaaaagaggaaacugaagucuuguggaccucaaacaguauuguuguguuuuguggcaccucagguacauauggaacaggcucauggccugauggggcggauaucaaucucaugccuauauaa

SEQ ID NO: 49596 - RNA, 1410 nt, Artificial Sequence; identical to SEQ ID NO: 49595
  derived and/or modified CDS sequence (wt) from neuraminidase__InfluenzaA__ACZ05175

SEQ ID NO: 49597 - RNA, 1413 nt, Artificial Sequence
  derived and/or modified CDS sequence (wt) from neuraminidase__InfluenzaA__ACZ05197
augaacccaaaucaaaagauaaugaccauuggaucaaucaguauagcaaucggaauaauuagucuaauguugcaaauaggaaauauuauuucaauaugggcuagucacucgauccaaacuggaagucaaaacaacacuggaauaugcaaccaaagaaucaucacauaugaaaacagcaccugggugaaucacacauauguuaauauuaacaacacuaauguuguugcuggagaggacaaaacgucagugacauuggccggcaauucaucucuuuguucuaucaguggaugggcuauauacacaaaagacaacagcauaagaauuggcuccaaaggagauguuuuugucauaagagaaccuuucauaucauguucucacuuggaaugcagaaccuuuuuucugacccaaggcgcucuauuaaaugacaaacauucaaaugggaccguaaaggacagaaguccuuauagggccuuaaugagcuguccucuaggugaagcuccguccccauacaauucaaaguucgaaucaguugcauggucagcaagcgcaugccaugauggcaugggcugguuaacaaucggaauuucugguccagacaauggagcuguggcuguacuaaaauacaacggaauaauaacuggaaccauaaaaaguuggaaaaagcaaauauuaagaacacaagagucugaaugugucuguaugaacgggucauguuucaccauaaugaccgauggcccgaguaauaaagccgccucguacaaaauuuucaagaucgaaaaggggaagguuacuaaaucaauagaguugaaugcacccaauuuuuauuaugaggaaugcuccuguuacccagacacuggcauagugauguguguaugcagggacaacuggcaugguucaaaucgaccuugggugucuuuuaaucaaaauuuggauuaucaaauaggauacaucugcaguggaguguuuggugacaauccgcgucccgaagauggagagggcagcugcaauccagugacuguugauggagcaaacggaguaaaaggguuuucauacaaauaugguaaugguguuuggauaggaaggaccaaaaguaacagacuuagaaagggguuugagaugauuugggauccuaauggauggacaaauaccgacagugauuucucagugaaacaggauguuguagcaauaacugauuggucaggguacagcggaaguuucguucaacauccugaguugacaggauuggacuguauaagaccuugcuucuggguugaguuagucagagggcugccuagagaaaauacaacaaucuggacuagugggagcagcauuucuuuuuguggcguuaauagugauacugcaaacuggucuuggccagacggugcugaguugccguucaccauugacaaguag

SEQ ID NO: 49598 - RNA, 1410 nt, Artificial Sequence
  derived and/or modified CDS sequence (wt) from neuraminidase__InfluenzaA__ACZ05208
augaauccaaaucaaaagauaauaacgauuggcucuguuucucucaccauuuccacaauaugcuucuucaugcaaauugccaucuugauaacuacuguaacauugcauuucaagcaauaugaauucaacucccccccaaacaaccaagugaugcugugugaaccaacaauaauagaaagaaacauaacagagauaguguaucugaccaacaccaccauagagaaggaaauaugccccaaacuagcagaauacagaaauuggucaaagccgcaaugugacauuacaggguuugcaccuuuuucuaaggacaauucgauuaggcuuuccgcugguggggacaucugggugacaagagaaccuuaugugucaugcgauccugacaaguguuaucaauuugcccuuggacagggaacaacacuaaacaacguacauucaaauaacacaguacgugauaggaccccuuaucggacccuauugaugaaugaguuagguguuccuuuucaucuggggaccaagcaagugugcauagcaugguccagcucaaguugucacgauggaaaagcauggcugcauguuuguauaacgggggaugauaaaaaugcaacugcuagcuucauuuacaaugggaggcuuguagauaguguuguuucaugguccaaagaaauccucaggacccaggagucagaaugcguuuguaucaauggaacuuguacaguaguaaugacugaugggagugcuucaggaaaagcugauacuaaaauacuauucauugaggaggggaaaaucguucauacuagcacauugucaggaagugcucagcaugucgaggagugcuccugcuauccucgauauccuggugucagaugugucugcagagacaacuggaaaggauccaauaggcccaucguagauauaaacauaaaggaucauagcauugucuccaguuauguguguucaggacuuguuggagacacacccagaaaaaacgacagcuccagcaguagccauuguucggauccuaacaaugaggaagguggucauggggugaaaggcugggccuuugauaguggaaaugacguguggaugggaagaacgaucagcgagaagucacgcuuaggguaugaaaccuucaaagucauugaaggcugguccaacccuaaguccaaauugcagauaaauaggcaagucauaguugacagagguaauagguccgguuauucugguauuuucucuguugaaggcaaaagcugcaucaaucggugcuuuuauguggaguugauaaggggaagaaaagaggaaacugaagucuuguggaccucaaacaguauuguuguguuuuguggcaccucagguacauauggaacaggcucauggccugauggggcggauaucaaucucaugccuauauaa

SEQ ID NO: 49599 - RNA, 1410 nt, Artificial Sequence
  derived and/or modified CDS sequence (wt) from neuraminidase__InfluenzaA__ACZ05219
augaauccaaaucaaaagauaauaacgauuggcucuguuucucucaccauuuccacaauaugcuucuucaugcaaauugccaucuugauaacuacuguaacauugcauuucaagcaauaugaauucaacucccccccaaacaaccaagugaugcugugugaaccaacaauaauagaaagaaacauaacagagauaguguaucugaccaacaccaccauagagaaggaaauaugccccaaacuagcagaauacagaaauuggucaaagccgcaauguggcauuacaggauuugcaccuuuuucuaaggacaauucgauuaggcuuuccgcugguggggacaucugggugacgagagaaccuuaugugucaugcgauccugacaaguguuaucaauuugcccuuggacagggaacaacacuaaacaacgugcauucaaauaacacaguacgugauaggaccccuuaucggacccuauugaugaaugaguuagguguuccuuuucaucuggggaccaagcaagugugcauagcaugguccagcucaaguugucacgauggaaaagcauggcugcauguuuguauaacgggggaugauaaaaaugcaacugcuagcuucauuuacaaugggaggcuuguagauaguguuguuucaugguccaaagaaauccucaggacccaggagucagaaugcguuuguaucaaugguacuuguacaguaguaaugacugaugggagugcuucaggaaaagcugauacuaaaauacuauucauugaggaggggaaaaucguucauacuagcacauugucaggaagugcucagcaugucgaggagugcuccugcuauccucgauauccuggugucagaugugucugcagagacaacuggaaaggcuccaauaggcccaucguagauauaaacauaaaggaucauagcauuguuuccaguuauguguguucaggacuuguuggagacacacccagaaaaaacgacagcuccagcaguagccauuguuuggauccuaauaaugaagaagguggucauggagugaaaggcugggccuuugaugauggaaaugacguguggaugggaagaacgaucagcgagaagucacgcuuaggguaugaaaccuucaaagucauugaaggcugguccaacccuaaguccaaauugcagauaaauaggcaagucauaguugacagagguaauagguccgguuauucugguauuuucucuguugaaggcaaaagcugcaucaaucggugcuuuuauguggaguugauaaggggaagaaaagaggaaacugaagucuuguggaccucaaacaguauuguuguguuuuguggcaccucagguacauauggaacaggcucauggccugauggggcggacaucaaucucaugccuauauaa

SEQ ID NO: 49600 - RNA, 1410 nt, Artificial Sequence; identical to SEQ ID NO: 49595
  derived and/or modified CDS sequence (wt) from neuraminidase__InfluenzaA__ACZ05230

SEQ ID NO: 49601 - RNA, 1410 nt, Artificial Sequence
  derived and/or modified CDS sequence (wt) from neuraminidase__InfluenzaA__ACZ05241
augaauccaaaucaaaagauaauaacgauuggcucuguuucucucaccauuuccacaauaugcuucuucaugcaaauugccaucuugauaacuacuguaacauugcauuucaagcaauaugaauucaacucccccccaaacaaccaagugaugcugugugaaccaacaauaauagaaagaaacauaacagagauaguguaucugaccaacaccaccauagagaaggaaauaugccccaaacuagcagaauacagaaauuggucaaagccgcaaugugacauuacaggguuugcaccuuuuucuaaggacaauucgauuaggcuuuccgcugguggggacaucugggugacaagagaaccuuaugugucaugcgauccugacaaguguuaucaauuugcccuuggacagggaacaacacuaaacaacguacauucaaauaacacaguacgugauaggaccccuuaucggacccuauugaugaaugaguuagguguuccuuuucaucuggggaccaagcaagugugcauagcaugguccagcucaaguugucacgauggaaaagcauggcugcauguuuguauaacgggggaugauaaaaaugcaacugcuagcuucauuuacaaugggaggcuuguagauaguguuguuucaugguccaaagaaauccucaggacccaggagucagaaugcguuuguaucaauggaacuuguacaguaguaaugacugaugggagugcuucaggaaaagcugauacuaaaauacuauucauugaggaggggaaaaucguucauacuagcaaauugucaggaagugcucagcaugucgaggagugcuccugcuauccucgauauccuggugucagaugugucugcagagacaacuggaaaggauccaauaggcccaucguagauauaaacauaaaggaucauagcauugucuccaguuauguguguucaggacuuguuggagacacacccagaaaaaacgacagcuccagcaguagccauuguuuggauccuaacaaugaggaagguggucauggggugaaaggcugggccuuugaugauggaaaugacguguggaugggaagaacgauaagcgagaagucacgcuuaggguaugaaaccuucaaagucauugaaggcugguccaacccuaaguccaaauugcagauaaauaggcaagucauaguugacagagguaauagguccgguuauucugguauuuucucuguugaaggcaaaagcugcaucaaucggugcuuuuauguggaguugauaaggggaagaaaagaggaaacugaagucuuguggaccucaaacaguauuguuguguuuuguggcaccucagguacauauggaacaggcucauggccugauggggcggauaucaaucucaugccuauauaa

SEQ ID NO: 49602 - RNA, 1413 nt, Artificial Sequence
  derived and/or modified CDS sequence (wt) from neuraminidase__InfluenzaA__ACZ05296
augaacccaaaucaaaagauaauaaccauuggaucaaucaguauagcaaucggaauaauuagucuaauguugcaaauaggaaauauuauuucaauaugggcuagucacucaauccaaacuggaagucaaaacaacacuggaauaugcaaccaaagaaucaucacauaugaaaacagcaccugggugaaucacacauauguuaauauuaacaacacuaauguuguugcuggagaggacaaaacuucagugacauuggccggcaauucaucucuuuguucuaucaguggaugggcuauauacacaaaagacaacagcaucagaauuggcuccaaaggagauguuuuugucauaagagaaccuuucauaucauguucucacuuggaaugcagaaccuuuuuucugacccaaggcgcucuauuaaaugacaaacauucaaaugggaccguaaaggacagaaguccuuauagggccuuaaugagcuguccucuaggugaagcuccguccccauacaauucaaaguucgaaucaguugcauggucagcaagcgcaugccaugauggcaugggcugguuaacaaucggaauuucugguccagacaauggagcuguggcuguacuaaaauacaacggaauaauaacuggaaccauuaaaaguuggaaaaagcaaauauuaagaacacaagagucugaaugugucuguaugaacgggucauguuucaccauaaugacugauggcccgaguaauaaggccgccucguacaaaauuuucaagaucgaaaaagggaagguuacuaaaucaauagaguugaaugcacccaauuuuuauuaugaggaaugcuccuguuacccagacacuggcauagugauguguguaugcagggacaacuggcaugguucaaaucgaccuugggugucuuuuaaucaaaacuuggauuaucagauaggauacaucugcaguggaguguuuggugacaauccgcgucccgaagauggagagggcagcugcaauccaguggcuguugauggagcaaauggaguaaaaggguuuucauacaaauaugguaaugguguuuggauaggaaggaccaaaaguaacagacuuagaaagggguuugagaugauuugggauccuaauggauggacaaauaccgacagugauuucucagugaaacaggauguuguagcaauaacugauuggucaggguacagcggaaguuucguccaacauccugaguuaacaggauuggacuguauaagaccuugcuucuggguugaguuagucagagggcugccuagagaaaauacaacaaucuggacuagugggagcagcauuucuuuuuguggcguuaauagugauacugcaaacuggucuuggccagacggugcugaguugccguucaccaucgacaaguag

SEQ ID NO: 49603 - RNA, 1410 nt, Artificial Sequence; identical to SEQ ID NO: 49595
  derived and/or modified CDS sequence (wt) from neuraminidase__InfluenzaA__ACZ05307

SEQ ID NO: 49604 - RNA, 1410 nt, Artificial Sequence
  derived and/or modified CDS sequence (wt) from neuraminidase__InfluenzaA__ACZ05318
augaauccaaaucaaaagauaauaacgauuggcucuguuucucucaccauuuccacaauaugcuucuucaugcaaaccgccauccugauaacuacuguaacauugcauuucaagcaaugugaauucaacucccccccaaacaaccaagugaugcugugugaaccaacaauaauagaaagaaacauaacagagauaguguaucugaccaacaccaccauagagaaggaaauaugccccaaacuagcagaauacagaaauuggucaaagccgcaaugugacauuacaggauuugcaccuuuuucuaaggacaauucgauuaggcuuuccgcugguggggacaucugggugacaagagaaccuuaugugucaugcgauccugacaaguguuaucaauuugcccuuggacagggaacaacgcuaaacaacgugcauucaaauaacacaguacgugauaggaccccuuaucggacucuauugaugaaugaguuagguguuccuuuucaucuggggaccaagcaagugugcauagcaugguccagcucaaguugucacgauggaaaagcauggcugcauguuuguauaacgggggaugauaaaaaugcaacugcuagcuucauuuacaaugggaggcuuguagauaguguuguuucaugguccaaagaaauccucaggacccaggagucagaaugcguuuguaucaauggaacuuguacaguaguaaugacugaugggagugcuucaggaaaagcugauacuaaaauacuauucauugaggaggggaaaaucguucauacuagcacauugucaggaagugcucagcaugucgaggagugcuccugcuauccucgauauccuggugucagaugugucugcagagacaacuggaaaggcuccaauaggcccaucguagauauaaacauaaaggaucauagcauuguuuccaguuauguguguucaggacuuguuggagacacacccagaaaaaacgacagcuccagcaguagccauuguuuggauccuaacaaugaagaagguggucauggagugaaaggcugggccuuugaugauggaaaugacguguggaugggaagaacgaucagcgagaaaucacgcuuaggguaugaaaccuucaaagucauugaaggcugguccaacccuaaguccaaauugcagauaaauaggcaagucauaguugacagagguaauagguccgguuauucugguauuuucucuguugaaggcaaaagcugcaucaaucggugcuuuuauguggaguugauaaggggaaggaaagaggaaacugaagucuuguggaccucaaacaguauuguuguguuuuguggcaccucagguacauauggaacaggcucauggccugauggggcggacaucaaucucaugccuauauaa

SEQ ID NO: 49605 - RNA, 1410 nt, Artificial Sequence; identical to SEQ ID NO: 49595
  derived and/or modified CDS sequence (wt) from neuraminidase__InfluenzaA__ACZ05329

SEQ ID NO: 49606 - RNA, 1410 nt, Artificial Sequence
  derived and/or modified CDS sequence (wt) from neuraminidase__InfluenzaA__ACZ05340
augaauccaaaucaaaagauaauaacgauuggcucuguuucucucaccauuuccacaauaugcuucuucaugcaaauugccaucuugauaacuacuguaacauugcauuucaagcaauaugaauucaacucccccccaaacaaccaagugaugcugugugaaccaacaauaauagaaagaaacauaacagagauaguguaucugaccaacaccaccauagagaaggaaauaugccccaaacuagcagaauacagaaauuggucaaagccgcaaugugacauuacaggguuugcaccuuuuucuaaggacaauucgauuaggcuuuccgcugguggggacaucugggugacaagagaaccuuaugugucaugcgauccugacaaguguuaucaauuugcccuuggacagggaacaacacuaaacaacguacauucaaaugacacaguacgugauaggaccccuuaucggacccuauugaugaaugaguuagguguuccuuuucaucuggggaccaagcaagugugcauagcaugguccagcucaaguugucacgauggaaaagcauggcugcauguuuguauaacgggggaugauaaaaaugcaacugcuagcuucauuuacaaugggaggcuuguagauaguguuguuucaugguccaaagaaauccucaggacccaggagucagaaugcguuuguaucaauggaacuuguacaguaguaaugacugaugggagugcuucaggaaaagcugauacuaaaauacuauucauugaggaggggaaaaucguucauacuagcacauugucaggaagugcucagcaugucgaggagugcuccugcuauccucgauauccuggugucagaugugucugcagagacaacuggaaaggauccaauaggcccaucguagauauaaacauaaaggaucauagcauugucuccaguuauguguguucaggacuuguuggagacacacccagaaaaaacgacagcuccagcaguagccauuguuuggauccuaacaaugaggaagguggucauggggugaaaggcugggccuuugaugauggaaaugacguguggaugggaagaacgaucagcgagaagucacgcuuaggguaugaaaccuucaaagucauugaaggcugguccaacccuaaguccaaauugcagauaaauaggcaagucauaguugacagagguaauagguccgguuauucugguauuuucucuguugaaggcaaaagcugcaucaaucggugcuuuuauguagaguugauaaggggaagaaaagaggaaacugaagucuuguggaccucaaacaguauuguuguguuuuguggcaccucagguacauauggaacaggcucauggccugauggggcggacaucaaucucaugccuauauaa

SEQ ID NO: 49607 - RNA, 1410 nt, Artificial Sequence
  derived and/or modified CDS sequence (wt) from neuraminidase__InfluenzaA__ACZ05362
augaauccaaaucaaaagauaauaacgauuggcucuguuucucucaccauuuccacaauaugcuucuucaugcaaauugccaucuugauaacuacuguaacauugcauuucaagcaauaugaauucaacucccccccaaacaaccaagugaugcugugugaaccaacaauaauagaaagaaacauaacagagauaguguaucugaccaacaccaccauagagaaggaaauaugccccaaacuagcagaauacagaaauuggucaaagccgcaaugugacauuacaggguuugcaccuuuuucuaaggacaauucgauuaggcuuuccgcugguggggacaucugggugacaagagaaccuuaugugucaugcgauccugacaaguguuaucaauuugcccuuggacagggaacaacacuaaacaacguacauucaaauaacacaguacgugauaggaccccuuaucggacccuauugaugaaugaguuagguguuccuuuucaucuggggaccaagcaagugugcauagcaugguccagcucaaguugucacgauggaaaagcauggcugcauguuuguauaacgggggaugauaaaaaugcaacugcuagcuucauuuacaaugggaggcuuguagauaguguuguuucaugguccaaagaaauccucaggacccaggagucagaaugcguuuguaucaauggaacuuguacaguaguaaugacugaugggagugcuucaggaaaagcugauacuaaaauacuauucauugaggaggggaaaaucguucauacuagcaaauugucaggaagugcucagcaugucgaggagugcuccugcuauccucgauauccuggugucagaugugucugcagagacaacuggaaaggauccaauaggcccaucguagauauaaacauaaaggaucauagcauugucuccaguuauguguguucaggacuuguuggagacacacccagaaaaaacgacagcuccagcaguagccauuguuuggauccuaacaaugaggaagguggucauggggugaaaggcugggccuuugaugauggaaaugacguguggaugggaagaacgaucagcgagaagucacgcuuaggguaugaaaccuucaaagucauugaaggcugguccaacccuaaguccaaauugcagauaaauaggcaagucauaguugacagagguaauagguccgguuauucugguauuuucucuguugaaggcaaaagcugcaucaaucggugcuuuuauguggaguugauaaggggaagaaaagaggaaacugaagucuuguggaccucaaacaguauuguuguguuuuguggcaccucagguacauauggaacaggcucauggccugauggggcggauaucaaucucaugccuauauaa

SEQ ID NO: 49608 - RNA, 1410 nt, Artificial Sequence; identical to SEQ ID NO: 49595
  derived and/or modified CDS sequence (wt) from neuraminidase__InfluenzaA__ACZ05373

SEQ ID NO: 49609 - RNA, 1410 nt, Artificial Sequence
  derived and/or modified CDS sequence (wt) from neuraminidase__InfluenzaA__ACZ05395
augaauccaaaucaaaagauaauaacgauuggcucuguuucucucaccauuuccacaauaugcuucuucaugcaaauugccaucuugauaacuacuguaacauugcauuucaagcaauaugaauucaacucccccccaaacaaccaagugaugcugugugaaccaacaauaauagaaagaaauauaacagagauaguguaucugaccaacacaaccauagagaaggaaauaugccccaaacuagcagaauacagaaauuggucaaagccgcaaugugacauuacaggguuugcaccuuuuucuaaggacaauucgauuaggcuuuccgcugguggggacaucugggugacaagagaaccuuaugugucaugcgauccugacaaguguuaucaauuugcccuuggacagggaacaacacuaaacaacguacauucaaauaacacaguacgugauaggaccccuuaucggacccuauugaugaaugaguuagguguuccuuuucaucuggggaccaagcaagugugcauagcaugguccagcucaaguugucacgauggaaaagcauggcugcauguuuguauaacgggggaugauaaaaaugcaacugcuagcuucauuuacaaugggaggcuuguagauaguguuguuucaugguccaaagaaauccucaggacccaggagucagaaugcguuuguaucaauggaacuuguacaguaguaaugacugaugggagugcuucaggaaaagcugauacuaaaauacuauucauugaggaggggaaaaucguucauacuagcacauugucaggaagugcucagcaugucgaggagugcuccugcuauccucgauauccuggugucagaugugucugcagagacaacuggaaaggauccaauaggcccaucguagauauaaacauaaaggaucauagcauugucuccaguuauguguguucaggacuuguuggagacacacccagaaaaaacgacagcuccagcaguagccauuguuuggauccuaacaaugaggaagguggucauggggugaaaggcugggccuuugaugauggaaaugacguguggaugggaagaacgaucagcgagaagucacgcuuaggguaugaaaccuucaaagucauugaaggcugguccaacccuaaguccaaauugcagauaaauaggcaagucauaguugacagagguaauagguccgguuauucugguauuuucucuguugaaggcaaaagcugcaucaaucggugcuuuuauguggaguugauaaggggaagaaaagaggaaacugaagucuuguggaccucaaacaguauuguuguguuuuguggcaccucagguacauauggaacaggcucauggccugauggggcggacaucaaucucaugccuauauaa

SEQ ID NO: 49610 - RNA, 1410 nt, Artificial Sequence
  derived and/or modified CDS sequence (wt) from neuraminidase__InfluenzaA__ACZ05406
augaauccaaaucaaaagauaauaacgauuggcucuguuucucucaccauuuccacaauaugcuucuucaugcaaauugccaucuugauaacuacuguaacauugcauuucaagcaauaugaauucaacucccccccaaacaaccaagugaugcugugugaaccaacaauaauagaaagaaacauaacagagauaguguaucugaccaacaccaccauagagaaggaaauaugccccaaacuagcagaauacagaaauuggucaaagccgcaaugugacauuacaggguuugcaccuuuuucuaaggacaauucgauuaggcuuuccgcugguggggacaucugggugacaagagaaccuuaugugucaugcgauccugacaaguguuaucaauuugcccuuggacagggaacaacacuaaacaacguacauucaaauaacacaguacgugauaggaccccuuaucggacccuauugaugaaugagcuagguguuccuuuucaucuggggaccaagcaagugugcauagcaugguccagcucaaguugucacgauggaaaagcauggcugcauguuuguauaacgggggaugauaaaaaugcaacugcuagcuucauuuacaaugggaggcuuguagauaguguuguuucaugguccaaagaaauccucaggacccaggagucagaaugcguuuguaucaauggaacuuguacaguaguaaugacugaugggagugcuucaggaaaagcugauacuaaaauacuauucauugaggaggggaaaaucguucauacuagcacauugucaggaagugcucagcaugucgaggagugcuccugcuauccucgauauccuggugucagaugugucugcagagacaacuggaaaggauccaauaggcccaucguagauauaaacauaaaggaucauagcauugucuccaguuauguguguucaggacuuguuggagacacacccagaaaaaacgacagcuccagcaguagccauuguuuggauccuaacaaugaggaagguggucauggggugaaaggcugggccuuugaugauggaaaugacguguggaugggaagaacgaucagcgagaagucacgcuuaggguaugaaaccuucaaagucauugaaggcugguccaacccuaaguccaaauugcagauaaauaggcaagucauaguugacagagguaauagguccgguuauucugguauuuucucuguugaaggcaaaagcugcaucaaucggugcuuuuauguggaguuaauaaggggaagaaaagaggaaacugaagucuuguggaccucaaacaguauuguuguguuuuguggcaccucagguacauauggaacaggcucauggccugauggggcggauaucaaucucaugccuauauaa

SEQ ID NO: 49611 - RNA, 1413 nt, Artificial Sequence
  derived and/or modified CDS sequence (wt) from neuraminidase__InfluenzaA__ACZ05450
augaacccaaaucaaaagauaauaaccauuggaucaaucaguauagcaaucggaauaauuagucuaauguugcaaauaggaaguauuauuucaauaugggcuagucacucaauccaaacuggaagucaaaacaacacuggaauaugcaaccaaagaaucaucacauaugaaaacagcaccugggugaaucacacauauguuaauauuaacaacacuaauguuguugcuggagaggacaaaacgucagugacauuggccggcaauucaucucuuuguucuaucaguggaugggcuauauacacaaaagacaacagcguaagaauuggcuccaaaggagauguuuuugucauaagagaaccuuucauaucauguucucacuuggaaugcagaaccuuuuuucugacccaaggcgcucuauuaaaugacaaacauucaaaugggaccguaaaggacagaaguccuuauagggccuuaaugagcuguccucuaggugaagcuccguccccauacaauucaaaguucgaaucaguugcauggucagcaagcgcaugccaugauggcaugggcugguuaacaaucggaauuucugguccagacaauggagcuguggcuguacuaaaauacaacggaauaauaacuggaaccauaaaaaguuggaaaaagcaaauauuaagaacacaagagucugaaugugucuguaugaacgggucauguuucaccauaaugaccgauggcccgaguaauaaagccgccucguacaaaauuuucaagaucgaaaaggggaagguuacuaaaucaauagaguugaaugcacccaauuuuuauuaugaggaaugcuccuguuacccagacacuggcauagugauguguguaugcagggacaacuggcaugguucaaaucgaccuugggugucuuuuaaucaaaauuuggauuaucaaauaggauacaucugcaguggaguguuuggugacaauccgcgucccgaagauggagagggcagcugcaauccagugacuguagauggagcaaacggaguaaaaggguuuucauacaaauaugguaaugguguuuggauaggaaggaccaaaaguaacagacuuagaaagggguuugagaugauuugggauccuaauggauggacaaauaccgacagugauuucucagugaaacaggauguuguagcaauaacugauuggucaggguacagcggaaguuucguccaacauccugaauugacaggauuggacuguauaagaccuugcuucuggguugaguuagucagagggcugccuagagaaaauacaacaaucuggacuagugggagcagcauuucuuuuuguggcguuaauagugauacugcaaacuggucuuggccagacggugcugaguugccguucaccauugacaaguag

SEQ ID NO: 49612 - RNA, 1410 nt, Artificial Sequence; identical to SEQ ID NO: 49595
  derived and/or modified CDS sequence (wt) from neuraminidase__InfluenzaA__ACZ05461

SEQ ID NO: 49613 - RNA, 1410 nt, Artificial Sequence; identical to SEQ ID NO: 49595
  derived and/or modified CDS sequence (wt) from neuraminidase__InfluenzaA__ACZ05472

SEQ ID NO: 49614 - RNA, 1410 nt, Artificial Sequence
  derived and/or modified CDS sequence (wt) from neuraminidase__InfluenzaA__ACZ05483
augaauccaaaucaaaagauaauaacgauuggcucuguuucucucaccauuuccacaauaugcuucuucaugcaaauugccaucuugauaacuacuguaacauugcauuucaagcaauaugaauucaacucccccccaaacaaccaagugaugcugugugaaccaacaauaauagaaagaaacauaacagagauaguguaucugaccaacaccaccguagagaaggaaauaugccccaaacuagcagaauacagaaauuggucaaagccgcaaugugacauuacaggguuugcaccuuuuucuaaggacaauucgauuaggcuuuccgcugguggggacaucugggugacaagagaaccuuaugugucaugcgauccugacaaguguuaucaauuugcccuuggacagggaacaacacuaaacaacguacauucaaauaacacaguacgugauaggaccccuuaucggacccuauugaugaaugaguuagguguuccuuuucaucuggggaccaagcaagugugcauagcaugguccagcucaaguugucacgauggaaaagcauggcugcauguuuguauaacgggggaugauaaaaaugcaacugcuagcuucauuuacaaugggaggcuuguagauaguguuguuucaugguccaaagaaauccucaggacccaggagucagaaugcguuuguaucaauggaacuuguacaguaguaaugacugaugggagugcuucaggaaaagcugauacuaaaauacuauucauugaggaggggaaaaucguucauacuagcacauugucaggaagugcucagcaugucgaggagugcuccugcuauccucgauauccuggugucagaugugucugcagagacaacuggaaaggauccaauaggcccaucguagauauaaacauaaaggaucauagcauugucuccaguuauguguguucaggacuuguuggagacacacccagaaaaaacgacagcuccagcaguagccauuguuuggauccuaacaaugaggaagguggucauggggugaaaggcugggccuuugaugauggaaaugacguguggaugggaagaacgaucagcgagaagucacgcuuaggguaugaaaccuucaaagucauugaaggcugguccaacccuaaguccaaauugcagauaaauaggcaagucauaguugacagagguaauagguccgguuauucugguauuuucucuguugaaggcaaaagcugcaucaaucggugcuuuuauguggaguugauaaggggaagaaaagaggaaacugaagucuuguggaccucaaacaguauuguuguguuuuguggcaccucagguacauauggaacaggcucauggccugauggggcggauaucaaucucaugccuauauaa

SEQ ID NO: 49615 - RNA, 1410 nt, Artificial Sequence
  derived and/or modified CDS sequence (wt) from neuraminidase__InfluenzaA__ACZ05494
augaauccaaaucaaaagauaauaacgauuggcucuguuucucucaccauuuccacaauaugcuucuucaugcaaauugccaucuugauaacuacuguaacauugcauuucaagcaauaugaauucaacucccccccaaacaaccaagugaugcugugugaaccaacaauaauagaaagaaauauaacagagauaguguaucugaccaacaccaccauagagaaggaaauaugccccaaacuagcagaauacagaaauuggucaaagccgcaaugugacauuacaggguuugcaccuuuuucuaaggacaauucgauuaggcuuuccgcugguggggacaucugggugacaagagaaccuuaugugucaugcgauccugacaaguguuaucaauuugcccuuggacagggaacaacacuaaacaacguacauucaaauaacacaguacgugauaggaccccuuaucgaacccuauugaugaaugaguuagguguuccuuuucaucuggggaccaagcaagugugcauagcaugguccagcucaaguugucacgauggaaaagcauggcugcauguuuguauaacgggggaugauaaaaaugcaacugcuagcuucauuuacaaugggaggcuuguagauaguguuguuucaugguccaaagaaauccucaggacccaggagucagaaugcguuuguaucaauggaacuuguacaguaguaaugacugaugggagugcuucaggaaaagcugauacuaaaauacuauucauugaggaggggaaaaucguucauacuagcacauugucaggaagugcucagcaugucgaggagugcuccugcuauccucgauauccuggugucagaugugucugcagagacaacuggaaaggauccaauaggcccaucguagauauaaacauaaaggaucauagcauugucuccaguuauguguguucaggacuuguuggagacacacccagaaaaaacgacagcuccagcaguagccauuguuuggauccuaacaaugaggaagguggucauggggugaaaggcugggccuuugaugauggaaaugacguguggaugggaagaacgaucagcgagaagucacgcuuaggguaugaaaccuucaaagucauugaaggcugguccaacccuaaguccaaauugcagauaaauaggcaagucauaguugacagagguaauagguccgguuauucugguauuuucucuguugaaggcaaaagcugcaucaaucggugcuuuuauguggaguugauaaggggaagaaaagaggaaacugaagucuuguggaccucaaacaguauuguuguguuuuguggcaccucagguacauauggaacaggcucauggccugauggggcggacaucaaucucaugccuauauaa

SEQ ID NO: 49616 - RNA, 1410 nt, Artificial Sequence
  derived and/or modified CDS sequence (wt) from neuraminidase__InfluenzaA__ACZ05516
augaauccaaaucaaaagauaauaacgauuggcucuguuucucucaccauuuccacaauaugcuucuucaugcaaaccgccauccugauaacuacugugacauugcauuucaagcaaugugaauucaacucccccccaaacaaccaagugaugcugugugaaccaacaauaauagaaagaaacauaacagagauaguguaucugaccaacaccaccauagagaaggaaauaugccccaaacuagcagaauacagaaauuggucaaagccgcaaugugacauuacaggauuugcaccuuuuucuaaggacaauucgauuaggcuuuccgcugguggggacaucugggugacaagagaaccuuaugugucaugcgauccugacaaguguuaucaauuugcccuuggacagggaacaacgcuaaacaacgugcauucaaauaacacaguacgugauaggaccccuuaucggacucuauugaugaaugaguuagguguuccuuuucaucuggggaccaagcaagugugcauagcaugguccagcucaaguugucacgauggaaaagcauggcugcauguuuguauaacgggggaugauaaaaaugcaacugcuagcuucauuuacaaugggaggcuuguagauaguguuguuucaugguccaaagaaauccucaggacccaggagucagaaugcguuuguaucaauggaacuuguacaguaguaaugacugaugggagugcuucaggaaaagcugauacuaaaauacuauucauugaggaggggaaaaucguucauacuagcacauugucaggaagugcucagcaugucgaggagugcuccugcuauccucgauauccuggugucagaugugucugcagagacaacuggaaaggcuccaauaggcccaucguagauauaaacauaaaggaucauagcauuguuuccaguuauguguguucaggacuuguuggagacacacccagaaaaaacgacagcuccagcaguagccauuguuuggauccuaacaaugaagaagguggucauggagugaaaggcugggccuuugaugauggaaaugacguguggaugggaagaacgaucagcgagaaaucacgcuuaggguaugaaaccuucaaagucauugaaggcugguccaacccuaaguccaaauugcagauaaauaggcaagucauaguugacagagguaauagguccgguuauucugguauuuucucuguugaaggcaaaagcugcaucaaucggugcuuuuauguggaguugauaaggggaaggaaagaggaaacugaagucuuguggaccucaaacaguauuguuguguuuuguggcaccucagguacauauggaacaggcucauggccugauggggcggacaucaaucucaugccuauauaa

SEQ ID NO: 49617 - RNA, 1410 nt, Artificial Sequence
  derived and/or modified CDS sequence (wt) from neuraminidase__InfluenzaA__ACZ05527
augaauccaaaucaaaagauaauaacgauuggcucuguuucucucaccauuuccacaauaugcuucuucaugcaaauugccaucuugauaacuacuguaacauugcauuucaagcaauaugaauucaacucccccccaaacaaccaagugaugcugugugaaccaacaauaauagaaagaaacauaacagagauaguguaucugaccaacaccaccauagagaaggaaauaugccccaaacuagcagaauacagaaauuggucaaagccgcaaugugacauuacaggguuugcaccuuuuucuaaggacaauucgauuaggcuuuccgcugguggggacaucugggugacaagagaaccuuaugugucaugcgauccugacaaguguuaucaauuugcccuuggacagggaacaacacuaaacaacguacauucaaauaacacaguacgugauaggaccccuuaucggacccuauugaugaaugaguuagguguuccuuuucaucuggggaccaagcaagugugcauagcaugguccagcucaaguugucacgauggaaaagcauggcugcauguuuguauaacgggggaugauaaaaaugcaacugcuagcuucauuuacaaugggaggcuuguagauaguguuguuucaugguccaaagaaauccucaggacccaggagucagaaugcguuuguaucaauggaacuuguacaguaguaaugacugaugggagugcuucaggaaaagcugauacuaaaauacuauucauugaggaggggaaaaucguucauacuagcacauugucaggaagugcucagcaugucgaggagugcuccugcuauccucgauauccuggugucagaugugucugcagagacaacuggaaaggauccaauaggcccaucguagauauaaacauaaaggaucauagcauugucuccaguuauguguguucaggacuuguuggagacacacccagaaaaaacgacagcuccagcaguagccauuguucggauccuaacaaugaggaagguggucauggggugaaaggcugggccuuugaugauggaaaugacguguggaugggaagaacgaucagcgagaagucacgcuuaggguaugaaaccuucaaagucauugaaggcugguccaacccuaaguccaaauugcagauaaauaggcaagucauaguugacagagguaauagguccgguuauucugguauuuucucuguugaaggcaaaagcugcaucaaucggugcuuuuauguggaguugauaaggggaagaaaagaggaaacugaagucuuguggaccucaaacaguauuguuguguuuuguggcaccucagguacauauggaacaggcucauggccugauggggcggauaucaaucucaugccuauauaa

SEQ ID NO: 49618 - RNA, 1410 nt, Artificial Sequence; identical to SEQ ID NO: 49607
  derived and/or modified CDS sequence (wt) from neuraminidase__InfluenzaA__ACZ05538

SEQ ID NO: 49619 - RNA, 1413 nt, Artificial Sequence
  derived and/or modified CDS sequence (wt) from neuraminidase__InfluenzaA__ACZ05593
augaacccaaaucaaaagauaauaaccauuggaucaaucaguauagcaaucggaauaauuagucuaauguugcaaauaggaaauauuauuucaauaugggcuagucacucaauccaaacuggaagucaaaacaacacuggaauaugcaaccaaagaaucaucacauaugaaaacagcaccugggugaaucacacauauguuaauauuaacaacacuaauguuguugcuggagaggacaaaacuucagugacauuggccggcaauucaucucuuuguucuaucaguggaugggcuauauacacaaaagacaacagcauaagaauuggcuccaaaggagauguuuuugucauaagagaaccuuucauaucauguucucauuuggaaugcagaaccuuuuuucugacccaaggcgcucuauuaaaugacaaacauucaaaugggaccguaaaggacagaaguccuuauagggccuuaaugagcuguccucuaggugaagcuccguccccauacaauucaaaguucgaaucaguugcauggucagcaagcgcaugccaugauggcaugggcugguuaacaaucggaauuucugguccagacaauggagcuguggcuguacuaaaauacaacggaauaauaacuggaaccauaaaaaguuggaaaaagcaaauauuaagaacacaagagucugaaugugucuguaugaacgggucauguuucaccauaaugaccgauggcccgaguaauaaggccgccucguacaaaauuuucaagaucgaaaaggggaagguuacuaaaucaauagaguugaaugcacccaauuuuuauuaugaggaaugcuccuguuacccagacacuggaauagugauguguguaugcagggacaacuggcaugguucaaaucgaccuugggugucuuuuaaucaaaacuuggauuaucaaauaggauacaucugcaguggaguguuuggugacaauccgcgucccgaagauggagagggcagcugcaauccagugacuguugauggagcaaacggaguaaaaggguuuucauacaaauaugguaaugguguuuggauaggaaggaccaaaaguaacagacuuagaaagggguuugagaugauuugggauccuaauggauggacaaauaccgacagugauuucucagugaaacaggauguuguagcaauaacugauuggucaggguacagcggaaguuucguccaacauccugaguuaacaggauuggacuguauaagaccuugcuucuggguugaguuagucagagggcugccuagagaaaauacaacaaucuggacuagugggagcagcauuucuuuuuguggcguuaauagugauacugcaaacuggucuuggccagacggugcugaguugccguucaccaucgacaaguag

SEQ ID NO: 49620 - RNA, 1413 nt, Artificial Sequence
  derived and/or modified CDS sequence (wt) from neuraminidase__InfluenzaA__ACZ05604
augaacccaaaucaaaagauaauaaccauuggaucaaucaguauagcaaucggaauaauuagucuaauguugcaaauaggaaauauuauuucaauaugggcuagucacucaauccaaacugggagucaaaacaacacuggaauaugcaaccaaagaaucaucacauaugaaaacagcaccugggugaaucacacauauguuaauauuaacaacacuaauguuguugcuggagaggacaaaacaucagugacauuggccggcaauucaucucuuuguucuauccguggaugggcuauauacacaaaagacaacagcauaagaauuggcuccaaaggagauguuuuugucauaagagaaccuuucauaucauguucucacuuggaaugcagaaccuucuuucugacccaaggcgcucuauuaaaugacaaacauucaaaugggaccguaaaggacagaaguccuuauagggccuuaaugagcuguccucuaggugaagcuccguccccauacaauucaaaguucgaaucaguugcauggucagcaagcgcaugccaugauggcaugggcugguuaacaaucggaauuucugguccagacaauggagcuguggcuguacuaaaauacaacggaauaauaacuggaaccauaaaaaguuggaaaaagcaaauauuaagaacacaagagucugaaugugucuguaugaacgggucauguuucaccauaaugaccgauggcccgaguaauaaggccgccucguacaaaauuuucaagaucgaaaaggggaagguuacuaaaucaauagaguugaaugcacccaauuuuuauuaugaggaaugcuccuguuacccagauacuggcauagugauguguguaugcagggacaacuggcaugguucaaaucgaccuugggugucuuuuaaucaaaacuuggauuaucaaauaggauacaucugcaguggaguguuuggugacaauccgcgucccgaagauggagagggcagcugcaauccagugacuguugauggagcaaacggaguaaaaggguuuucauacaaauaugguaaugguguuuggauagggaggaccaaaaguaacagacuuagaaagggguuugagaugauuugggauccuaauggauggacaaauaccgacagugauuucucagugaaacaggauguuguagcaauaacugauuggucaggguacagcggaaguuucguccaacauccugaguuaacaggauuggacuguauaagaccuugcuucuggguugaguuagucagagggcugccuagagaaaauacaacaaucuggacuagugggagcagcauuucuuuuuguggcguuaauagugauacugcaaacuggucuuggccagacggugcugaguugccguucaccauugacaaguag

SEQ ID NO: 49621 - RNA, 1410 nt, Artificial Sequence; identical to SEQ ID NO: 49595
  derived and/or modified CDS sequence (wt) from neuraminidase__InfluenzaA__ACZ05953

SEQ ID NO: 49622 - RNA, 1410 nt, Artificial Sequence; identical to SEQ ID NO: 49617
  derived and/or modified CDS sequence (wt) from neuraminidase__InfluenzaA__ACZ05964

SEQ ID NO: 49623 - RNA, 1410 nt, Artificial Sequence; identical to SEQ ID NO: 49595
  derived and/or modified CDS sequence (wt) from neuraminidase__InfluenzaA__ACZ05997

SEQ ID NO: 49624 - RNA, 1410 nt, Artificial Sequence; identical to SEQ ID NO: 49617
  derived and/or modified CDS sequence (wt) from neuraminidase__InfluenzaA__ACZ06008

SEQ ID NO: 49625 - RNA, 1410 nt, Artificial Sequence; identical to SEQ ID NO: 49617
  derived and/or modified CDS sequence (wt) from neuraminidase__InfluenzaA__ACZ06019

SEQ ID NO: 49626 - RNA, 1413 nt, Artificial Sequence
  derived and/or modified CDS sequence (wt) from neuraminidase__InfluenzaA__ACZ16015
augaacccaaaucaaaagauaauaaccauuggaucaaucaguauagcaaucggaauaauuagucuaauguugcaaauaggaaauauuauuucaauaugggcuagucacucaauccaaacugggagucaaaacaacacuggaauaugcaaccaaagaaucaucacauaugaaaacagcaccugggugaaucacacauauguuaauauuaacaacacuaauguuguugcuggagaggacaaaacaucagugacauuggccggcaauucaucucuuuguucuaucaguggaugggcuauauacacaaaagacaacagcauaagaauuggcuccaaaggagauguuuuugucauaagagaaccuuucauaucauguucucacuuggaaugcagaaccuuuuuucugacccaaggcgcucuauuaaaugacaaacauucaaaugggaccguaaaggacagaaguccuuacagggccuuaaugagcuguccucuaggugaagcuccguccccauacaauucaaaguucgaaucaguugcauggucagcaagcgcaugccaugauggcaugggcugguuaacaaucggaauuucugguccagacaauggagcuguggcuguacuaaaauacaacggaauaauaacuggaaccauaaaaaguuggaaaaagcaaauauuaagaacacaagagucugaauguguuuguaugaacgggucauguuucaccauaaugaccgauggcccgaguaauaaggccgccucguacaaaauuuucaagaucgaaaaggggaagguuucuaaaucaauagaguugaaugcacccaauuuuuauuaugaggaaugcuccuguuacccagauacuggcauagugauguguguaugcagggacaacuggcaugguucaaaucgaccuugggugucuuuuaaucaaaacuuggauuaucaaauaggauacaucugcaguggaguguuuggugacaauccgcgucccgaagauggagagggcagcugcaauccagugacuguugauggagcaaacggaguaaaaggguuuucauacaaauaugguaaugguguuuggauagggaggaccaaaaguaacagacuuagaaagggguuugagaugauuugggauccuaauggauggacaaauaccgacagugauuucucagugaaacaggauguuguagcaauaacugauuggucaggguacagcggaaguuucguccaacauccugaguuaacaggauuggacuguauaagaccuugcuucuggguugaguuagucagagggcuaccuagagaaaauacaacaaucuggacuagugggagcagcauuucuuuuuguggcguuaauagugauacugcaaacuggucuuggccagacggugcugaguugccguucaccauugacaaguag

SEQ ID NO: 49627 - RNA, 1413 nt, Artificial Sequence
  derived and/or modified CDS sequence (wt) from neuraminidase__InfluenzaA__ACZ16025
augaacccaaaucaaaagauaauaaccauuggaucaaucaguauagcaaucggaauaauuagucuaauguugcaaauaggaaauauuauuucaauaugggcuagucacucaauccaaacugggagucaaaacaacacuggaauaugcaaccaaagaaucaucacauaugaaaacagcaccugggugaaucacacauauguuaauauuaacaacacuaauguuguugcuggagaggacaaaacaucagugacauuggccggcaauucaucucuuuguucuaucaguggaugggcuauauacacaaaagacaacagcauaagaauuggcuccaaaggagauguuuuugucauaagagaaccuuucauaucauguucucacuuggaaugcagaaccuuuuuucugacccaaggcgcucuauuaaaugacaaacauucaaaugggaccauaaaggacagaaguccuuauagggccuuaaugagcuguccucuaggugaagcuccguccccauacaauucaaaguucgaaucaguugcauggucagcaagcgcaugccaugauggcaugggcugguuaacaaucggaauuucugguccagacaauggagcuguggcuguacuaaaauacaacggaauaauaacuggaaccauaaaaaguuggaaaaagcaaauauuaagaacacaagagucugaaugugucuguaugaacgggucauguuucaccauaaugaccgauggcccgaguaauaaggccgccucguacaaaauuuucaagaucgaaaaggggaagguuacuaaaucaauagaguugaaugcacccaauuuuuauuaugaggaaugcuccuguuacccagauacuggcauagugauguguguaugcagggacaacuggcaugguucaaaucgaccuugggugucuuuuaaucaaaacuuggauuaucaaauaggauacaucugcaguggaguguuuggugacaauccgcgucccgaagauggagagggcagcugcaauccagugacuguugauggagcaaacggaguaaaaggguuuucauacaaauaugguaaugguguuuggauagggaggaccaaaaguaacagacuuagaaagggguuugagaugauuugggauccuaauggauggacaaauaccgacagugauuucucagugaaacaggauguuguagcaauaacugauuggucaggguacagcggaaguuucguccaacauccugaguuaacaggauuggacuguauaagaccuugcuucuggguugaguuagucagagggcugccuagagaaaauacaacaaucuggacuagugggagcagcauuucuuuuuguggcguuaauagugauacugcaaacuggucuuggccagacggugcugaguugccguucaccauugacaaguag

SEQ ID NO: 49628 - RNA, 1413 nt, Artificial Sequence
  derived and/or modified CDS sequence (wt) from neuraminidase__InfluenzaA__ACZ16035
augaacccaaaucaaaagauaauaaccauuggaucaaucaguauagcaaucggaauaauuagucuaauguugcaaauaggaaauauuauuucaauaugggcuagucacucaauccaaacugggagucaaaacaacacuggaauaugcaaccaaaggaucaucacauaugaaaacagcaccugggugaaucacacauauguuaauauuaacaacacuaauguuguugcuggagaggacaaaacgucagugacauuggccggcaauucaucucuuuguucuaucaguggaugggcuauauacacaaaagacaacagcauaagaauuggcuccaaaggagauguuuuugucauaagagaaccuuucauaucauguucucacuuggaaugcagaaccuuuuuucugacccaaggcgcucuauuaaaugacaaacauucaaaugggaccguaaaggacagaaguccuuauagggccuuaaugagcuguccucuaggugaagcuccguccccauacaauucaaaguucgaaucaguugcauggucagcaagcgcaugucaugauggcaugggcugguuaacaaucggaauuucugguccagacaauggagcuguggcuguacuaaaauacaacggaauaauaacuggaaccauaaaaaguuggaaaaagcaaauauuaagaacacaagagucugaaugugucuguaugaacgggucauguuucaccauaaugaccgauggcccgaguaauaaggccgccucguacaaaauuuucaagaucgaaaaggggaagguuacuaaaucaauagaguugaaugcacccaauuuuuauuaugaggaaugcuccuguuacccagauacuggcauagugauguguguaugcagggacaacuggcaugguucaaaucgaccuugggugucuuuuaaucaaaacuuggauuaucaaauaggauacauuugcaguggaguguuuggugacaauccgcgucccgaagauggagagggcagcugcaauccagugacuguugauggagcaaacggaguaaaaggguuuucauacaaauaugguaaugguguuuggauagggaggaccaaaaguaacagacuuagaaagggguuugagaugauuugggauccuaauggauggacaaauaccgacagugauuucucagugaaacaggauguuguagcaauaacugauuggucaggguacagcggaaguuucguccaacauccugaguuaacaggauuggacuguauaagaccuugcuucuggguugaguuagucagagggcugccuagagaaaauacaacaaucuggacuagugggagcagcauuucuuuuuguggcguuaauagugauacugcaaacuggucuuggccagacggugcugaguugccguucaccauugacaaguag

SEQ ID NO: 49629 - RNA, 1410 nt, Artificial Sequence
  derived and/or modified CDS sequence (wt) from neuraminidase__InfluenzaA__ACZ16043
augaauccaaaccaaaagauaauaaccauugguucggucuguaugacaauuggaauggcuaacuuaauauuacaaauuggaaacauaaucucaauauggauuagccacucaauucaacuugggaaucaaaaucagauugaaacaugcaaucaaagcgucauuacuuaugaaaacaacacuuggguaaaucagacauauguuaacaucagcaacaccaacuuugcugcuggacagucagugguuuccgugaaauuagcgggcaauuccucucucugcccuguuaguggaugggcuauauacaguaaagacaacaauauaagaaucgguuccaagggggauguguuugucauaagggaaccauucauaucaugcucccccuuggaaugcagaaccuucuucuugacucaaggggccuugcuaaaugacaaacauuccaauggaaccauuaaagacaggagcccauaucgaacccuaaugagcuguccuauuggugaaguucccucuccauacaacucaagauuugagucagucgcuuggucagcaagugcuugucaugauggcaucaauuggcuaacaauuggaauuucuggcccagacaauggggcaguggcuguguuaaaguacaacggcauaauaacagacacuaucaagaguuggagaaacaauauauugagaacacaagagucugaaugugcauguguaaaugguucuugcuuuacuguaaugaccgauggaccaagugauggacaggccucauacaagaucuucagaauagaaaagggaaagauagucaaaucagucgaaaugaaugccccuaauuaucacuaugaggaaugcuccuguuauccugauucuagugaaaucacaugugugugcagggauaacuggcauggcucgaaucgaccgugggugucuuucaaccagaaucuggaauaucagauaggauacauaugcagugggauuuucggagacaauccacgcccuaaugauaagacaggcaguugugguccaguaucgucuaauggagcaaauggaguaaaaggauuuucauucaaauacggcaaugguguuuggauagggagaacuaaaagcauuaguucaagaaacgguuuugagaugauuugggauccgaacggauggacugggacagacaauaacuucucaauaaagcaagauaucguaggaauaaaugaguggucaggauauagcgggaguuuuguucagcauccagaacuaacagggcuggauuguauaagaccuugcuucuggguugaacuaaucagagggcgacccaaagagaacacaaucuggacuagcgggagcagcauauccuuuugugguguaaacagugacacuguggguuggucuuggccagacggugcugaguugccauuuaccauugacaaguaa

SEQ ID NO: 49630 - RNA, 1410 nt, Artificial Sequence
  derived and/or modified CDS sequence (wt) from neuraminidase__InfluenzaA__ACZ16053
augaauccaaaccaaaagauaauaaccauugguucggucuguaugacaauuggaauggcuaacuuaauauuacaaauuggaaacauaaucucaauauggauuagccacucaauucaacuugggaaucaaaaucagauugaaacaugcaaucaaagcgucauuacuuaugaaaacaacacuuggguaaaucagacauauguuaacaucagcaacaccaacuuugcugcuggacagucagugguuuccgugaaauuagcgggcaauuccucucucugcccuguuaguggaugggcuauauacaguaaagacaacaguguaagaaucgguuccaagggggauguguuugucauaagggaaccauucauaucaugcucccccuuggaaugcagaaccuucuucuugacucaaggggccuugcuaaaugacaaacauuccaauggaaccauuaaagacaggagcccauaucgaacccuaaugagcuguccuauuggugaaguucccucuccauacaacucaagauuugagucagucgcuuggucagcaagugcuugucaugauggcaucaauuggcuaacaauuggaauuucuggcccagacaauggggcaguggcuguguuaaaguacaacggcauaauaacagacacuaucaagaguuggagaaacaauauauugagaacacaagagucugaaugugcauguguaaaugguucuugcuuuacuguaaugaccgauggaccaaguaauggacaggccucauacaagaucuucagaauagaaaagggaaagauagucaaaucagucgaaaugaaugccccuaauuaucacuaugaggaaugcuccuguuauccugauucuagugaaaucacaugugugugcagggauaacuggcauggcucgaaucgaccgugggugucuuucaaccagaaucuggaauaucagauaggauacauaugcagugggauuuucggagacaauccacgcccuaaugauaagacaggcaguugugguccaguaucgucuaauggagcaaauggaguaaaaggauuuucauucaaauacggcaaugguguuuggauagggagaacuaaaagcauuaguucaagaaacgguuuugagaugauuugggauccgaacggauggacugggacagacaauaacuucucaacaaagcaagauaucguaggaauaaaugaguggucaggauauagcgggaguuuuguucagcauccagaacuaacagggcuggauuguauaagaccuugcuucuggguugaacuaaucagagggcgacccaaagagaacacaaucuggacuagcgggagcagcauauccuuuugugguguaaacagugacacuguggguuggucuuggccagacggugcugaguugccauuuaccauugacaaguaa

SEQ ID NO: 49631 - RNA, 1410 nt, Artificial Sequence
  derived and/or modified CDS sequence (wt) from neuraminidase__InfluenzaA__ACZ16073
augaauccaaaccaaaagauaauaaccauugguucggucuguaugacaauuggaauggcuaacuuaauauuacaaauuggaaauauaaucucaauauggauuagccacucaauucaacuugggaaucaaaaucagauugaaacaugcaaucaaagcgucauuacuuaugaaaacaacacuuggguaaaucagacauauguuaacaucagcaacaccaacuuugcugcuggacagucagugguuuccgugaaauuagcgggcaauuccucucucugcccuguuaguggaugggcuauauacaguaaagacaacaguguaagaaucgguuccaagggggauguguuugucauaagggaaccauucauaucaugcucccccuuggaaugcagaaccuucuucuugacucaaggggccuugcuaaaugacaaacauuccaauggaaccauuaaagacaggagcccauaucgaacccuaaugagcuguccuauuggugaaguucccucuccauacaacucaagauuugagucagucgcuuggucagcaagugcuugucaugauggcaucaauugguuaacaauuggaauuucuggcccagacaauggggcaguggcuguguuaaaguacaacggcauaauaacagacacuaucaagaguuggagaaacaauauauugagaacacaagagucugaaugugcauguguaaaugguucuugcuuuacuguaaugaccgauggaccaaguaauggacaggccucauacaagaucuucagaauagaaaagggaaagauagucaaaucagucgaaaugaaugccccuaauuaucacuaugaggaaugcuccuguuauccugauucuagugaaaucacaugugugugcagggauaacuggcauggcucgaaucgaccgugggugucuuucaaccagaaucuggaauaucagauaggauacauaugcagugggauuuucggagacaauccacgcccuaaugauaagacaggcaguugugguccaguaucgucuaauggagcaaauggaguaaaaggauuuucauucaaauacggcaaugguguuuggauagggagaacuaaaagcauuaguucaagaaacgguuuugagaugauuugggauccgaacggauggacugggacagacaauaacuucucaauaaagcaagauaucguaggaauaaaugaguggucaggauauagcgggaguuuuguucagcauccagaacuaacagggcuggauuguauaaggccuugcuucuggguugaacuaaucagagggcgacccaaagagaacacaaucuggacuagcgggagcagcauauccuuuugugguguaaacagugacacuguggguuggucuuggccagacggugcugaguugccauuuaccauugacaaguaa

SEQ ID NO: 49632 - RNA, 1410 nt, Artificial Sequence
  derived and/or modified CDS sequence (wt) from neuraminidase__InfluenzaA__ACZ16083
augaauccaaaccaaaagauaauaaccauugguucggucuguaugacaaucggaauggcuaacuuaauauuacaaauuggaaacauaaucucaauauggauuagccacucaauucaacuugggaaucaaaaucagauugaaacaugcaaucaaagcgucauuacuuaugaaaacaacacuuggguaaaucagacauauguuaacaucagcaacaccaacuuugcugcuagacagucagugguuuccgugaaauuagcgggcaauuccucucucugcccuguuaguggaugggcuauauacaguaaagacaacaguguaagaaucgguuccaagggggauguguuugucauaagggaaccauucauaucaugcucccccuugggaugcagaaccuucuucuugacucaaggggccuugcuaaaugacaaacauuccaauggaaccauuaaagacaggagcccauaucgaacccuaaugagcuguccuauuggugaaguucccucuccauacaacucaagauuugagucagucgcuuggucagcaagugcuugucaugauggcaucaauuggcuaacaauuggaauuucuggcccagacaauggggcaguggcuguguuaaaguacaacggcauaauaacagacacuaucaagaguuggagaaacaauauauugagaacacaagagucugaaugugcauguguaaaugguucuugcuuuacuguaaugaccgauggaccaaguaauggacaggccucauacaagaucuucagaauagaaaagggaaagauagucaaaucagucgaaaugaaugccccuaauuaucacuaugaggaaugcuccuguuauccugauucuagugaaaucacaugugugugcagggauaacuggcauggcucgaaucgaccgugggugucuuucaaccagaaucuggaauaucagauaggauacauaugcagugggauuuucggagacaauccacgcccuaaugauaagacaggcaguugugguccaguaucgucuaauggagcaaauggaguaaaaggauuuucauucaaauacggcaaugguguuuggauagggagaacuaaaagcauuaguucaagaaacgguuuugagaugauuugggauccgaacggauggacugggacagacaauaacuucucaauaaagcaagauaucguaggaauaaaugaguggucaggauauagcgggaguuuuguucagcauccagaacuaacagggcuggauuguauaagaccuugcuucuggauugaacuaaucagagggcgacccaaagagaacacaaucuggacuagcgggagcagcauauccuuuugugguguaaacagugacacuguggguuggucuuggccagacggugcugaguugccauuuaccauugacaaguaa

SEQ ID NO: 49633 - RNA, 1410 nt, Artificial Sequence; identical to SEQ ID NO: 48740
  derived and/or modified CDS sequence (wt) from neuraminidase__InfluenzaA__ACZ16093

SEQ ID NO: 49634 - RNA, 1410 nt, Artificial Sequence; identical to SEQ ID NO: 48953
  derived and/or modified CDS sequence (wt) from neuraminidase__InfluenzaA__ACZ16103

SEQ ID NO: 49635 - RNA, 1410 nt, Artificial Sequence; identical to SEQ ID NO: 48953
  derived and/or modified CDS sequence (wt) from neuraminidase__InfluenzaA__ACZ16113

SEQ ID NO: 49636 - RNA, 1410 nt, Artificial Sequence
  derived and/or modified CDS sequence (wt) from neuraminidase__InfluenzaA__ACZ16123
augaauccaaaccaaaagauaauaaccauugguucggucuguaugacaauuggaauggcuaacuuaauauuacaaauuggaaacauaaucucaauauggauuagccacucaauucaacuugggaaucaaaaucagauugaaacaugcaaucaaagcgucauuacuuaugaaaacaacacuuggguaaaucagacauauguuaacaucagcaacaccaacuuugcugcuggacagucagugguuuccgugaaauuagcgggcaauuccucucucugcccuguuaguggaugggcuauauacaguaaagacaacaguauaagaaucgguuccaagggggauguguuugucauaagggaaccauucauaucaugcucccccuuggaaugcagaaccuucuucuugacucaaggggccuugcuaaaugacaaacauuccaauggaaccauuaaagacaggagcccauaucgaacccuaaugagcuguccuauuggugaaguucccuccccauacaacucaagauuugagucagucgcuuggucagcaagugcuugucaugauggcaucaauuggcuaacaauuggaauuucuggcccagacaauggggcaguggcuguguuaaaguacaacggcauaauaacagacacuaucaagaguuggagaaacaauauauugagaacacaagagucugaaugugcauguguaaaugguucuugcuuuacuguaaugaccgauggaccaagugauggacaggccucauacaagaucuucagaauagaaaagggaaagauagucaaaucagucgaaaugaaugccccuaauuaucacuaugaggaaugcuccuguuauccugauucuagugaaaucacaugugugugcagggauaacuggcauggcucgaaucgaccgugggugucuuucaaccagaaucuggaauaucagauaggauacauauguagugggauuuucggagacaauccacgcccuaaugauaagacaggcaguugugguccaguaucgucuaauggagcaaauggaguaaaaggauuuucauucaaauacggcaaugguguuuggauagggagaacuaaaagcauuaguucaagaaacgguuuugagaugauuugggauccgaacggauggacugggacagacaauaacuucucaauaaagcaagauaucguaggaauaaaugaguggucaggauauagcgggaguuuuguucagcauccagaacuaacagggcuggauuguauaagaccuugcuucuggguugaacuaaucagagggcgacccaaagagaacacaaucuggacuagcgggagcagcauauccuuuugugguguaaacagugacacuguggguuggucuuggccagacggugcugaguugccauuuaccauugacaaguaa

SEQ ID NO: 49637 - RNA, 1410 nt, Artificial Sequence
  derived and/or modified CDS sequence (wt) from neuraminidase__InfluenzaA__ACZ16133
augaauccaaaccaaaagauaauaaccauugguucggucuguaugacaauuggaauggcuaacuuaauauuacaaauuggaaacauaaucucaauauggauuagccacucaauucaacuugggaaucaaaaucagauugaaacaugcaaucaaagcgucauuacuuaugaaaacaacacuuggguaaaucagacauauguuaacaucagcaacaccaacuuugcugcuggacagucagugguuuccgugaaauuagcgggcaauuccucucucugcccuguuaguggaugggcuauauacaguaaagacaacaguauaagaaucgguuccaagggggauguguuugucauaagggaaccauucauaucaugcucccccuuggaaugcagaaccuucuucuugacucaaggggccuugcuaaaugacaaacauuccaauggaaccauuaaagacaggagcccauaucgaacccuaaugagcuguccuauuggugaaguucccucuccauacaacucaagauuugagucagucgcuuggucagcaagugcuugucaugauggcaucaauuggcuaacaauuggaauuucuggcccagacaauggggcaguggcuguguuaaaguacaacggcauaauaacagacacuaucaagaguuggagaaacaauauauugagaacacaagagucugaaugugcauguguaaaugguucuugcuuuacuauaaugaccgauggaccaagugauggacaggccucauacaagaucuucagaauagaaaagggaaagauagucaaaucagucgaaaugaaugccccuaauuaucacuaugaggaaugcuccuguuauccugauucuagugaaaucacaugugugugcagggauaacuggcauggcucgaaucgaccgugggugucuuucaaccagaaucuggaauaucagauaggauacauauguagugggauuuucggagacaauccacgcccuaaugauaagacaggcaguugugguccaguaucgucuaauggagcaaauggaguaaaaggauuuucauucaaauacggcaaugguguuuggauagggagaacuaaaagcauuaguucaagaaacgguuuugagaugauuugggauccgaacggauggacugggacagacaauaacuucucaauaaagcaagauaucguaggaauaaaugaguggucaggauauagcgggaguuuuguucagcauccagaacuaacagggcuggauuguauaagaccuugcuucuggguugaacuaaucagagggcgacccaaagagaacacaaucuggacuagcgggagcagcauauccuuuugugguguaaacagugacacuguggguuggucuuggccagacggugcugaguugccauuuaccauugacaaguaa

SEQ ID NO: 49638 - RNA, 1410 nt, Artificial Sequence
  derived and/or modified CDS sequence (wt) from neuraminidase__InfluenzaA__ACZ16143
augaauccaaaccaaaagauaauaaccauugguucggucuguaugacaauuggaauggcuaacuuaauauuacaaauuggaaacauaaucucaauauggauuagccacucaauucaacuugggaaucaaaaucagauugaaacaugcaaucaaagcgucauuacuuaugaaaacaacacuuggguaaaucagacauauguuaacaucagcaacaccaacuuugcugcuggacagucagugguuuccgugaaauuagcgggcaauuccucucucugcccuguuaguggaugggcuauauacaguaaagacaacaguauaagaaucgguuccaagggggauguguuugucauaagggaaccauucauaucaugcucccccuuggaaugcagaaccuucuucuugacucaaggggccuugcuaaaugacaaacauuccaauggaaccauuaaagacaggagcccauaucgaacccuaaugagcuguccuauuggugaaguucccucuccauacaacucaagauuugagucagucgcuuggucagcaagugcuugucaugauggcaucaauuggcuaacaauuggaauuucuggcccagacaauggggcaguggcuguguuaaaguacaacggcauaauaacagacacuaucaagaguuggagaaacaauauauugagaacacaagagucugaaugugcauguguaaaugguucuugcuuuacuguaaugaccgauggaccaagugauggacaggccucauacaagaucuucagaauagaaaagggaaagauagucaaaucagucgaaaugaaugccccuaauuaucacuaugaggaaugcuccuguuauccugauucuagugaaaucacaugugugugcagggauaacuggcauggcucgaaucgaccgugggugucuuucaaccagaaucuggaauaucagauaggauacauauguagugggauuuucggagacaauccacgcccuaaugauaagacaggcaguugugguccauuaucgucuaauggagcaaauggaguaaaaggauuuucauucaaauacggcaaugguguuuggauagggagaacuaaaagcauuaguucaagaaacgguuuugagaugauuugggauccgaacggauggacugggacagacaauaacuucucaauaaagcaagauaucguaggaauaaaugaguggucaggauauagcgggaguuuuguucagcauccagaacuaacagggcuggauuguauaagaccuugcuucuggguugaacuaaucagagggcgacccaaagagaacacaaucuggacuagcgggagcagcauauccuuuugugguguaaacagugacacuguggguuggucuuggccagacggugcugaguugccauuuaccauugacaaguaa

SEQ ID NO: 49639 - RNA, 1410 nt, Artificial Sequence; identical to SEQ ID NO: 48953
  derived and/or modified CDS sequence (wt) from neuraminidase__InfluenzaA__ACZ16153

SEQ ID NO: 49640 - RNA, 1410 nt, Artificial Sequence; identical to SEQ ID NO: 48953
  derived and/or modified CDS sequence (wt) from neuraminidase__InfluenzaA__ACZ16163

SEQ ID NO: 49641 - RNA, 1410 nt, Artificial Sequence; identical to SEQ ID NO: 48749
  derived and/or modified CDS sequence (wt) from neuraminidase__InfluenzaA__ACZ16173

SEQ ID NO: 49642 - RNA, 1410 nt, Artificial Sequence; identical to SEQ ID NO: 48953
  derived and/or modified CDS sequence (wt) from neuraminidase__InfluenzaA__ACZ16193

SEQ ID NO: 49643 - RNA, 1410 nt, Artificial Sequence; identical to SEQ ID NO: 48953
  derived and/or modified CDS sequence (wt) from neuraminidase__InfluenzaA__ACZ16203

SEQ ID NO: 49644 - RNA, 1410 nt, Artificial Sequence; identical to SEQ ID NO: 48953
  derived and/or modified CDS sequence (wt) from neuraminidase__InfluenzaA__ACZ16213

SEQ ID NO: 49645 - RNA, 1410 nt, Artificial Sequence
  derived and/or modified CDS sequence (wt) from neuraminidase__InfluenzaA__ACZ16223
augaauccaaaccaaaagauaauaaccauugguucggucuguaugacaauuggaauggcuaacuuaauauuacaaauuggaaacauaaucucaauauggauuagccacucaauucaacuugggaaucaaaaucagauugaaacaugcaaucaaagcgucauuacuuaugaaaacaacacuuggguaaaucagacauauguuaacaucagcaacaccaacuuugcugcuggacagucagugguuuccgugaaauuagcgggcaauuccucucucugcccuguuaguggaugggcuauauacaguaaagacaacaguauaagaaucgguuccaagggggauguguuugucauaagggaaccauucauaucaugcucccccuuggaaugcagaaccuucuucuugacucaaggggccuugcuaaaugacaaacauuccaaugaaaccauuaaagacaggagcccauaucgaacccuaaugagcuguccuauuggugaaguucccucuccauacaacucaagauuugagucagucgcuuggucagcaagugcuugucaugauggcaucaauuggcuaacaauuggaauuucuggcccagacaauggggcaguggcuguguuaaaguacaacggcauaauaacagacacuaucaagaguuggagaaacaauauauugagaacacaagagucugaaugugcauguguaaaugguucuugcuuuacuguaaugaccgauggaccaagugauggacaggccucauacaagaucuucagaauagaaaagggaaagauagucaaaucagucgaaaugaaugccccuaauuaucacuaugaggaaugcuccuguuauccugauucuagugaaaucacaugugugugcagggauaacuggcauggcucgaaucgaccgugggugucuuucaaccagaaucuggaauaucagauaggauacauauguagugggauuuucggagacaauccacgcccuaaugauaagacaggcaguugugguccaguaucgucuaauggagcaaauggaguaaaaggauuuucauucaaauacggcaaugguguuuggauagggagaacuaaaagcauuaguucaagaaacgguuuugagaugauuugggauccgaacggauggacugggacagacaauaacuucucaauaaagcaagauaucauaggaauaaaugaguggucaggauauagcgggaguuuuguucagcauccagaacuaacagggcuggauuguauaagaccuugcuucuggguugaacuaaucagagggcgacccaaagagaacacaaucuggacuagcgggagcagcauauccuuuugugguguaaacagugacacuguggguuggucuuggccagacggugcugaguugccauuuaccauugacaaguaa

SEQ ID NO: 49646 - RNA, 1410 nt, Artificial Sequence; identical to SEQ ID NO: 48953
  derived and/or modified CDS sequence (wt) from neuraminidase__InfluenzaA__ACZ16233

SEQ ID NO: 49647 - RNA, 1410 nt, Artificial Sequence
  derived and/or modified CDS sequence (wt) from neuraminidase__InfluenzaA__ACZ16243
augaauccaaaccaaaagauaauaaccauugguucggucuguaugacaauuggaauggcuaacuuaauauuacaaauuggaaacauaaucucaauauggauuagccacucaauucaacuugggaaucaaaaucagauugaaacaugcaaucaaagcgucauuacuuaugaaaacaacacuuggguaaaucagacauauguuaacaucagcaacaccaacuuugcugcuggacagucaaugguuuccgugaaauuagcgggcaauuccucucucugcccuguuaguggaugggcuauauacaguaaagacaacaguguaagaaucgguuccaagggggauguguuugucauaagggaaccauucauaucaugcucccccuuggaaugcagaaccuucuucuugacucaaggggccuugcuaaaugacaaacauuccaauggaaccauuaaagacaggagcccauaucgaacccuaaugagcuguccuauuggugaaguucccucuccauacaacucaagauuugagucagucgcuuggucagcaagugcuugucaugauggcaucaauuggcuaacaauuggaauuucuggcccagacaauggggcaguggcuguguuaaaguacaacggcauaauaacagacacuaucaagaguuggagaaacaauauauugagaacacaagagucugaaugugcauguguaaaugguucuugcuuuacuguaaugaccgauggaccaaguaauggacaggccucauacaagaucuucagaauagaaaagggaaagauagucaaaucagucgaaaugaaugccccuaauuaucacuaugaggaaugcuccuguuauccugauucuagugaaaucacaugugugugcagggauaacuggcauggcucgaaucgaccgugggugucuuucaaccagaaucuggaauaucagauaggauacauaugcagugggauuuucggagacaauccacgcccuaaugauaagacaggcaguugugguccaguaucgucuaauggagcaaauggaguaaaaggauuuucauucaaauacggcaaugguguuuggauagggagaacuaaaagcauuaguucaagaaacgguuuugagaugauuugggauccgaacggauggacugggacagacaauaacuucucaauaaagcaagauaucguaggaauaaaugaguggucaggauauagcgggaguuuuguucagcauccagaacuaacagggcuggauuguauaagaccuugcuucuggguugaacuaaucagagggcgacccaaagagaacacaaucuggacuagcgggagcagcauaucuuuuugugguguaaacagugacacuguggguuggucuuggccagacggugcugaguugccauuuaccauugacaaguaa

SEQ ID NO: 49648 - RNA, 1410 nt, Artificial Sequence
  derived and/or modified CDS sequence (wt) from neuraminidase__InfluenzaA__ACZ16253
augaauccaaaccaaaagauaauaaccauugguucggucuguaugacaauuggaauggcuaacuuaauauuacaaauuggaaacauaaucucaauauggauuagccacucaauucaacuugggaaucaaaaucagauugaaacaugcaaucaaagcgucauuacuuaugaaaacaacacuuggguaaaucagacauauguuaacaucagcaacaccaacuuugcugcuggacagucagugguuuccgugaaauuagcgggcaauuccucucucugcccuguuaguggaugggcuauauacaguaaagacaacaguauaagaaucgguuccaagggggauguguuugucauaagggaaccauucauaucaugcucccccuuggaaugcagaaccuucuucuugacucaaggggccuugcuaaaugacaaacauuccaauggaaccauuaaagacaggagcccauaucgaacccuaaugagcuguccuauuggugaaguucccucuccauacaacucaagauuugagucagucgcuuggucagcaagugcuugucaugauggcaucaauuggcuaacaauuggaauuucuggcccagacaauggggcaguggcuguguuaaaguacaacggcauaauaacagacacuaucaagaguuggagaaacaauauauugagaacacaagagucugaaugugcauguguaaaugguucuugcuuuacuguaaugaccgauggaccaagugauggacaggccucauacaagaucuucagaauagaaaagggaaagauagucaaaucagucgaaaugaaugccccuaauuaucacuaugaggaaugcuccuguuauccugauucuagugaaaucacaugugugugcagggauaacuggcauggcucgaaucgaccgugggugucuuucaaccagaaucuggaauaucagauaggauacauauguagugggauuuucggagacaauccacgcccuaaugauaagacaggcaguugugguccaguaucgucuaauggagcaaauggaguaaaaggauuuucauucaaauacggcaaugguguuuggauagggagaacuaaaagcauuaguucaagaaacgguuuugagaugauuugggauccgaacggauggacugggacagacaauaacuucucaauaaagcaagauaucguaggaauaaaugaguggucaggauauagcgggaguuuuguucagcauccagaacuaacagggcuggauuguauaagaccuugcuucuggguugaacuaaucagagggcgacccaaagagaacacaaucuggacuagcgggagcagcauauccuuuuguggugugaacagugacacuguggguuggucuuggccagacggugcugaguugccauuuaacauugacaaguaa

SEQ ID NO: 49649 - RNA, 1410 nt, Artificial Sequence; identical to SEQ ID NO: 48953
  derived and/or modified CDS sequence (wt) from neuraminidase__InfluenzaA__ACZ16263

SEQ ID NO: 49650 - RNA, 1410 nt, Artificial Sequence; identical to SEQ ID NO: 48749
  derived and/or modified CDS sequence (wt) from neuraminidase__InfluenzaA__ACZ16283

SEQ ID NO: 49651 - RNA, 1410 nt, Artificial Sequence; identical to SEQ ID NO: 48953
  derived and/or modified CDS sequence (wt) from neuraminidase__InfluenzaA__ACZ16293

SEQ ID NO: 49652 - RNA, 1410 nt, Artificial Sequence; identical to SEQ ID NO: 48953
  derived and/or modified CDS sequence (wt) from neuraminidase__InfluenzaA__ACZ16303

SEQ ID NO: 49653 - RNA, 1410 nt, Artificial Sequence; identical to SEQ ID NO: 48953
  derived and/or modified CDS sequence (wt) from neuraminidase__InfluenzaA__ACZ16313

SEQ ID NO: 49654 - RNA, 1410 nt, Artificial Sequence; identical to SEQ ID NO: 48953
  derived and/or modified CDS sequence (wt) from neuraminidase__InfluenzaA__ACZ16323

SEQ ID NO: 49655 - RNA, 1410 nt, Artificial Sequence; identical to SEQ ID NO: 48953
  derived and/or modified CDS sequence (wt) from neuraminidase__InfluenzaA__ACZ16333

SEQ ID NO: 49656 - RNA, 1410 nt, Artificial Sequence; identical to SEQ ID NO: 49647
  derived and/or modified CDS sequence (wt) from neuraminidase__InfluenzaA__ACZ16343

SEQ ID NO: 49657 - RNA, 1410 nt, Artificial Sequence; identical to SEQ ID NO: 48953
  derived and/or modified CDS sequence (wt) from neuraminidase__InfluenzaA__ACZ16353

SEQ ID NO: 49658 - RNA, 1410 nt, Artificial Sequence; identical to SEQ ID NO: 48953
  derived and/or modified CDS sequence (wt) from neuraminidase__InfluenzaA__ACZ16363

SEQ ID NO: 49659 - RNA, 1410 nt, Artificial Sequence; identical to SEQ ID NO: 48749
  derived and/or modified CDS sequence (wt) from neuraminidase__InfluenzaA__ACZ16373

SEQ ID NO: 49660 - RNA, 1410 nt, Artificial Sequence; identical to SEQ ID NO: 48953
  derived and/or modified CDS sequence (wt) from neuraminidase__InfluenzaA__ACZ16383

SEQ ID NO: 49661 - RNA, 1410 nt, Artificial Sequence; identical to SEQ ID NO: 48953
  derived and/or modified CDS sequence (wt) from neuraminidase__InfluenzaA__ACZ16393

SEQ ID NO: 49662 - RNA, 1410 nt, Artificial Sequence
  derived and/or modified CDS sequence (wt) from neuraminidase__InfluenzaA__ACZ16403
augaauccaaaccaaaagauaauaaccauugguucggucuguaugacaauuggaauggcuaacuuaauauuacaaauuggaaacauaaucucaauauggauuagccacucaauucaacuugggaaucaaaaucagauugaaacaugcaaucaaagcgucauuacuuaugaaaacaacacuuggguaaaucagacauauguuaacaucagcaacaccaacuuugcugcuggacagucagugguuuccgugaaauuagcgggcaauuccucucucugcccuguuaguggaugggcuauauacaguaaagacaacaguauaagaaucgguuccaagggggauguguuugucauaagggaaccauucauaucaugcucccccuuggaaugcagaaccuucuucuugacucaaggggccuugcuaaaugacaaacauuccaauggaaccauuaaagacaggagcccauaucgaacccuaaugagcuguccuauuggugaaguucccucuccauacaacucaagauuugagucagucgcuuggucagcaagugcuugucaugauggcaucaauuggcuaacaauuggaauuucuggcccagacaauggggcaguggcuguguuaaaguacaacggcauaauaacagacacuaucaagaguuggagaaacaauauauugagaacacaagagucugaaugugcauguguaaaugguucuugcuuuacuguaaugaccgauggaccaagugauggacaggccucauacaagaucuucagaauagaaaagggaaagauagucaaaucagucgaaaugaaugccccuaauuaucacuaugaggaaugcuccuguuauccugauucuagugaaaucacaugugugugcagggauaacuggcauggcucgaaucgaccgugggugucuuucaaccagaaucuggaauaucagauaggauacauauguagugggauuuucggagacaauccacgcccuaaugauaagacaggcaguugugguccaguaucgucuaauggagcaaauggaguaaaaggauuuucauucaaauacggcaaugguguuuggauagggagaacuaaaagcauuaguucaagaaacgguuuugagaugauuugggauccgaacggauggacggggacagacaauaacuucucaauaaagcaagauaucguaggaauaaaugaguggucaggauauagcgggaguuuuguucagcauccagaacuaacagggcuggauuguauaagaccuugcuucuggguugaacuaaucagagggcgacccaaagagaacacaaucuggacuagcgggagcagcauauccuuuugugguguaaacagugacacuguggguuggucuuggccagacggugcugaguugccauuuaccauugacaaguaa

SEQ ID NO: 49663 - RNA, 1410 nt, Artificial Sequence; identical to SEQ ID NO: 48750
  derived and/or modified CDS sequence (wt) from neuraminidase__InfluenzaA__ACZ16423

SEQ ID NO: 49664 - RNA, 1410 nt, Artificial Sequence; identical to SEQ ID NO: 48953
  derived and/or modified CDS sequence (wt) from neuraminidase__InfluenzaA__ACZ16433

SEQ ID NO: 49665 - RNA, 1410 nt, Artificial Sequence; identical to SEQ ID NO: 48953
  derived and/or modified CDS sequence (wt) from neuraminidase__InfluenzaA__ACZ16443

SEQ ID NO: 49666 - RNA, 1410 nt, Artificial Sequence; identical to SEQ ID NO: 48953
  derived and/or modified CDS sequence (wt) from neuraminidase__InfluenzaA__ACZ16453

SEQ ID NO: 49667 - RNA, 1410 nt, Artificial Sequence; identical to SEQ ID NO: 49647
  derived and/or modified CDS sequence (wt) from neuraminidase__InfluenzaA__ACZ16463

SEQ ID NO: 49668 - RNA, 1410 nt, Artificial Sequence; identical to SEQ ID NO: 48953
  derived and/or modified CDS sequence (wt) from neuraminidase__InfluenzaA__ACZ16483

SEQ ID NO: 49669 - RNA, 1410 nt, Artificial Sequence
  derived and/or modified CDS sequence (wt) from neuraminidase__InfluenzaA__ACZ16493
augaauccaaaccaaaagauaauaaccauugguucggucuguaugacaauuggaauggcuaacuuaauauuacaaauuggaaacauaaucucaauauggauuagccacucaauucaacuugggaaucaaaaucagauugaaacaugcaaucaaagcgucauuacuuaugaaaacaacacuuggguaaaucagacauauguuaacaucagcaacaccaacuuugcugcuggacagucagugguuuccgugaaauuagcgggcaauuccucucucugcccuguuaguggaugggcuauauacagcaaagacaacaguauaagaaucgguuccaagggggauguguuugucauaagggaaccauucauaucaugcucccccuuggaaugcagaaccuucuucuugacucaaggggccuugcuaaaugacaaacauuccaauggaaccauuaaagacaggagcccauaucgaacccuaaugagcuguccuauuggugaaguucccucuccauacaacucaagauuugagucagucgcuuggucagcaagugcuugucaugauggcaucaauuggcuaacaauuggaauuucuggcccagacaauggggcaguggcuguguuaaaguacaacggcauaauaacagacacuaucaagaguuggagaaacaauauauugagaacacaagagucugaaugugcauguguaaaugguucuugcuuuacuguaaugaccgauggaccaagugauggacaggccucauacaagaucuucagaauagaaaagggaaagauagucaaaucagucgaaaugaaugccccuaauuaucacuaugaggaaugcuccuguuauccugauucuagugaaaucacaugugugugcagggauaacuggcauggcucgaaucgaccgugggugucuuucaaccagaaucuggaauaucagauaggauacauauguagugggauuuucggagacaauccacgcccuaaugauaagacaggcaguugugguccaguaucgucuaauggagcaaauggaguaaaaggauuuucauucaaauacggcaaugguguuuggauagggagaacuaaaagcauuaguucaagaaacgguuuugagaugauuugggauccgaacggauggacugggacagacaauaacuucucaauaaagcaagauaucguaggaauaaaugaguggucaggauauagcgggagcuuuguucagcauccagaacuaacagggcuggauuguauaagaccuugcuucuggguugaacuaaucagagggcgacccaaagagaacacaaucuggacuagcgggagcagcauauccuuuugugguguaaacagugacacuguggguuggucuuggccagacggugcugaguugccauuuaccauugacaaguaa

SEQ ID NO: 49670 - RNA, 1410 nt, Artificial Sequence
  derived and/or modified CDS sequence (wt) from neuraminidase__InfluenzaA__ACZ16503
augaauccaaaccaaaagauaauaaccauugguucggucuguaugacaauuggaauggcuaacuuaauauuacaaauuggaaacauaaucucaauauggauuagccacucaauucaacuugggaaucaaaaucagauugaaacaugcaaucaaagcgucauuacuuaugaaaacaacacuuggguaaaucagacauauguuaacaucagcaacaccaacuuugcugcuggacagucagugguuuccgugaaauuagcgggcaauuccucucucugcccuguuaguggaugggcuauauacaguaaagacaacaguauaagaaucgguuccaagggggauguguuugucauaagggaaccauucauaucaugcucccccuuggaaugcagaaccuucuucuugacucaaggggccuugcuaaaugacaaacauuccaauggaaccauuaaagacaggagcccauaucgaacccuaaugagcuguccuauuggugaaguucccucuccauacaacucaagauuugagucagucgcuuggucagcaagugcuugucaugauggcaucaauuggcuaacaauuggaauuucuggcccagacaauggggcaguggcuguguuaaaguacaacggcauaauaacagacacuaucaagaguuggagaaacaauauauugagaacacaagagucugaaugugcauguguaaaugguucuugcuuuacuguaaugaccgauggaccaagugauggacaggccucauacaagaucuucagaauagaaaagggaaagauagucaaaucagucgaaauggaugccccuaauuaucacuaugaggaaugcuccuguuauccugauucuagugaaaucacaugugugugcagggauaacuggcauggcucgaaucgaccgugggugucuuucaaccagaaucuggaauaucagauaggauacauauguagugggauuuucggagacaauccacgcccuaaugauaagacaggcaguugugguccaguaucgucuaauggagcaaauggaguaaaaggauuuucauucaaauacggcaaugguguuuggauagggagaacuaaaagcauuaguucaagaaacgguuuugagaugauuugggauccgaacggauggacugggacagacaauaacuucucaauaaagcaagauaucguaggaauaaaugaguggucaggauauagcgggaguuuuguucagcauccagaacuaacagggcuggauuguauaagaccuugcuucuggguugaacuaaucagagggcgacccaaagagaacacaaucuggacuagcgggagcagcauauccuuuugugguguaaacagugacacuguggguuggucuuggccagacggugcugaguugccauuuaccauugacaaguaa

SEQ ID NO: 49671 - RNA, 1410 nt, Artificial Sequence; identical to SEQ ID NO: 49647
  derived and/or modified CDS sequence (wt) from neuraminidase__InfluenzaA__ACZ16513

SEQ ID NO: 49672 - RNA, 1410 nt, Artificial Sequence; identical to SEQ ID NO: 48953
  derived and/or modified CDS sequence (wt) from neuraminidase__InfluenzaA__ACZ16523

SEQ ID NO: 49673 - RNA, 1410 nt, Artificial Sequence; identical to SEQ ID NO: 48953
  derived and/or modified CDS sequence (wt) from neuraminidase__InfluenzaA__ACZ16533

SEQ ID NO: 49674 - RNA, 1410 nt, Artificial Sequence; identical to SEQ ID NO: 48749
  derived and/or modified CDS sequence (wt) from neuraminidase__InfluenzaA__ACZ16543

SEQ ID NO: 49675 - RNA, 1410 nt, Artificial Sequence; identical to SEQ ID NO: 48953
  derived and/or modified CDS sequence (wt) from neuraminidase__InfluenzaA__ACZ16553

SEQ ID NO: 49676 - RNA, 1410 nt, Artificial Sequence; identical to SEQ ID NO: 48953
  derived and/or modified CDS sequence (wt) from neuraminidase__InfluenzaA__ACZ16586

SEQ ID NO: 49677 - RNA, 1410 nt, Artificial Sequence; identical to SEQ ID NO: 48953
  derived and/or modified CDS sequence (wt) from neuraminidase__InfluenzaA__ACZ16596

SEQ ID NO: 49678 - RNA, 1410 nt, Artificial Sequence; identical to SEQ ID NO: 48953
  derived and/or modified CDS sequence (wt) from neuraminidase__InfluenzaA__ACZ16606

SEQ ID NO: 49679 - RNA, 1410 nt, Artificial Sequence; identical to SEQ ID NO: 48953
  derived and/or modified CDS sequence (wt) from neuraminidase__InfluenzaA__ACZ16633

SEQ ID NO: 49680 - RNA, 1410 nt, Artificial Sequence
  derived and/or modified CDS sequence (wt) from neuraminidase__InfluenzaA__ACZ16643
augaauccaaaccaaaagauaauaaccauugguucggucuguaugacaauuggaauggcuaacuuaauauuacaaauuggaaacauaaucucaauauggauuagccacucaauucaacuugggaaucaaaaucagauugaaacaugcaaucaaagcgucauuacuuaugaaaacaacacuuggguaaaucagacauauguuaacaucagcaacaccaacuuugcugcuggacagucagugguuuccgugaaauuagcgggcaauuccucucucugcccuguuaguggaugggcuauauacaguaaagacaacaguauaagaaucgguuccaagggggauguguuugucauaagggaaccauucauaucaugcucccccuuggaaugcagaaccuucuucuugacucaaggggccuugcuaaaugacaaacauuccaauggaaccauuaaagacaggagcccauaucgaacccuaaugagcuguccuauuggugaaguucccucuccauacaacucaagauuugagucagucgcuuggucagcaagugcuugucaugauggcaucaauuggcuaacaauuggaauuucuggcccagacaauggggcaguggcuguguuaagguacaacggcauaauaacagacacuaucaagaguuggagaaacaauauauugagaacacaagagucugaaugugcauguguaaaugguucuugcuuuacuguaaugaccgauggaccaagugauggacaggccucauacaagaucuucagaauagaaaagggaaagauagucaaaucagucgaaaugaaugccccuaauuaucacuaugaggaaugcuccuguuauccugauucuagugaaaucacaugugugugcagggauaacuggcauggcucgaaucgaccgugggugucuuucaaccagaaucuggaauaucagauaggauacauauguagugggauuuucggagacaauccacgcccuaaugauaagacaggcaguugugguccaguaucgucuaauggagcaaauggaguaaaaggauuuucauucaaauacggcaaugguguuuggauagggagaacuaaaagcauuaguucaagaaacgguuuugagaugauuugggauccgaacggauggacugggacagacaauaacuucucaauaaagcaagauaucguaggaauaaaugaguggucaggauauagcgggaguuuuguucagcauccagaacuaacagggcuggauuguauaagaccuugcuucuggguugaacuaaucagagggcgacccaaagagaacacaaucuggacuagcgggagcagcauauccuuuugugguguaaacagugacacuguggguuggucuuggccagacggugcugaguugccauuuaccauugacaaguaa

SEQ ID NO: 49681 - RNA, 1410 nt, Artificial Sequence; identical to SEQ ID NO: 48953
  derived and/or modified CDS sequence (wt) from neuraminidase__InfluenzaA__ACZ16653

SEQ ID NO: 49682 - RNA, 1410 nt, Artificial Sequence
  derived and/or modified CDS sequence (wt) from neuraminidase__InfluenzaA__ACZ16663
augaauccaaaccaaaagauaauaaccauugguucggucuguaugacaauuggaauggcuaacuuaauauuacaaauuggaaacauaaucucaauauggauuagccacucaauucaacuugggaaucaaaaucagauugaaacaugcaaucaaagcgucauuacuuaugaaaacaacacuuggguaaaucagacauauguuaacaucagcaacaccaacuuugcugcuggacagucagugguuuccgugaaauuagcgggcaauuccucucucugcccuguuaguggaugggcuauauacaguaaagacaacaguauaagaaucgguuccaagggggauguguuugucauaagggaaccauucauaucaugcucccccuuggaaugcagaaccuucuucuugacucaaggggccuugcuaaaugacaaacauuccaauggaaccauuaaagacaggagcccauaucgaacccuaaugagcuguccuauuggugaaguucccucuccauacaacucaagauuugagucagucgcuuggucagcaagugcuugucaugauggcaucaauuggcuaacaauuggaauuucuggcccagacaauggggcaguggcuguguuaaaguacaacggcauaauaacagacacuaucaagaguuggagaaacaauauauugagaacacaagagucugaaugugcauguguaaaugguucuugcuuuacuguaaugaccgauggaccaagugauggacaggccucauacaagaucuucagaauagaaaagggaaagauagucaaaucagucgaaaugaaugccccuaauuaucacuaugaggaaugcuccuguuauccugauucuagugaaaucacaugugugugcagggauaacuggcauggcucgaaucgaccguggguaucuuucaaccagaaucuggaauaucagauaggauacauauguagugggauuuucggagacaauccacgcccuaaugauaagacaggcaguugugguccaguaucgucuaauggagcaaauggaguaaaaggauuuucauucaaauacggcaaugguguuuggauagggagaacuaaaagcauuaguucaagaaacgguuuugagaugauuugggauccgaacggauggacugggacagacaauaacuucucaauaaagcaagauaucguaggaauaaaugaguggucaggauauagcgggaguuuuguucagcauccagaacuaacagggcuggauuguauaagaccuugcuucuggguugaacuaaucagagggcgacccaaagagaacacaaucuggacuagcgggagcagcauauccuuuugugguguaaacagugacacuguggguuggucuuggccagacggugcugaguugccauuuaccauugacaaguaa

SEQ ID NO: 49683 - RNA, 1410 nt, Artificial Sequence; identical to SEQ ID NO: 48953
  derived and/or modified CDS sequence (wt) from neuraminidase__InfluenzaA__ACZ16673

SEQ ID NO: 49684 - RNA, 1410 nt, Artificial Sequence; identical to SEQ ID NO: 48953
  derived and/or modified CDS sequence (wt) from neuraminidase__InfluenzaA__ACZ16683

SEQ ID NO: 49685 - RNA, 1410 nt, Artificial Sequence; identical to SEQ ID NO: 48953
  derived and/or modified CDS sequence (wt) from neuraminidase__InfluenzaA__ACZ16693

SEQ ID NO: 49686 - RNA, 1410 nt, Artificial Sequence; identical to SEQ ID NO: 48953
  derived and/or modified CDS sequence (wt) from neuraminidase__InfluenzaA__ACZ16703

SEQ ID NO: 49687 - RNA, 1410 nt, Artificial Sequence; identical to SEQ ID NO: 48953
  derived and/or modified CDS sequence (wt) from neuraminidase__InfluenzaA__ACZ16713

SEQ ID NO: 49688 - RNA, 1410 nt, Artificial Sequence; identical to SEQ ID NO: 48953
  derived and/or modified CDS sequence (wt) from neuraminidase__InfluenzaA__ACZ16723

SEQ ID NO: 49689 - RNA, 1410 nt, Artificial Sequence; identical to SEQ ID NO: 48953
  derived and/or modified CDS sequence (wt) from neuraminidase__InfluenzaA__ACZ16733

SEQ ID NO: 49690 - RNA, 1410 nt, Artificial Sequence; identical to SEQ ID NO: 48953
  derived and/or modified CDS sequence (wt) from neuraminidase__InfluenzaA__ACZ16743

SEQ ID NO: 49691 - RNA, 1410 nt, Artificial Sequence; identical to SEQ ID NO: 48953
  derived and/or modified CDS sequence (wt) from neuraminidase__InfluenzaA__ACZ16753

SEQ ID NO: 49692 - RNA, 1410 nt, Artificial Sequence
  derived and/or modified CDS sequence (wt) from neuraminidase__InfluenzaA__ACZ16763
augaauccaaaccaaaagauaauaaccauugguucggucuguaugacaauuggaauggcuaacuuaauauuacaaauuggaaacauaaucucaauauggauuagccacucaauucaacuugggaaucaaaaucagauugaaacaugcaaucaaagcgucauuacuuaugaaaacaacacuuggguaaaucagacauauguuaacaucagcaacaccaacuuugcugcuggacagucagugguuuccgugaaauuagcgggcaauuccucucucugcccuguuaguggaugggcuauauacaguaaagacaacaguauaagaaucgguuccaagggggauguguuugucauaagggaaccauucauaucaugcucccccuuggaaugcagaaccuucuucuugacucaaggggccuugcuaaaugacaaacauuccaauggaaccauuaaagacaggagcccauaucgaacccuaaugagcuguccuauuggugaaguucccucuccauacaacucaagauuugagucagucgcuuggucagcaagugcuugucaugauggcaucaauuggcuaacaauuggaauuucuggcccagacaauggggcaguggcuguguuaaaguacaacggcauaauaacagacacuaucaagaguuggagaaacaauauauugagaacacaagagucugaaugugcauguguaaaugguucuugcuuuacuguaaugaccgauggaccaagugauggacaggccucauacaagaucuucagaauagaaaagggaaagauagucaaaucagucgaaaugaaugccccuaauuaucacuaugaggaaugcuccuguuauccugauucuagugaaaucacaugugugugcagggauaacuggcauggcucgaaucgaccgugggugucuuucaaccagaaucuggaauaucagauaggauacauauguagugggauuuucggagacaauccacgcccuaaugauaagacaggcaguugugguccaguaucgucuaauggagcaaauggaguaaaaggauuuucauucaaauacggcaaugguguuuggauagggagaacuaaaagcauuaguucaagaaacgguuuugagaugauuugggauccgaacggauggacugggacagacaauaacuucucaauaaagcaagauaucguaggaauaaaugaguggucaggauauagcgggagcuuuguucagcauccagaacuaacagggcuggauuguauaagaccuugcuucuggguugaacuaaucagagggcgacccaaagagaacacaaucuggacuagcgggagcagcauauccuuuugugguguaaacagugacacuguggguuggucuuggccagacggugcugaguugccauuuaccauugacaaguaa

SEQ ID NO: 49693 - RNA, 1410 nt, Artificial Sequence; identical to SEQ ID NO: 48749
  derived and/or modified CDS sequence (wt) from neuraminidase__InfluenzaA__ACZ16773

SEQ ID NO: 49694 - RNA, 1410 nt, Artificial Sequence
  derived and/or modified CDS sequence (wt) from neuraminidase__InfluenzaA__ACZ16783
augaauccaaaccaaaagauaauaaccauugguucggucuguaugacaauuggaauggcuaacuuaauauuacaaauuggaaacauaaucucaauauggauuagccacucaauucaacuugggaaucaaaaucagauugaaacaugcaaucaaagcgucauuacuuaugaaaacaacacuuggguaaaucagacauauguuaacaucagcaacaccaacuuugcugcuggacagucagugguuuccgugaaauuagcgggcaauuccucucucugcccuguuaguggaugggcuauauacaguaaagacaacaguauaagaaucgguuccaagggggauguguuugucauaagggaaccauucauaucaugcucccccuuggaaugcagaaccuucuucuugacucaaggggccuugcuaaaugacaaacauuccaauggaaccauuaaagacaggagcccauaucgaacccuaaugagcuguccuauuggugaaguucccucuccauacaacucaagauuugagucagucgcuuggucagcaagugcuugucaugauggcaucaauuggcuaacaauuggaauuucuggcccagacaauggggcaguggcuguguuaaaguacaacggcauaauaacagacacuaucaagaguuggagaaacaauauauugagaacacaagagucugaaugugcauguguaaaugguucuugcuuuacuguaaugaccgauggaccaagugauggacaggccucauacaagaucuucagaauagaaaagggaaagauagucaaaucagucgaaaugaaugccccuaauuaucacuaugaggaaugcuccuguuauccugauucuagugaaaucacaugugugugcagggauaacuggcauggcucgaaucgaccgugggugucuuucaaccagaaucuggaauaucagauaggauacauauguagugggauuuucggagacaauccacgccccaaugauaagacaggcaguugugguccaguaucgucuaauggagcaaauggaguaaaaggauuuucauucaaauacggcaaugguguuuggauagggagaacuaaaagcauuaguucaagaaacgguuuugagaugauuugggauccgaacggauggacugggacagacaauaacuucucaauaaagcaagauaucguaggaauaaaugaguggucaggauauagcgggaguuuuguucagcauccagaacuaacagggcuggauuguauaagaccuugcuucuggguugaacuaaucagagggcgacccaaagagaacacaaucuggacuagcgggagcagcauauccuuuuguggugugaacagugacacuguggguuggucuuggccagacggugcugaguugccauuuaccauugacaaguaa

SEQ ID NO: 49695 - RNA, 1410 nt, Artificial Sequence; identical to SEQ ID NO: 48953
  derived and/or modified CDS sequence (wt) from neuraminidase__InfluenzaA__ACZ16793

SEQ ID NO: 49696 - RNA, 1410 nt, Artificial Sequence; identical to SEQ ID NO: 48953
  derived and/or modified CDS sequence (wt) from neuraminidase__InfluenzaA__ACZ16803

SEQ ID NO: 49697 - RNA, 1410 nt, Artificial Sequence; identical to SEQ ID NO: 48953
  derived and/or modified CDS sequence (wt) from neuraminidase__InfluenzaA__ACZ16813

SEQ ID NO: 49698 - RNA, 1410 nt, Artificial Sequence; identical to SEQ ID NO: 48749
  derived and/or modified CDS sequence (wt) from neuraminidase__InfluenzaA__ACZ16823

SEQ ID NO: 49699 - RNA, 1410 nt, Artificial Sequence
  derived and/or modified CDS sequence (wt) from neuraminidase__InfluenzaA__ACZ16833
augaauccaaaccaaaagauaauaaccauugguucggucuguaugacaauuggaauggcuaacuuaauauuacaaauuggaaacauaaucucaauauggauuagccacucaauucaacuugggaaucaaaaucagauugaaacaugcaaucaaagcgucauuacuuaugaaaacaacacuuggguaaaucagacauauguuaacaucagcaacaccaacuuugcugcuggacagucagugguuuccgugaaauuagcgggcaauuccucucucugcccuguuaguggaugggcuauauacaguaaagacaacaguauaagaaucgguuccaagggggauguguuugucauaagggaaccauucauaucaugcucccccuuggaaugcagaaccuucuucuugacucaaggggccuugcuaaaugacaaacauuccaauggaaccauuaaagacaggagcccauaucgaacccuaaugagcuguccuauuggugaaguucccucuccauacaacucaagauuugagucagucgcuuggucagcaagugcuugucaugauggcaucaauuggcuaacaauuggaauuucuggcccagacaauggggcaguggcuguguuaaaguacaacggcauaauaacagacacuaucaagaguuggagaaacaauauauugagaacacaagagucugaaugugcauguguaaaugguucuugcuuuacuguaaugaccgauggaccaagugauggacaggccucauacaagaucuucagaauagaaaagggaaagauagucaaaucagucgaaaugaaugccccuaauuaucacuaugaggaaugcuccuguuauccugauucuagugaaaucacaugugugugcagggauaacuggcauggcucgaaucgaccgugggugucuuucaaccagaaucuggaauaucagauaggauacauauguagugggauuuucggagacaauccacgcccuaaugauaagacaggcaguugugguccaguaucgucuaauggagcaaauggaguaaaaggauuuucauucaaauacggcaaugguguuuggauagggagaacuaaaagcauuaguucaagaaacgguuuugagaugauuugggauccgaacggauggacugggacagacaauaacuucucaauaaagcaagauaucguaggaauaaaugaguggucaggauauagcgggaguuuuguucaacauccagaacuaacagggcuggauuguauaagaccuugcuucuggguugaacuaaucagagggcgacccaaagagaacacaaucuggacuagcgggagcagcauauccuuuugugguguaaacagugacacuguggguuggucuuggccagacggugcugaguugccauuuaccauugacaaguaa

SEQ ID NO: 49700 - RNA, 1410 nt, Artificial Sequence; identical to SEQ ID NO: 48953
  derived and/or modified CDS sequence (wt) from neuraminidase__InfluenzaA__ACZ16843

SEQ ID NO: 49701 - RNA, 1410 nt, Artificial Sequence; identical to SEQ ID NO: 49670
  derived and/or modified CDS sequence (wt) from neuraminidase__InfluenzaA__ACZ16853

SEQ ID NO: 49702 - RNA, 1410 nt, Artificial Sequence
  derived and/or modified CDS sequence (wt) from neuraminidase__InfluenzaA__ACZ16863
augaauccaaaccaaaagauaauaaccauugguucggucuguaugacaauuggaauggcuaacuuaauauuacaaauuggaaacauaaucucaauauggauuagccacucaauucaacuugggaaucaaaaucagauugaaacaugcaaucaaagcgucauuacuuaugaaaacaacacuuggguaaaucagacauauguuaacaucagcaacaccaacuuugcugcuggacagucagugguuuccgugaaauuagcgggcaauuccucucucugcccuguuaguggaugggcuauauacaguaaagacaacaguauaagaaucgguuccaagggggauguguuugucauaagggaaccauucauaucaugcucccccuuggaaugcagaaccuucuucuugacucaaggggccuugcuaaaugacaaacauuccaauggaaccauuaaagacaggagcccauaucgaacccuaaugagcuguccuauuggugaaguucccucuccauacaacucaagauuugagucagucgcuuggucagcaagugcuugucaugauggcaucaauuggcuaacaauuggaauuucuggcccagacaauggggcaguggcuguguuaaaguacaacggcauaauaacagacacuaucaagaguuggagaaacaauauauugagaacacaagagucugaaugugcauguguaaaugguucuugcuuuacuguaaugaccgauggaccaagugauggacaggccucauacaagaucuucagaauagaaaagggaaagauagucaaaucagucgaaaugaaugccccuaacuaucacuaugaggaaugcuccuguuauccugauucuagugaaaucacaugugugugcagggauaacuggcauggcucgaaucgaccgugggugucuuucaaccagaaucuggaauaucagauaggauacauauguagugggauuuucggagacaauccacgcccuaaugauaagacaggcaguugugguccaguaucgucuaauggagcaaauggaguaaaaggauuuucauucaaauacgguaaugguguuuggauagggagaacuaaaagcauuaguucaagaaacgguuuugagaugauuugggauccgaacggauggacugggacagacaauaacuucucaauaaagcaagauaucguaggaauaaaugaguggucaggauauagcgggaguuuuguucagcauccagaacuaacagggcuggauuguauaagaccuugcuucuggguugaacuaaucagagggcgacccaaagagaacacaaucuggacuagcgggagcagcauauccuuuugugguguaaacagugacacuguggguuggucuuggccagacggugcugaguugccauuuaccauugacaaguaa

SEQ ID NO: 49703 - RNA, 1410 nt, Artificial Sequence; identical to SEQ ID NO: 48953
  derived and/or modified CDS sequence (wt) from neuraminidase__InfluenzaA__ACZ16873

SEQ ID NO: 49704 - RNA, 1410 nt, Artificial Sequence; identical to SEQ ID NO: 48953
  derived and/or modified CDS sequence (wt) from neuraminidase__InfluenzaA__ACZ16883

SEQ ID NO: 49705 - RNA, 1410 nt, Artificial Sequence; identical to SEQ ID NO: 48953
  derived and/or modified CDS sequence (wt) from neuraminidase__InfluenzaA__ACZ16893

SEQ ID NO: 49706 - RNA, 1410 nt, Artificial Sequence; identical to SEQ ID NO: 48953
  derived and/or modified CDS sequence (wt) from neuraminidase__InfluenzaA__ACZ16903

SEQ ID NO: 49707 - RNA, 1410 nt, Artificial Sequence; identical to SEQ ID NO: 48953
  derived and/or modified CDS sequence (wt) from neuraminidase__InfluenzaA__ACZ16913

SEQ ID NO: 49708 - RNA, 1410 nt, Artificial Sequence; identical to SEQ ID NO: 48953
  derived and/or modified CDS sequence (wt) from neuraminidase__InfluenzaA__ACZ16923

SEQ ID NO: 49709 - RNA, 1410 nt, Artificial Sequence; identical to SEQ ID NO: 48750
  derived and/or modified CDS sequence (wt) from neuraminidase__InfluenzaA__ACZ16933

SEQ ID NO: 49710 - RNA, 1410 nt, Artificial Sequence; identical to SEQ ID NO: 48750
  derived and/or modified CDS sequence (wt) from neuraminidase__InfluenzaA__ACZ16943

SEQ ID NO: 49711 - RNA, 1410 nt, Artificial Sequence; identical to SEQ ID NO: 48761
  derived and/or modified CDS sequence (wt) from neuraminidase__InfluenzaA__ACZ16953

SEQ ID NO: 49712 - RNA, 1410 nt, Artificial Sequence; identical to SEQ ID NO: 48750
  derived and/or modified CDS sequence (wt) from neuraminidase__InfluenzaA__ACZ16963

SEQ ID NO: 49713 - RNA, 1410 nt, Artificial Sequence; identical to SEQ ID NO: 48750
  derived and/or modified CDS sequence (wt) from neuraminidase__InfluenzaA__ACZ16973

SEQ ID NO: 49714 - RNA, 1410 nt, Artificial Sequence
  derived and/or modified CDS sequence (wt) from neuraminidase__InfluenzaA__ACZ16983
augaauccaaaccaaaagauaauaaccauugguucggucuguaugacaauuggaauggcuaacuuaauauuacaaauuggaaacauaaucucaauauggauuagccacucaauucaacuugggaaucaaaaucaaauugaaacaugcaaucaaagcgucauuacuuaugaaaacaacacuuggguaaaucagacauauguuaacaucagcaacaccaacuuugcugcuggacagucagugguuuccgugaaauuagcgggcaauuccucucucugcccuguuaguggaugggcuauauacaguaaagacaacaguauaagaaucgguuccaagggggauguguuugucauaagggaaccauucauaucaugcucccccuuggaaugcagaaccuucuucuugacucaaggggccuugcuaaaugacaaacauuccaauggaaccauuaaagacaggagcccauaucgaacccuaaugagcuguccuauuggugaaguucccucuccauacaacucaagauuugagucagucgcuuggucagcaagugcuugucaugauggcaucaauuggcuaacaauuggaauuucuggcccagacaauggggcaguggcuguguuaaaguacaacggcauaauaacagacacuaucaagaguuggagaaacaauauauugagaacacaagagucugaaugugcauguguaaaugguucuugcuuuacuguaaugaccgauggaccaagugauggacaggccucauacaagaucuucagaauagaaaagggaaagauagucaaaucagucgaaaugaaugccccuaauuaucacuaugaggaaugcuccuguuauccugauucuagugaaaucacaugugugugcagggauaacuggcauggcucgaaucgaccgugggugucuuucaaccagaaucuggaguaucagauaggauacauaugcagugggauuuucggagacaauccacgcccuaaugauaagacaggcaguugugguccaguaucgucuaauggagcaaauggaguaaaaggauuuucauucaaauacggcaaugguguuuggauagggagaacuaaaagcauuaguucaagaaacgguuuugagaugauuugggauccgaacggauggacugggacagacaauaacuucucaauaaagcaagauaucguaggaauaaaugaguggucaggauauagcgggaguuuuguucagcauccagaacuaacagggcuggauuguauaagaccuugcuucuggguugaacuaaucagagggcgacccaaagagaacacaaucuggacuagcgggagcagcauauccuuuugugguguaaacagugacacuguggguuggucuuggccagacggugcugaguugccauuuaccauugacaaguaa

SEQ ID NO: 49715 - RNA, 1410 nt, Artificial Sequence; identical to SEQ ID NO: 48750
  derived and/or modified CDS sequence (wt) from neuraminidase__InfluenzaA__ACZ16993

SEQ ID NO: 49716 - RNA, 1410 nt, Artificial Sequence; identical to SEQ ID NO: 48750
  derived and/or modified CDS sequence (wt) from neuraminidase__InfluenzaA__ACZ17003

SEQ ID NO: 49717 - RNA, 1410 nt, Artificial Sequence
  derived and/or modified CDS sequence (wt) from neuraminidase__InfluenzaA__ACZ17023
augaauccaaaccaaaagauaauaaccauugguucggucuguaugacaauuggaauggcuaacuuaauauuacaaauuggaaacauaaucucaauauggauuagccacucaauucaacuugggaaucaaaaucagauugaaacaugcaaucaaagcgucauuacuuaugaaaacaacacuuggguaaaucagacauauguuaacaucagcaacaccaacuuugcugcuggacagucagugguuuccgugaaauuagcgggcaauuccucucucugcccuguuaguggaugggcuauauacaguaaagacaacaguauaagaaucgguuccaagggggauguguuugucauaagggaaccauucauaucaugcucccccuuggaaugcagaaccuucuucuugacucaaggggccuugcuaaaugacaaacauuccaauggaaccauuaaagacaggagcccauaucgaacccuaaugagcuguccuauuggugaaguucccucuccauacaacucaagauuugagucagucgcuuggucagcaagugcuugucaugauggcaucaauuggcuaacaauuggaauuucuggcccagacaauggggcaguggcuguguuaaaguacaacggcauaauaacagacacuaucaagaguuggagaaacaauauauugagaacacaagagucugaaugugcauguguaaaugguucuugcuuuacuguaaugaccgauggaccaagugauggacaggccucauacaagaucuucagaauagaaaagggaaagauagucaaaucagucgaaaugaaugccccuaauuaucacuaugaggaaugcuccuguuauccugauucuagugaaaucacaugugugugcagggauaacuggcauggcucgaaucgaccgugggugucuuucaaccagaaucuggaauaucagauaggauacauaugcagugggauuuucggagacaauccacgcccuaaugauaagacaggcaguugugguccaguaucgucuaauggagcaaauggaguaaaaggauuuucauucaaauacggcaaugguguuuggauagggagaacuaaaaguauuaguucaagaaacgguuuugagaugauuugggauccgaacggauggacugggacagacaauaacuucucaauaaagcaagauaucguaggaauaaaugaguggucaggauauagcgggaguuuuguucagcauccagaacuaacagggcuggauuguaucagaccuugcuucuggguugaacuaaucagagggcgacccaaagagaacacaaucuggacuagcgggagcagcauauccuuuugugguguaaacagugacacuguggguuggucuuggccagacggugcugaguugccauuuaccauugacaaguaa

SEQ ID NO: 49718 - RNA, 1410 nt, Artificial Sequence; identical to SEQ ID NO: 48750
  derived and/or modified CDS sequence (wt) from neuraminidase__InfluenzaA__ACZ17043

SEQ ID NO: 49719 - RNA, 1410 nt, Artificial Sequence
  derived and/or modified CDS sequence (wt) from neuraminidase__InfluenzaA__ACZ17053
augaauccaaaccaaaagauaauaaccauugguucggucuguaugacaauuggaauggcuaacuuaauauuacaaauuggaaacauaaucucaauauggauuagccacucaauucaacuugggaaucaaaaucagauugaaacaugcaaucaaagcgucauuacuuaugaaaacaacacuuggguaaaucagacauauguuaacaucagcaacaccaacuuugcugcuggacagucagugguuuccgugaaauuagcgggcaauuccucucucugcccuguuaguggaugggcuauauacaguaaagacaacaguauaagaaucgguuccaaaggggauguguuugucauaagggaaccauucauaucaugcucccccuuggaaugcagaaccuucuucuugacucaaggggccuugcuaaaugacaaacauuccaauggaaccauuaaagacaggagcccauaucgaacccuaaugagcuguccuauuggugaaguucccucuccauacaacucaagauuugagucagucgcuuggucagcaagugcuugucaugauggcaucaauuggcucacaauuggaauuucuggcccagacaauggggcaguggcuguguuaaaguacaacggcauaauaacagacacuaucaagaguuggagaaacaauauauugagaacacaagagucugaaugugcauguguaaaugguucuugcuuuacuguaaugaccgauggaccaagugauggacaggccucauacaagaucuucagaauagaaaagggaaagauagucaaaucagucgaaaugaaugccccuaauuaucacuaugaggaaugcuccuguuauccugauucuagugaaaucacaugugugugcagggauaacuggcauggcucgaaucgaccgugggugucuuucaaccagaaucuggaauaucagauaggauacauauguagugggauuuucggagacaauccacgcccuaaugauaagacaggcaguugugguccaguaucgucuaauggagcaaauggaguaaaaggauuuucauucaaauacggcaaugguguuuggauagggagaacuaaaagcauuaguucaagaaacgguuuugagaugauuugggauccgaacggauggacugggacagacaauaacuucucaauaaagcaagauaucguaggaauaaaugaguggucaggauauagcgggaguuuuguucagcauccagaacuaacagggcuggauuguauaagaccuugcuucuggguugaacuaaucagagggcgacccaaagagaacacaaucuggacuagcgggagcagcauauccuuuugugguguaaacagugacacuguggguuggucuuggccagacggugcugaguugccauuuaccauugacaaguaa

SEQ ID NO: 49720 - RNA, 1410 nt, Artificial Sequence
  derived and/or modified CDS sequence (wt) from neuraminidase__InfluenzaA__ACZ17063
augaauccaaaccaaaagauaauaaccauugguucggucuguaugacaauuggaauggcuaacuuaauauuacaaauuggaaacauaaucucaauauggauuagccacucaauucaacuuggggaucaaaaucagauugaaacaugcaaucaaagcgucauuacuuaugaaaacaacacuuggguaaaucagacauauguuaacaucagcaacaccaacuuugcugcuggacagucagugguuuccgugaaauuagcgggcaauuccucucucugcccuguuaguggaugggcuaucuacaguaaagacaacaguauaagaaucgguuccaagggggauguguuugucauaagggaaccauucauaucaugcucccccuuggaaugcagaaccuucuucuugacucaaggggccuugcuaaaugacaaacauuccaauggaaccauuaaagacaggagcccauaucgaacccuaaugagcuguccuauuggugaaguucccucuccauacaacucaagauuugagucagucgcuuggucagcaagugcuugucaugauggcaucaauuggcuaacaauuggaauuucuggcccagacaauggggcaguggcuguguuaaaguacaacggcauaauaacagacacuaucaagaguuggagaaacaauauauugagaacacaagagucugaaugugcauguguaaaugguucuugcuuuacuguaaugaccgauggaccaagugauggacaggccucauacaagaucuucagaauagaaaagggaaagauagucaaaucagucgaaaugaaugccccuaauuaucacuaugaggaaugcuccuguuauccugauucuagugaaaucacaugugugugcagggauaacuggcauggcucgaaucgaccgugggugucuuucaaccagaaucuggaauaucagauaggauacauaugcagugggauuuucggagacaauccacgcccuaaugauaagacaggcaguugugguccaguaucgucuaauggagcaaauggaguaaaaggauuuucauucaaauacggcaaugguguuuggauagggagaacuaaaagcauuaguucaagaaacgguuuugagaugauuugggauccgaacggauggacugggacagacaauaacuucucaauaaagcaagauaucguaggaauaaaugaguggucaggauauagcgggaguuuuguucagcauccagaacuaacagggcuggauuguauaagaccuugcuucuggguugaacuaaucagagggcgacccaaagagaacacaaucuggacuagcgggagcagcauauccuuuugugguguaaacagugacacuguggguugguccuggccagacggugcugaguugccauuuaccauugacaaguaa

SEQ ID NO: 49721 - RNA, 1410 nt, Artificial Sequence; identical to SEQ ID NO: 48750
  derived and/or modified CDS sequence (wt) from neuraminidase__InfluenzaA__ACZ17073

SEQ ID NO: 49722 - RNA, 1410 nt, Artificial Sequence; identical to SEQ ID NO: 49647
  derived and/or modified CDS sequence (wt) from neuraminidase__InfluenzaA__ACZ17083

SEQ ID NO: 49723 - RNA, 1410 nt, Artificial Sequence
  derived and/or modified CDS sequence (wt) from neuraminidase__InfluenzaA__ACZ17093
augaauccaaaccaaaagauaauaaccauugguucggucuguaugacaauuggaauggcuaacuuaauauuacaaauuggaaacauaaucucaauauggauuagccacucaauucaacuugggaaucaaaaucagauugaaacaugcaaucaaagcgucauuacuuaugaaaacaacacuuggguaaaucagacauauguuaacaucagcaacaccaacuuugcugcuggacagucagugguuuccgugaaauuagcgggcaauuccucucucugcccuguuaguggaugggcuauauacaguaaagacaacaguauaagaaucgguuccaagggggauguguuugucauaagggaaccauucauaucaugcucccccuuugaaugcagaaccuucuucuugacucaaggggcccugcuaaaugacaaacauuccaauggaaccauuaaagacaggagcccauaucgaacccuaaugagcuguccuauuggugaaguucccucuccauacaacucaagauuugagucagucgcuuggucagcaagugcuugucaugauggcaucaauuggcuaacaauuggaauuucuggcccagacaauggggcaguggcuguguuaaaguacaacggcauaauaacagacacuaucaagaguuggagaaacaauauauugagaacacaagagucugaaugugcauguguaaaugguucuugcuuuacuguaaugaccgauggaccaagugauggacaggccucauacaagaucuucagaauagaaaagggaaagauagucaaaucagucgaaaugaaugccccuaauuaucacuaugaggaaugcuccuguuauccugauucuagugaaaucacaugugugugcagggauaacuggcauggcucgaaucgaccgugggugucuuucaaccagaaucuggaauaucagauaggauacauaugcagugggauuuucggagacaauccacgcccuaaugauaagacaggcaguugugguccaguaucgucuaauggagcaaauggaguaaaaggauuuucauucaaauacggcaaugguguuuggauagggagaacuaaaagcauuaguucaagaaacgguuuugagaugauuugggauccgaacggauggacugggacagacaauaacuucucaauaaagcaagauaucguaggaauaaaugaguggucaggauauagcgggaguuuuguucagcauccagaacuaacagggcuggauuguauaagaccuugcuucuggguugaacuaaucagagggcgacccaaagagaacacaaucuggacuagcgggagcagcauauccuuuugugguguaaacagugacacuguggguuggucuuggccagacggugcugaguugccauuuaccauugacaaguaa

SEQ ID NO: 49724 - RNA, 1410 nt, Artificial Sequence
  derived and/or modified CDS sequence (wt) from neuraminidase__InfluenzaA__ACZ17113
augaauccaaaccaaaagauaauaaccauugguucggucuguaugacaauuggaauggcuaacuuaauauuacaaauuggaaacauaaucucaauauggauuagccacucaauucaacuugggaaucaaaaucagauugaaacaugcaaucaaagcgucauuacuuaugaaaacaacacuuggguaaaucagacauauguuaacaucagcaacaccaacuuugcugcuggacagucagugguuuccgugaaauuagcgggcaauuccucucucugcccuguuaauggaugggcuauauacaguaaagacaacaguauaagaaucgguuccaagggggauguguuugucauaagggaaccauucauaucaugcucccccuuggaaugcagaaccuucuucuugacucaaggggccuugcuaaacgacaaacauuccaauggaaccauuaaagacaggagcccauaucgaacccuaaugagcuguccuauuggugaaguucccucuccauacaacucaagauuugagucagucgcuuggucagcaagugcuugucaugauggcaucaauuggcuaacaauuggaauuucuggcccagacaauggggcaguggcuguguuaaaguacaacggcauaauaacagacacuaucaagaguuggagaaacaauauauugagaacacaagagucugaaugugcauguguaaaugguucuugcuuuacuguaaugaccgauggaccaagugauggacaggccucauacaagaucuucagaauagaaaagggaaagauagucaaaucagucgaaaugaaugccccuaauuaucacuaugaggaaugcuccuguuauccugauucuagugaaaucacaugugugugcagggauaacuggcauggcucgaaucgaccgugggugucuuucaaccagaaucuggaauaucagauaggauacauaugcagugggauuuucggagacaauccacgcccuaaugauaagacaggcaguugugguccaguaucgucuaauggagcaaauggaguaaaaggauuuucauucaaauacggcaaugguguuuggauagggagaacuaaaagcauuaguucaagaaacgguuuugagaugauuugggauccgaacggauggacugggacagacaauaacuucucaauaaagcaagauaucguaggaauaaaugaguggucaggauauagcgggaguuuuguucagcauccagaacuaacagggcuggauuguauaagaccuugcuucuggguugaacuaaucagagggcgacccaaagagaacacaaucuggacuagcgggagcagcauauccuuuugugguguaaacagugacacuguggguuggucuuggccagacggugcugaguugccauuuaccauugacaaguaa

SEQ ID NO: 49725 - RNA, 1410 nt, Artificial Sequence; identical to SEQ ID NO: 48750
  derived and/or modified CDS sequence (wt) from neuraminidase__InfluenzaA__ACZ17123

SEQ ID NO: 49726 - RNA, 1410 nt, Artificial Sequence; identical to SEQ ID NO: 48750
  derived and/or modified CDS sequence (wt) from neuraminidase__InfluenzaA__ACZ17133

SEQ ID NO: 49727 - RNA, 1410 nt, Artificial Sequence
  derived and/or modified CDS sequence (wt) from neuraminidase__InfluenzaA__ACZ17163
augaauccaaaccaaaagauaauaaccauugguucggucuguaugacaauuggaauggcuaacuuaauauuacaaauuggaaacauaaucucaauauggauuagccacucaauucaacuugggaaucaaaaucagauugaaacaugcaaucaaagcgucauuacuuaugaaaacaacacuuggguaaaucagacauauguuaacaucagcaacaccaacuuugcugcuggacagucagugguuuccgugaaauuagcgggcaauuccucucucugcccuguuaguggaugggcuauauacaguaaagacaacaguauaagaaucgguuccaagggggauguguuugucauaagggaaccauucauaucaugcucccccuuggaaugcagaaccuucuucuugacucaaggggccuugcuaaaugacaaacauuccaauggaaccauuaaagacaggagcccauaucgaacccuaaugagcuguccuauuggugaaguucccucuccauacaacucaagauuugagucagucgcuuggucagcaagugcuugucaugauggcaucaauuggcuaacaauuggaauuucuggcccagacaauggggcaguggcuguguuaaaguacaacggcauaauaacagacacuaucaagaguuggagaaacaauauauugagaacacaagagucugaaugugcauguguaaaugguucuugcuuuacuguaaugaccgauggaccaagugauggacaggccucauacaagaucuucagaauagaaaagggaaagauagucaaaucagucgaaaugaaugccccuaauuaucacuaugaggaaugcuccuguuauccugauucuagugaaaucacaugugugugcagggauaacuggcauggcucgaaucgaccgugggugucuuucaaccggaaucuggaauaucagauaggauacauaugcagugggauuuucggagacaauccacgcccuaaugauaagacaggcaguugugguccaguaucgucuaauggagcaaauggaguaaaaggauuuucauucaaauacggcaaugguguuuggauagggagaacuaaaagcauuaguucaagaaacgguuuugagaugauuugggauccgaacggauggacugggacagacaauaacuucucaauaaagcaagauaucguaggaauaaaugaguggucaggauauagcgggaguuuuguucagcauccagaacuaacagggcuggauuguauaagaccuugcuucuggguugaacuaaucagagggcgacccaaagagaacacaaucuggacuagcgggagcagcauauccuuuugugguguaaacagugacacuguggguuggucuuggccagacggugcugaguugccauuuaccauugacaaguaa

SEQ ID NO: 49728 - RNA, 1410 nt, Artificial Sequence; identical to SEQ ID NO: 49727
  derived and/or modified CDS sequence (wt) from neuraminidase__InfluenzaA__ACZ17173

SEQ ID NO: 49729 - RNA, 1410 nt, Artificial Sequence
  derived and/or modified CDS sequence (wt) from neuraminidase__InfluenzaA__ACZ17183
augaauccaaaccaaaagauaauaaccauugguucggucuguaugacaauuggaauggcuaacuuaauauuacaaauuggaaacauaaucucaauauggauuagccacucaauucaacuugggaaucaaaaucagauugaaacaugcaaucaaagcgucauuacuuaugaaaacaacacuuggguaaaucagacauauguuaacaucagcaacaccaacuuugcugcuggacagucagugguuuccgugaaauuagcgggcaauuccucucucugccccguuaguggaugggcuauauacaguaaagacaacaguauaagaaucgguuccaagggggauguguuugucauaagggaaccauucauaucaugcucccccuuggaaugcagaaccuucuucuugacucaaggggccuugcuaaaugacaaacauuccaauggaaccauuaaagacaggagcccauaucgaacccuaaugagcuguccuauuggugaaguucccucuccauacaacucaagauuugagucagucgcuuggucagcaagugcuugucaugauggcaucaauuggcuaacaauuggaauuucuggcccagacaauggggcaguggcuguguuaaaguacaacggcauaauaacagacacuaucaagaguuggagaaacaauauauugagaacacaagagucugaaugugcauguguaaaugguucuugcuuuacuguaaugaccgauggaccaagugauggacaggccucauacaagaucuucagaauagaaaagggaaagauagucaaaucagucgaaaugaaugccccuaauuaucacuaugaggaaugcuccuguuauccugauucuagugaaaucacaugugugugcagggauaacuggcauggcucgaaucgaccgugggugucuuucaaccggaaucuggaauaucagauaggauacauaugcagugggauuuucggagacaauccacgcccuaaugauaagacaggcaguugugguccaguaucgucuaauggagcaaauggaguaaaaggauuuucauucaaauacggcaaugguguuuggauagggagaacuaaaagcauuaguucaagaaacgguuuugagaugauuugggauccgaacggauggacugggacagacaauaacuucucaauaaagcaagauaucguaggaauaaaugaguggucaggauauagcgggaguuuuguucagcauccagaacuaacagggcuggauuguauaagaccuugcuucuggguugaacuaaucagagggcgacccaaagagaacacaaucuggacuagcgggagcagcauauccuuuugugguguaaacagugacacuguggguuggucuuggccagacggugcugaguugccauuuaccauugacaaguaa

SEQ ID NO: 49730 - RNA, 1410 nt, Artificial Sequence; identical to SEQ ID NO: 49729
  derived and/or modified CDS sequence (wt) from neuraminidase__InfluenzaA__ACZ17193

SEQ ID NO: 49731 - RNA, 1410 nt, Artificial Sequence; identical to SEQ ID NO: 49729
  derived and/or modified CDS sequence (wt) from neuraminidase__InfluenzaA__ACZ17203

SEQ ID NO: 49732 - RNA, 1410 nt, Artificial Sequence
  derived and/or modified CDS sequence (wt) from neuraminidase__InfluenzaA__ACZ17213
augaauccaaaccaaaagauaauaaccauugguucggucuguaugacaauuggaauggcuaacuuaauauuacaaauuggaaacauaaucucaauauggauuagccacucaauucaacuugggaaucaaaaucagauugaaacaugcaaucaaagcgucauuacuuaugaaaacaacacuuggguaaaucagacauauguuaacaucagcaacaccaacuuugcugcuggacagucagugguuuccgugaaauuagcgggcaauuccucucucugcccuguuaguggaugggcuauauacaguaaagacaacaguauaagaaucgguuccaagggggauguguuugucauaagggaaccauucauaucaugcucccccuuggaaugcagaaccuucuucuugacucaaggggccuugcuaaaugacaaacauuccaauggaaccauuaaagacaggagcccauaucgaacccuaaugagcuguccuauuggugaaguacccucuccauacaacucaagauuugagucagucgcuuggucagcaagugcuugucaugauggcaucaauuggcuaacaauuggaauuucuggcccagacaauggggcaguggcuguguuaaaguacaacggcauaauaacagacacuaucaagaguuggagaaacaauauauugagaacacaagagucugaaugugcauguguaaaugguucuugcuuuacuguaaugaccgauggaccaagugauggacaggccucauacaagaucuucagaauagaaaagggaaagauagucaaaucagucgaaaugaaugccccuaauuaucacuaugaggaaugcuccuguuauccugauucuagugaaaucacaugugugugcagggauaacuggcauggcucgaaucgaccgugggugucuuucaaccagaaucuggaauaucagauaggauacauaugcagugggauuuucggagacaauccacgcccuaaugauaagacaggcaguugugguccaguaucgucuaauggagcaaauggaguaaaaggauuuucauucaaauacggcaaugguguuuggauagggagaacuaaaagcauuaguucaagaaacgguuuugagaugauuugggauccgaacggauggacugggacagacaauaacuucucaauaaagcaagauaucguaggaauaaaugaguggucaggauauagcgggaguuuuguucagcauccagaacuaacagggcuggauuguauaagaccuugcuucuggguugaacuaaucagagggcgacccaaagagaacacaaucuggacuagcgggagcagcauauccuuuugugguguaaacagugacacuguggguuggucuuggccagacggugcugaguugccauuuaccauugacaaguaa

SEQ ID NO: 49733 - RNA, 1410 nt, Artificial Sequence
  derived and/or modified CDS sequence (wt) from neuraminidase__InfluenzaA__ACZ17223
augaauccaaaccaaaagauaauaaccauugguucggucuguaugacaauuggaauggcuaacuuaauauuacaaauuggaaacauaaucucaauauggauuagccacucaauucaacuugggaaucaaaaucagauugaaacaugcaaucaaagcgucauuacuuaugaaaacaacacuuggguaaaucagacauauguuaacaucagcaacaccaacuuugcugcuggacagucagugguuuccgugaaauuagcaggcaauuccucucucugcccuguuaguggaugggcuauauacaguaaagacaacaguauaagaaucgguuccaagggggauguguuugucauaagggaaccauucauaucaugcucccccuuggaaugcagaaccuucuucuugacucaaggggccuugcuaaaugacaaacauuccaauggaaccauuaaagacaggagcccauaucgaacccuaaugagcuguccuauuggugaaguucccucuccauacaacucaagauuugagucagucgcuuggucagcaagugcuugucaugauggcaucaauuggcuaacaauuggaauuucuggcccagacaauggggcaguggcuguguuaaaguacaacggcauaauaacagacacuaucaagaguuggagaaacaauauauugagaacacaagagucugaaugugcauguguaaaugguucuugcuuuacuguaaugaccgaugggccaagugauggacaggccucauacaagaucuucagaauagaaaagggaaagauagucaaaucagucgaaaugaaugccccuaauuaucacuaugaggaaugcuccuguuauccugauucuagugaaaucacaugugugugcagggauaacuggcauggcucgaaucgaccgugggugucuuucaaccagaaucuggaauaucagauaggauacauaugcagugggauuuucggagacaauccacgcccuaaugauaagacaggcaguugugguccaguaucgucuaauggagcaaauggaguaaaaggauuuucauucaaauacggcaaugguguuuggauagggagaacuaaaagcauuaguucaagaaacgguuuugagaugauuugggauccgaacggauggacugggacagacaauaacuucucaauaaagcaagauaucguaggaauaaaugaguggucaggauauagcgggaguuuuguucagcauccagaacuaacagggcuggauuguauaagaccuugcuucuggguugaacuaaucagagggcgacccaaagagaacacaaucuggacuagcgggagcagcauauccuuuugugguguaaacagugacacuguggguuggucuuggccagacggugcugaguugccauuuaccauugacaaguaa

SEQ ID NO: 49734 - RNA, 1410 nt, Artificial Sequence; identical to SEQ ID NO: 49733
  derived and/or modified CDS sequence (wt) from neuraminidase__InfluenzaA__ACZ17233

SEQ ID NO: 49735 - RNA, 1410 nt, Artificial Sequence; identical to SEQ ID NO: 49733
  derived and/or modified CDS sequence (wt) from neuraminidase__InfluenzaA__ACZ17243

SEQ ID NO: 49736 - RNA, 1410 nt, Artificial Sequence; identical to SEQ ID NO: 49733
  derived and/or modified CDS sequence (wt) from neuraminidase__InfluenzaA__ACZ17263

SEQ ID NO: 49737 - RNA, 1410 nt, Artificial Sequence
  derived and/or modified CDS sequence (wt) from neuraminidase__InfluenzaA__ACZ17273
augaauccaaaccaaaagauaauaaccauugguucggucuguaugacaauuggaauggcuaacuuaauauuacaaauuggaaacauaaucucaauauggauuagccacucaauucaacuugggaaucaaaaucagauugaaacaugcaaucaaagcgucauuacuuaugaaaacaacacuuggguaaaucagacauauguuaacaucagcaacaccaacuuugcugcuggacagucagugguuuccgugaaauuagcgggcaauuccucucucugcccuguuaguggaugggcuauauacaguaaagacaacaguauaagaaucgguuccaagggggauguguuugucauaagggaaccauucauaucaugcucccccuuggaaugcagaaccuucuucuugacucaaggggccuugcuaaaugacaaacauuccaauggaaccauuaaagacaggagcccauaucggacccuaaugagcuguccuauuggugaaguucccucuccauacaacucaagauuugagucagucgcuuggucagcaagugcuugucaugauggcuucaauuggcuaacaauuggaauuucuggcccagacaauggggcaguggcuguguuaaaguacaacggcauaauaacagacacuaucaagaguuggagaaacaauauauugagaacacaagagucugaaugugcauguguaaaugguucuugcuuuacuguaaugaccgauggaccaagugauggacaggccucauacaagaucuucagaauagaaaagggaaagauagucaaaucagucgaaaugaaugccccuaauuaucacuaugaggaaugcuccuguuauccugauucuagugaaaucacaugugugugcagggauaacuggcauggcucgaaucgaccgugggugucuuucaaccagaaucuggaauaucagauaggauacauaugcagugggauuuucggagacaauccacgcccuaaugauaagacaggcaguugugguccaguauugucuaauggagcaaauggaguaaaaggauuuucauucaaauacggcaaugguguuuggauagggagaacuaaaagcauuaguucaagaaacgguuuugagaugauuugggauccgaacggauggacugggacagacaauaacuucucaauaaagcaagauaucguaggaauaaaugaguggucaggauauagcgggaguuuuguucagcauccagaacuaacagggcuggauuguauaagaccuugcuucuggguugaacuaaucagagggcgacccaaagagaacacaaucuggacuagcgggagcagcauauccuuuugugguguaaacagugacacuguggguuggucuuggccagacggugcugaguugccauuuaccauugacaaguaa

SEQ ID NO: 49738 - RNA, 1410 nt, Artificial Sequence; identical to SEQ ID NO: 48750
  derived and/or modified CDS sequence (wt) from neuraminidase__InfluenzaA__ACZ17283

SEQ ID NO: 49739 - RNA, 1410 nt, Artificial Sequence; identical to SEQ ID NO: 48780
  derived and/or modified CDS sequence (wt) from neuraminidase__InfluenzaA__ACZ17293

SEQ ID NO: 49740 - RNA, 1410 nt, Artificial Sequence; identical to SEQ ID NO: 48780
  derived and/or modified CDS sequence (wt) from neuraminidase__InfluenzaA__ACZ17303

SEQ ID NO: 49741 - RNA, 1410 nt, Artificial Sequence; identical to SEQ ID NO: 48780
  derived and/or modified CDS sequence (wt) from neuraminidase__InfluenzaA__ACZ17313

SEQ ID NO: 49742 - RNA, 1410 nt, Artificial Sequence; identical to SEQ ID NO: 48750
  derived and/or modified CDS sequence (wt) from neuraminidase__InfluenzaA__ACZ17401

SEQ ID NO: 49743 - RNA, 1410 nt, Artificial Sequence; identical to SEQ ID NO: 48750
  derived and/or modified CDS sequence (wt) from neuraminidase__InfluenzaA__ACZ17411

SEQ ID NO: 49744 - RNA, 1410 nt, Artificial Sequence; identical to SEQ ID NO: 48750
  derived and/or modified CDS sequence (wt) from neuraminidase__InfluenzaA__ACZ17421

SEQ ID NO: 49745 - RNA, 1410 nt, Artificial Sequence
  derived and/or modified CDS sequence (wt) from neuraminidase__InfluenzaA__ACZ17431
augaauccaaaccaaaagauaauaaccauugguucggucuguaugacaauuggaauggcuaacuuaauauuacaaauuggaaacauaaucucaauauggauuagccacucaauucaacuugggaaucaaaaucagauugaaacaugcaaucaaagcgucauuacuuaugaaaacaacacuuggguaaaucagacauauguuaacaucagcaacaccaacuuugcugcuggacagucagugguuuccgugaaauuagcgggcaauuccucucucugcccuguuaguggaugggcuauauacaguaaagacaacaguguaagaaucgguuccaagggggauguguuugucauaagggaaccauucauaucaugcucccccuuggaaugcagaaccuucuucuugacucaaggggccuugcuaaaugacaaacauuccaauggaaccauuaaagacaggagcccauaucgaacccuaaugagcuguccuauuggugaaguccccucuccauacaacucaagauuugagucagucgcuuggucagcaagugcuugucaugauggcaucaauuggcuaacaauuggaauuucuggcccagacaauggggcaguggcuguguuaaaguacaacggcauaauaacagacacuaucaagaguuggagaaacaauauauugagaacacaagagucugaaugugcauguguaaaugguucuugcuuuacuguaaugaccgauggaccaaguaauggacaggccucauacaaaaucuucagaauagaaaagggaaaaauagucaaaucagucgaaaugaaugccccuaauuaucacuaugaggaaugcuccuguuauccugauucuagugaaaucacaugugugugcagggauaacuggcauggcucgaaucgaccgugggugucuuucaaccagaaucuggaauaucagauaggauacauaugcagugggauuuucggagacaauccacgcccuaaugauaagacaggcaguugugguccaguaucgucuaauggagcaaauggaguaaaaggauuuucauucaaauacggcaaugguguuuggauagggagaacuaaaagcauuaauucaagaaacgguuuugagaugauuugggauccgaacggauggacugggacagacaauaacuucucaauaaagcaagauaucguaggaauaaaugaguggucaggauauagcgggaguuuuguucagcauccagaacuaacagggcuggauuguauaagaccuugcuucuggguugaacuaaucagagggcgacccaaagagaacacaaucuggacuagcgggagcagcauauccuuuugugguguaaacagugacacuguggguuggucuuggccagacggugcugaguugccauuuaccauugacaaguaa

SEQ ID NO: 49746 - RNA, 1410 nt, Artificial Sequence
  derived and/or modified CDS sequence (wt) from neuraminidase__InfluenzaA__ACZ17441
augaauccaaaccaaaagauaauaaccauugguucggucuguaugacaauuggaauggcuaacuuaauauuacaaauuggaaacauaaucucaauauggauuagccacucaauucaacuugggaaucaaaaucagauugaaacaugcaaucaaagcgucauuacuuaugaaaacaacacuuggguaaaucagacauauguuaacaucagcaacaccaacuuugcugcuggacagucagugguuuccgugaaauuagcgggcaauuccucucucugcccuguuaguggaugggcuauauacaguaaagacaacaguguaagaaucgguuccaagggggauguguuugucauaagggaaccauucauaucaugcucccccuuggaaugcagaaccuucuucuugacucaaggggccuugcuaaaugacaaacauuccaauggaaccauuaaagacaggagcccauaucgaacccuaaugagcuguccuauuggugaaguccccucuccauacaacucaagauuugagucagucgcuuggucagcaagugcuugucaugauggcaucaauuggcuaacaauuggaauuucuggcccagacaauggggcaguggcuguguuaaaguacaacggcauaauaacagacacuaucaagaguuggagaaacaauauauugagaacacaagagucugaaugugcauguguaaaugguucuugcuuuacuguaaugaccgauggaccaaguaauggacaggccucauacaaaaucuucagaauagaaaagggaaagauagucaaaucagucgaaaugaaugccccuaauuaucacuaugaggaaugcuccuguuauccugauucuagugaaaucacaugugugugcagggauaacuggcauggcucgaaucgaccgugggugucuuucaaccagaaucuggaauaucagauaggauacauaugcagugggauuuucggagacaauccacgcccuaaugauaagacaggcaguugugguccaguaucgucuaauggagcaaauggaguaaaaggauuuucauucaaauacggcaaugguguuuggauagggagaacuaaaagcauuaauucaagaaacgguuuugagaugauuugggauccgaacggauggacugggacagacaauaacuucucaauaaagcaagauaucguaggaauaaaugaguggucaggauauagcgggaguuuuguucagcauccagaacuaacagggcuggauuguauaagaccuugcuucuggguugaacuaaucagagggcgacccaaagagaacacaaucuggacuagcgggagcagcauauccuuuugugguguaaacagugacacuguggguuggucuuggccagacggugcugaguugccauuuaccauugacaaguaa

SEQ ID NO: 49747 - RNA, 1410 nt, Artificial Sequence
  derived and/or modified CDS sequence (wt) from neuraminidase__InfluenzaA__ACZ17451
augaauccaaaccaaaagauaauaaccauugguucggucuguaugacaauuggaauggcuaacuuaauauuacaaauuggaaacauaaucucaauauggauuagccacucaauucaacuugggaaucaaaaucagauugaaacaugcaaucaaagcgucauuacuuaugaaaacaacacuuggguaaaucagacauauguuaacaucagcaacaccaacuuugcugcuggacagucagugguuuccgugaaauuagcgggcaauuccucucucugcccuguuaguggaugggcuauauacaguaaagacaacaguguaagaaucgguuccaagggggauguguuugucauaagggaaccauucauaucaugcucccccuuggaaugcagaaccuucuucuugacucaaggggccuugcuaaaugacaaacauuccaauggaaccauuaaagacaggagcccauaucgaacccuaaugagcuguccuauuggugaaguucccucuccauacaacucaagauuugagucagucgcuuggucagcaagugcuugucaugauggcaucaauuggcuaacaauuggaauuucuggcccagacaauggggcaguggcuguguuaaaguacaacggcauaauaacagacacuaucaagagcuggagaaacaauauauugagaacacaagagucugaaugugcauguguaaaugguucuugcuuuacuguaaugaccgauggaccaaguaauggacaggccucauacaagaucuucagaauagaaaagggaaagauagucaaaucagucgaaaugaaugccccuaauuaucacuaugaggaaugcuccuguuauccugauucuagugaaaucacaugugugugcagggauaacuggcauggcucgaaucgaccgugggugucuuucaaccagaaucuggaauaucagauaggauacauaugcagugggauuuucggagacaauccacgcccuaaugauaagacaggcaguugugguccaguaucgucuaauggagcaaauggaguaaaaggauuuucauucaaauacggcaaugguguuuggauagggagaacuaaaagcauuaguucaagaaacgguuuugagaugauuugggauccgaacggauggacugggacagacaauaacuucucaauaaagcaagauaucguaggaauaaaugaguggucaggauauagcgggaguuuuguucagcauccagaacuaacagggcuggauuguauaagaccuugcuucuggguugaacuaaucagagggcgacccaaagagaacacaaucuggacuagcgggagcagcauauccuuuugugguguaaacagugacacuguggguuggucuuggccagacggugcugaguugccauuuaccauugacaaguaa

SEQ ID NO: 49748 - RNA, 1410 nt, Artificial Sequence; identical to SEQ ID NO: 48750
  derived and/or modified CDS sequence (wt) from neuraminidase__InfluenzaA__ACZ17461

SEQ ID NO: 49749 - RNA, 1410 nt, Artificial Sequence; identical to SEQ ID NO: 48750
  derived and/or modified CDS sequence (wt) from neuraminidase__InfluenzaA__ACZ17471

SEQ ID NO: 49750 - RNA, 1410 nt, Artificial Sequence
  derived and/or modified CDS sequence (wt) from neuraminidase__InfluenzaA__ACZ17481
augaauccaaaccaaaagauaauaaccauugguucggucuguaugacaauuggaauggcuaacuuaauauuacaaauuggaaacauaaucucaauauggauuagccacucaauucaacuugggaaucaaaaucagauugaaacaugcaaucaaagcgucauuacuuaugaaaacaacacuuggguaaaucagacauauguuaacaucagcaacaccaacuuugcugcuggacagucagugguuuccgugaaauuagcgggcaauuccucucucugcccuguugguggaugggcuauauacaguaaagacaacaguguaagaaucgguuccaagggggauguguuugucauaagggaaccauucauaucaugcucccccuuggaaugcagaaccuucuucuugacucaaggggccuugcuaaaugacaaacauuccaauggaaccauuaaagacaggagcccauaucgaacccuaaugagcuguccuauuggagaaguucccucuccauacaacucaagauuugagucagucgcuuggucagcaagugcuugucaugauggcaucaauuggcuaacaauuggaauuucuggcccagacaauggggcaguggcuguguuaaaguacaacggcauaauaacagacacuaucaagaguuggagaaacaauauauugagaacacaagagucugaaugugcauguguaaaugguucuugcuuuacuguaaugaccgauggaccaaguaauggacaggccucauacaagaucuucagaauagaaaagggaaagauagucaaaucagucgaaaugaaugccccuaauuaucacuaugaggaaugcuccuguuauccugauucuagugaaaucacaugugugugcagggauaacuggcauggcucgaaucgaccgugggugucuuucaaccagaaucuggaauaucagauaggauacauaugcagugggauuuucggagacaauccacgcccuaaugauaagacaggcaguugugguccaguaucgucuaauggagcaaauggaguaaaaggauuuucauucaaauacggcaaugguguuuggauagggagaacuaaaagcauuaguucaagaaacgguuuugagaugauuugggauccgaacggauggacugggacagacaauaacuucucaauaaagcaagauaucguaggaauaaaugaguggucaggauauagcgggaguuuuguucagcauccagaacuaacagggcuggauuguauaagaccuugcuucuggguugaacuaaucagagggcgacccaaagagaacacaaucuggacuagcgggagcagcauauccuuuugugguguaaacagugacacuguggguuggucuuggccagacggugcugaguugccauuuaccauugacaaguaa

SEQ ID NO: 49751 - RNA, 1410 nt, Artificial Sequence; identical to SEQ ID NO: 48750
  derived and/or modified CDS sequence (wt) from neuraminidase__InfluenzaA__ACZ17491

SEQ ID NO: 49752 - RNA, 1410 nt, Artificial Sequence
  derived and/or modified CDS sequence (wt) from neuraminidase__InfluenzaA__ACZ27803
augaauccaaaccaaaagauaauaaccauugguucggucuguaugacaauuggaauggcuaacuuaauauuacaaauuggaaacauaaucucaauauggauuagccacucaauucaacuugggaaucaaaaucagauugaaacaugcaaucaaagcgucauuacuuaugaaaacaacacuuggguaaaucagacauauguuaacaucagcaacaccaacuuugcugcuggacagucaaugguuuccgugaaauuagcgggcaauuccucucucugcccuguuaguggaugggcuauauacaguaaagacaacaguguaagaaucgguuccaagggggauguguuuaucauaagggaaccauucauaucaugcucccccuuggaaugcagaaccuucuucuugacucaaggggccuugcuaaaugacaaacauuccaauggaaccauuaaagacaggagcccauaucgaacccuaaugagcuguccuauuggugaaguucccucuccauacaacucaagauuugagucagucgcuuggucagcaagugcuugucaugauggcaucaauuggcuaacaauuggaauuucuggcccagacaauggggcaguggcuguguuaaaguacaacggcauaauaacagacacuaucaagaguuggagaaacaauauauugagaacacaagagucugaaugugcauguguaaaugguucuugcuuuacuguaaugaccgauggaccaaguaauggacaggccucauacaagaucuucagaauagaaaagggaaagauagucaaaucagucgaaaugaaugcuccuaauuaucacuaugaggaaugcuccuguuauccugauucuagugaaaucacaugugugugcagggauaacuggcauggcucgaaucgaccgugggugucuuucaaccagaaucuggaauaucagauaggauacauaugcagugggauuuucggagacaauccacgcccuaaugauaagacaggcaguugugguccaguaucgucuaauggagcaaauggaguaaaaggauuuucauucaaauacggcaaugguguuuggauagggagaacuaaaagcauuaguucaagaaacgguuuugagaugauuugggauccgaacggauggacugggacagacaauaacuucucaauaaagcaagauaucguaggaauaaaugaguggucaggauauagcgggaguuuuguucagcauccagaacuaacagggcuggauuguauaagaccuugcuucuggguugaacuaaucagagggcgacccaaagagaacacaaucuggacuagcgggagcagcauauccuuuugugguguaaacagugacacuguggguuggucuuggccagacggugcugaguugccauuuaccauugacaaguaa

SEQ ID NO: 49753 - RNA, 1410 nt, Artificial Sequence
  derived and/or modified CDS sequence (wt) from neuraminidase__InfluenzaA__ACZ27813
augaauccaaaccaaaagauaauaaccauugguucggucuguaugacaauuggaauggcuaacuuaauauuacaaauuggaaacauaaucucaauauggauuagccacucaauucaacuugggaaucaaaaucagauugaaacaugcaaucaaagcgucauuacuuaugaaaacaacacuuggguaaaucagacauauguuaacaucagcaacaccaacuuugcugcuggacagucagugguuuccgugaaauuagcgggcaauuccucucucugcccuguuaguggaugggcuauauacaguaaagacaacaguguaagaaucgguuccaagggggauguguuugucauaagggaaccauucauaucaugcucccccuuggaaugcagaaccuucuucuugacucaaggggccuugcuaaaugacaaacauuccaauggaaccauuaaagacaggagcccauaucgaacccuaaugagcuguccuauuggugaaguucccucuccauacaacucaagauuugagucagucgcuuggucagcaagugcuugucaugauggcaucaauuggcuaacaauuggaauuucuggcccagacaauggggcaguggcuguguuaaaguacaacggcauaauaacagacacuaucaagaguuggagaaacaauauauugagaacacaagagucugaaugugcauguguaaaugguucuugcuuuacuguaaugaccgauggaccaaguaauggacaggccucauacaagaucuucagaauagaaaagggaaagauagucaaaucagucgaaaugaaugccccuaauuaucacuaugaggaaugcuccuguuauccugauucuagugaaaucacaugugugugcagggauaacuggcauggcucgaaucgaccgugggugucuuucaaccagaaucuggaauaucagauaggauacauaugcagugggauuuucggggacaauccacgcccuaaugauaagacaggcaguugugguccaguaucgucuaauggagcaaauggaguaaaaggauuuucauucaaauacggcaaugguguuuggauagggagaacuaaaagcauuaguucaagaaacgguuuugagaugauuugggauccgaacggauggacugggacagacaauaacuucucaauaaagcaagauaucguaggaauaaaugaguggucaggauauagcgggaguuuuguucagcauccagaacuaacagggcuggauuguauaagaccuugcuucuggguugaacuaaucagagggcgacccaaagagaacacaaucuggacuagcgggagcagcauauccuuuugugguguaaacagugacacuguggguuggucuuggccagacggugcugaguugccauuuaccauugacaaguaa

SEQ ID NO: 49754 - RNA, 1410 nt, Artificial Sequence; identical to SEQ ID NO: 48947
  derived and/or modified CDS sequence (wt) from neuraminidase__InfluenzaA__ACZ27823

SEQ ID NO: 49755 - RNA, 1410 nt, Artificial Sequence
  derived and/or modified CDS sequence (wt) from neuraminidase__InfluenzaA__ACZ27833
augaauccaaaccaaaagauaauaaccauugguucggucuguaugacaauuggaauggcuaacuuaauauuacaaauuggaaacauaaucucaauauggauuagccacucaauucaacuugggaaucaaaaucagauugaaacaugcaaucaaagcgucauuacuuaugaaaacaacacuuggguaaaucagacauauguuaacaucagcaacaccaacuuugcugcuggacagucagugguuuccgugaaauuagcgggcaauuccucucucugcccuguuaguggaugggcuauauacaguaaagacaacaguguaagaaucgguuccaagggggauguguuugucauaagggaaccauucauaucaugcucccccuuggaaugcagaaccuucuucuugacucaaggggccuugcuaaaugacaaacauuccaauggaaccauuaaagacaggagcccauaucgaacccuaaugagcuguccuauuggugaaguucccucuccauacaacucaagauuugagucagucgcuuggucagcaagugcuugucaugauggcaucaauuggcuaacaauuggaauuucuggcccagacaauggggcaguggcuguguuaaaguacaacggcauaauaacagacacuaucaagaguuggagaaacaauauauugagaacacaagagucugaaugugcauguguaaaugguucuugcuuuacuguaaugaccgauggaccaaguaauggacaggccucauacaagaucuucagaauagaaaagggaaagauagucaaaucagucgaaaugaaugccccuaauuaucacuaugaggaaugcuccuguuauccugauucuagugaaaucacaugugugugcagggauaacuggcauggcucgaaucgaccgugggugucuuucaaccagaaucuggaauaucagauaggauacauaugcagugggauuuucggagacaauccacgcccuaaugauaagacaggcaguugugguccaguaucgucuaauggagcaaauggaguaaaaggauuuucauucaaauacggcaaugguguuuggauagggagaacuaaaagcauuaguucaagaaacgguuuugagaugauuugggauccgaacggauggacugggacagacaauaacuucucaauaaagcaagauaucguaggaauaaaugaguggucaggauauagcgggaguuuuguccagcauccagaacuaacagggcuggauuguauaagaccuugcuucuggguugaacuaaucagagggcgacccaaagagaacacaaucuggacuagcgggagcagcauauccuuuugugguguaaacagugacacuguggguuggucuuggccagacggugcugaguugccauuuaccauugacaaguaa

SEQ ID NO: 49756 - RNA, 1410 nt, Artificial Sequence; identical to SEQ ID NO: 48947
  derived and/or modified CDS sequence (wt) from neuraminidase__InfluenzaA__ACZ45022

SEQ ID NO: 49757 - RNA, 1410 nt, Artificial Sequence
  derived and/or modified CDS sequence (wt) from neuraminidase__InfluenzaA__ACZ53958
augaauccaaaucaaaagauaauaacgauuggcucuguuucucucaccauugccacaauaugcuuccuuaugcaaauugccauccugguaacuacuguaacauugcauuucaagcaauaugaaugcaacucccccccaaacaaccaagugaugcugugugaaccaacaauaauagaaagaaacauaacagagauaguguaucugaccaacaccaccauagagaaggaaauaugccccaaacuagcagaauacagaaauuggucaaagccgcaauguaacauuacaggauuugcaccuuuuucuaaggacaauucgauccggcuuuccgcugguggggacaucugggugacaagagaaccuuacgugucaugcgauccugacaaguguuaucaauuugcccuuggacagggaacaacacuaaacaacgggcauucaaaugacacaguacaugauaggaccccuuaucggacccuauugaugaaugaguuggguguuccauuucauuugggaaccaagcaagugugcauagcaugguccagcucaaguugucacgauggaaaagcauggcugcauguuuguguaacgggggaugaugaaaaugcaacugcuagcuucauuuacaaugggaggcuuguagauaguauugguucaugguccaaaaaaauccucaggacccaggagucggaaugcguuuguaucaauggaacuuguacaguaguaaugacugaugggagugcuucaggaaaagcugauacuaaaauacuauucauugaggaggggaaaaucguucauacuagcucauugucaggaagugcucagcaugucgaggagugcuccuguuauccucgauauccuggugucagaugugucugcagagacaacuggaaaggcuccaauaggcccaucguagauauaaauguaaaggauuauagcauuguuuccaguuaugugugcucaggacuuguuggagacacacccagaaaaaacgacagcuccagcaguagccauugcuuggauccuaacaaugaggaagguggucauggagugaaaggcugggccuuugaugauggaaaugacguguggaugggaagaacgaucagcgagaaguuacgcucaggauaugaaaccuucaaagucauugaaggcugguccaaaccuaacuccaaauugcagauaaauaggcaagucauaguugacagagguaauagguccgguuauucugguauuuucucuguugaaggcaaaagcugcaucaaucggugcuuuuauguggaguugauaaggggaaggaaacaggaaacugaagucuuguggaccucaaacaguauuguuguguuuuguggcaccucagguacauauggaacaggcucauguccugaugggucuguccucaaucucaugccuauauaa

SEQ ID NO: 49758 - RNA, 1410 nt, Artificial Sequence
  derived and/or modified CDS sequence (wt) from neuraminidase__InfluenzaA__ACZ53969
augaauccaaaucaaaagauaauaacgauuggcucuguuucucucaccauugccacaauaugcuuccuuaugcaaauugccauccugguaacuacuguaacauugcauuucaagcaauaugaaugcaacucccccccaaacaaccaagugaugcugugugaaccaacaauaauagaaagaaacauaacagagauaguguaucugaccaacaccaccauagagaaggaaauaugccccaaacuagcagaauacagaaauuggucaaagccgcaauguaacauuacaggauuugcaccuuuuucuaaggacaauucgauucggcuuuccgcugguggggacaucugggugacaagagaaccuuacgugucaugcgauccugacaaguguuaucaauuugcccuuggacagggaacaacacuaaacaacgggcauucaaaugacacaguacaugauaggaccccuuaucggacccuauugaugaaugaauuggguguuccauuucauuugggaaccaagcaagugugcauagcaugguccagcucaaguugucacgauggaaaagcauggcugcauguuuguguaacgggggaugaugaaaaugcaacugcuagcuucauuuacaaugggaggcuuguagauaguauugguucaugguccaaaaaaauccucaggacccaggagucggaaugcguuuguaucaauggaacuuguacaguaguaaugacugaugggagugcuucaggaaaagcugauacuaaaauacuauucauugaggagggggaaaucguucauacuagcccauugucaggaagugcucagcaugucgaggagugcuccuguuauccucgauauccuggugucagaugugucugcagagacaacuggaaaggcuccaauaggcccaucguagauauaaauguaaaggauuauagcauuguuuccaguuaugugugcucaggacuuguuggagacacacccagaaaaaacgacagcuccagcaguagccauugcuuggauccuaacaaugaggaagguggucauggagugaaaggcugggccuuugaugauggaaaugacguguggaugggaagaacgaucagcgagaagucacgcucaggauaugaaaccuucaaagucauugaaggcugguccaaaccuaacuccaaauugcagauaaauaggcaagucauaguugacagagguaauagguccgguuauucugguauuuucucuguugaaggcaaaagcugcaucaaucggugcuuuuauguggaguugauaaggggaaggaaacaggaaacugaagucuuguggaccucaaacaguauuguuguguuuuguggcaccucagguacauauggaacaggcucauggccugaugggucuguccucaaucucaugccuauauaa

SEQ ID NO: 49759 - RNA, 1410 nt, Artificial Sequence
  derived and/or modified CDS sequence (wt) from neuraminidase__InfluenzaA__ACZ53980
augaauccaaaucaaaauaaauuaccgauuggcucuguuucucucaccauugccacaauaugcuuccuuaugcaaauugcaauccugaaaacuacuguaacauugcauuucaagcaauaugaaugcaacucccccccaaacaaccaagugaugcugugugaaccaacaauaauagaaagaaacuuaacaaagauuguguaucugaccaacaccaccauaaaaaaggaaauaugccccaaacaaccaaaauacagaaauuggucaaagccgaaauguaaaauuacagaauuggcaccuuuuucuaaggacaauucgauucggcuuuccgcugguggggacaucugggugacaagagaaccuuacgugucaugcgauccugacaaguguuaucaauuugcccuuggacagggaacaacacuaaacaacgggcauucaaaugacacaguacaugauaggaccccuuaucggacccuauugaugaaugaguuggguguuccauuucauuugggaaccaagcaagugugcauagcaugguccagcucaaguugucacgauggaaaagcauggcugcauguuuguaucacuggggaugauaaaaaugcaacugcuagcuucauuuacaaugggaggcuuguagauaguauuguuucaugguccaaagaaauccucaggacccaggagucagaaugcguuuguaucaauggaacuuguacaguaguaaugacugaugggagugcuucaggaaaagcugauacuaaaauacuauucauugaggaggggaaaauuguccauauuagcccauugucaggaagugcucagcauguagaagaguguuccuguuauccuagauauccuggcgucagauguaucugcagagacaacuggaaaggcucuaauaggcccgucguagacauaaauauggaagauuauagcauugauuccaguuaugugugcucaggacuuguuggagacacacccagaaaaaacgacagcuccagcaguagccauugcuuggauccuaacaaugaggaagguggucauggagugaaaggcugggccuuugaugauggaaaugacguguggaugggaagaacgaucagcgagaaguuacgcucaggauaugaaaccuucaaagucauuggaggcugguccaaaccuaacuccaaauugcagauaaauaggcaagucauaguugacagagguaauagguccgguuauucugguauuuucucuguugaaggcaaaagcugcaucaaucggugcuuuuauguggaguugauaaggggaaggaaacaggaaacugaagucuuguggaccucaaacaguauuguuguguuuuguggcaccucagguacauauggaacaggcucauggccugaugggucuguccucaaucucaugccuauauaa

SEQ ID NO: 49760 - RNA, 1410 nt, Artificial Sequence; identical to SEQ ID NO: 48814
  derived and/or modified CDS sequence (wt) from neuraminidase__InfluenzaA__ACZ56082

SEQ ID NO: 49761 - RNA, 1410 nt, Artificial Sequence
  derived and/or modified CDS sequence (wt) from neuraminidase__InfluenzaA__ACZ57183
augaauccaaaccaaaagauaauaaccauugguucggucuguaugacaauuggaauggcuaacuuaauauuacaaauuggaaacauaaucucaauauggauuagccacucaauucaacuugggaaucaaaaucagauugaaacaugcaaucaaagcgucauuacuuaugaaaacaacacuuggguaaaucagacauauguuaacaucagcaacaccaacuuugcugcuggacagucagugguuuccgugaaauuagcgggcaauuccucucucugcccuguuaguggaugggcuauauacaguaaagacaacaguguaagaaucgguuccaagggggauguguuugucauaagggaaccauucauaucaugcucccccuuggaaugcagaaccuucuucuugacucaaggggccuugcuaaaugacaaacauuccaauggaaccauuaaagacaggagcccauaucgaacccuaaugagcuguccuauuggugaaguucccucuccauacaacucaagauuugagucagucgcuuggucagcaagugcuugucaugauggcaucaauuggcuaacaauuggaauuucuggcccagacaauggggcaguggcuguguuaaaguacaacggcauaauaacagacacuaucaagaguuggagaaacaauauauugagaacacaagagucugaaugugcauguguaaaugguucuugcuuuacuguaaugaccgauggaccaagugauggacaggccucauacaagaucuucaggauagaaaagggaaagauagucaaaucagucgaaaugaaugccccuaauuaucacuaugaggaaugcuccuguuauccugauucuagugaaaucacaugugugugcagggauaacuggcauggcucgaaucgaccgugggugucuuucaaccagaaucuggaauaucagauaggguacauaugcagugggauuuucggagacaauccacgcccuaaugauaagacaggcaguugugguccaguaucgucuaauggagcaaauggaguaaaaggauuuucauucaaauacggcaaugguguuuggauagggagaacuaaaagcauuaguucaagaaacgguuuugagaugauuugggauccgaacggauggacugggacagacaauaacuucucaauaaagcaagauaucguaggaauaaaugaguggucaggauauagcgggaguuuuguucagcauccagaacuaacagggcuggauuguauaagaccuugcuucuggguugaacuaaucagagggcgacccaaagagaacacaaucuggacuagcgggagcagcauauccuuuugugguguaaacagugacacuguggguuggucuuggccagacggugcugaguugccauuuaccauugacaaguaa

SEQ ID NO: 49762 - RNA, 1413 nt, Artificial Sequence
  derived and/or modified CDS sequence (wt) from neuraminidase__InfluenzaA__ACZ81542
augaacccaaaucaaaagguuauaaccauuggaucaaucaguauagcaaucggaauaauuagucuaauguugcaaauaggaaauauuauuucaauaugggcuagucacucaauccaaacugggagucaaaacaacacuggaauaugcaaccaaagaaucaucacauaugaaaacagcaccugggugaaucacacauauguuaauauuaacaacacuaauguuguugcuggagaggacaaaacaucagugacauuggccggcaauucaucucuuuguucuaucaguggaugggcuauauacacaaaagacaacagcauaagaauuggcuccaaaggagauguuuuugucauaagagaaccuuucauaucauguucucacuuggaaugcagaaccuuuuuucugacccaaggcgcucuauuaaaugacaaacauucaaaugggaccguaaaggacagaaguccuuauagggccuuaaugagcuguccucuaggugaagcuccguccccauacaauucaaaguucgaaucaguugcauggucagcaagcgcaugccaugauggcaugggcugguuaacaaucggaauuucuggcccagacaauggagcuguggcuguacuaaaauacaacggaauaauaacuggaaccauaaaaaguuggaaaaagcaaauauuaagaacacaagagucugaaugugucuguaugaacgggucauguuucaccauaaugaccgauggcccgaguaauaaggccgccucguacaaaauuuucaagaucgaaaaggggaagguuacuaaaucaauagaguugaaugcacccaauuuuuauuaugaggaaugcuccuguuacccagauacuggcauagugauguguguaugcagggacaacuggcaugguucaaaucgaccuugggugucuuuuaaucaaaacuuggauuaucaaauaggauacaucugcaguggaguguuuggugacaauccgcgucccgaagauggagaaggcagcugcaauccagugacuguugauggagcaaacggaguaaaaggguuuucauacaaauaugguaaugguguuuggauagggaggaccaaaaguaacagacuuagaaagggguuugagaugauuugggauccuaauggauggacaaauaccgacagugauuucucagugaaacaggauguuguagcaauaacugauuggucaggguacagcggaaguuucguccaacauccugaguuaacaggauuggacuguauaagaccuugcuucuggguugaguuagucagagggcugccuagagaaaauacaacaaucuggacuagugggagcagcauuucuuuuuguggcguuaauagugauacugcaaacuggucuuggccagacggugcugaguugccguucaccauugacaaguag

SEQ ID NO: 49763 - RNA, 1413 nt, Artificial Sequence
  derived and/or modified CDS sequence (wt) from neuraminidase__InfluenzaA__ACZ81543
augaacccaaaucaaaagauaauaaccauuggaucaaucaguauagcaaucggaauaauuagucuaauguugcaaauaggaaauauuauuucaauaugggcuagucacucaauccaaacugggagucaaaacaacacuggaauaugcaaccaaagaaucaucacauaugaaaacaacaccugggugaaucacacauauguuaauauuaacaacacuaauguuguugcuggagaggacaaaacaucagugacauuggcuggcaauucaucucuuuguucuaucaguggaugggcuauauacacaaaagacaacagcauaagaauuggcuccaaaggagauguuuuugucauaagagaaccuuucauaucauguucucacuuggaaugcagaaccuuuuuucugacccaaggcgcucuauuaaaugacaaacauucaaaugggaccguaaaggacagaaguccuuacagggccuuaaugagcuguccucuaggugaagcuccguccccauacaauucaaaguucgaaucaguugcauggucagcaagcgcaugccaugauggcaugggcugguuaacaaucggaauuucugguccagacaauggagcuguggcuguacuaaaauacaacggaauaauaacuggaaccauaaaaaguuggaaagagcaaauauuaagaacacaagagucugaauguguuuguaugaacgggucauguuucaccauaaugaccgauggcccgaguaauaaggccgccucguacaaaauuuucaagaucgaaaaggggaagguuacuaaaucaauagaguugaaugcacccaauuuuuauuaugaggaaugcuccuguuacccagauacuggcauagugauguguguaugcagggacaacuggcaugguucaaaucgaccuugggugucuuuuaaucaaaacuuggauuaucaaacaggauacaucugcaguggaguguuuggugacaauccgcgucccgaagauggagagggcagcugcaauccagugacuguugauggagcaaacggaguaaaaggguuuucauacaaauaugguaaugguguuuggauagggaggaccaaaaguaacagacuuagaaagggguuugagaugauuugggauccuaauggauggacaaauaccgacagugauuucucagugaaacaggauguuguagcaauaacugauuggucaggguacagcggaaguuucguccaacauccugaguuaacaggauuggacuguauaagaccuugcuucuggguugaguuagucagagggcugccuagagaaaauacaacaaucuggacuagugggagcagcauuucuuuuuguggcguuaauagugauacugcaaacuggucuuggccagacggugcugaguugccguucaccauugacaaguag

SEQ ID NO: 49764 - RNA, 1410 nt, Artificial Sequence
  derived and/or modified CDS sequence (wt) from neuraminidase__InfluenzaA__ACZ81546
augaauccaaaucaaaagauaauaacgauuggcucuguuucucucaccauuuccacaauaugcuucuucaugcaaauugccaucuugauaacuacuguaacauugcauuucaagcaauaugaauucaacucccccccaaacaaccaagugaugcugugugaaccaacaauaauagaaagaaacauaacagagauaguguaucugaccaacaccaccauagagaaggaaauaugccccaaacuagcagaauacagaaauuggucaaagccgcaaugugacauuacaggaucugcaccuuuuucuaaggacaauucgauuaggcuuuccgcugguggggacaucugggugacaagagaaccuuaugugucaugcgauccugacaaguguuaucaauuugcccuuggacagggaacaacacuaaacaacguacauucaaauaacacaguacaugauaggaccccuuaucggacccuauugaugaaugaguuagguguuccuuuucaucuggggaccaagcaagugugcauagcaugguccagcucaaguugucacgauggaaaagcauggcugcauguuuguauaacgggggaugauaaaaaugcaacugcuagcuucauuuacaaugggaggcuuguagauaguguuguuucaugguccaaagaaauccucaggacccaggagucagaaugcguuuguaucaauggaacuuguacaguaguaaugacugaugggagugcuucaggaaaagcugauacuaaaauacuauucauugaggaggggaaaaucguucauacuagcacauugucaggaagugcucagcaugucgaggagugcuccugcuauccucgauauccuggugucagaugugucugcagagacaacuggaaaggauccaauaggcccaucguagauauaaacauaaaggaucauagcauugucuccaguuauguguguucaggacuuguuggagacacacccagaaaaaacgacagcuccagcaguagccauuguuuggauccuaacaaugaggaagguggucauggggugaaaggcugggccuuugaugauggaaaugacguguggaugggaagaacgaucagcgagaagucacgcuuaggguaugaaaccuucaaagucauugaaggcugguccaacccuaaguccaaauugcagauaaauaggcaagucauaguugacagagguaauagguccgguuauucugguauuuucucuguugaaggcaaaagcugcaucaaucggugcuuuuauguggaguugauaaggggaagaaaagaggaaacugaagucuuguggaccucaaacaguauuguuguguuuuguggcaccucagguacauauggaacaggcucauggccugauggggcggacaucaaucucaugccuauauaa

SEQ ID NO: 49765 - RNA, 1410 nt, Artificial Sequence
  derived and/or modified CDS sequence (wt) from neuraminidase__InfluenzaA__ACZ81547
augaauccaaaucaaaagauaauaacgauuggcucuguuucucucaccauuuccacaauaugcuucuucaugcaaauugccaucuugauaacuacuguaacauugcauuucaagcaauaugaauucaacucccccccaaacaaccaagugaugcugugugaaccaacaauaauagaaagaaauauaacagagauaguguaucugaccaacaccaccauagagaaggaaauaugccccaaacuagcagaauacagaaauuggucaaaaccgcaaugugacauuacaggguuugcaccuuuuucuaaggacaauucgauuaggcuuuccgcugguggggacaucugggugacaagagaaccuuaugugucaugcgauccugacaaguguuaucaauuugcccuuggacagggaacaacacuaaacaacguacauucaaauaacacaguacgugauaggaccccuuaucggacccuauugaugaaugaguuagguguuccuuuucaucuggggaccaagcaagugugcauagcaugguccagcucaaguugucacgauggaaaagcauggcugcauguuuguauaacgggggaugauaaaaaugcaacugcuagcuucauuuacaaugggaggcuuguagauaguguuguuucaugguccaaagaaauccucaggacccaggagucagaaugcguuuguaucaauggaacuuguacaguaguaaugacugaugggagugcuucaggaaaagcugauacuaaaauacuauucauugaggaggggaaaaucguucauacuagcacauugucaggaagugcucagcaugucgaggagugcuccugcuauccucgauauccuggugucagaugugucugcagagacaacuggaaaggauccaauaggcccaucguagauauaaacacaaaggaucauagcauugucuccaguuauguguguucaggacuuguuggagacacacccagaaaaaacgacagcuccagcaguagccauuguuuggauccuaacaaugaggaagguggucauggggugaaaggcugggccuuugaugauggaaaugacguguggaugggaagaacgaucagcgagaagucacgcuuaggguaugaaaccuucaaagucauugaaggcugguccaacccuaaguccaaauugcagauaaauaggcaagucauaguugacaaagguaauagguccgguuauucugguauuuucucuguugaaggcaaaagcugcaucaaucggugcuuuuauguggaguugauaaggggaagaaaagaggaaacugaagucuuguggaccucaaacaguauuguuguguuuuguggcaccucagguacauauggaacaggcucauggccugauggggcggacaucaaucucaugccuauauaa

SEQ ID NO: 49766 - RNA, 1410 nt, Artificial Sequence; identical to SEQ ID NO: 48750
  derived and/or modified CDS sequence (wt) from neuraminidase__InfluenzaA__ACZ81634

SEQ ID NO: 49767 - RNA, 1410 nt, Artificial Sequence
  derived and/or modified CDS sequence (wt) from neuraminidase__InfluenzaA__ACZ81644
augaauccaaaccaaaagauaauaaccauugguucggucuguaugacaauuggaauggcuaacuuaauauuacaaauuggaaacauaaucucaauauggauuagccacucaauucaacuugggaaucaaaaucagauugaaacaugcaaucaaagcgucauuacuuaugaaaacaacacuuggguaaaucagacauauguuaacaucagcaacaccaacuuugcugcuggacaaucagugguuuccgugaaauuagcgggcaauuccucucucugcccuguuaguggaugggcuauauacaguaaagacaacaguauaagaaucgguuccaagggggauguguuugucauaagggaaccauucauaucaugcucccccuuggaaugcagaaccuucuucuugacucaaggggccuugcuaaaugacaaacauuccaauggaaccauuaaagacaggagcccauaucgaacccuaaugagcuguccuauuggugaaguucccucuccauacaacucaagauuugagucagucgcuuggucagcaagugcuugucaugauggcaucaauuggcuaacaauuggaauuucuggcccagacaauggggcaguggcuguguuaaaguacaacggcauaauaacagacacuaucaagaguuggagaaacaauauauugagaacacaagagucugaaugugcauguguaaaugguucuugcuuuacuguaaugaccgauggaccaagugauggacaggccucauacaagaucuucagaauagaaaagggaaagauagucaaaucagucgaaaugaaugccccuaauuaucacuaugaggaaugcuccuguuauccugauucuagugaaaucacaugugugugcagggauaacuggcauggcucgaaucgaccgugggugucuuucaaccagaaucuggaauaucagauaggauacauaugcagugggauuuucggagacaauccacgcccuaaugauaagacaggcaguugugguccaguaucgucuaauggagcaaauggaguaaaaggauuuucauucaaauacggcaaugguguuuggauagggagaacuaaaagcauuaguucaagaaacgguuuugagaugauuugggauccgaacggauggacugggacagacaauaacuucucaauaaagcaagauaucauaggaauaaaugaguggucaggauauagcgggaguuuuguucagcauccagaacuaacagggcuggauuguauaagaccuugcuucuggguugaacuaaucagagggcgacccaaagagaacacaaucuggacuagcgggagcagcauauccuuuugugguguaaacagugacacuguggguuggucuuggccagacggugcugaguugccauuuaccauugacaaguaa

SEQ ID NO: 49768 - RNA, 1410 nt, Artificial Sequence
  derived and/or modified CDS sequence (wt) from neuraminidase__InfluenzaA__ACZ81653
augaauccaaaccaaaagauaauaaccauugguucggucuguaugacaauuggaauggcuaacuuaauauuacaaauuggaaacauaaucucaauauggauuagccacucaauucaacuugggaaucaaaaucagauugaaacaugcaaucaaagcgucauuacuuaugaaaacaacacuuggguaaaucagacauauguuaacaucagcaacaccaacuuugcugcuggacagucagugguuuccgugaaauuagcgggcaauuccucucucugcccuguuaguggaugggcuauauacaguaaagacaacaguauaagaaucgguuccaagggggauguguuugucauaagggaaccauucauaucaugcucccccuuggaaugcagaaccuucuucuugacucaaggggccuugcuaaaugacaaacauuccaauggaaccauuaaagacaggagcccauaucgaacccuaaugagcuguccuauuggugaaguucccucuccauacaacucaagauuugagucagucgcuuggucagcaagugcuugucaugauggcaucaauuggcuaacaauuggaauuucuggcccagacaauggggcaguggcuguguuaaaguacaacggcauaauaacagacacuaucaagaguuggagaaacaauauauugagaacacaagagucugaaugugcauguguaaaugguucuugcuuuacuguaaugaccgauggaccaagugauggacaggccucauacaagaucuucagaauagaaaagggaaagauagucaaaucagucgaaaugaaugccccuaauuaucacuaugaggaaugcuccuguuauccugauucuagugaaaucacaugugugugcagggauaacuggcauggcucgaaucgaccgugggugucuuucaaccagaaucuggaauaucagauaggauacauaugcagugggauuuucggagacaauccacgcccuaaugauaagacaggcaguugugguccaguaucgucuaauggagcaaauggaguaaaaggauuuucauucaaauacggcaaugguguuuggauagggagaacuaaaagcauuaguucaagaaacgguuuugagaugauuugggauccgaacggauggacugggacagacaauaacuucucaauaaagcaagauaucguaggaauaaaugaguggucaggauauagcgggaguuuuguucagcauccagaacuaacagggcugaauuguauaagaccuugcuucuggguugaacuaaucagagggcgacccaaagagaacacaaucuggacuagcgggagcagcauauccuuuugugguguaaacagugacacuguggguuggucuuggccagacggugcugaguugccauuuaccauugacaaguaa

SEQ ID NO: 49769 - RNA, 1410 nt, Artificial Sequence; identical to SEQ ID NO: 48750
  derived and/or modified CDS sequence (wt) from neuraminidase__InfluenzaA__ACZ95840

SEQ ID NO: 49770 - RNA, 1410 nt, Artificial Sequence
  derived and/or modified CDS sequence (wt) from neuraminidase__InfluenzaA__ACZ95850
augaauccaaaccaaaagauaauaaccauugguucggucuguaugacaauuggaauggcuaacuuaauauuacaaauuggaaacauaaucucaauauggauuagccacucaauucaacuugggaaucaaaaucagauugaaacaugcaaucaaagcgucauuacuuaugaaaacaacacuuggguaaaucagacauauguuaacaucagcaacaccaacuuugcugcuggacagucagugguuuccgugaaauuagcgggcaauuccucucucugcccuguuaguggaugggcuauauacaguaaagacaacaguauaagaaucgguuccaagggggauguguuugucauaagggaaccauucauaucaugcucccccuuggaaugcagaaccuucuucuugacucaaggggccuugcuaaaugacaaacauuccaauggaaccauuaaagacaggagcccauaucgaacccuaaugagcuguccuauuggugaaguucccucuccauacaacucaagauuugagucagucgcuuggucagcaagugcuugucaugauggcaucaauuggcuaacaauuggaauuucuggcccagacaauggggcaguggcuguguuaaaguacaacggcauaauaacagacacuaucaagaguuggagaaacaauauauugagaacacaagagucugaaugugcauguguaaaugguucuugcuuuacuguaaugaccgauggaccaagugauggacaggccucauacaagaucuucagaauagaaaagggaaagauagucaaaucagucgaaaugaaugccccuaauuaucacuaugaggaaugcuccuguuauccugauucuagugaaaucacaugugugugcagggauaacuggcauggcucgaaucgaccgugggugucuuucaaccagaaucuggaauaucagauaggauacauaugcagugggauuuucggagacaauccacgcccuaaugauaagacaggcaguugugguccaguaucgucuaauggagcaaauggaguaaaaggauuuucauucaaauacggcaaugguguuuggauagggagaacuaaaagcauuaguucaagaaacgguuuugagaugauuugggauccgaacggauggacugggacagacaauaacuucucaauaaagcaagauauuguaggaauaaaugaguggucaggauauagcgggaguuuuguucagcauccagaacuaacagggcuggauuguauaagaccuugcuucuggguugaacuaaucagagggcgacccaaagagaacacaaucuggacuagcgggagcagcauauccuuuugugguguaaacagugacacuguggguuggucuuggccagacggugcugaguugccauuuaccauugacaaguaa

SEQ ID NO: 49771 - RNA, 1410 nt, Artificial Sequence
  derived and/or modified CDS sequence (wt) from neuraminidase__InfluenzaA__ACZ95860
augaauccaaaccaaaagauaauaaccauugguucggucuguaugacaauuggaauggcuaacuuaauauuacaaauuggaaacauaaucucaauauggauuagccacucaauucaacuugggaaucaaaaucagauugaaacaugcaaucaaagcgucauuacuuaugaaaacaacacuuggguaaaucagacauauguuaacaucagcaacaccaacuuugcugcuggacagucagugguuuccgugaaauuagcgggcaauuccucucucugcccuguuaguggaugggcuauauacaguaaagacaacaguauaagaaucgguuccaagggggauguguuugucauaagggaaccauucauaucaugcucccccuuggaaugcagaaccuucuucuugacucaaggggccuugcuaaaugacaaacauuccaauggaaccauuaaagacaggagcccauaucgaacccuaaugagcuguccuauuggugaaguucccucuccauacaacucaagauuugagucagucgcuuggucagcaagugcuugucaugauggcaucaauuggcuaacaauuggaauuucuggcccagacaauggggcaguggcuguguuaaaguacaacggcauaauaacagacacuaucaagaguuggagaaacaauauauugagaacacaagagucugaaugugcauguguaaaugguucuugcuuuacuguaaugaccgauggaccaagugauggacaggccucauacaagaucuucagaauagaaaagggaaagauagucaaaucagucgaaaugaaugccccuaauuaucacuaugaggaaugcuccuguuauccugauucuagugaaaucacaugugugugcagggauaacuggcauggcucgaaucgaccgugggugucuuucaaccagaaucuggaauaucagauaggauacauaugcagugggauuuucggagacaauccacgcccuaaugauaagacaggcaguugugguccaguaucgucuaauggagcaaauggaguaaaaggauuuucauucaaauacggcaaugguguuuggauagggagaacuaaaagcauuaguucaagaaacgguuuugagaugauuugggauccgaacggauggacugggacagacaauaacuucucaauaaagcaagauauaguaggaauaaaugaguggucaggauauagcgggaguuuuguucagcauccagaacuaacagggcuggauuguauaagaccuugcuucuggguugaacuaaucagagggcgacccaaagagaacacaaucuggacuagcgggagcagcauauccuuuugugguguaaacagugacacuguggguuggucuuggccagacggugcugaguugccauuuaccauugacaaguaa

SEQ ID NO: 49772 - RNA, 1410 nt, Artificial Sequence
  derived and/or modified CDS sequence (wt) from neuraminidase__InfluenzaA__ACZ95870
augaauccaaaccaaaagauaauaaccauugguucggucuguaugacaauuggaauggcuaacuuaauauuacaaauuggaaacauaaucucaauauggauuagccacucaauucaacuugggaaucaaaaucagauugaaacaugcaaucaaagcgucauuacuuaugaaaacaacacuuggguaaaucagacauauguuaacaucagcaacaccaacuuugcugcuggacagucagugguuucugugaaauuagcgggcaauuccucucucugcccuguuaguggaugggcuauauacaguaaagacaacaguauaagaaucgguuccaagggggauguguuugucauaagggaaccauucauaucaugcucccccuuggaaugcagaaccuucuucuugacucaaggggccuugcuaaaugacaaacauuccaauggaaccauuaaagacaggagcccauaucgaacccuaaugagcuguccuauuggugaaguucccucuccauacaacucaagauuugagucagucgcuuggucagcaagugcuugucaugauggcaucaauuggcuaacaauuggaauuucuggcccagacaauggggcaguggcuguguuaaaguacaacggcauaauaacagacacuaucaagaguuggagaaacaauauauugagaacacaagagucugaaugugcauguguaaaugguucuugcuuuacuguaaugaccgauggaccaagugauggacaggccucauacaagaucuucagaauagaaaagggaaagauagucaaaucagucgaaaugaaugccccuaauuaucacuaugaggaaugcuccuguuauccugauucuagugaaaucacaugugugugcagggauaacuggcauggcucgaaucgaccgugggugucuuucaaccagaaucuggaauaucagauaggauacauaugcagugggauuuucggagacaauccacgcccuaaugauaagacaggcaguugugguccaguaucgucuaauggagcaaauggaguaaaaggauuuucauucaaauacggcaaugguguuuggauagggagaacuaaaagcauuaguucaagaaacgguuuugagaugauuugggauccgaacggauggacugggacagacaauaacuucucaauaaagcaagauaucguaggaauaaaugaguggucaggauauagcgggaguuuuguucagcauccagaacuaacagggcuggauuguauaagaccuugcuucuggguugaacuaaucagagggcgacccaaagagaacacaaucuggacuagcgggagcagcauauccuuuugugguguaaacagugacacuguggguuggucuuggccagacggugcugaguugccauuuaccauugacaaguaa

SEQ ID NO: 49773 - RNA, 1410 nt, Artificial Sequence; identical to SEQ ID NO: 48750
  derived and/or modified CDS sequence (wt) from neuraminidase__InfluenzaA__ACZ95880

SEQ ID NO: 49774 - RNA, 1410 nt, Artificial Sequence
  derived and/or modified CDS sequence (wt) from neuraminidase__InfluenzaA__ACZ95890
augaauccaaaccaaaagauaauaaccauugguucggucuguaugacaauuggaauggcuaacuuaauauuacaaauuggaaacauaaucucaauauggauuagccacucaauucaacuugggaaucaaaaucagauugaaacaugcaaucaaagcgucauuacuuaugaaaacaacacuuggguaaaucagacauauguuaacaucagcaacaccaacuuugcugcuggacagucagugguuuccgugaaauuagcgggcaauuccucucucugcccuguuaguggaugggcuauauacaguaaagacaacaguauaagaaucgguuccaagggggauguguuugucauaagggaaccauucauaucaugcucccccuuggaaugcagaaccuucuucuugacucaaggggccuugcuaaaugacaaacauuccaauggaaccauuaaagacaggagcccauaucgaacccuaaugagcuguccuauuggugaaguucccucuccauacaacucaagauuugagucagucgcuuggucagcaagugcuugucaugauggcaucaauuggcuaacaauuggaauuucuggcccagacaauggggcaguggcuguguuaaaguacaacggcauaauaacagacacuaucaagaguuggagaaacaauauauugagaacacaagagucugaaugugcauguguaaaugguucuugcuuuacuguaaugaccgauggaccaagugauggacaggccucauacaagaucuucagaauagaaaagggaaagauagucaaaucagucgaaaugaaugccccuaauuaucacuaugaggaaugcuccuguuauccugauuccagugaaaucacaugugugugcagggacaacuggcauggcucgaaucgaccgugggugucuuucaaccagaaucuggaauaucagauaggauacauaugcagugggauuuucggagacaauccacgcccuaaugauaagacaggcaguugugguccaguaucgucuaauggagcaaauggaguaaaaggauuuucauucaaauacggcaaugguguuuggauagggagaacuaaaagcauuaguucaagaaacgguuuugagaugauuugggauccgaacggauggacugggacagacaauaacuucucaauaaagcaagauaucguaggaauaaaugaguggucaggauauagcgggaguuuuguucagcauccagaacuaacagggcuggauuguauaagaccuugcuucuggguugaacuaaucagagggcgacccaaagagaacacaaucuggacuagcgggagcagcauauccuuuugugguguaaacagugacacuguggguuggucuuggccagacggugcugaguugccauuuaccauugacaaguaa

SEQ ID NO: 49775 - RNA, 1410 nt, Artificial Sequence; identical to SEQ ID NO: 48750
  derived and/or modified CDS sequence (wt) from neuraminidase__InfluenzaA__ACZ95900

SEQ ID NO: 49776 - RNA, 1410 nt, Artificial Sequence
  derived and/or modified CDS sequence (wt) from neuraminidase__InfluenzaA__ACZ95910
augaauccaaaccaaaagauaauaaccauugguucggucuguaugacaauuggaauggcuaacuuaauauuacaaauuggaaacauaaucucaauauggauuagccacucaauucaacuugggaaucaaaaucagauugaaacaugcaaucaaagcgucauuacuuaugaaaacaacacuuggguaaaucagacauauguuaacaucagcaacaccaacuuugcugcuggacagucagugguuuccgugaaauuagcgggcaauuccucucucugcccuguuaguggaugggcuauauacaguaaagacaacaguauaagaaucgguuccaagggggauguguuugucauaagggaaccauucauaucaugcucccccuuggaaugcagaacuuucuucuugacucaaggggccuugcuaaaugacaaacauuccaauggaaccauuaaagacaggagcccauaucgaacccuaaugagcuguccuauuggugaaguucccucuccauacaacucaagauuugagucagucgcuuggucagcaagugcuugucaugauggcaucaauuggcuaacaauuggaauuucuggcccagacaauggggcaguggcuguguuaaaguacaacggcauaauaacagacacuaucaagaguuggagaaacaauauauugagaacacaagagucugaaugugcauguguaaaugguucuugcuuuacuguaaugaccgauggaccaagugauggacaggccucauacaagaucuucagaauagaaaagggaaagauagucaaaucagucgaaaugaaugccccuaauuaucacuaugaggaaugcuccuguuauccugauucuagugaaaucacaugugugugcagggauaacuggcauggcucgaaucgaccgugggugucuuucaaccagaaucuggaauaucagauaggauacauaugcagugggauuuucggagacaauccacgcccuaaugauaagacaggcaguugugguccaguaucgucuaauggagcaaauggaguaaaaggauuuucauucaaauacggcaaugguguuuggauagggagaacuaaaagcauuaguucaagaaacgguuuugagaugauuugggauccgaacggauggacugggacagacaauaacuucucaauaaagcaagauaucguaggaauaaaugaguggucaggauauagcgggaguuuuguucagcauccagaacuaacagggcuggauuguauaagaccuugcuucuggguugaacuaaucagagggcgacccaaagagaacacaaucuggacuagcgggagcagcauauccuuuugugguguaaacagugacacuguggguuggucuuggccagacggugcugaguugccauuuaccauugacaaguaa

SEQ ID NO: 49777 - RNA, 1410 nt, Artificial Sequence
  derived and/or modified CDS sequence (wt) from neuraminidase__InfluenzaA__ACZ95920
augaauccaaaccaaaagauaauaaccauugguucggucuguaugacaauuggaauggcuaacuuaauauuacaaauuggaaacauaaucucaauauggauuagccacucaauucaacuugggaaucaaaaucagauugaaacaugcaaucaaagcgucauuacuuaugaaaacaacacuuggguaaaucagacauauguuaacaucagcaacaccaacuuugcugcuggacagucagugguuuccgugaaauuagcgggcaauuccucucucugcccuguuaguggaugggcuauauacaguaaagacaacaguauaagaaucgguuccaagggggauguguuugucauaagggaaccauucauaucaugcucccccuuggaaugcagaaccuucuucuugacucaaggggccuugcuaaaugacaaacauuccaauggaaccauuaaagacaggagcccauaucgaacccuaaugagcuguccuauuggugaaguucccucuccauacaacucaagauuugagucagucgcuuggucagcaagugcuugucaugauggcaucaauuggcuaacaauuggaauuucuggcccagacaauggggcaguggcuguguuaaaguacaacggcauaauaacagacacuaucaagaguuggagaaacaauauauugagaacacaagagucugaaugugcauguguaaaugguucuugcuuuacuguaaugaccgauggaccaagugauggacaggccucauacaagaucuucagaauagaaaagggaaagauagucaaaucagucgaaaugaaugccccuaauuaucacuaugaggaaugcuccuguuauccugauucuagugaaaucacaugugugugcagggauaacuggcauggcucgaaucgaccgugggugucuuucaaucagaaucuggaauaucagauaggauacauaugcagugggauuuucggagacaauccacgcccuaaugauaagacaggcaguugugguccaguaucgucuaauggagcaaauggaguaaaaggauuuucauucaaauacggcaaugguguuuggauagggagaacuaaaagcauuaguucaagaaacgguuuugagaugauuugggauccgaacggauggacugggacagacaauaacuucucaauaaagcaagauaucguaggaauaaaugaguggucaggauauagcgggaguuuuguucagcauccagaacuaacagggcuggauuguauaagaccuugcuucuggguugaacuaaucagagggcgacccaaagagaacacaaucuggacuagcgggagcagcauauccuuuugugguguaaacagugacacuguggguuggucuuggccagacggugcugaguugccauuuaccauugacaaguaa

SEQ ID NO: 49778 - RNA, 1410 nt, Artificial Sequence
  derived and/or modified CDS sequence (wt) from neuraminidase__InfluenzaA__ACZ95930
augaauccaaaccaaaagauaauaaccauugguucggucuguaugacaauuggaauggcuaacuuaauauuacaaauuggaaacauaaucucaauauggauuagccacucaauucaacuugggaaucaaaaucagauugaaacaugcaaucaaagcgucauuacuuaugaaaacaacacuuggguaaaucagacauauguuaacaucagcaacaccaacuuugcugcuggacagucagugguuucugugaaauuagcgggcaauuccucucucugcccuguuaguggaugggcuauauacaguaaagacaacaguauaagaaucgguuccaagggggauguguuugucauaagggaaccauucauaucaugcucccccuuggaaugcagaaccuucuucuugacucaaggggccuugcuaaaugacaaacauuccaauggaaccauuaaagacaggagcccauaucgaacccuaaugagcuguccuauuggugaaguucccucuccauacaacucaagauuugagucagucgcuuggucagcaagugcuugucaugauggcaucaauuggcuaacaauuggaauuucuggcccagacaauggggcaguggcuguguuaaaguacaacggcauaauaacagacacuaucaagaguuggagaaacaauauauugagaacacaagagucugaaugugcauguguaaaugguucuugcuuuacuauaaugaccgauggaccaagugauggacaggccucauacaagaucuucagaauagaaaagggaaagauagucaaaucagucgaaaugaaugccccuaauuaucacuaugaggaaugcuccuguuauccugauucuagugaaaucacaugugugugcagggauaacuggcauggcucgaaucgaccgugggugucuuucaaccagaaucuggaauaucagauaggauacauaugcagugggauuuucggagacaauccacgcccuaaugauaagacaggcaguugugguccaguaucgucuaauggagcaaacggaguaaaaggauuuucauucaaauacggcaaugguguuuggauagggagaacuaaaagcauuaguucaagaaacgguuuugagaugauuugggauccgaacggauggacugggacagacaauaacuucucaauaaagcaagauaucguaggaauaaaugaauggucaggauauagcgggaguuuuguucagcauccagaacuaacagggcuggauuguauaagaccuugcuucuggguugaacuaaucagagggcgacccaaagagaacacaaucuggacuagcgggagcagcauauccuuuugugguguaaacagugacacuguggguuggucuuggccagacggugcugaguugccauuuaccauugacaaguaa

SEQ ID NO: 49779 - RNA, 1410 nt, Artificial Sequence; identical to SEQ ID NO: 49777
  derived and/or modified CDS sequence (wt) from neuraminidase__InfluenzaA__ACZ95940

SEQ ID NO: 49780 - RNA, 1410 nt, Artificial Sequence
  derived and/or modified CDS sequence (wt) from neuraminidase__InfluenzaA__ACZ95950
augaauccaaaccaaaagauaauaaccauugguucggucuguaugacaauuggaauggcuaacuuaauauuacaaauuggaaacauaaucucaauauggauuagccacucaauucaacuugggaaucaaaaucagauugaaacaugcaaucaaagcgucauuacuuaugaaaacaacacuuggguaaaucagacauauguuaacaucagcaacaccaacuuugcugcuggacagucagugguuuccgugaaauuagcgggcaauuccucucucugcccuguuaguggaugggcuauauacaguaaagacaacaguauaagaaucgguuccaagggggauguguuugucauaagggaaccauucauaucaugcucccccuuggaaugcagaaccuucuucuugacucaaggggccuugcuaaaugacaaacauuccaauggaaccauuaaagacaggagcccauaucgaacccuaaugagcuguccuauuggugaaguucccucuccauacaacucaagauuugagucagucgcuuggucagcaagugcuugucaugauggcaucaacuggcuaacaauuggaauuucuggcccagacaauggggcaguggcuguguuaaaguacaacggcauaauaacagacacuaucaagaguuggagaaacaauauauugagaacacaagagucugaaugugcauguguaaaugguucuugcuuuacuguaaugaccgauggaccaagugauggacaggccucauacaagaucuucagaauagaaaagggaaagauagucaaaucagucgaaaugaaugccccuaauuaucacuaugaggaaugcuccuguuauccugauucuagugaaaucacaugugugugcagggauaacuggcauggcucgaaucgaccgugggugucuuucaaccagaaucuggaauaucagauaggauacauaugcagugggauuuucggagacaauccacgcccuaaugauaagacaggcaguugugguccaguaucgucuaauggagcaaauggaguaaaaggauuuucauucaaauacggcaaugguguuuggauagggagaacuaaaagcauuaguucaagaaacgguuuugagaugauuugggauccgaacggauggacugggacagacaauaacuucucaauaaagcaagauaucauaggaauaaaugaguggucaggauauagcgggaguuuuguucagcauccagaacuaacagggcuggauuguauaagaccuugcuucuggguugaacuaaucagagggcgacccaaagagaacacaaucuggacuagcgggagcagcauauccuuuugugguguaaacagugacacuguggguuggucuuggccagacggugcugaguugccauuuaccauugacaaguaa

SEQ ID NO: 49781 - RNA, 1410 nt, Artificial Sequence
  derived and/or modified CDS sequence (wt) from neuraminidase__InfluenzaA__ACZ95960
augaauccaaaccaaaagauaauaaccauugguucggucuguaugacaauuggaauggcuaacuuaauauuacaaauuggaaacauaaucucaauauggauuagccacucaauucaacuugggaaucaaaaucagauugaaacaugcaaucaaagcgucauuacuuaugaaaacaacacuuggguaaaucagacauauguuaacaucagcaacaccaacuuugcugcuggacagucagugguuuccgugaaauuagcgggcaauuccucucucugcccuguuaguggaugggcuauauacaguaaagacaacaguauaagaauugguuccaagggggauguguuugucauaagggaaccauucauaucaugcucccccuuggaaugcagaaccuucuucuugacucaaggggccuugcuaaaugacaaacauuccaauggaaccauuaaagacaggagcccauaucgaacccuaaugagcuguccuauuggugaaguucccucuccauacaacucaagauuugagucagucgcuuggucagcaagugcuugucaugauggcaucaauuggcuaacaauuggaauuucuggcccagacaauggagcaguggcuguguuaaaguacaacggcauaauaacagacacuaucaagaguuggagaaacaauauauugagaacacaagagucugaaugugcauguguaaaugguucuugcuuuacuguaaugaccgauggaccaagugauggacaggccucauacaagaucuucagaauagaaaagggaaagauagucaaaucagucgaaaugaaugccccuaauuaucacuaugaggaaugcuccuguuauccugauucuagugaaaucacaugugugugcagggauaacuggcauggcucgaaucgaccgugggugucuuucaaccagaauuuggaauaucagauaggauacauaugcagugggauuuucggagacaauccacgcccuaaugauaagacaggcaguugugguccaguaucgucuaauggagcaaauggaguaaaaggauuuucauucaaauacggcaaugguguuuggauagggagaacuaaaagcauuaguucaagaaacgguuuugagaugauuugggauccgaacggauggacugggacagacaauaacuucucaauaaagcaagauaucguaggaauaaaugaguggucaggauauagcgggaguuuuguucagcauccagaacuaacagggcuggauuguauaagaccuugcuucuggguugaacuaaucagagggcgacccaaagagaacacaaucuggacuagcgggagcagcauauccuuuugugguguaaacagugacacuguggguuggucuuggccagacggugcugaguugccauuuaccauugacaaguaa

SEQ ID NO: 49782 - RNA, 1410 nt, Artificial Sequence; identical to SEQ ID NO: 49780
  derived and/or modified CDS sequence (wt) from neuraminidase__InfluenzaA__ACZ95970

SEQ ID NO: 49783 - RNA, 1410 nt, Artificial Sequence; identical to SEQ ID NO: 49777
  derived and/or modified CDS sequence (wt) from neuraminidase__InfluenzaA__ACZ95980

SEQ ID NO: 49784 - RNA, 1410 nt, Artificial Sequence
  derived and/or modified CDS sequence (wt) from neuraminidase__InfluenzaA__ACZ95990
augaauccaaaccaaaagauaauaaccauugguucggucuguaugacaauuggaauggcuaacuuaauauuacaaauuggaaacauaaucucaauauggauuagccacucaauucaacuugggaaucaaaaucagauugaaacaugcaaucaaagcgucauuacuuaugaaaacaacacuuggguaaaucagacauauguuaacaucagcaacaccaacuuugcugcuggacagucagugguuuccgugaaauuagcgggcaauuccucucucugcccuguuaguggaugggcuauauacaguaaagacaacaguauaagaaucgguuccaaaggggauguguuugucauaagggaaccauucauaucaugcucccccuuggaaugcagaaccuucuucuugacucaaggggccuugcuaaaugacaaacauuccaauggaaccauuaaagacaggagcccauaucgaacccuaaugagcuguccuauuggugaaguucccucuccauacaacucaagauuugagucagucgcuuggucagcaagugcuugucaugauggcaucaauuggcuaacaauuggaauuucuggcccagacaauggggcaguggcuguguuaaaguacaacggcauaauaacagacacuaucaagaguuggagaaacaauauauugagaacacaagagucugaaugugcauguguaaaugguucuugcuuuacuguaaugaccgauggaccaagugauggacaggccucauacaagaucuucagaauagaaaagggaaagauagucaaaucagucgaaaugaaugccccuaauuaucacuaugaggaaugcuccuguuauccugauucuagugaaaucacaugugugugcagggauaacuggcauggcucgaaucgaccgugggugucuuucaaccagaaucuggaauaucagauaggauacauaugcagugggauuuucggagacaauccacgcccuaaugauaagacaggcaguugugguccaguaucguccaauggagcaaauggaguaaaaggauuuucauucaaauacggcaaugguguuuggauagggagaacuaaaagcauuaguucaagaaacgguuuugagaugauuugggauccgaacggauggacugggacagacaauaacuucucaauaaagcaagauaucguaggaauaaaugaguggucaggauauagcgggaguuuuguccagcauccagaacuaacagggcuggauuguauaagaccuugcuucuggguugaacuaaucagagggcgacccaaagagaacacaaucuggacuagcgggagcagcauauccuuuugugguguaaacagugacacuguggguuggucuuggccagacggugcugaguugccauuuaccauugacaaguaa

SEQ ID NO: 49785 - RNA, 1410 nt, Artificial Sequence
  derived and/or modified CDS sequence (wt) from neuraminidase__InfluenzaA__ACZ96000
augaauccaaaccaaaagauaauaaccauugguucggucuguaugacaauuggaauggcuaacuuaauauuacaaauuggaaacauaaucucaauauggauuagccacucaauucaacuugggaaucaaaaucagauugaaacaugcaaucaaagcgucauuacuuaugaaaacaacacuuggguaaaucagacauauguuaacaucagcaacaccaacuuugcugcuggacagucagugguuuccgugaaauuagcgggcaauuccucucucugcccuguuaguggaugggcuauauacaguaaagacaacaguauaagaaucgguuccaagggggauguguuugucauaagggaaccauucauaucaugcucccccuuggaaugcagaaccuucuucuugacucaaggggccuugcuaaaugacaaacauuccaauggaaccauuaaagacaggagcccauaucgaacccuaaugagcuguccuauuggugaaguccccucuccauacaacucaagauuugagucagucgcuuggucagcaagugcuugucaugauggcaucaauuggcuaacaauuggaauuucuggcccagacaauggggcaguggcuguguuaaaguacaacggcauaauaacagacacuaucaagaguuggagaaacaauauauugagaacacaagagucugaaugugcauguguaaaugguucuugcuuuacuguaaugaccgauggaccaagugauggacaggccucauacaagaucuucagaauagaaaagggaaagauagucaaaucagucgaaaugaaugccccuaauuaucacuaugaggaaugcuccuguuauccugauucuagugaaaucacaugugugugcagggauaacuggcauggcucgaaucgaccgugggugucuuucaaccagaaucuggaauaucagauaggauacauaugcagugggauuuucggagacaauccacgcccuaaugauaagacaggcaguugugguccaguaucgucuaauggagcaaauggaguaaaaggauuuucauucaaauacggcaaugguguuuggauagggagaacuaaaagcauuaguucaagaaacgguuuugagaugauuugggauccgaacggauggacugggacagacaauaacuucucaauaaagcaagauaucguaggaauaaaugaauggucaggauauagcgggaguuuuguucagcauccagaacuaacagggcuggauuguauaagaccuugcuucuggguugaacuaaucagagggcgacccaaagagaacacaaucuggacuagcgggagcagcauauccuuuugugguguaaacagugacacuguggguuggucuuggccagacggugcugaguugccauuuaccauugacaaguaa

SEQ ID NO: 49786 - RNA, 1410 nt, Artificial Sequence
  derived and/or modified CDS sequence (wt) from neuraminidase__InfluenzaA__ACZ96010
augaauccaaaccaaaagauaauaaccauugguucggucuguaugacaauuggaauggcuaacuuaauauuacaaauuggaaacauaaucucaauauggauuagccacucaauucaacuugggaaucaaaaucagauugaaacaugcaaucaaagcgucauuacuuaugaaaacaacacuuggguaaaucagacauauguuaacaucagcaacaccaacuuugcugcuggacagucagugguuuccgugaaauuagcgggcaauuccucucucugcccuguuaguggaugggcuauauacaguaaagacaacaguauaagaaucgguuccaagggggauguguuugucauaagggaaccauucauaucaugcucccccuuggaaugcagaaccuucuucuugacucaaggggccuugcuaaaugacaaacauuccaauggaaccauuaaagacaggagcccauaucgaacccuaaugagcuguccuauuggugaaguucccucuccauacaacucaagauuugagucagucgcuuggucagcaagugcuugucaugauggcaucaauuggcuaacaauuggaauuucuggcccagacaauggggcaguggcuguguuaaaauacaacggcauaauaacagacacuaucaagaguuggagaaacaauauauugagaacacaagagucugaaugugcauguguaaaugguucuugcuuuacuguaaugaccgauggaccaagugauggacaggccucauacaagaucuucagaauagaaaagggaaagauagucaaaucagucgaaaugaaugccccuaauuaucacuaugaggaaugcuccuguuauccugauucuagugaaaucacaugugugugcagggauaacuggcauggcucgaaucgaccgugggugucuuucaaccagaaucuggaauaucagauaggauacauaugcagugggauuuucggagacaauccacgcccuaaugauaagacaggcaguugugguccaguaucgucuaauggagcaaauggaguaaaaggauuuucauucaaauacggcaaugguguuuggauagggagaacuaaaagcauuaguucaagaaacgguuuugagaugauuugggauccgaacggauggacugggacagacaauaacuucucaauaaagcaagauaucguaggaauaaaugaguggucaggauauagcgggaguuuuguucagcauccagaacuaacagggcuggauuguauaagaccuugcuucuggguugaacuaaucagagggcgacccaaagagaacacaaucuggacuagcgggagcagcauauccuuuugugguguaaacagugacacuguggguuggucuuggccagacggugcugaguugccauuuaccauugacaaguaa

SEQ ID NO: 49787 - RNA, 1410 nt, Artificial Sequence
  derived and/or modified CDS sequence (wt) from neuraminidase__InfluenzaA__ACZ96020
augaauccaaaccaaaagauaauaaccauugguucggucugcaugacaauuggaauggcuaacuuaauauuacaaauuggaaacauaaucuuaauauggauuagccacucaauucaacuugggaaucaaaaucagacugaaacaugcaaucaaagcgucaucaccuacgaaaacaacacuuggguaaaucagacauauguuaacaucagcaacaccaacuuugcugcuggacagucagugguuuccgugaaauuagcgggcaauuccucucucugcccuguuaguggaugggcuauauacaguaaagacaacaguguaagaaucgguuccaagggggauguguuugucauaagggaaccauucauaucaugcucccccuuggaaugcagaaccuucuucuugacucaaggggccuugcuaaaugacaaacauuccaauggaaccauuaaagacaggagcccauaucgaacccuaaugagcuguccuauuggugaaguucccucuccauacaacucaagauuugagucagucgcuuggucagcaagugcuugucaugauggcaucaauuggcuaacaauuggaauuucugggccagacaauggggcaguggcuguguuaaaguacaacggcauaauaacagacacuaucaagaguuggagaaacaauauauugagaacacaagagucugaaugugcauguguaaaugguucuugcuuuacuguaaugaccgauggaccaaguaauggacaggccucauacaagaucuucagaauagaaaagggaaagauagucaaaucagucgaaaugaaugccccuaauuaucacuaugaggaaugcuccuguuauccugauucuagugaaaucacaugugugugcagggauaacuggcauggcucgaaucgaccgugggugucuuucaaccagaaucuggaauaucagauaggauacauaugcagugggauuuucggagacaauccacgcccuauugauaagacaggcaguugugguccaguaucgucuaauggagcaaauggaguaaaaggauuuucauucaaauacggcaaugguguuuggauagggagaacuaaaagcauuaguucaagaaacgguuuugagaugauuugggauccgaacggauggacugggacagacaauaacuucucaauaaagcaagauaucguaggaauaaaugaguggucaggauauagcgggaguuuuguucagcauccggaacuaacagggcuggauuguauaagaccuugcuucuggguugaacuaaucagagggcgacccaaagagaacacaaucuggacuagcgggagcagcauauccuuuugugguguaaacagugacacuguggguuggucuuggccagacggugcugaguugccauuuaccauugacaaguaa

SEQ ID NO: 49788 - RNA, 1410 nt, Artificial Sequence; identical to SEQ ID NO: 49777
  derived and/or modified CDS sequence (wt) from neuraminidase__InfluenzaA__ACZ96050

SEQ ID NO: 49789 - RNA, 1410 nt, Artificial Sequence; identical to SEQ ID NO: 48750
  derived and/or modified CDS sequence (wt) from neuraminidase__InfluenzaA__ACZ96060

SEQ ID NO: 49790 - RNA, 1410 nt, Artificial Sequence; identical to SEQ ID NO: 49786
  derived and/or modified CDS sequence (wt) from neuraminidase__InfluenzaA__ACZ96072

SEQ ID NO: 49791 - RNA, 1410 nt, Artificial Sequence
  derived and/or modified CDS sequence (wt) from neuraminidase__InfluenzaA__ACZ96082
augaauccaaaccaaaagauaauaaccauugguucggucuguaugacaauuggaauggcuaacuuaauauuacaaauuggaaacauaaucucaauauggauuagccacucaauucaacuugggaaucaaaaucagauugaaacaugcaaucaaagcgucauuacuuaugaaaauaacacuuggguaaaucagacauauguuaacaucagcaacaccaacuuugcugcuggacagucagugguuuccgugaaauuagcgggcaauuccucucucugcccuguuaguggaugggcuauauacaguaaagacaacaguauaagaaucgguuccaaaggggauguguuugucauaagggaaccauucauaucaugcucccccuuggaaugcagaaccuucuucuugacucaaggggccuugcuaaaugacaaacauuccaauggaaccauuaaagacaggagcccauaucgaacccuaaugagcuguccuauuggugaaguucccucuccauacaacucaagauuugagucagucgcuuggucagcaagugcuugucaugauggcaucaauuggcuaacaauuggaauuucuggcccagacaauggggcaguggcuguguuaaaguacaacggcauaauaacagacacuaucaagaguuggagaaacaauauauugagaacacaagagucugaaugugcauguguaaaugguucuugcuuuacuguaaugaccgauggaccaagugauggacaggccucauacaagaucuucagaauagaaaagggaaagauagucaaaucagucgaaaugaaugccccuaauuaucacuaugaggaaugcuccuguuauccugauucuagugaaaucacaugugugugcagggauaacuggcauggcucgaaucgaccgugggugucuuucaaccagaaucuggaauaucagauaggauacauaugcagugggauuuucggagacaauccacgcccuaaugauaagacaggcaguugugguccaguaucguccaauggagcaaauggaguaaaaggauuuucauucaaauacggcaaugguguuuggauagggagaacuaaaagcauuaguucaagaaacgguuuugagaugauuugggauccgaacggauggacugggacagacaauaacuucucaauaaagcaagauaucguaggaauaaaugaguggucaggauauagcgggaguuuuguccagcauccagaacuaacagggcuggauuguauaagaccuugcuucuggguugaacuaaucagagggcgacccaaagagaacacaaucuggacuagcgggagcagcauauccuuuugugguguaaacagugacacuguggguuggucuuggccagacggugcugaguugccauuuaccauugacaaguaa

SEQ ID NO: 49792 - RNA, 1410 nt, Artificial Sequence; identical to SEQ ID NO: 49777
  derived and/or modified CDS sequence (wt) from neuraminidase__InfluenzaA__ACZ96092

SEQ ID NO: 49793 - RNA, 1410 nt, Artificial Sequence
  derived and/or modified CDS sequence (wt) from neuraminidase__InfluenzaA__ACZ96102
augaauccaaaccaaaagauaauaaccauugguucggucuguaugacaauuggaauggcuaacuuaauauuacaaauuggaaacauaaucucaauauggauuagccacucaauucaacuugggaaucaaaaucagauugaaacaugcaaucaaagcgucauuacuuaugaaaacaacacuuggguaaaucagacauauguuaacaucagcaacaccaacuuugcugcuggacagucagugguuuccgugaaauuagcgggcaauuccucucucugcccuguuaguggaugggcuauauacaguaaagacaacaguauaagaaucgguuccaagggggauguguuugucauaagggaaccauucauaucaugcucccccuuggaaugcagaaccuucuucuugacucaaggggccuugcuaaaugacaaacauuccaauggaaccauuaaagacaggagcccauaucgaacccuaaugagcuguccuauuggugaaguucccucuccauacaacucaagauuugagucagucgcuuggucagcaagugcuugucaugauggcaucaauuggcuaacaauuggaauuucuggcccagacaauggggcaguggcuguguuaaaguacaacggcauaauaacagacacuaucaagaguuggagaaacaacauauugagaacacaagagucugaaugugcauguguaaaugguucuugcuuuacuguaaugaccgauggaccaagugauggacaggccucauacaaaaucuucagaauagaaaagggaaagauagucaaaucagucgaaaugaaugccccuaauuaucacuaugaggaaugcuccuguuauccugauucuagugaaaucacaugugugugcagggauaacuggcauggcucgaaucgaccgugggugucuuucaaccaaaaucuggaauaucagauaggauacauaugcagugggauuuucggagacaauccacgcccuaaugauaagacaggcaguugugguccaguaucgucuaauggagcaaauggaguaaaaggauuuucauucaaauacggcaaugguguuuggauagggagaacuaaaagcauuaguucaagaaacgguuuugagaugauuugggauccgaacggauggacugggacagacaauaacuucucaauaaagcaagauaucguaggaauaaaugaguggucaggauauagcgggaguuuuguucagcauccagaacuaacagggcuggauuguauaagaccuugcuucuggguugaacuaaucagagggcgacccaaagagaacacaaucuggacuagcgggagcagcauauccuuuugugguguaaacagugacacuguggguuggucuuggccagacggugcugaguugccauuuaccauugacaaguaa

SEQ ID NO: 49794 - RNA, 1410 nt, Artificial Sequence
  derived and/or modified CDS sequence (wt) from neuraminidase__InfluenzaA__ACZ96112
augaauccaaaccaaaagauaauaaccauugguucggucuguaugacaauuggaauggcuaacuuaauauuacaaauuggaaacauaaucucaauauggauuagccacucaauucaacuugggaaucaaaaucagauugaaacaugcaaucaaagcgucauuacuuaugaaaacaacacuuggguaaaucagacauauguuaacaucagcaacaccaacuuugcugcuggacagucagugguuuccgugaaauuagcgggcaauuccucucucugcccuguuaguggaugggcuauauacaguaaagacaacaguauaagaaucgguuccaagggggauguguuugucauaagggaaccauucauaucaugcucccccuuggaaugcagaaccuucuucuugacucaaggggccuugcuaaaugacaaacauuccaauggaaccauuaaagacaggagcccauaucgaacccuaaugagcuguccuauuggugaaguucccucuccauacaacucaagauuugagucagucgcuuggucagcaagugcuugucaugauggcaucaauuggcuaacaauuggaauuucuggcccagacaauggggcaguggcuguguuaaaguacaacggcauaauaacagacacuaucaagaguuggagaaacaauauauugagaacacaagagucugaaugugcauguguaaaugguucuugcuuuacuguaaugaccgauggaccaagugauggacaggccucauacaagaucuucagaauagaaaagggaaagauagucaaaucagucgaaaugaaugccccuaauuaucacuaugaggaaugcuccuguuauccugauucuagugaaaucacaugugugugcagggauaacuggcauggcucgaaucgaccgugggugucuuucaaccagaaucuggaauaucagauaggauacauaugcagugggauuuucggagacaauccacgcccuaaugauaagacaggcaguugugguccaguaucgucuaauggagcaaauggaguaaaaggauuuucauucaaauacggcaaugguguuuggauagggagaacuaaaagcauuaguucaagaaacgguuuugagaugauuugggauccgaacggauggacugggacagacaauaacuucucaauaaagcaagauaucguaggaauaaaugaauggucaggauauagcgggaguuuuguucagcauccagaacuaacagggcuggauuguauaagaccuugcuucuggguugaacuaaucagagggcgacccaaagagaacacaaucuggacuagcgggagcagcauauccuuuugugguguaaacagugacacuguggguuggucuuggccagacggugcugaguugccauuuaccauugacaaguaa

SEQ ID NO: 49795 - RNA, 1410 nt, Artificial Sequence
  derived and/or modified CDS sequence (wt) from neuraminidase__InfluenzaA__ACZ96122
augaauccaaaccaaaagauaauaaccauugguucggucuguaugacaauuggaauggcuaacuuaauauuacaaauuggaaacauaaucucaauauggauuagccacucaauucaacuugggaaucaaaaucagauugaagcaugcaaucaaagcgucauuacuuaugaaaacaacacuuggguaaaucagacauauguuaacaucagcaacaccaacuuugcugcuggacagucagugguuuccgugaaauuagcgggcaauuccucucucugcccuguuaguggaugggccauauacaguaaagacaacaguauaagaaucgguuccaagggggauguguuugucauaagggaaccauucauaucaugcucccccuuggaaugcagaaccuucuucuugacucaaggggccuugcuaaaugacaaacauuccaauggaaccauuaaagacaggagcccauaucgaacccuaaugagcuguccuauuggugaaguucccucuccauacaacucaagauuugagucagucgcuuggucagcaagugcuugucaugauggcaucaauuggcuaacaauuggaauuucuggcccagacaauggggcaguggcuguguuaaaguacaacggcauaauaacagacacuaucaagaguuggagaaacaauauauugagaacacaagagucugaaugugcauguguaaaugguucuugcuuuacuguaaugaccgauggaccaagugauggacaggccucauacaagaucuucagaauagaaaagggaaagauagucaaaucagucgaaaugaaugccccuaauuaucacuaugaggaaugcuccuguuauccugauucuagugaaaucacaugugugugcagggauaacuggcauggcucgaaucgaccgugggugucuuucaaccagaaucuggaauaucagauaggauacauaugcagugggauuuucggagacaauccacgcccuaaugauaagacaggcaguugugguccaguaucgucuaauggagcaaauggaguaaaaggauuuucauucaaauacggcaaugguguuuggauagggagaacuaaaagcauuaguucaaggaacgguuuugagaugauuugggauccgaacggauggacugggaaagacaauaacuucucaauaaagcaagauaucguaggaauaaaugaguggucaggauauagcgggaguuuuguucagcauccagaacuaacagggcuggauuguauaagaccuugcuucuggguugaacuaaucagagggcgacccaaagagaacacaaucuggacuagcgggagcagcauauccuuuugugguauaaacagugacacuguggguuggucuuggccagacggugcugaguugccauuuaccauugacaaguaa

SEQ ID NO: 49796 - RNA, 1410 nt, Artificial Sequence; identical to SEQ ID NO: 48750
  derived and/or modified CDS sequence (wt) from neuraminidase__InfluenzaA__ACZ96132

SEQ ID NO: 49797 - RNA, 1410 nt, Artificial Sequence; identical to SEQ ID NO: 48814
  derived and/or modified CDS sequence (wt) from neuraminidase__InfluenzaA__ACZ96142

SEQ ID NO: 49798 - RNA, 1410 nt, Artificial Sequence
  derived and/or modified CDS sequence (wt) from neuraminidase__InfluenzaA__ACZ96152
augaauccaaaccaaaagauaauaaccauugguucggucuguaugacaauuggaauggcuaacuuaauauuacaaauuggaaacauaauaucaauauggauuagccacucaauucaacuugggaaucaaaaucagauugaaacaugcaaucaaagcgucauuacuuaugaaaacaacacuuggguaaaucagacauauguuaacaucagcaacaccaacuuugcugcuggacagucagugguuuccgugaaauuagcgggcaauuccucucucugcccuguuaguggaugggcuauauacaguaaagacaacaguauaagaaucgguuccaagggggauguguuugucauaagggaaccauucauaucaugcucccccuuggaaugcagaaccuucuucuugacucaaggggccuugcuaaaugacaaacauuccaauggaaccauuaaagacaggagcccauaucgaacccuaaugagcuguccuauuggugaaguucccucuccauacaacucaagauuugagucagucgcuuggucagcaagugcuugucaugauggcaucaauuggcuaacaauuggaauuucuggcccagacaauggggcaguggcuguguuaaaguacaacggcauaauaacagacacuaucaagaguuggagaaacaauauauugagaacacaagagucugaaugugcauguguaaaugguucuugcuuuacugugaugaccgauggaccaagugauggacaggccucauacaagaucuucagaauagaaaagggaaagauagucaaaucagucgaaaugaaugccccuaauuaucacuaugaggaaugcuccuguuauccugauucuagugaaaucacaugugugugcagggauaacuggcauggcucgaaucgaccgugggugucuuucaaccagaaucuggaauaucagauaggauacauaugcagugggauuuucggagacaauccacgcccuaaugauaagacaggcaguugugguccaguaucgucuaauggagcaaauggaguaaaaggauuuucauucaaauacggcaaugguguuuggauagggagaacuaaaagcauuaguucaagaaacgguuuugagaugauuugggauccgaacggauggacugggacagacaauaacuucucaauaaagcaagauaucguaggaauaaaugaguggucaggauauagcgggaguuuuguucagcauccagaacuaacagggcuggauuguauaagaccuugcuucuggguugaacuaaucagagggcgacccaaagagaacacaaucuggacuagcgggagcagcauauccuuuugugguguaaacagugacacuguggguuggucuuggccagacggugcugaguugccauuuaccauugacaaguaa

SEQ ID NO: 49799 - RNA, 1410 nt, Artificial Sequence; identical to SEQ ID NO: 49785
  derived and/or modified CDS sequence (wt) from neuraminidase__InfluenzaA__ACZ96162

SEQ ID NO: 49800 - RNA, 1410 nt, Artificial Sequence; identical to SEQ ID NO: 48814
  derived and/or modified CDS sequence (wt) from neuraminidase__InfluenzaA__ACZ96172

SEQ ID NO: 49801 - RNA, 1410 nt, Artificial Sequence
  derived and/or modified CDS sequence (wt) from neuraminidase__InfluenzaA__ACZ96182
augaauccaaaccaaaagauaauaaccauugguucggucuguaugacaauuggaauggcuaacuuaauauuacaaauuggaaacauaaucucaauauggauuagccacucaauucaacuugggaaucaaaaucagauugaaacaugcaaucaaagcgucauuacuuaugaaaacaacacuuggguaaaucagacauauguuaacaucagcaacaccaacuuugcugcuggacagucagugguuuccgugaaauuagcgggcaauuccucucucugcccuguuaguggaugggcuauauacaguaaagacaacaguauaagaaucgguuccaagggggauguguuugucauaagggaaccauucauaucaugcucccccuuggaaugcagaaccuucuucuugacucaaggggccuugcuaaaugacagacauuccaauggaaccauuaaagacaggagcccauaucgaacccuaaugagcuguccuauuggugaaguucccucuccauacaacucaagauuugagucagucgcuuggucagcaagugcuugucaugauggcaucaauuggcuaacaauuggaauuucuggcccagacaauggggcaguggcuguguuaaaguacaacggcauaauaacagacacuaucaagaguuggagaaacaauauauugagaacacaagagucugaaugugcauguguaaaugguucuugcuuuacuguaaugaccgauggaccaagugauggacaggccucauacaagaucuucagaauagaaaagggaaagauagucaaaucagucgaaaugaaugccccuaauuaucacuaugaggaaugcuccuguuauccugauucuagugaaaucacaugugugugcagggauaacuggcauggcucgaaucgaccgugggugucuuucaaccagaaucuggaauaucagauaggauacauaugcagugggauuuucggagacaauccacgcccuaaugauaagacaggcaguugugguccaguaucgucuaauggagcaaauggaguaaaaggauuuucauucaaauacggcaaugguguuuggauagggagaacuaaaagcauuaguucaagaaacgguuuugagaugauuugggauccgaacggauggacugggacagacaauaacuucucaauaaagcaagauaucguaggaauaaaugaauggucaggauauagcgggaguuuuguucagcauccagaacuaacagggcuggauuguauaagaccuugcuucuggguugaacuaaucagagggcgacccaaagagaacacaaucuggacuagcgggagcagcauauccuuuugugguguaaacagugacacuguggguuggucuuggccagacggugcugaguugccauuuaccauugacaaguaa

SEQ ID NO: 49802 - RNA, 1410 nt, Artificial Sequence
  derived and/or modified CDS sequence (wt) from neuraminidase__InfluenzaA__ACZ96192
augaauccaaaccaaaagauaauaaccauugguucggucuguaugacaauuggaauggcuaacuuaauauuacaaauuggaaacauaaucucaauauggauuagccacucaauucaacuugggaaucaaaaucagauugaaacaugcaaucaaagcgucauuacuuaugaaaacaacacuuggguaaaucagacauauguuaacaucagcaacaccaacuuugcugcuggacagucagugguuuccgugaaauuagcgggcaauuccucucucugcccuguuaguggaugggcuauauacaguaaagacaacaguauaagaaucgguuccaagggggauguguuugucauaagggaaccauucauaucaugcucccccuuggaaugcagaaccuucuucuugacucaaggggccuugcuaaaugacaaacauuccaauggaaccauuaaagacaggagcccauaucgaacccuaaugagcuguccuauuggugaaguucccucuccauacaacucaagauuugagucagucgcuuggucagcaagugcuugucaugauggcaucaauuggcuaacaauuggaauuucuggcccagacaauggggcaguggcuguguuaaaguacaacggcauaauaacagacacuaucaagaguuggagaaacaauauauugagaacacaagagucugaaugugcauguguaaaugguucuugcuuuacuguaaugaccgauggaccaagugauggacaggccucauacaagaucuucagaauagaaaagggaaagauagucaaaucagucgaaaugaaugccccuaauuaucacuaugaggaaugcuccuguuauccugauucuagugaaaucacaugugugugcagggauaacuggcauggcucgaaucgaccgugggugucuuucaaccagaaucuggaauaucagauaggauacauaugcagugggauuuucggagacaauccacgcucuaaugauaagacaggcaguugugguccaguaucgucuaauggagcaaauggaguaaaaggauuuucauucaaauacggcaaugguguuuggauagggagaacuaaaagcauuaguucaagaaacgguuuugagaugauuugggauccgaacggauggacugggacagacaauaacuucucaauaaagcaagauaucguaggaauaaaugaguggucaggauauagcgggaguuuuguucagcauccagaacuaacagggcuggauuguauaagaccuugcuucuggguugaacuaaucagagggcgacccaaagagaacacaaucuggacuagcgggagcagcauauccuuuugugguguaaacagugacacuguggguuggucuuggccagacggugcugaguugccauuuaccauugacaaguaa

SEQ ID NO: 49803 - RNA, 1410 nt, Artificial Sequence
  derived and/or modified CDS sequence (wt) from neuraminidase__InfluenzaA__ACZ96232
augaauccaaaccaaaagauaauaaccauugguucggucuguaugacaguuggaauggcuaacuuaauauuacaaauuggaaacauaaucucaauauggauuagccacucaauucaacuugggaaucaaaaucagauugaaacaugcaaucaaagcgucauuacuuaugaaaacaacacuuggguaaaucagacauauguuaacaucagcaacaccaacuuugcugcuggacagucagugguuuccgugaaauuagcgggcaauuccucucucugcccuguuaguggaugggcuauauacaguaaagacaacaguauaagaaucgguuccaagggggauguguuugucauaagggaaccauucauaucaugcucccccuuggaaugcagaaccuucuucuugacucaaggggccuugcuaaaugacaaacauuccaauggaaccauuaaagacaggagcccauaucgaacccuaaugagcuguccuauuggugaaguucccucuccauacaacucaagauuugagucagucgcuuggucagcaagugcuugucaugauggcaucaauuggcuaacaauuggaauuucuggcccagacaauggggcaguggcuguguuaaaguacaacggcauaauaacagacacuaucaagaguuggagaaacaauauauugagaacacaagagucugaaugugcauguguaaaugguucuugcuuuacuguaaugaccgauggaccaagugauggacaggccucauacaagaucuucagaauagaaaagggaaagauagucaaaucagucgaaaugaaugccccuaauuaucacuaugaggaaugcuccuguuauccugauucuagugaaaucacaugugugugcagggauaacuggcauggcucgaaucgaccgugggugucuuucaaccagaaucuggaauaucagauaggauacauaugcaguggaauuuucggagacaauccacgcccuaaugauaagacaggcaguugugguccaguaucgucuaauggagcaaauggaguaaaaggauuuucauucaaauacggcaaugguguuuggauagggagaacuaaaagcauuaguucaagaaacgguuuugagaugauuugggauccgaacggauggacugggacagacaaugacuucucaauaaagcaagauaucguaggaauaaaugaguggucaggauauagcgggaguuuuguucagcauccagaacuaacagggcuggauuguauaagaccuugcuucuggguugaacuaaucagagggcgacccaaagagaacacaaucuggacuagcgggagcagcauauccuuuugugguguaaacagugacacuguggguuggucuuggccagacggugcugaguugccauuuaccauugacaaguaa

SEQ ID NO: 49804 - RNA, 1410 nt, Artificial Sequence
  derived and/or modified CDS sequence (wt) from neuraminidase__InfluenzaA__ACZ96242
augaauccaaaccaaaagauaauaaccauugguucggucuguaugacaauuggaauggcuaacuuaauauuacaaauuggaaacauaaucucaauauggauuagccacucaauucaacuugggaaucaaaaucagauugaaacaugcaaucaaagcgucauuacuuaugaaaacaacacuuggguaaaucagacauauguuaacaucagcaacaccaacuuugcugcuggacagucagugguuuccgugaaauuagcgggcaauuccucucucugcccuguuaguggaugggcuauauacaguaaagacaacaguauaagaaucgguuccaagggggauguguuugucauaagggaaccauucauaucaugcucccccuuggaaugcagaaccuucuucuugacucaaggggccuugcuaaaugacaaacauuccaauggaaccauuaaagacaggagcccauaucgaacccuaaugagcuguccuauuggugaaguucccucuccauacaacucaagauuugagucagucgcuuggucagcaagugcuugucaugauggcaucaauuggcuaacaauuggaauuucuggcccagacaauggggcaguggcuguguuaaaguacaacggcauaauaacagacacuaucaagaguuggagaaacaauauauugagaacacaagagucugaaugugcauguguaaaugguucuugcuuuacuguaaugaccgauggaccaagugauggacaggccucauacaagaucuucagaauagaaaagggaaagauagucaaaucagucgaaaugaaugccccuaauuaucacuaugaggaaugcuccuguuauccugauucuagugaaaucacaugugugugcagggauaacuggcauggcucgaaucgaccgugggugucuuucaaccagaaucuggaauaucagauaggauacauaugcagugggauuuucggagacaauccacgcccuaaugauaagacaggcaguugugguccaguaucgucuaauggagcaaauggaguaaaaggauuuucauucaaauacggcaaugguguuuggauagggagaacuaaaagcauuaguucaagaaacgguuuugagaugauuugggauccgaacggauggacugggacagacaauaacuucucaauaaagcaagauaucguaggaauaaaugaauggucaggauauagcgggaguuuuguucagcauccagaacuaacagggcuggauuguauaagaccuugcuucuggguugaacuaaucagagggcgacccaaagagagcacaaucuggacuagcgggagcagcauauccuuuugugguguaaacagugacacuguggguuggucuuggccagacggugcugaguugccauuuaccauugacaaguaa

SEQ ID NO: 49805 - RNA, 1410 nt, Artificial Sequence; identical to SEQ ID NO: 49786
  derived and/or modified CDS sequence (wt) from neuraminidase__InfluenzaA__ACZ96252

SEQ ID NO: 49806 - RNA, 1410 nt, Artificial Sequence; identical to SEQ ID NO: 49781
  derived and/or modified CDS sequence (wt) from neuraminidase__InfluenzaA__ACZ96292

SEQ ID NO: 49807 - RNA, 1410 nt, Artificial Sequence
  derived and/or modified CDS sequence (wt) from neuraminidase__InfluenzaA__ACZ96302
augaauccaaaccaaaagauaauaaccauugguucggucuguaugacaauuggaauggcuaacuuaauauuacaaauuggaaacauaaucucaauauggauuagccacucaauucaacuugggaaucaaaaucagauugaaacaugcaaucaaagcgucauuacuuaugaaaacaacacuuggguaaaucagacauauguuaacaucagcaacaccaacuuugcugcuggacagucagugguuuccgugaaauuagcgggcaauuccucucucugcccuguuaguggaugggcuauauacaguaaagacaacaguauaagaauugguuccaagggggauguguuugucauaagggaaccauucauaucaugcucccccuuggaaugcagaaccuucuucuugacucaaggggccuugcuaaaugacaaacauuccaauggaaccauuaaagacaggagcccauaucgaacccuaaugagcuguccuauuggugaaguucccucuccauacaacucaagauuugagucagucgcuuggucagcaagugcuugucaugauggcaucaauuggcuaacaauuggaauuucuggcccagacaauggagcaguggcuguguuaaaguacaacggcauaauaacagacacuaucaagaguuggagaaacaauauauugagaacacaagagucugaaugugcauguguaaaugguucuugcuuuacuguaaugaccgauggaccaagugauggacaggccucauacaagaucuucagaauagaaaagggaaagauagucaaaucggucgaaaugaaugccccuaauuaucacuaugaggaaugcuccuguuauccugauucuagugaaaucacaugugugugcagggauaacuggcauggcucgaaucgaccgugggugucuuucaaccagaauuuggaauaucagauaggauacauaugcagugggauuuucggagacaauccacgcccuaaugauaagacaggcaguugugguccaguaucgucuaauggagcaaauggaguaaaaggauuuucauucaaauacggcaaugguguuuggauagggagaacuaaaagcauuaguucaagaaacgguuuugagaugauuugggauccgaacggauggacugggacagacaauaacuucucaauaaagcaagauaucguaggaauaaaugaguggucaggauauagcgggaguuuuguucagcauccagaacuaacagggcuggauuguauaagaccuugcuucuggguugaacuaaucagagggcgacccaaagagaacacaaucuggacuagcgggagcagcauauccuuuugugguguaaacagugacacuguggguuggucuuggccagacggugcugaguugccauuuaccauugacaaguaa

SEQ ID NO: 49808 - RNA, 1410 nt, Artificial Sequence; identical to SEQ ID NO: 49197
  derived and/or modified CDS sequence (wt) from neuraminidase__InfluenzaA__ACZ96312

SEQ ID NO: 49809 - RNA, 1410 nt, Artificial Sequence
  derived and/or modified CDS sequence (wt) from neuraminidase__InfluenzaA__ACZ96322
augaauccaaaccaaaagauaauaaccauugguucggucuguaugacaauuggaauggcuaacuuaauauuacaaauuggaaacauaaucucaauauggauuagccacucaauucaacuugggaaucaaaaucagauugaaacaugcaaucaaagcgucauuacuuaugaaaacaacacuuggguaaaucagacauauguuaacaucagcaacaccaacuuugcugcuggacagucagugguuuccgugaaauuaacgggcaauuccucucucugcccuguuaguggaugggcuauauacaguaaagacaacaguauaagaaucgguuccaagggggauguguuugucauaagggaaccauucauaucaugcucccccuuggaaugcagaaccuucuucuugacucaaggggccuugcuaaaugacaaacauuccaauggaaccauuaaagacaggagcccauaucgaacccuaaugagcuguccuauuggugaaguucccucuccauacaacucaagauuugagucagucgcuuggucagcaagugcuugucaugauggcaucaauuggcuaacaauuggaauuucuggcccagacaauggggcaguggcuguguuaaaguacaacggcauaauaacagacacuaucaagaguuggagaaacaauauauugagaacacaagagucugaaugugcauguguaaaugguucuugcuuuacuguaaugaccgauggaccaagugauggacaggccucauacaagaucuucagaauagaaaagggaaagauagucaaaucagucgaaaugaaugccccuaauuaucacuaugaggaaugcuccuguuauccugauucuagugaaaucacaugugugugcagggauaacuggcauggcucgaaucgaccgugggugucuuucaaccagaaucuggaauaucagauaggauacauaugcagugggauuuucggagacaauccacgcccuaaugauaagacaggcaguugugguccaguaucgucuaauggagcaaauggaguaaaaggauuuucauucaaauacggcaaugguguuuggauagggagaacuaaaagcauuaguucaagaaacgguuuugagaugauuugggauccgaacggauggacugggacagacaauaacuucucaauaaagcaagauaucguaggaauaaaugaguggucaggauauagcgggaguuuuguucagcauccagaacuaacagggcuggauuguauaagaccuugcuucuggguugaacuaaucagagggcgacccaaagagaacacaaucuggacuagcgggagcagcauauccuuuugugguguaaacagugacacuguggguuggucuuggccagacggugcugaguugccauuuaccauugacaaguaa

SEQ ID NO: 49810 - RNA, 1410 nt, Artificial Sequence; identical to SEQ ID NO: 49809
  derived and/or modified CDS sequence (wt) from neuraminidase__InfluenzaA__ACZ96332

SEQ ID NO: 49811 - RNA, 1410 nt, Artificial Sequence
  derived and/or modified CDS sequence (wt) from neuraminidase__InfluenzaA__ACZ96352
augaauccaaaccaaaagauaauaaccauugguucggucuguaugacaauuggaauggcuaacuuaauauuacaaauuggaaacauaaucucaauauggauuagccacucaauucaacuugggaaucaaaaucagauugaaacaugcaaucaaagcgucauuacuuaugaaaacaacacuuggguaaaucagacauauguuaacaucagcaacaccaacuuugcugcuggacagucagugguuuccgugaaauuagcgggcaacuccucucucugcccuguuaguggaugggcuauauacaguaaagacaacaguauaagaaucgguuccaagggggauguguuugucauaagggaaccauucauaucaugcucccccuuggaaugcagaaccuucuucuugacucaaggggccuugcuaaaugacaaacauuccaauggaaccauuaaagacaggagcccauaucgaacccuaaugagcuguccuauuggugaaguucccucuccauacaacucaagauuugagucagucgcuuggucagcaagugcuugucaugauggcaucaacuggcuaacaauuggaauuucuggcccagacaauggggcaguggcuguguuaaaguacaacggcauaauaacagacacuaucaagaguuggagaaacaauauauugagaacacaagagucugaaugugcauguguaaaugguucuugcuuuacuguaaugaccgauggaccaagugauggacaggccucauacaagaucuucagaauagaaaagggaaagauagucaaaucagucgaaaugaaugccccuaauuaucacuaugaggaaugcuccuguuauccugauucuagugaaaucacaugugugugcagggauaacuggcauggcucgaaucgaccgugggugucuuucaaccagaaucuggaauaucagauaggauacauaugcagugggauuuucggagacaauccacgcccuaaugauaagacaggcaguugugguccaguaucgucuaauggagcaaauggaguaaaaggauuuucauucaaauacggcaaugguguuuggauagggagaacuaaaagcauuaguucaagaaacgguuuugagaugauuugggauccgaacggauggacugggacagacaauaacuucucaauaaagcaagauaucguaggaauaaaugaguggucaggauauagcgggaguuuuguucagcauccagaacuaacagggcuggauuguauaagaccuugcuucuggguugaacuaaucagagggcgacccaaagagaacacaaucuggacuagcgggagcagcauauccuuuugugguguaaacagugacacuguggguuggucuuggccagacggugcugaguugccauuuaccauugacaaguaa

SEQ ID NO: 49812 - RNA, 1410 nt, Artificial Sequence; identical to SEQ ID NO: 49809
  derived and/or modified CDS sequence (wt) from neuraminidase__InfluenzaA__ACZ96362

SEQ ID NO: 49813 - RNA, 1410 nt, Artificial Sequence
  derived and/or modified CDS sequence (wt) from neuraminidase__InfluenzaA__ACZ96375
augaauccaaaccaaaagauaauaaccauugguucggucuguaugacaauuggaauggcuaacuuaauauuacaaauuggaaacauaaucucaauauggauuagccacucaauucaacuugggaaucaaaaucagauugaaacaugcaaucaaagcgucauuacuuaugaaaacaacacuuggguaaaucagacauauguuaacaucagcaacaccaacuuugcugcuggacagucagugguuuccgugaaauuagcgggcaauuccucucucugcccuguuaguggaugggcuauauacaguaaagacaacaguauaagaaucgguuccaagggggauguguuugucauaagggaaccauucauaucaugcucccccuuggaaugcagaaccuucuucuugacucaaggggccuugcuaaaugacaaacauuccaauggaaccauuaaagacaggagcccauaucgaacccuaaugagcuguccuauuggugaaguucccucuccauacaacucaagauuugagucagucgcuuggucagcaagugcuugucaugauggcaucaauuggcuaacaauuggaauuucuggcccagacaauggggcaguggcuguguuaaaguacaacggcauaauaacagacacuaucaagaguuggagaaacaauauauugagaacacaagagucugaaugugcauguguaaaugguucuugcuuuacuguaaugaccgauggaccaagugauggacaggccucauacaagaucuucagaauagaaaagggaaagauagucaaaucagucgaaaugaaugccccuaauuaucacuaugaggaaugcuccuguuauccugauucuagugaaaucacaugugugugcagggauaacuggcauggcucgaaucgaccgugggugucuuucaaccagaaucuggaauaucagauaggauacauaugcagugggauuuucggagacaauccacgcccuaaugauaagacaggcaguugugguccaguaucgucuaauggagcaaacggaguaaaaggauuuucauucaaauacggcaaugguguuuggauagggagaacuaaaagcauuaguucaagaaacgguuuugagaugauuugggauccgaacggauggacugggacagacaauaacuucucaauaaagcaagauaucguaggaauaaaugaauggucaggauauagcgggaguuuuguucagcauccagaacuaacagggcuggauuguauaagaccuugcuucuggguugaacuaaucagagggcgacccaaagagaacacaaucuggacuagcgggagcagcauauccuuuugugguguaaacagugacacuguggguuggucuuggccagacggugcugaguugccauuuaccauugacaaguaa

SEQ ID NO: 49814 - RNA, 1410 nt, Artificial Sequence; identical to SEQ ID NO: 49809
  derived and/or modified CDS sequence (wt) from neuraminidase__InfluenzaA__ACZ96385

SEQ ID NO: 49815 - RNA, 1410 nt, Artificial Sequence
  derived and/or modified CDS sequence (wt) from neuraminidase__InfluenzaA__ACZ96395
augaauccaaaccaaaagauaauaaccauugguucggucugcaugacaauuggaauggcuaacuuaauauuacaaauuggaaacauaaucucaauauggauuagccacucaauucaacuugggaaucaaaaucagacugaaacaugcaaucaaagcgucaucaccuacgaaaacaacacuuggguaaaucagacauauguuaacaucagcaacaccaacuuugcugcuggacagucagugguuuccgugaaauuagcgggcaauuccucucucugcccuguuaguggaugggcuauauacaguaaagacaacaguguaagaaucgguuccaagggggauguguuugucauaagggaaccauucauaucaugcucccccuuggaaugcagaaccuucuucuugacucaaggggccuugcuaaaugacaaacauuccaauggaaccauuaaagacaggagcccauaucgaacccuaaugagcuguccuauuggugaaguucccucuccauacaacucaagauuugagucagucgcuuggucagcaagugcuugucaugauggcaucaauuggcuaacaauuggaauuucugggccagacaauggggcaguggcuguguuaaaguacaacggcauaauaacagacacuaucaagaguuggagaaacaauauauugagaacacaagagucugaaugugcauguguaaaugguucuugcuuuacuguaaugaccgauggaccaaguaauggacaggccucauacaagaucuucagaauagaaaagggaaagauagucaaaucagucgaaaugaaugccccuaauuaucacuaugaggaaugcuccuguuauccugauucuagugaaaucacaugugugugcagggauaacuggcauggcucgaaucgaccgugggugucuuucaaccagaaucuggaauaucagauaggauacauaugcagugggauuuucggagacaauccacgcccuauugauaagacaggcaguugugguccaguaucgucuaauggagcaaauggaguaaaaggauuuucauucaaauacggcaaugguguuuggauagggagaacuaaaagcauuaguucaagaaacgguuuugagaugauuugggauccgaacggauggacugggacagacaauaacuucucaauaaagcaagauaucguaggaauaaaugaguggucaggauauagcgggaguuuuguucagcauccggaacuaacagggcuggauuguauaagaccuugcuucuggguugaacuaaucagagggcgacccaaagagaacacaaucuggacuagcgggagcagcauauccuuuugugguguaaacagugacacuguggguuggucuuggccagacggugcugaguugccauuuaccauugacaaguaa

SEQ ID NO: 49816 - RNA, 1410 nt, Artificial Sequence; identical to SEQ ID NO: 49794
  derived and/or modified CDS sequence (wt) from neuraminidase__InfluenzaA__ACZ96408

SEQ ID NO: 49817 - RNA, 1410 nt, Artificial Sequence; identical to SEQ ID NO: 48750
  derived and/or modified CDS sequence (wt) from neuraminidase__InfluenzaA__ACZ96428

SEQ ID NO: 49818 - RNA, 1410 nt, Artificial Sequence; identical to SEQ ID NO: 48750
  derived and/or modified CDS sequence (wt) from neuraminidase__InfluenzaA__ACZ96438

SEQ ID NO: 49819 - RNA, 1410 nt, Artificial Sequence
  derived and/or modified CDS sequence (wt) from neuraminidase__InfluenzaA__ACZ96448
augaauccaaaccaaaagauaauaaccauugguucggucuguaugacaauuggaauggcuaacuuaauauuacaaauuggaaacauaaucucaauauggauuagccacucaauucaacuugggaaucaaaaucagauugaaacaugcaaucaaagcgucauuacuuaugaaaacaacacuuggguaaaucagacauauguuaacaucagcaacaccaacuuugcugcuggacagucagugguuuccgugaaauuagcgggcaauuccucucucugcccuguuaguggaugggcuauauacaguaaagacaacaguauaagaaucgguuccaagggggauguguuugucauaagggaaccauucauaucaugcucccccuuggaaugcagaaccuucuucuugacucaaggggccuugcuaaaugacaaacauuccaauggaaccauuaaagacaggagcccauaucgaacccuaaugagcuguccuauuggugaaguucccucuccauacaacucaagauuugagucagucgcuuggucagcaagugcuugucaugauggcaucaauuggcuaacaauuggaauuucuggcccagacaauggggcaguggcuguguuaaaguacaacggcauaauaacagacacuaucaagaguuggagaaacaauauauugagaacacaagagucugaaugugcauguguaaaugguucuugcuuuacuguaaugaccgauggaccaagugauggacaggccucauacaagaucuucagaauagaaaagggaaagauagucaaaucagucgaaaugaaugccccuaauuaucacuaugaggaaugcuccuguuauccugauucuagugaaaucacaugugugugcagggauaacuggcauggcucgaaucgaccgugggugucuuucaaccagaaucuggaauaucagauaggauacauaugcagugggauuuucggagacaauccacgcccuaaugauaagacaggcaguugugguccaguaucgucuaauggagcaaauggaguaaaaggauuuucauucaaauacggcaaugguguuuggauagggagaacuaaaagcauuaguucaagaaacgguuuugagaugauuugggauccgaacggauggacugggacagacaauaacuucucaauaaagcaagauaucguaggaauaaaugaguggucaggauauagcgggaguuuuguucagcauccagaacuaacagggcuggauuguauaagaccuugcuucuggguugaacuaaucagagggcgacccaaagagaacacaaucuggacuagugggagcagcauauccuuuugugguguaaacagugacacuguggguuggucuuggccagacggugcugaguugccauuuaccauugacaaguaa

SEQ ID NO: 49820 - RNA, 1410 nt, Artificial Sequence; identical to SEQ ID NO: 48750
  derived and/or modified CDS sequence (wt) from neuraminidase__InfluenzaA__ACZ96479

SEQ ID NO: 49821 - RNA, 1410 nt, Artificial Sequence; identical to SEQ ID NO: 49780
  derived and/or modified CDS sequence (wt) from neuraminidase__InfluenzaA__ACZ96489

SEQ ID NO: 49822 - RNA, 1410 nt, Artificial Sequence
  derived and/or modified CDS sequence (wt) from neuraminidase__InfluenzaA__ACZ96499
augaauccaaaccaaaagauaauaaccauugguucggucuguaugacaauuggaauggcuaacuuaauauuacaaauuggaaacauaaucucaauauggauuagccacucaauucaacuugggaaucaaaaucagauugaaacaugcaaucaaagcgucauuacuuaugaaaacaacacuuggguaaaucagacauauguuaacaucagcaauaccaacuuugcugcuggacagucagugguuuccgugaaauuagcgggcaauuccucucucugcccuguuaguggaugggcuauauacaguaaagacaacaguauaagaaucgguuccaagggggauguguuugucauaagggaaccauucauaucaugcucccccuuggaaugcagaaccuucuucuugacucaaggggccuugcuaaaugacaaacauuccaauggaaccauuaaagacaggagcccauaucgaacccuaaugagcuguccuauuggugaaguucccucuccauacaacucaagauuugagucagucgcuuggucagcaagugcuugucaugauggcaucaauuggcuaacaauuggaauuucuggcccagacaauggggcaguggcuguguuaaaguacaacggcauaauaacagacacuaucaagaguuggagaaacaauauauugagaacacaagagucugaaugugcauguguaaaugguucuugcuuuacuguaaugaccgauggaccaagugauggacaggccucauacaagaucuucagaauagaaaagggaaagauagucaaaucagucgaaaugaaugccccuaauuaucacuaugaggaaugcuccuguuauccugauucuagugaaaucacaugugugugcagggauaacuggcauggcucgaaucgaccgugggugucuuucaaccagaaucuggaauaucagauaggauacauaugcagugggauuuucggagacaauccacgcccuaaugauaagacaggcaguugugguccaguaucgucuaauggagcaaauggaguaaaaggauuuucauucaaauacggcaaugguguuuggauagggagaacuaaaagcauuaguucaagaaacgguuuugagaugauuugggauccgaacggauggacugggacagacaauaacuucucaauaaagcaagauaucguaggaauaaaugaauggucaggauauagcgggaguuuuguucagcauccagaacuaacagggcuggauuguauaagaccuugcuucuggguugaacuaaucagagggcgacccaaagagaacacaaucuggacuagcgggagcagcauauccuuuugugguguaaacagugacacuguggguuggucuuggccagacggugcugaguugccauuuaccauugacaaguaa

SEQ ID NO: 49823 - RNA, 1410 nt, Artificial Sequence
  derived and/or modified CDS sequence (wt) from neuraminidase__InfluenzaA__ACZ96509
augaauccaaaccaaaagauaauaaccauugguucggucuguaugacaauuggaauggcuaacuuaauauuacaaauuggaaacauaaucucaauauggauuagccacucaauucaacuugggaaucaaaaucagauugaaacaugcaaucaaagcgucauuacuuaugaaaacaacacuuggauaaaccaaacauauguuaacaucagcaacaccaacuuugcugcuggacagucagugguuuccgugaaauuagcgggcaauuccucucucugcccuguuaguggaugggcuauauacaguaaagacaacaguauaagaaucgguuccaagggggauguguuugucauaagggaaccauucauaucaugcucccccuuggaaugcagaaccuucuucuugacucaaggggccuugcuaaaugacaaacauuccaauggaaccauuaaagacaggagcccauaucgaacccuaaugagcuguccuauuggugaaguucccucuccauacaacucaagauuugagucagucgcuuggucagcaagugcuugucaugauggcaucaauuggcuaacaauuggaauuucuggcccagacaauggggcaguggcuguguuaaaguacaacggcauaauaacagacacuaucaagaguuggagaaacaauauauugagaacacaagagucugaaugugcauguguaaaugguucuugcuuuacuguaaugaccgauggaccaagugauggacaggccucauacaagaucuucagaauagaaaagggaaagauagucaaaucagucgaaaugaaugccccuaauuaucacuaugaggaaugcuccuguuauccugauucuagugaaaucacaugugugugcagggauaacuggcauggcucgaaucgaccgugggugucuuucaaccagaaucuggaauaucagauaggauacauaugcagugggauuuucggagacaauccacgcccuaaugauaagacaggcaguugugguccaguaucgucuaauggagcaaauggaguaaaaggauuuucauucaaauacggcaaugguguuuggauagggagaacuaaaagcauuaguucaagaaacgguuuugagaugauuugggauccgaacggauggacugggacagacaauaacuucucaauaaagcaagauaucguaggaauaaaugaguggucaggauauagcgggaguuuuguucagcauccagaacuaacagggcuggauuguauaagaccuugcuucuggguugaacuaaucagagggcgacccaaagagaacacaaucuggacuagcgggagcagcauauccuuuugugguguaaacagugacacuguggguuggucuuggccagacggugcugaguugccauuuaccauugacaaguaa

SEQ ID NO: 49824 - RNA, 1410 nt, Artificial Sequence; identical to SEQ ID NO: 48750
  derived and/or modified CDS sequence (wt) from neuraminidase__InfluenzaA__ACZ96519

SEQ ID NO: 49825 - RNA, 1410 nt, Artificial Sequence
  derived and/or modified CDS sequence (wt) from neuraminidase__InfluenzaA__ACZ96529
augaauccaaaccaaaagauaauaaccauugguucggucuguaugacaauuggaauggcuaacuuaauauuacaaauuggaaacauaaucucaauauggauuagccacucaauucaacuugggaaucaaaaucagauugaaacaugcaaucaaagcgucauuacuuaugaaaacaacacuuggguaaaucagacauauguuaacaucagcaacaccaacuuugcugcuggacagucagugguuuccgugaaauuagcgggcaauuccucucucugcccuguuaguggaugggcuauauacaguaaagacaacaguauaagaaucgguuccaagggggauguguuugucauaagggaaccauucauaucaugcucccccuuggaaugcagaaccuucuucuugacucaaggggccuugcuaaaugacaaacauuccaauggaaccauuaaagacaggagcccauaucgaacccuaaugagcuguccuauuggugaaguuccaucuccauacaacucaagauuugagucagucgcuuggucagcaagugcuugucaugauggcaucaauuggcuaacaauuggaauuucuggcccagacaauggggcaguggcuguguuaaaguacaacggcauaauaacagacacuaucaagaguuggagaaacaauauauugagaacacaagagucugaaugugcauguguaaaugguucuugcuuuacuguaaugacugauggaccaagugauggacaggccucauacaagaucuucagaauagaaaagggaaagauagucaaaucagucgaaaugaaugccccuaauuaucacuaugaggaaugcuccuguuauccugauucuagugaaaucacaugugugugcagggauaacuggcauggcucgaaucgaccgugggugucuuucaaccagaaucuggaauaucagauaggauacauaugcagugggauuuucggagacaauccacgcccuaaugauaagacaggcaguugugguccaguaucgucuaauggagcaaauggaguaaaaggauuuucauucaaauacggcaaugguguuuggauagggagaacuaaaagcauuaguucaagaaacgguuuugagaugauuugggauccgaacggauggacugggacagacaauaacuucucaauaaagcaagauaucguaggaauaaaugaauggucaggauauagcgggaguuuuguucagcauccagaacuaacagggcuggauuguauaagaccuugcuucuggguugaacuaaucagagggcgacccaaagagaacacaaucuggacuagcgggagcagcauauccuuuugugguguaaacagugacacuguggguuggucuuggccagacggugcugaguugccauuuaccauugacaaguaa

SEQ ID NO: 49826 - RNA, 1410 nt, Artificial Sequence
  derived and/or modified CDS sequence (wt) from neuraminidase__InfluenzaA__ACZ96552
augaauccaaaccaaaagauaauaaccauugguucggucuguaugacaauuggaauggcuaacuuaauauuacaaauuggaaacauaaucucaauauggauuagccacucaagucaacuugggaaucaaaaucagauugaaacaugcaaucaaagcgucauuacuuaugaaaacaacacuuggguaaaucagacauauguuaacaucagcaacaccaacuuugcugcuggacagucagugguuuccgugaaauuagcgggcaauuccucucucugcccuguuaguggaugggcuauauacaguaaagacaacaguauaagaaucgguuccaagggggauguguuugucauaagggaaccauucauaucaugcucccccuuggaaugcagaaccuucuucuugacucaaggggccuugcuaaaugacaaacauuccaauggaaccauuaaagacaggagcccauaucgaacccuaaugagcuguccuauuggugaaguucccucuccauacaacucaagauuugagucagucgcuuggucagcaagugcuugucaugauggcaucaauuggcuaacaauuggaauuucuggcccagacaauggggcaguggcuguguuaaaguacaacggcauaauaacagacacuaucaagaguuggagaaacaauauauugagaacacaagagucugaaugugcauguguaaaugguucuugcuuuacuguaaugaccgauggaccaagugauggacaggccucauacaagaucuucagaauagaaaagggaaagauagucaaaucagucgaaaugaaugccccuaauuaucacuaugaggaaugcuccuguuauccugauucuagugaaaucacaugugugugcagggauaacuggcauggcucgaaucgaccgugggugucuuucaaccagaaucuggaauaucagauaggauacauaugcagugggauuuucggagacaauccacgcccuaaugauaagacaggcaguugugguccaguaucgucuaauggagcaaacggaguaaaaggauuuucauucaaauacggcaaugguguuuggauagggagaacuaaaagcauuaguucaagaaacgguuuugagaugauuugggauccgaacggauggacugggacagacaauaacuucucaauaaagcaagauaucguaggaauaaaugaauggucaggauauagcgggaguuuuguucagcauccagaacuaacagggcuggauuguauaagaccuugcuucuggguugaacuaaucagagggcgacccaaagagaacacaaucuggacuagcgggagcagcauauccuuuugugguguaaacagugacacuguggguuggucuuggccagacggugcugaguugccauuuaccauugacaaguaa

SEQ ID NO: 49827 - RNA, 1410 nt, Artificial Sequence
  derived and/or modified CDS sequence (wt) from neuraminidase__InfluenzaA__ACZ96562
augaauccaaaccaaaagauaauaaccauugguucggucuguaugacaauuggaauggcuaacuuaauauuacaaauuggaaacauaaucucaauauggauuagccacucaauucaacuugggaaucaaaaucagauugaaacaugcaaucaaagcgucauuacuuaugaaaacaacacuuggguaaaucagacauauguuaacaucagcaacaccaacuuugcugcuggacagucagugguuuccgugaaauuagcgggcaauuccucucucugcccuguuaguggaugggcuauauacaguaaagacaacaguauaagaaucgguuccaagggggauguguuugucauaagggaaccauucauaucaugcucccccuuggaaugcagaaccuucuucuugacucaaggggccuugcuaaaugacaaacauuccaauggaaccauuaaagacaggagcccauaucgaacccuaaugagcuguccuauuggugaaguucccucuccauacaacucaagauuugagucagucgcuuggucagcaagugcuugucaugauggcaucaauuggcuaacaauuggaauuucuggcccagacaauggggcaguggcuguguuaaaguacaacggcauaauaacagacacuaucaagaguuggagaaacaauauauugagaacacaagagucugaaugugcauguguaaaugguucuuguuuuacuguaaugaccgauggaccaagugauggacaggccucauacaagaucuucagaauagaaaagggaaagauagucaaaucagucgaaaugaaugccccuaauuaucacuaugaggaaugcuccuguuauccugauucuagugaaaucacaugugugugcagggauaacuggcauggcucgaaucgaccgugggugucuuucaaccagaaucuggaauaucagauaggauacauaugcagugggauuuucggagacaauccacgcccuaaugauaagacaggcaguugugguccaguaucgucuaauggagcaaauggaguaaaaggauuuucauucaaauacggcaaugguguuuggauagggagaacuaaaagcauuaguucaagaaacgguuuugagaugauuugggauccgaacggauggacugggacagacaauaacuucucaauaaagcaagauaucguaggaauaaaugaguggucaggauauagcgggaguuuuguucagcauccagaacuaacagggcuggauuguauaagaccuugcuucuggguugaacuaaucagagggcgacccaaagagaacacaaucuggacuagcgggagcagcauauccuuuugugguguaaacagugacacuguggguuggucuuggccagacggugcugaguugccauuuaccauugacaaguaa

SEQ ID NO: 49828 - RNA, 1410 nt, Artificial Sequence; identical to SEQ ID NO: 49794
  derived and/or modified CDS sequence (wt) from neuraminidase__InfluenzaA__ACZ96572

SEQ ID NO: 49829 - RNA, 1410 nt, Artificial Sequence; identical to SEQ ID NO: 48750
  derived and/or modified CDS sequence (wt) from neuraminidase__InfluenzaA__ACZ96582

SEQ ID NO: 49830 - RNA, 1410 nt, Artificial Sequence
  derived and/or modified CDS sequence (wt) from neuraminidase__InfluenzaA__ACZ96592
augaauccaaaccaaaagauaauaaccauugguucggucuguaugacaauuggaauggcuaacuuaauauuacaaauuggaaacauaaucucaauauggauuagccacucaauucaacuugggaaucaaaaucagauugaaacaugcaaucaaagcgucauuacuuaugaaaacaacacuuggguaaaucagacauauguuaacaucagcaacaccaacuuugcugcuggacagucagugguuuccgugaaauuagcgggcaauuccucucucugcccuguuaguggaugggcuauauacaguaaagacaacaguauaagaaucgguuccaagggggauguguuugucauaagggaaccauucauaucaugcucccccuuggaaugcagaaccuucuucuugacucaaggggccuugcuaaaugacaaacauuccaauggaaccauuaaagacaggagcccauaucgaacccuaaugagcuguccuauuggugaaguucccucuccauacaacucaagauuugagucagucgcuuggucagcaagugcuugucaugauggcaucaauuggcuaacaauuggaauuucuggcccagacaauggggcaguggcuguguuaaaguacaacggcauaauaacagacacuaucaagaguuggagaaacaauauauugagaacacaagagucugaaugugcauguguaaaugguucuugcuuuacuguaaugaccgauggaccaagugauggacaguccucauacaagaucuucaaaauagaaaagggaaagauagucaaaucagucgaaaugaaugccccuaauuaucacuaugaggaaugcuccuguuauccugauucuagugaaaucacaugugugugcagggauaacuggcauggcucgaaucgaccgugggugucuuucaaccagaaucuggaauaucagauaggauacauaugcagugggauuuucggagacaauccacgcccuaaugauaagacaggcaguugugguccaguaucgucuaauggagcaaauggaguaaaaggauuuucauucaaauacggcaaugguguuuggauagggagaacuaaaagcauuaguucaagaaacgguuuugagaugauuugggauccgaacggauggacugggacagacaauaauuucucaauaaagcaagauaucguaggaauaaaugaguggucaggauauagcgggaguuuuguccagcauccagaacuaacagggcuggauuguauaagaccuugcuucuggguugaacuaaucagagggcgacccaaagagaacacaaucuggacuagcgggagcagcauauccuuuugugguguaaacagugacacuguggguuggucuuggccagacggugcugaguugccauuuaccauugacaaguaa

SEQ ID NO: 49831 - RNA, 1410 nt, Artificial Sequence; identical to SEQ ID NO: 48814
  derived and/or modified CDS sequence (wt) from neuraminidase__InfluenzaA__ACZ96602

SEQ ID NO: 49832 - RNA, 1410 nt, Artificial Sequence
  derived and/or modified CDS sequence (wt) from neuraminidase__InfluenzaA__ACZ96612
augaauccaaaccaaaagauaauaaccauugguucggucuguaugacaauuggaauggcuaacuuaauauuacaaauuggaaacauaaucucaauauggauuagccacucaauucaacuugggaaucaaaaucagauugaaacaugcaaucaaagcgucguuacuuaugaaaacaacacuuggguaaaucagacauauguuaacaucagcaacaccaacuuugcugcuggacagucagugguuuccgugaaauuagcgggcaauuccucucucugcccuguuaguggaugggcuauauacaguaaagacaacaguguaagaaucgguuccaagggggauguguuugucauaagggaaccauucauaucaugcucccccuuggaaugcagaaccuucuucuugacucaaggggccuugcuaaaugacaaacauuccaauggaaccauuaaagauaggagcccauaucgaacccuaaugagcuguccuauuggugaaguucccucuccauacaacucaagauuugagucagucgcuuggucagcaagugcuugucaugauggcaucaauuggcuaacaauuggaauuucuggcccagacaauggggcaguggcuguguuaaaguacaacggcauaauaacagacacuaucaagaguuggagaaacaauauauugagaacacaagagucugaaugugcauguguaaaugguucuugcuuuacuguaaugaccgauggaccaaguaauggacaggccucauacaagaucuucagaauagaaaagggaaagauagucaaaucagucgaaaugaaugccccuaauuaucacuaugaggaaugcuccuguuauccugauucuagugaaaucacaugugugugcagggauaacuggcauggcucgaaucgaccgugggugucuuucaaccagaaucuggaauaucagauaggauacauaugcagugggauuuucggagacaauccacgcccuaaugauaagacaggcaguugugguccaguaucgucuaauggagcaaauggaguaaaaggauuuucauucaaauacggcaaugguguuuggauagggagaacuaaaagcauuaguucaagaaacgguuuugagaugauuugggauccgaacggauggacugggacagacaauaacuucucaauaaagcaagauaucguaggaauaaaugaguggucaggauauagcgggaguuuuguucagcauccagaacuaacagggcuggauuguauaagaccuugcuucuggguugaacuaaucagagggcgacccaaagagaacacaaucuggacuagcgggagcagcauauccuuuugugguguaaacagugacacuguggguuggucuuggccagacggugcugaguugccauuuaccauugacaaguaa

SEQ ID NO: 49833 - RNA, 1410 nt, Artificial Sequence; identical to SEQ ID NO: 48780
  derived and/or modified CDS sequence (wt) from neuraminidase__InfluenzaA__ACZ96622

SEQ ID NO: 49834 - RNA, 1410 nt, Artificial Sequence; identical to SEQ ID NO: 48780
  derived and/or modified CDS sequence (wt) from neuraminidase__InfluenzaA__ACZ96632

SEQ ID NO: 49835 - RNA, 1410 nt, Artificial Sequence; identical to SEQ ID NO: 48780
  derived and/or modified CDS sequence (wt) from neuraminidase__InfluenzaA__ACZ96642

SEQ ID NO: 49836 - RNA, 1410 nt, Artificial Sequence; identical to SEQ ID NO: 48780
  derived and/or modified CDS sequence (wt) from neuraminidase__InfluenzaA__ACZ96652

SEQ ID NO: 49837 - RNA, 1410 nt, Artificial Sequence; identical to SEQ ID NO: 48780
  derived and/or modified CDS sequence (wt) from neuraminidase__InfluenzaA__ACZ96662

SEQ ID NO: 49838 - RNA, 1410 nt, Artificial Sequence; identical to SEQ ID NO: 48780
  derived and/or modified CDS sequence (wt) from neuraminidase__InfluenzaA__ACZ96672

SEQ ID NO: 49839 - RNA, 1410 nt, Artificial Sequence; identical to SEQ ID NO: 48780
  derived and/or modified CDS sequence (wt) from neuraminidase__InfluenzaA__ACZ96682

SEQ ID NO: 49840 - RNA, 1410 nt, Artificial Sequence; identical to SEQ ID NO: 48780
  derived and/or modified CDS sequence (wt) from neuraminidase__InfluenzaA__ACZ96692

SEQ ID NO: 49841 - RNA, 1410 nt, Artificial Sequence; identical to SEQ ID NO: 48780
  derived and/or modified CDS sequence (wt) from neuraminidase__InfluenzaA__ACZ96702

SEQ ID NO: 49842 - RNA, 1410 nt, Artificial Sequence; identical to SEQ ID NO: 48780
  derived and/or modified CDS sequence (wt) from neuraminidase__InfluenzaA__ACZ96712

SEQ ID NO: 49843 - RNA, 1410 nt, Artificial Sequence; identical to SEQ ID NO: 48780
  derived and/or modified CDS sequence (wt) from neuraminidase__InfluenzaA__ACZ96722

SEQ ID NO: 49844 - RNA, 1410 nt, Artificial Sequence; identical to SEQ ID NO: 48780
  derived and/or modified CDS sequence (wt) from neuraminidase__InfluenzaA__ACZ96732

SEQ ID NO: 49845 - RNA, 1410 nt, Artificial Sequence; identical to SEQ ID NO: 48780
  derived and/or modified CDS sequence (wt) from neuraminidase__InfluenzaA__ACZ96742

SEQ ID NO: 49846 - RNA, 1410 nt, Artificial Sequence
  derived and/or modified CDS sequence (wt) from neuraminidase__InfluenzaA__ACZ96752
augaauccaaaccaaaagauaauaaccauugguucggucuguaugacaauuggaauggcuaacuuaauauuacaaauuggaaacauaaucucaauauggauuagccacucaauucaacuugggaaucaaaaucagauugaaacaugcaaucaaagcgucauuacuuaugaaaacaacacuuggguaaaucagacauauguuaacaucagcaacaccaacuuugcugcuggacagucagugguuuccgugaaauuagcgggcaauuccucucucugcccuguuaguggaugggcuauauacaguaaagacaacaguguaagaaucgguuccaagggggauguguuugucauaagagaaccguucauaucaugcucccccuuggaaugcagaaccuucuucuugacucaaggagccuugcuaaaugacaaacauuccaauggaaccauuaaagacaggagcccauaucgaaccuuaaugagcuguccuauuggugaaguucccucuccauacaacucaagauuugagucagucgcuuggucagcaagugcuugucaugauggcaucaauuggcuaacaauuggaauuucuggcccagacaauggggcaguggcuguguuaaaguacaacggcauaauaacagacacuaucaagaguuggagaaacaauauauugagaacacaagagucugaaugugcauguguaaaugguucuugcuuuacuguaaugaccgauggaccaaguaauggacaggccucauacaagaucuucagaauagaaaagggaaagauagucaaaucagucgaaaugaaugccccuaauuaucacuaugaggaaugcuccuguuauccugauucuagugaaaucacaugugugugcagggauaacuggcauggcucgaaucgaccgugggugucuuucaaccagaaucuggaauaucagauaggauacauaugcagugggauuuucggagacaauccacgcccuaaugauaagacaggcaguugugguccaguaucgucuaauggagcaaauggaguaaaaggauuuucauucaaauacggcaaugguguuuggauagggagaacuaaaagcauuaguucaagaaacgguuuugagaugauuugggauccgaacggauggacugggacagacaauaacuucucaauaaagcaagauaucguaggaauaaaugaguggucaggauauagcgggaguuuuguucagcauccagaacuaacagggcuggauuguauaagaccuugcuucuggguugaacuaaucagagggcgacccaaagagaacacaaucuggacuagcgggagcagcauauccuuuugugguguaaacagugacacuguggguuggucuuggccagacggugcugaguugccauuuaccauugacaaguaa

SEQ ID NO: 49847 - RNA, 1410 nt, Artificial Sequence; identical to SEQ ID NO: 48749
  derived and/or modified CDS sequence (wt) from neuraminidase__InfluenzaA__ACZ96762

SEQ ID NO: 49848 - RNA, 1410 nt, Artificial Sequence; identical to SEQ ID NO: 48749
  derived and/or modified CDS sequence (wt) from neuraminidase__InfluenzaA__ACZ96772

SEQ ID NO: 49849 - RNA, 1410 nt, Artificial Sequence
  derived and/or modified CDS sequence (wt) from neuraminidase__InfluenzaA__ACZ96782
augaauccaaaccaaaagauaauaaccauugguucggucuguaugacaauuggaauggcuaacuuaauauuacaaauuggaaacauaaucucaauauggauuagccacucaauucaacuugggaaucaaaaucagauugaaacaugcaaucaaagcgucauuacuuaugaaaacaacacuuggguaaaucagacauauguuaacaucagcaacaccaacuuugcugcuggacagucagugguuuccgugaaauuagcgggcaauuccucucucugcccuguuaguggaugggcuauauacaguaaagacaacaguguaagaaucgguuccaagggggauguguuugucauaagagaaccguucauaucaugcucccccuuggaaugcagaaccuucuucuugacucaaggagccuugcuaaaugacaaacauuccaauggaaccauuaaagacaggagcccauaucgaacccuaaugagcuguccuauuggugaaguucccucuccauacaacucaagauuugagucagucgcuuggucagcaagugcuugucaugauggcaucaauuggcuaacaauuggaauuucuggcccagacaauggggcaguggcuguguuaaaguacaacggcauaauaacagacacuaucaagaguuggagaaacaauauauugagaacacaagagucugaaugugcauguguaaaugguucuugcuuuacuguaaugaccgauggaccaaguaauggacaggccucauacaagaucuucagaauagaaaagggaaagauagucaaaucagucgaaaugaaugccccuaauuaucacuaugaggaaugcuccuguuauccugauucuagugaaaucacaugugugugcagggauaacuggcauggcucgaaucgaccgugggugucuuucaaccagaaucuggaauaucagauaggauacauaugcagugggauuuucggagacaauccacgcccuaaugauaagacaggcaguugugguccaguaucgucuaauggagcaaauggaguaaaaggauuuucauucaaauacggcaaugguguuuggauagggagaacuaaaagcauuaguucaagaaacgguuuugagaugauuugggauccgaacggauggacugggacagacaauaacuucucaauaaagcaagauaucguaggaauaaaugaguggucaggauauagcgggaguuuuguucagcauccagaacuaacagggcuggauuguauaagaccuugcuucuggguugaacuaaucagagggcgacccaaagagaacacaaucuggacuagcgggagcagcauauccuuuugugguguaaacagugacacuguggguuggucuuggccagacggugcugaguugccauuuaccauugacaaguaa

SEQ ID NO: 49850 - RNA, 1410 nt, Artificial Sequence
  derived and/or modified CDS sequence (wt) from neuraminidase__InfluenzaA__ACZ96792
augaauccaaaccaaaagauaauaaccauugguucggucuguaugacaauuggaauggcuaacuuaauauuacaaauuggaaacauaaucucaauauggauuagccacucaauucaacuugggaaucaaaaucagauugaaacaugcaaucaaagcgucauuacuuaugaaaacaacacuuggguaaaucagacauauguuaacaucagcaacaccaacuuugcugcuggacagucagugguuuccgugaaauuagcgggcaauuccucucucugcccuguuaguggaugggcuauauacaguaaagacaacaguguaagaaucgguuccaagggggauguguuugucauaagagaaccguucauaucaugcucccccuuggaaugcagaaccuuuuucuugacucaaggagccuugcuaaaugacaaacauuccaauggaaccauuaaagacaggagcccauaucgaacccuaaugagcuguccuauuggugaaguucccucuccauacaacucaagauuugagucagucgcuuggucagcaagugcuugucaugauggcaucaauuggcuaacaauuggaauuucuggcccagacaauggggcaguggcuguguuaaaguacaacggcauaauaacagacacuaucaagaguuggagaaacaauauauugagaacacaagagucugaaugugcauguguaaaugguucuugcuuuacuguaaugaccgauggaccaaguaauggacaggccucauacaagaucuucagaauagaaaagggaaagauagucaaaucagucgaaaugaaugccccuaauuaucacuaugaggaaugcuccuguuauccugauucuagugaaaucacaugugugugcagggauaacuggcauggcucgaaucgaccgugggugucuuucaaccagaaucuggaauaucagauaggauacauaugcagugggauuuucggagacaauccacgcccuaaugauaagacaggcaguugugguccaguaucgucuaauggagcaaauggaguaaaaggauuuucauucaaauacggcaaugguguuuggauagggagaacuaaaagcauuaguucaagaaacgguuuugagaugauuugggauccgaacggauggacugggacagacaauaacuucucaauaaagcaagauaucguaggaauaaaugaguggucaggauauagcgggaguuuuguucagcauccagaacuaacagggcuggauuguauaagaccuugcuucuggguugaacuaaucagagggcgacccaaagagaacacaaucuggacuagcgggagcagcauauccuuuugugguguaaacagugacacuguggguuggucuuggccagacggugcugaguugccauuuaccauugacaaguaa

SEQ ID NO: 49851 - RNA, 1410 nt, Artificial Sequence; identical to SEQ ID NO: 48750
  derived and/or modified CDS sequence (wt) from neuraminidase__InfluenzaA__ACZ96802

SEQ ID NO: 49852 - RNA, 1410 nt, Artificial Sequence; identical to SEQ ID NO: 48750
  derived and/or modified CDS sequence (wt) from neuraminidase__InfluenzaA__ACZ96812

SEQ ID NO: 49853 - RNA, 1410 nt, Artificial Sequence
  derived and/or modified CDS sequence (wt) from neuraminidase__InfluenzaA__ACZ96822
augaauccaaaccaaaagauaauaaccauugguucggucuguaugacaauuggaauggcuaacuuaauauuacaaauuggaaacauaaucucaauauggauuagccacucaauucaacuugggaaucaaaaucagauugaaacaugcaaucaaagcgucauuacuuaugaaaacaacacuuggguaaaucagacauauguuaacaucagcaacaccaacuuugcugcuggacagucagugguuuccgugaaauuagcgggcaauuccucucucugcccuguuaguggaugggcuauauacaguaaagacaacaguguaagaaucgguuccaagggggauguguuugucauaagggaaccauucauaucaugcucccccuuggaaugcagaaccuucuucuugacucaaggggccuugcuaaaugacaaacauuccaauggaaccauuaaagacaggagcccauaucgaacccuaaugagcuguccuauuggugaaguucccucuccauacaacucaagauuugagucagucgcuuggucagcaagugcuugucaugauggcaucaauuggcuaacaauuggaauuucuggcccagacaauggggcaguggcuguguuaaaguacaacggcauaauaacagacacuaucaagagcuggagaaacaauauauugagaacacaagagucugaaugugcauguguaaaugguucuugcuuuacuguaaugaccgauggaccaagugauggacaggccucauacaagaucuucagaauagaaaagggaaagauagucaaaucagucgaaaugaaugccccuaauuaucacuaugaggaaugcuccuguuauccugauucuagugaaaucacaugugugugcagggauaacuggcauggcucgaaucgaccgugggugucuuucaaccagaaucuggaauaucagauaggauacauaugcagugggauuuucggagacaauccacgcccuaaugauaagacaggcaguugugguccaguaucgucuaauggagcaaauggaguaaaaggauuuucauucaaauacggcaaugguguuuggauagggagaacuaaaagcauuaguucaagaaacgguuuugagaugauuugggauccgaacggauggacugggacagacaauaacuucucaauaaagcaagauaucguaggaauaaaugaguggucaggauauagcgggaguuuuguucagcauccagaacuaacagggcuggauuguauaagaccuugcuucuggguugaacuaaucagagggcgacccaaagagaacacaaucuggacuagcgggagcagcauauccuuuugugguguaaacagugacacugugggcuggucuuggccagacggugcugaguugccauuuaccauugacaaguaa

SEQ ID NO: 49854 - RNA, 1410 nt, Artificial Sequence
  derived and/or modified CDS sequence (wt) from neuraminidase__InfluenzaA__ACZ96842
augaauccaaaccaaaagauaauaaccauugguucggucuguaugacaauuggaauggcuaacuuaauauuacaaauuggaaacauaaucucaauauggauuagccacucaauucaacuugggaaucaaaaucagauugaaacaugcaaucaaagcgucauuacuuaugaaaacaacacuuggguaaaucagacauauguuaacaucagcaacaccaacuuugcugcuggacagucagugguuuccgugaaauuagcgggcaauuccucucucugcccuguuaguggaugggcuauauacaguaaagacaacaguguaagaaucgguuccaagggggauguguuugucauaagagaaccguucauaucaugcucccccuuggaaugcagaaccuucuucuugacucaaggagccuugcuaaaugacaaacauuccaauggaaccauuaaagacaggagcccauaucgaacccuaaugagcuguccuauuggugaaguucccucuccauacaacucaagauuugagucagucgcuuggucagcaagugcuugucaugauggcaucaauuggcuaacaauuggaauuucuggcccagacaauggggcaguggcuguguuaaaguacaacggcauaauaacagacacuaucaagaguuggagaaacaauauauugagaacacaagagucugaaugugcauguguaaaugguucuugcuuuacuguaaugaccgauggaccaaguaauggacaggccucauacaagaucuucagaauagaaaagggaaagauagucaaaucagucgaaaugauugccccuaauuaucacuaugaggaaugcuccuguuauccugauucuagugaaaucacaugugugugcagggauaacuggcauggcucgaaucgaccgugggugucuuucaaccagaaucuggaauaucagauaggauacauaugcagugggauuuucggagacaauccacgcccuaaugauaagacaggcaguugugguccaguaucgucuaauggagcaaauggaguaaaaggauuuucauucaaauacggcaaugguguuuggauagggagaacuaaaagcauuaguucaagaaacgguuuugagaugauuugggauccgaacggauggacugggacagacaauaacuucucaauaaagcaagauaucguaggaauaaaugaguggucaggauauagcgggaguuuuguucagcauccagaacuaacagggcuggauuguauaagaccuugcuucuggguugaacuaaucagagggcgacccaaagagaacacaaucuggacuagcgggagcagcauauccuuuugugguguaaacagugacacuguggguuggucuuggccagacggugcugaguugccauuuaccauugacaaguaa

SEQ ID NO: 49855 - RNA, 1410 nt, Artificial Sequence; identical to SEQ ID NO: 49771
  derived and/or modified CDS sequence (wt) from neuraminidase__InfluenzaA__ACZ96852

SEQ ID NO: 49856 - RNA, 1410 nt, Artificial Sequence; identical to SEQ ID NO: 48750
  derived and/or modified CDS sequence (wt) from neuraminidase__InfluenzaA__ACZ96862

SEQ ID NO: 49857 - RNA, 1410 nt, Artificial Sequence
  derived and/or modified CDS sequence (wt) from neuraminidase__InfluenzaA__ACZ96872
augaauccaaaccaaaagauaauaaccauugguucggucuguaugacaauuggaauggcuaacuuaauauuacaaauuggaaacauaaucucaauauggauuagccacucaauucaacuugggaaucaaaaucagauugaaacaugcaaucaaagcgucauuacuuaugaaaacaacacuuggguaaaucagacauauguuaacaucagcaacaccaacuuugcugcuggacagucagugguuuccaugaaauuagcgggcaauuccucucucugcccuguuaguggaugggcuauauacaguaaagacaacaguauaagaaucgguuccaagggggauguguuugucauaagggaaccauucauaucaugcucccccuuggaaugcagaaccuucuucuugacucaaggggccuugcuaaaugacaaacauuccaauggaaccauuaaagacaggagcccauaucgaacccuaaugagcuguccuauuggugaaguucccucuccauacaacucaagauuugagucagucgcuuggucagcaagugcuugucaugauggcaucaauuggcuaacaauuggaauuucuggcccagacaauggggcaguggcuguguuaaaguacaacggcauaauaacagacacuaucaagaguuggagaaacaauauauugagaacacaagagucugaaugcgcauguguaaaugguucuugcuuuacuguaaugaccgauggaccaagugauggacaggccucauacaagaucuucagaauagaaaagggaaagauagucaaaucagucgaaaugaaugccccuaauuaucacuaugaggaaugcuccuguuauccugauucuagugaaaucacaugugugugcagggauaacuggcauggcucgaaucgaccgugggugucuuucaaccagaaucuggaauaucagauaggauacauaugcagugggauuuucggagacaauccacgcccuaaugauaagacaggcaguugugguccaguaucgucuaauggagcaaauggaguaaaaggauuuucauucaaauacggcaaugguguuuggauagggagaacuaaaagcauuaguucaagaaacgguuuugagaugauuugggauccgaacggauggacugggacagacaauaacuucucaauaaagcaagauaucguaggaauaaaugaguggucaggauauagcgggaguuuuguucagcauccagaacuaacagggcuggauuguauaagaccuugcuucuggguugaacuaaucagagggcgacccaaagagaacacaaucuggacuagcgggagcagcauauccuuuugugguguaaacagugacacuguggguuggucuuggccagacggugcugaguugccauuuaccauugacaaguaa

SEQ ID NO: 49858 - RNA, 1410 nt, Artificial Sequence
  derived and/or modified CDS sequence (wt) from neuraminidase__InfluenzaA__ACZ96882
augaauccaaaccaaaagauaauaaccauugguucggucuguaugacaauuggaauggcuaacuuaauauuacaaauuggaaacauaaucucaauauggauuagccacucaauucaacuugggaaucaaaaucagauugaaacaugcaaucaaagcgucauuacuuaugaaaacaacacuuggguaaaucagacauauguuaacaucagcaacaccaacuuugcugcuggacagucagugguuuccgugaaauuagcgggcaauuccucucucugcccuguuaguggaugggcuauauacaguaaagacaacaguguaagaaucgguuccaagggggauguguuugucauaagggaaccauucauaucaugcucccccuuggaaugcagaaccuucuucuugacucaaggggccuugcuaaaugacaaacauuccaauggaaccauuaaagacaggagcccauaucgaacccuaaugagcuguccuauuggugaaguucccucuccauacaacucaagauuugagucagucgcuuggucagcaagugcuugucaugauggcaucaauuggcuaacaauuggaauuucuggcccagacaauggggcaguggcuguguuaaaguacaacggcauaauaacagacacuaucaagagcuggagaaacaauauauugagaacacaagagucugaaugugcauguguaaaugguucuugcuuuacuguaaugaccgauggaccaaguaauggacaggccucauacaagaucuucagaauagaaaagggaaagauagucaaaucagucgaaaugaaugccccuaauuaucacuaugaggaaugcuccuguuauccugauucuagugaaaucacaugugugugcagggauaacuggcauggcucgaaucgaccgugggugucuuucaaccagaaucuggaauaucagauaggauacauaugcagugggauuuucggagacaauccacgcccuaaugauaagacaggcaguugugguccaguaucgucuaauggagcaaauggaguaaaaggauuuucauucaaauacggcaaugguguuuggauagggagaacuaaaagcauuaguucaagaaacgguuuugagaugauuugggauccgaacggauggacugggacagacaauaacuucucaauaaagcaagauaucguaggaauaaaugaguggucaggauauagcgggaguuuuguucagcauccagaacuaacagggcuggauuguauaagaccuugcuucuggguugaacuaaucagagggcgacccaaagagaacacaaucuggacuagcgggagcagcauauccuuuugugguguaaacagugacacugugggcuggucuuggccagacggugcugaguugccauuuaccauugacaaguaa

SEQ ID NO: 49859 - RNA, 1410 nt, Artificial Sequence; identical to SEQ ID NO: 49857
  derived and/or modified CDS sequence (wt) from neuraminidase__InfluenzaA__ACZ96892

SEQ ID NO: 49860 - RNA, 1410 nt, Artificial Sequence; identical to SEQ ID NO: 49857
  derived and/or modified CDS sequence (wt) from neuraminidase__InfluenzaA__ACZ96902

SEQ ID NO: 49861 - RNA, 1410 nt, Artificial Sequence
  derived and/or modified CDS sequence (wt) from neuraminidase__InfluenzaA__ACZ96912
augaauccaaaccaaaagauaauaaccauugguucggucuguaugacaauuggaauggcuaacuuaauauuacaaauuggaaacauaaucucaauauggauuagccacucaauucaacuugggaaucaaaaucagauugaaacaugcaaucaaagcgucauuacuuaugaaaacaacacuuggguaaaucagacauauguuaacaucagcaacaccaacuuugcugcuggacagucagugguuuccgugaaauuagcgggcaauuccucucucugcccuguuaguggaugggcuauauacaguaaagacaacaguguaagaaucgguuccaagggggauguguuugucauaagggaaccauucauaucaugcucccccuuggaaugcagaaccuucuucuugacucaaggggccuugcuaaaugacaaacauuccaauggaaccauuaaagacaggagcccauaucgaacccuaaugagcuguccuauuggugaaguucccucuccauacaacucaagauuugagucagucgcuuggucagcaagugcuugucaugauggcaucaauuggcuaacaauuggaauuucuggcccagacaauggggcaguggcuguguuaaaguacaacggcauaauaacagacacuaucaagaguuggagaaacaauauauugagaacacaagagucugaaugugcauguguaaaugguucuugcuuuacuguaaugaccgauggaccaaguaauggacaggccucauacaagaucuucagaauagaaaagggaaagauagucaaaucagucgaaaugaaugccccuaauuaucacuaugaggaaugcuccuguuauccugauucuagugaaaucacaugugugugcagggauaacuggcauggcucgaaucgaccgugggugucuuucaaccagaaucuggaauaucagauaggauacauaugcagugggauuuucggagacaauccacgcccuaaugauaagacaggcaguugugguccaguaucgucuaauggagcaaauggaguaaaaggauuuucauucaaauacggcaaugguguuuggauagggagaacuaaaagcauuaguucaagaaacgguuuugagaugauuugggauccgaacggauggacugggacagacaauaacuucucaauaaagcaagauaucguaggaauaaaugaguggucaggauauagcgggaguuuuguucagcauccagaacuaacagggcuggauuguauaagaccuugcuucuggguugaacuaaucagggggcgacccaaagagaacacaaucuggacuagcgggagcagcauauccuuuugugguguaaacagugacacuguggguuggucuuggccagacggugcugaguugccauuuaccauugacaaguaa

SEQ ID NO: 49862 - RNA, 1410 nt, Artificial Sequence; identical to SEQ ID NO: 49861
  derived and/or modified CDS sequence (wt) from neuraminidase__InfluenzaA__ACZ96922

SEQ ID NO: 49863 - RNA, 1410 nt, Artificial Sequence
  derived and/or modified CDS sequence (wt) from neuraminidase__InfluenzaA__ACZ96932
augaauccaaaccaaaagauaauaaccauugguucggucuguaugacaauuggaauggcuaacuuaauauuacaaauuggaaacauaaucucaauauggauuagccacucaauucaacuugggaaucaaaaucagauugaaacaugcaaucaaagcgucauuacuuaugaaaacaacacuuggguaaaucagacauauguuaacaucagcaacaccaauuuugcugcuggacagucagugguuuccaugaaauuagcgggcaauuccucucucugcccuguuaguggaugggcuauauacaguaaagacaacaguauaagaaucgguuccaagggggauguguuugucauaagggaaccauucauaucaugcucccccuuggaaugcagaaccuucuucuugacucaaggggccuugcuaaaugacaaacauuccaauggaaccauuaaagacaggagcccauaucgaacccuaaugagcuguccuauuggugaaguucccucuccauacaacucaagauuugagucagucgcuuggucagcaagugcuugucaugauggcaucaauuggcuaacaauuggaauuucuggcccagacaauggggcaguggcuguguuaaaguacaacggcauaauaacagacacuaucaagaguuggagaaacaauauauugagaacacaagagucugaaugugcauguguaaaugguucuugcuuuacuguaaugaccgauggaccaagugauggacaggccucauacaagaucuucagaauagaaaagggaaagauagucaaaucagucgaaaugaaugccccuaauuaucacuaugaggaaugcuccuguuauccugauucuagugaaaucacaugugugugcagggauaacuggcauggcucgaaucgaccgugggugucuuucaaccagaaucuggaauaucagauaggauacauaugcagugggauuuucggagacaauccacgcccuaaugauaagacaggcaguugugguccaguaucgucuaauggagcaaauggaguaaaaggauuuucauucaaauacggcaaugguguuuggauagggagaacuaaaagcauuaguucaagaaacgguuuugagaugauuugggauccgaacggauggacugggacagacaauaacuucucaauaaagcaagauaucguaggaauaaaugaguggucaggauauagcgggaguuuuguucagcauccagaacuaacagggcuggauuguauaagaccuugcuucuggguugaacuaaucagagggcgacccaaagagaacacaaucuggacuagcgggagcagcauauccuuuugugguguaaacagugacacuguggguuggucuuggccagacggugcugaguugccauuuaccauugacaaguaa

SEQ ID NO: 49864 - RNA, 1410 nt, Artificial Sequence; identical to SEQ ID NO: 49863
  derived and/or modified CDS sequence (wt) from neuraminidase__InfluenzaA__ACZ96942

SEQ ID NO: 49865 - RNA, 1410 nt, Artificial Sequence; identical to SEQ ID NO: 48749
  derived and/or modified CDS sequence (wt) from neuraminidase__InfluenzaA__ACZ96952

SEQ ID NO: 49866 - RNA, 1410 nt, Artificial Sequence; identical to SEQ ID NO: 48749
  derived and/or modified CDS sequence (wt) from neuraminidase__InfluenzaA__ACZ97024

SEQ ID NO: 49867 - RNA, 1410 nt, Artificial Sequence; identical to SEQ ID NO: 49863
  derived and/or modified CDS sequence (wt) from neuraminidase__InfluenzaA__ACZ97336

SEQ ID NO: 49868 - RNA, 1410 nt, Artificial Sequence; identical to SEQ ID NO: 49857
  derived and/or modified CDS sequence (wt) from neuraminidase__InfluenzaA__ACZ97346

SEQ ID NO: 49869 - RNA, 1410 nt, Artificial Sequence; identical to SEQ ID NO: 49070
  derived and/or modified CDS sequence (wt) from neuraminidase__InfluenzaA__ACZ97366

SEQ ID NO: 49870 - RNA, 1410 nt, Artificial Sequence; identical to SEQ ID NO: 49070
  derived and/or modified CDS sequence (wt) from neuraminidase__InfluenzaA__ACZ97376

SEQ ID NO: 49871 - RNA, 1410 nt, Artificial Sequence; identical to SEQ ID NO: 49070
  derived and/or modified CDS sequence (wt) from neuraminidase__InfluenzaA__ACZ97386

SEQ ID NO: 49872 - RNA, 1410 nt, Artificial Sequence; identical to SEQ ID NO: 49863
  derived and/or modified CDS sequence (wt) from neuraminidase__InfluenzaA__ACZ97396

SEQ ID NO: 49873 - RNA, 1410 nt, Artificial Sequence; identical to SEQ ID NO: 48750
  derived and/or modified CDS sequence (wt) from neuraminidase__InfluenzaA__ACZ98171

SEQ ID NO: 49874 - RNA, 1410 nt, Artificial Sequence
  derived and/or modified CDS sequence (wt) from neuraminidase__InfluenzaA__ACZ98181
augaauccaaaccaaaagauaauaaccauugguucggucuguaugacaauuggaauggcuaacuuaauauuacaaauuggaaacauaaucucaauauggauuagccacucaauucaacuugggaaucaaaaucagauugaaacaugcaaucaaagcgucauuacuuaugaaaacaacacuuggguaaaucagacauauguuaacaucagcaacaccaacuuugcugcuggacagucagugguuuccgugaaauuagcgggcaauuccucucucugcccuguuaguggaugggcuauauacaguaaagacaacaguauaagaaucgguuccaagggggauguguuugucauaagggaaccauucauaucaugcucccccuuggaaugcagaaccuucuucuugacucaaggggccuugcuaaaugacaaacauuccaauggaaccauuaaagacaggagcccauaucgaacccuaaugagcuguccuauuggugaaguucccucuccauacaacucaagauuugagucagucgcuuggucagcaagugcuugucaugauggcaucaauuggcuaacaauuggaauuucuggcccagacaauggggcaguggcuguguuaaaguacaacggcauaauaacagacacuaucaagaguuggagaaacaauauauugagaacacaagagucugaaugugcauguguaaaugguucuugcuuuacuguaaugaccgauggaccaagugauggacaggccucauacaagaucuucagaauagaaaagggaaagauagucaaaucagucgaaaugaaugccccuaauuaucacuaugaggaaugcuccuguuauccugauucuagugaaaucacaugugugugcagggauaacuggcauggcucgaaucgaccgugggugucuuucaaccagaaucuggaauaucagauaggauacauauguagugggauuuucggagacaauccacgcccuaaugauaagacaggcaguugugguccaguaucgucuaauggagcaaauggaguaaaaggauuuucauucaaauacggcaaugguguuuggauagggagaacuaaaagcauuaguucaagaaacgguuuugagaugauuugggauccgaacggauggacugggacagacaauaacuucucaauaaagcaagauaucguaggaauaaaugaguggucaggauauagcgggaguuuuguucagcauccagaacuaacagggcuggauuguauaagaccuugcuucuggguugaacuaaucagagggcgacccaaagagaacacaaucuggacuagcgggagcagcaucuccuuuugugguguaaacagugacacuguggguuggucuuggccagacggugcugaguugccauuuaccauugacaaguaa

SEQ ID NO: 49875 - RNA, 1410 nt, Artificial Sequence
  derived and/or modified CDS sequence (wt) from neuraminidase__InfluenzaA__ACZ98191
augaauccaaaccaaaagauaauaaccauugguucggucuguaugacaauuggaauggcuaacuuaauauuacaaauuggaaacauaaucucaauauggauuagccacucaauucaacuugggaaucaaaaucagauugaaacaugcaaucaaagcgucauuaguuaugaaaacaacacuuggguaaaucagacauauguuaacaucagcaacaccaacuuugcugcuggacagucagugguuuccgugaaauuagcgggcaauuccucucucugcccuguuaguggaugggcuauauacaguaaagacaacaguauaagaaucgguuccaagggggauguguuugucauaagggaaccauucauaucaugcucccccuuggaaugcagaaccuucuucuuaacucaaggggccuugcuaaaugacaaacauuccaauggaaccauuaaagacaggagcccauaucgaacccuaaugagcuguccuauuggugaaguucccucuccauacaacucaagauuugagucagucgcuuggucagcaagugcuugucaugauggcaucaauuggcuaacaauuggaauuucuggcccagacaauggggcaguggcuguguuaaaguacaacggcauaauaacagacacuaucaagaguuggagaaacaauauauugagaacacaagagucugaaugugcauguguaaaugguucuugcuuuacuguaaugaccgauggaccaagugauggacaggccucauacaagaucuucagaauagaaaagggaaagauagucaaaucagucgaaaugaaugccccuaauuaucacuaugaggaaugcuccuguuauccugauucuagugaaaucacaugugugugcagggauaacuggcauggcucgaaucgaccgugggugucuuucaaccagaaucuggaauaucagauaggauacauaugcagugggauuuucggagacaauccacgcccuaaugauaagacaggcaguugugguccaguaucgucuaauggagcaaauggaguaaaaggauuuucauucaaauacggcaaugguguuuggauagggagaacuaaaagcauuaguucaagaaacgguuuugagaugauuugggauccgaacggauggacugggacagacaauaacuucucaauaaagcaagauaucguaggaauaaaugaguggucaggauauagcgguaguuuuguucagcauccagaacuaacagggcuggauuguauaagaccuugcuucuggguugaacuaaucagagggcgacccaaagagaacacaaucuggacuagcgggagcagcauauccuuuugugguguaaacagugacacuguggguuggucuuggccagacggugcugaguugccauuuaccauugacaaguaa

SEQ ID NO: 49876 - RNA, 1410 nt, Artificial Sequence; identical to SEQ ID NO: 48749
  derived and/or modified CDS sequence (wt) from neuraminidase__InfluenzaA__ACZ98201

SEQ ID NO: 49877 - RNA, 1410 nt, Artificial Sequence; identical to SEQ ID NO: 48750
  derived and/or modified CDS sequence (wt) from neuraminidase__InfluenzaA__ACZ98211

SEQ ID NO: 49878 - RNA, 1410 nt, Artificial Sequence; identical to SEQ ID NO: 49304
  derived and/or modified CDS sequence (wt) from neuraminidase__InfluenzaA__ACZ98221

SEQ ID NO: 49879 - RNA, 1410 nt, Artificial Sequence
  derived and/or modified CDS sequence (wt) from neuraminidase__InfluenzaA__ACZ98231
augaauccaaaccaaaagauaauaaccauugguucggucuguaugacaauuggaauggcuaacuuaauauuacaaauugggaacauaaucucaauauggauuagccacucaauucaacuugggaaucaaaaucagauugaaacaugcaaucaaagcgucauuacuuaugaaaacaacacuuggguaaaucagacauauguuaacaucagcaacaccaacuuugcugcuggacagucagugguuuccgugaaauuagcgggcaauuccucucucugcccuguuaguggaugggcuauauacaguaaagacaacaguauaagaaucgguuccaagggggauguguuugucauaagggaaccauucauaucaugcucccccuuggaaugcagaaccuucuucuugacucaaggggccuugcuaaaugacaaacauuccaauggaaccauuaaagacaggagcccauaucgaacccuaaugagcuguccuauuggugaaguucccucuccauacaacucaagauuugagucagucgcuuggucagcaagugcuugucaugauggcaucaauuggcuaacaauuggaauuucuggcccagacaauggggcaguggcuguguuaaaguacaacggcauaauaacagacacuaucaagaguuggagaaacaauauauugagaacacaagagucugaaugugcauguguaaaugguucuugcuuuacuguaaugaccgauggaccaagugauggacaggccucauacaagaucuucagaauagaaaagggaaagauagucaaaucagucgaaaugaaugccccuaauuaucacuaugaggaaugcuccuguuauccugauucuagugaaaucacaugugugugcagggauaacuggcauggcucgaaucgaccgugggugucuuucaaccagaaucuggaauaucagauaggauacauaugcagugggauuuucggagacaauccacgcccuaaugauaagacaggcaguugugguccaguaucgucuaauggagcaaauggaguaaaaggauuuucauucaaauacggcaaugguguuuggauagggagaacuaaaagcauuaguucaagaaacgguuuugagaugauuugggauccgaacggauggacugggacagacaauaacuucucaauaaagcaagauaucguaggaauaaaugaguggucaggauauagcgggaguuuuguccagcauccagaacuaacagggcuggauuguauaagaccuugcuucuggguugaacuaaucagagggcgacccaaagagaacacaaucuggacuagcgggagcagcauauccuuuugugguguaaacagugacacuguggguuggucuuggccagacggugcugaguugccauuuaccauugacaaguaa

SEQ ID NO: 49880 - RNA, 1410 nt, Artificial Sequence; identical to SEQ ID NO: 48750
  derived and/or modified CDS sequence (wt) from neuraminidase__InfluenzaA__ACZ98241

SEQ ID NO: 49881 - RNA, 1410 nt, Artificial Sequence; identical to SEQ ID NO: 49727
  derived and/or modified CDS sequence (wt) from neuraminidase__InfluenzaA__ACZ98251

SEQ ID NO: 49882 - RNA, 1410 nt, Artificial Sequence
  derived and/or modified CDS sequence (wt) from neuraminidase__InfluenzaA__ACZ98261
augaauccaaaccaaaagauaauaaccauugguucggucuguaugacaauuggaauggcuaacuuaauauuacaaauuggaaacauaaucucaauauggauuagccacucaauucaacuugggaaucaaaaucagauugaaacaugcaaucaaagcgucauuacuuaugaaaacaacacuuggguaaaucagacauauguuaacaucagcaacaccaacuuugcugcuggacagucagugguuuccgugaaauuagcaggcaauuccucucucugcccuguuaguggaugggcuauauacaguaaagacaacaguauaagaaucgguuccaagggggauguguuugucauaagggaaccauucauaucaugcucccccuuggaaugcagaaccuucuucuugacucaaggggccuugcuaaaugacaaacauuccaacggaaccauuaaagacaggagcccauaucgaacccuaaugagcuguccuauuggugaaguucccucuccauacaacucaagauuugagucagucgcuuggucagcaagugcuugucaugauggcaucaauuggcuaacaauuggaauuucuggcccagacaauggggcaguggcuguguuaaaguacaacggcauaauaacagacacuaucaagaguuggagaaacaauauauugagaacacaagagucugaaugugcauguguaaaugguucuugcuuuacuguaaugaccgaugggccaagugauggacaggccucauacaagaucuucagaauagaaaagggaaagauagucaaaucagucgaaaugaaugccccuaauuaucacuaugaggaaugcuccuguuauccugauucuagugaaaucacaugugugugcagggauaacuggcauggcucgaaucgaccgugggugucuuucaaccagaaucuggaauaucagauaggauacauaugcagugggauuuucggagacaauccacgcccuaaugauaagacaggcaguugugguccaguaucgucuaauggagcaaauggaguaaaaggauuuucauucaaauacggcaaugguguuuggauagggagaacuaaaagcauuaguucaagaaacgguuuugagaugauuugggauccgaacggauggacugggacagacaauaacuucucaauaaagcaagauaucguaggaauaaaugaguggucaggauauagcgggaguuuuguucagcauccagaacuaacagggcuggauuguauaagaccuugcuucuggguugaacuaaucagagggcgacccaaagagaacacaaucuggacuagcgggagcagcauauccuuuugugguguaaacagugacacuguggguuggucuuggccagacggugcugaguugccauuuaccauugacaaguaa

SEQ ID NO: 49883 - RNA, 1410 nt, Artificial Sequence; identical to SEQ ID NO: 49733
  derived and/or modified CDS sequence (wt) from neuraminidase__InfluenzaA__ACZ98271

SEQ ID NO: 49884 - RNA, 1410 nt, Artificial Sequence; identical to SEQ ID NO: 49771
  derived and/or modified CDS sequence (wt) from neuraminidase__InfluenzaA__ACZ98281

SEQ ID NO: 49885 - RNA, 1410 nt, Artificial Sequence; identical to SEQ ID NO: 49771
  derived and/or modified CDS sequence (wt) from neuraminidase__InfluenzaA__ACZ98291

SEQ ID NO: 49886 - RNA, 1410 nt, Artificial Sequence
  derived and/or modified CDS sequence (wt) from neuraminidase__InfluenzaA__ACZ98301
augaauccaaaccaaaagauaauaaccauugguucggucuguaugacaauuggaauggcuaacuuaauauuacaaauuggaaacauaauuucaauauggauuagccacucaauucaacuugggaaucaaaaucagauugaaacaugcaaucaaagcgucauuacuuaugaaaacaacacuuggguaaaucagacauauguuaacaucagcaacaccaacuuugcugcuggacagucagugguuuccgugaaauuagcgggcaauuccucucucugcccuguuaguggaugggcuauauacaguaaagacaacaguguaagaaucgguuccaagggggauguguuugucauaagggaaccauucauaucaugcucccccuuggaaugcagaaccuucuucuugacucaaggggccuugcuaaaugacaaacauuccaauggaaccauuaaagacaggagcccauaucgaacccuaaugagcuguccuauuggugaaguucccucuccauacaacucaagauuugagucagucgcuuggucagcaagugcuugucaugauggcaucaauuggcuaacaauuggaauuucuggcccagacaauggggcaguggcuguguuaaaguacaacggcauaauaacagacaccaucaagaguuggagaaacaauauauugagaacacaagagucugaaugugcauguguaaaugguucuugcuuuacuguaaugaccgauggaccaaguaauggacaggccucauacaagaucuucagaauagaaaagggaaagauagucaaaucagucgaaaugaaugccccuaauuaucacuaugaggaaugcuccuguuauccugauucuagugaaaucacaugugugugcagggauaacuggcauggcucgaaucgaccgugggugucuuucaaccagaaucuggaauaucagauaggauacauaugcagugggauuuucggagacaauccacgcccuaaugauaagacgggcaguugugguccaguaucgucuaauggagcaaauggaguaaaaggauuuucauucaaauacggcaaugguguuuggauagggagaacuaaaagcauuaguucaagaaacgguuuugagaugauuugggauccgaacggauggacugggacagacaauaacuucucaauaaagcaagauaucguaggaauaaaugaguggucaggauauagcgggaguuuuguucagcauccagaacuaacagggcuggauuguauaagaccuugcuucuggguugaacuaaucagagggcgacccaaagagaacacaaucuggacuagcgggagcagcauauccuuuugugguguaaacagugacacuguggguuggucuuggccagacggugcugaguugccauuuaccauugacaaguaa

SEQ ID NO: 49887 - RNA, 1410 nt, Artificial Sequence
  derived and/or modified CDS sequence (wt) from neuraminidase__InfluenzaA__ACZ98321
augaauccaaaccaaaagauaauaaccauugguucggucuguaugacaauuggaauggcuaacuuaauauuacaaauuggaaacauaaucucaauauggauuagccacucaauucaacuugggaaucaaaaucagauugaaacaugcaaucaaagcgucauuacuuaugaaaacaacacuuggguaaaucagacauauguuaacaucagcaacaccaacuuugcugcuggacagucagugguuuccgugaaauuagcgggcaauuccucucucugcccuguuaguggaugggcuauauacaguaaagacaacaguauaagaaucgguuccaagggggauguguuugucauaagggaaccauucauaucaugcucccccuuggaaugcagaaccuucuucuugacucaaggggccuugcuaaaugacaaacauuccaauggaaccauuaaagacaggagcccauaucgaacccuaaugagcuguccuauuggugaaguucccucuccauacaacucaagauuugagucagucgcuuggucagcaagugcuugucaugauggcaucaauuggcuaacaauuggaauuucuggcccagacaauggggcaguggcuguguuaaaguacaacggcauaauaacagacacuaucaagaguuggagaaacaauauauugagaacacaagagucugaaugugcauguguaaaugguucuugcuuuacuguaaugaccgauggaccaagugauggacaggccucauacaagaucuucagaauagaaaagggaaagauagucaaaucagucgaaaugaaugccccuaauuaucacuaugaggaaugcuccuguuauccugauucuagugaaaucacaugugugugcagggauaacuggcauggcucgaaucgaccgugggugucuuucaaccagaaucuggaauaucagauaggauacauaugcagugggauuuucggagacaauccacgcccuaaugauaagacaggcaguugugguccaguaucgucuaauggagcaaauggaguaaaaggauuuucauucaaauacggcaaugguguuuggauagggagaacuaaaagcauuaauucaagaaacgguuuugagaugauuugggauccgaacggauggacugggacagacaauaacuucucaauaaagcaagauaucguaggaauaaaugaguggucaggauauagcgggaguuuuguucagcauccagaacuaacagggcuggauuguauaagaccuugcuucuggguugaacuaaucagagggcgacccaaagagaacacaaucuggacuagcgggagcagcauauccuuuugugguguaaacagugacacuguggguuggucuuggccagacggugcugaguugccauuuaccauugacaaguaa

SEQ ID NO: 49888 - RNA, 1410 nt, Artificial Sequence; identical to SEQ ID NO: 49794
  derived and/or modified CDS sequence (wt) from neuraminidase__InfluenzaA__ACZ98331

SEQ ID NO: 49889 - RNA, 1410 nt, Artificial Sequence
  derived and/or modified CDS sequence (wt) from neuraminidase__InfluenzaA__ACZ98341
augaauccaaaccaaaagauaauaaccauugguucggucuguauuacaauuggaauggcuaacuuaauauuacaaauuggaaacauaaucucaauauggauuagccacccaauucaacuugggaaucaaaaucagauugaaacaugcaaucaaagcgucauuacuuaugaaaacaacacuuggguaaaucagacauaugucaacaucagcaacaccaaccuugcugcuggacagucagugguuuccgugaaauuagcgggcaauuccucucucugcccugucaguggaugggcuauauacaguaaagacaacaguauaagaaucgguuccaagggggauguguuugucauaagggaaccauucauaucaugcucccccuuggaaugcagaaccuucuucuugacucaaggggccuugcuaaaugacaaacauuccaauggaaccauuaaagacaggagcccauaucgaacccuaaugagcuguccuauuggugaaguucccucuccauacaacucaagauuugagucagucgcuuggucagcaagugcuugucaugauggcaucaauuggcuaacaauuggaauuucuggcccagacaauggggcaguggcuguguuaaaguacaacggcauaauaacagacacuaucaagaguuggagaaacaauauauugagaacacaagagucugaaugugcauguguaaaugguucuugcuuuacuguaaugaccgauggaccaagugauggacaggccucauacaagaucuucagaauagaaaagggaaagauagucaaaucagucgaaaugaaugccccuaauuaucacuaugaggaaugcuccuguuauccugauucuagugaaaucacaugugugugcagggauaacuggcauggcucgaaucgaccgugggugucuuucaaccagaaucuggaauaucagauaggauacauaugcagugggauuuucggagacaauccacgcccuaaugauaagacaggcaguugugguccaguaucgucuaauggagcaaauggaguaaaaggauuuucauucaaauacggcaaugguguuuggauagggagaacuaaaagcauuaguucaagaaacgguuuugagaugauuugggauccgaacggauggacugggacagacaauaacuucucaauaaagcaagauaucguaggaauaaaugaguggucaggauauagcgggaguuuuguucagcauccagaacuaacagggcuggauuguauaagaccuugcuucuggguugaacuaaucagagggcgacccaaagagaacacaaucuggacuagcgggagcagcauauccuuuugugguguaaacagugacacuguggguuggucuuggccagacggugcugaguugccauuuaccauugacaaguaa

SEQ ID NO: 49890 - RNA, 1410 nt, Artificial Sequence; identical to SEQ ID NO: 49771
  derived and/or modified CDS sequence (wt) from neuraminidase__InfluenzaA__ACZ98351

SEQ ID NO: 49891 - RNA, 1410 nt, Artificial Sequence; identical to SEQ ID NO: 48750
  derived and/or modified CDS sequence (wt) from neuraminidase__InfluenzaA__ACZ98361

SEQ ID NO: 49892 - RNA, 1410 nt, Artificial Sequence; identical to SEQ ID NO: 48750
  derived and/or modified CDS sequence (wt) from neuraminidase__InfluenzaA__ACZ98371

SEQ ID NO: 49893 - RNA, 1410 nt, Artificial Sequence; identical to SEQ ID NO: 48947
  derived and/or modified CDS sequence (wt) from neuraminidase__InfluenzaA__ACZ98381

SEQ ID NO: 49894 - RNA, 1410 nt, Artificial Sequence; identical to SEQ ID NO: 48750
  derived and/or modified CDS sequence (wt) from neuraminidase__InfluenzaA__ACZ98391

SEQ ID NO: 49895 - RNA, 1410 nt, Artificial Sequence; identical to SEQ ID NO: 48750
  derived and/or modified CDS sequence (wt) from neuraminidase__InfluenzaA__ACZ98401

SEQ ID NO: 49896 - RNA, 1410 nt, Artificial Sequence; identical to SEQ ID NO: 48750
  derived and/or modified CDS sequence (wt) from neuraminidase__InfluenzaA__ACZ98411

SEQ ID NO: 49897 - RNA, 1410 nt, Artificial Sequence; identical to SEQ ID NO: 48780
  derived and/or modified CDS sequence (wt) from neuraminidase__InfluenzaA__ACZ98421

SEQ ID NO: 49898 - RNA, 1410 nt, Artificial Sequence; identical to SEQ ID NO: 48750
  derived and/or modified CDS sequence (wt) from neuraminidase__InfluenzaA__ACZ98431

SEQ ID NO: 49899 - RNA, 1410 nt, Artificial Sequence; identical to SEQ ID NO: 48750
  derived and/or modified CDS sequence (wt) from neuraminidase__InfluenzaA__ACZ98441

SEQ ID NO: 49900 - RNA, 1410 nt, Artificial Sequence; identical to SEQ ID NO: 48750
  derived and/or modified CDS sequence (wt) from neuraminidase__InfluenzaA__ACZ98451

SEQ ID NO: 49901 - RNA, 1410 nt, Artificial Sequence; identical to SEQ ID NO: 49771
  derived and/or modified CDS sequence (wt) from neuraminidase__InfluenzaA__ACZ98461

SEQ ID NO: 49902 - RNA, 1410 nt, Artificial Sequence; identical to SEQ ID NO: 49853
  derived and/or modified CDS sequence (wt) from neuraminidase__InfluenzaA__ACZ98674

SEQ ID NO: 49903 - RNA, 1410 nt, Artificial Sequence; identical to SEQ ID NO: 49863
  derived and/or modified CDS sequence (wt) from neuraminidase__InfluenzaA__ACZ98684

SEQ ID NO: 49904 - RNA, 1410 nt, Artificial Sequence; identical to SEQ ID NO: 49803
  derived and/or modified CDS sequence (wt) from neuraminidase__InfluenzaA__ACZ98694

SEQ ID NO: 49905 - RNA, 1410 nt, Artificial Sequence
  derived and/or modified CDS sequence (wt) from neuraminidase__InfluenzaA__ADA60801
augaauccaaaccaaaagauaauaaccauugguucggucuguaugacaauuggaauggcuaacuuaauauuacaaauuggaaacauaaucucaauauggauuagccacucaauucaacuugggaaucaaaaucagauugaaacaugcaaucaaagcgucauuacuuaugaaaacaacacuuggguaaaucagacauauguuaacaucagcaacaccaacuuugcugcuggacagucagugguuuccgugaaauuagcgggcaauuccucucucugcccuguuaguggaugggcuauauacaguaaagacaacaguauaagaaucgguuccaagggggauguguuugucauaagggaaccauucauaucaugcucccccuuggaaugcagaaccuucuucuugacucaaggggccuugcuaaaugacaaacauuccaauggaaccauuaaagacaggagcccauaucgaacccuaaugagcuguccuauuggugaaguucccucuccauacaacucaagauuugagucagucgcuuggucagcaagugcuugucaugauggcaucaauuggcuaacaauuggaauuucuggcccagacaauggggcaguggcuguguuaaaguacaacggcauaauaacagacacuaucaagaguuggagaaacaauauauugagaacacaagagucugaaugugcauguguaaaugguucuugcuuuacuguaaugaccgauggaccaagugauggacaggccucauacaagaucuucagaauagaaaagggaaagauagucaaaucagucgaaaugaaugccccuaauuaucacuaugaggaaugcuccuguuauccugauucuagugaaaucacaugugugugcagggauaacuggcauggcucgaaucgaccgugggugucuuucaaccagaaccuggaauaucagauaggauacauaugcagugggauuuucggagacaauccacgcccuaaugauaagacaggcaguugugguccaguaucgucuaauggagcaaauggaguaaaaggauuuucauucaaauacggcaaugguguuuggauagggagaacuaaaagcauuaguucaagaaacgguuuugagaugauuugggauccgaacggauggacugggacagacaauaacuucucaauaaagcaagauaucguaggaauaaaugaguggucaggauauagcgggaguuuuguccagcauccagaacuaacagggcuggauuguauaagaccuugcuucuggguugaacuaaucagagggcgacccaaagagaacacaaucuggacuagcgggagcagcauauccuuuugugguguaaacagugacacuguggguuggucuuggccagacggugcugaguugccauuuaccauugacaaguaa

SEQ ID NO: 49906 - RNA, 1410 nt, Artificial Sequence; identical to SEQ ID NO: 48750
  derived and/or modified CDS sequence (wt) from neuraminidase__InfluenzaA__ADA69294

SEQ ID NO: 49907 - RNA, 1410 nt, Artificial Sequence; identical to SEQ ID NO: 48750
  derived and/or modified CDS sequence (wt) from neuraminidase__InfluenzaA__ADA69304

SEQ ID NO: 49908 - RNA, 1410 nt, Artificial Sequence; identical to SEQ ID NO: 48750
  derived and/or modified CDS sequence (wt) from neuraminidase__InfluenzaA__ADA69314

SEQ ID NO: 49909 - RNA, 1410 nt, Artificial Sequence; identical to SEQ ID NO: 48750
  derived and/or modified CDS sequence (wt) from neuraminidase__InfluenzaA__ADA69324

SEQ ID NO: 49910 - RNA, 1410 nt, Artificial Sequence; identical to SEQ ID NO: 48750
  derived and/or modified CDS sequence (wt) from neuraminidase__InfluenzaA__ADA69334

SEQ ID NO: 49911 - RNA, 1410 nt, Artificial Sequence
  derived and/or modified CDS sequence (wt) from neuraminidase__InfluenzaA__ADA69451
augaauccaaaccaaaagauaauaaccauugguucggucuguaugacaauuggaauggcuaacuuaauauuacaaauuggaaacauaaucucaauauggauuagccacucaauucaacuugggaaucaaaaucagauugaaacaugcaaucaaagcgucauuacuuaugaaaacaacacuuggguaaaucagacauauguuaacaucagcaacaccaacuuugcugcuggacagucagugguuuccgugaaauuagcgggcaauuccucucucugcccuguuaguggaugggcuauauacaguaaagacaacaguauaagaaucgguuccaagggggauguguuugucauaagggaaccauucauaucaugcucccccuuggaaugcagaaccuucuucuugacucaaggggccuugcuaaaugacaaacauuccaauggaaccauuaaagacaggagcccauaucgaacccuaaugagcuguccuauuggugaaguucccucuccauacaacucaagauuugagucagucgcuuggucagcaagugcuugucaugauggcaucaauuggcuaacaauuggaauuucuggcccagacaauggggcaguggcuguguuaaaguacaacggcauaauaacagacacuaucaagaguuggagaaacaauauauugagaacacaagagucugaaugugcauguguaaaugguucuugcuuuacuguaaugaccgauggaccaagugauggacaggccucauacaagaucuucagaauagaaaagggaaagauagucaaaucagucgaaaugaaugccccuaauuaucacuaugaggaaugcuccuguuauccugauucuagugaaaucacaugugugugcagggauaacuggcauggcucgaaucgaccgugggugucuuucaaccagaaucuggaauaucagauaggauacauaugcagugggauuuucggagacaauccacgcccuaaugauaagacaggcaguugugguccaguaucgucuaauggagcaaauggaguaaaaggauuuucauucaaauacggcaaugguguuuggauagggagaacuaaaagcauuaguucaagaaacgguuuugagaugauuugggauccgaacggauggacugggacagacaauaacuucucaauaaagcaagauaucguaggaauaaaugaguggucaggauauagcgggaguuuuguucagcauccagaacuaacagggcuggauuguaucagaccuugcuucuggguugaacuaaucagagggcgacccaaagagaacacaaucuggacuagcgggagcagcauauccuuuugugguguaaacagugacacuguggguuggucuuggccagacggugcugaguugccauuuaccauugacaaguaa

SEQ ID NO: 49912 - RNA, 1410 nt, Artificial Sequence
  derived and/or modified CDS sequence (wt) from neuraminidase__InfluenzaA__ADA69453
augaauccaaaccaaaagauaauaaccauugguucggucuguaugacaauuggaauggcuaacuuaauauuacaaauuggaaacauaaucucaauauggauuagccacucaauucaacuugggaaucaaaaucagauugaaacaugcaaucaaagcgucauuacuuaugaaaacaacacuuggguaaaucagacauauguuaacaucagcaacaccaacuuugcugcuggacagucagugguuuccgugaaauuagcgggcaauuccucucucugcccuguuaguggaugggcuauauacaguaaagacaacaguauaagaaucgguuccaagggggauguguuugucauaagggaaccauucauaucaugcuccccuuuggaaugcagaaccuucuucuugacucaaggggccuugcuaaaugacaaacauuccaauggaaccauuaaagacaggagcccauaucgaacccuaaugagcuguccuauuggugaaguucccucuccauacaacucaagauuugagucagucgcuuggucagcaagugcuugucaugauggcaucaauuggcuaacaauuggaauuucuggcccagacaauggggcaguggcuguguuaaaguacaacggcauaauaacagacacuaucaagaguuggagaaacaauauauugagaacacaagagucugaaugugcauguguaaaugguucuugcuuuacuguaaugaccgauggaccaagugauggacaggccucauacaagaucuucagaauagaaaagggaaagauagucaaaucagucgaaaugaaugccccuaauuaucacuaugaggaaugcuccuguuauccugauucuagugaaaucacaugugugugcagggauaacuggcauggcucgaaucgaccgugggugucuuucaaccagaaucuggaauaucagauaggauacauaugcagugggauuuucggagacaauccacgcccuaaugauaagacaggcaguugugguccaguaucgucuaauggagcaaauggaguaaaaggauuuucauucaaauacggcaaugguguuuggauagggagaacuaaaagcauuaguucaagaaacgguuuugagaugauuugggauccgaacggauggacugggacagacaauaacuucucaauaaagcaagauaucguaggaauaaaugaguggucaggauauagcgggaguuuuguucagcauccagaacuaacagggcuggauuguauaagaccuugcuucuggguugaacuaaucagagggcgacccaaagagaacacaaucuggacuagcgggagcagcauauccuuuugugguguaaacagugacacuguggguuggucuuggccagacggugcugaguugccauuuaccauugacaaguaa

SEQ ID NO: 49913 - RNA, 1410 nt, Artificial Sequence
  derived and/or modified CDS sequence (wt) from neuraminidase__InfluenzaA__ADA71153
augaauccaaaucaaaagauaauaacgauuggcucuguuucucucaccauuuccacaauaugcuucuucaugcaaauugccaucuugguaacuacuguaacauugcauuucaagcaauaugaauucaacucccccccaaacaaccaagugaugcugugugaaccaacaauaauagaaagaaacauaacagagauaguguaucugaccaacaccaccauagagaaggaaauaugccccaaacuagcagaauacagaaauuggucaaagccgcaaugugacauuacaggauuugcaccuuuuucuaaggacaauucgauuaggcuuuccgcugguggggacaucugggugacaagagaaccuuaugugucaugcgauccugacaaguguuaucaauuugcccuuggacagggaacaacacuaaacaacgugcauucaaauaacacaguacgugauaggaccccuuaucggacccuauugaugaaugaguuagguguuccuuuucaucuggggaccaagcaagugugcauagcaugguccagcucaaguugucacgauggaaaagcauggcugcauguuuguauaacgggggaugauaaaaaugcaacugcuagcuucauuuacaaugggaggcuuguagauaguguuguuucaugguccaaagacauccucaggacccaggagucagaaugcguuuguaucaauggaacuuguacaguaguaaugacugaugggagugcuucaggaaaagcugauacuaaaauacuauucauugaggaggggaaaaucguucauacuagcacauugucaggaagugcucagcaugucgaggagugcuccugcuauccucgauauccuggugucagaugugucugcagagacaacuggaaaggcuccaauaggcccauuguagauauaaacauaaaggaucauagcauuguuucccguuauguguguucaggacuuguuggagacccacccagaaaaaacgacagcuccagcaguagccauuguuuggauccuaacaaugaagaagguggucauggagugaaaggcugggccuuugaugauggaaaugacguguggaugggaagaacgaucagcgagaagucacgcuuaggguaugaaaccuucaaagucauugaaggcugguccaacccuaaguccaaauugcagauaaauaggcaagucauaguugacagagguaauagguccgguuauucugguauuuucucuguugaaggcaaaagcugcaucaaucggugcuuuuauguggaguugauaaggggaagaaaagaggaaacugaagucuuguggaccucaaacaguauuguuguguuuuguggcaccucagguacauauggaacaggcucauggccugauggggcgaacaucaaucucaugccuauauaa

SEQ ID NO: 49914 - RNA, 1413 nt, Artificial Sequence
  derived and/or modified CDS sequence (wt) from neuraminidase__InfluenzaA__ADA71155
augaacccaaaucaaaagauaauaaccauuggaucaaucaguauagcaaucgggauaauuagucuaauguugcaaauaggaaauauuauuucaauaugggcuagucacucaauccaaauuggaagucaaaacaacacuggaauaugcaaccaaagaaucaucacauaugaaaacagcaccugggugaaucacacauauguuaauauuaacaacacuaaaguuguugcuggagaggacaaaacuucagugacauuggccggcaauucaucucuuuguucuaucaguggaugggcuauauacacaaaagacaacagcauaagaauuggcuccaaaggagauguuuuugucauaagagaaccuuucauaucauguucucacuuggaaugcagaaccuuuuuucugacccaaggcgcucuauuaaaugacaaacauucaaaugggaccguaaaggacagaaguccuuauagggccuuaaugagcuguccucuaggugaagcuccguccccauacaauucaaaguucgaaucaguugcauggucagcaagcgcaugccaugauggcaugggcugguuaacaaucggaauuucugguccagacaauggagcuguggcuguacuaaaauacaacggaauaauaacuggaaccauaaaaaguuggaaaaagcaaauauuaagaacacaagagucugaaugugucuguaugaacgggucauguuuuaccauaaugaccgauggcccgaguaauaaggccgccucuuacaaaauuuucaagaucgaaaaggggaagguuacuaaaucaauagaguugaaugcacccaauuuuuauuaugaggaaugcuccuguuacccagacacuggcauagugauguguguaugcagggacaacuggcaugguucaaaucgaccuugggugucuuuuaaucaaaacuuggauuaucaaauaggauacaucugcaguggaguguuuggugacaauccgcgucccgaagauggagagggcagcugcaauccagugacuguugauggagcaaacggaguaaaaggguuuucauacaaauaugguaaugggguuuggauaggaaggaccaaaaguaacagacuuagaaagggguuugagaugauuugggauccuaauggauggacaaauaccgacagugauuucucagugaaacaggauguuguagcaauaacugauuggucaggauacagcgggaguuucguccaacauccugaguuaacaggauuggacuguauaagaccuugcuucuggguugaguuagucagagggcugccuagagaaaauacaacaaucuggacuagugggagcagcauuucuuuuuguggcguuaauagugauacugcaaacuggucuuggccagacggugcugaguugccguucaccaucgacaaguag

SEQ ID NO: 49915 - RNA, 1413 nt, Artificial Sequence
  derived and/or modified CDS sequence (wt) from neuraminidase__InfluenzaA__ADA71157
augaacccaaaucaaaagauaauaaccauuggaucaaucaguauagcaaucggaauaauuagucuaauguugcaaauaggaaauauuauuucaauaugggcuagucacucaauccaaacugggagucaaaacaacacuggaauaugcaaccaaagaaucaucacauaugaaaacagcaccugggugaaucacacauauguuaauauuaacaacacuaauguuguugcuggagaggacaaaacgucagugacauuggccggcaauucaucucuuuguucuaucaguggaugggcuauauacacaaaagacaacagcauaagaauuggcuccaaaggagauguuuuugucauaagagaaccuuucauaucauguucucacuuggaaugcagaaccuuuuuucugacccaaggcgcucuauuaaaugacaaacauucaaaugggaccguaaaggacagaaguccuuauagggccuuaaugagcuguccucuaggugaagcuccguccccauacaauucaaaguucgaaucaguugcauggucagcaagcgcaugccaugauggcaugggcugguuaacaaucggaauuucugguccagacaauggagcuguggcuguacuaaaauacaacggaauaauaacuggaaccauaaaaaguuggaaaaagcaaauauuaagaacacaagagucugaaugugucuguaugaacgggucauguuucaccauaaugaccgauggcccgaguaauaaggccgccucguacaaaauuuucaagaucgaaaaggggaagguuacuaaaucaauagaguugaaugcacccaauuuuuauuaugaggaaugcuccuguuacccagacacuggcauagugauguguguaugcagggacaacuggcaugguucaaaucgaccuugggugucuuuuaaucaaaacuuggauuaucaaauaggauacauuugcaguggaguguuuggugacaauccgcgucccgaagauggagagggcagcugcaauccagugacuguugauggagcaaacggaguaaaaggguuuucauacaaauaugguaaugguguuuggauagggaggaccaaaaguaacagacuuagaaagggguuugagaugauuugggauccuaauggauggacaaauaccgacagugauuucucagugaaacaggauguuguagcaauaacugauuggucaggguacagcggaaguuucguccaacauccugaguuaacaggauuggacuguauaagaccuugcuucuggguugaguuagucagagggcugccuagagaaaauacaacaaucuggacuagugggagcagcauuucuuuuuguggcguuaauagugauacugcaaacuggucuuggccagacggugcugaguugccguucaccaucgacaaguag

SEQ ID NO: 49916 - RNA, 1413 nt, Artificial Sequence
  derived and/or modified CDS sequence (wt) from neuraminidase__InfluenzaA__ADA71159
augaacccaaaucaaaagauaauaaccauuggaucaaucaguauagcaaucgggauaauuagucuaauguugcaaauaggaaauauuauuucaauaugggcuagucacucaauccaaauuggaagucaaaacaacacuggaauaugcaaccaaagaaucaucacauaugaaaacagcaccugggugaaucacacauauguuaauauuaacaacacuaaaguuguugcuggagagggcaaaacuucagugacauuggccggcaauucaucucuuuguucuaucaguggaugggcuauaaacacaaaagacaacagcauaagaauuggcuccaaaggagauguuuuugucauaagagaaccuuucauaucauguucucacuuggaaugcagaaccuuuuuucugacccaaggcgcacuauuaaaugacaaacauucaaauaggaccguaaaggacagaaguccuuauagggccuuaaugagcuguccucuaggugaagcuccguccccauacaauucaaaguucgaaucaguugcauggucagcaagcgcaugccaugauggcaugggcugguuaacaaucggaauuucugguccagacaauggagcuguggcuguacuaaaauacaacggaauaauaacuggaaccauaaaaaguuggaaaaagcaaauauuaagaacacaagagucugaaugugucuguaugaacgggucauguuuuaccauaaugaccgauggcccgaguaauaaggccgccucguacaaaauuuucaagaucgaaaaggggaagguuacuaaaucaauagaguugaaugcacccaauuuuuauuaugaggaaugcuccuguuacccagacacuggcauagugauguguguaugcagggacaacuggcaugguucaaaucgaccuugggugucuuuuaaucaaaacuuggauuaucaaauaggauacaucugcaguggaguguuuggugacaauccgcgucccgaagauggagagggcagcugcaauccagugacuguugauggagcaaacggaguaaaaggguuuucauacaaauaugguaaugggguuuggauaggaaggaccaaaaguaacagacuuagaaagggguuugagaugauuugggauccuaauggauggacaaauaccgacagugauuucucagugaaacaggauguuguagcaauaacugauuggucaggauacagcgggaguuucguccaacauccugaguuaacaggauuggacuguauaagaccuugcuucuggguugaguuagucagagggcugccuagagaaaauacaacaaucuggacuagugggagcagcauuucuuuuuguggcguuaauagugauacugcaaacuggucuuggccagacggugcugaguugccguucaccaucgacaaguag

SEQ ID NO: 49917 - RNA, 1410 nt, Artificial Sequence
  derived and/or modified CDS sequence (wt) from neuraminidase__InfluenzaA__ADA71161
augaauccaaaucaaaagauaauaacgauuggcucuguuucucucaccauuuccacaauaugcuucuucaugcaaauugccaucuugauaacuacuguaacauugcauuucaagcaauaugaauucaacucccccccaaacaaccaagugaugcugugugaaccaacaauaauagaaagaaacauaacagagauaguguaucugaccaacaccaccauagagaaggaaauaugccccaaacuagcagaauacagaaauuggucaaagccgcaaugugacauuacaggauuugcaccuuuuucuaaggacaauucgauuaggcuuuccgcugguggggacaucugggugacaagagaaccuuaugugucaugcgauccugacaaguguuaucaauuugcccuuggacagggaacaacacuaaacaacgugcauucaaauaacacaguacgugauaggaccccuuaucggacccuauugaugaaugaguuagguguuccuuuucaucuggggaccaagcaagugugcauagcaugguccagcucaaguugucacgauggaaaagcauggcugcauguuuguauaacgggggaugauaaaaaugcaacugcuagcuucauuuacaaugggaggcuuguagauaguguuguuucaugguccaaagaaauccucaggacccaggagucagaaugcgucuguaucaauggaacuuguacaguaguaaugacugaugggagugcuucaggaaaagcugauacuaaaauacuauucauugaggaggggaaaaucguccauacuagcacauugucaggaagugcucagcaugucgaggagugcucuugcuauccucgauauccuggugucagaugugucugcagagacaacuggaaaggcuccaauaggcccaucguagauauaaacauaaaggaucauagcauuguuuccaguuauguguguucaggacuuguuggagacacacccagaaaaaacgacagcuccagcaguagccauuguuuggauccuaacaaugaagaagguggucauggagugaaaggcugggccuuugaugauggaaaugacguguggaugggaagaacgaucagcgagaagucacgcuuaggguaugaaacuuucaaagucauugaaggcugguccaaccauaaguccaaauugcagauaaauaggcaagucauaguugacagagguaauagguccgguuauucugguauuuucucuguugaaggcaaaagcugcaucaaucggugcuuuuauguggaguugauuaggggaagaaaagaggaaacugaagucuuguggaccucaaacaguauuguuguguuuuguggcaccucagguacauauggaacaggcucauggccugauggggcggaccucaaucucaugccuauauaa

SEQ ID NO: 49918 - RNA, 1413 nt, Artificial Sequence
  derived and/or modified CDS sequence (wt) from neuraminidase__InfluenzaA__ADA71165
augaacccaaaucaaaagauaauaaccauuggaucaaucaguauagcaaucggaauaauuagucuaauguugcaaauaggaaauauuauuucaauaugggcuagucacucaauccaaacugggagucaaaacaacacuggaauaugcaaccaaagaaucaucacauaugaaaacagcaccugggugaaucacacauauguuaauauuaacaacacuaauguuguugcuggagaggacaaaacgucagugacauuggccggcaauucaucucuuuguucuaucaguggaugggcuauauacacaaaagacaacagcauaagaauuggcuccaaaggagauguuuuugucauaagagaaccuuucauaucauguucucacuuggaaugcagaaccuuuuuucugacccaaggcgcucuauuaaaugacaaacauucaaaugggaccguaaaggacagaaguccuuauagggccuuaaugagcuguccucuaggugaagcuccguccccauacaauucaaaguucgaaucaguugcauggucagcaagcgcaugccaugauggcaugggcugguuaacaaucggaauuucugguccagacaauggagcuguggcuguacuaaaauacaacggaauaauaacuggaaccauaaaaaguuggaaaaagcaaauauuaagaacacaagagucugaaugugucuguaugaacgggucauguuucaccauaaugaccgauggcccgaguaauaaggccgccucguacaaaauuuccaagaucgaaaaggggaagguuacuaaaucaauagaguugaaugcacccaauuuuuauuaugaggaaugcuccuguuacccagacacuggcauagugauguguguaugcagggacaacuggcaugguucaaaucgaccuugggugucuuuuaaucaaaacuuggauuaucaaauaggauacaucugcaguggaguguuuggugacaauccgcgucccgaagauggagagggcagcugcaauccagugacuguugauggagcaaacggaguaaaaggguuuucauacaaauaugguaaugggguuuggauaggaaggaccaaaaguaacagacuuagaaagggguuugagaugauuugggauccuaauggauggacaaauaccgacagugauuucucagugaaacaggauguuguagcaauaacugauuggucaggguacagcggaaguuucguccaacauccugaguuaacaggauuggacuguauaagaccuugcuucuggguugaguuagucagagggcugccuagagaaaauacaacaaucuggacuagugggagcagcauuucuuuuuguggcguuaauagugauacugcaaacuggucuuggccagacggugcugaguugccguucaccaucgacaaguag

SEQ ID NO: 49919 - RNA, 1410 nt, Artificial Sequence
  derived and/or modified CDS sequence (wt) from neuraminidase__InfluenzaA__ADA71167
augaauccaaaucaaaagauaauaacgauuggcucuguuucucucaccauuuccacaauaugcuucuucaugcaaauugccaucuugauaacuacuguaacauugcauuucaagcaauaugaauucaacucccccccaaacaaccaagugaugcugugugaaccaacaauaauagaaagaaacauaacagagauaguguaucugaccaacaccaccauagagaaggaaauaugccccaaacuagcagaauacagaaauuggucaaagccgcaaugugacauuacaggauuugcaccuuuuucuaaggacaauucgauuaggcuuuccgcuggcggggacaucugggugacaagagaaccuuaugugucaugcgauccugacaaguguuaucaauuugcccuuggacagggaacaacacuaaacaacgugcauucaaauaacacaguacgugguaggaccccuuaucggacccuauugaugaaugaguuagguguuccuuuucaucuggggaccaagcaagugugcauagcaugguccagcucaaguugucacgauggaaaagcauggcugcauguuuguauaacgggggaugauaaaaaugcaacugcuagcuucauuuacaaugggaggcuuguagauaguguuguuucaugguccaaagacauccucaggacccaggagucagaaugcguuuguaucaauggaacuuguacaguaguaaugacugaugggagugcuucaggaaaagcugauacuaaaauacuauucauugaggaggggaaaaucguucauacuagcacauugucaggaagugcucagcaugucgaggagugcuccugcuauccucgauauccuggugucagaugugucugcagagacaacuggaaaggcuccaauaggcccaucguggauauaaacauaaaggaucauagcauuguuuccaguuauguguguucaggacuuguuggagacacacccagaaaaaacgacagcuccagcaguagccauuguuugaauccuaacaaugaagaagguggucauggagugaaaggcugggccuuugaugauggaaaugacguguggaugggaagaacgaucagcgagaagucacgcuuaggguaugaaaccuucaaagucauugaaggcugguccaacccuaaguccaaauugcagauaaauaggcaagucauaguugacagagguaauagguccgguuauucugguauuuucucuguugaaggcaaaagcugcaucaaucggugcuuuuauguggaauugauaaggggaagaaaagaggaaacugaagucuuguggaccucaaacaguauuguuguguuuuguggcaccucagguacauauggaacaggcucauggccugauggggcgaacaucaaucucaugccuauauaa

SEQ ID NO: 49920 - RNA, 1413 nt, Artificial Sequence
  derived and/or modified CDS sequence (wt) from neuraminidase__InfluenzaA__ADA71169
augaacccaaaucaaaaaauaauaaccauuggaucaaucaguauagcaaucggaauaauuagucuaauguugcaaauaggaaauauuauuucaauaugggcuagucacucaauucaaacuggaagucaaaaccacacuggaauaugcaaccaaagaaucaucacauaugaaaacagcaccugggugaaucacacauauguuaauauuaacaacacuaauguuguugcuggaaaggacaaaacuccagugacauuggucggcaacucaucucuuuguucuaucaguggaugggcuauauacacaaaagacaacagcauaagaauuggcuccaaaggagauguuuuugucauaagagaaccuuucauaucaugcucucacuuggaaugcaaaaccuuuuuucugacccaaggcgcucuauuaaaugacaaacauucaaaugggaccguaaaggacagaaguccuuauagggccuuaaugagcuguccucuaggugaagcuccguccccauacaauucaaaguucgaaucaguugcauggucagcaagcgcaugccaugauggcauaggcugguuaacaaucggaauuucugguccagacaauggagcuguggcuguacuaaaauacaaaggaauaauaacuggaaccauaaaaaguuggaaaaagcaaauauuaagaacacaagagucugaaugugucuguauaaacgggucauguuucaccauaaugaccgaugguccgagugauggggccgccucguacaaaauuuucaagaucgaaaaggggaagguuacuaaaucaauggaguugaaugcacccaauuuucauuaugaggaauguucuuguuacccagacacuggcacagugauguguguaugcagggacaacuggcaugguucaaaucgaccuugggugucuuuuaaucaaaacuuggauuaucaaauaggauacaucugcaguggaguguucggugacaauccgcgucccaaagauggagagggcagcugcaacccagugacuguugauggagcaaacggaguaaaaggguuuucauacaaauaugguaaugguguuuggauaggaaggaccaaaaguaacagaauuagaaagggguuugagaugauuugggauccuaauggauggacaaauaccgacagugauuucucagugaaacaggauauuguagcaauaacugauuggucaggguacagcggaaguuucguccaacauccugaguuaacaggauuggacuguauaagaccuugcuucuggguugaguuagucagagggcugccuagagaaaauacaacaaucuggacuagugggagcagcauuucuuuuuguggcguuaauggugauauugcaaauuggucuuggccagacggugcugaguugccguucaccauugacaaguag

SEQ ID NO: 49921 - RNA, 1413 nt, Artificial Sequence
  derived and/or modified CDS sequence (wt) from neuraminidase__InfluenzaA__ADA71171
augaacccaaaucaaaagauaauaaccauuggaucaaucaguauagcaaucggaauaauuagucuaauguugcaaauaggaaauauuauuucaauaugggcuagucacucaauccaaacugggagucaaaacaacacuggaauaugcaaccaaagaaucaucacauaugaaaacagcaccugggugaaucacacauauguuaauauuaacaacacuaauguuguugcuggagaggacaaaacgucagugacauuggccggcaauucaucucuuuguucuaucaguggaugggcuauauacacaaaagacaacagcauaagaauuggcuccaaaggagauguuuuugucauaagagaaccuuucauaucauguucucacuuggaaugcagaaccuuuuuucugacccaaggcgcucuauuaaaugacaaacauucaaaugggaccguaaaggacagaaguccuuauagggccuuaaugagcuguccucuaggugaagcuccguccccauacaauucaaaguucgaaucaguugcauggucagcaagcgcaugccaugauggcaugggcugguuaacaaucggaauuucugguccagacaauggagcuguggcuguacuaaaauacaacggaauaauaacuggaaccauaaaaaguuggaaaaagcaaauauuaaggacacaagagucugaaugugucuguaugaacgggucauguuucaccauaaugaccgauggcccgaguaauaaggccgccucguacaaaauuuucaagaucgaaaaggggaagguuacuaaaucaauagaguugaaugcacccaauuuuuauuaugaggaaugcuccuguuacccagacacuggcauagugauguguguaugcagggacaacuggcaugguucaaaucgaccuugggugucuuuuaaucaaaacuuggauuaucaaauaggauacaucugcaguggaguguuuggugacaauccgcgucccgaagauggagagggcagcugcaauccagugacuguugauggagcaaacggaguaaaaggguuuucauacaaauaugguaaugggguuuggauaggaaggaccaaaaguaacagacuuagaaagggguuugagaugauuugggauccuaauggauggacaaauaccgacagugauuucucagugaaacaggauguuguagcaauaacugauuggucaggguacagcggaaguuucguccaacauccugaguuaacaggauuggacuguauaagaccuugcuucuggguugaguuagucagagggcugccuagagaaaauacaacaaucuggacuagugggagcagcauuucuuuuuguggcguuaauagugauacugcaaacuggucuuggccagacggugcugaguugccguucaccaucgacaaguag

SEQ ID NO: 49922 - RNA, 1410 nt, Artificial Sequence
  derived and/or modified CDS sequence (wt) from neuraminidase__InfluenzaA__ADA71173
augaauccaaaucaaaagauaauaacgauuggcucuguuucucucaccauuuccacaauaugcuucuucaugcaaauugccaucuugauaacuacuguaacauugcauuucaagcaauaugaauucaacucccccccaaacaaccaagugaugcugugugaaccaacaauaauagaaagaaacauaacagagauaguguaucugaccaacaccaccauagagaaggaaauaugccccaaacuagcagaauacagaaauuggucaaagccgcaaugugacauuacaggauuugcaccuuuuucuaaggacaauucgauuaggcuuuccgcugguggggacaucugggugacaagagaaccuuaugugucaugcgauccugacaaguguuaucaauuugcccuuggacagggaacaacacuaaacaacgugcauucaaauaacacaguacgugcuaggaccccuuaucggacccuauugaugaaugaguuagguguuccuuuucaucuggggaccaagcaagugugcauagcaugguccagcucaaguugucacgauggaaaagcauggcugcauguuuguauaacgggggaugauaaaaaugcaacugcuagcuucauuuacaaugggaggcuuguagauaguguuguuucaugguccaaagacauccucaggacccaggagucagaaugcguuuguaucaauggaacuuguacaguaguaaugacugaugggagugcuucaggaaaagcugauacuaaaauacuauucauugaggaggggaaaaucguucauacuagcacauugucaggaagugcucagcaugucgaggagugcuccugcuauccucgauauccuggugucagaugugucugcagagacaacuggaaaggcuccaauaggcccaucguagauauaaacauaaaggaucauagcauuguuuccaguuauguguguucaggacuuguuggagacacacccagaaaaaacgacagcuccagcaguagccauuguuugaauccuaacaaugaagaagguggucauggagugaaaggcugggccuuugaugauggaaaugacguguggaugggaagaacgaucagcgagaagucacgcuuaggguaugaaaccuucaaagucauugaaggcugguccaacccuaaguccaaauugcagauaaauaggcaagucauaguugacagagguaauagguccgguuauucugguauuuucucuguugaaggcaaaagcugcaucaaucggugcuuuuauguggaauugauaaggggaagaaaagaggaaacugaagucuuguggaccucaaacaguauuguuguguuuuguggcaccucagguacauauggaacaggcucauggccugauggggcgaacaucaaucucaugccuauauaa

SEQ ID NO: 49923 - RNA, 1413 nt, Artificial Sequence
  derived and/or modified CDS sequence (wt) from neuraminidase__InfluenzaA__ADA71175
augaacccaaaucaaaagauaauaaccauuggaucaaucaguauagcaaucgggauaauuagucuaauguugcaaauaggaaauauuauuucaauaugggcuagucacucaauccaaauuggaagucaaaacaacacuggaauaugcaaccaaagaaucaucacauaugaaaacagcaccugggugaaucacacauauguuaauauuaacaacacuaaaguuguugcuggagaggacaaaacuucagugacauuggccggcaauucaucucuuuguucuaucaguggaugggcuauaaacacaaaagacaacagcauaagaauuggcuccaaaggagauguuuuugucauaagagaaccuuucauaucauguucucacuuggaaugcagaaccuuuuuucugacccaaggcgcucuauuaaaugacaaacauucaaaugggaccguaaaggacagaaguccuuauagggccuuaaugagcuguccucuaggugaagcuccguccccauacaauucaaaguucgaaucaguugcauggucagcaagcgcaugccaugauggcaugggcugguuaacaaucggaauuucugguccagacaauggagcuguggcuguacuaaaauacaacggaauaauaacuggaaccauaaaaaguuggaaaaagcaaauauuaagaacacaagagucugaaugugucuguaugaacgggucauguuuuaccauaaugaccgauggcccgaguaauaaggccgccucguacaaaauuuucaagaucgaaaaagggaagguuacuaaaucaauagaguugaaugcacccaauuuuuauuaugaggaaugcuccuguuacccagacacuggcauagugauguguguaugcagggacaacuggcaugguucaaaucgaccuugggugucuuuuaaucaaaacuuggauuaucaaauaggauacaucugcaguggaguguuuggugacaauccgcgucccgaagauggagagggcagcugcaauccagugacuguugauggagcaaacggaguaaaaggguuuucauacaaauaugguaaugggguuuggauaggaaggaccaaaaguaacagacuuagaaagggguuugagaugauuugggauccuaauggauggacaaauaccgacagugauuucucagugaaacaggauguuguagcaauaacugauuggucaggauacagcgggaguuucguccaacauccugaguuaacaggauuggacuguauaagaccuugcuucuggguugaguuagucagagggcugccuagagaaaauacaacaaucuggacuagugggagcagcauuucuuuuuguggcguuaauagugauacugcaaacuggucuuggccagacggugcugaguugccguucaccaucgacaaguag

SEQ ID NO: 49924 - RNA, 1413 nt, Artificial Sequence
  derived and/or modified CDS sequence (wt) from neuraminidase__InfluenzaA__ADA71177
augaacccaaaucaaaagauaauaaccauuggaucaaucaguauagcaaucggaauaauuagucuaauguugcaaauaggaaauauuauuucaauaugggcuagucacucaauccaaacugggagucaaaacaacacuggaauaugcaaccaaagaaucaucacauaugaaaacagcaccugggugaaucacacauauguuaauauuaacaacacuaauguuguugcuggagaggacaaaacgucagugacauuggccggcaauucaucucuuuguucuaucaguggaugggcuauauacacaaaagacaacagcauaagaauuggcuccaaaggagauguuuuugucauaagagaaccuuucauaucauguucucacuuggaaugcagaaccuuuuuucugacccaaggcgcucuauuaaaugacaaacauucaaaugggaccguaaaggacagaaguccuuauagggccuuaaugagcuguccucuaggugaagcuccguccccauacaauucaaaguucgaaucaguugcauggucagcaagcgcaugccaugauggcaugggcugguuaacaaucggaauuucugguccagacaauggagcuguggcuguacuaaaauacaacggaauaauaacuggaaccauaaaaaguuggaaaaagcaaauauuaagaacacaagagucugaaugugucuguaugaacgggucauguuucaccauaaugaccgauggcccgaguaauaaggccgccucguacaaaauuuucaagaucgaaaaggggaagguuacuaaaucaauagaguugaaugcacccaauuuuuauuaugaggaaugcuccuguuacccagauacuggcauagugauguguguaugcagggacaacuggcaugguucaaaucgaccuugggugucuuuuaaucaaaacuuggauuaucaaauaggauacauuugcaguggaguguuuggugacaauccgcgucccgaagauggagagggcagcugcaauccagugacuguugauggagcaaacggaguaaaaggguuuucauacaaauaugguaaugguguuuggauagggaggaccaaaaguaacagacuuagaaagggguuugagaugauuugggauccuaauggauggacaaauaccgacagugauuucucagugaaacaggauguuguagcaauaacugauuggucaggguacagcggaaguuucguccaacauccugaguuaacaggauuggacuguauaagaccuugcuucuggguugaguuagucagagggcugccuagagaaaauacaacaaucuggacuagugggagcagcauuucuuuuuguggcguuaauagugauacugcaaacuggucuuggccagacggugcugaguugccguucaccauugacaaguag

SEQ ID NO: 49925 - RNA, 1410 nt, Artificial Sequence
  derived and/or modified CDS sequence (wt) from neuraminidase__InfluenzaA__ADA71193
augaauccaaaccaaaagauaauaaccauugguucggucuguaugacaauuggaauggcuaacuuaauauuacaaauuggaaacauaaucucaauauggauuagccacucaauucaacuugggaaucaaaaucagauugaaacaugcaaucaaagcgucauuacuuaugaaaacaacacuuggguaaaucagacauauguuaacaucagcaacaccaacuuugcugcuggacagucagugguuuccgugaaauuagcgggcaauuccucucucugcccuguuaguggaugggcuauauacaguaaagacaacaguauaagaaucgguuccaagggggauguguuugucauaagggaaccauucauaucaugcucccccuuggaaugcagaaccuucuucuugacucaaggggccuugcuaaaugacaaacauuccaauggaaccauuaaagacaggagcccauaucgaacccuaaugagcuguccuauuggugaaguucccucuccauacaacucaagauuugagucagucgcuuggucagcaagugcuugucaugauggcaucaauuggcuaacaauuggaauuucuggcccagacaauggggcaguggcuguguuaaaguacaacggcauaauaacagacacuaucaagaguuggagaaacaauauauugagaacacaagagucugaaugugcauguguaaaugguucuugcuuuacuguaaugaccgauggaccaagugauggacaggccucauacaagaucuucagaauagaaaagggaaagguagucaaaucagucgaaaugaaugccccuaauuaucacuaugaggaaugcuccuguuauccugauucuagugaaaucacaugugugugcagggauaacuggcauggcucgaaucgaccgugggugucuuucaaccagaaucuggaauaucagauaggauacauaugcagugggauuuucggagacaauccacgcccuaaugauaagacaggcaguugugguccaguaucgucuaauggagcaaauggaguaaaaggauuuucauucaaauacggcaaugguguuuggauagggagaacuaaaagcauuaguucaagaaacgguuuugagaugauuugggauccgaacggauggacugggacagacaauaacuucucaauaaagcaagauaucguaggaauaaaugaguggucaggauauagcgggaguuuuguccagcauccagaacuaacagggcuggauuguauaagaccuugcuucuggguugaacuaaucagagggcgacccaaagagaacacaaucuggacuagcgggagcagcauauccuuuugugguguaaacagugacacuguggguuggucuuggccagacggugcugaguugccauuuaccauugacaaguaa

SEQ ID NO: 49926 - RNA, 1410 nt, Artificial Sequence
  derived and/or modified CDS sequence (wt) from neuraminidase__InfluenzaA__ADA79589
augaauccaaaccaaaagauaauaaccauugguucggucuguaugacaauuggaauggcuaacuuaauauuacaaauuggaaacauaaucucaauauggauuagccacucaauucaacuugggaaucaaaaucagauugaaacaugcaaucaaagcgucauuacuuaugaaaacaacacuuggguaaaucagacauauguuaacaucagcaacaccaacuuugcugcuggacagucagugguuuccgugaaauuagcgggcaguuccucucucugcccuguuaguggaugggcuauauacaguaaagacaacaguauaagaaucgguuccaagggggauguguuugucauaagggaaccauucauaucaugcucccccuuggaaugcagaaccuucuucuugacucaaggggccuugcuaaaugacaaacauuccaauggaaccauuaaagacaggagcccauaucgaacccuaaugagcuguccuauuggugaaguucccucuccauacaagucaagauuugagucagucgcuuggucagcaagugcuugucaugauggcaucaauuggcuaacaauuggaauuucuggcccagacaauggggcaguggcuguguuaaaguauaacggcauaauaacagacacuaucaagaguuggagaaacaauauauugagaacacaagagucugaaugugcauguguaaaugguucuugcuuuacuguaaugaccgauggaccaagugauggacaggccucauacaagaucuucagaauagaaaagggaaagauagucaaaucagucgaaaugaaugccccuaauuaucacuaugaggaaugcuccuguuauccugauucuagugaaaucacaugugugugcagggauaacuggcauggcucgaaucgaccgugggugucuuucaaccagaaucuggaauaucagauaggauacauaugcagugggauuuucggagacaauccacgcccuaaugauaagacaggcaguugugguccaguaucgucuaauggagcaaauggaguaaaaggauuuucauucaaauacggcaaugguguuuggauagggagaacuaaaagcauuaguucaagaaacgguuuugagaugauuugggauccgaacggauggacugggacagacaauaacuucucaauaaagcaagauaucguaggaauaaaugaguggucaggauauagcgggaguuuuguccagcauccagaacuaacagggcuggauuguauaagaccuugcuucuggguugaacuaaucagagggcgacccaaagagaacacaaucuggacuagcgggagcagcauauccuuuugugguguaaacagugacacuguggguuggucuuggccagacggugcugaguugccauuuaccauugacaaguaa

SEQ ID NO: 49927 - RNA, 1410 nt, Artificial Sequence
  derived and/or modified CDS sequence (wt) from neuraminidase__InfluenzaA__ADA79599
augaauccaaaccaaaagauaauaaccauugguucggucuguaugacaauuggaauggcuaacuuaauauuacaaauuggaaacauaaucucaauauggauuagccacucaauucaacuugggaaucaaaaucagauugaaacaugcaaucaaagcgucauuacuuaugaaaacaacacuuggguaaaucagacauauguuaacaucagcaacaccaacuuugcugcuggacagucagugguuuccgugaaauuagcgggcaauuccucucucugcccuguuaguggaugggcuauauacaguaaagacaacaguauaagaaucgguuccaagggggauguguuugucauaagggaaccauucauaucaugcucccccuuggaaugcagaaccuucuucuugacucaaggggccuugcuaaaugacaaacauuccaauggaaccauuaaagacaggagcccauaucgaacccuaaugagcuguccuauuggugaaguucccucuccauacaacucaagauuugagucagucgcuuggucagcaagugcuugucaugauggcaucaauuggcuaacaauuggaauuucuggcccagacaauggggcaguggcuguguuaaaguacaacggcauaauaacagacacuaucaagaguuggagaaacaauauauugagaacacaagagucugaaugugcauguguaaaugguucuugcuuuacuguaaugaccgauggaccaagugauggacaggccucauacaagaucuucagaauagaaaagggaaagauagucaaaucagucgaaaugaaugccccuaauuaucacuaugaggaaugcuccuguuauccugauucuagugaaaucacaugugugugcagggauaacuggcauggcucgaaucgaccgugggugucuuucaaccagaaucuggaauaucagauaggauacauaugcagugggauuuucggagacaauccacgcccuaaugauaagacaggcaguugugguccaguaucgucuaauggagcaaauggaguaaaaggauuuucauucaaauacggcaaugguguuuggauagggagaacuaaaagcauuaguucaagaaacgguuuugagaugauuugggauccgaacggauggacugggacagacaauaaauucucaauaaagcaagauaucguaggaauaaaugaguggucaggauauagcgggaguuuuguccagcauccagaacuaacagggcuggauuguauaagaccuugcuucuggguugaacuaaucagagggcgacccaaagagaacacaaucuggacuagcgggagcagcauauccuuuugugguguaaacagugacacuguggguuggucuuggccagacggugcugaguugccauuuaccauugacaaguaa

SEQ ID NO: 49928 - RNA, 1410 nt, Artificial Sequence
  derived and/or modified CDS sequence (wt) from neuraminidase__InfluenzaA__ADA79609
augaauccaaaccaaaagauaauaaccauugguucggucuguaugacaauuggaauggcuaacuuaauauuacaaauuggaaacauaaucucaauauggauuagccacucaauucaacuugggaaucaaaaucagauugaaacaugcaaucaaagcgucauuacuuaugaaaacaacacuuggguaaaucagacauauguuaacaucagcaacaccaacuuugcugcuggacagucagugguuuccgugaaauuagcgggcaauuccucucucugcccuguuaguggaugggcuauauacaguaaagacaacaguauaagaaucgguuccaagggggauguguuugucauaagggaaccauucauaucaugcucccccuuggaaugcagaaccuucuucuugacucaaggggccuugcuaaaugacaaacauuccaauggaaccauuaaagacaggagcccauaucgaacccuaaugagcuguccuauuggugaaguucccucuccauacaacucaagauuugagucagucgcuuggucagcaagugcuugucaugauggcaucaauuggcuaacaauuggaauuucuggcccagacaauggggcaguggcuguguuaaaguacaacggcauaauaacagacacuaucaagaguuggagaaacaauauauugagaacacaagagucugaaugugcauguguaaaugguucuugcuuuacuguaaugaccgauggaccaagugauggacaggccucauacaagaucuucagaauagaaaagggaaagauagucaaaucagucgaaaugaaugccccuaauuaucacuaugaggaaugcuccuguuauccugauucuagugaaaucacaugugugugcagggauaacuggcauggcucgaaucgaccaugggugucuuucaaccagaaucuggaauaucagauaggauacauaugcagugggauuuucggagacaauccacgcccuaaugauaagacaggcaguugugguccaguaucgucuaauggagcaaauggaguaaaaggauuuucauucaaauacggcaaugguguuuggauagggagaacuaaaagcauuaguucaagaaacgguuuugagaugauuugggauccgaacggauggacugggacagacaauaaauucucaauaaagcaagauaucguaggaauaaaugaguggucaggauauagcgggaguuuuguccagcauccagaacuaacagggcuggauuguauaagaccuugcuucuggguugaacuaaucagagggcgacccaaagagaacacaaucuggacuagcgggagcagcauauccuuuugugguguaaacagugacacuguggguuggucuuggccagacggugcugaguugccauuuaccauugacaaguaa

SEQ ID NO: 49929 - RNA, 1410 nt, Artificial Sequence
  derived and/or modified CDS sequence (wt) from neuraminidase__InfluenzaA__ADA79619
augaauccaaaccaaaagauaauaaccauugguucgaucuguaugacaauuggaauggcuaacuuaauauuacaaauuggaaacauaaucucaauauggauuagccacucaauucaacuugggaaucaaaaucagauugaaacaugcaaucaaagcgucauuacuuaugaaaacaacacuuggguaaaucagacauauguuaacaucagcaacaccaacuuugcugcuggacagucaguggccuccgugaaauuagcgggcaauuccucucucugcccuguuaguggaugggcuauauacaguaaagacaacaguauaagaaucgguuccaagggggauguguuugucauaagggaaccauucauaucaugcucccccuuggaaugcagaaccuucuucuugacucaaggggccuugcuaaaugacaaacauuccaauggaaccauuaaagacaggagcccauaucgaacccuaaugagcuguccuauuggugaaguucccucuccauacaacucaagauuugagucagucgcuuggucagcaagugcuugucaugauggcaucaauuggcuaacaauuggaauuucuggcccagacaauggggcaguggcuguguuaaaguacaacggcauaauaacagacacuaucaagaguuggagaaacaauauauugagaacacaagagucugaaugugcauguguaaaugguucuugcuuuacuguaaugaccgauggaccaagugauggacaggccucauacaagaucuucagaauagaaaagggaaagauagucaaaucagucgaaaugaaugccccuaauuaucacuaugaggaaugcuccuguuauccugauucuagugaaaucacaugugugugcagggauaacuggcauggcucgaaucgaccgugggugucuuucaaccagaaucuggaauaucagauaggauacauaugcagugggauuuucggagacaauccacgcccuaaugauaagacaggcaguugugguccaguaucgucuaauggagcaaauggaguaaaaggauuuucauucaaauacggcaaugguguuuggauagggagaacuaaaagcauuaguucaagaaacgguuuugagaugauuugggauccgaacggauggacugggacagacaauaacuucucaauaaagcaagauaucguaggaauaaaugaguggucaggauauagcgggaguuuuguucagcauccagaacuaacagggcuggauuguauaagaccuugcuucuggguugaacuaaucagagggcgacccaaagagaacacaaucuggacuagcgggagcagcauauccuuuugugguguaaacagugacacuguggguuggucuuggccagacggugcugaguugccauuuaccauugacaaguaa

SEQ ID NO: 49930 - RNA, 1410 nt, Artificial Sequence; identical to SEQ ID NO: 48947
  derived and/or modified CDS sequence (wt) from neuraminidase__InfluenzaA__ADA81211

SEQ ID NO: 49931 - RNA, 1410 nt, Artificial Sequence
  derived and/or modified CDS sequence (wt) from neuraminidase__InfluenzaA__ADA83035
augaauccaaaccaaaagauaauaaccauugguucggucuguaugacaauuggaauggcuaacuuaauauuacaaauuggaaacauaaucucaauauggauuagccacucaauucaacuugggaaucaaaaucagauugaaacaugcaaucaaagcgucauuacuuaugaaaacaacacuuggguaaaucagacauauguuaacaucagcaacaccaacuuugcugcuggacagucagugguuuccgugaaauuagcgggcaauuccucucucugcccuguuaguggaugggcuauauacaguaaagacaacaguauaagaaucgguuccaagggggauguguuugucauaagggaaccauucauaucaugcucccccuuggaaugcaguaccuucuucuugacucaaggggccuugcuaaaugacaaacauuccaauggaaccauuaaagacaggagcccauaucgaacccuaaugagcuguccuauuggugaaguucccucuccauacaacucaagauuugagucagucgcuuggucagcaagugcuugucaugauggcaucaauuggcuaacaauuggaauuucuggcccagacaauggggcaguggcuguguuaaaguacaacggcauaauaacagacacuaucaagaguuggagaaacaauauauugagaacacaagagucugaaugugcauguguaaaugguucuugcuuuacuguaaugaccgauggaccaagugauggacaggccucauacaagaucuucagaauagaaaagggaaagauagucaaaucagucgaaaugaaugccccuaauuaucacuaugaggaaugcuccuguuauccugauucuagugaaaucacaugugugugcagggauaacuggcauggcucgaaucgaccgugggugucuuucaaccagaaucuggaauaucagauaggguacauaugcagugggauuuucggagacaauccacgcccuaaugauaagacaggcaguugugguccaguaucgucuaauggagcaaauggaguaaaaggauuuucauucaaauacggcaaugguguuuggauagggagaacuaaaagcauuaguucaagaaacgguuuugagaugauuugggauccgaacggauggacugggacagacaauaacuucucaauaaagcaagauaucguaggaauaaaugaguggucaggauauagcgggaguuuuguucagcauccagaacuaacagggcuggauuguauaagaccuugcuucuggguugaacuaaucagagggcgacccaaagagaacacaaucuggacuagcgggagcagcauauccuuuugcgguguaaacagugacacuguggguuggucuuggccagacggugcugaguugccauuuaccauugacaaguaa

SEQ ID NO: 49932 - RNA, 1410 nt, Artificial Sequence
  derived and/or modified CDS sequence (wt) from neuraminidase__InfluenzaA__ADA83037
augaauccaaaccaaaagauaauaaccauugguucggucuguaugacaauuggaauggcuaacuuaauauuacaaauuggaaacauaaucucgauauggauuagccacucaauucaacuugggaaucaagaucagauugaaacaugcaaucaaagcgucauuacuuaugaaaacaacacuuggguaaaucagacauauguuaacaucagcaacaccaacuuugcugcuggacagucagugguuuccgugaaauuagcgggcaauuccucucucugcccuguuaguggaugggcuauauacaguaaagacaacaguauaagaaucgguuccaagggggauguguuugucauaagggaaccauucauaucaugcucccccuuggaaugcagaaccuucuucuugacucaaggggccuugcuaaaugacaaacauuccaauggaaccauuaaagacaggagcccauaucgaacccuaaugagcuguccuauuggugaaguucccucuccauacaacucaagauuugagucagucgcuuggucagcaagugcuugucaugauggcaucaauuggcuaacaauuggaauuucuggcccagacaauggggcaguggcuguguuaaaguacaacggcauaauaacagacacuaucaagaguuggagaaacaauauauugagaacacaagagucugaaugugcauguguaaaugguucuugcuuuacuguaaugaccgauggaccaagugauggacaggccucauacaagaucuucagaauagaaaagggaaagauagucaaaucagucgaaaugaaugccccuaauuaucacuaugaggaaugcuccuguuauccugauucuagugaaaucacaugugugugcagggauaacuggcauggcucgaaucgaccgugggugucuuucaaccagaaucuggaauaucagauaggauacauaugcagugggauuuucggagacaauccacgcccuaaugauaagacaggcaguugugguccaguaucgucuaauggagcaaauggaguaaaaggauuuucauucaaauacggcaaugguguuuggauagggagaacuaaaagcauuaguucaagaaacgguuuugagaugauuugggauccgaacggauggacugggacagacaauaaauucucaauaaagcaagauaucguaggaauaaaugaguggucaggauauagcgggaguuuuguccagcauccagaacuaacagggcuggauuguauaagaccuugcuucuggguugaacuaaucagagggcgacccaaagagaacacaaucuggacuagcgggagcagcauauccuuuugugguguaaacagugacacuguggguuggucuuggccagacggugcugaguugccauuuaccauugacaaguaa

SEQ ID NO: 49933 - RNA, 1410 nt, Artificial Sequence; identical to SEQ ID NO: 48750
  derived and/or modified CDS sequence (wt) from neuraminidase__InfluenzaA__ADA83588

SEQ ID NO: 49934 - RNA, 1410 nt, Artificial Sequence; identical to SEQ ID NO: 49483
  derived and/or modified CDS sequence (wt) from neuraminidase__InfluenzaA__ADA83592

SEQ ID NO: 49935 - RNA, 1410 nt, Artificial Sequence; identical to SEQ ID NO: 48750
  derived and/or modified CDS sequence (wt) from neuraminidase__InfluenzaA__ADA83596

SEQ ID NO: 49936 - RNA, 1410 nt, Artificial Sequence; identical to SEQ ID NO: 48826
  derived and/or modified CDS sequence (wt) from neuraminidase__InfluenzaA__ADA83600

SEQ ID NO: 49937 - RNA, 1410 nt, Artificial Sequence; identical to SEQ ID NO: 48750
  derived and/or modified CDS sequence (wt) from neuraminidase__InfluenzaA__ADA83604

SEQ ID NO: 49938 - RNA, 1410 nt, Artificial Sequence
  derived and/or modified CDS sequence (wt) from neuraminidase__InfluenzaA__ADA83608
augaauccaaaccaaaagauaauaaccauugguucggucuguaugacaauuggaauggcuaacuuaauauuacaaauuggaaacauaaucucaauauggauuagccacucaauucaacuugggaaucaaaaucagauugaaacaugcaaucaaagcgucauuacuuaugaaaacaacacuuggguaaaucagacauauguuaacaucagcaacaccaacuuugcugcuggacagucagugguuuccgugaaauuagcgggcaauuccucucucugcccuguuaguggaugggcuauauacaguaaagacaacaguauaagaaucgguuccaagggggauguguuugucauaagggaaccauucauaucaugcucccccuuggaaugcagaaccuucuucuugacucaaggggccuugcuaaaugacaaacauuccaauggaaccauuaaagacaggagcccauaucgaacccuaaugagcuguccuauuggugaaguucccucuccauacaacucaagauuugagucagucgcuuggucagcaagugcuugucaugauggcaucaauuggcuaacaauuggaauuucuggcccagacaauggggcaguggcuguguuaaaguacaacggcauaauaacagacacuaucaagaguuggagaaacaauauauugagaacacaagagucugaaugugcauguguaaaugguucuugcuuuacuguaaugaccgauggaccaagugauggacaggccucauacaagaucuucagaauagaaaagggaaagauagucaaaucagucgaaaugaaugccccuaauuaucacuaugaggaaugcuccuguuauccugauucaagugaaaucacaugugugugcagggauaacuggcauggcucgaaucgaccgugggugucuuucaaccagaaucuggaauaucagauaggauacauaugcagugggauuuucggagacaauccacgcccuaaugauaagacaggcaguugugguccaguaucgucuaauggagcaaauggaguaaaaggauuuucauucaaauacggcaaugguguuuggauagggagaacuaaaagcauuaguucaagaaacgguuuugagaugauuugggauccgaacggauggacugggacagacaauaacuucucaauaaagcaagauaucguaggaauaaaugaguggucaggauauagcgggaguuuuguucagcauccagaacuaacagggcuggauuguauaagaccuugcuucuggguugaacuaaucagagggcgacccaaagagaacacaaucuggacuagcgggagcagcauauccuuuugugguguaaacagugacacuguggguuggucuuggccagacggugcugaguugccauuuaccauugacaaguaa

SEQ ID NO: 49939 - RNA, 1410 nt, Artificial Sequence
  derived and/or modified CDS sequence (wt) from neuraminidase__InfluenzaA__ADA83612
augaauccaaaccaaaagauaauaaccauugguucggucuguaugacaauuggaauggcuaacuuaauauuacaaauuggaaacauaaucucaauauggauuagccacucaauucaacuugggaaucaaaaucagauugaaacaugcaaucaaagcgucauuacuuaugaaaacaacacuuggguaaaucagacauauguuaacaucagcaacaccaacuuugcugcuggacagucagugguuuccgugaaauuagcgggcaauuccucucucugcccuguuaguggaugggcuauauacaguaaagacaacaguauaagaaucgguuccaagggggauguguuugucauaagggaaccauucauaucaugcucccccuuggaaugcagaaccuucuucuugacucaaggggccuugcuaaaugacaaacauuccaauggaaccauuaaagacaggagcccauaucgaacccuaaugagcuguccuauuggugaaguucccucuccauacaacucaagauuugagucagucgcuuggucagcaagugcuugucaugauggcaucaauuggcuaacaauuggaauuucuggcccagacaauggggcaguggcuguguuaaaguacaacggcauaauaacagacacuaucaagaguuggagaaacaauauauugagaacacaagagucugaaugugcauguguaaaugguucuugcuuuacuguaaugaccgauggaccaagugaugggcaggccucauacaagaucuucagaauagaaaagggaaagauagucaaaucagucgaaaugaaugccccuaauuaucacuaugaggaaugcuccuguuauccugauucuagugaaaucacaugugugugcagggauaacuggcauggcucgaaucgaccgugggugucuuucaaccagaaucuggaauaucagauaggauacauaugcagugggauuuucggagacaauccacgcccuaaugauaagacaggcaguugugguccaguaucgucuaauggagcaaauggaguaaaaggauuuucauucaaauacggcaaugguguuuggauagggagaacuaaaagcauuaguucaagaaacgguuuugagaugauuugggauccgaacggauggacugggacagacaauaacuucucaauaaagcaagauaucguaggaauaaaugaguggucaggauauagcgggaguuuuguucagcauccagaacuaacagggcuggauuguauaagaccuugcuucuggguugaacuaaucagagggcgacccaaagagaacacaaucuggacuagcgggagcagcauauccuuuugugguguaaacagugacacuguggguuggucuuggccagacggugcugaguugccauuuaccauugacaaguaa

SEQ ID NO: 49940 - RNA, 1410 nt, Artificial Sequence
  derived and/or modified CDS sequence (wt) from neuraminidase__InfluenzaA__ADA83616
augaauccaaaccaaaagauaauaaccauugguucggucuguaugacaauuggaauggcuaacuuaauauuacaaauuggaaacauaaucucaauauggauuagccacucaauucaacuugggaaucaaaaucagauugaaacaugcaaucaaagcgucauuacuuaugaaaacaacacuuggguaaaucagacauauguuaacaucagcaacaccaacuuugcugcuggacagucagugguuuccgugaaauuagcgggcaauuccucucucugcccuguuaguggaugggcuauauacaguaaagacaacaguauaagaaucgguuccaagggggauguguuugucauaagggaaccauucauaucaugcucccccuuggaaugcagaaccuucuucuugacucaaggggccuugcuaaaugacaaacauuccaauggaaccauuaaagacaggagcccauaucgaacccuaaugagcuguccuauuggugaaguucccucuccauacaacucaagauuugagucagucgcuuggucagcaagugcuugucaugauggcaucaauuggcuaacaauuggaauuucuggcccagacaauggggcaguggcuguguuaaaguacaacggcauaauaacagacacuaucaagaguuggagaaacaauauauugagaacacaagagucugaaugugcauguguaaaugguucuugcuuuacuguaaugaccgauggaccaagugaugggcaggccucguacaagaucuucagaauagaaaagggaaagauagucaaaucagucgaaaugaaugccccuaauuauuacuaugaggaaugcuccuguuauccugauucaagugaaaucacaugugugugcagggauaacuggcauggcucgaaucgaccgugggugucuuucaaccagaaucuggaauaucagauaggauacauaugcagugggauuuucggagacaauccacgcccuaaugauaagacaggcaguugugguccaguaucgucuaauggagcaaauggaguaaaaggauuuucauucaaauacggcaaugguguuuggauagggagaacuaaaagcauuaguucaagaaacgguuuugagaugauuugggauccgaacggauggacugggacagacaauaacuucucaauaaagcaagauaucguaggaauaaaugaguggucaggauauagcgggaguuuuguucagcauccagaacuaacagggcuggauuguauaagaccuugcuucuggguugaacuaaucagagggcgacccaaagagaacacaaucuggacuagcgggagcagcauauccuuuugugguguaaacagugacacuguggguuggucuuggccagacggugcugaguugccauuuaccauugacaaguaa

SEQ ID NO: 49941 - RNA, 1410 nt, Artificial Sequence; identical to SEQ ID NO: 49938
  derived and/or modified CDS sequence (wt) from neuraminidase__InfluenzaA__ADA83624

SEQ ID NO: 49942 - RNA, 1410 nt, Artificial Sequence; identical to SEQ ID NO: 48750
  derived and/or modified CDS sequence (wt) from neuraminidase__InfluenzaA__ADA83630

SEQ ID NO: 49943 - RNA, 1410 nt, Artificial Sequence
  derived and/or modified CDS sequence (wt) from neuraminidase__InfluenzaA__ADA83634
augaauccaaaccaaaagauaauaaccauugguucggucuguaugacaauuggaauggcuaacuuaauauuacaaauuggaaacauaaucucaauauggauuagccacucaauucaacuugggaaucaaaaucagauugaaacaugcaaucaaagcgucauuacuuaugaaaacaacacuuggguaaaucagacauauguuaacaucagcaacaccaacuuugcugcuggacagucagugguuuccgugaaauuagcgggcaauuccucucucugcccuguuaguggaugggcuauauacaguaaagacaacaguauaagaaucgguuccaagggggauguguuugucauaagggaaccauucauaucaugcucccccuuggaaugcagaaccuucuucuugacucaaggggccuugcuaaaugacaaacauuccaauggaaccauuaaagacaggagcccauaucgaacccuaaugagcuguccuauuggugaaguucccucuccauacaacucaagauuugagucagucgcuuggucagcaagugcuugucaugauggcaucaauuggcuaacaauuggaauuucuggcccagacaauggggcaguggcuguguuaaaguacaacggcauaauaacagacacuaucaagaguuggagaaacaauauauugagaacacaagagucugaaugugcauguguaaaugguucuugcuuuacuguaaugaccgauggaccaagugauggacaggccucauacaagaucuucagaauagaaaagggaaagauagucaaaucagucgaaaugaaugccccuaauuaucacuaugaggaaugcuccuguuauccugauucuagugaaaucacaugugugugcagggauaacuggcaugguucgaaucgaccgugggugucuuucaaccagaaucuggaauaucagauaggauacauaugcagugggauuuucggagacaauccacgcccuaaugauaagacaggcaguugugguccaguaucgucuaauggagcaaauggaguaaaaggauuuucauucaaauacggcaaugguguuuggauagggagaacuaaaagcauuaguucaagaaacgguuuugagaugauuugggauccgaacggauggacugggacagacaauaacuucucaauaaagcaagauaucguaggaauaaaugaguggucaggauauagcgggaguuuuguucagcauccagaacuaacagggcuggauuguauaagaccuugcuucuggguugaacuaaucagagggcgacccaaagagaacacaaucuggacuagcgggagcagcauauccuuuugugguguaaacagugacacuguggguuggucuuggccagacggugcugaguugccauuuaccauugacaaguaa

SEQ ID NO: 49944 - RNA, 1410 nt, Artificial Sequence
  derived and/or modified CDS sequence (wt) from neuraminidase__InfluenzaA__ADA83638
augaauccaaaccaaaagauaauaaccauugguucggucuguaugacaauuggaauggcuaacuuaauauuacaaauuggaaacauaaucucaauauggauuagccacucaauucaacuugggaaucaaaaucagauugaaacaugcaaucaaagcgucauuacuuaugaaaacaacacuuggguaaaucagacauauguuaacaucagcaacaccaacuuugcugcuggacagucagugguuuccgugaaauuagcgggcaauuccucucucugcccuguuaguggaugggcuauauacaguaaagacaacaguauaagaaucgguuccaagggggauguguuugucauaagggaaccauucauaucaugcucccccuuggaaugcagaaccuucuucuugacucaaggggccuugcuaaaugacaaacauuccaauggaaccauuaaagacaggagcccauaucgaacccuaaugagcuguccuauuggugaaguucccucuccauacaacucaagauuugagucagucgcuuggucagcaagugcuugucaugauggcaucaauuggcuaacaauuggaauuucuggcccagacaauggggcaguggcuguguuaaaguacaacggcauaauaacagacacuaucaagaguuggagaaacaauauauugagaacacaagagucugaaugugcauguguaaaugguucuugcuuuacuguaaugaccgauggaccaagugaugggcaggccucguacaagaucuucagaauagaaaagggaaagauagucaaaucagucgaaaugaaugccccuaauuaucacuaugaggaaugcuccuguuauccugauucuagugaaaucacaugugugugcagggauaacuggcauggcucgaaucgaccgugggugucuuucaaccagaaucuggaauaucagauaggauacauaugcagugggauuuucggagacaauccacgcccuaaugauaagacaggcaguugugguccaguaucgucuaauggagcaaauggaguaaaaggauuuucauucaaauacggcaaugguguuuggauagggagaacuaaaagcauuaguucaagaaacgguuuugagaugauuugggauccgaacggauggacugggacagacaauaacuucucaauaaagcaagauaucguaggaauaaaugaguggucaggauauagcgggaguuuuguucagcauccagaacuaacagggcuggauuguauaagaccuugcuucuggguugaacuaaucagagggcgacccaaagagaacacaaucuggacuagcgggagcagcauauccuuuugugguguaaacagugacacuguggguuggucuuggccagacggugcugaguugccauuuaccauugacaaguaa

SEQ ID NO: 49945 - RNA, 1410 nt, Artificial Sequence; identical to SEQ ID NO: 48750
  derived and/or modified CDS sequence (wt) from neuraminidase__InfluenzaA__ADA83642

SEQ ID NO: 49946 - RNA, 1410 nt, Artificial Sequence; identical to SEQ ID NO: 48750
  derived and/or modified CDS sequence (wt) from neuraminidase__InfluenzaA__ADA83649

SEQ ID NO: 49947 - RNA, 1410 nt, Artificial Sequence; identical to SEQ ID NO: 49944
  derived and/or modified CDS sequence (wt) from neuraminidase__InfluenzaA__ADA83653

SEQ ID NO: 49948 - RNA, 1410 nt, Artificial Sequence
  derived and/or modified CDS sequence (wt) from neuraminidase__InfluenzaA__ADA83657
augaauccaaaccaaaagauaauaaccauugguucggucuguaugacaauuggaauggcuaacuuaauauuacaaauuggaaacauaaucucaauauggauuagccacucaauucaacuugggaaucaaaaucagauugaaacaugcaaucaaagcgucauuacuuaugaaaacaacacuuggguaaaucagacauauguuaacaucagcaacaccaacuuugcugcuggacagucagugguuuccgugaaauuagcgggcaauuccucucucuguccuguuaguggaugggcuauauacaguaaagacaacaguauaagaaucgguuccaagggggauguguuugucauaagggaaccauucauaucaugcucccccuuggaaugcagaaccuucuucuugacucaaggggccuugcuaaaugacaaacauuccaauggaaccauuaaagacaggagcccauaucgaacccuaaugagcuguccuauuggugaaguucccucuccauacaacucaagauuugagucagucgcuuggucagcaagugcuugucaugauggcaucaauuggcuaacaauuggaauuucuggcccagacaauggggcaguggcuguguuaaaguacaacggcauaauaacagacacuaucaagaguuggagaaacaauauauugagaacacaagagucugaaugugcauguguaaaugguucuugcuuuacuguaaugaccgauggaccaagugaugggcaggccucauacaagaucuucagaauagaaaagggaaagauagucaaaucagucgaaaugaaugccccuaauuaucacuaugaggaaugcuccuguuauccugauucuagugaaaucacaugugugugcagggauaacuggcauggcucgaaucgaccgugggugucuuucaaccagaaucuggaauaucagauaggauacauaugcagugggauuuucggagacaauccacgcccuaaugauaagacaggcaguugugguccaguaucgucuaauggagcaaauggaguaaaaggauuuucauucaaauacggcaaugguguuuggauagggagaacuaaaagcauuaguucaagaaacgguuuugagaugauuugggauccgaacggauggacugggacagacaauaacuucucaauaaagcaagauaucguaggaauaaaugaguggucaggauauagcgggaguuuuguucagcauccagaacuaacagggcuggauuguauaagaccuugcuucuggguugaacuaaucagagggcgacccaaagagaacacaaucuggacuagcgggagcagcauauccuuuugugguguaaacagugacacuguggguuggucuuggccagacggugcugaguugccauuuaccauugacaaguaa

SEQ ID NO: 49949 - RNA, 1410 nt, Artificial Sequence
  derived and/or modified CDS sequence (wt) from neuraminidase__InfluenzaA__ADA83661
augaauccaaaccaaaagauaauaaccauugguucggucuguaugacaauuggaauggcuaacuuaauauuacaaauuggaaacauaaucucaauauggauuagccacucaauucaacuugggaaucaaaaucagauugaaacaugcaaucaaagcgucauuacuuaugaaaacaacacuuggguaaaucagacauauguuaacaucagcaacaccaacuuugcugcuggacagucagugguuuccgugaaauuagcgggcaauuccucucucugcccuguuaguggaugggcuauauacaguaaagacaacaguauaagaaucgguuccaagggggauguguuugucauaagggaaccauucauaucaugcucccccuuggaaugcagaaccuucuucuugacucaaggggccuugcuaaaugacaaacauuccaauggaaccauuaaagacaggagcccauaucgaacccuaaugagcuguccuauuggugaaguucccucuccauacaacucaagauuugagucagucgcuuggucagcaagugcuugucaugauggcaucaauuggcuaacaauuggaauuucuggcccagacaauggggcaguggcuguguuaaaguacaacggcauaauaacagacacuaucaagaguuggagaaacaauauauugagaacacaagagucugaaugugcauguguaaaugguucuugcuuuacuguaaugaccgauggaccaagugauggacaggccucauacaagaucuucagaauagaaaagggaaagauagucaaaucagucgaaaugaaugccccuaauuaucacuaugaggaaugcuccuguuauccugauucuagugaaaucacaugugugugcagggauaacuggcauggcucgaaucgaccgugggugucuuucaaccagaaucuggaauaucagauaggauacauaugcagugggauuuucggagacaauccacgcccuaaugauaagacaggcaguugugguccaguaucgucuaauggagcaaauggaguaaaaggauuuucauucaaauacggcaaugguguuuggauagggagaacuaaaagcauuaguucaagaaacgguuuugagaugauuugggauccgaacggauggacugggacagacaauaacuucucaauaaagcaagauaucguaggaauaaaugaguggucaggauauagcgggaguuuuguucagcauccagaacuaacagggcuggauuguauaagaccuugcuucuggguugaacuaaucagagggcgacccaaagaaaacacaaucuggacuagcgggagcagcauauccuuuugugguguaaacagugacacuguggguuggucuuggccagacggugcugaguugccauuuaccauugacaaguaa

SEQ ID NO: 49950 - RNA, 1410 nt, Artificial Sequence; identical to SEQ ID NO: 48750
  derived and/or modified CDS sequence (wt) from neuraminidase__InfluenzaA__ADA83669

SEQ ID NO: 49951 - RNA, 1410 nt, Artificial Sequence; identical to SEQ ID NO: 48750
  derived and/or modified CDS sequence (wt) from neuraminidase__InfluenzaA__ADA83673

SEQ ID NO: 49952 - RNA, 1410 nt, Artificial Sequence
  derived and/or modified CDS sequence (wt) from neuraminidase__InfluenzaA__ADA83677
augaauccaaaccaaaagauaauaaccauugguucggucuguaugacaauuggaauggcuaacuuaauauuacaaauuggaaacauaaucucaauauggauuagccacucaauucaacuugggaaucaaaaucagauugaaacaugcaaucaaagcgucauuacuuaugaaaacaacacuuggguaaaucagacauauguuaacaucagcaacaccaacuuugcugcuggacagucagugguuuccgugaaauuagcgggcaauuccucucucugcccuguuaguggaugggcuauauacaguaaagacaacaguauaagaaucgguuccaagggggauguguuugucauaagggaaccauucauaucaugcucccccuuggaaugcagaaccuucuucuugacucaaggggccuugcuaaaugacaaacauuccaauggaaccauuaaagacaggagcccauaucgaacccuaaugagcuguccuauuggugaaguucccucuccauacaacucaagauuugagucagucgcuuggucagcaagugcuugucaugauggcaucaauuggcuaacaauuggaauuucuggcccagacaauggggcaguggcuguguuaaaguacaacggcauaauaacagacacuaucaagaguuggagaaacaauauauugagaacacaagagucugaaugugcauguguaaaugguucuugcuuuacuguaaugaccgauggaccaagugauggacaggccucauacaagaucuucagaauagaaaagggaaagauagucaaaucagucgaaaugaaugccccuaauuaucacuaugaggaaugcuccuguuauccugauucuagugaaaucacaugugugugcagggauaacuggcaugguucgaaucgaccgugggugucuuucaaucagaaucuggaauaucagauaggauacauaugcagugggauuuucggagacaauccacgcccuaaugauaagacaggcaguugugguccaguaucgucuaauggagcaaauggaguaaaaggauuuucauucaaauacggcaaugguguuuggauagggagaacuaaaagcauuaguucaagaaacgguuuugagaugauuugggauccgaacggauggacugggacagacaauaacuucucaauaaagcaagauaucguaggaauaaaugaguggucaggauauagcgggaguuuuguucagcauccagaacuaacagggcuggauuguauaagaccuugcuucuggguugaacuaaucagagggcgacccaaagagaacacaaucuggacuagcgggagcagcauauccuuuugugguguaaacagugacacuguggguuggucuuggccagacggugcugaguugccauuuaccauugacaaguaa

SEQ ID NO: 49953 - RNA, 1410 nt, Artificial Sequence; identical to SEQ ID NO: 49943
  derived and/or modified CDS sequence (wt) from neuraminidase__InfluenzaA__ADA83681

SEQ ID NO: 49954 - RNA, 1410 nt, Artificial Sequence
  derived and/or modified CDS sequence (wt) from neuraminidase__InfluenzaA__ADA83685
augaauccaaaccaaaagauaauaaccauugguucggucuguaugacaauuggaauggcuaacuuaauauuacaaauuggaaacauaaucucaauauggauuagccacucaauucaacuugggaaucaaaaucagauugaaacaugcaaucaaagcgucauuacuuaugaaaacaacacuuggguaaaucagacauauguuaacaucagcaacaccaacuuugcugcuggacagucagugguuuccgugaaauuagcuggcaauuccucucucugcccuguuaguggaugggcuauauacaguaaagacaacaguauaagaaucgguuccaagggggauguguuugucauaagggaaccauucauaucaugcucccccuuggaaugcagaaccuucuucuugacucaaggggccuugcuaaaugacaaacauuccaauggaaccauuaaagacaggagcccauaucgaacccuaaugagcuguccuauuggugaaguucccucuccauacaacucaagauuugagucagucgcuuggucagcaagugcuugucaugauggcaucaauuggcuaacaauuggaauuucugguccagacaauggggcaguggcuguguuaaaguacaacggcauaauaacagacacuaucaagaguuggagaaacaauauauugagaacacaagagucugaaugugcauguguaaaugguucuugcuuuacuguaaugaccgauggaccaagugauggacaggccucauacaagaucuucagaauagaaaagggaaagauagucaaaucagucgaaaugaaugccccuaauuaucacuaugaggaaugcuccuguuauccugauucaagugaaaucacaugugugugcagggauaacuggcauggcucgaaucgaccgugggugucuuucaaccagaaucuggaauaucagauaggauacauaugcagugggauuuucggagacaauccacgcccuaaugauaagacaggcaguugugguccaguaucgucuaauggagcaaauggaguaaaaggauuuucauucaaauacggcaaugguguuuggauagggagaacuaaaagcauuaguucaagaaacgguuuugagaugauuugggauccgaacggauggacugggacagacaauaacuucucaauaaagcaagauaucguaggaauaaaugaguggucaggauauagcgggaguuuuguucagcauccagaacuaacagggcuggauuguauaagaccuugcuucuggguugaacuaaucagagggcgacccaaagagaacacaaucuggacuagcgggagcagcauauccuuuugugguguaaacagugacacuguggguuggucuuggccagacggugcugaguugccauuuaccauugacaaguaa

SEQ ID NO: 49955 - RNA, 1410 nt, Artificial Sequence
  derived and/or modified CDS sequence (wt) from neuraminidase__InfluenzaA__ADA86069
augaauccaaaccaaaagauaauaaccauugguucggucuguaugacaauuggaauggcuaacuuaauauuacaaauuggaaacauaaucucaauauggauuagccacucaauucaacuugggaaucaaaaucagauugaaacaugcaaucaaagcgucauuacuuaugaaaacaacacuuggguaaaucagacauauguuaacaucagcaacaccaacuuugcugcuggacagucagugguuuccgugaaauuagcgggcaauuccucucucugcccuguuaguggaugggcuauauacaguaaagacaacaguauaagaaucgguuccaagggggauguguuugucauaagggaaccauucauaucaugcucccccuuggaaugcagaaccuucuucuugacucaaggggccuugcuaaaugacaaacauuccaauggaaccauuaaagacaggagcccauaucgaacccuaaugagcuguccuauuggugaaguucccucuccauacaacucaagauuugagucagucgcuuggucagcaagugcuugucaugauggcaucaauuggcuaacaauuggaauuucuggcccagacaauggggcaguggcuguguuaaaguacaacggcauaauaacagacacuaucaagaguuggagaaacaauauauugagaacacaagagucugaaugugcauguguaaaugguucuugcuuuacuguaaugaccgauggaccaagugauggacaggccucauacaagaucuucagaauagaaaagggaaagauagucaaaucagucgaaaugaaugccccuaauuaucacuaugaggaaugcuccuguuauccugauucuagugaaaucacaugugugugcagggauaacuggcauggcucgaaucgaccgugggugucuuucaaucagaaucuggaauaucagauaggauacauaugcagugggauuuucggagacaauccacgcccuaaugauaagacaggcaguugugguccaguaucgucuaauggagcaaauggaguaaaaggauuuucauucaaauacggcaaugguguuuggauagggagaacuaaaagcauuaguucaagaaacgguuuugagaugauuugggauccgaacggauggacugggacagacaauaacuucucaauaaagcaagauaucguaggaauaaaugaguggucaggauauagcgggaguuuuguccagcauccagaacuaacagggcuggauuguauaagaccuugcuucuggguugaacuaaucagagggcgacccaaagagaacacaaucuggacuagcgggagcagcauauccuuuugugguguaaacagugacacuguggguuggucuuggccagacggugcugaguugccauuuaccauugacaaguaa

SEQ ID NO: 49956 - RNA, 1410 nt, Artificial Sequence; identical to SEQ ID NO: 48947
  derived and/or modified CDS sequence (wt) from neuraminidase__InfluenzaA__ADB27973

SEQ ID NO: 49957 - RNA, 1410 nt, Artificial Sequence; identical to SEQ ID NO: 48947
  derived and/or modified CDS sequence (wt) from neuraminidase__InfluenzaA__ADB27983

SEQ ID NO: 49958 - RNA, 1410 nt, Artificial Sequence
  derived and/or modified CDS sequence (wt) from neuraminidase__InfluenzaA__ADB66693
augaauccaaaccaaaagauaauaaccauugguucggucuguaugacaauuggaauggcuaacuuaauauuacaaauuggaaacauaaucucaauauggauuauccacucaauucaacuugggaaucaaaaucagauugaaacaugcaaucaaagcgucauuacuuaugaaaacaacacuuggguaaaucagacauauguuaacaucagcaacaccaacuuugcugcuggacagucagugguuuccgugaaauuagcgggcaauuccucucucugcccuguuaguggaugggcuauauacaguaaagacaacaguauaagaaucgguuccaagggggauguguuugucauaagggaaccauucauaucaugcucccccuuggaaugcagaaccuucuucuugacucaaggggccuugcuaaaugacaaacauuccaauggaaccauuaaagacaggagcccauaucgaacccuaaugagcuguccuauuggugaaguucccucuccauacaacucaagauuugagucagucgcuuggucagcaagugcuugucaugauggcaucaauuggcuaacaauuggaauuucuggcccagacaauggggcaguggcuguguuaaaguacaacggcauaauaacagacacuaucaagaguuggagaaacaauauauugagaacacaagagucugaaugugcauguguaaaugguucuugcuuuacuguaaugaccgauggaccaagugauggacaggccucauacaagaucuucagaauagaaaagggaaagauagucaaaucagucgaaaugaaugccccuaauuaucacuaugaggaaugcuccuguuauccugauucuagugaaaucacaugugugugcagggauaacuggcauggcucgaaucgaccgugggugucuuucaaccagaaucuggaauaucagauaggauacauaugcagugggauuuucggagacaauccacgcccuaaugauaagacaggcaguugugguccaguaucgucuaauggagcaaauggaguaaaaggauuuucauucaaauacggcaaugguguuuggauagggagaacuaaaagcauuaguucaagaaacgguuuugagaugauuugggauccgaacggauggacugggacagacaauaacuucucaauaaagcaagauaucguaggaauaaaugaguggucaggauauagcgggaguuuuguucagcauccagaacuaacagggcuggauuguauaagaccuugcuucuggguugaacuaaucagagggcgacccaaagagaacacaaucuggacuagcgggagcagcauauccuuuugugguguaaacagugacacuguggguuggucuuggccagacggugcugaguugccauuuaccauugacaaguaa

SEQ ID NO: 49959 - RNA, 1410 nt, Artificial Sequence; identical to SEQ ID NO: 48750
  derived and/or modified CDS sequence (wt) from neuraminidase__InfluenzaA__ADB66695

SEQ ID NO: 49960 - RNA, 1410 nt, Artificial Sequence
  derived and/or modified CDS sequence (wt) from neuraminidase__InfluenzaA__ADB66696
augaauccaaaccaaaagauaauaaccauugguucggucuguaugacaauuggaauggcuaacuuaauauuacaaauuggaaacauaaucucaauauggauuagccacucaauucaacuugggaaucaaaaucagauugaaacaugcaaucaaagcgucauuacuuaugaaaacaacacuuggguaaaucagacauauguuaacaucagcaacaccaacuuugcugcuggacagucagugguuuccgugaaauuagcgggcaauuccucucucugcccuguuaguggaugggcuauauacaguaaagacaacaguauaagaaucgguuccaagggggauguguuugucauaagggaaccauucauaucaugcucccccuuggaaugcagaaccuucuucuugacucaaggggccuugcuaaaugacaaacauuccaauggaaccauuaaagacaggagcccauaucgaacccuaaugagcuguccuauuggugaaguucccucuccauacaacucaagauuugagucagucgcuuggucagcaagugcuugucaugauggcaucaauuggcuaacaauuggaauuucuggcccagacaauggggcaguggcuguguuaaaguacaacggcauaauaacagacacuaucaagaguuggagaaacaauauauugagaacacaagagucugaaugugcauguguaaaugguucuugcuuuacuguaaugaccgauggaccaagugauggacaggccucauacaagaucuucagaauagaaaagggaaagauagucaaaucagucgaaaugaaugccccuaauuaucacuaugaggaaugcuccuguuauccugauucuagugaaaucacaugugugugcagggauaacuggcauggcucgaaucgaccgugggugucuuucaaccagaaucuggaauaucagauaggauacauaugcagugggauuuucggagacaauccacgcccuaaugauaagacaggcaguugugguccaguaucgucuaauggagcaaauggaguaaaaggauuuucauucaaauacggcaaugguguuuggauagggagaacuaaaagcauuaguucaagaaacgguuuugagaugauuugggauccgaacggauggacugggacagacaauaacuucucaauaaagcaagauaucguaggaauaaaugaguggucaggauauagcgggaguuuuguucagcauccagaacuaacagggcuggauuguauaagaccuugcuucuggguugaauuaaucagagggcgacccaaagagaacacaaucuggacuagcgggagcagcauauccuuuugugguguaaacagugacacuguggguuggucuuggccagacggugcugaguugccauuuaccauugacaaguaa

SEQ ID NO: 49961 - RNA, 1410 nt, Artificial Sequence
  derived and/or modified CDS sequence (wt) from neuraminidase__InfluenzaA__ADB66697
augaauccaaaccaaaagauaauaaccauugguucggucuguauaacaauuggaauggcuaacuuaauauuacaaauuggaaacauaaucucaauauggauuagccacucaauucaacuugggaaucaaaaucagauugaaacaugcaaucaaagcgucauuacuuaugaaaacaacacuuggguaaaucagacauauguuaacaucagcaacaccaacuuugcugcuggacagucagugguuuccgugaaauuagcgggcaauuccucucucugcccuguuaguggaugggcuauauacaguaaagacaacagcauaagaaucgguuccaagggggauguguuugucauaagggaaccauucauaucaugcucccccuuggaaugcagaaccuucuucuugacucaaggggccuugcuaaaugacaaacauuccaauggaaccauuaaagacaggagcccauaucgaacccuaaugagcuguccuauuggugaaguucccucuccauacaacucaagauuugagucagucgcuuggucagcaagugcuugucaugauggcaucaauuggcuaacaauuggaauuucuggcccagacaauggggcaguggcuguguuaaaguacaacggcauaauaacagacacuaucaagaguuggagaaacaauauauugagaacacaagagucugaaugugcauguguaaaugguucuugcuuuacuguaaugaccgauggaccaagugaugaacaagccucauacaagaucuucagaauagaaaagggaaagauagucaaaucagucgaaaugaaugccccuaauuaucacuaugaggaaugcuccuguuauccugauucuagugaaaucacaugugugugcagggauaacuggcauggcucgaaucgaccgugggugucuuucaaccagaaucuggaauaucggauaggauacauaugcagugggauuuucggagacaauccacgcccuaaugauaagacaggcaguugugguccaguaucgucuaauggagcaaauggaguaaaaggauuuucauucaaauacggcaaugguguuuggauagggagaacuaaaagcauuaguucaagaaacgguuuugagaugauuugggauccgaacggauggacugggacagacaauaacuucucaauaaagcaagauaucguaggaauacaugaguggucaggauauagcgggaguuuuguucagcauccagaacuaacagggcuggauuguauaagaccuugcuucuggguugaacuaaucagagggcgacccaaagagaacacaaucuggacuagcgggagcagcauauccuuuugugguguaaacagugacacuguggguuggucuuggccagacggugcugaguugccauuuaccauugacaaguaa

SEQ ID NO: 49962 - RNA, 1410 nt, Artificial Sequence; identical to SEQ ID NO: 49925
  derived and/or modified CDS sequence (wt) from neuraminidase__InfluenzaA__ADB81401

SEQ ID NO: 49963 - RNA, 1410 nt, Artificial Sequence
  derived and/or modified CDS sequence (wt) from neuraminidase__InfluenzaA__ADB81421
augaauccaaaccaaaagauaauaaccauugguucggucuguaugacaauuggaauggcuaacuuaauauuacaaauuggaaacauaaucucaauauggauuagccacucaauucaacuugggaaucaaaaucagauugaaacaugcaaucaaagcgucauuacuuaugaaaacaacacuuggguaaaucagacauauguuaacaucagcaacaccaacuuugcugcuggacagucagugguuuccgugaaauuagcgggcaauuccucucucugcccuguuaguggaugggcuauauacaguaaagacaacaguauaagaaucgguuccaagggggauguguuugucauaagagaaccauucauaucaugcucccccuuggaaugcagaaccuucuucuugacucaaggggccuugcuaaaugacaaacauuccaauggaaccauuaaagacaggagcccauaucgaacccuaaugagcuguccuauuggugaaguucccucuccauacaacucaagauuugagucagucgcuuggucagcaagugcuugucaugauggcaucaauuggcuaacaauuggaauuucuggcccagacaauggggcaguggcuguguuaaaguacaacggcauaauaacagacacuaucaagaguuggagaaacaauauauugagaacacaagagucugaaugugcauguguaaaugguucuugcuuuacuguaaugaccgauggaccaagugauggacaggccucauacaagaucuucagaauagaaaagggaaagauagucaaaucagucgaaaugaaugccccuaauuaucacuaugaggaaugcuccuguuauccugauucuagugaaaucacaugugugugcagggauaacuggcauggcucgaaucgaccgugggugucuuucaaccagaaucuggaauaucagauaggauacauaugcagugggauuuucggagacaauccacgcccuaaugauaagacaggcaguugugguccaguaucgucuaauggagcaaauggaguaaaaggauuuucauucaaauacggcaaugguguuuggauagggagaacuaaaagcauuaguucaagaaacgguuuugagaugauuugggauccgaacggauggacugggacagacaauaacuucucaauaaagcaagauaucguaggaauaaaugaguggucaggauauagcgggaguuuuguccagcauccagaacuaacagggcugaauuguauaagaccuugcuucuggguugaacuaaucagagggcgacccaaagagaacacaaucuggacuagcgggagcagcauauccuuuugugguguaaacagugacacuguggguuggucuuggccagacggugcugaguugccauuuaccauugacaaguaa

SEQ ID NO: 49964 - RNA, 1410 nt, Artificial Sequence
  derived and/or modified CDS sequence (wt) from neuraminidase__InfluenzaA__ADB81431
augaauccaaaccaaaagauaauaaccauugguucggucuguaugacaauuggaauggcuaacuuaauauuacaaauuggaaacauaaucucaauauggauuagccacucaauucaacuugggaaucaaaaucagauugaaacaugcaaucaaagcgucauuacuuaugaaaacaacacuuggguaaaucagacauauguuaacaucagcaacaccaacuuugcugcuggacagucagugguuuccgugaaauuagcgggcaauuccucucucugcccuguuaguggaugggcuauauacaguaaagacaacaguauaagaaucgguuccaagggggauguguuugucauaagggaaccauucauaucaugcucccccuuggaaugcagaaccuucuucuugacucaaggggccuugcuaaaugacaaacauuccaauggaaccauuaaagacaggagcccauaucgaacccuaaugagcuguccuauuggugaaguucccucuccauacaacucaagauuugagucagucgcuuggucagcaagugcuugucaugauggcaucaauuggcuaacaauuggaauuucuggcccagacaauggggcaguggcuguguuaaaguacaacggaauaauaacagacacuaucaagaguuggagaaacaauauauugagaacacaagagucugaaugugcauguguaaaugguucuugcuuuacuguaaugaccgauggaccaagugauggacaggccucauacaagaucuucagaauagaaaagggaaagauagucaaaucagucgaaaugaaugccccuaauuauuacuaugaggaaugcuccuguuauccugauucuagugaaaucacaugugugugcagggauaacuggcauggcucgaaucgaccgugggugucuuucaaccagaaucuggaauaucagauaggauacauaugcagugggauuuucggagacaauccacgcccuaaugauaagacaggcaguugugguccaguaucgucuaauggagcaaauggaguaaaaggauuuucauucaaauacggcaaugguguuuggauagggagaacuaaaagcauuaguucaaggaacgguuuugagaugauuugggauccgaacggauggacugggacagacaauaacuucucaauaaagcaagauaucguaggaauaaaugaguggucaggauauagcgggaguuuuguucagcauccagaacuaacagggcuggauuguauaagaccuugcuucuggguugaacuaaucagagggcgacccaaagagaacacaaucuggacuagcgggagcagcauauccuuuugugguguaaacagugacacuguggguuggucuuggccagacggugcugaguugccauuuaccauugacaaguaa

SEQ ID NO: 49965 - RNA, 1410 nt, Artificial Sequence
  derived and/or modified CDS sequence (wt) from neuraminidase__InfluenzaA__ADB81441
augaauccaaaccaaaagauaauaaccauugguucggucuguaugacaauuggaauggcuaacuuaauauuacaaauuggaaacauaaucucaauauggauuagccacucaauucaacuugggaaucaaaaucagauugaaacaugcaaucaaagcgucauuacuuaugaaaacaacacuuggguaaaucagacauauguuaacaucagcaacaccaacuuugcugcuggacagucagugguuuccgugaaauuagcgggcaauuccucucucugcccuguuaguggaugggcuauauacaguaaagacaacaguauaagaaucgguuccaagggggauguguuugucauaagggaaccauucauaucaugcucccccuuggaaugcagaaccuucuucuugacucaaggggccuugcuaaaugacaaacauuccaauggaaccauuaaagacaggagcccauaucgaacccuaaugagcuguccuauuggugaaguucccucuccauacaacucaagauuugagucagucgcuuggucagcaagugcuugucaugauggcaucaauuggcuaacaauuggaauuucuggcccagacaauggggcaguggcuguguuaaaguacaacggcauaauaacagacacuaucaagaguuggagaaacaauauauugagaacacaagagucugaaugugcauguguaaaugguucuugcuuuacuguaaugaccgauggaccaagugauggacaggccucauacaagaucuucaggauagaaaagggaaagauagucaaaucagucgaaaugaaugccccuaauuaucacuaugaggaaugcuccuguuauccugauucuagugaaaucacaugugugugcagggauaacuggcauggcucgaaucgaccgugggugucuuucaaccagaaucuggaauaucagauaggguacauaugcagugggauuuucggagacaauccacgcccuaaugauaagacaggcaguugugguccaguaucgucuaauggagcaaauggaguaaaaggauuuucauucaaauacggcaaugguguuuggauagggagaacuaaaagcauuaguucaagaaacgguuuugagaugauuugggauccgaacggauggacugggacagacaauaacuucucaauaaagcaagauaucguaggaauaaaugaguggucaggauauagcgggaguuuuguucagcauccagaacuaacagggcuggauuguauaagaccuugcuucuggguugaacuaaucagagggcgacccaaagagaacacaaucuggacuagcgggagcagcauauccuuuugcgguguaaacagugacacuguggguuggucuuggccagacggugcugaguugccauuuaccauugacaaguaa

SEQ ID NO: 49966 - RNA, 1410 nt, Artificial Sequence
  derived and/or modified CDS sequence (wt) from neuraminidase__InfluenzaA__ADB81451
augaauccaaaccaaaagauaauaaccauugguucggucuguaugacaauuggaauggcuaacuuaauauuacaaauuggaaacauaaucucaauauggauuagccacucaauucaacuugggaaucaaaaucagauugaaacaugcaaucaaagcgucauuacuuaugaaaacaacacuuggguaaaucagacauauguuaacaucagcaacaccaacuuugcugcuggacagucagugguuuccgugaaauuagcgggcaauuccucucucugcccuguuaguggaugggcuauauacaguaaagacaacaguauaagaaucgguuccaagggggauguguuugucauaagggaaccauucauaucaugcucccccuuggaaugcagaaccuucuucuugacucaaggggccuugcuaaaugacaaacauuccaauggaaccauuaaagacaggagcccauaucgaacccuaaugagcuguccuauuggugaaguucccucuccauacaacucaagauuugagucagucgcuuggucagcaagugcuugucaugauggcaucaauuggcuaacaauuggaauuucuggcccagacaauggggcaguggcuguguuaaaguacaacggcauaauaacagacacuaucaagaguuggagaaacaauauauugagaacacaagagucugaauguguauguguaaaugguucuugcuuuacuguaaugaccgauggaccaagugauggacaggccucauacaagaucuucagaauagaaaagggaaagauagucaaaucagucgaaaugaaugccccuaauuaucacuaugaggaaugcuccuguuauccugauucuagugaaaucacaugugugugcagggauaacuggcauggcucgaaucgaccgugggugucuuucaaccagaaucuggaauaucagauaggauacauaugcagugggauuuucggagacaauccacgcccuaaugauaagacaggcaguugugguccaguaucgucuaauggagcaaauggaguaaaaggauuuucauucaaauacggcaaugguguuuggauagggagaacuaaaagcauuaguucaagaaacgguuuugagaugauuugggauccgaacggauggacugggacagacaauaaauucucaauaaagcaagauaucguaggaauaaaugaguggucaggauauagcgggaguuuuguccagcauccagaacuaacagggcuggauuguauaagaccuugcuucuggguugaacuaaucagagggcgacccaaagagaacacaaucuggacuagcgggagcagcauauccuuuugugguguaaacagugacacuguggguuggucuuggccagacggugcugaguugccauuuaccauugacaaguaa

SEQ ID NO: 49967 - RNA, 1410 nt, Artificial Sequence; identical to SEQ ID NO: 49927
  derived and/or modified CDS sequence (wt) from neuraminidase__InfluenzaA__ADB81461

SEQ ID NO: 49968 - RNA, 1410 nt, Artificial Sequence; identical to SEQ ID NO: 49927
  derived and/or modified CDS sequence (wt) from neuraminidase__InfluenzaA__ADB82942

SEQ ID NO: 49969 - RNA, 1410 nt, Artificial Sequence
  derived and/or modified CDS sequence (wt) from neuraminidase__InfluenzaA__ADB82945
augaauccaaaccaaaagauaauaaccauugguucggucuguaugacaauuggaauggcuaacuuaauauuacaaauuggaaacauaaucucaauauggauuagccacucaauucaacuugggaaucaaaaucagauugaaacaugcaaucaaagcgucauuacuuaugaaaacaacacuuggguaaaucagacauauguuaacaucagcaacaccaacuuugcugcuggacagucagugguuuccgugaaauuagcgggcaauuccucucucugcccuguuaguggaugggcuauauacaguaaagacaacaguauaagaaucgguuccaagggggauguguuugucauaagggaaccauucauaucaugcucccccuuggaaugcagaaccuucuucuugacucaaggggccuugcuaaaugacaaacauuccaauggaaccauuaaagacaggagcccauaucgaacccuaaugagcuguccuauuggugaaguucccucuccauacaacucaagauuugagucagucgcuuggucagcaagugcuugucaugauggcaucaauuggcuaacaauuggaauuucuggcccagacaauggggcaguggcuguguuaaaguacaacggcauaauaacagacacuaucaagaguuggagaaacaauauauugagaacacaagagucugaaugugcauguguaaaugguucuugcuuuacuguaaugaccgauggaccaaguaauggacaggccucauacaagaucuucagaauagaaaagggaaagauagucaaaucagucgaaaugaaugccccuaauuaucacuaugaggaaugcuccuguuauccugauucuagugaaaucacaugugugugcagggauaacuggcauggcucgaaucgaccgugggugucuuucaaccagaaucuggaauaucagauaggguacauaugcagugggauuuucggagacaauccacgcccuaaugauaagacaggcaguugugguccaguaucgucuaauggagcaaauggaguaaaaggauuuucauucaaauacggcaaugguguuuggauagggagaacuaaaagcauuaguucaagaaacgguuuugagaugauuugggauccgaacggauggacugggacagacaauaacuucucaauaaagcaagauaucguaggaauaaaugaguggucaggauauagcgggaguuuuguucagcauccagaacuaacagggcuggauuguauaagaccuugcuucuggguugaacuaaucagagggcgacccaaagagaacacaaucuggacuagcgggagcagcauauccuuuugcgguguaaacagugacacuguggguuggucuuggccagacggugcugaguugccauuuaccauugacaaguaa

SEQ ID NO: 49970 - RNA, 1410 nt, Artificial Sequence
  derived and/or modified CDS sequence (wt) from neuraminidase__InfluenzaA__ADB89132
augaauccaaaccaaaagauaauaaccauugguucggucuguaugacaauuggaauggcuaacuuaauauuacaaauuggaaacauaaucucaauauggauuagccacucaauucaacuugggaaucaaaaucagauugaaacaugcaaucaaagcgucauuacuuaugaaaacaacacuuggguaaaucagacauauguuaacaucagcaacaccaacuuugcugcuggacagucagugguuuccgugaaauuagcgggcaauuccucucucugcccuguuaguggaugggcuauauacaguaaagacaacaguauaagaaucgguuccaagggggauguguuugucauaagggaaccauucauaucaugcucccccuuggaaugcagaaccuucuucuugacucaaggggccuugcuaaaugacaaacauuccaauggaaccauuaaagacaggagcccauaucgaacccuaaugagcuguccuauuggugaaguucccucuccauacaacucaagauuugagucagucgcuuggucagcaagugcuugucaugauggcaucaauuggcuaacaauuggaauuucuggcccagacaauggggcaguggcuguguuaaaguacaacggcauaauaacagacacuaucaagaguuggagaaacaauauauugagaacacaagagucugaaugugcauguguaaaugguucuugcuuuacuguaaugaccgauggaccaagugauggacaggccucauacaagaucuucagaauagaaaagggaaagauagucaaaucagucgaaaugaaugccccuaauuaucacuaugaggaaugcuccuguuauccugauucuagugaaaucacaugugugugcagggauaacuggcauggcucgaaucgaccgugggugucuuucaaccagaaucuggaauaucagauaggguacauaugcagugggauuuucggagacaauccacgcccuaaugauaagacaggcaguugugguccaguaucgucuaauggagcaaauggaguaaaaggauuuucauucaaauacggcaaugguguuuggauagggagaacuaaaagcauuaguucaagaaacgguuuugagaugauuugggauccgaacggauggacugggacagacaauaacuucucaauaaagcaagauaucguaggaauaaaugaguggucaggauauagcgggaguuuuguucagcauccagaacuaacagggcuggauuguauaagaccuugcuucuggguugaacuaaucagagggcgacccaaagagaacacaaucuggacuagcgggagcagcauauccuuuugcgguguaaacagugacacuguggguuggucuuggccagacggugcugaguugccauuuaccauugacaaguaa

SEQ ID NO: 49971 - RNA, 1410 nt, Artificial Sequence
  derived and/or modified CDS sequence (wt) from neuraminidase__InfluenzaA__ADB89142
augaauccaaaccaaaagauaauaaccauugguucggucuguaugacaauuggaauggcuaacuuaauauuacaaauuggaaacauaaucucaauauggauuagccacucaauucaacuugggaaucaaaaucagauugaaacaugcaaucaaagcgucauuacuuaugaaaacaacacuuggguaaaucagacauauguuaacaucagcaacaccaacuuugcugcuggacagucagugguuuccgugaaauuagcgggcaauuccucucucugcccuguuaguggaugggcuauauacaguaaagacaacaguguaagaaucgguuccaagggggauguguuugucauaagggaaccauucauaucaugcucccccuuggaaugcagaaccuucuucuugacucaaggggccuugcuaaaugacaaacauuccaauggaaccauuaaagacaggagcccauaucgaacccuaaugagcuguccuauuggugaaguucccucuccauacaacucaagauuugagucagucgcuuggucagcaagugcuugucaugauggcaucaauuggcuaacaauuggaauuucuggcccagacaauggggcaguggcuguguuaaaguacaacggcauaauaacagacacuaucaagaguuggagaaacaauauauugagaacacaagagucugaaugugcauguguaaaugguucuugcuuuacuguaaugaccgauggaccaagugauggacaggccucauacaagaucuucagaauagaaaagggaaagauagucaaaucagucgaaaugaaugccccuaauuaucacuaugaggaaugcuccuguuauccugauucuagugaaaucacaugugugugcagggauaacuggcauggcucgaaucgaccgugggugucuuucaaccagaaucuggaauaucagauaggguacauaugcagugggauuuucggagacaauccacgcccuaaugauaagacaggcaguugugguccaguaucgucuaauggagcaaauggaguaaaaggauuuucauucaaauacggcaaugguguuuggauagggagaacuaaaagcauuaguucaagaaacgguuuugagaugauuugggauccgaacggauggacugggacagacaauaacuucucaauaaagcaagauaucguaggaauaaaugaguggucaggauauagcgggaguuuuguucagcauccagaacuaacagggcuggauuguauaagaccuugcuucuggguugaacuaaucagagggcgacccaaagagaacacaaucuggacuagcgggagcagcauauccuuuugcgguguaaacagugacacuguggguuggucuuggccagacggugcugaguugccauuuaccauugacaaguaa

SEQ ID NO: 49972 - RNA, 1410 nt, Artificial Sequence; identical to SEQ ID NO: 48953
  derived and/or modified CDS sequence (wt) from neuraminidase__InfluenzaA__ADB89224

SEQ ID NO: 49973 - RNA, 1410 nt, Artificial Sequence
  derived and/or modified CDS sequence (wt) from neuraminidase__InfluenzaA__ADB89234
augaauccaaaccaaaagauaauaaccauugguucggucuguaugacaauuggaauggcuaacuuaauauuacaaauuggaaacauaaucucaauauggauuagccacucaauucaacuugggaaucaaaaucagauugaaacaugcaaucaaagcgucauuacuuaugaaaacaacacuuggguaaaucagacauauguuaacaucagcaacaccaacuuugcugcuggacagucagugguuuccgugaaauuagugggcaauuccucucucugcccuguuaguggaugggcuauauacaguaaagacaacaguguaagaaucgguuccaagggggauguguuugucauaagggaaccauucauaucaugcucccccuuggaaugcagaaccuucuucuugacucaaggggccuugcuaaaugacaaacauuccaauggaaccauuaaagacaggagcccauaucgaacccuaaugagcuguccuauuggugaaguucccucuccauacaacucaagauuugagucagucgcuuggucagcaagugcuugucaugauggcaucaauuggcuaacaauuggaauuucuggcccagacaauggggcaguggcuguguuaaaguacaacggcauaauaacagacacuaucaagaguuggagaaacaauauauugagaacacaagagucugaaugugcauguguaaaugguucuugcuuuacuguaaugaccgauggaccaaguaauggacaggccucauacaagaucuucagaauagaaaagggaaagauagucaaaucagucgaaaugaaugccccuaauuaucacuaugaggaaugcuccuguuauccugauucuagugaaaucacaugugugugcagggauaacuggcauggcucgaaucgaccgugggugucuuucaaccagaaucuggaauaucagauaggauacauaugcagugggauuuucggagacaauccacgcccuaaugauaagacaggcaguugugguccaguaucgucuaauggagcaaauggaguaaaaggauuuucauucaaauacggcaaugguguuuggauagggagaacuaaaagcauuaguucaagaaacgguuuugagaugauuugggauccgaacggauggacugggacagacaauaacuucucaauaaagcaagauaucguaggaauaaaugaguggucaggauauagcgggaguuuuguucagcauccagaacuaacagggcuggauuguauaagaccuugcuucuggguugaacuaaucagagggcgacccaaagagaacacaaucuggacuagcgggagcagcauauccuuuugugguguaaacagugacacuguggguuggucuuggccagacggugcugaguugccauuuaccauugacaaguaa

SEQ ID NO: 49974 - RNA, 1410 nt, Artificial Sequence; identical to SEQ ID NO: 48784
  derived and/or modified CDS sequence (wt) from neuraminidase__InfluenzaA__ADB89244

SEQ ID NO: 49975 - RNA, 1410 nt, Artificial Sequence; identical to SEQ ID NO: 48814
  derived and/or modified CDS sequence (wt) from neuraminidase__InfluenzaA__ADB89264

SEQ ID NO: 49976 - RNA, 1410 nt, Artificial Sequence
  derived and/or modified CDS sequence (wt) from neuraminidase__InfluenzaA__ADB89274
augaauccaaaccaaaagauaauaaccauugguucggucuguaugacaauuggaauggcuaacuuaauauuacaaauuggaaacauaaucucaauauggauuagccacucaauucaacuuggggaucaaaaucagauugaaacaugcaaucaaagcgucauuacuuaugaaaacaacacuuggguaaaucagacauauguuaacaucagcaacaccaacuuugcugcuggacagucagugguuuccgugaaauuagcgggcaauuccucucucugcccuguuaguggaugggcuauauacaguaaagacaacaguauaagaaucgguuccaagggggauguguuugucauaagggaaccauucauaucaugcucccccuuggaaugcagaaccuucuucuugacucaaggggccuugcuaaaugacaaacauuccaauggaaccauuaaagacaggagcccauaucgaacccuaaugagcuguccuauuggugaaguucccucuccauacaacucaagauuugagucaguugcuuggucagcaagugcuugucaugauggcaucaauuggcuaacaauuggaauuucuggcccagacaauggggcaguggcuguguuaaaguacaacggcauaauaacagacacuaucaagaguuggagaaacaauauauugagaacacaagagucugaaugugcauguguaaaugguucuugcuuuacuguaaugaccgauggaccaagugauggacaggccucauacaagaucuucagaauagaaaagggaaagauagucaaaucagucgaaaugaaugccccuaauuaucacuaugaggaaugcuccuguuauccugauucuagugaaaucacaugugugugcagggauaacuggcauggcucgaaucgaccgugggugucuuucaaccagaaucuggaauaucagauaggauacauaugcagugggauuuucggagacaauccacgcccuaaugauaagacaggcaguugugguccaguaucgucuaauggagcaaauggaguaaaaggauuuucauucaaauacggcaaugguguuuggauagggagaacuaaaagcauuaguucaagaaacgguuuugagaugauuugggauccgaacggauggacugggacagacaauaacuucucaauaaagcaagauaucguaggaauaaaugaguggucaggauauagcgggaguuuuguucagcauccagaacuaacagggcuggauuguauaagaccuugcuuuuggguugaacuaaucagagggcgacccaaagagaacacaaucuggacuagcgggagcagcauauccuuuugugguguaaacagugacacuguggguuggucuuggccagacggugcugaguugccauuuaccauugacaaguaa

SEQ ID NO: 49977 - RNA, 1410 nt, Artificial Sequence; identical to SEQ ID NO: 48905
  derived and/or modified CDS sequence (wt) from neuraminidase__InfluenzaA__ADB89284

SEQ ID NO: 49978 - RNA, 1410 nt, Artificial Sequence; identical to SEQ ID NO: 49544
  derived and/or modified CDS sequence (wt) from neuraminidase__InfluenzaA__ADB89294

SEQ ID NO: 49979 - RNA, 1410 nt, Artificial Sequence
  derived and/or modified CDS sequence (wt) from neuraminidase__InfluenzaA__ADB89304
augaauccaaaccaaaagauaauaaccauugguucggucuguaugacaauuggaauggcuaacuuaauauuacaaauuggaaacauaaucucaauauggauuagccacucaauucaacuugggaaucaaaaucagauugaaacaugcaaucaaagcgucauuacuuaugaaaacaacacuuggguaaaucagacauauguuaacaucagcaacaccaacuuugcugcuggacagucagugguuuccgugaaauuagcgggcaauuccucucucugcccuguuaguggaugggcuauauacaguaaagacaacaguauaagaaucgguuccaagggggauguguuugucauaagggaaccauucauaucaugcucccccuuggaaugcagaaccuucuucuugacucaaggggccuugcuaaaugacaaacauuccaauggaaccauuaaagacaggagcccauaucgaacccuaaugagcuguccuauuggugaaguucccucuccauacaacucaagauuugagucagucgcuuggucagcaagugcuugucaugauggcaucaauuggcuaacaauuggaauuucuggcccagacaauggggcaguggcuguguuaaaguacaacggcauaauaacagacacuaucaagaguuggagaaacaauauauugagaacacaagagucugaaugugcauguguaaaugguucuugcuuuacuguaaugaccgauggaccaagugauggacaggccucauacaagaucuucagaauagaaaagggaaagauagucaaaucagucgaaaugaaugccccuaauuaucacuaugaggaaugcuccuguuauccugauucuagugaaaucacaugugugugcagggauaacuggcauggcucgaaucgaccgugggugucuuucaaccagaaucuggaauaucagauaggauacauaugcagugggauuuucggagacaauccacgcccuaaugauaagacaggcaguugugguccaguaucgucuaauggagcaaauggaguaaagggauuuucauucaaauacggcaaugguguuuggauagggagaacuaaaagcauuaguucaagaaacgguuuugagaugauuugggauccgaacggauggacugggacagacaauaacuucucaauaaagcaagauaucguaggaauaaaugaguggucaggauauagcgggaguuuuguucagcauccagaacuaacagggcuggauuguauaagaccuugcuucuggguugaacuaaucagagggcgacccaaagagaacacaaucuggacuagcgggagcagcauauccuuuugugguguaaacagugacacuguggguuggucuuggccagacggugcugaguugccauuuaccauugacaaguaa

SEQ ID NO: 49980 - RNA, 1410 nt, Artificial Sequence
  derived and/or modified CDS sequence (wt) from neuraminidase__InfluenzaA__ADB89314
augaauccaaaccaaaagauaauaaccauugguucggucuguaugacaauuggaauggcuaacuuaauauuacaaauuggaaacauaaucucaauauggauuagccacucaauucaacuugggaaucaaaaucagauugaaacaugcaaucaaagcgucauuacuuaugaaaacaacacuuggguaaaucagacauauguuaacaucagcaacaccaacuuugcugcuggacagucagugguuuccgugaaauuagcgggcaauuccucucucugcccuguuaguggaugggcuauauacaguaaagacaacaguauaagaaucgguuccaagggggauguguuugucauaagggaaccauucauaucaugcucccccuuggaaugcagaaccuucuucuugacucaaggggccuugcuaaaugacaaacauuccaauggaaccauuaaagacaggagcccauaucgaacccuaaugagcuguccuauuggugaaguucccucuccauacaacucaagauuugagucagucgcuuggucagcaagugcuugucaugauggcaucaauuggcuaacaauuggaauuucuggcccagacaauggggcaguggcuguguuaaaguacaacggcauaauaacagacacuaucaagaguuggagaaacaauauauugagaacacaagagucugaaugugcauguguaaaugguucuugcuuuacuguaaugaccgauggaccaagugauggacaggccucauacaagaucuucagaauagaaaaaggaaagauagucaaaucagucgaaaugaaugccccuaauuaucacuaugaggaaugcuccuguuauccugauucuagugaaaucacaugugugugcagggauaacuggcauggcucgaaucgaccgugggugucuuucaaccagaaucuggaauaucagauaggauacauaugcagugggauuuucggagacaauccacgcccuaaugauaagacaggcaguugugguccaguaucgucuaauggagcaaauggaguaaaaggauuuucauucaaauacggcaaugguguuuggauagggagaacuaaaagcauuaguucaagaaacgguuuugagaugauuugggauccgaacggauggacugggacagacaauaacuucucaauaaagcaagauaucguaggaauaaaugaguggucaggauauagcgggaguuuuguucagcauccagaacuaacagggcuggauuguauaagaccuugcuucuggguugaacuaaucagagggcgacccaaagagaacacaaucuggacuagcgggagcagcauauccuuuugugguguaaacagugacacuguggguuggucuuggccagacggugcugaguugccauuuaccauugacaaguaa

SEQ ID NO: 49981 - RNA, 1410 nt, Artificial Sequence; identical to SEQ ID NO: 48750
  derived and/or modified CDS sequence (wt) from neuraminidase__InfluenzaA__ADB89324

SEQ ID NO: 49982 - RNA, 1410 nt, Artificial Sequence; identical to SEQ ID NO: 48750
  derived and/or modified CDS sequence (wt) from neuraminidase__InfluenzaA__ADB89334

SEQ ID NO: 49983 - RNA, 1410 nt, Artificial Sequence; identical to SEQ ID NO: 48750
  derived and/or modified CDS sequence (wt) from neuraminidase__InfluenzaA__ADB89344

SEQ ID NO: 49984 - RNA, 1410 nt, Artificial Sequence; identical to SEQ ID NO: 48750
  derived and/or modified CDS sequence (wt) from neuraminidase__InfluenzaA__ADB89364

SEQ ID NO: 49985 - RNA, 1410 nt, Artificial Sequence
  derived and/or modified CDS sequence (wt) from neuraminidase__InfluenzaA__ADB89374
augaauccaaaccaaaagauaauaaccauugguucggucuguaugacaauuggaauggcuaacuuaauauuacaaauuggaaacauaaucucaauauggauuagccacucaauucaacuugggaaucaaaaucagauugaaacaugcaaucaaagcgucauuacuuaugaaaacaacacuuggguaaaucagacauauguuaacaucagcaacaccaacuuugcugcuggacagucagugguuuccgugaaauuagcgggcaauuccucucucugcccuguuaguggaugggcuauauacaguaaagacaacaguauaagaaucgguuccaagggggauguguuugucauaagggaaccauucauaucaugcucccccuuggaaugcagaaccuucuucuugacucaaggggccuugcuaaaugacaaacauuccaauggaaccauuaaagacaggagcccauaucgaacccuaaugagcuguccuauuggugaaguucccucuccauacaacucaagauuugagucagucgcuuggucagcaagugcuugucaugauggcaucaauuggcuaacaauuggaauuucuggcccagacaauggggcaguggcuguguuaaaguacaacgguauaauaacagacacuaucaagaguuggagaaacaauauauugagaacacaagagucugaaugugcauguguaaaugguucuugcuuuacuguaaugaccgauggaccaagugauggacaggccucauacaagaucuucagaauagaaaagggaaagauagucaaaucagucgaaaugaaugccccuaauuaucacuaugaggaaugcuccuguuauccugauucuagugaaaucacaugugugugcagggauaacuggcauggcucgaaucgaccgugggugucuuucaaccagaaucuggaauaucagauaggauacauaugcagugggauuuucggagacaauccacgcccuaaugauaagacaggcaguugugguccaguaucgucuaauggagcaaauggaguaaaaggauuuucauucaaauacggcaaugguguuuggauagggagaacuaaaagcauuaguucaagaaacgguuuugagaugauuugggauccgaacggauggacugggacagacaauaacuucucaauaaagcaagauaucguaggaauaaaugaguggucaggauauagcgggaguuuuguucagcauccagaacuaacagggcuggauuguauaagaccuugcuucuggguugaacuaaucagagggcgacccaaagagaacacaaucuggacuagcgggagcagcauauccuuuugugguguaaacagugacacuguggguuggucuuggccagacggugcugaguugccauuuaccauugacaaguaa

SEQ ID NO: 49986 - RNA, 1410 nt, Artificial Sequence; identical to SEQ ID NO: 48750
  derived and/or modified CDS sequence (wt) from neuraminidase__InfluenzaA__ADB89384

SEQ ID NO: 49987 - RNA, 1410 nt, Artificial Sequence; identical to SEQ ID NO: 48750
  derived and/or modified CDS sequence (wt) from neuraminidase__InfluenzaA__ADB89394

SEQ ID NO: 49988 - RNA, 1410 nt, Artificial Sequence
  derived and/or modified CDS sequence (wt) from neuraminidase__InfluenzaA__ADB89404
augaauccaaaccaaaagauaauaaccauugguucggucuguaugacaauuggaauggcuaacuuaauauuacaaauuggaaacauaaucucaauauggauuagccacucaauucaacuugggaaucaaaaucagauugaaacaugcaaucaaagcgucauuacuuaugaaaacaacacuuggguaaaucagacauauguuaacaucagcaacaccaacuuugcugcuggacagucagugguuuccgugaaauuagcgggcaauuccucucucugcccuguuaguggaugggcuauauacaguaaagacaacaguguaagaaucgguuccaagggggauguguuugucauaagggaaccauucauaucaugcucccccuuggaaugcagaaccuucuucuugacucaaggggccuugcuaaaugacaaacauuccaauggaaccauuaaagacaggagcccauaucgaacccuaaugagcuguccuauuggugaaguucccucuccauacaacucaagauuugagucagucgcuuggucagcaagugcuugucaugauggcaucaauuggcuaacaauuggaauuucuggcccagacaauggggcaguggcuguguuaaaguacaacggcauaauaacagacacuaucaagaguuggagaaacaguauauugagaacacaagaaucugaaugugcauguguaaaugguucuugcuuuacuguaaugaccgauggaccaaguaauggacaggccucauacaagaucuucagaauagaaaagggaaagauagucaaaucagucgaaaugaaugccccuaauuaucacuaugaggaaugcuccuguuauccugauucuagugaaaucacaugugugugcagggauaacuggcauggcucgaaucgaccgugggugucuuucaaccagaaucuggaauaucagauaggauacauaugcagugggauuuucggagacaauccacgcccuaaugauaagacaggcaguugugguccaguaucgucuaauggagcaaauggaguaaaaggauuuucauucaaauacggcaaugguguuuggauagggagaacuaaaagcauuaguucaagaaacgguuuugagaugauuugggauccgaacggauggacugggacagacaauaacuucucaauaaagcaagauaucguaggaauaaaugaguggucaggauauagcgggaguuuuguucagcauccagaacuaacagggcuggauuguauaagaccuugcuucuggguugaacuaaucagagggcgacccaaagagaacacaaucuggacuagcgggagcagcauauccuuuugugguguaaacagugacacuguggguuggucuuggccagacggugcugaguugccauuuaccauugacaaguaa

SEQ ID NO: 49989 - RNA, 1410 nt, Artificial Sequence; identical to SEQ ID NO: 48750
  derived and/or modified CDS sequence (wt) from neuraminidase__InfluenzaA__ADB89414

SEQ ID NO: 49990 - RNA, 1410 nt, Artificial Sequence; identical to SEQ ID NO: 48750
  derived and/or modified CDS sequence (wt) from neuraminidase__InfluenzaA__ADB89424

SEQ ID NO: 49991 - RNA, 1410 nt, Artificial Sequence; identical to SEQ ID NO: 48814
  derived and/or modified CDS sequence (wt) from neuraminidase__InfluenzaA__ADB89434

SEQ ID NO: 49992 - RNA, 1410 nt, Artificial Sequence; identical to SEQ ID NO: 48814
  derived and/or modified CDS sequence (wt) from neuraminidase__InfluenzaA__ADB89444

SEQ ID NO: 49993 - RNA, 1410 nt, Artificial Sequence
  derived and/or modified CDS sequence (wt) from neuraminidase__InfluenzaA__ADB89454
augaauccaaaccaaaagauaauaaccauugguucggucuguaugacaauuggaauggcuaacuuaauauuacaaauuggaaacauaaucucaauauggauuagccacucaauucaacuugggaaucaaaaucagauugaaacaugcaaucaaagcgucauuacuuaugaaaacaacacuuggguaaaucagacauauguuaacaucagcaacaccaacuuugcugcuggacagucagugguuuccgugaaauuagcgggcaauuccucucucugcccuguuaguggaugggcuauauacaguaaagacaacaguauaagaaucgguuccaagggggauguguuugucauaagggaaccauucauaucaugcucccccuuggaaugcagaaccuucuucuugacucaaggggccuugcuaaaugacaaacauuccaauggaaccauuaaagacaggagcccauaucgaacccuaaugagcuguccuauuggugaaguucccucuccauacaacucaagauuugagucagucgcuuggucagcaagugcuugucaugauggcaucaauuggcuaacaauuggaauuucuggcccagacaauggggcaguggcugugcuaaaguacaacggcauaauaacagacacuaucaagaguuggagaaacaauauauugagaacacaagagucugaaugugcauguguaaaugguucuugcuuuacuguaaugaccgauggaccaaaugauggacaggccucauacaagaucuucagaauagaaaagggaaagauagucaaaucagucgaaaugaaugccccuaauuaucacuaugaggaaugcuccuguuauccugauucuagugaaaucacaugugugugcagggauaacuggcauggcucgaaucgaccgugggugucuuucaaccagaaucuggaauaucagauaggauacauaugcagugggauuuucggagacaauccacgcccuaaugauaagacaggcaguugugguccaguaucgucuaauggagcaaauggaguaaaaggauuuucauucaaauacggcaaugguguuuggauagggagaacuaaaagcauuaguucaagaaacgguuuugagaugauuugggauccgaacggauggacugggacagacaauaacuucucaauaaagcaagauaucguaggaauaaaugaguggucaggauauagcgggaguuuuguucagcauccagaacuaacagggcuggauuguauaagaccuugcuucuggguugaacuaaucagagggcgacccaaagagaacacaaucuggacuagcggaagcagcauauccuuuugugguguaaacagugacacuguggguuggucuuggccagacggugcugaguugccauuuaccauugacaaguaa

SEQ ID NO: 49994 - RNA, 1410 nt, Artificial Sequence; identical to SEQ ID NO: 48750
  derived and/or modified CDS sequence (wt) from neuraminidase__InfluenzaA__ADB89464

SEQ ID NO: 49995 - RNA, 1410 nt, Artificial Sequence; identical to SEQ ID NO: 48814
  derived and/or modified CDS sequence (wt) from neuraminidase__InfluenzaA__ADB89484

SEQ ID NO: 49996 - RNA, 1410 nt, Artificial Sequence
  derived and/or modified CDS sequence (wt) from neuraminidase__InfluenzaA__ADB89494
augaauccaaaccaaaagauaauaaccauugguucggucuguaugacaauuggaauggcuaacuuaauauuacaaauuggaaacauaaucucaauauggauuagccacucaauucaacuugggaaucaaaaucagauugaaacaugcaaucaaagcgucauuacuuaugaaaacaacacuuggguaaaucagacauauguuaacaucagcaacaccaacuuugcugcuggacagucagugguuuccgugaaauuagcgggcaauuccucucucugcccuguuaguggaugggcuauauacaguaaagacaacaguauaagaaucgguuccaagggggauguguuugucauaagggaaccauucauaucaugcucccccuuggaaugcagaaccuucuucuugacucaaggggccuugcuaaaugacaaacauuccaauggaaccauuaaagacaggagcccauaucgaacccuaaugagcuguccuauuggugaaguucccucuccauacaacucaagauuugagucagucgcuuggucagcaagugcuugucaugauggcaucaauuggcuaacaauuggaauuucuggcccagacaauggggcaguggcuguguuaaaguacaacggcauaauaacagacacuaucaagaguuggagaaacaauauauugagaacacaagagucugaaugugcauguguaaaugguucuugcuuuacuguaaugaccgauggaccaagugauggacaggccucauacaagaucuucagaauagaaaagggaaagauagucaaaucagucgaaaugaaugccccuaauuaucacuaugaggaaugcuccuguuauccugauucuagugaaaucacauguguaugcagggauaacuggcauggcucgaaucgaccgugggugucuuucaaccagaaucuggaauaucagauaggauacauaugcagugggauuuucggagacaauccacgcccuaaugauaagacgggcaguugugguccaguaucgucuaauggagcaaauggaguaaaaggauuuucauucaaauacggcaaugguguuuggauagggagaacuaaaagcauuaguucaagaaacgguuuugagaugauuugggauccgaacggauggacugggacagacaauaacuucucaauaaagcaagauaucguaggaauaaaugaguggucaggauauagcgggaguuuuguucagcauccagaacuaacagggcuggauuguauaagaccuugcuucuggguugaacuaaucagagggcgacccaaagagaacacaaucuggacuagcgggagcagcauauccuuuugugguguaaacagugacacuguggguuggucuuggccagacggugcugaguugccauuuaccauugacaaguaa

SEQ ID NO: 49997 - RNA, 1410 nt, Artificial Sequence
  derived and/or modified CDS sequence (wt) from neuraminidase__InfluenzaA__ADB89504
augaauccaaaccaaaagauaauaaccauugguucggucuguaugacaauuggaauggcuaacuuaauauuacaaauuggaaacauaaucucaauauggauuagccacucaauucaacuugggaaucaaaaucagauugaaacaugcaaucaaagcgucauuacuuaugaaaacaacacuuggguaaaucagacauauguuaacaucagcaacaccaacuuugcugcuggacagucagugguuuccgugaaauuagcgggcaauuccucucucugcccuguuaguggaugggcuauauacaguaaagacaacaguguaagaaucgguuccaagggggauguguuugucauaagggaaccauucauaucaugcucccccuuggaaugcagaaccuucuucuugacucaaggggccuugcuuaaugacaaacauuccaauggaaccauuaaagacaggagcccauaucgaacccuaaugagcuguccuauuggugaaguucccucuccauacaacucaagauuugagucagucgcuuggucagcaagugcuugucaugauggcaucaauuggcuaacaauuggaauuucuggcccagacaauggggcaguggcuguguuaaaguacaacggcauaauaacagacacuaucaagaguuggagaaacaauauauugagaacacaagagucugaaugugcauguguaaaugguucuugcuuuacuguaaugaccgauggaccaaguaauggacaggccucauacaagaucuucagaauagaaaagggaaagauagucaaaucagucgaaaugaaugccccuaauuaucacuaugaggaaugcuccuguuauccugauucuagugaaaucacaugugugugcagggauaacuggcauggcucgaaucgaccgugggugucuuucaaccagaaucuggaauaucagauaggauacauaugcagugggauuuucggagacaauccacgcccuaaugauaagacaggcaguugugguccaguaucgucuaauggagcaaauggaguaaaaggauuuucauucaaauacggcaaugguguuuggauagggagaacuaaaagcauuaguucaagaaacgguuuugagaugauuugggauccgaacggauggacugggacagacaauaacuucucaauaaagcaagauaucguaggaauaaaugaguggucaggauauagcgggaguuuuguucagcauccagaacuaacagggcuggauuguauaagaccuugcuucuggguugaacuaaucagagggcgacccaaagagaacacaaucuggacuagcgggagcagcauauccuuuugugguguaaacagugacacuguggguuggucuuggccagacggugcugaguugccauuuaccaucgacaaguaa

SEQ ID NO: 49998 - RNA, 1410 nt, Artificial Sequence; identical to SEQ ID NO: 48750
  derived and/or modified CDS sequence (wt) from neuraminidase__InfluenzaA__ADB89514

SEQ ID NO: 49999 - RNA, 1410 nt, Artificial Sequence
  derived and/or modified CDS sequence (wt) from neuraminidase__InfluenzaA__ADB89524
augaauccaaaccaaaagauaauaaccauugguucggucuguaugacaauuggaauggcuaacuuaauauuacaaauuggaaacauaaucucaauauggauuagccacucaauucaacuugggaaucaaaaucagauugaaacaugcaaucaaagcgucauuacuuaugaaaacaacacuuggguaaaucagacauauguuaacaucagcaacaccaacuuugcugcuggacagucagugguuuccgugaaauuagcgggcaauuccucucucugcccuguuaguggaugggcuauauacaguaaagacaacaguauaagaaucgguuccaagggggauguguuugucauaagggaaccauucauaucaugcucccccuuggaaugcagaaccuucuucuugacucaaggggccuugcuaaaugacaaacauuccaauggaaccauuaaagacaggagcccauaucgaacccuaaugagcuguccuauuggugaaguucccucuccauacaacucaagauuugagucagucgcuuggucagcaagugcuugucaugauggcaucaauuggcuaacaauuggaauuucuggcccagacaauggggcaguggcuguguuaaaguacaacggcauaauaacagacacuaucaagaguuggagaaacaauauauugagaacacaagagucugaaugugcauguguaaaugguucuugcuuuacuguaaugaccgauggaccaagugauggacaggccucauacaagaucuucagaauagaaaagggaaagauagucaaaucagucgaaaugaaugccccuaauuaucacuaugaggaaugcuccuguuauccugauucuagugaaaucacaugugugugcagggauaacuggcauggcucgaaucgaccgugggugucuuucaaccagaaucuggaauaucagauaggauacauaugcagugggauuuucggagacaauccacgcccuaaugauaagacaggcaguugugguccaguaucgucuaauggagcaaauggaguaaaaggauuuucauucaaauacggcaaugguguuuggauagggagaacuaaaagcauuaguucaagaaacgguuuugagaugauuugggauccgaacggauggacugggacagacaauaacuucucaauaaagcaagauaucguaggaauaaaugaguggucaggauauagcgggaguuuuguucagcauccagaacuaacagggcuggauuguauaagaccuugcuucuggguugaacuaaucagagggcgacccaaagagaacacaaucuggacuagcgggagcagcauauccuuuugugguguaaacagugacacuguggguuggucuuggccagacggugcugaguugccauucaccauugacaaguaa

SEQ ID NO: 50000 - RNA, 1410 nt, Artificial Sequence
  derived and/or modified CDS sequence (wt) from neuraminidase__InfluenzaA__ADB89544
augaauccaaaccaaaagauaauaaccauugguucggucuguaugacaauuggaauggcuaacuuaauauuacaaauuggaaacauaaucucaauauggauuagccacucaauucaacuugggaaucaaaaucagauugaaacaugcaaucaaagcgucauuacuuaugaaaacaacacuuggguaaaucagacauauguuaacaucagcaacaccaacuuugcugcuggacagucagugguuuccgugaaauuagcgggcaauuccucucucugcccuguuaguggaugggcuauauacaguaaagacaacaguauaagaaucgguuccaagggggauguguuugucauaagggaaccauucauaucaugcucccucuuggaaugcagaaccuucuucuugacucaaggggccuugcuaaaugacaaacauuccaauggaaccauuaaagacaggagcccauaucgaacccuaaugagcuguccuauuggugaaguucccucuccauacaacucaagauuugagucagucgcuuggucagcaagugcuugucaugauggcaucaauuggcuaacaauuggaauuucuggcccagacaauggggcaguggcuguguuaaaguacaacggcauaauaacagacacuaucaagaguuggagaaacaauauauugagaacacaagagucugaaugugcauguguaaaugguucuugcuuuacuguaaugaccgauggaccaagugauggacaggccucauacaagaucuucagaauagaaaagggaaagauagucaaaucagucgaaaugaaugccccuaauuaucacuaugaggaaugcuccuguuauccugauucuagugaaaucacauguguaugcagggauaacuggcauggcucgaaucgaccgugggugucuuucaaccagaaucuggaauaucagauaggauacauaugcagugggauuuucggagacaauccacgcccuaaugauaagacaggcaguugugguccaguaucgucuaauggagcaaauggaguaaaaggauuuucauucaaauacggcaaugguguuuggauagggagaacuaaaagcauuaguucaagaaacgguuuugagaugauuugggauccgaacggauggacugggacagacaauaacuucucaauaaagcaagauaucguaggaauaaaugaguggucaggauauagcgggaguuuuguucagcauccagaacuaacagggcuggauuguauaagaccuugcuucuggguugaacuaaucagagggcgacccaaagagaacacaaucuggacuagcgggagcagcauauccuuuugugguguaaacagugacacuguggguuggucuuggccagacggugcugaguugccauuuaccauugacaaguaa

SEQ ID NO: 50001 - RNA, 1410 nt, Artificial Sequence; identical to SEQ ID NO: 48750
  derived and/or modified CDS sequence (wt) from neuraminidase__InfluenzaA__ADB89564

SEQ ID NO: 50002 - RNA, 1410 nt, Artificial Sequence; identical to SEQ ID NO: 48750
  derived and/or modified CDS sequence (wt) from neuraminidase__InfluenzaA__ADB89574

SEQ ID NO: 50003 - RNA, 1410 nt, Artificial Sequence; identical to SEQ ID NO: 48814
  derived and/or modified CDS sequence (wt) from neuraminidase__InfluenzaA__ADB89594

SEQ ID NO: 50004 - RNA, 1410 nt, Artificial Sequence; identical to SEQ ID NO: 49794
  derived and/or modified CDS sequence (wt) from neuraminidase__InfluenzaA__ADB89604

SEQ ID NO: 50005 - RNA, 1410 nt, Artificial Sequence
  derived and/or modified CDS sequence (wt) from neuraminidase__InfluenzaA__ADB89614
augaauccaaaccaaaagauaauaaccauugguucggucuguaugacaauuggaauggcuaacuuaauauuacaaauuggaaacauaaucucaauauggauuagccacucaauucaacuugggaaucaaaaucagauugaaacaugcaaucaaagcgucauuacuuaugaaaacaacacuuggguaaaucagacauauguuaacaucagcaacaccaacuuugcugcuggacagucagugguuuccgugaaauuagcgggcaauuccucucucugcccuguuaguggaugggcuauauacaguaaagacaacaguauaagaaucgguuccaagggggauguguuugucauaagggaaccauucauaucaugcucccccuuggaaugcagaaccuucuucuugacucaaggggccuugcuaaaugacaaacauuccaauggaaccauuaaagacaggagcccauaucgaacccuaaugagcuguccuauuggugaaguucccucuccauacaacucaagauuugagucagucgcuuggucagcaagugcuugucaugauggcaucaauuggcuaacaauuggaauuucuggcccagacaauggggcaguggcuguguuaaaguacaacggcauaauaacagacacuaucaagaguuggagaaacaauauauugagaacacaagagucugaaugugcauguguaaaugguucuugcuuuacuguaaugaccgauggaccaagugauggacaggccucauacaagaucuucagaauagaaaagggaaagauagucaaaucagucgaaaugaaugccccuaauuaucacuaugaggaaugcuccuguuauccugauucuagugaaaucacaugugugugcagggauaacuggcauggcucgaaucgaccgugggugucuuucaaccagaaucuggaauaucagauaggauacauaugcagugggauuuucggagacaauccacgcccuaaugauaagacaggcagcugugguccaguaucgucuaauggagcaaauggaguaaaaggauuuucauucaaauacggcaaugguauuuggauagggagaacuaaaagcauuaguucaagaaacgguuuugagaugauuugggauccgaacggauggacugggacagacaauaacuucucaauaaagcaagauaucguaggaauaaaugaguggucaggauauagcgggaguuuuguucagcauccagaacuaacagggcuggauuguauaagaccuugcuucuggguugaacuaaucagagggcgacccaaagagaacacaaucuggacuagcgggagcagcauauccuuuugugguguaaacagugacacuguggguuggucuuggccagacggugcugaguugccauuuaccauugacaaguaa

SEQ ID NO: 50006 - RNA, 1410 nt, Artificial Sequence; identical to SEQ ID NO: 49794
  derived and/or modified CDS sequence (wt) from neuraminidase__InfluenzaA__ADB89624

SEQ ID NO: 50007 - RNA, 1410 nt, Artificial Sequence; identical to SEQ ID NO: 48750
  derived and/or modified CDS sequence (wt) from neuraminidase__InfluenzaA__ADB89634

SEQ ID NO: 50008 - RNA, 1410 nt, Artificial Sequence; identical to SEQ ID NO: 49794
  derived and/or modified CDS sequence (wt) from neuraminidase__InfluenzaA__ADB89644

SEQ ID NO: 50009 - RNA, 1410 nt, Artificial Sequence
  derived and/or modified CDS sequence (wt) from neuraminidase__InfluenzaA__ADB89664
augaauccaaaccaaaagauaauaaccauugguucggucuguaugacaauuggaauggcuaacuuaauauuacaaauuggaaacauaaucucaauauggauuagccacucaauucaacuugggaaucaaaaucagauugaaacaugcaaucaaagcgucauuacuuaugaaaacaacacuuggguaaaucagacauauguuaacaucagcaacaccaacuuugcugcuggacagucagugguuuccgugaaauuagcgggcaauuccucucucugcccuguuaguggaugggcuauauacaguaaagacaacaguauaagaaucgguuccaagggggauguguuugucauaagggaaccauucauaucaugcucccccuuggaaugcagaaccuucuucuugacucaaggggccuugcuaaaugacaaacauuccaauggaaccauuaaagacaggagcccauaucgaacccuaaugagcuguccuauuggugaaguucccucuccauacaacucaagauuugagucagucgcuuggucagcaagugcuugucaugauggcaucaauuggcuaacaauuggaauuucuggcccagacaauggggcaguggcuguguuaaaguacaacggcauaauaacagacacuaucaagaguuggagaaacaauauauugagaacacaagagucugaaugugcauguguaaaugguucuugcuuuacuguaaugaccgauggaccaagugauggacaggccucauacaagaucuucagaauagaaaagggaaagauagucaaaucagucgaaaugaaugccccuaauuaucacuaugaggaaugcuccuguuauccugauucuagugaaaucacaugugugugcagggauaacuggcauggcucgaaucgaccgugggugucuuucaaccagaaucuggaauaucagauaggauacauaugcagugggauuuucggagacaauccacgcccuaaugauaagacaggcaguugugguccaguaucgucuaauggagcaaauggaguaaaaggauuuucauucaaauacggcaaugguguuuggauagggagaacuaaaagcauuaguucaagaaacgguuuugagaugauuugggauccgaacggauggacugggacagacaauaacuucucaauaaagcaagauaucguaggaauaaaugaguggucaggauauagcgggaguuuuguucagcauccagaacuaacagggcugaauuguauaagacccugcuucuggguugaacuaaucagagggcgacccaaagagaacacaaucuggacuagcgggagcagcauauccuuuugugguguaaacagugacacuguggguuggucuuggccagacggugcugaguugccauuuaccauugacaaguaa

SEQ ID NO: 50010 - RNA, 1410 nt, Artificial Sequence
  derived and/or modified CDS sequence (wt) from neuraminidase__InfluenzaA__ADB89674
augaauccaaaccaaaagauaauaaccauugguucggucuguaugacaauuggaauggcuaacuuaauauuacaaauuggaaacauaaucucaauauggauuagccacucaauucaacuugggaaucaaaaucagauugaaacaugcaaucaaagcgucauuacuuaugaaaacaacacuuggguaaaucagacauauguuaacaucagcaacaccaacuuugcugcuggacagucagugguuuccgugaaauuagcgggcaauuccucucucugcccuguuaguggaugggcuauauacaguaaagacaacaguauaagaaucgguuccaagggggauguguuugucauaagggaaccauucauaucaugcucccccuuggaaugcagaaccuucuucuugacucaaggggccuugcuaaaugacaaacauuccaauggaaccauuaaagacaggagcccauaucgaacccuaaugagcuguccuauuggugaaguucccucuccauacaacucaagauuugagucagucgcuuggucagcaagugcuugucaugauggcaucaauuggcuaacaauuggaauuucuggcccagacaauggggcaguggcuguguuaaaguacaacggcauaauaacagacacuaucaagaguuggagaaacaauauauugagaacacaagagucugaaugugcauguguaaaugguucuugcuuuacuguaaugaccgauggaccaagugauggacaggccucauacaagaucuucagaauagaaaaggggaagauagucaaaucagucgaaaugaaugccccuaauuaucacuaugaggaaugcuccuguuauccugauucuagugaaaucacaugugugugcagggauaacuggcauggcucgaaucgaccgugggugucuuucaaccagaaucuggaauaucagauaggauacauaugcagugggauuuucggagacaauccacgcccuaaugauaagacaggcaguugugguccaguaucgucuaauggagcaaauggaguaaaaggauuuucauucaaauacggcaaugguguuuggauagggagaacuaaaagcauuaguucaagaaacgguuuugagaugauuugggauccgaacggauggacugggacagacaauaacuucucaauaaagcaagauaucguaggaauaaaugaauggucaggauauagcgggaguuuuguucagcauccagaacuaacagggcuggauuguauaagaccuugcuucuggguugaacuaaucagagggcgacccaaagagaacacaaucuggacuagcgggagcagcauauccuuuugugguguaaacagugacacuguggguuggucuuggccagacggugcugaguugccauuuaccauugacaaguaa

SEQ ID NO: 50011 - RNA, 1410 nt, Artificial Sequence
  derived and/or modified CDS sequence (wt) from neuraminidase__InfluenzaA__ADB89684
augaauccaaaccaaaagauaauaaccauugguucggucuguaugacaauuggaauggcuaacuuaauauuacaaauuggaaacauaaucucaauauggauuagccacucaauucaacuugggaaucaaaaucagauugaaacaugcaaucaaagcgucauuacuuaugaaaacaacacuuggguaaaucagacauauguuaacaucagcaacaccaacuuugcugcuggacagucagugguuuccguaaaauuagcgggcaauuccucucucugcccuguuaguggaugggcuauauacaguaaagacaacaguauaagaaucgguuccaagggggauguguuugucauaagggaaccauucauaucaugcucccccuuggaaugcagaaccuucuucuugacucaaggggccuugcuaaaugacaaacauuccaauggaaccauuaaagacaggagcccauaucgaacccuaaugagcuguccuauuggugaaguucccucuccauacaacucaagauuugagucagucgcuuggucagcaagugcuugucaugauggcaucaauuggcuaacaauuggaauuucuggcccagacaauggggcaguggcuguguuaaaguacaacggcauaauaacagacacuaucaagaguuggagaaacaauauauugagaacacaagagucugaaugugcauguguaaaugguucuugcuuuacuguaaugaccgauggaccaagugauggacaggccucauacaagaucuucagaauagaaaagggaaagauagucaaaucagucgaaaugaaugccccuaauuaucacuaugaggaaugcuccuguuauccugauucuagugaaaucacaugugugugcagggauaacuggcauggcucgaaucgaccgugggugucuuucaaccagaaucuggaauaucagauaggauacauaugcagugggauuuucggagacaauccacgcccuaaugauaagacaggcaguugugguccaguaucgucuaauggagcaaauggaguaaaaggauuuucauucaaauacggcaaugguguuuggauagggagaacuaaaagcauuaguucaagaaacgguuuugagaugauuugggauccgaacggauggacugggacagacaauaacuucucaauaaagcaagauaucguaggaauaaaugaguggucaggauauagcgggaguuuuguucagcauccagaacuaacagggcuggauuguauaagaccuugcuucuggguugaacuaaucagagggcgacccaaagagaacacaaucuggacuagcgggagcagcauauccuuuugugguguaaacagugacacuguggguuggucuuggccagacggugcugaguugccauuuaccauugacaaguaa

SEQ ID NO: 50012 - RNA, 1410 nt, Artificial Sequence
  derived and/or modified CDS sequence (wt) from neuraminidase__InfluenzaA__ADB89694
augaauccaaaccaaaagauaauaaccauugguucggucuguaugacaauuggaauggcuaacuuaauauuacaaauuggaaacauaaucucaauauggauuagccacucaauucaacuugggaaucaaaaucagauugaaacaugcaaucaaagcgucauuacuuaugaaaacaacacuuggguaaaucagacauauguuaacaucagcaacaccaacuuugcugcuggacagucagugguuuccgugaaauuagcgggcaauuccucucucugcccuguuaguggaugggcuauauacaguaaagacaacaguauaagaaucgguuccaagggggauguguuugucauaagggaaccauucauaucaugcucccccuuggaaugcagaaccuucuucuugacucaaggggccuugcuaaaugacaaacauuccaauggaaccauuaaagacaggagcccauaucgaacccuaaugagcuguccuauuggugaaguucccucuccauacaacucaagauuugagucagucgcuuggucagcaagugcuugucaugauggcaucaauuggcuaacaauuggaauuucuggcccagacaauggggcaguggcuguguuaaaguacaacggcauaauaacagacacuaucaagaguuggagaaacaauauauugagaacacaagagucugaaugugcauguguaaaugguucuugcuuuacuguaaugaccgauggaccaagugauggacaggccucauacaagaucuucagaauagaaaagggaaagauagucaaaucagucgaaaugaaugccccuaauuaucacuaugaggaaugcuccuguuauccugauucuagugaaaucacaugugugugcagggauaacuggcauggcucgaaucgaccgugggugucuuucaaccagaaucuggaauaucagauaggauacauaugcagugggauuuucggagacaauccacgcccuaaugauaagacaggcaguugugguccaguaucgucuaauggagcaaauggaguaaaaggauuuucauucaaauacggcaaugguguuuggauagggagaacuaaaagcauuaguucaagaaacgguuuugagaugauuugggauccgaacggauggacugggacagacaauaacuucacaauaaagcaagauaucguaggaauaaaugaguggucaggauauagcgggaguuuuguucagcauccagaacuaacagggcuggauuguauaagaccuugcuucuggguugaacuaaucagagggcgacccaaagagaacacaaucuggacuagcgggagcagcauauccuuuugugguguaaacagugacacuguggguuggucuuggccagacggugcugaguugccauuuaccauugacaaguaa

SEQ ID NO: 50013 - RNA, 1410 nt, Artificial Sequence
  derived and/or modified CDS sequence (wt) from neuraminidase__InfluenzaA__ADB89704
augaauccaaaccaaaagauaauaaccauugguucggucuguaugacaauuggaauggcuaacuuaauauuacaaauuggaaacauaaucucaauauggauuagccacucaauucaacuugggaaucaaaaucagauugaaacaugcaaucaaagcgucauuacuuaugaaaacaacacuuggguaaaucagacauauguuaacaucagcaacaccaacuuugcugcuggacagucagugguuuccgugaaauuagcgggcaauuccucucucugcccuguuaguggaugggcuauauacaguaaagacaacaguauaagaaucgguuccaagggggauguguuugucauaagggaaccauucauaucaugcucccccuuggaaugcagaaccuucuucuugacucaaggggccuugcuaaaugacaaacauuccaauggaaccauuaaagacaggagcccauaucgaacccuaaugagcuguccuauuggugaaguucccucuccauacaacucaagauuugagucagucgcuuggucagcaagugcuugucaugauggcaucaauuggcuaacaauuggaauuucuggcccagacaauggggcaguggcuguguuaaaguacaacggcauaauaacagacacuaucaagaguuggagaaacaauauauugagaacacaagagucugaaugugcauguguaaaugguucuugcuuuacuguaaugaccgauggaccaagugauggacaggccucauacaagaucuucagaauagaaaagggaaagauagucaaaucagucgaaaugaaugccccuaauuaucacuaugaggaaugcuccuguuauccugauucuagugaaaucacaugugugugcagggauaacuggcauggcucgaaucgaccgugggugucuuucaaccagaaucuggaauaucagauaggauacauaugcagugggauuuucggagacaauccacgcccuaaugacaagacaggcaguugugguccaguaucgucuaauggagcaaauggaguaaaaggauuuucauucaaauacggcaaugguguuuggauagggagaacuaaaagcauuaguucaagaaacgguuuugagaugauuugggauccgaacggauggacugggacagacaauaacuucucaauaaagcaagauaucguaggaauaaaugaguggucaggauauagcgggaguuuuguucagcauccagaacuaacagggcuggauuguauaagaccuugcuucuggguugaacuaaucagagggcgacccaaagagaacacaaucuggacuagcgggagcagcauauccuuuugugguguaaacagugacacuguggguuggucuuggccagacggugcugaguugccauuuaccauugacaaguaa

SEQ ID NO: 50014 - RNA, 1410 nt, Artificial Sequence; identical to SEQ ID NO: 50013
  derived and/or modified CDS sequence (wt) from neuraminidase__InfluenzaA__ADB89714

SEQ ID NO: 50015 - RNA, 1410 nt, Artificial Sequence; identical to SEQ ID NO: 49470
  derived and/or modified CDS sequence (wt) from neuraminidase__InfluenzaA__ADB89724

SEQ ID NO: 50016 - RNA, 1410 nt, Artificial Sequence; identical to SEQ ID NO: 49595
  derived and/or modified CDS sequence (wt) from neuraminidase__InfluenzaA__ADB89735

SEQ ID NO: 50017 - RNA, 1410 nt, Artificial Sequence; identical to SEQ ID NO: 48750
  derived and/or modified CDS sequence (wt) from neuraminidase__InfluenzaA__ADB90357

SEQ ID NO: 50018 - RNA, 1410 nt, Artificial Sequence
  derived and/or modified CDS sequence (wt) from neuraminidase__InfluenzaA__ADB90358
augaauccaaaccaaaagauaauaaccauugguucggucuguaugacaauuggaauggcuaacuuaauauuacaaauuggaaacauaaucucaauauggauuagccacucaauucaacuugggaaucaaaaucagauugaaacaugcaaucaaagcgucauuacuuaugaaaacaacacuuggguaaaucagacauauguuaacaucagcaacaccaacuuugcugcuggacagucagugguuuccgugaaauuagcgggcaauuccucucucugcccuguuaguggaugggcuauauacaguaaagacaacaguauaagaaucgguuccaagggggauguguuugucauaagggaaccauucauaucaugcucccccuuggaaugcagaaccuucuucuugacucaaggggccuugcuaaaugacaaacauuccaauggaaccauuaaagacaggagcccauaucgaacccuaaugagcuguccuauuggugaaguucccucuccauacaacucaagauuugagucagucgcauggucagcaagugcuugucaugauggcaucaauuggcuaacaauuggaauuucuggcccagacaauggggcaguggcuguguuaaaguacaacggcauaauaacagacacuaucaagaguuggagaaacaauauauugagaacacaagagucugaaugugcauguguaaaugguucuugcuuuacuguaaugaccgauggaccaagugauggacaggccucauacaagaucuucagaauagaaaagggaaagauagucaaaucagucgaaaugaaugccccuaauuaucacuaugaggaaugcuccuguuauccugauucuagugaaaucacaugugugugcagggauaacuggcauggcucgaaucgaccgugggugucuuucaaccagaaucuggaauaucagauaggauacauaugcagugggauuuucggagacaauccacgcccuaaugauaagacaggcaguugugguccaguaucgucuaauggagcaaauggaguaaaaggauuuucauucaaauacggcaaugguguuuggauagggagaacuaaaagcauuaguucaagaaacgguuuugagaugauuugggauccgaacggauggacugggacagacaauaacuucucaauaaagcaagauaucguaggaauaaaugaguggucaggauauagcgggaguuuuguucagcauccagaacuaacagggcuggauuguauaagaccuugcuucuggguugaacuaaucagagggcgacccaaagagaacacaaucuggacuagcgggagcagcauauccuuuugugguguaaacagugacacuguggguuggucuuggccagacggugcugaguugccauuuaccauugacaaguaa

SEQ ID NO: 50019 - RNA, 1410 nt, Artificial Sequence
  derived and/or modified CDS sequence (wt) from neuraminidase__InfluenzaA__ADB90359
augaauccaaaccaaaagauaauaaccauugguucggucuguaugacaauuggaauggcuaacuuaauauuacaaauuggaaacauaaucucaauauggauuagccacucaauucaacuugggaaucaaaaucagauugaaacaugcaaucaaagcaucauuacuuaugaaaacaacacuuggguaaaucagacauauguuaacaucagcaacaccaacuuugcugcuggacagucagugguuuccgugaaacuagcgggcaauuccucucucugcccuguuaguggaugggcuauauacaguaaagacaacaguauaagaaucgguuccaagggggauguguuugucauaagggaaccauucauaucaugcucccccuuggaaugcagaaccuucuucuugacucaaggggccuugcuaaaugacaaacauuccaauggaaccauuaaagacaggagcccauaucgaacccuaaugagcuguccuauuggugaaguucccucuccauacaacucaagauuugagucagucgcuuggucagcaagugcuugucaugauggcaucaauuggcuaacaauuggaauuucugggccagacaauggggcaguggcuguguuaaaguacaacggcauaauaacagacacuaucaagaguuggagaaacaauauauugagaacacaagagucugaaugugcauguguaaaugguucuugcuuuacuguaaugaccgauggaccaagugauggacaggccucauacaagaucuucagaauagaaaagggaaagauagucaaaucagucgaaaugaaugccccuaauuaucacuaugaggaaugcuccuguuauccugauucuagugaaaucacaugugugugcagggauaacuggcauggcucgaaucgaccgugggugucuuucaaccagaaucuggaauaucggauaggauacauaugcagugggauuuucggagacaauccacgcccuaaugauaagacaggcaguugugguccaguaucgucuaauggagcaaauggaguaaaaggauuuucauucaaauacggcaaugguguuuggauagggagaacuaaaagcauuaguucaagaaacgguuuugagaugauuugggauccgaacggauggacugggacagacaauaacuucucaauaaagcaagauaucguaggaacaaaugaguggucaggauauagcgggaguuuuguucagcauccagaacuaacagggcuggauuguauaagaccuugcuucuggguugaacuaaucagagggcgacccaaagagaacacaaucuggacuagcgggagcagcauauccuuuugugguguaaacagugacacuguggguuggucuuggccagacggugcugaguugccauuuaccauugacaaguaa

SEQ ID NO: 50020 - RNA, 1410 nt, Artificial Sequence; identical to SEQ ID NO: 48947
  derived and/or modified CDS sequence (wt) from neuraminidase__InfluenzaA__ADB90363

SEQ ID NO: 50021 - RNA, 1410 nt, Artificial Sequence; identical to SEQ ID NO: 49927
  derived and/or modified CDS sequence (wt) from neuraminidase__InfluenzaA__ADB90373

SEQ ID NO: 50022 - RNA, 1410 nt, Artificial Sequence
  derived and/or modified CDS sequence (wt) from neuraminidase__InfluenzaA__ADB98137
augaauccaaaccaaaagauaauaaccauugguucggucuguaugacgauuggaauggcuaacuuaauauuacaaauuggaaacauaaucucaauauggauuagccacucaauucaacuugggaaucaaaaucagauugaaacaugcaaucaaagcgucauuacuuaugaaaacaacacuuggguaaaucagacauauguuaacaucagcaacaccaacuuugcugcuggacagucagugguuuccgugaaauuagcgggcaauuccucucucugcccuguuaguggaugggcuauauacaguaaagacaacaguauaagaaucgguuccaagggggauguguuugucauaagggaaccauucauaucaugcucccccuuggaaugcagaaccuucuucuugacucaaggggccuugcuaaaugacaaacauuccaauggaaccauuaaagacaggagcccauaucgaacccuaaugagcuguccuauuggugaaguucccucuccauacaacucaagauuugagucagucgcuuggucagcaagugcuugucaugauggcaucaauuggcuaacaauuggaauuucuggcccagacaauggggcaguggcuguguuaaaguacaacggcauaauaacagacacuaucaagaguuggagaaacaauauauugagaacacaagagucugaaugugcauguguaaaugguucuugcuuuacuguaaugaccgauggaccaagugauggacaggccucauacaagaucuucagaauagaaaagggaaagauagucaaaucagucgaaaugaaugccccuaauuaucacuaugaggaaugcuccuguuauccugauucuagugaaaucacaugugugugcagggauaacuggcauggcucgaaucgaccgugggugucuuucaaccagaaucuggaauaucagauaggauacauaugcagugggauuuucggagacaauccacgcccuaaugauaagacaggcaguugugguccaguaucgucuaauggagcaaauggaguaaaaggauuuucauucaaauacggcaaugguguuuggauagggagaacuaaaagcauuaguucaagaaacgguuuugagaugauuugggauccgaacggauggacugggacagacaauaacuucucaauaaagcaagauaucguaggaauaaaugaguggucaggauauagcgggaguuuuguucagcauccagaacuaacagggcuggauuguauaagaccuugcuucuggguugaacuaaucagagggcgacccaaagagaacacaaucuggacuagcgggagcagcauauccuuuugugguguaaacagugacacuguggguuggucuuggccagacggugcugaguugccauuuaccauugacaaguaa

SEQ ID NO: 50023 - RNA, 1410 nt, Artificial Sequence
  derived and/or modified CDS sequence (wt) from neuraminidase__InfluenzaA__ADB98138
augaauccaaaccaaaagauaauaaccauugguucggucuguaugacgauuggaauggcuaacuuaauauuacaaauuggaaacauaaucucaauauggauuagccacucaauucaacuugggaaucaaaaucagauugaaacaugcaaucaaagcgucauuacuuaugaaaacaacacuuggguaaaucagacauauguuaacaucagcaacaccaacuuugcugcuggacagucagugguuuccgugaaauuagcgggcaauuccucucucugcccuguuaguggaugggcuauauacaguaaagacaacaguauaagaaucgguuccaagggggauguguuugucauaagggaaccauucauaucaugcucccccuuggaaugcagaaccuucuucuugacucaaggggccuugcuaaaugacaaacauuccaauggaaccauuaaagacaggagcccauaucgaacccuaaugagcuguccuauuggugaaguucccucuccauacaacucaagauuugagucagucgcuuggucagcaagugcuugucaugauggcaucaauuggcuaacaauuggaauuucuggcccagacaauggggcaguggcuguguuaaaguacaacggcauaauaacagacacuaucaagaguuggagaaacaauauauugagaacacaagagucugaaugugcauguguaaaugguucuugcuuuacuguaaugaccgauggaccaagugauggacaggccucauacaagaucuucagaauagaaaagggaaagauagucaaaucagucgaaaugaaugccccuaauuauuacuaugaggaaugcuccuguuauccugauucuagugaaaucacaugugugugcagggauaacuggcauggcucgaaucgaccgugggugucuuucaaccagaaucuggaauaucagauaggauacauaugcagugggauuuucggagacaauccacgcccuaaugauaagacaggcaguugugguccaguaucgucuaauggagcaaauggaguaaaaggauuuucauucaaauacggcaaugguguuuggauagggagaacuaaaagcauuaguucaagaaacgguuuugagaugauuugggauccgaacggauggacugggacagacaauaacuucucaauaaagcaagauaucguaggaauaaaugaguggucaggauauagcgggaguuuuguucagcauccagaacuaacagggcuggauuguauaagaccuugcuucuggguugaacuaaucagagggcgacccaaagagaacacaaucuggacuagcgggagcagcauauccuuuugugguguaaacagugacacuguggguuggucuuggccagacggugcugaguugccauuuaccauugacaaguaa

SEQ ID NO: 50024 - RNA, 1410 nt, Artificial Sequence; identical to SEQ ID NO: 49794
  derived and/or modified CDS sequence (wt) from neuraminidase__InfluenzaA__ADB98139

SEQ ID NO: 50025 - RNA, 1410 nt, Artificial Sequence
  derived and/or modified CDS sequence (wt) from neuraminidase__InfluenzaA__ADB98140
augaauccaaaccaaaagauaauaaccauugguucggucuguaugacaauuggaauggcuaacuuaauauuacaaauuggaaacauaaucucaauauggauuagccacucaauucaacuugggaaucaaaaucagauugaaacaugcaaucaaagcgucauuacuuaugaaaacaacacuuggguaaaucagacauauguuaacaucagcaacaccaacuuugcugcuggacagucagugguuuccgugaaauuagcgggcaauuccucucucugcccuguuaguggaugggcuauauacaguaaagacaacaguauaagaaucgguuccaagggggauguguuugucauaagggaaccauucauaucaugcucccccuuggaaugcagaaccuucuucuugacucaaggggccuugcuaaaugacaaacauuccaauggaaccauuaaagacaggagcccauaucgaacccuaaugagcuguccuauuggugaaguucccucuccauacaacucaagauuugagucagucgcuuggucagcaagugcuugucaugauggcaucaauuggcuaacaauuggaauuucuggcccagacaauggggcaguggcuguguuaaaguacaacggcauaauaacagacacuaucaagaguuggagaaacaauauauugagaacacaagagucugaaugugcauguguaaaugguucuugcuuuacuguaaugaccgauggaccaagugauggacaggccucauacaagaucuucagaauagaaaagggaaagauagucaaaucagucgaaaugaaugccccuaauuauuacuaugaggaaugcuccuguuauccugauucuagugaaaucacaugugugugcagggauaacuggcauggcucgaaucgaccgugggugucuuucaaccagaaucuggaauaucagauaggauacauaugcagugggauuuucggagacaauccacgcccuaaugauaagacaggcaguugugguccaguaucgucuaauggagcaaauggaguaaaaggauuuucauucaaauacggcaaugguguuuggauagggagaacuaaaagcauuaguucaagaaacgguuuugagaugauuugggauccgaacggauggacugggacagacaauaacuucucaauaaagcaagauaucguaggaauaaaugaauggucaggauauagcgggaguuuuguucagcauccagaacuaacagggcuggauuguauaagaccuugcuucuggguugaacuaaucagagggcgacccaaagagaacacaaucuggacuagcgggagcagcauauccuuuugugguguaaacagugacacuguggguuggucuuggccagacggugcugaguugccauuuaccauugacaaguaa

SEQ ID NO: 50026 - RNA, 1410 nt, Artificial Sequence; identical to SEQ ID NO: 50025
  derived and/or modified CDS sequence (wt) from neuraminidase__InfluenzaA__ADB98141

SEQ ID NO: 50027 - RNA, 1410 nt, Artificial Sequence
  derived and/or modified CDS sequence (wt) from neuraminidase__InfluenzaA__ADC32391
augaauccaaaccaaaagauaauaaccauugguucggucuguaugacaauuggaauggcuaacuuaauauuacaaauuggaaacauaaucucaauauggauuagccacucaauucaacuugggaaucaaaaucagauugaaacaugcaaucaaagcgucauuacuuaugaaaacaacacuuggguaaaucagacauauguuaacaucagcaacaccaacuuugcugcuggacagucagugguuuccgugaaauuagcgggcaauuccucucucugcccuguuaguggaugggcuauauacaguaaagacaacaguauaagaaucgguuccaagggggauguguuugucauaagggaaccauucauaucaugcucccccuuggaaugcagaaccuucuucuugacucaaggggccuugcuaaaugacaaacauuccaauggaaccauuaaagacaggagcccauaucgaacccuaaugagcuguccuauuggugaaguucccucuccauacaacucaagauuugagucagucgcuuggucagcaagugcuugucaugauggcaucaauuggcuaacaauuggaauuucuggcccagacaauggggcaguggcuguguuaaaguacaacggcauaauaacagacacuaucaagaguuggagaaacaauauauugagaacacaagagucugaaugugcauguguaaaugguucuugcuuuacugugaugaccgauggaccaagugauggacaggccucauacaagaucuucagaauagaaaagggaaagauagucaaaucagucgaaaugaaugccccuaauuaucacuaugaggaaugcuccuguuauccugauucuagugaaaucacauguguaugcagggauaacuggcauggcucgaaucgaccgugggugucuuucaaccagaaucuggaauaucagauaggauacauaugcagugggauuuucggagacaauccacgcccuaaugauaagacaggcaguugugguccaguaucgucuaauggagcaaauggaguaaaaggauuuucauucaaauacggcaaugguguuuggauagggagaacuaaaagcauuaguucaagaaacgguuuugagaugauuugggauccgaacggauggacugggacagacaauaacuucucaauaaagcaagauaucguaggaauaaaugaguggucaggauauagcgggaguuuuguucagcauccagaacuaacagggcuggauuguauaagaccuugcuucuggguugaacuaaucagagggcgacccaaagagaacacaaucuggacuagcgggagcagcauauccuuuugugguguaaacagugacacuguggguuggucuuggccagacggugcugaguugccauuuaccauugacaaguaa

SEQ ID NO: 50028 - RNA, 1410 nt, Artificial Sequence; identical to SEQ ID NO: 49215
  derived and/or modified CDS sequence (wt) from neuraminidase__InfluenzaA__ADC32392

SEQ ID NO: 50029 - RNA, 1410 nt, Artificial Sequence; identical to SEQ ID NO: 48814
  derived and/or modified CDS sequence (wt) from neuraminidase__InfluenzaA__ADC32393

SEQ ID NO: 50030 - RNA, 1410 nt, Artificial Sequence; identical to SEQ ID NO: 48814
  derived and/or modified CDS sequence (wt) from neuraminidase__InfluenzaA__ADC32394

SEQ ID NO: 50031 - RNA, 1410 nt, Artificial Sequence; identical to SEQ ID NO: 48814
  derived and/or modified CDS sequence (wt) from neuraminidase__InfluenzaA__ADC32395

SEQ ID NO: 50032 - RNA, 1410 nt, Artificial Sequence; identical to SEQ ID NO: 48814
  derived and/or modified CDS sequence (wt) from neuraminidase__InfluenzaA__ADC32396

SEQ ID NO: 50033 - RNA, 1410 nt, Artificial Sequence; identical to SEQ ID NO: 48814
  derived and/or modified CDS sequence (wt) from neuraminidase__InfluenzaA__ADC32397

SEQ ID NO: 50034 - RNA, 1410 nt, Artificial Sequence; identical to SEQ ID NO: 48814
  derived and/or modified CDS sequence (wt) from neuraminidase__InfluenzaA__ADC32398

SEQ ID NO: 50035 - RNA, 1410 nt, Artificial Sequence
  derived and/or modified CDS sequence (wt) from neuraminidase__InfluenzaA__ADC32399
augaauccaaaccaaaagauaauaaccauugguucggucuguaugacaauuggaauggcuaacuuaauauuacaaauuggaaacauaaucucaauauggauuagccacucaauucaacuugggaaucaaaaucagauugaaacaugcaaucaaagcgucauuacuuaugaaaacaacacuuggguaaaucagacauauguuaacaucagcaacaccaacuuugcugcuggacagucagugguuuccgugaaauuagcgggcaauuccucucucugcccuguuaguggaugggcuauauacaguaaagacaacaguauaagaaucgguuccaagggggauguguuuguaauaagggaaccauucauaucaugcucccccuuggaaugcagaaccuucuucuugacucaaggggccuugcuaaaugacaaacauuccaauggaaccauuaaagacaggagcccauaucgaacccuaaugagcuguccuauuggugaaguucccucuccauacaacucaagauuugagucagucgcuuggucagcaagugcuugucaugauggcaucaauuggcuaacaauuggaauuucuggcccagacaauggggccguggcuguguuaaaguacaacggcauaauaacagacacuaucaagaguuggagaaacaauauauugagaacacaagagucugaaugugcauguguaaaugguucuugcuuuacuguaaugaccgauggaccaagugauggacaggccucauacaagaucuucagaauagaaaagggaaagauagucaaaucagucgaaaugaaugccccuaauuaucacuaugaggaaugcuccuguuauccugauucuagugaaaucacauguguaugcagggauaacuggcauggcucgaaucgaccgugggugucuuucaaccagaaucuggaauaucagauaggauacauaugcagugggauuuucggagacaauccacgcccuaaugauaagacaggcaguugugguccaguaucgucuaauggagcaaauggaguaaaaggauuuucauucaaauacggcaaugguguuuggauagggagaacuaaaagcauuaguucaagaaacgguuuugagaugauuugggauccgaacggauggacugggacagacaauaacuucucaauaaagcaagauaucguaggaauaaaugaguggucaggauauagcgggaguuuuguucagcauccagaacuaacagggcuggauuguauaagaccuugcuucuggguugaacuaaucagagggcgacccaaagagaacacaaucuggacuagcgggagcagcauauccuuuugugguguaaacagugacacuguggguuggucuuggccagacggugcugaguugccauuuaccauugacaaguaa

SEQ ID NO: 50036 - RNA, 1410 nt, Artificial Sequence; identical to SEQ ID NO: 48814
  derived and/or modified CDS sequence (wt) from neuraminidase__InfluenzaA__ADC32400

SEQ ID NO: 50037 - RNA, 1410 nt, Artificial Sequence
  derived and/or modified CDS sequence (wt) from neuraminidase__InfluenzaA__ADC32401
augaauccaaaccaaaagauaauaaccauugguucggucuguaugacaauuggaauggcuaacuuaauauuacaaauuggaaacauaaucucaauauggauuagccacucaauucaacuugggaaucaaaaucagauugaaacaugcaaucaaagcgucauuacuuaugaaaacaacacuuggguaaaucagacauauguuaacaucagcaacaccaacuuugcugcuggacagucagugguuuccgugaaauuagcgggcaauuccucucucugcccuguuaguggaugggcuauauacaguaaagacaacaguauaagaaucgguuccaagggggauguguuugucauaagggaaccauucauaucaugcucccccuuggaaugcagaaccuucuucuugacucaaggggccuugcuaaaugacaaacauuccaauggaaccauuaaagacaggagcccauaucgaacccuaaugagcuguccuauuggugaaguucccucuccauacaacucaagauuugagucagucgcuuggucagcaagugcuugucaugauggcaucaauuggcuaacaauuggaauuucuggaccagacaauggggcaguggcuguguuaaaguacaacggcauaauaacagacacuaucaagaguuggagaaacaauauauugagaacacaagagucugaaugugcauguguaaaugguucuugcuuuacuguaaugaccgauggaccaagugauggacaggccucauacaagaucuucagaauagaaaagggaaagauagucaaaucagucgaaaugaaugccccuaauuaucacuaugaggaaugcuccuguuauccugauucuagugaaaucacaugugugugcagggauaacuggcauggcucgaaucgaccguggguaucuuucaaccagaaucuggaauaucagauaggauacauaugcagugggauuuucggagacaauccacgcccuaaugauaagacaggcaguugugguccaguaucgucuaauggagcaaauggaguaaaaggauuuucauucaaauacggcaaugguguuuggauagggagaacuaaaagcauuaguucaagaaacgguuuugagaugauuugggauccgaacggauggacugggacagacaauaacuucucaauaaagcaagauaucguaggaauaaaugaguggucaggauauagcgggaguuuuguucagcauccagaacuaacagggcuggauuguauaagaccuugcuucuggguugaacuaaucagagggcgacccaaagagaacacaaucuggacuagcgggagcagcauauccuuuugugguguaaacagugacacuguggguuggucuuggccggacggugcugaguugccauuuaccauugacaaguaa

SEQ ID NO: 50038 - RNA, 1410 nt, Artificial Sequence
  derived and/or modified CDS sequence (wt) from neuraminidase__InfluenzaA__ADC32404
augaauccaaaccaaaagauaauaaccauugguucggucuguaugacaauuggaauggcuaacuuaauauuacaaauuggaaacauaaucucaauauggauuagccacucaauucaacuugggaaucaaaaucagauugaaacaugcaaucaaagcgucauuacuuaugaaaacaacacuuggguaaaucagacauauguuaacaucagcaacaccaacuuugcugcuggacagucagugguuuccgugaaauuagcgggcaauuccucucucugcccuguuaguggaugggcuauauacaguaaagacaacaguauaagaaucgguuccaagggggauguguuugucauaagggaaccauucauaucaugcucccccuuggaaugcagaaccuucuucuugacucaaggggccuugcuaaaugacaaacauuccaauggaaccauuaaagacaggagcccauaucgaacccuaaugagcuguccuauuggugaaguucccucuccauacaacucaagauuugagucagucgcuuggucagcaagugcuugucaugauggcaucaauuggcuaacaauuggaauuucuggcccagacaauggggcaguggcuguguuaaaguacaacggcauaauaacagacacuaucaagaguuggagaaacaauauauugagaacacaagagucugaaugugcauguguaaaugguucuugcuuuacuguaaugaccgauggaccaagugauggacaggccucauacaagaucuucagaauagaaaagggaaagauagucaaaucagucgaaaugaaugccccuaauuaucacuaugaggaaugcuccuguuauccugauucuagugaaaucacaugugugugcagggauaacuggcauggcucgaaucgaccgugggugucuuucaaccagaaucuggaauaucagauaggauacauaugcagugggauuuucggagacaauccacgcccuaaugauaagaaaggcaguugugguccaguaucgucuaauggagcaaauggaguaaaaggauuuucauucaaauacggcaaugguguuuggauagggagaacuaaaagcauuaguucaagaaacgguuuugagaugauuugggauccgaacggauggacugggacagacaauaacuucucaauaaagcaagauaucguaggaauaaaugaauggucaggauauagcgggaguuuuguucagcauccagaacuaacagggcuggauuguauaagaccuugcuucuggguugaacuaaucagagggcgacccaaagagaacacaaucuggacuagcgggagcagcauauccuuuugugguguaaacagugacacuguggguuggucuuggccagacggugcugaguugccauuuaccauugacaaguaa

SEQ ID NO: 50039 - RNA, 1410 nt, Artificial Sequence
  derived and/or modified CDS sequence (wt) from neuraminidase__InfluenzaA__ADC32407
augaauccaaagcaaaagauaauaaccauugguucggucuguaugacaauuggaauggcuaacuuaauauuacaaauuggaaacauaaucucaauauggauuagccacucaauucaacuugggaaucaaaaucagauugaaacaugcaaucaaagcgucauuacuuaugaaaacaacacuuggguaaaucagacauauguuaacaucagcaacaccaacuuugcugcuggacagucagugguuuccgugaaauuagcgggcaauuccucucucugcccuguuaguggaugggcuauauacaguaaagacaacaguauaagaaucgguuccaagggggauguguuugucauaagggaaccauucauaucaugcucccccuuggaaugcagaaccuucuucuugacucaaggggccuugcuaaaugacaaacauuccaauggaaccauuaaagacaggagcccauaucgaacccuaaugagcuguccuauuggugaaguucccucuccauacaacucaagauuugagucagucgcuuggucagcaagugcuugucaugauggcaucaauuggcuaacaauuggaauuucuggcccagacaauggggcaguggcuguguuaaaguacaacggcauaauaacagacacuaucaagaguuggagaaacaauauauugagaacacaagagucugaaugugcauguguaaaugguucuugcuuuacuguaaugaccgauggaccaagugauggacaggccucauacaagaucuucagaauagaaaagggaaagauagucaaaucagucgaaaugaaugccccuaauuaucauuaugaggaaugcuccuguuauccugauucuagugaaaucacaugugugugcagggauaacuggcauggcucgaaucgaccgugggugucuuucaaccagaaucuggaauaucagauaggauacauaugcagugggauuuucggagacaauccacgcccuaaugauaagaaaggcaguugugguccaguaucgucuaauggagcaaauggaguaaaaggauuuucauucaaauacggcaaugguguuuggauagggagaacuaaaagcauuaguucaagaaacgguuuugagaugaucugggauccgaacggauggacugggacagacaauaacuucucaauaaagcaagauaucguaggaauaaaugaauggucaggauauagcgggaguuuuguucagcauccagaacuaacagggcuggauuguauaagaccuugcuucuggguugaacuaaucagagggcgacccaaagagaacacaaucuggacuagcgggagcagcauauccuuuugugguguaaacagugacacuguggguuggucuuggccagacggugcugaguugccauuuaccauugacaaguaa

SEQ ID NO: 50040 - RNA, 1410 nt, Artificial Sequence
  derived and/or modified CDS sequence (wt) from neuraminidase__InfluenzaA__ADC34942
augaauccaaaucaaaagauaauaacgauuggcucuguuucucucaccauuuccacaauaugcuucuucaugcaaauugccaucuuaauaacuacuguaacauugcauuucaagcaauaugaauucaacccccccccaaacaaccaagugaugcugugugaaccaacaauaauagaaaggaacauaacagagauaguguaucugaccaacaccaccauagagaaggaaauaugccccaaacuagcagaauacagagaguggucaaagccgcaauguaauauuacaggauuugcaccuuuuucuaaggacaauucgauuaggcuuuccgcugguggggacaucugggugacaagagaaccuuaugugucaugcgauccugacaaguguuaucaauuugcccuuggacagggaacaacacuaaacaacgugcauucaaaugacauaguacgugauaggaccccuuaucggacccuauugaugaaugaguuagguguuccauuucaucuggggaccaagcaagugugcauagcaugguccagcucaaguugucacgauggaaaagcauggcugcauguuuguguaacgggggaugauaaaaaugcaacugcuagcuucauuuacaaugggaggcuuguagauaguauuguuucaugguccaaagaaauccucaggacccaggagucagaaugcguuuguaucaauggaacuuguacaguaguaaugacugaugggagugcuucaggaaaagcugauacuaaaauacuauucauugaggaggggaaaaucguucauacuagcacauugucaggaagugcucagcaugucgaggagugcuccugcuauccucgauauccuggugucagaugugucugcagagacaacuggagaggcuccaauaggcccauaguagauauaaacaugaaggauuauagcauuguuuccaguuaugugugcucaggacuuguuggagacacacccagaaaaaacgacagcuccagcaguggccauugcuugaauccuaacaaugaagaagguggucauggagugaaaggcugggccuuugaugauggaaaugacguguggaugggaagaacgaucagcgagaaguuacgcucaggauaugaaaccuucaaagucauugaaggcugguccaacccuaauuccaaauugcagauaaauaggcaagucauaguugacagagguaauagguccgguuauucugguauuuucucuguugaaggcaaaagcugcaucaaucggugcuuuuauguggaguugauaaggggaagaaaagaggaaacugaagucuuguggaccucaaacaguauuguuguguuuuguggcaccucagguacauauggaacaggcucauggccugauggggcggacaucaaucucaugccuauauaa

SEQ ID NO: 50041 - RNA, 1410 nt, Artificial Sequence
  derived and/or modified CDS sequence (wt) from neuraminidase__InfluenzaA__ADC39000
augaauccaaaccaaaagauaauaaccauugguucggucuguaugacaauuggaauggcuaacuuaauauuacaaauuggaaacauaaucucaauauggauuagccacucaauucaacuugggaaucaaaaucagauugaaacaugcaaucaaagcgucauuacuuaugaaaacaacacuuggguaaaucagacauauguuaacaucagcaacaccaacuuugcugcuggacagucagugguuuccgugaaauuagcgggcaauuccucucucugcccuguuaguggaugggcuauauacaguaaagacaacaguauaagaaucgguuccaagggggauguguuugucauaagggaaccauucauaucaugcucccccuuggaaugcagaaccuucuucuugacucaaggggccuugcuaaaugacaaacauuccaauggaaccauuaaagacaggagcccauaucgaacccuaaugagcuguccuauuggugaaguucccucuccauacaacucaagauuugagucagucgcuuggucagcaagugcuugucaugauggcaucaauuggcuaacaauuggaauuucuggcccagacaauggggcaguggcuguguuaaaguacaacggcauaauaacagacacuaucaagaguuggagaaacaauauauugagaacacaagagucugaaugugcauguguaaaugguucuugcuuuacuguaaugaccgauggaccaagugauggacaggccucauacaagaucuucagaauagaaaagggaaaaauagucaaaucagucgaaaugaaugccccuaauuaucacuaugaggaaugcuccuguuauccugauucuagugaaaucacaugugugugcagggauaacuggcauggcucgaaucgaccgugggugucuuucaaccagaaucuggaauaucagauaggauacauaugcagugggauuuucggagacaauccacgcccuaaugauaagacaggcaguugugguccaguaucgucuaauggagcaaauggaguaaaaggauuuucauucaaauacggcaaugguguuuggauagggagaacuaaaagcauuaguucaagaaacgguuuugagaugauuugggauccgaacggauggacugggacagacaauaacuucucaauaaagcaagauaucguaggaauaaaugaguggucaggauauagcgggaguuuuguucagcauccagaacuaacagggcuggauuguauaagaccuugcuucuggguugaacuaaucagagggcgacccaaagagaacacaaucuggacuagcgggagcagcauauccuuuugugguguaaacagugacaauguggguuggucuuggccagacggugcugaguugccauuuaccauugacaaguaa

SEQ ID NO: 50042 - RNA, 1410 nt, Artificial Sequence; identical to SEQ ID NO: 48947
  derived and/or modified CDS sequence (wt) from neuraminidase__InfluenzaA__ADC39010

SEQ ID NO: 50043 - RNA, 1413 nt, Artificial Sequence
  derived and/or modified CDS sequence (wt) from neuraminidase__InfluenzaA__ADC45606
augaauccaaaucaaaagauaauaaccauuggaucaaucaguauagcaaucggaauaauuagucuaauguugcaaauaggaaauauuauuucaauaugggcuagucacucaauccaaacuggaagucaaaacaauacuggaauaugcaaccaaagaaucaucacauaugaaaacagcaccugggugaaucacacauauguuaauauuaacaacacuaauguuguugcuggagaggacaaaacuucagugacauuggccggcaauucaucucuuuguucuaucaguggaugggcuauauacacaaaagacaacagcauaagaauuggcuccaaaggagauguuuuugucauaagagaaccuuucauaucauguucucacuuggaaugcagaaccuuuuuucugacccaaggcgcucuauugaaugacaaacauucaaaugggaccguaaaggacagaaguccuuauagggccuuaaugagcuguccucuaggugaagcuccguccccauacaauucaaaguucgaaucaguugcauggucagcaagcgcaugccaugauggcaugggcugguuaacaauuggaauuucugguccagacaauggagcuguggcuguacuaaaauacaacggaauaauaacuggaaccauaaaaaguuggaaaaagcaaauauuaagaacacaagagucugaaugugucuguaugaacgggucauguuuuaccauaaugaccgauggcccgaguaauaaggccgccucguacaaaauuuucaagaucgaaaaggggaagguuacuaaaucaauagaguugaaugcacccaauuuucauuaugaggaauguuccuguuacccagacacuggcauagugauguguguaugcagggacaacuggcaugguucaaaucgaccuugggugucuuuuaaucaaaacuuggauuaucaaauaggauacaucugcaguggaguguucggugacaauccgcgucccgaagauggagagggcagcugcaauccagugacuguugauggagcaaacggaguaaaaggguuuucauacaaauaugauaaugguguuuggauaggaaggaccaaaaguaacagacuuagaaagggguuugagaugaucugggauccuaauggauggacaaauaccgacagugauuucucagugaaacaggauguuguagcaauaacugauuggucaggguacagcggaaguuucguccaacauccugaguuaacaggauuggacuguauaagaccuugcuucuggguugaguuagucagagggcugccuagagaaaauacaacaaucuggacuagugggagcagcauuucuuuuuguggcguuaauagugauacugcaaacuggucuuggccagacggugcugaguugccguucaccauugacaaguag

SEQ ID NO: 50044 - RNA, 1413 nt, Artificial Sequence
  derived and/or modified CDS sequence (wt) from neuraminidase__InfluenzaA__ADC45628
augaauccaaaucaaaaaauaauaaccauuggaucaaucaguauagcaaucggaauaauuagucuaauguugcaaaugggaaauauuauuucaauaugggcuagucacucaauucaaacuggaagucaaaaccacacuggaauaugcaaccaaagaaucaucacauaugaaaacagcaccugggugaaucacacauauguuaauauuaacaacacuaauguuguugcuggaaaggacaaaacuccagugacauuggucggcaacucaucucuuuguucuaucaguggaugggcuauauacacaaaagacaacagcauaagaauuggcuccaaaggagauguuuuugucauaagagaaccuuucauaucauguucucacuuggaaugcaaaaccuuuuuucugacccaaggcgcucuauuaaaugacaaacauucaaaugggaccguaaaggacagaaguccuuauagggccuuaaugagcuguccucuaggugaagcuccguccccauacaauucaaaguucgaaucaguugcauggucagcaagcgcaugccaugauggcauaggcugguuaacaaucggaauuucugguccagacaauggagcuguggcuguacuaaaauacaaaggaauaauaacuggaaccauaaaaaguuggaaaaagcaaauauuaagaacacaagagucugaaugugucuguaugaacgggucauguuucaccauaaugaccgaugguccgaguaauggggccgccucguacaaaauuuucaagaucgaaaaggggaagguuacuaaaucaauggaguugaaugcacccaauuuucauuaugaggaauguucuuguuacccagacacuggcacagugauguguguaugcagggacaacuggcaugguucaaaucgaccuugggugucuuuuaaucaaaacuuggauuaucaaauaggauacaucugcaguggaguguucggugacaauccgcgucccaaagauagagagggcagcugcaauccagugacuguugauggagcaaacggaguaaaaggguuuucauacaaauaugguaaugguguuuggauaggaaggaccaaaaguaacagaauuagaaagggguuugaaaugauuugggauccuaauggauggacaaauaccgacagugauuucucagugaaacaggauauuguagcaauaacugauuggucaggguacagcggaaguuucguccaacauccugaguuaacaggauuggacuguauaagaccuugcuucuggguugaguuagucagagggcugccuagagaaaauacaacaaucuggacuagugggagcagcauuucuuuuuguggcguuaauggugauauugcaaauuggucuuggccagacggugcugaguugccguucaccauugacaaguag

SEQ ID NO: 50045 - RNA, 1413 nt, Artificial Sequence
  derived and/or modified CDS sequence (wt) from neuraminidase__InfluenzaA__ADC45639
augaauccaaaucaaaaaauaauaaccauuggaucaaucaguauagcaaucggaauaauuagucuaauguugcaaauaggaaauauuauuucaauaugggcuagucacucaauucaaacuggaagucaaaaccacacuggaauaugcaaccaaagaaucaucacauaugaaaacagcaccugggugaaucacacauauguuaauauuaacaacacuaauguuguugcuggaaaggacaaaacuccagugacauuggucggcaacucaucucuuuguucuaucaguggaugggcuauauacacaaaagacaacagcauaagaauuggcuccaaaggagauguuuuugucauaagagaaccuuucauaucauguucucacuuggaaugcaaaaccuuuuuucugacccaaggcgcucuauuaaaugacaaacauucaaaugggaccguaaaggacagaaguccuuauagggccuuaaugagcuguccucuaggugaagcuccguccccauacaauucaaaguucgaaucaguugcauggucagcaagcgcaugccaugauggcauaggcugguuaacaaucggaguuucugguccagacaauggagcuguggcuguacuaaaauacaaaggaauaauaacuggaaccauaaaaaguuggaaaaagcaaauauuaagaacacaagagucugaaugugucuguaugaacgggucauguuucaccauaaugaccgaugguccgaguaauggggccgccucguacaaaauuuucaagaucgaaaaggggaagguuacuaaaucaauggaguugaaugcacccaauuuucauuaugaggaauguucuuguuacccagacacuggcacagugauguguguaugcagggacaacuggcaugguucaaaucgaccuugggugucuuuuaaucaaaacuuggauuaucaaauaggauacaucugcaguggaguguucggugacaauccgcgucccaaagauagagagggcagcugcaauccagugacuguugauggagcaaacggaguaaaaggguuuucauacaaauaugguaaugguguuuggauaggaaggaccaaaaguaacagaauuagaaagggguuugagaugauuugggauccuaauggauggacaaauaccgacagugauuucucagugaaacaggauauuguagcaauaacugauuggucaggguacagcggaaguuucguccaacauccugaguuaacaggauuggacuguauaagaccuugcuucuggguugaguuagucagagggcugccuagagaaaauacaacaaucuggacuagugggagcagcauuucuuuuuguggcguuaauggugauauugcaaauuggucuuggccagacggugcugaguugccguucaccauugacaaguag

SEQ ID NO: 50046 - RNA, 1413 nt, Artificial Sequence
  derived and/or modified CDS sequence (wt) from neuraminidase__InfluenzaA__ADC45650
augaauccaaaucaaaagauaauaaccauuggaucaaucaguauagcaaucggaauaauuagucuaauguugcaaauaggaaauauuauuucaauaugggcuagucacucaauccaaacuggaagucaaaacaacacuggaauaugcaaccaaagaaucaucacauaugaaaacagcaccugggugaaucacacauauguuaauauuaacaacacuaauguuguugcuggagaggacaaaacuucagugacauuggcuggcaauucaucucuuuguucuaucaguggaugggcuauauacacaaaagacaacagcauaagaauuggcuccaaaggagauguuuuugucauaagagaaccuuucauaucauguucucacuuggaaugcagaaccuuuuuucugacccaaggcgcucuauuaaaugacaaacauucaaaugggaccguaaaggacagaaguccuuauagggccuuaaugagcuguccucuaggugaagcuccguccccauacaauucaaaguucgaaucaguugcauggucagcaagcgcaugccaugauggcaugggcugguuaacaaucggaauuucugguccagacaauggagcuguggcuguacuaaaauacaacggaauaauaacuggaaccauaaaaaguuggaaaaagcaaauauuaagaacacaagagucugaaugugucuguaugaacgggucauguuucaccauaaugaccgauggcccgaguaauaaggccgccucguacaaaauuuucaagaucgaaaaggggaagguuacuaaaucaauagaguugaaugcacccaauuuucauuaugaggaauguuccuguuacccagacacuggcauagugauguguguaugcagggacaacuggcaugguucaaaucgaccuugggugucuuuuaaucaaaacuuggauuaucaaauaggauacaucugcaguggaguguucggugacaauccgcgucccgaagauggagagggcagcugcaauccagugacuguugauggagcaaacggaguaaaaggguuuucauacaaauaugauaaugguguuuggauaggaaggaccaaaaguaacagacuuagaaagggguuugagaugauuugggauccuaauggauggacaaauaccgacagugauuucucagugaaacaggauguuguagcaauaacugauuggucaggguacagcggaaguuucguccaacauccugaguuaacaggauuggacuguauaagaccuugcuucuggguugaguuagucagagggcugccuagagaaaauacaacaaucuggacuagugggagcagcauuucuuuuuguggcguuaauagugauacugcaaacuggucuuggccagacggugcugaguugccguucaccauugacaaguag

SEQ ID NO: 50047 - RNA, 1413 nt, Artificial Sequence
  derived and/or modified CDS sequence (wt) from neuraminidase__InfluenzaA__ADC45661
augaauccaaaucaaaagauaauaaccauuggaucaaucaguauagcaaucggaauaauuagucuaauguugcaaauaggaaauauuauuucaauaugggcuagucacucaauccaaacuggaagucaaaacaacacuggaauaugcaaccaaagaaucaucacauaugaaaacagcaccugggugaaucacacauauguuaauauuaacaacacuaauguuguugcuggagaggacaaaacuucagugacauuggccggcaauucaucucuuuguucuaucaguggaugggcuauauacacaaaagacaacagcauaagaauuggcuccaaaggagauguuuuugucauaagagaaccuuucauaucauguucucacuuggaaugcagaaccuuuuuucugacccaaggcgcucuauuaaaugacaaacauucaaaugggaccguaaaggacagaaguccuuauagggccuuaaugagcuguccucuaggugaagcuccguccccauacaauucaaaguucgaaucaguugcauggucagcaagcgcaugccaugauggcaugggcugguuaacaaucggaauuucugguccagacaauggagcuguggcuguacuaaaauacaacggaauaauaacuggaaccauaaaaaguuggaaaaagcaaauacuaagaacacaagagucugaaugugucuguaugaacgggucauguuucaccauaaugaccgauggcccgaguaauaaggccgccucguacaaaauuuucaagaucgaaaaggggaagguuacuaaaucaauagaguugaaugcacccaauuuucauuaugaggaauguuccuguuacccagacacuggcauagugauguguguaugcagggacaacuggcaugguucaaaucgaccuugggugucuuuuaaucaaaacuuggauuaucaaauaggauacaucugcaguggaguguuuggugacaauccgcgucccgaagauggagagggcagcugcaauccagugacuguugauggagcaaacggaguaaaaggguuuucauacaaauaugauaaugguguuuggauaggaaggaccaaaaguaacagacuuagaaagggguuugagaugauuugggauccuaauggauggacaaauaccgacagugauuucucagugaaacaggauguuguagcaauaacugauuggucaggguacagcggaaguuucguccaacauccugaguuaacaggauuggacuguauaagaccuugcuucuggguugaguuagucagagggcugccuagagaaaauacaacaaucuggacuagugggagcagcauuucuuuuuguggcguuaauagugauacugcaaacuggucuuggccagacggugcugaguugccguucaccauugacaaguag

SEQ ID NO: 50048 - RNA, 1413 nt, Artificial Sequence
  derived and/or modified CDS sequence (wt) from neuraminidase__InfluenzaA__ADC45683
augaauccaaaucaaaaaauaauaaccauuggaucaaucaguauagcaaucggaauaauuagucuaauguugcaaauaggaaauauuauuucaauaugggcuagucacucaauucaaacuggaagucaaaaccacacuggaauaugcaaccaaagaaucaucacauaugaaaacagcaccugggugaaucacacauauguuaauauuaacaacacuaauguuguugcuggagaggacaaaacuccagugacauuggucggcaacucaucucuuuguucuaucaguggaugggcuauauacacaaaagacaacagcauaagaauuggcuccaaaggagauguuuuugucauaagagaaccuuucauaucauguucucacuuggaaugcaaaaccuuuuuucugacccaaggcgcucuauuaaaugacaaacauucaaaugggaccguaaaggacagaaguccuuauagggccuuaaugagcuguccucuaggugaagcuccguccccauacaauucaaaguucgaaucaguugcauggucagcaagcgcaugccaugauggcauaggcugguuaacaaucggaauuucugguccagacaauggagcuguggcuguacuaaaauacaaaggaauaauaacuggaaccauaaaaaguuggaaaaagcaaauauuaagaacacaagagucugaaugugucuguaugaacgggucauguuucaccauaaugaccgaugguccgaguaauggggccgccucguacaaaauuuucaagaucgaaaaggggaagguuacuaaaucaauggaguugaaugcacccaauuuucauuaugaggaauguucuuguuacccagacacuggcacagugauguguguaugcagggacaacuggcaugguucaaaucgaccuuggguguccuuuaaucaaaacuuggauuaucaaauaggauacaucugcaguggaguguucggugacaauccgcgucccaaagauagagagggcagcugcaauccagugacuguugauggagcaaacggaguaaaaggguuuucauacaaauaugguaaugguguuuggauaggaaggaccaaaaguaacagaauuagaaagggguuugagaugauuugggauccuaauggauggacaaauaccgacagugauuucucagugaaacaggauauuguagcaauaacugauuggucaggguacagcggaaguuucguccaacauccugaguuaacaggauuggacuguauaagaccuugcuucuggguugaguuagucagagggcugccuagagaaaauacaacaaucuggacuagugggagcagcauuucuuuuuguggcguuaauggugauauugcaaauuggucuuggccagacggugcugaguugccguucaccauugacaaguag

SEQ ID NO: 50049 - RNA, 1413 nt, Artificial Sequence
  derived and/or modified CDS sequence (wt) from neuraminidase__InfluenzaA__ADC45705
augaauccaaaucaaaagauaauaaccauuggaucaaucaguauagcaaucggaauaauuagucuaauguugcaaauaggaaauauuauuucaauaugggcuagucacucaauccaaacuggaagucaaaacaacacuggaauaugcaaccaaagaaucaucacauaugaaaacagcaccugggugaaucacacauauguuaauauuaacaacacuaauguuguugcuggagaggacaaaacuucagugacauuggcuggcaauucaucucuuuguucuaucaguggaugggcuauauacacaaaagacaacagcauaagaauuggcuccaaaggagauguuuuugucauaagagaaccuuucauaucauguucucacuuggaaugcagaaccuuuuuucugacccaaggcgcucuauuaaaugacaaacauucaaaugggaccguaaagaacagaaguccuuauagggccuuaaugagcuguccucuaggugaagcuccguccccauacaauucaaaguucgaaucaguugcauggucagcaagcgcaugccaugauggcaugggcugguuaacaaucggaauuucugguccagacaauggagcuguggcuguacuaaaauacaacggaauaauaacuggaaccauaaaaaguuggaaaaagcaaauauuaagaacacaagagucugaaugugucuguaugaacgggucauguuucaccauaaugacugauggcccgaguaauaaggccgccucguacaaaauuuucaagaucgaaaaggggaagguuacuaaaucaauagaguugaaugcacccaauuuucauuaugaggaauguuccuguuacccagacacuggcauagugauguguguaugcagggacaacuggcaugguucaaaucgaccuugggugucuuuuaaucaaaacuuggauuaucaaauaggauacaucugcaguggaguguucggugacaauccgcgucccgaagauggagagggcagcugcaauccagugacuguugauggagcaaacggaguaaaaggguuuucauacaaauaugauaaugguguuuggauaggaaggaccaaaaguaacagacuuagaaagggguuugagaugauuugggauccuaauggauggacaaauaccgacagugauuucucagugaaacaggauguuguagcaauaacugauuggucaggguacagcggaaguuucguccaacauccugaguuaacaggauuggacuguauaagaccuugcuucuggguugaguuagucagagggcugccuagagaaaauacaacaaucuggacuagugggagcagcauuucuuuuuguggcguuaauagugauacugcaaacuggucuuggccagacggugcugaguugccguucaccauugacaaguag

SEQ ID NO: 50050 - RNA, 1413 nt, Artificial Sequence
  derived and/or modified CDS sequence (wt) from neuraminidase__InfluenzaA__ADC45716
augaauccaaaucaaaaaauaauaaccauuggaucaaucaguauagcaaucggaauaauuagucuaauguugcaaauaggaaauauuauuucaauaugggcuagucacucaauucaaacuggaagucaaaaccacacuggaauaugcaaccaaagaaucaucacauaugaaaacagcaccugggugaaucacacauauguuaauauuaacaacacuaauguuguugcuggaaaggacaaaacuccagugacauuggucggcaacucaucucuuuguucuaucaguggaugggcuauauacacaaaagacaacagcauaagaauuggcuccaaaggagauguuuuugucauaagagaaccuuucauaucauguucucacuuggaaugcaaaaccuuuuuucugacccaaggcgcucuauuaaaugacaaacauucaaaugggaccguaaaggacagaaguccuuauagggccuuaaugagcuguccucuaggugaagcuccguccccauacaauucaaaguucgaaucaguugcauggucagcaagcgcaugccaugauggcauaggcugguuaacaaucggaauuucugguccagacaauggagcuguggcuguacuaaaauacaaaggaauaauaacuggaaccauaaaaaguuggaaaaagcaaauauuaagaacacaagagucugaaugugucuguaugaacgggucauguuucaccauaaugaccgaugguccgaguaauggggccgccucguacaaaauuuucaagaucgaaaaggggaagguuacuaaaucaauggaguugaaugcacccaauuuucauuaugaggaauguucuuguuacccagacacuggcacagugauguguguaugcagggacaacuggcaugguucaaaucgaccuugggugucuuuuaaucaaaacuuggauuaucaaauaggauacaucugcaguggaguguucggugacaauccgcgucccaaagauagagagggcagcugcaauccagugacuguugauggagcaaacggaguagaaggguuuucauacaaauaugguaaugguguuuggauaggaaggaccaaaaguaacagaauuagaaagggguuugagaugauuugggauccuaauggauggacaaauaccgacagugauuucucagugaaacaggauauuguagcaauaacuaauuggucaggguacagcggaaguuucguccaacauccugaguuaacaggauuggacuguauaagaccuugcuucuggguugaguuagucagagggcugccuagagaaaauacaacaaucuggacuagugggagcagcauuucuuuuuguggcguuaauggugauauugcaaauugguccuggccagacggugcugaguugccguucaccauugacaaguag

SEQ ID NO: 50051 - RNA, 1413 nt, Artificial Sequence
  derived and/or modified CDS sequence (wt) from neuraminidase__InfluenzaA__ADC45738
augaauccaaaucaaaagauaauaaccauuggaucaaucaguauagcaaucggaauaauuagucuaauguugcaaauaggaaauauuauuucaauaugggcuagucacucaauccaaacuggaagucaaaacaacacuggaauaugcaaccaaagaaucaucacauaugaaaacagcaccugggugaaucacacauauguuaauauuaacaacacuaauguuguugcuggagaggacaaaacuucagugacauuggccggcaauucaucucuuuguucuaucaguggaugggcuauauacacaaaagacaacagcauaagaauuggcuccaaaggagauguuuuugucauaagagaaccuuucauaucauguucucacuuggaaugcagaaccuuuuuucugacccaaggcgcucuauuaaaugacaaacauucaaaugggaccguaaaggacagaaguccuuauagggccuuaaugagcuguccucuaggugaagcuccguccccauacaauucaaaguucgaaucaguugcauggucagcaagcgcaugccaugauggcaugggcugguuaacaaucggaauuucugguccagacaauggagcuguggcuguacuaaaauacaacggaauaauaacuggaaccauaaaaaguuggaaaaagcaaauacuaagaacacaagagucugaaugugucuguaugaacgggucauguuucaccauaaugaccgauggcccgaguaauaaggccgccucguacaaaauuuucaagaucgaaaaggggaagguuacuaaaucaauagaguugaaugcacccaauuuuuauuaugaggaauguuccuguuacccagacacuggcauagugauguguguaugcagggacaacuggcaugguucaaaucgaccuugggugucuuuuaaucaaaacuuggauuaucaaauaggauacaucugcaguggaguguuuggugacaauccgcgucccgaagauggagagggcagcugcaauccagugacuguugauggagcaaacggaguaaaaggguuuucauacaaauaugauaaugguguuuggauaggaaggaccaaaaguaacagacuuagaaagggguuugagaugauuugggauccuaauggauggacaaauaccgacagugauuucucagugaaacaggauguuguagcaauaacugauuggucaggguacagcggaaguuucguccaacauccugaguuaacaggauuggacuguauaagaccuugcuucuggguugaguuagucagagggcugccuagagaaaauacaacaaucuggacuagugggagcagcauuucuuuuuguggcguuaauagugacacugcaaacuggucuuggccagacggugcugaguugccguucaccauugacaaguag

SEQ ID NO: 50052 - RNA, 1413 nt, Artificial Sequence
  derived and/or modified CDS sequence (wt) from neuraminidase__InfluenzaA__ADC45760
augaauccaaaucaaaagauaauaaccauuggaucaaucaguauagcaaucggaauaauuagucuaauguugcaaauaggaaauauuauuucaauaugggcuagucacucaauccaaacugggagucaaaacaacacuggaauaugcaaccaaagaaucaucacauaugaaaacagcaccugggugaaucacacauauguuaauauuaacaacacuaauguuguugcuggagaggacaaaacaucagugacauuggccggcaauucaucucuuuguucuaucaguggaugggcuauauacacaaaagacaacagcauaagaauuggcuccaaaggagauguuuuugucauaagagaaccuuucauaucauguucucacuuggaaugcagaaccuuuuuucugacccaaggcgcucuauuaaaugacaaacauucaaaugggaccgcaaaggacagaaguccuuauagggccuuaaugagcuguccucuaggugaagcuccguccccauacaauucaaaguucgaaucaguugcauggucagcaagcgcaugccaugauggcaugggcugguuaacaaucggaauuucugguccagacaauggagcuguggcuguacuaaaauacaacggaauaauaacuggaaccauaaaaaguuggaaaaagcaaauauuaagaacacaagagucugaaugugucuguaugaacgggucauguuucaccauaaugaccgauggcccgaguaauaaggccgccucguacaaaauuuucaagaucgaaaaggggaagguuacuaaaucaauagaguugaaugcacccaauuuuuauuaugaggaaugcuccuguuacccagauacuggcauagugauguguguaugcagggacaacuggcaugguucaaaucgaccuugggugucuuuuaaucaaaacuuggauuaucaaauaggauacaucugcaguggaguguuuggugacaauccgcgucccgaagauggagagggcagcugcaauccagugacuguugauggagcaaacggaguaaaaggguuuucauacaaauaugguaaugguguuuggauagggaggaccaaaaguaacagacuuagaaagggguuugagaugauuugggauccuaauggauggacaaauaccgacagugauuucucagugaaacaggauguuguagcaauaacugauuggucaggguacagcggaaguuucguccaacauccugaguuaacaggauugggcuguauaagaccuugcuucuggguugaguuagucagagggcugccuagagaaaauacaacaaucuggacuagugggagcagcauuucuuuuuguggcguuaauagugauacugcaaacuggucuuggccagacggugcugaguugccguucaccauugacaaguag

SEQ ID NO: 50053 - RNA, 1413 nt, Artificial Sequence
  derived and/or modified CDS sequence (wt) from neuraminidase__InfluenzaA__ADC45771
augaauccaaaucaaaagauaauaaccauuggaucaaucaguauagcaaucggaauaauuagucuaauguugcaaauaggaaauauuauuucaauaugggcuagucacucaauccaaacugggagucaaaacaacacuggaauaugcaaccaaagaaucaucacauaugaaaacagcaccugggugaaucacacauauguuaauauuaacaacacuaauguuguugcuggagaggacaaaacaucagugacauuggccggcaauucaucucuuuguucuaucaguggaugggcuauauacacaaaagacaacagcauaagaauuggcuccaaaggagauguuuuugucauaagagaaccuuucauaucauguucucacuuggaaugcagaaccuuuuuucugacccaaggcgcucuauuaaaugacaaacauucaaaugggaccguaaaggacagaaguccuuauagggccuuaaugagcuguccucuaggugaagcuccguccccauacaauucaaaguucgaaucaguugcauggucagcaagcgcaugccaugauggcaugggcugguuaacaaucggaauuucugguccagacaauggagcuguggcuguacuaaaauacaacggaauaauaacuggaaccauaaaaaguuggaaaaagcaaauauuaagaacacaagagucugaaugugucuguaugaacgggucauguuucaccauaaugaccgauggcccgaguaauaaggccgccucguacaaaauuuucaagaucgaaaaggggaagguuacuaaaucaauagaguugaaugcacccaauuuuuauuaugaggaaugcuccuguuacccagauacuggcauagugauguguguaugcagggacaacuggcaugguucaaaucgaccuugggugucuuuuaaucaaaacuuggauuaucaaauaggauacaucugcaguggaguguuuggugacaauccgcgucccgaagauggagagggcagcugcaauccagugacuguugauggagcaaacggaguaaaaggguuuucauacaaauaugguaaugguguuuggauagggaggaccaaaaguaacagacuuagaaagggguuugagaugauuugggauccuaauggauggacaaauaccgacagugauuucucaaugaaacaggauguuguagcaauaacugauuggucaggguacagcggaaguuucguccaacauccugaguuaacaggauuggacuguauaagaccuugcuucuggguugaguuagucagagggcugccuagagaaaauacaacaaucuggacuagugggagcagcauuucuuuuuguggcguuaauagugauacugcaaacuggucuuggccagacggugcugaguugccguucaccauugacaaguag

SEQ ID NO: 50054 - RNA, 1413 nt, Artificial Sequence
  derived and/or modified CDS sequence (wt) from neuraminidase__InfluenzaA__ADC45782
augaauccaaaucaaaagauaauaaccauuggaucaaucaguauagcaaucggaauaauuagucuaauguugcaaauaggaaauauuauuucaauaugggcuagucacucaauccaaacugggagucaaaacaacacuggaauaugcaaccaaagaaucaucacauaugaaaacagcaccugggugaaucacacauauguuaauauuaacaacacuaauguuguugcuggagaggacaaaacaucagugacauuggccggcaauucaucucuuuguucuaucaguggaugggcuauauacacaaaagacaacagcauaagaauuggcuccaaaggagauguuuuugucauaagagaaccuuucauaucauguucucacuuggaaugcagaaccuuuuuucugacccaaggcgcucuauuaaaugacaaacauucaaauaggaccguaaaggacagaaguccuuauagggccuuaaugagcuguccucuaggugaagcuccguccccauacaauucaaaguucgaaucaguugcauggucagcaagcgcaugccaugauggcaugggcugguuaacaaucggaauuucugguccagacaauggagcuguggcuguacuaaaauacaacggaauaauaacuggaaccauaaaaaguuggaaaaagcaaauauuaagaacacaagagucugaaugugucugugugaacgggucauguuucaccauaaugaccgauggcccgaguaauaaggccgccucguacaaaauuuucaagaucgaaaaggggaagguuacuaaaucaauagaguugaaugcacccaauuuuuauuaugaggaaugcuccuguuacccagauacuggcauagugauguguguaugcagggacaacuggcaugguucaaaucgaccuugggugucuuuuaaucaaaacuuggauuaucaaauaggauacaucugcaguggaguguuuggugacaauccgcgucccgaagauggagagggcagcugcaauccagugacuguugauggagcaaacggaguaaaaggguuuucauacaaauaugguaaugguguuuggauagggaggaccaaaaguaacagacuuagaaagggguuugagaugauuugggauccuaauggauggacaaauaccgacagugauuucucagugaaacaggauguuguagcaauaacugauuggucaggguacagcggaaguuucguccaacauccugaguuaacaggauuggacuguauaagaccuugcuucuggguugaguuagucagagggcugccuagagaaaauacaacaaucuggacuagugggagcagcauuucuuuuuguggcguuaauagugauacugcaaacuggucuuggccagacggugcugaguugccguucaccauugacaaguag

SEQ ID NO: 50055 - RNA, 1413 nt, Artificial Sequence
  derived and/or modified CDS sequence (wt) from neuraminidase__InfluenzaA__ADC45804
augaauccaaaucaaaagauaauaaccauuggaucaaucaguauagcaaucggaauaauuagucuaauguugcaaauaggaaauauuauuucaauaugggcuagucacucaauccaaacugggagucaaaacaacacuggaauaugcaaccaaagaaucaucacauaugaaaacagcaccugggugaaucacacauauguuaauauuaacaacacuaauguuguugcuggagaggacaaaacaucagugacauuggccggcaauucaucucuuuguucuaucaguggaugggcuauauacacaaaagacaacagcauaagaauuggcuccaaaggagauguuuuugucauaagagaaccuuucauaucauguucucacuuggaaugcagaaccuuuuuucugacccaaggcgcucuauuaaaugacaaacauucaaaugggaccguaaaggacagaaguccuuauagggccuuaaugagcuguccucuaggugaagcuccguccccauacaauucaaaguucgaaucaguugcauggucagcaagcgcaugccaugauggcaugggcugguuaacaaucggaauuucugguccagacaauggagcuguggcuguacuaaaauacaacggaauaauaacuggaaccauaaaaaguuggaaaaagcaaauauuaagaacacaagagucugaaugugucuguaugaacgggucauguuucaccauaaugaccgauggcccgaguaauaaggccgccucguacaaaauuuucaagaucgaaaaggggaagauuacuaaaucaauagaguugaaugcacccaauuuuuauuaugaggaaugcuccuguuacccagauacuggcauagugauguguguaugcagggacaacuggcaugguucaaaucgaccuugggugucuuuuaaucaaaacuuggauuaucaaauaggauacaucugcaguggaguguuuggugacaauccgcgucccgaagauggagagggcagcugcaauccagugacuguugauggagcaaacggaguaaaaggguuuucauacaaauaugguaaugguguuuggauagggaggaccaaaaguaacagacuuagaaagggguuugagaugauuugggauccuaauggauggacaaauaccgacagugauuucucagugaaacaggauguuguagcaauaacugauuggucaggguacagcggaaguuucguccaacauccugaguuaacaggauuggacuguauaagaccuugcuucuggguugaguuagucagagggcugccuagagaaaauacaacaaucuggacuagugggagcagcauuucuuuuuguggcguuaauagugauacugcaaacuggucuuggccagacggugcugaguugccguucaccauugacaaguag

SEQ ID NO: 50056 - RNA, 1413 nt, Artificial Sequence
  derived and/or modified CDS sequence (wt) from neuraminidase__InfluenzaA__ADC45815
augaauccaaaucaaaagauaauaaccauaggaucaaucaguauagcaaucggaauaauuagucuaauguugcaaauaggaaauauuauuucaauaugggcuagucacucaauccaaacuggaagucaaaacaacacuggaauaugcaaccaaagaaucaucacauaugaaaacagcaccugggugaaucacacauauguuaauauuaacaacacuaauguuguugcuggagaggacaaaacgucagugacauuggccggcaauucaucucuuuguucuaucaguggaugggcuauauacacaaaagacaacagcauaagaauuggcuccaaaggagauguuuuugucauaagagaaccuuucauaucauguucucacuuggaaugcagaaccuuuuuucugacccaaggcgcucuauuaaaugacaaacauucaaaugggaccguaaaggacagaaguccuuauagggccuuaaugagcuguccucuaggugaagcuccguccccauacaauucaaaguucgaaucaguugcauggucagcaagcgcaugccaugauggcaugggcugguuaacaaucggaauuucuggcccagacaauggagcuguggcuguacuaaaauacaacggaauaauaacuggaaccguaaaaaguuggaaaaagcaaauauuaagaacacaagagucugaaugugucuguaugaacgggucauguuucaccauaaugaccgauggcccgaguaauaaggccgccucguacaaaauuuucaagaucgaaaaggggaagguuacuaaaucaauagaguugaaugcacccaauuuuuauuaugaggaaugcuccuguuacccggacacuggcauggugauguguguaugcagggacaacuggcaugguucaaaucgaccuugggugucuuuuaaucaaaacuuggauuaucaaauaggauacaucugcaguggaguguuuggugacaauccgcgucccgaagauggagagggcagcugcaauccagugacuguugauggagcaaacggaguaaaaggguuuucauacaaauaugguaaugguguuuggauaggaaggaccaaaaguaacagacuuagaaagggguuugagaugauuugggauccuaauggauggacaaauaccgacagugauuucucagugaaacaggauguuguagcaauaacugauuggucaggguacagcggaaguuucguccaacauccugaguuaacaggauuggacuguauaagaccuugcuucuggguugaguuagucagagggcugccuagagaaaauacaacaaucuggacuagugggagcagcauuucuuuuuguggcguuaauagugauacugcaaacuggucuuggccagacggugcugaguugccguucaccauugacaaguag

SEQ ID NO: 50057 - RNA, 1413 nt, Artificial Sequence
  derived and/or modified CDS sequence (wt) from neuraminidase__InfluenzaA__ADC45837
augaauccaaaucaaaagauaauaaccauuggaucaaucaguauagcaaucggaauaauuagucuaauguugcaaauaggaaauauuauuucaauaugggcuagucacucaauccaaacugggagucaaaacaacacuggaauaugcaaccaaagaaucaucacauaugaaaacagcaccugggugaaucacacauauguuaauauuaacaacacuaauguuguugcuggagaggacaaaacaucagugacauuggccggcaauucaucucuuuguucuaucaguggaugggcuauauacacaaaagacaacagcauaagaauuggcuccaaaggagauguuuuugucauaagagaaccuuucauaucauguucucacuuggaaugcagaaccuuuuuucugacccaaggcgcucuauuaaaugacaaacauucaaaugggaccguaaaggacagaaguccuuauagggccuuaaugagcuguccucuaggugaagcuccguccccauacaauucaaaguucgaaucaguugcauggucagcaagcgcaugccaugauggcaugggcugguuaacaaucggaauuucugguccagacaauggagcuguggcuguacuaaaauacaacggaauaauaacuggaaccauaaaaaguuggaaaaagcaaauauuaagaacacaagagucugaaugugucuguaugaacgggucauguuucaccauaaugaccgauggcccgaguaauaaggccgccucguacaaaauuuucaagaucgaaaaggggaagguuacuaaaucaauagaguugaaugcacccaauuuuuauuaugaggaaugcuccuguuacccagauacuggcauagugauguguguaugcagggacaacuggcaugguucaaaucgaccuugggugucuuuuaaucaaaacuuggauuaucaaauaggauacaucugcaguggaguguuuggugacaauccgcgucccgaagauggagagggcagcugcaauccagugacuguugauggagcaaacggaguaaaaggguuuucauacaaauaugguaaugguguuuggauagggaggaccaaaaguaacagacuuagaaagggguuugagaugauuugggauccuaauggauggacaaauaccgacagugauuucucagugaaacaggauguuguagcaauaacugauuggucaggguacagcggaaguuucguccaacauccugaguuaacaggauuggacuguauaagaccuugcuucuggguugaguuagucagagggcugccuagagaaaauacaacaaucuggacuagugggagcagcauuucuuuuuguggcguuaauagugauacugcaaacuggucuuggccagacggugcugaguugccguucaccauugacaaguag

SEQ ID NO: 50058 - RNA, 1413 nt, Artificial Sequence
  derived and/or modified CDS sequence (wt) from neuraminidase__InfluenzaA__ADC45848
augaauccaaaucaaaagauaauaaccauuggaucaaucaguauagcaaucggaauaauuagucuaauguugcaaauaggaaauauuauuucaauaugggcuagucacucaauccaaacuggaagucaaaacaacacuggaauaugcaaccaaagaaucaucacauaugaaaacagcaccugggugaaucacacauauguuaauauuaacaacacuaauguuguugcuggagaggacaaaacuucagugacauuggccggcaauucaucucuuuguucuaucaguggaugggcuauauacacaaaagacaacagcauaagaauuggcuccaaaggagauguuuuugucauaagagaaccuuucauaucauguucucacuuggaaugcagaaccuuuuuucugacccaaggcgcucuauuaaaugacaaacauucaaaugggaccguaaaggacagaaguccuuauagggccuuaaugagcuguccucuaggugaagcuccguccccauacaauucaaaguucgaaucaguugcauggucagcaagcgcaugccaugauggcaugggcugguuaacaaucggaauuucugguccagacaauggagcuguggcuguacuaaaauacaacggaauaauaacuggaaccauaaaaaguuggaaaaagcaaauauuaagaacacaagagucugaaugugucuguaugaacgggucauguuucaccauaaugaccgauggcccgaguaauaaggccgccucguacaaaauuuucaagaucgaaaaggggaagguuacuaaaucaauagaguugaaugcacccaauuuuuauuaugaggaaugcuccuguuacccagacacuggcauagugauguguguaugcagggacaacuggcaugguucaaaucgaccuugggugucuuuuaaucaaaacuuggauuaucaaauaggauacaucugcaguggaguguuuggugacaauccgcgucccgaagauggagagggcagcugcaauccagugacuguugauggagcaaacggaguaaaaggguuuucauacaaauaugguaaugguguuuggauaggaaggaccaaaaguaacagacuuagaaagggguuugagaugauuugggauccuaauggauggacaaauaccgacagugauuucucagugaaacaggauguuguagcaauaacugauuggucaggguacagcggaaguuucguccaacauccugaguuaacaggauuggacuguauaagaccuugcuucuggguugaguuagucagagggcugccuagagaaaauacaacaaucuggacuagugggagcagcauuuccuuuuguggcguuaauagugauacugcaaacuggucuuggccagacggugcugaguugccguucaccauugacaaguag

SEQ ID NO: 50059 - RNA, 1410 nt, Artificial Sequence; identical to SEQ ID NO: 48794
  derived and/or modified CDS sequence (wt) from neuraminidase__InfluenzaA__ADC53559

SEQ ID NO: 50060 - RNA, 1410 nt, Artificial Sequence; identical to SEQ ID NO: 48750
  derived and/or modified CDS sequence (wt) from neuraminidase__InfluenzaA__ADD14088

SEQ ID NO: 50061 - RNA, 1410 nt, Artificial Sequence; identical to SEQ ID NO: 48750
  derived and/or modified CDS sequence (wt) from neuraminidase__InfluenzaA__ADD14090

SEQ ID NO: 50062 - RNA, 1410 nt, Artificial Sequence; identical to SEQ ID NO: 48750
  derived and/or modified CDS sequence (wt) from neuraminidase__InfluenzaA__ADD14094

SEQ ID NO: 50063 - RNA, 1410 nt, Artificial Sequence; identical to SEQ ID NO: 48750
  derived and/or modified CDS sequence (wt) from neuraminidase__InfluenzaA__ADD14096

SEQ ID NO: 50064 - RNA, 1410 nt, Artificial Sequence; identical to SEQ ID NO: 48750
  derived and/or modified CDS sequence (wt) from neuraminidase__InfluenzaA__ADD14098

SEQ ID NO: 50065 - RNA, 1410 nt, Artificial Sequence; identical to SEQ ID NO: 48750
  derived and/or modified CDS sequence (wt) from neuraminidase__InfluenzaA__ADD14100

SEQ ID NO: 50066 - RNA, 1410 nt, Artificial Sequence; identical to SEQ ID NO: 48750
  derived and/or modified CDS sequence (wt) from neuraminidase__InfluenzaA__ADD14102

SEQ ID NO: 50067 - RNA, 1410 nt, Artificial Sequence; identical to SEQ ID NO: 48750
  derived and/or modified CDS sequence (wt) from neuraminidase__InfluenzaA__ADD14104

SEQ ID NO: 50068 - RNA, 1410 nt, Artificial Sequence; identical to SEQ ID NO: 48750
  derived and/or modified CDS sequence (wt) from neuraminidase__InfluenzaA__ADD14106

SEQ ID NO: 50069 - RNA, 1410 nt, Artificial Sequence; identical to SEQ ID NO: 48750
  derived and/or modified CDS sequence (wt) from neuraminidase__InfluenzaA__ADD14110

SEQ ID NO: 50070 - RNA, 1410 nt, Artificial Sequence
  derived and/or modified CDS sequence (wt) from neuraminidase__InfluenzaA__ADD14112
augaauccaaaccaaaagauaauaaccauugguucggucuguaugacaauuggaauggcuaacuuaauauuacaaauuggaaacauaaucucaauauggauuagccacucaauucaacuugggaaucaaaaucagauugaaacaugcaaucaaagcgucauuacuuaugaaaacaacacuuggguaaaucagacauauguuaacaucagcaacaccaacuuugcugcuggacagucagugguuuccgugaaauuagcgggcaauuccucucucugcccuguuaguggaugggcuauauacaguaaagacaacaguauaagaaucgguuccaagggggauguguuugucauaagggaaccauucauaucaugcucccccuuggaaugcagaaccuucuucuugacucaaggggccuugcuaaaugacaaacauuccaauggaaccauuaaagacaggaguccauaucgaacccuaaugagcuguccuauuggugaaguucccucuccauacaacucaagauuugagucagucgcuuggucagcaagugcuugucaugauggcaucaauuggcuaacaauuggaauuucuggcccagacaauggggcaguggcuguguuaaaguacaacggcauaauaacagacacuaucaagaguuggagaaacaauauauugagaacacaagagucugaaugugcauguguaaaugguucuugcuuuacuguaaugaccgauggaccaagugauggacaggccucauacaagaucuucagaauagaaaagggaaagauagucaaaucagucgaaaugaaugccccuaauuaucacuaugaggaaugcuccuguuauccugauucuagugaaaucacaugugugugcagggauaacuggcauggcucgaaucgaccgugggugucuuucaaccagaaucuggaauaucagauaggauacauaugcagugggauuuucggagacaauccacgcccuaaugauaagacaggcaguugugguccaguaucgucuaauggagcaaauggaguaaaaggauuuucauucaaauacggcaaugguguuuggauagggagaacuaaaagcauuaguucaagaaacgguuuugagaugauuugggauccgaacggauggacugggacagacaauaacuucucaauaaagcaagauaucguaggaauaaaugaguggucaggauauagcgggaguuuuguucagcauccagaacuaacagggcuggauuguauaagaccuugcuucuggguugaacuaaucagagggcgacccaaagagaacacaaucuggacuagcgggagcagcauauccuuuugugguguaaacagugacacuguggguuggucuuggccagacggugcugaguugccauuuaccauugacaaguaa

SEQ ID NO: 50071 - RNA, 1410 nt, Artificial Sequence
  derived and/or modified CDS sequence (wt) from neuraminidase__InfluenzaA__ADD14114
augaauccaaaccaaaagauaauaaccauugguucggucuguaugacaauuggaauggcuaacuuaauauuacaaauuggaaacauaaucucaauauggauuagccacucaauucaacuuggggaucaaaaucagauugaaacaugcaaucaaagcgucauuacuuaugaaaacaacacuuggguaaaucagacauauguuaacaucagcaacaccaacuuugcugcuggacagucagugguuuccgugaaauuagcgggcaauuccucucucugcccuguuaguggaugggcuauauacaguaaagacaacaguauaagaaucgguuccaagggggauguguuugucauaagggaaccauucauaucaugcucccccuuggaaugcagaaccuucuucuugacucaaggggccuugcuaaaugacaaacauuccaauggaaccauuaaagacaggagcccauaucgaacccuaaugagcuguccuauuggugaaguucccucuccauacaacucaagauuugagucagucgcuuggucagcaagugcuugucaugauggcaucaauuggcuaacaauuggaauuucuggcccagacaauggggcaguggcuguguuaaaguacaacggcauaauaacagacacuaucaagaguuggagaaacaauauauugagaacacaagagucugaaugugcauguguaaaugguucuugcuuuacuguaaugaccgauggaccaagugauggacaggccucauacaagaucuucagaauagaaaagggaaagauagucaaaucagucgaaaugaaugccccuaauuaucacuaugaggaaugcuccuguuauccugauucuagugaaaucacaugugugugcagggauaacuggcauggcucgaaucgaccgugggugucuuucaaccagaaucuggaauaucagauaggauacauaugcagugggauuuucggagacaauccacgcccuaaugauaagacaggcaguugugguccaguaucgucuaauggagcaaauggaguaaaaggauuuucauucaaauacggcaaugguguuuggauagggagaacuaaaagcauuaguucaagaaacgguuuugagaugauuugggauccgaacggauggacugggacagacaauaacuucucaauaaagcaagauaucguaggaauaaaugaguggucaggauauagcgggaguuuuguucagcauccagaacuaacagggcuggauuguauaagaccuugcuucuggguugaacuaaucagagggcgacccaaagagaacacaaucuggacuagcgggagcagcauauccuuuugugguguaaacagugacacuguggguuggucuuggccagacggugcugaguugccauuuaccauugacaaguaa

SEQ ID NO: 50072 - RNA, 1410 nt, Artificial Sequence; identical to SEQ ID NO: 48750
  derived and/or modified CDS sequence (wt) from neuraminidase__InfluenzaA__ADD14116

SEQ ID NO: 50073 - RNA, 1410 nt, Artificial Sequence; identical to SEQ ID NO: 48750
  derived and/or modified CDS sequence (wt) from neuraminidase__InfluenzaA__ADD14118

SEQ ID NO: 50074 - RNA, 1410 nt, Artificial Sequence; identical to SEQ ID NO: 48750
  derived and/or modified CDS sequence (wt) from neuraminidase__InfluenzaA__ADD14120

SEQ ID NO: 50075 - RNA, 1410 nt, Artificial Sequence
  derived and/or modified CDS sequence (wt) from neuraminidase__InfluenzaA__ADD14122
augaauccaaaccaaaagauaauaaccauugguucggucuguaugaccauuggaauggcuaacuuaauauuacaaauuggaaacauaaucucaauauggauuagccacucaauucaacuugggaaucaaaaucagauugaaacaugcaaucaaagcgucauuacuuaugaaaacaacacuuggguaaaucagacauauguuaacaucagcaacaccaacuuugcugcuggacagucagugguuuccgugaaauuagcgggcaauuccucucucugcccuguuaguggaugggcuauauacaguaaagacaacaguauaagaaucgguuccaagggggauguguuugucauaagggaaccauucauaucaugcucccccuuggaaugcagaaccuucuucuugacucaaggggccuugcuaaaugacaaacauuccaauggaaccauuaaagacaggagcccauaucgaacccuaaugagcuguccuauuggugaaguucccucuccauacaacucaagauuugagucagucgcuuggucagcaagugcuugucaugauggcaucaauuggcuaacaauuggaauuucuggcccagacaauggggcaguggcuguguuaaaguacaacggcauaauaacagacacuaucaagaguuggagaaacaauauauugagaacacaagagucugaaugugcauguguaaaugguucuugcuuuacuguaaugaccgauggaccaagugauggacaggccucauacaagaucuucagaauagaaaagggaaagauagucaaaucagucgaaaugaaugccccuaauuaucacuaugaggaaugcuccuguuauccugauucuagugaaaucacaugugugugcagggauaacuggcauggcucgaaucgaccgugggugucuuucaaccagaaucuggaauaucagauaggauacauaugcagugggauuuucggagacaauccacgcccuaaugauaagacaggcaguugugguccaguaucgucuaauggagcaaauggaguaaaaggauuuucauucaaauacggcaaugguguuuggauagggagaacuaaaagcauuaguucaagaaacgguuuugagaugauuugggauccgaacggauggacugggacagacaauaacuucucaauaaagcaagauaucguaggaauaaaugaguggucaggauauagcgggaguuuuguucagcauccagaacuaacagggcuggauuguauaagaccuugcuucuggguugaacuaaucagagggcgacccaaagagaacacaaucuggacuagcgggagcagcauauccuuuugugguguaaacagugacacuguggguuggucuuggccagacggugcugaguugccauuuaccauugacaaguaa

SEQ ID NO: 50076 - RNA, 1410 nt, Artificial Sequence; identical to SEQ ID NO: 48750
  derived and/or modified CDS sequence (wt) from neuraminidase__InfluenzaA__ADD14124

SEQ ID NO: 50077 - RNA, 1410 nt, Artificial Sequence; identical to SEQ ID NO: 49809
  derived and/or modified CDS sequence (wt) from neuraminidase__InfluenzaA__ADD14126

SEQ ID NO: 50078 - RNA, 1410 nt, Artificial Sequence; identical to SEQ ID NO: 48750
  derived and/or modified CDS sequence (wt) from neuraminidase__InfluenzaA__ADD14128

SEQ ID NO: 50079 - RNA, 1410 nt, Artificial Sequence; identical to SEQ ID NO: 48750
  derived and/or modified CDS sequence (wt) from neuraminidase__InfluenzaA__ADD14130

SEQ ID NO: 50080 - RNA, 1410 nt, Artificial Sequence
  derived and/or modified CDS sequence (wt) from neuraminidase__InfluenzaA__ADD14132
augaauccaaaccaaaagauaauaaccauugguucggucuguaugacaauuggaauggccaacuuaauauuacaaauuggaaacauaaucucaauauggauuagccacucaauucaacuugggaaucaaaaucagauugaaacaugcaaucaaagcgucauuacuuaugaaaacaacacuuggguaaaucagacauauguuaacaucagcaacaccaacuuugcugcuggacagucagugguuuccgugaaauuagcaggcaauuccucucucugcccuguuaguggaugggcuauauacaguaaagacaacaguauaagaaucgguuccaagggggauguguuugucauaagggaaccauucauaucaugcucccccuuggaaugcagaaccuucuucuugacucaaggggccuugcuaaaugacaaacauuccaauggaaccauuaaagacaggagcccauaucgaacccuaaugagcuguccuauuggugaaguucccucuccauacaacucaagauuugagucagucgcuuggucagcaagugcuugucaugauggcaucaauuggcuaacaauuggaauuucuggcccagacaauggggcaguggcuguguuaaaguacaacggcauaauaacagacacuaucaagaguuggagaaacaauauauugagaacacaagagucugaaugugcauguguaaaugguucuugcuuuacuguaaugaccgauggaccaagugauggacaggccucauacaagaucuucagaauagaaaagggaaagauagucaaaucagucgaaaugaaugccccuaauuaucacuaugaggaaugcuccuguuauccugauucuagugaaaucacaugugugugcagggauaacuggcauggcucgaaucgaccgugggugucuuucaaccagaaucuggaauaucagauaggauacauaugcagugggauuuucggagacaauccacgcccuaaugauaagacaggcaguugugguccaguaucgucuaauggagcaaauggaguaaaaggauuuucauucaaauacggcaaugguguuuggauagggagaacuaaaagcauuaguucaagaaacgguuuugagaugauuugggauccgaacggauggacugggacagacaauaacuucucaauaaagcaagauaucguaggaauaaaugaguggucaggauauagcgggaguuuuguucagcauccagaacuaacagggcuggauuguauaagaccuugcuucuggguugaacuaaucagagggcgacccaaagagaacacaaucuggacuagcgggagcagcauauccuuuugugguguaaacagugacacuguggguuggucuuggccagacggugcugaguugccauuuaccauugacaaguaa

SEQ ID NO: 50081 - RNA, 1410 nt, Artificial Sequence; identical to SEQ ID NO: 48750
  derived and/or modified CDS sequence (wt) from neuraminidase__InfluenzaA__ADD14134

SEQ ID NO: 50082 - RNA, 1410 nt, Artificial Sequence; identical to SEQ ID NO: 48750
  derived and/or modified CDS sequence (wt) from neuraminidase__InfluenzaA__ADD14136

SEQ ID NO: 50083 - RNA, 1410 nt, Artificial Sequence; identical to SEQ ID NO: 48750
  derived and/or modified CDS sequence (wt) from neuraminidase__InfluenzaA__ADD14138

SEQ ID NO: 50084 - RNA, 1410 nt, Artificial Sequence
  derived and/or modified CDS sequence (wt) from neuraminidase__InfluenzaA__ADD14142
augaauccaaaccaaaagauaauaaccauugguucggucuguaugacaauuggaauggcuaacuuaauauuacaaauuggaaacauaaucucaauauggauuagccacucaauucaacuugggaaucaaaaucagauugaaacaugcaaucaaagcgucauuacuuaugaaaacaacacuuggguaaaucagacauauguuaacaucagcaacaccaacuuugcugcuggacagucagugguuuccgugaaauuagcgggcaauuccucucucugcccuguuaguggaugggcuauauacaguaaagacaacaguauaagaaucgguuccaagggggauguguuugucauaagggaaccauucauaucaugcucccccuuggaaugcagaaccuucuucuugacucaaggggccuugcuaaaugacaaacauuccaauggaaccauuaaagacaggagcccauaucgaacccuaaugagcuguccuauuggugaaguucccucuccauacaacucaagauuugagucagucgcuuggucagcaagugcuugucaugauggcaucaauuggcuaacaauuggaauuucuggcccagacaauggggcaguggcuguguuaaaguacaacggcauaauaacggacacuaucaagaguuggagaaacaauauauugagaacacaagagucugaaugugcauguguaaaugguucuugcuuuacuguaaugaccgauggaccaagugauggacaggccucauacaagaucuucagaauagaaaagggaaagauagucaaaucagucgaaaugaaugccccuaauuaucacuaugaggaaugcuccuguuauccugauucuagugaaaucacaugugugugcagggauaacuggcauggcucgaaucgaccgugggugucuuucaaccagaaucuggaauaucagauaggauacauaugcagugggauuuucggagacaauccacgcccuaaugauaagacaggcaguugugguccaguaucgucuaauggagcaaauggaguaaaaggauuuucauucaaauacggcaaugguguuuggauagggagaacuaaaagcauuaguucaagaaacgguuuugagaugauuugggauccgaacggauggacugggacagacaauaacuucucaauaaagcaagauaucguaggaauaaaugaguggucaggauauagcgggaguuuuguucagcauccagaacuaacagggcuggauuguauaagaccuugcuucuggguugaacuaaucagagggcgacccaaagagaacacaaucuggacuagcgggagcagcauauccuuuugugguguaaacagugacacuguggguuggucuuggccagacggugcugaguugccauuuaccauugacaaguaa

SEQ ID NO: 50085 - RNA, 1410 nt, Artificial Sequence; identical to SEQ ID NO: 48750
  derived and/or modified CDS sequence (wt) from neuraminidase__InfluenzaA__ADD14144

SEQ ID NO: 50086 - RNA, 1410 nt, Artificial Sequence; identical to SEQ ID NO: 48750
  derived and/or modified CDS sequence (wt) from neuraminidase__InfluenzaA__ADD14146

SEQ ID NO: 50087 - RNA, 1410 nt, Artificial Sequence; identical to SEQ ID NO: 48750
  derived and/or modified CDS sequence (wt) from neuraminidase__InfluenzaA__ADD14148

SEQ ID NO: 50088 - RNA, 1410 nt, Artificial Sequence
  derived and/or modified CDS sequence (wt) from neuraminidase__InfluenzaA__ADD14150
augaauccaaaccaaaagauaauaaccauugguucggucuguaugacaauuggaauggcuaacuuaauauuacaaauuggaaacauaaucucaauauggauuagccacucaauucaacuugggaaucaaaaucagauugaaacaugcaaucaaagcgucauuacuuaugaaaacaacacuuggguaaaucagacauauguuaacaucagcaacaccaacuuugcugcuggacagucagugguuuccgugaaauuagcgggcaauuccucucucugcccuguuaguggaugggcuauauacaguaaagacaacaguauaagaaucgguuccaagggggauguguuugucauaagggaaccauucauaucgugcucccccuuggaaugcagaaccuucuucuugacucaaggggccuugcuaaaugacaaacauuccaauggaaccauuaaagacaggagcccauaucgaacccuaaugagcuguccuauuggugaaguucccucuccauacaacucaagauuugagucagucgcuuggucagcaagugcuugucaugauggcaucaauuggcuaacaauuggaauuucuggcccagacaauggggcaguggcuguguuaaaguacaacggcauaauaacagacacuauuaagaguuggagaaacaauauauugagaacacaagagucugaaugugcauguguaaaugguucuugcuuuacuguaaugaccgauggaccaagugauggacaggccucauacaagaucuucagaauagaaaagggaaagauagucaaaucagucgaaaugaaugccccuaauuaucacuaugaggaaugcuccuguuauccugauucuagugaaaucacaugugugugcagggauaacuggcauggcucgaaucgaccgugggugucuuucaaccagaaucuggaauaucagauaggauacauaugcagugggauuuucggagacaauccacgcccuaaugauaagacaggcaguugugguccaguaucgucuaauggagcaaauggagugaaaggauuuucauucaaauacggcaaugguguuuggauagggagaacuaaaagcauuaguucaagaaacgguuuugagaugauuugggauccgaacggauggacugggacagacgauaacuucucaauaaagcaagauaucguaggaauaaaugaguggucaggauauagcgggaguuuuguucagcauccagaacuaacagggcuggauuguauaagaccuugcuucuggguugaacuaaucagagggcgacccaaagagaacacaaucuggacuagcgggagcagcauauccuuuugugguguaaacagugacacuguggguuggucuuggccagacggugcugaguugccauuuaccauugacaaguaa

SEQ ID NO: 50089 - RNA, 1410 nt, Artificial Sequence
  derived and/or modified CDS sequence (wt) from neuraminidase__InfluenzaA__ADD14152
augaauccaaaccaaaagauaauaaccauugguucggucuguaugacaauuggaauggcuaacuuaauauuacaaauuggaaauauaaucucaauauggauuagccacucaauucaacuugggaaucaaaaucagauugaaacaugcaaucaaagcgucauuacuuaugaaaacaacacuuggguaaaucagacauauguuaacaucagcaacaccaacuuugcugcuggacagucagugguuuccgugaaauuagcgggcaauuccucucucugcccuguuaguggaugggcuauauacaguaaagacaacaguauaagaaucgguuccaagggggauguguuugucauaagggaaccauucauaucaugcucccccuuggaaugcagaaccuucuucuugacucaaggggccuugcuaaaugacaaacauuccaauggaaccauuaaagacaggagcccauaucgaacccuaaugagcuguccuauuggugaaguucccucuccauacaacucaagauuugagucagucgcuuggucagcaagugcuugucaugauggcaucaauuggcuaacaauuggaauuucuggcccagacaauggggcaguggcuguguuaaaguacaacggcauaauaacagacacuaucaagaguuggagaaacaauauauugagaacacaagagucugaaugugcauguguaaaugguucuugcuuuacuguaaugaccgauggaccaagugauggacaggccucauacaagaucuucagaauagaaaagggaaagauagucaaaucagucgaaaugaaugccccuaauuaucacuaugaggaaugcuccuguuauccugauucuagugaaaucacaugugugugcagggauaacuggcauggcucgaaucgaccgugggugucuuucaaccagaaucuggaauaucagauaggauacauaugcagugggauuuucggagacaauccacgcccuaaugauaagacaggcaguugugguccaguaucgucuaauggagcaaauggaguaaaaggauuuucauucaaauacggcaaugguguuuggauagggagaacuaaaagcauuaguucaagaaacgguuuugagaugauuugggauccgaacggauggacugggacagacaauaacuucucaauaaagcaagauaucguaggaauaaaugaguggucaggauauagcgggaguuuuguucagcauccagaacuaacagggcuggauuguauaagaccuugcuucuggguugaacuaaucagagggcgacccaaagagaacacaaucuggacuagcgggagcagcauauccuuuugugguguaaacagugacacuguggguuggucuuggccagacggugcugaguugccauuuaccauugacaaguaa

SEQ ID NO: 50090 - RNA, 1410 nt, Artificial Sequence
  derived and/or modified CDS sequence (wt) from neuraminidase__InfluenzaA__ADD14154
augaauccaaaccaaaagauaauaaccauugguucggucuguaugacaauuggaauggcuaacuuaauauuacaaauuggaaacauaaucucaauauggauuagccacucaauucaacuugggaaucaaaaucagauugaaacaugcaaucaaagcgucauuacuuaugaaaacaacacuuggguaaaucagacauauguuaacaucagcaucaccaacuuugcugcuggacagucagugguuuccgugaaauuagcgggcaauuccucucucugcccuguuaguggaugggcuauauacaguaaagacaacaguauaagaaucgguuccaagggggauguguuugucauaagggaaccauucauaucaugcucccccuuggaaugcagaaccuucuucuugacucaaggggccuugcuaaaugacaaacauuccaauggaaccauuaaagacaggagcccauaucgaacccuaaugagcuguccuauuggugaaguucccucuccauacaacucaagauuugagucagucgcuuggucagcaagugcuugucaugauggcaucaauuggcuaacaauuggaauuucuggcccagacaauggggcaguggcuguguuaaaguacaacggcauaauaacagacacuaucaagaguuggagaaacaauauauugagaacacaagagucugaaugugcauguguaaaugguucuugcuuuacuguaaugaccgauggaccaagugauggacaggccucauacaagaucuucagaauagaaaagggaaagauagucaaaucagucgaaaugaaugccccuaauuaucacuaugaggaaugcuccuguuauccugauucuagugaaaucacaugugugugcagggauaacuggcauggcucgaaucgaccgugggugucuuucaaccagaaucuggaauaucagauaggauacauaugcagugggauuuucggagacaauccacgcccuaaugauaagacaggcaguugugguccaguaucgucuaauggagcaaauggaguaaaaggauuuucauucaaauacggcaaugguguuuggauagggagaacuaaaagcauuaguucaagaaacgguuuugagaugauuugggauccgaacggauggacugggacagacaauaacuucucaauaaagcaagauaucguaggaauaaaugaguggucaggauauagcgggaguuuuguucagcauccagaacuaacagggcuggauuguauaagaccuugcuucuggguugaacuaaucagagggcgacccaaagagaacacaaucuggacuagcgggagcagcauauccuuuugugguguaaacagugacacuguggguuggucuuggccagacggugcugaguugccauuuaccauugacaaguaa

SEQ ID NO: 50091 - RNA, 1410 nt, Artificial Sequence; identical to SEQ ID NO: 48750
  derived and/or modified CDS sequence (wt) from neuraminidase__InfluenzaA__ADD14156

SEQ ID NO: 50092 - RNA, 1410 nt, Artificial Sequence; identical to SEQ ID NO: 48750
  derived and/or modified CDS sequence (wt) from neuraminidase__InfluenzaA__ADD14158

SEQ ID NO: 50093 - RNA, 1410 nt, Artificial Sequence; identical to SEQ ID NO: 48750
  derived and/or modified CDS sequence (wt) from neuraminidase__InfluenzaA__ADD14164

SEQ ID NO: 50094 - RNA, 1410 nt, Artificial Sequence; identical to SEQ ID NO: 48750
  derived and/or modified CDS sequence (wt) from neuraminidase__InfluenzaA__ADD14174

SEQ ID NO: 50095 - RNA, 1410 nt, Artificial Sequence; identical to SEQ ID NO: 48750
  derived and/or modified CDS sequence (wt) from neuraminidase__InfluenzaA__ADD14184

SEQ ID NO: 50096 - RNA, 1410 nt, Artificial Sequence; identical to SEQ ID NO: 48750
  derived and/or modified CDS sequence (wt) from neuraminidase__InfluenzaA__ADD14194

SEQ ID NO: 50097 - RNA, 1410 nt, Artificial Sequence; identical to SEQ ID NO: 49157
  derived and/or modified CDS sequence (wt) from neuraminidase__InfluenzaA__ADD14204

SEQ ID NO: 50098 - RNA, 1410 nt, Artificial Sequence
  derived and/or modified CDS sequence (wt) from neuraminidase__InfluenzaA__ADD21449
augaauccaaaccaaagaauaauaacuaucgggacagccugccugauaauuggaauaguuagucuauugcugcagauaggaaauauagucucauuauggauaagccauucgauucagacuggagaaaaaaaucacucugagacaugcaaccgaaauaccauuacauaugaaaacagcacaugggugaaccaaacuuauguaaacauuagcaauaucaacauugcugguggacagggcguggcuucaauaauacuugcuggcaauuccucucuuugcccaguaaaugggugggcuauauacaguaaagacaacagcauaaggauugguuccaaaggagacauuuuugucauaagagaaccauucaucucaugcucucacuuggagugcagaaccuuuuuucugacccaaggugccuuguuaaaugacaggcauucuaauggaacugucaaggacaggagccccuaccgaaccuuaaugagcugcccgauuggugaagcuccaucuccguauaauucaaaauucgaaucaguugcuuggucagcaagugcaugccaugaugggaugggauggcuaacaauugggauuuccgguccagauaauggagcaguggcuguuuugaaauacaaugguauaauaacagauacgauaaaaaguuggagaaacagaauacuaagaacacaagagucagaauguguuuguauaaacgguucauguuuuaccauaaugacugauggcccaagcaaugggcaagccuccuacaaaauauucaaaauggagagagggaagauuauuaagucaguugaacuggaugcaccuaauuaccacuaugaggaaugcuccuguuauccugauacaggcaaaguggugugugugugcagagacaacuggcaugcuucaaaucgaccguggguuuccuucgaucagaaucuugauuaucaaauaggguacauaagcagugggguuuuuggugauaacccgcguucuaaugaugggaagggcaauuguggcccaguacuuucuaauggagcaaauggagugaaaggauugucauuuagauauggcaauggugucuggauaggaagaacuaaaaguaccaacucuagaaguggauuugagaugauuugggauccaaauggauggacggaaacugauaguaauuuuucuaugaagcaagauauuauagcauuaacugauuggucaggauauaguggaaguuuuguucaacacccugaguuaacaggaaugaauugcauaaggccuuguuuuuggguagaauugaucagaggucaacccaagcaaagcacaaucuggacuaguggaagcagcauuucuuucuguggcguggacagugaaaccgcaagcuggucauggccagacggagcugaucugccauucaccauugacaaguag

SEQ ID NO: 50099 - RNA, 1413 nt, Artificial Sequence
  derived and/or modified CDS sequence (wt) from neuraminidase__InfluenzaA__ADD21469
augaauccaaaucaaaaaauaauaaccauuggaucaaucaguauagcaaucggaauaauuagucuaauguugcaaauaggaaauauuauuucaguaugggcuagucacucaauccaaacuggaagucaaaaccacacuggaauaugcaaccaaagaaucaucacauaugaaaacagcaccugggugaaucacacauauguuaauauuaacaacacuaauguuguugcuggaaaggacaaaacuucagugacauuggccggcaauucaucucuuuguucuaucaguggaugggcuauauacacaaaagacaacagcauaagaauuggauccaaaggagauguuuuugucauaagagaaccuuucauaucauguucucacuuggaaugcagaaccuuuuuucugacccaaggugcucuauuaaaugacaaacauucaaauggaaccguuaaggacagaaguccuuauagggccuuaaugagcugcccucuaggugaagcuccguccccauacaauucaaaguuugaaucaguugcauggucagcaagcgcaugccaugauggcaugggcugguuaacgaucggaauuucugguccagacaauggagcuguggcuguacuaaaauacaacggcauaauaacugaaaccauaaaaaguuggaaaaaacgaauguuaagaacacaagagucugaauguaucugugugaacgggucauguuucaccauaaugaccgauggcccgaguaauggggccgccucguacaaaaucuucaagaucgaaaaggggaagguuacuaaaucaauagaguugaaugcacccaauuuccauuaugaggaauguuccuguuacccagacacuggcacagugauguguguaugcagggacaacuggcaugguucaaaucgaccuugggugucuuuuaaucaaaaccuggauuaucaaauaggauacaucugcagugggguguucggugacaauccgcgucccaaagauggagagggcagcuguaauccagugacuguugauggagcagacggaguaaagggguuuucauacaaauaugguaaugguguuuggauaggaagaacuaaaaguaacagacuuagaaagggguuugagaugauuugggauccuaauggauggacagauaccgacaguaauuucucagugaaacaggauguuguggcaauaacugauuggucaggguacagcggaaguuucguucaacauccugaguuaacaggauuggacuguauaagaccuugcuucuggguugaguuagucagaggacugccuagagaaaauacaacaaucuggacuagugggagcagcauuucuuuuuguggcguaaauagugauacugcaaacuggucuuggccagacggugcugaguugccauucaccauugacaaguag

SEQ ID NO: 50100 - RNA, 1410 nt, Artificial Sequence; identical to SEQ ID NO: 49733
  derived and/or modified CDS sequence (wt) from neuraminidase__InfluenzaA__ADD21747

SEQ ID NO: 50101 - RNA, 1410 nt, Artificial Sequence
  derived and/or modified CDS sequence (wt) from neuraminidase__InfluenzaA__ADD21767
augaauccaaaccaaaagauaauaaucauugguucggucuguaugacaauuggaauggcuaacuuaauauuacaaauuggaaacauaaucucaauauggauuagccacucaauucaacuugggaaucaaaaucagauugaaacaugcaaucaaagcgucauuacuuaugaaaacaacacuuggguaaaucagacauauguuaacaucagcaacaccaacuuugcugcuggacagucagugguuuccgugaaauuagcaggcaauuccucucucugcccuguuaguggaugggcuauauacaguaaagacaacaguauaagaaucgguuccaagggggauguguuugucauaagggaaccauucauaucaugcucccccuuggaaugcagaaccuucuucuugacucaaggggccuugcuaaaugacaaacauuccaauggaaccauuaaagacaggagcccauaucgaacccuaaugagcuguccuauuggugaaguucccucuccauacaacucaagauuugagucagucgcuuggucagcaagugcuugucaugauggcaucaauuggcuaacaauuggaauuucuggcccagacaauggggcaguggcuguguuaaaguacaacggcauaauaacagacacuaucaagaguuggagaaacaauauauugagaacacaagagucugaaugugcauguguaaaugguucuugcuuuacuguaaugaccgaugggccaagugauggacaggccucauacaagaucuucagaauagaaaagggaaagauagucaaaucagucgaaaugaaugccccuaauuaucacuaugaggaaugcuccuguuauccugauucuagugaaaucacaugugugugcagggauaacuggcauggcucgaaucgaccgugggugucuuucaaccagaaucuggaauaucagauaggauacauaugcagugggauuuucggagacaauccacgcccuaaugauaagacaggcaguugugguccaguaucgucuaauggagcaaauggaguaaaaggauuuucauucaaauacggcaaugguguuuggauagggagaacuaaaagcauuaguucaagaaacgguuuugagaugauuugggauccgaacggauggacugggacagacaauaacuucucaauaaagcaagauaucguaggaauaaaugaguggucaggauauagcgggaguuuuguucagcauccagaacuaacagggcuggauuguauaagaccuugcuucuggguugaacuaaucagagggcgacccaaagagaacacaaucuggacuagcgggagcagcauauccuuuugugguguaaacagugacacuguggguuggucuuggccagacggugcugaguugccauuuaccauugacaaguaa

SEQ ID NO: 50102 - RNA, 1410 nt, Artificial Sequence
  derived and/or modified CDS sequence (wt) from neuraminidase__InfluenzaA__ADD21777
augaauccaaaccaaaagauaauaaccauugguucggucuguaugacaauuggaauggcuaacuuaauauuacaaauuggaaacauaaucucaauauggauuagccacucaauucaacuugggaaucaaaaucagauugaaacaugcaaucagagcgucauuacuuaugaaaacaacacuuggguaaaucagacauauguuaacaucagcaacaccaacuuugcugcuggacagucagugguuuccgugaaauuagcgggcaauuccucucucugcccuguuaguggaugggcuauauacaguaaagacaacaguauaagaaucgguuccaagggggauguguuugucauaagggaaccauucauaucaugcucccccuuggaaugcagaaccuucuucuugacucaaggggccuugcuaaaugacaaacauuccaauggaaccauuaaagacaggagcccauaucgaacccuaaugagcuguccuauuggugaaguucccucuccauacaacucaagauuugagucagucgcuuggucagcaagugcuugucaugauggcaucaauuggcuaacaauuggaauuucuggcccagacaauggggcaguggcugugauaaaguacaacggcauaauaacagacacuaucaagaguuggagaaacaauauauugagaacacaagagucugaaugugcauguguaaaugguucuugcuuuacuguaaugaccgauggaccaagugauggacaggccucauacaagaucuucagaauagaaaagggaaagauagucaaaucagucgaaaugaaugccccuaauuaucacuaugaggaaugcuccuguuauccugauucuagugaaaucacaugugugugcagggauaacuggcauggcucgaaucgaccgugggugucuuucaaccagaaucuggaauaucagauaggauacauaugcagugggauuuucggagacaauccacgcccuaaugauaagacaggcaguugugguccaguaucgucuaauggagcaaauggaguaaaaggauuuucauucaaauacggcaaugguguuuggauagggagaacuaaaagcauuaguucaagaaacgguuuugagaugauuugggauccgaacggauggacugggacagacaauaacuucucaauaaagcaagauaucguaggaauaaaugaguggucaggauauagcgggaguuuuguucagcauccagaacuaacagggcuggauuguauaagaccuugcuucuggguugaacuaaucagagggcgacccaaagagaacacaaucuggacuagcgggagcagcauauccuuuugugguguaaacagugacacuguggguuggucuuggccagacggugcugaguugccauuuaccauugacaaguaa

SEQ ID NO: 50103 - RNA, 1410 nt, Artificial Sequence; identical to SEQ ID NO: 49794
  derived and/or modified CDS sequence (wt) from neuraminidase__InfluenzaA__ADD21787

SEQ ID NO: 50104 - RNA, 1410 nt, Artificial Sequence
  derived and/or modified CDS sequence (wt) from neuraminidase__InfluenzaA__ADD21797
augaauccaaaccaaaagauaauaaccauugguucggucuguaugacaauuggaauggcuaacuuaauauuacaaauuggaaacauaaucucaauauggauuagccacucaauucaacuugggaaucaaaaucagauugaaacaugcaaucaaagcgucauuacuuaugaaaacaacacuuggguaaaucagacauauguuaacaucagcaacaccaacuuugcugcuggacagucagugguuuccgugaaauuagcgggcaauuccucucucugcccuguuaguggaugggcuauauacaguaaagacaacaguauaagaaucgguuccaagggggauguguuugucauaagggaaccauucauaucaugcucccccuuggaaugcagaaccuucuucuugacucaaggggccuugcuaaaugacaaacauuccaauggaaccauuaaagacaggagcccauaucgaacccuaaugagcuguccuauuggugaaguucccucuccauacaacucaagauuugagucagucgcuuggucagcaagugcuugucaugauggcaucaauuggcuaacaauuggaauuucuggcccagacaauggggcaguggcuguguuaaaguacaacggcauaauaacagacacuaucaagaguuggagaaacaauauauugagaacacaagagucugaaugugcauguguaaaugguucuugcuuuacuguaaugaccgauggaccaagugauggacaggccucauacaagaucuucagaauagaaaagggaaagauagucaaaucagucgaaaugaaugccccuaauuaucacuaugaggaaugcuccuguuauccugauucuagugaaaucacaugugugugcagggauaacuggcauggcucgaaucgaccgugggugucuuucaaccagaaucuggaauaucagauaggauacauaugcagugggauuuucggagacaauccacgcccuaaugauaagacaggcaguugugguccaguaucgucuaauggagcaaauggaguaaaaggauuuucauucaaauacggcaaugguguuuggauagggagaacuaaaagcauuaguucaaggaacgguuuugagaugauuugggauccgaacggauggacugggacagacaauaacuucucaauaaagcaagauaucguaggaauaaaugaguggucaggauauagcgggaguuuuguucagcauccagaacuaacagggcuggauuguauaagaccuugcuucuggguugaacuaaucagagggcgacccaaagagaacacaaucuggacuagcgggagcagcauauccuuuugugguguaaacagugacacuguggguuggucuuggccagacggugcugaguugccauuuaccauugacaaguaa

SEQ ID NO: 50105 - RNA, 1410 nt, Artificial Sequence
  derived and/or modified CDS sequence (wt) from neuraminidase__InfluenzaA__ADD21817
augaauccaaaccaaaagauaauaaccauugguucggucuguaugacaauuggaauggcuaacuuaauauuacaaauuggaaacauaaucucaauauggauuagccacucaauucaacuugggaaucaaaaucagauugaaacaugcaaucaaagcgucauuacuuaugaaaacaacacuuggguaaaucagacauauguuaacaucagcaacaccaacuuugcugcuggacagucagugguuuccgugaaauuagcgggcaauuccucucucugcccuguuaguggaugggcuauauacaguaaagacaacaguauaagaaucgguuccaagggggauguguuugucauaagggaaccauucauaucaugcucccccuuggaaugcagaaccuucuucuugacucaaggggccuugcuaaaugacaaacauuccaauggaaccauuaaagacaggagcccauaucgaacccuaaugagcuguccuauuggugaaguucccucuccauacaacucaagauuugagucagucgcuuggucagcaagugcuugucaugauggcaucaauuggcuaacaauuggaauuucuggcccagacaauggggcaguggcuguguuaaaguacaacggcauaauaacagacacuaucaagaguuggagaaacaauauauugagaacacaagagucugaaugugcauguguaaaugguucuugcuuuacuguaaugaccgauggaccaagugauggacaggccucauacaagaucuucagaauagaaaagggaaagauagucaaaucagucgaaaugaaugccccuaauuaucacuaugaggaaugcuccuguuauccugauucuagugaaaucacaugugugugcagagauaacuggcauggcucgaaucgaccgugggugucuuucaaccagaaucuggaauaucagauaggauacauaugcagugggauuuucggagacaauccacgcccuaaugauaagacaggcaguugugguccaguaucgucuaauggagcaaauggaguaaaaggauuuucauucaaauacggcaaugguguuuggauagggagaacuaaaagcauuaguucaagaaacgguuuugagaugauuugggauccgaacggauggacugggacagacaauaacuucucaauaaagcaagauaucguaggaauaaaugaauggucaggauauagcgggaguuuuguucagcauccagaacuaacagggcuggauuguauaagaccuugcuucuggguugaacuaaucagagggcgacccaaagagaacacaaucuggacuagcgggagcagcauauccuuuugugguguaaacagugacacuguggguuggucuuggccagacggugcugaguugccauuuaccauugacaaguaa

SEQ ID NO: 50106 - RNA, 1410 nt, Artificial Sequence; identical to SEQ ID NO: 50104
  derived and/or modified CDS sequence (wt) from neuraminidase__InfluenzaA__ADD21827

SEQ ID NO: 50107 - RNA, 1410 nt, Artificial Sequence
  derived and/or modified CDS sequence (wt) from neuraminidase__InfluenzaA__ADD21837
augaauccaaaccaaaagauaauaaccauugguucggucuguaugacaauuggaauggcuaacuuaauauuacaaauuggaaacauaaucucaauauggauuagccacucaauucaacuugggaaucaaaaucagauugaaacaugcaaucaaagcgucauuacuuaugaaaacaacacuuggguaaaucagacauauguuaacaucagcaacaccaacuuugcugcuggacagucagugguuuccguaaaauuagcgggcaauuccucucucugcccuguuaguggaugggcuauauacaguaaagacaacaguauaagaaucgguuccaagggggauguguuugucauaagggaaccauucauaucaugcucccccuuggaaugcagaaccuucuucuugacucaaggggccuugcuaaaugacaaacauuccaauggaaccauuaaagacaggagcccauaucgaacccuaaugagcuguccuauuggugaaguucccucuccauacaacucaagauuugagucagucgcuuggucagcaagugcuugucaugauggcaucaauuggcuaacaauuggaauuucuggcccagacaauggggcaguggcuguguuaaaguacaacggcauaauaacagacacuaucaagaguuggagaaacaauauauugagaacacaagagucugaaugugcauguguaaaugggucuugcuuuacuguaaugaccgauggaccaagugauggacaggccucauacaagaucuucagaauagaaaagggaaagauagucaaaucagucgaaaugaaugccccuaauuaucacuaugaggaaugcuccuguuauccugauucuagugaaaucacaugugugugcagggauaacuggcauggaucgaaucgaccgugggugucuuucaaccagaaucuggaauaucagauaggauacauaugcagugggauuuucggagacaauccacgcccuaaugauaagacaggcaguugugguccaguaucgucuaauggagcaaauggaguaaaaggauuuucauucaaauacggcaaugguguuuggauagggagaacuaaaagcauuaguucaaggaacgguuuugagaugauuugggauccgaacggauggacugggacagacaauaacuucucaauaaagcaagauaucguaggaauaaaugaguggucaggauauagcgggaguuuuguucagcauccagaacuaacagggcuggauuguauaagaccuugcuucuggguugaacuaaucagagggcgacccaaagagaacacaaucuggacuagcgggagcagcauauccuuuugugguguaaacagugacacuguggguuggucuuggccagacggugcugaguugccauuuaccauugacaaguaa

SEQ ID NO: 50108 - RNA, 1410 nt, Artificial Sequence; identical to SEQ ID NO: 49794
  derived and/or modified CDS sequence (wt) from neuraminidase__InfluenzaA__ADD21847

SEQ ID NO: 50109 - RNA, 1410 nt, Artificial Sequence; identical to SEQ ID NO: 49794
  derived and/or modified CDS sequence (wt) from neuraminidase__InfluenzaA__ADD21857

SEQ ID NO: 50110 - RNA, 1410 nt, Artificial Sequence
  derived and/or modified CDS sequence (wt) from neuraminidase__InfluenzaA__ADD21867
augaauccaaaccaaaagauaauaaccauugguucggucuguaugacaauuggaauggcuaauuuaauauuacaaauuggaaacauaaucucaauauggauuagccacucaauucaacuugggaaucaaaaucagauugaaacaugcaaucaaagcgucauuacuuaugaaaacaacacuuggguaaaucagacauauguuaacaucagcaacaccaacuuugcugcuggacagucagugguuuccgugaaauuagcgggcaauuccucucucugcccuguuaguggaugggcuauauacaguaaagacaacaguauaagaaucgguuccaagggggauguguuugucauaagggaaccauucauaucaugcucccccuuggaaugcagaaccuucuucuugacucaaggggccuugcuaaaugacaaacauuccaauggaaccauuaaagacaggagcccauaucgaacccuaaugaguuguccuauuggugaaguucccucuccauacaacucaagauuugagucagucgcuuggucagcaagugcuugucaugauggcaucaauuggcuaacaauuggaauuucuggcccagacaauggggcaguggcuguguuaaaguacaacggcauaauaacagacacuaucaagaguuggagaaacaauauauugagaacacaagagucugaaugugcauguguaaaugguucuugcuuuacuguaaugaccgauggaccaagugauggacaggccucauacaagaucuucagaauagaaaagggaaagauagucaaaucagucgaaaugaaugccccuaauuaucacuaugaggaaugcuccuguuauccugauucuagugaaaucacaugugugugcagggauaacuggcauggcucgaaucgaccgugggugucuuucaaccagaaucuggaauaucagauaggauacauaugcagugggauuuucggagacaauccacgcccuaaugacaagacaggcaguugugguccaguaucgucuaauggagcaaauggaguaaaaggauuuucauucaaauacggcaaugguguuuggauagggagaacuaaaagcauuaguucaagaaacgguuuugagaugauuugggauccgaacggauggacugggacagacaauaacuucucaauaaagcaagauaucguaggaauaaaugaguggucaggauauagcgggaguuuuguucagcauccagaacuaacagggcuggauuguauaagaccuugcuucuggguugaacuaaucagagggcgacccaaagagaacacaaucuggacuagcgggagcagcauauccuuuugugguguaaacagugacacuguggguuggucuuggccagacggugcugaguugccauuuaccauugacaaguaa

SEQ ID NO: 50111 - RNA, 1410 nt, Artificial Sequence; identical to SEQ ID NO: 49481
  derived and/or modified CDS sequence (wt) from neuraminidase__InfluenzaA__ADD21877

SEQ ID NO: 50112 - RNA, 1410 nt, Artificial Sequence; identical to SEQ ID NO: 49481
  derived and/or modified CDS sequence (wt) from neuraminidase__InfluenzaA__ADD21897

SEQ ID NO: 50113 - RNA, 1410 nt, Artificial Sequence; identical to SEQ ID NO: 48750
  derived and/or modified CDS sequence (wt) from neuraminidase__InfluenzaA__ADD22494

SEQ ID NO: 50114 - RNA, 1410 nt, Artificial Sequence; identical to SEQ ID NO: 48750
  derived and/or modified CDS sequence (wt) from neuraminidase__InfluenzaA__ADD22504

SEQ ID NO: 50115 - RNA, 1410 nt, Artificial Sequence; identical to SEQ ID NO: 50013
  derived and/or modified CDS sequence (wt) from neuraminidase__InfluenzaA__ADD22514

SEQ ID NO: 50116 - RNA, 1410 nt, Artificial Sequence
  derived and/or modified CDS sequence (wt) from neuraminidase__InfluenzaA__ADD22524
augaauccaaaccaaaagauaauaaccauugguucggucuguaugacaauuggaauggcuaacuuaauauuacaaauuggaaacauaaucucaauauggauuagccacucaauucaacuugggaaucaaaaucagauugaaacaugcaaucaaagcgucauuacuuaugaaaacaacacuuggguaaaucagacauauguuaacaucagcaacaccaacuuugcugcugggcagucagugguuuccgugaaauuagcgggcaauuccucucucugcccuguuaguggaugggcuauauacaguaaagacaacaguauaagaaucgguuccaagggggauguguuugucauaagggaaccauucauaucaugcucccccuuggaaugcagaaccuucuucuugacucaaggggccuugcuaaaugacaaacauuccaauggaaccauuaaagacaggagcccauaucgaacucuaaugagcuguccuauuggugaaguucccucuccauacaacucaagauuugagucagucgcuuggucagcaagugcuugucaugauggcaucaauuggcuaacaauuggaauuucuggcccagacaauggggcaguggcuguguuaaaguacaacggcauaauaacagacacuaucaagaguuggagaaacaauauauugagaacacaagagucugaaugugcauguguaaaugguucuugcuuuacuguaaugaccgauggaccaagugauggacaggccucauacaagaucuucagaauagaaaagggaaagauagucaaaucagucgaaaugaaugccccuaauuaucacuaugaggaaugcuccuguuauccugauucuagugaaaucacaugugugugcagggauaacuggcauggcucgaaucgaccgugggugucuuucaaccagaaucuggaauaucagauaggauacauaugcagugggauuuucggagacaauccacgcccuaaugauaagacaggcaguugugguccaguaucgucuaauggagcaaauggaguaaaaggauuuucauucaaauacggcaaugguguuuggauagggagaacuaaaagcauuaguucaagaaacgguuuugagaugauuugggauccgaacggauggacugggacagacaauaacuucucaauaaagcaagauaucguaggaauaaaugaguggucaggauauagcgggaguuuuguucagcauccagaacuaacagggcuggauuguauaagaccuugcuucuggguugaacuaaucagagggcgacccaaagagaacacaaucuggacuagcgggagcagcauauccuuuugugguguaaacagugacacuguggguuggucuuggccagacggugcugaguugccauuuaccauugacaaguaa

SEQ ID NO: 50117 - RNA, 1410 nt, Artificial Sequence
  derived and/or modified CDS sequence (wt) from neuraminidase__InfluenzaA__ADD22534
augaauccaaaccaaaagauaauaaccauugguucggucuguaugacaauuggaauggcuaacuuaauauuacaaauuggaaacauaaucucaauauggauuagccacucaauucaacuugggaaucaaaaucagauugaaacaugcaaucaaagcgucauuacuuaugaaaacaacacuuggguaaaucagacauauguuaacaucagcaacaccaacuuugcugcuggacagucagugguuuccgugaaauuagcgggcaauuccucucucugcccuguuaguggaugggcuauauacaguaaagacaacaguauaagaaucgguuccaagggggauguguuugucauaagggaaccauucauaucaugcucccccuuggaaugcagaaccuucuucuugacucaaggggccuugcuaaaugacaaacauuccaauggaaccauuaaagacaggagcccauaucgaacccuaaugagcuguccuauuggugaaguucccucuccauacaacucaagauuugagucagucgcuuggucagcaagugcuugucaugauggcaucaauuggcuaacaauuggaauuucuggcccagacaauggggcaguggcuguguuaaaguacaacggcauaauaacagacacuaucaagaguuggagaaacaauauauugagaacacaagagucugaaugugcauguguaaaugguucuugcuuuacuguaaugaccgauggaccaagugauggacaggccucauacaagaucuucagaauagaaaagggaaagauagucaaaucagucgaaaugaaugccccuaauuaucacuaugaggaaugcuccuguuauccugauucuagugaaaucacaugugugugcagggauaacuggcauggcucgaaucgaccgugggugucuuucaaccagaaucuggaauaucagauaggauacauaugcagugggauuuucggagacaguccacgcccuaaugauaagacaggcaguugugguccaguaucgucuaauggagcaaauggaguaaaaggauuuucauucaaauacggcaaugguguuuggauagggagaacuaaaagcauuaguucaagaaacgguuuugagaugauuugggauccgaacggauggacugggacagacaauaacuucucaauaaagcaagauaucguaggaauaaaugaguggucaggauauagcgggaguuuuguucagcauccagaacuaacagggcuggauuguauaagaccuugcuucuggguugaacuaaucagagggcgacccaaagagaacacaaucuggacuagcgggagcagcauauccuuuugugguguaaacagugacacuguggguuggucuuggccagacggugcugaguugccauuuaccauugacaaguaa

SEQ ID NO: 50118 - RNA, 1410 nt, Artificial Sequence
  derived and/or modified CDS sequence (wt) from neuraminidase__InfluenzaA__ADD22544
augaauccaaaccaaaagauaauaaccauugguucggucuguaugacaauuggaauggcuaacuuaauauuacaaauuggaaacauaaucucaauauggauuagccacucaauucaacuugggaaucaaaaucagauugaaacaugcaaucaaagcgucauuacuuaugaaaacaacacuuggguaaaucagacauauguuaacaucagcaacaccaacuuugcugcuggacagucagugguuuccgugaaauuagcgggcaauuccucucucugcccuguuaguggaugggcuauauacaguaaagacaacaguauaagaaucgguuccaagggggauguguuugucauaagggaaccauucauaucaugcucccccuuggaaugcagaaccuucuucuugacucaaggggccuugcuaaaugacaaacauuccaauggaaccauuaaagacaggagcccauaucgaacccuaaugagcuguccuauuggugaaguucccucuccauacaacucaagauuugagucagucgcuuggucagcaagugcuugucaugauggcaucaauuggcuaacaauuggaauuucuggcccagacaauggggcaguggcuguguugaaguacaacggcauaauaacagacacuaucaagaguuggagaaacaauauauugagaacacaagagucugaaugugcauguguaaaugguucuugcuuuacuguaaugaccgauggaccaagugauggacaggccucauacaagaucuucagaauagaaaagggaaagauagucaaaucagucgaaaugaaugccccuaauuaucacuaugaggaaugcuccuguuauccugauucuagugaaaucacaugugugugcagggauaacuggcauggcucgaaucgaccgugggugucuuucaaccagaaucuggaauaucagauaggauacauaugcagugggauuuucggagacaauccacgcccuaaugacaagacaggcaguugugguccaguaucgucuaauggagcaaauggaguaaaaggauuuucauucaaauacggcaaugguguuuggauagggagaacuaaaagcauuaguucaagaaacgguuuugagaugauuugggauccgaacggauggacugggacagacaauaacuucucaauaaagcaagauaucguaggaauaaaugaguggucaggauauagcgggaguuuuguucagcauccagaacuaacagggcuggauuguauaagaccuugcuucuggguugaacuaaucagagggcgacccaaagagaacacaaucuggacuagcgggagcagcauauccuuuugugguguaaacagugacacuguggguuggucuuggccagacggugcugaguugccauuuaccauugacaaguaa

SEQ ID NO: 50119 - RNA, 1410 nt, Artificial Sequence; identical to SEQ ID NO: 49481
  derived and/or modified CDS sequence (wt) from neuraminidase__InfluenzaA__ADD22557

SEQ ID NO: 50120 - RNA, 1410 nt, Artificial Sequence; identical to SEQ ID NO: 48750
  derived and/or modified CDS sequence (wt) from neuraminidase__InfluenzaA__ADD22567

SEQ ID NO: 50121 - RNA, 1410 nt, Artificial Sequence; identical to SEQ ID NO: 50116
  derived and/or modified CDS sequence (wt) from neuraminidase__InfluenzaA__ADD22577

SEQ ID NO: 50122 - RNA, 1410 nt, Artificial Sequence
  derived and/or modified CDS sequence (wt) from neuraminidase__InfluenzaA__ADD22587
augaauccaaaccaaaagauaauaaccauugguucggucuguaugacaauuggaauggcuaacuuaauauuacaaauuggaaacauaaucucaauauggauuagccacucaauucaacuugggaaucaaaaucagauugaaacaugcaaucaaagcgucauuacuuaugaaaacaacacuuggguaaaucagacauauguuaacaucagcaacaccaacuuugcugcuggacagucagugguuuccgugaaauuagcgggcaauuccucucucugcccuguuaguggaugggcuauauacaguaaagacaacaguauaagaaucgguuccaagggggauguguuugucauaagggaaccauucauaucaugcucccccuuggaaugcagaaccuucuucuugacucaaggggccuugcuaaaugacaaacauuccaauggaaccauuaaagacaggagcccauaucgaacccuaaugagcuguccuauuggugaaguucccucuccauacaacucaagauuugagucagucgcuuggucagcaagugcuugucaugauggcaucaauuggcuaacaauuggaauuucuggcccagacaauggggcaguggcuguguuaaaguacaacggcauaauaacagacacuaucaagaguuggagaaacaauauauugagaacacaagagucugaaugugcauguguaaaugguucuugcuuuacuguaaugaccgauggaccaagugauggacaggccucauacaagaucuucagaauagaaaagggaaagauagucaaaucagucgaaaugaaugccccuaauuaucacuaugaggaaugcuccuguuauccugauucuagugaaaucacaugugugugcagggauaacuggcauggcucgaaucgaccgugggugucuuucaaccagaaucuggaauaucaaauaggauacauaugcagugggauuuucggagacaauccacgcccuaaugacaagacaggcaguugugguccaguaucgucuaauggagcaaauggaguaaaaggauuuucauucaaauacggcaaugguguuuggauagggagaacuaaaagcauuaguucaagaaacgguuuugagaugauuugggauccgaacggauggacugggacagacaauaacuucucaauaaagcaagauaucguaggaauaaaugaguggucaggauauagcgggaguuuuguucagcauccagaacuaacagggcuggauuguauaagaccuugcuucuggguugaacuaaucagagggcgacccaaagagaacacaaucuggacuagcgggagcagcauauccuuuugugguguaaacagugacacuguggguuggucuuggccagacggugcugaguugccauuuaccauugacaaguaa

SEQ ID NO: 50123 - RNA, 1410 nt, Artificial Sequence
  derived and/or modified CDS sequence (wt) from neuraminidase__InfluenzaA__ADD22597
augaauccaaaccaaaagauaauaaccauugguucggucuguaugacaauuggaauggccaacuuaauauuacaaauuggaaacauaaucucaauauggauuagccacucaauucaacuugggaaucaaaaucagauugaaacaugcaaucaaagcgucauuacuuaugaaaacaacacuuggguaaaucagacauauguuaacaucagcaacaccaacuuugcugcuggacagucagugguuuccgugaaauuagcgggcaauuccucucucugcccuguuaguggaugggcuauauacaguaaagacaacaguauaagaaucgguuccaagggggauguguuugucauaagggaaccauucauaucaugcucccccuuggaaugcagaaccuucuucuugacucaaggggccuugcuaaaugacaaacauuccaauggaaccauuaaagacaggagcccauaucgaacccuaaugagcuguccuauuggugaaguucccucuccauacaacucaagauuugagucagucgcuuggucagcaagugcuugucaugauggcaucaauuggcuaacaauuggaauuucuggcccagacaauggggcaguggcuguguuaaaguacaacggcauaauaacagacacuaucaagaguuggagaaacaauauauugagaacacaagagucugaaugugcauguguaaaugguucuugcuuuacuguaaugaccgauggaccaagugauggacaggccucauacaagaucuucagaauagaaaagggaaagauagucaaaucagucgaaaugaaugccccuaauuaucacuaugaggaaugcuccuguuauccugauucuagugaaaucacaugugugugcagggauaacuggcauggcucgaaucgaccgugggugucuuucaaccagaaucuggaauaucagauaggauacauaugcagugggauuuucggagacaauccacgcccuaaugauaagacaggcaguugugguccaguaucgucuaauggagcaaauggaguaaaaggauuuucauucaaauacggcaaugguguuuggauagggagaacuaaaagcauuaguucaagaaacgguuuugagaugauuugggauccgaacggauggacugggacagacaauaacuucucaauaaagcaagauaucguaggaauaaaugaguggucaggauauagcgggaguuuuguucagcauccagaacuaacagggcuggauuguauaagaccuugcuucuggguugaacuaaucagagggcgacccaaagagaacacaaucuggacuagcgggagcagcauauccuuuugugguguaaacagugacacuguggguuggucuuggccagacggugcugaguugccauuuaccauugacaaguaa

SEQ ID NO: 50124 - RNA, 1410 nt, Artificial Sequence; identical to SEQ ID NO: 50013
  derived and/or modified CDS sequence (wt) from neuraminidase__InfluenzaA__ADD22617

SEQ ID NO: 50125 - RNA, 1410 nt, Artificial Sequence
  derived and/or modified CDS sequence (wt) from neuraminidase__InfluenzaA__ADD22627
augaauccaaaccaaaagauaauaaccauugguucggucuguaugacaauuggaauggcuaacuuaauauuacaaauuggaaacauaaucucaauauggauuagccacucaauucaacuugggaaucaaaaucagauugaaacaugcaaucaaagcgucauuacuuaugaaaacaacacuuggguaaaucagacauauguuaacaucagcaacaccaacuuugcugcuggacagucagugguuuccgugaaauuagcgggcaauuccucucucugcccuguuaguggaugggcuauauacaguaaagacaacaguauaagaaucgguuccaaaggggauguguuugucauaagggaaccauucauaucaugcucccccuuggaaugcagaaccuucuucuugacucaaggggccuugcuaaaugacaaacauuccaauggaaccauuaaagacaggagcccauaucgaacccuaaugagcuguccuauuggugaaguucccucuccauacaacucaagauuugagucagucgcuuggucagcaagugcuugucaugauggcaucaauuggcuaacaauuggaauuucuggcccagacaauggggcaguggcuguguuaaaguacaacggcauaauaacagacacuaucaagaguuggagaaacaauauauugagaacacaagagucugaaugugcauguguaaaugguucuugcuuuacuguaaugaccgauggaccaagugauggacaggccucauacaagaucuucagaauagaaaagggaaagauagucaaaucagucgaaaugaaugccccuaauuaucacuaugaggaaugcuccuguuauccugauucuagugaaaucacaugugugugcagggauaacuggcauggcucgaaucgaccgugggugucuuucaaccagaaucuggaauaucagauaggauacauaugcagugggauuuucggagacaauccacgcccuaaugacaagacaggcaguugugguccaguaucgucuaauggagcaaauggaguaaaaggauuuucauucaaauacggcaaugguguuuggauagggagaacuaaaagcauuaguucaagaaacgguuuugagaugauuugggauccgaacggauggacugggacagacaauaacuucucaauaaagcaagauaucguaggaauaaaugaguggucaggauauagcgggaguuuuguucagcauccagaacuaacagggcuggauuguauaagaccuugcuucuggguugaacuaaucagagggcgacccaaagagaacacaaucuggacuagcgggagcagcauauccuuuugugguguaaacagugacacuguggguuggucuuggccagacggugcugaguugccauuuaccauugacaaguaa

SEQ ID NO: 50126 - RNA, 1410 nt, Artificial Sequence; identical to SEQ ID NO: 48750
  derived and/or modified CDS sequence (wt) from neuraminidase__InfluenzaA__ADD22637

SEQ ID NO: 50127 - RNA, 1410 nt, Artificial Sequence
  derived and/or modified CDS sequence (wt) from neuraminidase__InfluenzaA__ADD22648
augaauccaaaccaaaagauaauaaccauugguucggucuguaugacaauuggaauggcuaacuuaauauuacaaauuggaaacauaaucucaauauggauuagccacucaauucaacuugggaaucaaaaucagauugaaacaugcaaucaaagcgucauuacuuaugaaaacaacacuuggguaaaucagacauauguuaacaucagcaacaccaacuuugcugcuggacagucagugguuuccgugaaauuagcgggcaauuccucucucugcccuguuaguggaugggcuauauacaguaaagacaacaguauaagaaucgguuccaagggggauguguuugucauaagggaaccauucauaucaugcucccccuuggaaugcagaaccuucuucuugacucaaggggccuugcuaaaugacaaacauuccaaugggaccauuaaagacaggagcccauaucgaacccuaaugagcuguccuauuggugaaguucccucuccauacaacucaagauuugagucagucgcuuggucagcaagugcuugucaugauggcaucaauuggcuaacaauuggaauuucuggcccagacaauggggcaguggcuguguuaaaguacaacggcauaauaacagacacuaucaagaguuggagaaacaauauauugagaacacaagagucugaaugugcauguguaaaugguucuugcuuuacuguaaugaccgauggaccaagugauggacaggccucauacaagaucuucagaauagaaaagggaaagauagucaaaucagucgaaaugaaugccccuaauuaucacuaugaggaaugcuccuguuauccugauucuagugaaaucacaugugugugcagggauaacuggcauggcucgaaucgaccgugggugucuuucaaccagaaucuggaauaucagauaggauacauaugcagugggauuuucggagacaauccacgcccuaaugacaagacaggcaguugugguccaguaucgucuaauggagcaaauggaguaaagggauuuucauucaaauacggcaaugguguuuggauagggagaacuaaaagcauuaguucaagaaacgguuuugagaugauuugggauccgaacggauggacugggacagacaauaacuucucaauaaagcaagauaucguaggaauaaaugaguggucaggauauagcgggaguuuuguucagcauccagaacuaacagggcuggauuguauaagaccuugcuucuggguugaacuaaucagagggcgacccaaagagaacacaaucuggacuagcgggagcagcauauccuuuugugguguaaacagugacacuguggguuggucuuggccagacggugcugaguugccauuuaccauugacaaguaa

SEQ ID NO: 50128 - RNA, 1410 nt, Artificial Sequence; identical to SEQ ID NO: 50118
  derived and/or modified CDS sequence (wt) from neuraminidase__InfluenzaA__ADD22658

SEQ ID NO: 50129 - RNA, 1410 nt, Artificial Sequence; identical to SEQ ID NO: 50118
  derived and/or modified CDS sequence (wt) from neuraminidase__InfluenzaA__ADD22668

SEQ ID NO: 50130 - RNA, 1410 nt, Artificial Sequence
  derived and/or modified CDS sequence (wt) from neuraminidase__InfluenzaA__ADD22688
augaauccaaaccaaaagauaauaaccauugguucggucuguaugacaauuggaauggcuaacuuaauauuacaaauuggaaacauaaucucaauauggauuagccacucaauucaacuugggaaucaaaaucagauugaaacaugcaaucaaagcgucauuacuuaugaaaacaacacuuggguaaaucagacauauguuaacaucagcaacaccaacuuugcugcuggacagucagugguuuccgugaaauuagcgggcaauuccucucucugcccuguuaguggaugggcuauauacaguaaagacaacaguauaagaaucgguuccaagggggauguguuugucauaagggaaccauucauaucaugcucccccuuggaaugcagaaccuucuucuugacucaaggggccuugcuaaaugacaaacauuccaauggaaccauuaaagacaggagcccauaucgaacccuaaugagcuguccuauuggugaaguucccucuccauacaacucaagauuugagucagucgcuuggucagcaagugcuugucaugauggcaucaauuggcuaacaauuggaauuucuggcccagacaauggggcaguggcuguguuaaaguacaacggcauaauaacagacacuaucaagaguuggagaaacaauauauugagaacacaagagucugaaugugcauguguaaaugguucuugcuuuacuguaaugaccgauggaccaagugauggacaggccucauacaagaucuucagaauagaaaagggaaagauagucaaaucagucgaaaugaaugccccuaauuaucacuaugaggaaugcuccuguuauccugauucuagugaaaucacaugugugugcagggauaacuggcauggcucgaaucgaccgugggugucuuucaaccagaaucuggaauaucagauaggauacauaugcagugggauuuucggagacaauccacgcccuaaugacaagacaggcaguugugguccaguaucgucuaauggagcaaauggaguaaaaggauuuucauucaaauacggcaaugguguuuggauagggagaacuaaaagcauuaguucaagaaacgguuuugagaugauuugggauccgaacggauggacugggacagacaauaacuucucaauaaagcaagauaucguaggaauaaaugaguggucaggauauagcgggaguuuuguucagcauccagaacuaacagggcuggauuguauaagaccuugcuucuggauugaacuaaucagagggcgacccaaagagaacacaaucuggacuagcgggagcagcauauccuuuugugguguaaacagugacacuguggguuggucuuggccagacggugcugaguugccauuuaccauugacaaguaa

SEQ ID NO: 50131 - RNA, 1410 nt, Artificial Sequence; identical to SEQ ID NO: 50013
  derived and/or modified CDS sequence (wt) from neuraminidase__InfluenzaA__ADD22698

SEQ ID NO: 50132 - RNA, 1410 nt, Artificial Sequence
  derived and/or modified CDS sequence (wt) from neuraminidase__InfluenzaA__ADD22725
augaauccaaaccaaaagauaauaaccauugguucggucuguaugacaauuggaauggcuaacuuaauauuacaaauuggaaacauaaucucaauauggauuagccacucaauucaacuugggaaucaaaaucagauugaaacaugcaaucaaagcgucauuacuuaugaaaacaacacuuggguaaaucagacauauguuaacaucagcaacaccaacuuugcugcuggacagucagugguuuccgugaaauuagcgggcaauuccucucucugcccuguuaguggaugggcuauauacaguaaagacaacaguauaagaaucgguuccaagggggauguguuugucauaagggaaccauucauaucaugcucccccuuggaaugcagaaccuucuucuugacucaaggggccuugcuaaaugacaaacauuccaauggaaccauuaaagacaggagcccauaucgaacccuaaugagcuguccuauuggugaaguucccucuccauacaacucaagauuugagucagucgcuuggucagcaagugcuugucaugauggcaucaauuggcuaacaauuggaauuucuggcccagacaauggggcaguggcuguguuaaaguacaacggcauaauaacagacacuaucaagaguuggagaaacaauauauugagaacacaagagucugaaugugcauguguaaaugguucuugcuuuacuguaaugaccgauggaccaagugauggacaggccucauacaagaucuucagaauagaaaagggaaagauagucaaaucagucgaaaugaaugccccuaauuaucacuaugaggaaugcuccuguuauccugauucuagugaaaucacaugugugugcagggauaacuggcauggcucgaaucgaccgugggugucuuucaaccagaaucuggaauaucagauaggauacauaugcagugggauuuucggagacaauccacgcccuaaugacaagacaggcaguugugguccaguaucgucuaauggagcaaauggaguaaaaggauuuucauucaaauacggcaaugguguuuggauagggagaacuaaaagcauuaguucaagaaacgguuuugagaugauuugggauccgaacggauggacugggacagacaauaacuucucaauaaagcaagauaucguaggaauaaaugaguggucaggauauagcgggaguuuuguucagcauccagaacuaacagggcuggauuguauaagaccuugcuucuggguugaacuaaucagagggcgacccaaagaaaacacaaucuggacuagcgggagcagcauauccuuuugugguguaaacagugacacuguggguuggucuuggccagacggugcugaguugccauuuaccauugacaaguaa

SEQ ID NO: 50133 - RNA, 1410 nt, Artificial Sequence; identical to SEQ ID NO: 50116
  derived and/or modified CDS sequence (wt) from neuraminidase__InfluenzaA__ADD22735

SEQ ID NO: 50134 - RNA, 1410 nt, Artificial Sequence; identical to SEQ ID NO: 50013
  derived and/or modified CDS sequence (wt) from neuraminidase__InfluenzaA__ADD22745

SEQ ID NO: 50135 - RNA, 1410 nt, Artificial Sequence
  derived and/or modified CDS sequence (wt) from neuraminidase__InfluenzaA__ADD22755
augaauccaaaccaaaagauaauaaccauugguucggucuguaugacaauuggaauggcuaacuuaauauuacaaauuggaaacauaaucucaauauggauuagccacucaauucaacuugggaaucaaaaucagauugaaacaugcaaucaaagcgucauuacuuaugaaaacaacacuuggguaaaucagacauauguuaacaucagcaacaccaacuuugcugcuggacagucagugguuuccgugaaauuagcgggcaauuccucucucugcacuguuaguggaugggcuauauacaguaaagacaacaguauaagaaucgguuccaagggggauguguuugucauaagggaaccauucauaucaugcucccccuuggaaugcagaaccuucuucuugacucaaggggccuugcuaaaugacaaacauuccaauggaaccauuaaagacaggagcccauaucgaacccuaaugagcuguccuauuggugaaguucccucuccauacaacucaagauuugagucagucgcuuggucagcaagugcuugucaugauggcaucaauuggcuaacaauuggaauuucuggcccagacaauggggcaguggcuguguuaaaguacaacggcauaauaacagacacuaucaagaguuggagaaacaauauauugagaacacaagagucugaaugugcauguguaaaugguucuugcuuuacuguaaugaccgauggaccaagugauggacaggccucauacaagaucuucagaauagaaaagggaaagauagucaaaucagucgaaaugaaugccccuaauuaucacuaugaggaaugcuccuguuauccugauucuagugaaaucacaugugugugcagggauaacuggcauggcucgaaucgaccgugggugucuuucaaccagaaucuggaauaucagauaggauacauaugcagugggauuuucggagacaguccacgcccuaaugauaagacaggcaguugugguccaguaucgucuaauggagcaaauggaguaaaaggauuuucauucaaauacggcaaugguguuuggauagggagaacuaaaagcauuaguucaagaaacgguuuugagaugauuugggauccgaacggauggacugggacagacaauaacuucucaauaaagcaagauaucguaggaauaaaugaguggucaggauauagcgggaguuuuguucagcauccagaacuaacagggcuggauuguauaagaccuugcuucuggguugaacuaaucagagggcgacccaaagagaacacaaucuggacuagcgggagcagcauauccuuuugugguguaaacagugacacuguggguuggucuuggccagacggugcugaguugccauuuaccauugacaaguaa

SEQ ID NO: 50136 - RNA, 1410 nt, Artificial Sequence
  derived and/or modified CDS sequence (wt) from neuraminidase__InfluenzaA__ADD22765
augaauccaaaccaaaagauaauaaccauugguucggucuguaugacaauuggaauggcuaacuuaauauuacaaauuggaaacauaaucucaauauggauuagccacucaauucaacuugggaaucaaaaucagauugaaacaugcaaucaaagcgucauuacuuaugaaaacaacacuuggguaaaucagacauauguuaacaucagcaacaccaacuuugcugcugggcagucagugguuuccgugaaauuagcgggcaauuccucucucugcccuguuaguggaugggcuauauacaguaaagacaacaguauaagaaucgguuccaagggggauguguuugucauaagggaaccauucauaucaugcucccccuuggaaugcagaaccuucuucuugacucaaggggccuugcuaaaugacaaacauuccaauggaaccauuaaagacaggagcccauaucgaacccuaaugagcuguccuauuggugaaguucccucuccauacaacucaagauuugagucagucgcuuggucagcaagugcuugucaugauggcaucaauuggcuaacaauuggaauuucuggcccagacaauggggcaguggcuguguuaaaguacaacggcauaauaacagacacuaucaagaguuggagaaacaauauauugagaacacaagagucugaaugugcauguguaaaugguucuugcuuuacuguaaugaccgauggaccaagugauggacaggccucauacaagaucuucagaauagaaaagggaaagauagucaaaucagucgaaaugaaugccccuaauuaucacuaugaggaaugcuccuguuauccugauucuagugaaaucacaugugugugcagggauaacuggcauggcucgaaucgaccgugggugucuuucaaccagaaucuggaauaucagauaggauacauaugcagugggauuuucggagacaauccacgcccuaaugauaagacaggcaguugugguccaguaucgucuaauggagcaaauggaguaaaaggauuuucauucaaauacggcaaugguguuuggauagggagaacuaaaagcauuaguucaagaaacgguuuugagaugauuugggauccgaacggauggacugggacagacaauaacuucucaauaaagcaagauaucguaggaauaaaugauuggucaggauauagcgggaguuuuguucagcauccagaacuaacagggcuggauuguauaagaccuugcuucuggguugaacuaaucagagggcgacccaaagagaacacaaucuggacuagcgggagcagcauauccuuuugugguguaaacagugacacuguggguuggucuuggccagacggugcugaguugccauuuaccauugacaaguaa

SEQ ID NO: 50137 - RNA, 1410 nt, Artificial Sequence
  derived and/or modified CDS sequence (wt) from neuraminidase__InfluenzaA__ADD22775
augaauccaaaccaaaagauaauaaccauugguucggucuguaugacaauuggaauggcuaacuuaauauuacaaauuggaaacauaaucucaauauggauuagccacucaauucaacuugggaaucaaaaucagauugaaacaugcaaucaaagcgucauuacuuaugaaaacaacacuuggguaaaucagacauauguuaacaucagcaacaccaacuuugcugcuggacagucagugguuuccgugaaauuagcgggcaauuccucucucugcccuguuaguggaugggcuauauacaguaaagacaacaguauaagaaucgguuccaagggggauguguuugucauaagggaaccauucauaucaugcucccccuuggaaugcagaaccuucuucuugacucaaggggccuugcuaaaugacaaacauuccaauggaaccauuaaagacaggagcccauaucgaacccuaaugagcuguccuauuggugaaguucccucuccauacaacucaagauuugagucagucgcuuggucagcaagugcuugucaugauggcaucaauuggcuaacaauuggaauuucuggcccagacaauggagcaguggcuguguuaaaguacaacggcauaauaacagacacuaucaagaguuggagaaacaauauauugagaacacaagagucugaaugugcauguguaaaugguucuugcuuuacuguaaugaccgauggaccaagugauggacaggccucauacaagaucuucagaauagaaaagggaaagauagucaaaucagucgaaaugaaugccccuaauuaucacuaugaggaaugcuccuguuauccugauucuagugaaaucacaugugugugcagggauaacuggcauggcucgaaucgaccgugggugucuuucaaccagaaucuggaauaucagauaggauacauaugcagugggauuuucggagacaauccacgcccuaaugacaagacaggcaguugugguccaguaucgucuaauggagcaaauggaguaaaaggauuuucauucaaauacggcaaugguguuuggauagggagaacuaaaagcauuaguucaagaaacgguuuugagaugauuugggauccgaacggauggacugggacagacaauaacuucucaauaaagcaggauaucguaggaauaaaugaguggucaggauauagcgggaguuuuguucagcauccagaacuaacagggcuggauuguauaagaccuugcuucuggguugaacuaaucagagggcgacccaaagagaacacaaucuggacuagcgggagcagcauauccuuuugugguguaaacagugacacuguggguuggucuuggccagacggugcugaguugccauuuaccauugacaaguaa

SEQ ID NO: 50138 - RNA, 1410 nt, Artificial Sequence
  derived and/or modified CDS sequence (wt) from neuraminidase__InfluenzaA__ADD22785
augaauccaaaccaaaagauaauaaccauugguucggucuguaugacaauuggaauggcuaacuuaauauuacaaauuggaaacauaaucucaauauggauuagccacucaauucaacuugggaaucaaaaucagauugaaacaugcaaucaaagcgucauuacuuaugaaaacaacacuuggguaaaucagacauauguuaacaucagcaacaccaacuuugcugcuggacagucagugguuuccgugaaauuagcgggcaauuccucucucugcccuguuaguggaugggcuauauacaguaaagacaacaguauaagaaucgguuccaagggggauguguuugucauaagggaaccauucauaucaugcucccccuuggaaugcagaaccuucuucuugacucaaggggccuugcuaaaugacaaacauuccaauggaaccauuaaagacaggagcccauaucgaacccuaaugagcuguccuauuggugaaguucccucuccauacaacucaagauuugagucagucgcuuggucagcaagugcuugucaugauggcaucaauuggcuaacaauuggaauuucuggcccagacaauggggcaguggcuguguuaaaguacaacggcauaauaacagacacuaucaagaguuggagaaacaauauauugagaacacaagagucugaaugugcauguguaaaugguucuugcuuuacuguaaugaccgauggaccaagugauggacaggccucauacaagaucuucagaauagaaaagggaaagauagucaaaucagucgaaaugaaugccccuaauuaucacuaugaggaaugcuccuguuauccugauucuagugaaaucacaugugugugcagggauaacuggcauggcucgaaucgaccgugggugucuuucaaccagaaucuggaauaucagauaggauacauaugcagugggauuuucggagacaauccacgcccuaaugacaagacaggcaguugugguccuguaucgucuaauggagcaaauggaguaaaaggauuuucauucaaauacggcaaugguguuuggauagggagaacuaaaagcauuaguucaagaaacgguuuugagaugauuugggauccgaacggauggacugggacagacaauaacuucucaauaaagcaagauaucguaggaauaaaugaguggucaggauauagcgggaguuuuguucagcauccagaacuaacagggcuggauuguauaagaccuugcuucuggguugaacuaaucagagggcgacccaaagagaacacaaucuggacuagcgggagcagcauauccuuuugugguguaaacagugacacuguggguuggucuuggccagacggugcugaguugccauuuaccauugacaaguaa

SEQ ID NO: 50139 - RNA, 1410 nt, Artificial Sequence
  derived and/or modified CDS sequence (wt) from neuraminidase__InfluenzaA__ADD22795
augaauccaaaccaaaagauaauaaccauugguucggucuguaugacaauuggaauggcuaacuuaauauuacaaauuggaaacauaaucucaauauggauuagccacucaauucaacuugggaaucaaaaucagauugaaacaugcaaucaaagcgucauuacuuaugaaaacaacacuuggguaaaucagacauauguuaacaucagcaacaccaacuuugcugcuggacagucagugguuuccgugaaauuagcgggcaauuccucucucugcccuguuaguggaugggcuauauacaguaaagacaacaguauaagaaucgguuccaagggggauguguuugucauaagggaaccauucauaucaugcucccccuuggaaugcagaaccuucuucuugacucaaggggccuugcuaaaugacaaacauuccaauggaaccauuaaagacaggagcccauaucgaacccuaaugaguuguccuauuggugaaguucccucuccauacaacucaagauuugagucagucgcuuggucagcaagugcuugucaugauggcaucaauuggcuaacaauuggaauuucuggcccagacaauggggcaguggcuguguuaaaguacaacggcauaauaacagacacuaucaagaguuggagaaacaauauauugagaacacaagagucugaaugugcauguguaaaugguucuugcuuuacuguaaugaccgauggaccaagugauggacaggccucauacaagaucuucagaauagaaaagggaaagauagucaaaucagucgaaaugaaugccccuaauuaucacuaugaggaaugcuccuguuauccugauucuagugaaaucacaugugugugcagggauaacuggcauggcucgaaucgaccgugggugucuuucaaccagaaucuggaauaucagauaggauacauaugcagugggauuuucggagacaauccacgcccuaaugacaagacaggcaguugugguccaguaucgucuaauggagcaaauggaguaaaaggauuuucauucaaauacggcaaugguguuuggauagggagaacuaaaagcauuaguucaagaaacgguuuugagaugauuugggauccgaacggauggacugggacagacaauaacuucucaauaaagcaagauaucguaggaauaaaugaguggucaggauauagcgggaguuuuguucagcauccagaacuaacagggcuggauuguauaagaccuugcuucuggguugaacuaaucagagggcgacccaaagagaacacaaucuggacuagcgggagcagcauauccuuuugugguguaaacagugacacuguggguuggucuuggccagacggugcugaguugccauuuaccauugacaaguaa

SEQ ID NO: 50140 - RNA, 1410 nt, Artificial Sequence
  derived and/or modified CDS sequence (wt) from neuraminidase__InfluenzaA__ADD22805
augaauccaaaccaaaagauaauaaccauugguucggucuguaugacaauuggaauggcuaacuuaauauuacaaauuggaaacauaaucucaauauggauuagccacucaauucaacuugggaaucaaaaucagauugaaacaugcaaucaaagcgucauuacuuaugaaaacaacacuuggguaaaucagacauauguuaacaucagcaacaccaacuuugcugcugggcagucagugguuuccgugaaauuagcgggcaauuccucucucugcccuguuaguggaugggcuauauacaguaaagacaacaguauaagaaucgguuccaagggggauguguuugucauaagggaaccauucauaucaugcucccccuuggaaugcagaaccuucuuuuugacucaaggggccuugcuaaaugacaaacauuccaauggaaccauuaaagacaggagcccauaucgaacucuaaugagcuguccuauuggugaaguucccucuccauacaacucaagauuugagucagucgcuuggucagcaagugcuugucaugauggcaucaauuggcuaacaauuggaauuucuggcccagacaauggggcaguggcuguguuaaaguacaacggcauaauaacagacacuaucaagaguuggagaaacaauauauugagaacacaagagucugaaugugcauguguaaaugguucuugcuuuacuguaaugaccgauggaccaagugauggacaggccucauacaagaucuucagaauagaaaagggaaagauagucaaaucagucgaaaugaaugccccuaauuaucacuaugaggaaugcuccuguuauccugauucuagugaaaucacaugugugugcagggauaacuggcauggcucgaaucgaccgugggugucuuucaaccagaaucuggaauaucagauaggauacauaugcagugggauuuucggagacaauccacgcccuaaugauaagacaggcaguugugguccaguaucgucuaauggagcaaauggaguaaaaggauuuucauucaaauacggcaaugguguuuggauagggagaacuaaaagcauuaguucaagaaacgguuuugagaugauuugggauccgaacggauggacugggacagacaauaacuucucaauaaagcaagauaucguaggaauaaaugaguggucaggauauagcgggaguuuuguucagcauccagaacuaacagggcuggauuguauaagaccuugcuucuggguugaacuaaucagagggcgacccaaagagaacacaaucuggacuagcgggagcagcauauccuuuugugguguaaacagugacacuguggguuggucuuggccagacggugcugaguugccauuuaccauugacaaguaa

SEQ ID NO: 50141 - RNA, 1410 nt, Artificial Sequence; identical to SEQ ID NO: 50013
  derived and/or modified CDS sequence (wt) from neuraminidase__InfluenzaA__ADD22815

SEQ ID NO: 50142 - RNA, 1410 nt, Artificial Sequence; identical to SEQ ID NO: 48750
  derived and/or modified CDS sequence (wt) from neuraminidase__InfluenzaA__ADD22825

SEQ ID NO: 50143 - RNA, 1410 nt, Artificial Sequence; identical to SEQ ID NO: 50013
  derived and/or modified CDS sequence (wt) from neuraminidase__InfluenzaA__ADD22835

SEQ ID NO: 50144 - RNA, 1410 nt, Artificial Sequence; identical to SEQ ID NO: 49481
  derived and/or modified CDS sequence (wt) from neuraminidase__InfluenzaA__ADD22845

SEQ ID NO: 50145 - RNA, 1410 nt, Artificial Sequence; identical to SEQ ID NO: 48750
  derived and/or modified CDS sequence (wt) from neuraminidase__InfluenzaA__ADD22855

SEQ ID NO: 50146 - RNA, 1410 nt, Artificial Sequence; identical to SEQ ID NO: 48750
  derived and/or modified CDS sequence (wt) from neuraminidase__InfluenzaA__ADD22924

SEQ ID NO: 50147 - RNA, 1410 nt, Artificial Sequence; identical to SEQ ID NO: 50013
  derived and/or modified CDS sequence (wt) from neuraminidase__InfluenzaA__ADD22934

SEQ ID NO: 50148 - RNA, 1410 nt, Artificial Sequence; identical to SEQ ID NO: 50013
  derived and/or modified CDS sequence (wt) from neuraminidase__InfluenzaA__ADD22944

SEQ ID NO: 50149 - RNA, 1410 nt, Artificial Sequence; identical to SEQ ID NO: 50013
  derived and/or modified CDS sequence (wt) from neuraminidase__InfluenzaA__ADD22954

SEQ ID NO: 50150 - RNA, 1410 nt, Artificial Sequence
  derived and/or modified CDS sequence (wt) from neuraminidase__InfluenzaA__ADD22974
augaauccaaaccaaaagauaauaaccauugguucggucuguaugacaauuggaauggcuaacuuaauauuacaaauuggaaacauaaucucaauauggauuagccacucaauucaacuugggaaucaaaaucagauugaaacaugcaaucaaagcgucauuacuuaugaaaacaacacuuggguaaaucagacauauguuaacaucagcaacaccaacuuugcugcuggacagucagugguuuccgugaaauuagcgggcaauuccucucucugcccuguuaguggaugggcuauauacaguaaagacaacaguauaagaaucgguuccaagggggauguguuugucauaagggaaccauucauaucaugcucccccuuggaaugcagaaccuucuucuugacucaaggggccuugcuaaaugacaaacauuccaauggaaccauuaaagacaggagcccauaucgaacccuaaugagcuguccuauuggugaaguucccucuccauacaacucaagauuugagucagucgcuuggucagcaagugcuugucaugauggcaucaauuggcuaacaauuggaauuucuggcccagacaauggggcaguggcuguguuaaaguacaacggcauaauaacagacacuaucaagaguuggagaaacaauauauugagaacacaagagucugaaugugcauguguaaaugguucuugcuuuacuguaaugaccgauggaccaagugauggacaggccucauacaagaucuucagaauagaaaagggaaagauagucaaaucagucgaaaugaaugccccuaauuaucacuaugaggaaugcuccuguuauccugauucuagugaaaucacaugugugugcagggauaacuggcauggcucgaaucgaccgugggugucuuucaaccagaaucuggaauaucagauaggauacauaugcagugggauuuucggagacaauccacgcccuaaugacaagacaggcaguugugguccaguaucgucuaauggagcaaauggaguaaaaggauuuucauucaaauacggcaaugguguuuggauagggagaacuaaaagcauuaguucaagaaacgguuuugagaugauuugggauccgaacggauggacugggacagacaauaacuucucaauaaagcaagauaucguaggaauaaaugaguggucaggauauagcgggaguuuuguucagcauccagaacuaacagggcuggauuguauaagaccuuguuucuggguugaacuaaucagagggcgacccaaagagaacacaaucuggacuagcgggagcagcauauccuuuugugguguaaacagugacacuguggguuggucuuggccagacggugcugaguugccauuuaccauugacaaguaa

SEQ ID NO: 50151 - RNA, 1410 nt, Artificial Sequence; identical to SEQ ID NO: 50013
  derived and/or modified CDS sequence (wt) from neuraminidase__InfluenzaA__ADD23075

SEQ ID NO: 50152 - RNA, 1410 nt, Artificial Sequence
  derived and/or modified CDS sequence (wt) from neuraminidase__InfluenzaA__ADD23085
augaauccaaaccaaaagauaauaaccauugguucggucuguaugacaauuggaauggcuaacuuaauauuacaaauuggaaacauaaucucaauauggauuagccacucaauucaacuugggaaucaaaaucagauugaaacaugcaaucaaagcgucauuacuuaugaaaacaacacuuggguaaaucagacauauguuaacaucagcaacaccaacuuugcugcuggacagucagugguuuccgugaaauuagcgggcaauuccucucucugcccuguuaguggaugggcuauauacaguaaagacaacaguauaagaaucgguuccaagggggauguguuugucauaagggaacuauucauaucaugcucccccuuggaaugcagaaccuucuucuugacucaaggggccuugcuaaaugacaaacauuccaauggaaccauuaaagacaggagcccauaucgaacccuaaugagcuguccuauuggugaaguucccucuccauacaacucaagauuugagucagucgcuuggucagcaagugcuugucaugauggcaucaauuggcuaacaauuggaauuucuggcccagacaauggggcaguggcuguguuaaaguacaacggcauaauaacagacacuaucaagaguuggagaaacaauauauugagaacacaagagucugaaugugcauguguaaaugguucuugcuuuacuguaaugaccgauggaccaagugauggacaggccucauacaagaucuucagaauagaaaagggaaagauagucaaaucagucgaaaugaaugccccuaauuaucacuaugaggaaugcuccuguuauccugauucuagugaaaucacaugugugugcagggauaauuggcauggcucgaaucgaccgugggugucuuucaaccagaaucuggaauaucagauaggauacauaugcagugggauuuucggagacaauccacgcccuaaugacaagacaggcaguugugguccaguaucgucuaauggagcaaauggaguaaaaggauuuucauucaaauacggcaaugguguuuggauagggagaacuaaaagcauuaguucaagaaacgguuuugagaugauuugggauccgaacggauggacugggacagacaauaacuucucaauaaagcaggauaucguaggaauaaaugaguggucaggauauagcgggaguuuuguucagcauccagaacuaacagggcuggauuguauaagaccuugcuucuggguugaacuaaucagagggcgacccaaagagaacacaaucuggacuagcgggagcagcauauccuuuugugguguaaacagugacacuguggguuggucuuggccagacggugcugaguugccauuuaccauugacaaguaa

SEQ ID NO: 50153 - RNA, 1410 nt, Artificial Sequence; identical to SEQ ID NO: 48750
  derived and/or modified CDS sequence (wt) from neuraminidase__InfluenzaA__ADD23095

SEQ ID NO: 50154 - RNA, 1410 nt, Artificial Sequence; identical to SEQ ID NO: 50013
  derived and/or modified CDS sequence (wt) from neuraminidase__InfluenzaA__ADD23105

SEQ ID NO: 50155 - RNA, 1410 nt, Artificial Sequence
  derived and/or modified CDS sequence (wt) from neuraminidase__InfluenzaA__ADD23115
augaauccaaaccaaaagauaauaaccauugguucggucuguaugacaauuggaauggcuaacuuaauauuacaaauuggaaacauaaucucaauauggauuagccacucaauucaacuugggaaucaaaaucagauugaaacaugcaaucaaagcgucauuacuuaugaaaacaacacuuggguaaaucagacauauguuaacaucagcaacaccaacuuugcugcuggacagucagugguuuccgugaaauuagcgggcaauuccucucucugcccuguuaguggaugggcuauauacaguaaagacaacaguauaagaaucgguuccaagggggauguguuugucauaagggaaccauucauaucaugcucccccuuggaaugcagaaccuucuucuugacucaaggggccuugcuaaaugacaaacauuccaauggaaccauuaaagacaggagcccauaucgaacccuaaugagcuguccuauuggugaaguucccucuccauacaacucaagauuugagucagucgcuuggucagcaagugcuugucaugauggcaucaauuggcuaacaauuggaauuucuggcccagacaauggggcaguggcuguguuaaaguacaacggcauaauaacagacacuaucaagaguuggagaaacaauauauugagaacacaagagucugaaugugcauguguaaaugguucuugcuuuacuguaaugaccgauggaccaagugauggacaggccucauacaagaucuucagaauagaaaagggaaagauagucaaaucagucgaaaugaaugccccuaauuaucacuaugaggaaugcuccuguuauccugauucuagugaaaucacaugugugugcagggauaacuggcauggcucgaaucgaccgugggugucuuucaaccagaaucuggaauaucagauaggauacauaugcagugggaucuucggagacaauccacgcccuaaugacaagacaggcaguugugguccaguaucgucuaauggagcaaauggaguaaaaggauuuucauucaaauacggcaaugguguuuggauagggagaacuaaaagcauuaguucaagaaacgguuuugagaugauuugggauccgaacggauggacugggacagacaauaacuucucaauaaagcaggauaucguaggaauaaaugaguggucaggauauagcgggaguuuuguucagcauccagaacuaacagggcuggauuguauaagaccuugcuucuggguugaacuaaucagagggcgacccaaagagaacacaaucuggacuagcgggagcagcauauccuuuugugguguaaacagugacacuguggguuggucuuggccagacggugcugaguugccauuuaccauugacaaguaa

SEQ ID NO: 50156 - RNA, 1410 nt, Artificial Sequence; identical to SEQ ID NO: 50155
  derived and/or modified CDS sequence (wt) from neuraminidase__InfluenzaA__ADD23125

SEQ ID NO: 50157 - RNA, 1410 nt, Artificial Sequence
  derived and/or modified CDS sequence (wt) from neuraminidase__InfluenzaA__ADD23135
augaauccaaaccaaaagauaauaaccauugguucggucuguaugacaauuggaauggcuaacuuaauauuacaaauuggaaacauaaucucaauauggauuagccacucaauucaacuugggaaucaaaaucagauugaaacaugcaaucaaagcgucauuacuuaugaaaacaacacuuggguaaaucagacauauguuaacaucagcaacaccaacuuugcugcuggacagucagugguuuccgugaaauuagcgggcaauuccucucucugcccuguuaguggaugggcuauauacaguaaagacaacaguauaagaaucgguuccaagggggauguguuugucauaagggaaccauucauaucaugcucccccuuggaaugcagaaccuucuucuugacucaaggggccuugcuaaaugacaaacauuccaauggaaccauuaaagacaggagcccauaucgaacccuaaugagcuguccuauuggugaaguucccucuccauacaacucaagauuugagucagucgcuuggucagcaagugcuugucaugauggcaucaauuggcuaacaauuggaauuucuggcccagacaauggggcaguggcuguguuaaaguacaacggcauaauaacagacacuaucaagaguuggagaaacaacauauugagaacacaagagucugaaugugcauguguaaaugguucuugcuuuacuguaaugaccgauggaccaagugauggacaggccucauacaagaucuucagaauagaaaagggaaagauagucaaaucagucgaaaugaaugccccuaauuaucacuaugaggaaugcuccuguuauccugauucuagugaaaucacaugugugugcagggauaacuggcauggcucgaaucgaccgugggugucuuucaaccagaaccuggaauaucagauaggauacauaugcagugggauuuucggagacaauccacgcccuaaugauaagacaggcaguugugguccaguaucgucuaauggagcaaauggaguaaaaggauuuucauucaaauacggcaaugguguuuggauagggagaacuaaaagcauuaguucaagaaacgguuuugagaugauuugggauccgaacggauggacugggacagacaauaacuucucaauaaagcaagauaucguaggaauaaaugaguggucaggauauagcgggaguuuuguucagcauccagaacuaacagggcuggauuguauaagaccuugcuucuggguugaacuaaucagagggcgacccaaagagaacacaaucuggacuagcgggagcagcauauccuuuugugguguaaacagugacacuguggguuggucuuggccagacggugcugaguugccauuuaccauugacaaguaa

SEQ ID NO: 50158 - RNA, 1410 nt, Artificial Sequence; identical to SEQ ID NO: 49794
  derived and/or modified CDS sequence (wt) from neuraminidase__InfluenzaA__ADD23145

SEQ ID NO: 50159 - RNA, 1410 nt, Artificial Sequence
  derived and/or modified CDS sequence (wt) from neuraminidase__InfluenzaA__ADD23155
augaauccaaaccaaaagauaauaaccauugguucggucuguaugacaauuggaauggcuaacuuaauauuacaaauuggaaacauaaucucaauauggauuagccacucaauucaacuugggaaucaaaaucagauugaaacaugcaaucaaagcgucauuacuuaugaaaacaacacuuggguaaaucagacauauguuaacaucagcaacaccaacuuugcugcuggacagucagugguuuccgugaaauuagcgggcaauuccucucucugcccuguuaguggaugggcuauauacaguaaagacaacaguauaagaaucgguuccaagggggauguguuugucauaagggaaccauucauaucaugcucccccuuggaaugcagaaccuucuucuugacucaaggggccuugcuaaaugacaaacauuccaauggaaccauuaaagacaggagcccauaucgaacccuaaugagcuguccuauuggugaaguucccucuccauacaacucaagauuugagucagucgcuuggucagcaagugcuugucaugauggcaucaauuggcuaacaauuggaauuucuggcccagacaauggggcaguggcuguguuaaaguacaacggcauaauaacagacacuaucaagaguuggagaaacaauauauugagaacacaagagucugaaugugcauguguaaaugguucuugcuuuacuguaaugaccgauggaccaagugauggacaggccucauacaagaucuucagaauagaaaagggaaagauagucaaaucagucgaaaugaaugccccuaauuaucacuaugaggaaugcuccuguuauccugauucuagugaaaucacaugugugugcagggauaacuggcauggcucgaaucgaccguggguaucuuucaaccagaaucuggaauaucagauaggauacauaugcagugggauuuucggagacaauccacgcccuaaugauaagacaggcaguugugguccaguaucgucuaauggagcaaauggaguaaaaggauuuucauucaaauacggcaaugguguuuggauagggagaacuaaaagcauuaguucaagaaacgguuuugagaugauuugggauccgaacggauggacugggacagacaauaacuucucaauaaagcaagauaucguaggaauaaaugaguggucaggauauagcgggaguuuuguucagcauccagaacuaacagggcuggauuguauaagaccuugcuucuggguugaacuaaucagagggcgacccaaagagaacacaaucuggacuagcgggagcagcauauccuuuugugguguaaacagugacacuguggguuggucuuggccagacggugcugaguugccauuuaccauugacaaguaa

SEQ ID NO: 50160 - RNA, 1410 nt, Artificial Sequence; identical to SEQ ID NO: 49794
  derived and/or modified CDS sequence (wt) from neuraminidase__InfluenzaA__ADD23165

SEQ ID NO: 50161 - RNA, 1410 nt, Artificial Sequence; identical to SEQ ID NO: 49794
  derived and/or modified CDS sequence (wt) from neuraminidase__InfluenzaA__ADD23175

SEQ ID NO: 50162 - RNA, 1410 nt, Artificial Sequence; identical to SEQ ID NO: 49794
  derived and/or modified CDS sequence (wt) from neuraminidase__InfluenzaA__ADD23185

SEQ ID NO: 50163 - RNA, 1410 nt, Artificial Sequence; identical to SEQ ID NO: 49794
  derived and/or modified CDS sequence (wt) from neuraminidase__InfluenzaA__ADD23195

SEQ ID NO: 50164 - RNA, 1410 nt, Artificial Sequence
  derived and/or modified CDS sequence (wt) from neuraminidase__InfluenzaA__ADD23223
augaauccaaaccaaaagauaauaaccauugguucggucuguaugacaauuggaauggcuaacuuaauauuacaaauuggaaacauaaucucaauauggauuagccacucaauucaacuugggaaucaaaaucagauugaaacaugcaaucaaagcgucauuacuuaugaaaacaacacuuggguaaaucagacauauguuaacaucagcaacaccaacuuugcugcuggacagucagugguuuccgugaaauuagcgggcaauuccucucucugcccuguuaguggaugggcuauauacaguaaagacaacaguauaagaaucggguccaagggggauguguuugucauaagggaaccauucauaucaugcucccccuuggaaugcagaaccuucuucuugacucaaggggccuugcuaaaugacaaacauuccaauggaaccauuaaagacaggagcccauaucgaacccuaaugagcuguccuauuggugaaguucccucuccauacaacucaagauuugagucagucgcuuggucagcaagugcuugucaugauggcaucaauuggcuaacaauuggaauuucuggcccagacaauggggcaguggcuguguuaaaguacaacggcauaauaacagacacuaucaagaguuggagaaacaauauauugagaacacaagagucugaaugugcauguguaaaugguucuugcuuuacuguaaugaccgauggaccaagugauggacaggccucauacaagaucuucagaauagaaaagggaaagauagucaaaucagucgaaaugaaugccccuaauuaucacuaugaggaaugcuccuguuauccugauucuagugaaaucacaugugugugcagggauaacuggcauggcucgaaucgaccgugggugucuuucaaucagaaucuggaauaucagauaggauacauaugcagugggauuuucggagacaauccacgcccuaaugauaagacaggcaguugugguccaguaucgucuaauggagcaaauggaguaaaaggauuuucauucaaauacggcaaugguguuuggauagggagaacuaaaagcauuaguucaagaaacgguuuugagaugauuugggauccgaacggauggacugggacagacaauaacuucucaauaaagcaagauaucguaggaauaaaugaauggucaggauauagcgggaguuuuguucagcauccagaacuaacagggcuggauuguauaagaccuugcuucuggguugaacuaaucagagggcgacccaaagagaacacaaucuggacuagcgggagcagcauauccuuuugugguguaaacagugacacuguggguuggucuuggccagacggugcugaguugccauuuaccauugacaaguaa

SEQ ID NO: 50165 - RNA, 1410 nt, Artificial Sequence
  derived and/or modified CDS sequence (wt) from neuraminidase__InfluenzaA__ADD23233
augaauccaaaccaaaagauaauaaccauugguucggucuguaugacaauuggaauggcuaacuuaauauuacaaauuggaaacauaaucucaauauggauuggccacucaauucaacuugggaaucaaaaucagauugaaacaugcaaucaaagcgucauuacuuaugaaaacaacacuuggguaaaucagacauauguuaacaucagcaacaccaacuuugcugcuggacagucagugguuuccgugaaauuagcgggcaauuccucucucuguccuguuaguggaugggcuauauacaguaaagacaacaguauaagaaucgguuccaagggggauguguuugucauaagggaaccauucauaucaugcucccccuuggaaugcagaaccuucuucuugacucaaggggccuugcuaaaugacaaacauuccaauggaaccauuaaagacaggagcccauaucgaacccuaaugagcuguccuauuggugaaguucccucuccauacaacucaagauuugagucagucgcuuggucagcaagugcuugucaugauggcaucaauuggcuaacaauuggaauuucuggcccagacaauggggcaguggcuguguuaaaguacaacggcauaauaacagacacuaucaagaguuggagaaacaauauauugagaacacaagagucugaaugugcauguguaaaugguucuugcuuuacuguaaugaccgauggaccaagugauggacaggccucauacaagaucuucagaauagaaaagggaaagauagucaaaucagucgaaaugaaugccccuaauuaucacuaugaggaaugcuccuguuauccugauucuagugaaaucacaugugugugcagggauaacuggcauggcucgaaucgaccgugggugucuuucaaccagaaucuggaauaucagauaggauacauaugcagugggauuuucggagacaauccacgcccuaaugauaagacaggcaguugugguccaguaucgucuaauggagcaaauggaguaaaaggauuuucauucaaauacggcaaugguguuuggauagggagaacuaaaagcauuaguucaaggaacgguuuugagaugauuugggauccgaacggauggacugggacagacaauaacuucucaauaaagcaagauaucguaggaauaaaugaguggucaggauauagcgggaguuuuguucagcauccagaacuaacagggcuggauuguauaagaccuugcuucuggguugaacuaaucagagggcgacccaaagagaacacaaucuggacuagcgggagcagcauauccuuuugugguguaaacagugacacuguggguuggucuuggccagacggugcugaguugccauuuaccauugacaaguaa

SEQ ID NO: 50166 - RNA, 1410 nt, Artificial Sequence
  derived and/or modified CDS sequence (wt) from neuraminidase__InfluenzaA__ADD23243
augaauccaaaccaaaagauaauaaccauugguucggucuguaugacaauuggaauggcuaacuuaauauuacaaauuggaaacauaaucucaauauggauuagccacucaauucaacuugggaaucaaaaucagauugaaacaugcaaucaaagcgucauuacuuaugaaaacaacacuuggguaaaucagacauauguuaacaucagcaacaccaacuuugcugcuggacagucagugguuuccgugaaauuagcgggcaauuccucucucugcccuguuaguggaugggcuauauacaguaaagacaacaguauaagaaucgguuccaagggggauguguuugucauaagggaaccauucauaucaugcucccccuuggaaugcagaaccuucuucuugacucaaggggccuugcuaaaugacaaacauuccaauggaaccauuaaagacaggagcccauaucgaacccuaaugagcuguccuauuggugaaguucccucuccauacaacucaagauuugagucagucgcuuggucagcaagugcuugucaugauggcaucaauuggcuaacaauuggaauuucuggcccagacaauggggcaguggcuguguuaaaguacaacggcauaauaacagacacuaucaagaguuggagaaacaauauauugagaacacaagagucugaaugugcauguguaaaugguucuugcuuuacuguaaugaccgauggaccaagugauggacaggccucauacaagaucuucagaauagaaaagggaaagauagucaaaucagucgaaaugaaugccccuaauuaucacuaugaggaaugcuccuguuauccugauucuagugaaaucacaugugugugcagggauaacuggcauggcucgaaucgaccgugggugucuuucaaccagaaucuggaauaucagauaggauacauaugcagugggauuuucggagacaauccacgcccuaaugauaagacaggcaguugugguccaguaucgucuaauggagcaaauggaguaaaaggauuuucauucaaauacggcaaugguguuuggauagggagaacuaaaagcauuaguucaagaaacgguuuugagaugauuugggauccgaacggauggacugggacagacaauaacuucucaauaaagcaagauaucguaggaauaaaugaauggucaggauauagcgggaguuuuguucagcauccagaacuaacagggcuggauuguauaagaccuugcuucuggguugaacuaaucagagggcgacccaaagagaacacaaucuggacuagugggagcagcauauccuuuugugguguaaacagugacacuguggguuggucuuggccagacggugcugaguugccauuuaccauugacaaguaa

SEQ ID NO: 50167 - RNA, 1410 nt, Artificial Sequence
  derived and/or modified CDS sequence (wt) from neuraminidase__InfluenzaA__ADD23253
augaauccaaaccaaaagauaauaaccauugguucggucuguaugacaauuggaauggcuaacuuaauauuacaaauuggaaacauaaucucaauauggauuagccacucaauucaacuugggaaucaaaaucagauugaaacaugcaaucaaagcgucauuacuuaugaaaacaacacuuggguaaaucagacauauguuaacaucagcaacaccaacuuugcugcuggacagucagugguuuccgugaaauuagcgggcaauuccucucucugcccuguuaguggaugggcuauauacaguaaagacaacaguauaagaaucgguuccaagggggauguguuugucauaagggaaccauucauaucaugcucccccuuggaaugcagaaccuucuucuugacucaaggggccuugcuaaaugacaaacauuccaauggaaccauuaaagacaggagcccauaucgaacccuaaugagcuguccuauuggugaaguucccucuccauacaacucaagauuugagucagucgcuuggucagcaagugcuugucaugauggcaucaauuggcuaacaauuggaauuucuggcccagacaauggggcaguggcuguguuaaaguacaacggcauaauaacagacacuaucaagaguuggagaaacaauauauugagaacacaagagucugaaugugcauguguaaaugguucuugcuuuacuguaaugaccgauggaccaagugauggacaggccucauacaagaucuucagaauagaaaagggaaagauagucaaaucagucgaaaugaaugccccuaauuaucacuaugaggaaugcuccuguuauccugauucuagugaaaucacaugugugugcagggauaacuggcauggcucgaaucgaccguggguaucuuucaaccagaaucuagaauaucagauaggauacauaugcagugggauuuucggagacaauccacgcccuaaugauaagaaaggcaguugugguccaguaucgucuaauggagcaaauggaguaaaaggauuuucauucaaauacggcaaugguguuuggauagggagaacuaaaagcauuaguucaagaaacgguuuugagaugauuugggauccgaacggauggacugggacagacaauaacuucucaauaaagcaagauaucguaggaauaaaugaguggucaggauauagcggaaguuuuguucagcauccagaacuaacagggcuggauuguauaagaccuugcuucuggguugaacuaaucagagggcgacccaaagagaacacaaucuggacuagcgggagcagcauauccuuuugugguguaaacagugacacuguggguuggucuuggccggacggugcugaguugccauuuaccauugacaaguaa

SEQ ID NO: 50168 - RNA, 1410 nt, Artificial Sequence
  derived and/or modified CDS sequence (wt) from neuraminidase__InfluenzaA__ADD23273
augaauccaaaccaaaagauaauaaccauugguucggucuguaugacaauuggaauggcuaacuuaauauuacaaauuggaaacauaaucucaauauggauuagccacucaauucaacuugggaaucaaaaucagauugaaacaugcaaucaaagcgucauuacuuaugaaaacaacacuuggguaaaucagacauauguuaacaucagcaacaccaacuuugcugcuggacagucagugguuuccgugaaauuagcgggcaauuccucucucugcccuguuaguggaugggcuauauacaguaaagacaacaguauaagaaucgguuccgagggggauguguuugucauaagggaaccauucauaucaugcucccccuuggaaugcagaaccuucuucuugacucaaggggccuugcuaaaugacaaacauuccaauggaaccauuaaagacaggagcccauaucgaacccuaaugagcuguccuauuggugaaguucccucuccauacaacucaagauuugagucagucgcuuggucagcaagugcuugucaugauggcaucaauuggcuaacaauuggaauuucuggcccagacaauggggcaguggcuguguuaaaguacaacggcauaauaacagacacuaucaagaguuggagaaacaauauauugagaacacaagagucugaaugugcauguguaaaugguucuugcuuuacuguaaugaccgauggaccaagugauggacaggccucauacaagaucuucagaauagaaaagggaaagauagucaaaucagucgaaaugaaugccccuaauuaucacuaugaggaaugcuccuguuauccugauucuagugaaaucacaugugugugcagggauaacuggcauggcucgaaucgaccgugggugucuuucaaccagaaucuggaauaucagauaggauacauaugcagugggauuuucggagacaauccacgcccuaaugauaagacaggcaguugugguccaguaucgucuaauggagcaaauggaguaaaaggauuuucauucaaauacggcaaugguguuuggauagggagaacuaaaagcauuaguucaagaaacgguuuugagaugauuugggauccgaacggauggacugggacagacaauaacuucucaauaaagcaagauaucguaggaauaaaugaauggucaggauauagcgggaguuuuguucagcauccagaacuaacagggcuggauuguauaagaccuugcuucuggguugaacuaaucagagggcgacccaaagagaacacaaucuggacuagcgggagcagcauauccuuuugugguguaaacagugacacuguggguuggucuuggccagacggugcugaguugccauuuaccauugacaaguaa

SEQ ID NO: 50169 - RNA, 1410 nt, Artificial Sequence
  derived and/or modified CDS sequence (wt) from neuraminidase__InfluenzaA__ADD23283
augaauccaaaccaaaagauaauaaccauugguucggucuguaugacaauuggaauggcuaacuuaauauuacaaauuggaaacauaaucucaauauggauuagccacucaauucaacuugggaaucaaaaucagauugaaacaugcaaucaaagcgucauuacuuaugaaaacaacacuuggguaaaucagacauauguuaacaucagcaacaccaacuuugcugcuggacagucagugguuuccgugaaauuagcgggcaauuccucucucugcccuguuaguggaugggcuauauacaguaaagacaacaguauaagaaucgguuccaagggggauguguuugucauaagggaaccauucauaucaugcucccccuuggaaugcagaaccuucuucuugacucaaggggccuugcuaaaugacaaacauuccaauggaaccauuaaagacaggagcccauaucgaacccuaaugagcuguccuauuggugaaguucccucuccauacaacucaagauuugagucagucgcuuggucagcaagugcuugucaugauggcaucaauuggcuaacaauuggaauuucuggcccagacaauggggcaguggcuguguuaaaguacaacggcauaauaacagacacuaucaagaguuggagaaacaauauauugagaacacaagagucugaaugugcauguguaaaugguucuugcuuuacuguaaugaccgauggaccaagugauggacaggccucauacaagaucuucagaauagaaaagggaaagauagucaaaucagucgaaaugaaugccccuaauuaucacuaugaggaaugcuccuguuauccugauucuagugaaaucacauguguaugcagggauaacuggcauggcucgaaucgaccgugggugucuuucaaccagaaucuggaauaucagauaggauacauaugcagugggauuuucggagacaauccacgcccuaaugauaagacaggcaguugugguccaguaucgucuaauggagcaaauggaguaaaaggauuuucauucaaauacggcaaugguguuuggauagggagaacuaaaagcauuaguucaagaaacgguuuugaaaugauuugggauccgaacggauggacugggacagacaauaacuucucaauaaagcaagauaucguaggaauaaaugaguggucaggauauagcgggaguuuuguucagcauccagaacuaacagggcuggauuguauaagaccuugcuucuggguugaacuaaucagagggcgaccaaaagagaacacaaucuggacuagcgggagcagcauauccuuuugugguguaaacagugacacuguggguuggucuuggccagacggugcugaguugccauuuaccauugacaaguaa

SEQ ID NO: 50170 - RNA, 1410 nt, Artificial Sequence
  derived and/or modified CDS sequence (wt) from neuraminidase__InfluenzaA__ADD23293
augaauccaaaccaaaagauaauaaccauugguucggucuguaugacaauuggaauggcuaacuuaauacuacaaauuggaaacauaaucucaauauggauuagccacucaauucaacuugggaaucaaaaucagauugaaacaugcaaucaaagcgucauuacuuaugaaaacaacacuuggguaaaucagacauauguuaacaucagcaacaccaacuuugcugcuggacagucagugguuuccgugaaauuagcgggcaauuccucucucugcccuguuaguggaugggcuauauacaguaaagacaacaguauaagaaucgguuccaagggggauguguuugucauaagggaaccauucauaucaugcucccccuuggaaugcagaaccuucuucuugacucaaggggccuugcuaaaugacaaacauuccaauggaaccauuaaagacaggagcccauaucgaacccuaaugagcuguccuauuggugaaguucccucuccauacaacucaagauuugagucagucgcuuggucagcaagugcuugucaugauggcaucaauuggcuaacaauuggaauuucuggcccagacaauggggcaguggcuguguuaaaguacaacggcauaauaacagacacuaucaagaguuggagaaacaauauauugagaacacaagagucugaaugugcauguguaaaugguucuugcuuuacuguaaugaccgauggaccaagugauggacaggccucauacaagaucuucagaauagaaaagggaaagauagucaaaucagucgaaaugaaugccccuaauuaucacuaugaggaaugcuccuguuauccugauucuagugaaaucacaugugugugcagggauaacuggcauggcucgaaucgaccgugggugucuuucaaccagaaucuggaauaucagauaggauacauaugcagugggauuuucggagacaauccacgcccuaaugauaagacaggcaguugugguccaguaucgucuaauggagcaaauggaguaaaaggauuuucauucaaauacggcaaugguguuuggauagggagaacuaaaagcauuaguucaagaaacgguuuugagaugauuugggauccgaacggauggacugggacagacaauaacuucucaauaaagcaagauaucguaggaauaaaugaguggucaggauauagcgggaguuuuguucagcauccagaacuaacagggcuggauuguauaagaccuugcuucuggguugaacuaaucagagggcgacccaaagagaacacaaucuggacuagcgggagcagcauauccuuuugugguguaaacagugacacuguggguuggucuuggccagacggugcugaguugccauuuaccauugacaaguaa

SEQ ID NO: 50171 - RNA, 1410 nt, Artificial Sequence
  derived and/or modified CDS sequence (wt) from neuraminidase__InfluenzaA__ADD23303
augaauccaaaccaaaagauaauaaccauugguucggucuguaugacaauuggaauggcuaacuuaauauuacaaauuggaaacauaaucucaauauggauuagccacucaauucaacuugggaaucaaaaucagauugaaacaugcaaucaaagcgucauuacuuaugaaaacaacacuuggguaaaucagacauauguuaacaucagcaacaccaacuuugcugcuggacagucagugguuuccgugaaauuagcgggcaauuccucucucugcccuguuaguggaugggcuauauacaguaaagacaacaguauaagaaucggguccaagggggauguguuugucauaagggaaccauucauaucaugcucccccuuggaaugcagaaccuucuucuugacucaaggggccuugcuaaaugacaaacauuccaauggaaccauuaaagacaggagcccauaucgaacccuaaugagcuguccuauuggugaaguucccucuccauacaacucaagauuugagucagucgcuuggucagcaagugcuugucaugauggcaucaauuggcuaacaauuggaauuucuggcccagacaauggggcaguggcuguguuaaaguacaacggcauaauaacagacacuaucaagaguuggagaaacaauauauugagaacacaagagucugaaugugcauguguaaaugguucuugcuuuacuguaaugaccgauggaccaagugauggacaggccucauacaagaucuucagaauagaaaagggaaagauagucaaaucagucgaaaugaaugccccuaauuaucacuaugaggaaugcuccuguuauccugauucuagugaaaucacaugugugugcagggauaacuggcauggcucgaaucgaccgugggugucuuucaaccagaaucuggaauaucagauaggauacauaugcagugggauuuucggagacaauccacgcccuaaugauaagacaggcaguugugguccaguaucgucuaauggagcaaauggaguaaaaggauuuucauucaaauacggcaaugguguuuggauagggagaacuaaaagcauuaguucaagaaacgguuuugagaugauuugggauccgaacggauggacugggacagacaauaacuucucaauaaagcaagauaucguaggaauaaaugaauggucaggauauagcgggaguuuuguucagcauccagaacuaacagggcuggauuguauaagaccuugcuucuggguugaacuaaucagagggcgacccaaagagaacacaaucuggacuagcgggagcagcauaucuuuuugugguguaaacagugacacuguggguuggucuuggccagacggugcugaguugccauuuaccauugacaaguaa

SEQ ID NO: 50172 - RNA, 1410 nt, Artificial Sequence; identical to SEQ ID NO: 48750
  derived and/or modified CDS sequence (wt) from neuraminidase__InfluenzaA__ADD23313

SEQ ID NO: 50173 - RNA, 1410 nt, Artificial Sequence
  derived and/or modified CDS sequence (wt) from neuraminidase__InfluenzaA__ADD23323
augaauccaaaccaaaagauaauaaccauugguucggucuguaugacaauuggaauggcuaacuuaauauuacaaauuggaaacauaaucucaauauggauuagccacucaauucaacuugggaaucaaaaucagauugaaacaugcaaucaaagcgucauuacuuaugaaaacaacacuuggguaaaucagacauauguuaacaucagcaacaccaacuuugcugcuggacagucagugguuuccgugaaauuagcgggcaauuccucucucugcccuguuaguggaugggcuauauacaguaaagacaacaguauaagaaucggguccaagggggauguguuugucauaagggaaccauucauaucaugcucccccuuggaaugcagaaccuucuucuugacucaaggggccuugcuaaaugacaaacauuccaauggaaccauuaaagacaggagcccauaucgaacccuaaugagcuguccuauuggugaaguucccucuccauacaacucaagauuugagucagucgcuuggucagcaagugcuugucaugauggcaucaauuggcuaacaauuggaauuucuggcccagacaauggggcaguggcuguguuaaaguacaacggcauaauaacagacacuaucaagaguuggagaaacaauauauugagaacacaagagucugaaugugcauguguaaaugguucuugcuuuacuguauugaccgauggaccaagugauggacaggccucauacaagaucuucagaauagaaaagggaaagauagucaaaucagucgaaaugaaugccccuaauuaucacuaugaggaaugcuccuguuauccugauucuagugaaaucacaugugugugcagggauaacuggcauggcucgaaucgaccgugggugucuuucaaccagaaucuggaauaucagauaggauacauaugcagugggauuuucggagacaauccacgcccuaaugauaagacaggcaguugugguccaguaucgucuaauggagcaaauggaguaaaaggauuuucauucaaauacggcaaugguguuuggauagggagaacuaaaagcauuaguucaagaaacgguuuugagaugauuugggauccgaacggauggacugggacagacaauaacuucucaauaaagcaagauaucguaggaauaaaugaauggucaggauauagcgggaguuuuguucagcauccagaacuaacagggcuggauuguauaagaccuugcuucuggguugaacuaaucagagggcgacccaaagagaacacaaucuggacuagcgggagcagcauaucuuuuugugguguaaacagugacacuguggguuggucuuggccagacggugcugaguugccauuuaccauugacaaguaa

SEQ ID NO: 50174 - RNA, 1410 nt, Artificial Sequence; identical to SEQ ID NO: 48750
  derived and/or modified CDS sequence (wt) from neuraminidase__InfluenzaA__ADD23333

SEQ ID NO: 50175 - RNA, 1410 nt, Artificial Sequence
  derived and/or modified CDS sequence (wt) from neuraminidase__InfluenzaA__ADD23358
augaauccaaaccaaaagauaauaaccauugguucggucuguaugacaauuggaauggcuaacuuaauauuacaaauuggaaacauaaucucaauauggauuagccacucaauucaacuugggaaucaaaaucagauugaaacaugcaaucaaagcgucauuacuuaugaaaacaacacuuggguaaaucagacauauguuaacaucagcaacaccaacuuugcugcuggacagucagugguuuccgugaaauuagcgggcaauuccucucucugcccuguuaguggaugggcuauauacaguaaagacaacaguauaagaaucgguuccaagggggauguguuugucauaagggaaccauucauaucaugcucccccuuggaaugcagaaccuucuucuugacucaaggggccuugcuaaaugacaaacauuccaauggaaccauuaaagacaggagcccauaucgaacccuaaugagcuguccuauuggugaaguucccucuccauacaacucaagauuugagucagucgcuuggucagcaagugcuugucaugauggcaucaauuggcuaacaauuggaauuucuggcccagacaauggggcaguggcuguguuaaaguacaacggcauaauaacagacacuaucaagaguuggagaaacaauauauugagaacacaagagucugaaugugcauguguaaaugguucuugcuuuacuguaaugaccgauggaccaagugauggacaggccucauacaagaucuucagaauagaaaagggaaagauagucaaaucagucgagaugaaugccccuaauuaucacuaugaggaaugcuccuguuauccugauucuagugaaaucacaugugugugcagggauaacuggcauggcucgaaucgaccgugggugucuuucaaccagaaucuggaauaucagauaggauacauaugcagugggauuuucggagacaauccacgcccuaaugauaagacaggcaguugugguccaguaucgucuaauggagcaaauggaguaaaaggauuuucauucaaauacggcaaugguguuuggauagggagaacuaaaagcauuaguucaagaaacgguuuugagaugauuugggauccgaacggauggacugggacagacaauaacuucucaauaaagcaagauaucguaggaauaaaugaguggucaggauauagcgggaguuuuguucagcauccagaacuaacagggcuggauuguauaagaccuugcuucuggguugaacuaaucagagggcgacccaaagagaacacaaucuggacuagcgggagcagcauauccuuuugugguguaaacagugacacuguggguuggucuuggccagacggugcugaguugccauuuaccauugacaaguaa

SEQ ID NO: 50176 - RNA, 1410 nt, Artificial Sequence
  derived and/or modified CDS sequence (wt) from neuraminidase__InfluenzaA__ADD23368
augaauccaaaccaaaagauaauaaucauugguucggucuguaugacaauuggaauggcuaacuuaauauuacaaauuggaaacauaaucucaauauggauuagccacucaauucaacuugggaaucaaaaucagauugaaacaugcaaucaaagcgucauuacuuaugaaaacaacacuuggguaaaucagacauauguuaacaucagcaacaccaacuuugcugcuggacagucagugguuuccgugaaauuagcgggcaauuccucucucugcccuguuaguggaugggcuauauacaguaaagacaacaguauaagaaucgguuccaagggggauguguuugucauaagggaaccauucauaucaugcucccccuuggaaugcagaaccuucuucuugacucaaggggccuugcuaaaugacaaacauuccaauggaaccauuaaagacaggagcccauaucgaacccuaaugagcuguccuauuggugaaguucccucuccauacaacucaagauuugagucagucgcuuggucagcaagugcuugucaugauggcaucaauuggcuaacaauuggaauuucuggcccagacaauggggcaguggcuguguuaaaguacaacggcauaauaacagacacuaucaagaguuggagaaacaauauauugagaacacaagagucugaaugugcauguguaaaugguucuugcuuuacuguaaugaccgauggaccaagugauggacaggccucauacaagaucuucagaauagaaaagggaaagauagucaaaucagucgaaaugaaugccccuaauuaucacuaugaggaaugcuccuguuauccugauucuagugaaaucacaugugugugcagggauaacuggcauggcucgaaucgaccgugggugucuuucaaccagaaucuggaauaucagauaggauacauaugcagugggauuuucggagacaauccacgcccuaaugauaagacaggcaguugugguccaguaucgucuaauggagcaaauggaguaaaaggauuuucauucaaauacggcaaugguguuuggauagggagaacuaaaagcauuaguucaagaaacgguuuugagaugauuugggauccgaacggauggacugggacagacaauaacuucucaauaaagcaagauaucguaggaauaaaugaguggucaggauauagcgggaguuuuguucagcauccagaacuaacagggcuggauuguauaagaccuugcuucuggguugaacuaaucagagggcgacccaaagagaacacaaucuggacuagcgggagcagcauauccuuuugugguguaaacagugacacuguggguuggucuuggccagacggugcugaguugccauuuaccauugacaaguaa

SEQ ID NO: 50177 - RNA, 1410 nt, Artificial Sequence; identical to SEQ ID NO: 48750
  derived and/or modified CDS sequence (wt) from neuraminidase__InfluenzaA__ADD23378

SEQ ID NO: 50178 - RNA, 1410 nt, Artificial Sequence; identical to SEQ ID NO: 50166
  derived and/or modified CDS sequence (wt) from neuraminidase__InfluenzaA__ADD23388

SEQ ID NO: 50179 - RNA, 1410 nt, Artificial Sequence
  derived and/or modified CDS sequence (wt) from neuraminidase__InfluenzaA__ADD23398
augaauccaaaccaaaagauaauaaccauugguucggucuguaugacaauuggaauggccaacuuaauauuacaaauuggaaacauaaucucaauauggauuagccacucaauucaacuugggaaucaaaaucagauugaaacaugcaaucaaagcgucauuacuuaugaaaacaacacuuggguaaaucagacauauguuaacaucagcaacaccaacuuugcugcuggacagucagugguuuccgugaaauuagcgggcaauuccucucucugcccuguuaguggaugggcuauauacaguaaagacaacaguguaagaaucgguuccaagggggauguguuugucauaagggaaccauucauaucaugcucccccuuggaaugcagaaccuucuucuugacucaaggggccuugcuaaaugacaaacauuccaauggaaccauuaaagacaggagcccauaucgaacccuaaugagcuguccuauuggugaaguucccucuccauacaacucaagauuugagucagucgcuuggucagcaagugcuugucaugauggcaucaauuggcuaacaauuggaauuucuggcccagacaauggggcaguggcuguguuaaaguacaacggcauaauaacagacacuaucaagaguuggagaaacaauauauugagaacacaagagucugaaugugcauguguaaaugguucuugcuuuacuguaaugaccgauggaccaagugauggacaggccucauacaagaucuucagaauagaaaagggaaagauagucaaaucagucgaaaugaaugccccuaauuaucacuaugaggaaugcuccuguuauccugauucuagugaaaucacaugugugugcagggauaacuggcauggcucgaaucgaccguggguuucuuucaaccagaaucuggaauaucagauaggauacauaugcagugggauuuucggagacaauccacgcccuaaugauaagacaggcaguugugguccaguaucgucuaauggagcaaauggaguaaaaggauuuucauucaaauacggcaaugguguuuggauagggagaacuaaaagcauuaguucaagaaacgguuuugagaugauuugggauccgaacggauggacugggacagacaauaacuucucaauaaagcaagauaucguaggaauaaaugaguggucaggauauagcgggaguuuuguucagcauccagaacuaacagggcuggauuguauaagaccuugcuucuggguugaacuaaucagagggcgacccaaagagaacacaaucuggacuagcgggagcagcauauccuuuugugguguaaacagugacacuguggguuggucuuggccagacggugcugaguugccauuuaccauugacaaguaa

SEQ ID NO: 50180 - RNA, 1410 nt, Artificial Sequence
  derived and/or modified CDS sequence (wt) from neuraminidase__InfluenzaA__ADD23408
augaauccaaaccaaaagauaauaaccauugguucggucuguaugacaauuggaauggcuaacuuaauauuacaaauuggaaacauaaucucaauauggauuagccacucaauucaacuugggaaucaaaaucagauugaaacaugcaaucaaagcgucauuacuuaugaaaacaacacuuggguaaaucagacauauguuaacaucagcaacaccaacuuugcugcuggacagucagugguuuccgugaaauuagcgggcaauuccucucucugcccuguuaguggaugggcuauauacaguaaagacaacaguauaagaaucgguuccaagggggauguguuugucauaagggaaccauucauaucaugcucccccuuggaaugcagaaccuucuucuugacucaaggggccuugcuaaaugacaaacauuccaauggaaccauuaaagacaggagcccauaucgaacccuaaugagcuguccuauuggugaaguucccucuccauacaacucaagauuugagucagucgcuuggucagcaagugcuugucaugauggcaucaauuggcuaacaauuggaauuucuggcccagacaauggggcaguggcuguguuaaaguacaacggcauaauaacagacacuaucaagaguuggagaaacaauauauugagaacacaagagucugaaugugcauguguaaaugguucuugcuuuacuguaaugaccgauggaccaagugauggacaggccucauacaagaucuucagaauagaaaagggaaagauagucaaaucagucgaaaugaaugccccuaauuaucacuaugaggaaugcuccuguuauccugauucuagugaaaucacaugugugugcagggauaacuggcauggcucgaaucgaccgugggugucuuucaaccaggaucuggaauaucagauaggauacauaugcagugggauuuucggagacaauccacgcccuaaugauaagacaggcaguugugguccaguaucgucuaauggagcaaauggaguaaaaggauuuucauucaaauacggcaaugguguuuggauagggagaacuaaaagcauuaguucaagaaacgguuuugagaugauuugggauccgaacggauggacugggacagacaauaacuucucaauaaagcaagauaucguaggaauaaaugaguggucaggauauagcgggaguuuuguucagcauccagaacuaacagggcuggauuguauaagaccuugcuucuggguugaacuaaucagagggcgacccaaagagaacacaaucuggacuagcgggagcagcauauccuuuugugguguaaacagugacacuguggguuggucuuggccagacggugcugaguugccauuuaccauugacaaguaa

SEQ ID NO: 50181 - RNA, 1410 nt, Artificial Sequence
  derived and/or modified CDS sequence (wt) from neuraminidase__InfluenzaA__ADD23438
augaauccaaaccaaaagauaauaaccauugguucggucuguaugacaauuggaauggcuaacuuaauauuacaaauuggaaacauaaucucaauauggauuagccacucaauucaacuugggaaucaaaaucagauugaaacaugcaaucaaagcgucauuacuuaugaaaacaacacuugggugaaucagacauauguuaacaucagcaacaccaacuuugcugcuggacagucagugguuuccgugaaauuagcgggcaauuccucucucugcccuguuaguggaugggcuauauacaguaaagacaacaguauaagaaucgguuccaagggggauguguuugucauaagggaaccauucauaucaugcucccccuuggaaugcagaaccuucuucuugacucaaggggccuugcuaaaugacaaacauuccaauggaaccauuaaagacaggagcccauaucgaacccuaaugagcuguccuauuggugaaguucccucuccauacaacucaagauuugagucagucgcuuggucagcaagugcuugucaugauggcaucaauuggcuaacaauuggaauuucuggcccagacaauggggcaguggcuguguuaaaguacaacggcauaauaacagacacuaucaagaguuggagaaacaauauauugagaacacaagagucugaaugugcauguguaaaugguucuugcuuuacuguaaugaccgauggaccaagugauggacaggccucauacaagaucuucagaauagaaaagggaaagauagucaaaucagucgaaaugaaugccccuaauuaucacuaugaggaaugcuccuguuauccugauucuagugaaaucacaugugugugcagggauaacuggcauggcucgaaucgaccgugggugucuuucaaccagaaucuggaauaucagauaggauacauaugcagugggauuuucggagacaauccacgcccuaaugauaagacaggcaguugugguccaguaucgucuaauggagcaaauggaguaaaaggauuuucauucaaauacggcaaugguguuuggauagggagaacuaaaagcauuaguucaagaaacggguuugagaugauuugggauccgaacggauggacugggacagacaauagcuucucaauaaagcaagauaucguaggaauaaaugaauggucaggauauagcgggaguuuuguucagcauccagaacuaacagggcuggauuguauaagaccuugcuucuggguugaacuaaucagagggcgacccaaagagaacacaaucuggacuagcgggagcagcauauccuuuugugguguaaacagugacacuguggguuggucuuggccagacggugcugaguugccauuuaccauugacaaguaa

SEQ ID NO: 50182 - RNA, 1410 nt, Artificial Sequence
  derived and/or modified CDS sequence (wt) from neuraminidase__InfluenzaA__ADD23448
augaauccaaaccaaaagauaauaaccauugguucggucuguaugacaauuggaauggcuaacuuaauauuacaaauuggaaacauaaucucaauauggauuagccacucaauucaacuugggaaucaaaaucagauugaaacaugcaaucaaagcgucauuacuuaugaaaacaacacuuggguaaaucagacauauguuaacaucagcaacaccaacuuugcugcuggacagucagugguuuccgugaaauuagcgggcaauuccucucucugcccuguuaguggaugggcuauauacaguaaagacaacaguauaagaaucgguuccaagggggauguguuugucauaagggaaccauucauaucaugcucccccuuggaaugcagaaccuucuucuugacucaaggggccuugcuaaaugacaaacauuccaauggaaccauuaaagacaggagcccauaucgaacccuaaugagcuguccuauuggugaaguucccucuccauacaacucaagauuugagucagucgcuuggucagcaagugcuugucaugauggcaucaauuggcuaacaauuggaauuucuggcccagacaauggggcaguggcuguguuaaaguacaacggcauaauaacagacacuaucaagaguuggagaaacaauauauugagaacacaagagucugaaugugcauguguaaaugguucuugcuuuacuguaaugaccgauggaccaagugauggacaggccucauacaagaucuucagaauagaaaagggaaagauagucaaaucagucgaaaugaaugccccuaauuaucacuaugaggaaugcuccuguuauccugauucuagugaaaucacaugugugugcagggauaacuggcauggcucgaaucgaccgugggugucuuucaaccagaaucuggaauaucagauaggauacauaugcaguggaauuuucggagacaauccacgcccuaaugauaagacaggcaguugugguccaguaucgucuaauggagcaaauggaguaaaaggauuuucauucaaauacggcaaugguguuuggauagggagaacuaaaagcauuaguucaagaaacgguuuugagaugauuugggauccgaacggauggacugggacagacaauaacuucucaauaaagcaagauaucguaggaauaaaugaguggucaggauauagcgggaguuuuguccagcauccagaacuaacagggcuggauuguauaagaccuugcuucuggguugaacuaaucagagggcgacccaaagagaacacaaucuggacuagcgggagcagcauauccuuuugugguguaaacagugacacuguggguuggucuuggccagacggugcugaguugccauuuaccauugacaaguaa

SEQ ID NO: 50183 - RNA, 1410 nt, Artificial Sequence; identical to SEQ ID NO: 49794
  derived and/or modified CDS sequence (wt) from neuraminidase__InfluenzaA__ADD23458

SEQ ID NO: 50184 - RNA, 1410 nt, Artificial Sequence
  derived and/or modified CDS sequence (wt) from neuraminidase__InfluenzaA__ADD23468
augaauccaaaccaaaagauaauaaccauugguucggucuguaugacaauuggaauggcuaacuuaauauuacaaauuggaaacauaaucucaauauggauuagccacucaauucaacuugggaaucaaaaucagauugaaacaugcaaucaaagcgucauuacuuaugaaaacaacacuuggguaaaucagacauauguuaacaucagcaacaccaacuuugcugcuggacagucagugguuuccgugaaauuagcgggcaauuccucucucugcccuguuaguggaugggcuauauacaguaaagacaacaguauaagaaucgguuccaagggggauguguuugucauaagggaaccauucauaucaugcucccccuuggaaugcagaaccuucuucuugacucaaggggccuugcuaaaugacaaacauuccaauggaaccauuaaagacaggagcccauaucgaacccuaaugagcuguccuauuggugaaguucccucuccauacaacucaagauuugagucagucgcuuggucagcaagugcuugucaugauggcaucaauuggcuaacaauuggaauuucuggcccagacaauggggcaguggcuguguuaaaguacaacggcauaauaacagacacuaucaagaguuggagaaacaauauauugagaacacaagagucugaaugugcauguguaaaugguucuugcuuuacuguaaugaccgauggaccaagugauggacaggccucauacaagaucuucagaauagaaaagggaaagauagucaaaucagucgaaaugaaugccccuaauuaucacuaugaggaaugcuccuguuauccugauucuagugaaaucacaugugugugcagggauaacuggcauggcucgaaucgaccgugggugucuuucaaccagaaucuggaauaucagauaggauacauaugcagugggauuuucggagacaauccacgcccuaaugauaagacaggcaguugugguccaguaucgucuaauggagcaaauggaguaaaaggauuuucauucaaauacggcaaugguguuuggauagggagaacuaaaagcauuaguucaagaaacgguuuugagaugauuugggauccgaacggauggacugggacagacaauaacuucucaauaaagcaagauaucguaggaguaaaugaauggucaggauauagcgggaguuuuguucagcauccagaacuaacagggcuggauuguauaagaccuugcuucuggguugaacuaaucagagggcgacccaaagagaacacaaucuggacuagugggagcagcauauccuuuugugguguaaacagugacacuguggguuggucuuggccagacggugcugaguugccauuuaccauugacaaguaa

SEQ ID NO: 50185 - RNA, 1410 nt, Artificial Sequence; identical to SEQ ID NO: 50166
  derived and/or modified CDS sequence (wt) from neuraminidase__InfluenzaA__ADD23478

SEQ ID NO: 50186 - RNA, 1410 nt, Artificial Sequence; identical to SEQ ID NO: 49794
  derived and/or modified CDS sequence (wt) from neuraminidase__InfluenzaA__ADD23488

SEQ ID NO: 50187 - RNA, 1410 nt, Artificial Sequence
  derived and/or modified CDS sequence (wt) from neuraminidase__InfluenzaA__ADD23498
augaauccaaaccaaaagauaauaaccauugguucggucuguaugacaauuggaauggcuaacuuaauauuacaaauuggaaacauaaucucaauauggauuagccacucaauucaacuugggaaucaaaaucauauugaaacaugcaaucaaagcgucauuacuuaugaaaacaacacuuggguaaaucagacauauguuaacaucagcaacaccaacuuugcugcuggacagucagugguuuccgugaaauuagcgggcaauuccucucucugcccuguuaguggaugggcuauauacaguaaagacaacaguauaagaaucgguuccaagggggauguguuugucauaagggaaccauucauaucaugcucccccuuggaaugcagaaccuucuucuugacucaaggggccuugcuaaaugacaaacauuccaauggaaccauuaaagacaggagcccauaucgaacccuaaugagcuguccuauuggugaaguucccucuccauacaacucaagauuugagucagucgcuuggucagcaagugcuugucaugauggcaucaauuggcuaacaauuggaauuucuggcccagacaauggggcaguggcuguguuaaaguacaacggcauaauaacagacacuaucaagaguuggagaaacaacauauugagaacacaagagucugaaugugcauguguaaaugguucuugcuuuacuguaaugaccgauggaccaagugauggacaggccucauacaagaucuucagaauagaaaagggaaagauagucaaaucagucgaaaugaaugccccuaauuaucacuaugaggaaugcuccuguuauccugauucuagugaaaucacaugugugugcagggauaacuggcauggcucgaaucgaccgugggugucuuucaaccagaaucuggaauaucagauaggauacauaugcagugggauuuucggagacaauccacgcccuaaugauaagacaggcaguugugguccaguaucgucuaauggagcaaauggaguaaaaggauuuucauucaaauacggcaaugguguuuggauagggagaacuaaaagcauuaguucaagaaacgguuuugagaugauuugggauccgaacggauggacugggacagacaauaacuucucaauaaagcaagauaucguaggaauaaaugaguggucaggauauagcgggaguuuuguucagcauccagaacuaacagggcuggauuguauaagaccuugcuucuggguugaacuaaucagagggcgacccaaagagaacacaaucuggacuagcgggagcagcauauccuuuugugguguaaacagugacacuguggguuggucuuggccagacggugcugaguugccauuuaccauugacaaguaa

SEQ ID NO: 50188 - RNA, 1410 nt, Artificial Sequence; identical to SEQ ID NO: 48750
  derived and/or modified CDS sequence (wt) from neuraminidase__InfluenzaA__ADD23508

SEQ ID NO: 50189 - RNA, 1410 nt, Artificial Sequence
  derived and/or modified CDS sequence (wt) from neuraminidase__InfluenzaA__ADD23518
augaauccaaaccaaaagauaauaaccauugguucggucuguaugacaauuggaauggcuaacuuaauauuacaaauuggaaacauaaucucaauauggauuagccacucaauucaacuugggaaucaaaaucagauugaaacaugcaaucaaagcgucauuacuuaugaaaacaacacuuggguaaaucagacauauguuaacaucagcaacaccaacuuugcugcuggacagucagugguuuccgugaaauuagcgggcaauuccucucucugcccuguuaguggaugggcuauauacaguaaagacaacaguauaagaaucgguuccaagggggauguguuugucauaagggaaccauucauaucaugcucccccuuggaaugcagaaccuucuucuugacucaaggggccuugcuaaaugacaaacauuccaauggaaccauuaaagacaggagcccauaucgaacccuaaugagcuguccuauuggugaaguucccucuccauacaacucaagauuugagucagucgcuuggucagcaagugcuugucaugauggcaucaauuggcuaacaauuggaauuucuggcccagacaauggggcaguggcuguguuaaaguacaacggcauaauaacagacacuaucaagaguuggagaaacaauauauugagaacacaagagucugaaugugcauguguaaaugguucuugcuuuacuguaaugaccgauggaccaagugauggacaggccucauacaagaucuucagaauagaaaagggaaagauagucaaaucagucgaaaugaaugccccuaauuaccacuaugaggaaugcuccuguuauccugauucuagugaaaucacaugugugugcagggauaacuggcauggcucaaaucgaccgugggugucuuucaaccagaaucuggaauaucagauaggauacauaugcagugggauuuucggagacaauccacgcccuaaugauaagacaggcaguugugguccaguaucgucuaauggagcaaauggaguaaaaggauuuucauucaaauacggcaaugguguuuggauagggagaacuaaaagcauuaguucaagaaacgguuuugagaugauuugggauccgaacggauggacugggacagacaauaacuucucaauaaagcaagauaucguaggaauaaaugaauggucaggauauagcgggaguuuuguucagcauccagaacuaacagggcuggauuguauaagaccuugcuucuggguugaacuaaucagagggcgacccaaagagaacacaaucuggacuagugggagcagcauauccuuuugugguguaaacagugacacuguggguuggucuuggccagacggugcugaguugccauuuaccauugacaaguaa

SEQ ID NO: 50190 - RNA, 1410 nt, Artificial Sequence; identical to SEQ ID NO: 49794
  derived and/or modified CDS sequence (wt) from neuraminidase__InfluenzaA__ADD23997

SEQ ID NO: 50191 - RNA, 1410 nt, Artificial Sequence
  derived and/or modified CDS sequence (wt) from neuraminidase__InfluenzaA__ADD24007
augaauccaaaccaaaagauaauaaccauugguucggucuguaugacaauuggaauggcuaacuuaauauuacaaauuggaaacauaaucucaauauggauuagccacucaauucaacuugggaaucaaaaucagauugaaacaugcaaucaaagcgucauuacuuaugaaaacaacacuuggguaaaucagacauauguuaacaucagcaacaccaacuuugcugcugggcagucagugguuuccgugaaauuagcgggcaauuccucucucugcccuguuaguggaugggcuauauacaguaaagacaacaguauaagaaucgguuccaagggggauguguuugucauaagggaaccauucauaucaugcucccccuuggaaugcagaaccuucuucuugacucaaggggccuugcuaaaugacaaacauuccaauggaaccauuaaagacaggagcccauaucgaacccuaaugagcuguccuauuggugaaguucccucuccauacaacucaagauuugagucagucgcuuggucagcaagugcuugucaugauggcaucaauuggcuaacaauuggaauuucuggcccagacaauggggcaguggcuguguuaaaguacaacggcauaauaacagacacuaucaagaguuggagaaacaauauauugagaacacaagagucugaaugugcauguguaaaugguucuugcuuuacuguaaugaccgauggaccaagugauggacaggccucauacaagaucuucagaauagaaaagggaaagauagucaaaucagucgaaaugaaugccccuaauuaucacuaugaggaaugcuccuguuauccugauucuagugaaaucacaugugugugcagggauaacuggcauggcucgaaucgaccgugggugucuuucaaccagaaucuggaauaucagauaggauacauaugcagugggauuuucggagacaauccacgcccuaaugauaagacaggcaguugugguccaguaucgucuaauggagcaaauggaguaaaaggauuuucauucaaauacggcaaugguguuuggauagggagaacuaaaagcauuaguucaagaaacgguuuugagaugauuugggauccgaacggauggacugggacagacaauaacuucucaauaaagcaagauaucguaggaauaaaugaguggucaggauauagcgggaguuuuguucagcauccagaacuaacagggcuggauuguauaagaccuugcuucuggguugaacuaaucagagggcgacccaaagagaacacaaucuggacuagcgggagcagcauauccuuuugugguguaaacagugacacuguggguuggucuuggccagacggugcugaguugccauuuaccauugacaaguaa

SEQ ID NO: 50192 - RNA, 1410 nt, Artificial Sequence; identical to SEQ ID NO: 50125
  derived and/or modified CDS sequence (wt) from neuraminidase__InfluenzaA__ADD24017

SEQ ID NO: 50193 - RNA, 1410 nt, Artificial Sequence; identical to SEQ ID NO: 48750
  derived and/or modified CDS sequence (wt) from neuraminidase__InfluenzaA__ADD24024

SEQ ID NO: 50194 - RNA, 1410 nt, Artificial Sequence; identical to SEQ ID NO: 49197
  derived and/or modified CDS sequence (wt) from neuraminidase__InfluenzaA__ADD24025

SEQ ID NO: 50195 - RNA, 1410 nt, Artificial Sequence; identical to SEQ ID NO: 48887
  derived and/or modified CDS sequence (wt) from neuraminidase__InfluenzaA__ADD24026

SEQ ID NO: 50196 - RNA, 1410 nt, Artificial Sequence; identical to SEQ ID NO: 48750
  derived and/or modified CDS sequence (wt) from neuraminidase__InfluenzaA__ADD24027

SEQ ID NO: 50197 - RNA, 1410 nt, Artificial Sequence; identical to SEQ ID NO: 48750
  derived and/or modified CDS sequence (wt) from neuraminidase__InfluenzaA__ADD24028

SEQ ID NO: 50198 - RNA, 1410 nt, Artificial Sequence; identical to SEQ ID NO: 48750
  derived and/or modified CDS sequence (wt) from neuraminidase__InfluenzaA__ADD24029

SEQ ID NO: 50199 - RNA, 1410 nt, Artificial Sequence; identical to SEQ ID NO: 49939
  derived and/or modified CDS sequence (wt) from neuraminidase__InfluenzaA__ADD24030

SEQ ID NO: 50200 - RNA, 1410 nt, Artificial Sequence; identical to SEQ ID NO: 48750
  derived and/or modified CDS sequence (wt) from neuraminidase__InfluenzaA__ADD24031

SEQ ID NO: 50201 - RNA, 1410 nt, Artificial Sequence; identical to SEQ ID NO: 48750
  derived and/or modified CDS sequence (wt) from neuraminidase__InfluenzaA__ADD24032

SEQ ID NO: 50202 - RNA, 1410 nt, Artificial Sequence
  derived and/or modified CDS sequence (wt) from neuraminidase__InfluenzaA__ADD25231
augaauccaaaccaaaagauaauaaccauugguucggucuguaugacaauuggaauggcuaacuuaauauuacaaauuggaaacauaaucucaauauggauuagccacucaauucaacuugggaaucaaaaucagauugaaacaugcaaucaaagcgucauuacuuaugaaaacaacacuuggguaaaucagacauauguuaacaucagcaacaccaacuuugcugcuggacagucagugguuuccgugaaauuagcgggcaauuccucucucugcccuguuaguggaugggcuauauacaguaaagacaacaguauaagaaucgguuccaagggggauguguuugucauaagggaaccauucauaucaugcucccccuuggaaugcagaaccuucuucuugacucaaggggccuugcuaaaugacaaacauuccaauggaaccauuaaagacaggagcccauaucgaacccuaaugagcuguccuauuggugaaguucccucuccauacaacucaagauuugagucagucgcuuggucagcaagugcuugucaugauggcaucaauuggcuaacaauuggaauuucuggcccagacaauggggcaguggcuguguuaaaguacaacggcauaauaacagacacuaucaagaguuggagaaacaauauauugagaacacaagagucugaaugugcauguguaaaugguucuugcuucacuguaaugaccgauggaccaagugauggacaggccucauacaagaucuucagaauagaaaagggaaagauagucaaaucagucgaaaugaaugccccuaauuaucacuaugaagaaugcuccuguuauccugauucuagugaaaucacaugugugugcagggauaacuggcauggcucgaaucgaccguggguaucuuucaaccagaaucuggaauaucagauaggauacauaugcagugggauuuucggagacaauccacgcccuaaugauaagacaggcaguugugguccaguaucgucuaauggagcaaauggaguaaaaggauuuucauucaaauacggcaaugguguuuggauagggagaacuaaaagcauuaguucaagaaacgguuuugagaugauuugggauccgaacggauggacugggacagacaauaacuucucaauaaagcaagauaucguaggaauaaaugaguggucaggauauagcgggaguuuuguucagcauccagaacuaacagggcuggauuguauaagaccuugcuucuggguugaacuaaucagagggcgacccaaagagaacacaaucuggacuagcgggaguagcauauccuuuugugguguaaacagugacacuguggguuggucuuggccagacggugcugaguugccauuuaccauugacaaguaa

SEQ ID NO: 50203 - RNA, 1410 nt, Artificial Sequence
  derived and/or modified CDS sequence (wt) from neuraminidase__InfluenzaA__ADD25233
augaauccaaaccaaaagauaauaaccauugguucggucuguaugacaauuggaauggcuaacuuaauauuacaaauuggaaacauaaucucaauauggauuagccacucaauucaacuugggaaucaaaaucagauugaaacaugcaaucaaagcgucauuacuuaugaaaacaacacuuggguaaaucagacauauguuaacaucagcaacaccaacuuugcugcuggacagucagugguuuccgugaaauuagcgggcaauuccucucucugcccuguuaguggaugggcuauauacaguaaagacaacaguauaagaaucgguuccaagggggauguguuugucauaagggaaccauucauaucaugcucccccuuggaaugcagaaccuucuucuugacucaaggggccuuguuaaaugacaaacauuccaauggaaccauuaaagacaggagcccauaucgaacccuaaugagcuguccuauuggugaaguucccucuccauacaacucaagauuugagucagucgcuuggucagcaagugcuugucaugauggcaucaauuggcuaacaauuggaauuucuggcccagacaauggggcaguggcuguguuaaaauacaacggcauaauaacagacacuaucaagaguuggagaaacaauauauugagaacacaagagucugaaugugcauguguaaaugguucuugcuuuacuguaaugaccgauggaccaagugauggacaggccucauacaagaucuucagaauagaaaagggaaagauagucaaaucagucgaaaugaaugccccuaauuaucacuaugaggaaugcuccuguuauccugauucuagugaaaucacaugugugugcagggauaacuggcauggcucgaaucgaccguggguaucuuucaaccagaaucuggaauaucagauaggauacauaugcagugggauuuucggagacaauccacgcccuaaugauaagacaggcaguugugguccaguaucgucuaauggagcaaauggaguaaaaggauuuucauucaaauacggcaaugguguuuggauagggagaacuaaaagcauuaguucaagaaacgguuuugagaugauuugggauccgaacggauggacugggacagacaauaacuucucaauaaagcaagauaucguaggaauaaaugaguggucaggauauagcgggaguuuuguucagcauccagaacuaacagggcuggauuguauaagaccuugcuucuggguugaacuaaucagagggcgacccaaagagaacacaaucuggacuagcgggagcagcauauccuuuugugguguaaacagugacacuguggguuggucuuggccagacggugcugaguugccauuuaccauugacaaguaa

SEQ ID NO: 50204 - RNA, 1410 nt, Artificial Sequence
  derived and/or modified CDS sequence (wt) from neuraminidase__InfluenzaA__ADD25235
augaauccaaaccaaaagauaauaaccauugguucggucuguaugacaauuggaauggcuaacuuaauauuacaaauuggaaacauaaucucaauauggauuagccacucaauucaacuugggaaucaaaaucagauugaaacaugcaaucaaagcgucauuacuuaugaaaacaacacuuggguaaaucagacauauguuaacaucagcaacaccaacuuugcugcuggacagucagugguuuccgugaaauuagcgggcaauuccucucucugcccuguuaguggaugggcuauauacaguaaagacaacaguauaagaaucgguuccaagggggauguguuugucauaagggaaccauucauaucaugcucccccuuggaaugcagaaccuucuucuugacucaaggggccuugcuaaaugacaaacauuccaauggaaccauuaaagacaggagcccauaucgaacccuaaugagcuguccuauuggugaaguucccucuccauacaacucaagauuugagucagucgcuuggucagcaagugcuugucaugauggcaucaauuggcuaacaauuggaauuucuggcccagacaauggggcaguggcuguguuaaaguacaacggcauaauaacagacacuaucaagaguuggagaaacaauauauugagaacacaagagucugaaugugcauguguaaaugguucuugcuuuacuguaaugaccgauggaccaagugauggacaggccucauacaagaucuucagaauagaaaagggaaagauagucaaaucagucgaaaugaaugccccuaauuaucacuaugaggaaugcuccuguuauccugauucuagugaaaucacaugugugugcagggauaacuggcauggcucgaaucgaccgugggugucuuucaaccagaaucuggaauaucagauaggauacauaugcagugggauuuucggagacaauccacgcccuaaugauaagacaggcaguugugguccaguaucgucuaauggagcaaauggaguaaaaggauuuucauucaaauacggcaaugguguuuggauagggagaacuaaaagcauuaguucaagaaacgguuuugagaugauuugggauccgaacggauggacugggacagacaauaacuucucaauaaagcaagauaucguaggaauaaaugaauggucaggauauagcgggaguuuuguucagcauccagaacuaacagggcuggauuguauaagaccuuguuucuggguugaacuaaucagagggcgacccaaagagaacacaaucuggacuagcgggagcagcauauccuuuugugguguaaacagugacacuguggguuggucuuggccagacggugcugaguugccauuuaccauugacaaguaa

SEQ ID NO: 50205 - RNA, 1410 nt, Artificial Sequence
  derived and/or modified CDS sequence (wt) from neuraminidase__InfluenzaA__ADD25244
augaauccaaaccaaaagauaauaaccauugguucggucuguaugacaauuggaauggcuaacuuaauauuacaaauuggaaacauaaucucaauauggauuagccacucaauucaacuugggaaucaaaaucagauugaaacaugcaaucaaagugucauuacuuaugaaaacaacacuuggguaaaucagacauauguuaacaucagcaacaccaacuuugcugcuggacagucagugguuuccgugaaauuagcgggcaauuccucucucugcccuguuaguggaugggcuauauacaguaaagacaacaguauaagaaucgguuccaagggggauguguuugucauaagggaaccauucauaucaugcucccccuuggaaugcagaaccuucuucuugacucaaggggccuugcuaaaugacaaacauuccaauggaaccauuaaagacaggagcccauaucgaacccuaaugagcuguccuauuggugaaguucccucuccauacaacucaagauuugagucagucgcuuggucagcaagugcuugucaugauggcaucaauuggcuaacaauuggaauuucuggcccagacaauggggcaguggcuguguuaaaguacaacggcauaauaacagacacuaucaagaguuggagaaacaauauauugagaacacaagagucugaaugugcauguguaaaugguucuugcuuuacuguaaugaccgauggaccaagugauggacaggccucauacaagaucuucagaauagaaaagggaaagauagucaaaucagucgaaaugaaugccccuaauuaucacuaugaggaaugcuccuguuauccugauucuagugaaaucacaugugugugcagggauaacuggcauggcucgaaucgaccgugggugucuuucaaccagaaucuggaauaucagauaggauacauaugcagugggauuuucggagacaauccacgcccuaaugauaagacaggcaguugugguccaguaucgucuaauggagcaaauggaguaaaaggauuuucauucaaauacggcaaugguguuuggauagggagaacuaaaagcauuaguucaagaaacgguuuugagaugauuugggauccgaacggauggacugggacagacaauaacuucucaauaaagcaagauaucguaggaauaaaugaauggucaggauauagcgggaguuuuguucagcauccagaacuaacagggcuggauuguauaagaccuuguuucuggguugaacuaaucagagggcgacccaaagagaacacaaucuggacuagcgggagcagcauauccuuuugugguguaaacagugacacuguggguuggucuuggccagacggugcugaguugccauuuaccauugacaaguaa

SEQ ID NO: 50206 - RNA, 1410 nt, Artificial Sequence
  derived and/or modified CDS sequence (wt) from neuraminidase__InfluenzaA__ADD25246
augaauccaaaccaaaagauaauaaccauugguucagucuguaugacaauuggaauggcuaacuuaauauuacaaauuggaaacauaaucucaauauggauuagccacucaauucaacuugggaaucaaaaucagauugaaacaugcaaucaaagcgucauuacuuaugaaaacaacacuuggguaaaucagacauauguuaacaucagcaacaccaacuuugcugcuggacagucagugguuuccgugaaauuagcgggcaauuccucucucugcccuguuaguggaugggcuauauacaguaaagacaacaguauaagaaucgguuccaagggggauguguuugucauaagggaaccauucauaucaugcucccccuuggaaugcagaaccuucuucuugacucaaggggccuugcuaaaugacaaacauuccaauggaaccauuaaagacaggagcccauaucgaacccuaaugagcuguccuauuggugaaguucccucuccauacaacucaagauuugagucagucgcuuggucagcaagugcuugucaugauggcaccaauuggcuaacaauuggaauuucuggcccagacaauggggcaguggcuguguuaaaguacaacggcauaauaacagacacuaucaagaguuggagaaacaauauauugagaacacaagagucugaaugugcauguguaaaugguucuugcuucacuguaaugaccgauggaccaagugauggacaggccucauacaagaucuucagaauagaaaagggaaagauagucaaaucagucgaaaugaaugccccuaauuaucacuaugaggaaugcuccuguuauccugauucuagugaaaucacaugugugugcagggauaacuggcauggcucgaaucgaccguggguaucuuucaaccagaaucuggaauaucagauaggauacauaugcagugggauuuucggagacaauccacgcccuaaugauaagacaggcaguugugguccaguaucgucuaauggagcaaauggaguaaaaggauuuucauucaaauacggcaaugguguuuggauagggagaacuaaaagcauuaguucaagaaacgguuuugagaugauuugggauccgaacggauggacugggacagacaauaacuucucaauaaagcaagauaucguaggaauaaaugaguggucaggauauagcgggaguuuuguucagcauccagaacuaacagggcuggauuguauaagaccuugcuucuggguugaacuaaucagagggcgacccaaagagaacacaaucuggacuagcgggagcagcauauccuuuugugguguaaacagugacacuguggguuggucuuggccagacggugcugaguugccauuuaccauugacaaguaa

SEQ ID NO: 50207 - RNA, 1410 nt, Artificial Sequence
  derived and/or modified CDS sequence (wt) from neuraminidase__InfluenzaA__ADD25248
augaauccaaaccaaaagauaauaaccauugguucggucuguaugacaauuggaauggcuaaccuaauauuacaaauuggaaacauaaucucaauauggauuagccacucaauucaacuugggaaucaaaaucagauugaaacaugcaaucaaagcgucauuacuuaugaaaacaacacuuggguaaaucagacauauguuaacaucagcaacaccaacuuugcugcuggacagucagugguuuccgugaaauuagcgggcaauuccucucucugcccuguuaguggaugggcuauauacaguaaagacaacaguauaagaaucgguuccaagggggauguguuugucauaagggaaccauucauaucaugcucccccuuggaaugcagaaccuucuucuugacucaaggggccuugcuaaaugacaaacauuccaauggaaccauuaaagacaggagcccauaucgaacccuaaugagcuguccuauuggugaaguucccucuccauacaacucaagauuugagucagucgcuuggucagcaagugcuugucaugauggcaucaauuggcuaacaauuggaauuucuggcccagacaauggggcaguggcuguguuaaaauacaacggcauaauaacagacacuaucaagaguuggagaaacaauauauugagaacacaagagucugaaugugcauguguaaaugguucuugcuuuacuguaaugaccgauggaccaagugauggacaggccucauacaagaucuucagaauagaaaagggaaagauagucaaaucagucgaaaugaaugccccuaauuaucacuaugaggaaugcuccuguuauccugauucuagugaaaucacaugugugugcagggauaacuggcauggcucgaaucgaccguggguaucuuucaaccagaaucuggaauaucagauaggauauauaugcagugggauuuucggagacaauccacgcccuaaugauaagacaggcaguugugguccaguaucgucuaauggagcaaauggaguaaaaggauuuucauucaaauacggcaaugguguuuggauagggagaacuaaaagcauuaguucaagaaacgguuuugagaugauuugggauccgaacggauggacugggacagacaauaacuucucaauaaagcaagauaucguaggaauaaaugaguggucaggauauagcgggaguuuuguucagcauccagaacuaacagggcuggauuguauaagaccuugcuucuggguugaacuaaucagagggcgacccaaagagaacacaaucuggacuagcgggagcagcauauccuuuugugguguaaacagugacacuguggguuggucuuggccggacggugcugaguugccauuuaccauugacaaguaa

SEQ ID NO: 50208 - RNA, 1410 nt, Artificial Sequence
  derived and/or modified CDS sequence (wt) from neuraminidase__InfluenzaA__ADD25250
augaauccaaaccaaaagauaauaaccauugguucggucuguaugacaauuggaauggcuaacuuaauauuacaaauuggaaacauaaucucaauauggauuagccgcucaauucaacuugggaaucaaaaucagauugaaacaugcaaucaaagcaucauuacuuaugaaaacaacacuuggguaaaucagacauauguuaacaucagcaacaccaacuuugcugcuggacagucagugguuuccgugaaauuagcgggcaauuccucucucugcccuguuaguggaugggcuauauacaguaaagacaacaguauaagaaucgguuccaagggggauguguuugucauaagggaaccauucauaucaugcucccccuuggaaugcagaaccuucuucuugacucaaggggccuugcuaaaugacaaacauuccaauggaaccauuaaagacaggagcccauaucgaacccuaaugagcuguccuauuggugaaguucccucuccauacaacucaagauuugagucagucgcuuggucagcaagugcuugucaugauggcaucaauuggcuaacaauuggaauuucuggcccagacaauggggcaguggcuguguuaaaguacaacggcauaauaacagacacuaucaagaguuggagaaacaauauauugagaacacaagagucugaaugugcauguguaaaugguucuugcuuuacuguaaugaccgauggaccaagugauggacaggccucauacaagaucuucagaauagaaaagggaaagauagucaaaucagucgaaaugaaugccccuaauuaucacuaugaggaaugcuccuguuauccugauucuggugaaaucacaugugugugcagggauaacuggcauggcucgaaucgaccgugggugucuuucaaccagaaucuggaauaucagauaggauacauaugcagugggauuuucggagacaauccacgcccuaaugauaagacaggcaguugugguccaguaucgucuaauggagcaaauggaguaaaaggauuuucauucaaauacggcaaugguguuuggauagggagaacuaaaagcauuaguucaagaaacgguuuugagaugauuugggauccgaacggauggacugggacagacaauaacuucucaauaaagcaagauaucguaggaauaaaugaauggucaggauauagcgggaguuuuguucagcauccagaacuaacagggcuggauuguauaagaccuugcuucuggguugaacuaaucagagggcgacccaaagagaacacaaucuggacuagcgggagcagcauauccuuuugugguguaaacagugacacuauggguuggucuuggccagacggugcugaguugccauuuaccauugacaaguaa

SEQ ID NO: 50209 - RNA, 1410 nt, Artificial Sequence; identical to SEQ ID NO: 50204
  derived and/or modified CDS sequence (wt) from neuraminidase__InfluenzaA__ADD25255

SEQ ID NO: 50210 - RNA, 1410 nt, Artificial Sequence
  derived and/or modified CDS sequence (wt) from neuraminidase__InfluenzaA__ADD25259
augaauccaaaccaaaagauaauaaccauugguucggucuguaugacaauuggaauggcuaacuuaauauuacaaauuggaaacauaaucucaauauggauuagccacucaauucaacuugggaaucaaaaucagauugaaacaugcaaucaaagcgucauuacuuaugaaaacaacacuuggguaaaucagacauauguuaacaucagcaacaccaacuuugcugcuggacagucagugguuuccgugaaauuagcgggcaauuccucucucugcccuguuaguggaugggcuauauacaguaaagacaacaguauaagaaucgguuccaagggggauguguuugucauaagggaaccauucauaucaugcucccccuuggaaugcagaaccuucuucuugacucaaggggccuugcuaaaugacaaacauuccaauggaaccauuaaagacaggagcccauaucgaacccuaaugagcuguccuauuggugaaguucccucuccauacaacucaagauuugagucagucgcuuggucagcaagugcuugucaugauggcaucaauuggcuaacaauuggaauuucuggcccagacaauggggcaguggcuguguuaaaguacaacggcauaauaacagacacuaucaagaguuggagaaacaauauauugagaacacaagagucugaaugugcauguguaaaugguucuugcuucacuguaaugaccgauggaccaagugauggacaggccucauacaagaucuucagaauagaaaagggaaagauagucaaaucagucgaaaugaaugccccuaauuaucacuaugaggaaugcuccuguuauccugauucuagugaaaucacaugugugugcagggauaacuggcauggcucgaaucgaccguggguaucuuucaaccagaaucuggaauaucagauaggauacauaugcagugggauuuucggagacaauccacgcccuaaugauaagacaggcaguugugguccaguaucgucuaauggagcaaauggaguaaaaggauuuucauucaaauacggcaaugguguuuggauagggagaacuaaaagcauuaguucaagaaacgguuuugagaugauuugggauccgaacggauggacugggacagacaauaacuucucaauaaagcaagauaucguaggaauaaaugaguggucaggauauagcgggaguuuuguucagcauccagaacuaacagggcuggauuguauaagaccuugcuucuggguugaacuaaucagagggcgacccaaagagaacacaaucuggacuagcgggagcagcauauccuuuugugguguaaacagugacacuguggguuggucuuggccagacggugcugaguugccauuuaccauugacaaguaa

SEQ ID NO: 50211 - RNA, 1410 nt, Artificial Sequence
  derived and/or modified CDS sequence (wt) from neuraminidase__InfluenzaA__ADD25262
augaauccaaaccaaaagauaauaaccauugguucggucuguaugacaauuggaauggcuaacuuaauauuacaaauuggaaacauaaucucaauauggauuagccacucaauucaacuugggaaucaaaaucagauugaaacaugcaaucaaagcgucauuacuuaugaaaacaacacuuggguaaaucagacauauguuaacaucagcaacaccaacuuugcugcuggacagucagugguuuccgugaaauuagcgggcaauuccucucucugcccuguuaguggaugggcuauauacaguaaagacaacaguauaagaaucgguuccaagggggauguguuugucauaagggaaccauucauaucaugcucccccuuggaaugcagaaccuucuucuugacucaaggggccuugcuaaaugacaaacauuccaauggaaccauuaaagacaggagcccauaucgaacccuaaugagcuguccuauuggugaaguucccucuccauacaacucaagauuugagucagucgcuuggucagcaagugcuugucaugauggcaucaauuggcuaacaauuggaauuucuggcccagacaauggggcaguggcuguguuaaaguacaacggcauaauaacagacacuaucaagaguuggagaaacaauauauugagaacacaagagucugaaugugcauguguaaaugguucuugcuuuacuguaaugaccgauggaccaagugauggacaggccucauacaagaucuucagaauagaaaagggaaagauagucaaaucagucgaaaugaaugccccuaauuaucacuaugaggaaugcuccuguuauccugauucuagugaaaucacaugugugugcagggauaacuggcauggcucgaaucgaccgugggugucuuucaaccagaaucuggaauaucagauaggauacauaugcagugggauuuucggagacaauccacgcccuaaugauaagaaaggcaguugugguccaguaucgucuaauggagcagauggaguaaaaggauuuucauucaaauacggcaaugguguuuggauagggagaacuaaaagcauuaguucaagaaacgguuuugagaugauuugggauccgaacggauggacugggacagacaauaacuucucaauaaagcaagauaucguaggaauaaaugaauggucaggauauagcgggaguuuuguucagcauccagaacuaacagggcuggauuguauaagaccuugcuucuggguugaacuaaucagagggcgacccaaagagaacacaaucuggacuagcgggagcagcauauccuuuugugguguaaacagugacacuguggguuggucuuggccagacggugcugaguugccauuuaccauugacaaguaa

SEQ ID NO: 50212 - RNA, 1410 nt, Artificial Sequence
  derived and/or modified CDS sequence (wt) from neuraminidase__InfluenzaA__ADD25266
augaauccaaaccaaaagauaauaaccauugguucggucugcaugacaauuggaauggcuaacuuaauauuacaaauuggaaacauaaucucaauauggauuagccacucaauucaacuugggaaucaaaaucagauugaaacaugcaaucaaagcgucauuacuuaugaaaacaacacuuggguaaaucagacauauguuaacaucagcaacaccaacuuugcugcuggacagucagugguucccgugaaauuagcgggcaauuccucucucugcccuguuaguggaugggcuauauacaguaaagacaacaguauaagaaucgguuccaagggggauguguuugucauaagggaaccauucauaucaugcucccccuuggaaugcagaaccuucuucuugacucaaggggccuugcuaaaugacaaacauuccaauggaaccauuaaagacaggagcccauaucgaacccuaaugagcuguccuauuggugaaguucccucuccauacaacucaagauuugagucagucgcuuggucagcaagugcuugucaugauggcaucaauuggcuaacaauuggaauuucuggcccagacaauggggcaguggcuguguuaaaguacaacggcauaauaacagacacuaucaagaguuggagaaacaauauauugagaacacaagagucugaaugugcauguguaaaugguucuugcuuuacuguaaugaccgauggaccaagugauggacaggccucauacaagaucuucagaauagaaaagggaaagauagucaaaucagucgaaaugaaugccccuaauuaucacuaugaggaaugcuccuguuauccugauucuagugaaaucacaugugugugcagggauaacuggcauggcucgaaucgaccguggguaucuuucaaccagaaucuggaauaucagauaggauacauaugcagugggauuuucggagacaauccacgcccuaaugauaagacaggcaguugugguccaguaucgucuaauggagcaaauggaguaaaaggauuuucauucaaauacggcaaugguguuuggauagggagaacuaaaagcauuaguucaagaaacgguuuugagaugauuugggauccgaacggauggacugggacagacaauaacuucucaauaaagcaagauaucguaggaauaaaugaguggucaggauauagcgggaguuuuguucagcauccagaacuaacagggcuggauuguauaagaccuugcuucuggguugaacuaaucagagggcgacccaaagagaacacaaucuggacuagcgggagcagcauauccuuuugugguguaaacagugacacuguggguuggucuuggccagacggugcugaguugccauuuaccauugacaaguaa

SEQ ID NO: 50213 - RNA, 1410 nt, Artificial Sequence
  derived and/or modified CDS sequence (wt) from neuraminidase__InfluenzaA__ADD25268
augaauccaaaccaaaagauaauaaccauugguucggucuguaugacaauuggaauggcuaacuuaauauuacaaauuggaaacauaaucucaauauggauuagccacucaauucaacuugggaaucaaaaucagauugaaacaugcaaucaaagcgucauuacuuaugaaaacaacacuuggguaaaucagacauauguuaacaucagcaacaccaacuuugcugcuggacagucagugguuuccgugaaauuagcgggcaauuccucucucugcccuguuaguggaugggcuauauacaguaaagacaacaguauaagaaucgguuccaagggggauguguuugucauaagggaaccauucauaucaugcucccccuuggaaugcagaaccuucuucuugacucaaggggccuugcuaaaugacaaacauuccaauggaaccauuaaagacaggagcccauaucgaacccuaaugagcuguccuauuggugaaguucccucuccauacaacucaagauuugagucagucgcuuggucagcaagugcuugucaugauggcaucaauuggcuaacaauuggaauuucuggcccagacaauggggcaguggcuguguuaaaguacaacggcauaauaacagacacuaucaagaguuggagaaacaauauauugagaacacaagagucugaaugugcauguguaaaugguucuugcuucacuguaaugaccgauggaccaagugauggacaggccucauacaagaucuucagaauagaaaagggaaagauagucaaaucaguugaaaugaaugccccuaauuaucacuaugaggaaugcuccuguuauccugauucuagugaaaucacaugugugugcagggauaacuggcauggcucgaaucgaccguggguaucuuucaaccagaaucuggaauaucagauaggauacauaugcagugggauuuucggagacaauccacgcccuaaugauaagacaggcaguugugguccaguaucgucuaauggagcaaauggaguaaaaggauuuucauucaaauacggcaaugguguuuggauagggagaacuaaaagcauuaguucaagaaacgguuuugagaugauuugggauccgaacggauggacugggacagacaauaacuucucaauaaagcaagauaucguaggaauaaaugaguggucaggauauagcgggaguuuuguucagcauccagaacuaacagggcuggauuguauaagaccuugcuucuggguugaacuaaucagagggcgacccaaagagaacacaaucuggacuagcgggagcagcauauccuuuugugguguaaacagugacacuguggguuggucuuggccggacggugcugaguugccauuuaccauugacaaguaa

SEQ ID NO: 50214 - RNA, 1410 nt, Artificial Sequence
  derived and/or modified CDS sequence (wt) from neuraminidase__InfluenzaA__ADD25271
augaauccaaaccaaaagauaauaaccauugguucggucuguaugacaauuggaauggcuaacuuaauauuacaaauuggaaacauaaucucaauauggauuagccacucaauucaacuugggaaucaaaaucagauugaaacaugcaaucaaagcgucauuacuuaugaaaacaacacuuggguaaaucagacauauguuaacaucagcaacaccaacuuugcugcuggacagucagugguuuccgugaaauuagcgggcaauuccucucucugcccuguuaguggaugggcuauauacaguaaagacaacaguauaagaaucgguuccaagggggauguguuugucauaagggaaccauucauaucaugcucccccuuggaaugcagaaccuucuucuugacucaaggggccuugcuaaaugacaaacauuccaauggaaccauuaaagacaggagcccauaucgaacccuaaugagcuguccuauuggugaaguucccucuccauacaacucaagauuugagucagucgcuuggucagcaagugcuugucaugauggcaucaauuggcuaacaauuggaauuucuggcccagacaauggggcaguggcuguguuaaaguacaacggcauaauaacagacacuaucaagaguuggagaaacaauauauugagaacacaagagucugaaugugcauguguaaaugguucuugcuuuacuguaaugaccgauggaccaagugauggacaggccucauacaagaucuucagaauagaaaagggaaagauagucaaaucagucgaaaugaaugccccuaauuaucacuaugaggaaugcuccuguuauccugauucuagugaaaucacaugugugugcagggauaacuggcauggcucgaaucgaccgugggugucuuucaaccagaaucuggaauaucagauaggauacauaugcagugggauuuucggagacaauccacgcccuaaugauaagacaggcaguugugguccaguaucgucuaauggagcaaauggaguaaaaggauuuucauucaaauacggcaaugguguuuggauagggagaacuaaaagcauuaguucaagaaacgguuuugagaugauuugggauccgaauggauggacugggacagacaauaacuucucaauaaagcaagauaucguaggaauaaaugaguggucaggauauagcgggaguuuuguccagcauccagaacuaacagggcuggauuguauaagaccuugcuucuggguugaacuaaucagagggcgacccaaagagaacacaaucuggacuagcgggagcagcauauccuuuugugguguaaacagugacacuguggguuggucuuggccagacggugcugaguugccauuuaccauugacaaguaa

SEQ ID NO: 50215 - RNA, 1410 nt, Artificial Sequence; identical to SEQ ID NO: 48947
  derived and/or modified CDS sequence (wt) from neuraminidase__InfluenzaA__ADD25274

SEQ ID NO: 50216 - RNA, 1410 nt, Artificial Sequence; identical to SEQ ID NO: 48947
  derived and/or modified CDS sequence (wt) from neuraminidase__InfluenzaA__ADD25276

SEQ ID NO: 50217 - RNA, 1410 nt, Artificial Sequence
  derived and/or modified CDS sequence (wt) from neuraminidase__InfluenzaA__ADD25278
augaauccaaaccaaaagauaauaaccauugguucggucuguaugacaauuggaauggcuaacuuaauauuacaaauuggaaacauaaucucaauauggauuagccgcucaauucaacuugggaaucaaaaucagauugaaacaugcaaucaaagcaucauuacuuaugaaaacaacacuuggguaaaucagacauauguuaacaucagcaacaccaacuuugcugcuggacagucagugguuuccgugaaauuagcgggcaauuccucucucugcccuguuaguggaugggcuauauacaguaaagacaacaguauaagaaucgguuccaagggggauguguuugucauaagggaaccauucauaucaugcucccccuuggaaugcagaaccuucuucuugacucaaggggccuugcuaaaugacaaacauuccaauggaaccauuaaagacaggagcccauaucgaacccuaaugagcuguccuauuggugaaguucccucuccauacaacucaagauuugagucagucgcuuggucagcaagugcuugucaugauggcaucaauuggcuaacaauuggaauuucuggcccagacaauggggcaguggcuguguuaaaguacaacggcauaauaacagacacuaucaagaguuggagaaacaauauauugagaacacaagagucugaaugugcauguguaaaugguucuugcuuuacuguaaugaccgauggaccaagugauggacaggccucauacaagaucuucagaauagaaaagggaaagauagucaaaucagucgaaaugaaugccccuaauuaucacuaugaggaaugcuccuguuauccugauucuggugaaaucacaugugugugcagggauaacuggcauggcucgaaucgaccgugggugucuuucaaccagaaucuggaauaucagauaggauacauaugcagugggauuuucggagacaauccacgcccuaaugauaagacaggcaguugugguccaguaucgucuaauggagcaaauggaguaaaaggauuuucauucaaauacggcaaugguguuuggauagggagaacuaaaagcauuaguucaagaaacgguuuugagaugauuugggauccgaacggauggacugggacagacaauaacuucucaauaaagcaagauaucguaggaauaaaugaauggucaggauauagcgggaguuuuguucagcauccagaacuaacagggcuggauuguauaagaccuugcuucuggguugaacuaaucagagggcgacccaaagagaacacaaucuggacuagcgggagcagcauauccuuuugugguguaaacagugacacuguggguuggucuuggccagacggugcugaguugccauuuaccauugacaaguaa

SEQ ID NO: 50218 - RNA, 1410 nt, Artificial Sequence; identical to SEQ ID NO: 49827
  derived and/or modified CDS sequence (wt) from neuraminidase__InfluenzaA__ADD25280

SEQ ID NO: 50219 - RNA, 1410 nt, Artificial Sequence
  derived and/or modified CDS sequence (wt) from neuraminidase__InfluenzaA__ADD25282
augaauccaaaccaaaagauaauaaccauugguucggucuguaugacaauuggaauggcuaacuuaauauuacaaauuggaaacauaaucucaauauggauuagccacucaauucaacuugggaaucaaaaucagauugaaacaugcaaucaaagcgucauuacuuaugaaaacaacacuuggguaaaucagacauauguuaacaucagcaacaccaacuuugcugcuggacagucagugguuuccgugaaauuagcgggcaauuccucucucugcccuguuaguggaugggcuauauacaguaaagacaacaguauaagaaucgguuccaagggggauguguuugucauaagggaaccauucauaucaugcucccccuuggaaugcagaaccuucuucuugacucaaggggccuugcuaaaugacaaacauuccaauggaaccauuaaagacaggagcccauaucgaacccuaaugagcuguccuauuggugaaguucccucuccauacaacucaagauuugagucagucgcuuggucagcaagugcuugucaugauggcaucaauuggcuaacaauuggaauuucuggcccagacaauggggcaguggcuguguuaaaguacaacggcauaauaacagacacuaucaagaguuggagaaacaauauauugagaacacaagagucugaaugugcauguguaaaugguucuugcuuuacuguaaugaccgauggaccaagugauggacaggccucauacaagaucuucagaauagaaaagggaaagauagucaaaucagucgaaaugaaugccccuaauuaucacuaugaggaaugcuccuguuauccugauucuagugaaaucacaugugugugcagggauaacuggcauggcucgaaucgaccgugggugucuuucaaccagaaucuggaauaucagauaggauacauaugcagugggauuuucggagacaauccacgcccuaaugauaagacaggcaguugugguccaguaucgucuaauggagcaaauggaguaaaaggauuuucauucaaauacggcaaugguguuuggauagggagaacuaaaaguauuaguucaagaaacgguuuugagaugauuugggauccgaacggauggacugggacagacaauaacuucucaauaaagcaagauaucguaggaauaaaugaguggucaggauauagcgggaguuuuguucagcauccagaacuaacagggcuggauuguauaagaccuugcuucuggguugaacuaaucagagggcgacccaaagagaacacaaucuggacuagcgggagcagcauauccuuuugugguguaaacagugacacuguggguuggucuuggccagacggugcugaguugccauuuaccauugacaaguaa

SEQ ID NO: 50220 - RNA, 1410 nt, Artificial Sequence; identical to SEQ ID NO: 50038
  derived and/or modified CDS sequence (wt) from neuraminidase__InfluenzaA__ADD25284

SEQ ID NO: 50221 - RNA, 1410 nt, Artificial Sequence
  derived and/or modified CDS sequence (wt) from neuraminidase__InfluenzaA__ADD25287
augaauccaaaccaaaagauaauaaccauugguucggucuguaugacaauuggaauggcuaacuuaauauuacaaauuggaaacauaaucucaauauggauuagccacucaauucaacuugggaaucaaaaucagauugaaacaugcaaucaaagcgucauuacuuaugaaaacaacacuuggguaaaucagacauauguuaacaucagcaacaccaacuuugcugcuggacagucagugguuuccgugaaauuagcgggcaauuccucucucugcccuguuaguggaugggcuauauacaguaaagacaacaguauaagaaucgguuccaagggggauguguuugucauaagggaaccauucauaucaugcucccccuuggaaugcagaaccuucuucuugacucaaggggccuugcuaaaugacaaacauuccaauggaaccauuaaagacaggagcccauaucgaacccuaaugagcuguccuauuggugaaguucccucuccauacaacucaagauuugagucagucgcuuggucagcaagugcuugucaugauggcaucaauuggcuaacaauuggaauuucuggcccagacaauggggcaguggcuguguuaaaauacaacggcauaauaacagacacuaucaagaguuggagaaacaauauauugagaacacaagagucugaaugugcauguguaaaugguucuugcuuuacuguaaugaccgauggaccaagugauggacaggccucauacaagaucuucagaauagaaaagggaaagauagucaaaucagucgaaaugaaugccccuaauuaucacuaugaggaaugcuccuguuauccugauucuagugaaaucacaugugugugcagggauaacuggcauggcucgaaucgaccguggguaucuuucaaccagaaucuggaauaucagauaggauacauaugcagugggauuuucggagacaauccacgcccuaaugauaagacaggcaguugugguccaguaucgucuaauggagcaaauggaguaaaaggauuuucauucaaauacggcaaugguguuuggauagggagaacuaaaagcauuaguucaagaaacgguuuugagaugauuugggauccgaacggauggacugggacagacaauaacuucucaauaaagcaagauaucguaggaauaaaugaguggucaggauauagcgggaguuuuguucagcauccagaacuaacagggcuggauuguauaagaccuugcuucuggguugaacuaaucagagggcgacccaaagagaacacaaucuggacuagcgggagcagcauauccuuuugugguguaaacagugacacuguggguuggucuuggccagacggugcugaguugccauuuaccauugacaaguaa

SEQ ID NO: 50222 - RNA, 1410 nt, Artificial Sequence; identical to SEQ ID NO: 48814
  derived and/or modified CDS sequence (wt) from neuraminidase__InfluenzaA__ADD25291

SEQ ID NO: 50223 - RNA, 1410 nt, Artificial Sequence; identical to SEQ ID NO: 50038
  derived and/or modified CDS sequence (wt) from neuraminidase__InfluenzaA__ADD25293

SEQ ID NO: 50224 - RNA, 1410 nt, Artificial Sequence
  derived and/or modified CDS sequence (wt) from neuraminidase__InfluenzaA__ADD25300
augaauccaaaccaaaagauaauaaccauugguucggucuguaugacaauuggaauggcuaacuuaauauuacaaauuggaaacauaaucucaauauggauuagccacucaauucaacuugggaaucaaaaucagauugaaacaugcaaucaaagcgucauuacuuaugaaaacaacacuuggguaaaucagacauauguuaacaucagcaacaccaacuuugcugcuggacagucagugguuuccgugaaauuagcgggcaauuccucucucugcccuguuaguggaugggcuauauacaguaaagacaacaguauaagaaucgguuccaagggggauguguuugucauaagggaaccauucauaucaugcucccccuuggaaugcagaaccuucuucuugacucaaggggccuugcuaaaugacaaacauuccaauggaaccauuaaagacaggagcccauaucgaacccuaaugagcuguccuauuggugaaguucccucuccauacaacucaagauuugagucagucgcuuggucagcaagugcuugucaugauggcaucaauuggcuaacaauuggaauuucuggcccagacaauggggcaguggcuguguuaaaguacaacggcauaauaacagacacuaucaagaguuggagaaacaauauauugagaacacaagagucugaaugugcaugugucaaugguucuugcuuuacuguaaugaccgauggaccaagugauggacaggccucauacaagaucuucagaauagaaaagggaaagauagucaaaucagucgaaaugaaugccccuaauuaucacuaugaggaaugcuccuguuauccugauucuagugaaaucacauguguaugcagggauaacuggcauggcucgaaucgaccgugggugucuuucaaccagaaucuggaauaucagauaggauacauaugcagugggauuuucggagacaauccacgcccuaaugauaagacaggcaguugugguccaguaucgucuaauggagcaaauggaguaaaaggauuuucauucaaauacggcaaugguguuuggauagggagaacuaaaagcauuaguucaagaaacgguuuugagaugauuugggauccgaacggauggacugggacagacaauaacuucucaauaaagcaagauaucguaggaauaaaugaguggucaggauauagcgggaguuuuguucagcauccagaacuaacagggcuggauuguauaagaccuugcuucuggguugaacuaaucagagggcgacccaaagagaacacaaucuggacuagcgggagcagcauauccuuuugugguguaaacagugacacuguggguuggucuuggccagacggugcugaguugccauuuaccauugacaaguaa

SEQ ID NO: 50225 - RNA, 1410 nt, Artificial Sequence
  derived and/or modified CDS sequence (wt) from neuraminidase__InfluenzaA__ADD25304
augaauccaaaccaaaagauaauaaccauugguucggucuguaugacaauuggaauggcuaacuuaauauuacaaauuggaaacauagucucaauauggauuagccacucaauucaacuugggaaucaaaaucagauugaaacaugcaaucaaagcgucauuacuuaugaaaacaacacuuggguaaaucagacauauguuaacaucagcaacaccaacuuugcugcuggacagucagugguuuccgugaaauuagcgggcaauuccucucucugcccuguuaguggaugggcuauauacaguaaagacaacaguauaagaaucgguuccaagggggauguguuugucauaagggaaccauucauaucaugcucccccuuggaaugcagaaccuucuucuugacucaaggggccuugcuaaaugauaaacauuccaauggaaccauuaaagacaggagcccauaucgaacccuaaugagcuguccuauuggugaaguucccucuccauacaacucaagauuugagucagucgcuuggucagcaagugcuugucaugauggcaucaauuggcuaacaauuggaauuucuggcccagacaauggggcaguagcuguguuaaaguacaacggcauaauaacagacacuaucaagaguuggagaaacaauauauugagaacacaagagucugaaugugcauguguaaaugguucuugcuuuacuguaaugaccgauggaccaagugauggacaggccucauacaagaucuucagaauagaaaagggaaagauagucaaaucagucgaaaugaaugccccuaauuaucacuaugaggaaugcuccuguuauccugauucuagugaaaucacauguguaugcagggauaacuggcauggcucgaaucgaccgugggugucuuucaaccagaaucuggaauaucagauaggauacauaugcagugggauuuucggagacaauccacgcccuaaugauaagacaggcaguugugguccaguaucgucuaauggagcaaauggaguaaaaggauuuucauucaaauacggcaaugguguuuggauagggagaacuaaaagcauuaguucaagaaacgguuuugagaugauuugggauccgaacggauggacugggacagacaauaacuucucaauaaagcaagauaucguaggaauaaaugaguggucaggauauagcgggaguuuuguucagcauccagaacuaacagggcuggauuguauaagaccuugcuucuggguugaacuaaucagagggcgacccaaagagaacacaaucuggacuagcgggagcagcauauccuuuugugguguaaacagugacacuguggguuggucuuggccagacggugcugaguugccauuuaccauugacaaguaa

SEQ ID NO: 50226 - RNA, 1410 nt, Artificial Sequence
  derived and/or modified CDS sequence (wt) from neuraminidase__InfluenzaA__ADD25306
augaauccaaaccaaaagauaauaaccauugguucggucuguaugacaauuggaauggcuaacuuaauauuacaaauuggaaacauaaucucaauauggauuagccgcucaauucaacuugggaaucaaaaucagauugaaacaugcaaucaaagcaucauuacuuaugaaaacaacacuuggguaaaucagacauauguuaacaucagcaacaccaacuuugcugcuggacagucagugguuuccgugaaauuagcgggcaauuccucucucugcccuguuaguggaugggcuauauacaguaaagacaacaguauaagaaucgguuccaagggggauguguuugucauaagggaaccauucauaucaugcucccccuuggaaugcagaaccuucuucuugacucaaggggccuugcuaaaugauaaacauuccaauggaaccauuaaagacaggagcccauaucgaacccuaaugagcuguccuauuggugaaguucccucuccauacaacucaagauuugagucagucgcuuggucagcaagugcuugucaugauggcaucaauuggcuaacaauuggaauuucuggcccagacaauggggcaguggcuguguuaaaguacaacggcauaauaacagacacuaucaagaguuggagaaacaauauauugagaacacaagagucugaaugugcauguguaaaugguucuugcuuuacuguaaugaccgaugaaccaagugauggacaggccucauacaagaucuucagaauagaaaagggaaagauagucaaaucagucgaaaugaaugccccuaauuaucacuaugaggaaugcuccuguuauccugauucuggugaaaucacaugugugugcagggauaacuggcauggcucgaaucgaccgugggugucuuucaaccagaaucuggaauaucagauaggauacauaugcagugggauuuucggagacaauccacgcccuaaugauaagacaggcaguugugguccaguaucgucuaauggagcaaauggaguaaaaggauuuucauucaaauacggcaaugguguuuggauagggagaacuaaaagcauuaguucaagaaacgguuuugagaugauuugggauccgaacggauggacugggacagacaauaacuucucaauaaagcaagauaucguaggaauaaaugaauggucaggauauagcgggaguuuuguucagcauccagaacuaacagggcuggauuguauaagaccuugcuucuggguugaacuaaucagagggcgacccaaagagaacacaaucuggacuagcgggagcagcauauccuuuugugguguaaacagugacacuguggguuggucuuggccagacggugcugaguugccauuuaccauugacaaguaa

SEQ ID NO: 50227 - RNA, 1410 nt, Artificial Sequence; identical to SEQ ID NO: 48814
  derived and/or modified CDS sequence (wt) from neuraminidase__InfluenzaA__ADD25308

SEQ ID NO: 50228 - RNA, 1410 nt, Artificial Sequence; identical to SEQ ID NO: 48814
  derived and/or modified CDS sequence (wt) from neuraminidase__InfluenzaA__ADD25310

SEQ ID NO: 50229 - RNA, 1410 nt, Artificial Sequence; identical to SEQ ID NO: 50214
  derived and/or modified CDS sequence (wt) from neuraminidase__InfluenzaA__ADD25312

SEQ ID NO: 50230 - RNA, 1410 nt, Artificial Sequence; identical to SEQ ID NO: 48750
  derived and/or modified CDS sequence (wt) from neuraminidase__InfluenzaA__ADD25314

SEQ ID NO: 50231 - RNA, 1410 nt, Artificial Sequence; identical to SEQ ID NO: 50214
  derived and/or modified CDS sequence (wt) from neuraminidase__InfluenzaA__ADD25316

SEQ ID NO: 50232 - RNA, 1410 nt, Artificial Sequence
  derived and/or modified CDS sequence (wt) from neuraminidase__InfluenzaA__ADD29799
augaauccaaaccaaaagauaauaaccauugguucggucuguaugacaauuggaauggcuaacuuaauauuacaaauuggaaacauaaucucaauauggauuagccacucaauucaacuugggaaucaaaaucagauugaaacaugcaaucaaagcgucauuacuuaugaaaacaacacuuggguaaaucagacauauguuaacaucagcaacaccaacuuugcugcuggacagucagugguuuccgugaaauuagcgggcaauuccucucucugcccuguuaguggaugggcuauauacaguaaagacaacaguauaagaaucgguuccaagggggauguguuugucauaagggaaccauucauaucaugcucccccuuggaaugcagaaccuucuucuugacucaaggugccuugcuaaaugacaaacauuccaauggaaccauuaaagacaggaguccauaucgaacccuaaugagcuguccuauuggugaaguucccucuccauacaacucaagguuugagucagucgcuuggucagcaagugcuugucaugauggcaucaauuggcuaacaauuggaauuucuggcccagacaauggggcaguggcuguguuaaaguacaacggcauaauaacagacacuaucaagaguuggagaaacaauauauugagaacacaagagucugaaugugcauguguaaaugguucuugcuuuacuguaaugaccgauggaccaagugauggacaggccucauacaagaucuucagaauagaaaagggaaagauagucaaaucagucgaaaugaaugccccuaauuaucacuaugaggaaugcuccuguuauccugauucuagugaaaucacaugugugugcagggauaacuggcauggcucgaaucgaccgugggugucuuucaaccagaaucuggaauaucagauaggauacauaugcagugggauuuucggagacaauccacgcccuaaugauaagacaggcaguugugguccaguaucgucuaauggagcaaauggaguaaaaggauuuucauucaaauacggcaaugguguuuggauagggagaacuaaaagcauuaguucaagaaacgguuuugagaugauuugggauccgaacggauggacugggacagacaauaacuucucaauaaagcaagauaucguaggaauaaaugaguggucaggauauagcgggaguuuuguucagcauccagaacuaacagggcuggauuguauaagaccuugcuucuggguugaacuaaucagagggcgacccaaagagaacacaaucuggacuagcgggagcagcauauccuuuugugguguaaacagugacacuguggguuggucuuggccagacggugcugaguugccauuuaccauugacaaguaa

SEQ ID NO: 50233 - RNA, 1410 nt, Artificial Sequence
  derived and/or modified CDS sequence (wt) from neuraminidase__InfluenzaA__ADD29800
augaauccaaaccaaaagauaauaaccauugguucggucuguaugacaauuggaauggcuaacuuaauauuacaaauuggaaacauaaucucaauauggauuagccacucaauucaacuugggaaucaaaaucagauugaaacaugcaaucaaagcgucauuacuuaugaaaacaacacuuggguaaaucagacauauguuaacaucagcaacaccaacuuugcugcuggacagucagugguuuccgugaaauuagcgggcaauuccucucucugcccuguuaguggaugggcuauauacaguaaagacaacaguauaagaaucgguuccaagggggauguguuugucauaagggaaccauucauaucaugcucccccuuggaaugcagaaccuucuucuugacucaaggggccuugcuaaaugacaaacauuccaauggaaccauuaaagacaggagcccauaucgaacccuaaugagcuguccuauuggugaaguucccucuccauacaacucaagauuugagucagucgcuuggucagcaagugcuugucaugauggcaucaauuggcuaacaauuggaauuucuggcccagacaauggggcaguggcuguguugaaguacaacggcauaauaacagacacuaucaagaguuggagaaacaauauauugagaacacaagagucugaaugugcauguguaaaugguucuugcuuuacuguaaugaccgauggaccaagugauggacaggccucauacaagaucuucagaauagaaaagggaaagauagucaaaucagucgaaaugaaugccccuaauuaucacuaugaggaaugcuccuguuauccugauucuagugaaaucacaugugugugcagggauaacuggcauggcucgaaucgaccgugggugucuuucaaccagaaucuggaauaucagauaggauacauaugcagugggauuuucggagacaauccacgcccuaaugauaagacaggcaguugugguccaguaucgucuaauggagcaaauggaguaaaaggauuuucauucaaauacggcaaugguguuuggauagggagaacuaaaagcauuaguucaagaaacgguuuugagaugauuugggauccgaacggauggacugggacagacaauaacuucucaauaaagcaagauaucguaggaauaaaugaguggucaggauauagcgggaguuuuguucagcauccagaacuaacagggcuggauuguauaagaccuugcuucuggguugaacuaaucagagggcgacccaaagagaacacaaucuggacuagcgggagcagcauauccuuuugugguguaaacagugacacuguggguuggucuuggccagacggugcugaguugccauuuaccauugacaaguaa

SEQ ID NO: 50234 - RNA, 1410 nt, Artificial Sequence
  derived and/or modified CDS sequence (wt) from neuraminidase__InfluenzaA__ADD29801
augaauccaaaccaaaagauaauaaccauugguucggucuguaugacaauuggaauggcuaacuuaauauuacaaauuggaaacauaaucucaauauggauuagccacucaauucaacuugggaaucaaaaucagauugaaacaugcaaucaaagcgucauuacuuaugaaaacaacacuuggguaaaucagacauauguuaacaucagcaacaccaacuuugcugcuggacagucagugguuuccgugaaauuagcgggcaauuccucucucugcccuguuaguggaugggcuauauacaguaaagacaacaguauaagaaucgguuccaagggggauguguuugucauaagggaaccauucauaucaugcucccccuuggaaugcagaaccuucuucuugacucaaggggccuugcuaaaugacaaacauuccaauggaaccauuaaagacaggagcccauaucgaacccuaaugagcugcccuauuggugaaguucccucuccauacaacucaagauuugagucagucgcuuggucagcaagugcuugucaugauggcaucaauuggcuaacaauuggaauuucuggcccagacaauggggcaguggcuguguuaaaguacaacggcauaauaacagacacuaucaagaguuggagaaacaauauauugagaacacaagagucugaaugugcauguguaaaugguucuugcuuuacuguaaugaccgauggaccaagugauggacaggccucauacaagaucuucagaauagaaaaaggaaagauagucaaaucagucgaaaugaaugccccuaauuaucacuaugaggaaugcuccuguuauccugauucuagugaaaucacaugugugugcagggauaacuggcauggcucgaaucgaccgugggugucuuucaaccagaaucuggaauaucagauaggauacauaugcagugggauuuucggagacaauccacgcccuaaugauaagacaggcaguugugguccaguaucgucuaauggagcaaauggaguaaaaggauuuucauucaaauacggcaaugguguuuggauagggagaacuaaaagcauuaguucaagaaacgguuuugagaugauuugggauccgaacggauggacugggacagacaauaacuucucaauaaagcaagauaucguaggaauaaaugaguggucaggauauagcgggaguuuuguucagcauccagaacuaacagggcuggauuguauaagaccuugcuucuggguugaacuaaucagagggcgacccaaagagaacacaaucuggacuagcgggagcagcauauccuuuugugguguaaacagugacacuguggguuggucuuggccagacggugcugaguugccauuuaccauugacaaguaa

SEQ ID NO: 50235 - RNA, 1410 nt, Artificial Sequence; identical to SEQ ID NO: 48750
  derived and/or modified CDS sequence (wt) from neuraminidase__InfluenzaA__ADD29802

SEQ ID NO: 50236 - RNA, 1410 nt, Artificial Sequence
  derived and/or modified CDS sequence (wt) from neuraminidase__InfluenzaA__ADD29803
augaauccaaaccaaaagauaauaaccauugguucggucuguaugacaauuggaauggcuaacuuaauauuacaaauuggaaacauaaucucaauauggauuagccacucaauucaacuuggaaaucaaaaucagauugaaacaugcaaucaaagcgucauuacuuaugaaaacaacacuuggguaaaucagacauauguuaacaucagcaacaccaacuuugcugcuggacagucagugguuuccgugaaauuagcgggcaauuccucucucugcccuguuaguggaugggcuauauacaguaaagacaacaguauaagaaucgguuccaagggggauguguuugucauaagggaaccauucauaucaugcucccccuuggaaugcagaaccuucuucuugacucaaggggccuugcuaaaugacaaacauuccaauggaaccauuaaagacaggagcccauaucgaacccuaaugagcuguccuauuggugaaguucccucuccauacaacucaagauuugagucagucgcuuggucagcaagugcuugucaugauggcaucaauuggcuaacaauuggaauuucuggcccagacaauggggcaguggcuguguuaaaguacaacggcauaauaacagacacuaucaagaguuggagaaacaauauauugagaacacaagagucugaaugugcauguguaaaugguucuugcuuuacuguaaugaccgauggaccaagugauggacaggccucauacaagaucuucagaauagaaaagggaaagauagucaaaucagucgaaaugaaugccccuaauuaucacuaugaggaaugcuccuguuauccugauucuagugaaaucacaugugugugcagggauaacuggcauggcucgaaucgaccgugggugucuuucaaccagaaucuggaauaucagauaggauacauaugcagugggauuuucggagacaauccacgcccuaaugauaagacaggcaguugugguccaguaucgucuaauggagcaaauggaguaaaaggauuuucauucaaauacggcaaugguguuuggauagggagaacuaaaagcauuaguucaagaaacgguuuugagaugauuugggauccgaacggauggacugggacagacaauaacuucucaauaaagcaagauaucguaggaauaaaugaguggucaggauauagcgggaguuuuguucagcauccagaacuaacagggcuggauuguauaagaccuugcuucuggguugaacuaaucagagggcgacccaaagagaacacaaucuggacuagcgggagcagcauauccuuuugugguguaaacagugacacuguggguuggucuuggccagacggugcugaguugccauuuaccauugacaaguaa

SEQ ID NO: 50237 - RNA, 1410 nt, Artificial Sequence
  derived and/or modified CDS sequence (wt) from neuraminidase__InfluenzaA__ADD29804
augaauccaaaccaaaagauaauaaccauugguucggucuguaugacaauuggaauggcuaacuuaauauuacaaauuggaaacauaaucucaauauggauuagccacucaauucaacuugggaaucaaaaucagauugaaacaugcaaucaaagcgucauuacuuaugaaaacaacacuuggguaaaucagacauauguuaacaucagcaacaccaacuuugcugcuggacagucagugguuuccgugaaauuagcgggcaauuccucucucugcccuguuaguggaugggcuauauacaguaaagacaacaguauaagaaucgguucuaagggggauguguuugucauaagggaaccauucauaucaugcucccccuuggaaugcagaaccuucuucuugacucaaggggccuugcuaaaugacaaacauuccaauggaaccauuaaagacaggagcccauaucgaacccuaaugagcuguccuauuggugaaguucccucuccauacaacucaagauuugagucagucgcuuggucagcaagugcuugucaugauggcaucaauuggcuaacaauuggaauuucuggcccagacaauggggcaguggcuguguuaaaguacaacggcauaauaacagacacuaucaagaguuggagaaacaauauauugagaacacaagagucugaaugugcauguguaaaugguucuugcuuuacuguaaugaccgauggaccaagugauggacaggccucauacaagaucuucagaauagaaaagggaaagauagucaaaucagucgaaaugaaugccccuaauuaucacuaugaggaaugcuccuguuauccugauucuagugaaaucacaugugugugcagggauaacuggcauggcucgaaucgaccgugggugucuuucaaccagaaucuggaauaucagauaggauacauaugcagugggauuuucggagacaauccacgcccuaaugauaagacaggcaguugugguccaguaucgucuaauggagcaaauggaguaaaaggauuuucauucaaauacggcaaugguguuuggauagggagaacuaaaagcauuaguucaagaaacgguuuugagaugauuugggauccgaacggauggacugggacagacaauaacuucucaauaaagcaagauaucguaggaauaaaugaguggucaggauauagcgggaguuuuguucagcauccagaacuaacagggcuggauuguauaagaccuugcuucuggguugaacuaaucagagggcgacccaaagagaacacaaucuggacuagcgggagcagcauauccuuuugugguguaaacagugacacuguggguuggucuuggccagacggugcugaguugccauuuaccauugacaaguaa

SEQ ID NO: 50238 - RNA, 1410 nt, Artificial Sequence
  derived and/or modified CDS sequence (wt) from neuraminidase__InfluenzaA__ADD29805
augaauccaaaccaaaagauaauaaccauugguucggucuguaugacaauuggaauggcuaacuuaauauuacaaauuggaaacauaaucucaauauggauuagccacucaauucaacuugggaaucaaaaucagauugaaacaugcaaucaaagcgucauuacuuaugaaaacaacacuuggguaaaucagacauauguuaacaucagcaacaccaacuuugcugcuggacagucagugguuuccgugaaauuagcgggcaauuccucucucugcccuguuaguggaugggcuauauacaguaaagacaacaguauaagaaucgguuccaagggggauguguuugucauaagggaaccauucauaucaugcucccccuuggaaugcagaaccuucuucuugacucaaggggccuugcuaaaugacaaacauuccaauggaaccauuaaagacaggagcccauaucgaacccuaaugagcuguccuauuggugaaguucccucuccauacaacucaagauuugagucagucgcuuggucagcaagugcuugucaugauggcaucaauuggcuaacaauuggaauuucuggcccagacaauggggcaguggcuguguuaaaguacaacggcauaauaacagacacuaucaagaguuggagaaacaauauauugagaacacaagagucugaaugugcauguguaaaugguucuugcuuuacuguaaugaccgauggaccaagugauggacaggccucauacaagaucuucagaauagaaaagggaaaaauagucaaaucagucgaaaugaaugccccuaauuaucacuaugaggaaugcuccuguuauccugauucuagugaaaucacaugugugugcagggauaacuggcauggcucgaaucgaccgugggugucuuucaaccagaaucuggaauaucagauaggauacauaugcagugggauuuucggagacaauccacgcccuaaugauaagacaggcaguugugguccaguaucgucuaauggagcaaauggaguaaaaggauuuucauucaaauacggcaaugguguuuggauagggagaacuaaaagcauuaguucaagaaacgguuuugagaugauuugggauccgaacggauggacugggacagacaauaacuucucaauaaagcaagauaucguaggaauaaaugaguggucaggauauagcgggaguuuuguucagcauccagaacuaacagggcuggauuguauaagaccuugcuucuggguugaacuaaucagagggcgacccaaagagaacacaaucuggacuagcgggagcagcauauccuucugugguguaaacagugacacuguggguuggucuuggccagacggugcugaguugccauuuaccauugacaaguaa

SEQ ID NO: 50239 - RNA, 1410 nt, Artificial Sequence; identical to SEQ ID NO: 48750
  derived and/or modified CDS sequence (wt) from neuraminidase__InfluenzaA__ADD29806

SEQ ID NO: 50240 - RNA, 1410 nt, Artificial Sequence; identical to SEQ ID NO: 48750
  derived and/or modified CDS sequence (wt) from neuraminidase__InfluenzaA__ADD29807

SEQ ID NO: 50241 - RNA, 1410 nt, Artificial Sequence
  derived and/or modified CDS sequence (wt) from neuraminidase__InfluenzaA__ADD29808
augaauccaaaccaaaagauaauaaccauugguucggucuguaugacaauuggaauggcuaacuuaauauuacaaauuggaaacauaaucucaauauggauuagccacucaauucaacuugggaaucaaaaucagauugaaacaugcaaucaaagcgucauuacuuaugaaaacaacacuuggguaaaucagacauauguuaacaucagcaacaccaacuuugcugcuggacagucagugguuuccgugaaauuagcgggcaauuccucucucugcccuguuaguggaugggcuauauacaguaaagacaacaguauaagaaucgguuccaagggggauguguuugucauaagggaaccauucauaucaugcucccccuuggaaugcagaaccuucuucuugacucaaggggccuugcuaaaugacaaacauuccaauggaaccauuaaagacaggagcccauaucgaacccuaaugagcuguccuauuggugaaguucccucuccauacaacucaagguuugagucagucgcuuggucagcaagugcuugucaugauggcaucaauuggcuaacaauuggaauuucuggcccagacaauggggcaguggcuguguuaaaguacaacggcauaauaacagacacuaucaagaguuggagaaacaauauauugagaacacaagagucugaaugugcauguguaaaugguucuugcuuuacuguaaugaccgauggaccaagugauggacaggccucauacaagaucuucagaauagaaaagggaaagauagucaaaucagucgaaaugaaugccccuaauuaucacuaugaggaaugcuccuguuauccugauucuagugaaaucacaugugugugcagggauaacuggcauggcucgaaucgaccgugggugucuuucaaccagaaucuggaauaucagauaggauacauaugcagugggauuuucggagacaauccacgcccuaaugauaagacaggcaguugugguccaguaucgucuaauggagcaaauggaguaaaaggauuuucauucaaauacggcaaugguguuuggauagggagaacuaaaagcauuaguucaagaaacgguuuugagaugauuugggauccgaacggauggacugggacagacaauaacuucucaauaaagcaagauaucguaggaauaaaugaguggucaggauauagcgggaguuuuguucagcauccagaacuaacagggcuggauuguauaagaccuugcuucuggguugaacuaaucagagggcgacccaaagagaacacaaucuggacuagcgggagcagcauauccuuuugugguguaaacagugacacuguggguuggucuuggccagacggugcugaguugccauuuaccauugacaaguaa

SEQ ID NO: 50242 - RNA, 1410 nt, Artificial Sequence; identical to SEQ ID NO: 48750
  derived and/or modified CDS sequence (wt) from neuraminidase__InfluenzaA__ADD52538

SEQ ID NO: 50243 - RNA, 1410 nt, Artificial Sequence; identical to SEQ ID NO: 49973
  derived and/or modified CDS sequence (wt) from neuraminidase__InfluenzaA__ADD74353

SEQ ID NO: 50244 - RNA, 1410 nt, Artificial Sequence
  derived and/or modified CDS sequence (wt) from neuraminidase__InfluenzaA__ADD74373
augaauccaaaccaaaagauaauaaccauugguucggucuguaugacaauuggaauggcuaacuuaauauuacaaauuggaaacauaaucucaauauggauuagccacucaauucaacuugggaaucaaaaucagauugaaacaugcaaucaaagcgucauuacuuaugaaaacaacacuuggguaaaucagacauauguuaacaucagcaacaccaacuuugcugcuggacagucagugguuuccgugaaauuagcaggcaauuccucucucugcccuguuaguggaugggcaauauacaguaaagacaacaguauaagaaucgguuccaagggggauguguuugucauaagggaaccauucauaucaugcucccccuuggaaugcagaaccuucuucuugacucaaggggccuugcuaaaugacaaacauuccaauggaaccauuaaagacaggagcccauaucgaacccuaaugagcuguccuauuggugaaguucccucuccauacaacucaagauuugagucagucgcuuggucagcaagugcuugucaugauggcaucaauuggcuaacaauuggaauuucuggcccagacaauggggcaguggcuguguuaaaguacaacggcauaauaacagacacuaucaagaguuggagaaacaauauauugagaacacaagagucugaaugugcauguguaaaugguucuugcuuuacuguaaugaccgaugggccaagugauggacaggccucauacaagaucuucagaauagaaaagggaaagauagucaaaucagucgaaaugaaugccccuaauuaucacuaugaggaaugcuccuguuauccugauucuagugaaaucacaugugugugcagggauaacuggcauggcucgaaucgaccgugggugucuuucaaccagaaucuggaauaucagauaggauacauaugcagugggauuuucggagacaauccacgcccuaaugauaagacaggcaguugugguccaguaucgucuaauggagcaaauggaguaaaaggauuuucauucaaauacggcaaugguguuuggauagggagaacuaaaagcauuaguucaagaaacgguuuugagaugauuugggauccgaacggauggacugggacagacaauaacuucucaauaaagcaagauaucguaggaauaaaugaguggucaggauauagcgggaguuuuguucagcauccagaacuaacagggcuggauuguauaagaccuugcuucuggguugaacuaaucagagggcgacccaaagagaacacaaucuggacuagcgggagcagcauauccuuuugugguguaaacagugacacuguggguuggucuuggccagacggugcugaguugccauuuaccauugacaaguaa

SEQ ID NO: 50245 - RNA, 1410 nt, Artificial Sequence; identical to SEQ ID NO: 49733
  derived and/or modified CDS sequence (wt) from neuraminidase__InfluenzaA__ADD74383

SEQ ID NO: 50246 - RNA, 1410 nt, Artificial Sequence
  derived and/or modified CDS sequence (wt) from neuraminidase__InfluenzaA__ADD74401
augaauccaaaccaaaagauaauaaccauugguucggucuguaugacaauuggaauggcuaacuuaauauuacaaauuggaaacauaaucucaauauggauuagccacucaauucaacuugggaaucaaaaucagauugaaacaugcaaucaaagcgucauuacuuaugaaaacaacacuuggguaaaucagacauauguuaacaucagcaacaccaacuuugcugcuggacagucagugguuuccgugaaauuagcgggcaauuccucucucugcccuguuaguggaugggcuauauacaguaaagacaacaguauaagaaucgguuccaagggggauguguuugucauaagggaaccauucauaucaugcucccccuuggaaugcagaacauucuucuugacucaaggggccuugcuaaaugacaaacauuccaauggaaccauuaaagacaggagcccauaucgaacccuaaugagcuguccuauuggugaaguccccucuccauacaacucaagauuugagucagucgcuuggucagcaagugcuugucaugauggcaucaauuggcuaacaauuggaauuucuggcccagacaauggggcaguggcuguguuaaaguacaacggcauaauaacagacacuaucaagaguuggagaaacaauauauugagaacacaagagucugaaugugcauguguaaaugguucuugcuuuacuguaaugaccgauggaccaagugauggacaggccucauacaagaucuucagaauagaaaagggaaagauagucaaaucagucgaaaugaaugccccuaauuaucacuaugaggaaugcuccuguuauccugauucuagugaaaucacaugugugugcagggauaacuggcauggcucgaaucgaccgugggugucuuucaaccagaaucuggaauaucagauaggauacauaugcagugggauuuucggagacaauccacgcccuaaugauaagacaggcaguugugguccaguaucgucuaauggagcaaauggaguaaaaggauuuucauucaaauacggcaaugguguuuggauagggagaacuaaaagcauuaguucaagaaacgguuuugagaugauuugggauccgaacggauggacugggacagacaauaacuucucaauaaagcaagauaucguaggaauaaaugaauggucaggauauagcgggaguuuuguucagcauccagaacuaacagggcuggauuguauaagaccuugcuucuggguugaacuaaucagagggcgacccaaagagaacacaaucuggacuagcgggagcagcauauccuuuugugguguaaacagugacacuguggguuggucuuggccagacggugcugaguugccauuuaccauugacaaguaa

SEQ ID NO: 50247 - RNA, 1410 nt, Artificial Sequence
  derived and/or modified CDS sequence (wt) from neuraminidase__InfluenzaA__ADD74411
augaauccaaaccaaaagauaauaaccauugguucggucuguaugacaauuggaauggcuaacuuaauauuacaaauuggaaacauaaucucaauauggauuagccacucaauucaacuugggaaucaaaaucagauugaaacaugcaaucaaagcgucauuacuuaugaaaacaacacuuggguaaaucagacauauguuaacaucagcaacaccaacguugcugcuggacagucagugguuuccgugaaauuagcgggcaauuccucucucugcccuguuaguggaugggcuauauacaguaaagacaacaguauaagaaucgguuccaagggggauguguuugucauaagggaaccauucauaucaugcucccccuuggaaugcagaaccuucuucuugacucaaggggccuugcuaaaugacaaacauuccaauggaaccauuaaagacaggagcccauaucgaacccuaaugagcuguccuauuggugaaguuccaucuccauacaacucaagauuugagucagucgcuuggucagcaagugcuugucaugauggcaucaauuggcuaacgauuggaauuucuggcccagacaauggggcaguggcuguguuaaaguacaacggcauaauaacagacacuaucaagaguuggagaaacaauauauugagaacacaagagucugaaugugcauguguaaaugguucuugcuuuacuguaaugaccgauggaccaagugauggacaggccucauacaagaucuucagaauagaaaagggaaagauagucaaaucagucgaaaugaaugccccuaauuaucacuaugaggaaugcuccuguuauccugauucuagugaaaucacaugugugugcagggauaacuggcauggcucgaaucgaccgugggugucuuucaaccagaaucuggaauaucagauaggauacauaugcagugggauuuucggagacaauccacgcccuaaugauaagacaggcaguugugguccaguaucgucuaauggagcaaauggaguaaaaggauuuucauucaaauacggcagugguguuuggauagggagaacuaaaagcauuaguucaagaagcgguuuugagaugauuugggauccgaacggauggacugggacagacaauaacuucucaauaaagcaagauaucguaggaauaaaugaguggucaggauauagcgggaguuuuguucagcauccagaacuaacagggcuggauuguauaagaccuugcuucuggguugaacuaaucagagggcgacccaaagagaacacaaucuggacuagcgggagcagcauauccuuuugugguguaaacagugacacuguggguuggucuuggccagacggugcugaguugccauuuaccauugacaaguaa

SEQ ID NO: 50248 - RNA, 1410 nt, Artificial Sequence; identical to SEQ ID NO: 48750
  derived and/or modified CDS sequence (wt) from neuraminidase__InfluenzaA__ADD74421

SEQ ID NO: 50249 - RNA, 1410 nt, Artificial Sequence; identical to SEQ ID NO: 48750
  derived and/or modified CDS sequence (wt) from neuraminidase__InfluenzaA__ADD74431

SEQ ID NO: 50250 - RNA, 1410 nt, Artificial Sequence
  derived and/or modified CDS sequence (wt) from neuraminidase__InfluenzaA__ADD74441
augaauccaaaccaaaagauaauaaccauugguucggucuguaugacaauuggaauggcuaacuuaauauuacaaauuggaaacauaaucucaauauggauuagccacucaauucaacuugggaaucaaaaucagauugaaacaugcaaucaaagcgucauuacuuaugaaaacaacacuuggguaaaucagacauauguuaacaucagcaacaccaacuuugcugcuggacagucagugguuuccgugaaauuagcaggcaauuccucucucugcccuguuaguggaugggccauauacagcaaagacaacagcauaagaaucgguuccaagggggauguguuugucauaagggaaccauucauaucaugcucccccuuggaaugcagaaccuucuucuugacucaaggggccuugcuaaaugacaaacauuccaauggaaccauuaaagacaggagcccauaucgaacccuaaugagcuguccuauuggugaaguucccucuccauacaacucaagauuugagucagucgcuuggucagcaagugcuugucaugauggcaucaauuggcuaacaauuggaauuucuggcccagacaauggggcaguggcuguguuaaaguacaacggcauaauaacagacacuaucaagaguuggagaaacaauauauugagaacacaagagucugaaugugcauguguaaaugguuccugcuuuacuguaaugaccgaugggccaagugauggacaggccucauacaagaucuucagaauagaaaagggaaagauagucaaaucagucgaaaugaaugccccuaauuaucacuaugaggaaugcuccuguuauccugauucuagugaaaucacaugugugugcagggauaacuggcauggcucgaaucgaccgugggugucuuucaaccagaaucuggaauaucagauaggauacauaugcagugggauuuucggagacaauccacgcccuaaugauaagacaggcaguugugguccaguaucgucuaauggagcaaauggaguaaaaggauuuucauucaaauacggcaaugguguuuggauagggagaacuaaaagcauuaguucaagaaacgguuuugagaugauuugggauccgaacggauggacugggacagacaauaucuucucaauaaagcaagauaucguaggaauaaaugaguggucaggauauagcgggaguuuuguucagcauccagaacuaacagggcuggauuguauaagaccuugcuucuggguugaacuaaucagagggcgacccaaagagaacacaaucuggacuagcgggagcagcauauccuuuugugguguaaacagugacacuguggguuggucuuggccagacggugcugaguugccauuuaccauugacaaguaa

SEQ ID NO: 50251 - RNA, 1410 nt, Artificial Sequence; identical to SEQ ID NO: 50246
  derived and/or modified CDS sequence (wt) from neuraminidase__InfluenzaA__ADD74451

SEQ ID NO: 50252 - RNA, 1410 nt, Artificial Sequence; identical to SEQ ID NO: 49733
  derived and/or modified CDS sequence (wt) from neuraminidase__InfluenzaA__ADD74461

SEQ ID NO: 50253 - RNA, 1410 nt, Artificial Sequence
  derived and/or modified CDS sequence (wt) from neuraminidase__InfluenzaA__ADD74471
augaauccaaaccaaaagauaauaaccauugguucggucuguaugacaauuggaauggcuaacuuaauauuacaaauuggaaacauaaucucaauauggauuagccacucaauucaacuugggaaucaaaaucagauugaaacaugcaaucaaagcgucauuacuuaugaaaacaacacuuggguaaaucagacauauguuaacaucagcaacaccaacuuugcugcuggacagucagugguuuccgugaaauuagcgggcaauuccucucucugcccuguuaguggaugggcuauauacaguaaagacaacaguauaagaaucgguuccaagggggauguguuugucauaagggaaccauucauaucaugcucccccuuggaaugcagaaccuucuucuugacucaaggggccuugcuaaaugacaaacauuccaauggaaccauuaaagacaggagcccauaucgaacccuaaugagcuguccuauuggugaaguucccucuccauacaacucaagauuugagucagucgcuuggucagcaagugcuugucaugauggcaucaauuggcuaacaauuggaauuucuggcccagacaauggggcaguggcuguguuaaaguacaacggcauaauaacagacacuaucaagaguuggagaaacaauauauugagaacacaagagucugaaugugcauguguaaaugguucuugcuuuacuguaaugaccgauggaccaagugauggacaggccucauacaagaucuucagaauagaaaagggaaagauagucaaaucagucgaaaugaaugccccuaauuaucacuaugaggaaugcuccuguuauccugauucuagugaaaucacaugugugugcagggauaacuggcauggcucgaaucgaccgugggugucuuucaaccagaaucuggaauaucagauaggauacauaugcagugggauuuucggagacaauccacgcccuaaugauaagacaggcaguugugguccaguaucgucuaauggagcaaauggaguaaaaggauuuucauucaaauacggcaaugguguuuggauagggagaacuaaaagcauuaguucaagaaacgguuuugagaugauuugggauccgaacggauggacugggacagacaauaacuucucaauaaagcaagauaucguaggaauaaaugaguggucaggauauagcgggaguuuuguucagcauccagaacuaacagggcuggauuguauaagaccuugcuucuggguugaacuaaucagagggcgacccaaagagaacacaaucuggacuagcgggagcagcauauccuuuugugguguaaacagugacacuguggguuggucuuggccagacggugcugaguugccguuuaccauugacaaguaa

SEQ ID NO: 50254 - RNA, 1410 nt, Artificial Sequence; identical to SEQ ID NO: 49794
  derived and/or modified CDS sequence (wt) from neuraminidase__InfluenzaA__ADD74481

SEQ ID NO: 50255 - RNA, 1410 nt, Artificial Sequence
  derived and/or modified CDS sequence (wt) from neuraminidase__InfluenzaA__ADD74491
augaauccaaaccaaaagauaauaaccauugguucggucuguaugacaauuggaauggcuaacuuaauauuacaaauuggaaacauaaucucaauauggauuagccacucaauucaacuugggaaucaaaaucagauugaaacaugcaaucaaagcgucauuacuuaugaaaacaacacuuggguaaaucagacauauguuaacaucagcaacaccaacuuugcugcuggacagucagugguuuccgugaaauuagcgggcaauuccucucucugcccuguuaguggaugggcuauauacaguaaagacaacaguauaagaaucgguuccaagggggauguguuugucauaagggaaccauucauaucaugcucccccuuggaaugcagaaccuucuucuugacucaaggggccuugcuaaaugacaaacauuccaauggaaccauuaaagacaggagcccauaucgaacccuaaugagcuguccuauuggugaaguucccucuccauacaacucaagauuugagucagucgcuuggucagcaagugcuugucaugauggcaucaauuggcuaacaauuggaauuucuggcccagacaauggggcaguggcuguguuaaaguacaacggcauaauaacagacacuaucaagaguuggagaaacaauauauugagaacacaagagucugaaugugcauguguaaaugguucuugcuuuacuguaaugaccgauggaccaagugauggacaggccucauacaagaucuucagaauagaaaagggaaagauagucaaaucagucgaaaugaaugccccuaauuaucacuaugaggaaugcuccuguuauccugauucuagugaaaucacaugugugugcagggauaacuggcauggcucgaaucgaccgugggugucuuucaaccagaaucuggaauaucagauaggauacauaugcagugggauuuucggagacaauccacgcccuaaugauaagacaggcaguugugguccaguaucgucuaauggagcaaauggaguaaaaggauuuucauucaaauacggcaaugguguuuggauagggagaacuaaaagcauuaguucaagaaacgguuuugagaugauuugggauccgaacggauggacugggacagacaauaacuucucaauaaagcaagauaucauaggaauaaaugaguggucaggauauagcgggaguuuuguucagcauccagaacuaacagggcuggauuguauaagaccuugcuucuggguugaacuaaucagagggcgacccaaagagaacacaaucuggacuagcgggagcagcauauccuuuugugguguaaacagugacacuguggguuggucuuggccagacggugcugaguugccauuuaccauugacaaguaa

SEQ ID NO: 50256 - RNA, 1410 nt, Artificial Sequence; identical to SEQ ID NO: 50246
  derived and/or modified CDS sequence (wt) from neuraminidase__InfluenzaA__ADD74501

SEQ ID NO: 50257 - RNA, 1410 nt, Artificial Sequence; identical to SEQ ID NO: 48750
  derived and/or modified CDS sequence (wt) from neuraminidase__InfluenzaA__ADD74511

SEQ ID NO: 50258 - RNA, 1410 nt, Artificial Sequence
  derived and/or modified CDS sequence (wt) from neuraminidase__InfluenzaA__ADD74521
augaauccaaaccaaaagauaauaaccauugguucggucuguaugacaauuggaauggcuaacuuaauauuacaaauuggaaacauaaucucaauauggauuagccacucaauucaacuugggaaucaaaaucagauugaaacaugcaaucaaagcgucauuacuuaugaaaacaacacuuggguaaaucagacauauguuaacaucagcaacaccaacuuugcugcuggacagucagugguuuccgugaaauuagcgggcaauuccucucucugcccuguuaguggaugggcuauauacaguaaagacaacaguauaagaaucgguuccaagggggauguguuugucauaagggaaccauucauaucaugcucccccuuggaaugcagaaccuucuucuugacucaaggggccuugcuaaaugacaaacauuccaauggaaccauuaaagacaggagcccauaucgaacccuaaugagcuguccuauuggugaaguucccucuccauacaacucaagauuugagucagucgcuuggucagcaagugcuugucaugauggcaucaauuggcuaacaauuggaauuucuggcccagacaauggggcaguggcuguguuaaaguacaacggcauaauaacagacacuaucaagaguuggagaaacaauauauugagaacacaagagucugaaugugcauguguaaaugguucuugcuuuacuguaaugaccgauggaccaagugauggacaggccucauacaagaucuucagaauagaaaagggaaagauagucaaaucagucgaaaugaaugccccuaauuaucacuaugaggaaugcuccuguuauccugauucuagugaaaucacaugugugugcagggauaacuggcauggcucgaaucgaccgugggugucuuucaaccagaaucuggaauaucagauaggauacauaugcagugggauuuucggagacaauccacgcccuaaugauaagacaggcaguugugguccaguaucgucuaauggagcaaauggaguaaaaggauuuucauucaaauacggcaaugguguuuggauagggagaacuaaaagcauuaguucaagaaacgguuuugagaugauuugggauccgaacggauggacugggacagacaauaacuucucaauaaagcaagauaucguaggaauaaaugaguggucaggauauagcgggaguuuuguccagcauccagaacuaacagggcugaauuguauaagaccuugcuucuggguugaacuaaucagagggcgacccaaagagaacacaaucuggacuagcgggagcagcauauccuuuugugguguaaacagugacacuguggguuggucuuggccagacggugcugaguugccauuuaccauugacaaguaa

SEQ ID NO: 50259 - RNA, 1410 nt, Artificial Sequence
  derived and/or modified CDS sequence (wt) from neuraminidase__InfluenzaA__ADD74531
augaauccaaaccaaaagauaauaaccauugguucggucuguaugacaauuggaauggcuaacuuaauauuacaaauuggaaacauaaucucaauauggauuagccacucaauucaacuugggaaucaaaaucagauugaaacaugcaaucaaagcgucauuacuuaugaaaacaacacuuggguaaaucagacauauguuaacaucagcaacaccaacuuugcugcuggacagucagugguuuccgugaaauuagcgggcaauuccucucucugcccuguuaguggaugggcuauauacaguaaagacaacaguauaagaaucgguuccaagggggauguguuugucauaagggaaccauucauaucaugcucccccuuggaaugcagaaccuucuucuugacucaaggggccuugcuaaaugacaaacauuccaauggaaccauuaaagacaggagcccauaucgaacccuaaugagcuguccuauuggugaaguucccucuccauacaacucaagauuugagucagucgcuuggucagcaagugcuugucaugauggcaucaauuggcuaacaauuggaauuucuggcccagacaauggggcaguggcuguguuaaaguacaacggcauaauaacagacacuaucaagaguuggagaaacaauauauugagaacacaagagucugaaugugcauguguaaaugguucuugcuuuacuguaaugaccgauggaccaagugauggacaggccucauacaagaucuucagaauagaaaagggaaagauagucaaaucagucgaaaugaaugccccuaauuaucacuaugaggaaugcuccuguuauccugauucuagugaaaucacaugugugugcagggauaacuggcauggcucgaaucgaccgugggugucuuucaaccagaaucuggaauaucagauaggauacauaugcagugggauuuucggagacaauccacgcccuaaugauaagacaggcaguugugguccaguaucgucuaauggagcaaauggaguaaaaggauuuucauucaaauacggcaaugguguuuggauagggagaacuaaaagcauuaguucaagaaacgguuuugagaugauuugggauccgaacggauggacugggacagacaauaacuucucaauaaagcaagauaucguaggaauaaaugaguggucaggauauagcgggaguuuuguucagcauccagaacuaacagggcuggauuguauaagacccugcuucuggguugaacuaaucagagggcgacccaaagagaacacaaucuggacuagcgggagcagcauauccuuuugugguguaaacagugacacuguggguuggucuuggccagacggugcugaguugccauuuaccauugacaaguaa

SEQ ID NO: 50260 - RNA, 1410 nt, Artificial Sequence
  derived and/or modified CDS sequence (wt) from neuraminidase__InfluenzaA__ADD74551
augaauccaaaccaaaagauaauaaccauugguucggucuguaugacaauuggaauggcuaacuuaauauuacaaauuggaaacauaaucucaauauggauuagccacucaauucaacuugggaaucaaaaucagauugaaacaugcaaucaaagcgucauuacuuaugaaaacaacacuuggguaaaucagacauauguuaacaucagcaacaccaacuuugcugcuggacagucagugguuuccgugaaauuagcgggcaauuccucucucugcccuguuaguggaugggcuauauacaguaaagacaacaguguaagaaucgguuccaagggggauguguuugucauaagggaaccauucauaucaugcucccccuuggaaugcagaaccuucuucuugacucaaggggccuugcuaaaugacaaacauuccaauggaaccauuaaagacaggagcccauaucgaacccuaaugagcuguccuauuggugaaguucccucuccauacaacucaagauuugagucagucgcuuggucagcaagugcuugucaugauggcaucaauuggcuaacaauuggaauuucuggcccagacuauggggcaguggcuguguuaaaguacaacggcauaauaacagacacuaucaagaguuggagaaacaauauauugagaacacaagagucugaaugugcauguguaaaugguucuugcuuuacuguaaugaccgauggaccaagugauggacaggccucauacaagaucuucagaauagaaaagggaaagauagucaaaucagucgaaaugaaugccccuaauuaucacuaugaggaaugcuccuguuauccugauucuagugaaaucacaugugugugcagggauaacuggcauggcucgaaucgaccgugggugucuuucaaccagaaucuggaauaucagauaggauacauaugcagugggauuuucggagacaauccacgcccuaaugauaagacaggcaguugugguccaguaucgucuaauggagcaaauggaguaaaaggauuuucauucaaauacggcaaugguguuuggauagggagaacuaaaagcauuaguucaagaaacgguuuugagaugauuugggauccgaacggauggacugggacagacaauaacuucucaauaaagcaagauaucguaggaauaaaugaguggucaggauauagcgggaguuuuguucagcauccagaacuaacagggcuggauuguauaagaccuugcuucuggguugaacuaaucagagggcgacccaaagagaacacaaucuggacuagcgggagcagcauauccuuuugugguguaaacagugacacuguggguuggucuuggccagacggugcugaguugccauuuaccauugacaaguaa

SEQ ID NO: 50261 - RNA, 1410 nt, Artificial Sequence; identical to SEQ ID NO: 48750
  derived and/or modified CDS sequence (wt) from neuraminidase__InfluenzaA__ADD74561

SEQ ID NO: 50262 - RNA, 1410 nt, Artificial Sequence; identical to SEQ ID NO: 48750
  derived and/or modified CDS sequence (wt) from neuraminidase__InfluenzaA__ADD74571

SEQ ID NO: 50263 - RNA, 1410 nt, Artificial Sequence
  derived and/or modified CDS sequence (wt) from neuraminidase__InfluenzaA__ADD74581
augaauccaaaccaaaagauaauaaccauugguucggucuguaugacaauuggaauggcuaacuuaauauuacaaauuggaaacauaaucucaauauggauuagccacucaauucaacuugggaaucaaaaucagauugaaacaugcaaucaaagcgucauuacuuaugaaaacaacacuuggguaaaucagacauauguuaacaucagcaacaccaacuuugcugcuggacagucagugguuuccgugaaauuagcgggcaauuccucucucugcccuguuaguggaugggcuauauacaguaaagacaacaguauaagaaucgguuccaagggggauguguuugucauaagggaaccauucauaucaugcucccccuuggaaugcagaaccuucuucuugacucaaggggccuugcuaaaugacaaacauuccaauggaaccauuaaagacaggagcccauaucgaacccuaaugagcuguccuauuggugaaguucccucuccauacaacucaagauuugagucagucgcuuggucagcaagugcuugucaugauggcaucaauuggcuaacaauuggaauuucuggcccagacaauggggcaguggcuguguuaaaguacaacggcauaauaacagacacuaucaagaguuggagaaacaauauauugagaacacaagagucugaaugugcauguguaaaugguucuugcuuuacuguaaugaccgauggaccaagugauggacaggccucauacaagaucuucagaauagaaaagggaaagauagucaaaucagucgaaaugaaugccccuaauuaucacuaugaggaaugcuccuguuauccugauucuagugaaaucacaugugugugcagggauaacuggcauggcucgaaucgaccgugggugucuuucaaccagaaucuggaauaucagauaggauacauaugcagugggauuuucggagacaauccacgcccuaaugauaagacaggcaguugugguccaguaucgucuaauggagcaaauggaguaaaaggauuuucauucaaauacggcaaugguguuuggauagggagaacuaaaagcauuaguucaagaaacgguuuugagaugauuugggauccgaacggauggacugggacagacaauaacuucucaauaaagcaagauaucguaggaauaaaugaguggucaggauauagcgggaguuuuguccagcauccagaacuaacagggcuggauuguauaagaccuugcuucuggguugaacuaaucagagggcgacccaaagagaacacaaucuggacuagcgggagcagcauauccuuuugugguguaaacagugacgcuguggguuggucuuggccagacggugcugaguugccauuuaccauugacaaguaa

SEQ ID NO: 50264 - RNA, 1410 nt, Artificial Sequence; identical to SEQ ID NO: 48750
  derived and/or modified CDS sequence (wt) from neuraminidase__InfluenzaA__ADD74591

SEQ ID NO: 50265 - RNA, 1410 nt, Artificial Sequence; identical to SEQ ID NO: 48750
  derived and/or modified CDS sequence (wt) from neuraminidase__InfluenzaA__ADD74601

SEQ ID NO: 50266 - RNA, 1410 nt, Artificial Sequence
  derived and/or modified CDS sequence (wt) from neuraminidase__InfluenzaA__ADD74611
augaauccaaaccaaaagauaauaaccauugguucggucuguaugacaauuggaauggcuaacuuaauauuacaaauuggaaacauaaucucaauauggauuagccacucaauucaacuugggaaucaaaaucagauugaaacaugcaaucaaagcgucauuacuuaugaaaacaacacuuggguaaaucagacauauguuaacaucagcaacaccaacuuugcugcuggacagucagugguuuccgugaaauuagcgggcaauuccucucucugcccuguuaguggaugggcuauauacaguaaagacaacaguauaagaaucgguuccaagggggauguguuugucauaagggaaccauucauaucaugcucccccuuggaaugcagaaccuucuucuugacucaaggggccuugcuaaaugacaaacauuccaauggaaccauuaaagacaggagcccauaucgaacccuaaugagcuguccuauuggugaaguucccucuccauacaacucaagauuugagucagucgcuuggucagcaagugcuugucaugauggcaucaauuggcuaacaauuggaauuucuggcccagacaauggggcaguggcuguguuaaaguacaacggcauaauaacagacacuaucaagaguuggagaaacaauauauugagaacacaagagucugaaugugcauguguaaaugguucuugcuuuacuguaaugaccgauggaccaagugauggacaggccucauacaagaucuucagaauagaaaagggaaagauagucaaaucagucgaaaugaaugccccuaauuaucacuaugaggaaugcuccuguuauccugauucuagugaaaucacaugugugugcagggauaacuggcauggcucgaaucgaccgugggugucuuucaaccagaaucuggaauaucagauaggauacauaugcagugggauuuucggagacaauccacgcccuaaugauaagacaggcaguugugguccaguaucgucuaauggagcaaauggaauaaaaggauuuucauucaaauacggcaaugguguuuggauagggagaacuaaaagcauuaguucaagaaacgguuuugagaugauuugggauccgaacggauggacugggacagacaauaacuucucaauaaagcaagauaucguaggaauaaaugaguggucaggauauagcgggaguuuuguucagcauccagaacuaacagggcuggauuguauaagaccuugcuucuggguugaacuaaucagagggcgacccaaagagaacacaaucuggacuagcgggagcagcauauccuuuugugguguaaacagugacacuguggguuggucuuggccagacggugcugaguugccauuuaccauugacaaguaa

SEQ ID NO: 50267 - RNA, 1410 nt, Artificial Sequence; identical to SEQ ID NO: 49794
  derived and/or modified CDS sequence (wt) from neuraminidase__InfluenzaA__ADD74621

SEQ ID NO: 50268 - RNA, 1410 nt, Artificial Sequence; identical to SEQ ID NO: 48947
  derived and/or modified CDS sequence (wt) from neuraminidase__InfluenzaA__ADD74631

SEQ ID NO: 50269 - RNA, 1410 nt, Artificial Sequence; identical to SEQ ID NO: 48750
  derived and/or modified CDS sequence (wt) from neuraminidase__InfluenzaA__ADD74641

SEQ ID NO: 50270 - RNA, 1410 nt, Artificial Sequence
  derived and/or modified CDS sequence (wt) from neuraminidase__InfluenzaA__ADD74651
augaauccaaaccaaaagauaauaaccauugguucggucuguaugacaauuggaauggcuaacuuaauauuacaaauuggaaacauaaucucaauauggauuagccacucaauucaacuugggaaucaaaaucagauugaaacaugcaaucaaagcgucauuacuuaugaaaacaacacuuggguaaaucagacauauguuaacaucagcaacaccaacuuugcugcuggacagucagugguuuccgugaaauuagcgggcaauuccucucucugcccuguuaguggaugggcuauauacaguaaagacaacaguauaagaaucgguuccaagggggauguguuugucauaagggaaccauucauaucaugcucccccuuggaaugcagaaccuucuucuugacucaaggggccuugcuaaaugacaaacauuccaauggaaccauuaaagacaggagcccauaucgaacccuaaugagcuguccuauuggugaaguucccucuccauacaacucaagauuugagucagucgcuuggucagcaagugcuugucaugauggcaucaauuggcuaacaauuggaauuucuggcccagacaauggggcaguggcuguguuaaaguacaacggcauaauaacagacacuaucaagaguuggagaaacaauauauugagaacacaagagucugaaugugcauguguaaaugguucuugcuuuacuguaaugaccgauggaccaagugauggacaggccucauacaagaucuucagaauagaaaagggaaagauagucaaaucagucgaaaugaaugccccuaauuaucacuaugaggaaugcuccuguuauccugauucuagugaaaucacaugugugugcagggauaacuggcauggcucgaaucgaccgugggugucuuucaaccagaaucuggaauaucagauaggauacauaugcagugggauuuucggagacaauccacgcccuaaugauaagacaggcaguugugguccaguaucgucuaauggagcaaauggaguaaaaggauuuucauucaaauacggcaaugguguuuggauagggagaacuaaaagcauuaguucaagaaacgguuuugagaugauuugggauccgaacggauggacugggacagacaauaacuucucaauaaagcaagauaucguaggaauaaaugaguggucaggauauagcgggaguuuuguucagcauccagaacuaacagggcuggauuguauaagaccuugcuucuggguugaacuaaucagagggcgacccaaagagaacacaaucuggacuagcgggagcagcauauccuuuugugguguaaacagugacacuguggguuggucguggccagacggugcugaguugccauuuaccauugacaaguaa

SEQ ID NO: 50271 - RNA, 1410 nt, Artificial Sequence; identical to SEQ ID NO: 50176
  derived and/or modified CDS sequence (wt) from neuraminidase__InfluenzaA__ADD74661

SEQ ID NO: 50272 - RNA, 1410 nt, Artificial Sequence
  derived and/or modified CDS sequence (wt) from neuraminidase__InfluenzaA__ADD74671
augaauccaaaccaaaagauaauaaccauugguucggucuguaugacaauuggaauggcuaacuuaauauuacaaauuggaaacauaaucucaauauggauuagccacucaauucaacuugggaaucaaaaucagauugaaacaugcaaucaaagcgucauuacuuaugaaaacaacacuuggguaaaucagacauauguuaacaucagcaacaccaacuuugcugcuggacagucagugguuuccgugaaauuagcgggcaauuccucucucugcccuguuaguggaugggcuauauacaguaaagacaacaguauaagaaucgguuccaagggggauguguuugucauaagggaaccauucauaucaugcucccccuuggaaugcagaaccuucuucuugacucaaggggccuugcuaaaugacaaacauuccaauggaaccauuaaagacaggagcccauaucgaacccuaaugagcuguccuauuggugaaguucccucuccauacaacucaagauuugagucagucgcuuggucagcaagugcuugucaugauggcaucaauuggcuaacaauuggaauuucuggcccagacaauggggcaguggcuguguuaaaguacaacggcauaauaacagacacuaucaagaguuggagaaacaauauauugagaacacaagagucugaaugugcauguguaaaugguucuugcuuuacuguaaugaccgauggaccaagugauggacaggccucauacaagaucuucagaauagaaaagggaaagauagucaaaucagucgaaaugaaugccccuaauuaucacuaugaggaaugcuccuguuauccugauucuagugaaaucacaugugugugcagggauaacuggcauggcucgaaucgaccgugggugucuuucaaccagaauuuggaauaucagauaggauacauaugcagugggauuuucggagacaauccacgcccuaaugauaagacaggcaguugugguccaguaucgucuaauggagcaaauggaguaaaaggauuuucauucaaauacggcaaugguguuuggauagggagaacuaaaagcauuaguucaagaaacgguuuugagaugauuugggauccgaacggauggacugggacagacaauaacuucucaauaaagcaagauaucguaggaauaaaugaguggucaggauauagcgggaguuuuguucagcauccagaacuaacagggcuggauuguauaagaccuugcuucuggguugaacuaaucagagggcgacccaaagagaacacaaucuggacuagcgggagcagcauauccuuuugugguguaaacagugacacuguggguuggucuuggccagacggugcugaguugccauuuaccauugacaaguaa

SEQ ID NO: 50273 - RNA, 1410 nt, Artificial Sequence; identical to SEQ ID NO: 48750
  derived and/or modified CDS sequence (wt) from neuraminidase__InfluenzaA__ADD74681

SEQ ID NO: 50274 - RNA, 1410 nt, Artificial Sequence
  derived and/or modified CDS sequence (wt) from neuraminidase__InfluenzaA__ADD74691
augaauccaaaccaaaagauaauaaccauugguucggucuguaugacaauuggaauggcuaacuuaauauuacaaauuggaaacauaaucucaauauggauuugccacucaauucaacuugggaaucaaaaucagaucgaaacaugcaaucaaagcgucauuacuuaugaaaacaacacuuggguaaaucagacauauguuaacaucagcaacaccaacuuugcugcuggacagucagugguuuccgugaaauuagcgggcaauuccucucucugcccuguuaguggaugggcuauauacaguaaagacaacaguauaagaaucgguuccaagggggauguguuugucauaagggaaccauucauaucaugcucccccuuggaaugcagaaccuucuucuugacucaaggggccuugcuaaaugacaaacauuccaauggaaccauuaaagacaggagcccauaucgaacccuaaugagcuguccuauuggugaaguucccucuccauacaacucaagauuugagucagucgcuuggucagcaagugcuugucaugauggcaucaauuggcuaacaauuggaauuucuggcccagacaauggggcaguggcuguguuaaaguacaacggcauaauaacagacacuaucaagaguuggagaaacaauauauugagaacacaagagucugaaugugcauguguaaaugguucuugcuuuacuguaaugaccgauggaccaagugauggacaggccucauacaagaucuucagaauagaaaagggaaagauagucaaaucagucgaaaugaaugccccuaauuaucacuaugaggaaugcuccuguuauccugauucuagugaaaucacaugugugugcagggauaacuggcauggcucgaaucgaccgugggugucuuucaaccagaaucuggaauaucagauaggauacauaugcagugggauuuucggagacaauccacgcccuaaugauaagacaggcaguugugguccaguaucgucuaauggagcaaauggaguaaaaggauuuucauucaaauacggcaaugguguuuggauagggagaacuaaaagcauuaguucaagaaacgguuuugagaugauuugggauccgaacggauggacugggacagacaauaacuucucaauaaagcaagauaucguaggaauaaaugaguggucaggauauagcgggaguuuuguucagcauccagaacuaacagggcuggauuguauaagaccuugcuucuggguugaacuaaucagagggcgacccaaagagaacacaaucuggacuagcgggagcagcauauccuuuugugguguaaacagugacacuguggguuggucuuggccagacggugcugaguugccauuuaccauugacaaguaa

SEQ ID NO: 50275 - RNA, 1410 nt, Artificial Sequence
  derived and/or modified CDS sequence (wt) from neuraminidase__InfluenzaA__ADD74701
augaauccaaaccaaaagauaauaaccauugguucggucuguaugacaauuggaauggcuaacuuaauauuacaaauuggaaacauaaucucaauauggauuagccacucaauucaacuugggaaucaaaaucagauugaaacaugcaaucaaagcgucauuacuuaugaaaacaacacuuggguaaaucagacauauguuaacaucagcaacaccaacuuugcugcuggacagucagugguuuccgugaaauuagcgggcaauuccucucucugcccugucaguggaugggcuauauacaguaaagacaacaguauaagaaucgguuccaagggggauguguuugucauaagggaaccauucauaucaugcucccccuuggaaugcagaaccuucuucuugacucaaggggccuugcuaaaugacaaacauuccaauggaaccauuaaagacaggagcccauaucgaacccuaaugagcuguccuauuggugaaguucccucuccauacaacucaagauuugagucagucgcuuggucagcaagugcuugucaugauggcaucaauuggcuaacaauuggaauuucuggcccagacaauggggcaguggcuguguuaaaguacaacggcauaauaacagacacuaucaagaguuggagaaacaauauauugagaacacaagagucugaaugugcauguguaaaugguucuugcuuuacuguaaugaccgauggaccaagugauggacaggccucauacaagaucuucagaauagaaaagggaaagauagucaaaucagucgaaaugaaugccccuaauuaucacuaugaggaaugcuccuguuauccugauucuagugaaaucacaugugugugcagggauaacuggcauggcucgaaucgaccgugggugucuuucaaccagaaucuggaauaucagauaggauacauaugcagugggauuuucggagacaauccacgcccuaaugauaagacaggcaguugugguccaguaucgucuaauggagcaaauggaguaaaaggauuuucauucaaauacggcaaugguguuuggauagggagaacuaaaagcauuaguucaagaaacgguuuugagaugauuugggauccgaacggauggacugggacagacaauaacuucucaauaaagcaagauaucguaggaauaaaugaguggucaggauauagcgggaguuuuguucagcauccagaacuaacagggcuggauuguauaagaccuugcuucuggguugaacuaaucagagggcgacccaaagagaacacaaucuggacuagcgggagcagcauauccuuuugugguguaaacagugacacuguggguuggucuuggccagacggugcugaguugccauuuaccauugacaaguaa

SEQ ID NO: 50276 - RNA, 1410 nt, Artificial Sequence; identical to SEQ ID NO: 48750
  derived and/or modified CDS sequence (wt) from neuraminidase__InfluenzaA__ADD74711

SEQ ID NO: 50277 - RNA, 1410 nt, Artificial Sequence
  derived and/or modified CDS sequence (wt) from neuraminidase__InfluenzaA__ADD74721
augaauccaaaccaaaagauaauaaccauugguucggucuguaugacaauuggaauggcuaacuuaauauuacaaauuggaaacauaaucucaauauggauuagccacucaauucaacuugggaaucaaaaucagauugaaacaugcaaucaaagcgucauuacuuaugaaaacaacacuuggguaaaucagacauauguuaacaucagcaacaccaacuuugcugcuggacagucagugguuuccgugaaauuagcgggcaauuccucucucugcccuguuaguggaugggcuauauacaguaaagacaacaguauaagaaucgguuccaagggggauguguuugucauaagggaaccauucauaucaugcucccccuuggaaugcagaaccuucuucuugacucaaggggccuugcuaaaugacaaacauuccaauggaaccauuaaagacaggagcccauaucgaacccuaaugagcuguccuauuggugaaguucccucuccauacaacucaagauuugagucagucgcuuggucagcaagugcuugucaugauggcaucaauuggcuaacaauuggaauuucuggcccagacaauggggcaguggcuguguuaaaguacaacggcauaauaacagacacuaucaagaguuggagaaacaauauauugagaacacaagagucugaaugugcauguguaaaugguucuugcuuuacuguaaugaccgauggaccaagugauggacaggccucauacaagaucuucagaauagaaaagggaaagauagucaaaucagucgaaaugaaugccccuaauuaucacuaugaggaaugcuccuguuauccugauucuagugaaaucacaugugugugcagggauaacuggcauggcucgaaccgaccgugggugucuuucaaccagaaucuggaauaucagauaggauacauaugcagugggauuuucggagacaauccacgcccuaaugauaagacaggcaguugugguccaguaucgucuaauggagcaaauggaguaaaaggauuuucauucaaauacggcaaugguguuuggauagggagaacuaaaagcauuaguucaagaaacgguuuugagaugauuugggauccgaacggauggacugggacagacaauaacuucucaauaaagcaagauaucguaggaauaaaugaguggucaggauauagcgggaguuuuguucagcauccagaacuaacagggcuggauuguauaagaccuugcuucuggguugaacuaaucagagggcgacccaaagagaacacaaucuggacuagcgggagcagcauauccuuuugugguguaaacagugacacuguggguuggucuuggccagacggugcugaguugccauuuaccauugacaaguaa

SEQ ID NO: 50278 - RNA, 1410 nt, Artificial Sequence; identical to SEQ ID NO: 49794
  derived and/or modified CDS sequence (wt) from neuraminidase__InfluenzaA__ADD74731

SEQ ID NO: 50279 - RNA, 1410 nt, Artificial Sequence
  derived and/or modified CDS sequence (wt) from neuraminidase__InfluenzaA__ADD74741
augaauccaaaccaaaagauaauaaccauugguucggucuguauaacaauuggaauggcuaacuuaauauuacaaauuggaaacauaaucucaauauggauuagccacucaauucaacuugggaaucaaaaucagauugaaacaugcaaucaaagcgucauuacuuaugaaaacaacacuuggguaaaucagacauauguuaacaucagcaacaccaacuuugcugcuggacagucagugguuuccgugaaauuagcgggcaguuccucucucugcccuguuaguggaugggcuauauacaguaaagacaacaguauaagaaucgguuccaagggggauguguuugucauaagggaaccauucauaucaugcucccccuuggaaugcagaaccuucuucuugacucaaggggccuugcuaaaugacaaacauuccaauggaaccauuaaagacaggagcccauaucgaacccuaaugagcuguccuauuggugaaguucccucuccauacaacucaagauuugagucagucgcuuggucagcaagugcuugucaugauggcaucaauuggcuaacaauuggaauuucuggcccagacaauggggcaguggcuguguuaaaguacaacggcauaauaacagacacuaucaagaguuggagaaacaauauauugagaacacaagagucugaaugugcauguguaaaugguucuugcuuuacuguaaugaccgauggaccaagugauggacaggccucauacaagaucuucagaauagaaaagggaaagauagucaaaucagucgaaaugaaugccccuaauuaucacuaugaggaaugcuccuguuauccugauucuagugaaaucacaugugugugcagggauaacuggcauggcucgaaucgaccguggguaucuuucaaccagaaucuggaauaucagauaggauacauaugcagugggauuuucggagacaauccacgcccuaaugauaagaaaggcaguugugguccaguaucgucuaauggagcaaauggaguaaaaggauuuucauucaaauacggcaaugguguuuggauagggagaacuaaaagcauuaguucaagaaacgguuuugagaugauuugggauccgaacggauggacugggacagacaauaacuucucaauaaagcaagauaucguaggaauaaaugaauggucaggauauagcgggaguuuuguucagcauccagaacuaacagggcuggauuguauaagaccuugcuucuggguugaacuaaucagagggcgacccaaagagaacacaaucuggacuagcgggagcagcauauccuuuugugguguaaacagugacacuguggguuggucuuggccagacggugcugaguugccauuuaccauugacaaguaa

SEQ ID NO: 50280 - RNA, 1410 nt, Artificial Sequence
  derived and/or modified CDS sequence (wt) from neuraminidase__InfluenzaA__ADD74751
augaauccaaaccaaaagauaauaaccauugguucggucuguaugacaauuggaauggcuaacuuaauauuacaaauuggaaacauaaucucaauauggauuagccacucaauucaacuugggaauaaaaaucagauugaaacaugcaaucaaagcgucauuacuuaugaaaacaacacuuggguaaaucagacauauguuaacaucagcaacaccaacuuugcugcuggacagucagugguuuccgugaaauuagcgggcaauuccucucucugcccuguuaguggaugggcuauauacaguaaagacaacaguauaagaaucgguuccaagggggauguguuugucauaagggaaccauucauaucaugcucccccuuggaaugcagaaccuucuucuugacucaaggggccuugcuaaaugacaaacauuccaauggaaccauuaaagacaggagcccauaucgaacccuaaugagcuguccuauuggugaaguucccucuccauacaacucaagauuugagucagucgcuuggucagcaagugcuugucaugauggcaucaauuggcuaacaauuggaauuucuggcccagacaauggggcaguggcuguguuaaaguacaacggcauaauaacagacacuaucaagaguuggagaaacaauauauugagaacacaagagucugaaugugcauguguaaaugguucuugcuuuacuguaaugaccgauggaccaagugauggacaggccucauacaagaucuucagaauagaaaagggaaagauagucaaaucagucgaaaugaaugccccuaauuaucacuaugaggaaugcuccuguuauccugauucuagugaaaucacaugugugugcagggauaacuggcauggcucgaaucgaccgugggugucuuucaaccagaaucugaaauaucagauaggauacauaugcagugggauuuucggagacaauccacgcccuaaugauaagaaaggcaguugugguccaguaucgucuaauggagcaaauggaguaaaaggauuuucauucaaauacggcaaugguguuuggauagggagaacuaaaagcauuaguucaagaaacgguuuugagaugauuugggauccgaacggauggacugggacagacaauaacuucucaauaaagcaagauaucguaggaaugaaugaauggucaggauauagcgggaguuuuguucagcauccagaacuaacagggcuggauuguauaagaccuugcuucuggguugaacuaaucagagggcgacccaaagagaacacaaucuggacuagcgggagcagcauauccuuuugugguguaaacagugacacuguggguuggucuuggccagacggugcugaguugccauuuaccauugacaaguaa

SEQ ID NO: 50281 - RNA, 1410 nt, Artificial Sequence
  derived and/or modified CDS sequence (wt) from neuraminidase__InfluenzaA__ADD74761
augaauccaaaccaaaagauaauaaccauugguucggucuguaugacaauuggaauggcuaacuuaauauuacaaauuggaaacauaaucucaauauggauuagccacucaauucaacuugggaaucaaaaucagauugaaacaugcaaucaaagcgucauuacuuaugaaaacaacacuuggguaaaucagacauauguuaacaucagcaacaccaacuuugcugcuggacagucagugguuuccgugaaauuagcgggcaauuccucucucugcccuguuaguggaugggcuauauacaguaaagacaacaguauaagaaucgguuccaagggggauguguuugucauaagggaaccauucauaucaugcucccccuuggaaugcagaaccuucuucuugacucaaggggccuugcuaaaugacaaacauuccaauggaaccauuaaagacaggagcccauaucgaacccuaaugagcuguccuauuggugaaguucccucuccauacaacucaagauuugagucagucgcuuggucagcaagugcuugucaugauggcaucaauuggcuaacaauuggaauuucuggcccagacaauggggcaguggcuguguuaaaguacaacggcauaauaacagacacuaucaagaguuggagaaacaauauauugagaacacaagagucugaaugugcauguguaaaugguucuugcuuuacuguaaugaccgauggaccaagugauggacaggccucauacaagaucuucagaauagaaaagggaaagauagucaaaucagucgaaaugaaugccccuaauuaucacuaugaggaaugcuccuguuauccugauucuagugaaaucacaugugugugcagggauaacuggcauggcucgaaucgaccgugggugucuuucaaccagaaucuggaauaucagauaggauacauaugcagugggauuuucggagacaauccacgcccuaaugauaagacaggcaguugugguccaguaucgucuaauggagcaaauggaguaaaaggauuuucauucaaauacggcaaugguguuuggauagggagaacuaaaagcauuaguucaagaaacgguuuugagaugauuugggauccgaacggauggacugggacagacaauaacuucucaauaaagcaagauaucguaggaauaaaugaauggucaggauauagcgggaguuuuguucagcauccagaacuaacagggcuggauuguauaagaccuugcuucuggguugaacuaaucagagggcgacccaaagagaacacaaucuggacuagcgggagcagcauauccuuuugugguauaaacagugacacuguggguuggucuuggccagacggugcugaguugccauuuaccauugacaaguaa

SEQ ID NO: 50282 - RNA, 1410 nt, Artificial Sequence
  derived and/or modified CDS sequence (wt) from neuraminidase__InfluenzaA__ADD74791
augaauccaaaccaaaagauaauaaccauugguucggucuguaugacaauuggaauggcuaacuuaauauuacaaauuggaaacauaaucucaauauggauuagccacucaauucaacuugggaaucaaaaucagauugaaacaugcaaucaaagcgucauuacuuaugaaaacaacacuuggguaaaucagacauauguuaacaucagcaacaccaacuuugcugcuggacagucagugguuuccgugaaauuagcgggcaauuccucucucugcccuguuaguggaugggcuauauacaguaaagacaacaguauaagaaucgguuccaagggggauguguuugucauaagggaaccauucauaucaugcucccccuuggaaugcagaaccuucuucuugacucaaggggccuugcuaaaugacaaacauuccaauggaaccauuaaagacaggagcccauaucgaacccuaaugagcuguccuauuggugaaguucccucuccauacaacucaagauuugagucagucgcuuggucagcaagugcuugucaugauggcaucaauuggcuaacaauuggaauuucuggcccagacaauggggcaguggcuguguuaaaguacaacggcauaauaacagacacuaucaagaguuggagaaacaauauauugagaacacaagagucugaaugugcauguguaaaugguucuugcuuuacuguaaugaccgauggaccaagugauggacaggccucauacaagaucuucagaauagaaaagggaaagauagucaaaucagucgaaaugaaugccccuaauuaucacuaugaggaaugcuccuguuauccugauucuagugaaaucacaugugugugcagggauaacuggcauggcucgaaccgaccgugggugucuuucaaccagaaucuggaauaucagauaggauacauaugcagugggauuuucggagacaauccacgcccuaaugauaagacaggcaguugugguccaguaucaucuaauggagcaaauggaguaaaaggauuuucauucaaauacggcaaugguguuuggauagggagaacuaaaagcauuaguucaagaaacgguuuugagaugauuugggauccgaacggauggacugggacagacaauaacuucucaauaaagcaagauaucguaggaauaaaugaguggucaggauauagcgggaguuuuguucagcauccagaacuaacagggcuggauuguauaagaccuugcuucuggguugaacuaaucagagggcgacccaaagagaacacaaucuggacuagcgggagcagcauauccuuuugugguguaaacagugacacuguggguuggucuuggccagacggugcugaguugccauuuaccauugacaaguaa

SEQ ID NO: 50283 - RNA, 1410 nt, Artificial Sequence
  derived and/or modified CDS sequence (wt) from neuraminidase__InfluenzaA__ADD74811
augaauccaaaccaaaagauaauaaccauugguucggucuguaugacaauuggaauggccaacuuaauauuacaaauuggaaacauaaucucaauauggauuagccacucaauucaacuugggaaucaaaaucagauugaaacaugcaaucaaagcgucauuacuuaugaaaacaacacuuggguaaaucagacauauguuaacaucagcaacaccaacuuugcugcuggacagucagugguuuccgugaaauuagcgggcaauuccucucucugcccuguuaguggaugggcuauauacaguaaagacaacaguguaagaaucgguuccaagggggauguguuugucauaagggaaccauucauaucaugcucccccuuggaaugcagaaccuucuucuugacucaaggggccuugcuaaaugacaaacauuccaauggaaccauuaaagacaggagcccauaucgaacccuaaugagcuguccuauuggugaaguucccuccccauacaacucaagauuugagucagucgcuuggucagcaagugcuugucaugauggcaucaauuggcuaacaauuggaauuucuggcccagacaauggggcaguggcuguguuaaaguacaacggcauaauaacagacacuaucaagaguuggagaaacaauauauugagaacacaagagucugaaugugcauguguaaaugguucuugcuuuacuguaaugaccgauggaccaagugauggacaggccucauacaagaucuucagaauagaaaagggaaagauagucaaaucagucgaaaugaaugccccuaauuaucacuaugaggaaugcuccuguuauccugauucuagugaaaucacaugugugugcagagauaacuggcauggcucgaaucgaccguggguuucuuucaaccagaaucuggaauaucagauaggauacauaugcagugggauuuucggagacaauccacgcccuaaugauaagacaggcaguugugguccaguaucgucuaauggagcaaauggaguaaaaggauuuucauucaaauacggcaaugguguuuggauagggagaacuaaaagcauuaguucaagaaacgguuuugagaugauuugggauccgaacggauggacugggacagacaauaacuucucaauaaagcaagauaucguaggaauaaaugaguggucaggauauagcgggaguuuuguucagcauccagaacuaacagggcuggauuguauaagaccuugcuucuggguugaacuaaucagagggcgacccaaagagaacacaaucuggacuagcgggagcagcauauccuuuugugguguaaacagugacacuguggguuggucuuggccagacggugcugaguugccauuuaccauugacaaguaa

SEQ ID NO: 50284 - RNA, 1410 nt, Artificial Sequence
  derived and/or modified CDS sequence (wt) from neuraminidase__InfluenzaA__ADD74821
augaauccaaaccaaaagauaauaaccauugguucggucuguaugacaauuggaauggcuaacuuaauauuacaaauuggaaacauaaucucaauauggauuagccacucaauucaacuugggaaucaaaaccagauugaaacaugcaaucaaagcgucauuacuuaugaaaacaacacuuggguaaaucagacauauguuaacaucagcaacaccaacuuugcugcuggacagucagugguuuccgugaaauuagcgggcaauuccucucucugcccuguuaguggaugggcuauauacaguaaagacaacaguauaagaaucgguuccaagggggauguguuugucauaagggaaccauucauaucaugcucccccuuggaaugcagaaccuucuucuugacucaaggggccuugcuaaaugacaaacauuccaauggaaccauuaaagacaggagcccauaucgaacccuaaugagcuguccuauuggugaaguucccucuccauacaacucaagauuugagucagucgcuuggucagcaagugcuugucaugauggcaucaauuggcuaacaauuggaauuucuggcccagacaauggggcaguggcuguguuaaaguacaacggcauaauaacagacacuaucaagaguuggagaaacaauauauugagaacacaagagucugaaugugcauguguaaaugguucuugcuuuacuguaaugaccgauggaccaagugauggacaggccucauacaagaucuucagaauagaaaagggaaagauagucaaaucagucgaaaugaaugccccuaauuaucacuaugaggaaugcuccuguuauccugauucuagugaaaucacaugugugugcagggauaacuggcauggcucgaaucgaccgugggugucuuucaaccagaaucuggaauaucagauaggauacauaugcagugggauuuucggagacaauccacgcccuaaugauaagacaggcaguugugguccaguaucgucuaauggagcaaauggaguaaaaggauuuucauucaaauacggcaaugguguuuggauagggagaacuaaaagcauuaguucaagaaacgguuuugagaugauuugggauccgaacggauggacugggacagacaauaacuucucaauaaagcaagauaucguaggaauaaaugaguggucaggauauagcgggaguuuuguucagcauccagaacuaacagggcuggauuguauaagaccuugcuucuggguugaacuaaucagagggcgacccaaagagaacacaaucuggacuagcgggagcagcauauccuuuugugguguaaacagugacacuguggguuggucuuggccagacggugcugaguugccauuuaccauugacaaguaa

SEQ ID NO: 50285 - RNA, 1410 nt, Artificial Sequence
  derived and/or modified CDS sequence (wt) from neuraminidase__InfluenzaA__ADD74831
augaauccaaaccaaaagauaauaaccauugguucgaucuguaugacaauuggaauggcuaacuuaauauuacaaauuggaaacauaaucucaauauggauuagccacucaauucaacuugggaaucaaaaucagauugaaacaugcaaucaaagcgucauuacuuaugaaaacaacacuuggguaaaucagacauauguuaacaucagcaacaccaacuuugcugcuggacagucagugguuuccgugaaauuagcgggcaauuccucucucugcccuguuaguggaugggcuauauacaguaaagacaacaguauaagaaucgguuccaagggggauguguuugucauaagggaaccauucauaucaugcucccccuuggaaugcagaaccuucuucuugacucaaggggccuugcuaaaugacaaacauuccaauggaaccauuaaagacaggagcccauaucgaacccuaaugagcuguccuauuggugaaguucccucuccauacaacucaagauuugagucagucgcuuggucagcaagugcuugucaugauggcaucaauuggcuaacaauuggaauuucuggcccagacaauggggcaguggcuguguuaaaguacaacggcauaauaacagacacuaucaagaguuggagaaacaauauauugagaacacaagagucugaaugugcauguuugaaugguucuugcuuuacuguaaugaccgauggaccaagugauggacaggccucauacaagaucuucagaauagaaaagggaaagauagucaaaucagucgaaaugaaugccccuaauuaucacuaugaggaaugcuccuguuauccugauucuagugaaaucacaugugugugcagggauaacuggcauggcucgaaucgaccgugggugucuuucaaccagaaucuggaauaucagauaggauacauaugcagugggauuuucggagacaauccacgcccuaaugauaagacaggcaguugugguccaguaucgucuaauggagcaaauggaguaaaaggauuuucauucaaauacggcaaugguguuuggauagggagaacuaaaagcauuaguucaagaaacgguuuugagaugauuugggauccgaacggauggacugggacagacaauaacuucucaauaaagcaagauaucguaggaauaaaugaauggucaggauauagcgggaguuuuguucagcauccagaacuaacagggcuggauuguauaagaccuugcuucuggguugaacuaaucagagggcgacccaaagagaacacaaucuggacuagcgggagcagcauauccuuuugugguguaaacagugacacuguggguuggucuuggccagacggugcugaguugccauuuaccauugacaaguaa

SEQ ID NO: 50286 - RNA, 1410 nt, Artificial Sequence; identical to SEQ ID NO: 48750
  derived and/or modified CDS sequence (wt) from neuraminidase__InfluenzaA__ADD74841

SEQ ID NO: 50287 - RNA, 1410 nt, Artificial Sequence
  derived and/or modified CDS sequence (wt) from neuraminidase__InfluenzaA__ADD74851
augaauccaaaccaaaagauaauaaccauugguucggucuguaugacaauuggaauggcuaacuuaauauuacaaauuggaaacauaaucucaauauggauuagccacucaauucaacuugggaaucaaaaucagauugaaacaugcaaucaaagcgucauuacuuaugaaaacaacacuuggguaaaucagacauauguuaacaucagcaacaccaacuuugcugcuggacagucagugguuuccgugaaauuagcgggcaauuccucucucugcccuguuaguggaugggcuauauacaguaaagacaacaguauaagaaucgguuccaagggggauguguuugucauaagggaaccauucauaucaugcucccccuuggaaugcagaaccuucuucuugacucaaggggccuugcuaaaugacaaacauuccaauggaaccauuaaagacaggagcccauaucgaacccuaaugagcuguccuauuggugaaguucccucuccauacaacucaagauuugagucagucgcuuggucagcaagugcuugucaugauggcaucaauuggcuaacaauuggaauuucuggcccagacaauggggcaguggcuguguuaaaguacaacggcauaauaacagacacuaucaagaguuggagaaacaauauauugagaacacaagagucugaaugugcauguguaaaugguucuugcuuuacuguaaugaccgauggaccaagugauggacaggccucauacaaaaucuucagaauagaaaagggaaagauagucaaaucagucgaaaugaaugccccuaauuaucacuaugaggaaugcuccuguuauccugauucuagugaaaucacaugugugugcagggauaacuggcauggcucgaaucgaccgugggugucuuucaaccagaaucuggaauaucagauaggauacauaugcagugggauuuucggagacaauccacgcccuaaugauaagacaggcaguugugguccaguaucgucuaauggagcaaauggaguaaaaggauuuucauucaaauacggcaaugguguuuggauagggagaacuaaaagcauuaguucaagaaacgguuuugagaugauuugggauccgaacggauggacugggacagacaauaacuucucaauaaagcaagauaucguaggaauaaaugaauggucaggauauagcgggaguuuuguucagcauccagaacuaacagggcuggauuguauaagaccuugcuucuggguugaacuaaucagagggcgacccaaagagaacacaaucuggacuagcgggagcagcauauccuuuugugguguaaacagugacacuguggguuggucuuggccagacggugcugaguugccauuuaccauugacaaguaa

SEQ ID NO: 50288 - RNA, 1410 nt, Artificial Sequence
  derived and/or modified CDS sequence (wt) from neuraminidase__InfluenzaA__ADD74861
augaauccaaaccaaaagauaauaaccauugguucggucugcaugacaauuggaauggcuaacuuaauauuacaaauuggaaacauaaucucaauauggauuagccacucaauucaacuugggaaucaaaaucagauugaaacaugcaaucaaagcgucauuacuuaugaaaacaacacuuggguaaaucagacauauguuaacaucagcaacaccaacuuugcugcuggacagucagugguuuccaugaaauuagcgggcaauuccucucucugcccuguuaguggaugggcuauauacaguaaagacaacaguauaagaaucgguuccaagggggauguguuugucauaagggaaccauucauaucaugcucccccuuggaaugcagaaccuucuucuugacucaaggggccuugcuaaaugacaaacauuccaauggaaccauuaaagacaggagcccauaucgaacccuaaugagcuguccuauuggugaaguucccucuccauacaacucaagauuugagucagucgcuuggucagcaagugcuugucaugauggcaucaauuggcuaacaauuggaauuucuggcccagacaauggggcaguggcuguguuaaaguacaacggcauaauaacagacacuaucaagaguuggagaaacaauauauugagaacacaagagucugaaugugcauguguaaaugguucuugcuuuacuguaaugaccgauggaccaagugauggacaggccucauacaagaucuucagaauagaaaagggaaagauagucaaaucagucgaaaugaaugccccuaauuaucacuaugaggaaugcuccuguuauccugauucuagugaaaucacaugugugugcagggauaacuggcauggcucgaaucgaccgugggugucuuucaaccagaaucuggaauaucagauaggauacauaugcagugggauuuucggagacaauccacgcccuaaugauaagacaggcaguugugguccaguaucgucuaauggagcaaauggaguaaaaggauuuucauucaaauacggcaaugguguuuggauagggagaacuaaaagcauuaguucaagaaacgguuuugagaugauuugggauccgaacggauggacugggacagacaauaacuucucaauaaagcaagauaucguaggaauaaaugaguggucaggauauagcgggaguuuuguucagcauccagaacuaacagggcuggauuguauaagaccuugcuucuggguugaacuaaucagagggcgacccaaagagaacacaaucuggacuagcgggagcagcauauccuuuugugguguaaacagugacacuguggguuggucuuggccagacggugcugaguugccauuuaccauugacaaguaa

SEQ ID NO: 50289 - RNA, 1410 nt, Artificial Sequence; identical to SEQ ID NO: 48750
  derived and/or modified CDS sequence (wt) from neuraminidase__InfluenzaA__ADD74871

SEQ ID NO: 50290 - RNA, 1410 nt, Artificial Sequence
  derived and/or modified CDS sequence (wt) from neuraminidase__InfluenzaA__ADD74881
augaauccaaaccaaaagauaauaaccauugguucggucuguaugacaauuggaauggcuaacuuaauauuacaaauuggaaacauaaucucaauauggauuagccacucaauucaacuugggaaucaaaaucagauugaaacaugcaaucaaagcgucauuacuuaugaaaacaacacuuggguaaaucagacauauguuaacaucagcaacaccaacuuugcugcuggacagucagugguuuccgugaaauuagcgggcaauuccucucucugcccuguuaguggaugggcuauauacaguaaagacaacaguauaagaaucgguuccaagggggauguguuugucauaagggaaccauucauaucaugcucccccuuggaaugcagaaccuucuucuugacucaaggggccuugcuaaaugacaaacauuccaauggaaccauuaaagacaggagcccauaucgaacccuaaugagcuguccuauuggugaaguucccucuccauacaacucaagauuugagucagucgcuuggucagcaagugcuugucaugauggcaucaauuggcuaacaauuggaauuucuggcccagacaauggggcaguggcuguguuaaaguacaacggcauaauaacagacacuaucaagaguuggagaaacaauauauugagaacacaagagucugaaugugcauguguaaaugguucuugcuuuacuguaaugaccgauggaccaagugauggacaggcaucauacaagaucuucagaauagaaaagggaaagauagucaaaucagucgaaaugaaugccccuaauuaucacuaugaggaaugcuccuguuauccugauucuagugaaaucacaugugugugcagggauaacuggcauggcucgaaucgaccgugggugucuuucaaccagaaucuggaauaucagauaggauacauaugcagugggauuuucggagacaauccacgcccuaaugauaagacaggcaguugugguccaguaucgucuaauggagcaaauggaguaaaaggauuuucauucaaauacggcaaugguguuuggauagggagaacuaaaagcauuaguucaagaaacgguuuugagaugauuugggauccgaacggauggacugggacagacaauaacuucucaauaaagcaagauaucguaggaauaaaugaguggucaggauauagcgggaguuuuguucagcauccagaacuaacagggcuggauuguauaagaccuugcuucuggguugaacuaaucagagggcgacccaaagagaacacaaucuggacuagcgggagcagcauauccuuuugugguguaaacagugacacuguggguuggucuuggccagacggugcugaguugccauuuaccauugacaaguaa

SEQ ID NO: 50291 - RNA, 1410 nt, Artificial Sequence; identical to SEQ ID NO: 48750
  derived and/or modified CDS sequence (wt) from neuraminidase__InfluenzaA__ADD74891

SEQ ID NO: 50292 - RNA, 1410 nt, Artificial Sequence; identical to SEQ ID NO: 50277
  derived and/or modified CDS sequence (wt) from neuraminidase__InfluenzaA__ADD74901

SEQ ID NO: 50293 - RNA, 1410 nt, Artificial Sequence
  derived and/or modified CDS sequence (wt) from neuraminidase__InfluenzaA__ADD74911
augaauccaaaccaaaagauaauaaccauugguucggucuguaugacaauuggaauggcuaacuuaauauuacaaauuggaaacauaaucucaauauggauuagccacucaauucaacuugggaaucaaaaucagauugaaacaugcaaucaaagcgucauuacuuaugaaaacaacacuuggguaaaucagacauauguuaacaucagcaacaccaacuuugcugcuggacagucagugguuuccgugaaauuagcgggcaauuccucucucugcccuguuaguggaugggcuauauacaguaaagacaacaguauaagaauugguuccaagggggauguguuugucauaagggaaccauucauaucgugcucccccuuggaaugcagaaccuucuucuugacucaaggggccuugcuaaaugacaaacauuccaauggaaccauuaaagacaggagcccauaucgaacccuaaugagcuguccuauuggugaaguucccucuccauacaacucaagauuugagucagucgcuuggucagcaagugcuugucaugauggcaucaauuggcuaacaauuggaauuucuggcccagacaauggagcaguggcuguguuaaaguacaacggcauaauaacagacacuaucaagaguuggagaaacaauauauugagaacacaagagucugaaugugcauguguaaaugguucuugcuuuacuguaaugaccgauggaccaagugauggacaggccucauacaagaucuucagaauagaaaagggaaagauagucaaaucagucgaaaugaaugccccuaauuaucacuaugaggaaugcuccuguuauccugauucuagugaaaucacaugugugugcagggauaacuggcauggcucgaaucgaccgugggugucuuucaaccagaauuuggaauaucagauaggauacauaugcagugggauuuucggagacaauccacgcccuaaugauaagacaggcaguugugguccaguaucgucuaauggagcaaauggaguaaaaggauuuucauucaaauacggcaaugguguuuggauagggagaacuaaaagcauuaguucaagaaacgguuuugagaugauuugggauccgaacggauggacugggacagacaauaacuucucaauaaagcaagauaucguaggaauaaaugaguggucaggauauagcgggaguuuuguucagcauccagaacuaacagggcuggauuguauaagaccuugcuucuggguugaacuaaucagagggcgacccaaagagaacacaaucuggacuagcgggagcagcauauccuuuugugguguaaacagugacacuguggguuggucuuggccagacggugcugaguugccauuuaccauugacaaguaa

SEQ ID NO: 50294 - RNA, 1410 nt, Artificial Sequence; identical to SEQ ID NO: 49794
  derived and/or modified CDS sequence (wt) from neuraminidase__InfluenzaA__ADD74921

SEQ ID NO: 50295 - RNA, 1410 nt, Artificial Sequence
  derived and/or modified CDS sequence (wt) from neuraminidase__InfluenzaA__ADD74941
augaauccaaaccaaaagauaauaaccauugguucggucuguaugacaauuggaauggcuaacuuaauauuacaaauuggaaacauaaucucaauauggauuagccacucaauucaacuugggaaucaaaaucagauugaaacaugcaaucaaagcgucauuacuuaugaaaacaacacuuggguaaaucagacauauguuaacaucagcaacaccaacuuugcugcuggacagucagugguuuccgugaaauuagcgggcaauuccucucucugcccuguuaguggaugggcuauauacaguaaagacaacaguauaagaaucgguuccaagggggauguguuugucauaagggaaccauucauaucaugcucccccuuggaaugcagaacuuucuucuugacucaaggggccuugcuaaaugacaaacauuccaauggaaccauuaaagacaggagcccauaucgaacccuaaugagcuguccuauuggugaaguucccucuccauacaacucaagauuugagucagucgcuuggucagcaagugcuugucaugauggcaucaauuggcuaacaauuggaauuucuggcccagacaauggggcaguggcuguguuaaaguacaacggcauaauaacagacacuaucaagaguuggagaaacaauauauugagaacacaagagucugaaugugcauguguaaaugguucuugcuuuacuguaaugaccgauggaccaagugauggacaggccucauacaagaucuucagaauagaaaagggaaagauagucaaaucagucgaaaugaaugccccuaauuaucacuaugaggaaugcuccuguuauccugauucuagugaaaucacaugugugugcagggauaacuggcauggcucgaaucgaccgugggugucuuucaaccagaaucuggaauaucagauaggauacauaugcagugggauuuucggagacaauccacgcccuaaugauaagacaggcaguugugguccaguaucgucuaauggagcaaauggaguaaaaggauuuucauucaaauacggcaaugguguuuggauagggagaacuaaaagcauuaguucaagaaacgguuuugagaugauuugggauccgaacggauggacugggacagacaauaacuucucaauaaagcaagauaucguaggaauaaaugaauggucaggauauagcgggaguuuuguucagcauccagaacuaacagggcuggauuguauaagaccuugcuucuggguugaacuaaucagagggcgacccaaagagaacacaaucuggacuagcgggagcagcauauccuuuugugguguaaacagugacacuguggguuggucuuggccagacggugcugaguugccauuuaccauugacaaguaa

SEQ ID NO: 50296 - RNA, 1410 nt, Artificial Sequence
  derived and/or modified CDS sequence (wt) from neuraminidase__InfluenzaA__ADD74961
augaauccaaaccaaaagauaauaaccauugguucggucuguaugacaauuggaauggcuaacuuaauauuacaaauuggaaacauaaucucaauauggauuagccacucaauucaacuugggaaucaaaaucagauuggaacaugcaaucaaagcgucauuacuuaugaaaacaacacuuggguaaaucauacauauguuaacaucagcaacaccaacuuugcugcuggacagucagugguuuccgugaaauuagcgggcaauuccucucucugcccuguuaguggaugggcuauauacaguaaagacaacaguguaagaaucgguuccaagggggauguguuugucauaagggaaccauucauaucaugcucccccuuggaaugcagaaccuucuucuugacucaaggggccuugcuaaaugacaaacauuccaauggaaccauuaaagacaggagcccauaucgaacccuaaugagcuguccuauuggugaaguucccucuccauacaacucaagauuugagucagucgcuuggucagcaagugcuugucaugauggcaucaauuggcuaacaauuggaauuucuggcccagacaauggggcaguggcuguguuaaaguacaacggcauaauaacagacacuaucaagaguuggagaaacaauauauugagaacacaagagucugaaugugcauguguaaaugguucuugcuuuacuguaaugaccgauggaccaagugauggacaggccucauacaagaucuucagaauagaaaagggaaagauagucaaaucagucgaaaugaaugccccuaauuaucacuaugaggaaugcuccuguuauccugauucuagugaaaucacaugugugugcagggauaacuggcauggcucgaaucgaccgugggugucuuucaaccagaaucuggaauaucagauaggauacauaugcagugggauuuucggagacaauccacgcccuaaugauaagacaggcaguugugguccaguaucgucuaauggagcaaauggaguaaaaggauuuucauucaaauacggcaaugguguuuggauagggagaacuaaaagcauuaguucaagaaacgguuuugagaugauuugggauccgaacggauggacugggacagacaauaacuucucaauaaagcaagauaucguaggaauaaaugaguggucaggauauagcgggaguuuuguucagcauccagaacuaacagggcuggauuguauaagaccuugcuucuggguugaacuaaucagagggcgacccaaagagaacacaaucuggacuagcgggagcagcauauccuuuugugguguaaacagugacacuguggguuggucuuggccagacggugcugaguugccauuuaccauugacaaguaa

SEQ ID NO: 50297 - RNA, 1410 nt, Artificial Sequence; identical to SEQ ID NO: 49794
  derived and/or modified CDS sequence (wt) from neuraminidase__InfluenzaA__ADD74971

SEQ ID NO: 50298 - RNA, 1410 nt, Artificial Sequence
  derived and/or modified CDS sequence (wt) from neuraminidase__InfluenzaA__ADD74981
augaauccaaaccaaaagauaauaaccauugguucggucuguaugacaauuggaauggcuaacuuaauauuacaaauuggaaacauaaucucaauauggauuagccacucaauucaacuugggaaucaaaaucagauugaaacaugcaaucaaagcaucauuacuuaugaaaacaacacuuggguaaaucagacauauguuaacaucagcaacaccaacuuugcugcuggacagucagugguuuccgugaaauuagcgggcaauuccucucucugcccuguuaguggaugggcuauauacaguaaagacaacaguauaagaaucgguuccaagggggauguguuugucauaagggaaccauucauaucaugcucccccuuggaaugcagaaccuucuucuugacucaaggggccuugcuaaaugacaaacauuccaauggaaccauuaaagacaggagcccauaucgaacccuaaugagcuguccuauuggugaaguucccucuccauacaacucaagauuugagucagucgcuuggucagcaagugcuugucaugauggcaucaauuggcuaacaauuggaauuucuggcccagacaauggggcaguggcuguguuaaaguacaacggcauaauaacagacacuaucaagaguuggagaaacaauauauugagaacacaagagucugaaugugcauguguaaaugguucuugcuuuacuguaaugaccgauggaccaagugauggacaggccucauacaagaucuucagaauagaaaagggaaagauagucaaaucagucgaaaugaaugccccuaauuaucacuaugaggaaugcuccuguuauccugauucuagugaaaucacaugugugugcagggauaacuggcauggcucgaaucgaccgugggugucuuucaaccagaaucuggaauaucagauaggauacauaugcagugggauuuucggagacaauccacgcccuaaugauaagacaggcaguugugguccaguaucgucuaauggagcaaauggaguaaaaggauuuucauucaaauacggcaaugguguuuggauagggagaacuaaaagcauuaguucaagaagcgguuuugagaugauuugggauccgaacggauggacugggacagacaauaacuucucaauaaagcaagauaucguaggaauaaaugaguggucaggauauagcgggaguuuuguucagcauccagaacuaacagggcuggauuguauaagaccuugcuucuggguugaacuaaucagagggcgacccgaagagaacacaaucuggacuagcgggagcagcauauccuuuugugguguaaacagugacacuguggguuggucuuggccagacggugcugaguugccauuuaccauugacaaguaa

SEQ ID NO: 50299 - RNA, 1410 nt, Artificial Sequence; identical to SEQ ID NO: 49794
  derived and/or modified CDS sequence (wt) from neuraminidase__InfluenzaA__ADD74991

SEQ ID NO: 50300 - RNA, 1410 nt, Artificial Sequence; identical to SEQ ID NO: 49794
  derived and/or modified CDS sequence (wt) from neuraminidase__InfluenzaA__ADD75001

SEQ ID NO: 50301 - RNA, 1410 nt, Artificial Sequence
  derived and/or modified CDS sequence (wt) from neuraminidase__InfluenzaA__ADD75011
augaauccaaaccaaaagauaauaaccauugguucggucuguaugacaauuggaauggcuaacuuaauauuacaaauuggaaacauaaucucaauauggauuagccacucaauucaacuugggaaucaaaaucagauugaaacaugcaaucaaagcgucauuacuuaugaaaacaacacuuggguaaaucagacauauguuaacaucagcaacaccaacuuugcugcuggacagucagugguuuccgugaaauuagcgggcaauuccucucucugcccuguuaguggaugggcuauauacaguaaagacaacaguauaagaaucgguuccaagggggauguguuugucauaagggaaccauucauaucaugcucccccuuggaaugcagaaccuucuucuugacucaaggggccuugcuaaaugacaaacauuccaauggaaccauuaaagacaggagcccauaucgaacccuaaugagcuguccuauuggugaaguucccucuccauacaacucaagauuugagucagucgcuuggucagcaagugcuugucaugauggcaucaauuggcuaacaauuggaauuucuggcccagacaauggggcaguggcuguguuaaaguacaacggcauaauaacagacacuaucaagaguuggagaaacaauauauugagaacacaagagucugaaugugcauguguaaaugguucuugcuuuacuguaaugaccgauggaccaagugauggacaggccucauacaagaucuucagaauagaaaagggaaagauagucaaaucagucgaaaugaaugccccuaauuaucacuaugaggaaugcuccuguuauccugauucuagugaaaucacaugugugugcagggauaacuggcauggcucgaaucgaccgugggugucuuucaaccagaaucuggaauaucagauaggauacauaugcagugggauuuucggagacaauccacgcccuaaugauaagacaggcaguugugauccaguaucgucuaauggagcaaauggaguaaaaggauuuucauucaaauacggcaaugguguuuggauagggagaacuaaaagcauuaguucaagaaacgguuuugagaugauuugggauccgaacggauggacugggacagacaauaacuucucaauaaagcaagauaucguaggaauaaaugaauggucaggauauagcgggaguuuuguucagcauccagaacuaacagggcuggauuguauaagaccuugcuucuggguugaacuaaucagagggcgacccaaagagaacacaaucuggacuagcgggagcagcauauccuuuugugguguaaacagugacacuguggguuggucuuggccagacggugcugaguugccauuuaccauugacaaguaa

SEQ ID NO: 50302 - RNA, 1410 nt, Artificial Sequence; identical to SEQ ID NO: 50038
  derived and/or modified CDS sequence (wt) from neuraminidase__InfluenzaA__ADD75031

SEQ ID NO: 50303 - RNA, 1410 nt, Artificial Sequence
  derived and/or modified CDS sequence (wt) from neuraminidase__InfluenzaA__ADD75041
augaauccaaaccaaaagauaauaaccauugguucggucuguaugacaauuggaauggcuaacuuaauauuacaaauuggaaacauaaucucaauauggauuagccacucaauucaacuugggaaucaaaaucagauugaaacaugcaaucaaagcgucauuacuuaugaaaacaaaacuuggguaaaucagacauauguuaacaucagcaacaccaacuuugcugcuggacagucagugguuuccgugaaauuagcgggcaauuccucucucugcccuguuaguggaugggcuauauacaguaaagacaacaguauaagaaucgguuccaagggggauguguuugucauaagggaaccauucauaucaugcucccccuuggaaugcagaaccuucuucuugacucaaggggccuugcuaaaugacaaacauuccaauggaaccauuaaagacaggagcccauaucgaacccuaaugagcuguccuauuggugaaguucccucuccauacaacucaagauuugagucagucgcuuggucagcaagugcuugucaugauggcaucaauuggcuaacaauuggaauuucuggcccagacaauggggcaguggcuguguuaaaguacaacggcauaauaacagacacuaucaagaguuggagaaacaauauauugagaacacaagagucugaaugugcauguguaaaugguucuugcuuuacuguaaugaccgauggaccaagugauggacaggccucauacaagaucuucagaauagaaaagggaaagauagucaaaucagucgaaaugaaugccccuaauuaucacuaugaggaaugcuccuguuauccugauucuagugaaaucacaugugugugcagggauaacuggcauggcucgaaucgaccgugggugucuuucaaccagaaucuggaauaucagauaggauacauaugcagugggauuuucggagacaauccacgcccuaaugauaagacaggcaguugugguccaguaucgucuaauggagcaaauggaguaaaaggauuuucauucaaauacggcaaugguguuuggauagggagaacuaaaagcauuaguucaagaaacgguuuugagaugauuugggauccgaacggauggacugggacagacaauaacuucucaauaaagcaagauaucguaggaauaaaugaauggucaggauauagcgggaguuuuguucagcauccagaacuaacagggcuggauuguauaagaccuugcuucuggguugaacuaaucagagggcgacccaaagagaacacaaucuggacuagcgggagcagcauauccuuuugugguguaaacagugacacuguggguuggucuuggccagacggugcugaguugccauuuaccauugacaaguaa

SEQ ID NO: 50304 - RNA, 1410 nt, Artificial Sequence
  derived and/or modified CDS sequence (wt) from neuraminidase__InfluenzaA__ADD75051
augaauccaaaccaaaagauaauaaccauugguucggucuguaugacaauuggaauggcuaacuuaauauuacaaauuggaaacauaaucucaauauggauuagccacucaauucaacuugggaaucaaaaucagauugaaacaugcaaucaaagcgucauuacuuaugaaaacaacacuuggguaaaucagacauauguuaacaucagcaacaccaacuuugcugcuggacagucagugguuuccgugaaauuagcgggcaauuccucucucugcccuguuaguggaugggcuauauacaguaaagacaacaguauaagaaucgguuccaagggggauguguuugucauaagggaaccauucauaucaugcucccccuuggaaugcagaaccuucuucuugacucaaggggccuugcuaaaugacaaacauuccaauggaaccauuaaagacaggagcccauaucgaacccuaaugagcuguccuauuggugaaguucccucuccauacaacucaagauuugagucagucgcuuggucagcaagugcuugucaugauggcaucaauuggcuaacaauuggaauuucuggcccagacaauggggcaguggcuguguuaaaguacaacggcauaauaacagacacuaucaagaguuggagaaacaauauauugagaacacaagagucugaaugugcauguguaaaugguucuugcuucacuguaaugaccgauggaccaagugauggacaggccucauacaagaucuucagaauagaaaagggaaagauagucaaaucagucgaaaugaaugccccuaauuaucacuaugaggaaugcuccuguuauccugauucuagugaaaucacaugugugugcagggauaacuggcauggcucgaaucgaccguggguaucuuucaaccagaaucuggaauaucagauaggauacauaugcagugggauuuucggagacaauccacgcccuaaugauaagacaggcaguugugguccaguaucgucuaauggagcaaauggaguaaaaggauuuucauucaaauacggcaaugguguuuggauagggagaacuaaaagcauuaguucaagaaacgguuuugagaugauuugggauccgaacggauggacugggacagacaauaacuucucaauaaagcaagauaucguaggaauaaaugaguggucaggauauagcgggaguuuuguucagcauccagaacuaacagggcuggauuguauaagaccuugcuucuggguugaacuaaucagagggcgacccaaagagaacacaaucuggacuagcgggagcagcauauccuuuugugguguaaacagugacacuguggguuggucuuggccggacggugcugaguugccauuuaccauugacaaguaa

SEQ ID NO: 50305 - RNA, 1410 nt, Artificial Sequence
  derived and/or modified CDS sequence (wt) from neuraminidase__InfluenzaA__ADD75061
augaauccaaaccaaaagauaauaaccauugguucggucuguaugacaauuggaauggcuaacuuaauauuacaaauuggaaacauaaucucaauauggauuagccacucaauucaacuugggaaucaaaaucagauugaaacaugcaaucaaagcgucauuacuuaugaaaacaacacuuggguaaaucagacauauguuaacaucagcaacaccaacuuugcugcuggacagucagugguuuccgugaaauuagcgggcaauuccucucuuugcccuguuaguggaugggcuauauacaguaaagacaacaguauaagaaucgguuccaagggggauguguuugucauaagggaaccauucauaucaugcucccccuuggaaugcagaaccuucuucuugacucaaggggccuugcuaaaugacaaacauuccaauggaaccauuaaagacaggagcccauaucgaacccuaaugagcuguccuauuggugaaguucccucuccauacaacucaagauuugagucagucgcuuggucagcaagugcuugucaugauggcaucaauuggcuaacaauuggaauuucuggcccagacaauggggcaguggcuguguuaaaguacaacggcauaauaacagacacuaucaagaguuggagaaacaauauauugagaacacaagagucugaaugugcauguguaaaugguucuugcuuuacuguaaugaccgauggaccaagugauggacaggccucauacaagaucuucagaauagaaaagggaaagauagucaaaucagucgaaaugaaugccccuaauuaucacuaugaggaaugcuccuguuauccugauucuagugaaaucacaugugugugcagggauaacuggcauggcucgaaucgaccgugggugucuuucaaccagaaucuggaauaucagauaggauacauaugcagugggauuuucggagacaauccacgcccuaaugauaagacaggcaguugugguccaguaucgucuaauggagcaaauggaguaaaaggauuuucauucaaauacggcaaugguguuuggauagggagaacuaaaagcauuaguucaagaaacgguuuugagaugauuugggauccgaacggauggacugggacagacaauaacuucucaauaaagcaagauaucguaggaauaaaugaguggucaggauauagcgggaguuuuguccagcauccagaacuaacagggcuggauuguauaagaccuugcuucuggguugaacuaaucagagggcgacccaaagagaacacaaucuggacuagcgggagcagcauauccuuuugugguguaaacagugacacuguggguuggucuuggccagacggugcugaguugccauuuaccauugacaaguaa

SEQ ID NO: 50306 - RNA, 1410 nt, Artificial Sequence
  derived and/or modified CDS sequence (wt) from neuraminidase__InfluenzaA__ADD75071
augaauccaaaccaaaagauaauaaccauugguucggucuguaugacaauuggaauggcuaacuuaauauuacaaauuggaaacauaaucucaauauggauuagccacucaauucaacuugggaaucaaaaucagauugaaacaugcaaucaaagcgucauuacuuaugaaaacaacacuuggguaaaucagacauauguuaacaucagcaacaccaacuuugcugcuggacagucagugguuuccgugaaauuagcgggcaauuccucucucugcccuguuaguggaugggcuauauacaguaaagacaacaguauaagaaucgguuccaagggggauguguuugucauaagggaaccauucauaucaugcucccccuuggaaugcagaaccuucuucuugacucaaggggccuugcuaaaugacaaacauuccaauggaaccauuaaagacaggagcccauaucgaacccuaaugagcuguccuauuggugaaguucccucuccauacaacucaagauuugagucagucgcuuggucagcaagugcuugucaugauggcaucaauuggcuaacaauuggaauuucuggcccagacaauggggcaguggcuguguuaaaguacaacggcauaauaacagacacuaucaagaguuggagaaacaauauauugagaacacaagagucugaaugugcauguguaaaugguucuugcuuuacuguaaugaccgauggaccaagugauggacaggccucauacaagaucuucagaauagaaaagggaaagauagucaaaucaguugaaaugaaugccccuaauuaucacuaugaggaaugcuccuguuauccugauucuagugaaaucacaugugugugcagggauaacuggcauggcucgaaucgaccgugggugucuuucaaccagaaucuggaauaucagauaggauacauaugcagugggauuuucggagacaauccacgcccuaaugauaagacaggcaguugugguccaguaucgucuaauggagcaaauggaguaaaaggauuuucauucaaauacggcaaugguguuuggauagggagaacuaaaagcauuaguucaagaaacgguuuugagaugauuugggauccgaacggauggacugggacagacaauaacuucucaauaaagcaagauaucguaggaauaaaugaguggucaggauauagcgggaguuuuguccagcauccagaacuaacagggcuggauuguauaagaccuugcuucuggguugaacuaaucagagggcgacccaaagagaacacaaucuggacuagcgggagcagcauauccuuuugugguguaaacagugacacuguggguuggucuuggccagacggugcugaguugccauuuaccauugacaaguaa

SEQ ID NO: 50307 - RNA, 1410 nt, Artificial Sequence; identical to SEQ ID NO: 48947
  derived and/or modified CDS sequence (wt) from neuraminidase__InfluenzaA__ADD75081

SEQ ID NO: 50308 - RNA, 1410 nt, Artificial Sequence
  derived and/or modified CDS sequence (wt) from neuraminidase__InfluenzaA__ADD75091
augaauccaaaccaaaagauaauaaccauugguucggucuguaugacaauuggaauggcuaacuuaauauuacaaauuggaaacauaaucucaauauggauuagccacucaauucaacuugggaaucaaaaucagauugaaacaugcaaucaaagcgucauuacuuaugaaaacaacacuuggguaaaucagacauauguuaacaucagcaacaccaacuuugcugcuggacagucagugguuuccgugaaauuagcgggcaauuccucucucugcccuguuaguggaugggcuauauacaguaaagacaacaguauaagaaucgguuccaagggggauguguuugucauaagggaaccauucauaucaugcucccccuuggaaugcagaaccuucuucuugacucaaggggccuugcuaaaugacaaacauuccaauggaaccauuaaagacaggagcccauaucgaacccuaaugagcuguccuauuggugaaguucccucuccauacaacucaagauuugagucagucgcuuggucagcaagugcuugucaugauggcaucaauuggcuaacaauuggaauuucuggcccagacaauggggcaguggcuguguuaaaguacaacggcauaauaacagacacuaucaagaguuggagaaacaauauauugagaacacaagagucugaaugugcauguguaaaugguucuugcuuuacuguaaugaccgauggaccaagugauggacaggccucauacaagaucuucagaauagaaaagggaaagauagucaaaucagucgaaaugaaugccccuaauuaucacuaugaggaaugcuccuguuauccugauucuagugaaaucacaugugugugcagggauaacuggcauggcucgaaucgaccguggguaucuuucaaccagaaucuggaauaucagauaggauacauaugcagugggauuuucggagacaauccacgcccuaaugauaagacaggcaguugugguccaguaucgucuaauggagcaaauggaguaaaaggauuuucauucaaauacggcaaugguguuuggauagggagaacuaaaagcauuaguucaagaagcgguuuugagaugauuugggauccgaacggauggacugggacagacaauaacuucucaauaaagcaagauaucguaggaauaaaugaguggucaggauauagcgggaguuuuguucagcauccagaacuaacagggcuggauuguauaagaccuugcuucuggguugaacuaaucagagggcgacccaaagagaacacaaucuggacuagcgggagcagcauauccuuuugugguguaaacagugacacuguggguuggucuuggccggacggugcugaguugccauuuaccauugacaaguaa

SEQ ID NO: 50309 - RNA, 1410 nt, Artificial Sequence
  derived and/or modified CDS sequence (wt) from neuraminidase__InfluenzaA__ADD75101
augaauccaaaccaaaagauaauaaccauugguucggucuguaugacaauuggaauggcuaacuuaauauuacaaauuggaaacauaaucucaauauggauuagccacucaauucaacuugggaaucaaaaucagauugaaacaugcaaucaaagcgucauuacuuaugaaaacaacacuuggguaaaucagacauauguuaacaucagcaacaccaacuuugcugcuggacagucagugguuuccgugaaauuagcgggcaauuccucucucugcccuguuaguggaugggcuauauacaguaaagacaacaguauaagaaucgguuccaagggggauguguuugucauaagggaaccauucauaucaugcucccccuuggaaugcagaaccuucuucuugacucaaggggccuugcuaaaugacaaacauuccaauggaaccauuaaagacaggagcccauaucgaacccuaaugagcuguccuauuggugaaguucccucuccauacaacucaagauuugagucagucgcuuggucagcaagugcuugucaugauggcaucaauuggcuaacaauuggaauuucuggcccagacaauggggcaguggcuguguuaaaguacaacggcauaauaacagacacuaucaagaguuggagaaacaauauauugagaacacaagagucugaaugugcauguguaaaugguucuugcuuuacuguaaugaccgauggaccaagugauggacaggccucauacaagaucuucagaauagaaaagggaaagauagucaaaucagucgaaaugaaugccccuaauuaucacuaugaggaaugcuccuguuauccugauucuagugaaaucacaugugugugcagggauaacuggcauggcucgaaucgaccgugggugucuuucaaccagaaucuggaauaucagauaggauacauaugcagugggauuuucggagacaauccacgcccuaaugauaagacaggcaguugugguccaguaucgucuaauggagcaaauggaguaaaaggauuuucauucaaauacggcaaugguguuuggauagggagaacuaaaagcauuaguucaagaaacgguuuugagaugauuugggauccgaacggauggacugggacagacaauaacuucucaauaaagcaagauaucguaggaauaaaugaguggucaggauauagcgggagcuuuguccagcauccagaacuaacagggcuggauuguauaagaccuugcuucuggguugaacuaaucagagggcgacccaaagagaacacaaucuggacuagcgggagcagcauauccuuuugugguguaaacagugacacuguggguuggucuuggccagacggugcugaguugccauuuaccauugacaaguaa

SEQ ID NO: 50310 - RNA, 1410 nt, Artificial Sequence
  derived and/or modified CDS sequence (wt) from neuraminidase__InfluenzaA__ADD75111
augaauccaaaccaaaagauaauaaccauugguucggucuguaugacaauuggaauggcuaacuuaauauuacaaauuggaaacauaaucucaauauggauuagccacucaauccaacuugggaaucaaaaucagauugaaacaugcaaucaaagcgucauuacuuaugaaaacaacacuuggguaaaucagacauauguuaacaucagcaacaccaacuuugcugcuggacagucagugguuuccgugaaauuagcgggcaauuccucucucugcccuguuaguggaugggcuauauacaguaaagacaacaguauaagaaucgguuccaagggggauguguuugucauaagggaaccauucauaucaugcucccccuuggaaugcagaaccuucuucuugacucaaggggccuugcuaaaugacaaacauuccaauggaaccauuaaagacaggagcccauaucgaacccuaaugagcuguccuauuggugaaguucccucuccauacaacucaagauuugagucagucgcuuggucagcaagugcuugucaugauggcaucaauuggcuaacaauuggaauuucuggcccagacaauggggcaguggcuguguuaaaguacaacggcauaauaacagacacuaucaagaguuggagaaacaauauauugagaacacaagagucugaaugugcauguguaaaugguucuugcuuuacuguaaugaccgauggaccaagugauggacaggccucauacaagaucuucagaauagaaaagggaaagauagucaaaucagucgaaaugaaugccccuaauuaucacuaugaggaaugcuccuguuauccugauucuagugaaaucacaugugugugcagggauaacuggcauggcucgaaucgaccgugggugucuuucaaccagaaucuggaauaucagauaggauacauaugcagugggauuuucggagacaauccacgcccuaaugauaagacaggcaguugugguccaguaucgucuaauggagcaaauggaguaaaaggauuuucauucaaauacggcaaugguguuuggauagggagaacuaaaagcauuaguucaagaaacgguuuugagaugauuugggauccgaacggauggacugggacagacaauaacuucucaauaaagcaagauaucguaggaauaaaugaguggucaggauauagcgggaguuuuguccagcauccagaacuaacagggcuggauuguauaagaccuugcuucuggguugaacuaaucagagggcgacccaaagagaacacaaucuggacuagcgggagcagcauauccuuuugugguguaaacagugacacuguggguuggucuuggccagacggugcugaguugccauuuaccauugacaaguaa

SEQ ID NO: 50311 - RNA, 1410 nt, Artificial Sequence
  derived and/or modified CDS sequence (wt) from neuraminidase__InfluenzaA__ADD75121
augaauccaaaccaaaagauaauaaccauugguucggucuguaugacaauuggaauggcuaacuuaauauuacaaauuggaaacauaaucucaauauggauuagccacucaauucaacuugggaaucaaaaucagauugaaacaugcaaucaaagcgucauuacuuaugaaaacaacacuuggguaaaucagacauauguuaacaucagcaacaccaacuuugcugcuggacagucagugguuuccgugaaauuagcgggcaauuccucucucugcccuguuaguggaugggcuauauacaguaaagacaacaguauaagaaucgguuccaagggggauguguuugucauaagggaaccauucauaucaugcucccccuuggaaugcagaaccuucuucuugacucaaggggccuugcuaaaugacaaacauuccaauggaaccauuaaagacaggagcccauaucgaacccuaaugagcuguccuauuggugaaguucccucuccauacaacucaagauuugagucagucgcuuggucagcaagugcuugucaugauggcaucaauuggcuaacaauuggaauuucuggcccagacaauggggcaguggcuguguuaaaguacaacggcauaauaacagacacuaucaagaguuggagaaacaauauauugagaacacaagagucugaaugugcauguguaaaugguucuugcuuuacuguaaugaccgauggaccaagugauggacaggccucauacaagaucuucagaauagaaaagggaaagauagucaaaucagucgaaaugaaugccccuaauuaucacuaugaggaaugcuccuguuauccugauucuagugaaaucacaugugugugcagggauaacuggcauggcucgaaucgaccgugggugucuuucaaccagaaucuggaauaucagauaggauacauaugcagugggauuuucggagacaauccacgcccuaaugauaagacaggcaguugugguccaguaucgucuaauggagcaaauggaguaaaaggauuuucauucaaauacggcaaugguguuuggauagggagaacuaaaagcauuaguucaagaaacgguuuugagaugauuugggauccgaacggauggacugggacagacaauaacuucucaauaaagcaagauaucguaggaauaaaugaguggucaggauauagcggaaguuuuguucagcauccagaacuaacagggcuggauuguauaagaccuugcuucuggguugaacuaaucagagggcgacccaaagagaacacaaucuggacuagcgggagcagcauauccuuuugugguguaaacagugacacuguggguuggucuuggccagacggugcugaguugccauuuaccauugacaaguaa

SEQ ID NO: 50312 - RNA, 1410 nt, Artificial Sequence
  derived and/or modified CDS sequence (wt) from neuraminidase__InfluenzaA__ADD75131
augaauccaaaccaaaagauaauaaccauugguucggucuguaugacaauuggaauggcuaacuuaauauuacaaauuggaaacauaaucucaauauggauuagccacucaauucaacuugggaaucaaaaucagauugaaacaugcaaucaaagcgucauuacuuaugaaaacaacacuuggguaaaucagacauauguuaacaucagcaacaccaacuuugcugcuggacagucagugguuuccgugaaauuagcgggcaauuccucucucugcccuguuaguggaugggcuauauacaguaaagacaacaguauaagaaucgguuccaagggggauguguuugucauaagggaaccauucauaucaugcucccccuuggaaugcagaaccuucuucuugacucaaggggccuugcuaaaugacaaacauuccaauggaaccauuaaagacaggagcccauaucgaacccuaaugagcuguccuauuggugaaguucccucuccauacaacucaagauuugagucagucgcuuggucagcaagugcuugucaugauggcaucaauuggcuaacaauuggaauuucuggcccagacaauggggcaguggcuguguuaaaguacaacggcauaauaacagacacuaucaagaguuggagaaacaauauauugagaacacaagagucugaaugugcauguguaaaugguucuugcuuuacuguaaugaccgauggaccaagugauggacaggccucauacaagaucuucagaauagaaaagggaaagauagucaaaucagucgaaaugaaugccccuaauuaucacuaugaggaaugcuccuguuauccugauucuagugaaaucacauguguaugcagggauaacuggcauggcucgaaucgaccgugggugucuuucaaccagaaucuggaauaucagauaggauacauaugcagugggauuuucggagacaauccacgcccuaaugauaagacaggcaguugugguccaguaucgucuaauggagcaaauggaguaaaaggauuuucauucaaauacggcaaugguguuuggauagggagaacuaaaagcauuaguucaagaaacgguuuugagaugauuugggauccgaauggauggacugggacagacaauaacuucucaauaaagcaagauaucguaggaauaaaugaguggucaggauauagcgggaguuuuguucagcauccagaacuaacagggcuggauuguauaagaccuugcuucuggguugaacuaaucagagggcgacccaaagagaacacaaucuggacuagcgggagcagcauauccuuuugugguguaaacagugacacuguggguuggucuuggccagacggugcugaguugccauuuaccauugacaaguaa

SEQ ID NO: 50313 - RNA, 1410 nt, Artificial Sequence; identical to SEQ ID NO: 48750
  derived and/or modified CDS sequence (wt) from neuraminidase__InfluenzaA__ADD75141

SEQ ID NO: 50314 - RNA, 1410 nt, Artificial Sequence
  derived and/or modified CDS sequence (wt) from neuraminidase__InfluenzaA__ADD75161
augaauccaaaccaaaagauaauaaccauugguucggucuguaugacaauuggaauggcuaacuuaauauuacaaauuggaaacauaaucucaauauggauuagccacucaauucaacuugggaaucaaaaucagauugaaacaugcaaucaaagcgucauuacuuaugaaaacaacacuuggguaaaucagacauauguuaacaucagcaacaccaacuuugcugcuggacagucagugguuuccgugaaauuagcgggcaauuccucucucugcccuguuaguggaugggcuauauacaguaaagacaacaguauaagaaucgguuccaagggggauguguuugucauaagggaaccauucauaucaugcucccccuuggaaugcagaaccuucuucuugacucaaggggccuugcugaaugacaaacauuccaauggaaccauuaaagacaggagcucauaucgaacccuaaugagcuguccuauuggugaaguucccucuccauacaacucaagauuugagucagucgcuuggucagcaagugcuugucaugauggcaucaauuggcuaacaauuggaauuucuggcccagacaauggggcaguggcuguguuaaaguacaacggcauaauaacagacacuaucaagaguuggagaaacaauauauugagaacacaagagucugaaugugcauguguaaaugguucuuguuuuacuguaaugaccgauggaccaagugauggacaggccucauacaagaucuucagaauagaaaagggaaagauagucaaaucagucgaaaugaaugccccuaauuaucacuaugaggaaugcuccuguuauccugauucuagugaaaucacaugugugugcagggauaacuggcauggcucgaaucgaccgugggugucuuucaaccagaaucuggaauauaagauaggauacauaugcagugggauuuucggagacaauccacgcccuaaugauaagacaggcaguugugguccaguaucgucuaauggagcaaauggaguaaaaggauuuucauucaaauacggcaaugguguuuggauagggagaacuaaaagcauuaguucaagaaacgguuuugagaugauuugggauccgaacggauggacugggacagacaauaacuucucaauaaagcaagauaucguaggaauaaaugaguggucaggauauagcgggaguuuuguucagcauccagaacuaacagggcuggauuguauaagaccuugcuucuggguugaacuaaucagagggcgacccaaagagaacacaaucuggacuagcgggagcagcauauccuuuugugguguaaacagugacacuguggguuggucuuggccagacggugcugaguugccauuuaccauugacagguaa

SEQ ID NO: 50315 - RNA, 1410 nt, Artificial Sequence
  derived and/or modified CDS sequence (wt) from neuraminidase__InfluenzaA__ADD84500
augaauccaaaccaaaauauaauaaccauugguucggucuguaugacaauuggaauggcuaacuuaauauuacaaauuggaaacauaaucucaauauggauuagccacucaauucaacuugggaaucaaaaucagauugaaacaugcaaucaaagcgucauuacuuaugaaaacaacacuuggguaaaucagacauauguuaacaucagcaacaccaacuuugcugcuggacagucagugguuuccgugaaauuagcgggcaauuccucucucugcccuguuaguggaugggcuauauacaguaaagacaacaguauaagaaucgguuccaagggggauguguuugucauaagggaaccauucauaucaugcucccccuuggaaugcagaaccuucuucuugacucaaggggccuugcuaaaugacaaacauuccaauggaaccauuaaagacaggagcccauaucgaacccuaaugagcuguccuauuggugaaguucccucuccauacaacucaagauuugagucagucgcuuggucagcaagugcuugucaugauggcaucaauuggcuaacaauuggaauuucuggcccagacaauggggcaguggcuguguuaaaguacaacggcauaauaacagacacuaucaagaguuggagaaacaauauauugagaacacaagagucugaaugugcauguguaaaugguucuugcuuuauuguaaugaccgauggaccaagugauggacaggccucauacaagaucuucagaauagaaaagggaaagauagucaaaucagucgaaaugaaugccccuaauuaucacuaugaggaaugcuccuguuauccugauucuagugaaaucacaugugugugcagggauaacuggcauggcucgaaucgaccgugggugucuuucaaccagaaucuggaauaucagauaggguacauaugcagugggauuuucggagacaauccacgcccuaaugauaagacaggcaguugugguccaguaucgucuaauggagcaaauggaguaaaaggauuuucauucaaauacggcaaugguguuuggauagggagaacuaaaagcauuaguucaagaaacgguuuugagaugauuugggauccgaacggauggacugggacagacaauaacuucucaauaaagcaagauaucguaggaauaaaugaguggucaggauauagcgggaguuuuguucagcauccagaacuaacagggcuggauuguauaagaccuugcuucuggguugaacuaaucagagggcgacccaaagagaacacaaucuggacuagcgggagcagcauauccuuuugcgguguaaacagugacacuguggguuggucuuggccagacggugcugaguugccauuuaccauugacaaguaa

SEQ ID NO: 50316 - RNA, 1410 nt, Artificial Sequence
  derived and/or modified CDS sequence (wt) from neuraminidase__InfluenzaA__ADD84502
augaauccaaaccaaaauauaauaaccauugguucggucuguaugacaauuggaauggcuaacuuaauauuacaaauuggaaacauaaucucaauauggauuagccacucaauucaacuugggaaucaaaaucagauugaaacaugcaaucaaagcgucauuacuuaugaaaacaacacuuggguaaaucagacauauguuaacaucagcaacaccaacuuugcugcuggacagucagugguuuccgugaaauuagcgggcaauuccucucucugcccuguuaguggaugggcuauauacaguaaagacaacaguauaagaaucgguuccaagggggauguguuugucauaagggaaccauucauaucaugcucccccuuggaaugcagaaccuucuucuugacucaaggggccuugcuaaaugacaaacauuccaauggaaccauuaaagacaggagcccauaucgaacccuaaugagcuguccuauuggugaaguucccucuccauacaacucaagauuugagucagucgcuuggucagcaagugcuugucaugauggcaucaauuggcuaacaauuggaauuucuggcccagacaauggggcaguggcuguguuaaaguacaacggcauaauaacagacacuaucaagaguuggagaaacaauauauugagaacacaagagucugaaugugcauguguaaaugguucuugcuuuacuguaaugaccgauggaccaagugauggacaggccucauacaagaucuucagaauagaaaagggaaagauagucaaaucagucgaaaugaaugccccuaauuaucacuaugaggaaugcuccuguuauccugauucuagugaaaucacaugugugugcagggauaacuggcauggcucgaaucgaccgugggugucuuucaaccagaaucuggaauaucagauaggguacauaugcagugggauuuucggagacaauccacgcccuaaugauaagacaggcaguugugguccaguaucgucuaauggagcaaauggaguaaaaggauuuucauucaaauacggcaaugguguuuggauagggagaacuaaaagcauuaguucaagaaacgguuuugagaugauuugggauccgaacggauggacugggacagacaauaacuucucaauaaagcaagauaucguaggaauaaaugaguggucaggauauagcgggaguuuuguucagcauccagaacuaacagggcuggauuguauaagaccuugcuucuggguugaacuaaucagagggcgacccaaagagaacacaaucuggacuagcgggagcagcauauccuuuugcgguguaaacagugacacuguggguuggucuuggccagacggugcugaguugccauuuaccauugacaaguaa

SEQ ID NO: 50317 - RNA, 1410 nt, Artificial Sequence; identical to SEQ ID NO: 50316
  derived and/or modified CDS sequence (wt) from neuraminidase__InfluenzaA__ADD84503

SEQ ID NO: 50318 - RNA, 1410 nt, Artificial Sequence
  derived and/or modified CDS sequence (wt) from neuraminidase__InfluenzaA__ADD84504
augaauccaaaccaaaauauaauaaccauugguucggucuguaugacaauuggaauggcuaacuuaauauuacaaauuggaaacauaaucucaauauggauuagccacucaauucaacuugggaaucaaaaucagauugaaacaugcaaucaaagcgucauuacuuaugaaaacaacacuuggguaaaucagacauauguuaacaucagcaacaccaacuuugcugcuggacagucagugguuuccgugaaauuagcgggcaauuucucucucugcccuguuaguggaugggcuauauacaguaaagacaacaguauaagaaucgguuccaagggggauguguuugucauaagggaaccauucauaucaugcucccccuuggaaugcagaaccuucuucuugacucaaggggccuugcuaaaugacaaacauuccaauggaaccauuaaagacaggagcccauaucgaacccuaaugagcuguccuauuggugaaguucccucuccauacaacucaagauuugagucagucgcuuggucagcaagugcuugucaugauggcaucaauuggcuaacaauuggaauuucuggcccagacaauggggcaguggcuguguuaaaguacaacggcauaauaacagacacuaucaagaguuggagaaacaauauauugagaacacaagagucugaaugugcauguguaaaugguucuugcuuuacuguaaugaccgauggaccaagugauggacaggccucauacaagaucuucagaauagaaaagggaaagauagucaaaucagucgaaaugaaugccccuaauuaucacuaugaggaaugcuccuguuauccugauucuagugaaaucacaugugugugcagggauaacuggcauggcucgaaucgaccgugggugucuuucaaccagaaucuggaauaucagauaggguacauaugcagugggauuuucggagacaauccacguccuaaugauaagacaggcaguugugguccaguaucgucuaauggagcaaauggaguaaaaggauuuucauucaaauacggcaaugguguuuggauagggagaacuaaaagcauuaguucaagaaacgguuuugagaugauuugggauccgaacggauggacugggacagacaauaacuucucaauaaagcaagauaucguaggaauaaaugaguggucaggauauagcgggaguuuuguucagcauccagaacuaacagggcuggauuguauaagaccuugcuucuggguugaacuaaucagagggcgacccaaagagaacacaaucuggacuagcgggagcagcauauccuuuugcgguguaaacagugacacuguggguuggucuuggccagacggugcugaguugccauuuaccauugacaaguaa

SEQ ID NO: 50319 - RNA, 1410 nt, Artificial Sequence; identical to SEQ ID NO: 50316
  derived and/or modified CDS sequence (wt) from neuraminidase__InfluenzaA__ADD84505

SEQ ID NO: 50320 - RNA, 1410 nt, Artificial Sequence; identical to SEQ ID NO: 50316
  derived and/or modified CDS sequence (wt) from neuraminidase__InfluenzaA__ADD84506

SEQ ID NO: 50321 - RNA, 1410 nt, Artificial Sequence
  derived and/or modified CDS sequence (wt) from neuraminidase__InfluenzaA__ADD92528
augaauccaaaccaaaagauaauaaccauugguucggucuguaugacaauuggaauggcuaacuuaauauuacaaauuggaaacauaaucucaauauggauuagccacucaauucaacuugggaaucaaaaucagauugaaacaugcaaucaaagcgucauuacuuaugaaaacaacacuuggguaaaucagacauauguuaacaucagcaacaccaacuuugcugcuggacagucagugguuuccgugaaauuagcgggcaacuccucucucugcccuguuaguggaugggcuauauacaguaaagacaacaguauaagaaucgguuccaagggggauguguuugucauaagggaaccauucauaucaugcucccccuuggaaugcagaaccuucuucuugacucaaggggccuugcuaaaugacaaacauuccaauggaaccauuaaagacaggagcccauaucgaacccuaaugagcuguccuauuggugaaguucccucuccauacaacucaagauuugagucagucgcuuggucagcaagugcuugucaugauggcaucaauuggcuaacaauuggaauuucuggcccagacaauggggcaguggcuguguuaaaguacaacggcauaauaacagacacuaucaagaguuggagaaacaauauauugagaacacaagagucugaaugugcauguguaaaugguucuugcuuuacuguaaugaccgauggaccaagugauggacaggccucauacaagaucuucagaauagaaaagggaaagauagucaaaucagucgaaaugaaugccccuaauuaucacuaugaggaaugcuccuguuauccugauucuagugaaaucacaugugugugcagggauaacuggcauggcucgaaucgaccgugggugucuuucaaccagaaucuggaauaucagauaggauacauaugcagugggauuuucggagacaauccacgcccuaaugauaagacaggcaguugugguccaguaucgucuaauggagcaaauggaguaaaaggauuuucauucaaauacggcaaugguguuuggauagggagaacuaaaagcauuaguucaagaaacgguuuugagaugauuugggauccgaacggauggacugggacagacaauaacuucucaauaaagcaagauaucguaggaauaaaugaguggucaggacauagcgggaguucuguucagcauccagaacuaacagggcuggauuguauaagaccuugcuucuggguugaacuaaucagagggcgacccaaagagaacacaaucuggacuagcgggagcagcauauccuuuugugguguaaacagugacacuguggguuggucuuggccagacggugcugaguugccauuuaccauugacaaguaa

SEQ ID NO: 50322 - RNA, 1410 nt, Artificial Sequence; identical to SEQ ID NO: 49973
  derived and/or modified CDS sequence (wt) from neuraminidase__InfluenzaA__ADD96769

SEQ ID NO: 50323 - RNA, 1410 nt, Artificial Sequence; identical to SEQ ID NO: 49973
  derived and/or modified CDS sequence (wt) from neuraminidase__InfluenzaA__ADD96779

SEQ ID NO: 50324 - RNA, 1410 nt, Artificial Sequence; identical to SEQ ID NO: 49973
  derived and/or modified CDS sequence (wt) from neuraminidase__InfluenzaA__ADD96789

SEQ ID NO: 50325 - RNA, 1410 nt, Artificial Sequence; identical to SEQ ID NO: 50101
  derived and/or modified CDS sequence (wt) from neuraminidase__InfluenzaA__ADD96799

SEQ ID NO: 50326 - RNA, 1410 nt, Artificial Sequence
  derived and/or modified CDS sequence (wt) from neuraminidase__InfluenzaA__ADD96809
augaauccaaaccaaaagauaauaaccauugguucggucuguaugacaauuggaauggcuaacuuaauauuacaaauuggaaacauaaucucaauauggauuagccacucaauucaacuugggaaucaaaaucagauugaaacaugcaaucaaagcgucauuacuuaugaaaacaacacuuggguaaaucagacauauguuaacaucagcaacaccaacuuugcugcuggacagucagugguuuccgugaaauuagcgggcaauuccucucucugcccuguuaguggaugggcuauauacaguaaagacaacaguauaagaaucgguuccaagggggauguguuugucauaagggaaccauucauaucaugcucccccuuggaaugcagaaccuucuucuugacucaaggggccuugcuaaaugacaaacauuccaauggaaccauuaaagacaggagcccauaucgaacccuaaugagcuguccuauuggugaaguucccucuccauacaacucaagauuugagucagucgcuuggucagcaagugcuugucaugauggcaucaauuggcuaacaauuggaauuucuggcccagacaauggggcaguggcuguguuaaaguacaacggcauaauaacagacacuaucaagaguuggagaaacaauauauugagaacacaagagucugaaugugcauguguaaaugguucuugcuuuacuguaaugaccgauggaccaagugauggacaggccucauacaagaucuucagaauagaaaagggaaagauagucaaaucagucgaaaugaaugccccuaauuaucacuaugaggaaugcuccuguuauccugauucuagugaaaucacaugugugugcagggauaacuggcauggcucgaaucgaccgugggugucuuucaaccagaaucuggaauaucagauaggauacauaugcagugggauuuucggagacaauccacgcccuaaugauaagacaggcaguugugguccaguaucgucuaauggagcaaauggaguaaaaggauuuucauucaaauacggcaaugguguuuggauagggagaacuaaaaguauuaguucaagaaacgguuuugagaugauuugggauccaaacggauggacugggacagacaauaacuucucaauaaagcaagauaucguaggaauaaaugaguggucaggauauagcgggaguuuuguucagcauccagaacuaacagggcuggauuguauaagaccuugcuucuggguugagcuaaucagagggcgacccaaagagaacacaaucuggacuagcgggagcagcauauccuuuugugguguaaacagugacacuguggguuggucuuggccagacggugcugaguugccauuuaccauugacaaguaa

SEQ ID NO: 50327 - RNA, 1410 nt, Artificial Sequence
  derived and/or modified CDS sequence (wt) from neuraminidase__InfluenzaA__ADD96819
augaauccaaaccaaaagauaauaaccauugguucggucuguaugacaauuggaauggcuaacuuaauauuacaaauuggaaacauaaucucaauauggauuagccacucaauucaacuugggaaucaaaaucagauugaaacaugcaaucaaagcgucauuacuuaugaaaacaacacuuggguaaaucagacauauguuaacaucagcaacaccaacuuugcugcuggacagucagugguuuccgugaaauuagcgggcaguuccucucucugcccuguuaguggaugggcuauauacaguaaagacaacaguauaagaaucgguuccaagggggauguguuugucauaagggaaccauucauaucaugcucccccuuggaaugcagaaccuucuucuugacucaaggggccuugcuaaaugacaaacauuccaauggaaccauuaaagacaggagcccauaucgaacccuaaugagcuguccuauuggugaaguucccucuccauacaacucaagauuugagucagucgcuuggucagcaagugcuugucaugauggcaucaauuggcuaacaauuggaauuucuggcccagacaauggggcaguggcuguguuaaaguacaacggcauaauaacagacacuaucaagaguuggagaaacaauauauugagaacacaagagucugaaugugcauguguaaaugguucuugcuuuacuguaaugaccgauggaccaagugauggacaggccucauacaagaucuucagaauagaaaagggaaagauagucaaaucagucgaaaugaaugccccuaauuaucacuaugaggaaugcuccuguuauccugauucuagugaaaucacaugugugugcagggauaacuggcauggcucgaaucgaccgugggugucuuucaaccagaaucuggaauaucagauaggauacauaugcagugggauuuucggagacaauccacgcccuaaugauaagaaaggcaguugugguccaguaucgucuaauggagcaaauggaguaaaaggauuuucauucaaauacggcaaugguguuuggauagggagaacuaaaagcauuaguucaagaaacgguuuugagaugauuugggauccgaacggauggacugggacagacaauaacuucucaauaaagcaagauaucguaggaauaaaugaauggucaggauauagcgggaguuuuguucagcauccagaacuaacagggcuggauuguauaagaccuugcuucuggguugaacuaaucagagggcgacccaaagagaacacaaucuggacuagcgggagcagcauauccuuuugugguguaaacagugacacuguggguuggucuuggccagacggugcugaguugccauuuaccauugacaaguaa

SEQ ID NO: 50328 - RNA, 1410 nt, Artificial Sequence
  derived and/or modified CDS sequence (wt) from neuraminidase__InfluenzaA__ADD96829
augaauccaaaccaaaagauaauaaccauugguucggucuguaugacaauuggaauggcuaacuuaauauuacaaauuggaaacauaaucucaauauggauuagccacucaauucaacuugggaaucaaaaucagauugaaacaugcaaucaaagcgucauuacuuaugaaaacaacacuuggguaaaucagacauauguuaacaucagcaacaccaacuuugcugcuggacagucagugguuuccgugaaauuagcgggcaauuccucucucugcccuguuaguggaugggcuauauacaguaaagacaacaguauaagaaucgguuccaagggggauguguuugucauaagggaaccauucauaucaugcucccccuuggaaugcagaaccuucuucuugacucaaggggccuugcuaaaugacaaacauuccaauggaaccauuaaagacaggagcccauaucgaacccuaaugagcuguccuauuggugaaguucccucuccauacaacucaagauuugagucagucgcuuggucagcaagugcuugucaugauggcaucaauuggcuaacaauuggaauuucuggcccagacaauggggcaguggcuguguuaaaguacaacggcauaauaacagacacuaucaagaguuggagaaacaauauauugagaacacaagagucugaaugugcauguguaaaugguucuugcuuuacuguaaugaccgauggaccaagugauggacaggccucauacaaaaucuucagaauagaaaagggaaagauagucaaaucagucgaaaugaaugccccuaauuaucacuaugaggaaugcuccuguuauccugauucuagugaaaucacaugugugugcagggauaacuggcauggcucgaaucgaccgugggugucuuucaaccagaaucuggaauaucagauaggauacauaugcagugggauuuucggagacaauccacgcccuaaugauaagacaggcaguugugguccaguaucgucuaauggagcaaauggaguaaaaggauuuucauucaaauacggcaaugguguuuggauagggagaacuaaaagcauuaguucaagaaacggguuugagaugauuugggauccgaacggauggacugggacagacaauaacuucucaauaaagcaagauaucguaggaauaaaugaguggucaggauauagcgggaguuuuguccagcauccagaacuaacagggcuggauuguauaagaccuugcuucuggguugaacuaaucagagggcgacccaaagagaacacaaucuggacuagcgggagcagcauauccuuuugugguguaaacagugacacuguggguuggucuuggccagacggugcugaguugccauuuaccauugacaaguaa

SEQ ID NO: 50329 - RNA, 1410 nt, Artificial Sequence; identical to SEQ ID NO: 48750
  derived and/or modified CDS sequence (wt) from neuraminidase__InfluenzaA__ADD96839

SEQ ID NO: 50330 - RNA, 1410 nt, Artificial Sequence; identical to SEQ ID NO: 50246
  derived and/or modified CDS sequence (wt) from neuraminidase__InfluenzaA__ADD96849

SEQ ID NO: 50331 - RNA, 1410 nt, Artificial Sequence; identical to SEQ ID NO: 48750
  derived and/or modified CDS sequence (wt) from neuraminidase__InfluenzaA__ADD96859

SEQ ID NO: 50332 - RNA, 1410 nt, Artificial Sequence
  derived and/or modified CDS sequence (wt) from neuraminidase__InfluenzaA__ADD96869
augaauccaaaccaaaagauaauaaccauugguucggucuguaugacaauuggaauggcuaacuuaauauuacaaauuggaaacauaaucucaauauggauuagccacccaauucaacuugggaaucaaaaucagauugaaacaugcaaucaaagcgucauuacuuaugaaaacaacacuuggguaaaucagacauauguuaacaucagcaacaccaacuuugcugcuggacagucagugguuuccgugaaauuagcgggcaauuccucucucugcccuguuaguggaugggcuauauacaguaaagacaacaguauaagaaucgguuccaagggggauguguuuguaauaagggaaccauucauaucaugcucccccuuggaaugcagaaccuucuucuugacucaaggggccuugcuaaaugacaaacauuccaauggaaccauuaaagacaggagcccauaucgaacccuaaugagcuguccuauuggugaaguucccucuccauacaacucaagauuugagucagucgcuuggucagcaagugcuugucaugauggcaucaauuggcuaacaauuggaauuucuggcccagacaauggggcaguggcuguguuaaaguacaacggcauaauaacagacacuaucaagaguuggaaaaacaauauauugagaacacaagagucugaaugugcauguguaaaugguucuugcuuuacuguaaugaccgauggaccaagugauggacaggccucauacaagaucuucagaauagaaaagggaaagauagucaaaucagucgaaaugaaugccccuaauuaucacuaugaggaaugcuccuguuauccugauucuagugaaaucacaugugugugcagggauaacuggcauggcucgaaucgaccgugggugucuuucaaccagaaucuggaauaucagauaggauacauaugcagugggauuuucggagacaauccacgcccuaaugauaagacaggcaguugugguccaguaucgucuaauggagcaaauggaguaaaaggauuuucauucaaauacggcaaugguguuuggauagggagaacuaaaagcauuaguucaagaaacgguuuugagaugauuugggauccgaacggauggacugggacagacaauaacuucucaauaaagcaagauaucguaggaauaaaugaauggucaggauauagcgggaguuuuguucagcauccagaacuaacagggcuggauuguauaagaccuugcuucuggguugaacuaaucagagggcgacccaaagagaacacaaucuggacuagcgggagcagcauauccuuuugugguguaaacagugacacuguggguuggucuuggccagacggugcugaguugccauuuaccauugacaaguaa

SEQ ID NO: 50333 - RNA, 1410 nt, Artificial Sequence
  derived and/or modified CDS sequence (wt) from neuraminidase__InfluenzaA__ADD96879
augaauccaaaccaaaagauaauaaccauugguucggucuguaugacaauuggaauggcuaacuuaauauuacaaauuggaaacauaaucucaauauggauuagccacucaauucaacuugggaaucaaaaucagauugaaacaugcaaucaaagcgucauuacuuaugaaaacaacacuuggguaaaucagacauauguuaacaucagcaacaccaacuuugcugcuggacagucagugguuuccgugaaauuagcgggcaauuccucucucugcccuguuaguggaugggcuauauacaguaaagacaacaguauaagaaucgguuccaagggggauguguuugucauaagggaaccauucauaucaugcucccccuugggaugcagaaccuucuucuugacucaaggggccuugcuaaaugacaaacauuccaauggaaccauuaaagacaggagcccauaucgaacccuaaugagcuguccuauuggugaaguucccucuccauacaacucaagauuugagucagucgcuuggucagcaagugcuugucaugauggcaucaauuggcuaacaauuggaauuucugguccagacaauggggcaguggcuguguuaaaguacaacggcauaauaacagacacuaucaagaguuggagaaacaauauauugagaacacaagagucugaaugugcauguguaaaugguucuugcuuuacuguaaugaccgauggaccaagugauggacaggccucauacaagaucuucagaauagaaaagggaaagauagucaaaucagucgaaaugaaugccccuaauuaucacuaugaggaaugcuccuguuauccugauucuagugaaaucacaugugugugcagggauaacuggcauggcucgaaucgaccgugggugucuuucaaccagaaucuggaauaucagauaggauacauaugcagugggauuuucggagacaauccacgcccuaaugauaagacaggcaguugugguccaguaucgucuaauggagcaaauggaguaaaaggauuuucauucaaauacggcaaugguguuuggauagggagaacuaaaagcauuaguucaagaaacgguuuugagaugauuugggauccgaacggauggacugggacagacaauaacuucucaauaaagcaagauaucguaggaauaaaugaguggucaggauauagcgggaguuuuguucagcauccagaacuaacagggcuggauuguauaagaccuugcuucuggguugaacuaaucagagggcgacccaaagagaacacaaucuggacuagcgggagcagcauauccuuuugugguguaaacagugacacuguggguuggucuuggccagacggugcugaguugccauuuaccauugacaaguaa

SEQ ID NO: 50334 - RNA, 1410 nt, Artificial Sequence
  derived and/or modified CDS sequence (wt) from neuraminidase__InfluenzaA__ADD96889
augaauccaaaccaaaagauaauaaccauugggucggucuguaugacaauuggaauggcuaacuuaauauuacaaauuggaaacauaaucucaauauggauuagccacucaauucaacuugggaaucaaaaucagauugaaacaugcaaucaaagcgucauuacuuaugaaaacaacacuuggguaaaucagacauauguuaacaucagcaacaccaacuuugcugcuggacagucagugguuuccgugaaauuagcgggcaauuccucucucugcccuguuaguggaugggcuauauacaguaaagacaacaguauaagaaucgguuccaagggggauguguuugucauaagggaaccauucauaucaugcucccccuuggaaugcagaaccuucuucuugacucaaggggccuugcuaaaugacaaacauuccaauggaaccauuaaagacaggagcccauaucgaacccuaaugagcuguccuauuggugaaguucccucuccauacaacucaagauuugagucagucgcuuggucagcaagugcuugucaugauggcaucaauuggcuaacaauuggaauuucuggcccagacaauggggcaguggcuguguuaaaguacaacggcauaauaacagacacuaucaagaguuggagaaauaauauauugagaacacaagagucugaaugugcauguguaaaugguucuugcuuuacuguaaugaccgauggaccaagugauggacaggcaucauacaagaucuucagaauagaaaagggaaagauagucaaaucagucgaaaugaaugccccuaauuaucacuaugaggaaugcuccuguuauccugauucuagugaaaucacauguguaugcagggauaacuggcauggcucgaaucgaccgugggugucuuucaaccagaaucuggaauaucagauaggauacauaugcagugggauuuucggagacaauccacgcccuaaugauaagacaggcaguugugguccaguaucgucuaauggagcaaauggaguaaaaggauuuucauucaaauacggcaaugguguuuggauagggagaacuaaaagcauuaguucaagaaacgguuuugagaugauuugggauccgaacggauggacugggacagacaauaacuucucaauaaagcaagauaucguaggaauaaaugaguggucaggauauagcgggaguuuuguucagcauccagaacuaacagggcuggauuguauaagaccuugcuucuggguugaacuaaucagagggcgacccaaagagaacacaaucuggacuagcgggagcagcauauccuuuugugguguaaacagugacacuguggguuggucuuggccagacggugcugaguugccauuuaccauugacaaguaa

SEQ ID NO: 50335 - RNA, 1410 nt, Artificial Sequence
  derived and/or modified CDS sequence (wt) from neuraminidase__InfluenzaA__ADD96899
augaauccaaaccaaaagauaauaaccauugguucggucuguaugacaauuggaauggccaacuuaauauuacaaauuggaaacauaaucucaauauggauuagccacucaauucaacuugggaaucaaaaucagauugaaacaugcaaucaaagcgucauuacuuaugaaaacaacacuuggguaaaucagacauauguuaacaucagcaacaccaacuuugcugcuggacagucagugguuuccgugaaauuagcaggcaauuccucucucugcccuguuaguggaugggcuauauacaguaaagacaacaguguaagaaucgguuccaagggggauguguuugucauaagggaaccauucauaucaugcucccccuuggaaugcagaaccuucuucuugacucaaggggccuugcuaaaugacaaacauuccaauggaaccauuaaagacaggagcccauaucgaacccuaaugagcuguccuauuggugaaguucccucuccauacaacucaagauuugagucagucgcuuggucagcaagugcuugucaugauggcaucaauuggcuaacaauuggaauuucuggcccagacaauggggcaguggcuguguuaaaguacaacggcauaauaacagacacuaucaagaguuggagaaacaauauauugagaacacaagagucugaaugugcauguguaaaugguucuugcuuuacuguaaugaccgauggaccaagugauggacaggccucauacaagaucuucagaauagaaaagggaaagauagucaaaucagucgaaaugaaugccccuaauuaucacuaugaggaaugcuccuguuauccugauucuagugaaaucacaugugugugcagggauaacuggcauggcucgaaucgaccguggguuucuuucaaccagaaucuggaauaucagauaggauacauaugcagugggauuuucggagacaauccacgcccuaaugauaagacaggcaguugugguccaguaucgucuaauggagcaaauggaguaaaaggauuuucauucaaauacggcaaugguguuuggauagggagaacuaaaagcauuaguucaagaaacgguuuugagaugauuugggauccgaacggauggacugggacagacaauaacuucucaauaaagcaagauaucguaggaauaaaugaguggucaggauauagcgggaguuuuguucagcauccagaacuaacagggcuggauuguauaagaccuugcuucuggguugaacuaaucagagggcgacccaaagagaacacaaucuggacuagcgggagcagcauauccuuuugugguguaaacagugacacuguggguuggucuuggccagacggugcugaguugccauuuaccauugacaaguaa

SEQ ID NO: 50336 - RNA, 1410 nt, Artificial Sequence; identical to SEQ ID NO: 49794
  derived and/or modified CDS sequence (wt) from neuraminidase__InfluenzaA__ADD96909

SEQ ID NO: 50337 - RNA, 1410 nt, Artificial Sequence; identical to SEQ ID NO: 49794
  derived and/or modified CDS sequence (wt) from neuraminidase__InfluenzaA__ADD96919

SEQ ID NO: 50338 - RNA, 1410 nt, Artificial Sequence; identical to SEQ ID NO: 49794
  derived and/or modified CDS sequence (wt) from neuraminidase__InfluenzaA__ADD96929

SEQ ID NO: 50339 - RNA, 1410 nt, Artificial Sequence
  derived and/or modified CDS sequence (wt) from neuraminidase__InfluenzaA__ADD96939
augaauccaaaccaaaagauaauaaccauugguucggucuguaugacaauuggaauggcuaacuuaauauuacaaauuggaaacauaaucucaauauggauuagccacucaauucaacuugggaaucaaaaucagauugaaacaugcaaucaaagcgucauuacuuaugaaaacaacacuuggguaaaucagacauauguuaacaucagcaacaccaacuuugcugcuggacagucagugguuuccgugaaauuagcgggcaauuccucucucugcccuguuaguggaugggcuauauacaguaaagacaacaguauaagaauugguuccaagggggauguguuugucauaagggaaccauucauaucaugcucccccuuggaaugcagaaccuucuucuugacucaaggggccuugcuaaaugacaaacauuccaauggaaccauuaaagacaggagcccauaucgaacccuaaugagcuguccuauuggugaaguucccucuccauacaacucaagauuugagucagucgcuuggucagcaagugcuugucaugauggcaucaauuggcuaacaauuggaauuucuggcccagacaauggggcaguggcuguguuaaaguacaacggcauaauaacagacacuaucaagaguuggagaaacaauauauugagaacacaagagucugaaugugcauguguaaaugguucuugcuuuacuguaaugaccgauggaccaagugauggacaggccucauacaagaucuucagaauagaaaagggaaagauagucaaaucagucgaaaugaaugccccuaauuaucacuaugaggaaugcuccuguuauccugauucuagugaaaucacaugugugugcagggauaacuggcauggcucgaaucgaccgugggugucuuucaaccagaaucuggaauaucagauaggauacauaugcagugggauuuucggagacaauccacgcccuaaugauaagacaggcaguugugguccaguaucgucuaauggagcaaauggaguaaaaggauuuucauucaaauacggcaaugguguuuggauagggagaacuaaaagcauuaguucaagaaacgguuuugagaugauuugggauccgaacggauggacugggacagacaauaacuucucaauaaagcaagauaucguaggaauaaaugaguggucaggauauagcgggaguuuuguucagcauccagaacuaacagggcuggauuguauaagaccuugcuucuggguugaacuaaucagagggcgacccaaagagaacacaaucuggacuagcgggagcagcauauccuuuugugguguaaacagugacacuguggguuggucuuggccagacggugcugaguugccauuuaccauugacaaguaa

SEQ ID NO: 50340 - RNA, 1410 nt, Artificial Sequence; identical to SEQ ID NO: 50312
  derived and/or modified CDS sequence (wt) from neuraminidase__InfluenzaA__ADD96959

SEQ ID NO: 50341 - RNA, 1410 nt, Artificial Sequence
  derived and/or modified CDS sequence (wt) from neuraminidase__InfluenzaA__ADD96969
augaauccaaaccaaaagauaauaaccauugguucggucuguaugacaauuggaauggcuaacuuaauauuacaaauuggaaacauaaucucaauauggauuagccacucaauucaacuugggaaucaaaaucagauugaaacaugcaaucaaagcgucauuacuuaugaaaacaacacuuggguaaaucagacauauguuaacaucagcaacaccaacuuugcugcuggacagucagugguuuccgugaaauuagcgggcaauuccucucucugcccuguuaguggaugggcuauauacaguaaagacaacaguauaagaaucgguuccaagggggauguguuugucauaagggaaccauucauaucaugcucccccuuggaaugcagaaccuucuucuugacucaaggggccuugcuaaaugacaaacauuccaauggaaccauuaaagacaggagcccauaucgaacccuaaugagcuguccuauuggugaaguucccucuccauacaacucaagauuugagucagucgcuuggucagcaagugcuugucaugauggcaucaauuggcuaacaauuggaauuucuggcccagacaauggggcaguggcuguguuaaaguacaacggcauaauaacagacacuaucaagaguuggagaaacaauauauugagaacacaagagucugaaugugcauguguaaaugguucuugcuuuacuguaaugaccgauggaccaagugauggacaggccucauacaagaucuucagaauagaaaagggaaagauagucaaaucagucgaaaugaaugccccuaauuaucacuaugaggaaugcucuuguuauccugauucuagugaaaucacaugugugugcagggauaacuggcauggcucgaaucgaccgugggugucuuucaaccagaaucuggaauaucagauaggauacauaugcagugggauuuucggagacaauccacgcccuaaugauaagacaggcaguugugguccaguaucgucuaauggagcaaauggaguaaaaggauuuucauucaaauacggcaaugguguuuggauagggagaacuaaaagcauuaguucaagaaacgguuuugagaugauuugggauccgaacggauggacugggacagacaauaacuucucaauaaagcaagauaucguaggaauaaaugaguggucaggauauagcgggaguuuuguucagcauccagaacuaacagggcuggauuguauaagaccuugcuucuggguugaacuaaucagagggcgacccaaagagaacacaaucuggacuagcgggagcagcauauccuuuugugguguaaacagugacacuguggguuggucuuggccagacggugcugaguugccauuuaccauugacaaguaa

SEQ ID NO: 50342 - RNA, 1410 nt, Artificial Sequence
  derived and/or modified CDS sequence (wt) from neuraminidase__InfluenzaA__ADD96989
augaauccaaaccaaaagauaauaaccauugguucggucuguaugacaauuggaauggcuaacuuaauauuacaaauuggaaacauaaucucaauauggauuagccacucaauucaacuugggaaucaaaaucagauugaaacaugcaaucaaagcgucauuacuuaugaaaacaacacuuggguaaaucagacauauguuaacaucagcaacaccaacuuugcugcuggacagucagugguuuccgugaaauuagcgggcaauuccucucucugcccuguuaguggaugggcuauauacaguaaagacaauaguauaagaaucgguuccaagggggauguguuugucauaagggaaccauucauaucaugcucccccuuggaaugcagaaccuucuucuugacucaaggggccuugcuaaaugacaaacauuccaauggaaccauuaaagacaggagcucauaucgaacccuaaugagcuguccuauuggugaaguucccucuccauacaacucaagauuugagucagucgcuuggucagcaagugcuugucaugauggcaucaauuggcuaacaauuggaauuucuggcccagacaauggggcaguggcuguguuaaaguacaacggcauaauaacagacacuaucaagaguuggagaaacaauauauugagaacacaagagucugaaugugcauguguaaaugguucuuguuuuacuguaaugaccgauggaccaagugauggacaggccucauacaagaucuucagaauagaaaagggaaagauagucaaaucagucgaaaugaaugccccuaauuaucacuaugaggaaugcuccuguuauccugauucuagugaaaucacaugugugugcagggauaacuggcauggcucgaaucgaccgugggugucuuucaaccagaaucuggaauaucagauaggauacauaugcagugggauuuucggagacaauccacgcccuaaugauaagacaggcaguugugguccaguaucgucuaauggagcaaauggaguaaaaggauuuucauucaaauacggcaaugguguuuggauagggagaacuaaaagcauuaguucaagaaaugguuuugagaugauuugggauccgaacggauggacugggacagacaauaacuucucaauaaagcaagauaucguaggaauaaaugaauggucaggauauagcgggaguuuuguucagcauccagaacuaacagggcuggauuguauaagaccuugcuucuggguugaacuaaucagagggcgacccaaagagaacacaaucuggacuagcgggagcagcauauccuuuugugguguaaacagugacacuguggguuggucuuggccagacggugcugaguugccauuuaccauugacaaguaa

SEQ ID NO: 50343 - RNA, 1410 nt, Artificial Sequence
  derived and/or modified CDS sequence (wt) from neuraminidase__InfluenzaA__ADD97038
augaauccaaaccaaaagauaauaaccauugguucggucuguaugacaauuggaauggcuaacuuaauauuacaaauuggaaacauaaucucaauauggauuagccacucaauucaacuugggaaucaaaaucagauugaaacaugcaaucaaagcgucauuacuuaugaaaacaauacuuggguaaaucagacauauguuaacaucagcaacaccaacuuugcugcuggacagucagugguuuccgugaaauuagcgggcaauucuucucucugcccuguuaguggaugggcuauauacaguaaagacaacaguauaagaaucgguuccaagggggauguguuugucauaagggaaccauucauaucaugcucccccuuggaaugcagaaccuucuucuugacucaaggggccuugcuaaaugacaaacauuccaauggaaccauuaaagacaggagcccauaucgaacccuaaugagcuguccuauuggugaaguucccucuccauacaacucaagauuugagucagucgcuuggucagcaagugcuugucaugauggcaucaauuggcuaacaauuggaauuucuggcccagacaauggggcaguggcuguguuaaaguacaacggcauaauaacagacacuaucaagaguuggagaaacaauauauugagaacacaagagucugaaugugcauguguaaaugguucuugcuuuacuguaaugaccgauggaccaagugauggacaggccucauacaagaucuucagaauagaaaagggaaagauagucaaaucagucgaaaugaaugccccuaauuaucacuaugaggaaugcuccuguuauccugauucuagugaaaucacaugugugugcagggauaacuggcauggcucgaaucgaccgugggugucuuucaaccagaaucuggaauaucagauaggauacauaugcagugggauuuucggagacaauccacgcccuaaugauaagacaggcaguugugguccaguaucgucuaauggagcaaauggaguaaaaggauuuucauucaaauacggcaaugguguuuggauagggagaacuaaaagcauuaguucaagaaacgguuuugagaugauuugggauccgaacggauggauugggacagacaauaacuucucaauaaagcaagauaucguaggaauaaaugaguggucaggauauagcgggaguuuuguucaacauccagaacuaacagggcuggauuguauaagaccuugcuucuggguugaacuaaucagagggcgacccaaagagaacacaaucuggacuagcgggagcagcauauccuuuugugguguaaacagugacacuggggguuggucuuggccagacggugcugaguugccauuuaccauugacaaguaa

SEQ ID NO: 50344 - RNA, 1410 nt, Artificial Sequence
  derived and/or modified CDS sequence (wt) from neuraminidase__InfluenzaA__ADD97048
augaauccaaaccaaaagauaauaaccauugguucggucuguaugacaauuggaauggcuaacuuaauauuacaaauuggaaacauaaucucaauauggauuagccacucaauucaacuugggaaucaaaaucagauugaaacaugcaaucaaagcgucauuacuuaugaaaacaacacuuggguaaaucagacauauguuaacaucagcaacaccaacuuugcugcuggacagucagugguuuccgugaaauuagcgggcaauuccucucucugcccuguuaguggaugggcuauauacaguaaagacaacaguauaagaaucgguuccaagggggauguguuugucauaagggaaccauucauaucaugcucccccuuggaaugcagaaccuucuucuugacucaaggggccuugcuaaaugacaaacauuccaauggaaccauuaaagacaggagcccauaucgaacccuaaugagcuguccuauuggugaaguucccucuccauacaauucaagauuugagucagucgcuuggucagcaagugcuugucaugauggcaucaauuggcuaacaauuggaauuucuggcccagacaauggggcaguggcuguguuaaaguacaacggcauaauaacagacacuaucaagaguuggagaaacaauauauugagaacacaagagucugaaugugcauguguaaaugguucuugcuuuacuguaaugaccgauggaccaagugauggacaggccucauacaagaucuucagaauagaaaagggaaagauagucaaaucagucgaaaugaaugccccuaauuaucacuaugaggaaugcuccuguuauccugauucuagugaaaucacaugugugugcagggauaacuggcauggcucgaaucgaccgugggugucuuucaaccagaaucuggaauaucagauaggauacauaugcagugggauuuucggagacaauccacgcccuaaugauaagacaggcaguugugguccaguaucgucuaauggagcaaauggaguaaaaggauuuucauucaaauacggcaaugguguuuggauagggagaacuaaaagcauuaguucaagaaacgguuuugagaugauuugggauccgaacggauggacugggacagacaauaacuucucaauaaagcaagauaucguaggaauaaaugaguggucaggauauagcgggaguuuuguucagcauccagaacuaacagggcuggauuguauaagaccuugcuucuggguugaacuaaucagagggcgacccaaagagaacacaaucuggacuagcgggagcagcauauccuuuugugguguaaacagugacacuguggguuggucuuggccagacggugcugaguugccauuuaccauugacaaguaa

SEQ ID NO: 50345 - RNA, 1410 nt, Artificial Sequence
  derived and/or modified CDS sequence (wt) from neuraminidase__InfluenzaA__ADD97058
augaauccaaaccaaaagauaauaaccauugguucggucuguaugacaauuggaauggcuaacuuaauauuacaaauuggaaacauaaucucaauauggauuagccacucaauucaacuugggaaucaaaaucagauugaaacaugcaaucaaagcgucauuacuuaugaaaacaacacuuggguaaaucagacauauguuaacaucagcaacaccaacuuugcugcuggacagucagugguuuccgugaaauuagcgggcaauuccucucucugcccuguuaguggaugggcuauauacaguaaagacaacaguauaaggaucgguuccaagggggauguguuugucauaagggaaccauucauaucaugcucccccuuggaaugcagaaccuucuucuugacucaaggggccuugcuaaaugacaaacauuccaauggaaccauuaaagacaggagcccauaucgaacccuaaugagcuguccuauuggugaaguucccucuccauacaacucaagauuugagucagucgcuuggucagcaagugcuugucaugauggcaucaauuggcuaacaauuggaauuucuggcccagacaauggggcaguggcuguguuaaaguacaacggcauaauaacagacacuaucaagaguuggagaaacaauauauugagaacacaagagucugaaugugcauguguaaaugguucuugcuuuacuguaaugaccgauggaccaagugauggacaggccucauacaagaucuucagaauagaaaagggaaagauagucaaaucagucgaaaugaaugccccuaauuaucacuaugaggaaugcuccuguuauccugauucuagugaaaucacaugugugugcagggauaacuggcauggcucgaaucgaccgugggugucuuucaaccagaaucuggaauaucagauaggauacauaugcagugggauuuucggagacaauccacgcccuaaugauaagacaggcaguugugguccaguaucgucuaauggagcaaauggaguaaaaggauuuucauucaaauacggcaaugguguuuggauagggagaacuaaaagcauuaguucaagaaacgguuuugagaugauuugggauccgaacggauggacugggacagacaauaacuucucaauaaagcaagauaucguaggaauaaaugaguggucaggauauagcgggaguuuuguucagcauccagaacuaacagggcuggauuguauaagaccuugcuucuggguugaacuaaucagagggcgacccaaagagaacacaaucuggacuagcgggagcagcauauccuuuugugguguaaacagugacacuguggguuggucuuggccagacggugcugaguugccauuuaccauugacaaguaa

SEQ ID NO: 50346 - RNA, 1410 nt, Artificial Sequence
  derived and/or modified CDS sequence (wt) from neuraminidase__InfluenzaA__ADD97069
augaauccaaaccaaaagauaauaaccauugguucggucuguaugacaauuggaauggcuaacuuaauauuacaaauuggaaacauaaucucaauauggauuagccacucaauucaacuugggaaucaaaaucagauugaaacaugcaaucaaagcgucauuacuuaugaaaacaacacuuggguaaaucagacauauguuaacaucagcaacaccaacuuugcugcuggacagucagugguuuccgugaaauuagcgggcaauuccucucucugcccuguuaguggaugggcuauauacaguaaagacaacaguauaagaaucgguuccaagggggauguguuugucauaagggaaccauucauaucaugcucccccuuggaaugcagaaccuucuucuugacucaaggggccuugcuaaaugacaaacauuccaauggaaccauuaaagacaggagcccauaucgaacccuaaugagcuguccuauuggugaaguucccucuccauacaacucaagauuugagucagucgcuuggucagcaagugcuugucaugauggcaucaauuggcuaacaauuggaauuucuggcccagacaauggggcaguggcuguguuaaaguacaacggcauaauaacagacacuaucaagaguuggagaaacaauauauugagaacacaagagucugaaugugcauguguaaaugguucuugcuuuacuguaaugaccgauggaccaagugauggacaggccucauacaagaucuucagaauagaaaagggaaagauagucaaaucagucgaaaugaaugccccuaauuaucacuaugaggaaugcuccuguuauccugauucuagugaaaucacauguguaugcagggauaacuggcauggcucaaaucgaccgugggugucuuucaaccagaaucuggaauaucagauaggauacauaugcagugggauuuucggagacaauccacgcccuaaugauaagacaggcaguugugguccaguaucgucuaauggagcaaauggaguaaaaggauuuucauucaaauacggcaaugguguuuggauagggagaacuaaaagcauuaguucaagaaacgguuuugagaugauuugggauccgaacggauggacugggacagacaauaacuucucaauaaagcaagauaucguaggaauaaaugaguggucaggauauagcgggaguuuuguucagcauccagaacuaacagggcuggauuguauaagaccuugcuucuggguugaacuaaucagagggcgacccaaagagaacacaaucuggacuagcgggagcagcauauccuuuugugguguaaacagugacacuguggguuggucuuggccagacggugcugaguugccauuuaccauugacaaguaa

SEQ ID NO: 50347 - RNA, 1410 nt, Artificial Sequence; identical to SEQ ID NO: 50345
  derived and/or modified CDS sequence (wt) from neuraminidase__InfluenzaA__ADD97126

SEQ ID NO: 50348 - RNA, 1410 nt, Artificial Sequence; identical to SEQ ID NO: 49194
  derived and/or modified CDS sequence (wt) from neuraminidase__InfluenzaA__ADD97164

SEQ ID NO: 50349 - RNA, 1410 nt, Artificial Sequence; identical to SEQ ID NO: 50341
  derived and/or modified CDS sequence (wt) from neuraminidase__InfluenzaA__ADD97174

SEQ ID NO: 50350 - RNA, 1410 nt, Artificial Sequence; identical to SEQ ID NO: 48750
  derived and/or modified CDS sequence (wt) from neuraminidase__InfluenzaA__ADD97184

SEQ ID NO: 50351 - RNA, 1410 nt, Artificial Sequence
  derived and/or modified CDS sequence (wt) from neuraminidase__InfluenzaA__ADD97194
augaauccaaaccaaaagauaauaaccauugguucggucuguaugacaauuggaauggcuaacuuaauauuacaaauuggaaacauaaucucaauauggauuagccacucaauucaacuugggaaucaaaaucagauugaaacaugcaaucaaagcgucauuacuuaugaaaacaacacuuggguaaaucagacauauguuaacaucagcaacgccaacuuugcugcuggacagucagugguuuccgugaaauuagcgggcaauuccucucucugcccuguuaguggaugggcuauauacaguaaagacaacaguauaagaaucgguuccaagggggauguguuugucauaagggaaccauucauaucaugcucccccuuggaaugcagaaccuucuucuugacucaaggggccuugcuaaaugacaaacauuccaauggaaccauuaaagacaggagcccauaucgaacccuaaugagcuguccuauuggugaaguucccucuccauacaacucaagauuugagucagucgcuuggucagcaagugcuugucaugauggcaucaauuggcuaacaauuggaauuucuggcccagacaauggggcaguggcuguguuaaaguacaacggcauaauaacagacacuaucaagaguuggagaaacaauauauugagaacacaagagucugaaugugcauguguaaaugguucuugcuuuacuguaaugaccgauggaccaagugauggacaggccucauacaagaucuucagaauagaaaagggaaagauagucaaaucagucgaaaugaaugccccuaauuaucacuaugaggaaugcuccuguuauccugauucuagugaaaucacaugugugugcagggauaacuggcauggcucgaaucgaccgugggugucuuucaaccagaaucuggaauaucagauaggauacauaugcagugggauuuucggagacaauccacgcccuaaugauaagacaggcaguugugguccaguaucgucuaauggagcaaauggaguaaaaggauuuucauucaaauacggcaaugguguuuggauagggagaacuaaaagcauuaguucaagaaacgguuuugagaugauuugggauccgaacggauggacugggacagacaauaacuucucaauaaagcaagauaucguaggaauaaaugaguggucaggauauagcgggaguuuuguucagcauccagaacuaacagggcuggauuguauaagaccuugcuucuggguugaacuaaucagagggcgacccaaagagaacacaaucuggacuagcgggagcagcauauccuuuugugguguaaacagugacacuguggguuggucuuggccagacggugcugaguugccauuuaccauugacaaguaa

SEQ ID NO: 50352 - RNA, 1410 nt, Artificial Sequence
  derived and/or modified CDS sequence (wt) from neuraminidase__InfluenzaA__ADD97204
augaauccaaaccaaaagauaauaaccauugguucggucuguaugacaauuggaauggcuaacuuaauauuacaaauuggaaacauaaucucaauauggauuagccacucaauucaacuugggaaucaaaaucagauugaaacaugcaaucaaagcgucauuacuuaugaaaacaacacuuggguaaaucagacauauguuaacaucagcaacaccaacuuugcugcuggacagucagugguuuccgugaaauuagcgggcaauuccucucucugcccuguuaguggaugggcuauauacaguaaagacaacaguauaagaaucgguuccaagggggauguguuugucauaagggaaccauucauaucaugcucccccuuggaaugcagaaccuucuucuugacucaaggggccuugcuaaaugacaaacauuccaauggaaccauuaaagacaggagcucauaucgaacccuaaugagcuguccuauuggugaaguucccucuccauacaacucaagauuugagucagucgcuuggucagcaagugcuugucaugauggcaucaauuggcuaacaauuggaauuucuggcccagacaauggggcaguggcuguguuaaaguacaacggcauaauaacagacacuaucaagaguuggagaaacaauauauugagaacacaagagucugaaugugcauguguaaaugguucuuguuuuacuguaaugaccgauggaccaagugauggacaggccucauacaagaucuucagaauagaaaagggaaagauagucaaaucagucgaaaugaaugccccuaauuaucacuaugaggaaugcuccuguuauccugauucuagugaaaucacaugugugugcagggauaacuggcauggcucgaaucgaccgugggugucuuucaaccagaaucuggaauaucagauaggauacauaugcagugggauuuucggagacaauccacgcccuaaugauaagacaggcaguugugguccaguaucgucuaauggagcaaauggaguaaaaggauuuucauucaaauacggcaaugguguuuggauagggagaacuaaaagcauuaguucaagaaacgguuuugagaugauuugggauccgaacggauggacugggacagacaauaacuucucaauaaagcaagauaucguaggaauaaaugaguggucaggauauagcgggaguuuuguucagcauccagaacuaacagggcuggauuguauaagaccuugcuucuggguugaacuaaucagagggcgacccaaagagaacacaaucuggacuagcgggagcagcauauccuuuugugguguaaacagugacacuguggguuggucuuggccagacggugcugaguugccauuuaccauugacaaguaa

SEQ ID NO: 50353 - RNA, 1410 nt, Artificial Sequence; identical to SEQ ID NO: 48750
  derived and/or modified CDS sequence (wt) from neuraminidase__InfluenzaA__ADD97214

SEQ ID NO: 50354 - RNA, 1410 nt, Artificial Sequence
  derived and/or modified CDS sequence (wt) from neuraminidase__InfluenzaA__ADD97224
augaauccaaaccaaaagauaauaaccauugguucggucuguaugacaauuggaauggcuaacuuaauauuacaaauuggaaacauaaucucaauauggauuagccacucaauucaacuugggaaucaaaaucagauugaaacaugcaaucaaagcgucauuacuuaugaaaacaacacuuggguaaaucagacauauguuaacaucagcaacaccaacuuugcugcuggacagucagugguuuccgugaaauuagcgggcaauuccucucucugcccuguuaguggaugggcuauauacaguaaagacaacaguauaagaaucgguuccaagggggauguguuugucauaagggaaccauucauaucaugcucccccuuggaaugcagaaccuucuucuugacucaaggggccuugcuaaaugacaaacauuccaauggaaccauuaaagacaggagcccauaucgaacccuaaugagcuguccuauuggugaaguucccucuccauacaacucaagauuugagucagucgcuuggucagcaagugcuugucaugauggcaucaauuggcuaacaauuggaauuucuggcccagacaauggggcaguggcuguguuaaaguacaacggcauaauaacagacacuaucaagaguuggagaaacaauauauugagaacacaagagucugaaugugcauguguaaaugguucuugcuuuacuguaaugaccgauggaccaagugauggacaggccucauacaagaucuucagaauagaaaagggaaagauagucaaaucagucgaaaugaaugccccuaauuaucacuaugaggaaugcuccuguuauccugauucuagugaaaucacaugugugugcagggauaacuggcauggcucgaaucgaccgugggugucuuucaaccagaaucuggaauaucagauaggauacauaugcagugggauuuucggagacaauccacgcccuaaugauaagacaggcaguugugguccaguaucgucuaauggagcaaauggaguaaaaggauuuucauucaaauacggcaaugguguuuggauagggagaacuaaaagcauuaguucaagaaacgguuuugagaugauuugggauccgaacggauggacugggacagacaauaacuucucaauaaagcaagauaucguaggaauaaaugaguggucaggauauagcgggaguuuuguucagcauccagaacuaacagggcuggacuguauaagaccuugcuucuggguugaacuaaucagagggcgacccaaagagaacacaaucuggacuagcgggagcagcauauccuuuugugguguaaacagugacacuguggguuggucuuggccagacggugcugaguugccauuuaccauugacaaguaa

SEQ ID NO: 50355 - RNA, 1410 nt, Artificial Sequence; identical to SEQ ID NO: 48750
  derived and/or modified CDS sequence (wt) from neuraminidase__InfluenzaA__ADD97234

SEQ ID NO: 50356 - RNA, 1410 nt, Artificial Sequence; identical to SEQ ID NO: 50345
  derived and/or modified CDS sequence (wt) from neuraminidase__InfluenzaA__ADD97244

SEQ ID NO: 50357 - RNA, 1410 nt, Artificial Sequence; identical to SEQ ID NO: 50345
  derived and/or modified CDS sequence (wt) from neuraminidase__InfluenzaA__ADD97254

SEQ ID NO: 50358 - RNA, 1410 nt, Artificial Sequence; identical to SEQ ID NO: 48750
  derived and/or modified CDS sequence (wt) from neuraminidase__InfluenzaA__ADD97264

SEQ ID NO: 50359 - RNA, 1410 nt, Artificial Sequence; identical to SEQ ID NO: 50354
  derived and/or modified CDS sequence (wt) from neuraminidase__InfluenzaA__ADD97274

SEQ ID NO: 50360 - RNA, 1410 nt, Artificial Sequence
  derived and/or modified CDS sequence (wt) from neuraminidase__InfluenzaA__ADD97284
augaauccaaaccaaaagauaauaaccauugguucggucuguaugacaauuggaauggcuaacuuaauauuacaaauuggaaacauaaucucaauauggauuagccacucaauucaacuugggaaucaaaaucagauugaaacaugcaaucaaagcgucauuacuuaugaaaacaacacuuggguaaaucagacauauguuaacaucugcaacaccaacuuugcugcuggacagucagugguuuccgugaaauuagcgggcaauuccucucucugcccuguuaguggaugggcuauauacaguaaagacaacaguauaagaaucgguuccaagggggauguguuugucauaagggaaccauucauaucaugcucccccuuggaaugcagaaccuucuucuugacucaaggggccuugcuaaaugacaaacauuccaauggaaccauuaaagacaggagcccauaucgaacccuaaugagcuguccuauuggugaaguucccucuccauacaacucaagauuugagucagucgcuuggucagcaagugcuugucaugauggcaucaauuggcuaacaauuggaauuucuggcccagacaauggggcaguggcuguguuaaaguacaacggcauaauaacagacacuaucaagaguuggagaaacaauauauugagaacacaagagucugaaugugcauguguaaaugguucuugcuuuacuguaaugaccgauggaccaagugauggacaggccucauacaagaucuucagaauagaaaagggaaagauagucaaaucagucgaaaugaaugccccuaauuaucacuaugaggaaugcucuuguuauccugauucuagugaaaucacaugugugugcagggauaacuggcauggcucgaaucgaccgugggugucuuucaaccagaaucuggaauaucagauaggauacauaugcagugggauuuucggagacaauccacgcccuaaugauaagacaggcaguugugguccaguaucgucuaauggagcaaauggaguaaaaggauuuucauucaaauacggcaaugguguuuggauagggagaacuaaaagcauuaguucaagaaacgguuuugagaugauuugggauccgaacggauggacugggacagacaauaacuucucaauaaagcaagauaucguaggaauaaaugaguggucaggauauagcgggaguuuuguucagcauccagaacuaacagggcuggauuguauaagaccuugcuucuggguugaacuaaucagagggcgacccaaagagaacacaaucuggacuagcgggagcagcauauccuuuugugguguaaacagugacacuguggguuggucuuggccagacggugcugaguugccauuuaccauugacaaguaa

SEQ ID NO: 50361 - RNA, 1410 nt, Artificial Sequence; identical to SEQ ID NO: 48750
  derived and/or modified CDS sequence (wt) from neuraminidase__InfluenzaA__ADD97294

SEQ ID NO: 50362 - RNA, 1410 nt, Artificial Sequence
  derived and/or modified CDS sequence (wt) from neuraminidase__InfluenzaA__ADD97314
augaauccaaaccaaaagauaauaaccauugguucggucuguaugacaauuggaauggcuaacuuaauauuacaaauuggaaacauaaucucaauauggauuagccacucaauucaacuugggaaucaaaaucagauugaaacaugcaaucaaagcgucauuacuuaugaaaacaacacuuggguaaaucagacauauguuaacaucagcaacaccaacuuugcugcuggacagucagugguuuccgugaaauuagcgggcaauuccucucucugcccuguuaguggaugggcuauauacaguaaagacaacaguauaagaaucgguuccaagggggauguguuugucauaagggaaccauucauaucaugcucccccuuggaaugcagaaccuucuucuugacucaaggggccuugcuaaaugacaaacauuccaauggaaccauuaaagacaggagcccauaucgaacccuaaugagcuguccuauuggugaaguucccucuccauacaacucaagauuugagucagucgcuuggucagcaagugcuugucaugauggcaucaauuggcuaacaauuggaauuucuggcccagacaauggggcaguggcuguguuaaaguacaacggcauaauaacagacacuaucaagaguuggagaaacaauauauugagaacacaagagucugaaugugcauguguaaaugguucuugcuuuacuguaaugaccgauggaccaagugauggacaggccucauacaagaucuucagaauagaaaagggaaagauagucaaaucagucgaaaugaaugccccuaauuaucacuaugaggaaugcuccuguuauccugauucuagugaaaucacaugugugugcagggauaacuggcauggcucgaaucgaccgugggugucuuucaaccagaaucuggaauaucagauaggauacauaugcagugggauuuucggagacaauccacgcccuaaugauaagacaggcaguugugguccaguaucgucuaauggagcaaauggaguaaaaggauuuucauucaaauacggcaaugguguuuggauagggagaacuaaaagcauuaguucaagaaacgguuuugagaugauuugggauccgaacggauggacugggacagacaauaacuucucaauaaagcaagauaucguaggaacaaaugaguggucaggauauagcgggaguuuuguccagcauccagaacuaacagggcuggauuguauaagaccuugcuucuggguugaacuaaucagagggcgacccaaagagaacacaaucuggacuagcgggagcagcauauccuuuugugguguaaacagugacacuguggguuggucuuggccagacggugcugaguugccauuuaccauugacaaguaa

SEQ ID NO: 50363 - RNA, 1410 nt, Artificial Sequence; identical to SEQ ID NO: 49794
  derived and/or modified CDS sequence (wt) from neuraminidase__InfluenzaA__ADD97334

SEQ ID NO: 50364 - RNA, 1410 nt, Artificial Sequence; identical to SEQ ID NO: 48947
  derived and/or modified CDS sequence (wt) from neuraminidase__InfluenzaA__ADD97344

SEQ ID NO: 50365 - RNA, 1410 nt, Artificial Sequence; identical to SEQ ID NO: 49794
  derived and/or modified CDS sequence (wt) from neuraminidase__InfluenzaA__ADD97354

SEQ ID NO: 50366 - RNA, 1410 nt, Artificial Sequence
  derived and/or modified CDS sequence (wt) from neuraminidase__InfluenzaA__ADD97384
augaauccaaaccaaaagauaauaaccauugguucggucuguaugacaauuggaauggcuaacuuaauauuacaaauuggaaacauaaucucaauauggauuagccacacaauucaacuugggaaucaaaaucagauugaaacaugcaaucaaagcgucauuacuuaugaaaacaacacuuggguaaaucagacauauguuaacaucagcaacaccaacuuugcugcuggacagucagugguuuccgugaaauuagcgggcaauuccucucucugcccuguuaguggaugggcuauauacaguaaagacaacaguauaagaaucgguuccaagggggauguguuugucauaagggaaccauucauaucaugcucccccuuggaaugcagaaccuucuucuugacucagggggccuugcuaaaugacaaacauuccaauggaaccauuaaagacaggagcccauaucgaacccuaaugagcuguccuauuggugaaguucccucuccauacaacucaagauuugagucagucgcuuggucagcaagugcuugucaugauggcaucaauuggcuaacaauuggaauuucuggcccagacaauggggcaguggcuguguuaaaguacaacggcauaauaacagacacuaucaagaguuggagaaacaauauauugagaacacaagagucugaaugugcauguguaaaugguucuugcuuuacuguaaugaccgauggaccaagugauggacaggccucauacaagaucuucagaauagaaaagggaaagauagucaaaucagucgaaaugaaugccccuaauuaucacuaugaggaaugcuccuguuauccugauucuagugaaaucacaugugugugcagggauaacuggcauggcucgaaucgaccgugggugucuuucaaccagaaucuggaauaucagauaggauacauaugcagugggauuuucggagacaauccacgcccuaaugauaagacaggcaguugugguccaguaucgucuaauggagcaaauggaguaaaaggauuuucauucaaauacggcaaugguguuuggauagggagaacuaaaagcauuaguucaagaaacgguuuugagaugauuugggauccgaacggauggacugggacagacaauaacuucucaauaaagcaagauaucguaggaauaaaugaauggucaggauauagcgggaguuuuguucagcauccagaacuaacagggcuggauuguauaagaccuugcuucuggguugaacuaaucagagggcgacccaaagagaacacaaucuggacuagcgggagcagcauauccuuuugugguguaaacagugacacuguggguuggucuuggccagacggugcugaguugccauuuaccauugacaaguaa

SEQ ID NO: 50367 - RNA, 1410 nt, Artificial Sequence
  derived and/or modified CDS sequence (wt) from neuraminidase__InfluenzaA__ADD97394
augaauccaaaccaaaagauaauaaccauugguucggucuguaugacaauuggaauggcuaacuuaauauuacaaauuggaaacauaaucucaauauggauuagccacucaauucaacuugggaaucaaaaucagauugaaacaugcaaucaaagcgucauuacuuaugaaaacaacacuuggguaaaucagacauauguuaacaucagcaacaccaacuuugcugcuggacagccagugguuuccgugaaauuagcgggcaauuccucucucugcccuguuaauggaugggcuauauacaguaaagacaacaguauaagaaucgguuccaagggggauguguuugucauaagggaaccauucauaucaugcucccccuuggaaugcagaaccuucuucuugacucaaggggccuugcuaaaugacaaacauuccaauggaaccauuaaagacaggagcccauaucgaacccuaaugagcuguccuauuggugaaguucccucuccauacaacucaagauuugagucagucgcuuggucagcaagugcuugucaugauggcaucaauuggcuaacaauuggaauuucuggcccagacaauggggcaguggcuguguuaaaguacaacggcauaauaacagacacuaucaagaguuggagaaacaauauauugagaacacaagagucugaaugugcauguguaaaugguucuugcuuuacuguaaugaccgauggaccaagugauggacaggccucauacaagaucuucagaauagaaaagggaaagauagucaaaucagucgaaaugaaugccccuaauuaucacuaugaggaaugcuccuguuauccugauucuagugaaaucacaugugugugcagggauaacuggcauggcucgaaucgaccgugggugucuuucaaccagaaucuggaauaucagauaggauacauaugcagugggauuuucggagacaauccacgcccuaaugauaagacaggcaguugugguccaguaucgucuaauggagcaaauggaguaaaaggauuuucauucaaauacggcaaugguguuuggauagggagaacuaaaagcauuaguucaagaaacgguuuugagaugauuugggauccgaacggauggacugggacagacaauaacuucucaauaaagcaagauaucguaggaauaaaugaguggucaggauauagcgggaguuuuguucagcauccagaacuaacagggcuggauuguauaagaccuugcuucuggguugaacuaaucagagggcgacccaaagagaacacaaucuggacuagcgggagcagcauauccuuuugugguguaaacagugacacuguggguuggucuuggccagacggugcugaguugccauuuaccauugacaaguaa

SEQ ID NO: 50368 - RNA, 1410 nt, Artificial Sequence; identical to SEQ ID NO: 48947
  derived and/or modified CDS sequence (wt) from neuraminidase__InfluenzaA__ADD97404

SEQ ID NO: 50369 - RNA, 1410 nt, Artificial Sequence; identical to SEQ ID NO: 49794
  derived and/or modified CDS sequence (wt) from neuraminidase__InfluenzaA__ADD97424

SEQ ID NO: 50370 - RNA, 1410 nt, Artificial Sequence; identical to SEQ ID NO: 48750
  derived and/or modified CDS sequence (wt) from neuraminidase__InfluenzaA__ADD97434

SEQ ID NO: 50371 - RNA, 1410 nt, Artificial Sequence
  derived and/or modified CDS sequence (wt) from neuraminidase__InfluenzaA__ADD97444
augaauccaaaccaaaagauaauaaccauugguucggucuguaugacaauuggaauggcuaacuuaauauuacaaauuggaaacauaaucucaauauggauuagccacucaauucaacuugggaaucaaaaucagauugaaacaugcaaucaaagcgucauuacuuaugaaaacaacacuuggguaaaucagacauauguuaacaucagcaacaccaacuuugcugcuggacagucagugguuuccgugaaauuagcgggcaauuccucucucugcccuguuaguggaugggcuauauacaguaaagacaacaguauaagaaucgguuccaagggggauguguuugucauaagggaaccauucauaucaugcucccccuuggaaugcagaaccuucuucuugacucaaggggccuugcuaaaugacaaacauuccaauggaaccauuaaagacaggagcccauaucgaacccuaaugagcuguccuauuggugaaguucccucuccauacaacucaagauuugagucagucgcuuggucagcaagugcuugucaugauggcaucaauuggcuaacaauuggaauuucuggcccagacaauggggcaguggcuguguuaaaguacaacggcauaauaacagacacuaucaagaguuggagaaacaauauauugagaacacaagagucugaaugugcauguguaaaugguucuugcuuuacuguaaugaccgauggaccaagugauggacaggccucauacaagaucuucagaauagaaaagggaaagauagucaaaucagucgaaaugaaugccccuaauuaucacuaugaggaaugcucuuguuauccugauucuagugaaaucacaugugugugcagggauaacuggcauggcucgaaucgaccgugggugucuuucaaccagaaucuggaauaucagauaggauacauaugcagugggauuuucggagacaauccacgcccuaaugauaagacaggcaguugugguccaguaucgucuaauggagcaaauggaguaaaaggauuuucauucaaauacggcaaugguguuuggauagggagaacuaaaagcauuaguucaagaaacgguuuugagaugauuugggauccgaacggauggacugggacagacaauaacuucucaauaaagcaagauaucguaggaauaaaugaguggucaggauauagcgggaguuuuguccagcauccagaacuaacagggcuggauuguauaagaccuugcuucuggguugaacuaaucagagggcgacccaaagagaacacaaucuggacuagcgggagcagcauauccuuuugugguguaaacagugacacuguggguuggucuuggccagacggugcugaguugccauuuaccauugacaaguaa

SEQ ID NO: 50372 - RNA, 1410 nt, Artificial Sequence
  derived and/or modified CDS sequence (wt) from neuraminidase__InfluenzaA__ADD97454
augaauccaaaccaaaagauaauaaccauugguucggucuguaugacaauuggaauggcuaacuuaauauuacaaauuggaaacauaaucucaauauggauuagccacucaauucaacuugggaaucaaaaucagauugaaacaugcaaucaaagcgucauuacuuaugaaaacaacacuuggguaaaucagacauauguuaacaucagcaacaccaacuuugcugcuggacagucagugguuuccgugaaauuagcgggcaauuccucucucugcccuauuaguggaugggcuauauacaguaaagacaacaguauaagaaucgguuccaagggggauguguuugucauaagggaaccauucauaucaugcucccccuuggaaugcagaaccuucuucuugacucaaggggccuugcuaagugacaaacauuccaauggaaccauuaaagacaggagcccauaucgaacccuaaugagcuguccuauuggugaaguucccucuccauacaacucaagauuugagucagucgcuuggucagcaagugcuugucaugauggcaucaauuggcuaacaauuggaauuucuggcccagacaauggggcaguggcuguguuaaaguacaacggcauaauaacagacacuaucaagaguuggagaaacaauauauugagaacacaagagucugaaugugcauguguaaaugguucuugcuuuacuguaaugaccgauggaccaagugauggacaggccucauacaagaucuucagaauagaaaagggaaagauagucaaaucagucgaaaugaaugccccuaauuaucacuaugaggaaugcuccuguuauccugauucuagugaaaucacauguguaugcagggauaacuggcauggcucaaaucgaccgugggugucuuucaaccagaaucuggaauaucagauaggauacauaugcagugggauuuucggagacaauccacgcccuaaugauaagacaggcaguugugguccaguaucgucuaauggagcaaauggaguaaaaggauuuucauucaaauacggcaaugguguuuggauagggagaacuaaaagcauuaguucaagaaacgguuuugagaugauuugggauccgaacggauggacugggacagacaauaacuucucaauaaagcaagauaucguaggaauaaaugaguggucaggauauagcgggaguuuuguucagcauccagaacuaacagggcuggauuguauaagaccuugcuucuggguugaacuaaucagagggcgacccaaagagaacacaaucuggacuagcgggagcagcauauccuuuugugguguaaacagugacacuguggguuggucuuggccagacggugcugaguugccauuuaccauugacaaguaa

SEQ ID NO: 50373 - RNA, 1410 nt, Artificial Sequence
  derived and/or modified CDS sequence (wt) from neuraminidase__InfluenzaA__ADD97464
augaauccaaaccaaaagauaauaaccauugguucggucuguaugacaauuggaauggcuaacuuaauauuacaaauuggaaacauaaucucaauauggauuagccacucaauucaacuugggaaucaaaaucagauugaaacaugcaaucaaagcgucauuacuuaugaaaacaacacuuggguaaaucagacauauguuaacaucagcaacaccaacuuugcugcuggacagucagugguuuccgugaaauuagcgggcaauuccucucucugcccuguuaguggaugggcuauauacaguaaagacaacaguauaagaaucgguuccaagggggauguguuugucauaagggaaccauucauaucaugcucccccuuggaaugcagaaccuucuucuugacucaaggggccuugcuaaaugacaaacauuccaauggaaccauuaaagacaggagcccauaucgaacccuaaugagcuguccuauuggugaaguucccucuccauacaacucaagauuugagucagucgcuuggucagcaagugcuugucaugauggcaucaauuggcuaacaauuggaauuucuggcccagacaauggggcaguggcuguguuaaaguacaacggcauaauaacagacacuaucaagaguuggagaaacaauauauugagaacacaagagucugaaugugcauguguaaaugguucuugcuuuacuguaaugaccgauggaccaagugauggacaggccucauacaagaucuucagaauagaaaagggaaagauagucaaaucagucgaaaugaaugccccuaauuaucacuaugaggaaugcuccuguuauccugauucuagugaaaucacauguguaugcagggauaacuggcauggcucaaaucgaccgugggugucuuucaaccagaaucuggaauaucagauaggauacauaugcagugggauuuucggagacaauccacgcccuaaugauaagacaggcaguugugguccaguaucgucuaauggagcaaauggaguaaaaggauuuucauucaaauacggcaaugguguuuggauagggagaacuaaaagcauuaguucaagaaacgguuuugagaugauuugggauccgaacggauggacugggacagacaauaacuucucaacaaagcaagauaucguaggaauaaaugaguggucaggauauagcgggaguuuuguucagcauccagaacuaacagggcuggauuguauaagaccuugcuucuggguugaacuaaucagagggcgacccaaagagaacacaaucuggacuagcgggagcagcauauccuuuugugguguaaacagugacacuguggguuggucuuggccagacggugcugaguugccauuuaccauugacaaguaa

SEQ ID NO: 50374 - RNA, 1410 nt, Artificial Sequence
  derived and/or modified CDS sequence (wt) from neuraminidase__InfluenzaA__ADD97474
augaauccaaaccaaaagauaauaaccauugguucggucuguaugacaauuggaauggcuaacuuaauauuacaaauuggaaacauaaucucaauauggauuagccacucaauucaacuugggaaucaaaaucagauugaaacaugcaaucaaagcgucauuacuuaugaaaacaacacuuggguaaaucagacauauguuaacaucagcaacaccaacuuugcugcuggacagucagugguuuccgugaaauuagcgggcaauuccucucucugcccuguuaguggaugggcuauauacaguaaagacaacaguauaagaaucgguuccaagggggauguguuugucauaagggaaccauucauaucaugcucccccuuggaaugcagaaccuucuucuugacucaaggggccuugcuaaaugacaaacauuccaauggaaccauuaaagacaggagcccauaucgaacccuaaugagcuguccuauuggugaaguucccuccccauacaacucaagauuugagucagucgcuuggucagcaagugcuugucaugauggcaucaauuggcuaacaauuggaauuucuggcccagacaauggggcaguggcuguguuaaaguacaacggcauaauaacagacacuaucaagaguuggagaaacaauauauugagaacacaagagucugaaugugcauguguaaaugguucuugcuuuacuguaaugaccgauggaccaagugauggacaggccucauacaagaucuucagaauagaaaagggaaagauagucaaaucagucgaaaugaaugccccuaauuaucacuaugaggaaugcuccuguuauccugauucuagugaaaucacaugugugugcagggauaacuggcauggcucgaaucgaccgugggugucuuucaaccagaaucuggaauaucagauaggauacauaugcagugggauuuucggagacaauccacgcccuaaugauaagacaggcaguugugguccaguaucgucuaauggagcaaauggaguaaaaggauuuucauucaaauacggcaaugguguuuggauagggagaacuaaaagcauuaguucaagaaacgguuuugagaugauuugggauccgaacggauggacugggacagacaauaacuucucaauaaagcaagauaucguaggaauaaaugaguggucaggauauagcgggaguuuuguucagcauccagaacuaacagggcuggauuguauaagaccuugcuucuggguugaacuaaucagagggcgacccaaagagaacacaaucuggacuagcgggagcagcauauccuuuugugguguaaacagugacacuguggguuggucuuggccagacggugcugaguugccauuuaccauugacaaguaa

SEQ ID NO: 50375 - RNA, 1410 nt, Artificial Sequence; identical to SEQ ID NO: 48750
  derived and/or modified CDS sequence (wt) from neuraminidase__InfluenzaA__ADD97484

SEQ ID NO: 50376 - RNA, 1410 nt, Artificial Sequence
  derived and/or modified CDS sequence (wt) from neuraminidase__InfluenzaA__ADD97494
augaauccaaaccaaaagauaauaaccauugguucggucuguaugacaauuggaauggcuaacuuaauauuacaaauuggaaacauaaucucaauauggauuagccacucaauucaacuugggaaucaaaaucagauugaaacaugcaaucaaagcgucauuacuuaugaaaacaacacuuggguaaaucagacauauguuaacaucagcaacaccaacuuugcugcuggacagucagugguuuccgugaaauuagcgggcaauuccucucucugcccuguuaguggaugggcuauauacaguaaagacaacaguauaagaaucgguuccaagggggauguguuugucauaagggaaccauucauaucaugcucccccucggaaugcagaaccuucuucuugacucaaggggccuugcuaaaugacaaacauuccaauggaaccauuaaagacaggagcccauaucgaacccuaaugagcuguccuauuggugaaguucccucuccauacaacucaagauuugagucagucgcuuggucagcaagugcuugucaugauggcaucaauuggcuaacaauuggaauuucuggcccagacaauggggcaguggcuguguuaaaguacaacggcauaauaacagacacuaucaagaguuggagaaacaauauauugagaacacaagagucugaaugugcauguguaaaugguucuugcuuuacuguaaugaccgauggaccaagugauggacaggccucauacaagaucuucagaauagaaaagggaaagauagucaaaucagucgaaaugaaugccccuaauuaucacuaugaggaaugcuccuguuauccugauucuagugaaaucacaugugugugcagggauaacuggcauggcucgaaucgaccgugggugucuuucaaccagaaucuggaauaucagauaggauacauaugcagugggauuuucggagacaauccacgcccuaaugauaagacaggcaguugugguccaguaucgucuaauggagcaaauggaguaaaaggauuuucauucaaauacggcaaugguguuuggauagggagaacuaaaagcauuaguucaagaaacgguuuugagaugauuugggauccgaacggauggacugggacagacaauaacuucucaauaaagcaagauaucguaggaauaaaugaguggucaggauauagcgggaguuuuguucagcauccagaacuaacagggcuggauuguauaagaccuugcuucuggguugaacuaaucagagggcgacccaaagagaacacaaucuggacuagcgggagcagcauauccuuuugugguguaaacagugacacuguggguuggucuuggccagacggugcugaguugccauuuaccauugacaaguaa

SEQ ID NO: 50377 - RNA, 1410 nt, Artificial Sequence; identical to SEQ ID NO: 48750
  derived and/or modified CDS sequence (wt) from neuraminidase__InfluenzaA__ADD97504

SEQ ID NO: 50378 - RNA, 1410 nt, Artificial Sequence
  derived and/or modified CDS sequence (wt) from neuraminidase__InfluenzaA__ADD97514
augaauccaaaccaaaagauaauaaccauugguucggucuguaugacaauuggaauggcuaacuuaauauuacaaauuggaaacauaaucucaauauggauuagccacucaauucaacuugggaaucaaaaucagauugaaacaugcaaucaaagcgucauuacuuaugaaaacaacacuuggguaaaucagacauauguuaacaucagcaacaccaacuuugcugcuggacagucagugguuuccgugaaauuagcgggcaauuccucucucugcccuguuaguggaugggcuauauacaguaaagacaacaguauaagaaucgguuccaagggggauguguuugucauaagggaaccauucauaucaugcucccccuuggaaugcagaaccuucuucuugacucaaggggccuugcuaaaugacaaacauuccaauggaaccauuaaagacaggagcccauaucgaacccuaaugagcuguccuauuggugaaguucccucuccauacaacucaagauuugagucagucgcuuggucagcaagugcuugucaugauggcaucaauuggcuaacaauuggaauuucuggcccagacaauggggcaguggcuguguuaaaguacaacggcauaauaacagacacuaucaagaguuggagaaacaauauauugagaacacaagagucugaaugugcauguguaaaugguucuugcuuuacuguaaugaccgauggaccaagugauggacaggccucauacaagaucuucagaauagaaaagggaaagauagucaaaucagucgaaaugaaugccccuaauuaucacuaugaggaaugcuccuguuauccugauucuagugaaaucacaugcguaugcagagauaacuggcauggcucgaaucgaccgugggugucuuucaaccagaaucuggaauaucagauaggauacauaugcaguggaauuuucggagacaauccacgcccuaaugauaagacaggcaguugugguccaguaucgucuaauggagcaaauggaguaaaaggauuuucauucaaauacggcaaugguguuuggauagggagaacuaaaagcauuaguucaagaaacgguuuugagaugauuugggauccgaacggauggacugggacagacaauaacuucucaauaaagcaagauaucguaggaauaaaugaguggucaggauauagcgggaguuuuguucagcauccagaacuaacagggcuggauuguauaagaccuugcuucuggguugaacuaaucagagggcgacccaaagagaacacaaucuggacuagcgggagcagcauauccuuuugugguguaaacagugacacuguggguuggucuuggccagacggugcugaguugccauuuaccauugacaaguaa

SEQ ID NO: 50379 - RNA, 1410 nt, Artificial Sequence; identical to SEQ ID NO: 50362
  derived and/or modified CDS sequence (wt) from neuraminidase__InfluenzaA__ADD97534

SEQ ID NO: 50380 - RNA, 1410 nt, Artificial Sequence; identical to SEQ ID NO: 48947
  derived and/or modified CDS sequence (wt) from neuraminidase__InfluenzaA__ADD97544

SEQ ID NO: 50381 - RNA, 1410 nt, Artificial Sequence
  derived and/or modified CDS sequence (wt) from neuraminidase__InfluenzaA__ADD97554
augaauccaaaccaaaagauaauaaccauugguucggucuguaugacaauuggaauggcuaacuuaauauuacaaauuggaaacauaaucucaauauggauuagccacucaauucaacuugggaaucaaaaucagauugaaacaugcaaucaaagcgucauuacuuaugaaaacaacacuuggguaaaucagacauauguuaacaucagcaacaccaacuuugcugcuggacagucagugguuuccgugaaauuagcgggcaauuccucucucugcccuguuaguggaugggcuauauacaguaaagacaacaguauaagaaucgguuccaagggggauguguuugucauaagggaaccauucauaucaugcucccccuuggaaugcagaaccuucuucuugacucaaggggccuugcuaaaugacaaacauuccaauggaaccauuaaagacaggagcccauaucgaacccuaaugagcuguccuauuggugaaguucccucuccauacaacucaagauuugagucagucgcuuggucagcaagugcuugucaugauggcaucaauuggcuaacaauuggaauuucuggcccagacaauggggcaguggcuguguuaaaguacaacggcauaauaacagacacuaucaagaguuggagaaacaauauauugagaacacaagagucugaaugugcauguguaaaugguucuugcuuuacuguaaugaccgauggaccaagugauggacaggccucauacaagaucuucagaauagaaaagggaaagauagucaaaucagucgaaaugaaugccccuaauuaucacuaugaggaaugcuccuguuauccugauucuagugaaaucacaugugugugcagggauaacuggcauggcucgaaucgaccgugggugucuuucaaccagaaucuggaauaucagauaggauacauaugcagugggauuuucggagacaauccacgcccuaaugauaagacaggcaguugugguccaguaucgucuaauggagcaaauggaguaaaaggauuuucauucaaauacggcaaugguguuuggauagggagaacuaaaagcauuaguucaagaaacgguuuugagaugauuugggauccgaacggauggacugggacagacaauaacuucucaauaaagcaagauaucguaggaauaaaugaguggucaggauauagcgggaguuuuguucagcauccagaacuaacagggcuggauuguauaagaccuugcuucuggguugaacuaaucagagggcgacccaaggagaacacaaucuggacuagcgggagcagcauauccuuuugugguguaaacagugacacuguggguuggucuuggccagacggugcugaguugcccuuuaccauugacaaguaa

SEQ ID NO: 50382 - RNA, 1410 nt, Artificial Sequence; identical to SEQ ID NO: 50366
  derived and/or modified CDS sequence (wt) from neuraminidase__InfluenzaA__ADD97564

SEQ ID NO: 50383 - RNA, 1410 nt, Artificial Sequence; identical to SEQ ID NO: 48750
  derived and/or modified CDS sequence (wt) from neuraminidase__InfluenzaA__ADD97574

SEQ ID NO: 50384 - RNA, 1410 nt, Artificial Sequence; identical to SEQ ID NO: 48750
  derived and/or modified CDS sequence (wt) from neuraminidase__InfluenzaA__ADD97584

SEQ ID NO: 50385 - RNA, 1410 nt, Artificial Sequence
  derived and/or modified CDS sequence (wt) from neuraminidase__InfluenzaA__ADD97681
augaauccaaaccaaaagauaauaaccauugguucggucuguaugacaauuggaauggcuaacuuaauauuacaaauuggaaacauaaucucaauauggauuagccacucaauucaacuugggaaucaaaaucagauugaaacaugcaaucaaagcgucauuacuuaugaaaacaacacuuggguaaaucagacauauguuaacaucagcaacaccaacuuugcugcuggacagucagugguuuccgugaaauuagcgggcaauuccucucucugcccuguuaguggaugggcuauauacaguaaagacaacaguauaagaaucgguuccaagggggauguguuugucauaagggaaccauucauaucaugcucccccuuggaaugcagaaccuucuucuugacucaaggggccuugcuaaaugacaaacauuccaauggaaccauuaaagacaggagcccauaucgaacccuaaugagcuguccuauuggugaaguucccucuccauacaacucaagauuugagucagucgcuuggucagcaagugcuugucaugauggcaucaauuggcuaacaauuggaauuucuggcccagacaauggggcaguggcuguguuaaaguacaacggcauaauaacagacacuaucaagaguuggagaaacaauauauugagaacacaagagucugaaugugcauguguaaaugguucuugcuuuacuguaaugaccgauggaccaagugauggacaggccucauacaagaucuucagaauagaaaagggaaagauagucaaaucagucgaaauaaaugccccuaauuaucacuaugaggaaugcuccuguuauccugauucuagugaaaucacaugugugugcagggauaacuggcauggcucgaaucgaccgugggugucuuucaaccagaaucuggaauaucagauaggauacauaugcagugggauuuucggagacaauccacgcccuaaugauaagacaggcaguugugguccaguaucgucuaauggagcaaauggaguaaaaggauuuucauucaaauacggcaaugguguuuggauagggagaacuaaaagcauuaguucaagaaacgguuuugagaugauuugggauccgaauggauggacugggacagacaauaacuucucaauaaagcaagauaucguaggaauaaaugaauggucaggauauagcgggaguuuuguucagcacccagaacuaacagggcuggauuguauaagaccuugcuucuggguugaacuaaucagagggcgacccaaagagaacacaaucuggacuagcgggagcagcauauccuuuugugguauaaacagugacacuguggguuggucuuggccagacggugcugaguugccauuuaccauugacaaguaa

SEQ ID NO: 50386 - RNA, 1410 nt, Artificial Sequence
  derived and/or modified CDS sequence (wt) from neuraminidase__InfluenzaA__ADD97691
augaauccaaaccaaaagauaauaaccauugguucggucuguaugacaauuggaauggcuaacuuaauauuacaaauuggaaacauaaucucaauauggauuagccacucaauucaacuugggaaucaaaaucagauugaaacaugcaaucaaagcgucauuacuuaugaaaacaacacuuggguaaaucagacauauguuaacaucagcaacaccaacuuugcugcuggacagucagugguuuccgugaaauuagcgggcaauuccucucucugcccuguuaguggaugggcuauauacaguaaagacaacaguauaagaaucgguuccaagggggauguguuugucauaagggaaccauucauaucaugcucccccuuggaaugcagaaccuucuucuugacucaaggggccuugcuaaaugacaaacauuccaauggaaccauuaaagacaggagcucauaucgaacccuaaugagcuguccuauuggugaaguucccucuccauacaacucaagauuugagucagucgcuuggucagcaagugcuugucaugauggcaucaauuggcuaacaauuggaauuucuggcccagacaauggggcaguggcuguguuaaaguacaacggcauaauaacagacacuaucaagaguuggagaaacaauauauugagaacacaagagucugaaugugcauguguaaaugguucuuguuuuacuguaaugaccgauggaccaagugauggacaggccucauacaagaucuucagaauagaaaagggaaagauagucaaaucagucgaaaugaaugccccuaauuaucacuaugaggaaugcuccuguuauccugauucuagugaaaucacaugugugugcagggauaacuggcauggcucgaaucgaccgugggugucuuucaaccagaaucuggaauaucagauaggauacauaugcagugggauuuucggagacaauccacgcccuaaugauaagacaggcaguugugguccaguaucgucuaauggagcaaauggaguaaaaggauuuucauucaaauauggcaaugguguuuggauagggagaacuaaaagcauuaguucaagaaacgguuuugagaugauuugggauccgaacggauggacugggacagacaauaacuucucaauaaagcaagauaucguaggaauaaaugaguggucaggauauagcgggaguuuuguucagcauccagaacuaacagggcuggauuguauaagaccuugcuucuggguugaacuaaucagagggcgacccaaagagaacacaaucuggacuagcgggagcagcauauccuuuugugguguaaacagugacacuguggguuggucuuggccagacggugcugaguugccauuuaccauugacaaguaa

SEQ ID NO: 50387 - RNA, 1410 nt, Artificial Sequence; identical to SEQ ID NO: 49887
  derived and/or modified CDS sequence (wt) from neuraminidase__InfluenzaA__ADD97701

SEQ ID NO: 50388 - RNA, 1410 nt, Artificial Sequence
  derived and/or modified CDS sequence (wt) from neuraminidase__InfluenzaA__ADD97891
augaauccaaaccaaaagauaauaaccauugguucggucuguaugacaauuggaauggcuaacuuaauauuacaaauuggaaacauaaucucaauauggauuagccacucaauucaacuugggaaucaaaaucagauugaaacaugcaaccaaagcgucauuacuuaugaaaacaacacuuggguaaaucagacauauguuaacaucagcaacaccaacuuugcugcuggacagucagugguuuccgugaaauuagcgggcaauuccucucucugcccuguuaguggaugggcuauauacaguaaagacaacaguauaagaaucgguuccaagggggauguguuugucauaagggaaccauucauaucaugcucccccuuggaaugcagaaccuucuucuugacucaaggggccuugcuaaaugacaaacauuccaauggaaccauuaaagacaggagcccauaucgaacccuaaugagcuguccuauuggugaaguucccucuccauacaacucaagauuugagucagucgcuuggucagcaagugcuugucaugauggcaucaauuggcuaacaauuggaauuucuggcccagacaauggggcaguggcuguguuaaaguacaacggcauaauaacagacacuaucaagaguuggagaaacaauauauugagaacacaagagucugaaugugcauguguaaaugguucuugcuuuacuguaaugaccgauggaccaagugauggacaggccucauacaagaucuucagaauagaaaagggaaagauagucaaaucagucgaaaugaaugccccuaauuaucacuaugaggaaugcuccuguuauccugauucuagugaaaucacaugugugugcagggauaacuggcauggcucgaaucgaccgugggugucuuucaaccagaaucuggaauaucagauaggauacauaugcagugggauuuucggagacaauccacgcccuaaugauaagacaggcaguugugguccaguaucgucuaauggagcaaauggaguaaaaggauuuucauucaaauacggcaaugguguuuggauagggagaacuaaaagcauuaguucaagaaacgguuuugagaugauuugggauccgaacggauggacugggacagacaauaacuucucaauaaagcaagauaucguaggaauaaaugaguggucaggauauagcgggaguuuuguucagcauccagaacuaacagggcuggauuguauaagaccuugcuucuggguugaacuaaucagagggcgacccaaagagaacacaaucuggacuagcgggagcagcauauccuuuugugguguaaacagugacacuguggguuggucuuggccagacggugcugaguugccauuuaccauugacaaguaa

SEQ ID NO: 50389 - RNA, 1410 nt, Artificial Sequence; identical to SEQ ID NO: 48947
  derived and/or modified CDS sequence (wt) from neuraminidase__InfluenzaA__ADD97901

SEQ ID NO: 50390 - RNA, 1410 nt, Artificial Sequence; identical to SEQ ID NO: 50378
  derived and/or modified CDS sequence (wt) from neuraminidase__InfluenzaA__ADD97911

SEQ ID NO: 50391 - RNA, 1410 nt, Artificial Sequence
  derived and/or modified CDS sequence (wt) from neuraminidase__InfluenzaA__ADD97921
augaauccaaaccaaaagauaauaaccauugguucggucuguaugacaauuggaauggcuaacuuaauauuacaaauuggaaacauaaucucaauauggauuagccacucaauucaacuugggaaucaaaaucagauugaaacaugcaaucaaagcgucauuacuuaugaaaacaacacuuggguaaaucagacauauguuaacaucagcaacaccaacuuugcugcuggacagucagugguuuccgugaaauuagcgggcaauuccucucucugcccuguuaguggaugggcuauauacaguaaagacaacaguauaagaaucgguuccaagggggauguguuugucauaagggaaccauucauaucaugcucccccuuggaaugcagaaccuucuucuugacucaaggggccuugcuuaaugacaaacauuccaauggaaccauuaaagacaggagcccauaucgaacccuaaugagcuguccuauuggugaaguucccucuccauacaacucaagauuugagucagucgcuuggucagcaagugcuugucaugauggcaucaauuggcuaacaauuggaauuucuggcccagacaauggggcaguggcuguguuaaaguacaacggcauaauaacagacacuaucaagaguuggagaaacaauauauugagaacacaagagucugaaugugcauguguaaaugguucuugcuuuacuguaaugaccgauggaccaagugauggacaggccucauacaagaucuucagaauagaaaagggaaagauagucaaaucagucgaaaugaaugccccuaauuaucacuaugaggaaugcuccuguuauccugauucuagugaaaucacaugugugugcagggauaacuggcauggcucgaaucgaccgugggugucuuucaaccagaaucuggaauaucagauaggauacauaugcagugggauuuucggagacaauccacgcccuaaugauaagacaggcaguugugguccaguaucgucuaauggagcaaauggaguaaaaggauuuucauucaaauacggcaaugguguuuggauagggagaacuaaaagcauuaguucaagaaacgguuuugagaugauuugggauccgaacggauggacugggacagacaauaacuucucaauaaagcaagauaucguaggaauaaaugaauggucaggauauagcgggaguuuuguucagcauccagaacuaacagggcuggauuguauaagaccuugcuucuggguugaacuaaucagagggcgacccaaagagaacacaaucuggacuagcgggagcagcauauccuuuugugguguaaacagugacacuguggguuggucuuggccagacggugcugaguugccauuuaccauugacaaguaa

SEQ ID NO: 50392 - RNA, 1410 nt, Artificial Sequence
  derived and/or modified CDS sequence (wt) from neuraminidase__InfluenzaA__ADD97931
augaauccaaaccaaaagauaauaaccauugguucggucuguaugacaauuggaauggcuaacuuaauauuacaaauuggaaacauaaucucaauauggauuagccacucaauucaacuugggaaucaaaaucagauugaaacaugcaaucaaagcgucauuacuuaugaaaacaacacuuggguaaaucagacauauguuaacaucagcaacaccaacuuugcugcuggacagucagugguuuccgugaaauuagcgggcaauuccucucucugcccuguuaguggaugggcuauauacaguaaagacaacaguauaagaaucgguuccaagggggauguguuugucauaagggaaccauucauaucaugcucccccuuggaaugcagaaccuucuucuugacucaaggggccuugcugaaugacaaacauuccaauggaaccauuaaagacaggagcccauaucgaacccuaaugagcuguccuauuggugaaguucccucuccauacaacucaagauuugagucagucgcuuggucagcaagugcuugucaugauggcaucaauuggcuaacaauuggaauuucuggcccagacaauggggcaguggcuguguuaaaguacaacggcauaauaacagacacuaucaagaguuggagaaacaauauauugagaacacaagagucugaaugugcauguguaaaugguucuugcuuuacuguaaugaccgauggaccaagugauggacaggccucauacaagaucuucagaauagaaaagggaaagauagucaaaucagucgaaaugaaugccccuaauuaucacuaugaggaaugcuccuguuauccugauucuagugaaaucacaugugugugcagggauaacuggcauggcucgaaucgaccgugggugucuuucaaccagaaucuggaauaucagauaggauacauaugcagugggauuuucggagacaauccacgcccuaaugacaagacaggcaguugugguccaguaucgucuaauggagcaaauggaguaaaaggauuuucauucaaauacggcaaugguguuuggauagggagaacuaaaagcauuaguucaagaaacgguuuugagaugauuugggauccgaacggauggacugggacagacaauaacuucucaauaaagcaagauaucguaggaauaaaugaguggucaggauauagcgggaguuuuguucagcauccagaacuaacagggcuggauuguauaagaccuugcuucuggguugaacuaaucagagggcgacccaaagagaacacaaucuggacuagcgggagcagcauauccuuuugugguguaaacagugacacuguggguuggucuuggccagacggugcugaguugccauuuaccauugacaaguaa

SEQ ID NO: 50393 - RNA, 1410 nt, Artificial Sequence
  derived and/or modified CDS sequence (wt) from neuraminidase__InfluenzaA__ADD97941
augaauccaaaccaaaagauaauaaccauugguucggucuguauaacaauuggaauggcuaacuuaauauuacaaauuggaaacauaaucucaauauggauuagccacucaauucaacuugggaaucaaaaucagauugaaacaugcaaucaaagcgucauuacuuaugaaaacaacacuuggguaaaucagacauauguuaacaucagcaacaccaacuuugcugcuggacagucagugguuuccgugaaauuagcgggcaauuccucucucugcccuguuaguggaugggcuauauacaguaaagacaacaguauaagaaucgguuccaagggggauguguuugucauaagggaaccauucauaucaugcucccccuuggaaugcagaaccuucuucuugacucaaggggccuugcuaaaugacaaacauuccaauggaaccauuaaagacaggagcccauaucgaacccuaaugagcuguccuauuggugaaguucccucuccauacaacucaagauuugagucagucgcuuggucagcaagugcuugucaugauggcaucaauuggcuaacaauuggaauuucuggcccagacaauggggcaguggcuguguuaaaguacaacggcauaauaacagacacuaucaagaguuggagaaacaauauauugagaacacaagagucugaaugugcauguguaaaugguucuugcuuuacuguaaugaccgauggaccaagugauggacaggccucauacaagaucuucagaauagaaaagggaaagauagucaaaucagucgaaaugaaugccccuaauuaucacuaugaggaaugcucuuguuauccugauucuagugaaaucacaugugugugcagggauaacuggcauggcucgaaucgaccgugggugucuuucaaccagaaucuggaauaucagauaggauacauaugcagugggauuuucggagacaauccacgcccuaaugauaagacaggcaguugugguccaguaucgucuaauggagcaaauggaguaaaaggauuuucauucaaauacggcaaugguguuuggauagggagaacuaaaagcauuaguucaagaaacgguuuugagaugauuugggauccgaacggauggacugggacagacaauaacuucucaauaaagcaagauaucguaggaauaaaugaguggucaggauauagcgggaguuuuguccagcauccagaacuaacagggcuggauuguauaagaccuugcuucuggguugaacuaaucagagggcgacccaaagagaacacaaucuggacuagcgggagcagcauauccuuuugugguguaaacagugacacuguggguuggucuuggccagacggugcugaguugccauuuaccauugacaaguaa

SEQ ID NO: 50394 - RNA, 1410 nt, Artificial Sequence
  derived and/or modified CDS sequence (wt) from neuraminidase__InfluenzaA__ADD97951
augaauccaaaccaaaagauaauaaccauuaguucggucuguaugacaauuggaauggcuaacuuaauauuacaaauuggaaacauaaucucaauauggauuagccacucaauucaacuugggaaucaaaaucagauugaaacaugcaaucaaagcgucauuacuuaugaaaacaacacuuggguaaaucagacauauguuaacaucagcaacaccaacuuugcugcuggacagucagugguuuccgugaaauuagcgggcaauuccucucucugcccuguuaguggaugggcuauauacaguaaagacaacaguauaagaaucgguuccaagggggauguguuugucauaagggaaccauucauaucaugcucccccuuggaaugcagaaccuucuucuugacucaaggggccuugcuaaaugacaaacauuccaauggaaccaucaaagacaggagcccauaucgaacccuaaugagcuguccuauuggugaaguucccucuccauacaacucaagauuugagucagucgcuuggucagcaagugcuugucaugauggcaucaauuggcuaacaauuggaauuucuggcccagacaauggggcaguggcuguguuaaaguacaacggcauaauaacagacacuaucaagaguuggagaaacaauauauugagaacacaagagucugaaugugcauguguaaaugguucuugcuuuacuguaaugaccgauggaccaagugauggacaggccucauacaagaucuucagaauagaaaagggaaagauagucaaaucagucgaaaugaaugccccuaauuaucacuaugaggaaugcuccuguuauccugauucuagugaaaucacaugugugugcagggauaacuggcauggcucgaaucgaccgugggugucuuucaaccagaaucuggaauaucagauaggauacauaugcagugggauuuucggagacaauccacgcccuaaugauaagacaggcaguugugguccaguaucgucuaauggagcaaauggaguaaaaggauuuucauucaaauacggcaaugguguuuggauagggagaacuaaaagcauuaguucaagaaacgguuuugagaugauuugggauccgaacggauggacugggacagacaauaacuucucaauaaagcaagauaucguaggaauaaaugaguggucaggauauagcgggaguuuuguucagcauccagaacuaacagggcuggauuguauaagaccuugcuucuggguugaacuaaucagagggcgacccaaagagaacacaaucuggacuagcgggagcagcauauccuuuugugguguaaacagugacacuguggguuggucuuggccagacggugcugaguugccauuuaccauugacaaguaa

SEQ ID NO: 50395 - RNA, 1410 nt, Artificial Sequence
  derived and/or modified CDS sequence (wt) from neuraminidase__InfluenzaA__ADD97961
augaauccaaaccaaaagauaauaaccauugguucggucuguaugacaauugggaugguuaacuuaauauuacaaauuggaaacauaaucucaauauggauuagccacucaauucaacuugggaaucaaaaucagauugaaacaugcaaucaaagcgucauuacuuaugaaaacaacacuuggguaaaucagacauauguuaacaucagcaacaccaacuuugcugcuggacagucagugguuuccgugaaauuagcgggcaaugccucucucugcccuguuaguggaugggcuauauacaguaaagacaacaguauaagaaucgguuccaagggggauguguuugucauaagggaaccauucauaucaugcucccccuuggaaugcagaaccuucuucuugacucaaggggccuugcuaaaugacaaacauuccaauggaaccauuaaagacaggagcccauaucgaacccuaaugagcuguccuauuggugaaguucccucuccauacaacucaagauuugagucagucgcuuggucagcaagugcuugucaugauggcaucaauuggcuaacaauuggaauuucuggcccagacaauggggcaguggcuguguuaaaguacaacggcauaauaacagacacuaucaagaguuggagaaacaauauauugagaacacaagagucugaaugugcauguguaaaugguucuugcuuuacuguaaugaccgauggaccaagugauggacaggccucauacaagaucuucagaauagaaaagggaaagauagucaaaucagucgaaaugaaugccccuaauuaucacuaugaggaaugcuccuguuauccugauucuagugaaaucacaugugugugcagggauaacuggcauggcucgaaucgaccgugggugucuuucaaccagaaucuggaauaucagauaggauacauaugcagugggauuuucggagacaauccacgcccuaaugauaagacaggcaguugugguccaguaucgucuaauggagcaaacggaguaaaaggauuuucauucaaauacggcaaugguguuuggauagggagaacuaaaagcauuaguucaagaaacgguuuugagaugauuugggauccgaacggauggacugggacagacaauaacuucucaauaaagcaagauaucguaggaauaaaugaauggucaggauauagcgggaguuuuguucagcauccagaacuaacagggcuggauuguauaagaccuugcuucuggguugaacuaaucagagggcgacccaaagagaacacaaucuggacuagcgggagcagcauauccuuuugugguguaaacagugacacuguggguuggucuuggccagacggugcugaguugccauuuaccauugacaaguaa

SEQ ID NO: 50396 - RNA, 1410 nt, Artificial Sequence; identical to SEQ ID NO: 50386
  derived and/or modified CDS sequence (wt) from neuraminidase__InfluenzaA__ADD97971

SEQ ID NO: 50397 - RNA, 1410 nt, Artificial Sequence; identical to SEQ ID NO: 48947
  derived and/or modified CDS sequence (wt) from neuraminidase__InfluenzaA__ADD97981

SEQ ID NO: 50398 - RNA, 1410 nt, Artificial Sequence
  derived and/or modified CDS sequence (wt) from neuraminidase__InfluenzaA__ADD97991
augaauccaaaccaaaagauaauaaccauugguucggucuguaugacaauuggaauggcuaacuuaauauuacaaauuggaaacauaaucucaauauggauuagccacucaauucaacuugggaaucaaaaucagauugaaacaugcaaucaaagcgucauuacuuaugaaaacaauacuuggguaaaucagacauauguuaacaucagcaacaccaacuuugcugcuggacagucagugguuuccgugaaauuagcgggcaauucuucucucugcccuguuaguggaugggcuauauacaguaaagacaacaguauaagaaucgguuccaagggggauguguuugucauaagggaaccauucauaucaugcucccccuuggaaugcagaaccuucuucuugacucaaggggccuugcuaaaugacaaacauuccaauggaaccauuaaagacaggagcccauaucgaacccuaaugagcuguccuauuggugaaguucccucuccauacaacucaagauuugagucagucgcuuggucagcaagugcuugucaugauggcaucaauuggcuaacaauuggaauuucuggcccagacaauggggcaguggcuguguuaaaguacaacggcauaauaacagacacuaucaagaguuggagaaacaauauauugagaacacaagagucugaaugugcauguguaaaugguucuugcuuuacuguaaugaccgauggaccaagugauggacaggccucauacaagaucuucagaauagaaaagggaaagauagucaaaucagucgaaaugaaugccccuaauuaucacuaugaggaaugcuccuguuauccugauucuagugaaaucacaugugugugcagggauaacuggcauggcucgaaucgaccgugggugucuuucaaccagaaucuggaauaucagauaggauacauaugcagugggauuuucggagacaauccacgcccuaaugauaagacaggcaguugugguccaguaucgucuaauggagcaaauggaguaaaaggauuuucauucaaauacggcaaugguguuuggauagggagaacuaaaagcauuaguucaagaaacgguuuugagaugauuugggauccgaacggauggauugggacagacaauaacuucucaauaaagcaagauaucguaggaauaaaugaguggucaggauauagcgggaguuuuguucaacauccagaacuaacagggcuggauuguauaagaccuugcuucuggguugaacuaaucagagggcgacccaaagagaacacaaucuggacuagcgggagcagcauauccuuuugugguguaaacagugacacuguggguuggucuuggccagacggugcugaguugccauuuaccauugacaaguaa

SEQ ID NO: 50399 - RNA, 1410 nt, Artificial Sequence
  derived and/or modified CDS sequence (wt) from neuraminidase__InfluenzaA__ADD98001
augaauccaaaccaaaagauaauaaccauugguucggucuguaugacaauuggaauggcuaacuuaauauuacaaauuggaaacauaaucucaauauggauuagccacucaauucaacuugggaaucaaaaucagauugaaacaugcaaucaaagcgucauuacuuaugaaaacaacacuuggguaaaucagacauauguuaacaucagcaacaccaacuuugcugcuggacagucagugguuuccgugaaauuagcgggcaauuccucucucugcccuguuaguggaugggcuauauacaguaaagacaacaguauaagaaucgguuccaagggggauguguuugucauaagggaaccauucauaucaugcucccccuuggaaugcagaaccuucuucuugacucaaggggccuugcuaaaugacaaacauuccaauggaaccauuaaagacaggagcccauaucgaacccuaaugagcuguccuauuggugaaguucccucuccauacaacucaagauuugagucagucgcuuggucagcaagugcuugucaugauggcaucaauuggcuaacaauuggaauuucuggcccagacaauggggcaguggcuguguuaaaguacaacggcauaauaacagacacugucaagaguuggagaaacaauauauugagaacacaagagucugaaugugcauguguaaaugguucuugcuuuacuguaaugaccgauggaccaagugauggacaggccucauacaagaucuucagaauagaaaagggaaagauagucaaaucagucgaaaugaaugccccuaauuaucacuaugaggaaugcuccuguuauccugauucuagugaaaucacaugugugugcagggauaacuggcauggcucgaaucgaccgugggugucuuucaaccagaaucuggaauaucagauaggauacauaugcagugggauuuucggagacaauccacgcccuaaugauaagacaggcaguugugguccaguaucgucuaauggagcaaauggaguaaaaggauuuucauucaaauacggcaaugguguuuggauagggagaacuaaaagcauuaguucaagaaacgguuuugagaugauuugggauccgaacggauggacugggacagacaauaacuucucaauaaagcaagauauaguaggaauaaaugaguggucaggauauagcgggaguuuuguucagcauccagaacuaacagggcuggauuguauaagaccuugcuucuggguugaacuaaucagagggcgacccaaagagaacacaaucuggacuagcgggagcagcauauccuuuugugguguaaacagugacacuguggguuggucuuggccagacggugcugaguugccauuuaccauugacaaguaa

SEQ ID NO: 50400 - RNA, 1410 nt, Artificial Sequence
  derived and/or modified CDS sequence (wt) from neuraminidase__InfluenzaA__ADD98011
augaauccaaaccaaaagauaauaaccauugguucggucuguaugacaauuggaauggcuaacuuaauauuacaaauuggaaacauaaucucaauauggauuagccacucaauucaacuugggaaucaaaaucagauugaaacaugcaaucaaagcgucauuacuuaugaaaacaacacuuggguaaaucagacauauguuaacaucagcaacaccaacuuugcugcuggacagucagugguuuccgugaaauuagcgggcaauuccucucucugcccuguuaguggaugggcuauauacaguaaagacaacaguauaagaaucgguuccaagggggauguguuugucauaagggaaccauucauaucaugcucccccuuggaaugcagaaccuucuucuugacucaaggggccuugcuaaaugacaaacauuccaauggaaccauuaaagacaggagcccauaucgaacccuaaugagcuguccuauuggugaaguucccucuccauacaacucaagauuugagucagucgcuuggucagcaagugcuugucaugauggcaucaauuggcuaacaauuggaauuucuggcccagacaauggggcaguggcuguguuaaaguacaacggcauaauaacagacacuaucaagaguuggagaaacaauauauugagaacacaagagucugaaugugcauguguaaaugguucuugcuuuacuguaaugaccgauggaccaagugauggacaggccucauacaagaucuucagaauagaaaagggaaagauagucaaaucagucgaaaugaaugccccuaauuaucacuaugaggaaugcuccuguuauccugauucuagugaaaucacaugugugugcagggauaacuggcauggcucgaaucgaccgugggugucuuucaaccagaaucuggaauaucagauaggauacauaugcagugggauuuucggagacaauccacgcccuaaugauaagacaggcaguugugguccaguaucgucuaauggagcaaauggaguaaaaggauuuucauucaaauacggcaaugguguuuggauagggagaacuaaaagcauuagcucaagaaacgguuuugagaugauuugggauccgaacggauggacugggacagacaauaacuucucaauaaagcaagauaucguaggaauaaaugaguggucaggauauagcgggaguuuuguucagcauccagaacuaacagggcuggauuguauaagaccuugcuucuggguugaacuaaucagagggcgacccaaagagaacacaaucuggacuagcgggagcagcauauccuuuugugguguaaacagugacacuguggguuggucuuggccagacggugcugaguugccauuuaccauugacaaguaa

SEQ ID NO: 50401 - RNA, 1410 nt, Artificial Sequence; identical to SEQ ID NO: 48814
  derived and/or modified CDS sequence (wt) from neuraminidase__InfluenzaA__ADD98031

SEQ ID NO: 50402 - RNA, 1410 nt, Artificial Sequence; identical to SEQ ID NO: 50399
  derived and/or modified CDS sequence (wt) from neuraminidase__InfluenzaA__ADD98041

SEQ ID NO: 50403 - RNA, 1410 nt, Artificial Sequence; identical to SEQ ID NO: 48947
  derived and/or modified CDS sequence (wt) from neuraminidase__InfluenzaA__ADD98051

SEQ ID NO: 50404 - RNA, 1410 nt, Artificial Sequence; identical to SEQ ID NO: 48750
  derived and/or modified CDS sequence (wt) from neuraminidase__InfluenzaA__ADD98061

SEQ ID NO: 50405 - RNA, 1410 nt, Artificial Sequence; identical to SEQ ID NO: 48750
  derived and/or modified CDS sequence (wt) from neuraminidase__InfluenzaA__ADD98071

SEQ ID NO: 50406 - RNA, 1410 nt, Artificial Sequence
  derived and/or modified CDS sequence (wt) from neuraminidase__InfluenzaA__ADD98081
augaauccaaaccaaaagauaauaaccauugguucggucuguaugacaauuggaauggcuaacuuaauauuacaaauuggaaacauaaucucaauauggauuagccacucaauucaacuugggaaucaaaaucagauugaaacaugcaaucaaagcgucauuacuuaugaaaacaacacuuggguaaaucagacauauguuaacaucagcaacaccaacuuugcugcuggacagucagugguuuccgugaaauuagcgggcaauuccucucucugcccuguuaguggaugggcuauauacaguaaagacaacaguauaagaaucgguuccaagggggauguguuugucauaagggaaccauucauaucaugcucccccuuggaaugcagaaccuucuucuugacucaaggggcauugcuaaaugacaaacauuccaauggaaccauuaaagacaggagcccauaucgaacccuaaugagcuguccuauuggugaaguucccucuccauacaacucaagauuugagucagucgcuuggucagcaagugcuugucaugauggcaucaauuggcuaacaauuggaauuucuggcccagacaauggggcaguggcuguguuaaaguacaacggcauaauaacagacacuaucaagaguuggagaaacaauauauugagaacacaagagucugaaugugcauguguaaaugguucuugcuuuacuguaaugaccgauggaccaagugauggacaggccucauacaagaucuucagaauagaaaagggaaagauagucaaaucagucgaaaugaaugccccuaauuaucacuaugaggaaugcuccuguuauccugauucuagugaaaucacaugugugugcagggauaacuggcauggcucgaaucgaccgugggugucuuucaaccagaaucuggaauaucagauaggauacauaugcagugggauuuucggagacaauccacgcccuaaugauaagacaggcaguugugguccaguaucgucuaauggagcaaauggaguaaaaggauuuucauucaaauacggcaaugguguuuggauagggagaacuaaaagcauuaguucaagaaacgguuuugagaugauuugggauccgaacggauggacugggacagacaauaacuucucaauaaagcaagauaucguaggaauaaaugaguggucaggauauagcgggaguuuuguucagcauccagaacuaacagggcuggauuguauaagaccuugcuucuggguugaacuaaucagagggcgacccaaagagaacacaaucuggacuagcgggagcagcauauccuuuugugguguaaacagugacacuguggguuggucuuggccagacggugcugaguugccauuuaccauugacaaguaa

SEQ ID NO: 50407 - RNA, 1410 nt, Artificial Sequence
  derived and/or modified CDS sequence (wt) from neuraminidase__InfluenzaA__ADD98091
augaauccaaaccaaaagauaauaaccauugguucggucuguaugacaauuggaauggcuaacuuaauauuacaaauuggaaacauaaucucaauauggauuagccacucaauucaacuugggaaucaaaaucagauugaaacaugcaaucaaagcgucauuacuuaugaaaacaacacuuggguaaaucagacauauguuaacaucagcaacaccaacuuugcugcuggacagucagugguuuccgugaaauuagcgggcaauuccucucucugcccuguuaguggaugggcuauauacaguaaagacaacaguauaagaaucgguuccaagggggauguguuugucauaagggaaccauucauaucaugcucccccuuggaaugcagaaccuucuucuugacucaaggggccuugcuaaaugacaaacauuccaauggaaccauuaaagacaggagcccauaucgaacccuaaugagcuguccuauuggugaaguucccucuccauacaacucaagauuugagucagucgcuuggucagcaagugcuugucaugauggcaucaauuggcuaacaauuggaauuucuggcccagacaauggggcaguggcuguguuaaaguacaacggcauaauaacagacacuaucaagaguuggagaaacaauauauugagaacacaagagucugaaugugcauguguaaaugguucuugcuuuacuguaaugaccgauggaccaagugauggacaagccucauacaagaucuucagaauagaaaagggaaagauagucaaaucagucgaaaugaaugccccuaauuaucacuaugaggaaugcuccuguuauccugauucuagugaaaucacaugugugugcagggauaacuggcauggcucgaaucgaccgugggugucuuucaaccagaaucuggaauaucagauaggauacauaugcagugggauuuucggagacaauccacgcccuaaugauaagacaggcaguugugguccaguaucgucuaauggagcaaauggaguaaaaggauuuucauucaaauacggcaaugguguuuggauagggagaacuaaaagcauuaguucaagaaacgguuuugagaugauuugggauccgaacggauggacugggacagacaauaacuucucaauaaagcaagauaucguaggaauaaaugaauggucaggauauagcgggaguuuuguucagcauccagaacuaacagggcuggauuguauaagaccuugcuucuggguugaacuaaucagagggcgacccaaagagaacacaaucuggacuagcgggagcagcauauccuuuugugguguaaacagugacacuguggguuggucuuggccagacggugcugaguugccauuuaccauugacaaguaa

SEQ ID NO: 50408 - RNA, 1410 nt, Artificial Sequence
  derived and/or modified CDS sequence (wt) from neuraminidase__InfluenzaA__ADD98101
augaauccaaaccaaaagauaauaaccauugguucggucuguaugacaauuggaauggcuaacuuaauauuacaaauuggaaacauaaucucaauauggauuagccacucaauucaacuugggaaucaaaaucagauugaaacaugcaaucaaagcgucauuacuuaugaaaacaacacuuggguaaaucagacauauguuaacaucagcaacaccaacuuugcugcuggacagucagugguuuccgugaaauuagcgggcaauuccucucucugcccuguuaguggaugggcuauauacaguaaagacaacaguauaagaaucgguuccaagggggauguguuugucauaagggaaccauucauaucaugcucccccuuggaaugcagaaccuucuucuugacucaaggggccuugcuaaaugacaaacauuccaauggaaccauuaaagacaggagcccauaucgaacccuaaugagcuguccuauuggugaaguucccucuccauacaacucaagauuugagucagucgcuuggucagcaagugcuugucaugauggcaucaauuggcuaacaauuggaauuucuggcccaaacaauggggcaguggcuguguuaaaguacaacggcauaauaacagacacuaucaagaguuggagaaacaauauauugagaacacaagagucugaaugugcauguguaaaugguucuugcuuuacuguaaugaccgauggaccaagugauggacaggccucauacaagaucuucagaauagaaaagggaaagauagucaaaucugucgaaaugaaugccccuaauuaucacuaugaggaaugcuccuguuauccugauucuagugaaaucacaugugugugcagggauaacuggcauggcucgaaucgaccgugggugucuuucaaccagaaucuggaauaucagauaggauacauaugcagugggauuuucggagacaauccacgcccuaaugauaagacaggcaguugugguccaguaucgucuaauggagcaaauggaguaaaaggauuuucauucaaauacggcaaugguguuuggauagggagaacuaaaagcauuaguucaagaaacgguuuugagaugauuugggauccgaacggauggacugggacagacaauaacuucucaauaaagcaagauaucguaggaauaaaugaguggucaggauauagcgggaguuuuguucagcauccagaacuaacagggcuggauuguauaagaccuugcuucuggguugaacuaaucagagggcgacccaaagagaacacaaucuggacuagcgggagcagcauauccuuuugugguguaaacagugacacuguggguuggucuuggccagacggugcugaguugccauuuaccauugacaaguaa

SEQ ID NO: 50409 - RNA, 1410 nt, Artificial Sequence
  derived and/or modified CDS sequence (wt) from neuraminidase__InfluenzaA__ADD98111
augaauccaaaccaaaagauaauaaccauugguucggucuguaugacaauuggaauggcuaacuuaauauuacaaauuggaaacauaaucucaauauggauuagccacucaauucaacuugggaaucaaaaucagauugaaacaugcaaucaaagcgucauuacuuaugaaaacaacacuuggguaaaucagacauauguuaacaucagcaacaccaacuuugcugcuggacagucagugguuuccgugaaauuagcgggcaauuccucucucugcccuguuaguggaugggcuauauacaguaaagacaacaguauaagaaucgguuccaagggggauguguuugucauaagggaaccauucauaucaugcucccccuuggaaugcagaaccuucuucuugacucaaggggccuugcuaaaugacaaacauuccaauggaaccauuaaagacaggagcccauaucgaacccuaaugagcuguccuauuggugaaguucccucuccauacaacucaagauuugagucagucgcuuggucagcaagugcuugucaugauggcaucaauuggcuaacaauuggaauuuccggcccagacaauggggcaguggcuguguuaaaguacaacggcauaauaacagacacuaucaagaguuggagaaacaauauauugagaacacaagagucugaaugugcauguguaaaugguucuugcuuuacuguaaugaccgauggaccaagugauggacaggccucauacaagaucuucagaauagaaaagggaaagauagucaaaucagucgaaaugaaugccccuaauuaucacuaugaggaaugcuccuguuauccugauucuagugaaaucacaugugugugcagggauaacuggcauggcucgaaucgaccgugggugucuuucaaccagaaucuggaauaucagauaggauacauaugcagugggauuuuaggagacaauccacgcccuaaugauaagacaggcaguugugguccaguaucgucuaauggagcaaauggaguaaaaggauuuucauucaaauacggcaaugguguuuggauagggagaacuaaaagcauuaguucaagaaacgguuuugagaugauuugggauccgaacggauggacugggacagacaauaacuucucaauaaagcaagauaucguaggaauaaaugaguggucaggauauagcgggaguuuuguucagcauccagaacuaacagggcuggauuguauaagaccuugcuucuggguugaacuaaucagagggcgacccaaagagaacacaaucuggacuagcgggagcagcauauccuuuugugguguaaacagugacacuguggguuggucuuggccagacggugcugaguugccauuuaccauugacaaguaa

SEQ ID NO: 50410 - RNA, 1410 nt, Artificial Sequence
  derived and/or modified CDS sequence (wt) from neuraminidase__InfluenzaA__ADD98121
augaauccaaaccaaaagauaauaaccauugguucggucuguaugacaauuggaauggcuaacuuaauauuacaaauuggaaacauaaucucaauauggauuagccacucaauucaacuugggaaucaaaaucagauugaaacaugcaaucaaagcgucauuacuuaugaaaacaacacuuggguaaaucagacauauguuaacaucagcaacaccaacuuugcugcuggacagucagugguauccgugaaauuagcgggcaauuccucucucugcccuguuaguggaugggcuauauacaguaaagacaacaguauaagaaucgguuccaagggggauguguuugucauaagggaaccauucauaucaugcucccccuuggaaugcagaaccuucuucuugacucaaggggccuugcuaaaugacaaacauuccaauggaaccauuaaagacaggagcccauaucgaacccuaaugagcuguccuauuggugaaguucccucuccauacaacucaagauuugagucagucgcuuggucagcaagugcuugucaugauggcaucaauuggcuaacaauuggaauuucuggcccagacaauggggcaguggcuguguuaaaguacaacggcauaauaacagacacuaucaagaguuggagaaacaauauauugagaacacaagagucugaaugugcauguguaaaugguucuugcuuuacuguaaugaccgauggaccaagugauggacaggccucauacaagaucuucagaauagaaaagggaaagauagucaaaucagucgaaaugaaugccccuaauuaucacuaugaggaaugcuccuguuauccugauucuagugaaaucacaugugugugcagggauaacuggcauggcucgaaucgaccgugggugucuuucaaccagaaucuggaauaucagauaggauacauaugcagugggauuuucggagacaauccacgcccuaaugauaagacaggcaguugugguccaguaucgucuaauggagcaaauggaguaaaaggauuuucauucaaauacggcaaugguguuuggauagggagaacuaaaagcauuaguucaagaaacgguuuugagaugauuugggauccgaacggauggacugggacagacaauaacuucucaauaaagcaagauaucguaggaauaaaugaguggucaggauauagcgggaguuuuguucagcauccagaacuaacagggcuggauuguauaagaccuugcuucuggguugaacuaaucagagggcgacccaaagagaacacaaucuggacuagcgggagcagcauauccuuuugugguguaaacagugacacuguggguuggucuuggccagacggugcugaguugccauuuaccauugacaaguaa

SEQ ID NO: 50411 - RNA, 1410 nt, Artificial Sequence; identical to SEQ ID NO: 48750
  derived and/or modified CDS sequence (wt) from neuraminidase__InfluenzaA__ADD98131

SEQ ID NO: 50412 - RNA, 1410 nt, Artificial Sequence; identical to SEQ ID NO: 48750
  derived and/or modified CDS sequence (wt) from neuraminidase__InfluenzaA__ADD98141

SEQ ID NO: 50413 - RNA, 1410 nt, Artificial Sequence; identical to SEQ ID NO: 50407
  derived and/or modified CDS sequence (wt) from neuraminidase__InfluenzaA__ADD98151

SEQ ID NO: 50414 - RNA, 1410 nt, Artificial Sequence
  derived and/or modified CDS sequence (wt) from neuraminidase__InfluenzaA__ADD98161
augaauccaaaccaaaagauaauaaccauugguucggucuguaugacaauuggaauggcuaacuuaauauuacaaauuggaaacauaaucucaauauggauuagccacacaauucaacuugggaaucaaaaucagauugaaacaugcaaucaaagcgucauuacuuaugaaaacaacacuuggguaaaucagacauauguuaacaucagcaacaccaacuuugcugcuggacagucagugguuuccgugaaauuagcgggcaauuccucucucugcccuguuaguggaugggcuauauacaguaaagacaacaguauaagaaucgguuccaagggggauguguuugucauaagggaaccauucauaucaugcucccccuuggaaugcagaaccuucuucuugacucagggggccuugcuaaaugacaaacauuccaauggaaccauuaaagacaggagcccauaucgaacccuaaugagcuguccuauuggugaaguucccucuccauacaacucaagauuugagucagucgcuuggucagcaagugcuugucaugauggcaucaauuggcuaacaauuggaauuucuggcccagacaauggggcaguggcuguguuaaaguacaacggcauaauaacagacacuaucaagaguuggagaaacaauauauugagaacacaagagucugaaugugcauguguaaaugguucuugcuuuacuguaaugaccgauggaccaagugauggacaggccucauacaagaucuucagaauagaaaagggaaagauagucaaaucagucgaaaugaaugccccuaauuaucacuaugaggaaugcuccuguuauccugauucuagugaaaucacaugugugugcagggauaacuggcauggcucgaaucgaccgugggugucuuucaaccagaaucuggaauaucagauaggauacauaugcagugggauuuucggagacaauccacgcccuaaugauaagacaggcaguugugguccaguaucgucuaauggagcaaauggaguaaaaggauuuucauucaaauacggcaaugguguuuggauagggagaacuaaaagcauuaguucaagaaacgguuuugagaugauuugggauccgaacggauggacuaggacagacaauaacuucucaauaaagcaagauaucguaggaauaaaugaauggucaggauauagcgggaguuuuguucagcauccagaacuaacagggcuggauuguauaagaccuugcuucuggguugaacuaaucagagggcgacccaaagagaacacaaucuggacuagcgggagcagcauauccuuuugugguguaaacagugacacuguggguuggucuuggccagacggugcugaguugccauuuaccauugacaaguaa

SEQ ID NO: 50415 - RNA, 1410 nt, Artificial Sequence
  derived and/or modified CDS sequence (wt) from neuraminidase__InfluenzaA__ADD98171
augaauccaaaccaaaagauaauaaucauugguucggucuguaugacaauuggaauggcuaacuuaauauuacaaauuggaaacauaaucucaauauggauuagccacucaauucaacuugggaaucaaaaucagauugaaacaugcaaucaaagcgucauuacuuaugaaaacaacacuuggguaaaucagacauauguuaacaucagcaacaccaacuuugcugcuggacagacagugguuuccgugaaauuagcgggcaauuccucucucugcccuguuaguggaugggcuauauacaguaaagacaacaguauaagaaucgguuccaagggggauguguuugucauaagggaaccauucauaucaugcucccccuuggaaugcagaaccuucuucuugacucaaggggccuugcuaaaugacaaacauuccaauggaaccauuaaagacaggagcccauaucgaacccuaaugagcuguccuauuggugaaguucccucuccauacaacucaagauuugagucagucgcuuggucagcaagugcuugucaugauggcaucaauuggcuaacaauuggaauuucuggcccagacaauggggcaguggcuguguuaaaguacaacggcauaauaacagacacuaucaagaguuggagaaacaauauauugagaacacaagagucugaaugugcauguguaaaugguucuugcuuuacuguaaugaccgauggaccaagugauggacaggccucauacaagaucuucagaauagaaaagggaaagauagucaaaucagucgaaaugaaugccccuaauuaucacuaugaggaaugcuccuguuauccugauucuagugaaaucacaugugugugcagggauaacuggcauggcucgaaucgaccgugggugucuuucaaccagaaucuggaauaucagauaggauacauaugcagugggauuuucggagacaauccacgcucuaaugauaagacaggcaguugugguccaguaucgucuaauggagcaaauggaguaaaaggauuuucauucaaauacggcaaugguguuuggauagggagaacuaaaagcauuaguucaagaaacgguuuugagaugauuugggauccgaacggauggacugggacagacaauaacuucucaauaaagcaagauaucguaggaauaaaugaguggucaggauauagcgggaguuuuguucagcauccagaacuaacagggcuggauuguauaagaccuugcuucuggguugaacuaaucagagggcgacccaaagagaacacaaucuggacuagcgggagcagcauauccuuuugugguguaaacagugacacuguggguuggucuuggccagacggugcugaguugccauuuaccauugacaaguaa

SEQ ID NO: 50416 - RNA, 1410 nt, Artificial Sequence
  derived and/or modified CDS sequence (wt) from neuraminidase__InfluenzaA__ADD98181
augaauccaaaccaaaagauaauaaccauugguucggucuguaugacaauuggaauggcuaacuuaauauuacaaauuggaaacaugaucucaauauggauuagccacucaauucaacuugagaaucaaaaucagauugaaacaugcaaucaaagcgucauuacuuaugaaaacaacacuuggguaaaucagacauauguuaacaucagcaacaccaacuuugcugcuggacagucagugguuuccgugaaauuagcgggcaauuccucucucugcccuguuaguggaugggcuauauacaguaaagacaacaguauaagaaucgguuccaagggggauguguuugucauaagggaaccauucauaucaugcucccccuuggaaugcagaaccuucuucuugacucaaggggccuugcuaaaugacaaacauuccaauggaaccauuaaagacaggagcccauaucgaacccuaaugagcuguccuauuggugaaguucccucuccauacaacucaagauuugagucagucgcuuggucagcaagugcuugucaugauggcaucaauuggcuaacaauuggaauuucuggcccagacaauggggcaguggcuguguuaaaguacaacggcauaauaacagacacuaucaagaguuggagaaacaauauauugagaacacaagagucugaaugugcauguguaaaugguucuugcuuuacuguaaugaccgauggaccaagugauggacaggccucauacaagaucuucagaauagaaaagggaaagauagucaaaucagucgaaaugaaugccccuaauuaucacuaugaggaaugcuccuguuauccugauucuagugaaaucacaugugugugcagggauaacuggcauggcucgaaucgaccgugggugucuuucaaccagaaucuggaauaucagauaggauacauaugcagugggauuuucggagacaauccacgcccuaaugauaagacaggcagcugugguccaguaucgucuaauggagcaaauggaguaaaaggauuuucauucaaauacggcaaugguguuuggauagggagaacuaaaagcauuaguucaagaaacgguuuugagaugauuugggauccgaacggauggacugggacagacaauaacuucucaauaaagcaagauaucguaggaauaaaugaguggucaggauauagcgggaguuuuguucagcauccagaacuaacagggcuggauuguauaagaccuugcuucuggguugaacuaaucagagggcgacccaaagagaacacaaucuggacuagcgggagcagcauauccuuuugugguguaaacagugacacuguggguuggucuuggccagacggugcugaguugccauuuaccauugacaaguaa

SEQ ID NO: 50417 - RNA, 1410 nt, Artificial Sequence
  derived and/or modified CDS sequence (wt) from neuraminidase__InfluenzaA__ADD98201
augaauccaaaccaaaagauaauaaccauugguucggucuguaugacaauuggaauggcuaacuuaauauuacaaauuggaaacauaaucucaauauggauuagccacucaauucaacuuggaaaucaaaaucagauugaaacaugcaaucaaagcgucauuacuuaugaaaacaacacuuggguaaaucagacauauguuaacaucagcaacaccaacuuugcugcuggacagucagugguuuccgugaaauuagcgggcaauuccucucucugcccuguuaguggaugggcuauauacaguaaagacaacaguauaagaaucgguuccaagggggauguguuugucauaagggaaccauucauaucaugcucccccuuggaaugcagaaccuucuucuugacucaaggggccuugcuaaaugacaaacauuccaauggaaccauuaaagacaggagcccauaucgaacccuaaugagcuguccuauuggugaaguucccucuccauacaacucaagauuugagucagucgcuuggucagcaagugcuugucaugauggcaucaauuggcuaacaauuggaauuucuggcccagacaauggggcaguggcuguguuaaaguacaacggcauaauaacagacacuaucaagaguuggagaaacaauauauugagaacacaagagucugaaugugcauguguaaaugguucuugcuuuacuguaaugaccgauggaccaagugauggacaggccucauacaagaucuucagaauagaaaagggaaagauagucaaaucagucgaaaugaaugccccuaauuaucacuaugaggaaugcuccuguuauccugauucuagugaaaucacaugugugugcagggauaacuggcauggcucgaaucgaccgugggugucuuucaaccagaaucuggaauaucagauaggauacauaugcagugggauuuucggagacaauccacgcccuaaugauaagacaggcaguugugguccaguaucgucuaauggagcaaacggaguaaaaggauuuucauucaaauacggcaaugguguuuggauagggagaacuaaaagcauuaguucaagaaacgguuuugagaugauuugggauccgaacggauggacugggacagacaauaacuucucaauaaagcaagauaucguaggaauaaaugaauggucaggauauagcgggaguuuuguucagcauccagaacuaacagggcuggauuguauaagaccuugcuucuggguugaacuaaucagagggcgacccaaagagaacacaaucuggacuagcgggagcagcauauccuuuugugguguaaacagugacacuguggguuggucuuggccagacggugcugaguugccauuuaccauugacaaguaa

SEQ ID NO: 50418 - RNA, 1410 nt, Artificial Sequence
  derived and/or modified CDS sequence (wt) from neuraminidase__InfluenzaA__ADD98211
augaauccaaaccaaaagauaauaaccauugguucggucuguaugacaauuggaauggcuaacuuaauauuacaaauuggaaacauaaucucaauauggauuagccacucaauucaacuugggaaucaaaaucagauugaaacaugcaaucaaagcgucauuacuuaugaaaacaacacuuggguaaaucagacauauguuaacaucagcaacaccaacuuugcugcuggacagucagugguuuccgugaaauuagcgggcaauuccucucucugcccuguuaguggaugggcuauauacaguaaagacaacaguauaagaaucgguuccaagggggauguguuugucauaagggaaccauucauaucaugcucccccuuggaaugcagaaccuucuucuugacucaaggggccuugcuaaaugacaaacauuccaauggaaccauuaaagacaggagcccauaucgaacccuaaugagcuguccuauuggugaaguucccucuccauacaacucaagauuugagucagucgcuuggucagcaagugcuugucaugauggcaucaauuggcuaacaauuggaauuucuggcccagacaauggggcaguggcuguguuaaaguacaacggcauaauaacagacacuaucaagagcuggagaaacaacauauugagaacacaagagucugaaugugcauguguaaaugguucuugcuuuacuguaaugaccgauggaccaagugauggacaggccucauacaagaucuucagaauagaaaagggaaagauagucaaaucagucgaaaugaaugccccuaauuaucacuaugaggaaugcuccuguuauccugauucuagugaaaucacaugugugugcagggauaacuggcauggcucgaaucgaccgugggugucuuucaaccagaaucuggaauaucagauaggauacauaugcagugggauuuucggagacaauccacgcccuaaugauaagacaggcaguugugguccaguaucgucuaauggagcaaauggaguaaaaggauuuucauucaaauacggcaaugguguuuggauagggagaacuaaaagcauuaguucaagaaacgguuuugagaugauuugggauccgaacggauggacugggacagacaauaacuucucaauaaagcaagauaucguaggaauaaaugaguggucaggauauagcgggaguuuuguucagcauccagaacuaacagggcuggauuguauaagaccuugcuucuggguugaacuaaucagagggcgacccaaagagaacacaaucuggacuagcgggagcagcauauccuuuugugguguaaacagugacacuguggguuggucuuggccagacggugcugaguugccauuuaccauugacaaguaa

SEQ ID NO: 50419 - RNA, 1410 nt, Artificial Sequence
  derived and/or modified CDS sequence (wt) from neuraminidase__InfluenzaA__ADE20324
augaauccaaaccaaaagauaauaaccauugguucggucuguaugacaauuggaauggcuaacuuaauauuacaaauuggaaacauaaucucaauauggauuagccacucaauucaacuugggaaucaaaaucagauugaaacaugcaaucaaagcgucauuacuuaugaaaacaacacuuggguaaaucagacauauguuaacaucagcaacaccaacuuugcugcuggacagucagugguuuccgugaaauuagugggcaauuccucucucugcccuguuaguggaugggcuauauacaguaaagacaacaguguaagaaucgguuccaagggggauguguuugucauaagggaaccauucauaucaugcucccccuuggaaugcagaaccuucuucuugacucaaggggccuugcuaaaugacaaacauuccaauggaaccauuaaagacaggagcccauaucgaacccuaaugagcuguccuauuggugaaguucccucuccauacaacucaagauuugagucagucgcuuggucagcaagugcuugucaugauggcaucaauuggcuaacaauuggaauuucuggcccagacaauggggcaguggcuguguuaaaguacaacggcauaauaacagacacuaucaagaguuggagaaacaauauauugagaacacaagagucugaaugugcauguguaaaugguucuugcuuuacuguaaugaccgauggaccaaguaauggacaggccucauacaagaucuucagaauagaaaagggaaagauagucaaaucagucgaaaugaaugccccuaauuaucacuaugaggagugcuccuguuauccugauucuagugaaaucacaugugugugcagggauaacuggcauggcucgaaucgaccgugggugucuuucaaccagaaucuggaauaucagauaggauacauaugcagugggauuuucggagacaauccacgcccuaaugauaagacaggcaguugugguccaguaucgucuaauggagcaaauggaguaaaaggauuuucauucaaauacggcaaugguguuuggauagggagaacuaaaagcauuaguucaagaaacgguuuugagaugauuugggauccgaacggauggacugggacagacaauaacuucucaauaaagcaagauaucguaggaauaaaugaguggucaggauauagcgggaguuuuguucagcauccagaacuaacagggcuggauuguauaagaccuugcuucuggguugaacuaaucagagggcgacccaaagagaacacaaucuggacuagcgggagcagcauauccuuuugugguguaaacagugacacuguggguuggucuuggccagacggugcugaguugccauuuaccauugacaaguaa

SEQ ID NO: 50420 - RNA, 1410 nt, Artificial Sequence; identical to SEQ ID NO: 49973
  derived and/or modified CDS sequence (wt) from neuraminidase__InfluenzaA__ADE20334

SEQ ID NO: 50421 - RNA, 1410 nt, Artificial Sequence; identical to SEQ ID NO: 49973
  derived and/or modified CDS sequence (wt) from neuraminidase__InfluenzaA__ADE20344

SEQ ID NO: 50422 - RNA, 1410 nt, Artificial Sequence; identical to SEQ ID NO: 49973
  derived and/or modified CDS sequence (wt) from neuraminidase__InfluenzaA__ADE20354

SEQ ID NO: 50423 - RNA, 1410 nt, Artificial Sequence; identical to SEQ ID NO: 49973
  derived and/or modified CDS sequence (wt) from neuraminidase__InfluenzaA__ADE20378

SEQ ID NO: 50424 - RNA, 1410 nt, Artificial Sequence; identical to SEQ ID NO: 49973
  derived and/or modified CDS sequence (wt) from neuraminidase__InfluenzaA__ADE20391

SEQ ID NO: 50425 - RNA, 1410 nt, Artificial Sequence; identical to SEQ ID NO: 49973
  derived and/or modified CDS sequence (wt) from neuraminidase__InfluenzaA__ADE20631

SEQ ID NO: 50426 - RNA, 1410 nt, Artificial Sequence; identical to SEQ ID NO: 49973
  derived and/or modified CDS sequence (wt) from neuraminidase__InfluenzaA__ADE20641

SEQ ID NO: 50427 - RNA, 1410 nt, Artificial Sequence
  derived and/or modified CDS sequence (wt) from neuraminidase__InfluenzaA__ADE20651
augaauccaaaccaaaagauaauaaccauugguucggucuguaugacaauuggaauggcuaacuuaauauuacaaauuggaaacauaaucucaauauggauuagccacucaauucaacuugggaaucaaaaucagauugaaacaugcaaucaaagcgucauuacuuaugaaaacaacacuuggguaaaucagacauauguuaacaucagcaacaccaacuuugcugcuggacagucagugguuuccgugaaauuagugggcaauuccucucucugcccuguuaguggaugggcuauauacaguaaagacaacaguguaagaaucgguuccaagggggauguguuugucauaagggaaccauucauaucaugcucccccuuggaaugcagaaccuucuucuugacucaaggggccuugcuaaaugacaaacauuccaauggaaccauuaaagacaggagcccauaucgaacccuaaugagcuguccuauuggugaaguucccucuccauacaacucaagauuugagucagucgcuuggucagcaagugcuugucaugauggcaucaauuggcuaacaauuggaauuucuggcccagacaauggggcaguggcuguguuaaaguacaacggcauaauaacagacacuaucaagaguuggagaaacaauauauugagaacacaagagucugaaugugcauguguaaaugguucuugcuuuacuguaaugaccgauggaccaagugauggacaggccucauacaagaucuucagaauagaaaagggaaagauagucaaaucagucgaaaugaaugccccuaauuaucacuaugaggaaugcuccuguuauccugauucuagugaaaucacaugugugugcagggauaacuggcauggcucgaaucgaccgugggugucuuucaaccagaaucuggaauaucagauaggauacauaugcagugggauuuucggagacaauccacgcccuaaugauaagacaggcaguugugguccaguaucgucuaauggagcaaauggaguaaaaggauuuucauucaaauacggcaaugguguuuggauagggagaacuaaaagcauuaguucaagaaacgguuuugagaugauuugggauccgaacggauggacugggacagacaauaacuucucaauaaagcaagauaucguaggaauaaaugaguggucaggauauagcgggaguuuuguucagcauccagaacuaacagggcuggauuguauaagaccuugcuucuggguugaacuaaucagagggcgacccaaagagaacacaaucuggacuagcgggagcagcauauccuuuugugguguaaacagugacacuguggguuggucuuggccagacggugcugaguugccauuuaccauugacaaguaa

SEQ ID NO: 50428 - RNA, 1410 nt, Artificial Sequence; identical to SEQ ID NO: 49973
  derived and/or modified CDS sequence (wt) from neuraminidase__InfluenzaA__ADE20661

SEQ ID NO: 50429 - RNA, 1410 nt, Artificial Sequence; identical to SEQ ID NO: 49973
  derived and/or modified CDS sequence (wt) from neuraminidase__InfluenzaA__ADE20671

SEQ ID NO: 50430 - RNA, 1410 nt, Artificial Sequence; identical to SEQ ID NO: 49973
  derived and/or modified CDS sequence (wt) from neuraminidase__InfluenzaA__ADE20681

SEQ ID NO: 50431 - RNA, 1410 nt, Artificial Sequence
  derived and/or modified CDS sequence (wt) from neuraminidase__InfluenzaA__ADE20701
augaauccaaaccaaaagauaauaaccauugguucggucuguaugacaauuggaauggcuaacuuaauauuacaaauuggaaacauaaucucaauauggauuagccacucaauucaacuugggaaucaaaaucagauugaaacaugcaaucaaagcgucauuacuuaugaaaacaacacuuggguaaaucagacauauguuaacaucagcaacaccaacuuugcugcuggacagucagugguuuccgugaaauuagcgggcaauuccucucucugcccuguuaguggaugggcuauauacaguaaagacaacaguguaagaaucgguuccaagggggauguguuugucauaagggaaccauucauaucaugcucccccuuggaaugcagaaccuucuucuugacucaaggggccuugcuaaaugacaaacauuccaauggaaccauuaaagacaggagcccauaucgaacccuaaugagcuguccuauuggugaaguucccucuccauacaacucaagauuugagucagucgcuuggucagcaagugcuugucaugauggcaucaauuggcuaacaauuggaauuucuggcccagacaauggggcaguggcuguguuaaaguacaacggcguaauaacagacacuaucaagaguuggagaaacaauauauugagaacacaagagucugaaugugcauguguaaaugguucuugcuuuacuguaaugaccgauggaccaaguaauggacaggccucauacaagaucuucagaauagaaaagggaaagauagucaaaucagucgaaaugaaugccccuaauuaucacuaugaggaaugcuccuguuauccugauucuagugaaaucacaugugugugcagggauaacuggcauggcucgaaucgaccgugggugucuuucaaccagaaucuggaauaucagauaggauacauaugcagugggauuuucggagacaauccacgcccuaaugauaagacaggcaguugugguccaguaucgucuaauggagcaaauggaguaaaaggauuuucauucaaauacggcaaugguguuuggauagggagaacuaaaagcauuaguucaagaaacgguuuugagaugauuugggauccgaacggauggacugggacagacaauaacuucucaauaaagcaagauaucguaggaauaaaugaguggucaggauauagcgggaguuuuguucagcauccagaacuaacagggcuggauuguauaagaccuugcuucuggguugaacuaaucagagggcgacccaaagagaacacaaucuggacuagcgggagcagcauauccuuuugugguguaaacagugacacuguggguuggucuuggccagacggugcugaguugccauuuaccauugacaaguaa

SEQ ID NO: 50432 - RNA, 1410 nt, Artificial Sequence; identical to SEQ ID NO: 49973
  derived and/or modified CDS sequence (wt) from neuraminidase__InfluenzaA__ADE20711

SEQ ID NO: 50433 - RNA, 1410 nt, Artificial Sequence
  derived and/or modified CDS sequence (wt) from neuraminidase__InfluenzaA__ADE20721
augaauccaaaccaaaagauaauaaccauugguucggucuguaugacaauuggaauggcuaacuuaauauuacaaauuggaaacauaaucucaauauggauuagccacucaauucaacuugggaaucaaaaucagauugaaacaugcaaucaaagcgucauuacuuaugaaaacaacacuuggguaaaucagacauauguuaacaucagcaacaccaacuuugcugcuggacagucagugguuuccgugaaauuagugggcaauuccucucucugcccuguuaguggaugggcuauauacaguaaagacaacaguguaagaaucgguuccaagggggauguguuugucauaagggaaccauucauaucaugcucccccuuggaaugcagaaccuucuucuugacucaaggggccuugcuaaaugacaaacauuccaauggaaccauuaaagacaggagcccauaucgaacccuaaugagcuguccuauuggugaaguucccucuccauacaacucaagauuugagucagucgcuuggucagcaagugcuugucaugauggcaucaauuggcuaacaauuggaauuucuggcccagacaauggggcaguggcuguguuaaaguacaacggcauaauaacagacacuaucaagaguuggagaaacaauauauugagaacacaagagucugaaugugcauguguaaaugguucuugcuuuacuguaaugaccgauggaccaaguaauggacaggccucauacaagaucuucagaauagaaaagggaaagauagucaaaucagucgaaaugaaugccccuaauuaucacuaugaggaaugcuccuguuauccugauucuagugaaaucacaugugugugcagggauaacuggcauggcucgaaucgaccgugggugucuuucaaccagaaucuggaauaucagauaggauacauaugcagugggauuuucggagacaauccacgcccuaaugauaagacaggcaguugugguccaguaucgucuaauggagcaaauggaguaaaaggauuuucauucaaauacggcaaugguguuuggauagggagaacuaaaagcauuaguucaagaaacgguuuugagaugauuugggauccgaacggauggacugggacagacaauaacuucucaauaaagcaagauaucguaggaauaaaugaguggucaggauauagcgggaguuuuguucagcauccagaacuaacagggcuggauuguauaagaccuugcuucuggguugaacuaaucagagggcgacccaaagagaacacaaucuggacuagcgggagcagcauauccuuuugugguguaaacagugacacuguggguuggucuuggccagacggugcugaguugccauuuaccauugacagguaa

SEQ ID NO: 50434 - RNA, 1410 nt, Artificial Sequence; identical to SEQ ID NO: 50431
  derived and/or modified CDS sequence (wt) from neuraminidase__InfluenzaA__ADE20731

SEQ ID NO: 50435 - RNA, 1410 nt, Artificial Sequence; identical to SEQ ID NO: 49973
  derived and/or modified CDS sequence (wt) from neuraminidase__InfluenzaA__ADE20741

SEQ ID NO: 50436 - RNA, 1410 nt, Artificial Sequence; identical to SEQ ID NO: 49973
  derived and/or modified CDS sequence (wt) from neuraminidase__InfluenzaA__ADE20751

SEQ ID NO: 50437 - RNA, 1410 nt, Artificial Sequence; identical to SEQ ID NO: 50431
  derived and/or modified CDS sequence (wt) from neuraminidase__InfluenzaA__ADE20761

SEQ ID NO: 50438 - RNA, 1410 nt, Artificial Sequence; identical to SEQ ID NO: 50431
  derived and/or modified CDS sequence (wt) from neuraminidase__InfluenzaA__ADE20781

SEQ ID NO: 50439 - RNA, 1410 nt, Artificial Sequence; identical to SEQ ID NO: 48750
  derived and/or modified CDS sequence (wt) from neuraminidase__InfluenzaA__ADE20791

SEQ ID NO: 50440 - RNA, 1410 nt, Artificial Sequence
  derived and/or modified CDS sequence (wt) from neuraminidase__InfluenzaA__ADE20801
augaauccaaaccaaaagauaauaaccauugguucggucuguaugacaauuggaauggcuaacuuaauauuacaaauuggaaacauaaucucaauauggauuagccacucaauucaacuugggaaucaaaaucagauugaaacaugcaaucaaagcgucauuacuuaugaaaacaacacuuggguaaaucagacauauguuaacaucagcaacaccaacuuugcugcuggacagucagugguuuccgugaaauuagcgggcaauuccucucucugcccuguuaguggaugggcuauauacaguaaagacaacaguauaagaaucgguuccaagggggauguguuugucauaagggaaccauucauaucaugcucccccuuggaaugcagaaccuucuucuugacucaaggggccuugcuaaaugacaaacauuccaauggaaccauuaaagacaggagcccauaucgaacccuaaugagcuguccuauuggugaaguucccucuccauacaacucaagauuugagucagucgcuuggucagcaagugcuugucaugauggcaucaauuggcuaacaauuggaauuucuggcccagacaauggggcaguggcuguguuaaaguacaacggcauaauaacagacacuaucaagaguuggagaaacaauauauugagaacacaagagucugaaugugcauguguaaaugguucuugcuuuacuguaaugaccgauggaccaagugauggacaggccucauacaagaucuucagaauagaaaagggaaagauagucaagucagucgaaaugaaugccccuaauuaucacuaugaggaaugcuccuguuauccugauucuagugaaaucacaugugugugcagggauaacuggcauggcucgaaucggccgugggugucuuucaaccagaaucuggaauaucagauaggauacauaugcagugggauuuucggagacaauccacgcccuaaugauaagacaggcaguugugguccaguaucgucuaauggagcaaauggaguaaaaggauuuucauucaaauacggcaaugguguuuggauagggagaacuaaaagcauuaguucaagaaacgguuuugagaugauuugggauccgaacggauggacugggacagacaauaacuucucaauaaagcaagauaucguaggaauaaaugaguggucaggauauagcgggaguuuuguucagcauccagaacuaacagggcuggauuguauaagaccuugcuucuggguugaacuaaucagagggcgacccaaagagaacacaaucuggacuagcgggagcagcauauccuuuugugguguaaacagugacacuguggguuggucuuggccagacggugcugaguugccauuuaccauugacaaguaa

SEQ ID NO: 50441 - RNA, 1410 nt, Artificial Sequence
  derived and/or modified CDS sequence (wt) from neuraminidase__InfluenzaA__ADE20811
augaauccaaaccaaaagauaauaaccauugguucggucuguaugacaauuggaauggcuaacuuaauauuacaaauuggaaacauaaucucaauauggauuagccacucaauucaacuugggaaucaaaaucagauugaaacaugcaaucaaagcgucauuacuuaugaaaacaacacuuggguaaaucagacauauguuaacaucagcaacaccaacuuugcugcuggacagucagugguuuccgugaaauuagcgggcaauuccucucucugcccuguuaguggaugggcuauauacaguaaagacaacaguauaagaaucgguuccaagggggauguguuugucauaagggaaccauucauaucaugcucccccuuggaaugcagaaccuucuucuugacucaaggggccuugcuaaaugacaaacauuccaauggaaccauuaaagacaggagcccauaucgaacccuaaugagcuguccuauuggugaaguucccucuccauacaacucaagauuugagucagucgcuuggucagcaagugcuugucaugauggcaucaauuggcuaacaauuggaauuucuggcccagacaauggggcaguggcuguguuaaaguacaacggcauaauaacagacacuaucaagaguuggagaaacaauauauugagaacacaagagucugaaugugcauguguaaaugguucuugcuuuacuguaaugaccgauggaccaagugauggacaggccucauacaagaucuucagaauagaaaagggaaagauagucaaaucagucgaaaugaaugccccuaauuaucacuaugaggaaugcuccuguuauccugauucuagugaaaucacaugugugugcagggauaacuggcauggcucgaaucgaccgugggugucuuucaaccagaaucuggaauaucagauaggauacauaugcagugggauuuucggagacaauccacgcccuaaugauaagacaggcaguugugguccaguaucguccaauggagcaaauggaguaaaaggauuuucauucaaauacggcaaugguguuuggauagggagaacuaaaagcauuaguucaagaaacgguuuugagaugauuugggauccgaacggauggacugggacagacaauaacuucucaauaaagcaagauaucguaggaauaaaugaguggucaggauauagcgggaguuuuguucagcauccagaacuaacagggcuggauuguauaagaccuugcuucuggguugaacuaaucagagggcgacccaaagagaacacaaucuggacuagcgggagcagcauauccuuuugugguguaaacagugacacuguggguuggucuuggccagacggugcugaguugccauuuaccauugacaaguaa

SEQ ID NO: 50442 - RNA, 1410 nt, Artificial Sequence; identical to SEQ ID NO: 49794
  derived and/or modified CDS sequence (wt) from neuraminidase__InfluenzaA__ADE20821

SEQ ID NO: 50443 - RNA, 1410 nt, Artificial Sequence; identical to SEQ ID NO: 48750
  derived and/or modified CDS sequence (wt) from neuraminidase__InfluenzaA__ADE20831

SEQ ID NO: 50444 - RNA, 1410 nt, Artificial Sequence; identical to SEQ ID NO: 48750
  derived and/or modified CDS sequence (wt) from neuraminidase__InfluenzaA__ADE20841

SEQ ID NO: 50445 - RNA, 1410 nt, Artificial Sequence; identical to SEQ ID NO: 48750
  derived and/or modified CDS sequence (wt) from neuraminidase__InfluenzaA__ADE20851

SEQ ID NO: 50446 - RNA, 1410 nt, Artificial Sequence; identical to SEQ ID NO: 50366
  derived and/or modified CDS sequence (wt) from neuraminidase__InfluenzaA__ADE20861

SEQ ID NO: 50447 - RNA, 1410 nt, Artificial Sequence
  derived and/or modified CDS sequence (wt) from neuraminidase__InfluenzaA__ADE20871
augaauccaaaccaaaagauaauaaccauugguucggucugcaugacaauuggaauggcuaacuuaauauuacaaauuggaaacauaaucucaauauggauuagccacucaauucaacuugggaaucaaaaucagauugaaacaugcaaucaaagcgucauuacuuaugaaaacaacacuuggguaaaucagacauauguuaacaucagcaacaccaacuuugcugcuggacagucagugguuuccgugaaauuagcgggcaauuccucucucugcccuguuaguggaugggcuauauacaguaaagacaacaguauaagaaucgguuccaagggggauguguuugucauaagggaaccauucauaucaugcucccccuuggaaugcagaaccuucuucuugacucaaggggccuugcuaaaugacaaacauuccaauggaaccauuaaagacaggagcccauaucgaacccuaaugagcuguccuauuggugaaguucccucuccauacaacucaagauuugagucagucgcuuggucagcaagugcuugucaugauggcaucaauuggcuaacaauuggaauuucuggcccagacaauggggcaguggcuguguuaaaguacaacggcauaauaacagacacuaucaagaguuggagaaacaauauauugagaacacaagagucugaaugugcauguguaaaugguucuugcuuuacuguaaugaccgauggaccaagugauggacaggccucauacaagaucuucagaauagaaaagggaaagauagucaaaucagucgaaaugaaugcccccaacuaucacuaugaggaaugcuccugcuauccugauucuagugaaaucacaugugugugcagggauaacuggcauggcucgaaucgaccgugggugucuuucaaccagaaucuggaauaucagauaggauacauaugcagugggauuuucggagacaauccacgcccuaaugauaagacaggcaguugugguccaguaucgucuaauggagcaaauggaguaaaaggauuuucauucaaauacggcaaugguguuuggauagggagaacuaaaagcauuaguucaaggaacgguuuugagaugauuugggauccgaacggauggacugggacagacaauaacuucucaauaaagcaagauaucguaggaauaaaugaguggucaggauauagcgggaguuuuguucagcauccagaacuaacagggcuggauuguauaagaccuugcuucuggguugaacuaaucagagggcgacccaaagagaacacaaucuggacuagcgggagcagcauauccuuuugugguguaaacagugacacuguggguuggucuuggccagacggugcugaguugccauuuaccauugacaaguaa

SEQ ID NO: 50448 - RNA, 1410 nt, Artificial Sequence; identical to SEQ ID NO: 50362
  derived and/or modified CDS sequence (wt) from neuraminidase__InfluenzaA__ADE20881

SEQ ID NO: 50449 - RNA, 1410 nt, Artificial Sequence
  derived and/or modified CDS sequence (wt) from neuraminidase__InfluenzaA__ADE20891
augaauccaaaccaaaagauaauaaccauugguucggucuguaugacaauuggaauggcuaacuuaauauuacaaauuggaaacauaaucucaauauggauuagccacucaauucaacuugggaaucaaaaucagauugaaacaugcaaucaaagcgucauuacuuaugaaaacaacacuuggguaaaucagacauauguuaacaucagcaacaccaacuuugcugcuggacagucagugguuuccgugaaauuagcgggcaauuccucucucugcccuguuaguggaugggcuauauacaguaaagacaacaguauaagaaucgguuccaagggggauguguuugucauaagggaaccauucauaucaugcucccccuuggaaugcaggaccuucuucuugacucaaggggccuugcuaaaugacaaacauuccaauggaaccauuaaagacaggagcccauaucgaacccuaaugagcuguccuauuggugaaguucccucuccauacaacucaagauuugagucagucgcuuggucagcaagugcuugucaugauggcaucaauuggcuaacaauuggaauuucuggcccagacaauggggcaguggcuguguuaaaguacaacggcauaauaacagacacuaucaagaguuggagaaacaauauauugagaacacaagagucugaaugugcauguguaaaugguucuugcuuuacuguaaugaccgauggaccaagugauggacaggccucauacaagaucuucagaauagaaaagggaaagauagucaaaucagucgaaaugaaugccccuaauuaucacuaugaggaaugcuccuguuauccugauucuagugaaaucacaugugugugcagggauaacuggcauggcucgaaucgaccgugggugucuuucaaccagaaucuggaauaucagauaggauacauaugcagcgggauuuucggagacaauccacgcccuaaugauaagacaggcaguugugguccaguaucgucuaauggagcaaauggaguaaaaggauuuucauucaaauacggcaaugguguuuggauagggagaacuaaaagcauuaguucaagaaacgguuuugagaugauuugggauccgaacggauggacugggacagacaauaacuucucaauaaagcaagauaucguaggaauaaaugaguggucaggauauagcgggaguuuuguucagcauccagaacuaacagggcuggauuguauaagaccuugcuucuggguugaacuaaucagagggcgacccaaagagaacacaaucuggacuagcgggagcagcauauccuuuugugguguaaacagugacacuguggguuggucuuggccagacggugcugaguugccauuuaccauugacaaguaa

SEQ ID NO: 50450 - RNA, 1410 nt, Artificial Sequence; identical to SEQ ID NO: 50371
  derived and/or modified CDS sequence (wt) from neuraminidase__InfluenzaA__ADE20901

SEQ ID NO: 50451 - RNA, 1410 nt, Artificial Sequence; identical to SEQ ID NO: 50407
  derived and/or modified CDS sequence (wt) from neuraminidase__InfluenzaA__ADE20911

SEQ ID NO: 50452 - RNA, 1410 nt, Artificial Sequence; identical to SEQ ID NO: 48750
  derived and/or modified CDS sequence (wt) from neuraminidase__InfluenzaA__ADE20921

SEQ ID NO: 50453 - RNA, 1410 nt, Artificial Sequence
  derived and/or modified CDS sequence (wt) from neuraminidase__InfluenzaA__ADE20931
augaauccaaaccaaaagauaauaaccauugguucggucuguaugacaauuggaauggcuaacuuaauauuacaaauuggaaacauaaucucaauauggauuagccacucaauucaacuugggaaucaaaaucagauugaaacaugcaaucaaagcgucauuacuuaugaaaacaacacuuggguaaaucagacauauguuaacaucagcaacaccaacuuugcugcuggacagucagugguuuccgugaaauuagcgggcaauuccucucucugcccuguuaguggaugggcuauauacaguaaagacaacaguauaagaaucgguuccaagggggauguguuugucauaagggaaccauucauaucaugcucccccuuggaaugcagaaccuucuucuugacucaaggggccuugcuaaaugacaaacauuccaauggaaccauuaaagacaggagcccauaucgaacccuaaugagcuguccuauuggugaaguucccucuccauacaacucaagauuugagucagucgcuuggucagcaagugcuugucaugauggcaucaauuggcuaacaauuggaauuucuggcccagacaauggggcaguggcuguguuaaaguacaacggcauaauaacagacacuaucaagaguuggagaaacaauauauugagaacacaagagucugaaugugcauguguaaaugguucuugcuuuacuguaaugaccgauggaccaagugauggacaggccucauacaagaucuucagaauagaaaagggaaagauagucaaaucagucgaaaugaaugccccuaauuaucacuaugaggaaugcuccuguuauccugauucuagugaaaucacaugcguaugcagagauaacuggcauggcucgaaucgaccgugggugucuuucaaccagaaucuggaauaucagauaggauacauaugcaguggaauuuucggagacaauccacguccuaaugauaagacaggcaguugugguccaguauugucuaauggagcaaauggaguaaaaggauuuucauucaaauacggcaaugguguuuggauagggagaacuaaaagcauugguucaagaaacgguuuugagaugauuugggauccgaacggauggacugggacagacaauaacuucucaauaaagcaagauaucguaggaauaaaugaguggucaggauauagcgggaguuuuguucagcauccagaacuaacagggcuggauuguauaagaccuugcuucuggguugaacuaaucagagggcgacccaaagagaacacaaucuggacuagcgggagcagcauauccuuuugugguguaaacagugacacuguggguuggucuuggccagacggugcugaguugccauuuaccauugacaaguaa

SEQ ID NO: 50454 - RNA, 1410 nt, Artificial Sequence; identical to SEQ ID NO: 48947
  derived and/or modified CDS sequence (wt) from neuraminidase__InfluenzaA__ADE20941
